United States Patent Application Publication US 2025/0154528 A1 - sequence listing, part 2

SEQ ID NO: 41810 - protein, 7 aa, synthetic construct
NTVRTSS

SEQ ID NO: 41811 - protein, 7 aa, synthetic construct
FQMQGKN

SEQ ID NO: 41812 - protein, 7 aa, synthetic construct
MNTKHQF

SEQ ID NO: 41813 - protein, 7 aa, synthetic construct
NAKGWPV

SEQ ID NO: 41814 - protein, 7 aa, synthetic construct
RPSMTAG

SEQ ID NO: 41815 - protein, 7 aa, synthetic construct
KDTGRMG

SEQ ID NO: 41816 - protein, 7 aa, synthetic construct
GATNKSY

SEQ ID NO: 41817 - protein, 7 aa, synthetic construct
FKGQSPG

SEQ ID NO: 41818 - protein, 7 aa, synthetic construct
YQSTRTG

SEQ ID NO: 41819 - protein, 7 aa, synthetic construct
KTTQARD

SEQ ID NO: 41820 - protein, 7 aa, synthetic construct
KMSTGQS

SEQ ID NO: 41821 - protein, 7 aa, synthetic construct
AQRSSTA

SEQ ID NO: 41822 - protein, 7 aa, synthetic construct
GMSQKQG

SEQ ID NO: 41823 - protein, 7 aa, synthetic construct
KQFKSPD

SEQ ID NO: 41824 - protein, 7 aa, synthetic construct
MTKPSQG

SEQ ID NO: 41825 - protein, 7 aa, synthetic construct
VYHTAQN

SEQ ID NO: 41826 - protein, 7 aa, synthetic construct
NKQRGDE

SEQ ID NO: 41827 - protein, 7 aa, synthetic construct
MARGTNA

SEQ ID NO: 41828 - protein, 7 aa, synthetic construct
TSSNRMG

SEQ ID NO: 41829 - protein, 7 aa, synthetic construct
QNQKKGP

SEQ ID NO: 41830 - protein, 7 aa, synthetic construct
NGARVQA

SEQ ID NO: 41831 - protein, 7 aa, synthetic construct
VTKADSG

SEQ ID NO: 41832 - protein, 7 aa, synthetic construct
AGNKQLG

SEQ ID NO: 41833 - protein, 7 aa, synthetic construct
KNASSVS

SEQ ID NO: 41834 - protein, 7 aa, synthetic construct
ILDITKG

SEQ ID NO: 41835 - protein, 7 aa, synthetic construct
IGVKTLN

SEQ ID NO: 41836 - protein, 7 aa, synthetic construct
SNKTGSG

SEQ ID NO: 41837 - protein, 7 aa, synthetic construct
TRSQEIP

SEQ ID NO: 41838 - protein, 7 aa, synthetic construct
TSQMTGY

SEQ ID NO: 41839 - protein, 7 aa, synthetic construct
LPSNIKG

SEQ ID NO: 41840 - protein, 7 aa, synthetic construct
RPQNMTG

SEQ ID NO: 41841 - protein, 7 aa, synthetic construct
NFKGNPV

SEQ ID NO: 41842 - protein, 7 aa, synthetic construct
NKTVSTA

SEQ ID NO: 41843 - protein, 7 aa, synthetic construct
QKAQTNG

SEQ ID NO: 41844 - protein, 7 aa, synthetic construct
NWKQVST

SEQ ID NO: 41845 - protein, 7 aa, synthetic construct
PRPQVMN

SEQ ID NO: 41846 - protein, 7 aa, synthetic construct
RNNSQAG

SEQ ID NO: 41847 - protein, 7 aa, synthetic construct
QAPVTSH

SEQ ID NO: 41848 - protein, 7 aa, synthetic construct
GTDRIHV

SEQ ID NO: 41849 - protein, 7 aa, synthetic construct
MGKGQSG

SEQ ID NO: 41850 - protein, 7 aa, synthetic construct
MKTSRDN

SEQ ID NO: 41851 - protein, 7 aa, synthetic construct
NLSLGHG

SEQ ID NO: 41852 - protein, 7 aa, synthetic construct
FNAGSKT

SEQ ID NO: 41853 - protein, 7 aa, synthetic construct
QRNSIGA

SEQ ID NO: 41854 - protein, 7 aa, synthetic construct
KAVKSDG

SEQ ID NO: 41855 - protein, 7 aa, synthetic construct
TRSQSQA

SEQ ID NO: 41856 - protein, 7 aa, synthetic construct
GVRDSFR

SEQ ID NO: 41857 - protein, 7 aa, synthetic construct
FAERNGS

SEQ ID NO: 41858 - protein, 7 aa, synthetic construct
PQMKGPA

SEQ ID NO: 41859 - protein, 7 aa, synthetic construct
RREIGTG

SEQ ID NO: 41860 - protein, 7 aa, synthetic construct
NANKVGG

SEQ ID NO: 41861 - protein, 7 aa, synthetic construct
TSKIAAE

SEQ ID NO: 41862 - protein, 7 aa, synthetic construct
DKKQTNS

SEQ ID NO: 41863 - protein, 7 aa, synthetic construct
LNQRQMA

SEQ ID NO: 41864 - protein, 7 aa, synthetic construct
TKTNTPG

SEQ ID NO: 41865 - protein, 7 aa, synthetic construct
QHDIRPG

SEQ ID NO: 41866 - protein, 7 aa, synthetic construct
GKPAASA

SEQ ID NO: 41867 - protein, 7 aa, synthetic construct
QVSPNHG

SEQ ID NO: 41868 - protein, 7 aa, synthetic construct
KPPGTAG

SEQ ID NO: 41869 - protein, 7 aa, synthetic construct
TNRTQVG

SEQ ID NO: 41870 - protein, 7 aa, synthetic construct
KDPGKFG

SEQ ID NO: 41871 - protein, 7 aa, synthetic construct
DKGKANP

SEQ ID NO: 41872 - protein, 7 aa, synthetic construct
HDLSHRG

SEQ ID NO: 41873 - protein, 7 aa, synthetic construct
MGKVASG

SEQ ID NO: 41874 - protein, 7 aa, synthetic construct
WAGAQSA

SEQ ID NO: 41875 - protein, 7 aa, synthetic construct
RMADRGA

SEQ ID NO: 41876 - protein, 7 aa, synthetic construct
RDKIKDA

SEQ ID NO: 41877 - protein, 7 aa, synthetic construct
NKPASNS

SEQ ID NO: 41878 - protein, 7 aa, synthetic construct
QVVQMKP

SEQ ID NO: 41879 - protein, 7 aa, synthetic construct
NPRANGA

SEQ ID NO: 41880 - protein, 7 aa, synthetic construct
TATGVKY

SEQ ID NO: 41881 - protein, 7 aa, synthetic construct
FKNTQAG

SEQ ID NO: 41882 - protein, 7 aa, synthetic construct
TGHHNER

SEQ ID NO: 41883 - protein, 7 aa, synthetic construct
HPNHHIA

SEQ ID NO: 41884 - protein, 7 aa, synthetic construct
QPKPGSA

SEQ ID NO: 41885 - protein, 7 aa, synthetic construct
AKSHTQG

SEQ ID NO: 41886 - protein, 7 aa, synthetic construct
RMKQDNL

SEQ ID NO: 41887 - protein, 7 aa, synthetic construct
VNSRAAP

SEQ ID NO: 41888 - protein, 7 aa, synthetic construct
SQKTGMG

SEQ ID NO: 41889 - protein, 7 aa, synthetic construct
HSKQQSP

SEQ ID NO: 41890 - protein, 7 aa, synthetic construct
QRSNVSG

SEQ ID NO: 41891 - protein, 7 aa, synthetic construct
QKVRIES

SEQ ID NO: 41892 - protein, 7 aa, synthetic construct
MNHGTVI

SEQ ID NO: 41893 - protein, 7 aa, synthetic construct
QREVLKA

SEQ ID NO: 41894 - protein, 7 aa, synthetic construct
KAQTSTG

SEQ ID NO: 41895 - protein, 7 aa, synthetic construct
GMRHTDL

SEQ ID NO: 41896 - protein, 7 aa, synthetic construct
TKPNGFS

SEQ ID NO: 41897 - protein, 7 aa, synthetic construct
TMQFGAG

SEQ ID NO: 41898 - protein, 7 aa, synthetic construct
KYSSDKG

SEQ ID NO: 41899 - protein, 7 aa, synthetic construct
LNSNRAS

SEQ ID NO: 41900 - protein, 7 aa, synthetic construct
QRDGPIK

SEQ ID NO: 41901 - protein, 7 aa, synthetic construct
MGPRGGI

SEQ ID NO: 41902 - protein, 7 aa, synthetic construct
YRGEVRI

SEQ ID NO: 41903 - protein, 7 aa, synthetic construct
YINQHPV

SEQ ID NO: 41904 - protein, 7 aa, synthetic construct
NNKQYKE

SEQ ID NO: 41905 - protein, 7 aa, synthetic construct
MGNVMKG

SEQ ID NO: 41906 - protein, 7 aa, synthetic construct
HKQASPV

SEQ ID NO: 41907 - protein, 7 aa, synthetic construct
MNKAVTG

SEQ ID NO: 41908 - protein, 7 aa, synthetic construct
RTPTSQG

SEQ ID NO: 41909 - protein, 7 aa, synthetic construct
PRGVTAG

SEQ ID NO: 41910 - protein, 7 aa, synthetic construct
NKQTMGG

SEQ ID NO: 41911 - protein, 7 aa, synthetic construct
ISRMTPV

SEQ ID NO: 41912 - protein, 7 aa, synthetic construct
SRTPAGA

SEQ ID NO: 41913 - protein, 7 aa, synthetic construct
FTQGNHG

SEQ ID NO: 41914 - protein, 7 aa, synthetic construct
RNTSQSP

SEQ ID NO: 41915 - protein, 7 aa, synthetic construct
TGQVANR

SEQ ID NO: 41916 - protein, 7 aa, synthetic construct
RMRMADT

SEQ ID NO: 41917 - protein, 7 aa, synthetic construct
LVRGQAL

SEQ ID NO: 41918 - protein, 7 aa, synthetic construct
VLADGIR

SEQ ID NO: 41919 - protein, 7 aa, synthetic construct
TTAGRPG

SEQ ID NO: 41920 - protein, 7 aa, synthetic construct
ANKMNQA

SEQ ID NO: 41921 - protein, 7 aa, synthetic construct
GPAKAMG

SEQ ID NO: 41922 - protein, 7 aa, synthetic construct
IKPNGKD

SEQ ID NO: 41923 - protein, 7 aa, synthetic construct
SKHMSGV

SEQ ID NO: 41924 - protein, 7 aa, synthetic construct
GQGRTNG

SEQ ID NO: 41925 - protein, 7 aa, synthetic construct
VHMAAGL

SEQ ID NO: 41926 - protein, 7 aa, synthetic construct
KLTGVAA

SEQ ID NO: 41927 - protein, 7 aa, synthetic construct
HGKYVMN

SEQ ID NO: 41928 - protein, 7 aa, synthetic construct
KSQHMIG

SEQ ID NO: 41929 - protein, 7 aa, synthetic construct
KNGNSQG

SEQ ID NO: 41930 - protein, 7 aa, synthetic construct
RPPMNIP

SEQ ID NO: 41931 - protein, 7 aa, synthetic construct
KSPNVVP

SEQ ID NO: 41932 - protein, 7 aa, synthetic construct
GQRSVTA

SEQ ID NO: 41933 - protein, 7 aa, synthetic construct
MQNTQRA

SEQ ID NO: 41934 - protein, 7 aa, synthetic construct
RDKGPVS

SEQ ID NO: 41935 - protein, 7 aa, synthetic construct
GRLPIAP

SEQ ID NO: 41936 - protein, 7 aa, synthetic construct
TKNTVSS

SEQ ID NO: 41937 - protein, 7 aa, synthetic construct
MATSRPT

SEQ ID NO: 41938 - protein, 7 aa, synthetic construct
LTRPSDT

SEQ ID NO: 41939 - protein, 7 aa, synthetic construct
NARQAGG

SEQ ID NO: 41940 - protein, 7 aa, synthetic construct
RMGQEQR

SEQ ID NO: 41941 - protein, 7 aa, synthetic construct
FPNKSSG

SEQ ID NO: 41942 - protein, 7 aa, synthetic construct
NRSHMPS

SEQ ID NO: 41943 - protein, 7 aa, synthetic construct
KGHTLYE

SEQ ID NO: 41944 - protein, 7 aa, synthetic construct
ESRLNTG

SEQ ID NO: 41945 - protein, 7 aa, synthetic construct
QKKEVNQ

SEQ ID NO: 41946 - protein, 7 aa, synthetic construct
AEYGGRM

SEQ ID NO: 41947 - protein, 7 aa, synthetic construct
YLRDRPV

SEQ ID NO: 41948 - protein, 7 aa, synthetic construct
SNKIGAI

SEQ ID NO: 41949 - protein, 7 aa, synthetic construct
MNQKAQV

SEQ ID NO: 41950 - protein, 7 aa, synthetic construct
YKPTSKE

SEQ ID NO: 41951 - protein, 7 aa, synthetic construct
HYKIMNP

SEQ ID NO: 41952 - protein, 7 aa, synthetic construct
RTNGNSA

SEQ ID NO: 41953 - protein, 7 aa, synthetic construct
GRTTASP

SEQ ID NO: 41954 - protein, 7 aa, synthetic construct
YLGGNLV

SEQ ID NO: 41955 - protein, 7 aa, synthetic construct
FNRASGE

SEQ ID NO: 41956 - protein, 7 aa, synthetic construct
KFQHAEQ

SEQ ID NO: 41957 - protein, 7 aa, synthetic construct
TMLAKGG

SEQ ID NO: 41958 - protein, 7 aa, synthetic construct
NKGVGSI

SEQ ID NO: 41959 - protein, 7 aa, synthetic construct
KRPDASG

SEQ ID NO: 41960 - protein, 7 aa, synthetic construct
KPPSMIH

SEQ ID NO: 41961 - protein, 7 aa, synthetic construct
RPQGTGM

SEQ ID NO: 41962 - protein, 7 aa, synthetic construct
GERKLGP

SEQ ID NO: 41963 - protein, 7 aa, synthetic construct
FKGIGSA

SEQ ID NO: 41964 - protein, 7 aa, synthetic construct
WSSKMTG

SEQ ID NO: 41965 - protein, 7 aa, synthetic construct
SKNSAHP

SEQ ID NO: 41966 - protein, 7 aa, synthetic construct
TGTSNKP

SEQ ID NO: 41967 - protein, 7 aa, synthetic construct
QKQTARE

SEQ ID NO: 41968 - protein, 7 aa, synthetic construct
SAFGVKD

SEQ ID NO: 41969 - protein, 7 aa, synthetic construct
CNRKEVC

SEQ ID NO: 41970 - protein, 7 aa, synthetic construct
DMHKSYS

SEQ ID NO: 41971 - protein, 7 aa, synthetic construct
QQKNNSA

SEQ ID NO: 41972 - protein, 7 aa, synthetic construct
QSGKVEI

SEQ ID NO: 41973 - protein, 7 aa, synthetic construct
GPMKSAG

SEQ ID NO: 41974 - protein, 7 aa, synthetic construct
PPYNVTP

SEQ ID NO: 41975 - protein, 7 aa, synthetic construct
ERSAAHS

SEQ ID NO: 41976 - protein, 7 aa, synthetic construct
YPSSKMG

SEQ ID NO: 41977 - protein, 7 aa, synthetic construct
GRPVQGG

SEQ ID NO: 41978 - protein, 7 aa, synthetic construct
TGTKQVV

SEQ ID NO: 41979 - protein, 7 aa, synthetic construct
VNGSRSG

SEQ ID NO: 41980 - protein, 7 aa, synthetic construct
KVAQNFG

SEQ ID NO: 41981 - protein, 7 aa, synthetic construct
TSRGIDM

SEQ ID NO: 41982 - protein, 7 aa, synthetic construct
RNAQASG

SEQ ID NO: 41983 - protein, 7 aa, synthetic construct
NRGTNQP

SEQ ID NO: 41984 - protein, 7 aa, synthetic construct
VNGRNSA

SEQ ID NO: 41985 - protein, 7 aa, synthetic construct
QRSSVSG

SEQ ID NO: 41986 - protein, 7 aa, synthetic construct
MTSSSRG

SEQ ID NO: 41987 - protein, 7 aa, synthetic construct
KTMPSQA

SEQ ID NO: 41988 - protein, 7 aa, synthetic construct
SQKHQTY

SEQ ID NO: 41989 - protein, 7 aa, synthetic construct
QLKVHDT

SEQ ID NO: 41990 - protein, 7 aa, synthetic construct
MSGNGNK

SEQ ID NO: 41991 - protein, 7 aa, synthetic construct
VGHNLHP

SEQ ID NO: 41992 - protein, 7 aa, synthetic construct
VSHEWRG

SEQ ID NO: 41993 - protein, 7 aa, synthetic construct
TAVFRTA

SEQ ID NO: 41994 - protein, 7 aa, synthetic construct
TGTAKMG

SEQ ID NO: 41995 - protein, 7 aa, synthetic construct
TVGPQKP

SEQ ID NO: 41996 - protein, 7 aa, synthetic construct
YSKTSSS

SEQ ID NO: 41997 - protein, 7 aa, synthetic construct
KNSVQVG

SEQ ID NO: 41998 - protein, 7 aa, synthetic construct
RLQPEKN

SEQ ID NO: 41999 - protein, 7 aa, synthetic construct
VRSNVSP

SEQ ID NO: 42000 - protein, 7 aa, synthetic construct
QFGQKSV

SEQ ID NO: 42001 - protein, 7 aa, synthetic construct
EKTHIHA

SEQ ID NO: 42002 - protein, 7 aa, synthetic construct
NPRSQGG

SEQ ID NO: 42003 - protein, 7 aa, synthetic construct
GQRTTGV

SEQ ID NO: 42004 - protein, 7 aa, synthetic construct
SKQGNNA

SEQ ID NO: 42005 - protein, 7 aa, synthetic construct
TRGSVQG

SEQ ID NO: 42006 - protein, 7 aa, synthetic construct
YPPKNNA

SEQ ID NO: 42007 - protein, 7 aa, synthetic construct
NKSSSAS

SEQ ID NO: 42008 - protein, 7 aa, synthetic construct
YKPGIMG

SEQ ID NO: 42009 - protein, 7 aa, synthetic construct
TRGQQTG

SEQ ID NO: 42010 - protein, 7 aa, synthetic construct
RPNGTMA

SEQ ID NO: 42011 - protein, 7 aa, synthetic construct
VKSAAMS

SEQ ID NO: 42012 - protein, 7 aa, synthetic construct
TKGNVNA

SEQ ID NO: 42013 - protein, 7 aa, synthetic construct
VKTQGSV

SEQ ID NO: 42014 - protein, 7 aa, synthetic construct
KRDQASV

SEQ ID NO: 42015 - protein, 7 aa, synthetic construct
AHHVRGD

SEQ ID NO: 42016 - protein, 7 aa, synthetic construct
RSTGQAA

SEQ ID NO: 42017 - protein, 7 aa, synthetic construct
VRVGNVA

SEQ ID NO: 42018 - protein, 7 aa, synthetic construct
RNDPVKS

SEQ ID NO: 42019 - protein, 7 aa, synthetic construct
TKTTMPS

SEQ ID NO: 42020 - protein, 7 aa, synthetic construct
GYMVTQA

SEQ ID NO: 42021 - protein, 7 aa, synthetic construct
RNPGAGA

SEQ ID NO: 42022 - protein, 7 aa, synthetic construct
PAGPQRG

SEQ ID NO: 42023 - protein, 7 aa, synthetic construct
NQGKSSG

SEQ ID NO: 42024 - protein, 7 aa, synthetic construct
FKLSPQG

SEQ ID NO: 42025 - protein, 7 aa, synthetic construct
NSNGRHE

SEQ ID NO: 42026 - protein, 7 aa, synthetic construct
WKPMMVG

SEQ ID NO: 42027 - protein, 7 aa, synthetic construct
LYQKGVH

SEQ ID NO: 42028 - protein, 7 aa, synthetic construct
THTGVGP

SEQ ID NO: 42029 - protein, 7 aa, synthetic construct
QDRVLKP

SEQ ID NO: 42030 - protein, 7 aa, synthetic construct
TSQRQQA

SEQ ID NO: 42031 - protein, 7 aa, synthetic construct
PRSANNG

SEQ ID NO: 42032 - protein, 7 aa, synthetic construct
KSNSNMA

SEQ ID NO: 42033 - protein, 7 aa, synthetic construct
QTMGDRP

SEQ ID NO: 42034 - protein, 7 aa, synthetic construct
MNKNGNP

SEQ ID NO: 42035 - protein, 7 aa, synthetic construct
GYTKIQA

SEQ ID NO: 42036 - protein, 7 aa, synthetic construct
DGRVTAS

SEQ ID NO: 42037 - protein, 7 aa, synthetic construct
LMKLSQA

SEQ ID NO: 42038 - protein, 7 aa, synthetic construct
RSPTSMG

SEQ ID NO: 42039 - protein, 7 aa, synthetic construct
ARERSGM

SEQ ID NO: 42040 - protein, 7 aa, synthetic construct
NTRPSGA

SEQ ID NO: 42041 - protein, 7 aa, synthetic construct
KTASTPA

SEQ ID NO: 42042 - protein, 7 aa, synthetic construct
IQSSQKT

SEQ ID NO: 42043 - protein, 7 aa, synthetic construct
RISHPRD

SEQ ID NO: 42044 - protein, 7 aa, synthetic construct
TRQSNNG

SEQ ID NO: 42045 - protein, 7 aa, synthetic construct
NKGQNSG

SEQ ID NO: 42046 - protein, 7 aa, synthetic construct
NFPNVNP

SEQ ID NO: 42047 - protein, 7 aa, synthetic construct
SNSSKQA

SEQ ID NO: 42048 - protein, 7 aa, synthetic construct
PNKAGNG

SEQ ID NO: 42049 - protein, 7 aa, synthetic construct
FPKPANG

SEQ ID NO: 42050 - protein, 7 aa, synthetic construct
KFKTSFD

SEQ ID NO: 42051 - protein, 7 aa, synthetic construct
KNPQAYN

SEQ ID NO: 42052 - protein, 7 aa, synthetic construct
TNRTNQA

SEQ ID NO: 42053 - protein, 7 aa, synthetic construct
VSKGVAA

SEQ ID NO: 42054 - protein, 7 aa, synthetic construct
MRGAQQA

SEQ ID NO: 42055 - protein, 7 aa, synthetic construct
TKVNINQ

SEQ ID NO: 42056 - protein, 7 aa, synthetic construct
GPASVKP

SEQ ID NO: 42057 - protein, 7 aa, synthetic construct
RKDQSMS

SEQ ID NO: 42058 - protein, 7 aa, synthetic construct
RAGDARY

SEQ ID NO: 42059 - protein, 7 aa, synthetic construct
FEKIFRE

SEQ ID NO: 42060 - protein, 7 aa, synthetic construct
NKGPIAA

SEQ ID NO: 42061 - protein, 7 aa, synthetic construct
TYGGNKG

SEQ ID NO: 42062 - protein, 7 aa, synthetic construct
TNTKGQA

SEQ ID NO: 42063 - protein, 7 aa, synthetic construct
NMKAMRD

SEQ ID NO: 42064 - protein, 7 aa, synthetic construct
RFNSSSP

SEQ ID NO: 42065 - protein, 7 aa, synthetic construct
IRLPRDV

SEQ ID NO: 42066 - protein, 7 aa, synthetic construct
QAPGART

SEQ ID NO: 42067 - protein, 7 aa, synthetic construct
ASPSNMI

SEQ ID NO: 42068 - protein, 7 aa, synthetic construct
TSLKALA

SEQ ID NO: 42069 - protein, 7 aa, synthetic construct
LTINSAP

SEQ ID NO: 42070 - protein, 7 aa, synthetic construct
NFRKDSA

SEQ ID NO: 42071 - protein, 7 aa, synthetic construct
TFNNNNG

SEQ ID NO: 42072 - protein, 7 aa, synthetic construct
TNFYKNG

SEQ ID NO: 42073 - protein, 7 aa, synthetic construct
GPRNSLA

SEQ ID NO: 42074 - protein, 7 aa, synthetic construct
MGTGRSE

SEQ ID NO: 42075 - protein, 7 aa, synthetic construct
NTKTMNA

SEQ ID NO: 42076 - protein, 7 aa, synthetic construct
QAKWVDP

SEQ ID NO: 42077 - protein, 7 aa, synthetic construct
YGSGKVG

SEQ ID NO: 42078 - protein, 7 aa, synthetic construct
NGSKVAM

SEQ ID NO: 42079 - protein, 7 aa, synthetic construct
PVRSQQP

SEQ ID NO: 42080 - protein, 7 aa, synthetic construct
FQHQTAA

SEQ ID NO: 42081 - protein, 7 aa, synthetic construct
MTNHSPM

SEQ ID NO: 42082 - protein, 7 aa, synthetic construct
NSHKNVG

SEQ ID NO: 42083 - protein, 7 aa, synthetic construct
KNASGSG

SEQ ID NO: 42084 - protein, 7 aa, synthetic construct
KGNQNTA

SEQ ID NO: 42085 - protein, 7 aa, synthetic construct
NLMRHAD

SEQ ID NO: 42086 - protein, 7 aa, synthetic construct
FSPHEHQ

SEQ ID NO: 42087 - protein, 7 aa, synthetic construct
RSGNMPP

SEQ ID NO: 42088 - protein, 7 aa, synthetic construct
DRQKDKQ

SEQ ID NO: 42089 - protein, 7 aa, synthetic construct
RPTSSGG

SEQ ID NO: 42090 - protein, 7 aa, synthetic construct
YQGSNKN

SEQ ID NO: 42091 - protein, 7 aa, synthetic construct
QMKTRES

SEQ ID NO: 42092 - protein, 7 aa, synthetic construct
NYKSGTN

SEQ ID NO: 42093 - protein, 7 aa, synthetic construct
FRNVGSD

SEQ ID NO: 42094 - protein, 7 aa, synthetic construct
QKPGIVG

SEQ ID NO: 42095 - protein, 7 aa, synthetic construct
PAVRFTE

SEQ ID NO: 42096 - protein, 7 aa, synthetic construct
NRGPLSS

SEQ ID NO: 42097 - protein, 7 aa, synthetic construct
TPPVGKG

SEQ ID NO: 42098 - protein, 7 aa, synthetic construct
RMQNATG

SEQ ID NO: 42099 - protein, 7 aa, synthetic construct
WPQKQSP

SEQ ID NO: 42100 - protein, 7 aa, synthetic construct
MQKGVKD

SEQ ID NO: 42101 - protein, 7 aa, synthetic construct
VNGLRSV

SEQ ID NO: 42102 - protein, 7 aa, synthetic construct
SIYGGHQ

SEQ ID NO: 42103 - protein, 7 aa, synthetic construct
LQFMNKG

SEQ ID NO: 42104 - protein, 7 aa, synthetic construct
QGTQVMG

SEQ ID NO: 42105 - protein, 7 aa, synthetic construct
KISSVES

SEQ ID NO: 42106 - protein, 7 aa, synthetic construct
AHTPVNN

SEQ ID NO: 42107 - protein, 7 aa, synthetic construct
TTNIRTA

SEQ ID NO: 42108 - protein, 7 aa, synthetic construct
KNTGKAE

SEQ ID NO: 42109 - protein, 7 aa, synthetic construct
LSTFSHA

SEQ ID NO: 42110 - protein, 7 aa, synthetic construct
VYPQRAQ

SEQ ID NO: 42111 - protein, 7 aa, synthetic construct
AMAWEGK

SEQ ID NO: 42112 - protein, 7 aa, synthetic construct
QQRSTAP

SEQ ID NO: 42113 - protein, 7 aa, synthetic construct
WSSGKPG

SEQ ID NO: 42114 - protein, 7 aa, synthetic construct
SFKGSTA

SEQ ID NO: 42115 - protein, 7 aa, synthetic construct
SVQSKAV

SEQ ID NO: 42116 - protein, 7 aa, synthetic construct
NGKSQNP

SEQ ID NO: 42117 - protein, 7 aa, synthetic construct
GKASHTA

SEQ ID NO: 42118 - protein, 7 aa, synthetic construct
MVKAIPA

SEQ ID NO: 42119 - protein, 7 aa, synthetic construct
SAQAKMA

SEQ ID NO: 42120 - protein, 7 aa, synthetic construct
YNIHKKD

SEQ ID NO: 42121 - protein, 7 aa, synthetic construct
PYKPSNA

SEQ ID NO: 42122 - protein, 7 aa, synthetic construct
IPKRAPE

SEQ ID NO: 42123 - protein, 7 aa, synthetic construct
RPNHNKE

SEQ ID NO: 42124 - protein, 7 aa, synthetic construct
FQKSNAS

SEQ ID NO: 42125 - protein, 7 aa, synthetic construct
PKQQNYA

SEQ ID NO: 42126 - protein, 7 aa, synthetic construct
GAGANYG

SEQ ID NO: 42127 - protein, 7 aa, synthetic construct
HFIKEPG

SEQ ID NO: 42128 - protein, 7 aa, synthetic construct
TMKGSNS

SEQ ID NO: 42129 - protein, 7 aa, synthetic construct
VSQRGPT

SEQ ID NO: 42130 - protein, 7 aa, synthetic construct
TASKHAT

SEQ ID NO: 42131 - protein, 7 aa, synthetic construct
KDKGNIP

SEQ ID NO: 42132 - protein, 7 aa, synthetic construct
KISNNPA

SEQ ID NO: 42133 - protein, 7 aa, synthetic construct
RTQAGVV

SEQ ID NO: 42134 - protein, 7 aa, synthetic construct
WKVTDQH

SEQ ID NO: 42135 - protein, 7 aa, synthetic construct
LGRDTIT

SEQ ID NO: 42136 - protein, 7 aa, synthetic construct
TSATKAG

SEQ ID NO: 42137 - protein, 7 aa, synthetic construct
TVSSSKG

SEQ ID NO: 42138 - protein, 7 aa, synthetic construct
FGKSQAQ

SEQ ID NO: 42139 - protein, 7 aa, synthetic construct
NSTRMNF

SEQ ID NO: 42140 - protein, 7 aa, synthetic construct
KQNNMAG

SEQ ID NO: 42141 - protein, 7 aa, synthetic construct
RPTNSSD

SEQ ID NO: 42142 - protein, 7 aa, synthetic construct
KSGNPMM

SEQ ID NO: 42143 - protein, 7 aa, synthetic construct
PRDRSLG

SEQ ID NO: 42144 - protein, 7 aa, synthetic construct
FDKIKNS

SEQ ID NO: 42145 - protein, 7 aa, synthetic construct
STPYYKD

SEQ ID NO: 42146 - protein, 7 aa, synthetic construct
MRTNVLS

SEQ ID NO: 42147 - protein, 7 aa, synthetic construct
TRTSTSN

SEQ ID NO: 42148 - protein, 7 aa, synthetic construct
NRINDRF

SEQ ID NO: 42149 - protein, 7 aa, synthetic construct
HLHKQAQ

SEQ ID NO: 42150 - protein, 7 aa, synthetic construct
KNNSTKD

SEQ ID NO: 42151 - protein, 7 aa, synthetic construct
TPKSGGG

SEQ ID NO: 42152 - protein, 7 aa, synthetic construct
TYPKPTN

SEQ ID NO: 42153 - protein, 7 aa, synthetic construct
MMRDANT

SEQ ID NO: 42154 - protein, 7 aa, synthetic construct
GWTKKET

SEQ ID NO: 42155 - protein, 7 aa, synthetic construct
KNMNTQA

SEQ ID NO: 42156 - protein, 7 aa, synthetic construct
YSLHQVS

SEQ ID NO: 42157 - protein, 7 aa, synthetic construct
VNHMKVP

SEQ ID NO: 42158 - protein, 7 aa, synthetic construct
QAPVSKD

SEQ ID NO: 42159 - protein, 7 aa, synthetic construct
FGAKGQN

SEQ ID NO: 42160 - protein, 7 aa, synthetic construct
RGNTFID

SEQ ID NO: 42161 - protein, 7 aa, synthetic construct
RPSVSTP

SEQ ID NO: 42162 - protein, 7 aa, synthetic construct
VRQQASG

SEQ ID NO: 42163 - protein, 7 aa, synthetic construct
TKPAGVG

SEQ ID NO: 42164 - protein, 7 aa, synthetic construct
GKGGSQV

SEQ ID NO: 42165 - protein, 7 aa, synthetic construct
KISTLMN

SEQ ID NO: 42166 - protein, 7 aa, synthetic construct
RHQGPQL

SEQ ID NO: 42167 - protein, 7 aa, synthetic construct
RPNGGQL

SEQ ID NO: 42168 - protein, 7 aa, synthetic construct
VLGIPRP

SEQ ID NO: 42169 - protein, 7 aa, synthetic construct
AKPNMSA

SEQ ID NO: 42170 - protein, 7 aa, synthetic construct
GKPNVQG

SEQ ID NO: 42171 - protein, 7 aa, synthetic construct
KPNASVP

SEQ ID NO: 42172 - protein, 7 aa, synthetic construct
LKPNHGM

SEQ ID NO: 42173 - protein, 7 aa, synthetic construct
TNKNNTG

SEQ ID NO: 42174 - protein, 7 aa, synthetic construct
MGPKVNG

SEQ ID NO: 42175 - protein, 7 aa, synthetic construct
MNGYFKA

SEQ ID NO: 42176 - protein, 7 aa, synthetic construct
TRHNAEL

SEQ ID NO: 42177 - protein, 7 aa, synthetic construct
MPPKSGS

SEQ ID NO: 42178 - protein, 7 aa, synthetic construct
AKTANSS

SEQ ID NO: 42179 - protein, 7 aa, synthetic construct
GARGSSM

SEQ ID NO: 42180 - protein, 7 aa, synthetic construct
VNGGRMA

SEQ ID NO: 42181 - protein, 7 aa, synthetic construct
SMMKTQP

SEQ ID NO: 42182 - protein, 7 aa, synthetic construct
KREMMGN

SEQ ID NO: 42183 - protein, 7 aa, synthetic construct
KHDSRNA

SEQ ID NO: 42184 - protein, 7 aa, synthetic construct
NRQTSAA

SEQ ID NO: 42185 - protein, 7 aa, synthetic construct
KDETKIL

SEQ ID NO: 42186 - protein, 7 aa, synthetic construct
RSQTQAA

SEQ ID NO: 42187 - protein, 7 aa, synthetic construct
TTRQTNA

SEQ ID NO: 42188 - protein, 7 aa, synthetic construct
TFMTKDG

SEQ ID NO: 42189 - protein, 7 aa, synthetic construct
GGVKTSA

SEQ ID NO: 42190 - protein, 7 aa, synthetic construct
AMVSHGM

SEQ ID NO: 42191 - protein, 7 aa, synthetic construct
TGKMATA

SEQ ID NO: 42192 - protein, 7 aa, synthetic construct
STNGKQG

SEQ ID NO: 42193 - protein, 7 aa, synthetic construct
MKPNSSP

SEQ ID NO: 42194 - protein, 7 aa, synthetic construct
SSIMSHG

SEQ ID NO: 42195 - protein, 7 aa, synthetic construct
KNTSHQP

SEQ ID NO: 42196 - protein, 7 aa, synthetic construct
TKQTGQQ

SEQ ID NO: 42197 - protein, 7 aa, synthetic construct
LSNAHVS

SEQ ID NO: 42198 - protein, 7 aa, synthetic construct
RNNAAYA

SEQ ID NO: 42199 - protein, 7 aa, synthetic construct
SIPNTMS

SEQ ID NO: 42200 - protein, 7 aa, synthetic construct
FGQAKNA

SEQ ID NO: 42201 - protein, 7 aa, synthetic construct
RNAQSHN

SEQ ID NO: 42202 - protein, 7 aa, synthetic construct
YKQQMKD

SEQ ID NO: 42203 - protein, 7 aa, synthetic construct
PTKGQSA

SEQ ID NO: 42204 - protein, 7 aa, synthetic construct
PFARMES

SEQ ID NO: 42205 - protein, 7 aa, synthetic construct
TATVPRG

SEQ ID NO: 42206 - protein, 7 aa, synthetic construct
TKQIMQV

SEQ ID NO: 42207 - protein, 7 aa, synthetic construct
KNMSAPP

SEQ ID NO: 42208 - protein, 7 aa, synthetic construct
YANTQKG

SEQ ID NO: 42209 - protein, 7 aa, synthetic construct
RGFGSDA

SEQ ID NO: 42210 - protein, 7 aa, synthetic construct
PKVSAGG

SEQ ID NO: 42211 - protein, 7 aa, synthetic construct
RSNNSTG

SEQ ID NO: 42212 - protein, 7 aa, synthetic construct
MKTGTGA

SEQ ID NO: 42213 - protein, 7 aa, synthetic construct
RDPIPYD

SEQ ID NO: 42214 - protein, 7 aa, synthetic construct
WMNKIAS

SEQ ID NO: 42215 - protein, 7 aa, synthetic construct
TNSMPSA

SEQ ID NO: 42216 - protein, 7 aa, synthetic construct
GKRETFG

SEQ ID NO: 42217 - protein, 7 aa, synthetic construct
QKNGTIG

SEQ ID NO: 42218 - protein, 7 aa, synthetic construct
LNQRTGG

SEQ ID NO: 42219 - protein, 7 aa, synthetic construct
SPSKALA

SEQ ID NO: 42220 - protein, 7 aa, synthetic construct
GSNNPVN

SEQ ID NO: 42221 - protein, 7 aa, synthetic construct
FGAYSTA

SEQ ID NO: 42222 - protein, 7 aa, synthetic construct
VTAMRQE

SEQ ID NO: 42223 - protein, 7 aa, synthetic construct
NQNRQQA

SEQ ID NO: 42224 - protein, 7 aa, synthetic construct
QPPYRGE

SEQ ID NO: 42225 - protein, 7 aa, synthetic construct
TNVKVPS

SEQ ID NO: 42226 - protein, 7 aa, synthetic construct
LASSARQ

SEQ ID NO: 42227 - protein, 7 aa, synthetic construct
DINHRSP

SEQ ID NO: 42228 - protein, 7 aa, synthetic construct
YGRSAYA

SEQ ID NO: 42229 - protein, 7 aa, synthetic construct
SFSSTTG

SEQ ID NO: 42230 - protein, 7 aa, synthetic construct
QMRPEPM

SEQ ID NO: 42231 - protein, 7 aa, synthetic construct
LEPRRNG

SEQ ID NO: 42232 - protein, 7 aa, synthetic construct
NAGHMHA

SEQ ID NO: 42233 - protein, 7 aa, synthetic construct
SKTGMNA

SEQ ID NO: 42234 - protein, 7 aa, synthetic construct
MYKGTNG

SEQ ID NO: 42235 - protein, 7 aa, synthetic construct
SKIGVAS

SEQ ID NO: 42236 - protein, 7 aa, synthetic construct
TARSPGS

SEQ ID NO: 42237 - protein, 7 aa, synthetic construct
RNSSGMS

SEQ ID NO: 42238 - protein, 7 aa, synthetic construct
NKSGMTG

SEQ ID NO: 42239 - protein, 7 aa, synthetic construct
ANKQSMG

SEQ ID NO: 42240 - protein, 7 aa, synthetic construct
RENTNVA

SEQ ID NO: 42241 - protein, 7 aa, synthetic construct
AGHGFGN

SEQ ID NO: 42242 - protein, 7 aa, synthetic construct
MYEHRGG

SEQ ID NO: 42243 - protein, 7 aa, synthetic construct
QAKVRES

SEQ ID NO: 42244 - protein, 7 aa, synthetic construct
TTRAPQA

SEQ ID NO: 42245 - protein, 7 aa, synthetic construct
HPNTVTG

SEQ ID NO: 42246 - protein, 7 aa, synthetic construct
FPGKAHY

SEQ ID NO: 42247 - protein, 7 aa, synthetic construct
MTNIKPA

SEQ ID NO: 42248 - protein, 7 aa, synthetic construct
QSGKMNA

SEQ ID NO: 42249 - protein, 7 aa, synthetic construct
RSSFGGE

SEQ ID NO: 42250 - protein, 7 aa, synthetic construct
VDMRHGG

SEQ ID NO: 42251 - protein, 7 aa, synthetic construct
LPRSNNA

SEQ ID NO: 42252 - protein, 7 aa, synthetic construct
VNGGNNR

SEQ ID NO: 42253 - protein, 7 aa, synthetic construct
IPAQPRD

SEQ ID NO: 42254 - protein, 7 aa, synthetic construct
QNKASSM

SEQ ID NO: 42255 - protein, 7 aa, synthetic construct
SKREIQA

SEQ ID NO: 42256 - protein, 7 aa, synthetic construct
GISYSKD

SEQ ID NO: 42257 - protein, 7 aa, synthetic construct
NKQMANA

SEQ ID NO: 42258 - protein, 7 aa, synthetic construct
SPPKNQA

SEQ ID NO: 42259 - protein, 7 aa, synthetic construct
MSKMATG

SEQ ID NO: 42260 - protein, 7 aa, synthetic construct
RANVTGG

SEQ ID NO: 42261 - protein, 7 aa, synthetic construct
QGSKGQA

SEQ ID NO: 42262 - protein, 7 aa, synthetic construct
GTRTTGA

SEQ ID NO: 42263 - protein, 7 aa, synthetic construct
RKNDENS

SEQ ID NO: 42264 - protein, 7 aa, synthetic construct
PGNKHAY

SEQ ID NO: 42265 - protein, 7 aa, synthetic construct
KFTHAPD

SEQ ID NO: 42266 - protein, 7 aa, synthetic construct
THVVGNR

SEQ ID NO: 42267 - protein, 7 aa, synthetic construct
LVPHMTK

SEQ ID NO: 42268 - protein, 7 aa, synthetic construct
RGMGPTG

SEQ ID NO: 42269 - protein, 7 aa, synthetic construct
FERQRME

SEQ ID NO: 42270 - protein, 7 aa, synthetic construct
GKNMASA

SEQ ID NO: 42271 - protein, 7 aa, synthetic construct
KFPNQGA

SEQ ID NO: 42272 - protein, 7 aa, synthetic construct
YHAARNG

SEQ ID NO: 42273 - protein, 7 aa, synthetic construct
MRGQDVR

SEQ ID NO: 42274 - protein, 7 aa, synthetic construct
KNSNASS

SEQ ID NO: 42275 - protein, 7 aa, synthetic construct
WSAVNKP

SEQ ID NO: 42276 - protein, 7 aa, synthetic construct
NKGNGAM

SEQ ID NO: 42277 - protein, 7 aa, synthetic construct
TSSKGVA

SEQ ID NO: 42278 - protein, 7 aa, synthetic construct
ALRGMNS

SEQ ID NO: 42279 - protein, 7 aa, synthetic construct
NKDQRFP

SEQ ID NO: 42280 - protein, 7 aa, synthetic construct
VGNRTTG

SEQ ID NO: 42281 - protein, 7 aa, synthetic construct
LHTKVQP

SEQ ID NO: 42282 - protein, 7 aa, synthetic construct
QPPNRQG

SEQ ID NO: 42283 - protein, 7 aa, synthetic construct
TNQKMGP

SEQ ID NO: 42284 - protein, 7 aa, synthetic construct
TNPKSGN

SEQ ID NO: 42285 - protein, 7 aa, synthetic construct
ERNAHHG

SEQ ID NO: 42286 - protein, 7 aa, synthetic construct
KTNGTAV

SEQ ID NO: 42287 - protein, 7 aa, synthetic construct
QMKSVGG

SEQ ID NO: 42288 - protein, 7 aa, synthetic construct
KNTTPNG

SEQ ID NO: 42289 - protein, 7 aa, synthetic construct
LRTKDEH

SEQ ID NO: 42290 - protein, 7 aa, synthetic construct
RNSGAVL

SEQ ID NO: 42291 - protein, 7 aa, synthetic construct
QMHYVAE

SEQ ID NO: 42292 - protein, 7 aa, synthetic construct
NGYPTPT

SEQ ID NO: 42293 - protein, 7 aa, synthetic construct
QKNNLGV

SEQ ID NO: 42294 - protein, 7 aa, synthetic construct
TGKYMNA

SEQ ID NO: 42295 - protein, 7 aa, synthetic construct
EKFHHQS

SEQ ID NO: 42296 - protein, 7 aa, synthetic construct
SPRMGTG

SEQ ID NO: 42297 - protein, 7 aa, synthetic construct
TTMIRLE

SEQ ID NO: 42298 - protein, 7 aa, synthetic construct
KMTNSSV

SEQ ID NO: 42299 - protein, 7 aa, synthetic construct
YPKRDNT

SEQ ID NO: 42300 - protein, 7 aa, synthetic construct
MNVSKPG

SEQ ID NO: 42301 - protein, 7 aa, synthetic construct
MGKPQTA

SEQ ID NO: 42302 - protein, 7 aa, synthetic construct
PRAQGTG

SEQ ID NO: 42303 - protein, 7 aa, synthetic construct
GPSGIKG

SEQ ID NO: 42304 - protein, 7 aa, synthetic construct
YGKASEG

SEQ ID NO: 42305 - protein, 7 aa, synthetic construct
QSRGGTY

SEQ ID NO: 42306 - protein, 7 aa, synthetic construct
KVWDKGE

SEQ ID NO: 42307 - protein, 7 aa, synthetic construct
NPATSKG

SEQ ID NO: 42308 - protein, 7 aa, synthetic construct
KEHAANM

SEQ ID NO: 42309 - protein, 7 aa, synthetic construct
IRPSTQA

SEQ ID NO: 42310 - protein, 7 aa, synthetic construct
TPTARGG

SEQ ID NO: 42311 - protein, 7 aa, synthetic construct
NSQKATG

SEQ ID NO: 42312 - protein, 7 aa, synthetic construct
AKEVRGP

SEQ ID NO: 42313 - protein, 7 aa, synthetic construct
NVNKSLS

SEQ ID NO: 42314 - protein, 7 aa, synthetic construct
NQYGGAM

SEQ ID NO: 42315 - protein, 7 aa, synthetic construct
KWNGHEA

SEQ ID NO: 42316 - protein, 7 aa, synthetic construct
YKNASQG

SEQ ID NO: 42317 - protein, 7 aa, synthetic construct
HDVRRQP

SEQ ID NO: 42318 - protein, 7 aa, synthetic construct
KDRSTGG

SEQ ID NO: 42319 - protein, 7 aa, synthetic construct
PQRNGGV

SEQ ID NO: 42320 - protein, 7 aa, synthetic construct
QKHDSST

SEQ ID NO: 42321 - protein, 7 aa, synthetic construct
KGNVSQG

SEQ ID NO: 42322 - protein, 7 aa, synthetic construct
NAMQRQM

SEQ ID NO: 42323 - protein, 7 aa, synthetic construct
RAQSTAG

SEQ ID NO: 42324 - protein, 7 aa, synthetic construct
YPGQKNQ

SEQ ID NO: 42325 - protein, 7 aa, synthetic construct
FIGKDTN

SEQ ID NO: 42326 - protein, 7 aa, synthetic construct
GWAQHAG

SEQ ID NO: 42327 - protein, 7 aa, synthetic construct
GKHPSQY

SEQ ID NO: 42328 - protein, 7 aa, synthetic construct
RYVNNGA

SEQ ID NO: 42329 - protein, 7 aa, synthetic construct
KVSSSQS

SEQ ID NO: 42330 - protein, 7 aa, synthetic construct
QRQAGSG

SEQ ID NO: 42331 - protein, 7 aa, synthetic construct
IIRDTAK

SEQ ID NO: 42332 - protein, 7 aa, synthetic construct
RDRDNLH

SEQ ID NO: 42333 - protein, 7 aa, synthetic construct
INGRSDA

SEQ ID NO: 42334 - protein, 7 aa, synthetic construct
DGRSRDT

SEQ ID NO: 42335 - protein, 7 aa, synthetic construct
IGKAVVN

SEQ ID NO: 42336 - protein, 7 aa, synthetic construct
KDNNRGG

SEQ ID NO: 42337 - protein, 7 aa, synthetic construct
YMGQQKP

SEQ ID NO: 42338 - protein, 7 aa, synthetic construct
TSKQVTT

SEQ ID NO: 42339 - protein, 7 aa, synthetic construct
AKPAGQH

SEQ ID NO: 42340 - protein, 7 aa, synthetic construct
LSGIRAS

SEQ ID NO: 42341 - protein, 7 aa, synthetic construct
SKVKLSD

SEQ ID NO: 42342 - protein, 7 aa, synthetic construct
YAKPTKD

SEQ ID NO: 42343 - protein, 7 aa, synthetic construct
TKTVINM

SEQ ID NO: 42344 - protein, 7 aa, synthetic construct
KTAQASA

SEQ ID NO: 42345 - protein, 7 aa, synthetic construct
RTSTGVG

SEQ ID NO: 42346 - protein, 7 aa, synthetic construct
TGGFGRD

SEQ ID NO: 42347 - protein, 7 aa, synthetic construct
GPKQNNG

SEQ ID NO: 42348 - protein, 7 aa, synthetic construct
KPAMGGG

SEQ ID NO: 42349 - protein, 7 aa, synthetic construct
QTGQKVG

SEQ ID NO: 42350 - protein, 7 aa, synthetic construct
GQKKEQA

SEQ ID NO: 42351 - protein, 7 aa, synthetic construct
QEWRKVD

SEQ ID NO: 42352 - protein, 7 aa, synthetic construct
NYTHGPL

SEQ ID NO: 42353 - protein, 7 aa, synthetic construct
DKKMSSQ

SEQ ID NO: 42354 - protein, 7 aa, synthetic construct
YTHKQDQ

SEQ ID NO: 42355 - protein, 7 aa, synthetic construct
TSRMLAG

SEQ ID NO: 42356 - protein, 7 aa, synthetic construct
ELKRKDE

SEQ ID NO: 42357 - protein, 7 aa, synthetic construct
PSSRGQF

SEQ ID NO: 42358 - protein, 7 aa, synthetic construct
RPTSSTA

SEQ ID NO: 42359 - protein, 7 aa, synthetic construct
GGQKSAG

SEQ ID NO: 42360 - protein, 7 aa, synthetic construct
FEVRAPA

SEQ ID NO: 42361 - protein, 7 aa, synthetic construct
SIAHAHS

SEQ ID NO: 42362 - protein, 7 aa, synthetic construct
TKSASSN

SEQ ID NO: 42363 - protein, 7 aa, synthetic construct
QNKTPAA

SEQ ID NO: 42364 - protein, 7 aa, synthetic construct
RDSQKGG

SEQ ID NO: 42365 - protein, 7 aa, synthetic construct
GRATMVA

SEQ ID NO: 42366 - protein, 7 aa, synthetic construct
TSRQSAG

SEQ ID NO: 42367 - protein, 7 aa, synthetic construct
KTAPGSG

SEQ ID NO: 42368 - protein, 7 aa, synthetic construct
IKQGSAG

SEQ ID NO: 42369 - protein, 7 aa, synthetic construct
GQPKGNG

SEQ ID NO: 42370 - protein, 7 aa, synthetic construct
IMQHGPG

SEQ ID NO: 42371 - protein, 7 aa, synthetic construct
QRAKYDE

SEQ ID NO: 42372 - protein, 7 aa, synthetic construct
NMGNKQG

SEQ ID NO: 42373 - protein, 7 aa, synthetic construct
ISHRAEA

SEQ ID NO: 42374 - protein, 7 aa, synthetic construct
TRFGDVV

SEQ ID NO: 42375 - protein, 7 aa, synthetic construct
KQSGVKD

SEQ ID NO: 42376 - protein, 7 aa, synthetic construct
HPGLIKE

SEQ ID NO: 42377 - protein, 7 aa, synthetic construct
TQNKGSM

SEQ ID NO: 42378 - protein, 7 aa, synthetic construct
KLHVSTN

SEQ ID NO: 42379 - protein, 7 aa, synthetic construct
QMGVQSA

SEQ ID NO: 42380 - protein, 7 aa, synthetic construct
TIYQKSM

SEQ ID NO: 42381 - protein, 7 aa, synthetic construct
SAMTHPG

SEQ ID NO: 42382 - protein, 7 aa, synthetic construct
AKNQAPA

SEQ ID NO: 42383 - protein, 7 aa, synthetic construct
NGPQTKP

SEQ ID NO: 42384 - protein, 7 aa, synthetic construct
FSMAGSS

SEQ ID NO: 42385 - protein, 7 aa, synthetic construct
STQSKMS

SEQ ID NO: 42386 - protein, 7 aa, synthetic construct
YKVQQVG

SEQ ID NO: 42387 - protein, 7 aa, synthetic construct
STKNMGA

SEQ ID NO: 42388 - protein, 7 aa, synthetic construct
ITNPRMH

SEQ ID NO: 42389 - protein, 7 aa, synthetic construct
GSKMTTG

SEQ ID NO: 42390 - protein, 7 aa, synthetic construct
GTHNTYG

SEQ ID NO: 42391 - protein, 7 aa, synthetic construct
TYAAAQG

SEQ ID NO: 42392 - protein, 7 aa, synthetic construct
TVGASSG

SEQ ID NO: 42393 - protein, 7 aa, synthetic construct
NGYATKA

SEQ ID NO: 42394 - protein, 7 aa, synthetic construct
MASGRKD

SEQ ID NO: 42395 - protein, 7 aa, synthetic construct
VQATIKS

SEQ ID NO: 42396 - protein, 7 aa, synthetic construct
MRINMVP

SEQ ID NO: 42397 - protein, 7 aa, synthetic construct
NHPFTIA

SEQ ID NO: 42398 - protein, 7 aa, synthetic construct
VPTMANN

SEQ ID NO: 42399 - protein, 7 aa, synthetic construct
KPGSQMS

SEQ ID NO: 42400 - protein, 7 aa, synthetic construct
IRPGGFH

SEQ ID NO: 42401 - protein, 7 aa, synthetic construct
PKNVNGG

SEQ ID NO: 42402 - protein, 7 aa, synthetic construct
YNSARAP

SEQ ID NO: 42403 - protein, 7 aa, synthetic construct
YGVRTGM

SEQ ID NO: 42404 - protein, 7 aa, synthetic construct
DKSKTGA

SEQ ID NO: 42405 - protein, 7 aa, synthetic construct
TAVVKNY

SEQ ID NO: 42406 - protein, 7 aa, synthetic construct
AKPVNSS

SEQ ID NO: 42407 - protein, 7 aa, synthetic construct
SRKESEN

SEQ ID NO: 42408 - protein, 7 aa, synthetic construct
IKPTRFD

SEQ ID NO: 42409 - protein, 7 aa, synthetic construct
VGHQQMG

SEQ ID NO: 42410 - protein, 7 aa, synthetic construct
LKLNKTP

SEQ ID NO: 42411 - protein, 7 aa, synthetic construct
KNYTTEP

SEQ ID NO: 42412 - protein, 7 aa, synthetic construct
FEHLNKG

SEQ ID NO: 42413 - protein, 7 aa, synthetic construct
NNLKTKP

SEQ ID NO: 42414 - protein, 7 aa, synthetic construct
TPTQKTG

SEQ ID NO: 42415 - protein, 7 aa, synthetic construct
GKTSSPT

SEQ ID NO: 42416 - protein, 7 aa, synthetic construct
KQPMTQA

SEQ ID NO: 42417 - protein, 7 aa, synthetic construct
SKAGSFA

SEQ ID NO: 42418 - protein, 7 aa, synthetic construct
NSSVTRA

SEQ ID NO: 42419 - protein, 7 aa, synthetic construct
TRMGQGV

SEQ ID NO: 42420 - protein, 7 aa, synthetic construct
PHVSVPG

SEQ ID NO: 42421 - protein, 7 aa, synthetic construct
NKTSQGS

SEQ ID NO: 42422 - protein, 7 aa, synthetic construct
RSGNIPD

SEQ ID NO: 42423 - protein, 7 aa, synthetic construct
HVHRGME

SEQ ID NO: 42424 - protein, 7 aa, synthetic construct
TRPSSGA

SEQ ID NO: 42425 - protein, 7 aa, synthetic construct
KMMKDLV

SEQ ID NO: 42426 - protein, 7 aa, synthetic construct
HMRELHA

SEQ ID NO: 42427 - protein, 7 aa, synthetic construct
YSGKHTG

SEQ ID NO: 42428 - protein, 7 aa, synthetic construct
NKGYTTG

SEQ ID NO: 42429 - protein, 7 aa, synthetic construct
QTGGKTY

SEQ ID NO: 42430 - protein, 7 aa, synthetic construct
VKQTDYS

SEQ ID NO: 42431 - protein, 7 aa, synthetic construct
FTPQAGT

SEQ ID NO: 42432 - protein, 7 aa, synthetic construct
SRVLHNP

SEQ ID NO: 42433 - protein, 7 aa, synthetic construct
YQATKTG

SEQ ID NO: 42434 - protein, 7 aa, synthetic construct
YKTAKGE

SEQ ID NO: 42435 - protein, 7 aa, synthetic construct
SGPRQGA

SEQ ID NO: 42436 - protein, 7 aa, synthetic construct
QHRPSTV

SEQ ID NO: 42437 - protein, 7 aa, synthetic construct
MNPKASG

SEQ ID NO: 42438 - protein, 7 aa, synthetic construct
SNSAHKI

SEQ ID NO: 42439 - protein, 7 aa, synthetic construct
HYGGAQG

SEQ ID NO: 42440 - protein, 7 aa, synthetic construct
TKPSISQ

SEQ ID NO: 42441 - protein, 7 aa, synthetic construct
MPNSAKS

SEQ ID NO: 42442 - protein, 7 aa, synthetic construct
GKNGSVV

SEQ ID NO: 42443 - protein, 7 aa, synthetic construct
EKDMNFM

SEQ ID NO: 42444 - protein, 7 aa, synthetic construct
QRQQAQA

SEQ ID NO: 42445 - protein, 7 aa, synthetic construct
WATKPDR

SEQ ID NO: 42446 - protein, 7 aa, synthetic construct
YRERSNI

SEQ ID NO: 42447 - protein, 7 aa, synthetic construct
TTQSKQG

SEQ ID NO: 42448 - protein, 7 aa, synthetic construct
SPKLQGG

SEQ ID NO: 42449 - protein, 7 aa, synthetic construct
QVLNNRG

SEQ ID NO: 42450 - protein, 7 aa, synthetic construct
SKQNAKD

SEQ ID NO: 42451 - protein, 7 aa, synthetic construct
RSSQEIY

SEQ ID NO: 42452 - protein, 7 aa, synthetic construct
TRPSGTA

SEQ ID NO: 42453 - protein, 7 aa, synthetic construct
NSKPMNG

SEQ ID NO: 42454 - protein, 7 aa, synthetic construct
RHTGDAG

SEQ ID NO: 42455 - protein, 7 aa, synthetic construct
QPYGANS

SEQ ID NO: 42456 - protein, 7 aa, synthetic construct
TVKTSTG

SEQ ID NO: 42457 - protein, 7 aa, synthetic construct
HMKTHQE

SEQ ID NO: 42458 - protein, 7 aa, synthetic construct
KLSNTKE

SEQ ID NO: 42459 - protein, 7 aa, synthetic construct
RNDFHTP

SEQ ID NO: 42460 - protein, 7 aa, synthetic construct
RPGEKTV

SEQ ID NO: 42461 - protein, 7 aa, synthetic construct
MSKSPNS

SEQ ID NO: 42462 - protein, 7 aa, synthetic construct
KRDQSGS

SEQ ID NO: 42463 - protein, 7 aa, synthetic construct
ARHKEDA

SEQ ID NO: 42464 - protein, 7 aa, synthetic construct
VHTNKTG

SEQ ID NO: 42465 - protein, 7 aa, synthetic construct
GGGGKVG

SEQ ID NO: 42466 - protein, 7 aa, synthetic construct
YQKTPQG

SEQ ID NO: 42467 - protein, 7 aa, synthetic construct
RTANAQG

SEQ ID NO: 42468 - protein, 7 aa, synthetic construct
FKPGMSN

SEQ ID NO: 42469 - protein, 7 aa, synthetic construct
TANGPNW

SEQ ID NO: 42470 - protein, 7 aa, synthetic construct
YGRPSIP

SEQ ID NO: 42471 - protein, 7 aa, synthetic construct
PHIKKDA

SEQ ID NO: 42472 - protein, 7 aa, synthetic construct
VYKQTEN

SEQ ID NO: 42473 - protein, 7 aa, synthetic construct
PFKSSNG

SEQ ID NO: 42474 - protein, 7 aa, synthetic construct
YKNHTGL

SEQ ID NO: 42475 - protein, 7 aa, synthetic construct
IGLRHID

SEQ ID NO: 42476 - protein, 7 aa, synthetic construct
TNRGKDP

SEQ ID NO: 42477 - protein, 7 aa, synthetic construct
SIQKSVP

SEQ ID NO: 42478 - protein, 7 aa, synthetic construct
MRQSSQS

SEQ ID NO: 42479 - protein, 7 aa, synthetic construct
RSPTTVG

SEQ ID NO: 42480 - protein, 7 aa, synthetic construct
LKLANMP

SEQ ID NO: 42481 - protein, 7 aa, synthetic construct
MTYKASN

SEQ ID NO: 42482 - protein, 7 aa, synthetic construct
TGVTRIG

SEQ ID NO: 42483 - protein, 7 aa, synthetic construct
NKMDTNM

SEQ ID NO: 42484 - protein, 7 aa, synthetic construct
FPGSKTH

SEQ ID NO: 42485 - protein, 7 aa, synthetic construct
SKSFGQG

SEQ ID NO: 42486 - protein, 7 aa, synthetic construct
NSRNAVA

SEQ ID NO: 42487 - protein, 7 aa, synthetic construct
ADRHKGM

SEQ ID NO: 42488 - protein, 7 aa, synthetic construct
QARGSVG

SEQ ID NO: 42489 - protein, 7 aa, synthetic construct
RMNNGGG

SEQ ID NO: 42490 - protein, 7 aa, synthetic construct
SHVKYKD

SEQ ID NO: 42491 - protein, 7 aa, synthetic construct
MKKHPEE

SEQ ID NO: 42492 - protein, 7 aa, synthetic construct
FKNMMPA

SEQ ID NO: 42493 - protein, 7 aa, synthetic construct
NRTTTGA

SEQ ID NO: 42494 - protein, 7 aa, synthetic construct
LGTRNVP

SEQ ID NO: 42495 - protein, 7 aa, synthetic construct
MTSKSPP

SEQ ID NO: 42496 - protein, 7 aa, synthetic construct
QQKVAAG

SEQ ID NO: 42497 - protein, 7 aa, synthetic construct
KPNSTYG

SEQ ID NO: 42498 - protein, 7 aa, synthetic construct
VSKGTAG

SEQ ID NO: 42499 - protein, 7 aa, synthetic construct
IRGPDIP

SEQ ID NO: 42500 - protein, 7 aa, synthetic construct
TGNNSKP

SEQ ID NO: 42501 - protein, 7 aa, synthetic construct
VRTGTVG

SEQ ID NO: 42502 - protein, 7 aa, synthetic construct
ASMGNKP

SEQ ID NO: 42503 - protein, 7 aa, synthetic construct
QQSNTGR

SEQ ID NO: 42504 - protein, 7 aa, synthetic construct
DMGKGKG

SEQ ID NO: 42505 - protein, 7 aa, synthetic construct
KWKTPTE

SEQ ID NO: 42506 - protein, 7 aa, synthetic construct
HVGGLKP

SEQ ID NO: 42507 - protein, 7 aa, synthetic construct
NAGTRAP

SEQ ID NO: 42508 - protein, 7 aa, synthetic construct
STANTQR

SEQ ID NO: 42509 - protein, 7 aa, synthetic construct
KIYDEKG

SEQ ID NO: 42510 - protein, 7 aa, synthetic construct
MNAGRPG

SEQ ID NO: 42511 - protein, 7 aa, synthetic construct
GMVPNRT

SEQ ID NO: 42512 - protein, 7 aa, synthetic construct
PNGRLPE

SEQ ID NO: 42513 - protein, 7 aa, synthetic construct
AEPHKAQ

SEQ ID NO: 42514 - protein, 7 aa, synthetic construct
HAPAAKM

SEQ ID NO: 42515 - protein, 7 aa, synthetic construct
FTKTTQA

SEQ ID NO: 42516 - protein, 7 aa, synthetic construct
NARGTIG

SEQ ID NO: 42517 - protein, 7 aa, synthetic construct
YKETMAG

SEQ ID NO: 42518 - protein, 7 aa, synthetic construct
KPTGGMM

SEQ ID NO: 42519 - protein, 7 aa, synthetic construct
HADVVRS

SEQ ID NO: 42520 - protein, 7 aa, synthetic construct
MSNQVKA

SEQ ID NO: 42521 - protein, 7 aa, synthetic construct
GRSPYVE

SEQ ID NO: 42522 - protein, 7 aa, synthetic construct
NQRNVQG

SEQ ID NO: 42523 - protein, 7 aa, synthetic construct
VKSQLGD

SEQ ID NO: 42524 - protein, 7 aa, synthetic construct
LKHKTME

SEQ ID NO: 42525 - protein, 7 aa, synthetic construct
TNKASGA

SEQ ID NO: 42526 - protein, 7 aa, synthetic construct
KPNVAVG

SEQ ID NO: 42527 - protein, 7 aa, synthetic construct
YTHKLDV

SEQ ID NO: 42528 - protein, 7 aa, synthetic construct
TKYDVPT

SEQ ID NO: 42529 - protein, 7 aa, synthetic construct
GKGMTAA

SEQ ID NO: 42530 - protein, 7 aa, synthetic construct
HTSHGSS

SEQ ID NO: 42531 - protein, 7 aa, synthetic construct
GRTNNMP

SEQ ID NO: 42532 - protein, 7 aa, synthetic construct
LRAYKDS

SEQ ID NO: 42533 - protein, 7 aa, synthetic construct
GRAAFGE

SEQ ID NO: 42534 - protein, 7 aa, synthetic construct
IPRFPTN

SEQ ID NO: 42535 - protein, 7 aa, synthetic construct
GPKQPYD

SEQ ID NO: 42536 - protein, 7 aa, synthetic construct
LYKVDQI

SEQ ID NO: 42537 - protein, 7 aa, synthetic construct
RPGGYAD

SEQ ID NO: 42538 - protein, 7 aa, synthetic construct
WRGVNQQ

SEQ ID NO: 42539 - protein, 7 aa, synthetic construct
TMGVKIQ

SEQ ID NO: 42540 - protein, 7 aa, synthetic construct
QAYAQSA

SEQ ID NO: 42541 - protein, 7 aa, synthetic construct
TASRASP

SEQ ID NO: 42542 - protein, 7 aa, synthetic construct
MGRNQGA

SEQ ID NO: 42543 - protein, 7 aa, synthetic construct
KNDKIPP

SEQ ID NO: 42544 - protein, 7 aa, synthetic construct
DHRLPSK

SEQ ID NO: 42545 - protein, 7 aa, synthetic construct
FGGVMGV

SEQ ID NO: 42546 - protein, 7 aa, synthetic construct
TSYKMNV

SEQ ID NO: 42547 - protein, 7 aa, synthetic construct
TTSQRMG

SEQ ID NO: 42548 - protein, 7 aa, synthetic construct
QHPKNQI

SEQ ID NO: 42549 - protein, 7 aa, synthetic construct
ARDHKDY

SEQ ID NO: 42550 - protein, 7 aa, synthetic construct
GHRTTFA

SEQ ID NO: 42551 - protein, 7 aa, synthetic construct
TRGQMAG

SEQ ID NO: 42552 - protein, 7 aa, synthetic construct
KSMGTQS

SEQ ID NO: 42553 - protein, 7 aa, synthetic construct
QKQMIQE

SEQ ID NO: 42554 - protein, 7 aa, synthetic construct
MMAKNNA

SEQ ID NO: 42555 - protein, 7 aa, synthetic construct
MGISRIP

SEQ ID NO: 42556 - protein, 7 aa, synthetic construct
VNRSQQG

SEQ ID NO: 42557 - protein, 7 aa, synthetic construct
GANRQNG

SEQ ID NO: 42558 - protein, 7 aa, synthetic construct
KTSTNNG

SEQ ID NO: 42559 - protein, 7 aa, synthetic construct
RDKTQSG

SEQ ID NO: 42560 - protein, 7 aa, synthetic construct
GASARTV

SEQ ID NO: 42561 - protein, 7 aa, synthetic construct
GKVSQAG

SEQ ID NO: 42562 - protein, 7 aa, synthetic construct
NRNLTAA

SEQ ID NO: 42563 - protein, 7 aa, synthetic construct
AMRGIKD

SEQ ID NO: 42564 - protein, 7 aa, synthetic construct
GKPGMTM

SEQ ID NO: 42565 - protein, 7 aa, synthetic construct
GKFVNNP

SEQ ID NO: 42566 - protein, 7 aa, synthetic construct
MKYANAE

SEQ ID NO: 42567 - protein, 7 aa, synthetic construct
IQGIKAA

SEQ ID NO: 42568 - protein, 7 aa, synthetic construct
TRTADNA

SEQ ID NO: 42569 - protein, 7 aa, synthetic construct
VNAARNG

SEQ ID NO: 42570 - protein, 7 aa, synthetic construct
KQSMGNA

SEQ ID NO: 42571 - protein, 7 aa, synthetic construct
NSYQKID

SEQ ID NO: 42572 - protein, 7 aa, synthetic construct
GLHMGPH

SEQ ID NO: 42573 - protein, 7 aa, synthetic construct
HHKGTQD

SEQ ID NO: 42574 - protein, 7 aa, synthetic construct
THNSPAV

SEQ ID NO: 42575 - protein, 7 aa, synthetic construct
PSPQTPG

SEQ ID NO: 42576 - protein, 7 aa, synthetic construct
MRGPDFA

SEQ ID NO: 42577 - protein, 7 aa, synthetic construct
RQNGTNS

SEQ ID NO: 42578 - protein, 7 aa, synthetic construct
WNVTDRK

SEQ ID NO: 42579 - protein, 7 aa, synthetic construct
PGPTQAG

SEQ ID NO: 42580 - protein, 7 aa, synthetic construct
TPRSQQS

SEQ ID NO: 42581 - protein, 7 aa, synthetic construct
RNSMGSG

SEQ ID NO: 42582 - protein, 7 aa, synthetic construct
SQSKGSG

SEQ ID NO: 42583 - protein, 7 aa, synthetic construct
GNAARVG

SEQ ID NO: 42584 - protein, 7 aa, synthetic construct
THHNSRA

SEQ ID NO: 42585 - protein, 7 aa, synthetic construct
MKQGVQG

SEQ ID NO: 42586 - protein, 7 aa, synthetic construct
IKVAGHQ

SEQ ID NO: 42587 - protein, 7 aa, synthetic construct
KISHGGA

SEQ ID NO: 42588 - protein, 7 aa, synthetic construct
LSGRSMQ

SEQ ID NO: 42589 - protein, 7 aa, synthetic construct
RMMQSPP

SEQ ID NO: 42590 - protein, 7 aa, synthetic construct
RFDRNQL

SEQ ID NO: 42591 - protein, 7 aa, synthetic construct
NTSQSRV

SEQ ID NO: 42592 - protein, 7 aa, synthetic construct
DKSKAVP

SEQ ID NO: 42593 - protein, 7 aa, synthetic construct
SKQPSKD

SEQ ID NO: 42594 - protein, 7 aa, synthetic construct
TRPVTTS

SEQ ID NO: 42595 - protein, 7 aa, synthetic construct
QIPAKQS

SEQ ID NO: 42596 - protein, 7 aa, synthetic construct
GKDMRTA

SEQ ID NO: 42597 - protein, 7 aa, synthetic construct
TKQTIKA

SEQ ID NO: 42598 - protein, 7 aa, synthetic construct
INGSGKG

SEQ ID NO: 42599 - protein, 7 aa, synthetic construct
RNMSSQA

SEQ ID NO: 42600 - protein, 7 aa, synthetic construct
MAPRHPS

SEQ ID NO: 42601 - protein, 7 aa, synthetic construct
VTTNAKG

SEQ ID NO: 42602 - protein, 7 aa, synthetic construct
KGSAQMS

SEQ ID NO: 42603 - protein, 7 aa, synthetic construct
GARAQTA

SEQ ID NO: 42604 - protein, 7 aa, synthetic construct
HGRNGAG

SEQ ID NO: 42605 - protein, 7 aa, synthetic construct
NKAFQGS

SEQ ID NO: 42606 - protein, 7 aa, synthetic construct
YNKGVTP

SEQ ID NO: 42607 - protein, 7 aa, synthetic construct
INAGSKP

SEQ ID NO: 42608 - protein, 7 aa, synthetic construct
GQKSSGG

SEQ ID NO: 42609 - protein, 7 aa, synthetic construct
LGNAHMH

SEQ ID NO: 42610 - protein, 7 aa, synthetic construct
MKSYQGE

SEQ ID NO: 42611 - protein, 7 aa, synthetic construct
QKGHTSP

SEQ ID NO: 42612 - protein, 7 aa, synthetic construct
TPVTARP

SEQ ID NO: 42613 - protein, 7 aa, synthetic construct
QRPNMSQ

SEQ ID NO: 42614 - protein, 7 aa, synthetic construct
QSKSNQS

SEQ ID NO: 42615 - protein, 7 aa, synthetic construct
QASVTHS

SEQ ID NO: 42616 - protein, 7 aa, synthetic construct
TNRGSNP

SEQ ID NO: 42617 - protein, 7 aa, synthetic construct
DTQIPGR

SEQ ID NO: 42618 - protein, 7 aa, synthetic construct
NPRQQGL

SEQ ID NO: 42619 - protein, 7 aa, synthetic construct
VMKVTQG

SEQ ID NO: 42620 - protein, 7 aa, synthetic construct
YNKTKDS

SEQ ID NO: 42621 - protein, 7 aa, synthetic construct
FSHRNET

SEQ ID NO: 42622 - protein, 7 aa, synthetic construct
SSSSGGN

SEQ ID NO: 42623 - protein, 7 aa, synthetic construct
STKGQNP

SEQ ID NO: 42624 - protein, 7 aa, synthetic construct
YKTSMGG

SEQ ID NO: 42625 - protein, 7 aa, synthetic construct
RQNTQNA

SEQ ID NO: 42626 - protein, 7 aa, synthetic construct
SKQGSGS

SEQ ID NO: 42627 - protein, 7 aa, synthetic construct
REGTHQP

SEQ ID NO: 42628 - protein, 7 aa, synthetic construct
KYATNQG

SEQ ID NO: 42629 - protein, 7 aa, synthetic construct
IKALGSS

SEQ ID NO: 42630 - protein, 7 aa, synthetic construct
DVRRSDP

SEQ ID NO: 42631 - protein, 7 aa, synthetic construct
NSGNRMA

SEQ ID NO: 42632 - protein, 7 aa, synthetic construct
RQNVSTG

SEQ ID NO: 42633 - protein, 7 aa, synthetic construct
LEGNHRS

SEQ ID NO: 42634 - protein, 7 aa, synthetic construct
GGRTLNA

SEQ ID NO: 42635 - protein, 7 aa, synthetic construct
TMGPDKR

SEQ ID NO: 42636 - protein, 7 aa, synthetic construct
KSQNGGS

SEQ ID NO: 42637 - protein, 7 aa, synthetic construct
KDKPATA

SEQ ID NO: 42638 - protein, 7 aa, synthetic construct
HLGQMNP

SEQ ID NO: 42639 - protein, 7 aa, synthetic construct
TKVAIRE

SEQ ID NO: 42640 - protein, 7 aa, synthetic construct
VHSQMKG

SEQ ID NO: 42641 - protein, 7 aa, synthetic construct
RQGGTSA

SEQ ID NO: 42642 - protein, 7 aa, synthetic construct
NQTKSST

SEQ ID NO: 42643 - protein, 7 aa, synthetic construct
QRYPAEA

SEQ ID NO: 42644 - protein, 7 aa, synthetic construct
QRTAQSA

SEQ ID NO: 42645 - protein, 7 aa, synthetic construct
QNGKYIS

SEQ ID NO: 42646 - protein, 7 aa, synthetic construct
RADRMNG

SEQ ID NO: 42647 - protein, 7 aa, synthetic construct
ITGRTNG

SEQ ID NO: 42648 - protein, 7 aa, synthetic construct
WAPSKGD

SEQ ID NO: 42649 - protein, 7 aa, synthetic construct
SSQKSMG

SEQ ID NO: 42650 - protein, 7 aa, synthetic construct
QWINGES

SEQ ID NO: 42651 - protein, 7 aa, synthetic construct
PKTQAVA

SEQ ID NO: 42652 - protein, 7 aa, synthetic construct
INKSGSN

SEQ ID NO: 42653 - protein, 7 aa, synthetic construct
KLKLHEA

SEQ ID NO: 42654 - protein, 7 aa, synthetic construct
AARHQGD

SEQ ID NO: 42655 - protein, 7 aa, synthetic construct
TPSNREQ

SEQ ID NO: 42656 - protein, 7 aa, synthetic construct
TGYSVNP

SEQ ID NO: 42657 - protein, 7 aa, synthetic construct
SIGRSTP

SEQ ID NO: 42658 - protein, 7 aa, synthetic construct
QGKNQVG

SEQ ID NO: 42659 - protein, 7 aa, synthetic construct
GLQRNQP

SEQ ID NO: 42660 - protein, 7 aa, synthetic construct
AFNTTHD

SEQ ID NO: 42661 - protein, 7 aa, synthetic construct
ISGMNRI

SEQ ID NO: 42662 - protein, 7 aa, synthetic construct
MYTGRTE

SEQ ID NO: 42663 - protein, 7 aa, synthetic construct
NLQHHVP

SEQ ID NO: 42664 - protein, 7 aa, synthetic construct
TKNAARE

SEQ ID NO: 42665 - protein, 7 aa, synthetic construct
SPSVRTF

SEQ ID NO: 42666 - protein, 7 aa, synthetic construct
QGGKMVG

SEQ ID NO: 42667 - protein, 7 aa, synthetic construct
KNTNSSM

SEQ ID NO: 42668 - protein, 7 aa, synthetic construct
ARQNQAS

SEQ ID NO: 42669 - protein, 7 aa, synthetic construct
NASHPHI

SEQ ID NO: 42670 - protein, 7 aa, synthetic construct
KQNTPIG

SEQ ID NO: 42671 - protein, 7 aa, synthetic construct
NKSVGNA

SEQ ID NO: 42672 - protein, 7 aa, synthetic construct
LSKGAQS

SEQ ID NO: 42673 - protein, 7 aa, synthetic construct
RYSDNKD

SEQ ID NO: 42674 - protein, 7 aa, synthetic construct
AVFKRPE

SEQ ID NO: 42675 - protein, 7 aa, synthetic construct
VKTTSTG

SEQ ID NO: 42676 - protein, 7 aa, synthetic construct
KASSHDI

SEQ ID NO: 42677 - protein, 7 aa, synthetic construct
GVQTPKG

SEQ ID NO: 42678 - protein, 7 aa, synthetic construct
TKGAQSG

SEQ ID NO: 42679 - protein, 7 aa, synthetic construct
LSRSGRD

SEQ ID NO: 42680 - protein, 7 aa, synthetic construct
NSPKAQG

SEQ ID NO: 42681 - protein, 7 aa, synthetic construct
YVDKNRG

SEQ ID NO: 42682 - protein, 7 aa, synthetic construct
SKANTMV

SEQ ID NO: 42683 - protein, 7 aa, synthetic construct
QGAPRND

SEQ ID NO: 42684 - protein, 7 aa, synthetic construct
KPGSSMS

SEQ ID NO: 42685 - protein, 7 aa, synthetic construct
GHTTVAG

SEQ ID NO: 42686 - protein, 7 aa, synthetic construct
MGKPLSG

SEQ ID NO: 42687 - protein, 7 aa, synthetic construct
AKHATVG

SEQ ID NO: 42688 - protein, 7 aa, synthetic construct
FKSGNST

SEQ ID NO: 42689 - protein, 7 aa, synthetic construct
HISTGAG

SEQ ID NO: 42690 - protein, 7 aa, synthetic construct
MAKPSNG

SEQ ID NO: 42691 - protein, 7 aa, synthetic construct
PRPNVAG

SEQ ID NO: 42692 - protein, 7 aa, synthetic construct
TKQTYTQ

SEQ ID NO: 42693 - protein, 7 aa, synthetic construct
MGIIGAP

SEQ ID NO: 42694 - protein, 7 aa, synthetic construct
QNGTRNG

SEQ ID NO: 42695 - protein, 7 aa, synthetic construct
RTSNSTP

SEQ ID NO: 42696 - protein, 7 aa, synthetic construct
SKSSTDR

SEQ ID NO: 42697 - protein, 7 aa, synthetic construct
FNGTRMV

SEQ ID NO: 42698 - protein, 7 aa, synthetic construct
KDQNKQY

SEQ ID NO: 42699 - protein, 7 aa, synthetic construct
VNGKGSA

SEQ ID NO: 42700 - protein, 7 aa, synthetic construct
RPAGDKL

SEQ ID NO: 42701 - protein, 7 aa, synthetic construct
RVSGTSG

SEQ ID NO: 42702 - protein, 7 aa, synthetic construct
KNSGMKE

SEQ ID NO: 42703 - protein, 7 aa, synthetic construct
MSVTRSE

SEQ ID NO: 42704 - protein, 7 aa, synthetic construct
WGHLHTA

SEQ ID NO: 42705 - protein, 7 aa, synthetic construct
QKQWESH

SEQ ID NO: 42706 - protein, 7 aa, synthetic construct
STYGREA

SEQ ID NO: 42707 - protein, 7 aa, synthetic construct
YQKNTQS

SEQ ID NO: 42708 - protein, 7 aa, synthetic construct
SVGMRVD

SEQ ID NO: 42709 - protein, 7 aa, synthetic construct
PRPGNGM

SEQ ID NO: 42710 - protein, 7 aa, synthetic construct
IRPKMFE

SEQ ID NO: 42711 - protein, 7 aa, synthetic construct
MPRASMD

SEQ ID NO: 42712 - protein, 7 aa, synthetic construct
GKPYGGA

SEQ ID NO: 42713 - protein, 7 aa, synthetic construct
LTRTMTD

SEQ ID NO: 42714 - protein, 7 aa, synthetic construct
QKGAGAG

SEQ ID NO: 42715 - protein, 7 aa, synthetic construct
QMGVSKN

SEQ ID NO: 42716 - protein, 7 aa, synthetic construct
YGPLNSK

SEQ ID NO: 42717 - protein, 7 aa, synthetic construct
LKGSYNI

SEQ ID NO: 42718 - protein, 7 aa, synthetic construct
TKVMGKE

SEQ ID NO: 42719 - protein, 7 aa, synthetic construct
NRQAMGG

SEQ ID NO: 42720 - protein, 7 aa, synthetic construct
GRQNGNG

SEQ ID NO: 42721 - protein, 7 aa, synthetic construct
GEKVRSD

SEQ ID NO: 42722 - protein, 7 aa, synthetic construct
SQNNKQA

SEQ ID NO: 42723 - protein, 7 aa, synthetic construct
NVHKPTG

SEQ ID NO: 42724 - protein, 7 aa, synthetic construct
MKNGSSN

SEQ ID NO: 42725 - protein, 7 aa, synthetic construct
TKQGSGY

SEQ ID NO: 42726 - protein, 7 aa, synthetic construct
NQRGTQI

SEQ ID NO: 42727 - protein, 7 aa, synthetic construct
TRQSGPP

SEQ ID NO: 42728 - protein, 7 aa, synthetic construct
YREHNQK

SEQ ID NO: 42729 - protein, 7 aa, synthetic construct
HLTYVKG

SEQ ID NO: 42730 - protein, 7 aa, synthetic construct
ISRGLEK

SEQ ID NO: 42731 - protein, 7 aa, synthetic construct
VTKAAGA

SEQ ID NO: 42732 - protein, 7 aa, synthetic construct
FNNRLNG

SEQ ID NO: 42733 - protein, 7 aa, synthetic construct
RRDTLAV

SEQ ID NO: 42734 - protein, 7 aa, synthetic construct
YQKGLLG

SEQ ID NO: 42735 - protein, 7 aa, synthetic construct
ITNKFGV

SEQ ID NO: 42736 - protein, 7 aa, synthetic construct
NNIHHVA

SEQ ID NO: 42737 - protein, 7 aa, synthetic construct
TNKGSQM

SEQ ID NO: 42738 - protein, 7 aa, synthetic construct
LSRQQGT

SEQ ID NO: 42739 - protein, 7 aa, synthetic construct
GQQQQIA

SEQ ID NO: 42740 - protein, 7 aa, synthetic construct
KDKANIG

SEQ ID NO: 42741 - protein, 7 aa, synthetic construct
FKPIQAA

SEQ ID NO: 42742 - protein, 7 aa, synthetic construct
VQSHNRM

SEQ ID NO: 42743 - protein, 7 aa, synthetic construct
MRNNNTG

SEQ ID NO: 42744 - protein, 7 aa, synthetic construct
KSKPAME

SEQ ID NO: 42745 - protein, 7 aa, synthetic construct
AVMHNQI

SEQ ID NO: 42746 - protein, 7 aa, synthetic construct
NSVKAGG

SEQ ID NO: 42747 - protein, 7 aa, synthetic construct
TNGMYPV

SEQ ID NO: 42748 - protein, 7 aa, synthetic construct
NSHRNAP

SEQ ID NO: 42749 - protein, 7 aa, synthetic construct
KNTMGGG

SEQ ID NO: 42750 - protein, 7 aa, synthetic construct
MKFQSPT

SEQ ID NO: 42751 - protein, 7 aa, synthetic construct
KSNITMV

SEQ ID NO: 42752 - protein, 7 aa, synthetic construct
REYKNAE

SEQ ID NO: 42753 - protein, 7 aa, synthetic construct
NTTSKTP

SEQ ID NO: 42754 - protein, 7 aa, synthetic construct
SKPTGAS

SEQ ID NO: 42755 - protein, 7 aa, synthetic construct
PKPNATA

SEQ ID NO: 42756 - protein, 7 aa, synthetic construct
RSQGGSG

SEQ ID NO: 42757 - protein, 7 aa, synthetic construct
VPNQQAR

SEQ ID NO: 42758 - protein, 7 aa, synthetic construct
RPSTREY

SEQ ID NO: 42759 - protein, 7 aa, synthetic construct
KASSNFG

SEQ ID NO: 42760 - protein, 7 aa, synthetic construct
PGIVGSG

SEQ ID NO: 42761 - protein, 7 aa, synthetic construct
QNAKQTA

SEQ ID NO: 42762 - protein, 7 aa, synthetic construct
QKGSARE

SEQ ID NO: 42763 - protein, 7 aa, synthetic construct
GVPIRIS

SEQ ID NO: 42764 - protein, 7 aa, synthetic construct
PKSSPVS

SEQ ID NO: 42765 - protein, 7 aa, synthetic construct
KTNQMVG

SEQ ID NO: 42766 - protein, 7 aa, synthetic construct
ISQTWKG

SEQ ID NO: 42767 - protein, 7 aa, synthetic construct
GKNSTAM

SEQ ID NO: 42768 - protein, 7 aa, synthetic construct
DHPRFNG

SEQ ID NO: 42769 - protein, 7 aa, synthetic construct
KNGTLTS

SEQ ID NO: 42770 - protein, 7 aa, synthetic construct
PTKQMGA

SEQ ID NO: 42771 - protein, 7 aa, synthetic construct
KVQTGNA

SEQ ID NO: 42772 - protein, 7 aa, synthetic construct
LKMQNNF

SEQ ID NO: 42773 - protein, 7 aa, synthetic construct
GHGIGMK

SEQ ID NO: 42774 - protein, 7 aa, synthetic construct
IIAHGHK

SEQ ID NO: 42775 - protein, 7 aa, synthetic construct
FKTYDAR

SEQ ID NO: 42776 - protein, 7 aa, synthetic construct
GGIKVQS

SEQ ID NO: 42777 - protein, 7 aa, synthetic construct
AKGNTAG

SEQ ID NO: 42778 - protein, 7 aa, synthetic construct
LPSRGDS

SEQ ID NO: 42779 - protein, 7 aa, synthetic construct
GPYGREG

SEQ ID NO: 42780 - protein, 7 aa, synthetic construct
YHSNVNG

SEQ ID NO: 42781 - protein, 7 aa, synthetic construct
RQAGSAM

SEQ ID NO: 42782 - protein, 7 aa, synthetic construct
DKNYGNA

SEQ ID NO: 42783 - protein, 7 aa, synthetic construct
VGTARVG

SEQ ID NO: 42784 - protein, 7 aa, synthetic construct
IRAMDHR

SEQ ID NO: 42785 - protein, 7 aa, synthetic construct
LQRFGNE

SEQ ID NO: 42786 - protein, 7 aa, synthetic construct
RGSTTAA

SEQ ID NO: 42787 - protein, 7 aa, synthetic construct
TRNYGSM

SEQ ID NO: 42788 - protein, 7 aa, synthetic construct
MKTQMSP

SEQ ID NO: 42789 - protein, 7 aa, synthetic construct
KHGNQYA

SEQ ID NO: 42790 - protein, 7 aa, synthetic construct
TTNRGVG

SEQ ID NO: 42791 - protein, 7 aa, synthetic construct
KMAPSKD

SEQ ID NO: 42792 - protein, 7 aa, synthetic construct
SWKGMGP

SEQ ID NO: 42793 - protein, 7 aa, synthetic construct
KNGSIVT

SEQ ID NO: 42794 - protein, 7 aa, synthetic construct
RPSASTN

SEQ ID NO: 42795 - protein, 7 aa, synthetic construct
GKSSSTI

SEQ ID NO: 42796 - protein, 7 aa, synthetic construct
NKNSPIA

SEQ ID NO: 42797 - protein, 7 aa, synthetic construct
RTTNGTG

SEQ ID NO: 42798 - protein, 7 aa, synthetic construct
QRQHYAS

SEQ ID NO: 42799 - protein, 7 aa, synthetic construct
MVDFVKE

SEQ ID NO: 42800 - protein, 7 aa, synthetic construct
RNMSTQP

SEQ ID NO: 42801 - protein, 7 aa, synthetic construct
RPAQNNG

SEQ ID NO: 42802 - protein, 7 aa, synthetic construct
RVQQSGT

SEQ ID NO: 42803 - protein, 7 aa, synthetic construct
DQKKPMF

SEQ ID NO: 42804 - protein, 7 aa, synthetic construct
PGTHMRD

SEQ ID NO: 42805 - protein, 7 aa, synthetic construct
QQKSMVG

SEQ ID NO: 42806 - protein, 7 aa, synthetic construct
RGDKQGM

SEQ ID NO: 42807 - protein, 7 aa, synthetic construct
DKMKGPA

SEQ ID NO: 42808 - protein, 7 aa, synthetic construct
QIGKREG

SEQ ID NO: 42809 - protein, 7 aa, synthetic construct
AKSTGGG

SEQ ID NO: 42810 - protein, 7 aa, synthetic construct
QSDHGRG

SEQ ID NO: 42811 - protein, 7 aa, synthetic construct
QSQRNTV

SEQ ID NO: 42812 - protein, 7 aa, synthetic construct
QQSNKGF

SEQ ID NO: 42813 - protein, 7 aa, synthetic construct
QLPIQNR

SEQ ID NO: 42814 - protein, 7 aa, synthetic construct
STNKVSV

SEQ ID NO: 42815 - protein, 7 aa, synthetic construct
KFERQHS

SEQ ID NO: 42816 - protein, 7 aa, synthetic construct
PRSNTTF

SEQ ID NO: 42817 - protein, 7 aa, synthetic construct
QPAPSTS

SEQ ID NO: 42818 - protein, 7 aa, synthetic construct
RATHQLG

SEQ ID NO: 42819 - protein, 7 aa, synthetic construct
NKDYHTG

SEQ ID NO: 42820 - protein, 7 aa, synthetic construct
GARGPSI

SEQ ID NO: 42821 - protein, 7 aa, synthetic construct
NSKHDHA

SEQ ID NO: 42822 - protein, 7 aa, synthetic construct
DSNFRQA

SEQ ID NO: 42823 - protein, 7 aa, synthetic construct
NSQKTTG

SEQ ID NO: 42824 - protein, 7 aa, synthetic construct
KYHSVND

SEQ ID NO: 42825 - protein, 7 aa, synthetic construct
TPNSKLD

SEQ ID NO: 42826 - protein, 7 aa, synthetic construct
QSVVKFA

SEQ ID NO: 42827 - protein, 7 aa, synthetic construct
NKQNSKD

SEQ ID NO: 42828 - protein, 7 aa, synthetic construct
KPNAAYG

SEQ ID NO: 42829 - protein, 7 aa, synthetic construct
THVTLKA

SEQ ID NO: 42830 - protein, 7 aa, synthetic construct
NARSGGA

SEQ ID NO: 42831 - protein, 7 aa, synthetic construct
WMPHKVN

SEQ ID NO: 42832 - protein, 7 aa, synthetic construct
NARGSAE

SEQ ID NO: 42833 - protein, 7 aa, synthetic construct
GNKTSNG

SEQ ID NO: 42834 - protein, 7 aa, synthetic construct
PKGGAET

SEQ ID NO: 42835 - protein, 7 aa, synthetic construct
HMVGPKP

SEQ ID NO: 42836 - protein, 7 aa, synthetic construct
RPPGNIG

SEQ ID NO: 42837 - protein, 7 aa, synthetic construct
KVPSNTG

SEQ ID NO: 42838 - protein, 7 aa, synthetic construct
KFQNFGP

SEQ ID NO: 42839 - protein, 7 aa, synthetic construct
FHERMAG

SEQ ID NO: 42840 - protein, 7 aa, synthetic construct
TKMGAHV

SEQ ID NO: 42841 - protein, 7 aa, synthetic construct
WVPLGRE

SEQ ID NO: 42842 - protein, 7 aa, synthetic construct
QNAARAS

SEQ ID NO: 42843 - protein, 7 aa, synthetic construct
TGPIRTP

SEQ ID NO: 42844 - protein, 7 aa, synthetic construct
GQFKTAG

SEQ ID NO: 42845 - protein, 7 aa, synthetic construct
IRPEHMS

SEQ ID NO: 42846 - protein, 7 aa, synthetic construct
DTHKVAV

SEQ ID NO: 42847 - protein, 7 aa, synthetic construct
RHPIPVN

SEQ ID NO: 42848 - protein, 7 aa, synthetic construct
MPKSNSG

SEQ ID NO: 42849 - protein, 7 aa, synthetic construct
TSQNHNV

SEQ ID NO: 42850 - protein, 7 aa, synthetic construct
NPARDTM

SEQ ID NO: 42851 - protein, 7 aa, synthetic construct
QQSPKSI

SEQ ID NO: 42852 - protein, 7 aa, synthetic construct
QWKPAGD

SEQ ID NO: 42853 - protein, 7 aa, synthetic construct
MGEKAEI

SEQ ID NO: 42854 - protein, 7 aa, synthetic construct
AQSTRTD

SEQ ID NO: 42855 - protein, 7 aa, synthetic construct
DLLAKHG

SEQ ID NO: 42856 - protein, 7 aa, synthetic construct
RQINSEA

SEQ ID NO: 42857 - protein, 7 aa, synthetic construct
HHGNLMG

SEQ ID NO: 42858 - protein, 7 aa, synthetic construct
KVALEVR

SEQ ID NO: 42859 - protein, 7 aa, synthetic construct
QRGSSVP

SEQ ID NO: 42860 - protein, 7 aa, synthetic construct
QARFANE

SEQ ID NO: 42861 - protein, 7 aa, synthetic construct
TRSMNQG

SEQ ID NO: 42862 - protein, 7 aa, synthetic construct
WAGHGPV

SEQ ID NO: 42863 - protein, 7 aa, synthetic construct
GKPQKFE

SEQ ID NO: 42864 - protein, 7 aa, synthetic construct
QKGHIMP

SEQ ID NO: 42865 - protein, 7 aa, synthetic construct
APHSHRD

SEQ ID NO: 42866 - protein, 7 aa, synthetic construct
SQRGTVG

SEQ ID NO: 42867 - protein, 7 aa, synthetic construct
QGGPNRT

SEQ ID NO: 42868 - protein, 7 aa, synthetic construct
RAQTSVG

SEQ ID NO: 42869 - protein, 7 aa, synthetic construct
KSTQNGL

SEQ ID NO: 42870 - protein, 7 aa, synthetic construct
NGILERK

SEQ ID NO: 42871 - protein, 7 aa, synthetic construct
VKSASGA

SEQ ID NO: 42872 - protein, 7 aa, synthetic construct
PKQMGQG

SEQ ID NO: 42873 - protein, 7 aa, synthetic construct
NGKPSQA

SEQ ID NO: 42874 - protein, 7 aa, synthetic construct
KGTQSQV

SEQ ID NO: 42875 - protein, 7 aa, synthetic construct
DKLRGWD

SEQ ID NO: 42876 - protein, 7 aa, synthetic construct
GVGKYLG

SEQ ID NO: 42877 - protein, 7 aa, synthetic construct
MRGNTQS

SEQ ID NO: 42878 - protein, 7 aa, synthetic construct
MRSNQSA

SEQ ID NO: 42879 - protein, 7 aa, synthetic construct
RQGATSP

SEQ ID NO: 42880 - protein, 7 aa, synthetic construct
RTPGTSG

SEQ ID NO: 42881 - protein, 7 aa, synthetic construct
NVNRQQV

SEQ ID NO: 42882 - protein, 7 aa, synthetic construct
QGPKQLA

SEQ ID NO: 42883 - protein, 7 aa, synthetic construct
GKYSNNG

SEQ ID NO: 42884 - protein, 7 aa, synthetic construct
VQQRGIG

SEQ ID NO: 42885 - protein, 7 aa, synthetic construct
NRQNGNS

SEQ ID NO: 42886 - protein, 7 aa, synthetic construct
PKSNVSS

SEQ ID NO: 42887 - protein, 7 aa, synthetic construct
GSKAASS

SEQ ID NO: 42888 - protein, 7 aa, synthetic construct
DFKRMNT

SEQ ID NO: 42889 - protein, 7 aa, synthetic construct
TFPSQNP

SEQ ID NO: 42890 - protein, 7 aa, synthetic construct
HKGGQAI

SEQ ID NO: 42891 - protein, 7 aa, synthetic construct
GKPQFGG

SEQ ID NO: 42892 - protein, 7 aa, synthetic construct
IQSNMPG

SEQ ID NO: 42893 - protein, 7 aa, synthetic construct
LIPTYKQ

SEQ ID NO: 42894 - protein, 7 aa, synthetic construct
LASRGMA

SEQ ID NO: 42895 - protein, 7 aa, synthetic construct
YGGVGGP

SEQ ID NO: 42896 - protein, 7 aa, synthetic construct
MGEYRSP

SEQ ID NO: 42897 - protein, 7 aa, synthetic construct
VSAGRVG

SEQ ID NO: 42898 - protein, 7 aa, synthetic construct
GKNNGTM

SEQ ID NO: 42899 - protein, 7 aa, synthetic construct
PRANATN

SEQ ID NO: 42900 - protein, 7 aa, synthetic construct
ANKTTTG

SEQ ID NO: 42901 - protein, 7 aa, synthetic construct
ADGQKIW

SEQ ID NO: 42902 - protein, 7 aa, synthetic construct
WNVHVGA

SEQ ID NO: 42903 - protein, 7 aa, synthetic construct
SLQRNMH

SEQ ID NO: 42904 - protein, 7 aa, synthetic construct
SRGTTNP

SEQ ID NO: 42905 - protein, 7 aa, synthetic construct
FKSQNNS

SEQ ID NO: 42906 - protein, 7 aa, synthetic construct
VQNGNRP

SEQ ID NO: 42907 - protein, 7 aa, synthetic construct
NTHHSTS

SEQ ID NO: 42908 - protein, 7 aa, synthetic construct
NKTSTQG

SEQ ID NO: 42909 - protein, 7 aa, synthetic construct
MGYQNAG

SEQ ID NO: 42910 - protein, 7 aa, synthetic construct
SILRTTN

SEQ ID NO: 42911 - protein, 7 aa, synthetic construct
NIYNATM

SEQ ID NO: 42912 - protein, 7 aa, synthetic construct
RMDKTNV

SEQ ID NO: 42913 - protein, 7 aa, synthetic construct
KPSSAAV

SEQ ID NO: 42914 - protein, 7 aa, synthetic construct
MSPSVKS

SEQ ID NO: 42915 - protein, 7 aa, synthetic construct
SQTSIRP

SEQ ID NO: 42916 - protein, 7 aa, synthetic construct
MSPNQTP

SEQ ID NO: 42917 - protein, 7 aa, synthetic construct
QRPMSAP

SEQ ID NO: 42918 - protein, 7 aa, synthetic construct
TANMQKV

SEQ ID NO: 42919 - protein, 7 aa, synthetic construct
NMRIQAN

SEQ ID NO: 42920 - protein, 7 aa, synthetic construct
KQSMQSG

SEQ ID NO: 42921 - protein, 7 aa, synthetic construct
VNQGMRG

SEQ ID NO: 42922 - protein, 7 aa, synthetic construct
WGARVVN

SEQ ID NO: 42923 - protein, 7 aa, synthetic construct
WTHTKNN

SEQ ID NO: 42924 - protein, 7 aa, synthetic construct
GANVKAV

SEQ ID NO: 42925 - protein, 7 aa, synthetic construct
QQRSIHD

SEQ ID NO: 42926 - protein, 7 aa, synthetic construct
PKNGNAP

SEQ ID NO: 42927 - protein, 7 aa, synthetic construct
RPGVKGP

SEQ ID NO: 42928 - protein, 7 aa, synthetic construct
NAPHSNL

SEQ ID NO: 42929 - protein, 7 aa, synthetic construct
SVIARSG

SEQ ID NO: 42930 - protein, 7 aa, synthetic construct
AHPIKGG

SEQ ID NO: 42931 - protein, 7 aa, synthetic construct
QRDKTQA

SEQ ID NO: 42932 - protein, 7 aa, synthetic construct
TSKNNMG

SEQ ID NO: 42933 - protein, 7 aa, synthetic construct
EGNVTRP

SEQ ID NO: 42934 - protein, 7 aa, synthetic construct
PKPHAVS

SEQ ID NO: 42935 - protein, 7 aa, synthetic construct
QKVQLAG

SEQ ID NO: 42936 - protein, 7 aa, synthetic construct
LTNGYKG

SEQ ID NO: 42937 - protein, 7 aa, synthetic construct
FVKQIDQ

SEQ ID NO: 42938 - protein, 7 aa, synthetic construct
QHGHPAT

SEQ ID NO: 42939 - protein, 7 aa, synthetic construct
GKSTMAS

SEQ ID NO: 42940 - protein, 7 aa, synthetic construct
TVKNTVT

SEQ ID NO: 42941 - protein, 7 aa, synthetic construct
TKQSTER

SEQ ID NO: 42942 - protein, 7 aa, synthetic construct
RDTTKQM

SEQ ID NO: 42943 - protein, 7 aa, synthetic construct
HNILAKN

SEQ ID NO: 42944 - protein, 7 aa, synthetic construct
SRSTTMG

SEQ ID NO: 42945 - protein, 7 aa, synthetic construct
YNGIKSS

SEQ ID NO: 42946 - protein, 7 aa, synthetic construct
MTAKSTG

SEQ ID NO: 42947 - protein, 7 aa, synthetic construct
MPRGTTA

SEQ ID NO: 42948 - protein, 7 aa, synthetic construct
NMRATNG

SEQ ID NO: 42949 - protein, 7 aa, synthetic construct
NAQGQKL

SEQ ID NO: 42950 - protein, 7 aa, synthetic construct
QGSYTAA

SEQ ID NO: 42951 - protein, 7 aa, synthetic construct
VFHSGTI

SEQ ID NO: 42952 - protein, 7 aa, synthetic construct
TAPRSQP

SEQ ID NO: 42953 - protein, 7 aa, synthetic construct
NSQVKNG

SEQ ID NO: 42954 - protein, 7 aa, synthetic construct
KVDHQAR

SEQ ID NO: 42955 - protein, 7 aa, synthetic construct
SKTPSQS

SEQ ID NO: 42956 - protein, 7 aa, synthetic construct
FKSASAV

SEQ ID NO: 42957 - protein, 7 aa, synthetic construct
KLNSSTG

SEQ ID NO: 42958 - protein, 7 aa, synthetic construct
GVPKGNY

SEQ ID NO: 42959 - protein, 7 aa, synthetic construct
MGLHGRP

SEQ ID NO: 42960 - protein, 7 aa, synthetic construct
QNLHMKD

SEQ ID NO: 42961 - protein, 7 aa, synthetic construct
RSNAGQG

SEQ ID NO: 42962 - protein, 7 aa, synthetic construct
TKPQGQD

SEQ ID NO: 42963 - protein, 7 aa, synthetic construct
LRGDRSS

SEQ ID NO: 42964 - protein, 7 aa, synthetic construct
RAQKSEG

SEQ ID NO: 42965 - protein, 7 aa, synthetic construct
QDKGKHG

SEQ ID NO: 42966 - protein, 7 aa, synthetic construct
FPSFKEH

SEQ ID NO: 42967 - protein, 7 aa, synthetic construct
FKTSNVS

SEQ ID NO: 42968 - protein, 7 aa, synthetic construct
QNKHLAD

SEQ ID NO: 42969 - protein, 7 aa, synthetic construct
IRSANIA

SEQ ID NO: 42970 - protein, 7 aa, synthetic construct
MKQNMSA

SEQ ID NO: 42971 - protein, 7 aa, synthetic construct
HKMQADP

SEQ ID NO: 42972 - protein, 7 aa, synthetic construct
QGHNHVS

SEQ ID NO: 42973 - protein, 7 aa, synthetic construct
GVPKYDT

SEQ ID NO: 42974 - protein, 7 aa, synthetic construct
KFNPNAA

SEQ ID NO: 42975 - protein, 7 aa, synthetic construct
RQNNTSA

SEQ ID NO: 42976 - protein, 7 aa, synthetic construct
TMPGSRA

SEQ ID NO: 42977 - protein, 7 aa, synthetic construct
SSAARTP

SEQ ID NO: 42978 - protein, 7 aa, synthetic construct
LFKSIEG

SEQ ID NO: 42979 - protein, 7 aa, synthetic construct
NDKFFPG

SEQ ID NO: 42980 - protein, 7 aa, synthetic construct
RKPDDPM

SEQ ID NO: 42981 - protein, 7 aa, synthetic construct
YGRFHLD

SEQ ID NO: 42982 - protein, 7 aa, synthetic construct
NGSKNVA

SEQ ID NO: 42983 - protein, 7 aa, synthetic construct
RNTGDKA

SEQ ID NO: 42984 - protein, 7 aa, synthetic construct
IVQTTQG

SEQ ID NO: 42985 - protein, 7 aa, synthetic construct
VGYQNQM

SEQ ID NO: 42986 - protein, 7 aa, synthetic construct
KTQTVSA

SEQ ID NO: 42987 - protein, 7 aa, synthetic construct
GQGTKSG

SEQ ID NO: 42988 - protein, 7 aa, synthetic construct
QSGRHVP

SEQ ID NO: 42989 - protein, 7 aa, synthetic construct
DNVMKMK

SEQ ID NO: 42990 - protein, 7 aa, synthetic construct
QTTKGTA

SEQ ID NO: 42991 - protein, 7 aa, synthetic construct
TIKSAKD

SEQ ID NO: 42992 - protein, 7 aa, synthetic construct
APSRSND

SEQ ID NO: 42993 - protein, 7 aa, synthetic construct
TVSGRAP

SEQ ID NO: 42994 - protein, 7 aa, synthetic construct
RETVRVP

SEQ ID NO: 42995 - protein, 7 aa, synthetic construct
VKQANHI

SEQ ID NO: 42996 - protein, 7 aa, synthetic construct
KTQVHNI

SEQ ID NO: 42997 - protein, 7 aa, synthetic construct
MKDMRNH

SEQ ID NO: 42998 - protein, 7 aa, synthetic construct
SKDGRNG

SEQ ID NO: 42999 - protein, 7 aa, synthetic construct
QWKGNGP

SEQ ID NO: 43000 - protein, 7 aa, synthetic construct
NMRLNRD

SEQ ID NO: 43001 - protein, 7 aa, synthetic construct
KGHNGVG

SEQ ID NO: 43002 - protein, 7 aa, synthetic construct
MKSSTPA

SEQ ID NO: 43003 - protein, 7 aa, synthetic construct
MGGKAWE

SEQ ID NO: 43004 - protein, 7 aa, synthetic construct
KGNNNAG

SEQ ID NO: 43005 - protein, 7 aa, synthetic construct
KPHISDA

SEQ ID NO: 43006 - protein, 7 aa, synthetic construct
TKVQDGS

SEQ ID NO: 43007 - protein, 7 aa, synthetic construct
VHGAKVG

SEQ ID NO: 43008 - protein, 7 aa, synthetic construct
QHVRPLG

SEQ ID NO: 43009 - protein, 7 aa, synthetic construct
YVMSPTG

SEQ ID NO: 43010 - protein, 7 aa, synthetic construct
FGKGATG

SEQ ID NO: 43011 - protein, 7 aa, synthetic construct
PGIGNRG

SEQ ID NO: 43012 - protein, 7 aa, synthetic construct
KGSSTTP

SEQ ID NO: 43013 - protein, 7 aa, synthetic construct
KSTQWLD

SEQ ID NO: 43014 - protein, 7 aa, synthetic construct
KIAATKD

SEQ ID NO: 43015 - protein, 7 aa, synthetic construct
VPRKHDD

SEQ ID NO: 43016 - protein, 7 aa, synthetic construct
VRNGNVG

SEQ ID NO: 43017 - protein, 7 aa, synthetic construct
AKNASLG

SEQ ID NO: 43018 - protein, 7 aa, synthetic construct
NRTGAMA

SEQ ID NO: 43019 - protein, 7 aa, synthetic construct
SITGKQG

SEQ ID NO: 43020 - protein, 7 aa, synthetic construct
MGGAMIA

SEQ ID NO: 43021 - protein, 7 aa, synthetic construct
FGRINSN

SEQ ID NO: 43022 - protein, 7 aa, synthetic construct
LDKRQFE

SEQ ID NO: 43023 - protein, 7 aa, synthetic construct
SVFAQKQ

SEQ ID NO: 43024 - protein, 7 aa, synthetic construct
QARATES

SEQ ID NO: 43025 - protein, 7 aa, synthetic construct
VNSSRGG

SEQ ID NO: 43026 - protein, 7 aa, synthetic construct
NRANSNI

SEQ ID NO: 43027 - protein, 7 aa, synthetic construct
NSQSRQG

SEQ ID NO: 43028 - protein, 7 aa, synthetic construct
WSMKHDG

SEQ ID NO: 43029 - protein, 7 aa, synthetic construct
KPTAGFA

SEQ ID NO: 43030 - protein, 7 aa, synthetic construct
QVHGTGN

SEQ ID NO: 43031 - protein, 7 aa, synthetic construct
GFAHGPV

SEQ ID NO: 43032 - protein, 7 aa, synthetic construct
TRDGFAQ

SEQ ID NO: 43033 - protein, 7 aa, synthetic construct
KFASTSG

SEQ ID NO: 43034 - protein, 7 aa, synthetic construct
GYSRGVD

SEQ ID NO: 43035 - protein, 7 aa, synthetic construct
SRGVSAA

SEQ ID NO: 43036 - protein, 7 aa, synthetic construct
VGQSNQG

SEQ ID NO: 43037 - protein, 7 aa, synthetic construct
SMGTRAG

SEQ ID NO: 43038 - protein, 7 aa, synthetic construct
TNQSQRP

SEQ ID NO: 43039 - protein, 7 aa, synthetic construct
DHHDNTR

SEQ ID NO: 43040 - protein, 7 aa, synthetic construct
KQSTLSG

SEQ ID NO: 43041 - protein, 7 aa, synthetic construct
RVTELKA

SEQ ID NO: 43042 - protein, 7 aa, synthetic construct
MTPGRSA

SEQ ID NO: 43043 - protein, 7 aa, synthetic construct
NRSNATG

SEQ ID NO: 43044 - protein, 7 aa, synthetic construct
SSRTSVG

SEQ ID NO: 43045 - protein, 7 aa, synthetic construct
TNRGNDT

SEQ ID NO: 43046 - protein, 7 aa, synthetic construct
HYPKGMQ

SEQ ID NO: 43047 - protein, 7 aa, synthetic construct
HLRQPQI

SEQ ID NO: 43048 - protein, 7 aa, synthetic construct
KNQPPSS

SEQ ID NO: 43049 - protein, 7 aa, synthetic construct
YHKVSSA

SEQ ID NO: 43050 - protein, 7 aa, synthetic construct
QRTGSVA

SEQ ID NO: 43051 - protein, 7 aa, synthetic construct
FKGASSV

SEQ ID NO: 43052 - protein, 7 aa, synthetic construct
IGGAKQG

SEQ ID NO: 43053 - protein, 7 aa, synthetic construct
FRPNHAQ

SEQ ID NO: 43054 - protein, 7 aa, synthetic construct
IQGRVVP

SEQ ID NO: 43055 - protein, 7 aa, synthetic construct
NLRGQAA

SEQ ID NO: 43056 - protein, 7 aa, synthetic construct
VKPSGQA

SEQ ID NO: 43057 - protein, 7 aa, synthetic construct
STYTSIG

SEQ ID NO: 43058 - protein, 7 aa, synthetic construct
TRQPMAP

SEQ ID NO: 43059 - protein, 7 aa, synthetic construct
RPNAERN

SEQ ID NO: 43060 - protein, 7 aa, synthetic construct
LVHPSER

SEQ ID NO: 43061 - protein, 7 aa, synthetic construct
IMPANKP

SEQ ID NO: 43062 - protein, 7 aa, synthetic construct
NKNSQQG

SEQ ID NO: 43063 - protein, 7 aa, synthetic construct
IGKVLRE

SEQ ID NO: 43064 - protein, 7 aa, synthetic construct
KRVDDIH

SEQ ID NO: 43065 - protein, 7 aa, synthetic construct
TAKNQFG

SEQ ID NO: 43066 - protein, 7 aa, synthetic construct
MAERAMG

SEQ ID NO: 43067 - protein, 7 aa, synthetic construct
SKNSSGG

SEQ ID NO: 43068 - protein, 7 aa, synthetic construct
KMNANQG

SEQ ID NO: 43069 - protein, 7 aa, synthetic construct
KQAQTNM

SEQ ID NO: 43070 - protein, 7 aa, synthetic construct
PRTSGQI

SEQ ID NO: 43071 - protein, 7 aa, synthetic construct
KGGGYEV

SEQ ID NO: 43072 - protein, 7 aa, synthetic construct
TQHGARD

SEQ ID NO: 43073 - protein, 7 aa, synthetic construct
RPTTVAA

SEQ ID NO: 43074 - protein, 7 aa, synthetic construct
HGLQHTP

SEQ ID NO: 43075 - protein, 7 aa, synthetic construct
KFSNQAA

SEQ ID NO: 43076 - protein, 7 aa, synthetic construct
NPARGQA

SEQ ID NO: 43077 - protein, 7 aa, synthetic construct
LKNAAGN

SEQ ID NO: 43078 - protein, 7 aa, synthetic construct
ARSTASV

SEQ ID NO: 43079 - protein, 7 aa, synthetic construct
FGAKTVG

SEQ ID NO: 43080 - protein, 7 aa, synthetic construct
LPNKTTN

SEQ ID NO: 43081 - protein, 7 aa, synthetic construct
AKTGIGG

SEQ ID NO: 43082 - protein, 7 aa, synthetic construct
QPRGPME

SEQ ID NO: 43083 - protein, 7 aa, synthetic construct
RPQFAAG

SEQ ID NO: 43084 - protein, 7 aa, synthetic construct
NKNYGAP

SEQ ID NO: 43085 - protein, 7 aa, synthetic construct
GTHHAAP

SEQ ID NO: 43086 - protein, 7 aa, synthetic construct
QQSVRAS

SEQ ID NO: 43087 - protein, 7 aa, synthetic construct
RPSGMAG

SEQ ID NO: 43088 - protein, 7 aa, synthetic construct
VTSRSQP

SEQ ID NO: 43089 - protein, 7 aa, synthetic construct
KVANTVS

SEQ ID NO: 43090 - protein, 7 aa, synthetic construct
TLKAPQD

SEQ ID NO: 43091 - protein, 7 aa, synthetic construct
TGNRTVA

SEQ ID NO: 43092 - protein, 7 aa, synthetic construct
MKERVSP

SEQ ID NO: 43093 - protein, 7 aa, synthetic construct
ISPVSNN

SEQ ID NO: 43094 - protein, 7 aa, synthetic construct
PKPNSMG

SEQ ID NO: 43095 - protein, 7 aa, synthetic construct
PTKSTFP

SEQ ID NO: 43096 - protein, 7 aa, synthetic construct
RHMSTPE

SEQ ID NO: 43097 - protein, 7 aa, synthetic construct
LHRLGTE

SEQ ID NO: 43098 - protein, 7 aa, synthetic construct
KDKRPDW

SEQ ID NO: 43099 - protein, 7 aa, synthetic construct
TGMKSNP

SEQ ID NO: 43100 - protein, 7 aa, synthetic construct
SGREHNG

SEQ ID NO: 43101 - protein, 7 aa, synthetic construct
STRSGAM

SEQ ID NO: 43102 - protein, 7 aa, synthetic construct
NLGFDAT

SEQ ID NO: 43103 - protein, 7 aa, synthetic construct
QQEKGVR

SEQ ID NO: 43104 - protein, 7 aa, synthetic construct
RPSSMSP

SEQ ID NO: 43105 - protein, 7 aa, synthetic construct
QGKITPV

SEQ ID NO: 43106 - protein, 7 aa, synthetic construct
QSRVAQA

SEQ ID NO: 43107 - protein, 7 aa, synthetic construct
KRLPDTD

SEQ ID NO: 43108 - protein, 7 aa, synthetic construct
QLGKHDS

SEQ ID NO: 43109 - protein, 7 aa, synthetic construct
GQFTHTT

SEQ ID NO: 43110 - protein, 7 aa, synthetic construct
MGQGMKS

SEQ ID NO: 43111 - protein, 7 aa, synthetic construct
KTVNTTY

SEQ ID NO: 43112 - protein, 7 aa, synthetic construct
RQPNGVS

SEQ ID NO: 43113 - protein, 7 aa, synthetic construct
RGPTQQN

SEQ ID NO: 43114 - protein, 7 aa, synthetic construct
KQSGTYG

SEQ ID NO: 43115 - protein, 7 aa, synthetic construct
KVNPNGG

SEQ ID NO: 43116 - protein, 7 aa, synthetic construct
RPSSTGS

SEQ ID NO: 43117 - protein, 7 aa, synthetic construct
VNGQKSA

SEQ ID NO: 43118 - protein, 7 aa, synthetic construct
STNKVSP

SEQ ID NO: 43119 - protein, 7 aa, synthetic construct
RTKSVDP

SEQ ID NO: 43120 - protein, 7 aa, synthetic construct
LQKSHIL

SEQ ID NO: 43121 - protein, 7 aa, synthetic construct
PNRNSND

SEQ ID NO: 43122 - protein, 7 aa, synthetic construct
KGQQQGH

SEQ ID NO: 43123 - protein, 7 aa, synthetic construct
FKYGPTS

SEQ ID NO: 43124 - protein, 7 aa, synthetic construct
MHVSGTG

SEQ ID NO: 43125 - protein, 7 aa, synthetic construct
NVTGQKA

SEQ ID NO: 43126 - protein, 7 aa, synthetic construct
QVKGAEN

SEQ ID NO: 43127 - protein, 7 aa, synthetic construct
NANTNSN

SEQ ID NO: 43128 - protein, 7 aa, synthetic construct
NKAVTKD

SEQ ID NO: 43129 - protein, 7 aa, synthetic construct
ITSRVQQ

SEQ ID NO: 43130 - protein, 7 aa, synthetic construct
MGARTQP

SEQ ID NO: 43131 - protein, 7 aa, synthetic construct
GNAQFKG

SEQ ID NO: 43132 - protein, 7 aa, synthetic construct
VSPKSNG

SEQ ID NO: 43133 - protein, 7 aa, synthetic construct
ARNANEM

SEQ ID NO: 43134 - protein, 7 aa, synthetic construct
TTGRSAA

SEQ ID NO: 43135 - protein, 7 aa, synthetic construct
TTTGTKG

SEQ ID NO: 43136 - protein, 7 aa, synthetic construct
QRAPMAG

SEQ ID NO: 43137 - protein, 7 aa, synthetic construct
LAKLPTT

SEQ ID NO: 43138 - protein, 7 aa, synthetic construct
SVQKKWE

SEQ ID NO: 43139 - protein, 7 aa, synthetic construct
ATNLRPG

SEQ ID NO: 43140 - protein, 7 aa, synthetic construct
TKGTKFE

SEQ ID NO: 43141 - protein, 7 aa, synthetic construct
HHMKPHG

SEQ ID NO: 43142 - protein, 7 aa, synthetic construct
TVRVTGE

SEQ ID NO: 43143 - protein, 7 aa, synthetic construct
HTRERQG

SEQ ID NO: 43144 - protein, 7 aa, synthetic construct
FQKLGVA

SEQ ID NO: 43145 - protein, 7 aa, synthetic construct
TRTNGAI

SEQ ID NO: 43146 - protein, 7 aa, synthetic construct
KFHDRIP

SEQ ID NO: 43147 - protein, 7 aa, synthetic construct
TGTRLSP

SEQ ID NO: 43148 - protein, 7 aa, synthetic construct
FKQSSMA

SEQ ID NO: 43149 - protein, 7 aa, synthetic construct
SGLKLTG

SEQ ID NO: 43150 - protein, 7 aa, synthetic construct
NPARAQG

SEQ ID NO: 43151 - protein, 7 aa, synthetic construct
SFKNQDK

SEQ ID NO: 43152 - protein, 7 aa, synthetic construct
LFKGTRE

SEQ ID NO: 43153 - protein, 7 aa, synthetic construct
IGTKAGA

SEQ ID NO: 43154 - protein, 7 aa, synthetic construct
AARTVGS

SEQ ID NO: 43155 - protein, 7 aa, synthetic construct
VAKTSVH

SEQ ID NO: 43156 - protein, 7 aa, synthetic construct
NGIRVVS

SEQ ID NO: 43157 - protein, 7 aa, synthetic construct
HFHKQPD

SEQ ID NO: 43158 - protein, 7 aa, synthetic construct
QRPDKTS

SEQ ID NO: 43159 - protein, 7 aa, synthetic construct
STFSKSE

SEQ ID NO: 43160 - protein, 7 aa, synthetic construct
MPKYGDT

SEQ ID NO: 43161 - protein, 7 aa, synthetic construct
SKFYNQG

SEQ ID NO: 43162 - protein, 7 aa, synthetic construct
HFSASVA

SEQ ID NO: 43163 - protein, 7 aa, synthetic construct
SLPRGSQ

SEQ ID NO: 43164 - protein, 7 aa, synthetic construct
RNPAGTS

SEQ ID NO: 43165 - protein, 7 aa, synthetic construct
HSMRAIG

SEQ ID NO: 43166 - protein, 7 aa, synthetic construct
ASSNTGM

SEQ ID NO: 43167 - protein, 7 aa, synthetic construct
TLGRVHG

SEQ ID NO: 43168 - protein, 7 aa, synthetic construct
FGKHTAD

SEQ ID NO: 43169 - protein, 7 aa, synthetic construct
IIRGKFE

SEQ ID NO: 43170 - protein, 7 aa, synthetic construct
QPSPTRS

SEQ ID NO: 43171 - protein, 7 aa, synthetic construct
YHGGKND

SEQ ID NO: 43172 - protein, 7 aa, synthetic construct
KVGNAAA

SEQ ID NO: 43173 - protein, 7 aa, synthetic construct
QGGQVHP

SEQ ID NO: 43174 - protein, 7 aa, synthetic construct
NMPGGVR

SEQ ID NO: 43175 - protein, 7 aa, synthetic construct
LGQMKTV

SEQ ID NO: 43176 - protein, 7 aa, synthetic construct
MKNTGNA

SEQ ID NO: 43177 - protein, 7 aa, synthetic construct
NNAARQP

SEQ ID NO: 43178 - protein, 7 aa, synthetic construct
QKQQVAA

SEQ ID NO: 43179 - protein, 7 aa, synthetic construct
KPVANSG

SEQ ID NO: 43180 - protein, 7 aa, synthetic construct
WGVHGPS

SEQ ID NO: 43181 - protein, 7 aa, synthetic construct
HKPTGDH

SEQ ID NO: 43182 - protein, 7 aa, synthetic construct
FKATAQG

SEQ ID NO: 43183 - protein, 7 aa, synthetic construct
PKSSSTV

SEQ ID NO: 43184 - protein, 7 aa, synthetic construct
ATKGGQG

SEQ ID NO: 43185 - protein, 7 aa, synthetic construct
KSTQNGA

SEQ ID NO: 43186 - protein, 7 aa, synthetic construct
KGTSAGP

SEQ ID NO: 43187 - protein, 7 aa, synthetic construct
RNGSSNG

SEQ ID NO: 43188 - protein, 7 aa, synthetic construct
TKSVANS

SEQ ID NO: 43189 - protein, 7 aa, synthetic construct
IPHKTAL

SEQ ID NO: 43190 - protein, 7 aa, synthetic construct
TQKFQQP

SEQ ID NO: 43191 - protein, 7 aa, synthetic construct
KASDKVW

SEQ ID NO: 43192 - protein, 7 aa, synthetic construct
YGATNKA

SEQ ID NO: 43193 - protein, 7 aa, synthetic construct
VNGKKDG

SEQ ID NO: 43194 - protein, 7 aa, synthetic construct
MGKQTAA

SEQ ID NO: 43195 - protein, 7 aa, synthetic construct
QKTGPGA

SEQ ID NO: 43196 - protein, 7 aa, synthetic construct
IPKGSSP

SEQ ID NO: 43197 - protein, 7 aa, synthetic construct
RPATSGP

SEQ ID NO: 43198 - protein, 7 aa, synthetic construct
TTRRDEM

SEQ ID NO: 43199 - protein, 7 aa, synthetic construct
SRQGNTA

SEQ ID NO: 43200 - protein, 7 aa, synthetic construct
KPSMGVG

SEQ ID NO: 43201 - protein, 7 aa, synthetic construct
TTHKMAI

SEQ ID NO: 43202 - protein, 7 aa, synthetic construct
NQPAKGG

SEQ ID NO: 43203 - protein, 7 aa, synthetic construct
LKSGGTA

SEQ ID NO: 43204 - protein, 7 aa, synthetic construct
NISAHPG

SEQ ID NO: 43205 - protein, 7 aa, synthetic construct
RSTSGMG

SEQ ID NO: 43206 - protein, 7 aa, synthetic construct
GVQGQTQ

SEQ ID NO: 43207 - protein, 7 aa, synthetic construct
WKSEGFG

SEQ ID NO: 43208 - protein, 7 aa, synthetic construct
INPRDQG

SEQ ID NO: 43209 - protein, 7 aa, synthetic construct
MHATAPS

SEQ ID NO: 43210 - protein, 7 aa, synthetic construct
TSNRGSV

SEQ ID NO: 43211 - protein, 7 aa, synthetic construct
NARTGTG

SEQ ID NO: 43212 - protein, 7 aa, synthetic construct
AKYGTEK

SEQ ID NO: 43213 - protein, 7 aa, synthetic construct
KTAGVVG

SEQ ID NO: 43214 - protein, 7 aa, synthetic construct
SRTTTGP

SEQ ID NO: 43215 - protein, 7 aa, synthetic construct
HKMTGNE

SEQ ID NO: 43216 - protein, 7 aa, synthetic construct
TKAVPMA

SEQ ID NO: 43217 - protein, 7 aa, synthetic construct
RVNTNMA

SEQ ID NO: 43218 - protein, 7 aa, synthetic construct
LKGKHEV

SEQ ID NO: 43219 - protein, 7 aa, synthetic construct
FQATKSA

SEQ ID NO: 43220 - protein, 7 aa, synthetic construct
ITKMARD

SEQ ID NO: 43221 - protein, 7 aa, synthetic construct
TRTNGRE

SEQ ID NO: 43222 - protein, 7 aa, synthetic construct
YQSGKQS

SEQ ID NO: 43223 - protein, 7 aa, synthetic construct
RNAGLNA

SEQ ID NO: 43224 - protein, 7 aa, synthetic construct
YKSMVKE

SEQ ID NO: 43225 - protein, 7 aa, synthetic construct
YEHNKNV

SEQ ID NO: 43226 - protein, 7 aa, synthetic construct
FAKSQIN

SEQ ID NO: 43227 - protein, 7 aa, synthetic construct
YAGGHNG

SEQ ID NO: 43228 - protein, 7 aa, synthetic construct
RSGSTVA

SEQ ID NO: 43229 - protein, 7 aa, synthetic construct
RHKLEEV

SEQ ID NO: 43230 - protein, 7 aa, synthetic construct
KPASGPG

SEQ ID NO: 43231 - protein, 7 aa, synthetic construct
GTRDKFG

SEQ ID NO: 43232 - protein, 7 aa, synthetic construct
GQGQRVA

SEQ ID NO: 43233 - protein, 7 aa, synthetic construct
KPSNPGM

SEQ ID NO: 43234 - protein, 7 aa, synthetic construct
MIPKVVT

SEQ ID NO: 43235 - protein, 7 aa, synthetic construct
QRTPPNV

SEQ ID NO: 43236 - protein, 7 aa, synthetic construct
KTQGSIS

SEQ ID NO: 43237 - protein, 7 aa, synthetic construct
IGRFVGE

SEQ ID NO: 43238 - protein, 7 aa, synthetic construct
PKAPVTA

SEQ ID NO: 43239 - protein, 7 aa, synthetic construct
DAKQQLP

SEQ ID NO: 43240 - protein, 7 aa, synthetic construct
KNQMGVG

SEQ ID NO: 43241 - protein, 7 aa, synthetic construct
VRGGYNA

SEQ ID NO: 43242 - protein, 7 aa, synthetic construct
SRGPTAG

SEQ ID NO: 43243 - protein, 7 aa, synthetic construct
NQTGNKG

SEQ ID NO: 43244 - protein, 7 aa, synthetic construct
RLDHKAN

SEQ ID NO: 43245 - protein, 7 aa, synthetic construct
TQNQSKG

SEQ ID NO: 43246 - protein, 7 aa, synthetic construct
MYINGTP

SEQ ID NO: 43247 - protein, 7 aa, synthetic construct
PKNANGS

SEQ ID NO: 43248 - protein, 7 aa, synthetic construct
PKTSGIG

SEQ ID NO: 43249 - protein, 7 aa, synthetic construct
QKPGTNS

SEQ ID NO: 43250 - protein, 7 aa, synthetic construct
LGPHHGF

SEQ ID NO: 43251 - protein, 7 aa, synthetic construct
TARSASP

SEQ ID NO: 43252 - protein, 7 aa, synthetic construct
DSRTPAK

SEQ ID NO: 43253 - protein, 7 aa, synthetic construct
ERDQVRN

SEQ ID NO: 43254 - protein, 7 aa, synthetic construct
VPAKNLN

SEQ ID NO: 43255 - protein, 7 aa, synthetic construct
TIRSISL

SEQ ID NO: 43256 - protein, 7 aa, synthetic construct
FLKLQTD

SEQ ID NO: 43257 - protein, 7 aa, synthetic construct
AMKQNSP

SEQ ID NO: 43258 - protein, 7 aa, synthetic construct
TPRTGAG

SEQ ID NO: 43259 - protein, 7 aa, synthetic construct
KPPNMPS

SEQ ID NO: 43260 - protein, 7 aa, synthetic construct
RQSIKID

SEQ ID NO: 43261 - protein, 7 aa, synthetic construct
INKAARD

SEQ ID NO: 43262 - protein, 7 aa, synthetic construct
VSIAFRE

SEQ ID NO: 43263 - protein, 7 aa, synthetic construct
NRAARDP

SEQ ID NO: 43264 - protein, 7 aa, synthetic construct
PPTGKGT

SEQ ID NO: 43265 - protein, 7 aa, synthetic construct
KTQATVG

SEQ ID NO: 43266 - protein, 7 aa, synthetic construct
YKGGVTN

SEQ ID NO: 43267 - protein, 7 aa, synthetic construct
MPKMDRN

SEQ ID NO: 43268 - protein, 7 aa, synthetic construct
KGPVGQA

SEQ ID NO: 43269 - protein, 7 aa, synthetic construct
RNAHENP

SEQ ID NO: 43270 - protein, 7 aa, synthetic construct
NKMKSGD

SEQ ID NO: 43271 - protein, 7 aa, synthetic construct
QNNAKQP

SEQ ID NO: 43272 - protein, 7 aa, synthetic construct
ARGGPLL

SEQ ID NO: 43273 - protein, 7 aa, synthetic construct
QMSSAKG

SEQ ID NO: 43274 - protein, 7 aa, synthetic construct
HTGKGQG

SEQ ID NO: 43275 - protein, 7 aa, synthetic construct
NVRMNNN

SEQ ID NO: 43276 - protein, 7 aa, synthetic construct
PNSNIPS

SEQ ID NO: 43277 - protein, 7 aa, synthetic construct
PNKAHMG

SEQ ID NO: 43278 - protein, 7 aa, synthetic construct
AGTKGLQ

SEQ ID NO: 43279 - protein, 7 aa, synthetic construct
SQGNNRA

SEQ ID NO: 43280 - protein, 7 aa, synthetic construct
QKTVAVG

SEQ ID NO: 43281 - protein, 7 aa, synthetic construct
MMGNRQG

SEQ ID NO: 43282 - protein, 7 aa, synthetic construct
MARDSHS

SEQ ID NO: 43283 - protein, 7 aa, synthetic construct
RVNQAPA

SEQ ID NO: 43284 - protein, 7 aa, synthetic construct
TKNNNNG

SEQ ID NO: 43285 - protein, 7 aa, synthetic construct
TNRDKGL

SEQ ID NO: 43286 - protein, 7 aa, synthetic construct
NLNASTA

SEQ ID NO: 43287 - protein, 7 aa, synthetic construct
NDHKAYS

SEQ ID NO: 43288 - protein, 7 aa, synthetic construct
RNSQAES

SEQ ID NO: 43289 - protein, 7 aa, synthetic construct
QPQYKDA

SEQ ID NO: 43290 - protein, 7 aa, synthetic construct
MHRSLAL

SEQ ID NO: 43291 - protein, 7 aa, synthetic construct
MVMDPND

SEQ ID NO: 43292 - protein, 7 aa, synthetic construct
GTALNHF

SEQ ID NO: 43293 - protein, 7 aa, synthetic construct
FGVNAKG

SEQ ID NO: 43294 - protein, 7 aa, synthetic construct
NTKITVP

SEQ ID NO: 43295 - protein, 7 aa, synthetic construct
VLMVKAD

SEQ ID NO: 43296 - protein, 7 aa, synthetic construct
GKSLTRE

SEQ ID NO: 43297 - protein, 7 aa, synthetic construct
RSGPHSD

SEQ ID NO: 43298 - protein, 7 aa, synthetic construct
FPRSTPN

SEQ ID NO: 43299 - protein, 7 aa, synthetic construct
DAHMPKA

SEQ ID NO: 43300 - protein, 7 aa, synthetic construct
LSKGMEG

SEQ ID NO: 43301 - protein, 7 aa, synthetic construct
VPKNTQA

SEQ ID NO: 43302 - protein, 7 aa, synthetic construct
SGKVNQG

SEQ ID NO: 43303 - protein, 7 aa, synthetic construct
HFSGTAS

SEQ ID NO: 43304 - protein, 7 aa, synthetic construct
KGVQTGG

SEQ ID NO: 43305 - protein, 7 aa, synthetic construct
RGTGVPM

SEQ ID NO: 43306 - protein, 7 aa, synthetic construct
GKNIQSA

SEQ ID NO: 43307 - protein, 7 aa, synthetic construct
IARATEM

SEQ ID NO: 43308 - protein, 7 aa, synthetic construct
HSNHPAM

SEQ ID NO: 43309 - protein, 7 aa, synthetic construct
STLGSKP

SEQ ID NO: 43310 - protein, 7 aa, synthetic construct
PVKNGAG

SEQ ID NO: 43311 - protein, 7 aa, synthetic construct
DKGGKVM

SEQ ID NO: 43312 - protein, 7 aa, synthetic construct
SPAKPYE

SEQ ID NO: 43313 - protein, 7 aa, synthetic construct
TPHKGSV

SEQ ID NO: 43314 - protein, 7 aa, synthetic construct
AKKPGDY

SEQ ID NO: 43315 - protein, 7 aa, synthetic construct
FGKNMQA

SEQ ID NO: 43316 - protein, 7 aa, synthetic construct
RAPGAQP

SEQ ID NO: 43317 - protein, 7 aa, synthetic construct
SKSSVGS

SEQ ID NO: 43318 - protein, 7 aa, synthetic construct
ARIGLGN

SEQ ID NO: 43319 - protein, 7 aa, synthetic construct
TSFRGSE

SEQ ID NO: 43320 - protein, 7 aa, synthetic construct
IVMNHRG

SEQ ID NO: 43321 - protein, 7 aa, synthetic construct
ASKMNQG

SEQ ID NO: 43322 - protein, 7 aa, synthetic construct
AKKSVTE

SEQ ID NO: 43323 - protein, 7 aa, synthetic construct
TRTPNSG

SEQ ID NO: 43324 - protein, 7 aa, synthetic construct
KPNSSQA

SEQ ID NO: 43325 - protein, 7 aa, synthetic construct
KFGTTFD

SEQ ID NO: 43326 - protein, 7 aa, synthetic construct
MAVHKDR

SEQ ID NO: 43327 - protein, 7 aa, synthetic construct
PAKMVAG

SEQ ID NO: 43328 - protein, 7 aa, synthetic construct
TFSMSKP

SEQ ID NO: 43329 - protein, 7 aa, synthetic construct
SDMKFTH

SEQ ID NO: 43330 - protein, 7 aa, synthetic construct
EHRTGSG

SEQ ID NO: 43331 - protein, 7 aa, synthetic construct
LMKDTFG

SEQ ID NO: 43332 - protein, 7 aa, synthetic construct
TKDNKSG

SEQ ID NO: 43333 - protein, 7 aa, synthetic construct
PPKGSGV

SEQ ID NO: 43334 - protein, 7 aa, synthetic construct
IEKRLNV

SEQ ID NO: 43335 - protein, 7 aa, synthetic construct
GFGSNHA

SEQ ID NO: 43336 - protein, 7 aa, synthetic construct
GALKHVP

SEQ ID NO: 43337 - protein, 7 aa, synthetic construct
QGSKAPN

SEQ ID NO: 43338 - protein, 7 aa, synthetic construct
VLGFEKQ

SEQ ID NO: 43339 - protein, 7 aa, synthetic construct
FRAGPSS

SEQ ID NO: 43340 - protein, 7 aa, synthetic construct
LQSTRAD

SEQ ID NO: 43341 - protein, 7 aa, synthetic construct
NMHLMKA

SEQ ID NO: 43342 - protein, 7 aa, synthetic construct
NAKISRE

SEQ ID NO: 43343 - protein, 7 aa, synthetic construct
MRLGMTP

SEQ ID NO: 43344 - protein, 7 aa, synthetic construct
FNVTHKD

SEQ ID NO: 43345 - protein, 7 aa, synthetic construct
SGVKGNL

SEQ ID NO: 43346 - protein, 7 aa, synthetic construct
VKTVVHG

SEQ ID NO: 43347 - protein, 7 aa, synthetic construct
YKPIAKD

SEQ ID NO: 43348 - protein, 7 aa, synthetic construct
NFHKTGS

SEQ ID NO: 43349 - protein, 7 aa, synthetic construct
KSYGGMD

SEQ ID NO: 43350 - protein, 7 aa, synthetic construct
AERPYPK

SEQ ID NO: 43351 - protein, 7 aa, synthetic construct
AKSNTNP

SEQ ID NO: 43352 - protein, 7 aa, synthetic construct
GPNKGTP

SEQ ID NO: 43353 - protein, 7 aa, synthetic construct
STKVTVG

SEQ ID NO: 43354 - protein, 7 aa, synthetic construct
MPRLTRD

SEQ ID NO: 43355 - protein, 7 aa, synthetic construct
LMRVTNE

SEQ ID NO: 43356 - protein, 7 aa, synthetic construct
LGSHWEK

SEQ ID NO: 43357 - protein, 7 aa, synthetic construct
NVGGRTP

SEQ ID NO: 43358 - protein, 7 aa, synthetic construct
SKFSSAA

SEQ ID NO: 43359 - protein, 7 aa, synthetic construct
KQPQSIA

SEQ ID NO: 43360 - protein, 7 aa, synthetic construct
VGFRDSP

SEQ ID NO: 43361 - protein, 7 aa, synthetic construct
NKWTMAD

SEQ ID NO: 43362 - protein, 7 aa, synthetic construct
MKPGGKD

SEQ ID NO: 43363 - protein, 7 aa, synthetic construct
PDRIGTL

SEQ ID NO: 43364 - protein, 7 aa, synthetic construct
ATHGPGA

SEQ ID NO: 43365 - protein, 7 aa, synthetic construct
GAPYKEA

SEQ ID NO: 43366 - protein, 7 aa, synthetic construct
LQKSYTG

SEQ ID NO: 43367 - protein, 7 aa, synthetic construct
RAKDTSA

SEQ ID NO: 43368 - protein, 7 aa, synthetic construct
KDRPGQA

SEQ ID NO: 43369 - protein, 7 aa, synthetic construct
TASGKFG

SEQ ID NO: 43370 - protein, 7 aa, synthetic construct
MMKFESS

SEQ ID NO: 43371 - protein, 7 aa, synthetic construct
KVPQGHP

SEQ ID NO: 43372 - protein, 7 aa, synthetic construct
TTKYAQM

SEQ ID NO: 43373 - protein, 7 aa, synthetic construct
GKTAGTA

SEQ ID NO: 43374 - protein, 7 aa, synthetic construct
TAAKQGT

SEQ ID NO: 43375 - protein, 7 aa, synthetic construct
TFKPLPY

SEQ ID NO: 43376 - protein, 7 aa, synthetic construct
HGQFKID

SEQ ID NO: 43377 - protein, 7 aa, synthetic construct
WANKINA

SEQ ID NO: 43378 - protein, 7 aa, synthetic construct
FENRAAA

SEQ ID NO: 43379 - protein, 7 aa, synthetic construct
NKQTTVA

SEQ ID NO: 43380 - protein, 7 aa, synthetic construct
HGRNPEN

SEQ ID NO: 43381 - protein, 7 aa, synthetic construct
NRANQQG

SEQ ID NO: 43382 - protein, 7 aa, synthetic construct
GNTKNAG

SEQ ID NO: 43383 - protein, 7 aa, synthetic construct
YKPPASG

SEQ ID NO: 43384 - protein, 7 aa, synthetic construct
TQSRPMG

SEQ ID NO: 43385 - protein, 7 aa, synthetic construct
KHNTNQA

SEQ ID NO: 43386 - protein, 7 aa, synthetic construct
SKANGMG

SEQ ID NO: 43387 - protein, 7 aa, synthetic construct
FPPLKSN

SEQ ID NO: 43388 - protein, 7 aa, synthetic construct
QNKNNNG

SEQ ID NO: 43389 - protein, 7 aa, synthetic construct
AKGGKPD

SEQ ID NO: 43390 - protein, 7 aa, synthetic construct
RPNGQMS

SEQ ID NO: 43391 - protein, 7 aa, synthetic construct
RAYGNMA

SEQ ID NO: 43392 - protein, 7 aa, synthetic construct
APGKGAV

SEQ ID NO: 43393 - protein, 7 aa, synthetic construct
QANNHHK

SEQ ID NO: 43394 - protein, 7 aa, synthetic construct
NMKNSAP

SEQ ID NO: 43395 - protein, 7 aa, synthetic construct
FGGKIQG

SEQ ID NO: 43396 - protein, 7 aa, synthetic construct
TRTQMNG

SEQ ID NO: 43397 - protein, 7 aa, synthetic construct
ENAMDWE

SEQ ID NO: 43398 - protein, 7 aa, synthetic construct
TGKASQG

SEQ ID NO: 43399 - protein, 7 aa, synthetic construct
ATQAPNN

SEQ ID NO: 43400 - protein, 7 aa, synthetic construct
RTTTSSA

SEQ ID NO: 43401 - protein, 7 aa, synthetic construct
VEPKKYY

SEQ ID NO: 43402 - protein, 7 aa, synthetic construct
GNKGKDA

SEQ ID NO: 43403 - protein, 7 aa, synthetic construct
NKPSGAN

SEQ ID NO: 43404 - protein, 7 aa, synthetic construct
SLNNINR

SEQ ID NO: 43405 - protein, 7 aa, synthetic construct
WAGIGEN

SEQ ID NO: 43406 - protein, 7 aa, synthetic construct
QHPRTMV

SEQ ID NO: 43407 - protein, 7 aa, synthetic construct
NGRANTG

SEQ ID NO: 43408 - protein, 7 aa, synthetic construct
YKKQVEG

SEQ ID NO: 43409 - protein, 7 aa, synthetic construct
RMPAAAH

SEQ ID NO: 43410 - protein, 7 aa, synthetic construct
APPRDNP

SEQ ID NO: 43411 - protein, 7 aa, synthetic construct
NSDIRPG

SEQ ID NO: 43412 - protein, 7 aa, synthetic construct
QARQVQM

SEQ ID NO: 43413 - protein, 7 aa, synthetic construct
MNVTKQT

SEQ ID NO: 43414 - protein, 7 aa, synthetic construct
STRLHNT

SEQ ID NO: 43415 - protein, 7 aa, synthetic construct
QKSTGVG

SEQ ID NO: 43416 - protein, 7 aa, synthetic construct
HTVQRTT

SEQ ID NO: 43417 - protein, 7 aa, synthetic construct
QVGTSKG

SEQ ID NO: 43418 - protein, 7 aa, synthetic construct
LYTQSGP

SEQ ID NO: 43419 - protein, 7 aa, synthetic construct
DNKSNKG

SEQ ID NO: 43420 - protein, 7 aa, synthetic construct
KHSTVVA

SEQ ID NO: 43421 - protein, 7 aa, synthetic construct
GNNSSVR

SEQ ID NO: 43422 - protein, 7 aa, synthetic construct
GKQSAIW

SEQ ID NO: 43423 - protein, 7 aa, synthetic construct
TQKTSNG

SEQ ID NO: 43424 - protein, 7 aa, synthetic construct
AQYPNKT

SEQ ID NO: 43425 - protein, 7 aa, synthetic construct
FDMMAKK

SEQ ID NO: 43426 - protein, 7 aa, synthetic construct
SNKGGTA

SEQ ID NO: 43427 - protein, 7 aa, synthetic construct
LKQGPTF

SEQ ID NO: 43428 - protein, 7 aa, synthetic construct
NKVTQSA

SEQ ID NO: 43429 - protein, 7 aa, synthetic construct
GMNAQNG

SEQ ID NO: 43430 - protein, 7 aa, synthetic construct
MNKINQV

SEQ ID NO: 43431 - protein, 7 aa, synthetic construct
SQSQRFL

SEQ ID NO: 43432 - protein, 7 aa, synthetic construct
QGINFVA

SEQ ID NO: 43433 - protein, 7 aa, synthetic construct
KPPTSGT

SEQ ID NO: 43434 - protein, 7 aa, synthetic construct
QKNQSPG

SEQ ID NO: 43435 - protein, 7 aa, synthetic construct
FKPSNGN

SEQ ID NO: 43436 - protein, 7 aa, synthetic construct
MKNAGVG

SEQ ID NO: 43437 - protein, 7 aa, synthetic construct
KSNPVRD

SEQ ID NO: 43438 - protein, 7 aa, synthetic construct
MSGKNQS

SEQ ID NO: 43439 - protein, 7 aa, synthetic construct
YTSHKIP

SEQ ID NO: 43440 - protein, 7 aa, synthetic construct
QKMGGGA

SEQ ID NO: 43441 - protein, 7 aa, synthetic construct
KQNNAGM

SEQ ID NO: 43442 - protein, 7 aa, synthetic construct
TSHMSTI

SEQ ID NO: 43443 - protein, 7 aa, synthetic construct
VQKVGVS

SEQ ID NO: 43444 - protein, 7 aa, synthetic construct
QPHRDPG

SEQ ID NO: 43445 - protein, 7 aa, synthetic construct
TPKPGNG

SEQ ID NO: 43446 - protein, 7 aa, synthetic construct
GEKQGGS

SEQ ID NO: 43447 - protein, 7 aa, synthetic construct
RQTTSSG

SEQ ID NO: 43448 - protein, 7 aa, synthetic construct
GKINTQA

SEQ ID NO: 43449 - protein, 7 aa, synthetic construct
IEMRQKS

SEQ ID NO: 43450 - protein, 7 aa, synthetic construct
KSANNPS

SEQ ID NO: 43451 - protein, 7 aa, synthetic construct
YRGPTTE

SEQ ID NO: 43452 - protein, 7 aa, synthetic construct
TIPQGKP

SEQ ID NO: 43453 - protein, 7 aa, synthetic construct
NAPKHGD

SEQ ID NO: 43454 - protein, 7 aa, synthetic construct
SPKQMGG

SEQ ID NO: 43455 - protein, 7 aa, synthetic construct
SVVQRRD

SEQ ID NO: 43456 - protein, 7 aa, synthetic construct
RPNSQSA

SEQ ID NO: 43457 - protein, 7 aa, synthetic construct
NSHHTLP

SEQ ID NO: 43458 - protein, 7 aa, synthetic construct
FKNMSKE

SEQ ID NO: 43459 - protein, 7 aa, synthetic construct
PSRYNEP

SEQ ID NO: 43460 - protein, 7 aa, synthetic construct
YSKTASA

SEQ ID NO: 43461 - protein, 7 aa, synthetic construct
QNKNNAG

SEQ ID NO: 43462 - protein, 7 aa, synthetic construct
HKPGFFE

SEQ ID NO: 43463 - protein, 7 aa, synthetic construct
GLHGRHA

SEQ ID NO: 43464 - protein, 7 aa, synthetic construct
QTPQQKY

SEQ ID NO: 43465 - protein, 7 aa, synthetic construct
YGTNKGG

SEQ ID NO: 43466 - protein, 7 aa, synthetic construct
YPGKNSA

SEQ ID NO: 43467 - protein, 7 aa, synthetic construct
LRTFKPD

SEQ ID NO: 43468 - protein, 7 aa, synthetic construct
SNKTSTT

SEQ ID NO: 43469 - protein, 7 aa, synthetic construct
QSRPGMG

SEQ ID NO: 43470 - protein, 7 aa, synthetic construct
SNRWKDG

SEQ ID NO: 43471 - protein, 7 aa, synthetic construct
FGQAKTG

SEQ ID NO: 43472 - protein, 7 aa, synthetic construct
RSTVSGG

SEQ ID NO: 43473 - protein, 7 aa, synthetic construct
YAKSANA

SEQ ID NO: 43474 - protein, 7 aa, synthetic construct
SQTIHHA

SEQ ID NO: 43475 - protein, 7 aa, synthetic construct
ANMSRGA

SEQ ID NO: 43476 - protein, 7 aa, synthetic construct
KTPGTNG

SEQ ID NO: 43477 - protein, 7 aa, synthetic construct
FAKSMKD

SEQ ID NO: 43478 - protein, 7 aa, synthetic construct
FRMIQDA

SEQ ID NO: 43479 - protein, 7 aa, synthetic construct
IKTTMQN

SEQ ID NO: 43480 - protein, 7 aa, synthetic construct
PKQRPEG

SEQ ID NO: 43481 - protein, 7 aa, synthetic construct
IKDSIGR

SEQ ID NO: 43482 - protein, 7 aa, synthetic construct
MGQGSHG

SEQ ID NO: 43483 - protein, 7 aa, synthetic construct
YAPKGSA

SEQ ID NO: 43484 - protein, 7 aa, synthetic construct
PQHAHQF

SEQ ID NO: 43485 - protein, 7 aa, synthetic construct
KRHGESD

SEQ ID NO: 43486 - protein, 7 aa, synthetic construct
DYGNRGG

SEQ ID NO: 43487 - protein, 7 aa, synthetic construct
QAHNRPP

SEQ ID NO: 43488 - protein, 7 aa, synthetic construct
VKGTANG

SEQ ID NO: 43489 - protein, 7 aa, synthetic construct
GTQSKSP

SEQ ID NO: 43490 - protein, 7 aa, synthetic construct
KTTPASN

SEQ ID NO: 43491 - protein, 7 aa, synthetic construct
TPTNAKS

SEQ ID NO: 43492 - protein, 7 aa, synthetic construct
RNAATSS

SEQ ID NO: 43493 - protein, 7 aa, synthetic construct
AKMGLMS

SEQ ID NO: 43494 - protein, 7 aa, synthetic construct
KQQMVAA

SEQ ID NO: 43495 - protein, 7 aa, synthetic construct
RLVPDAG

SEQ ID NO: 43496 - protein, 7 aa, synthetic construct
NKHETKG

SEQ ID NO: 43497 - protein, 7 aa, synthetic construct
GKTMANA

SEQ ID NO: 43498 - protein, 7 aa, synthetic construct
FKNSQAP

SEQ ID NO: 43499 - protein, 7 aa, synthetic construct
GRNTSPA

SEQ ID NO: 43500 - protein, 7 aa, synthetic construct
TVKHPDQ

SEQ ID NO: 43501 - protein, 7 aa, synthetic construct
YGNLGGK

SEQ ID NO: 43502 - protein, 7 aa, synthetic construct
HDRLMPA

SEQ ID NO: 43503 - protein, 7 aa, synthetic construct
NQVNRPG

SEQ ID NO: 43504 - protein, 7 aa, synthetic construct
KSPGSGG

SEQ ID NO: 43505 - protein, 7 aa, synthetic construct
RQKGALE

SEQ ID NO: 43506 - protein, 7 aa, synthetic construct
FKSSQMG

SEQ ID NO: 43507 - protein, 7 aa, synthetic construct
DKVSKTA

SEQ ID NO: 43508 - protein, 7 aa, synthetic construct
YKRDDPS

SEQ ID NO: 43509 - protein, 7 aa, synthetic construct
SRTPQQP

SEQ ID NO: 43510 - protein, 7 aa, synthetic construct
RTNASGP

SEQ ID NO: 43511 - protein, 7 aa, synthetic construct
GPSGKTG

SEQ ID NO: 43512 - protein, 7 aa, synthetic construct
NTKIWQD

SEQ ID NO: 43513 - protein, 7 aa, synthetic construct
LLQGSGG

SEQ ID NO: 43514 - protein, 7 aa, synthetic construct
KPVRDAP

SEQ ID NO: 43515 - protein, 7 aa, synthetic construct
MDRSPRD

SEQ ID NO: 43516 - protein, 7 aa, synthetic construct
YAGFGNN

SEQ ID NO: 43517 - protein, 7 aa, synthetic construct
EGHARPM

SEQ ID NO: 43518 - protein, 7 aa, synthetic construct
NGLKGAQ

SEQ ID NO: 43519 - protein, 7 aa, synthetic construct
PRGGNNP

SEQ ID NO: 43520 - protein, 7 aa, synthetic construct
QSMQHTG

SEQ ID NO: 43521 - protein, 7 aa, synthetic construct
LGKFNNP

SEQ ID NO: 43522 - protein, 7 aa, synthetic construct
RPDKGMG

SEQ ID NO: 43523 - protein, 7 aa, synthetic construct
MTKSQPI

SEQ ID NO: 43524 - protein, 7 aa, synthetic construct
MRPNTIM

SEQ ID NO: 43525 - protein, 7 aa, synthetic construct
IRSPTGG

SEQ ID NO: 43526 - protein, 7 aa, synthetic construct
KYVKHEI

SEQ ID NO: 43527 - protein, 7 aa, synthetic construct
MKKGLDP

SEQ ID NO: 43528 - protein, 7 aa, synthetic construct
SMEKRDS

SEQ ID NO: 43529 - protein, 7 aa, synthetic construct
AKQSGMG

SEQ ID NO: 43530 - protein, 7 aa, synthetic construct
KTQGSTS

SEQ ID NO: 43531 - protein, 7 aa, synthetic construct
ILGTKQT

SEQ ID NO: 43532 - protein, 7 aa, synthetic construct
GAYRTNG

SEQ ID NO: 43533 - protein, 7 aa, synthetic construct
HPISRKE

SEQ ID NO: 43534 - protein, 7 aa, synthetic construct
KSSMAVS

SEQ ID NO: 43535 - protein, 7 aa, synthetic construct
KQSPQAG

SEQ ID NO: 43536 - protein, 7 aa, synthetic construct
GHPIMRA

SEQ ID NO: 43537 - protein, 7 aa, synthetic construct
FMGPGKA

SEQ ID NO: 43538 - protein, 7 aa, synthetic construct
MQKASNA

SEQ ID NO: 43539 - protein, 7 aa, synthetic construct
KDLSTQG

SEQ ID NO: 43540 - protein, 7 aa, synthetic construct
FKSGQTN

SEQ ID NO: 43541 - protein, 7 aa, synthetic construct
APKISKD

SEQ ID NO: 43542 - protein, 7 aa, synthetic construct
KNVNVTA

SEQ ID NO: 43543 - protein, 7 aa, synthetic construct
TPRTGNA

SEQ ID NO: 43544 - protein, 7 aa, synthetic construct
SKGTSAG

SEQ ID NO: 43545 - protein, 7 aa, synthetic construct
IVDFQKQ

SEQ ID NO: 43546 - protein, 7 aa, synthetic construct
RANSTGG

SEQ ID NO: 43547 - protein, 7 aa, synthetic construct
HRKEVLA

SEQ ID NO: 43548 - protein, 7 aa, synthetic construct
TSQKSTG

SEQ ID NO: 43549 - protein, 7 aa, synthetic construct
KAAQGVM

SEQ ID NO: 43550 - protein, 7 aa, synthetic construct
LNKTPLH

SEQ ID NO: 43551 - protein, 7 aa, synthetic construct
FSTGRDS

SEQ ID NO: 43552 - protein, 7 aa, synthetic construct
QRAGGMG

SEQ ID NO: 43553 - protein, 7 aa, synthetic construct
KFNAGSA

SEQ ID NO: 43554 - protein, 7 aa, synthetic construct
YGKNAQS

SEQ ID NO: 43555 - protein, 7 aa, synthetic construct
THIPRTE

SEQ ID NO: 43556 - protein, 7 aa, synthetic construct
GNVVVTK

SEQ ID NO: 43557 - protein, 7 aa, synthetic construct
FGHQRVD

SEQ ID NO: 43558 - protein, 7 aa, synthetic construct
WAGKGQV

SEQ ID NO: 43559 - protein, 7 aa, synthetic construct
TSTIHQS

SEQ ID NO: 43560 - protein, 7 aa, synthetic construct
KTANGAG

SEQ ID NO: 43561 - protein, 7 aa, synthetic construct
KSMNSVA

SEQ ID NO: 43562 - protein, 7 aa, synthetic construct
HSAKAEP

SEQ ID NO: 43563 - protein, 7 aa, synthetic construct
QPPGRFD

SEQ ID NO: 43564 - protein, 7 aa, synthetic construct
NARANQP

SEQ ID NO: 43565 - protein, 7 aa, synthetic construct
KPQSANT

SEQ ID NO: 43566 - protein, 7 aa, synthetic construct
KNMGQVG

SEQ ID NO: 43567 - protein, 7 aa, synthetic construct
NSYKTET

SEQ ID NO: 43568 - protein, 7 aa, synthetic construct
MPQKSMG

SEQ ID NO: 43569 - protein, 7 aa, synthetic construct
LEWMKNE

SEQ ID NO: 43570 - protein, 7 aa, synthetic construct
SYDKTQG

SEQ ID NO: 43571 - protein, 7 aa, synthetic construct
GMGKVQG

SEQ ID NO: 43572 - protein, 7 aa, synthetic construct
GPHVSKW

SEQ ID NO: 43573 - protein, 7 aa, synthetic construct
LGTSRNP

SEQ ID NO: 43574 - protein, 7 aa, synthetic construct
SYEHTKS

SEQ ID NO: 43575 - protein, 7 aa, synthetic construct
NYARSKD

SEQ ID NO: 43576 - protein, 7 aa, synthetic construct
FVGVKTQ

SEQ ID NO: 43577 - protein, 7 aa, synthetic construct
TTAATQA

SEQ ID NO: 43578 - protein, 7 aa, synthetic construct
IMTKFQA

SEQ ID NO: 43579 - protein, 7 aa, synthetic construct
WSHKTTN

SEQ ID NO: 43580 - protein, 7 aa, synthetic construct
LKSTTSA

SEQ ID NO: 43581 - protein, 7 aa, synthetic construct
KTNNGAT

SEQ ID NO: 43582 - protein, 7 aa, synthetic construct
QMKNSAG

SEQ ID NO: 43583 - protein, 7 aa, synthetic construct
YKSHPVN

SEQ ID NO: 43584 - protein, 7 aa, synthetic construct
VKGVSQA

SEQ ID NO: 43585 - protein, 7 aa, synthetic construct
PTNRSME

SEQ ID NO: 43586 - protein, 7 aa, synthetic construct
RPTSSVG

SEQ ID NO: 43587 - protein, 7 aa, synthetic construct
YGKQYDI

SEQ ID NO: 43588 - protein, 7 aa, synthetic construct
WNGMQKP

SEQ ID NO: 43589 - protein, 7 aa, synthetic construct
HGIGKMQ

SEQ ID NO: 43590 - protein, 7 aa, synthetic construct
KMMRAET

SEQ ID NO: 43591 - protein, 7 aa, synthetic construct
SKTNNVA

SEQ ID NO: 43592 - protein, 7 aa, synthetic construct
RQAPYGG

SEQ ID NO: 43593 - protein, 7 aa, synthetic construct
SKPYLSD

SEQ ID NO: 43594 - protein, 7 aa, synthetic construct
NKAGFTG

SEQ ID NO: 43595 - protein, 7 aa, synthetic construct
HNTQSAS

SEQ ID NO: 43596 - protein, 7 aa, synthetic construct
HGAQTHN

SEQ ID NO: 43597 - protein, 7 aa, synthetic construct
EQRPRPQ

SEQ ID NO: 43598 - protein, 7 aa, synthetic construct
MPKHAAG

SEQ ID NO: 43599 - protein, 7 aa, synthetic construct
GAPRQQV

SEQ ID NO: 43600 - protein, 7 aa, synthetic construct
AGVRGQY

SEQ ID NO: 43601 - protein, 7 aa, synthetic construct
DRKAGPD

SEQ ID NO: 43602 - protein, 7 aa, synthetic construct
SVRNVSL

SEQ ID NO: 43603 - protein, 7 aa, synthetic construct
QNARAQA

SEQ ID NO: 43604 - protein, 7 aa, synthetic construct
MLTKDAH

SEQ ID NO: 43605 - protein, 7 aa, synthetic construct
HKPHSTF

SEQ ID NO: 43606 - protein, 7 aa, synthetic construct
FDRPVAR

SEQ ID NO: 43607 - protein, 7 aa, synthetic construct
SKTTNTG

SEQ ID NO: 43608 - protein, 7 aa, synthetic construct
PPSVKAG

SEQ ID NO: 43609 - protein, 7 aa, synthetic construct
YNPHNPL

SEQ ID NO: 43610 - protein, 7 aa, synthetic construct
TKNPSQS

SEQ ID NO: 43611 - protein, 7 aa, synthetic construct
LERGIHT

SEQ ID NO: 43612 - protein, 7 aa, synthetic construct
QKMQAAH

SEQ ID NO: 43613 - protein, 7 aa, synthetic construct
LPTRQHM

SEQ ID NO: 43614 - protein, 7 aa, synthetic construct
VIAKLNG

SEQ ID NO: 43615 - protein, 7 aa, synthetic construct
RKSVADE

SEQ ID NO: 43616 - protein, 7 aa, synthetic construct
TKGTVTL

SEQ ID NO: 43617 - protein, 7 aa, synthetic construct
YPQTKGG

SEQ ID NO: 43618 - protein, 7 aa, synthetic construct
FPNHKTP

SEQ ID NO: 43619 - protein, 7 aa, synthetic construct
ITGTLGG

SEQ ID NO: 43620 - protein, 7 aa, synthetic construct
NKAMNGG

SEQ ID NO: 43621 - protein, 7 aa, synthetic construct
ARAGMDS

SEQ ID NO: 43622 - protein, 7 aa, synthetic construct
ATNGSKA

SEQ ID NO: 43623 - protein, 7 aa, synthetic construct
HKIEGFM

SEQ ID NO: 43624 - protein, 7 aa, synthetic construct
SQTNRQP

SEQ ID NO: 43625 - protein, 7 aa, synthetic construct
RKVGDTL

SEQ ID NO: 43626 - protein, 7 aa, synthetic construct
DKKWNNS

SEQ ID NO: 43627 - protein, 7 aa, synthetic construct
IDHAVRS

SEQ ID NO: 43628 - protein, 7 aa, synthetic construct
THKYPSP

SEQ ID NO: 43629 - protein, 7 aa, synthetic construct
QMNTKMD

SEQ ID NO: 43630 - protein, 7 aa, synthetic construct
DNFKYTA

SEQ ID NO: 43631 - protein, 7 aa, synthetic construct
NKMKAND

SEQ ID NO: 43632 - protein, 7 aa, synthetic construct
FRGGQDM

SEQ ID NO: 43633 - protein, 7 aa, synthetic construct
HNIPMPP

SEQ ID NO: 43634 - protein, 7 aa, synthetic construct
AEDIKRR

SEQ ID NO: 43635 - protein, 7 aa, synthetic construct
MFTRDKA

SEQ ID NO: 43636 - protein, 7 aa, synthetic construct
YKPPRPD

SEQ ID NO: 43637 - protein, 7 aa, synthetic construct
NRITLKE

SEQ ID NO: 43638 - protein, 7 aa, synthetic construct
KGATQNP

SEQ ID NO: 43639 - protein, 7 aa, synthetic construct
KTQPVGG

SEQ ID NO: 43640 - protein, 7 aa, synthetic construct
QHNNRPD

SEQ ID NO: 43641 - protein, 7 aa, synthetic construct
GQNKAGG

SEQ ID NO: 43642 - protein, 7 aa, synthetic construct
EPGVNKG

SEQ ID NO: 43643 - protein, 7 aa, synthetic construct
KNSPVGG

SEQ ID NO: 43644 - protein, 7 aa, synthetic construct
HHNVTRN

SEQ ID NO: 43645 - protein, 7 aa, synthetic construct
YNVAIRQ

SEQ ID NO: 43646 - protein, 7 aa, synthetic construct
RNSGTIA

SEQ ID NO: 43647 - protein, 7 aa, synthetic construct
RPPGTGA

SEQ ID NO: 43648 - protein, 7 aa, synthetic construct
TMKNKDT

SEQ ID NO: 43649 - protein, 7 aa, synthetic construct
KDKAMAG

SEQ ID NO: 43650 - protein, 7 aa, synthetic construct
QKATPSG

SEQ ID NO: 43651 - protein, 7 aa, synthetic construct
KYPGGEW

SEQ ID NO: 43652 - protein, 7 aa, synthetic construct
HQNKAVA

SEQ ID NO: 43653 - protein, 7 aa, synthetic construct
TRGTTVA

SEQ ID NO: 43654 - protein, 7 aa, synthetic construct
WAKTKDE

SEQ ID NO: 43655 - protein, 7 aa, synthetic construct
NKDKTGG

SEQ ID NO: 43656 - protein, 7 aa, synthetic construct
TVIGKKE

SEQ ID NO: 43657 - protein, 7 aa, synthetic construct
TKNGATS

SEQ ID NO: 43658 - protein, 7 aa, synthetic construct
KMGAVAG

SEQ ID NO: 43659 - protein, 7 aa, synthetic construct
VFGRIKD

SEQ ID NO: 43660 - protein, 7 aa, synthetic construct
KISGMSG

SEQ ID NO: 43661 - protein, 7 aa, synthetic construct
LNMGLKA

SEQ ID NO: 43662 - protein, 7 aa, synthetic construct
LPIGPKT

SEQ ID NO: 43663 - protein, 7 aa, synthetic construct
RKDIGNL

SEQ ID NO: 43664 - protein, 7 aa, synthetic construct
FKRSEEG

SEQ ID NO: 43665 - protein, 7 aa, synthetic construct
GSKIPEV

SEQ ID NO: 43666 - protein, 7 aa, synthetic construct
YKDKGGS

SEQ ID NO: 43667 - protein, 7 aa, synthetic construct
GFSISKA

SEQ ID NO: 43668 - protein, 7 aa, synthetic construct
LPGKIPN

SEQ ID NO: 43669 - protein, 7 aa, synthetic construct
IDRGKAA

SEQ ID NO: 43670 - protein, 7 aa, synthetic construct
AGFPNKG

SEQ ID NO: 43671 - protein, 7 aa, synthetic construct
TEQPKKF

SEQ ID NO: 43672 - protein, 7 aa, synthetic construct
GNASIKS

SEQ ID NO: 43673 - protein, 7 aa, synthetic construct
QVKVSQA

SEQ ID NO: 43674 - protein, 7 aa, synthetic construct
GPNKTAG

SEQ ID NO: 43675 - protein, 7 aa, synthetic construct
PNKMHTM

SEQ ID NO: 43676 - protein, 7 aa, synthetic construct
YATGSKG

SEQ ID NO: 43677 - protein, 7 aa, synthetic construct
AGFQMSS

SEQ ID NO: 43678 - protein, 7 aa, synthetic construct
NLDIRGS

SEQ ID NO: 43679 - protein, 7 aa, synthetic construct
KRNPDFM

SEQ ID NO: 43680 - protein, 7 aa, synthetic construct
MGSSRTA

SEQ ID NO: 43681 - protein, 7 aa, synthetic construct
KMAGSSG

SEQ ID NO: 43682 - protein, 7 aa, synthetic construct
AVIRPQP

SEQ ID NO: 43683 - protein, 7 aa, synthetic construct
QKDSKHQ

SEQ ID NO: 43684 - protein, 7 aa, synthetic construct
GPGNPVT

SEQ ID NO: 43685 - protein, 7 aa, synthetic construct
GPKQSSP

SEQ ID NO: 43686 - protein, 7 aa, synthetic construct
PGSIGYK

SEQ ID NO: 43687 - protein, 7 aa, synthetic construct
AGTKTPG

SEQ ID NO: 43688 - protein, 7 aa, synthetic construct
TPKRDPP

SEQ ID NO: 43689 - protein, 7 aa, synthetic construct
AGTPPRD

SEQ ID NO: 43690 - protein, 7 aa, synthetic construct
QNKAVNG

SEQ ID NO: 43691 - protein, 7 aa, synthetic construct
FSNHVAN

SEQ ID NO: 43692 - protein, 7 aa, synthetic construct
RSPQNNG

SEQ ID NO: 43693 - protein, 7 aa, synthetic construct
QRNNANV

SEQ ID NO: 43694 - protein, 7 aa, synthetic construct
ARQVKEN

SEQ ID NO: 43695 - protein, 7 aa, synthetic construct
RSGVTVG

SEQ ID NO: 43696 - protein, 7 aa, synthetic construct
NDPKRGD

SEQ ID NO: 43697 - protein, 7 aa, synthetic construct
ITGSKGA

SEQ ID NO: 43698 - protein, 7 aa, synthetic construct
PIHRHSE

SEQ ID NO: 43699 - protein, 7 aa, synthetic construct
VRTGNSA

SEQ ID NO: 43700 - protein, 7 aa, synthetic construct
SSKQGNH

SEQ ID NO: 43701 - protein, 7 aa, synthetic construct
ELANKQL

SEQ ID NO: 43702 - protein, 7 aa, synthetic construct
RSMGGMG

SEQ ID NO: 43703 - protein, 7 aa, synthetic construct
SPPSTRP

SEQ ID NO: 43704 - protein, 7 aa, synthetic construct
VRPDTTA

SEQ ID NO: 43705 - protein, 7 aa, synthetic construct
RQNRTSE

SEQ ID NO: 43706 - protein, 7 aa, synthetic construct
KDSGKSA

SEQ ID NO: 43707 - protein, 7 aa, synthetic construct
TNNRSSA

SEQ ID NO: 43708 - protein, 7 aa, synthetic construct
MRQADSR

SEQ ID NO: 43709 - protein, 7 aa, synthetic construct
TLKTSGA

SEQ ID NO: 43710 - protein, 7 aa, synthetic construct
TAHSLRE

SEQ ID NO: 43711 - protein, 7 aa, synthetic construct
NKMPSSG

SEQ ID NO: 43712 - protein, 7 aa, synthetic construct
PKAQSIG

SEQ ID NO: 43713 - protein, 7 aa, synthetic construct
LTRNNND

SEQ ID NO: 43714 - protein, 7 aa, synthetic construct
YATKQSI

SEQ ID NO: 43715 - protein, 7 aa, synthetic construct
SQGNNRS

SEQ ID NO: 43716 - protein, 7 aa, synthetic construct
FKNNVSS

SEQ ID NO: 43717 - protein, 7 aa, synthetic construct
QGSKTVA

SEQ ID NO: 43718 - protein, 7 aa, synthetic construct
RQQATQG

SEQ ID NO: 43719 - protein, 7 aa, synthetic construct
QQTTSSG

SEQ ID NO: 43720 - protein, 7 aa, synthetic construct
TKNQASS

SEQ ID NO: 43721 - protein, 7 aa, synthetic construct
WSGKTHV

SEQ ID NO: 43722 - protein, 7 aa, synthetic construct
STKQPHG

SEQ ID NO: 43723 - protein, 7 aa, synthetic construct
MGKAVNG

SEQ ID NO: 43724 - protein, 7 aa, synthetic construct
MKQQNKI

SEQ ID NO: 43725 - protein, 7 aa, synthetic construct
QNNSRNG

SEQ ID NO: 43726 - protein, 7 aa, synthetic construct
YVMGAKA

SEQ ID NO: 43727 - protein, 7 aa, synthetic construct
MIGPERR

SEQ ID NO: 43728 - protein, 7 aa, synthetic construct
YPTTMKV

SEQ ID NO: 43729 - protein, 7 aa, synthetic construct
TSTKTQP

SEQ ID NO: 43730 - protein, 7 aa, synthetic construct
DTLYNKA

SEQ ID NO: 43731 - protein, 7 aa, synthetic construct
RVDGRGN

SEQ ID NO: 43732 - protein, 7 aa, synthetic construct
KNYPNNG

SEQ ID NO: 43733 - protein, 7 aa, synthetic construct
KHIGVSG

SEQ ID NO: 43734 - protein, 7 aa, synthetic construct
TTGKVTP

SEQ ID NO: 43735 - protein, 7 aa, synthetic construct
GNKSLSI

SEQ ID NO: 43736 - protein, 7 aa, synthetic construct
KAGSYSV

SEQ ID NO: 43737 - protein, 7 aa, synthetic construct
GNKVTTG

SEQ ID NO: 43738 - protein, 7 aa, synthetic construct
LNGRMAM

SEQ ID NO: 43739 - protein, 7 aa, synthetic construct
AAGYKFG

SEQ ID NO: 43740 - protein, 7 aa, synthetic construct
DGTMRPP

SEQ ID NO: 43741 - protein, 7 aa, synthetic construct
GKSQTNA

SEQ ID NO: 43742 - protein, 7 aa, synthetic construct
QNTGRTA

SEQ ID NO: 43743 - protein, 7 aa, synthetic construct
YNKTPAG

SEQ ID NO: 43744 - protein, 7 aa, synthetic construct
MTKMNEG

SEQ ID NO: 43745 - protein, 7 aa, synthetic construct
VNNRAGG

SEQ ID NO: 43746 - protein, 7 aa, synthetic construct
HQGRLMA

SEQ ID NO: 43747 - protein, 7 aa, synthetic construct
NRVVLHD

SEQ ID NO: 43748 - protein, 7 aa, synthetic construct
ILPVGQQ

SEQ ID NO: 43749 - protein, 7 aa, synthetic construct
TNKATQG

SEQ ID NO: 43750 - protein, 7 aa, synthetic construct
TNTQNKA

SEQ ID NO: 43751 - protein, 7 aa, synthetic construct
GPGTKPG

SEQ ID NO: 43752 - protein, 7 aa, synthetic construct
GQFKTLD

SEQ ID NO: 43753 - protein, 7 aa, synthetic construct
TQMDIRS

SEQ ID NO: 43754 - protein, 7 aa, synthetic construct
KSNTGSS

SEQ ID NO: 43755 - protein, 7 aa, synthetic construct
QAKPPTG

SEQ ID NO: 43756 - protein, 7 aa, synthetic construct
PYRGKED

SEQ ID NO: 43757 - protein, 7 aa, synthetic construct
RDRFADH

SEQ ID NO: 43758 - protein, 7 aa, synthetic construct
GKTDKQS

SEQ ID NO: 43759 - protein, 7 aa, synthetic construct
SNAIKPC

SEQ ID NO: 43760 - protein, 7 aa, synthetic construct
HQKGSNF

SEQ ID NO: 43761 - protein, 7 aa, synthetic construct
NSSKQVG

SEQ ID NO: 43762 - protein, 7 aa, synthetic construct
NIKLKPV

SEQ ID NO: 43763 - protein, 7 aa, synthetic construct
QEYKKQP

SEQ ID NO: 43764 - protein, 7 aa, synthetic construct
YSKVRGE

SEQ ID NO: 43765 - protein, 7 aa, synthetic construct
TKNPPGG

SEQ ID NO: 43766 - protein, 7 aa, synthetic construct
PGVTGLK

SEQ ID NO: 43767 - protein, 7 aa, synthetic construct
YTKFGQD

SEQ ID NO: 43768 - protein, 7 aa, synthetic construct
KPHAQTG

SEQ ID NO: 43769 - protein, 7 aa, synthetic construct
FPMVGKD

SEQ ID NO: 43770 - protein, 7 aa, synthetic construct
KMVAGAN

SEQ ID NO: 43771 - protein, 7 aa, synthetic construct
MQGAHKN

SEQ ID NO: 43772 - protein, 7 aa, synthetic construct
KIPTAVY

SEQ ID NO: 43773 - protein, 7 aa, synthetic construct
GSGPLAE

SEQ ID NO: 43774 - protein, 7 aa, synthetic construct
RTSNNNG

SEQ ID NO: 43775 - protein, 7 aa, synthetic construct
GKSAQNG

SEQ ID NO: 43776 - protein, 7 aa, synthetic construct
RPLSNTG

SEQ ID NO: 43777 - protein, 7 aa, synthetic construct
QAKVNDR

SEQ ID NO: 43778 - protein, 7 aa, synthetic construct
FSNKPHQ

SEQ ID NO: 43779 - protein, 7 aa, synthetic construct
GKKDAGG

SEQ ID NO: 43780 - protein, 7 aa, synthetic construct
KPTHLDT

SEQ ID NO: 43781 - protein, 7 aa, synthetic construct
KPAMVGG

SEQ ID NO: 43782 - protein, 7 aa, synthetic construct
GKSTTMG

SEQ ID NO: 43783 - protein, 7 aa, synthetic construct
IARHTGI

SEQ ID NO: 43784 - protein, 7 aa, synthetic construct
KLGQGNS

SEQ ID NO: 43785 - protein, 7 aa, synthetic construct
KVTSQQA

SEQ ID NO: 43786 - protein, 7 aa, synthetic construct
SLQASGR

SEQ ID NO: 43787 - protein, 7 aa, synthetic construct
YAANRSQ

SEQ ID NO: 43788 - protein, 7 aa, synthetic construct
KPQALVG

SEQ ID NO: 43789 - protein, 7 aa, synthetic construct
YGMGKPS

SEQ ID NO: 43790 - protein, 7 aa, synthetic construct
YKPQGWQ

SEQ ID NO: 43791 - protein, 7 aa, synthetic construct
LKGVGTA

SEQ ID NO: 43792 - protein, 7 aa, synthetic construct
DYGKMKS

SEQ ID NO: 43793 - protein, 7 aa, synthetic construct
KVAGNQI

SEQ ID NO: 43794 - protein, 7 aa, synthetic construct
HQFIGKG

SEQ ID NO: 43795 - protein, 7 aa, synthetic construct
NGNQTKG

SEQ ID NO: 43796 - protein, 7 aa, synthetic construct
QSMAVKA

SEQ ID NO: 43797 - protein, 7 aa, synthetic construct
TFQYQSP

SEQ ID NO: 43798 - protein, 7 aa, synthetic construct
IKSYNHN

SEQ ID NO: 43799 - protein, 7 aa, synthetic construct
FKDNKSG

SEQ ID NO: 43800 - protein, 7 aa, synthetic construct
FNPQKQA

SEQ ID NO: 43801 - protein, 7 aa, synthetic construct
LQQAQGG

SEQ ID NO: 43802 - protein, 7 aa, synthetic construct
KFNASLV

SEQ ID NO: 43803 - protein, 7 aa, synthetic construct
RNNNGMG

SEQ ID NO: 43804 - protein, 7 aa, synthetic construct
YPGGKTS

SEQ ID NO: 43805 - protein, 7 aa, synthetic construct
WRNMDQG

SEQ ID NO: 43806 - protein, 7 aa, synthetic construct
KAQVMAE

SEQ ID NO: 43807 - protein, 7 aa, synthetic construct
SSQQRNG

SEQ ID NO: 43808 - protein, 7 aa, synthetic construct
YPLDSKN

SEQ ID NO: 43809 - protein, 7 aa, synthetic construct
RGSTNMG

SEQ ID NO: 43810 - protein, 7 aa, synthetic construct
MQKQRVE

SEQ ID NO: 43811 - protein, 7 aa, synthetic construct
IVMARQE

SEQ ID NO: 43812 - protein, 7 aa, synthetic construct
DPIRNKH

SEQ ID NO: 43813 - protein, 7 aa, synthetic construct
HGKPSMP

SEQ ID NO: 43814 - protein, 7 aa, synthetic construct
GTNVRGG

SEQ ID NO: 43815 - protein, 7 aa, synthetic construct
SSTSGIR

SEQ ID NO: 43816 - protein, 7 aa, synthetic construct
IKAVQVA

SEQ ID NO: 43817 - protein, 7 aa, synthetic construct
DPKSKQF

SEQ ID NO: 43818 - protein, 7 aa, synthetic construct
RDKSANA

SEQ ID NO: 43819 - protein, 7 aa, synthetic construct
TGPYNPP

SEQ ID NO: 43820 - protein, 7 aa, synthetic construct
KPAMSVG

SEQ ID NO: 43821 - protein, 7 aa, synthetic construct
TPRIGNG

SEQ ID NO: 43822 - protein, 7 aa, synthetic construct
SYRSVEG

SEQ ID NO: 43823 - protein, 7 aa, synthetic construct
FAHSNTL

SEQ ID NO: 43824 - protein, 7 aa, synthetic construct
THGVKAA

SEQ ID NO: 43825 - protein, 7 aa, synthetic construct
NHVKQGN

SEQ ID NO: 43826 - protein, 7 aa, synthetic construct
NKPPMGA

SEQ ID NO: 43827 - protein, 7 aa, synthetic construct
IAKAKTE

SEQ ID NO: 43828 - protein, 7 aa, synthetic construct
SNQRGNG

SEQ ID NO: 43829 - protein, 7 aa, synthetic construct
KPSNMAA

SEQ ID NO: 43830 - protein, 7 aa, synthetic construct
NKSTTQA

SEQ ID NO: 43831 - protein, 7 aa, synthetic construct
GSKFTIA

SEQ ID NO: 43832 - protein, 7 aa, synthetic construct
MNQFKEV

SEQ ID NO: 43833 - protein, 7 aa, synthetic construct
RHNSLTE

SEQ ID NO: 43834 - protein, 7 aa, synthetic construct
SKAQTSG

SEQ ID NO: 43835 - protein, 7 aa, synthetic construct
DKVHHFA

SEQ ID NO: 43836 - protein, 7 aa, synthetic construct
RAQHMPH

SEQ ID NO: 43837 - protein, 7 aa, synthetic construct
KSQNSQA

SEQ ID NO: 43838 - protein, 7 aa, synthetic construct
GGSAKVG

SEQ ID NO: 43839 - protein, 7 aa, synthetic construct
TKGHMAG

SEQ ID NO: 43840 - protein, 7 aa, synthetic construct
TNRHPSM

SEQ ID NO: 43841 - protein, 7 aa, synthetic construct
LHKNAMG

SEQ ID NO: 43842 - protein, 7 aa, synthetic construct
NKTMQNA

SEQ ID NO: 43843 - protein, 7 aa, synthetic construct
RQSAALN

SEQ ID NO: 43844 - protein, 7 aa, synthetic construct
WGRDKSA

SEQ ID NO: 43845 - protein, 7 aa, synthetic construct
PKAGNFG

SEQ ID NO: 43846 - protein, 7 aa, synthetic construct
KATMTRV

SEQ ID NO: 43847 - protein, 7 aa, synthetic construct
YKQQSSN

SEQ ID NO: 43848 - protein, 7 aa, synthetic construct
RNGQPTP

SEQ ID NO: 43849 - protein, 7 aa, synthetic construct
QGKYAEP

SEQ ID NO: 43850 - protein, 7 aa, synthetic construct
VLKYTDH

SEQ ID NO: 43851 - protein, 7 aa, synthetic construct
MARPTGV

SEQ ID NO: 43852 - protein, 7 aa, synthetic construct
RTSTHEI

SEQ ID NO: 43853 - protein, 7 aa, synthetic construct
MASRTQA

SEQ ID NO: 43854 - protein, 7 aa, synthetic construct
IPAMAHS

SEQ ID NO: 43855 - protein, 7 aa, synthetic construct
VAKSNGG

SEQ ID NO: 43856 - protein, 7 aa, synthetic construct
LHTGYPS

SEQ ID NO: 43857 - protein, 7 aa, synthetic construct
GTRGVSG

SEQ ID NO: 43858 - protein, 7 aa, synthetic construct
QTHMGEK

SEQ ID NO: 43859 - protein, 7 aa, synthetic construct
KTYETVG

SEQ ID NO: 43860 - protein, 7 aa, synthetic construct
ADGVTRA

SEQ ID NO: 43861 - protein, 7 aa, synthetic construct
KMQPNQS

SEQ ID NO: 43862 - protein, 7 aa, synthetic construct
GHNSLKG

SEQ ID NO: 43863 - protein, 7 aa, synthetic construct
NSGQMKA

SEQ ID NO: 43864 - protein, 7 aa, synthetic construct
PTNRQGA

SEQ ID NO: 43865 - protein, 7 aa, synthetic construct
KLNSAGG

SEQ ID NO: 43866 - protein, 7 aa, synthetic construct
IRQNSGY

SEQ ID NO: 43867 - protein, 7 aa, synthetic construct
QGETRNN

SEQ ID NO: 43868 - protein, 7 aa, synthetic construct
FKNQYPA

SEQ ID NO: 43869 - protein, 7 aa, synthetic construct
KASSPGG

SEQ ID NO: 43870 - protein, 7 aa, synthetic construct
SSNFGKS

SEQ ID NO: 43871 - protein, 7 aa, synthetic construct
PIRGHAE

SEQ ID NO: 43872 - protein, 7 aa, synthetic construct
QMRTNQP

SEQ ID NO: 43873 - protein, 7 aa, synthetic construct
YNKGDSI

SEQ ID NO: 43874 - protein, 7 aa, synthetic construct
TMNARQA

SEQ ID NO: 43875 - protein, 7 aa, synthetic construct
VKANHTP

SEQ ID NO: 43876 - protein, 7 aa, synthetic construct
FKPSTAP

SEQ ID NO: 43877 - protein, 7 aa, synthetic construct
NPTNRSG

SEQ ID NO: 43878 - protein, 7 aa, synthetic construct
FKSNMQA

SEQ ID NO: 43879 - protein, 7 aa, synthetic construct
FASHIAP

SEQ ID NO: 43880 - protein, 7 aa, synthetic construct
HRGLNLE

SEQ ID NO: 43881 - protein, 7 aa, synthetic construct
WKSGNLT

SEQ ID NO: 43882 - protein, 7 aa, synthetic construct
GRNHIMP

SEQ ID NO: 43883 - protein, 7 aa, synthetic construct
IHGNYGA

SEQ ID NO: 43884 - protein, 7 aa, synthetic construct
GFGNKTG

SEQ ID NO: 43885 - protein, 7 aa, synthetic construct
PQTASRG

SEQ ID NO: 43886 - protein, 7 aa, synthetic construct
EPNRIAP

SEQ ID NO: 43887 - protein, 7 aa, synthetic construct
QTPQRGA

SEQ ID NO: 43888 - protein, 7 aa, synthetic construct
QNTARQG

SEQ ID NO: 43889 - protein, 7 aa, synthetic construct
TKTSSVP

SEQ ID NO: 43890 - protein, 7 aa, synthetic construct
MFGNLSP

SEQ ID NO: 43891 - protein, 7 aa, synthetic construct
QKNNPSG

SEQ ID NO: 43892 - protein, 7 aa, synthetic construct
FKKNGVE

SEQ ID NO: 43893 - protein, 7 aa, synthetic construct
SRNSVQT

SEQ ID NO: 43894 - protein, 7 aa, synthetic construct
ISSTHSG

SEQ ID NO: 43895 - protein, 7 aa, synthetic construct
IIEKMHF

SEQ ID NO: 43896 - protein, 7 aa, synthetic construct
YSHAKDP

SEQ ID NO: 43897 - protein, 7 aa, synthetic construct
MGMGRGT

SEQ ID NO: 43898 - protein, 7 aa, synthetic construct
RTNAGKD

SEQ ID NO: 43899 - protein, 7 aa, synthetic construct
YPNQVKG

SEQ ID NO: 43900 - protein, 7 aa, synthetic construct
HPRYEQA

SEQ ID NO: 43901 - protein, 7 aa, synthetic construct
PTDRKQM

SEQ ID NO: 43902 - protein, 7 aa, synthetic construct
ANNKQNG

SEQ ID NO: 43903 - protein, 7 aa, synthetic construct
IKTNNNV

SEQ ID NO: 43904 - protein, 7 aa, synthetic construct
QNIHGPS

SEQ ID NO: 43905 - protein, 7 aa, synthetic construct
RMGAAPS

SEQ ID NO: 43906 - protein, 7 aa, synthetic construct
YKPQMSN

SEQ ID NO: 43907 - protein, 7 aa, synthetic construct
QMGKGQF

SEQ ID NO: 43908 - protein, 7 aa, synthetic construct
KNGAVGG

SEQ ID NO: 43909 - protein, 7 aa, synthetic construct
NNIREMG

SEQ ID NO: 43910 - protein, 7 aa, synthetic construct
KNNDAKG

SEQ ID NO: 43911 - protein, 7 aa, synthetic construct
YANHVYS

SEQ ID NO: 43912 - protein, 7 aa, synthetic construct
ITGYMKE

SEQ ID NO: 43913 - protein, 7 aa, synthetic construct
PMRTAQG

SEQ ID NO: 43914 - protein, 7 aa, synthetic construct
QVKVTAP

SEQ ID NO: 43915 - protein, 7 aa, synthetic construct
FSRATDA

SEQ ID NO: 43916 - protein, 7 aa, synthetic construct
YRSEWSA

SEQ ID NO: 43917 - protein, 7 aa, synthetic construct
NERIARD

SEQ ID NO: 43918 - protein, 7 aa, synthetic construct
VTRNNPA

SEQ ID NO: 43919 - protein, 7 aa, synthetic construct
TNSRGTV

SEQ ID NO: 43920 - protein, 7 aa, synthetic construct
MFTSSPA

SEQ ID NO: 43921 - protein, 7 aa, synthetic construct
KRVNELA

SEQ ID NO: 43922 - protein, 7 aa, synthetic construct
KAYNGQA

SEQ ID NO: 43923 - protein, 7 aa, synthetic construct
IAMGKTN

SEQ ID NO: 43924 - protein, 7 aa, synthetic construct
PTNKGTG

SEQ ID NO: 43925 - protein, 7 aa, synthetic construct
GTPRMVA

SEQ ID NO: 43926 - protein, 7 aa, synthetic construct
TVKSQQS

SEQ ID NO: 43927 - protein, 7 aa, synthetic construct
PQSMKIA

SEQ ID NO: 43928 - protein, 7 aa, synthetic construct
NQARSVG

SEQ ID NO: 43929 - protein, 7 aa, synthetic construct
EIIRNGN

SEQ ID NO: 43930 - protein, 7 aa, synthetic construct
MGGKVQA

SEQ ID NO: 43931 - protein, 7 aa, synthetic construct
TNRGSVP

SEQ ID NO: 43932 - protein, 7 aa, synthetic construct
QKSNQTA

SEQ ID NO: 43933 - protein, 7 aa, synthetic construct
LKIGKIS

SEQ ID NO: 43934 - protein, 7 aa, synthetic construct
MQPTKSS

SEQ ID NO: 43935 - protein, 7 aa, synthetic construct
PHNTHKQ

SEQ ID NO: 43936 - protein, 7 aa, synthetic construct
MQPGKNY

SEQ ID NO: 43937 - protein, 7 aa, synthetic construct
SVKSSTG

SEQ ID NO: 43938 - protein, 7 aa, synthetic construct
KFGQTSG

SEQ ID NO: 43939 - protein, 7 aa, synthetic construct
IKPAHSP

SEQ ID NO: 43940 - protein, 7 aa, synthetic construct
YHPKMPQ

SEQ ID NO: 43941 - protein, 7 aa, synthetic construct
VFDGRTG

SEQ ID NO: 43942 - protein, 7 aa, synthetic construct
YPRAQVG

SEQ ID NO: 43943 - protein, 7 aa, synthetic construct
KPGSMTP

SEQ ID NO: 43944 - protein, 7 aa, synthetic construct
LGRSVMP

SEQ ID NO: 43945 - protein, 7 aa, synthetic construct
NKPSPGA

SEQ ID NO: 43946 - protein, 7 aa, synthetic construct
YQGRQDS

SEQ ID NO: 43947 - protein, 7 aa, synthetic construct
IKGNSQG

SEQ ID NO: 43948 - protein, 7 aa, synthetic construct
SAQKMDR

SEQ ID NO: 43949 - protein, 7 aa, synthetic construct
AYLKMKD

SEQ ID NO: 43950 - protein, 7 aa, synthetic construct
RQPSGSV

SEQ ID NO: 43951 - protein, 7 aa, synthetic construct
AKGGRES

SEQ ID NO: 43952 - protein, 7 aa, synthetic construct
SDTYSKI

SEQ ID NO: 43953 - protein, 7 aa, synthetic construct
QSNKSQA

SEQ ID NO: 43954 - protein, 7 aa, synthetic construct
NTSQTKV

SEQ ID NO: 43955 - protein, 7 aa, synthetic construct
KTQVSNA

SEQ ID NO: 43956 - protein, 7 aa, synthetic construct
WGKKNDG

SEQ ID NO: 43957 - protein, 7 aa, synthetic construct
CMSTRCE

SEQ ID NO: 43958 - protein, 7 aa, synthetic construct
NGPKPMT

SEQ ID NO: 43959 - protein, 7 aa, synthetic construct
QTHRPGL

SEQ ID NO: 43960 - protein, 7 aa, synthetic construct
MISQPRS

SEQ ID NO: 43961 - protein, 7 aa, synthetic construct
YNSNKAG

SEQ ID NO: 43962 - protein, 7 aa, synthetic construct
QKHPVGF

SEQ ID NO: 43963 - protein, 7 aa, synthetic construct
THAAVKD

SEQ ID NO: 43964 - protein, 7 aa, synthetic construct
IMKDRIA

SEQ ID NO: 43965 - protein, 7 aa, synthetic construct
TSKTATM

SEQ ID NO: 43966 - protein, 7 aa, synthetic construct
KNSSVQM

SEQ ID NO: 43967 - protein, 7 aa, synthetic construct
PYKKTEH

SEQ ID NO: 43968 - protein, 7 aa, synthetic construct
RPGATNS

SEQ ID NO: 43969 - protein, 7 aa, synthetic construct
TKAPNRE

SEQ ID NO: 43970 - protein, 7 aa, synthetic construct
KPQSGGS

SEQ ID NO: 43971 - protein, 7 aa, synthetic construct
MGHRLGA

SEQ ID NO: 43972 - protein, 7 aa, synthetic construct
ELAGRRE

SEQ ID NO: 43973 - protein, 7 aa, synthetic construct
HAASSKA

SEQ ID NO: 43974 - protein, 7 aa, synthetic construct
GQGVFHQ

SEQ ID NO: 43975 - protein, 7 aa, synthetic construct
FNKSSAS

SEQ ID NO: 43976 - protein, 7 aa, synthetic construct
IYPRGGN

SEQ ID NO: 43977 - protein, 7 aa, synthetic construct
PRTQNPM

SEQ ID NO: 43978 - protein, 7 aa, synthetic construct
EKNGAVS

SEQ ID NO: 43979 - protein, 7 aa, synthetic construct
STQSQKG

SEQ ID NO: 43980 - protein, 7 aa, synthetic construct
VWSGKSS

SEQ ID NO: 43981 - protein, 7 aa, synthetic construct
RGADPNQ

SEQ ID NO: 43982 - protein, 7 aa, synthetic construct
VQGRNLA

SEQ ID NO: 43983 - protein, 7 aa, synthetic construct
FNARQGE

SEQ ID NO: 43984 - protein, 7 aa, synthetic construct
NHPPFSK

SEQ ID NO: 43985 - protein, 7 aa, synthetic construct
VNSKSQG

SEQ ID NO: 43986 - protein, 7 aa, synthetic construct
KQPSNYG

SEQ ID NO: 43987 - protein, 7 aa, synthetic construct
LQMKPVS

SEQ ID NO: 43988 - protein, 7 aa, synthetic construct
TKARGDP

SEQ ID NO: 43989 - protein, 7 aa, synthetic construct
GKWVSEN

SEQ ID NO: 43990 - protein, 7 aa, synthetic construct
VNHANAG

SEQ ID NO: 43991 - protein, 7 aa, synthetic construct
KPATMKD

SEQ ID NO: 43992 - protein, 7 aa, synthetic construct
EASKLRY

SEQ ID NO: 43993 - protein, 7 aa, synthetic construct
RGPNISG

SEQ ID NO: 43994 - protein, 7 aa, synthetic construct
SPRTGVY

SEQ ID NO: 43995 - protein, 7 aa, synthetic construct
PRPTAGT

SEQ ID NO: 43996 - protein, 7 aa, synthetic construct
TPPNQYL

SEQ ID NO: 43997 - protein, 7 aa, synthetic construct
TAPTRTG

SEQ ID NO: 43998 - protein, 7 aa, synthetic construct
QQRTGVG

SEQ ID NO: 43999 - protein, 7 aa, synthetic construct
WNTGKSA

SEQ ID NO: 44000 - protein, 7 aa, synthetic construct
NTKAMRD

SEQ ID NO: 44001 - protein, 7 aa, synthetic construct
NKTHQSL

SEQ ID NO: 44002 - protein, 7 aa, synthetic construct
VRGVVAV

SEQ ID NO: 44003 - protein, 7 aa, synthetic construct
QSARSQI

SEQ ID NO: 44004 - protein, 7 aa, synthetic construct
TKNQVSA

SEQ ID NO: 44005 - protein, 7 aa, synthetic construct
LKPAVGM

SEQ ID NO: 44006 - protein, 7 aa, synthetic construct
SASFTVA

SEQ ID NO: 44007 - protein, 7 aa, synthetic construct
IHQRIMP

SEQ ID NO: 44008 - protein, 7 aa, synthetic construct
SSLTKNY

SEQ ID NO: 44009 - protein, 7 aa, synthetic construct
IKKPHTD

SEQ ID NO: 44010 - protein, 7 aa, synthetic construct
FRNNHEL

SEQ ID NO: 44011 - protein, 7 aa, synthetic construct
THMRPVE

SEQ ID NO: 44012 - protein, 7 aa, synthetic construct
SGKTNQV

SEQ ID NO: 44013 - protein, 7 aa, synthetic construct
YSSSAKV

SEQ ID NO: 44014 - protein, 7 aa, synthetic construct
LANWEKN

SEQ ID NO: 44015 - protein, 7 aa, synthetic construct
FPKSTAG

SEQ ID NO: 44016 - protein, 7 aa, synthetic construct
KSNNSQS

SEQ ID NO: 44017 - protein, 7 aa, synthetic construct
EPQFPKT

SEQ ID NO: 44018 - protein, 7 aa, synthetic construct
DRRSQEA

SEQ ID NO: 44019 - protein, 7 aa, synthetic construct
LVRGTMT

SEQ ID NO: 44020 - protein, 7 aa, synthetic construct
TNKNSTG

SEQ ID NO: 44021 - protein, 7 aa, synthetic construct
KEGHMVG

SEQ ID NO: 44022 - protein, 7 aa, synthetic construct
YKDSDQI

SEQ ID NO: 44023 - protein, 7 aa, synthetic construct
QQRQTNP

SEQ ID NO: 44024 - protein, 7 aa, synthetic construct
WKMQNKD

SEQ ID NO: 44025 - protein, 7 aa, synthetic construct
NKSAIKD

SEQ ID NO: 44026 - protein, 7 aa, synthetic construct
DVHHHKP

SEQ ID NO: 44027 - protein, 7 aa, synthetic construct
QKDPGRA

SEQ ID NO: 44028 - protein, 7 aa, synthetic construct
QASRAVI

SEQ ID NO: 44029 - protein, 7 aa, synthetic construct
TMHARPE

SEQ ID NO: 44030 - protein, 7 aa, synthetic construct
NRSSNAP

SEQ ID NO: 44031 - protein, 7 aa, synthetic construct
WGTQRDG

SEQ ID NO: 44032 - protein, 7 aa, synthetic construct
TNTFPGP

SEQ ID NO: 44033 - protein, 7 aa, synthetic construct
GANQRMG

SEQ ID NO: 44034 - protein, 7 aa, synthetic construct
TRQPAYG

SEQ ID NO: 44035 - protein, 7 aa, synthetic construct
KSQQTGG

SEQ ID NO: 44036 - protein, 7 aa, synthetic construct
MSKMSAG

SEQ ID NO: 44037 - protein, 7 aa, synthetic construct
KKSDGTS

SEQ ID NO: 44038 - protein, 7 aa, synthetic construct
VNVVARE

SEQ ID NO: 44039 - protein, 7 aa, synthetic construct
ANIHVNK

SEQ ID NO: 44040 - protein, 7 aa, synthetic construct
KEKTMSG

SEQ ID NO: 44041 - protein, 7 aa, synthetic construct
KKWEPPE

SEQ ID NO: 44042 - protein, 7 aa, synthetic construct
MMGAARN

SEQ ID NO: 44043 - protein, 7 aa, synthetic construct
NKSQSMN

SEQ ID NO: 44044 - protein, 7 aa, synthetic construct
QFKGPLH

SEQ ID NO: 44045 - protein, 7 aa, synthetic construct
GPNMVKS

SEQ ID NO: 44046 - protein, 7 aa, synthetic construct
TNRSSPP

SEQ ID NO: 44047 - protein, 7 aa, synthetic construct
TVRQTSP

SEQ ID NO: 44048 - protein, 7 aa, synthetic construct
IRDINKH

SEQ ID NO: 44049 - protein, 7 aa, synthetic construct
ARVANGM

SEQ ID NO: 44050 - protein, 7 aa, synthetic construct
QKSSAQS

SEQ ID NO: 44051 - protein, 7 aa, synthetic construct
MSRMRDE

SEQ ID NO: 44052 - protein, 7 aa, synthetic construct
QKPPQPS

SEQ ID NO: 44053 - protein, 7 aa, synthetic construct
ATGKGNG

SEQ ID NO: 44054 - protein, 7 aa, synthetic construct
RTTSGSP

SEQ ID NO: 44055 - protein, 7 aa, synthetic construct
RMPTNQS

SEQ ID NO: 44056 - protein, 7 aa, synthetic construct
IQNQRQG

SEQ ID NO: 44057 - protein, 7 aa, synthetic construct
VNPRNQG

SEQ ID NO: 44058 - protein, 7 aa, synthetic construct
INRPNKE

SEQ ID NO: 44059 - protein, 7 aa, synthetic construct
PRNAVAG

SEQ ID NO: 44060 - protein, 7 aa, synthetic construct
NTSHQLV

SEQ ID NO: 44061 - protein, 7 aa, synthetic construct
QPPRTGL

SEQ ID NO: 44062 - protein, 7 aa, synthetic construct
TLIQNKF

SEQ ID NO: 44063 - protein, 7 aa, synthetic construct
SQGVTNP

SEQ ID NO: 44064 - protein, 7 aa, synthetic construct
IPNMGNG

SEQ ID NO: 44065 - protein, 7 aa, synthetic construct
YHKAMQN

SEQ ID NO: 44066 - protein, 7 aa, synthetic construct
RMGVGDG

SEQ ID NO: 44067 - protein, 7 aa, synthetic construct
KASASAA

SEQ ID NO: 44068 - protein, 7 aa, synthetic construct
MGKGGKD

SEQ ID NO: 44069 - protein, 7 aa, synthetic construct
KFQNNGA

SEQ ID NO: 44070 - protein, 7 aa, synthetic construct
NMRTGHV

SEQ ID NO: 44071 - protein, 7 aa, synthetic construct
KTSSMMG

SEQ ID NO: 44072 - protein, 7 aa, synthetic construct
SKMAGKE

SEQ ID NO: 44073 - protein, 7 aa, synthetic construct
NRSTSQG

SEQ ID NO: 44074 - protein, 7 aa, synthetic construct
QPRHGPD

SEQ ID NO: 44075 - protein, 7 aa, synthetic construct
VVKLPMK

SEQ ID NO: 44076 - protein, 7 aa, synthetic construct
LHIHSKS

SEQ ID NO: 44077 - protein, 7 aa, synthetic construct
KYDGGQA

SEQ ID NO: 44078 - protein, 7 aa, synthetic construct
RASATMG

SEQ ID NO: 44079 - protein, 7 aa, synthetic construct
QSKQVNA

SEQ ID NO: 44080 - protein, 7 aa, synthetic construct
QRTQVQG

SEQ ID NO: 44081 - protein, 7 aa, synthetic construct
QSGNKQA

SEQ ID NO: 44082 - protein, 7 aa, synthetic construct
GVQRTAP

SEQ ID NO: 44083 - protein, 7 aa, synthetic construct
RNTTSTS

SEQ ID NO: 44084 - protein, 7 aa, synthetic construct
INKNASG

SEQ ID NO: 44085 - protein, 7 aa, synthetic construct
TVGKGVG

SEQ ID NO: 44086 - protein, 7 aa, synthetic construct
MNKMTMD

SEQ ID NO: 44087 - protein, 7 aa, synthetic construct
FRQMGAA

SEQ ID NO: 44088 - protein, 7 aa, synthetic construct
QRATSQP

SEQ ID NO: 44089 - protein, 7 aa, synthetic construct
MNKNAGS

SEQ ID NO: 44090 - protein, 7 aa, synthetic construct
KGNHNQM

SEQ ID NO: 44091 - protein, 7 aa, synthetic construct
SKSPSNG

SEQ ID NO: 44092 - protein, 7 aa, synthetic construct
THATQQN

SEQ ID NO: 44093 - protein, 7 aa, synthetic construct
TSQHTKN

SEQ ID NO: 44094 - protein, 7 aa, synthetic construct
VNVGGGK

SEQ ID NO: 44095 - protein, 7 aa, synthetic construct
GATRTPS

SEQ ID NO: 44096 - protein, 7 aa, synthetic construct
ERQREGK

SEQ ID NO: 44097 - protein, 7 aa, synthetic construct
YHRTADP

SEQ ID NO: 44098 - protein, 7 aa, synthetic construct
HYKGLGE

SEQ ID NO: 44099 - protein, 7 aa, synthetic construct
MIVTGKS

SEQ ID NO: 44100 - protein, 7 aa, synthetic construct
NNRTAPG

SEQ ID NO: 44101 - protein, 7 aa, synthetic construct
RFHADSS

SEQ ID NO: 44102 - protein, 7 aa, synthetic construct
YATRSLD

SEQ ID NO: 44103 - protein, 7 aa, synthetic construct
RSPGSSP

SEQ ID NO: 44104 - protein, 7 aa, synthetic construct
WPGHGSV

SEQ ID NO: 44105 - protein, 7 aa, synthetic construct
MRQNSNP

SEQ ID NO: 44106 - protein, 7 aa, synthetic construct
YSQVKTM

SEQ ID NO: 44107 - protein, 7 aa, synthetic construct
RNTATVG

SEQ ID NO: 44108 - protein, 7 aa, synthetic construct
QMKSGGA

SEQ ID NO: 44109 - protein, 7 aa, synthetic construct
MTNRGQP

SEQ ID NO: 44110 - protein, 7 aa, synthetic construct
MRPNHAT

SEQ ID NO: 44111 - protein, 7 aa, synthetic construct
KQNKEHM

SEQ ID NO: 44112 - protein, 7 aa, synthetic construct
MSIGSMK

SEQ ID NO: 44113 - protein, 7 aa, synthetic construct
TRQQGVT

SEQ ID NO: 44114 - protein, 7 aa, synthetic construct
MDARAKT

SEQ ID NO: 44115 - protein, 7 aa, synthetic construct
TPGYSIP

SEQ ID NO: 44116 - protein, 7 aa, synthetic construct
HHMMAKG

SEQ ID NO: 44117 - protein, 7 aa, synthetic construct
RLDKGGG

SEQ ID NO: 44118 - protein, 7 aa, synthetic construct
WREKTVT

SEQ ID NO: 44119 - protein, 7 aa, synthetic construct
WHNHHPA

SEQ ID NO: 44120 - protein, 7 aa, synthetic construct
IVGVNQN

SEQ ID NO: 44121 - protein, 7 aa, synthetic construct
NSSQSKV

SEQ ID NO: 44122 - protein, 7 aa, synthetic construct
SRVVGSM

SEQ ID NO: 44123 - protein, 7 aa, synthetic construct
ASVGKTP

SEQ ID NO: 44124 - protein, 7 aa, synthetic construct
NKWNEGQ

SEQ ID NO: 44125 - protein, 7 aa, synthetic construct
MFKNAQS

SEQ ID NO: 44126 - protein, 7 aa, synthetic construct
FTKFSPD

SEQ ID NO: 44127 - protein, 7 aa, synthetic construct
TFKETKG

SEQ ID NO: 44128 - protein, 7 aa, synthetic construct
NGLHSLP

SEQ ID NO: 44129 - protein, 7 aa, synthetic construct
ERYGKPS

SEQ ID NO: 44130 - protein, 7 aa, synthetic construct
YSGFQKD

SEQ ID NO: 44131 - protein, 7 aa, synthetic construct
HSSHSKA

SEQ ID NO: 44132 - protein, 7 aa, synthetic construct
YMKSVYA

SEQ ID NO: 44133 - protein, 7 aa, synthetic construct
TRPGISA

SEQ ID NO: 44134 - protein, 7 aa, synthetic construct
TKPSMVA

SEQ ID NO: 44135 - protein, 7 aa, synthetic construct
KPNQASS

SEQ ID NO: 44136 - protein, 7 aa, synthetic construct
HLKDMNY

SEQ ID NO: 44137 - protein, 7 aa, synthetic construct
NKMAHQA

SEQ ID NO: 44138 - protein, 7 aa, synthetic construct
TTSAASV

SEQ ID NO: 44139 - protein, 7 aa, synthetic construct
FQQLSIG

SEQ ID NO: 44140 - protein, 7 aa, synthetic construct
GFGREHA

SEQ ID NO: 44141 - protein, 7 aa, synthetic construct
RSTSTQS

SEQ ID NO: 44142 - protein, 7 aa, synthetic construct
IMAGPNK

SEQ ID NO: 44143 - protein, 7 aa, synthetic construct
QTGGTAP

SEQ ID NO: 44144 - protein, 7 aa, synthetic construct
YPSSKNG

SEQ ID NO: 44145 - protein, 7 aa, synthetic construct
RTAQYAD

SEQ ID NO: 44146 - protein, 7 aa, synthetic construct
YAVLKTQ

SEQ ID NO: 44147 - protein, 7 aa, synthetic construct
GWATHAA

SEQ ID NO: 44148 - protein, 7 aa, synthetic construct
AFQGAKQ

SEQ ID NO: 44149 - protein, 7 aa, synthetic construct
RSPHAPY

SEQ ID NO: 44150 - protein, 7 aa, synthetic construct
VRPSLAG

SEQ ID NO: 44151 - protein, 7 aa, synthetic construct
GIHTVNR

SEQ ID NO: 44152 - protein, 7 aa, synthetic construct
HMVRSQN

SEQ ID NO: 44153 - protein, 7 aa, synthetic construct
QPTKMVG

SEQ ID NO: 44154 - protein, 7 aa, synthetic construct
QGSGTKW

SEQ ID NO: 44155 - protein, 7 aa, synthetic construct
GPRTNSP

SEQ ID NO: 44156 - protein, 7 aa, synthetic construct
VIERPRH

SEQ ID NO: 44157 - protein, 7 aa, synthetic construct
SKSNAGS

SEQ ID NO: 44158 - protein, 7 aa, synthetic construct
SFSAKSP

SEQ ID NO: 44159 - protein, 7 aa, synthetic construct
TGGKTAS

SEQ ID NO: 44160 - protein, 7 aa, synthetic construct
YERQRGD

SEQ ID NO: 44161 - protein, 7 aa, synthetic construct
NKGSSGF

SEQ ID NO: 44162 - protein, 7 aa, synthetic construct
MSSHMNS

SEQ ID NO: 44163 - protein, 7 aa, synthetic construct
MKTQTQG

SEQ ID NO: 44164 - protein, 7 aa, synthetic construct
LKGGPPW

SEQ ID NO: 44165 - protein, 7 aa, synthetic construct
AKNTTAP

SEQ ID NO: 44166 - protein, 7 aa, synthetic construct
FKTTGTA

SEQ ID NO: 44167 - protein, 7 aa, synthetic construct
KATAVQG

SEQ ID NO: 44168 - protein, 7 aa, synthetic construct
KTAGKQE

SEQ ID NO: 44169 - protein, 7 aa, synthetic construct
KTGMASG

SEQ ID NO: 44170 - protein, 7 aa, synthetic construct
HRGLPPP

SEQ ID NO: 44171 - protein, 7 aa, synthetic construct
VANRLQA

SEQ ID NO: 44172 - protein, 7 aa, synthetic construct
MSKNLTP

SEQ ID NO: 44173 - protein, 7 aa, synthetic construct
VKSSSQG

SEQ ID NO: 44174 - protein, 7 aa, synthetic construct
HQRQVTG

SEQ ID NO: 44175 - protein, 7 aa, synthetic construct
STRNMTM

SEQ ID NO: 44176 - protein, 7 aa, synthetic construct
MPRAQAG

SEQ ID NO: 44177 - protein, 7 aa, synthetic construct
LWTGMKE

SEQ ID NO: 44178 - protein, 7 aa, synthetic construct
DGHKILG

SEQ ID NO: 44179 - protein, 7 aa, synthetic construct
NQSARMA

SEQ ID NO: 44180 - protein, 7 aa, synthetic construct
TNKTGQG

SEQ ID NO: 44181 - protein, 7 aa, synthetic construct
FNRQGTA

SEQ ID NO: 44182 - protein, 7 aa, synthetic construct
KAHGPVV

SEQ ID NO: 44183 - protein, 7 aa, synthetic construct
EYRNVPE

SEQ ID NO: 44184 - protein, 7 aa, synthetic construct
FAGVMTS

SEQ ID NO: 44185 - protein, 7 aa, synthetic construct
GKTNTPG

SEQ ID NO: 44186 - protein, 7 aa, synthetic construct
MPANMKA

SEQ ID NO: 44187 - protein, 7 aa, synthetic construct
IGNKPWD

SEQ ID NO: 44188 - protein, 7 aa, synthetic construct
LPAYTKQ

SEQ ID NO: 44189 - protein, 7 aa, synthetic construct
SGTTPKV

SEQ ID NO: 44190 - protein, 7 aa, synthetic construct
KSTSNTA

SEQ ID NO: 44191 - protein, 7 aa, synthetic construct
GMNKSGI

SEQ ID NO: 44192 - protein, 7 aa, synthetic construct
DKRANGT

SEQ ID NO: 44193 - protein, 7 aa, synthetic construct
DQNKWNG

SEQ ID NO: 44194 - protein, 7 aa, synthetic construct
AMTGMRD

SEQ ID NO: 44195 - protein, 7 aa, synthetic construct
MIGKQYH

SEQ ID NO: 44196 - protein, 7 aa, synthetic construct
RAVGNGN

SEQ ID NO: 44197 - protein, 7 aa, synthetic construct
MAPFSAP

SEQ ID NO: 44198 - protein, 7 aa, synthetic construct
NYGNKQA

SEQ ID NO: 44199 - protein, 7 aa, synthetic construct
RAAMGVL

SEQ ID NO: 44200 - protein, 7 aa, synthetic construct
MPWRKEE

SEQ ID NO: 44201 - protein, 7 aa, synthetic construct
HKQQVPS

SEQ ID NO: 44202 - protein, 7 aa, synthetic construct
DLRPLKQ

SEQ ID NO: 44203 - protein, 7 aa, synthetic construct
SNHTQNI

SEQ ID NO: 44204 - protein, 7 aa, synthetic construct
ARHGQQI

SEQ ID NO: 44205 - protein, 7 aa, synthetic construct
RIQSAQT

SEQ ID NO: 44206 - protein, 7 aa, synthetic construct
WDKRIAP

SEQ ID NO: 44207 - protein, 7 aa, synthetic construct
FKSATQN

SEQ ID NO: 44208 - protein, 7 aa, synthetic construct
TVQVGRA

SEQ ID NO: 44209 - protein, 7 aa, synthetic construct
KPSTANS

SEQ ID NO: 44210 - protein, 7 aa, synthetic construct
SAKPHAM

SEQ ID NO: 44211 - protein, 7 aa, synthetic construct
INHVYRG

SEQ ID NO: 44212 - protein, 7 aa, synthetic construct
VRNNQSQ

SEQ ID NO: 44213 - protein, 7 aa, synthetic construct
NRPSEPG

SEQ ID NO: 44214 - protein, 7 aa, synthetic construct
IWTTGTD

SEQ ID NO: 44215 - protein, 7 aa, synthetic construct
YKGAVNG

SEQ ID NO: 44216 - protein, 7 aa, synthetic construct
YISHAKE

SEQ ID NO: 44217 - protein, 7 aa, synthetic construct
QSHQKQW

SEQ ID NO: 44218 - protein, 7 aa, synthetic construct
HVSNTRA

SEQ ID NO: 44219 - protein, 7 aa, synthetic construct
QNVVKGG

SEQ ID NO: 44220 - protein, 7 aa, synthetic construct
MNKYVIQ

SEQ ID NO: 44221 - protein, 7 aa, synthetic construct
YMKSDKP

SEQ ID NO: 44222 - protein, 7 aa, synthetic construct
FTKSLNA

SEQ ID NO: 44223 - protein, 7 aa, synthetic construct
NKVAGSA

SEQ ID NO: 44224 - protein, 7 aa, synthetic construct
LVRSGQA

SEQ ID NO: 44225 - protein, 7 aa, synthetic construct
HMLRDTG

SEQ ID NO: 44226 - protein, 7 aa, synthetic construct
GAGGNKA

SEQ ID NO: 44227 - protein, 7 aa, synthetic construct
TSKSPSG

SEQ ID NO: 44228 - protein, 7 aa, synthetic construct
GTNSRGI

SEQ ID NO: 44229 - protein, 7 aa, synthetic construct
QPKMQHM

SEQ ID NO: 44230 - protein, 7 aa, synthetic construct
VQRSSQN

SEQ ID NO: 44231 - protein, 7 aa, synthetic construct
DVRRVPP

SEQ ID NO: 44232 - protein, 7 aa, synthetic construct
TKNNGQN

SEQ ID NO: 44233 - protein, 7 aa, synthetic construct
NGGNRAG

SEQ ID NO: 44234 - protein, 7 aa, synthetic construct
QKGNSPA

SEQ ID NO: 44235 - protein, 7 aa, synthetic construct
HGPHVKS

SEQ ID NO: 44236 - protein, 7 aa, synthetic construct
KNPSGPP

SEQ ID NO: 44237 - protein, 7 aa, synthetic construct
DAKRQPP

SEQ ID NO: 44238 - protein, 7 aa, synthetic construct
LHRSGMP

SEQ ID NO: 44239 - protein, 7 aa, synthetic construct
RSGHTSF

SEQ ID NO: 44240 - protein, 7 aa, synthetic construct
RSSGVTG

SEQ ID NO: 44241 - protein, 7 aa, synthetic construct
NMPKIPG

SEQ ID NO: 44242 - protein, 7 aa, synthetic construct
QSKSFQG

SEQ ID NO: 44243 - protein, 7 aa, synthetic construct
EMRPSNG

SEQ ID NO: 44244 - protein, 7 aa, synthetic construct
MKASTGS

SEQ ID NO: 44245 - protein, 7 aa, synthetic construct
MTNRPAE

SEQ ID NO: 44246 - protein, 7 aa, synthetic construct
YNGVKQG

SEQ ID NO: 44247 - protein, 7 aa, synthetic construct
FQHREKP

SEQ ID NO: 44248 - protein, 7 aa, synthetic construct
ERNQSHA

SEQ ID NO: 44249 - protein, 7 aa, synthetic construct
TNRTTNG

SEQ ID NO: 44250 - protein, 7 aa, synthetic construct
YQKATSA

SEQ ID NO: 44251 - protein, 7 aa, synthetic construct
LRHHDSG

SEQ ID NO: 44252 - protein, 7 aa, synthetic construct
VVNNKTP

SEQ ID NO: 44253 - protein, 7 aa, synthetic construct
GIGKNGS

SEQ ID NO: 44254 - protein, 7 aa, synthetic construct
QHRNDDR

SEQ ID NO: 44255 - protein, 7 aa, synthetic construct
LNQLMRD

SEQ ID NO: 44256 - protein, 7 aa, synthetic construct
QTGKVAN

SEQ ID NO: 44257 - protein, 7 aa, synthetic construct
TPGAVRA

SEQ ID NO: 44258 - protein, 7 aa, synthetic construct
MSVKAGE

SEQ ID NO: 44259 - protein, 7 aa, synthetic construct
NRYGGPV

SEQ ID NO: 44260 - protein, 7 aa, synthetic construct
MPRDVKG

SEQ ID NO: 44261 - protein, 7 aa, synthetic construct
SKSVSKE

SEQ ID NO: 44262 - protein, 7 aa, synthetic construct
KGNTGSG

SEQ ID NO: 44263 - protein, 7 aa, synthetic construct
QNKWAVA

SEQ ID NO: 44264 - protein, 7 aa, synthetic construct
RIGTTIT

SEQ ID NO: 44265 - protein, 7 aa, synthetic construct
YSSKSSG

SEQ ID NO: 44266 - protein, 7 aa, synthetic construct
YGKSTTS

SEQ ID NO: 44267 - protein, 7 aa, synthetic construct
QSKAQLN

SEQ ID NO: 44268 - protein, 7 aa, synthetic construct
KTKTEWV

SEQ ID NO: 44269 - protein, 7 aa, synthetic construct
SRPSIIN

SEQ ID NO: 44270 - protein, 7 aa, synthetic construct
KNANQNG

SEQ ID NO: 44271 - protein, 7 aa, synthetic construct
GNNRSGA

SEQ ID NO: 44272 - protein, 7 aa, synthetic construct
NKTGSAP

SEQ ID NO: 44273 - protein, 7 aa, synthetic construct
GSVQKAP

SEQ ID NO: 44274 - protein, 7 aa, synthetic construct
QKGGGFA

SEQ ID NO: 44275 - protein, 7 aa, synthetic construct
NSGNNRW

SEQ ID NO: 44276 - protein, 7 aa, synthetic construct
FNKGNSP

SEQ ID NO: 44277 - protein, 7 aa, synthetic construct
GGPNKGS

SEQ ID NO: 44278 - protein, 7 aa, synthetic construct
YSKTIGP

SEQ ID NO: 44279 - protein, 7 aa, synthetic construct
RIDKFHG

SEQ ID NO: 44280 - protein, 7 aa, synthetic construct
TKGGGNA

SEQ ID NO: 44281 - protein, 7 aa, synthetic construct
TSEHKRD

SEQ ID NO: 44282 - protein, 7 aa, synthetic construct
SVKPMGA

SEQ ID NO: 44283 - protein, 7 aa, synthetic construct
ASQHLQV

SEQ ID NO: 44284 - protein, 7 aa, synthetic construct
SHKPTVD

SEQ ID NO: 44285 - protein, 7 aa, synthetic construct
HDRTVRI

SEQ ID NO: 44286 - protein, 7 aa, synthetic construct
STSTKMS

SEQ ID NO: 44287 - protein, 7 aa, synthetic construct
MKKHDEF

SEQ ID NO: 44288 - protein, 7 aa, synthetic construct
AKGAMGP

SEQ ID NO: 44289 - protein, 7 aa, synthetic construct
FSKLNSE

SEQ ID NO: 44290 - protein, 7 aa, synthetic construct
DEHRFKN

SEQ ID NO: 44291 - protein, 7 aa, synthetic construct
MKSQSQA

SEQ ID NO: 44292 - protein, 7 aa, synthetic construct
LRYNTAT

SEQ ID NO: 44293 - protein, 7 aa, synthetic construct
HTQKQDS

SEQ ID NO: 44294 - protein, 7 aa, synthetic construct
QQRGSNP

SEQ ID NO: 44295 - protein, 7 aa, synthetic construct
ATKGSQV

SEQ ID NO: 44296 - protein, 7 aa, synthetic construct
VKPWIQD

SEQ ID NO: 44297 - protein, 7 aa, synthetic construct
RPFGDQP

SEQ ID NO: 44298 - protein, 7 aa, synthetic construct
KDSKAQT

SEQ ID NO: 44299 - protein, 7 aa, synthetic construct
RSSTAAA

SEQ ID NO: 44300 - protein, 7 aa, synthetic construct
SRQSSSG

SEQ ID NO: 44301 - protein, 7 aa, synthetic construct
MHQQERQ

SEQ ID NO: 44302 - protein, 7 aa, synthetic construct
NRPQNSA

SEQ ID NO: 44303 - protein, 7 aa, synthetic construct
MAGKNYL

SEQ ID NO: 44304 - protein, 7 aa, synthetic construct
YPKFRTD

SEQ ID NO: 44305 - protein, 7 aa, synthetic construct
SKLGNAG

SEQ ID NO: 44306 - protein, 7 aa, synthetic construct
NKETLAV

SEQ ID NO: 44307 - protein, 7 aa, synthetic construct
RAKDTNA

SEQ ID NO: 44308 - protein, 7 aa, synthetic construct
NYKHQAT

SEQ ID NO: 44309 - protein, 7 aa, synthetic construct
NQNANIR

SEQ ID NO: 44310 - protein, 7 aa, synthetic construct
TTSQRNS

SEQ ID NO: 44311 - protein, 7 aa, synthetic construct
MKPARPD

SEQ ID NO: 44312 - protein, 7 aa, synthetic construct
MSSWQRE

SEQ ID NO: 44313 - protein, 7 aa, synthetic construct
DFNKNRA

SEQ ID NO: 44314 - protein, 7 aa, synthetic construct
FGTGKAG

SEQ ID NO: 44315 - protein, 7 aa, synthetic construct
VAPRFQP

SEQ ID NO: 44316 - protein, 7 aa, synthetic construct
YSKREAD

SEQ ID NO: 44317 - protein, 7 aa, synthetic construct
KATSIAG

SEQ ID NO: 44318 - protein, 7 aa, synthetic construct
YAVKNVS

SEQ ID NO: 44319 - protein, 7 aa, synthetic construct
RPMSATP

SEQ ID NO: 44320 - protein, 7 aa, synthetic construct
MVQGSSG

SEQ ID NO: 44321 - protein, 7 aa, synthetic construct
NKTGTGS

SEQ ID NO: 44322 - protein, 7 aa, synthetic construct
YSGKMQG

SEQ ID NO: 44323 - protein, 7 aa, synthetic construct
MVGNTMH

SEQ ID NO: 44324 - protein, 7 aa, synthetic construct
AATLYKG

SEQ ID NO: 44325 - protein, 7 aa, synthetic construct
MPRSAAP

SEQ ID NO: 44326 - protein, 7 aa, synthetic construct
YHARIPA

SEQ ID NO: 44327 - protein, 7 aa, synthetic construct
PGKSMTA

SEQ ID NO: 44328 - protein, 7 aa, synthetic construct
GVAYTAG

SEQ ID NO: 44329 - protein, 7 aa, synthetic construct
TKTTTGG

SEQ ID NO: 44330 - protein, 7 aa, synthetic construct
FRGSTVG

SEQ ID NO: 44331 - protein, 7 aa, synthetic construct
FSKIYAA

SEQ ID NO: 44332 - protein, 7 aa, synthetic construct
RVASINN

SEQ ID NO: 44333 - protein, 7 aa, synthetic construct
MQRKEWE

SEQ ID NO: 44334 - protein, 7 aa, synthetic construct
QRIDPVL

SEQ ID NO: 44335 - protein, 7 aa, synthetic construct
RGGTMLQ

SEQ ID NO: 44336 - protein, 7 aa, synthetic construct
VLKLKEY

SEQ ID NO: 44337 - protein, 7 aa, synthetic construct
SKHITTP

SEQ ID NO: 44338 - protein, 7 aa, synthetic construct
LGQGTRY

SEQ ID NO: 44339 - protein, 7 aa, synthetic construct
PRKVEQE

SEQ ID NO: 44340 - protein, 7 aa, synthetic construct
VSARHPD

SEQ ID NO: 44341 - protein, 7 aa, synthetic construct
RTTSQTH

SEQ ID NO: 44342 - protein, 7 aa, synthetic construct
QQRNVGG

SEQ ID NO: 44343 - protein, 7 aa, synthetic construct
QVGFTPN

SEQ ID NO: 44344 - protein, 7 aa, synthetic construct
TMSGRQA

SEQ ID NO: 44345 - protein, 7 aa, synthetic construct
IQRTPER

SEQ ID NO: 44346 - protein, 7 aa, synthetic construct
SARSNMA

SEQ ID NO: 44347 - protein, 7 aa, synthetic construct
KHIQNIG

SEQ ID NO: 44348 - protein, 7 aa, synthetic construct
RPSNSVA

SEQ ID NO: 44349 - protein, 7 aa, synthetic construct
AKSFTQA

SEQ ID NO: 44350 - protein, 7 aa, synthetic construct
REPSYGG

SEQ ID NO: 44351 - protein, 7 aa, synthetic construct
LLAKGTD

SEQ ID NO: 44352 - protein, 7 aa, synthetic construct
GAKSQQA

SEQ ID NO: 44353 - protein, 7 aa, synthetic construct
KDAGQRQ

SEQ ID NO: 44354 - protein, 7 aa, synthetic construct
TNKQTQS

SEQ ID NO: 44355 - protein, 7 aa, synthetic construct
TIGKTGY

SEQ ID NO: 44356 - protein, 7 aa, synthetic construct
RQQSRDY

SEQ ID NO: 44357 - protein, 7 aa, synthetic construct
VHSKVTG

SEQ ID NO: 44358 - protein, 7 aa, synthetic construct
YNGWVKA

SEQ ID NO: 44359 - protein, 7 aa, synthetic construct
KNNPGNP

SEQ ID NO: 44360 - protein, 7 aa, synthetic construct
TKSSVSA

SEQ ID NO: 44361 - protein, 7 aa, synthetic construct
SNQSAIQ

SEQ ID NO: 44362 - protein, 7 aa, synthetic construct
RQGATNA

SEQ ID NO: 44363 - protein, 7 aa, synthetic construct
RHGTGSQ

SEQ ID NO: 44364 - protein, 7 aa, synthetic construct
MAKSANG

SEQ ID NO: 44365 - protein, 7 aa, synthetic construct
TKSSSFL

SEQ ID NO: 44366 - protein, 7 aa, synthetic construct
RLHGTVE

SEQ ID NO: 44367 - protein, 7 aa, synthetic construct
TPSRQAY

SEQ ID NO: 44368 - protein, 7 aa, synthetic construct
QSRPGGG

SEQ ID NO: 44369 - protein, 7 aa, synthetic construct
GGHIKAS

SEQ ID NO: 44370 - protein, 7 aa, synthetic construct
AKNNTDA

SEQ ID NO: 44371 - protein, 7 aa, synthetic construct
NNGVRVG

SEQ ID NO: 44372 - protein, 7 aa, synthetic construct
GLRMKSD

SEQ ID NO: 44373 - protein, 7 aa, synthetic construct
IRASGTE

SEQ ID NO: 44374 - protein, 7 aa, synthetic construct
TMKSNNA

SEQ ID NO: 44375 - protein, 7 aa, synthetic construct
QHNVKMN

SEQ ID NO: 44376 - protein, 7 aa, synthetic construct
GNYAHNM

SEQ ID NO: 44377 - protein, 7 aa, synthetic construct
DSRHANS

SEQ ID NO: 44378 - protein, 7 aa, synthetic construct
KSSGNVP

SEQ ID NO: 44379 - protein, 7 aa, synthetic construct
LGHGPER

SEQ ID NO: 44380 - protein, 7 aa, synthetic construct
FTHVRES

SEQ ID NO: 44381 - protein, 7 aa, synthetic construct
NRGQMSA

SEQ ID NO: 44382 - protein, 7 aa, synthetic construct
VKSYGDH

SEQ ID NO: 44383 - protein, 7 aa, synthetic construct
LGMTNHS

SEQ ID NO: 44384 - protein, 7 aa, synthetic construct
MGNGYQG

SEQ ID NO: 44385 - protein, 7 aa, synthetic construct
MKGGAVA

SEQ ID NO: 44386 - protein, 7 aa, synthetic construct
NPPGTSA

SEQ ID NO: 44387 - protein, 7 aa, synthetic construct
TNNPRQG

SEQ ID NO: 44388 - protein, 7 aa, synthetic construct
ISTVRSA

SEQ ID NO: 44389 - protein, 7 aa, synthetic construct
QKNSPGA

SEQ ID NO: 44390 - protein, 7 aa, synthetic construct
TTSGKIN

SEQ ID NO: 44391 - protein, 7 aa, synthetic construct
SYPGFKP

SEQ ID NO: 44392 - protein, 7 aa, synthetic construct
MRGTNMG

SEQ ID NO: 44393 - protein, 7 aa, synthetic construct
WERKVMD

SEQ ID NO: 44394 - protein, 7 aa, synthetic construct
FKMSSQA

SEQ ID NO: 44395 - protein, 7 aa, synthetic construct
QEPPMRR

SEQ ID NO: 44396 - protein, 7 aa, synthetic construct
WTQQAQG

SEQ ID NO: 44397 - protein, 7 aa, synthetic construct
GQYRNGD

SEQ ID NO: 44398 - protein, 7 aa, synthetic construct
HSKATTG

SEQ ID NO: 44399 - protein, 7 aa, synthetic construct
MRTGQSP

SEQ ID NO: 44400 - protein, 7 aa, synthetic construct
SSGKITA

SEQ ID NO: 44401 - protein, 7 aa, synthetic construct
KRDVGDY

SEQ ID NO: 44402 - protein, 7 aa, synthetic construct
IKHAGDW

SEQ ID NO: 44403 - protein, 7 aa, synthetic construct
NNIKQIQ

SEQ ID NO: 44404 - protein, 7 aa, synthetic construct
ERTVKVG

SEQ ID NO: 44405 - protein, 7 aa, synthetic construct
TGKSMGS

SEQ ID NO: 44406 - protein, 7 aa, synthetic construct
GMAEKKW

SEQ ID NO: 44407 - protein, 7 aa, synthetic construct
AGQQQKG

SEQ ID NO: 44408 - protein, 7 aa, synthetic construct
NPSYQVS

SEQ ID NO: 44409 - protein, 7 aa, synthetic construct
QQVKAVV

SEQ ID NO: 44410 - protein, 7 aa, synthetic construct
QTNRTGG

SEQ ID NO: 44411 - protein, 7 aa, synthetic construct
QKTGSTG

SEQ ID NO: 44412 - protein, 7 aa, synthetic construct
INARDYG

SEQ ID NO: 44413 - protein, 7 aa, synthetic construct
HMPLSRN

SEQ ID NO: 44414 - protein, 7 aa, synthetic construct
FKGGNQT

SEQ ID NO: 44415 - protein, 7 aa, synthetic construct
AKNSMQG

SEQ ID NO: 44416 - protein, 7 aa, synthetic construct
MQKSNQM

SEQ ID NO: 44417 - protein, 7 aa, synthetic construct
KGNSQNG

SEQ ID NO: 44418 - protein, 7 aa, synthetic construct
DKNRHHE

SEQ ID NO: 44419 - protein, 7 aa, synthetic construct
YKNVVTI

SEQ ID NO: 44420 - protein, 7 aa, synthetic construct
RTTTSTA

SEQ ID NO: 44421 - protein, 7 aa, synthetic construct
TKNVAVS

SEQ ID NO: 44422 - protein, 7 aa, synthetic construct
TRGNMTA

SEQ ID NO: 44423 - protein, 7 aa, synthetic construct
LAQRSME

SEQ ID NO: 44424 - protein, 7 aa, synthetic construct
PPMRPDL

SEQ ID NO: 44425 - protein, 7 aa, synthetic construct
QVPGTKG

SEQ ID NO: 44426 - protein, 7 aa, synthetic construct
NRQIKSE

SEQ ID NO: 44427 - protein, 7 aa, synthetic construct
IRQMGSL

SEQ ID NO: 44428 - protein, 7 aa, synthetic construct
NRSQSVP

SEQ ID NO: 44429 - protein, 7 aa, synthetic construct
NTRLAGS

SEQ ID NO: 44430 - protein, 7 aa, synthetic construct
TQRDGDH

SEQ ID NO: 44431 - protein, 7 aa, synthetic construct
IQHIQAP

SEQ ID NO: 44432 - protein, 7 aa, synthetic construct
SRGATGP

SEQ ID NO: 44433 - protein, 7 aa, synthetic construct
NPRQSAE

SEQ ID NO: 44434 - protein, 7 aa, synthetic construct
RPPSGNM

SEQ ID NO: 44435 - protein, 7 aa, synthetic construct
LINQKKE

SEQ ID NO: 44436 - protein, 7 aa, synthetic construct
DRKTVSG

SEQ ID NO: 44437 - protein, 7 aa, synthetic construct
AAMMKNN

SEQ ID NO: 44438 - protein, 7 aa, synthetic construct
LQQGGSP

SEQ ID NO: 44439 - protein, 7 aa, synthetic construct
FGNAPTM

SEQ ID NO: 44440 - protein, 7 aa, synthetic construct
VHANIPN

SEQ ID NO: 44441 - protein, 7 aa, synthetic construct
VQSRAQG

SEQ ID NO: 44442 - protein, 7 aa, synthetic construct
NWTDKQP

SEQ ID NO: 44443 - protein, 7 aa, synthetic construct
QMHKQSS

SEQ ID NO: 44444 - protein, 7 aa, synthetic construct
INGGRMG

SEQ ID NO: 44445 - protein, 7 aa, synthetic construct
MKQGQAG

SEQ ID NO: 44446 - protein, 7 aa, synthetic construct
KANSTAP

SEQ ID NO: 44447 - protein, 7 aa, synthetic construct
VRPNGVA

SEQ ID NO: 44448 - protein, 7 aa, synthetic construct
NTSKIYG

SEQ ID NO: 44449 - protein, 7 aa, synthetic construct
IGQHAKQ

SEQ ID NO: 44450 - protein, 7 aa, synthetic construct
GMRQLRE

SEQ ID NO: 44451 - protein, 7 aa, synthetic construct
NKISTSG

SEQ ID NO: 44452 - protein, 7 aa, synthetic construct
YRNGESV

SEQ ID NO: 44453 - protein, 7 aa, synthetic construct
HQWSNAS

SEQ ID NO: 44454 - protein, 7 aa, synthetic construct
GHNPTGL

SEQ ID NO: 44455 - protein, 7 aa, synthetic construct
KGTNNSA

SEQ ID NO: 44456 - protein, 7 aa, synthetic construct
RTGTAGI

SEQ ID NO: 44457 - protein, 7 aa, synthetic construct
TRYLDRE

SEQ ID NO: 44458 - protein, 7 aa, synthetic construct
RNPANGS

SEQ ID NO: 44459 - protein, 7 aa, synthetic construct
WRDGPMS

SEQ ID NO: 44460 - protein, 7 aa, synthetic construct
SYARSQD

SEQ ID NO: 44461 - protein, 7 aa, synthetic construct
YAGKQMP

SEQ ID NO: 44462 - protein, 7 aa, synthetic construct
NTIKADA

SEQ ID NO: 44463 - protein, 7 aa, synthetic construct
MVSAKQA

SEQ ID NO: 44464 - protein, 7 aa, synthetic construct
QGKSVPA

SEQ ID NO: 44465 - protein, 7 aa, synthetic construct
QASGKMG

SEQ ID NO: 44466 - protein, 7 aa, synthetic construct
NPKSPQA

SEQ ID NO: 44467 - protein, 7 aa, synthetic construct
IRNTHPP

SEQ ID NO: 44468 - protein, 7 aa, synthetic construct
PVMSTGG

SEQ ID NO: 44469 - protein, 7 aa, synthetic construct
FAPGMNM

SEQ ID NO: 44470 - protein, 7 aa, synthetic construct
NMRPMAG

SEQ ID NO: 44471 - protein, 7 aa, synthetic construct
YPKGSVA

SEQ ID NO: 44472 - protein, 7 aa, synthetic construct
QFRNHQV

SEQ ID NO: 44473 - protein, 7 aa, synthetic construct
RQTTTTG

SEQ ID NO: 44474 - protein, 7 aa, synthetic construct
MQRSQLD

SEQ ID NO: 44475 - protein, 7 aa, synthetic construct
YDKFSSH

SEQ ID NO: 44476 - protein, 7 aa, synthetic construct
TQGVAPN

SEQ ID NO: 44477 - protein, 7 aa, synthetic construct
QPKSAMA

SEQ ID NO: 44478 - protein, 7 aa, synthetic construct
RMNATTG

SEQ ID NO: 44479 - protein, 7 aa, synthetic construct
HKPMVIG

SEQ ID NO: 44480 - protein, 7 aa, synthetic construct
KSTKAAE

SEQ ID NO: 44481 - protein, 7 aa, synthetic construct
KAQGSPT

SEQ ID NO: 44482 - protein, 7 aa, synthetic construct
KSGSSTA

SEQ ID NO: 44483 - protein, 7 aa, synthetic construct
MFNLTSG

SEQ ID NO: 44484 - protein, 7 aa, synthetic construct
MNDWQKQ

SEQ ID NO: 44485 - protein, 7 aa, synthetic construct
KNNTGAS

SEQ ID NO: 44486 - protein, 7 aa, synthetic construct
MDPINKG

SEQ ID NO: 44487 - protein, 7 aa, synthetic construct
RQIKDQI

SEQ ID NO: 44488 - protein, 7 aa, synthetic construct
ISHGKSL

SEQ ID NO: 44489 - protein, 7 aa, synthetic construct
MQKTGQG

SEQ ID NO: 44490 - protein, 7 aa, synthetic construct
TDTPFKA

SEQ ID NO: 44491 - protein, 7 aa, synthetic construct
MTNKQVP

SEQ ID NO: 44492 - protein, 7 aa, synthetic construct
QKTHPVQ

SEQ ID NO: 44493 - protein, 7 aa, synthetic construct
KDKREQA

SEQ ID NO: 44494 - protein, 7 aa, synthetic construct
YSKTNGV

SEQ ID NO: 44495 - protein, 7 aa, synthetic construct
REWKDAI

SEQ ID NO: 44496 - protein, 7 aa, synthetic construct
LMKQHMT

SEQ ID NO: 44497 - protein, 7 aa, synthetic construct
FKPGGQA

SEQ ID NO: 44498 - protein, 7 aa, synthetic construct
SGIKTGG

SEQ ID NO: 44499 - protein, 7 aa, synthetic construct
SPKSVPS

SEQ ID NO: 44500 - protein, 7 aa, synthetic construct
QNKTPSG

SEQ ID NO: 44501 - protein, 7 aa, synthetic construct
TNSRGNG

SEQ ID NO: 44502 - protein, 7 aa, synthetic construct
TMGTRQP

SEQ ID NO: 44503 - protein, 7 aa, synthetic construct
VAIKNAL

SEQ ID NO: 44504 - protein, 7 aa, synthetic construct
VVPLVKD

SEQ ID NO: 44505 - protein, 7 aa, synthetic construct
NSQGKGT

SEQ ID NO: 44506 - protein, 7 aa, synthetic construct
KPQTAPA

SEQ ID NO: 44507 - protein, 7 aa, synthetic construct
TLVLRQG

SEQ ID NO: 44508 - protein, 7 aa, synthetic construct
VDKYYQK

SEQ ID NO: 44509 - protein, 7 aa, synthetic construct
SNKNTMG

SEQ ID NO: 44510 - protein, 7 aa, synthetic construct
YAKLEKE

SEQ ID NO: 44511 - protein, 7 aa, synthetic construct
RKDPMNG

SEQ ID NO: 44512 - protein, 7 aa, synthetic construct
GQKSASP

SEQ ID NO: 44513 - protein, 7 aa, synthetic construct
QKSMNNA

SEQ ID NO: 44514 - protein, 7 aa, synthetic construct
RSNTVTA

SEQ ID NO: 44515 - protein, 7 aa, synthetic construct
KSTQSRD

SEQ ID NO: 44516 - protein, 7 aa, synthetic construct
GQHMAQA

SEQ ID NO: 44517 - protein, 7 aa, synthetic construct
WKHGTGV

SEQ ID NO: 44518 - protein, 7 aa, synthetic construct
PKGSNVT

SEQ ID NO: 44519 - protein, 7 aa, synthetic construct
KSPGPTA

SEQ ID NO: 44520 - protein, 7 aa, synthetic construct
TKSQSHF

SEQ ID NO: 44521 - protein, 7 aa, synthetic construct
RARSDEA

SEQ ID NO: 44522 - protein, 7 aa, synthetic construct
FRGQADM

SEQ ID NO: 44523 - protein, 7 aa, synthetic construct
TLHGPKG

SEQ ID NO: 44524 - protein, 7 aa, synthetic construct
IRNVNGS

SEQ ID NO: 44525 - protein, 7 aa, synthetic construct
SKSTPHP

SEQ ID NO: 44526 - protein, 7 aa, synthetic construct
FGKSYAD

SEQ ID NO: 44527 - protein, 7 aa, synthetic construct
KSPQSNS

SEQ ID NO: 44528 - protein, 7 aa, synthetic construct
LGNHYVG

SEQ ID NO: 44529 - protein, 7 aa, synthetic construct
FNREKNN

SEQ ID NO: 44530 - protein, 7 aa, synthetic construct
NSRGSYP

SEQ ID NO: 44531 - protein, 7 aa, synthetic construct
DGQGSRS

SEQ ID NO: 44532 - protein, 7 aa, synthetic construct
KTSAVVG

SEQ ID NO: 44533 - protein, 7 aa, synthetic construct
MKNQGNA

SEQ ID NO: 44534 - protein, 7 aa, synthetic construct
KSSSAST

SEQ ID NO: 44535 - protein, 7 aa, synthetic construct
HNKNTTV

SEQ ID NO: 44536 - protein, 7 aa, synthetic construct
VMPYKDQ

SEQ ID NO: 44537 - protein, 7 aa, synthetic construct
PQHRMAA

SEQ ID NO: 44538 - protein, 7 aa, synthetic construct
SPLRTDP

SEQ ID NO: 44539 - protein, 7 aa, synthetic construct
IGKNSNH

SEQ ID NO: 44540 - protein, 7 aa, synthetic construct
PHKYGDL

SEQ ID NO: 44541 - protein, 7 aa, synthetic construct
MTNGSKG

SEQ ID NO: 44542 - protein, 7 aa, synthetic construct
QFGKGTA

SEQ ID NO: 44543 - protein, 7 aa, synthetic construct
PGSRSTG

SEQ ID NO: 44544 - protein, 7 aa, synthetic construct
FATRTQQ

SEQ ID NO: 44545 - protein, 7 aa, synthetic construct
MKHGQSF

SEQ ID NO: 44546 - protein, 7 aa, synthetic construct
QANNKTH

SEQ ID NO: 44547 - protein, 7 aa, synthetic construct
KSGNTMP

SEQ ID NO: 44548 - protein, 7 aa, synthetic construct
LLMGVKG

SEQ ID NO: 44549 - protein, 7 aa, synthetic construct
NPKSGMS

SEQ ID NO: 44550 - protein, 7 aa, synthetic construct
RGVHGDM

SEQ ID NO: 44551 - protein, 7 aa, synthetic construct
TMAKSSA

SEQ ID NO: 44552 - protein, 7 aa, synthetic construct
SIRGYEI

SEQ ID NO: 44553 - protein, 7 aa, synthetic construct
KKDSSSG

SEQ ID NO: 44554 - protein, 7 aa, synthetic construct
NKQTVAT

SEQ ID NO: 44555 - protein, 7 aa, synthetic construct
SGTKQLL

SEQ ID NO: 44556 - protein, 7 aa, synthetic construct
FKGIHGV

SEQ ID NO: 44557 - protein, 7 aa, synthetic construct
LTKIGGS

SEQ ID NO: 44558 - protein, 7 aa, synthetic construct
TGANTSS

SEQ ID NO: 44559 - protein, 7 aa, synthetic construct
YRKSEGG

SEQ ID NO: 44560 - protein, 7 aa, synthetic construct
VPHKQMG

SEQ ID NO: 44561 - protein, 7 aa, synthetic construct
GTQNRSP

SEQ ID NO: 44562 - protein, 7 aa, synthetic construct
PFHGSKS

SEQ ID NO: 44563 - protein, 7 aa, synthetic construct
LRTSNHQ

SEQ ID NO: 44564 - protein, 7 aa, synthetic construct
KTTSSGG

SEQ ID NO: 44565 - protein, 7 aa, synthetic construct
QKSGNSS

SEQ ID NO: 44566 - protein, 7 aa, synthetic construct
VQGPSKG

SEQ ID NO: 44567 - protein, 7 aa, synthetic construct
AKSPTVT

SEQ ID NO: 44568 - protein, 7 aa, synthetic construct
GHYKLPI

SEQ ID NO: 44569 - protein, 7 aa, synthetic construct
INQQNRV

SEQ ID NO: 44570 - protein, 7 aa, synthetic construct
SDRIVAG

SEQ ID NO: 44571 - protein, 7 aa, synthetic construct
TRSYNSD

SEQ ID NO: 44572 - protein, 7 aa, synthetic construct
ASGKGMP

SEQ ID NO: 44573 - protein, 7 aa, synthetic construct
RAGDGNG

SEQ ID NO: 44574 - protein, 7 aa, synthetic construct
YKGTTNP

SEQ ID NO: 44575 - protein, 7 aa, synthetic construct
GHRGKQE

SEQ ID NO: 44576 - protein, 7 aa, synthetic construct
RPQGTSG

SEQ ID NO: 44577 - protein, 7 aa, synthetic construct
NRVTQNA

SEQ ID NO: 44578 - protein, 7 aa, synthetic construct
KKVNDSG

SEQ ID NO: 44579 - protein, 7 aa, synthetic construct
GVNSRAP

SEQ ID NO: 44580 - protein, 7 aa, synthetic construct
YQKNFQA

SEQ ID NO: 44581 - protein, 7 aa, synthetic construct
SYERSQG

SEQ ID NO: 44582 - protein, 7 aa, synthetic construct
KSQQTTG

SEQ ID NO: 44583 - protein, 7 aa, synthetic construct
LNPKYSE

SEQ ID NO: 44584 - protein, 7 aa, synthetic construct
TPFMKDF

SEQ ID NO: 44585 - protein, 7 aa, synthetic construct
MAKMAGI

SEQ ID NO: 44586 - protein, 7 aa, synthetic construct
FGASHST

SEQ ID NO: 44587 - protein, 7 aa, synthetic construct
VNRGSNA

SEQ ID NO: 44588 - protein, 7 aa, synthetic construct
MQPKFMA

SEQ ID NO: 44589 - protein, 7 aa, synthetic construct
ITAGSVN

SEQ ID NO: 44590 - protein, 7 aa, synthetic construct
TPRTSAP

SEQ ID NO: 44591 - protein, 7 aa, synthetic construct
INHQGEK

SEQ ID NO: 44592 - protein, 7 aa, synthetic construct
YRGTQAG

SEQ ID NO: 44593 - protein, 7 aa, synthetic construct
TKSNAFG

SEQ ID NO: 44594 - protein, 7 aa, synthetic construct
QKPASVQ

SEQ ID NO: 44595 - protein, 7 aa, synthetic construct
YHGHSMT

SEQ ID NO: 44596 - protein, 7 aa, synthetic construct
MGPVKSG

SEQ ID NO: 44597 - protein, 7 aa, synthetic construct
TKNTTKE

SEQ ID NO: 44598 - protein, 7 aa, synthetic construct
TGKSNSP

SEQ ID NO: 44599 - protein, 7 aa, synthetic construct
MERGTGV

SEQ ID NO: 44600 - protein, 7 aa, synthetic construct
TMGGKQG

SEQ ID NO: 44601 - protein, 7 aa, synthetic construct
TQAKNNY

SEQ ID NO: 44602 - protein, 7 aa, synthetic construct
TGKPMSA

SEQ ID NO: 44603 - protein, 7 aa, synthetic construct
PRRGTED

SEQ ID NO: 44604 - protein, 7 aa, synthetic construct
VSNQKSG

SEQ ID NO: 44605 - protein, 7 aa, synthetic construct
QSRSMIG

SEQ ID NO: 44606 - protein, 7 aa, synthetic construct
QKNPASA

SEQ ID NO: 44607 - protein, 7 aa, synthetic construct
LIPMKNP

SEQ ID NO: 44608 - protein, 7 aa, synthetic construct
VHTQNRA

SEQ ID NO: 44609 - protein, 7 aa, synthetic construct
QKPNNSM

SEQ ID NO: 44610 - protein, 7 aa, synthetic construct
YGKKEVT

SEQ ID NO: 44611 - protein, 7 aa, synthetic construct
INNGRGG

SEQ ID NO: 44612 - protein, 7 aa, synthetic construct
IAIGRGV

SEQ ID NO: 44613 - protein, 7 aa, synthetic construct
RSLQSAP

SEQ ID NO: 44614 - protein, 7 aa, synthetic construct
SKLLTKG

SEQ ID NO: 44615 - protein, 7 aa, synthetic construct
QDKQSKG

SEQ ID NO: 44616 - protein, 7 aa, synthetic construct
PVGGHGH

SEQ ID NO: 44617 - protein, 7 aa, synthetic construct
KQNGPVP

SEQ ID NO: 44618 - protein, 7 aa, synthetic construct
HQVNTAT

SEQ ID NO: 44619 - protein, 7 aa, synthetic construct
HWTNKAD

SEQ ID NO: 44620 - protein, 7 aa, synthetic construct
SPGRVDT

SEQ ID NO: 44621 - protein, 7 aa, synthetic construct
QGRINES

SEQ ID NO: 44622 - protein, 7 aa, synthetic construct
MNPRSAG

SEQ ID NO: 44623 - protein, 7 aa, synthetic construct
KNNTSAT

SEQ ID NO: 44624 - protein, 7 aa, synthetic construct
KNTGPQG

SEQ ID NO: 44625 - protein, 7 aa, synthetic construct
TTMVHQG

SEQ ID NO: 44626 - protein, 7 aa, synthetic construct
MDRPPGR

SEQ ID NO: 44627 - protein, 7 aa, synthetic construct
NLKMIPP

SEQ ID NO: 44628 - protein, 7 aa, synthetic construct
ITAALKG

SEQ ID NO: 44629 - protein, 7 aa, synthetic construct
RDKNVAG

SEQ ID NO: 44630 - protein, 7 aa, synthetic construct
QGTRGQA

SEQ ID NO: 44631 - protein, 7 aa, synthetic construct
NNHTKDI

SEQ ID NO: 44632 - protein, 7 aa, synthetic construct
REAHSKN

SEQ ID NO: 44633 - protein, 7 aa, synthetic construct
QKKWMEE

SEQ ID NO: 44634 - protein, 7 aa, synthetic construct
QPRANGA

SEQ ID NO: 44635 - protein, 7 aa, synthetic construct
QTRSAPG

SEQ ID NO: 44636 - protein, 7 aa, synthetic construct
SKAQKNE

SEQ ID NO: 44637 - protein, 7 aa, synthetic construct
YSGKGNN

SEQ ID NO: 44638 - protein, 7 aa, synthetic construct
LYGSIKD

SEQ ID NO: 44639 - protein, 7 aa, synthetic construct
SKYSVSE

SEQ ID NO: 44640 - protein, 7 aa, synthetic construct
VHNRVLN

SEQ ID NO: 44641 - protein, 7 aa, synthetic construct
RPGSQMP

SEQ ID NO: 44642 - protein, 7 aa, synthetic construct
IAGAIQS

SEQ ID NO: 44643 - protein, 7 aa, synthetic construct
TNKNVSA

SEQ ID NO: 44644 - protein, 7 aa, synthetic construct
YHKHGSA

SEQ ID NO: 44645 - protein, 7 aa, synthetic construct
GNGKAVQ

SEQ ID NO: 44646 - protein, 7 aa, synthetic construct
ARNQAAA

SEQ ID NO: 44647 - protein, 7 aa, synthetic construct
YQGNPRS

SEQ ID NO: 44648 - protein, 7 aa, synthetic construct
KMNGVQA

SEQ ID NO: 44649 - protein, 7 aa, synthetic construct
KNFKDYG

SEQ ID NO: 44650 - protein, 7 aa, synthetic construct
TKLHTNA

SEQ ID NO: 44651 - protein, 7 aa, synthetic construct
RQPGVKE

SEQ ID NO: 44652 - protein, 7 aa, synthetic construct
KNSGQSG

SEQ ID NO: 44653 - protein, 7 aa, synthetic construct
RIAGLTQ

SEQ ID NO: 44654 - protein, 7 aa, synthetic construct
QGRSLNP

SEQ ID NO: 44655 - protein, 7 aa, synthetic construct
TKSQSFS

SEQ ID NO: 44656 - protein, 7 aa, synthetic construct
KVAGRLD

SEQ ID NO: 44657 - protein, 7 aa, synthetic construct
TTAKNGM

SEQ ID NO: 44658 - protein, 7 aa, synthetic construct
AGKTPER

SEQ ID NO: 44659 - protein, 7 aa, synthetic construct
FDKKGPG

SEQ ID NO: 44660 - protein, 7 aa, synthetic construct
MNQKSTG

SEQ ID NO: 44661 - protein, 7 aa, synthetic construct
GQQARMG

SEQ ID NO: 44662 - protein, 7 aa, synthetic construct
FEAMRRN

SEQ ID NO: 44663 - protein, 7 aa, synthetic construct
ASSTRNP

SEQ ID NO: 44664 - protein, 7 aa, synthetic construct
TNRAPQG

SEQ ID NO: 44665 - protein, 7 aa, synthetic construct
GLAPKLI

SEQ ID NO: 44666 - protein, 7 aa, synthetic construct
LYMKKEG

SEQ ID NO: 44667 - protein, 7 aa, synthetic construct
VRQSTAA

SEQ ID NO: 44668 - protein, 7 aa, synthetic construct
NSVLKSG

SEQ ID NO: 44669 - protein, 7 aa, synthetic construct
NRPSTLP

SEQ ID NO: 44670 - protein, 7 aa, synthetic construct
NPMHKYA

SEQ ID NO: 44671 - protein, 7 aa, synthetic construct
KGNNNTG

SEQ ID NO: 44672 - protein, 7 aa, synthetic construct
MRNSIGS

SEQ ID NO: 44673 - protein, 7 aa, synthetic construct
RGASTTG

SEQ ID NO: 44674 - protein, 7 aa, synthetic construct
NKNPQNA

SEQ ID NO: 44675 - protein, 7 aa, synthetic construct
RGVPSQP

SEQ ID NO: 44676 - protein, 7 aa, synthetic construct
WTKAEPI

SEQ ID NO: 44677 - protein, 7 aa, synthetic construct
SKHRDNG

SEQ ID NO: 44678 - protein, 7 aa, synthetic construct
NNHNKVA

SEQ ID NO: 44679 - protein, 7 aa, synthetic construct
QMNHHSA

SEQ ID NO: 44680 - protein, 7 aa, synthetic construct
AMGMGHG

SEQ ID NO: 44681 - protein, 7 aa, synthetic construct
HQMGPKG

SEQ ID NO: 44682 - protein, 7 aa, synthetic construct
VAKSTMN

SEQ ID NO: 44683 - protein, 7 aa, synthetic construct
IVGVLKD

SEQ ID NO: 44684 - protein, 7 aa, synthetic construct
INQRSSG

SEQ ID NO: 44685 - protein, 7 aa, synthetic construct
NQRNTAG

SEQ ID NO: 44686 - protein, 7 aa, synthetic construct
TLIAGRP

SEQ ID NO: 44687 - protein, 7 aa, synthetic construct
RGVSQIA

SEQ ID NO: 44688 - protein, 7 aa, synthetic construct
NNTKGQG

SEQ ID NO: 44689 - protein, 7 aa, synthetic construct
PKQANGG

SEQ ID NO: 44690 - protein, 7 aa, synthetic construct
TNPGQSS

SEQ ID NO: 44691 - protein, 7 aa, synthetic construct
GHHNPVK

SEQ ID NO: 44692 - protein, 7 aa, synthetic construct
YKFQQRE

SEQ ID NO: 44693 - protein, 7 aa, synthetic construct
DVKHKTY

SEQ ID NO: 44694 - protein, 7 aa, synthetic construct
KGQNNTA

SEQ ID NO: 44695 - protein, 7 aa, synthetic construct
WMKNQED

SEQ ID NO: 44696 - protein, 7 aa, synthetic construct
WAEVGRD

SEQ ID NO: 44697 - protein, 7 aa, synthetic construct
HTKGAVS

SEQ ID NO: 44698 - protein, 7 aa, synthetic construct
KEPYSRD

SEQ ID NO: 44699 - protein, 7 aa, synthetic construct
PQSGQRT

SEQ ID NO: 44700 - protein, 7 aa, synthetic construct
LMKVVQG

SEQ ID NO: 44701 - protein, 7 aa, synthetic construct
GATRGSE

SEQ ID NO: 44702 - protein, 7 aa, synthetic construct
SPKNLTA

SEQ ID NO: 44703 - protein, 7 aa, synthetic construct
QGSQRQA

SEQ ID NO: 44704 - protein, 7 aa, synthetic construct
HTTKNLG

SEQ ID NO: 44705 - protein, 7 aa, synthetic construct
GQKNSNA

SEQ ID NO: 44706 - protein, 7 aa, synthetic construct
GRGKDGV

SEQ ID NO: 44707 - protein, 7 aa, synthetic construct
GYHSKNS

SEQ ID NO: 44708 - protein, 7 aa, synthetic construct
TPKMAQG

SEQ ID NO: 44709 - protein, 7 aa, synthetic construct
TGIKKDA

SEQ ID NO: 44710 - protein, 7 aa, synthetic construct
KMGNSGG

SEQ ID NO: 44711 - protein, 7 aa, synthetic construct
TATNHRE

SEQ ID NO: 44712 - protein, 7 aa, synthetic construct
DRKPGVA

SEQ ID NO: 44713 - protein, 7 aa, synthetic construct
DKRHPSE

SEQ ID NO: 44714 - protein, 7 aa, synthetic construct
SERSSAS

SEQ ID NO: 44715 - protein, 7 aa, synthetic construct
HPVYKTH

SEQ ID NO: 44716 - protein, 7 aa, synthetic construct
GKNSMNV

SEQ ID NO: 44717 - protein, 7 aa, synthetic construct
VRTSTVG

SEQ ID NO: 44718 - protein, 7 aa, synthetic construct
QSGGKFG

SEQ ID NO: 44719 - protein, 7 aa, synthetic construct
SKGQSEG

SEQ ID NO: 44720 - protein, 7 aa, synthetic construct
GLVDPRQ

SEQ ID NO: 44721 - protein, 7 aa, synthetic construct
QIHHPAD

SEQ ID NO: 44722 - protein, 7 aa, synthetic construct
TNPHFPM

SEQ ID NO: 44723 - protein, 7 aa, synthetic construct
SLPAARQ

SEQ ID NO: 44724 - protein, 7 aa, synthetic construct
NMKVVPN

SEQ ID NO: 44725 - protein, 7 aa, synthetic construct
NPRNTQP

SEQ ID NO: 44726 - protein, 7 aa, synthetic construct
MATRTDR

SEQ ID NO: 44727 - protein, 7 aa, synthetic construct
TKQQKNE

SEQ ID NO: 44728 - protein, 7 aa, synthetic construct
SALRPQP

SEQ ID NO: 44729 - protein, 7 aa, synthetic construct
QGRSASP

SEQ ID NO: 44730 - protein, 7 aa, synthetic construct
YRNHQDT

SEQ ID NO: 44731 - protein, 7 aa, synthetic construct
ISSWIKD

SEQ ID NO: 44732 - protein, 7 aa, synthetic construct
AFPAIAS

SEQ ID NO: 44733 - protein, 7 aa, synthetic construct
KGMQSGG

SEQ ID NO: 44734 - protein, 7 aa, synthetic construct
GFKAQQN

SEQ ID NO: 44735 - protein, 7 aa, synthetic construct
GVNNKTG

SEQ ID NO: 44736 - protein, 7 aa, synthetic construct
GKGPSHD

SEQ ID NO: 44737 - protein, 7 aa, synthetic construct
VTGSIKP

SEQ ID NO: 44738 - protein, 7 aa, synthetic construct
ANATRYQ

SEQ ID NO: 44739 - protein, 7 aa, synthetic construct
FKGASGN

SEQ ID NO: 44740 - protein, 7 aa, synthetic construct
LKASFGG

SEQ ID NO: 44741 - protein, 7 aa, synthetic construct
LKRQETG

SEQ ID NO: 44742 - protein, 7 aa, synthetic construct
VEPWAKA

SEQ ID NO: 44743 - protein, 7 aa, synthetic construct
HPSKERL

SEQ ID NO: 44744 - protein, 7 aa, synthetic construct
IKTGTGG

SEQ ID NO: 44745 - protein, 7 aa, synthetic construct
FQGKSIL

SEQ ID NO: 44746 - protein, 7 aa, synthetic construct
VSGTRQG

SEQ ID NO: 44747 - protein, 7 aa, synthetic construct
QRVTNNA

SEQ ID NO: 44748 - protein, 7 aa, synthetic construct
YKQQQTS

SEQ ID NO: 44749 - protein, 7 aa, synthetic construct
TTQRAAG

SEQ ID NO: 44750 - protein, 7 aa, synthetic construct
RSPGVSA

SEQ ID NO: 44751 - protein, 7 aa, synthetic construct
KANIPHG

SEQ ID NO: 44752 - protein, 7 aa, synthetic construct
KNAGTGA

SEQ ID NO: 44753 - protein, 7 aa, synthetic construct
NKVTGSA

SEQ ID NO: 44754 - protein, 7 aa, synthetic construct
NNGKNLG

SEQ ID NO: 44755 - protein, 7 aa, synthetic construct
SVSRAAP

SEQ ID NO: 44756 - protein, 7 aa, synthetic construct
LKPGRED

SEQ ID NO: 44757 - protein, 7 aa, synthetic construct
QGKQAPA

SEQ ID NO: 44758 - protein, 7 aa, synthetic construct
TRNQNSG

SEQ ID NO: 44759 - protein, 7 aa, synthetic construct
RPTGSVE

SEQ ID NO: 44760 - protein, 7 aa, synthetic construct
WHGVDKV

SEQ ID NO: 44761 - protein, 7 aa, synthetic construct
NAKQAHS

SEQ ID NO: 44762 - protein, 7 aa, synthetic construct
TLRRMEE

SEQ ID NO: 44763 - protein, 7 aa, synthetic construct
GQGERYA

SEQ ID NO: 44764 - protein, 7 aa, synthetic construct
TIQKQNF

SEQ ID NO: 44765 - protein, 7 aa, synthetic construct
QYASAQG

SEQ ID NO: 44766 - protein, 7 aa, synthetic construct
KSPRPET

SEQ ID NO: 44767 - protein, 7 aa, synthetic construct
KKDISPQ

SEQ ID NO: 44768 - protein, 7 aa, synthetic construct
FKPHQAS

SEQ ID NO: 44769 - protein, 7 aa, synthetic construct
TNRLQMT

SEQ ID NO: 44770 - protein, 7 aa, synthetic construct
KNMAQQA

SEQ ID NO: 44771 - protein, 7 aa, synthetic construct
MSNAGFG

SEQ ID NO: 44772 - protein, 7 aa, synthetic construct
KASGKLE

SEQ ID NO: 44773 - protein, 7 aa, synthetic construct
RNPQGAG

SEQ ID NO: 44774 - protein, 7 aa, synthetic construct
NKYGQGL

SEQ ID NO: 44775 - protein, 7 aa, synthetic construct
AGQQKVM

SEQ ID NO: 44776 - protein, 7 aa, synthetic construct
QTHMQRG

SEQ ID NO: 44777 - protein, 7 aa, synthetic construct
DHRGMQV

SEQ ID NO: 44778 - protein, 7 aa, synthetic construct
SKPMQSG

SEQ ID NO: 44779 - protein, 7 aa, synthetic construct
FNKAMRD

SEQ ID NO: 44780 - protein, 7 aa, synthetic construct
MPRMNGG

SEQ ID NO: 44781 - protein, 7 aa, synthetic construct
IGQVQKV

SEQ ID NO: 44782 - protein, 7 aa, synthetic construct
NGATRNG

SEQ ID NO: 44783 - protein, 7 aa, synthetic construct
TKSGTNG

SEQ ID NO: 44784 - protein, 7 aa, synthetic construct
RPGLQFE

SEQ ID NO: 44785 - protein, 7 aa, synthetic construct
KQTGMTG

SEQ ID NO: 44786 - protein, 7 aa, synthetic construct
TEAYKSA

SEQ ID NO: 44787 - protein, 7 aa, synthetic construct
QPRAMTG

SEQ ID NO: 44788 - protein, 7 aa, synthetic construct
EPKWKHE

SEQ ID NO: 44789 - protein, 7 aa, synthetic construct
NPRAGAG

SEQ ID NO: 44790 - protein, 7 aa, synthetic construct
HREPVFN

SEQ ID NO: 44791 - protein, 7 aa, synthetic construct
VRAMGNE

SEQ ID NO: 44792 - protein, 7 aa, synthetic construct
FRPSGAN

SEQ ID NO: 44793 - protein, 7 aa, synthetic construct
KNSVTAS

SEQ ID NO: 44794 - protein, 7 aa, synthetic construct
SIKTPVQ

SEQ ID NO: 44795 - protein, 7 aa, synthetic construct
SHLKTDF

SEQ ID NO: 44796 - protein, 7 aa, synthetic construct
KFGINTD

SEQ ID NO: 44797 - protein, 7 aa, synthetic construct
VNNGGKG

SEQ ID NO: 44798 - protein, 7 aa, synthetic construct
IRPFKEN

SEQ ID NO: 44799 - protein, 7 aa, synthetic construct
KNSATSA

SEQ ID NO: 44800 - protein, 7 aa, synthetic construct
ESKQSRM

SEQ ID NO: 44801 - protein, 7 aa, synthetic construct
TRVTGDS

SEQ ID NO: 44802 - protein, 7 aa, synthetic construct
GPKSQSA

SEQ ID NO: 44803 - protein, 7 aa, synthetic construct
MNKPGQS

SEQ ID NO: 44804 - protein, 7 aa, synthetic construct
FRNVIDG

SEQ ID NO: 44805 - protein, 7 aa, synthetic construct
TRAHGSI

SEQ ID NO: 44806 - protein, 7 aa, synthetic construct
RGMKNDP

SEQ ID NO: 44807 - protein, 7 aa, synthetic construct
YSSSNNK

SEQ ID NO: 44808 - protein, 7 aa, synthetic construct
NRTNIVS

SEQ ID NO: 44809 - protein, 7 aa, synthetic construct
FTASKQN

SEQ ID NO: 44810 - protein, 7 aa, synthetic construct
DDRRSKD

SEQ ID NO: 44811 - protein, 7 aa, synthetic construct
NRSGGTG

SEQ ID NO: 44812 - protein, 7 aa, synthetic construct
QGRKDDS

SEQ ID NO: 44813 - protein, 7 aa, synthetic construct
AKPGPQN

SEQ ID NO: 44814 - protein, 7 aa, synthetic construct
FKAKGVD

SEQ ID NO: 44815 - protein, 7 aa, synthetic construct
SARSTAA

SEQ ID NO: 44816 - protein, 7 aa, synthetic construct
NSKMSVG

SEQ ID NO: 44817 - protein, 7 aa, synthetic construct
KPEFHRN

SEQ ID NO: 44818 - protein, 7 aa, synthetic construct
NRAQGPM

SEQ ID NO: 44819 - protein, 7 aa, synthetic construct
VNRSSTV

SEQ ID NO: 44820 - protein, 7 aa, synthetic construct
SHTRTGE

SEQ ID NO: 44821 - protein, 7 aa, synthetic construct
RQSTNVA

SEQ ID NO: 44822 - protein, 7 aa, synthetic construct
TMHRVTG

SEQ ID NO: 44823 - protein, 7 aa, synthetic construct
SKNEFRG

SEQ ID NO: 44824 - protein, 7 aa, synthetic construct
GKKDTAA

SEQ ID NO: 44825 - protein, 7 aa, synthetic construct
RMPGQTP

SEQ ID NO: 44826 - protein, 7 aa, synthetic construct
TRQMSQP

SEQ ID NO: 44827 - protein, 7 aa, synthetic construct
RDQVWNA

SEQ ID NO: 44828 - protein, 7 aa, synthetic construct
YNHAHAM

SEQ ID NO: 44829 - protein, 7 aa, synthetic construct
TGSTKFA

SEQ ID NO: 44830 - protein, 7 aa, synthetic construct
MRAGPHE

SEQ ID NO: 44831 - protein, 7 aa, synthetic construct
RPLGMLE

SEQ ID NO: 44832 - protein, 7 aa, synthetic construct
QGAKADK

SEQ ID NO: 44833 - protein, 7 aa, synthetic construct
RHPPSEG

SEQ ID NO: 44834 - protein, 7 aa, synthetic construct
KPTPGMA

SEQ ID NO: 44835 - protein, 7 aa, synthetic construct
NQGGTKG

SEQ ID NO: 44836 - protein, 7 aa, synthetic construct
LTSRKDP

SEQ ID NO: 44837 - protein, 7 aa, synthetic construct
NHDNKFG

SEQ ID NO: 44838 - protein, 7 aa, synthetic construct
TQVARPA

SEQ ID NO: 44839 - protein, 7 aa, synthetic construct
AHAKSVY

SEQ ID NO: 44840 - protein, 7 aa, synthetic construct
FPTAAAH

SEQ ID NO: 44841 - protein, 7 aa, synthetic construct
IEFTKKG

SEQ ID NO: 44842 - protein, 7 aa, synthetic construct
YAPGTKG

SEQ ID NO: 44843 - protein, 7 aa, synthetic construct
VSHSERG

SEQ ID NO: 44844 - protein, 7 aa, synthetic construct
RPPNSNS

SEQ ID NO: 44845 - protein, 7 aa, synthetic construct
KMIAPDG

SEQ ID NO: 44846 - protein, 7 aa, synthetic construct
RHPDGLQ

SEQ ID NO: 44847 - protein, 7 aa, synthetic construct
LPEHKLY

SEQ ID NO: 44848 - protein, 7 aa, synthetic construct
NKMTSGA

SEQ ID NO: 44849 - protein, 7 aa, synthetic construct
MQPQPSG

SEQ ID NO: 44850 - protein, 7 aa, synthetic construct
NGNSKNP

SEQ ID NO: 44851 - protein, 7 aa, synthetic construct
AHRPLPE

SEQ ID NO: 44852 - protein, 7 aa, synthetic construct
TRFPSQE

SEQ ID NO: 44853 - protein, 7 aa, synthetic construct
ISGYHSS

SEQ ID NO: 44854 - protein, 7 aa, synthetic construct
PTNKHYS

SEQ ID NO: 44855 - protein, 7 aa, synthetic construct
MMGGALA

SEQ ID NO: 44856 - protein, 7 aa, synthetic construct
RPGKALE

SEQ ID NO: 44857 - protein, 7 aa, synthetic construct
KNPISQP

SEQ ID NO: 44858 - protein, 7 aa, synthetic construct
RANWPTD

SEQ ID NO: 44859 - protein, 7 aa, synthetic construct
EKTHMTA

SEQ ID NO: 44860 - protein, 7 aa, synthetic construct
LGKMIEI

SEQ ID NO: 44861 - protein, 7 aa, synthetic construct
MYGKSTP

SEQ ID NO: 44862 - protein, 7 aa, synthetic construct
KPPASNS

SEQ ID NO: 44863 - protein, 7 aa, synthetic construct
NAHGKSP

SEQ ID NO: 44864 - protein, 7 aa, synthetic construct
AYKYTME

SEQ ID NO: 44865 - protein, 7 aa, synthetic construct
TTQKASA

SEQ ID NO: 44866 - protein, 7 aa, synthetic construct
LHNKIRD

SEQ ID NO: 44867 - protein, 7 aa, synthetic construct
WVIGKEG

SEQ ID NO: 44868 - protein, 7 aa, synthetic construct
FQKNASG

SEQ ID NO: 44869 - protein, 7 aa, synthetic construct
VKHAVEN

SEQ ID NO: 44870 - protein, 7 aa, synthetic construct
DNHMKKD

SEQ ID NO: 44871 - protein, 7 aa, synthetic construct
KMRLEGT

SEQ ID NO: 44872 - protein, 7 aa, synthetic construct
LQMHKMG

SEQ ID NO: 44873 - protein, 7 aa, synthetic construct
VHGRFGE

SEQ ID NO: 44874 - protein, 7 aa, synthetic construct
PIQKLEG

SEQ ID NO: 44875 - protein, 7 aa, synthetic construct
NQRAKEP

SEQ ID NO: 44876 - protein, 7 aa, synthetic construct
ILSGKKD

SEQ ID NO: 44877 - protein, 7 aa, synthetic construct
GKNTSNS

SEQ ID NO: 44878 - protein, 7 aa, synthetic construct
SDRGFHG

SEQ ID NO: 44879 - protein, 7 aa, synthetic construct
MAAGNSR

SEQ ID NO: 44880 - protein, 7 aa, synthetic construct
NNKAAQS

SEQ ID NO: 44881 - protein, 7 aa, synthetic construct
STPQRIM

SEQ ID NO: 44882 - protein, 7 aa, synthetic construct
PKSPGYG

SEQ ID NO: 44883 - protein, 7 aa, synthetic construct
RSQNAAV

SEQ ID NO: 44884 - protein, 7 aa, synthetic construct
KSSNNRD

SEQ ID NO: 44885 - protein, 7 aa, synthetic construct
MHKGPPA

SEQ ID NO: 44886 - protein, 7 aa, synthetic construct
KKPDVAG

SEQ ID NO: 44887 - protein, 7 aa, synthetic construct
IGNRAND

SEQ ID NO: 44888 - protein, 7 aa, synthetic construct
SIPKSKD

SEQ ID NO: 44889 - protein, 7 aa, synthetic construct
MMPGTAG

SEQ ID NO: 44890 - protein, 7 aa, synthetic construct
QRGREFA

SEQ ID NO: 44891 - protein, 7 aa, synthetic construct
NSRNVGM

SEQ ID NO: 44892 - protein, 7 aa, synthetic construct
IAGNNRG

SEQ ID NO: 44893 - protein, 7 aa, synthetic construct
TSRGMTG

SEQ ID NO: 44894 - protein, 7 aa, synthetic construct
VKYEKGP

SEQ ID NO: 44895 - protein, 7 aa, synthetic construct
TKTLVQH

SEQ ID NO: 44896 - protein, 7 aa, synthetic construct
TIGFPKE

SEQ ID NO: 44897 - protein, 7 aa, synthetic construct
QAKAYGP

SEQ ID NO: 44898 - protein, 7 aa, synthetic construct
FNQPHNQ

SEQ ID NO: 44899 - protein, 7 aa, synthetic construct
NNHSGHA

SEQ ID NO: 44900 - protein, 7 aa, synthetic construct
NKSMKPV

SEQ ID NO: 44901 - protein, 7 aa, synthetic construct
LSGRSHQ

SEQ ID NO: 44902 - protein, 7 aa, synthetic construct
QKSNHEI

SEQ ID NO: 44903 - protein, 7 aa, synthetic construct
IRTMQTP

SEQ ID NO: 44904 - protein, 7 aa, synthetic construct
ESRATSG

SEQ ID NO: 44905 - protein, 7 aa, synthetic construct
KGTAATF

SEQ ID NO: 44906 - protein, 7 aa, synthetic construct
NHVPNMG

SEQ ID NO: 44907 - protein, 7 aa, synthetic construct
GNQGKSP

SEQ ID NO: 44908 - protein, 7 aa, synthetic construct
FGGKNNG

SEQ ID NO: 44909 - protein, 7 aa, synthetic construct
RDTIRTT

SEQ ID NO: 44910 - protein, 7 aa, synthetic construct
ITHGMGS

SEQ ID NO: 44911 - protein, 7 aa, synthetic construct
RQSSVMG

SEQ ID NO: 44912 - protein, 7 aa, synthetic construct
QRSSPTG

SEQ ID NO: 44913 - protein, 7 aa, synthetic construct
SMQRNQP

SEQ ID NO: 44914 - protein, 7 aa, synthetic construct
QRQAAGA

SEQ ID NO: 44915 - protein, 7 aa, synthetic construct
HNSNKFI

SEQ ID NO: 44916 - protein, 7 aa, synthetic construct
FHLSRTP

SEQ ID NO: 44917 - protein, 7 aa, synthetic construct
RSTSATG

SEQ ID NO: 44918 - protein, 7 aa, synthetic construct
WDRGPGS

SEQ ID NO: 44919 - protein, 7 aa, synthetic construct
MQGWQQS

SEQ ID NO: 44920 - protein, 7 aa, synthetic construct
SISGFVA

SEQ ID NO: 44921 - protein, 7 aa, synthetic construct
RTGSVAP

SEQ ID NO: 44922 - protein, 7 aa, synthetic construct
TKNQNQA

SEQ ID NO: 44923 - protein, 7 aa, synthetic construct
HIQNKYT

SEQ ID NO: 44924 - protein, 7 aa, synthetic construct
HKGNHSG

SEQ ID NO: 44925 - protein, 7 aa, synthetic construct
GKRSSEP

SEQ ID NO: 44926 - protein, 7 aa, synthetic construct
MQYGPQG

SEQ ID NO: 44927 - protein, 7 aa, synthetic construct
SKNGPVG

SEQ ID NO: 44928 - protein, 7 aa, synthetic construct
QNKGQMS

SEQ ID NO: 44929 - protein, 7 aa, synthetic construct
GKVNSSA

SEQ ID NO: 44930 - protein, 7 aa, synthetic construct
MAGHQEM

SEQ ID NO: 44931 - protein, 7 aa, synthetic construct
AKSNVTG

SEQ ID NO: 44932 - protein, 7 aa, synthetic construct
HITTTKL

SEQ ID NO: 44933 - protein, 7 aa, synthetic construct
IHIKFGG

SEQ ID NO: 44934 - protein, 7 aa, synthetic construct
YNNSRGA

SEQ ID NO: 44935 - protein, 7 aa, synthetic construct
SKTGNNP

SEQ ID NO: 44936 - protein, 7 aa, synthetic construct
GYANRHP

SEQ ID NO: 44937 - protein, 7 aa, synthetic construct
SEKHHNF

SEQ ID NO: 44938 - protein, 7 aa, synthetic construct
HNRQGDQ

SEQ ID NO: 44939 - protein, 7 aa, synthetic construct
IGKSMTG

SEQ ID NO: 44940 - protein, 7 aa, synthetic construct
SPKQSAS

SEQ ID NO: 44941 - protein, 7 aa, synthetic construct
GVKTTFL

SEQ ID NO: 44942 - protein, 7 aa, synthetic construct
GKSSATN

SEQ ID NO: 44943 - protein, 7 aa, synthetic construct
KQQNVVG

SEQ ID NO: 44944 - protein, 7 aa, synthetic construct
MSGKTSM

SEQ ID NO: 44945 - protein, 7 aa, synthetic construct
QPRNGEH

SEQ ID NO: 44946 - protein, 7 aa, synthetic construct
QTKGMTA

SEQ ID NO: 44947 - protein, 7 aa, synthetic construct
DVSTKHP

SEQ ID NO: 44948 - protein, 7 aa, synthetic construct
KHPPYEV

SEQ ID NO: 44949 - protein, 7 aa, synthetic construct
PGKGLGY

SEQ ID NO: 44950 - protein, 7 aa, synthetic construct
RFVSGQP

SEQ ID NO: 44951 - protein, 7 aa, synthetic construct
RNIVTQA

SEQ ID NO: 44952 - protein, 7 aa, synthetic construct
TNGRGGP

SEQ ID NO: 44953 - protein, 7 aa, synthetic construct
AFNQPKD

SEQ ID NO: 44954 - protein, 7 aa, synthetic construct
VPLQNKP

SEQ ID NO: 44955 - protein, 7 aa, synthetic construct
QTPKTYP

SEQ ID NO: 44956 - protein, 7 aa, synthetic construct
TQAKKDG

SEQ ID NO: 44957 - protein, 7 aa, synthetic construct
PGTKGTF

SEQ ID NO: 44958 - protein, 7 aa, synthetic construct
YKLNDAM

SEQ ID NO: 44959 - protein, 7 aa, synthetic construct
HTSTTSN

SEQ ID NO: 44960 - protein, 7 aa, synthetic construct
ERDFRPG

SEQ ID NO: 44961 - protein, 7 aa, synthetic construct
RGASQSF

SEQ ID NO: 44962 - protein, 7 aa, synthetic construct
SRNQQEF

SEQ ID NO: 44963 - protein, 7 aa, synthetic construct
LGSAHAP

SEQ ID NO: 44964 - protein, 7 aa, synthetic construct
TPRPVGG

SEQ ID NO: 44965 - protein, 7 aa, synthetic construct
QRNMTAS

SEQ ID NO: 44966 - protein, 7 aa, synthetic construct
DIPQTKR

SEQ ID NO: 44967 - protein, 7 aa, synthetic construct
QRNQATA

SEQ ID NO: 44968 - protein, 7 aa, synthetic construct
YQTPKGG

SEQ ID NO: 44969 - protein, 7 aa, synthetic construct
NRPQGNG

SEQ ID NO: 44970 - protein, 7 aa, synthetic construct
RGPSVGG

SEQ ID NO: 44971 - protein, 7 aa, synthetic construct
HPANRQF

SEQ ID NO: 44972 - protein, 7 aa, synthetic construct
SKPQAAG

SEQ ID NO: 44973 - protein, 7 aa, synthetic construct
KTQTHAQ

SEQ ID NO: 44974 - protein, 7 aa, synthetic construct
KGNNQSA

SEQ ID NO: 44975 - protein, 7 aa, synthetic construct
INLGNYS

SEQ ID NO: 44976 - protein, 7 aa, synthetic construct
FTPGHKQ

SEQ ID NO: 44977 - protein, 7 aa, synthetic construct
HINPRAP

SEQ ID NO: 44978 - protein, 7 aa, synthetic construct
SNHIKSA

SEQ ID NO: 44979 - protein, 7 aa, synthetic construct
KNGIKSE

SEQ ID NO: 44980 - protein, 7 aa, synthetic construct
GIVMKAT

SEQ ID NO: 44981 - protein, 7 aa, synthetic construct
MRNAAPT

SEQ ID NO: 44982 - protein, 7 aa, synthetic construct
DTRAAPG

SEQ ID NO: 44983 - protein, 7 aa, synthetic construct
ISHGSRN

SEQ ID NO: 44984 - protein, 7 aa, synthetic construct
QPKMLGG

SEQ ID NO: 44985 - protein, 7 aa, synthetic construct
NGGRTNG

SEQ ID NO: 44986 - protein, 7 aa, synthetic construct
PNTQKSG

SEQ ID NO: 44987 - protein, 7 aa, synthetic construct
QAVTIRD

SEQ ID NO: 44988 - protein, 7 aa, synthetic construct
LQPVIRG

SEQ ID NO: 44989 - protein, 7 aa, synthetic construct
TKVGPGS

SEQ ID NO: 44990 - protein, 7 aa, synthetic construct
GGWGNNE

SEQ ID NO: 44991 - protein, 7 aa, synthetic construct
SEYVRGD

SEQ ID NO: 44992 - protein, 7 aa, synthetic construct
RDKGVSG

SEQ ID NO: 44993 - protein, 7 aa, synthetic construct
QRGAANG

SEQ ID NO: 44994 - protein, 7 aa, synthetic construct
SAHNAGS

SEQ ID NO: 44995 - protein, 7 aa, synthetic construct
ERRESKV

SEQ ID NO: 44996 - protein, 7 aa, synthetic construct
NGERPRA

SEQ ID NO: 44997 - protein, 7 aa, synthetic construct
WQKTGKE

SEQ ID NO: 44998 - protein, 7 aa, synthetic construct
SRTSVQA

SEQ ID NO: 44999 - protein, 7 aa, synthetic construct
IGNIERG

SEQ ID NO: 45000 - protein, 7 aa, synthetic construct
NIKNQMG

SEQ ID NO: 45001 - protein, 7 aa, synthetic construct
IRTKGDF

SEQ ID NO: 45002 - protein, 7 aa, synthetic construct
ARPQTMG

SEQ ID NO: 45003 - protein, 7 aa, synthetic construct
SIHGNQG

SEQ ID NO: 45004 - protein, 7 aa, synthetic construct
KTNAGGS

SEQ ID NO: 45005 - protein, 7 aa, synthetic construct
WPGRAQP

SEQ ID NO: 45006 - protein, 7 aa, synthetic construct
GKGPSVA

SEQ ID NO: 45007 - protein, 7 aa, synthetic construct
IRQPNQQ

SEQ ID NO: 45008 - protein, 7 aa, synthetic construct
NRPTQQT

SEQ ID NO: 45009 - protein, 7 aa, synthetic construct
YGAGIMS

SEQ ID NO: 45010 - protein, 7 aa, synthetic construct
NREQKLD

SEQ ID NO: 45011 - protein, 7 aa, synthetic construct
FKKIYAE

SEQ ID NO: 45012 - protein, 7 aa, synthetic construct
LSNRPSA

SEQ ID NO: 45013 - protein, 7 aa, synthetic construct
RKDTGNA

SEQ ID NO: 45014 - protein, 7 aa, synthetic construct
RDKMNGG

SEQ ID NO: 45015 - protein, 7 aa, synthetic construct
VPRAQQD

SEQ ID NO: 45016 - protein, 7 aa, synthetic construct
VRAPTSA

SEQ ID NO: 45017 - protein, 7 aa, synthetic construct
IKYKDYS

SEQ ID NO: 45018 - protein, 7 aa, synthetic construct
PMKAGIL

SEQ ID NO: 45019 - protein, 7 aa, synthetic construct
VQNMAHF

SEQ ID NO: 45020 - protein, 7 aa, synthetic construct
PQKSGSG

SEQ ID NO: 45021 - protein, 7 aa, synthetic construct
NKILRNE

SEQ ID NO: 45022 - protein, 7 aa, synthetic construct
NAGNKLN

SEQ ID NO: 45023 - protein, 7 aa, synthetic construct
GKNKQDP

SEQ ID NO: 45024 - protein, 7 aa, synthetic construct
YQKGKDG

SEQ ID NO: 45025 - protein, 7 aa, synthetic construct
HPKKVEI

SEQ ID NO: 45026 - protein, 7 aa, synthetic construct
NSKQTSA

SEQ ID NO: 45027 - protein, 7 aa, synthetic construct
RGPNLGS

SEQ ID NO: 45028 - protein, 7 aa, synthetic construct
TGHLMGP

SEQ ID NO: 45029 - protein, 7 aa, synthetic construct
RVLSQSD

SEQ ID NO: 45030 - protein, 7 aa, synthetic construct
RQSNSMD

SEQ ID NO: 45031 - protein, 7 aa, synthetic construct
VKNAIAG

SEQ ID NO: 45032 - protein, 7 aa, synthetic construct
VRPTPIA

SEQ ID NO: 45033 - protein, 7 aa, synthetic construct
QRPSIAT

SEQ ID NO: 45034 - protein, 7 aa, synthetic construct
SNLAKQG

SEQ ID NO: 45035 - protein, 7 aa, synthetic construct
SNNKNMP

SEQ ID NO: 45036 - protein, 7 aa, synthetic construct
GHHSKAG

SEQ ID NO: 45037 - protein, 7 aa, synthetic construct
AGGGSGM

SEQ ID NO: 45038 - protein, 7 aa, synthetic construct
HQAFEKG

SEQ ID NO: 45039 - protein, 7 aa, synthetic construct
MARNPDS

SEQ ID NO: 45040 - protein, 7 aa, synthetic construct
ILRLNSA

SEQ ID NO: 45041 - protein, 7 aa, synthetic construct
TPNHQAR

SEQ ID NO: 45042 - protein, 7 aa, synthetic construct
GYQKMRD

SEQ ID NO: 45043 - protein, 7 aa, synthetic construct
GPGQRTG

SEQ ID NO: 45044 - protein, 7 aa, synthetic construct
KNTSQQA

SEQ ID NO: 45045 - protein, 7 aa, synthetic construct
SQKAVAG

SEQ ID NO: 45046 - protein, 7 aa, synthetic construct
VKYDTAP

SEQ ID NO: 45047 - protein, 7 aa, synthetic construct
DMKFSGK

SEQ ID NO: 45048 - protein, 7 aa, synthetic construct
RPKSFLD

SEQ ID NO: 45049 - protein, 7 aa, synthetic construct
YGGKSQN

SEQ ID NO: 45050 - protein, 7 aa, synthetic construct
WNTGVVG

SEQ ID NO: 45051 - protein, 7 aa, synthetic construct
GQARTMG

SEQ ID NO: 45052 - protein, 7 aa, synthetic construct
QKTSGAA

SEQ ID NO: 45053 - protein, 7 aa, synthetic construct
VKNGDAR

SEQ ID NO: 45054 - protein, 7 aa, synthetic construct
FNYSKET

SEQ ID NO: 45055 - protein, 7 aa, synthetic construct
TKLVGDR

SEQ ID NO: 45056 - protein, 7 aa, synthetic construct
NTGTKSP

SEQ ID NO: 45057 - protein, 7 aa, synthetic construct
FDTVHHP

SEQ ID NO: 45058 - protein, 7 aa, synthetic construct
SNTKVSG

SEQ ID NO: 45059 - protein, 7 aa, synthetic construct
NKFTAEM

SEQ ID NO: 45060 - protein, 7 aa, synthetic construct
ANQRQQA

SEQ ID NO: 45061 - protein, 7 aa, synthetic construct
LKPVVQG

SEQ ID NO: 45062 - protein, 7 aa, synthetic construct
PIQQRST

SEQ ID NO: 45063 - protein, 7 aa, synthetic construct
KLAGPIN

SEQ ID NO: 45064 - protein, 7 aa, synthetic construct
TRSSAQS

SEQ ID NO: 45065 - protein, 7 aa, synthetic construct
MPGKSQA

SEQ ID NO: 45066 - protein, 7 aa, synthetic construct
DKQHLMP

SEQ ID NO: 45067 - protein, 7 aa, synthetic construct
KMAPNNV

SEQ ID NO: 45068 - protein, 7 aa, synthetic construct
ANRGTII

SEQ ID NO: 45069 - protein, 7 aa, synthetic construct
QNKATKE

SEQ ID NO: 45070 - protein, 7 aa, synthetic construct
KGTSLAG

SEQ ID NO: 45071 - protein, 7 aa, synthetic construct
PPHNPKM

SEQ ID NO: 45072 - protein, 7 aa, synthetic construct
VKPPHSS

SEQ ID NO: 45073 - protein, 7 aa, synthetic construct
TEHNRVG

SEQ ID NO: 45074 - protein, 7 aa, synthetic construct
GKPGNPA

SEQ ID NO: 45075 - protein, 7 aa, synthetic construct
NIPHRPE

SEQ ID NO: 45076 - protein, 7 aa, synthetic construct
KTMSAQP

SEQ ID NO: 45077 - protein, 7 aa, synthetic construct
QDPVRGG

SEQ ID NO: 45078 - protein, 7 aa, synthetic construct
TSSAKQA

SEQ ID NO: 45079 - protein, 7 aa, synthetic construct
SNQHAAL

SEQ ID NO: 45080 - protein, 7 aa, synthetic construct
GSGGQVY

SEQ ID NO: 45081 - protein, 7 aa, synthetic construct
PRDYSQN

SEQ ID NO: 45082 - protein, 7 aa, synthetic construct
RSQGNNA

SEQ ID NO: 45083 - protein, 7 aa, synthetic construct
KDPNGRA

SEQ ID NO: 45084 - protein, 7 aa, synthetic construct
QPRSAVP

SEQ ID NO: 45085 - protein, 7 aa, synthetic construct
SSSKGTG

SEQ ID NO: 45086 - protein, 7 aa, synthetic construct
KMNPNSA

SEQ ID NO: 45087 - protein, 7 aa, synthetic construct
HQNKINS

SEQ ID NO: 45088 - protein, 7 aa, synthetic construct
RSLQAME

SEQ ID NO: 45089 - protein, 7 aa, synthetic construct
MPTGRTH

SEQ ID NO: 45090 - protein, 7 aa, synthetic construct
VQRMNSN

SEQ ID NO: 45091 - protein, 7 aa, synthetic construct
KNPGSGN

SEQ ID NO: 45092 - protein, 7 aa, synthetic construct
MPKALHT

SEQ ID NO: 45093 - protein, 7 aa, synthetic construct
QTKTAQG

SEQ ID NO: 45094 - protein, 7 aa, synthetic construct
TAGNNRI

SEQ ID NO: 45095 - protein, 7 aa, synthetic construct
WAGSQIK

SEQ ID NO: 45096 - protein, 7 aa, synthetic construct
GSTKMAG

SEQ ID NO: 45097 - protein, 7 aa, synthetic construct
GTRTGVG

SEQ ID NO: 45098 - protein, 7 aa, synthetic construct
KYSNGMG

SEQ ID NO: 45099 - protein, 7 aa, synthetic construct
SRATNAP

SEQ ID NO: 45100 - protein, 7 aa, synthetic construct
NTNRGLA

SEQ ID NO: 45101 - protein, 7 aa, synthetic construct
NPGRRDD

SEQ ID NO: 45102 - protein, 7 aa, synthetic construct
GRYKSDE

SEQ ID NO: 45103 - protein, 7 aa, synthetic construct
RNQTATA

SEQ ID NO: 45104 - protein, 7 aa, synthetic construct
RQPGIGG

SEQ ID NO: 45105 - protein, 7 aa, synthetic construct
NKMPSTS

SEQ ID NO: 45106 - protein, 7 aa, synthetic construct
FVSAQSP

SEQ ID NO: 45107 - protein, 7 aa, synthetic construct
MHERNGA

SEQ ID NO: 45108 - protein, 7 aa, synthetic construct
LKSGHKE

SEQ ID NO: 45109 - protein, 7 aa, synthetic construct
KKFSMIE

SEQ ID NO: 45110 - protein, 7 aa, synthetic construct
NQGGGTL

SEQ ID NO: 45111 - protein, 7 aa, synthetic construct
IGHNPNK

SEQ ID NO: 45112 - protein, 7 aa, synthetic construct
NGTIARP

SEQ ID NO: 45113 - protein, 7 aa, synthetic construct
SKATNGA

SEQ ID NO: 45114 - protein, 7 aa, synthetic construct
KSTAGQQ

SEQ ID NO: 45115 - protein, 7 aa, synthetic construct
YNVKGQN

SEQ ID NO: 45116 - protein, 7 aa, synthetic construct
RGPSGTG

SEQ ID NO: 45117 - protein, 7 aa, synthetic construct
SGSYKND

SEQ ID NO: 45118 - protein, 7 aa, synthetic construct
LSHHFQG

SEQ ID NO: 45119 - protein, 7 aa, synthetic construct
RPMQGAA

SEQ ID NO: 45120 - protein, 7 aa, synthetic construct
SERMGKY

SEQ ID NO: 45121 - protein, 7 aa, synthetic construct
TGKTATV

SEQ ID NO: 45122 - protein, 7 aa, synthetic construct
DNYSKIG

SEQ ID NO: 45123 - protein, 7 aa, synthetic construct
FPKTQNG

SEQ ID NO: 45124 - protein, 7 aa, synthetic construct
NEFIKGF

SEQ ID NO: 45125 - protein, 7 aa, synthetic construct
IKPTQMN

SEQ ID NO: 45126 - protein, 7 aa, synthetic construct
FVHGSPG

SEQ ID NO: 45127 - protein, 7 aa, synthetic construct
MRMKGDS

SEQ ID NO: 45128 - protein, 7 aa, synthetic construct
ITQGQKM

SEQ ID NO: 45129 - protein, 7 aa, synthetic construct
KTNNSNT

SEQ ID NO: 45130 - protein, 7 aa, synthetic construct
KGVQKYE

SEQ ID NO: 45131 - protein, 7 aa, synthetic construct
QAHQARD

SEQ ID NO: 45132 - protein, 7 aa, synthetic construct
TQRSSVA

SEQ ID NO: 45133 - protein, 7 aa, synthetic construct
KQSIKEG

SEQ ID NO: 45134 - protein, 7 aa, synthetic construct
RPGGTNV

SEQ ID NO: 45135 - protein, 7 aa, synthetic construct
PRATGSA

SEQ ID NO: 45136 - protein, 7 aa, synthetic construct
NRIQNPV

SEQ ID NO: 45137 - protein, 7 aa, synthetic construct
KPPGYGA

SEQ ID NO: 45138 - protein, 7 aa, synthetic construct
FGGVRNP

SEQ ID NO: 45139 - protein, 7 aa, synthetic construct
MSRVMYE

SEQ ID NO: 45140 - protein, 7 aa, synthetic construct
KRSDVQM

SEQ ID NO: 45141 - protein, 7 aa, synthetic construct
IKFIQTE

SEQ ID NO: 45142 - protein, 7 aa, synthetic construct
NRSSGLN

SEQ ID NO: 45143 - protein, 7 aa, synthetic construct
YKPYADS

SEQ ID NO: 45144 - protein, 7 aa, synthetic construct
VKPYSQA

SEQ ID NO: 45145 - protein, 7 aa, synthetic construct
GGGNFRD

SEQ ID NO: 45146 - protein, 7 aa, synthetic construct
NSTTKNA

SEQ ID NO: 45147 - protein, 7 aa, synthetic construct
SKPGYGA

SEQ ID NO: 45148 - protein, 7 aa, synthetic construct
AGKSQNS

SEQ ID NO: 45149 - protein, 7 aa, synthetic construct
PLYRGTP

SEQ ID NO: 45150 - protein, 7 aa, synthetic construct
NQFGKNL

SEQ ID NO: 45151 - protein, 7 aa, synthetic construct
GVSAKTG

SEQ ID NO: 45152 - protein, 7 aa, synthetic construct
KAPANMS

SEQ ID NO: 45153 - protein, 7 aa, synthetic construct
NHNAKQG

SEQ ID NO: 45154 - protein, 7 aa, synthetic construct
VQRTTGG

SEQ ID NO: 45155 - protein, 7 aa, synthetic construct
YNGKQSA

SEQ ID NO: 45156 - protein, 7 aa, synthetic construct
FSAHGHG

SEQ ID NO: 45157 - protein, 7 aa, synthetic construct
GNGQRNQ

SEQ ID NO: 45158 - protein, 7 aa, synthetic construct
LRHQHAT

SEQ ID NO: 45159 - protein, 7 aa, synthetic construct
KQASTIS

SEQ ID NO: 45160 - protein, 7 aa, synthetic construct
FERKGVD

SEQ ID NO: 45161 - protein, 7 aa, synthetic construct
RDNRNPL

SEQ ID NO: 45162 - protein, 7 aa, synthetic construct
DGYRGVP

SEQ ID NO: 45163 - protein, 7 aa, synthetic construct
SRKTEGG

SEQ ID NO: 45164 - protein, 7 aa, synthetic construct
FTKDTRN

SEQ ID NO: 45165 - protein, 7 aa, synthetic construct
FLRQNKD

SEQ ID NO: 45166 - protein, 7 aa, synthetic construct
LKSGLSG

SEQ ID NO: 45167 - protein, 7 aa, synthetic construct
WGNTKVG

SEQ ID NO: 45168 - protein, 7 aa, synthetic construct
VKGAMGG

SEQ ID NO: 45169 - protein, 7 aa, synthetic construct
VVGGNKG

SEQ ID NO: 45170 - protein, 7 aa, synthetic construct
RVSAEVA

SEQ ID NO: 45171 - protein, 7 aa, synthetic construct
SKSGTSM

SEQ ID NO: 45172 - protein, 7 aa, synthetic construct
KATGSMA

SEQ ID NO: 45173 - protein, 7 aa, synthetic construct
RMNTNGS

SEQ ID NO: 45174 - protein, 7 aa, synthetic construct
YHGGVPK

SEQ ID NO: 45175 - protein, 7 aa, synthetic construct
TMLSKGP

SEQ ID NO: 45176 - protein, 7 aa, synthetic construct
ARSETRP

SEQ ID NO: 45177 - protein, 7 aa, synthetic construct
KDKFGVG

SEQ ID NO: 45178 - protein, 7 aa, synthetic construct
FPKSNVT

SEQ ID NO: 45179 - protein, 7 aa, synthetic construct
FQTPARD

SEQ ID NO: 45180 - protein, 7 aa, synthetic construct
GRQSATP

SEQ ID NO: 45181 - protein, 7 aa, synthetic construct
SKGSSMQ

SEQ ID NO: 45182 - protein, 7 aa, synthetic construct
GKTNNMA

SEQ ID NO: 45183 - protein, 7 aa, synthetic construct
KPKPTEQ

SEQ ID NO: 45184 - protein, 7 aa, synthetic construct
TKQSKVE

SEQ ID NO: 45185 - protein, 7 aa, synthetic construct
GVGRPMQ

SEQ ID NO: 45186 - protein, 7 aa, synthetic construct
TTRAMSS

SEQ ID NO: 45187 - protein, 7 aa, synthetic construct
RNTQTSG

SEQ ID NO: 45188 - protein, 7 aa, synthetic construct
NRTLEKS

SEQ ID NO: 45189 - protein, 7 aa, synthetic construct
VKSQEKL

SEQ ID NO: 45190 - protein, 7 aa, synthetic construct
TRSNSAP

SEQ ID NO: 45191 - protein, 7 aa, synthetic construct
NGMPSMK

SEQ ID NO: 45192 - protein, 7 aa, synthetic construct
QKWQPNA

SEQ ID NO: 45193 - protein, 7 aa, synthetic construct
RAYPQHD

SEQ ID NO: 45194 - protein, 7 aa, synthetic construct
RNMSAGG

SEQ ID NO: 45195 - protein, 7 aa, synthetic construct
RVTMKEG

SEQ ID NO: 45196 - protein, 7 aa, synthetic construct
SKALKQD

SEQ ID NO: 45197 - protein, 7 aa, synthetic construct
LSTKTEW

SEQ ID NO: 45198 - protein, 7 aa, synthetic construct
IFKEVRP

SEQ ID NO: 45199 - protein, 7 aa, synthetic construct
KGHSHSG

SEQ ID NO: 45200 - protein, 7 aa, synthetic construct
LAGTMKG

SEQ ID NO: 45201 - protein, 7 aa, synthetic construct
NSRNSTP

SEQ ID NO: 45202 - protein, 7 aa, synthetic construct
MFRDQSK

SEQ ID NO: 45203 - protein, 7 aa, synthetic construct
INKTGNN

SEQ ID NO: 45204 - protein, 7 aa, synthetic construct
MPHKFDP

SEQ ID NO: 45205 - protein, 7 aa, synthetic construct
QRSNVMV

SEQ ID NO: 45206 - protein, 7 aa, synthetic construct
SVKNGLY

SEQ ID NO: 45207 - protein, 7 aa, synthetic construct
QYKMGIA

SEQ ID NO: 45208 - protein, 7 aa, synthetic construct
RSNPANP

SEQ ID NO: 45209 - protein, 7 aa, synthetic construct
RTGASGM

SEQ ID NO: 45210 - protein, 7 aa, synthetic construct
RPHAVSV

SEQ ID NO: 45211 - protein, 7 aa, synthetic construct
TSKSATP

SEQ ID NO: 45212 - protein, 7 aa, synthetic construct
RGMRMEM

SEQ ID NO: 45213 - protein, 7 aa, synthetic construct
NSFMTSP

SEQ ID NO: 45214 - protein, 7 aa, synthetic construct
GMGNRQA

SEQ ID NO: 45215 - protein, 7 aa, synthetic construct
MQRNGNP

SEQ ID NO: 45216 - protein, 7 aa, synthetic construct
NTGRGAT

SEQ ID NO: 45217 - protein, 7 aa, synthetic construct
LKSATRD

SEQ ID NO: 45218 - protein, 7 aa, synthetic construct
FRGAGPS

SEQ ID NO: 45219 - protein, 7 aa, synthetic construct
KRDLISS

SEQ ID NO: 45220 - protein, 7 aa, synthetic construct
RSQTGPA

SEQ ID NO: 45221 - protein, 7 aa, synthetic construct
TTKIMQP

SEQ ID NO: 45222 - protein, 7 aa, synthetic construct
QTGSRQG

SEQ ID NO: 45223 - protein, 7 aa, synthetic construct
KVDKRGE

SEQ ID NO: 45224 - protein, 7 aa, synthetic construct
TNTRQSG

SEQ ID NO: 45225 - protein, 7 aa, synthetic construct
IKAMDGN

SEQ ID NO: 45226 - protein, 7 aa, synthetic construct
MMKPTNA

SEQ ID NO: 45227 - protein, 7 aa, synthetic construct
QPMFAGG

SEQ ID NO: 45228 - protein, 7 aa, synthetic construct
IVTQGGA

SEQ ID NO: 45229 - protein, 7 aa, synthetic construct
QRASSSP

SEQ ID NO: 45230 - protein, 7 aa, synthetic construct
KNMATMA

SEQ ID NO: 45231 - protein, 7 aa, synthetic construct
TMSNTKG

SEQ ID NO: 45232 - protein, 7 aa, synthetic construct
SFKTVQN

SEQ ID NO: 45233 - protein, 7 aa, synthetic construct
GRGPASE

SEQ ID NO: 45234 - protein, 7 aa, synthetic construct
HTKQVPQ

SEQ ID NO: 45235 - protein, 7 aa, synthetic construct
YPTGKTG

SEQ ID NO: 45236 - protein, 7 aa, synthetic construct
SRTTSNG

SEQ ID NO: 45237 - protein, 7 aa, synthetic construct
GKNMQTA

SEQ ID NO: 45238 - protein, 7 aa, synthetic construct
VHGLYPE

SEQ ID NO: 45239 - protein, 7 aa, synthetic construct
KPYGQNP

SEQ ID NO: 45240 - protein, 7 aa, synthetic construct
RTATQNG

SEQ ID NO: 45241 - protein, 7 aa, synthetic construct
QKHSFGE

SEQ ID NO: 45242 - protein, 7 aa, synthetic construct
QPNAVKN

SEQ ID NO: 45243 - protein, 7 aa, synthetic construct
QRPMSVG

SEQ ID NO: 45244 - protein, 7 aa, synthetic construct
RVNGQLG

SEQ ID NO: 45245 - protein, 7 aa, synthetic construct
TQKGVVA

SEQ ID NO: 45246 - protein, 7 aa, synthetic construct
VQRQHSE

SEQ ID NO: 45247 - protein, 7 aa, synthetic construct
WSTFGRE

SEQ ID NO: 45248 - protein, 7 aa, synthetic construct
ATRYQSP

SEQ ID NO: 45249 - protein, 7 aa, synthetic construct
IVGNLGK

SEQ ID NO: 45250 - protein, 7 aa, synthetic construct
HNGKGMI

SEQ ID NO: 45251 - protein, 7 aa, synthetic construct
YHNKSER

SEQ ID NO: 45252 - protein, 7 aa, synthetic construct
KTGPQAA

SEQ ID NO: 45253 - protein, 7 aa, synthetic construct
QVKDGKG

SEQ ID NO: 45254 - protein, 7 aa, synthetic construct
TSYVKTD

SEQ ID NO: 45255 - protein, 7 aa, synthetic construct
GINRHQP

SEQ ID NO: 45256 - protein, 7 aa, synthetic construct
RGYLQPE

SEQ ID NO: 45257 - protein, 7 aa, synthetic construct
LRGTNNI

SEQ ID NO: 45258 - protein, 7 aa, synthetic construct
RDGQQAL

SEQ ID NO: 45259 - protein, 7 aa, synthetic construct
SNPVQMG

SEQ ID NO: 45260 - protein, 7 aa, synthetic construct
GYGHTHA

SEQ ID NO: 45261 - protein, 7 aa, synthetic construct
NMKQGNG

SEQ ID NO: 45262 - protein, 7 aa, synthetic construct
MQHKMLD

SEQ ID NO: 45263 - protein, 7 aa, synthetic construct
KTTTNTS

SEQ ID NO: 45264 - protein, 7 aa, synthetic construct
TKMMGRE

SEQ ID NO: 45265 - protein, 7 aa, synthetic construct
IKDRKEF

SEQ ID NO: 45266 - protein, 7 aa, synthetic construct
NQTQSHT

SEQ ID NO: 45267 - protein, 7 aa, synthetic construct
RPTQANS

SEQ ID NO: 45268 - protein, 7 aa, synthetic construct
IGSHKTI

SEQ ID NO: 45269 - protein, 7 aa, synthetic construct
DLRFKAA

SEQ ID NO: 45270 - protein, 7 aa, synthetic construct
GRTLGVA

SEQ ID NO: 45271 - protein, 7 aa, synthetic construct
ARQASTN

SEQ ID NO: 45272 - protein, 7 aa, synthetic construct
IKYNNGA

SEQ ID NO: 45273 - protein, 7 aa, synthetic construct
MGRTDIP

SEQ ID NO: 45274 - protein, 7 aa, synthetic construct
LPPYLKA

SEQ ID NO: 45275 - protein, 7 aa, synthetic construct
SRNAQTG

SEQ ID NO: 45276 - protein, 7 aa, synthetic construct
RPTPATA

SEQ ID NO: 45277 - protein, 7 aa, synthetic construct
YNTSGKG

SEQ ID NO: 45278 - protein, 7 aa, synthetic construct
TIGRMAE

SEQ ID NO: 45279 - protein, 7 aa, synthetic construct
QKYGTQG

SEQ ID NO: 45280 - protein, 7 aa, synthetic construct
MKMTSAG

SEQ ID NO: 45281 - protein, 7 aa, synthetic construct
KNNSATS

SEQ ID NO: 45282 - protein, 7 aa, synthetic construct
KGNSSNV

SEQ ID NO: 45283 - protein, 7 aa, synthetic construct
YGPNKNP

SEQ ID NO: 45284 - protein, 7 aa, synthetic construct
NSPRVIE

SEQ ID NO: 45285 - protein, 7 aa, synthetic construct
KDKPTSA

SEQ ID NO: 45286 - protein, 7 aa, synthetic construct
YGNSTRG

SEQ ID NO: 45287 - protein, 7 aa, synthetic construct
RNSSQGS

SEQ ID NO: 45288 - protein, 7 aa, synthetic construct
FMTVQKG

SEQ ID NO: 45289 - protein, 7 aa, synthetic construct
RQPGSSA

SEQ ID NO: 45290 - protein, 7 aa, synthetic construct
TTKNGNA

SEQ ID NO: 45291 - protein, 7 aa, synthetic construct
KYLSNGP

SEQ ID NO: 45292 - protein, 7 aa, synthetic construct
VIKTAAG

SEQ ID NO: 45293 - protein, 7 aa, synthetic construct
GNIPSRV

SEQ ID NO: 45294 - protein, 7 aa, synthetic construct
NNKSGQG

SEQ ID NO: 45295 - protein, 7 aa, synthetic construct
NKGPAAP

SEQ ID NO: 45296 - protein, 7 aa, synthetic construct
RSYTVGE

SEQ ID NO: 45297 - protein, 7 aa, synthetic construct
MTARAVS

SEQ ID NO: 45298 - protein, 7 aa, synthetic construct
FKPGGNG

SEQ ID NO: 45299 - protein, 7 aa, synthetic construct
MNRSPMA

SEQ ID NO: 45300 - protein, 7 aa, synthetic construct
VSTSGRA

SEQ ID NO: 45301 - protein, 7 aa, synthetic construct
IKSPSEM

SEQ ID NO: 45302 - protein, 7 aa, synthetic construct
KYGGSQD

SEQ ID NO: 45303 - protein, 7 aa, synthetic construct
LNQAITT

SEQ ID NO: 45304 - protein, 7 aa, synthetic construct
MNQQKLV

SEQ ID NO: 45305 - protein, 7 aa, synthetic construct
YPGGNKT

SEQ ID NO: 45306 - protein, 7 aa, synthetic construct
KNMSEHG

SEQ ID NO: 45307 - protein, 7 aa, synthetic construct
KDPGKSA

SEQ ID NO: 45308 - protein, 7 aa, synthetic construct
GTKTTGG

SEQ ID NO: 45309 - protein, 7 aa, synthetic construct
GQAHFKE

SEQ ID NO: 45310 - protein, 7 aa, synthetic construct
KNPSMGS

SEQ ID NO: 45311 - protein, 7 aa, synthetic construct
PRKMLDN

SEQ ID NO: 45312 - protein, 7 aa, synthetic construct
AYPKQGN

SEQ ID NO: 45313 - protein, 7 aa, synthetic construct
NTSSRTP

SEQ ID NO: 45314 - protein, 7 aa, synthetic construct
GVNHMQA

SEQ ID NO: 45315 - protein, 7 aa, synthetic construct
IQGVMAN

SEQ ID NO: 45316 - protein, 7 aa, synthetic construct
NTGANKP

SEQ ID NO: 45317 - protein, 7 aa, synthetic construct
DNRFVSG

SEQ ID NO: 45318 - protein, 7 aa, synthetic construct
YSTSSKF

SEQ ID NO: 45319 - protein, 7 aa, synthetic construct
RNSLEGV

SEQ ID NO: 45320 - protein, 7 aa, synthetic construct
QNAKKQE

SEQ ID NO: 45321 - protein, 7 aa, synthetic construct
WMEKIRG

SEQ ID NO: 45322 - protein, 7 aa, synthetic construct
TTVSRGF

SEQ ID NO: 45323 - protein, 7 aa, synthetic construct
SNKPQGT

SEQ ID NO: 45324 - protein, 7 aa, synthetic construct
SNPHIMN

SEQ ID NO: 45325 - protein, 7 aa, synthetic construct
QGTGKQA

SEQ ID NO: 45326 - protein, 7 aa, synthetic construct
TKTGTVG

SEQ ID NO: 45327 - protein, 7 aa, synthetic construct
IDRPATR

SEQ ID NO: 45328 - protein, 7 aa, synthetic construct
IRNMLSA

SEQ ID NO: 45329 - protein, 7 aa, synthetic construct
YEAYKHN

SEQ ID NO: 45330 - protein, 7 aa, synthetic construct
KQNQTAS

SEQ ID NO: 45331 - protein, 7 aa, synthetic construct
QPTKGHM

SEQ ID NO: 45332 - protein, 7 aa, synthetic construct
KLDNRGS

SEQ ID NO: 45333 - protein, 7 aa, synthetic construct
TNRSQTP

SEQ ID NO: 45334 - protein, 7 aa, synthetic construct
ETRELDI

SEQ ID NO: 45335 - protein, 7 aa, synthetic construct
KDGFNNM

SEQ ID NO: 45336 - protein, 7 aa, synthetic construct
DQRHMKS

SEQ ID NO: 45337 - protein, 7 aa, synthetic construct
NRSNGNG

SEQ ID NO: 45338 - protein, 7 aa, synthetic construct
GVTMVKP

SEQ ID NO: 45339 - protein, 7 aa, synthetic construct
PVKNTQG

SEQ ID NO: 45340 - protein, 7 aa, synthetic construct
ERHVKDI

SEQ ID NO: 45341 - protein, 7 aa, synthetic construct
RMSTQTG

SEQ ID NO: 45342 - protein, 7 aa, synthetic construct
KPGMDPV

SEQ ID NO: 45343 - protein, 7 aa, synthetic construct
KMGSGSN

SEQ ID NO: 45344 - protein, 7 aa, synthetic construct
KMNHQVG

SEQ ID NO: 45345 - protein, 7 aa, synthetic construct
FPDKKQA

SEQ ID NO: 45346 - protein, 7 aa, synthetic construct
LGHIQNQ

SEQ ID NO: 45347 - protein, 7 aa, synthetic construct
INNQMIK

SEQ ID NO: 45348 - protein, 7 aa, synthetic construct
KDNTHTG

SEQ ID NO: 45349 - protein, 7 aa, synthetic construct
LNAKMTV

SEQ ID NO: 45350 - protein, 7 aa, synthetic construct
LRSFSKD

SEQ ID NO: 45351 - protein, 7 aa, synthetic construct
KTSQYGP

SEQ ID NO: 45352 - protein, 7 aa, synthetic construct
KSPNQMG

SEQ ID NO: 45353 - protein, 7 aa, synthetic construct
GRNANIA

SEQ ID NO: 45354 - protein, 7 aa, synthetic construct
FMNMHDK

SEQ ID NO: 45355 - protein, 7 aa, synthetic construct
FKSGGAS

SEQ ID NO: 45356 - protein, 7 aa, synthetic construct
IGFREAT

SEQ ID NO: 45357 - protein, 7 aa, synthetic construct
RQYAETG

SEQ ID NO: 45358 - protein, 7 aa, synthetic construct
FPHAIAD

SEQ ID NO: 45359 - protein, 7 aa, synthetic construct
IPLHKQE

SEQ ID NO: 45360 - protein, 7 aa, synthetic construct
KVDSPAD

SEQ ID NO: 45361 - protein, 7 aa, synthetic construct
LRSMVQN

SEQ ID NO: 45362 - protein, 7 aa, synthetic construct
TGGVGQG

SEQ ID NO: 45363 - protein, 7 aa, synthetic construct
NVNGEKS

SEQ ID NO: 45364 - protein, 7 aa, synthetic construct
YPKTSTN

SEQ ID NO: 45365 - protein, 7 aa, synthetic construct
EPRANKT

SEQ ID NO: 45366 - protein, 7 aa, synthetic construct
PVQGQKV

SEQ ID NO: 45367 - protein, 7 aa, synthetic construct
RKNTLEA

SEQ ID NO: 45368 - protein, 7 aa, synthetic construct
MGYKMGQ

SEQ ID NO: 45369 - protein, 7 aa, synthetic construct
GNKDKAG

SEQ ID NO: 45370 - protein, 7 aa, synthetic construct
FKSHMEH

SEQ ID NO: 45371 - protein, 7 aa, synthetic construct
RDMAKPG

SEQ ID NO: 45372 - protein, 7 aa, synthetic construct
QPRGMTG

SEQ ID NO: 45373 - protein, 7 aa, synthetic construct
KAWNKEG

SEQ ID NO: 45374 - protein, 7 aa, synthetic construct
DKKWEGP

SEQ ID NO: 45375 - protein, 7 aa, synthetic construct
PRGTGQI

SEQ ID NO: 45376 - protein, 7 aa, synthetic construct
NTSAKHY

SEQ ID NO: 45377 - protein, 7 aa, synthetic construct
YRKPDDR

SEQ ID NO: 45378 - protein, 7 aa, synthetic construct
KIQLTAG

SEQ ID NO: 45379 - protein, 7 aa, synthetic construct
MHREQKD

SEQ ID NO: 45380 - protein, 7 aa, synthetic construct
WGMHTQA

SEQ ID NO: 45381 - protein, 7 aa, synthetic construct
GTQQIKG

SEQ ID NO: 45382 - protein, 7 aa, synthetic construct
HPGSPRP

SEQ ID NO: 45383 - protein, 7 aa, synthetic construct
TSGQKMG

SEQ ID NO: 45384 - protein, 7 aa, synthetic construct
FPGYAAP

SEQ ID NO: 45385 - protein, 7 aa, synthetic construct
CMKKADC

SEQ ID NO: 45386 - protein, 7 aa, synthetic construct
MSRGQQA

SEQ ID NO: 45387 - protein, 7 aa, synthetic construct
KQPNGAG

SEQ ID NO: 45388 - protein, 7 aa, synthetic construct
MIPKPDR

SEQ ID NO: 45389 - protein, 7 aa, synthetic construct
VSNSRQP

SEQ ID NO: 45390 - protein, 7 aa, synthetic construct
KEKGPVN

SEQ ID NO: 45391 - protein, 7 aa, synthetic construct
GRPSNGA

SEQ ID NO: 45392 - protein, 7 aa, synthetic construct
TGRIAPD

SEQ ID NO: 45393 - protein, 7 aa, synthetic construct
EGTRGQS

SEQ ID NO: 45394 - protein, 7 aa, synthetic construct
MKGSYNG

SEQ ID NO: 45395 - protein, 7 aa, synthetic construct
QGVQRGM

SEQ ID NO: 45396 - protein, 7 aa, synthetic construct
EIVRSHG

SEQ ID NO: 45397 - protein, 7 aa, synthetic construct
FPKSSSP

SEQ ID NO: 45398 - protein, 7 aa, synthetic construct
HMKGTDR

SEQ ID NO: 45399 - protein, 7 aa, synthetic construct
QRSSTNG

SEQ ID NO: 45400 - protein, 7 aa, synthetic construct
WNPGREG

SEQ ID NO: 45401 - protein, 7 aa, synthetic construct
PVKSMGA

SEQ ID NO: 45402 - protein, 7 aa, synthetic construct
MQGMANN

SEQ ID NO: 45403 - protein, 7 aa, synthetic construct
EFPPNHG

SEQ ID NO: 45404 - protein, 7 aa, synthetic construct
SKGNSQG

SEQ ID NO: 45405 - protein, 7 aa, synthetic construct
QTANRGH

SEQ ID NO: 45406 - protein, 7 aa, synthetic construct
NSIKTLT

SEQ ID NO: 45407 - protein, 7 aa, synthetic construct
AGHAAPR

SEQ ID NO: 45408 - protein, 7 aa, synthetic construct
GQTVNKG

SEQ ID NO: 45409 - protein, 7 aa, synthetic construct
KNNSVGP

SEQ ID NO: 45410 - protein, 7 aa, synthetic construct
FQKAATG

SEQ ID NO: 45411 - protein, 7 aa, synthetic construct
INRAATQ

SEQ ID NO: 45412 - protein, 7 aa, synthetic construct
VPMVSQH

SEQ ID NO: 45413 - protein, 7 aa, synthetic construct
AGNKNNI

SEQ ID NO: 45414 - protein, 7 aa, synthetic construct
PGHGGVM

SEQ ID NO: 45415 - protein, 7 aa, synthetic construct
KGAHNLM

SEQ ID NO: 45416 - protein, 7 aa, synthetic construct
TRMSTDA

SEQ ID NO: 45417 - protein, 7 aa, synthetic construct
PKSSMAS

SEQ ID NO: 45418 - protein, 7 aa, synthetic construct
GPSHVHA

SEQ ID NO: 45419 - protein, 7 aa, synthetic construct
ERGGGSF

SEQ ID NO: 45420 - protein, 7 aa, synthetic construct
KNAGARD

SEQ ID NO: 45421 - protein, 7 aa, synthetic construct
YPSIKIA

SEQ ID NO: 45422 - protein, 7 aa, synthetic construct
KPNAGQQ

SEQ ID NO: 45423 - protein, 7 aa, synthetic construct
NVSTHNG

SEQ ID NO: 45424 - protein, 7 aa, synthetic construct
GQGAKAG

SEQ ID NO: 45425 - protein, 7 aa, synthetic construct
TLQSKAG

SEQ ID NO: 45426 - protein, 7 aa, synthetic construct
HKLAPLG

SEQ ID NO: 45427 - protein, 7 aa, synthetic construct
HMGINLV

SEQ ID NO: 45428 - protein, 7 aa, synthetic construct
NLKNSNP

SEQ ID NO: 45429 - protein, 7 aa, synthetic construct
QTRGPAT

SEQ ID NO: 45430 - protein, 7 aa, synthetic construct
NQQPKIT

SEQ ID NO: 45431 - protein, 7 aa, synthetic construct
INQHFRA

SEQ ID NO: 45432 - protein, 7 aa, synthetic construct
TPGVIMA

SEQ ID NO: 45433 - protein, 7 aa, synthetic construct
GLIRQVE

SEQ ID NO: 45434 - protein, 7 aa, synthetic construct
TTKIQSS

SEQ ID NO: 45435 - protein, 7 aa, synthetic construct
YHNFSKP

SEQ ID NO: 45436 - protein, 7 aa, synthetic construct
KPQHMQG

SEQ ID NO: 45437 - protein, 7 aa, synthetic construct
TNGYKLG

SEQ ID NO: 45438 - protein, 7 aa, synthetic construct
PKSAGRD

SEQ ID NO: 45439 - protein, 7 aa, synthetic construct
HPQFSNA

SEQ ID NO: 45440 - protein, 7 aa, synthetic construct
WTSHPGT

SEQ ID NO: 45441 - protein, 7 aa, synthetic construct
QARTMMA

SEQ ID NO: 45442 - protein, 7 aa, synthetic construct
GRQASVG

SEQ ID NO: 45443 - protein, 7 aa, synthetic construct
FSKNTAS

SEQ ID NO: 45444 - protein, 7 aa, synthetic construct
TRASKDP

SEQ ID NO: 45445 - protein, 7 aa, synthetic construct
GKGNGFG

SEQ ID NO: 45446 - protein, 7 aa, synthetic construct
NNSNRTA

SEQ ID NO: 45447 - protein, 7 aa, synthetic construct
IGNWNNS

SEQ ID NO: 45448 - protein, 7 aa, synthetic construct
MSANHKN

SEQ ID NO: 45449 - protein, 7 aa, synthetic construct
GMKNSVG

SEQ ID NO: 45450 - protein, 7 aa, synthetic construct
TGRSKDD

SEQ ID NO: 45451 - protein, 7 aa, synthetic construct
NKSSVQM

SEQ ID NO: 45452 - protein, 7 aa, synthetic construct
VLPNLGH

SEQ ID NO: 45453 - protein, 7 aa, synthetic construct
EPPRSNG

SEQ ID NO: 45454 - protein, 7 aa, synthetic construct
TRQVSTA

SEQ ID NO: 45455 - protein, 7 aa, synthetic construct
NNTSNKP

SEQ ID NO: 45456 - protein, 7 aa, synthetic construct
NRNPPPG

SEQ ID NO: 45457 - protein, 7 aa, synthetic construct
LWPAGAT

SEQ ID NO: 45458 - protein, 7 aa, synthetic construct
YGLKQLA

SEQ ID NO: 45459 - protein, 7 aa, synthetic construct
NQALSAP

SEQ ID NO: 45460 - protein, 7 aa, synthetic construct
ITQNQTN

SEQ ID NO: 45461 - protein, 7 aa, synthetic construct
LGHRPVQ

SEQ ID NO: 45462 - protein, 7 aa, synthetic construct
KRDGTTG

SEQ ID NO: 45463 - protein, 7 aa, synthetic construct
MKSASSA

SEQ ID NO: 45464 - protein, 7 aa, synthetic construct
VGNRATP

SEQ ID NO: 45465 - protein, 7 aa, synthetic construct
FGASNKG

SEQ ID NO: 45466 - protein, 7 aa, synthetic construct
QSKGNAG

SEQ ID NO: 45467 - protein, 7 aa, synthetic construct
KIPQAGA

SEQ ID NO: 45468 - protein, 7 aa, synthetic construct
NGMGQKG

SEQ ID NO: 45469 - protein, 7 aa, synthetic construct
QKWMPEE

SEQ ID NO: 45470 - protein, 7 aa, synthetic construct
FSQQKQA

SEQ ID NO: 45471 - protein, 7 aa, synthetic construct
GSRNGVE

SEQ ID NO: 45472 - protein, 7 aa, synthetic construct
NFKHIVT

SEQ ID NO: 45473 - protein, 7 aa, synthetic construct
SGKMSAV

SEQ ID NO: 45474 - protein, 7 aa, synthetic construct
GNGGNIR

SEQ ID NO: 45475 - protein, 7 aa, synthetic construct
MSNKGNA

SEQ ID NO: 45476 - protein, 7 aa, synthetic construct
RRGYEID

SEQ ID NO: 45477 - protein, 7 aa, synthetic construct
KPSHTQG

SEQ ID NO: 45478 - protein, 7 aa, synthetic construct
NAMRPSA

SEQ ID NO: 45479 - protein, 7 aa, synthetic construct
QKQMSKD

SEQ ID NO: 45480 - protein, 7 aa, synthetic construct
ISGGMGS

SEQ ID NO: 45481 - protein, 7 aa, synthetic construct
FSKGDPP

SEQ ID NO: 45482 - protein, 7 aa, synthetic construct
LRMPMGE

SEQ ID NO: 45483 - protein, 7 aa, synthetic construct
RPNQNGP

SEQ ID NO: 45484 - protein, 7 aa, synthetic construct
AKGVPGV

SEQ ID NO: 45485 - protein, 7 aa, synthetic construct
HNNNSIL

SEQ ID NO: 45486 - protein, 7 aa, synthetic construct
MVGLVKT

SEQ ID NO: 45487 - protein, 7 aa, synthetic construct
VTKTAFG

SEQ ID NO: 45488 - protein, 7 aa, synthetic construct
ARANHSF

SEQ ID NO: 45489 - protein, 7 aa, synthetic construct
KSDMARS

SEQ ID NO: 45490 - protein, 7 aa, synthetic construct
PRTIHAT

SEQ ID NO: 45491 - protein, 7 aa, synthetic construct
GAQGGMK

SEQ ID NO: 45492 - protein, 7 aa, synthetic construct
KMGNHSE

SEQ ID NO: 45493 - protein, 7 aa, synthetic construct
MRNSGQS

SEQ ID NO: 45494 - protein, 7 aa, synthetic construct
IVGLRNS

SEQ ID NO: 45495 - protein, 7 aa, synthetic construct
RPGGVMA

SEQ ID NO: 45496 - protein, 7 aa, synthetic construct
NRANATA

SEQ ID NO: 45497 - protein, 7 aa, synthetic construct
KLTSGET

SEQ ID NO: 45498 - protein, 7 aa, synthetic construct
GKQTPVG

SEQ ID NO: 45499 - protein, 7 aa, synthetic construct
RQALSDF

SEQ ID NO: 45500 - protein, 7 aa, synthetic construct
ARTTLHG

SEQ ID NO: 45501 - protein, 7 aa, synthetic construct
QLHDSPK

SEQ ID NO: 45502 - protein, 7 aa, synthetic construct
PVKPAQS

SEQ ID NO: 45503 - protein, 7 aa, synthetic construct
QMKPTGA

SEQ ID NO: 45504 - protein, 7 aa, synthetic construct
KTPGSKD

SEQ ID NO: 45505 - protein, 7 aa, synthetic construct
KTQNPQS

SEQ ID NO: 45506 - protein, 7 aa, synthetic construct
ASKAGTV

SEQ ID NO: 45507 - protein, 7 aa, synthetic construct
IYLNKTP

SEQ ID NO: 45508 - protein, 7 aa, synthetic construct
SRSVNMP

SEQ ID NO: 45509 - protein, 7 aa, synthetic construct
NNARASS

SEQ ID NO: 45510 - protein, 7 aa, synthetic construct
KATNMGA

SEQ ID NO: 45511 - protein, 7 aa, synthetic construct
ILGRQSF

SEQ ID NO: 45512 - protein, 7 aa, synthetic construct
TARAEPF

SEQ ID NO: 45513 - protein, 7 aa, synthetic construct
AAYKSMG

SEQ ID NO: 45514 - protein, 7 aa, synthetic construct
EWQTKPI

SEQ ID NO: 45515 - protein, 7 aa, synthetic construct
REMHNAD

SEQ ID NO: 45516 - protein, 7 aa, synthetic construct
FSSKVSS

SEQ ID NO: 45517 - protein, 7 aa, synthetic construct
GQGGRFE

SEQ ID NO: 45518 - protein, 7 aa, synthetic construct
SNVQKQA

SEQ ID NO: 45519 - protein, 7 aa, synthetic construct
NKGSTPS

SEQ ID NO: 45520 - protein, 7 aa, synthetic construct
GFKGPSP

SEQ ID NO: 45521 - protein, 7 aa, synthetic construct
DMMGKRF

SEQ ID NO: 45522 - protein, 7 aa, synthetic construct
RNNGITV

SEQ ID NO: 45523 - protein, 7 aa, synthetic construct
VEPYRMG

SEQ ID NO: 45524 - protein, 7 aa, synthetic construct
ANNIAKD

SEQ ID NO: 45525 - protein, 7 aa, synthetic construct
KMAGGTS

SEQ ID NO: 45526 - protein, 7 aa, synthetic construct
NGTGRSS

SEQ ID NO: 45527 - protein, 7 aa, synthetic construct
QNAYTNV

SEQ ID NO: 45528 - protein, 7 aa, synthetic construct
SISNAKS

SEQ ID NO: 45529 - protein, 7 aa, synthetic construct
SHVPRMG

SEQ ID NO: 45530 - protein, 7 aa, synthetic construct
GRPAQNP

SEQ ID NO: 45531 - protein, 7 aa, synthetic construct
IIGVRGD

SEQ ID NO: 45532 - protein, 7 aa, synthetic construct
WKGNVTG

SEQ ID NO: 45533 - protein, 7 aa, synthetic construct
FQGKNQM

SEQ ID NO: 45534 - protein, 7 aa, synthetic construct
FQKAGQG

SEQ ID NO: 45535 - protein, 7 aa, synthetic construct
ASNKGYG

SEQ ID NO: 45536 - protein, 7 aa, synthetic construct
MKAYETV

SEQ ID NO: 45537 - protein, 7 aa, synthetic construct
KPTVQDP

SEQ ID NO: 45538 - protein, 7 aa, synthetic construct
GNAKTTM

SEQ ID NO: 45539 - protein, 7 aa, synthetic construct
RFKEQYV

SEQ ID NO: 45540 - protein, 7 aa, synthetic construct
GHFGNLS

SEQ ID NO: 45541 - protein, 7 aa, synthetic construct
KTTNATS

SEQ ID NO: 45542 - protein, 7 aa, synthetic construct
MKQGLST

SEQ ID NO: 45543 - protein, 7 aa, synthetic construct
SKTHTMA

SEQ ID NO: 45544 - protein, 7 aa, synthetic construct
RNVKPVD

SEQ ID NO: 45545 - protein, 7 aa, synthetic construct
LNSVTTG

SEQ ID NO: 45546 - protein, 7 aa, synthetic construct
GQMNSAV

SEQ ID NO: 45547 - protein, 7 aa, synthetic construct
HSNMQKA

SEQ ID NO: 45548 - protein, 7 aa, synthetic construct
NSSGQKV

SEQ ID NO: 45549 - protein, 7 aa, synthetic construct
SAKGVPG

SEQ ID NO: 45550 - protein, 7 aa, synthetic construct
KPQSTVA

SEQ ID NO: 45551 - protein, 7 aa, synthetic construct
KMGVARE

SEQ ID NO: 45552 - protein, 7 aa, synthetic construct
FRSDSSP

SEQ ID NO: 45553 - protein, 7 aa, synthetic construct
GYMRAQG

SEQ ID NO: 45554 - protein, 7 aa, synthetic construct
VSKVASS

SEQ ID NO: 45555 - protein, 7 aa, synthetic construct
DRYGQSP

SEQ ID NO: 45556 - protein, 7 aa, synthetic construct
AGTHGMG

SEQ ID NO: 45557 - protein, 7 aa, synthetic construct
NYKGESY

SEQ ID NO: 45558 - protein, 7 aa, synthetic construct
QPKTPGS

SEQ ID NO: 45559 - protein, 7 aa, synthetic construct
NTFSKPG

SEQ ID NO: 45560 - protein, 7 aa, synthetic construct
RYPEQPS

SEQ ID NO: 45561 - protein, 7 aa, synthetic construct
ADRNKVA

SEQ ID NO: 45562 - protein, 7 aa, synthetic construct
MSRSGSP

SEQ ID NO: 45563 - protein, 7 aa, synthetic construct
PKVKTQE

SEQ ID NO: 45564 - protein, 7 aa, synthetic construct
RPPNKSE

SEQ ID NO: 45565 - protein, 7 aa, synthetic construct
QDFRTNG

SEQ ID NO: 45566 - protein, 7 aa, synthetic construct
KSTTATA

SEQ ID NO: 45567 - protein, 7 aa, synthetic construct
FNKQVVA

SEQ ID NO: 45568 - protein, 7 aa, synthetic construct
TGKAPNG

SEQ ID NO: 45569 - protein, 7 aa, synthetic construct
IGPAHNK

SEQ ID NO: 45570 - protein, 7 aa, synthetic construct
SHYRMQE

SEQ ID NO: 45571 - protein, 7 aa, synthetic construct
AGKMSVY

SEQ ID NO: 45572 - protein, 7 aa, synthetic construct
MKPASSN

SEQ ID NO: 45573 - protein, 7 aa, synthetic construct
VPRQAGA

SEQ ID NO: 45574 - protein, 7 aa, synthetic construct
PKPMSGA

SEQ ID NO: 45575 - protein, 7 aa, synthetic construct
STAVAKN

SEQ ID NO: 45576 - protein, 7 aa, synthetic construct
LIIHGAG

SEQ ID NO: 45577 - protein, 7 aa, synthetic construct
GKETKAG

SEQ ID NO: 45578 - protein, 7 aa, synthetic construct
QNSPSNL

SEQ ID NO: 45579 - protein, 7 aa, synthetic construct
DPGMKLA

SEQ ID NO: 45580 - protein, 7 aa, synthetic construct
ERRDANS

SEQ ID NO: 45581 - protein, 7 aa, synthetic construct
KTYQVED

SEQ ID NO: 45582 - protein, 7 aa, synthetic construct
IVHKVDG

SEQ ID NO: 45583 - protein, 7 aa, synthetic construct
VGTSVRT

SEQ ID NO: 45584 - protein, 7 aa, synthetic construct
NNRDSKI

SEQ ID NO: 45585 - protein, 7 aa, synthetic construct
VMGIRNT

SEQ ID NO: 45586 - protein, 7 aa, synthetic construct
GATLRPA

SEQ ID NO: 45587 - protein, 7 aa, synthetic construct
IERIPRA

SEQ ID NO: 45588 - protein, 7 aa, synthetic construct
QGSKTNS

SEQ ID NO: 45589 - protein, 7 aa, synthetic construct
MGRNVQG

SEQ ID NO: 45590 - protein, 7 aa, synthetic construct
SNSKPPI

SEQ ID NO: 45591 - protein, 7 aa, synthetic construct
TKSQKGE

SEQ ID NO: 45592 - protein, 7 aa, synthetic construct
KAGTSAM

SEQ ID NO: 45593 - protein, 7 aa, synthetic construct
LIRSVHA

SEQ ID NO: 45594 - protein, 7 aa, synthetic construct
TSNQKPP

SEQ ID NO: 45595 - protein, 7 aa, synthetic construct
PRGNQEW

SEQ ID NO: 45596 - protein, 7 aa, synthetic construct
AANYHDR

SEQ ID NO: 45597 - protein, 7 aa, synthetic construct
FGNTKTG

SEQ ID NO: 45598 - protein, 7 aa, synthetic construct
KPGVTPN

SEQ ID NO: 45599 - protein, 7 aa, synthetic construct
NNTAKMI

SEQ ID NO: 45600 - protein, 7 aa, synthetic construct
SRGIAEF

SEQ ID NO: 45601 - protein, 7 aa, synthetic construct
WDDKLRS

SEQ ID NO: 45602 - protein, 7 aa, synthetic construct
QGRTVPQ

SEQ ID NO: 45603 - protein, 7 aa, synthetic construct
STTGGSN

SEQ ID NO: 45604 - protein, 7 aa, synthetic construct
LGMRGSD

SEQ ID NO: 45605 - protein, 7 aa, synthetic construct
SPRQTHQ

SEQ ID NO: 45606 - protein, 7 aa, synthetic construct
QWKIRED

SEQ ID NO: 45607 - protein, 7 aa, synthetic construct
VKNQSNP

SEQ ID NO: 45608 - protein, 7 aa, synthetic construct
PPKISMN

SEQ ID NO: 45609 - protein, 7 aa, synthetic construct
STVVKNF

SEQ ID NO: 45610 - protein, 7 aa, synthetic construct
RLNNHGN

SEQ ID NO: 45611 - protein, 7 aa, synthetic construct
GKNMGTY

SEQ ID NO: 45612 - protein, 7 aa, synthetic construct
SNTKHTP

SEQ ID NO: 45613 - protein, 7 aa, synthetic construct
MQKSSQN

SEQ ID NO: 45614 - protein, 7 aa, synthetic construct
GNIYSRE

SEQ ID NO: 45615 - protein, 7 aa, synthetic construct
GEKGMRN

SEQ ID NO: 45616 - protein, 7 aa, synthetic construct
TREKATS

SEQ ID NO: 45617 - protein, 7 aa, synthetic construct
GAKKPDG

SEQ ID NO: 45618 - protein, 7 aa, synthetic construct
SPGRNMH

SEQ ID NO: 45619 - protein, 7 aa, synthetic construct
EKSKMAY

SEQ ID NO: 45620 - protein, 7 aa, synthetic construct
KTQNGSI

SEQ ID NO: 45621 - protein, 7 aa, synthetic construct
MGTASKI

SEQ ID NO: 45622 - protein, 7 aa, synthetic construct
QGTRNSP

SEQ ID NO: 45623 - protein, 7 aa, synthetic construct
WSTLNKS

SEQ ID NO: 45624 - protein, 7 aa, synthetic construct
KLHQEGY

SEQ ID NO: 45625 - protein, 7 aa, synthetic construct
VYIGKDA

SEQ ID NO: 45626 - protein, 7 aa, synthetic construct
ERVSRSE

SEQ ID NO: 45627 - protein, 7 aa, synthetic construct
QNSAGKG

SEQ ID NO: 45628 - protein, 7 aa, synthetic construct
SKMSMSG

SEQ ID NO: 45629 - protein, 7 aa, synthetic construct
SGKFNMG

SEQ ID NO: 45630 - protein, 7 aa, synthetic construct
RQSTTAA

SEQ ID NO: 45631 - protein, 7 aa, synthetic construct
SKGNNAA

SEQ ID NO: 45632 - protein, 7 aa, synthetic construct
VNLKAGM

SEQ ID NO: 45633 - protein, 7 aa, synthetic construct
TRNAQTG

SEQ ID NO: 45634 - protein, 7 aa, synthetic construct
DMQYHKA

SEQ ID NO: 45635 - protein, 7 aa, synthetic construct
GMNKGKD

SEQ ID NO: 45636 - protein, 7 aa, synthetic construct
RNTFMTD

SEQ ID NO: 45637 - protein, 7 aa, synthetic construct
MREEWSA

SEQ ID NO: 45638 - protein, 7 aa, synthetic construct
LGQMAQR

SEQ ID NO: 45639 - protein, 7 aa, synthetic construct
VTKGNSL

SEQ ID NO: 45640 - protein, 7 aa, synthetic construct
PSNSTTL

SEQ ID NO: 45641 - protein, 7 aa, synthetic construct
TIQGPKA

SEQ ID NO: 45642 - protein, 7 aa, synthetic construct
KNPDARG

SEQ ID NO: 45643 - protein, 7 aa, synthetic construct
GMRTTAG

SEQ ID NO: 45644 - protein, 7 aa, synthetic construct
LAKQANI

SEQ ID NO: 45645 - protein, 7 aa, synthetic construct
TKQSQGA

SEQ ID NO: 45646 - protein, 7 aa, synthetic construct
MKGNSAP

SEQ ID NO: 45647 - protein, 7 aa, synthetic construct
LRAFVDG

SEQ ID NO: 45648 - protein, 7 aa, synthetic construct
QPGSSAR

SEQ ID NO: 45649 - protein, 7 aa, synthetic construct
DHFTKKS

SEQ ID NO: 45650 - protein, 7 aa, synthetic construct
YKQNVVG

SEQ ID NO: 45651 - protein, 7 aa, synthetic construct
FDQLSNR

SEQ ID NO: 45652 - protein, 7 aa, synthetic construct
AHPVAKN

SEQ ID NO: 45653 - protein, 7 aa, synthetic construct
STKVTIT

SEQ ID NO: 45654 - protein, 7 aa, synthetic construct
FKDKPYV

SEQ ID NO: 45655 - protein, 7 aa, synthetic construct
NKSGAVG

SEQ ID NO: 45656 - protein, 7 aa, synthetic construct
MRGSNTV

SEQ ID NO: 45657 - protein, 7 aa, synthetic construct
RPPSGLA

SEQ ID NO: 45658 - protein, 7 aa, synthetic construct
NNAQRSA

SEQ ID NO: 45659 - protein, 7 aa, synthetic construct
SMQSAAR

SEQ ID NO: 45660 - protein, 7 aa, synthetic construct
GAPQRSP

SEQ ID NO: 45661 - protein, 7 aa, synthetic construct
TGPGQAK

SEQ ID NO: 45662 - protein, 7 aa, synthetic construct
LGSQTQH

SEQ ID NO: 45663 - protein, 7 aa, synthetic construct
TDMRTPM

SEQ ID NO: 45664 - protein, 7 aa, synthetic construct
NMGNSKP

SEQ ID NO: 45665 - protein, 7 aa, synthetic construct
NHGRNQT

SEQ ID NO: 45666 - protein, 7 aa, synthetic construct
LQSRTAS

SEQ ID NO: 45667 - protein, 7 aa, synthetic construct
LGLAHGP

SEQ ID NO: 45668 - protein, 7 aa, synthetic construct
YGAPIRE

SEQ ID NO: 45669 - protein, 7 aa, synthetic construct
LGSQRQY

SEQ ID NO: 45670 - protein, 7 aa, synthetic construct
LDRVGHQ

SEQ ID NO: 45671 - protein, 7 aa, synthetic construct
GLKVDLG

SEQ ID NO: 45672 - protein, 7 aa, synthetic construct
MNTRYGP

SEQ ID NO: 45673 - protein, 7 aa, synthetic construct
YPKTPTA

SEQ ID NO: 45674 - protein, 7 aa, synthetic construct
TNAQSKG

SEQ ID NO: 45675 - protein, 7 aa, synthetic construct
MPRGDKG

SEQ ID NO: 45676 - protein, 7 aa, synthetic construct
EKYRGEG

SEQ ID NO: 45677 - protein, 7 aa, synthetic construct
DTHYVMK

SEQ ID NO: 45678 - protein, 7 aa, synthetic construct
YAPAVAT

SEQ ID NO: 45679 - protein, 7 aa, synthetic construct
YGTTKQG

SEQ ID NO: 45680 - protein, 7 aa, synthetic construct
NQIHDKI

SEQ ID NO: 45681 - protein, 7 aa, synthetic construct
QPKGLMA

SEQ ID NO: 45682 - protein, 7 aa, synthetic construct
TPSMKTS

SEQ ID NO: 45683 - protein, 7 aa, synthetic construct
RQVEPAK

SEQ ID NO: 45684 - protein, 7 aa, synthetic construct
VSGHWKE

SEQ ID NO: 45685 - protein, 7 aa, synthetic construct
NATRLSP

SEQ ID NO: 45686 - protein, 7 aa, synthetic construct
MQGVVSR

SEQ ID NO: 45687 - protein, 7 aa, synthetic construct
MINGIGK

SEQ ID NO: 45688 - protein, 7 aa, synthetic construct
KPTSGSA

SEQ ID NO: 45689 - protein, 7 aa, synthetic construct
MTKMAKD

SEQ ID NO: 45690 - protein, 7 aa, synthetic construct
AMPSKAD

SEQ ID NO: 45691 - protein, 7 aa, synthetic construct
GKREIYG

SEQ ID NO: 45692 - protein, 7 aa, synthetic construct
VGKTYPH

SEQ ID NO: 45693 - protein, 7 aa, synthetic construct
SYKAHDG

SEQ ID NO: 45694 - protein, 7 aa, synthetic construct
DHSRVLP

SEQ ID NO: 45695 - protein, 7 aa, synthetic construct
WQKNEQK

SEQ ID NO: 45696 - protein, 7 aa, synthetic construct
LAGFKHN

SEQ ID NO: 45697 - protein, 7 aa, synthetic construct
MLPKEKG

SEQ ID NO: 45698 - protein, 7 aa, synthetic construct
NKDNYNK

SEQ ID NO: 45699 - protein, 7 aa, synthetic construct
SNKQTSS

SEQ ID NO: 45700 - protein, 7 aa, synthetic construct
GQQAKGG

SEQ ID NO: 45701 - protein, 7 aa, synthetic construct
YPKSISN

SEQ ID NO: 45702 - protein, 7 aa, synthetic construct
SSRNALN

SEQ ID NO: 45703 - protein, 7 aa, synthetic construct
IDYRVKT

SEQ ID NO: 45704 - protein, 7 aa, synthetic construct
GKGSNMG

SEQ ID NO: 45705 - protein, 7 aa, synthetic construct
VKHDMAT

SEQ ID NO: 45706 - protein, 7 aa, synthetic construct
KQMRLEA

SEQ ID NO: 45707 - protein, 7 aa, synthetic construct
NKASTSN

SEQ ID NO: 45708 - protein, 7 aa, synthetic construct
MGRGVQM

SEQ ID NO: 45709 - protein, 7 aa, synthetic construct
TITMHSS

SEQ ID NO: 45710 - protein, 7 aa, synthetic construct
MDQKQAG

SEQ ID NO: 45711 - protein, 7 aa, synthetic construct
AILHGGG

SEQ ID NO: 45712 - protein, 7 aa, synthetic construct
NHIRAKE

SEQ ID NO: 45713 - protein, 7 aa, synthetic construct
MNSTRSP

SEQ ID NO: 45714 - protein, 7 aa, synthetic construct
NPKSSYG

SEQ ID NO: 45715 - protein, 7 aa, synthetic construct
RGSTVVG

SEQ ID NO: 45716 - protein, 7 aa, synthetic construct
GGRALEW

SEQ ID NO: 45717 - protein, 7 aa, synthetic construct
QTSGIHG

SEQ ID NO: 45718 - protein, 7 aa, synthetic construct
NKAQISG

SEQ ID NO: 45719 - protein, 7 aa, synthetic construct
TSRSTQI

SEQ ID NO: 45720 - protein, 7 aa, synthetic construct
KYSTTAD

SEQ ID NO: 45721 - protein, 7 aa, synthetic construct
NSKGATN

SEQ ID NO: 45722 - protein, 7 aa, synthetic construct
GSHMVRG

SEQ ID NO: 45723 - protein, 7 aa, synthetic construct
DKKTSNA

SEQ ID NO: 45724 - protein, 7 aa, synthetic construct
TIASRGG

SEQ ID NO: 45725 - protein, 7 aa, synthetic construct
DQYTKTG

SEQ ID NO: 45726 - protein, 7 aa, synthetic construct
VNTQRGA

SEQ ID NO: 45727 - protein, 7 aa, synthetic construct
LGPRQQL

SEQ ID NO: 45728 - protein, 7 aa, synthetic construct
NRGDMMA

SEQ ID NO: 45729 - protein, 7 aa, synthetic construct
YGSQKAT

SEQ ID NO: 45730 - protein, 7 aa, synthetic construct
QNEVRNG

SEQ ID NO: 45731 - protein, 7 aa, synthetic construct
NGASRQS

SEQ ID NO: 45732 - protein, 7 aa, synthetic construct
MASPTFA

SEQ ID NO: 45733 - protein, 7 aa, synthetic construct
QHSVGGP

SEQ ID NO: 45734 - protein, 7 aa, synthetic construct
DMGRPKN

SEQ ID NO: 45735 - protein, 7 aa, synthetic construct
NERIRTD

SEQ ID NO: 45736 - protein, 7 aa, synthetic construct
TKSSIGG

SEQ ID NO: 45737 - protein, 7 aa, synthetic construct
GVPYAQN

SEQ ID NO: 45738 - protein, 7 aa, synthetic construct
DEKGWGG

SEQ ID NO: 45739 - protein, 7 aa, synthetic construct
YPAKTGN

SEQ ID NO: 45740 - protein, 7 aa, synthetic construct
HAPKYAA

SEQ ID NO: 45741 - protein, 7 aa, synthetic construct
NKGTPMG

SEQ ID NO: 45742 - protein, 7 aa, synthetic construct
METYLKK

SEQ ID NO: 45743 - protein, 7 aa, synthetic construct
IATTQKA

SEQ ID NO: 45744 - protein, 7 aa, synthetic construct
AQKQGFY

SEQ ID NO: 45745 - protein, 7 aa, synthetic construct
TVKAMHG

SEQ ID NO: 45746 - protein, 7 aa, synthetic construct
NKLQQPQ

SEQ ID NO: 45747 - protein, 7 aa, synthetic construct
AYKTPGT

SEQ ID NO: 45748 - protein, 7 aa, synthetic construct
RGPIIAG

SEQ ID NO: 45749 - protein, 7 aa, synthetic construct
NGKKWDP

SEQ ID NO: 45750 - protein, 7 aa, synthetic construct
MKSPMQA

SEQ ID NO: 45751 - protein, 7 aa, synthetic construct
TNMKAGG

SEQ ID NO: 45752 - protein, 7 aa, synthetic construct
QVRPAGY

SEQ ID NO: 45753 - protein, 7 aa, synthetic construct
KISIRHD

SEQ ID NO: 45754 - protein, 7 aa, synthetic construct
KGNAAMG

SEQ ID NO: 45755 - protein, 7 aa, synthetic construct
QRQPEIG

SEQ ID NO: 45756 - protein, 7 aa, synthetic construct
NNWSKQE

SEQ ID NO: 45757 - protein, 7 aa, synthetic construct
KTQQGGA

SEQ ID NO: 45758 - protein, 7 aa, synthetic construct
YTQITPS

SEQ ID NO: 45759 - protein, 7 aa, synthetic construct
DNLTTVR

SEQ ID NO: 45760 - protein, 7 aa, synthetic construct
RMPAQND

SEQ ID NO: 45761 - protein, 7 aa, synthetic construct
GANKGIM

SEQ ID NO: 45762 - protein, 7 aa, synthetic construct
NVRGVTG

SEQ ID NO: 45763 - protein, 7 aa, synthetic construct
MEVRGHT

SEQ ID NO: 45764 - protein, 7 aa, synthetic construct
EYPVPSG

SEQ ID NO: 45765 - protein, 7 aa, synthetic construct
HTATRTA

SEQ ID NO: 45766 - protein, 7 aa, synthetic construct
NKQGQQL

SEQ ID NO: 45767 - protein, 7 aa, synthetic construct
HMHSTHS

SEQ ID NO: 45768 - protein, 7 aa, synthetic construct
KIQTMPG

SEQ ID NO: 45769 - protein, 7 aa, synthetic construct
ILSKYQA

SEQ ID NO: 45770 - protein, 7 aa, synthetic construct
TFRHDSQ

SEQ ID NO: 45771 - protein, 7 aa, synthetic construct
GKNGTMA

SEQ ID NO: 45772 - protein, 7 aa, synthetic construct
GIKYNSS

SEQ ID NO: 45773 - protein, 7 aa, synthetic construct
KMATGRD

SEQ ID NO: 45774 - protein, 7 aa, synthetic construct
QVNAMRG

SEQ ID NO: 45775 - protein, 7 aa, synthetic construct
RVDGAYA

SEQ ID NO: 45776 - protein, 7 aa, synthetic construct
NQFKSTP

SEQ ID NO: 45777 - protein, 7 aa, synthetic construct
VFKTGYG

SEQ ID NO: 45778 - protein, 7 aa, synthetic construct
FKGAVHS

SEQ ID NO: 45779 - protein, 7 aa, synthetic construct
QKGGTNN

SEQ ID NO: 45780 - protein, 7 aa, synthetic construct
RFDQNPV

SEQ ID NO: 45781 - protein, 7 aa, synthetic construct
NGGRSVG

SEQ ID NO: 45782 - protein, 7 aa, synthetic construct
IGHVRSA

SEQ ID NO: 45783 - protein, 7 aa, synthetic construct
VKGHAPM

SEQ ID NO: 45784 - protein, 7 aa, synthetic construct
YKTASTP

SEQ ID NO: 45785 - protein, 7 aa, synthetic construct
GFSRFGA

SEQ ID NO: 45786 - protein, 7 aa, synthetic construct
TKMAKAE

SEQ ID NO: 45787 - protein, 7 aa, synthetic construct
GGGGYSA

SEQ ID NO: 45788 - protein, 7 aa, synthetic construct
INPRVVT

SEQ ID NO: 45789 - protein, 7 aa, synthetic construct
DPVRVNS

SEQ ID NO: 45790 - protein, 7 aa, synthetic construct
NVKQSGG

SEQ ID NO: 45791 - protein, 7 aa, synthetic construct
QPGHSKS

SEQ ID NO: 45792 - protein, 7 aa, synthetic construct
DFKGLRP

SEQ ID NO: 45793 - protein, 7 aa, synthetic construct
SKPKTGE

SEQ ID NO: 45794 - protein, 7 aa, synthetic construct
RRDQPEA

SEQ ID NO: 45795 - protein, 7 aa, synthetic construct
ANRPSHD

SEQ ID NO: 45796 - protein, 7 aa, synthetic construct
GRVTVIQ

SEQ ID NO: 45797 - protein, 7 aa, synthetic construct
NSRATAA

SEQ ID NO: 45798 - protein, 7 aa, synthetic construct
NRQEVKG

SEQ ID NO: 45799 - protein, 7 aa, synthetic construct
MSKVAGG

SEQ ID NO: 45800 - protein, 7 aa, synthetic construct
VHVAGAM

SEQ ID NO: 45801 - protein, 7 aa, synthetic construct
QHTQNRG

SEQ ID NO: 45802 - protein, 7 aa, synthetic construct
KQPNVTA

SEQ ID NO: 45803 - protein, 7 aa, synthetic construct
YASKMSG

SEQ ID NO: 45804 - protein, 7 aa, synthetic construct
FNNTAGN

SEQ ID NO: 45805 - protein, 7 aa, synthetic construct
NLSTHVH

SEQ ID NO: 45806 - protein, 7 aa, synthetic construct
NYRQHEG

SEQ ID NO: 45807 - protein, 7 aa, synthetic construct
FYSNKHG

SEQ ID NO: 45808 - protein, 7 aa, synthetic construct
IPSGQMG

SEQ ID NO: 45809 - protein, 7 aa, synthetic construct
KGLNQTS

SEQ ID NO: 45810 - protein, 7 aa, synthetic construct
RKDVNGS

SEQ ID NO: 45811 - protein, 7 aa, synthetic construct
AAVQNVH

SEQ ID NO: 45812 - protein, 7 aa, synthetic construct
NKATTQS

SEQ ID NO: 45813 - protein, 7 aa, synthetic construct
VSSKQAG

SEQ ID NO: 45814 - protein, 7 aa, synthetic construct
NQGGKNP

SEQ ID NO: 45815 - protein, 7 aa, synthetic construct
SNKVNNG

SEQ ID NO: 45816 - protein, 7 aa, synthetic construct
GHAAIRA

SEQ ID NO: 45817 - protein, 7 aa, synthetic construct
KYPTVTG

SEQ ID NO: 45818 - protein, 7 aa, synthetic construct
TNQVVSH

SEQ ID NO: 45819 - protein, 7 aa, synthetic construct
WNHGVKA

SEQ ID NO: 45820 - protein, 7 aa, synthetic construct
KHAVQMD

SEQ ID NO: 45821 - protein, 7 aa, synthetic construct
KPGGRGE

SEQ ID NO: 45822 - protein, 7 aa, synthetic construct
PKVNTQG

SEQ ID NO: 45823 - protein, 7 aa, synthetic construct
PQKTPGG

SEQ ID NO: 45824 - protein, 7 aa, synthetic construct
VGVRWPD

SEQ ID NO: 45825 - protein, 7 aa, synthetic construct
IKSTPGT

SEQ ID NO: 45826 - protein, 7 aa, synthetic construct
RQQGMNS

SEQ ID NO: 45827 - protein, 7 aa, synthetic construct
NASKIQA

SEQ ID NO: 45828 - protein, 7 aa, synthetic construct
THFSSSA

SEQ ID NO: 45829 - protein, 7 aa, synthetic construct
LGSLNGA

SEQ ID NO: 45830 - protein, 7 aa, synthetic construct
ASGHSIP

SEQ ID NO: 45831 - protein, 7 aa, synthetic construct
LQNHAKF

SEQ ID NO: 45832 - protein, 7 aa, synthetic construct
KLHYANA

SEQ ID NO: 45833 - protein, 7 aa, synthetic construct
GSMAPRG

SEQ ID NO: 45834 - protein, 7 aa, synthetic construct
GKYATSG

SEQ ID NO: 45835 - protein, 7 aa, synthetic construct
TNGHMAS

SEQ ID NO: 45836 - protein, 7 aa, synthetic construct
TNKVNLG

SEQ ID NO: 45837 - protein, 7 aa, synthetic construct
IVSRHMA

SEQ ID NO: 45838 - protein, 7 aa, synthetic construct
LQNRNFD

SEQ ID NO: 45839 - protein, 7 aa, synthetic construct
NLQKAPA

SEQ ID NO: 45840 - protein, 7 aa, synthetic construct
MSYGSSG

SEQ ID NO: 45841 - protein, 7 aa, synthetic construct
KETPARS

SEQ ID NO: 45842 - protein, 7 aa, synthetic construct
YMGHIEV

SEQ ID NO: 45843 - protein, 7 aa, synthetic construct
TYSNMSV

SEQ ID NO: 45844 - protein, 7 aa, synthetic construct
TWGKEQD

SEQ ID NO: 45845 - protein, 7 aa, synthetic construct
NYASNRP

SEQ ID NO: 45846 - protein, 7 aa, synthetic construct
GKPHKDS

SEQ ID NO: 45847 - protein, 7 aa, synthetic construct
TTAHSAA

SEQ ID NO: 45848 - protein, 7 aa, synthetic construct
NRPSTNP

SEQ ID NO: 45849 - protein, 7 aa, synthetic construct
RDKFSND

SEQ ID NO: 45850 - protein, 7 aa, synthetic construct
QYPPYKQ

SEQ ID NO: 45851 - protein, 7 aa, synthetic construct
FGKTVKD

SEQ ID NO: 45852 - protein, 7 aa, synthetic construct
YQSKSNP

SEQ ID NO: 45853 - protein, 7 aa, synthetic construct
HQIPGGP

SEQ ID NO: 45854 - protein, 7 aa, synthetic construct
MNSMTNH

SEQ ID NO: 45855 - protein, 7 aa, synthetic construct
TASKVSP

SEQ ID NO: 45856 - protein, 7 aa, synthetic construct
HSKQDGA

SEQ ID NO: 45857 - protein, 7 aa, synthetic construct
MPSGYPG

SEQ ID NO: 45858 - protein, 7 aa, synthetic construct
NKANISG

SEQ ID NO: 45859 - protein, 7 aa, synthetic construct
FTPGRTE

SEQ ID NO: 45860 - protein, 7 aa, synthetic construct
SKTQMTG

SEQ ID NO: 45861 - protein, 7 aa, synthetic construct
TKEKDRT

SEQ ID NO: 45862 - protein, 7 aa, synthetic construct
KQGNMLI

SEQ ID NO: 45863 - protein, 7 aa, synthetic construct
RNPSTNV

SEQ ID NO: 45864 - protein, 7 aa, synthetic construct
YGARTTG

SEQ ID NO: 45865 - protein, 7 aa, synthetic construct
RPTQQAA

SEQ ID NO: 45866 - protein, 7 aa, synthetic construct
HNHRLES

SEQ ID NO: 45867 - protein, 7 aa, synthetic construct
KQASSIA

SEQ ID NO: 45868 - protein, 7 aa, synthetic construct
QGVTQHG

SEQ ID NO: 45869 - protein, 7 aa, synthetic construct
MKNQMSA

SEQ ID NO: 45870 - protein, 7 aa, synthetic construct
KGTTAQG

SEQ ID NO: 45871 - protein, 7 aa, synthetic construct
KQASNMN

SEQ ID NO: 45872 - protein, 7 aa, synthetic construct
SKPISKD

SEQ ID NO: 45873 - protein, 7 aa, synthetic construct
QMKSNSA

SEQ ID NO: 45874 - protein, 7 aa, synthetic construct
TAMSKNA

SEQ ID NO: 45875 - protein, 7 aa, synthetic construct
YNPPAKA

SEQ ID NO: 45876 - protein, 7 aa, synthetic construct
EAKGKAF

SEQ ID NO: 45877 - protein, 7 aa, synthetic construct
KVARGGE

SEQ ID NO: 45878 - protein, 7 aa, synthetic construct
TGFHTSM

SEQ ID NO: 45879 - protein, 7 aa, synthetic construct
YSKHNMD

SEQ ID NO: 45880 - protein, 7 aa, synthetic construct
RPPVSGG

SEQ ID NO: 45881 - protein, 7 aa, synthetic construct
KAKSSED

SEQ ID NO: 45882 - protein, 7 aa, synthetic construct
VNQRGQA

SEQ ID NO: 45883 - protein, 7 aa, synthetic construct
QKQHPNV

SEQ ID NO: 45884 - protein, 7 aa, synthetic construct
KTASVAG

SEQ ID NO: 45885 - protein, 7 aa, synthetic construct
PRPVFQD

SEQ ID NO: 45886 - protein, 7 aa, synthetic construct
PFRAQPI

SEQ ID NO: 45887 - protein, 7 aa, synthetic construct
GPWAGPP

SEQ ID NO: 45888 - protein, 7 aa, synthetic construct
VGYRTHE

SEQ ID NO: 45889 - protein, 7 aa, synthetic construct
MIQPVKG

SEQ ID NO: 45890 - protein, 7 aa, synthetic construct
RQSSGTG

SEQ ID NO: 45891 - protein, 7 aa, synthetic construct
HGNQYMS

SEQ ID NO: 45892 - protein, 7 aa, synthetic construct
DRYKAHS

SEQ ID NO: 45893 - protein, 7 aa, synthetic construct
TKNNQAA

SEQ ID NO: 45894 - protein, 7 aa, synthetic construct
NYRDVPI

SEQ ID NO: 45895 - protein, 7 aa, synthetic construct
MNKTGVA

SEQ ID NO: 45896 - protein, 7 aa, synthetic construct
TKNWASG

SEQ ID NO: 45897 - protein, 7 aa, synthetic construct
VRSTSPA

SEQ ID NO: 45898 - protein, 7 aa, synthetic construct
PTKGAQG

SEQ ID NO: 45899 - protein, 7 aa, synthetic construct
FKSGASA

SEQ ID NO: 45900 - protein, 7 aa, synthetic construct
NAANQKG

SEQ ID NO: 45901 - protein, 7 aa, synthetic construct
GNKQRAE

SEQ ID NO: 45902 - protein, 7 aa, synthetic construct
MLPMLAS

SEQ ID NO: 45903 - protein, 7 aa, synthetic construct
IGAKPVT

SEQ ID NO: 45904 - protein, 7 aa, synthetic construct
FNVGSTI

SEQ ID NO: 45905 - protein, 7 aa, synthetic construct
KPVILKN

SEQ ID NO: 45906 - protein, 7 aa, synthetic construct
KMSGSNV

SEQ ID NO: 45907 - protein, 7 aa, synthetic construct
LVPKHNG

SEQ ID NO: 45908 - protein, 7 aa, synthetic construct
VFTETRA

SEQ ID NO: 45909 - protein, 7 aa, synthetic construct
YIQRYGE

SEQ ID NO: 45910 - protein, 7 aa, synthetic construct
RQAQGNP

SEQ ID NO: 45911 - protein, 7 aa, synthetic construct
GIKMATP

SEQ ID NO: 45912 - protein, 7 aa, synthetic construct
GPGHSHA

SEQ ID NO: 45913 - protein, 7 aa, synthetic construct
KAGEKVQ

SEQ ID NO: 45914 - protein, 7 aa, synthetic construct
PTKSASG

SEQ ID NO: 45915 - protein, 7 aa, synthetic construct
MRSGQGG

SEQ ID NO: 45916 - protein, 7 aa, synthetic construct
GQKSNTP

SEQ ID NO: 45917 - protein, 7 aa, synthetic construct
KPQTGFA

SEQ ID NO: 45918 - protein, 7 aa, synthetic construct
ADSGGSW

SEQ ID NO: 45919 - protein, 7 aa, synthetic construct
HDRNTSQ

SEQ ID NO: 45920 - protein, 7 aa, synthetic construct
NGGRTAP

SEQ ID NO: 45921 - protein, 7 aa, synthetic construct
KKDPSRD

SEQ ID NO: 45922 - protein, 7 aa, synthetic construct
QMKSTGG

SEQ ID NO: 45923 - protein, 7 aa, synthetic construct
MKTWKEA

SEQ ID NO: 45924 - protein, 7 aa, synthetic construct
HGIYREN

SEQ ID NO: 45925 - protein, 7 aa, synthetic construct
WKPHQKD

SEQ ID NO: 45926 - protein, 7 aa, synthetic construct
RKIVTSE

SEQ ID NO: 45927 - protein, 7 aa, synthetic construct
HPPNYGG

SEQ ID NO: 45928 - protein, 7 aa, synthetic construct
NEKGRNS

SEQ ID NO: 45929 - protein, 7 aa, synthetic construct
FKNTNSE

SEQ ID NO: 45930 - protein, 7 aa, synthetic construct
SYGRTEI

SEQ ID NO: 45931 - protein, 7 aa, synthetic construct
ARGTTVG

SEQ ID NO: 45932 - protein, 7 aa, synthetic construct
IANYGLG

SEQ ID NO: 45933 - protein, 7 aa, synthetic construct
DNGVKKG

SEQ ID NO: 45934 - protein, 7 aa, synthetic construct
QHNQKTE

SEQ ID NO: 45935 - protein, 7 aa, synthetic construct
QGNDKRG

SEQ ID NO: 45936 - protein, 7 aa, synthetic construct
KDKNSTS

SEQ ID NO: 45937 - protein, 7 aa, synthetic construct
KGNSTVP

SEQ ID NO: 45938 - protein, 7 aa, synthetic construct
TRTGKGE

SEQ ID NO: 45939 - protein, 7 aa, synthetic construct
QKTVSPG

SEQ ID NO: 45940 - protein, 7 aa, synthetic construct
SVSGSRP

SEQ ID NO: 45941 - protein, 7 aa, synthetic construct
YKDKHGF

SEQ ID NO: 45942 - protein, 7 aa, synthetic construct
QAKPSSG

SEQ ID NO: 45943 - protein, 7 aa, synthetic construct
LKSGNVG

SEQ ID NO: 45944 - protein, 7 aa, synthetic construct
FGRGNHD

SEQ ID NO: 45945 - protein, 7 aa, synthetic construct
NAQRIGG

SEQ ID NO: 45946 - protein, 7 aa, synthetic construct
RDKSSQN

SEQ ID NO: 45947 - protein, 7 aa, synthetic construct
NAHRNAD

SEQ ID NO: 45948 - protein, 7 aa, synthetic construct
TEWHGSE

SEQ ID NO: 45949 - protein, 7 aa, synthetic construct
KPNHTMA

SEQ ID NO: 45950 - protein, 7 aa, synthetic construct
THLGQKI

SEQ ID NO: 45951 - protein, 7 aa, synthetic construct
FKGRDDG

SEQ ID NO: 45952 - protein, 7 aa, synthetic construct
NPTARHE

SEQ ID NO: 45953 - protein, 7 aa, synthetic construct
YNKQMKD

SEQ ID NO: 45954 - protein, 7 aa, synthetic construct
STLGNKM

SEQ ID NO: 45955 - protein, 7 aa, synthetic construct
SGASRLA

SEQ ID NO: 45956 - protein, 7 aa, synthetic construct
KNASPQG

SEQ ID NO: 45957 - protein, 7 aa, synthetic construct
NKYKQSE

SEQ ID NO: 45958 - protein, 7 aa, synthetic construct
RMNSVGG

SEQ ID NO: 45959 - protein, 7 aa, synthetic construct
VRQTSPP

SEQ ID NO: 45960 - protein, 7 aa, synthetic construct
ATRESSF

SEQ ID NO: 45961 - protein, 7 aa, synthetic construct
SRGGLMN

SEQ ID NO: 45962 - protein, 7 aa, synthetic construct
VKNGNAY

SEQ ID NO: 45963 - protein, 7 aa, synthetic construct
TGKAAQG

SEQ ID NO: 45964 - protein, 7 aa, synthetic construct
QTPNNSA

SEQ ID NO: 45965 - protein, 7 aa, synthetic construct
DPRKHLQ

SEQ ID NO: 45966 - protein, 7 aa, synthetic construct
LNHGQIQ

SEQ ID NO: 45967 - protein, 7 aa, synthetic construct
QRNNSVA

SEQ ID NO: 45968 - protein, 7 aa, synthetic construct
NGYSKEP

SEQ ID NO: 45969 - protein, 7 aa, synthetic construct
NIYTHHD

SEQ ID NO: 45970 - protein, 7 aa, synthetic construct
TQFVPSG

SEQ ID NO: 45971 - protein, 7 aa, synthetic construct
VRSQQAG

SEQ ID NO: 45972 - protein, 7 aa, synthetic construct
MKQSMAA

SEQ ID NO: 45973 - protein, 7 aa, synthetic construct
MTSQRAG

SEQ ID NO: 45974 - protein, 7 aa, synthetic construct
QNKQGSA

SEQ ID NO: 45975 - protein, 7 aa, synthetic construct
TKTDRSG

SEQ ID NO: 45976 - protein, 7 aa, synthetic construct
QRSNSMA

SEQ ID NO: 45977 - protein, 7 aa, synthetic construct
NQTRPSV

SEQ ID NO: 45978 - protein, 7 aa, synthetic construct
KMTGATS

SEQ ID NO: 45979 - protein, 7 aa, synthetic construct
GMIDTGR

SEQ ID NO: 45980 - protein, 7 aa, synthetic construct
DTGHKMA

SEQ ID NO: 45981 - protein, 7 aa, synthetic construct
NQGRIQA

SEQ ID NO: 45982 - protein, 7 aa, synthetic construct
FKTAIEE

SEQ ID NO: 45983 - protein, 7 aa, synthetic construct
AIKGTFG

SEQ ID NO: 45984 - protein, 7 aa, synthetic construct
SGRQERV

SEQ ID NO: 45985 - protein, 7 aa, synthetic construct
PTHTAMH

SEQ ID NO: 45986 - protein, 7 aa, synthetic construct
MQVGRRD

SEQ ID NO: 45987 - protein, 7 aa, synthetic construct
QTGKSNA

SEQ ID NO: 45988 - protein, 7 aa, synthetic construct
TQRIEHI

SEQ ID NO: 45989 - protein, 7 aa, synthetic construct
NKIGNPQ

SEQ ID NO: 45990 - protein, 7 aa, synthetic construct
EATMRMS

SEQ ID NO: 45991 - protein, 7 aa, synthetic construct
QHLRAYE

SEQ ID NO: 45992 - protein, 7 aa, synthetic construct
MKGTNSP

SEQ ID NO: 45993 - protein, 7 aa, synthetic construct
GNKVPDN

SEQ ID NO: 45994 - protein, 7 aa, synthetic construct
YVGPKSP

SEQ ID NO: 45995 - protein, 7 aa, synthetic construct
LNPLGQH

SEQ ID NO: 45996 - protein, 7 aa, synthetic construct
TGESRAG

SEQ ID NO: 45997 - protein, 7 aa, synthetic construct
EGKLVPP

SEQ ID NO: 45998 - protein, 7 aa, synthetic construct
KQGGTTA

SEQ ID NO: 45999 - protein, 7 aa, synthetic construct
TREGWKD

SEQ ID NO: 46000 - protein, 7 aa, synthetic construct
TTGRGNG

SEQ ID NO: 46001 - protein, 7 aa, synthetic construct
VLGSNQG

SEQ ID NO: 46002 - protein, 7 aa, synthetic construct
IQTKPSS

SEQ ID NO: 46003 - protein, 7 aa, synthetic construct
TGRTFAP

SEQ ID NO: 46004 - protein, 7 aa, synthetic construct
TSQVRQG

SEQ ID NO: 46005 - protein, 7 aa, synthetic construct
KVNNTAG

SEQ ID NO: 46006 - protein, 7 aa, synthetic construct
TGKPPQA

SEQ ID NO: 46007 - protein, 7 aa, synthetic construct
MNQNAKG

SEQ ID NO: 46008 - protein, 7 aa, synthetic construct
GTRTANG

SEQ ID NO: 46009 - protein, 7 aa, synthetic construct
MGSNNNK

SEQ ID NO: 46010 - protein, 7 aa, synthetic construct
AMKVSSG

SEQ ID NO: 46011 - protein, 7 aa, synthetic construct
ERDQIMG

SEQ ID NO: 46012 - protein, 7 aa, synthetic construct
ITRGREP

SEQ ID NO: 46013 - protein, 7 aa, synthetic construct
SRTTNNG

SEQ ID NO: 46014 - protein, 7 aa, synthetic construct
YNGLRTQ

SEQ ID NO: 46015 - protein, 7 aa, synthetic construct
GPKPNTG

SEQ ID NO: 46016 - protein, 7 aa, synthetic construct
VNKHDPQ

SEQ ID NO: 46017 - protein, 7 aa, synthetic construct
TGKSTGA

SEQ ID NO: 46018 - protein, 7 aa, synthetic construct
HVQHKDI

SEQ ID NO: 46019 - protein, 7 aa, synthetic construct
GASQKNG

SEQ ID NO: 46020 - protein, 7 aa, synthetic construct
RNPTAAG

SEQ ID NO: 46021 - protein, 7 aa, synthetic construct
QNPPKQN

SEQ ID NO: 46022 - protein, 7 aa, synthetic construct
SGYKTGH

SEQ ID NO: 46023 - protein, 7 aa, synthetic construct
RSGSTQA

SEQ ID NO: 46024 - protein, 7 aa, synthetic construct
KGPVRSD

SEQ ID NO: 46025 - protein, 7 aa, synthetic construct
RPSGALG

SEQ ID NO: 46026 - protein, 7 aa, synthetic construct
ASPRFLG

SEQ ID NO: 46027 - protein, 7 aa, synthetic construct
KQPSNMQ

SEQ ID NO: 46028 - protein, 7 aa, synthetic construct
INRQAGA

SEQ ID NO: 46029 - protein, 7 aa, synthetic construct
GGVRAQS

SEQ ID NO: 46030 - protein, 7 aa, synthetic construct
RKEGPGA

SEQ ID NO: 46031 - protein, 7 aa, synthetic construct
YFGANAK

SEQ ID NO: 46032 - protein, 7 aa, synthetic construct
VQPRRDA

SEQ ID NO: 46033 - protein, 7 aa, synthetic construct
WLKDRSG

SEQ ID NO: 46034 - protein, 7 aa, synthetic construct
MKNAVRE

SEQ ID NO: 46035 - protein, 7 aa, synthetic construct
KGTGTGG

SEQ ID NO: 46036 - protein, 7 aa, synthetic construct
MTTKGGG

SEQ ID NO: 46037 - protein, 7 aa, synthetic construct
NKPTGTM

SEQ ID NO: 46038 - protein, 7 aa, synthetic construct
NRQSANV

SEQ ID NO: 46039 - protein, 7 aa, synthetic construct
VVKNFSA

SEQ ID NO: 46040 - protein, 7 aa, synthetic construct
STQRQNA

SEQ ID NO: 46041 - protein, 7 aa, synthetic construct
YMGNRNS

SEQ ID NO: 46042 - protein, 7 aa, synthetic construct
SMSKSTP

SEQ ID NO: 46043 - protein, 7 aa, synthetic construct
ARNTLPQ

SEQ ID NO: 46044 - protein, 7 aa, synthetic construct
VKNAQTS

SEQ ID NO: 46045 - protein, 7 aa, synthetic construct
VHGNATL

SEQ ID NO: 46046 - protein, 7 aa, synthetic construct
GNIRGDL

SEQ ID NO: 46047 - protein, 7 aa, synthetic construct
TDMRAKG

SEQ ID NO: 46048 - protein, 7 aa, synthetic construct
KAQQVHV

SEQ ID NO: 46049 - protein, 7 aa, synthetic construct
LGNRGQG

SEQ ID NO: 46050 - protein, 7 aa, synthetic construct
TPKVNQA

SEQ ID NO: 46051 - protein, 7 aa, synthetic construct
FAVSGHG

SEQ ID NO: 46052 - protein, 7 aa, synthetic construct
IGGRTGN

SEQ ID NO: 46053 - protein, 7 aa, synthetic construct
AGTTNKS

SEQ ID NO: 46054 - protein, 7 aa, synthetic construct
SKPNWVE

SEQ ID NO: 46055 - protein, 7 aa, synthetic construct
IQGMNNP

SEQ ID NO: 46056 - protein, 7 aa, synthetic construct
TGEHRTS

SEQ ID NO: 46057 - protein, 7 aa, synthetic construct
DRQTPGH

SEQ ID NO: 46058 - protein, 7 aa, synthetic construct
AHKVMGD

SEQ ID NO: 46059 - protein, 7 aa, synthetic construct
NVYKDSL

SEQ ID NO: 46060 - protein, 7 aa, synthetic construct
KKYQDNT

SEQ ID NO: 46061 - protein, 7 aa, synthetic construct
RVSATLS

SEQ ID NO: 46062 - protein, 7 aa, synthetic construct
IPLQRME

SEQ ID NO: 46063 - protein, 7 aa, synthetic construct
GNSKFNG

SEQ ID NO: 46064 - protein, 7 aa, synthetic construct
KKPGALD

SEQ ID NO: 46065 - protein, 7 aa, synthetic construct
LVTKPAG

SEQ ID NO: 46066 - protein, 7 aa, synthetic construct
QQGGWTG

SEQ ID NO: 46067 - protein, 7 aa, synthetic construct
MKNSTGQ

SEQ ID NO: 46068 - protein, 7 aa, synthetic construct
HDGKPGA

SEQ ID NO: 46069 - protein, 7 aa, synthetic construct
VPKQSIG

SEQ ID NO: 46070 - protein, 7 aa, synthetic construct
QHGRVVL

SEQ ID NO: 46071 - protein, 7 aa, synthetic construct
WTKEGKA

SEQ ID NO: 46072 - protein, 7 aa, synthetic construct
QKMANQA

SEQ ID NO: 46073 - protein, 7 aa, synthetic construct
IQKAGKD

SEQ ID NO: 46074 - protein, 7 aa, synthetic construct
VGQPQHP

SEQ ID NO: 46075 - protein, 7 aa, synthetic construct
NKTMTKE

SEQ ID NO: 46076 - protein, 7 aa, synthetic construct
KPNAGPY

SEQ ID NO: 46077 - protein, 7 aa, synthetic construct
KTTAGAM

SEQ ID NO: 46078 - protein, 7 aa, synthetic construct
YVPPREG

SEQ ID NO: 46079 - protein, 7 aa, synthetic construct
NRAGNTP

SEQ ID NO: 46080 - protein, 7 aa, synthetic construct
VGDKMHG

SEQ ID NO: 46081 - protein, 7 aa, synthetic construct
IQRERMS

SEQ ID NO: 46082 - protein, 7 aa, synthetic construct
GPSKSVA

SEQ ID NO: 46083 - protein, 7 aa, synthetic construct
VNMTKPI

SEQ ID NO: 46084 - protein, 7 aa, synthetic construct
QRSEHHG

SEQ ID NO: 46085 - protein, 7 aa, synthetic construct
TGKPGVA

SEQ ID NO: 46086 - protein, 7 aa, synthetic construct
HNPGMKA

SEQ ID NO: 46087 - protein, 7 aa, synthetic construct
RAYDPID

SEQ ID NO: 46088 - protein, 7 aa, synthetic construct
TSSNTFQ

SEQ ID NO: 46089 - protein, 7 aa, synthetic construct
MQKSTGG

SEQ ID NO: 46090 - protein, 7 aa, synthetic construct
QPKGVAG

SEQ ID NO: 46091 - protein, 7 aa, synthetic construct
QSHKGTD

SEQ ID NO: 46092 - protein, 7 aa, synthetic construct
NAMQHVP

SEQ ID NO: 46093 - protein, 7 aa, synthetic construct
RDRQSEN

SEQ ID NO: 46094 - protein, 7 aa, synthetic construct
GAVSRNP

SEQ ID NO: 46095 - protein, 7 aa, synthetic construct
AKRLNEM

SEQ ID NO: 46096 - protein, 7 aa, synthetic construct
TRQSNTG

SEQ ID NO: 46097 - protein, 7 aa, synthetic construct
MRGSGMG

SEQ ID NO: 46098 - protein, 7 aa, synthetic construct
HRNMGVA

SEQ ID NO: 46099 - protein, 7 aa, synthetic construct
QKQNSQA

SEQ ID NO: 46100 - protein, 7 aa, synthetic construct
HTGPNKG

SEQ ID NO: 46101 - protein, 7 aa, synthetic construct
TMTSGRP

SEQ ID NO: 46102 - protein, 7 aa, synthetic construct
VRAGEHG

SEQ ID NO: 46103 - protein, 7 aa, synthetic construct
GGKANVG

SEQ ID NO: 46104 - protein, 7 aa, synthetic construct
NPKYGQA

SEQ ID NO: 46105 - protein, 7 aa, synthetic construct
YVGFPKG

SEQ ID NO: 46106 - protein, 7 aa, synthetic construct
PQKNSSG

SEQ ID NO: 46107 - protein, 7 aa, synthetic construct
QRNNQYV

SEQ ID NO: 46108 - protein, 7 aa, synthetic construct
GQKSPTA

SEQ ID NO: 46109 - protein, 7 aa, synthetic construct
QISPGSN

SEQ ID NO: 46110 - protein, 7 aa, synthetic construct
TRAGNVS

SEQ ID NO: 46111 - protein, 7 aa, synthetic construct
QNKAQVT

SEQ ID NO: 46112 - protein, 7 aa, synthetic construct
SKSQFNG

SEQ ID NO: 46113 - protein, 7 aa, synthetic construct
RGPIHLG

SEQ ID NO: 46114 - protein, 7 aa, synthetic construct
WMKDGRN

SEQ ID NO: 46115 - protein, 7 aa, synthetic construct
RMNNAGA

SEQ ID NO: 46116 - protein, 7 aa, synthetic construct
TLTKVNS

SEQ ID NO: 46117 - protein, 7 aa, synthetic construct
INGALQG

SEQ ID NO: 46118 - protein, 7 aa, synthetic construct
HKHSPDQ

SEQ ID NO: 46119 - protein, 7 aa, synthetic construct
QAPFTSS

SEQ ID NO: 46120 - protein, 7 aa, synthetic construct
MVQLKRE

SEQ ID NO: 46121 - protein, 7 aa, synthetic construct
FGNNVKG

SEQ ID NO: 46122 - protein, 7 aa, synthetic construct
MMGKHTV

SEQ ID NO: 46123 - protein, 7 aa, synthetic construct
LRDYSNA

SEQ ID NO: 46124 - protein, 7 aa, synthetic construct
KQPNQGS

SEQ ID NO: 46125 - protein, 7 aa, synthetic construct
TKKMLDM

SEQ ID NO: 46126 - protein, 7 aa, synthetic construct
DDKKHFG

SEQ ID NO: 46127 - protein, 7 aa, synthetic construct
KSQGKFD

SEQ ID NO: 46128 - protein, 7 aa, synthetic construct
SKQSPGG

SEQ ID NO: 46129 - protein, 7 aa, synthetic construct
KSNNPAA

SEQ ID NO: 46130 - protein, 7 aa, synthetic construct
MKLSVNG

SEQ ID NO: 46131 - protein, 7 aa, synthetic construct
TKQQSNS

SEQ ID NO: 46132 - protein, 7 aa, synthetic construct
PQKPMVG

SEQ ID NO: 46133 - protein, 7 aa, synthetic construct
QVPSGKD

SEQ ID NO: 46134 - protein, 7 aa, synthetic construct
TYGGRGE

SEQ ID NO: 46135 - protein, 7 aa, synthetic construct
TNKGVQG

SEQ ID NO: 46136 - protein, 7 aa, synthetic construct
QNKWIHE

SEQ ID NO: 46137 - protein, 7 aa, synthetic construct
RSTSITG

SEQ ID NO: 46138 - protein, 7 aa, synthetic construct
MRSTNGA

SEQ ID NO: 46139 - protein, 7 aa, synthetic construct
QPMVPKE

SEQ ID NO: 46140 - protein, 7 aa, synthetic construct
SKNNAAA

SEQ ID NO: 46141 - protein, 7 aa, synthetic construct
VMLQKTS

SEQ ID NO: 46142 - protein, 7 aa, synthetic construct
HITGYTP

SEQ ID NO: 46143 - protein, 7 aa, synthetic construct
TDVLKYT

SEQ ID NO: 46144 - protein, 7 aa, synthetic construct
RTPFLNE

SEQ ID NO: 46145 - protein, 7 aa, synthetic construct
NNNKTSP

SEQ ID NO: 46146 - protein, 7 aa, synthetic construct
MKQISLG

SEQ ID NO: 46147 - protein, 7 aa, synthetic construct
HVGQQSV

SEQ ID NO: 46148 - protein, 7 aa, synthetic construct
AKSQREH

SEQ ID NO: 46149 - protein, 7 aa, synthetic construct
KTTQSTP

SEQ ID NO: 46150 - protein, 7 aa, synthetic construct
QMGQRQA

SEQ ID NO: 46151 - protein, 7 aa, synthetic construct
VPNKNQG

SEQ ID NO: 46152 - protein, 7 aa, synthetic construct
GKTEIRG

SEQ ID NO: 46153 - protein, 7 aa, synthetic construct
SASKTSG

SEQ ID NO: 46154 - protein, 7 aa, synthetic construct
HGRGHDA

SEQ ID NO: 46155 - protein, 7 aa, synthetic construct
SKQPTSS

SEQ ID NO: 46156 - protein, 7 aa, synthetic construct
NNMQVKS

SEQ ID NO: 46157 - protein, 7 aa, synthetic construct
VKVPPDF

SEQ ID NO: 46158 - protein, 7 aa, synthetic construct
SNASQYR

SEQ ID NO: 46159 - protein, 7 aa, synthetic construct
YSKQHLP

SEQ ID NO: 46160 - protein, 7 aa, synthetic construct
SYKDGKQ

SEQ ID NO: 46161 - protein, 7 aa, synthetic construct
SSSKATG

SEQ ID NO: 46162 - protein, 7 aa, synthetic construct
SRTPATA

SEQ ID NO: 46163 - protein, 7 aa, synthetic construct
MKPTAFV

SEQ ID NO: 46164 - protein, 7 aa, synthetic construct
PNYPGGG

SEQ ID NO: 46165 - protein, 7 aa, synthetic construct
IKTNHTG

SEQ ID NO: 46166 - protein, 7 aa, synthetic construct
ARNSNMG

SEQ ID NO: 46167 - protein, 7 aa, synthetic construct
MRVSEEH

SEQ ID NO: 46168 - protein, 7 aa, synthetic construct
RFQEVGG

SEQ ID NO: 46169 - protein, 7 aa, synthetic construct
RNKLEFM

SEQ ID NO: 46170 - protein, 7 aa, synthetic construct
HNTGISV

SEQ ID NO: 46171 - protein, 7 aa, synthetic construct
KMGGSAG

SEQ ID NO: 46172 - protein, 7 aa, synthetic construct
DFSRQKF

SEQ ID NO: 46173 - protein, 7 aa, synthetic construct
KTTVQRE

SEQ ID NO: 46174 - protein, 7 aa, synthetic construct
MAQSITP

SEQ ID NO: 46175 - protein, 7 aa, synthetic construct
MPNRQGA

SEQ ID NO: 46176 - protein, 7 aa, synthetic construct
RGAAGNP

SEQ ID NO: 46177 - protein, 7 aa, synthetic construct
FKPQQTG

SEQ ID NO: 46178 - protein, 7 aa, synthetic construct
KANAPIA

SEQ ID NO: 46179 - protein, 7 aa, synthetic construct
KTMHVHP

SEQ ID NO: 46180 - protein, 7 aa, synthetic construct
TKSVSSN

SEQ ID NO: 46181 - protein, 7 aa, synthetic construct
DERTNRY

SEQ ID NO: 46182 - protein, 7 aa, synthetic construct
NAHQSHQ

SEQ ID NO: 46183 - protein, 7 aa, synthetic construct
DRYHIES

SEQ ID NO: 46184 - protein, 7 aa, synthetic construct
QTNRPPA

SEQ ID NO: 46185 - protein, 7 aa, synthetic construct
GQKAGYI

SEQ ID NO: 46186 - protein, 7 aa, synthetic construct
IKQSSQA

SEQ ID NO: 46187 - protein, 7 aa, synthetic construct
PRTSAQP

SEQ ID NO: 46188 - protein, 7 aa, synthetic construct
QNTRVAG

SEQ ID NO: 46189 - protein, 7 aa, synthetic construct
MKPSPSG

SEQ ID NO: 46190 - protein, 7 aa, synthetic construct
ILNQSNG

SEQ ID NO: 46191 - protein, 7 aa, synthetic construct
FNTKPQL

SEQ ID NO: 46192 - protein, 7 aa, synthetic construct
GPHNTSM

SEQ ID NO: 46193 - protein, 7 aa, synthetic construct
PQKQNIM

SEQ ID NO: 46194 - protein, 7 aa, synthetic construct
RGRIDGD

SEQ ID NO: 46195 - protein, 7 aa, synthetic construct
PKGGALN

SEQ ID NO: 46196 - protein, 7 aa, synthetic construct
KANTSSP

SEQ ID NO: 46197 - protein, 7 aa, synthetic construct
LGANNGY

SEQ ID NO: 46198 - protein, 7 aa, synthetic construct
VGGHPDR

SEQ ID NO: 46199 - protein, 7 aa, synthetic construct
TKWAVNA

SEQ ID NO: 46200 - protein, 7 aa, synthetic construct
WERVKGA

SEQ ID NO: 46201 - protein, 7 aa, synthetic construct
MRTGNSP

SEQ ID NO: 46202 - protein, 7 aa, synthetic construct
LPTRHLD

SEQ ID NO: 46203 - protein, 7 aa, synthetic construct
GELRLSG

SEQ ID NO: 46204 - protein, 7 aa, synthetic construct
MAPRTYN

SEQ ID NO: 46205 - protein, 7 aa, synthetic construct
MKYTAPD

SEQ ID NO: 46206 - protein, 7 aa, synthetic construct
NTITKNS

SEQ ID NO: 46207 - protein, 7 aa, synthetic construct
HNAKMSP

SEQ ID NO: 46208 - protein, 7 aa, synthetic construct
NIIKKDP

SEQ ID NO: 46209 - protein, 7 aa, synthetic construct
TRVHVNV

SEQ ID NO: 46210 - protein, 7 aa, synthetic construct
VPYNTHA

SEQ ID NO: 46211 - protein, 7 aa, synthetic construct
GNARGGV

SEQ ID NO: 46212 - protein, 7 aa, synthetic construct
QMPTQRA

SEQ ID NO: 46213 - protein, 7 aa, synthetic construct
SPGKITG

SEQ ID NO: 46214 - protein, 7 aa, synthetic construct
MINRAHS

SEQ ID NO: 46215 - protein, 7 aa, synthetic construct
IKQGYKE

SEQ ID NO: 46216 - protein, 7 aa, synthetic construct
RMDPMKN

SEQ ID NO: 46217 - protein, 7 aa, synthetic construct
WHQITSD

SEQ ID NO: 46218 - protein, 7 aa, synthetic construct
LQPHAPM

SEQ ID NO: 46219 - protein, 7 aa, synthetic construct
SNLKEHA

SEQ ID NO: 46220 - protein, 7 aa, synthetic construct
TRDFKTG

SEQ ID NO: 46221 - protein, 7 aa, synthetic construct
HSKYPET

SEQ ID NO: 46222 - protein, 7 aa, synthetic construct
FPDPRKG

SEQ ID NO: 46223 - protein, 7 aa, synthetic construct
ATQMTIG

SEQ ID NO: 46224 - protein, 7 aa, synthetic construct
NQRGVTG

SEQ ID NO: 46225 - protein, 7 aa, synthetic construct
TRNTDAV

SEQ ID NO: 46226 - protein, 7 aa, synthetic construct
VNKPNVQ

SEQ ID NO: 46227 - protein, 7 aa, synthetic construct
DFGRVKL

SEQ ID NO: 46228 - protein, 7 aa, synthetic construct
GIKNTDI

SEQ ID NO: 46229 - protein, 7 aa, synthetic construct
SYQRAQV

SEQ ID NO: 46230 - protein, 7 aa, synthetic construct
TVPHTVT

SEQ ID NO: 46231 - protein, 7 aa, synthetic construct
TKFDKVG

SEQ ID NO: 46232 - protein, 7 aa, synthetic construct
QKNNVMG

SEQ ID NO: 46233 - protein, 7 aa, synthetic construct
YDRTNHH

SEQ ID NO: 46234 - protein, 7 aa, synthetic construct
MAKFDNK

SEQ ID NO: 46235 - protein, 7 aa, synthetic construct
WKGSVSN

SEQ ID NO: 46236 - protein, 7 aa, synthetic construct
TKTIGGG

SEQ ID NO: 46237 - protein, 7 aa, synthetic construct
RNEQNGG

SEQ ID NO: 46238 - protein, 7 aa, synthetic construct
HDRRYTD

SEQ ID NO: 46239 - protein, 7 aa, synthetic construct
PNKVQGG

SEQ ID NO: 46240 - protein, 7 aa, synthetic construct
QLKTSDA

SEQ ID NO: 46241 - protein, 7 aa, synthetic construct
LQYKAVI

SEQ ID NO: 46242 - protein, 7 aa, synthetic construct
KTNTGGV

SEQ ID NO: 46243 - protein, 7 aa, synthetic construct
MKSHQAP

SEQ ID NO: 46244 - protein, 7 aa, synthetic construct
SGTQKYN

SEQ ID NO: 46245 - protein, 7 aa, synthetic construct
DKHAVFA

SEQ ID NO: 46246 - protein, 7 aa, synthetic construct
KDSRYAM

SEQ ID NO: 46247 - protein, 7 aa, synthetic construct
TKSPATS

SEQ ID NO: 46248 - protein, 7 aa, synthetic construct
TKPTGQN

SEQ ID NO: 46249 - protein, 7 aa, synthetic construct
QHLGTIP

SEQ ID NO: 46250 - protein, 7 aa, synthetic construct
GFTSGRG

SEQ ID NO: 46251 - protein, 7 aa, synthetic construct
IGKIVPQ

SEQ ID NO: 46252 - protein, 7 aa, synthetic construct
FNAHRNS

SEQ ID NO: 46253 - protein, 7 aa, synthetic construct
FGQYAVE

SEQ ID NO: 46254 - protein, 7 aa, synthetic construct
QKTSPMN

SEQ ID NO: 46255 - protein, 7 aa, synthetic construct
GMKGSTL

SEQ ID NO: 46256 - protein, 7 aa, synthetic construct
TKTAVQN

SEQ ID NO: 46257 - protein, 7 aa, synthetic construct
NYNNHLA

SEQ ID NO: 46258 - protein, 7 aa, synthetic construct
KSKDYAG

SEQ ID NO: 46259 - protein, 7 aa, synthetic construct
IAGVIKI

SEQ ID NO: 46260 - protein, 7 aa, synthetic construct
LAVGPQQ

SEQ ID NO: 46261 - protein, 7 aa, synthetic construct
VGNKSSG

SEQ ID NO: 46262 - protein, 7 aa, synthetic construct
RHENAKN

SEQ ID NO: 46263 - protein, 7 aa, synthetic construct
VKWDPEK

SEQ ID NO: 46264 - protein, 7 aa, synthetic construct
QTKNVQI

SEQ ID NO: 46265 - protein, 7 aa, synthetic construct
NRGIKAE

SEQ ID NO: 46266 - protein, 7 aa, synthetic construct
QNRGSPD

SEQ ID NO: 46267 - protein, 7 aa, synthetic construct
HGPAQAV

SEQ ID NO: 46268 - protein, 7 aa, synthetic construct
VKEWMAE

SEQ ID NO: 46269 - protein, 7 aa, synthetic construct
RNAQVGG

SEQ ID NO: 46270 - protein, 7 aa, synthetic construct
DKFNPTI

SEQ ID NO: 46271 - protein, 7 aa, synthetic construct
FANGKGQ

SEQ ID NO: 46272 - protein, 7 aa, synthetic construct
KNAQSGN

SEQ ID NO: 46273 - protein, 7 aa, synthetic construct
QGAAKVG

SEQ ID NO: 46274 - protein, 7 aa, synthetic construct
GTSAKNG

SEQ ID NO: 46275 - protein, 7 aa, synthetic construct
NKVGNPG

SEQ ID NO: 46276 - protein, 7 aa, synthetic construct
TGQKVYG

SEQ ID NO: 46277 - protein, 7 aa, synthetic construct
TAGAKGG

SEQ ID NO: 46278 - protein, 7 aa, synthetic construct
RGSQSQE

SEQ ID NO: 46279 - protein, 7 aa, synthetic construct
TYGTKQP

SEQ ID NO: 46280 - protein, 7 aa, synthetic construct
RPGSNQP

SEQ ID NO: 46281 - protein, 7 aa, synthetic construct
YPQKANS

SEQ ID NO: 46282 - protein, 7 aa, synthetic construct
NAQRTQA

SEQ ID NO: 46283 - protein, 7 aa, synthetic construct
IAAAMPG

SEQ ID NO: 46284 - protein, 7 aa, synthetic construct
GSKNQMA

SEQ ID NO: 46285 - protein, 7 aa, synthetic construct
NVTTKRD

SEQ ID NO: 46286 - protein, 7 aa, synthetic construct
SKATTKE

SEQ ID NO: 46287 - protein, 7 aa, synthetic construct
NDGKMKP

SEQ ID NO: 46288 - protein, 7 aa, synthetic construct
KLHSSEP

SEQ ID NO: 46289 - protein, 7 aa, synthetic construct
AHRDRHP

SEQ ID NO: 46290 - protein, 7 aa, synthetic construct
NQHHRGD

SEQ ID NO: 46291 - protein, 7 aa, synthetic construct
YNNNRSV

SEQ ID NO: 46292 - protein, 7 aa, synthetic construct
QQTSSQS

SEQ ID NO: 46293 - protein, 7 aa, synthetic construct
IRMSGSP

SEQ ID NO: 46294 - protein, 7 aa, synthetic construct
QFTIRSE

SEQ ID NO: 46295 - protein, 7 aa, synthetic construct
KDHTSTA

SEQ ID NO: 46296 - protein, 7 aa, synthetic construct
RVYSDAG

SEQ ID NO: 46297 - protein, 7 aa, synthetic construct
RDKVIHA

SEQ ID NO: 46298 - protein, 7 aa, synthetic construct
STKASAA

SEQ ID NO: 46299 - protein, 7 aa, synthetic construct
GKHVNTY

SEQ ID NO: 46300 - protein, 7 aa, synthetic construct
VKLSGPG

SEQ ID NO: 46301 - protein, 7 aa, synthetic construct
KNVNSVS

SEQ ID NO: 46302 - protein, 7 aa, synthetic construct
INRTQTN

SEQ ID NO: 46303 - protein, 7 aa, synthetic construct
NKGAKME

SEQ ID NO: 46304 - protein, 7 aa, synthetic construct
GPQSHMG

SEQ ID NO: 46305 - protein, 7 aa, synthetic construct
RTFGQAD

SEQ ID NO: 46306 - protein, 7 aa, synthetic construct
KNSGNLG

SEQ ID NO: 46307 - protein, 7 aa, synthetic construct
IQRTHPD

SEQ ID NO: 46308 - protein, 7 aa, synthetic construct
QPQRVGG

SEQ ID NO: 46309 - protein, 7 aa, synthetic construct
VKGSQSA

SEQ ID NO: 46310 - protein, 7 aa, synthetic construct
MKINQPN

SEQ ID NO: 46311 - protein, 7 aa, synthetic construct
IIAVAKN

SEQ ID NO: 46312 - protein, 7 aa, synthetic construct
GYSQQSG

SEQ ID NO: 46313 - protein, 7 aa, synthetic construct
NKSTSGS

SEQ ID NO: 46314 - protein, 7 aa, synthetic construct
NNYQNKP

SEQ ID NO: 46315 - protein, 7 aa, synthetic construct
KPTNVST

SEQ ID NO: 46316 - protein, 7 aa, synthetic construct
ITQKSMQ

SEQ ID NO: 46317 - protein, 7 aa, synthetic construct
GFQGLMN

SEQ ID NO: 46318 - protein, 7 aa, synthetic construct
MNATKTG

SEQ ID NO: 46319 - protein, 7 aa, synthetic construct
QFNQARD

SEQ ID NO: 46320 - protein, 7 aa, synthetic construct
NGPQHRT

SEQ ID NO: 46321 - protein, 7 aa, synthetic construct
ETWPGKS

SEQ ID NO: 46322 - protein, 7 aa, synthetic construct
THGSQMV

SEQ ID NO: 46323 - protein, 7 aa, synthetic construct
QMRRDQM

SEQ ID NO: 46324 - protein, 7 aa, synthetic construct
IKNWKIE

SEQ ID NO: 46325 - protein, 7 aa, synthetic construct
IKIGPAG

SEQ ID NO: 46326 - protein, 7 aa, synthetic construct
MSSNRQA

SEQ ID NO: 46327 - protein, 7 aa, synthetic construct
KGASGMA

SEQ ID NO: 46328 - protein, 7 aa, synthetic construct
HHGTPRI

SEQ ID NO: 46329 - protein, 7 aa, synthetic construct
LPPKSMG

SEQ ID NO: 46330 - protein, 7 aa, synthetic construct
TFKGGEQ

SEQ ID NO: 46331 - protein, 7 aa, synthetic construct
RVMMGES

SEQ ID NO: 46332 - protein, 7 aa, synthetic construct
GDFTSRS

SEQ ID NO: 46333 - protein, 7 aa, synthetic construct
TNNKMQL

SEQ ID NO: 46334 - protein, 7 aa, synthetic construct
ANHGQSA

SEQ ID NO: 46335 - protein, 7 aa, synthetic construct
NANSTKS

SEQ ID NO: 46336 - protein, 7 aa, synthetic construct
YRAPRDE

SEQ ID NO: 46337 - protein, 7 aa, synthetic construct
SAVFTKE

SEQ ID NO: 46338 - protein, 7 aa, synthetic construct
NAKSNVG

SEQ ID NO: 46339 - protein, 7 aa, synthetic construct
QDHTKVF

SEQ ID NO: 46340 - protein, 7 aa, synthetic construct
LNYRPVE

SEQ ID NO: 46341 - protein, 7 aa, synthetic construct
YDRKAAM

SEQ ID NO: 46342 - protein, 7 aa, synthetic construct
NQQGNPP

SEQ ID NO: 46343 - protein, 7 aa, synthetic construct
MSGRENG

SEQ ID NO: 46344 - protein, 7 aa, synthetic construct
QTNTVQR

SEQ ID NO: 46345 - protein, 7 aa, synthetic construct
TNKMYPE

SEQ ID NO: 46346 - protein, 7 aa, synthetic construct
LGRNVSN

SEQ ID NO: 46347 - protein, 7 aa, synthetic construct
TNTSPKP

SEQ ID NO: 46348 - protein, 7 aa, synthetic construct
RGTANGP

SEQ ID NO: 46349 - protein, 7 aa, synthetic construct
GKNVSQG

SEQ ID NO: 46350 - protein, 7 aa, synthetic construct
LLGRYPQ

SEQ ID NO: 46351 - protein, 7 aa, synthetic construct
LSINNIG

SEQ ID NO: 46352 - protein, 7 aa, synthetic construct
HKLGTPM

SEQ ID NO: 46353 - protein, 7 aa, synthetic construct
MQKSVTG

SEQ ID NO: 46354 - protein, 7 aa, synthetic construct
PMKGPSA

SEQ ID NO: 46355 - protein, 7 aa, synthetic construct
NKISSNG

SEQ ID NO: 46356 - protein, 7 aa, synthetic construct
MKSSAMA

SEQ ID NO: 46357 - protein, 7 aa, synthetic construct
MLGTKVQ

SEQ ID NO: 46358 - protein, 7 aa, synthetic construct
SKTAGYG

SEQ ID NO: 46359 - protein, 7 aa, synthetic construct
DGSDYTK

SEQ ID NO: 46360 - protein, 7 aa, synthetic construct
MNRMHDG

SEQ ID NO: 46361 - protein, 7 aa, synthetic construct
RHSTTAT

SEQ ID NO: 46362 - protein, 7 aa, synthetic construct
SYPGVSH

SEQ ID NO: 46363 - protein, 7 aa, synthetic construct
RVRGEDV

SEQ ID NO: 46364 - protein, 7 aa, synthetic construct
KNASIKD

SEQ ID NO: 46365 - protein, 7 aa, synthetic construct
NNGKSQP

SEQ ID NO: 46366 - protein, 7 aa, synthetic construct
QQLRIPE

SEQ ID NO: 46367 - protein, 7 aa, synthetic construct
KTAASGT

SEQ ID NO: 46368 - protein, 7 aa, synthetic construct
VMLRGVE

SEQ ID NO: 46369 - protein, 7 aa, synthetic construct
SAKSNNG

SEQ ID NO: 46370 - protein, 7 aa, synthetic construct
IMSAMGS

SEQ ID NO: 46371 - protein, 7 aa, synthetic construct
NKQATNI

SEQ ID NO: 46372 - protein, 7 aa, synthetic construct
QHGMKLP

SEQ ID NO: 46373 - protein, 7 aa, synthetic construct
LSAGKIG

SEQ ID NO: 46374 - protein, 7 aa, synthetic construct
KQSNMGS

SEQ ID NO: 46375 - protein, 7 aa, synthetic construct
RENYTTE

SEQ ID NO: 46376 - protein, 7 aa, synthetic construct
MISSRLD

SEQ ID NO: 46377 - protein, 7 aa, synthetic construct
FPNSSKG

SEQ ID NO: 46378 - protein, 7 aa, synthetic construct
GMLKYRE

SEQ ID NO: 46379 - protein, 7 aa, synthetic construct
TSNKSGT

SEQ ID NO: 46380 - protein, 7 aa, synthetic construct
SFKQHVS

SEQ ID NO: 46381 - protein, 7 aa, synthetic construct
VTQKTNS

SEQ ID NO: 46382 - protein, 7 aa, synthetic construct
IVTLSAS

SEQ ID NO: 46383 - protein, 7 aa, synthetic construct
VLTNKII

SEQ ID NO: 46384 - protein, 7 aa, synthetic construct
RGDHSQA

SEQ ID NO: 46385 - protein, 7 aa, synthetic construct
VRKNDEF

SEQ ID NO: 46386 - protein, 7 aa, synthetic construct
QNRTNWE

SEQ ID NO: 46387 - protein, 7 aa, synthetic construct
RNQQQMS

SEQ ID NO: 46388 - protein, 7 aa, synthetic construct
GMRVSIA

SEQ ID NO: 46389 - protein, 7 aa, synthetic construct
DKHSAQS

SEQ ID NO: 46390 - protein, 7 aa, synthetic construct
HPQRYAA

SEQ ID NO: 46391 - protein, 7 aa, synthetic construct
YLPTKKE

SEQ ID NO: 46392 - protein, 7 aa, synthetic construct
KPTGNGM

SEQ ID NO: 46393 - protein, 7 aa, synthetic construct
MGKNKDP

SEQ ID NO: 46394 - protein, 7 aa, synthetic construct
YGHSPSG

SEQ ID NO: 46395 - protein, 7 aa, synthetic construct
KTNSSMP

SEQ ID NO: 46396 - protein, 7 aa, synthetic construct
KGSATTV

SEQ ID NO: 46397 - protein, 7 aa, synthetic construct
NKQGVNP

SEQ ID NO: 46398 - protein, 7 aa, synthetic construct
YPSKSIN

SEQ ID NO: 46399 - protein, 7 aa, synthetic construct
LGQGIHN

SEQ ID NO: 46400 - protein, 7 aa, synthetic construct
SQSKMNG

SEQ ID NO: 46401 - protein, 7 aa, synthetic construct
GKASTQN

SEQ ID NO: 46402 - protein, 7 aa, synthetic construct
SKYSQNG

SEQ ID NO: 46403 - protein, 7 aa, synthetic construct
GSIQQQV

SEQ ID NO: 46404 - protein, 7 aa, synthetic construct
QHFHKSD

SEQ ID NO: 46405 - protein, 7 aa, synthetic construct
TQGVGHK

SEQ ID NO: 46406 - protein, 7 aa, synthetic construct
FKSGTGN

SEQ ID NO: 46407 - protein, 7 aa, synthetic construct
SQIRAGA

SEQ ID NO: 46408 - protein, 7 aa, synthetic construct
SKHSSME

SEQ ID NO: 46409 - protein, 7 aa, synthetic construct
YMKVQDG

SEQ ID NO: 46410 - protein, 7 aa, synthetic construct
DNHIKPS

SEQ ID NO: 46411 - protein, 7 aa, synthetic construct
LTHIYRD

SEQ ID NO: 46412 - protein, 7 aa, synthetic construct
RTTSAQP

SEQ ID NO: 46413 - protein, 7 aa, synthetic construct
QVGSKMG

SEQ ID NO: 46414 - protein, 7 aa, synthetic construct
RGPGMNS

SEQ ID NO: 46415 - protein, 7 aa, synthetic construct
RETGKYS

SEQ ID NO: 46416 - protein, 7 aa, synthetic construct
GIAKNVA

SEQ ID NO: 46417 - protein, 7 aa, synthetic construct
MEKGPRL

SEQ ID NO: 46418 - protein, 7 aa, synthetic construct
ILNPAKG

SEQ ID NO: 46419 - protein, 7 aa, synthetic construct
MRAPSQG

SEQ ID NO: 46420 - protein, 7 aa, synthetic construct
MGGKSVG

SEQ ID NO: 46421 - protein, 7 aa, synthetic construct
SYKDTRL

SEQ ID NO: 46422 - protein, 7 aa, synthetic construct
DMRYSEK

SEQ ID NO: 46423 - protein, 7 aa, synthetic construct
MKQTSQV

SEQ ID NO: 46424 - protein, 7 aa, synthetic construct
KGNMAAV

SEQ ID NO: 46425 - protein, 7 aa, synthetic construct
QPMKQVP

SEQ ID NO: 46426 - protein, 7 aa, synthetic construct
NKTPVAA

SEQ ID NO: 46427 - protein, 7 aa, synthetic construct
ISVHKGG

SEQ ID NO: 46428 - protein, 7 aa, synthetic construct
GKAAHQY

SEQ ID NO: 46429 - protein, 7 aa, synthetic construct
QWGGKTS

SEQ ID NO: 46430 - protein, 7 aa, synthetic construct
SVGKIHD

SEQ ID NO: 46431 - protein, 7 aa, synthetic construct
TSAKNVS

SEQ ID NO: 46432 - protein, 7 aa, synthetic construct
PQRPITE

SEQ ID NO: 46433 - protein, 7 aa, synthetic construct
KSMNTVG

SEQ ID NO: 46434 - protein, 7 aa, synthetic construct
LQEFKTP

SEQ ID NO: 46435 - protein, 7 aa, synthetic construct
IAPHFKT

SEQ ID NO: 46436 - protein, 7 aa, synthetic construct
PQRQNAA

SEQ ID NO: 46437 - protein, 7 aa, synthetic construct
GSNKTNP

SEQ ID NO: 46438 - protein, 7 aa, synthetic construct
VGYKNAP

SEQ ID NO: 46439 - protein, 7 aa, synthetic construct
WKVDDKF

SEQ ID NO: 46440 - protein, 7 aa, synthetic construct
SKMTGVI

SEQ ID NO: 46441 - protein, 7 aa, synthetic construct
QGNLKGE

SEQ ID NO: 46442 - protein, 7 aa, synthetic construct
HRENYQG

SEQ ID NO: 46443 - protein, 7 aa, synthetic construct
AIYSSHG

SEQ ID NO: 46444 - protein, 7 aa, synthetic construct
FGASFIG

SEQ ID NO: 46445 - protein, 7 aa, synthetic construct
KRDGANP

SEQ ID NO: 46446 - protein, 7 aa, synthetic construct
VLRVKSE

SEQ ID NO: 46447 - protein, 7 aa, synthetic construct
QRGQSMG

SEQ ID NO: 46448 - protein, 7 aa, synthetic construct
LKDRTTH

SEQ ID NO: 46449 - protein, 7 aa, synthetic construct
KQAGAVA

SEQ ID NO: 46450 - protein, 7 aa, synthetic construct
KLQRDNT

SEQ ID NO: 46451 - protein, 7 aa, synthetic construct
LRGSFND

SEQ ID NO: 46452 - protein, 7 aa, synthetic construct
KPQSISA

SEQ ID NO: 46453 - protein, 7 aa, synthetic construct
LYTRDNA

SEQ ID NO: 46454 - protein, 7 aa, synthetic construct
QTQSHFA

SEQ ID NO: 46455 - protein, 7 aa, synthetic construct
HRAQDPS

SEQ ID NO: 46456 - protein, 7 aa, synthetic construct
HKYPSSS

SEQ ID NO: 46457 - protein, 7 aa, synthetic construct
RNKDTGA

SEQ ID NO: 46458 - protein, 7 aa, synthetic construct
IWKDALP

SEQ ID NO: 46459 - protein, 7 aa, synthetic construct
LGAMNIQ

SEQ ID NO: 46460 - protein, 7 aa, synthetic construct
YGSKGTA

SEQ ID NO: 46461 - protein, 7 aa, synthetic construct
LSQMKMQ

SEQ ID NO: 46462 - protein, 7 aa, synthetic construct
SKTSTGG

SEQ ID NO: 46463 - protein, 7 aa, synthetic construct
TKTAVAG

SEQ ID NO: 46464 - protein, 7 aa, synthetic construct
SKNQTSP

SEQ ID NO: 46465 - protein, 7 aa, synthetic construct
RTTAAQA

SEQ ID NO: 46466 - protein, 7 aa, synthetic construct
GYKSVGS

SEQ ID NO: 46467 - protein, 7 aa, synthetic construct
ADKGHHG

SEQ ID NO: 46468 - protein, 7 aa, synthetic construct
KIPQGQF

SEQ ID NO: 46469 - protein, 7 aa, synthetic construct
VRQSSNV

SEQ ID NO: 46470 - protein, 7 aa, synthetic construct
RNPSAGV

SEQ ID NO: 46471 - protein, 7 aa, synthetic construct
THDNKAT

SEQ ID NO: 46472 - protein, 7 aa, synthetic construct
AARGPAV

SEQ ID NO: 46473 - protein, 7 aa, synthetic construct
GHARGSD

SEQ ID NO: 46474 - protein, 7 aa, synthetic construct
PGRTSTD

SEQ ID NO: 46475 - protein, 7 aa, synthetic construct
MQHSGQA

SEQ ID NO: 46476 - protein, 7 aa, synthetic construct
HNHPSTI

SEQ ID NO: 46477 - protein, 7 aa, synthetic construct
MGKVKEM

SEQ ID NO: 46478 - protein, 7 aa, synthetic construct
ERVPAQS

SEQ ID NO: 46479 - protein, 7 aa, synthetic construct
SVAGGVP

SEQ ID NO: 46480 - protein, 7 aa, synthetic construct
FKDTKNG

SEQ ID NO: 46481 - protein, 7 aa, synthetic construct
SQSKGGG

SEQ ID NO: 46482 - protein, 7 aa, synthetic construct
LTPLHQQ

SEQ ID NO: 46483 - protein, 7 aa, synthetic construct
MKGHPEA

SEQ ID NO: 46484 - protein, 7 aa, synthetic construct
LRVGVHD

SEQ ID NO: 46485 - protein, 7 aa, synthetic construct
RPNSQFG

SEQ ID NO: 46486 - protein, 7 aa, synthetic construct
IATRMKE

SEQ ID NO: 46487 - protein, 7 aa, synthetic construct
NIHGKFM

SEQ ID NO: 46488 - protein, 7 aa, synthetic construct
MSSHQNL

SEQ ID NO: 46489 - protein, 7 aa, synthetic construct
FKTSVVT

SEQ ID NO: 46490 - protein, 7 aa, synthetic construct
TRQSQQD

SEQ ID NO: 46491 - protein, 7 aa, synthetic construct
NPRASVP

SEQ ID NO: 46492 - protein, 7 aa, synthetic construct
ATGPVSS

SEQ ID NO: 46493 - protein, 7 aa, synthetic construct
ERTRTVA

SEQ ID NO: 46494 - protein, 7 aa, synthetic construct
QSKSRMD

SEQ ID NO: 46495 - protein, 7 aa, synthetic construct
LRRDATN

SEQ ID NO: 46496 - protein, 7 aa, synthetic construct
RVNRPEV

SEQ ID NO: 46497 - protein, 7 aa, synthetic construct
NTGRTNP

SEQ ID NO: 46498 - protein, 7 aa, synthetic construct
YGAYAKN

SEQ ID NO: 46499 - protein, 7 aa, synthetic construct
PNVSRAA

SEQ ID NO: 46500 - protein, 7 aa, synthetic construct
LGGTWKG

SEQ ID NO: 46501 - protein, 7 aa, synthetic construct
GQGGNHF

SEQ ID NO: 46502 - protein, 7 aa, synthetic construct
KPGMGKD

SEQ ID NO: 46503 - protein, 7 aa, synthetic construct
QQSARSP

SEQ ID NO: 46504 - protein, 7 aa, synthetic construct
SGHITHY

SEQ ID NO: 46505 - protein, 7 aa, synthetic construct
SQGKPAA

SEQ ID NO: 46506 - protein, 7 aa, synthetic construct
VAIYGKE

SEQ ID NO: 46507 - protein, 7 aa, synthetic construct
VKGLWKE

SEQ ID NO: 46508 - protein, 7 aa, synthetic construct
EIVKHKE

SEQ ID NO: 46509 - protein, 7 aa, synthetic construct
NKQGAKD

SEQ ID NO: 46510 - protein, 7 aa, synthetic construct
MKGPMTG

SEQ ID NO: 46511 - protein, 7 aa, synthetic construct
NQRGIPA

SEQ ID NO: 46512 - protein, 7 aa, synthetic construct
HRQHTIS

SEQ ID NO: 46513 - protein, 7 aa, synthetic construct
KATPSTA

SEQ ID NO: 46514 - protein, 7 aa, synthetic construct
HAARNET

SEQ ID NO: 46515 - protein, 7 aa, synthetic construct
RPMAQPE

SEQ ID NO: 46516 - protein, 7 aa, synthetic construct
VDKKWHP

SEQ ID NO: 46517 - protein, 7 aa, synthetic construct
NKSTTAP

SEQ ID NO: 46518 - protein, 7 aa, synthetic construct
QSGGKNG

SEQ ID NO: 46519 - protein, 7 aa, synthetic construct
VRSSAST

SEQ ID NO: 46520 - protein, 7 aa, synthetic construct
KSQTVVG

SEQ ID NO: 46521 - protein, 7 aa, synthetic construct
VRGQTNA

SEQ ID NO: 46522 - protein, 7 aa, synthetic construct
GQHHRIV

SEQ ID NO: 46523 - protein, 7 aa, synthetic construct
SRSSTAS

SEQ ID NO: 46524 - protein, 7 aa, synthetic construct
RSQGNIG

SEQ ID NO: 46525 - protein, 7 aa, synthetic construct
KTYTTQV

SEQ ID NO: 46526 - protein, 7 aa, synthetic construct
QWNKGTP

SEQ ID NO: 46527 - protein, 7 aa, synthetic construct
GKSTGDS

SEQ ID NO: 46528 - protein, 7 aa, synthetic construct
SRTPQTG

SEQ ID NO: 46529 - protein, 7 aa, synthetic construct
KGSSQGG

SEQ ID NO: 46530 - protein, 7 aa, synthetic construct
NMARPPS

SEQ ID NO: 46531 - protein, 7 aa, synthetic construct
INAASNR

SEQ ID NO: 46532 - protein, 7 aa, synthetic construct
IYGDNGR

SEQ ID NO: 46533 - protein, 7 aa, synthetic construct
RNPTTTG

SEQ ID NO: 46534 - protein, 7 aa, synthetic construct
EQKEKRP

SEQ ID NO: 46535 - protein, 7 aa, synthetic construct
DDLKKLP

SEQ ID NO: 46536 - protein, 7 aa, synthetic construct
RKDVNTA

SEQ ID NO: 46537 - protein, 7 aa, synthetic construct
GVAKSPM

SEQ ID NO: 46538 - protein, 7 aa, synthetic construct
HIMKAQE

SEQ ID NO: 46539 - protein, 7 aa, synthetic construct
STAQRTA

SEQ ID NO: 46540 - protein, 7 aa, synthetic construct
RLTYANE

SEQ ID NO: 46541 - protein, 7 aa, synthetic construct
PPGHSTP

SEQ ID NO: 46542 - protein, 7 aa, synthetic construct
QANGSMA

SEQ ID NO: 46543 - protein, 7 aa, synthetic construct
KNYGNSA

SEQ ID NO: 46544 - protein, 7 aa, synthetic construct
RQSNSDS

SEQ ID NO: 46545 - protein, 7 aa, synthetic construct
KDRHGLV

SEQ ID NO: 46546 - protein, 7 aa, synthetic construct
PVRAPIS

SEQ ID NO: 46547 - protein, 7 aa, synthetic construct
KQGSSMS

SEQ ID NO: 46548 - protein, 7 aa, synthetic construct
NAVKGPS

SEQ ID NO: 46549 - protein, 7 aa, synthetic construct
SGGRFQA

SEQ ID NO: 46550 - protein, 7 aa, synthetic construct
QHMNKEN

SEQ ID NO: 46551 - protein, 7 aa, synthetic construct
TNKSTSG

SEQ ID NO: 46552 - protein, 7 aa, synthetic construct
KQNTSIA

SEQ ID NO: 46553 - protein, 7 aa, synthetic construct
NTYTATV

SEQ ID NO: 46554 - protein, 7 aa, synthetic construct
HAKLIGG

SEQ ID NO: 46555 - protein, 7 aa, synthetic construct
HKGWQQS

SEQ ID NO: 46556 - protein, 7 aa, synthetic construct
KNRDSNA

SEQ ID NO: 46557 - protein, 7 aa, synthetic construct
TKNGHIM

SEQ ID NO: 46558 - protein, 7 aa, synthetic construct
GQYRNQM

SEQ ID NO: 46559 - protein, 7 aa, synthetic construct
KPTAMGA

SEQ ID NO: 46560 - protein, 7 aa, synthetic construct
RGQQTSA

SEQ ID NO: 46561 - protein, 7 aa, synthetic construct
LPGKSVD

SEQ ID NO: 46562 - protein, 7 aa, synthetic construct
NRMNGQA

SEQ ID NO: 46563 - protein, 7 aa, synthetic construct
RNQSQNG

SEQ ID NO: 46564 - protein, 7 aa, synthetic construct
QRAQQTS

SEQ ID NO: 46565 - protein, 7 aa, synthetic construct
GRMGSNV

SEQ ID NO: 46566 - protein, 7 aa, synthetic construct
MRTGNDS

SEQ ID NO: 46567 - protein, 7 aa, synthetic construct
SMTQNQS

SEQ ID NO: 46568 - protein, 7 aa, synthetic construct
MDGKKPS

SEQ ID NO: 46569 - protein, 7 aa, synthetic construct
VKPNNTP

SEQ ID NO: 46570 - protein, 7 aa, synthetic construct
MKSVATG

SEQ ID NO: 46571 - protein, 7 aa, synthetic construct
KQGSSVL

SEQ ID NO: 46572 - protein, 7 aa, synthetic construct
KIYDLPQ

SEQ ID NO: 46573 - protein, 7 aa, synthetic construct
VFRMESK

SEQ ID NO: 46574 - protein, 7 aa, synthetic construct
LFKGERN

SEQ ID NO: 46575 - protein, 7 aa, synthetic construct
ADYRDRE

SEQ ID NO: 46576 - protein, 7 aa, synthetic construct
YSGGKDT

SEQ ID NO: 46577 - protein, 7 aa, synthetic construct
NVKPSNQ

SEQ ID NO: 46578 - protein, 7 aa, synthetic construct
GSMQQSR

SEQ ID NO: 46579 - protein, 7 aa, synthetic construct
KTSNVGP

SEQ ID NO: 46580 - protein, 7 aa, synthetic construct
NGQHTMG

SEQ ID NO: 46581 - protein, 7 aa, synthetic construct
EIQSKRA

SEQ ID NO: 46582 - protein, 7 aa, synthetic construct
QGQSSGK

SEQ ID NO: 46583 - protein, 7 aa, synthetic construct
KMASTKD

SEQ ID NO: 46584 - protein, 7 aa, synthetic construct
HPNIMPQ

SEQ ID NO: 46585 - protein, 7 aa, synthetic construct
KDSKASG

SEQ ID NO: 46586 - protein, 7 aa, synthetic construct
TSISRMT

SEQ ID NO: 46587 - protein, 7 aa, synthetic construct
KNDRHGD

SEQ ID NO: 46588 - protein, 7 aa, synthetic construct
MGGSKSP

SEQ ID NO: 46589 - protein, 7 aa, synthetic construct
AKRDNVA

SEQ ID NO: 46590 - protein, 7 aa, synthetic construct
YGKTHIL

SEQ ID NO: 46591 - protein, 7 aa, synthetic construct
KSSNGKE

SEQ ID NO: 46592 - protein, 7 aa, synthetic construct
FSAFAKD

SEQ ID NO: 46593 - protein, 7 aa, synthetic construct
DRMQQRA

SEQ ID NO: 46594 - protein, 7 aa, synthetic construct
RKEMASG

SEQ ID NO: 46595 - protein, 7 aa, synthetic construct
RTQPGNA

SEQ ID NO: 46596 - protein, 7 aa, synthetic construct
RPKDSMV

SEQ ID NO: 46597 - protein, 7 aa, synthetic construct
TRQTPQG

SEQ ID NO: 46598 - protein, 7 aa, synthetic construct
GVQNRSP

SEQ ID NO: 46599 - protein, 7 aa, synthetic construct
FQQGSTS

SEQ ID NO: 46600 - protein, 7 aa, synthetic construct
KTTQLGG

SEQ ID NO: 46601 - protein, 7 aa, synthetic construct
ITSSSTW

SEQ ID NO: 46602 - protein, 7 aa, synthetic construct
GSKNMSA

SEQ ID NO: 46603 - protein, 7 aa, synthetic construct
HGMAMTP

SEQ ID NO: 46604 - protein, 7 aa, synthetic construct
NQMNGRA

SEQ ID NO: 46605 - protein, 7 aa, synthetic construct
QAGVGMF

SEQ ID NO: 46606 - protein, 7 aa, synthetic construct
NRQDPIR

SEQ ID NO: 46607 - protein, 7 aa, synthetic construct
HRSARDD

SEQ ID NO: 46608 - protein, 7 aa, synthetic construct
GQGVKQG

SEQ ID NO: 46609 - protein, 7 aa, synthetic construct
IKPNVHG

SEQ ID NO: 46610 - protein, 7 aa, synthetic construct
KNHNPGV

SEQ ID NO: 46611 - protein, 7 aa, synthetic construct
NGRGSTV

SEQ ID NO: 46612 - protein, 7 aa, synthetic construct
KLGLTHN

SEQ ID NO: 46613 - protein, 7 aa, synthetic construct
NGQKMGA

SEQ ID NO: 46614 - protein, 7 aa, synthetic construct
QSRTNAS

SEQ ID NO: 46615 - protein, 7 aa, synthetic construct
HTNYRAD

SEQ ID NO: 46616 - protein, 7 aa, synthetic construct
ITARNTG

SEQ ID NO: 46617 - protein, 7 aa, synthetic construct
PSATKTA

SEQ ID NO: 46618 - protein, 7 aa, synthetic construct
QKPRMEG

SEQ ID NO: 46619 - protein, 7 aa, synthetic construct
PQKGPNV

SEQ ID NO: 46620 - protein, 7 aa, synthetic construct
NSGKNGG

SEQ ID NO: 46621 - protein, 7 aa, synthetic construct
QNRSQAP

SEQ ID NO: 46622 - protein, 7 aa, synthetic construct
TGNPMKG

SEQ ID NO: 46623 - protein, 7 aa, synthetic construct
PKQSGAG

SEQ ID NO: 46624 - protein, 7 aa, synthetic construct
DNRSGIQ

SEQ ID NO: 46625 - protein, 7 aa, synthetic construct
AAKSAVN

SEQ ID NO: 46626 - protein, 7 aa, synthetic construct
KTTQARE

SEQ ID NO: 46627 - protein, 7 aa, synthetic construct
YGKTVSA

SEQ ID NO: 46628 - protein, 7 aa, synthetic construct
KVGIHPT

SEQ ID NO: 46629 - protein, 7 aa, synthetic construct
RYVEHTG

SEQ ID NO: 46630 - protein, 7 aa, synthetic construct
YRGDDSK

SEQ ID NO: 46631 - protein, 7 aa, synthetic construct
KYSKSEI

SEQ ID NO: 46632 - protein, 7 aa, synthetic construct
RDVIAHQ

SEQ ID NO: 46633 - protein, 7 aa, synthetic construct
PKNSASS

SEQ ID NO: 46634 - protein, 7 aa, synthetic construct
QVRELRP

SEQ ID NO: 46635 - protein, 7 aa, synthetic construct
AAFSAKA

SEQ ID NO: 46636 - protein, 7 aa, synthetic construct
LGSKTLS

SEQ ID NO: 46637 - protein, 7 aa, synthetic construct
SRDKTAG

SEQ ID NO: 46638 - protein, 7 aa, synthetic construct
SNRNQGP

SEQ ID NO: 46639 - protein, 7 aa, synthetic construct
FAKSTSP

SEQ ID NO: 46640 - protein, 7 aa, synthetic construct
GILGRVQ

SEQ ID NO: 46641 - protein, 7 aa, synthetic construct
NNVGNKG

SEQ ID NO: 46642 - protein, 7 aa, synthetic construct
RGPNTQA

SEQ ID NO: 46643 - protein, 7 aa, synthetic construct
TREKSYQ

SEQ ID NO: 46644 - protein, 7 aa, synthetic construct
SAGQTKN

SEQ ID NO: 46645 - protein, 7 aa, synthetic construct
YDHAIKQ

SEQ ID NO: 46646 - protein, 7 aa, synthetic construct
TKTMGNG

SEQ ID NO: 46647 - protein, 7 aa, synthetic construct
GAKLDRP

SEQ ID NO: 46648 - protein, 7 aa, synthetic construct
IASTKPG

SEQ ID NO: 46649 - protein, 7 aa, synthetic construct
HPNVPYT

SEQ ID NO: 46650 - protein, 7 aa, synthetic construct
TDKTKRD

SEQ ID NO: 46651 - protein, 7 aa, synthetic construct
VKVIGMA

SEQ ID NO: 46652 - protein, 7 aa, synthetic construct
INHQKVH

SEQ ID NO: 46653 - protein, 7 aa, synthetic construct
WQPVQSG

SEQ ID NO: 46654 - protein, 7 aa, synthetic construct
KKSDHMG

SEQ ID NO: 46655 - protein, 7 aa, synthetic construct
TLMTTKN

SEQ ID NO: 46656 - protein, 7 aa, synthetic construct
RTNPTAA

SEQ ID NO: 46657 - protein, 7 aa, synthetic construct
WNSRGNE

SEQ ID NO: 46658 - protein, 7 aa, synthetic construct
YTGNRNG

SEQ ID NO: 46659 - protein, 7 aa, synthetic construct
HSKHSGD

SEQ ID NO: 46660 - protein, 7 aa, synthetic construct
LRDVHGI

SEQ ID NO: 46661 - protein, 7 aa, synthetic construct
TDLRGSA

SEQ ID NO: 46662 - protein, 7 aa, synthetic construct
RVTSGAP

SEQ ID NO: 46663 - protein, 7 aa, synthetic construct
AMKSGGG

SEQ ID NO: 46664 - protein, 7 aa, synthetic construct
TTRNNNG

SEQ ID NO: 46665 - protein, 7 aa, synthetic construct
AKNQTAA

SEQ ID NO: 46666 - protein, 7 aa, synthetic construct
TMSNKST

SEQ ID NO: 46667 - protein, 7 aa, synthetic construct
IFTPNNP

SEQ ID NO: 46668 - protein, 7 aa, synthetic construct
DIHTQFG

SEQ ID NO: 46669 - protein, 7 aa, synthetic construct
KTVRDPT

SEQ ID NO: 46670 - protein, 7 aa, synthetic construct
IDVGAKK

SEQ ID NO: 46671 - protein, 7 aa, synthetic construct
NHKINEW

SEQ ID NO: 46672 - protein, 7 aa, synthetic construct
KPDAKTM

SEQ ID NO: 46673 - protein, 7 aa, synthetic construct
QYVGAKT

SEQ ID NO: 46674 - protein, 7 aa, synthetic construct
KMPSTNS

SEQ ID NO: 46675 - protein, 7 aa, synthetic construct
YKADYGH

SEQ ID NO: 46676 - protein, 7 aa, synthetic construct
LSPSGKT

SEQ ID NO: 46677 - protein, 7 aa, synthetic construct
TKQITQF

SEQ ID NO: 46678 - protein, 7 aa, synthetic construct
LATAHKE

SEQ ID NO: 46679 - protein, 7 aa, synthetic construct
FIAKGPP

SEQ ID NO: 46680 - protein, 7 aa, synthetic construct
QSKPTSA

SEQ ID NO: 46681 - protein, 7 aa, synthetic construct
ANVKSQG

SEQ ID NO: 46682 - protein, 7 aa, synthetic construct
QHNKWGD

SEQ ID NO: 46683 - protein, 7 aa, synthetic construct
QSKNMVF

SEQ ID NO: 46684 - protein, 7 aa, synthetic construct
KVASGKD

SEQ ID NO: 46685 - protein, 7 aa, synthetic construct
GGRGIVT

SEQ ID NO: 46686 - protein, 7 aa, synthetic construct
QYKPNGA

SEQ ID NO: 46687 - protein, 7 aa, synthetic construct
MAHGKPA

SEQ ID NO: 46688 - protein, 7 aa, synthetic construct
HAHRSQP

SEQ ID NO: 46689 - protein, 7 aa, synthetic construct
SGHQKEF

SEQ ID NO: 46690 - protein, 7 aa, synthetic construct
RNNERTP

SEQ ID NO: 46691 - protein, 7 aa, synthetic construct
VTQKPSL

SEQ ID NO: 46692 - protein, 7 aa, synthetic construct
NNLAQGH

SEQ ID NO: 46693 - protein, 7 aa, synthetic construct
TNKADKM

SEQ ID NO: 46694 - protein, 7 aa, synthetic construct
DVVSRSP

SEQ ID NO: 46695 - protein, 7 aa, synthetic construct
PQSKSQA

SEQ ID NO: 46696 - protein, 7 aa, synthetic construct
MRPASQN

SEQ ID NO: 46697 - protein, 7 aa, synthetic construct
TIGGPRD

SEQ ID NO: 46698 - protein, 7 aa, synthetic construct
TNHKAFM

SEQ ID NO: 46699 - protein, 7 aa, synthetic construct
PGDRLGG

SEQ ID NO: 46700 - protein, 7 aa, synthetic construct
VMPKQIA

SEQ ID NO: 46701 - protein, 7 aa, synthetic construct
LNKTQKD

SEQ ID NO: 46702 - protein, 7 aa, synthetic construct
ASHIVPG

SEQ ID NO: 46703 - protein, 7 aa, synthetic construct
EKVRPIF

SEQ ID NO: 46704 - protein, 7 aa, synthetic construct
MAQSQRV

SEQ ID NO: 46705 - protein, 7 aa, synthetic construct
NNKGHMN

SEQ ID NO: 46706 - protein, 7 aa, synthetic construct
RPSSSVN

SEQ ID NO: 46707 - protein, 7 aa, synthetic construct
DRDGKHG

SEQ ID NO: 46708 - protein, 7 aa, synthetic construct
TAKNSPF

SEQ ID NO: 46709 - protein, 7 aa, synthetic construct
VSKLATP

SEQ ID NO: 46710 - protein, 7 aa, synthetic construct
TNKGSSA

SEQ ID NO: 46711 - protein, 7 aa, synthetic construct
THDAFRP

SEQ ID NO: 46712 - protein, 7 aa, synthetic construct
QQQGRAQ

SEQ ID NO: 46713 - protein, 7 aa, synthetic construct
KYHDVHP

SEQ ID NO: 46714 - protein, 7 aa, synthetic construct
KVMDKQF

SEQ ID NO: 46715 - protein, 7 aa, synthetic construct
AGLQSRG

SEQ ID NO: 46716 - protein, 7 aa, synthetic construct
NPRSGDG

SEQ ID NO: 46717 - protein, 7 aa, synthetic construct
AKNLPHI

SEQ ID NO: 46718 - protein, 7 aa, synthetic construct
HAGKMTD

SEQ ID NO: 46719 - protein, 7 aa, synthetic construct
RPSFISE

SEQ ID NO: 46720 - protein, 7 aa, synthetic construct
YMGVTSP

SEQ ID NO: 46721 - protein, 7 aa, synthetic construct
VKMNGAA

SEQ ID NO: 46722 - protein, 7 aa, synthetic construct
LSNKMSA

SEQ ID NO: 46723 - protein, 7 aa, synthetic construct
VLAQSNH

SEQ ID NO: 46724 - protein, 7 aa, synthetic construct
MGKPPGL

SEQ ID NO: 46725 - protein, 7 aa, synthetic construct
NSNLHVG

SEQ ID NO: 46726 - protein, 7 aa, synthetic construct
EYRNGQG

SEQ ID NO: 46727 - protein, 7 aa, synthetic construct
EKQKNWS

SEQ ID NO: 46728 - protein, 7 aa, synthetic construct
QDRKFNA

SEQ ID NO: 46729 - protein, 7 aa, synthetic construct
MKKDTVM

SEQ ID NO: 46730 - protein, 7 aa, synthetic construct
NIRDLAI

SEQ ID NO: 46731 - protein, 7 aa, synthetic construct
FKPHAVN

SEQ ID NO: 46732 - protein, 7 aa, synthetic construct
KPGAAYS

SEQ ID NO: 46733 - protein, 7 aa, synthetic construct
LGLGVKG

SEQ ID NO: 46734 - protein, 7 aa, synthetic construct
NMNGHKA

SEQ ID NO: 46735 - protein, 7 aa, synthetic construct
HNTIGRA

SEQ ID NO: 46736 - protein, 7 aa, synthetic construct
EWPGKTG

SEQ ID NO: 46737 - protein, 7 aa, synthetic construct
QRNPNVT

SEQ ID NO: 46738 - protein, 7 aa, synthetic construct
QPAGRMA

SEQ ID NO: 46739 - protein, 7 aa, synthetic construct
KDIMITA

SEQ ID NO: 46740 - protein, 7 aa, synthetic construct
VTSHRQE

SEQ ID NO: 46741 - protein, 7 aa, synthetic construct
KTVNNTA

SEQ ID NO: 46742 - protein, 7 aa, synthetic construct
ARGTSNT

SEQ ID NO: 46743 - protein, 7 aa, synthetic construct
PGSGARV

SEQ ID NO: 46744 - protein, 7 aa, synthetic construct
HHLKHDS

SEQ ID NO: 46745 - protein, 7 aa, synthetic construct
FQNTQMA

SEQ ID NO: 46746 - protein, 7 aa, synthetic construct
AGPSFLG

SEQ ID NO: 46747 - protein, 7 aa, synthetic construct
TRNRPGD

SEQ ID NO: 46748 - protein, 7 aa, synthetic construct
STHSHPS

SEQ ID NO: 46749 - protein, 7 aa, synthetic construct
NHATLPA

SEQ ID NO: 46750 - protein, 7 aa, synthetic construct
TPPSTSG

SEQ ID NO: 46751 - protein, 7 aa, synthetic construct
HKMTGQG

SEQ ID NO: 46752 - protein, 7 aa, synthetic construct
GKQSVAS

SEQ ID NO: 46753 - protein, 7 aa, synthetic construct
EKPFLQA

SEQ ID NO: 46754 - protein, 7 aa, synthetic construct
NMPHKTV

SEQ ID NO: 46755 - protein, 7 aa, synthetic construct
GMSTHHG

SEQ ID NO: 46756 - protein, 7 aa, synthetic construct
QRPPQGG

SEQ ID NO: 46757 - protein, 7 aa, synthetic construct
RTSGVGN

SEQ ID NO: 46758 - protein, 7 aa, synthetic construct
MVRVPEK

SEQ ID NO: 46759 - protein, 7 aa, synthetic construct
RTANSGP

SEQ ID NO: 46760 - protein, 7 aa, synthetic construct
TPGAGKI

SEQ ID NO: 46761 - protein, 7 aa, synthetic construct
MMKGSTP

SEQ ID NO: 46762 - protein, 7 aa, synthetic construct
QKPAGVG

SEQ ID NO: 46763 - protein, 7 aa, synthetic construct
NVKGMQG

SEQ ID NO: 46764 - protein, 7 aa, synthetic construct
NGRVIQP

SEQ ID NO: 46765 - protein, 7 aa, synthetic construct
KQPIRQD

SEQ ID NO: 46766 - protein, 7 aa, synthetic construct
VTRGQMG

SEQ ID NO: 46767 - protein, 7 aa, synthetic construct
NMGIHNG

SEQ ID NO: 46768 - protein, 7 aa, synthetic construct
RNPPTGS

SEQ ID NO: 46769 - protein, 7 aa, synthetic construct
RGQASQG

SEQ ID NO: 46770 - protein, 7 aa, synthetic construct
QNQRAQA

SEQ ID NO: 46771 - protein, 7 aa, synthetic construct
FSNFKAS

SEQ ID NO: 46772 - protein, 7 aa, synthetic construct
TKNMVKD

SEQ ID NO: 46773 - protein, 7 aa, synthetic construct
GTNHKMG

SEQ ID NO: 46774 - protein, 7 aa, synthetic construct
PHKHDAP

SEQ ID NO: 46775 - protein, 7 aa, synthetic construct
VRKERDA

SEQ ID NO: 46776 - protein, 7 aa, synthetic construct
NSTKTPA

SEQ ID NO: 46777 - protein, 7 aa, synthetic construct
YGPKTAS

SEQ ID NO: 46778 - protein, 7 aa, synthetic construct
KISTHQE

SEQ ID NO: 46779 - protein, 7 aa, synthetic construct
TGKGGGT

SEQ ID NO: 46780 - protein, 7 aa, synthetic construct
LQGPNRN

SEQ ID NO: 46781 - protein, 7 aa, synthetic construct
YRGLTAD

SEQ ID NO: 46782 - protein, 7 aa, synthetic construct
TMNATNG

SEQ ID NO: 46783 - protein, 7 aa, synthetic construct
KTGSFQG

SEQ ID NO: 46784 - protein, 7 aa, synthetic construct
FEKWMPN

SEQ ID NO: 46785 - protein, 7 aa, synthetic construct
TVTFRDN

SEQ ID NO: 46786 - protein, 7 aa, synthetic construct
RFPHADS

SEQ ID NO: 46787 - protein, 7 aa, synthetic construct
ITMHKNA

SEQ ID NO: 46788 - protein, 7 aa, synthetic construct
LPKSMGN

SEQ ID NO: 46789 - protein, 7 aa, synthetic construct
FINGLPQ

SEQ ID NO: 46790 - protein, 7 aa, synthetic construct
SMKIPSV

SEQ ID NO: 46791 - protein, 7 aa, synthetic construct
PTRSNGA

SEQ ID NO: 46792 - protein, 7 aa, synthetic construct
VVNHVPN

SEQ ID NO: 46793 - protein, 7 aa, synthetic construct
TRQTTNG

SEQ ID NO: 46794 - protein, 7 aa, synthetic construct
KKAFHED

SEQ ID NO: 46795 - protein, 7 aa, synthetic construct
IQNRGAS

SEQ ID NO: 46796 - protein, 7 aa, synthetic construct
PTRGQNV

SEQ ID NO: 46797 - protein, 7 aa, synthetic construct
NKMVQQG

SEQ ID NO: 46798 - protein, 7 aa, synthetic construct
VYGTKNG

SEQ ID NO: 46799 - protein, 7 aa, synthetic construct
WRQEAKQ

SEQ ID NO: 46800 - protein, 7 aa, synthetic construct
VKNSGGS

SEQ ID NO: 46801 - protein, 7 aa, synthetic construct
NHMRAIG

SEQ ID NO: 46802 - protein, 7 aa, synthetic construct
LAVRNNA

SEQ ID NO: 46803 - protein, 7 aa, synthetic construct
QNSRQGS

SEQ ID NO: 46804 - protein, 7 aa, synthetic construct
KSQMQPA

SEQ ID NO: 46805 - protein, 7 aa, synthetic construct
KDRSMQG

SEQ ID NO: 46806 - protein, 7 aa, synthetic construct
TRITPVE

SEQ ID NO: 46807 - protein, 7 aa, synthetic construct
WPHDTAL

SEQ ID NO: 46808 - protein, 7 aa, synthetic construct
AKDAGKQ

SEQ ID NO: 46809 - protein, 7 aa, synthetic construct
FSVEGSH

SEQ ID NO: 46810 - protein, 7 aa, synthetic construct
GKNAQAA

SEQ ID NO: 46811 - protein, 7 aa, synthetic construct
FQERHMK

SEQ ID NO: 46812 - protein, 7 aa, synthetic construct
VNQLKSP

SEQ ID NO: 46813 - protein, 7 aa, synthetic construct
IRNAGHV

SEQ ID NO: 46814 - protein, 7 aa, synthetic construct
NRDGRAP

SEQ ID NO: 46815 - protein, 7 aa, synthetic construct
EMTRTNS

SEQ ID NO: 46816 - protein, 7 aa, synthetic construct
HLPHSVA

SEQ ID NO: 46817 - protein, 7 aa, synthetic construct
LVKQTQG

SEQ ID NO: 46818 - protein, 7 aa, synthetic construct
NGQAKQN

SEQ ID NO: 46819 - protein, 7 aa, synthetic construct
GKTQTAS

SEQ ID NO: 46820 - protein, 7 aa, synthetic construct
RPGVMNV

SEQ ID NO: 46821 - protein, 7 aa, synthetic construct
MSHQKEI

SEQ ID NO: 46822 - protein, 7 aa, synthetic construct
NRQGGSI

SEQ ID NO: 46823 - protein, 7 aa, synthetic construct
NQKNTAA

SEQ ID NO: 46824 - protein, 7 aa, synthetic construct
RSTFIKD

SEQ ID NO: 46825 - protein, 7 aa, synthetic construct
WKKMDMG

SEQ ID NO: 46826 - protein, 7 aa, synthetic construct
VKPSIAG

SEQ ID NO: 46827 - protein, 7 aa, synthetic construct
NNWNGQG

SEQ ID NO: 46828 - protein, 7 aa, synthetic construct
VRPNTNA

SEQ ID NO: 46829 - protein, 7 aa, synthetic construct
NQQRPSA

SEQ ID NO: 46830 - protein, 7 aa, synthetic construct
NRTAGGP

SEQ ID NO: 46831 - protein, 7 aa, synthetic construct
GKKQEGG

SEQ ID NO: 46832 - protein, 7 aa, synthetic construct
HFKKAGD

SEQ ID NO: 46833 - protein, 7 aa, synthetic construct
VTAQRSI

SEQ ID NO: 46834 - protein, 7 aa, synthetic construct
SLVGNRM

SEQ ID NO: 46835 - protein, 7 aa, synthetic construct
MVKAHEH

SEQ ID NO: 46836 - protein, 7 aa, synthetic construct
TKGVLAP

SEQ ID NO: 46837 - protein, 7 aa, synthetic construct
MKSSKGD

SEQ ID NO: 46838 - protein, 7 aa, synthetic construct
TNSMKNG

SEQ ID NO: 46839 - protein, 7 aa, synthetic construct
TTQKSNA

SEQ ID NO: 46840 - protein, 7 aa, synthetic construct
YQSMVRG

SEQ ID NO: 46841 - protein, 7 aa, synthetic construct
EKFDLKN

SEQ ID NO: 46842 - protein, 7 aa, synthetic construct
GVSKTSG

SEQ ID NO: 46843 - protein, 7 aa, synthetic construct
EVFKASA

SEQ ID NO: 46844 - protein, 7 aa, synthetic construct
PKDSKFG

SEQ ID NO: 46845 - protein, 7 aa, synthetic construct
NKPHISQ

SEQ ID NO: 46846 - protein, 7 aa, synthetic construct
RKTGDVD

SEQ ID NO: 46847 - protein, 7 aa, synthetic construct
VSKKSEV

SEQ ID NO: 46848 - protein, 7 aa, synthetic construct
WDAKDGK

SEQ ID NO: 46849 - protein, 7 aa, synthetic construct
KFEKHLG

SEQ ID NO: 46850 - protein, 7 aa, synthetic construct
TPKNAVG

SEQ ID NO: 46851 - protein, 7 aa, synthetic construct
SNAMQIG

SEQ ID NO: 46852 - protein, 7 aa, synthetic construct
TNKQQSG

SEQ ID NO: 46853 - protein, 7 aa, synthetic construct
PIGKQTA

SEQ ID NO: 46854 - protein, 7 aa, synthetic construct
NTVRSAA

SEQ ID NO: 46855 - protein, 7 aa, synthetic construct
NNKSIQA

SEQ ID NO: 46856 - protein, 7 aa, synthetic construct
GGSKMQA

SEQ ID NO: 46857 - protein, 7 aa, synthetic construct
HHNKGTD

SEQ ID NO: 46858 - protein, 7 aa, synthetic construct
VKNNGQS

SEQ ID NO: 46859 - protein, 7 aa, synthetic construct
MLKYGTQ

SEQ ID NO: 46860 - protein, 7 aa, synthetic construct
THNRTDA

SEQ ID NO: 46861 - protein, 7 aa, synthetic construct
LAYHSKD

SEQ ID NO: 46862 - protein, 7 aa, synthetic construct
HLTFQKE

SEQ ID NO: 46863 - protein, 7 aa, synthetic construct
MTKQLTA

SEQ ID NO: 46864 - protein, 7 aa, synthetic construct
QLPKSNA

SEQ ID NO: 46865 - protein, 7 aa, synthetic construct
YGAALAN

SEQ ID NO: 46866 - protein, 7 aa, synthetic construct
KKSEMVG

SEQ ID NO: 46867 - protein, 7 aa, synthetic construct
IRSVENR

SEQ ID NO: 46868 - protein, 7 aa, synthetic construct
MKASSMA

SEQ ID NO: 46869 - protein, 7 aa, synthetic construct
GNIQGKA

SEQ ID NO: 46870 - protein, 7 aa, synthetic construct
INNMKAG

SEQ ID NO: 46871 - protein, 7 aa, synthetic construct
VEGRHQG

SEQ ID NO: 46872 - protein, 7 aa, synthetic construct
RRDLQQT

SEQ ID NO: 46873 - protein, 7 aa, synthetic construct
QFRMVPE

SEQ ID NO: 46874 - protein, 7 aa, synthetic construct
KPSTVSL

SEQ ID NO: 46875 - protein, 7 aa, synthetic construct
ERKSPST

SEQ ID NO: 46876 - protein, 7 aa, synthetic construct
MDVKALI

SEQ ID NO: 46877 - protein, 7 aa, synthetic construct
SMPNKTA

SEQ ID NO: 46878 - protein, 7 aa, synthetic construct
TGTARQG

SEQ ID NO: 46879 - protein, 7 aa, synthetic construct
MPQKGFA

SEQ ID NO: 46880 - protein, 7 aa, synthetic construct
NIKLGVA

SEQ ID NO: 46881 - protein, 7 aa, synthetic construct
HGVTKNV

SEQ ID NO: 46882 - protein, 7 aa, synthetic construct
TQVGQRF

SEQ ID NO: 46883 - protein, 7 aa, synthetic construct
SGSKHHE

SEQ ID NO: 46884 - protein, 7 aa, synthetic construct
GMNKNNP

SEQ ID NO: 46885 - protein, 7 aa, synthetic construct
IEKIFSA

SEQ ID NO: 46886 - protein, 7 aa, synthetic construct
INSMMGA

SEQ ID NO: 46887 - protein, 7 aa, synthetic construct
VTSKAFM

SEQ ID NO: 46888 - protein, 7 aa, synthetic construct
LIGRKDD

SEQ ID NO: 46889 - protein, 7 aa, synthetic construct
MRALPTP

SEQ ID NO: 46890 - protein, 7 aa, synthetic construct
MQPGSQN

SEQ ID NO: 46891 - protein, 7 aa, synthetic construct
FKQPNSG

SEQ ID NO: 46892 - protein, 7 aa, synthetic construct
LYKDRPI

SEQ ID NO: 46893 - protein, 7 aa, synthetic construct
ANQRGVE

SEQ ID NO: 46894 - protein, 7 aa, synthetic construct
NVNVTNV

SEQ ID NO: 46895 - protein, 7 aa, synthetic construct
AIKTHPP

SEQ ID NO: 46896 - protein, 7 aa, synthetic construct
TTQGKTG

SEQ ID NO: 46897 - protein, 7 aa, synthetic construct
QTKGAYA

SEQ ID NO: 46898 - protein, 7 aa, synthetic construct
TPPGARG

SEQ ID NO: 46899 - protein, 7 aa, synthetic construct
GKQSSAP

SEQ ID NO: 46900 - protein, 7 aa, synthetic construct
QRSASAA

SEQ ID NO: 46901 - protein, 7 aa, synthetic construct
SQKNPNY

SEQ ID NO: 46902 - protein, 7 aa, synthetic construct
MKSSMRD

SEQ ID NO: 46903 - protein, 7 aa, synthetic construct
PGRQLPV

SEQ ID NO: 46904 - protein, 7 aa, synthetic construct
MKSVSAP

SEQ ID NO: 46905 - protein, 7 aa, synthetic construct
KNQGATA

SEQ ID NO: 46906 - protein, 7 aa, synthetic construct
TSGIKGG

SEQ ID NO: 46907 - protein, 7 aa, synthetic construct
SEINRGG

SEQ ID NO: 46908 - protein, 7 aa, synthetic construct
GITARQA

SEQ ID NO: 46909 - protein, 7 aa, synthetic construct
GTFRSSE

SEQ ID NO: 46910 - protein, 7 aa, synthetic construct
GPTNKTA

SEQ ID NO: 46911 - protein, 7 aa, synthetic construct
AASRANF

SEQ ID NO: 46912 - protein, 7 aa, synthetic construct
KHKVQDS

SEQ ID NO: 46913 - protein, 7 aa, synthetic construct
GPSGYGI

SEQ ID NO: 46914 - protein, 7 aa, synthetic construct
GKPTTMS

SEQ ID NO: 46915 - protein, 7 aa, synthetic construct
GHPRTHE

SEQ ID NO: 46916 - protein, 7 aa, synthetic construct
TGKVDHR

SEQ ID NO: 46917 - protein, 7 aa, synthetic construct
QRSGGSV

SEQ ID NO: 46918 - protein, 7 aa, synthetic construct
RMGLDGI

SEQ ID NO: 46919 - protein, 7 aa, synthetic construct
LFSEKKG

SEQ ID NO: 46920 - protein, 7 aa, synthetic construct
QGPNHSG

SEQ ID NO: 46921 - protein, 7 aa, synthetic construct
GMKHAGP

SEQ ID NO: 46922 - protein, 7 aa, synthetic construct
GKQQRDG

SEQ ID NO: 46923 - protein, 7 aa, synthetic construct
AGGKGNP

SEQ ID NO: 46924 - protein, 7 aa, synthetic construct
SRSTASS

SEQ ID NO: 46925 - protein, 7 aa, synthetic construct
IATLSRN

SEQ ID NO: 46926 - protein, 7 aa, synthetic construct
RNIGGTS

SEQ ID NO: 46927 - protein, 7 aa, synthetic construct
QNNKATS

SEQ ID NO: 46928 - protein, 7 aa, synthetic construct
QNSINQK

SEQ ID NO: 46929 - protein, 7 aa, synthetic construct
SSRVTAI

SEQ ID NO: 46930 - protein, 7 aa, synthetic construct
MNKNVSI

SEQ ID NO: 46931 - protein, 7 aa, synthetic construct
NNKEPSR

SEQ ID NO: 46932 - protein, 7 aa, synthetic construct
RTGANSA

SEQ ID NO: 46933 - protein, 7 aa, synthetic construct
EHSQTRG

SEQ ID NO: 46934 - protein, 7 aa, synthetic construct
MELNFKG

SEQ ID NO: 46935 - protein, 7 aa, synthetic construct
GQWKLTA

SEQ ID NO: 46936 - protein, 7 aa, synthetic construct
SEHRWPA

SEQ ID NO: 46937 - protein, 7 aa, synthetic construct
MQNTIHH

SEQ ID NO: 46938 - protein, 7 aa, synthetic construct
FRNKGME

SEQ ID NO: 46939 - protein, 7 aa, synthetic construct
NKYRMGD

SEQ ID NO: 46940 - protein, 7 aa, synthetic construct
IAKQHMN

SEQ ID NO: 46941 - protein, 7 aa, synthetic construct
SQAGSKS

SEQ ID NO: 46942 - protein, 7 aa, synthetic construct
RNNATTG

SEQ ID NO: 46943 - protein, 7 aa, synthetic construct
RQMGGNA

SEQ ID NO: 46944 - protein, 7 aa, synthetic construct
SRQQSQV

SEQ ID NO: 46945 - protein, 7 aa, synthetic construct
KRQSNDD

SEQ ID NO: 46946 - protein, 7 aa, synthetic construct
NGPTIRI

SEQ ID NO: 46947 - protein, 7 aa, synthetic construct
PNRPLPN

SEQ ID NO: 46948 - protein, 7 aa, synthetic construct
MAVNSNV

SEQ ID NO: 46949 - protein, 7 aa, synthetic construct
ALLAREA

SEQ ID NO: 46950 - protein, 7 aa, synthetic construct
YLDHTHA

SEQ ID NO: 46951 - protein, 7 aa, synthetic construct
SKQTGQG

SEQ ID NO: 46952 - protein, 7 aa, synthetic construct
RYATNSM

SEQ ID NO: 46953 - protein, 7 aa, synthetic construct
RTKNEYD

SEQ ID NO: 46954 - protein, 7 aa, synthetic construct
DMSQKTL

SEQ ID NO: 46955 - protein, 7 aa, synthetic construct
AQYKDRA

SEQ ID NO: 46956 - protein, 7 aa, synthetic construct
RNANGTG

SEQ ID NO: 46957 - protein, 7 aa, synthetic construct
QKPVNSD

SEQ ID NO: 46958 - protein, 7 aa, synthetic construct
SNFSPRV

SEQ ID NO: 46959 - protein, 7 aa, synthetic construct
LPKQLPQ

SEQ ID NO: 46960 - protein, 7 aa, synthetic construct
WRPEKPP

SEQ ID NO: 46961 - protein, 7 aa, synthetic construct
QKSIAGN

SEQ ID NO: 46962 - protein, 7 aa, synthetic construct
QTMRSVE

SEQ ID NO: 46963 - protein, 7 aa, synthetic construct
QPQNKFG

SEQ ID NO: 46964 - protein, 7 aa, synthetic construct
RPVNVGG

SEQ ID NO: 46965 - protein, 7 aa, synthetic construct
GPNAKNP

SEQ ID NO: 46966 - protein, 7 aa, synthetic construct
GNQGFKP

SEQ ID NO: 46967 - protein, 7 aa, synthetic construct
FNKGAQN

SEQ ID NO: 46968 - protein, 7 aa, synthetic construct
YATHKPT

SEQ ID NO: 46969 - protein, 7 aa, synthetic construct
TIPHTQG

SEQ ID NO: 46970 - protein, 7 aa, synthetic construct
ASVPSRA

SEQ ID NO: 46971 - protein, 7 aa, synthetic construct
MDGMNKP

SEQ ID NO: 46972 - protein, 7 aa, synthetic construct
PQAGKFG

SEQ ID NO: 46973 - protein, 7 aa, synthetic construct
YDRKMDI

SEQ ID NO: 46974 - protein, 7 aa, synthetic construct
MPSTKQG

SEQ ID NO: 46975 - protein, 7 aa, synthetic construct
QKAPRGD

SEQ ID NO: 46976 - protein, 7 aa, synthetic construct
WGGARVG

SEQ ID NO: 46977 - protein, 7 aa, synthetic construct
KSQMNGI

SEQ ID NO: 46978 - protein, 7 aa, synthetic construct
KRNTDQP

SEQ ID NO: 46979 - protein, 7 aa, synthetic construct
SFTVTHG

SEQ ID NO: 46980 - protein, 7 aa, synthetic construct
QTASGRP

SEQ ID NO: 46981 - protein, 7 aa, synthetic construct
SKGISTG

SEQ ID NO: 46982 - protein, 7 aa, synthetic construct
AAWGGHE

SEQ ID NO: 46983 - protein, 7 aa, synthetic construct
HHNKYQA

SEQ ID NO: 46984 - protein, 7 aa, synthetic construct
LAFRIKD

SEQ ID NO: 46985 - protein, 7 aa, synthetic construct
KKSVLME

SEQ ID NO: 46986 - protein, 7 aa, synthetic construct
NNRNNTG

SEQ ID NO: 46987 - protein, 7 aa, synthetic construct
ITNRTNS

SEQ ID NO: 46988 - protein, 7 aa, synthetic construct
NFPQSHA

SEQ ID NO: 46989 - protein, 7 aa, synthetic construct
LHTRESA

SEQ ID NO: 46990 - protein, 7 aa, synthetic construct
TGPQMKG

SEQ ID NO: 46991 - protein, 7 aa, synthetic construct
TGHKEWG

SEQ ID NO: 46992 - protein, 7 aa, synthetic construct
MHPAAIG

SEQ ID NO: 46993 - protein, 7 aa, synthetic construct
AMNNGKY

SEQ ID NO: 46994 - protein, 7 aa, synthetic construct
PIKGTSA

SEQ ID NO: 46995 - protein, 7 aa, synthetic construct
VLQLNGK

SEQ ID NO: 46996 - protein, 7 aa, synthetic construct
MGNLTTQ

SEQ ID NO: 46997 - protein, 7 aa, synthetic construct
QFGREPK

SEQ ID NO: 46998 - protein, 7 aa, synthetic construct
WPQIQKE

SEQ ID NO: 46999 - protein, 7 aa, synthetic construct
STKMAKD

SEQ ID NO: 47000 - protein, 7 aa, synthetic construct
RERPAGS

SEQ ID NO: 47001 - protein, 7 aa, synthetic construct
RHAGNQM

SEQ ID NO: 47002 - protein, 7 aa, synthetic construct
VLPFQNQ

SEQ ID NO: 47003 - protein, 7 aa, synthetic construct
GKDTGSM

SEQ ID NO: 47004 - protein, 7 aa, synthetic construct
KKSDIAM

SEQ ID NO: 47005 - protein, 7 aa, synthetic construct
MPKPTTG

SEQ ID NO: 47006 - protein, 7 aa, synthetic construct
AKGPVLA

SEQ ID NO: 47007 - protein, 7 aa, synthetic construct
KTPSQFG

SEQ ID NO: 47008 - protein, 7 aa, synthetic construct
KRQADDN

SEQ ID NO: 47009 - protein, 7 aa, synthetic construct
DQGIVRS

SEQ ID NO: 47010 - protein, 7 aa, synthetic construct
RQDSRTA

SEQ ID NO: 47011 - protein, 7 aa, synthetic construct
FRNNQMG

SEQ ID NO: 47012 - protein, 7 aa, synthetic construct
RVSVAHS

SEQ ID NO: 47013 - protein, 7 aa, synthetic construct
GKYVSHN

SEQ ID NO: 47014 - protein, 7 aa, synthetic construct
PSRNGMG

SEQ ID NO: 47015 - protein, 7 aa, synthetic construct
PQAKNTA

SEQ ID NO: 47016 - protein, 7 aa, synthetic construct
THVHGGF

SEQ ID NO: 47017 - protein, 7 aa, synthetic construct
RPGTIPA

SEQ ID NO: 47018 - protein, 7 aa, synthetic construct
SHIHNVP

SEQ ID NO: 47019 - protein, 7 aa, synthetic construct
HRERNPE

SEQ ID NO: 47020 - protein, 7 aa, synthetic construct
ATITSVP

SEQ ID NO: 47021 - protein, 7 aa, synthetic construct
MVRVSEA

SEQ ID NO: 47022 - protein, 7 aa, synthetic construct
QGGKASP

SEQ ID NO: 47023 - protein, 7 aa, synthetic construct
TMGVGGP

SEQ ID NO: 47024 - protein, 7 aa, synthetic construct
HNNILPI

SEQ ID NO: 47025 - protein, 7 aa, synthetic construct
GTKVQTS

SEQ ID NO: 47026 - protein, 7 aa, synthetic construct
QMTNTYL

SEQ ID NO: 47027 - protein, 7 aa, synthetic construct
SGRPIPM

SEQ ID NO: 47028 - protein, 7 aa, synthetic construct
IRPGQDK

SEQ ID NO: 47029 - protein, 7 aa, synthetic construct
TTGSRVG

SEQ ID NO: 47030 - protein, 7 aa, synthetic construct
VQKMQSN

SEQ ID NO: 47031 - protein, 7 aa, synthetic construct
KYNTASD

SEQ ID NO: 47032 - protein, 7 aa, synthetic construct
YPGGSSA

SEQ ID NO: 47033 - protein, 7 aa, synthetic construct
FGTNKNP

SEQ ID NO: 47034 - protein, 7 aa, synthetic construct
FQDYQKV

SEQ ID NO: 47035 - protein, 7 aa, synthetic construct
SRKTDQD

SEQ ID NO: 47036 - protein, 7 aa, synthetic construct
QSNRTDS

SEQ ID NO: 47037 - protein, 7 aa, synthetic construct
SWDIKIS

SEQ ID NO: 47038 - protein, 7 aa, synthetic construct
NKHRMED

SEQ ID NO: 47039 - protein, 7 aa, synthetic construct
YKQIDGQ

SEQ ID NO: 47040 - protein, 7 aa, synthetic construct
YKSQVVG

SEQ ID NO: 47041 - protein, 7 aa, synthetic construct
YMRQQNH

SEQ ID NO: 47042 - protein, 7 aa, synthetic construct
ASNRVID

SEQ ID NO: 47043 - protein, 7 aa, synthetic construct
SNPKGTM

SEQ ID NO: 47044 - protein, 7 aa, synthetic construct
HMGPPKA

SEQ ID NO: 47045 - protein, 7 aa, synthetic construct
NVKNSQS

SEQ ID NO: 47046 - protein, 7 aa, synthetic construct
VGQMRGS

SEQ ID NO: 47047 - protein, 7 aa, synthetic construct
TKSFGTA

SEQ ID NO: 47048 - protein, 7 aa, synthetic construct
ALSNSTH

SEQ ID NO: 47049 - protein, 7 aa, synthetic construct
QPGQKSA

SEQ ID NO: 47050 - protein, 7 aa, synthetic construct
FVGRVPN

SEQ ID NO: 47051 - protein, 7 aa, synthetic construct
GRSAHHP

SEQ ID NO: 47052 - protein, 7 aa, synthetic construct
LVKNNRE

SEQ ID NO: 47053 - protein, 7 aa, synthetic construct
VPKATSG

SEQ ID NO: 47054 - protein, 7 aa, synthetic construct
GSGKPHY

SEQ ID NO: 47055 - protein, 7 aa, synthetic construct
NGSNRTP

SEQ ID NO: 47056 - protein, 7 aa, synthetic construct
KFPTSNG

SEQ ID NO: 47057 - protein, 7 aa, synthetic construct
GVAPTSK

SEQ ID NO: 47058 - protein, 7 aa, synthetic construct
NSKNTQV

SEQ ID NO: 47059 - protein, 7 aa, synthetic construct
HNPKRME

SEQ ID NO: 47060 - protein, 7 aa, synthetic construct
FTSNIQH

SEQ ID NO: 47061 - protein, 7 aa, synthetic construct
NQFKQGD

SEQ ID NO: 47062 - protein, 7 aa, synthetic construct
YPKQPTN

SEQ ID NO: 47063 - protein, 7 aa, synthetic construct
TRMREPP

SEQ ID NO: 47064 - protein, 7 aa, synthetic construct
IGRQVSN

SEQ ID NO: 47065 - protein, 7 aa, synthetic construct
NPGMKAM

SEQ ID NO: 47066 - protein, 7 aa, synthetic construct
PKNYGTD

SEQ ID NO: 47067 - protein, 7 aa, synthetic construct
RQSNNIS

SEQ ID NO: 47068 - protein, 7 aa, synthetic construct
KMQASTN

SEQ ID NO: 47069 - protein, 7 aa, synthetic construct
MPSFQHN

SEQ ID NO: 47070 - protein, 7 aa, synthetic construct
QSRSGEM

SEQ ID NO: 47071 - protein, 7 aa, synthetic construct
YPGKQSP

SEQ ID NO: 47072 - protein, 7 aa, synthetic construct
QNKPQQG

SEQ ID NO: 47073 - protein, 7 aa, synthetic construct
EYGKGKP

SEQ ID NO: 47074 - protein, 7 aa, synthetic construct
QHRNHDS

SEQ ID NO: 47075 - protein, 7 aa, synthetic construct
LRHQQEQ

SEQ ID NO: 47076 - protein, 7 aa, synthetic construct
YKSINKD

SEQ ID NO: 47077 - protein, 7 aa, synthetic construct
MHDPKLA

SEQ ID NO: 47078 - protein, 7 aa, synthetic construct
TDAFSKP

SEQ ID NO: 47079 - protein, 7 aa, synthetic construct
YGYGTQK

SEQ ID NO: 47080 - protein, 7 aa, synthetic construct
NQTGKQA

SEQ ID NO: 47081 - protein, 7 aa, synthetic construct
NRMGSTG

SEQ ID NO: 47082 - protein, 7 aa, synthetic construct
VLDIKIG

SEQ ID NO: 47083 - protein, 7 aa, synthetic construct
TKPSVGA

SEQ ID NO: 47084 - protein, 7 aa, synthetic construct
KMQGITN

SEQ ID NO: 47085 - protein, 7 aa, synthetic construct
IHPPGHT

SEQ ID NO: 47086 - protein, 7 aa, synthetic construct
GKQPNAG

SEQ ID NO: 47087 - protein, 7 aa, synthetic construct
IMNERFG

SEQ ID NO: 47088 - protein, 7 aa, synthetic construct
NHPAVPR

SEQ ID NO: 47089 - protein, 7 aa, synthetic construct
MHQLGGH

SEQ ID NO: 47090 - protein, 7 aa, synthetic construct
IKVFHAE

SEQ ID NO: 47091 - protein, 7 aa, synthetic construct
HMTRQEP

SEQ ID NO: 47092 - protein, 7 aa, synthetic construct
ENRYKVE

SEQ ID NO: 47093 - protein, 7 aa, synthetic construct
KSQQSPN

SEQ ID NO: 47094 - protein, 7 aa, synthetic construct
RHPVVSP

SEQ ID NO: 47095 - protein, 7 aa, synthetic construct
HMRELNM

SEQ ID NO: 47096 - protein, 7 aa, synthetic construct
GNVQHSA

SEQ ID NO: 47097 - protein, 7 aa, synthetic construct
KDRAGTA

SEQ ID NO: 47098 - protein, 7 aa, synthetic construct
FHKQADG

SEQ ID NO: 47099 - protein, 7 aa, synthetic construct
GKSHIGA

SEQ ID NO: 47100 - protein, 7 aa, synthetic construct
VKPSMAG

SEQ ID NO: 47101 - protein, 7 aa, synthetic construct
KTPAKFD

SEQ ID NO: 47102 - protein, 7 aa, synthetic construct
MQSGHKF

SEQ ID NO: 47103 - protein, 7 aa, synthetic construct
TSRQDAY

SEQ ID NO: 47104 - protein, 7 aa, synthetic construct
VAKTNSS

SEQ ID NO: 47105 - protein, 7 aa, synthetic construct
ATRQTNP

SEQ ID NO: 47106 - protein, 7 aa, synthetic construct
RPSMAQA

SEQ ID NO: 47107 - protein, 7 aa, synthetic construct
RSTTTMP

SEQ ID NO: 47108 - protein, 7 aa, synthetic construct
AMSYNAS

SEQ ID NO: 47109 - protein, 7 aa, synthetic construct
NHKYESP

SEQ ID NO: 47110 - protein, 7 aa, synthetic construct
GRISQDN

SEQ ID NO: 47111 - protein, 7 aa, synthetic construct
WNGVAKM

SEQ ID NO: 47112 - protein, 7 aa, synthetic construct
NLAKQPS

SEQ ID NO: 47113 - protein, 7 aa, synthetic construct
NPKNAAA

SEQ ID NO: 47114 - protein, 7 aa, synthetic construct
MRDHQEF

SEQ ID NO: 47115 - protein, 7 aa, synthetic construct
SKPVMTG

SEQ ID NO: 47116 - protein, 7 aa, synthetic construct
NQPMSVS

SEQ ID NO: 47117 - protein, 7 aa, synthetic construct
MYHREDK

SEQ ID NO: 47118 - protein, 7 aa, synthetic construct
GPNSVQA

SEQ ID NO: 47119 - protein, 7 aa, synthetic construct
TPRQVQG

SEQ ID NO: 47120 - protein, 7 aa, synthetic construct
VNSGTKG

SEQ ID NO: 47121 - protein, 7 aa, synthetic construct
FHSRDPP

SEQ ID NO: 47122 - protein, 7 aa, synthetic construct
PRPTNGN

SEQ ID NO: 47123 - protein, 7 aa, synthetic construct
KVSNPTQ

SEQ ID NO: 47124 - protein, 7 aa, synthetic construct
HANLKSP

SEQ ID NO: 47125 - protein, 7 aa, synthetic construct
RLHPKFD

SEQ ID NO: 47126 - protein, 7 aa, synthetic construct
SPYKNEV

SEQ ID NO: 47127 - protein, 7 aa, synthetic construct
IKIKEES

SEQ ID NO: 47128 - protein, 7 aa, synthetic construct
HHEPKQG

SEQ ID NO: 47129 - protein, 7 aa, synthetic construct
NGQKNSA

SEQ ID NO: 47130 - protein, 7 aa, synthetic construct
TGKSQGT

SEQ ID NO: 47131 - protein, 7 aa, synthetic construct
AQNARGA

SEQ ID NO: 47132 - protein, 7 aa, synthetic construct
NMKQQGA

SEQ ID NO: 47133 - protein, 7 aa, synthetic construct
NKHTQNG

SEQ ID NO: 47134 - protein, 7 aa, synthetic construct
FKNPTTS

SEQ ID NO: 47135 - protein, 7 aa, synthetic construct
TKKDMNA

SEQ ID NO: 47136 - protein, 7 aa, synthetic construct
SGKTSGA

SEQ ID NO: 47137 - protein, 7 aa, synthetic construct
KNSTNPF

SEQ ID NO: 47138 - protein, 7 aa, synthetic construct
MKQVVNE

SEQ ID NO: 47139 - protein, 7 aa, synthetic construct
VSKPLGM

SEQ ID NO: 47140 - protein, 7 aa, synthetic construct
SKSVAYA

SEQ ID NO: 47141 - protein, 7 aa, synthetic construct
FSSPSSP

SEQ ID NO: 47142 - protein, 7 aa, synthetic construct
KMNSTQA

SEQ ID NO: 47143 - protein, 7 aa, synthetic construct
LTGNSRG

SEQ ID NO: 47144 - protein, 7 aa, synthetic construct
MQKDHTG

SEQ ID NO: 47145 - protein, 7 aa, synthetic construct
HVNNGHG

SEQ ID NO: 47146 - protein, 7 aa, synthetic construct
QMGSKQV

SEQ ID NO: 47147 - protein, 7 aa, synthetic construct
HGLQRLD

SEQ ID NO: 47148 - protein, 7 aa, synthetic construct
DLDFRTP

SEQ ID NO: 47149 - protein, 7 aa, synthetic construct
HKQHVEA

SEQ ID NO: 47150 - protein, 7 aa, synthetic construct
RSQASLP

SEQ ID NO: 47151 - protein, 7 aa, synthetic construct
KNHSMPL

SEQ ID NO: 47152 - protein, 7 aa, synthetic construct
LPRNHVG

SEQ ID NO: 47153 - protein, 7 aa, synthetic construct
QAGVHPS

SEQ ID NO: 47154 - protein, 7 aa, synthetic construct
RKDSSAM

SEQ ID NO: 47155 - protein, 7 aa, synthetic construct
QKTLAPN

SEQ ID NO: 47156 - protein, 7 aa, synthetic construct
NVGGRQP

SEQ ID NO: 47157 - protein, 7 aa, synthetic construct
SAYGGTV

SEQ ID NO: 47158 - protein, 7 aa, synthetic construct
GVTQRSG

SEQ ID NO: 47159 - protein, 7 aa, synthetic construct
SRLANGG

SEQ ID NO: 47160 - protein, 7 aa, synthetic construct
QKDKPYA

SEQ ID NO: 47161 - protein, 7 aa, synthetic construct
HGSYQSS

SEQ ID NO: 47162 - protein, 7 aa, synthetic construct
NRGKDGI

SEQ ID NO: 47163 - protein, 7 aa, synthetic construct
DIKSNRA

SEQ ID NO: 47164 - protein, 7 aa, synthetic construct
KTASVKE

SEQ ID NO: 47165 - protein, 7 aa, synthetic construct
DRYRTAD

SEQ ID NO: 47166 - protein, 7 aa, synthetic construct
RPASAQQ

SEQ ID NO: 47167 - protein, 7 aa, synthetic construct
KPGNGAF

SEQ ID NO: 47168 - protein, 7 aa, synthetic construct
YGMQAIQ

SEQ ID NO: 47169 - protein, 7 aa, synthetic construct
IDHKGGV

SEQ ID NO: 47170 - protein, 7 aa, synthetic construct
RHIGPNS

SEQ ID NO: 47171 - protein, 7 aa, synthetic construct
VMDIGRN

SEQ ID NO: 47172 - protein, 7 aa, synthetic construct
PNRMTQA

SEQ ID NO: 47173 - protein, 7 aa, synthetic construct
QVKGRDA

SEQ ID NO: 47174 - protein, 7 aa, synthetic construct
INAHLSN

SEQ ID NO: 47175 - protein, 7 aa, synthetic construct
NYSKLQA

SEQ ID NO: 47176 - protein, 7 aa, synthetic construct
YGIHGIS

SEQ ID NO: 47177 - protein, 7 aa, synthetic construct
VHRLRPD

SEQ ID NO: 47178 - protein, 7 aa, synthetic construct
TSANRTP

SEQ ID NO: 47179 - protein, 7 aa, synthetic construct
MNKGSSN

SEQ ID NO: 47180 - protein, 7 aa, synthetic construct
YPANQAR

SEQ ID NO: 47181 - protein, 7 aa, synthetic construct
HGANHKD

SEQ ID NO: 47182 - protein, 7 aa, synthetic construct
AVKGGTP

SEQ ID NO: 47183 - protein, 7 aa, synthetic construct
TPIRDTG

SEQ ID NO: 47184 - protein, 7 aa, synthetic construct
YQKKEWA

SEQ ID NO: 47185 - protein, 7 aa, synthetic construct
KEKQGFV

SEQ ID NO: 47186 - protein, 7 aa, synthetic construct
NGGRTGT

SEQ ID NO: 47187 - protein, 7 aa, synthetic construct
KQINAIP

SEQ ID NO: 47188 - protein, 7 aa, synthetic construct
NAQMKSP

SEQ ID NO: 47189 - protein, 7 aa, synthetic construct
RPGVSGP

SEQ ID NO: 47190 - protein, 7 aa, synthetic construct
STLIPRP

SEQ ID NO: 47191 - protein, 7 aa, synthetic construct
RPNHGEG

SEQ ID NO: 47192 - protein, 7 aa, synthetic construct
IDKFAPS

SEQ ID NO: 47193 - protein, 7 aa, synthetic construct
SAHGSSP

SEQ ID NO: 47194 - protein, 7 aa, synthetic construct
PRNGSQA

SEQ ID NO: 47195 - protein, 7 aa, synthetic construct
PNTRSGP

SEQ ID NO: 47196 - protein, 7 aa, synthetic construct
KHEPGWS

SEQ ID NO: 47197 - protein, 7 aa, synthetic construct
RSNPAQA

SEQ ID NO: 47198 - protein, 7 aa, synthetic construct
GQQKANA

SEQ ID NO: 47199 - protein, 7 aa, synthetic construct
ELQMPRK

SEQ ID NO: 47200 - protein, 7 aa, synthetic construct
YTGLTKP

SEQ ID NO: 47201 - protein, 7 aa, synthetic construct
YKGGSQG

SEQ ID NO: 47202 - protein, 7 aa, synthetic construct
QSIKAAG

SEQ ID NO: 47203 - protein, 7 aa, synthetic construct
PKSQTVS

SEQ ID NO: 47204 - protein, 7 aa, synthetic construct
HAVQISA

SEQ ID NO: 47205 - protein, 7 aa, synthetic construct
HPGKEFS

SEQ ID NO: 47206 - protein, 7 aa, synthetic construct
MPKNNQS

SEQ ID NO: 47207 - protein, 7 aa, synthetic construct
YKQVSKE

SEQ ID NO: 47208 - protein, 7 aa, synthetic construct
RMEQKSD

SEQ ID NO: 47209 - protein, 7 aa, synthetic construct
NSRMVQG

SEQ ID NO: 47210 - protein, 7 aa, synthetic construct
NDLKWGA

SEQ ID NO: 47211 - protein, 7 aa, synthetic construct
YARGILS

SEQ ID NO: 47212 - protein, 7 aa, synthetic construct
IRGEKIV

SEQ ID NO: 47213 - protein, 7 aa, synthetic construct
KQAGPSM

SEQ ID NO: 47214 - protein, 7 aa, synthetic construct
PKTVSTG

SEQ ID NO: 47215 - protein, 7 aa, synthetic construct
YRDKGTN

SEQ ID NO: 47216 - protein, 7 aa, synthetic construct
HAKINVT

SEQ ID NO: 47217 - protein, 7 aa, synthetic construct
MNQSWPS

SEQ ID NO: 47218 - protein, 7 aa, synthetic construct
GAKIPAP

SEQ ID NO: 47219 - protein, 7 aa, synthetic construct
SKNQQQS

SEQ ID NO: 47220 - protein, 7 aa, synthetic construct
NVRVKDD

SEQ ID NO: 47221 - protein, 7 aa, synthetic construct
PWPEKRE

SEQ ID NO: 47222 - protein, 7 aa, synthetic construct
GKVNQGG

SEQ ID NO: 47223 - protein, 7 aa, synthetic construct
KPTDNRP

SEQ ID NO: 47224 - protein, 7 aa, synthetic construct
GKPPSGG

SEQ ID NO: 47225 - protein, 7 aa, synthetic construct
SKSFTQG

SEQ ID NO: 47226 - protein, 7 aa, synthetic construct
GRESYRD

SEQ ID NO: 47227 - protein, 7 aa, synthetic construct
KPQQQKV

SEQ ID NO: 47228 - protein, 7 aa, synthetic construct
KGIQGLS

SEQ ID NO: 47229 - protein, 7 aa, synthetic construct
KTMGGVS

SEQ ID NO: 47230 - protein, 7 aa, synthetic construct
YQAKGSA

SEQ ID NO: 47231 - protein, 7 aa, synthetic construct
GTYPTPV

SEQ ID NO: 47232 - protein, 7 aa, synthetic construct
YGQGRTQ

SEQ ID NO: 47233 - protein, 7 aa, synthetic construct
KYTSQQG

SEQ ID NO: 47234 - protein, 7 aa, synthetic construct
NKQNVSG

SEQ ID NO: 47235 - protein, 7 aa, synthetic construct
WGIIAKN

SEQ ID NO: 47236 - protein, 7 aa, synthetic construct
TAHTKYN

SEQ ID NO: 47237 - protein, 7 aa, synthetic construct
TRGANNV

SEQ ID NO: 47238 - protein, 7 aa, synthetic construct
ITPGPRA

SEQ ID NO: 47239 - protein, 7 aa, synthetic construct
VPQTKQG

SEQ ID NO: 47240 - protein, 7 aa, synthetic construct
MRSPTGA

SEQ ID NO: 47241 - protein, 7 aa, synthetic construct
AHKQGPI

SEQ ID NO: 47242 - protein, 7 aa, synthetic construct
RNSNGTG

SEQ ID NO: 47243 - protein, 7 aa, synthetic construct
RVSNVSA

SEQ ID NO: 47244 - protein, 7 aa, synthetic construct
SMIGSQP

SEQ ID NO: 47245 - protein, 7 aa, synthetic construct
GNQGKFL

SEQ ID NO: 47246 - protein, 7 aa, synthetic construct
NHNHGIA

SEQ ID NO: 47247 - protein, 7 aa, synthetic construct
PYKAVHV

SEQ ID NO: 47248 - protein, 7 aa, synthetic construct
QHNQMAG

SEQ ID NO: 47249 - protein, 7 aa, synthetic construct
ISHNGKA

SEQ ID NO: 47250 - protein, 7 aa, synthetic construct
RTNAATP

SEQ ID NO: 47251 - protein, 7 aa, synthetic construct
ERGYAED

SEQ ID NO: 47252 - protein, 7 aa, synthetic construct
HRDAAKN

SEQ ID NO: 47253 - protein, 7 aa, synthetic construct
QRMPGPH

SEQ ID NO: 47254 - protein, 7 aa, synthetic construct
IKYKEEV

SEQ ID NO: 47255 - protein, 7 aa, synthetic construct
TMSRTKD

SEQ ID NO: 47256 - protein, 7 aa, synthetic construct
TQRTVAG

SEQ ID NO: 47257 - protein, 7 aa, synthetic construct
ANGKTSV

SEQ ID NO: 47258 - protein, 7 aa, synthetic construct
NPMTHGA

SEQ ID NO: 47259 - protein, 7 aa, synthetic construct
GNHAQPV

SEQ ID NO: 47260 - protein, 7 aa, synthetic construct
GKGTFSA

SEQ ID NO: 47261 - protein, 7 aa, synthetic construct
QQKTSHA

SEQ ID NO: 47262 - protein, 7 aa, synthetic construct
HTITKNA

SEQ ID NO: 47263 - protein, 7 aa, synthetic construct
TRSNSTG

SEQ ID NO: 47264 - protein, 7 aa, synthetic construct
KNSNYGG

SEQ ID NO: 47265 - protein, 7 aa, synthetic construct
TGAGKMG

SEQ ID NO: 47266 - protein, 7 aa, synthetic construct
EGKGAMF

SEQ ID NO: 47267 - protein, 7 aa, synthetic construct
TKQHNHM

SEQ ID NO: 47268 - protein, 7 aa, synthetic construct
MNKKPEY

SEQ ID NO: 47269 - protein, 7 aa, synthetic construct
KTVTAGG

SEQ ID NO: 47270 - protein, 7 aa, synthetic construct
MGMSAKP

SEQ ID NO: 47271 - protein, 7 aa, synthetic construct
VAVGHRE

SEQ ID NO: 47272 - protein, 7 aa, synthetic construct
GNAHGNA

SEQ ID NO: 47273 - protein, 7 aa, synthetic construct
TMSSGKG

SEQ ID NO: 47274 - protein, 7 aa, synthetic construct
GGYSGRE

SEQ ID NO: 47275 - protein, 7 aa, synthetic construct
EAIRNHG

SEQ ID NO: 47276 - protein, 7 aa, synthetic construct
KTGTGKE

SEQ ID NO: 47277 - protein, 7 aa, synthetic construct
QPVNKFA

SEQ ID NO: 47278 - protein, 7 aa, synthetic construct
QPKTGYG

SEQ ID NO: 47279 - protein, 7 aa, synthetic construct
IKMKYSE

SEQ ID NO: 47280 - protein, 7 aa, synthetic construct
YAEHNKG

SEQ ID NO: 47281 - protein, 7 aa, synthetic construct
APNSIRG

SEQ ID NO: 47282 - protein, 7 aa, synthetic construct
MPPWQKD

SEQ ID NO: 47283 - protein, 7 aa, synthetic construct
TSQVNRG

SEQ ID NO: 47284 - protein, 7 aa, synthetic construct
YQKTSSY

SEQ ID NO: 47285 - protein, 7 aa, synthetic construct
MKPSGNG

SEQ ID NO: 47286 - protein, 7 aa, synthetic construct
KVPNSQA

SEQ ID NO: 47287 - protein, 7 aa, synthetic construct
KYKEVNG

SEQ ID NO: 47288 - protein, 7 aa, synthetic construct
KNGQSTS

SEQ ID NO: 47289 - protein, 7 aa, synthetic construct
MKLGNME

SEQ ID NO: 47290 - protein, 7 aa, synthetic construct
IWKQEQK

SEQ ID NO: 47291 - protein, 7 aa, synthetic construct
FGKNPLE

SEQ ID NO: 47292 - protein, 7 aa, synthetic construct
WKTHTQM

SEQ ID NO: 47293 - protein, 7 aa, synthetic construct
TSSTKGG

SEQ ID NO: 47294 - protein, 7 aa, synthetic construct
VDKVRGV

SEQ ID NO: 47295 - protein, 7 aa, synthetic construct
QHYKQVE

SEQ ID NO: 47296 - protein, 7 aa, synthetic construct
YMKGQSP

SEQ ID NO: 47297 - protein, 7 aa, synthetic construct
MKPHLMP

SEQ ID NO: 47298 - protein, 7 aa, synthetic construct
HNKVDYL

SEQ ID NO: 47299 - protein, 7 aa, synthetic construct
FETPRGT

SEQ ID NO: 47300 - protein, 7 aa, synthetic construct
FHPRGVG

SEQ ID NO: 47301 - protein, 7 aa, synthetic construct
TPHLKEY

SEQ ID NO: 47302 - protein, 7 aa, synthetic construct
QKTSSGM

SEQ ID NO: 47303 - protein, 7 aa, synthetic construct
NSNKPNS

SEQ ID NO: 47304 - protein, 7 aa, synthetic construct
KSNVGAA

SEQ ID NO: 47305 - protein, 7 aa, synthetic construct
SVMKTGG

SEQ ID NO: 47306 - protein, 7 aa, synthetic construct
MAGILQA

SEQ ID NO: 47307 - protein, 7 aa, synthetic construct
LKDTTRG

SEQ ID NO: 47308 - protein, 7 aa, synthetic construct
QKSGNQG

SEQ ID NO: 47309 - protein, 7 aa, synthetic construct
SWHGMEI

SEQ ID NO: 47310 - protein, 7 aa, synthetic construct
NKPTVQA

SEQ ID NO: 47311 - protein, 7 aa, synthetic construct
GTWKQTE

SEQ ID NO: 47312 - protein, 7 aa, synthetic construct
WGKTRDD

SEQ ID NO: 47313 - protein, 7 aa, synthetic construct
GPRQGVG

SEQ ID NO: 47314 - protein, 7 aa, synthetic construct
TSEDRKR

SEQ ID NO: 47315 - protein, 7 aa, synthetic construct
YKGSLPP

SEQ ID NO: 47316 - protein, 7 aa, synthetic construct
TQRSKDP

SEQ ID NO: 47317 - protein, 7 aa, synthetic construct
SKMTMKE

SEQ ID NO: 47318 - protein, 7 aa, synthetic construct
SNRQLTA

SEQ ID NO: 47319 - protein, 7 aa, synthetic construct
APKKEYS

SEQ ID NO: 47320 - protein, 7 aa, synthetic construct
WKTGTPT

SEQ ID NO: 47321 - protein, 7 aa, synthetic construct
TRVNTQA

SEQ ID NO: 47322 - protein, 7 aa, synthetic construct
QPKYQGG

SEQ ID NO: 47323 - protein, 7 aa, synthetic construct
QPTGRTP

SEQ ID NO: 47324 - protein, 7 aa, synthetic construct
NHIVIHG

SEQ ID NO: 47325 - protein, 7 aa, synthetic construct
AMPYQTE

SEQ ID NO: 47326 - protein, 7 aa, synthetic construct
RPTNGAN

SEQ ID NO: 47327 - protein, 7 aa, synthetic construct
WANKSVA

SEQ ID NO: 47328 - protein, 7 aa, synthetic construct
WQNGYSN

SEQ ID NO: 47329 - protein, 7 aa, synthetic construct
LHQHLKS

SEQ ID NO: 47330 - protein, 7 aa, synthetic construct
QAEKNPY

SEQ ID NO: 47331 - protein, 7 aa, synthetic construct
NDKKGGM

SEQ ID NO: 47332 - protein, 7 aa, synthetic construct
HIKAVAQ

SEQ ID NO: 47333 - protein, 7 aa, synthetic construct
KNPSTMS

SEQ ID NO: 47334 - protein, 7 aa, synthetic construct
VEGRSSQ

SEQ ID NO: 47335 - protein, 7 aa, synthetic construct
SDNSHKG

SEQ ID NO: 47336 - protein, 7 aa, synthetic construct
MGHDVLS

SEQ ID NO: 47337 - protein, 7 aa, synthetic construct
PNRNAGA

SEQ ID NO: 47338 - protein, 7 aa, synthetic construct
FNKHEQY

SEQ ID NO: 47339 - protein, 7 aa, synthetic construct
TGAGRTA

SEQ ID NO: 47340 - protein, 7 aa, synthetic construct
IGQWPQG

SEQ ID NO: 47341 - protein, 7 aa, synthetic construct
NPTSHER

SEQ ID NO: 47342 - protein, 7 aa, synthetic construct
KGIQQQT

SEQ ID NO: 47343 - protein, 7 aa, synthetic construct
RQEITKG

SEQ ID NO: 47344 - protein, 7 aa, synthetic construct
FSGAKSG

SEQ ID NO: 47345 - protein, 7 aa, synthetic construct
HMREKSA

SEQ ID NO: 47346 - protein, 7 aa, synthetic construct
RKSMNGE

SEQ ID NO: 47347 - protein, 7 aa, synthetic construct
NHKPMIS

SEQ ID NO: 47348 - protein, 7 aa, synthetic construct
IGYPMGG

SEQ ID NO: 47349 - protein, 7 aa, synthetic construct
YMNGIVN

SEQ ID NO: 47350 - protein, 7 aa, synthetic construct
PNKGAGA

SEQ ID NO: 47351 - protein, 7 aa, synthetic construct
YRRDDRD

SEQ ID NO: 47352 - protein, 7 aa, synthetic construct
AHARSDP

SEQ ID NO: 47353 - protein, 7 aa, synthetic construct
RSSTSMP

SEQ ID NO: 47354 - protein, 7 aa, synthetic construct
SSAYKGE

SEQ ID NO: 47355 - protein, 7 aa, synthetic construct
QSQKPGA

SEQ ID NO: 47356 - protein, 7 aa, synthetic construct
FKAPQKD

SEQ ID NO: 47357 - protein, 7 aa, synthetic construct
QRRDPDS

SEQ ID NO: 47358 - protein, 7 aa, synthetic construct
VPMANSP

SEQ ID NO: 47359 - protein, 7 aa, synthetic construct
GQKQVSG

SEQ ID NO: 47360 - protein, 7 aa, synthetic construct
DSRISYA

SEQ ID NO: 47361 - protein, 7 aa, synthetic construct
LVSGSSL

SEQ ID NO: 47362 - protein, 7 aa, synthetic construct
KYGKEFI

SEQ ID NO: 47363 - protein, 7 aa, synthetic construct
VNDRTRI

SEQ ID NO: 47364 - protein, 7 aa, synthetic construct
RNKHESG

SEQ ID NO: 47365 - protein, 7 aa, synthetic construct
KQTSTTA

SEQ ID NO: 47366 - protein, 7 aa, synthetic construct
HKSMTTD

SEQ ID NO: 47367 - protein, 7 aa, synthetic construct
NQARTAP

SEQ ID NO: 47368 - protein, 7 aa, synthetic construct
QSKLGQG

SEQ ID NO: 47369 - protein, 7 aa, synthetic construct
SFPKNEA

SEQ ID NO: 47370 - protein, 7 aa, synthetic construct
NMKASKD

SEQ ID NO: 47371 - protein, 7 aa, synthetic construct
RSNVPFN

SEQ ID NO: 47372 - protein, 7 aa, synthetic construct
LMDRMRS

SEQ ID NO: 47373 - protein, 7 aa, synthetic construct
VHSSIKG

SEQ ID NO: 47374 - protein, 7 aa, synthetic construct
LEKGRPY

SEQ ID NO: 47375 - protein, 7 aa, synthetic construct
TRTNANP

SEQ ID NO: 47376 - protein, 7 aa, synthetic construct
RRDLNTV

SEQ ID NO: 47377 - protein, 7 aa, synthetic construct
QARGFGP

SEQ ID NO: 47378 - protein, 7 aa, synthetic construct
VRAQGVP

SEQ ID NO: 47379 - protein, 7 aa, synthetic construct
VARAGAP

SEQ ID NO: 47380 - protein, 7 aa, synthetic construct
VYDRGKN

SEQ ID NO: 47381 - protein, 7 aa, synthetic construct
FSKTMTS

SEQ ID NO: 47382 - protein, 7 aa, synthetic construct
AGYNTKP

SEQ ID NO: 47383 - protein, 7 aa, synthetic construct
YGRIDVG

SEQ ID NO: 47384 - protein, 7 aa, synthetic construct
LPMRADA

SEQ ID NO: 47385 - protein, 7 aa, synthetic construct
RYANVPV

SEQ ID NO: 47386 - protein, 7 aa, synthetic construct
ISERLYG

SEQ ID NO: 47387 - protein, 7 aa, synthetic construct
LPQRGHT

SEQ ID NO: 47388 - protein, 7 aa, synthetic construct
AYKTSTS

SEQ ID NO: 47389 - protein, 7 aa, synthetic construct
HSRGIDM

SEQ ID NO: 47390 - protein, 7 aa, synthetic construct
YFDQIVS

SEQ ID NO: 47391 - protein, 7 aa, synthetic construct
FKSPNKE

SEQ ID NO: 47392 - protein, 7 aa, synthetic construct
STRDGKY

SEQ ID NO: 47393 - protein, 7 aa, synthetic construct
MKNGKME

SEQ ID NO: 47394 - protein, 7 aa, synthetic construct
KGMHGIA

SEQ ID NO: 47395 - protein, 7 aa, synthetic construct
NEKWVKE

SEQ ID NO: 47396 - protein, 7 aa, synthetic construct
LPAGQAP

SEQ ID NO: 47397 - protein, 7 aa, synthetic construct
IGKTAGN

SEQ ID NO: 47398 - protein, 7 aa, synthetic construct
HKANTYA

SEQ ID NO: 47399 - protein, 7 aa, synthetic construct
SRDIVHN

SEQ ID NO: 47400 - protein, 7 aa, synthetic construct
FDKSRVG

SEQ ID NO: 47401 - protein, 7 aa, synthetic construct
KSNSVAT

SEQ ID NO: 47402 - protein, 7 aa, synthetic construct
TYNKGTG

SEQ ID NO: 47403 - protein, 7 aa, synthetic construct
MGAGRNG

SEQ ID NO: 47404 - protein, 7 aa, synthetic construct
HFSNGRT

SEQ ID NO: 47405 - protein, 7 aa, synthetic construct
QLKVLQA

SEQ ID NO: 47406 - protein, 7 aa, synthetic construct
SATGNVR

SEQ ID NO: 47407 - protein, 7 aa, synthetic construct
FPRDTTS

SEQ ID NO: 47408 - protein, 7 aa, synthetic construct
RATSGMA

SEQ ID NO: 47409 - protein, 7 aa, synthetic construct
QRQPPNV

SEQ ID NO: 47410 - protein, 7 aa, synthetic construct
PKRLDLM

SEQ ID NO: 47411 - protein, 7 aa, synthetic construct
TRGSEQY

SEQ ID NO: 47412 - protein, 7 aa, synthetic construct
KSNMATG

SEQ ID NO: 47413 - protein, 7 aa, synthetic construct
DLHKVHT

SEQ ID NO: 47414 - protein, 7 aa, synthetic construct
MTSGTKG

SEQ ID NO: 47415 - protein, 7 aa, synthetic construct
NPNGGKG

SEQ ID NO: 47416 - protein, 7 aa, synthetic construct
RTNGQNG

SEQ ID NO: 47417 - protein, 7 aa, synthetic construct
DGTRRMA

SEQ ID NO: 47418 - protein, 7 aa, synthetic construct
TDIKART

SEQ ID NO: 47419 - protein, 7 aa, synthetic construct
FKGSLSL

SEQ ID NO: 47420 - protein, 7 aa, synthetic construct
ALGVAAA

SEQ ID NO: 47421 - protein, 7 aa, synthetic construct
SGKAMTG

SEQ ID NO: 47422 - protein, 7 aa, synthetic construct
KTMTQGM

SEQ ID NO: 47423 - protein, 7 aa, synthetic construct
VKNASMA

SEQ ID NO: 47424 - protein, 7 aa, synthetic construct
TKTGSTI

SEQ ID NO: 47425 - protein, 7 aa, synthetic construct
YSPNAKP

SEQ ID NO: 47426 - protein, 7 aa, synthetic construct
VSKGPWS

SEQ ID NO: 47427 - protein, 7 aa, synthetic construct
TSPNRHA

SEQ ID NO: 47428 - protein, 7 aa, synthetic construct
IDDKRKG

SEQ ID NO: 47429 - protein, 7 aa, synthetic construct
QLKPHQE

SEQ ID NO: 47430 - protein, 7 aa, synthetic construct
HQGGQTS

SEQ ID NO: 47431 - protein, 7 aa, synthetic construct
TKTYPME

SEQ ID NO: 47432 - protein, 7 aa, synthetic construct
HRGLMPQ

SEQ ID NO: 47433 - protein, 7 aa, synthetic construct
IAMGRVS

SEQ ID NO: 47434 - protein, 7 aa, synthetic construct
RVQQGGL

SEQ ID NO: 47435 - protein, 7 aa, synthetic construct
ITTKSML

SEQ ID NO: 47436 - protein, 7 aa, synthetic construct
GHKWVKE

SEQ ID NO: 47437 - protein, 7 aa, synthetic construct
RNAMTEG

SEQ ID NO: 47438 - protein, 7 aa, synthetic construct
KSIHVDV

SEQ ID NO: 47439 - protein, 7 aa, synthetic construct
GLGPYKV

SEQ ID NO: 47440 - protein, 7 aa, synthetic construct
EARGIRD

SEQ ID NO: 47441 - protein, 7 aa, synthetic construct
IPRDGMV

SEQ ID NO: 47442 - protein, 7 aa, synthetic construct
GGNNKFA

SEQ ID NO: 47443 - protein, 7 aa, synthetic construct
IGNWVNE

SEQ ID NO: 47444 - protein, 7 aa, synthetic construct
RGKKDED

SEQ ID NO: 47445 - protein, 7 aa, synthetic construct
AWKDYPP

SEQ ID NO: 47446 - protein, 7 aa, synthetic construct
GQHYRME

SEQ ID NO: 47447 - protein, 7 aa, synthetic construct
TKGSSQT

SEQ ID NO: 47448 - protein, 7 aa, synthetic construct
HKPQYAS

SEQ ID NO: 47449 - protein, 7 aa, synthetic construct
TGGIAKQ

SEQ ID NO: 47450 - protein, 7 aa, synthetic construct
KPTPSAS

SEQ ID NO: 47451 - protein, 7 aa, synthetic construct
RQTSMSP

SEQ ID NO: 47452 - protein, 7 aa, synthetic construct
FRNMSVE

SEQ ID NO: 47453 - protein, 7 aa, synthetic construct
PSRGYME

SEQ ID NO: 47454 - protein, 7 aa, synthetic construct
NGNFRAP

SEQ ID NO: 47455 - protein, 7 aa, synthetic construct
FQKGSAY

SEQ ID NO: 47456 - protein, 7 aa, synthetic construct
RAASQNM

SEQ ID NO: 47457 - protein, 7 aa, synthetic construct
YKQGDKT

SEQ ID NO: 47458 - protein, 7 aa, synthetic construct
AKSYAKD

SEQ ID NO: 47459 - protein, 7 aa, synthetic construct
NKPHVGN

SEQ ID NO: 47460 - protein, 7 aa, synthetic construct
AARIAHS

SEQ ID NO: 47461 - protein, 7 aa, synthetic construct
KNHQSIS

SEQ ID NO: 47462 - protein, 7 aa, synthetic construct
KMSQPDL

SEQ ID NO: 47463 - protein, 7 aa, synthetic construct
FQKAASG

SEQ ID NO: 47464 - protein, 7 aa, synthetic construct
VFQKAVD

SEQ ID NO: 47465 - protein, 7 aa, synthetic construct
RSVHMHG

SEQ ID NO: 47466 - protein, 7 aa, synthetic construct
KQISNRE

SEQ ID NO: 47467 - protein, 7 aa, synthetic construct
AFGARGG

SEQ ID NO: 47468 - protein, 7 aa, synthetic construct
HSHMQKG

SEQ ID NO: 47469 - protein, 7 aa, synthetic construct
THPIEFS

SEQ ID NO: 47470 - protein, 7 aa, synthetic construct
LGGRVDH

SEQ ID NO: 47471 - protein, 7 aa, synthetic construct
GGKSTSS

SEQ ID NO: 47472 - protein, 7 aa, synthetic construct
INKEYLR

SEQ ID NO: 47473 - protein, 7 aa, synthetic construct
QRQGGSA

SEQ ID NO: 47474 - protein, 7 aa, synthetic construct
SKMNNTM

SEQ ID NO: 47475 - protein, 7 aa, synthetic construct
MYSRQGG

SEQ ID NO: 47476 - protein, 7 aa, synthetic construct
RKIEISN

SEQ ID NO: 47477 - protein, 7 aa, synthetic construct
TRPGTGN

SEQ ID NO: 47478 - protein, 7 aa, synthetic construct
PDNTKTV

SEQ ID NO: 47479 - protein, 7 aa, synthetic construct
LQPNHGG

SEQ ID NO: 47480 - protein, 7 aa, synthetic construct
RTQKDWG

SEQ ID NO: 47481 - protein, 7 aa, synthetic construct
RYHADGA

SEQ ID NO: 47482 - protein, 7 aa, synthetic construct
NKAQNAG

SEQ ID NO: 47483 - protein, 7 aa, synthetic construct
RNTTGAP

SEQ ID NO: 47484 - protein, 7 aa, synthetic construct
LHMKTLD

SEQ ID NO: 47485 - protein, 7 aa, synthetic construct
SHPPYNK

SEQ ID NO: 47486 - protein, 7 aa, synthetic construct
PEYPAKG

SEQ ID NO: 47487 - protein, 7 aa, synthetic construct
TQKQSWN

SEQ ID NO: 47488 - protein, 7 aa, synthetic construct
SSAKSSA

SEQ ID NO: 47489 - protein, 7 aa, synthetic construct
LNPIATN

SEQ ID NO: 47490 - protein, 7 aa, synthetic construct
RSAGQQS

SEQ ID NO: 47491 - protein, 7 aa, synthetic construct
SNHLSKN

SEQ ID NO: 47492 - protein, 7 aa, synthetic construct
LGHPNKN

SEQ ID NO: 47493 - protein, 7 aa, synthetic construct
RTGNNTP

SEQ ID NO: 47494 - protein, 7 aa, synthetic construct
MRGNASP

SEQ ID NO: 47495 - protein, 7 aa, synthetic construct
DHYKRDM

SEQ ID NO: 47496 - protein, 7 aa, synthetic construct
QSQSIPA

SEQ ID NO: 47497 - protein, 7 aa, synthetic construct
KQSVSHV

SEQ ID NO: 47498 - protein, 7 aa, synthetic construct
GTIHSER

SEQ ID NO: 47499 - protein, 7 aa, synthetic construct
MFRERQA

SEQ ID NO: 47500 - protein, 7 aa, synthetic construct
VSGKAFT

SEQ ID NO: 47501 - protein, 7 aa, synthetic construct
KPNQGGA

SEQ ID NO: 47502 - protein, 7 aa, synthetic construct
GKGTNSG

SEQ ID NO: 47503 - protein, 7 aa, synthetic construct
YKTQGQS

SEQ ID NO: 47504 - protein, 7 aa, synthetic construct
QKSHMLA

SEQ ID NO: 47505 - protein, 7 aa, synthetic construct
KSGHPRD

SEQ ID NO: 47506 - protein, 7 aa, synthetic construct
FLPHHRA

SEQ ID NO: 47507 - protein, 7 aa, synthetic construct
DRKAVGV

SEQ ID NO: 47508 - protein, 7 aa, synthetic construct
IKQGIGS

SEQ ID NO: 47509 - protein, 7 aa, synthetic construct
GTNGKNS

SEQ ID NO: 47510 - protein, 7 aa, synthetic construct
QMKNVAG

SEQ ID NO: 47511 - protein, 7 aa, synthetic construct
AKNFNGP

SEQ ID NO: 47512 - protein, 7 aa, synthetic construct
RFKDHSG

SEQ ID NO: 47513 - protein, 7 aa, synthetic construct
NKGPMPN

SEQ ID NO: 47514 - protein, 7 aa, synthetic construct
GLSYIRE

SEQ ID NO: 47515 - protein, 7 aa, synthetic construct
SGYKNFD

SEQ ID NO: 47516 - protein, 7 aa, synthetic construct
FRPHHGD

SEQ ID NO: 47517 - protein, 7 aa, synthetic construct
MKGASKE

SEQ ID NO: 47518 - protein, 7 aa, synthetic construct
TSKMSSA

SEQ ID NO: 47519 - protein, 7 aa, synthetic construct
DSTNTNS

SEQ ID NO: 47520 - protein, 7 aa, synthetic construct
NMQASPL

SEQ ID NO: 47521 - protein, 7 aa, synthetic construct
SNRMKPE

SEQ ID NO: 47522 - protein, 7 aa, synthetic construct
RTSNPQG

SEQ ID NO: 47523 - protein, 7 aa, synthetic construct
PPKTGRD

SEQ ID NO: 47524 - protein, 7 aa, synthetic construct
RSTGHDT

SEQ ID NO: 47525 - protein, 7 aa, synthetic construct
QATRNMT

SEQ ID NO: 47526 - protein, 7 aa, synthetic construct
KSKDSTG

SEQ ID NO: 47527 - protein, 7 aa, synthetic construct
KNAVSSA

SEQ ID NO: 47528 - protein, 7 aa, synthetic construct
DPLLRTG

SEQ ID NO: 47529 - protein, 7 aa, synthetic construct
MNHQGMG

SEQ ID NO: 47530 - protein, 7 aa, synthetic construct
SKYGTDG

SEQ ID NO: 47531 - protein, 7 aa, synthetic construct
AVKVQAG

SEQ ID NO: 47532 - protein, 7 aa, synthetic construct
GGVTGAH

SEQ ID NO: 47533 - protein, 7 aa, synthetic construct
TGRSFNE

SEQ ID NO: 47534 - protein, 7 aa, synthetic construct
LLKLKIP

SEQ ID NO: 47535 - protein, 7 aa, synthetic construct
GWKKALD

SEQ ID NO: 47536 - protein, 7 aa, synthetic construct
YIQNKHG

SEQ ID NO: 47537 - protein, 7 aa, synthetic construct
VRAGAGV

SEQ ID NO: 47538 - protein, 7 aa, synthetic construct
STGKNAG

SEQ ID NO: 47539 - protein, 7 aa, synthetic construct
KQLSKTD

SEQ ID NO: 47540 - protein, 7 aa, synthetic construct
TIKKADV

SEQ ID NO: 47541 - protein, 7 aa, synthetic construct
YQHKKDD

SEQ ID NO: 47542 - protein, 7 aa, synthetic construct
KTGTSMA

SEQ ID NO: 47543 - protein, 7 aa, synthetic construct
GKMGLTI

SEQ ID NO: 47544 - protein, 7 aa, synthetic construct
TIPREII

SEQ ID NO: 47545 - protein, 7 aa, synthetic construct
FYKNQQE

SEQ ID NO: 47546 - protein, 7 aa, synthetic construct
ITHAEMI

SEQ ID NO: 47547 - protein, 7 aa, synthetic construct
KNTQSNT

SEQ ID NO: 47548 - protein, 7 aa, synthetic construct
TSASGKT

SEQ ID NO: 47549 - protein, 7 aa, synthetic construct
RMQMTGA

SEQ ID NO: 47550 - protein, 7 aa, synthetic construct
ANGMAKD

SEQ ID NO: 47551 - protein, 7 aa, synthetic construct
SLRSTEI

SEQ ID NO: 47552 - protein, 7 aa, synthetic construct
MSAAITP

SEQ ID NO: 47553 - protein, 7 aa, synthetic construct
SQVKSGS

SEQ ID NO: 47554 - protein, 7 aa, synthetic construct
DISKLSI

SEQ ID NO: 47555 - protein, 7 aa, synthetic construct
AGGVKPG

SEQ ID NO: 47556 - protein, 7 aa, synthetic construct
PKYGSQD

SEQ ID NO: 47557 - protein, 7 aa, synthetic construct
INGRMGG

SEQ ID NO: 47558 - protein, 7 aa, synthetic construct
RNSNGMG

SEQ ID NO: 47559 - protein, 7 aa, synthetic construct
MGHGSAY

SEQ ID NO: 47560 - protein, 7 aa, synthetic construct
KLVGSKE

SEQ ID NO: 47561 - protein, 7 aa, synthetic construct
YMKNHGA

SEQ ID NO: 47562 - protein, 7 aa, synthetic construct
FKGSANG

SEQ ID NO: 47563 - protein, 7 aa, synthetic construct
GGATRLY

SEQ ID NO: 47564 - protein, 7 aa, synthetic construct
KTQQMSA

SEQ ID NO: 47565 - protein, 7 aa, synthetic construct
SKVQVSN

SEQ ID NO: 47566 - protein, 7 aa, synthetic construct
NKGPSGI

SEQ ID NO: 47567 - protein, 7 aa, synthetic construct
LQQKLRE

SEQ ID NO: 47568 - protein, 7 aa, synthetic construct
RSPVATG

SEQ ID NO: 47569 - protein, 7 aa, synthetic construct
HHKDSAI

SEQ ID NO: 47570 - protein, 7 aa, synthetic construct
TLERGMP

SEQ ID NO: 47571 - protein, 7 aa, synthetic construct
MGRIQVN

SEQ ID NO: 47572 - protein, 7 aa, synthetic construct
PNEPRRQ

SEQ ID NO: 47573 - protein, 7 aa, synthetic construct
INGRVGG

SEQ ID NO: 47574 - protein, 7 aa, synthetic construct
HRERLTG

SEQ ID NO: 47575 - protein, 7 aa, synthetic construct
DNVVRAH

SEQ ID NO: 47576 - protein, 7 aa, synthetic construct
NRSAMQA

SEQ ID NO: 47577 - protein, 7 aa, synthetic construct
FGSSYTV

SEQ ID NO: 47578 - protein, 7 aa, synthetic construct
AMHKHTG

SEQ ID NO: 47579 - protein, 7 aa, synthetic construct
KGIVGFE

SEQ ID NO: 47580 - protein, 7 aa, synthetic construct
NPGTSAP

SEQ ID NO: 47581 - protein, 7 aa, synthetic construct
VGTNKTG

SEQ ID NO: 47582 - protein, 7 aa, synthetic construct
SKNVNQS

SEQ ID NO: 47583 - protein, 7 aa, synthetic construct
FGGPNIR

SEQ ID NO: 47584 - protein, 7 aa, synthetic construct
SEKHMRF

SEQ ID NO: 47585 - protein, 7 aa, synthetic construct
DIRVSQG

SEQ ID NO: 47586 - protein, 7 aa, synthetic construct
KQNGVSG

SEQ ID NO: 47587 - protein, 7 aa, synthetic construct
RSKDGIW

SEQ ID NO: 47588 - protein, 7 aa, synthetic construct
TRQAIQG

SEQ ID NO: 47589 - protein, 7 aa, synthetic construct
VGQKSMG

SEQ ID NO: 47590 - protein, 7 aa, synthetic construct
SDHGGRM

SEQ ID NO: 47591 - protein, 7 aa, synthetic construct
GVGTYSM

SEQ ID NO: 47592 - protein, 7 aa, synthetic construct
QQSRSVP

SEQ ID NO: 47593 - protein, 7 aa, synthetic construct
RQNAHQD

SEQ ID NO: 47594 - protein, 7 aa, synthetic construct
RQSPVIG

SEQ ID NO: 47595 - protein, 7 aa, synthetic construct
IKATVAS

SEQ ID NO: 47596 - protein, 7 aa, synthetic construct
AGIQKIP

SEQ ID NO: 47597 - protein, 7 aa, synthetic construct
GTKSNAP

SEQ ID NO: 47598 - protein, 7 aa, synthetic construct
QQRGVNG

SEQ ID NO: 47599 - protein, 7 aa, synthetic construct
WKHSDPQ

SEQ ID NO: 47600 - protein, 7 aa, synthetic construct
FKPSTSS

SEQ ID NO: 47601 - protein, 7 aa, synthetic construct
YQAKNNS

SEQ ID NO: 47602 - protein, 7 aa, synthetic construct
VETWKTP

SEQ ID NO: 47603 - protein, 7 aa, synthetic construct
TMKAPRE

SEQ ID NO: 47604 - protein, 7 aa, synthetic construct
KSNSSMM

SEQ ID NO: 47605 - protein, 7 aa, synthetic construct
TKHVDGV

SEQ ID NO: 47606 - protein, 7 aa, synthetic construct
GWGVHQA

SEQ ID NO: 47607 - protein, 7 aa, synthetic construct
NTTGRTA

SEQ ID NO: 47608 - protein, 7 aa, synthetic construct
MSSTRAA

SEQ ID NO: 47609 - protein, 7 aa, synthetic construct
TANHHQF

SEQ ID NO: 47610 - protein, 7 aa, synthetic construct
YKSGPGG

SEQ ID NO: 47611 - protein, 7 aa, synthetic construct
SKNNPGG

SEQ ID NO: 47612 - protein, 7 aa, synthetic construct
GPNYKQE

SEQ ID NO: 47613 - protein, 7 aa, synthetic construct
LSAQKTQ

SEQ ID NO: 47614 - protein, 7 aa, synthetic construct
EQRVAPG

SEQ ID NO: 47615 - protein, 7 aa, synthetic construct
LRGEMSP

SEQ ID NO: 47616 - protein, 7 aa, synthetic construct
DKKGANP

SEQ ID NO: 47617 - protein, 7 aa, synthetic construct
KQQILGG

SEQ ID NO: 47618 - protein, 7 aa, synthetic construct
QGPQFHS

SEQ ID NO: 47619 - protein, 7 aa, synthetic construct
IARANSV

SEQ ID NO: 47620 - protein, 7 aa, synthetic construct
PMHRSSD

SEQ ID NO: 47621 - protein, 7 aa, synthetic construct
DYRNTIS

SEQ ID NO: 47622 - protein, 7 aa, synthetic construct
GKMQSAA

SEQ ID NO: 47623 - protein, 7 aa, synthetic construct
HRPTNME

SEQ ID NO: 47624 - protein, 7 aa, synthetic construct
QSKSLVA

SEQ ID NO: 47625 - protein, 7 aa, synthetic construct
NMKTSPS

SEQ ID NO: 47626 - protein, 7 aa, synthetic construct
YTASNQK

SEQ ID NO: 47627 - protein, 7 aa, synthetic construct
YGTKHIM

SEQ ID NO: 47628 - protein, 7 aa, synthetic construct
GHAITQG

SEQ ID NO: 47629 - protein, 7 aa, synthetic construct
FFRDGPS

SEQ ID NO: 47630 - protein, 7 aa, synthetic construct
KLPYYQE

SEQ ID NO: 47631 - protein, 7 aa, synthetic construct
ARRDMVS

SEQ ID NO: 47632 - protein, 7 aa, synthetic construct
NNAQPIA

SEQ ID NO: 47633 - protein, 7 aa, synthetic construct
GARPKDG

SEQ ID NO: 47634 - protein, 7 aa, synthetic construct
INTRLTG

SEQ ID NO: 47635 - protein, 7 aa, synthetic construct
KVGAQMG

SEQ ID NO: 47636 - protein, 7 aa, synthetic construct
NKPSSTM

SEQ ID NO: 47637 - protein, 7 aa, synthetic construct
TKPNQFA

SEQ ID NO: 47638 - protein, 7 aa, synthetic construct
RNNAIVG

SEQ ID NO: 47639 - protein, 7 aa, synthetic construct
KTQGMES

SEQ ID NO: 47640 - protein, 7 aa, synthetic construct
QKNGIQG

SEQ ID NO: 47641 - protein, 7 aa, synthetic construct
WVAGGPS

SEQ ID NO: 47642 - protein, 7 aa, synthetic construct
RNSAGTG

SEQ ID NO: 47643 - protein, 7 aa, synthetic construct
KNNNPTA

SEQ ID NO: 47644 - protein, 7 aa, synthetic construct
ALIHKAP

SEQ ID NO: 47645 - protein, 7 aa, synthetic construct
TRQPSNS

SEQ ID NO: 47646 - protein, 7 aa, synthetic construct
THKQIGP

SEQ ID NO: 47647 - protein, 7 aa, synthetic construct
DRGSTNR

SEQ ID NO: 47648 - protein, 7 aa, synthetic construct
SKNTTQT

SEQ ID NO: 47649 - protein, 7 aa, synthetic construct
NYVKNHP

SEQ ID NO: 47650 - protein, 7 aa, synthetic construct
NNNNREA

SEQ ID NO: 47651 - protein, 7 aa, synthetic construct
RIPKENW

SEQ ID NO: 47652 - protein, 7 aa, synthetic construct
RSQSFNG

SEQ ID NO: 47653 - protein, 7 aa, synthetic construct
TKSPGPY

SEQ ID NO: 47654 - protein, 7 aa, synthetic construct
TRNAGAA

SEQ ID NO: 47655 - protein, 7 aa, synthetic construct
RNQLGDS

SEQ ID NO: 47656 - protein, 7 aa, synthetic construct
RSERSGG

SEQ ID NO: 47657 - protein, 7 aa, synthetic construct
FTQKQGG

SEQ ID NO: 47658 - protein, 7 aa, synthetic construct
SLKSSNS

SEQ ID NO: 47659 - protein, 7 aa, synthetic construct
VQINQKV

SEQ ID NO: 47660 - protein, 7 aa, synthetic construct
PSRNHHD

SEQ ID NO: 47661 - protein, 7 aa, synthetic construct
AKDMKLD

SEQ ID NO: 47662 - protein, 7 aa, synthetic construct
LGVKGAH

SEQ ID NO: 47663 - protein, 7 aa, synthetic construct
QKTTHMG

SEQ ID NO: 47664 - protein, 7 aa, synthetic construct
PAKSAQA

SEQ ID NO: 47665 - protein, 7 aa, synthetic construct
NNGRNSI

SEQ ID NO: 47666 - protein, 7 aa, synthetic construct
RFDRMPE

SEQ ID NO: 47667 - protein, 7 aa, synthetic construct
STTPRMM

SEQ ID NO: 47668 - protein, 7 aa, synthetic construct
VQAGRAM

SEQ ID NO: 47669 - protein, 7 aa, synthetic construct
VTSRAAP

SEQ ID NO: 47670 - protein, 7 aa, synthetic construct
KYNSTSA

SEQ ID NO: 47671 - protein, 7 aa, synthetic construct
AEMVKHS

SEQ ID NO: 47672 - protein, 7 aa, synthetic construct
PRKDTVD

SEQ ID NO: 47673 - protein, 7 aa, synthetic construct
TKNVQLG

SEQ ID NO: 47674 - protein, 7 aa, synthetic construct
KNTNEVR

SEQ ID NO: 47675 - protein, 7 aa, synthetic construct
PKQSNAG

SEQ ID NO: 47676 - protein, 7 aa, synthetic construct
VDNLVRS

SEQ ID NO: 47677 - protein, 7 aa, synthetic construct
SSHRSHE

SEQ ID NO: 47678 - protein, 7 aa, synthetic construct
QKVGNNG

SEQ ID NO: 47679 - protein, 7 aa, synthetic construct
NRDTGKV

SEQ ID NO: 47680 - protein, 7 aa, synthetic construct
MIIGKQD

SEQ ID NO: 47681 - protein, 7 aa, synthetic construct
QAKIPSL

SEQ ID NO: 47682 - protein, 7 aa, synthetic construct
VKIAASN

SEQ ID NO: 47683 - protein, 7 aa, synthetic construct
GFKNQER

SEQ ID NO: 47684 - protein, 7 aa, synthetic construct
QQKGPNA

SEQ ID NO: 47685 - protein, 7 aa, synthetic construct
KSPTVGT

SEQ ID NO: 47686 - protein, 7 aa, synthetic construct
KSGGATV

SEQ ID NO: 47687 - protein, 7 aa, synthetic construct
GVSNKNV

SEQ ID NO: 47688 - protein, 7 aa, synthetic construct
LAGTATF

SEQ ID NO: 47689 - protein, 7 aa, synthetic construct
TGTFMKP

SEQ ID NO: 47690 - protein, 7 aa, synthetic construct
RIRGDEL

SEQ ID NO: 47691 - protein, 7 aa, synthetic construct
VKVNTSG

SEQ ID NO: 47692 - protein, 7 aa, synthetic construct
FHKSQAN

SEQ ID NO: 47693 - protein, 7 aa, synthetic construct
RKDAVID

SEQ ID NO: 47694 - protein, 7 aa, synthetic construct
FKDARAA

SEQ ID NO: 47695 - protein, 7 aa, synthetic construct
NDKSRVP

SEQ ID NO: 47696 - protein, 7 aa, synthetic construct
KTNNAMS

SEQ ID NO: 47697 - protein, 7 aa, synthetic construct
GDFHRNP

SEQ ID NO: 47698 - protein, 7 aa, synthetic construct
NKFVHAP

SEQ ID NO: 47699 - protein, 7 aa, synthetic construct
VNKQPQA

SEQ ID NO: 47700 - protein, 7 aa, synthetic construct
THGQKDY

SEQ ID NO: 47701 - protein, 7 aa, synthetic construct
TQRGNAG

SEQ ID NO: 47702 - protein, 7 aa, synthetic construct
NRSNSQP

SEQ ID NO: 47703 - protein, 7 aa, synthetic construct
IRRELPA

SEQ ID NO: 47704 - protein, 7 aa, synthetic construct
GPKPTAA

SEQ ID NO: 47705 - protein, 7 aa, synthetic construct
AQNSKPD

SEQ ID NO: 47706 - protein, 7 aa, synthetic construct
PRNATGT

SEQ ID NO: 47707 - protein, 7 aa, synthetic construct
KYTQSGA

SEQ ID NO: 47708 - protein, 7 aa, synthetic construct
GQEHRLA

SEQ ID NO: 47709 - protein, 7 aa, synthetic construct
INKVKDS

SEQ ID NO: 47710 - protein, 7 aa, synthetic construct
TYRIATA

SEQ ID NO: 47711 - protein, 7 aa, synthetic construct
SAGGVIV

SEQ ID NO: 47712 - protein, 7 aa, synthetic construct
TGTKGAS

SEQ ID NO: 47713 - protein, 7 aa, synthetic construct
QSAARSP

SEQ ID NO: 47714 - protein, 7 aa, synthetic construct
KMPTSNA

SEQ ID NO: 47715 - protein, 7 aa, synthetic construct
VNKWTME

SEQ ID NO: 47716 - protein, 7 aa, synthetic construct
KFNGAGG

SEQ ID NO: 47717 - protein, 7 aa, synthetic construct
NKGQVNG

SEQ ID NO: 47718 - protein, 7 aa, synthetic construct
NAIQGFG

SEQ ID NO: 47719 - protein, 7 aa, synthetic construct
SKNSQQP

SEQ ID NO: 47720 - protein, 7 aa, synthetic construct
QKMSTNG

SEQ ID NO: 47721 - protein, 7 aa, synthetic construct
DHRPKYP

SEQ ID NO: 47722 - protein, 7 aa, synthetic construct
YKNQQMI

SEQ ID NO: 47723 - protein, 7 aa, synthetic construct
GHHQMQS

SEQ ID NO: 47724 - protein, 7 aa, synthetic construct
RIPMKAD

SEQ ID NO: 47725 - protein, 7 aa, synthetic construct
QQSLANP

SEQ ID NO: 47726 - protein, 7 aa, synthetic construct
WNKQWTD

SEQ ID NO: 47727 - protein, 7 aa, synthetic construct
FNKPGNN

SEQ ID NO: 47728 - protein, 7 aa, synthetic construct
AFKHSSA

SEQ ID NO: 47729 - protein, 7 aa, synthetic construct
NLGHRYE

SEQ ID NO: 47730 - protein, 7 aa, synthetic construct
VDNKVRV

SEQ ID NO: 47731 - protein, 7 aa, synthetic construct
MKDWNVA

SEQ ID NO: 47732 - protein, 7 aa, synthetic construct
RMHQAGP

SEQ ID NO: 47733 - protein, 7 aa, synthetic construct
MQTGQNH

SEQ ID NO: 47734 - protein, 7 aa, synthetic construct
KQNSSMP

SEQ ID NO: 47735 - protein, 7 aa, synthetic construct
MQQAKVP

SEQ ID NO: 47736 - protein, 7 aa, synthetic construct
YDMTKKE

SEQ ID NO: 47737 - protein, 7 aa, synthetic construct
VPQQQHL

SEQ ID NO: 47738 - protein, 7 aa, synthetic construct
AFTRSDM

SEQ ID NO: 47739 - protein, 7 aa, synthetic construct
SKPNNTG

SEQ ID NO: 47740 - protein, 7 aa, synthetic construct
KGYPSGT

SEQ ID NO: 47741 - protein, 7 aa, synthetic construct
TGGNKMG

SEQ ID NO: 47742 - protein, 7 aa, synthetic construct
QKGNQYA

SEQ ID NO: 47743 - protein, 7 aa, synthetic construct
YANIMKT

SEQ ID NO: 47744 - protein, 7 aa, synthetic construct
IMNAIPG

SEQ ID NO: 47745 - protein, 7 aa, synthetic construct
HQKVQVG

SEQ ID NO: 47746 - protein, 7 aa, synthetic construct
VQKKHDA

SEQ ID NO: 47747 - protein, 7 aa, synthetic construct
LKTSMKD

SEQ ID NO: 47748 - protein, 7 aa, synthetic construct
NMTHTQA

SEQ ID NO: 47749 - protein, 7 aa, synthetic construct
KTQTPGQ

SEQ ID NO: 47750 - protein, 7 aa, synthetic construct
FNAQSKG

SEQ ID NO: 47751 - protein, 7 aa, synthetic construct
HTKTVTN

SEQ ID NO: 47752 - protein, 7 aa, synthetic construct
DKYNNAA

SEQ ID NO: 47753 - protein, 7 aa, synthetic construct
TIINGSR

SEQ ID NO: 47754 - protein, 7 aa, synthetic construct
KSPPSNG

SEQ ID NO: 47755 - protein, 7 aa, synthetic construct
NTGHQSG

SEQ ID NO: 47756 - protein, 7 aa, synthetic construct
SKPSHMG

SEQ ID NO: 47757 - protein, 7 aa, synthetic construct
LPGNTRQ

SEQ ID NO: 47758 - protein, 7 aa, synthetic construct
WGKSNEH

SEQ ID NO: 47759 - protein, 7 aa, synthetic construct
HKYNAEG

SEQ ID NO: 47760 - protein, 7 aa, synthetic construct
AQQRPTI

SEQ ID NO: 47761 - protein, 7 aa, synthetic construct
YPKLMQG

SEQ ID NO: 47762 - protein, 7 aa, synthetic construct
TTNKVAG

SEQ ID NO: 47763 - protein, 7 aa, synthetic construct
TPAKQVA

SEQ ID NO: 47764 - protein, 7 aa, synthetic construct
YNKYIVE

SEQ ID NO: 47765 - protein, 7 aa, synthetic construct
RMGTNAG

SEQ ID NO: 47766 - protein, 7 aa, synthetic construct
GSKTPVG

SEQ ID NO: 47767 - protein, 7 aa, synthetic construct
KKSDNGG

SEQ ID NO: 47768 - protein, 7 aa, synthetic construct
GVAHHHG

SEQ ID NO: 47769 - protein, 7 aa, synthetic construct
LVSHTKP

SEQ ID NO: 47770 - protein, 7 aa, synthetic construct
TSRKPFE

SEQ ID NO: 47771 - protein, 7 aa, synthetic construct
TQSRSQA

SEQ ID NO: 47772 - protein, 7 aa, synthetic construct
QTNRVER

SEQ ID NO: 47773 - protein, 7 aa, synthetic construct
PLHNGQP

SEQ ID NO: 47774 - protein, 7 aa, synthetic construct
GYGQHHS

SEQ ID NO: 47775 - protein, 7 aa, synthetic construct
NAGNRVA

SEQ ID NO: 47776 - protein, 7 aa, synthetic construct
VGSKSNA

SEQ ID NO: 47777 - protein, 7 aa, synthetic construct
NTNQRQP

SEQ ID NO: 47778 - protein, 7 aa, synthetic construct
KYNNAAG

SEQ ID NO: 47779 - protein, 7 aa, synthetic construct
TGTSRTG

SEQ ID NO: 47780 - protein, 7 aa, synthetic construct
KSSNGVS

SEQ ID NO: 47781 - protein, 7 aa, synthetic construct
KASQVGA

SEQ ID NO: 47782 - protein, 7 aa, synthetic construct
YFNGRGD

SEQ ID NO: 47783 - protein, 7 aa, synthetic construct
MIPGGKE

SEQ ID NO: 47784 - protein, 7 aa, synthetic construct
KGSAHLA

SEQ ID NO: 47785 - protein, 7 aa, synthetic construct
THLHGLA

SEQ ID NO: 47786 - protein, 7 aa, synthetic construct
NNGTGRM

SEQ ID NO: 47787 - protein, 7 aa, synthetic construct
MSKSTGI

SEQ ID NO: 47788 - protein, 7 aa, synthetic construct
NSKATAG

SEQ ID NO: 47789 - protein, 7 aa, synthetic construct
NQTTGRG

SEQ ID NO: 47790 - protein, 7 aa, synthetic construct
PKHHNFS

SEQ ID NO: 47791 - protein, 7 aa, synthetic construct
TTRPTAG

SEQ ID NO: 47792 - protein, 7 aa, synthetic construct
AQHAGPH

SEQ ID NO: 47793 - protein, 7 aa, synthetic construct
VTNNKRE

SEQ ID NO: 47794 - protein, 7 aa, synthetic construct
HIRQLNA

SEQ ID NO: 47795 - protein, 7 aa, synthetic construct
SSTQTGR

SEQ ID NO: 47796 - protein, 7 aa, synthetic construct
MNGAKSG

SEQ ID NO: 47797 - protein, 7 aa, synthetic construct
WGKNMGM

SEQ ID NO: 47798 - protein, 7 aa, synthetic construct
PIHKSGM

SEQ ID NO: 47799 - protein, 7 aa, synthetic construct
TKYLDES

SEQ ID NO: 47800 - protein, 7 aa, synthetic construct
FTKSTGT

SEQ ID NO: 47801 - protein, 7 aa, synthetic construct
FRKEDNT

SEQ ID NO: 47802 - protein, 7 aa, synthetic construct
IRYSGDA

SEQ ID NO: 47803 - protein, 7 aa, synthetic construct
WKSGTNP

SEQ ID NO: 47804 - protein, 7 aa, synthetic construct
VSSNRSQ

SEQ ID NO: 47805 - protein, 7 aa, synthetic construct
FVKGMQE

SEQ ID NO: 47806 - protein, 7 aa, synthetic construct
KQPNGNG

SEQ ID NO: 47807 - protein, 7 aa, synthetic construct
NRTTVNG

SEQ ID NO: 47808 - protein, 7 aa, synthetic construct
PQPRQSN

SEQ ID NO: 47809 - protein, 7 aa, synthetic construct
TNGVQRG

SEQ ID NO: 47810 - protein, 7 aa, synthetic construct
TKNGIGA

SEQ ID NO: 47811 - protein, 7 aa, synthetic construct
RKPPFEM

SEQ ID NO: 47812 - protein, 7 aa, synthetic construct
YANSHMG

SEQ ID NO: 47813 - protein, 7 aa, synthetic construct
TMTNSKA

SEQ ID NO: 47814 - protein, 7 aa, synthetic construct
YNNNARS

SEQ ID NO: 47815 - protein, 7 aa, synthetic construct
YPKQMSN

SEQ ID NO: 47816 - protein, 7 aa, synthetic construct
GYNAKQA

SEQ ID NO: 47817 - protein, 7 aa, synthetic construct
YMPSRNE

SEQ ID NO: 47818 - protein, 7 aa, synthetic construct
GKISGQT

SEQ ID NO: 47819 - protein, 7 aa, synthetic construct
HNKGSGM

SEQ ID NO: 47820 - protein, 7 aa, synthetic construct
MLTQSKG

SEQ ID NO: 47821 - protein, 7 aa, synthetic construct
RIVVGAE

SEQ ID NO: 47822 - protein, 7 aa, synthetic construct
NKTTAGM

SEQ ID NO: 47823 - protein, 7 aa, synthetic construct
MGYQNQV

SEQ ID NO: 47824 - protein, 7 aa, synthetic construct
QYGKSQP

SEQ ID NO: 47825 - protein, 7 aa, synthetic construct
KVNSNQS

SEQ ID NO: 47826 - protein, 7 aa, synthetic construct
QGQMNNR

SEQ ID NO: 47827 - protein, 7 aa, synthetic construct
HKKNEQE

SEQ ID NO: 47828 - protein, 7 aa, synthetic construct
FELKRQP

SEQ ID NO: 47829 - protein, 7 aa, synthetic construct
DRQVPAY

SEQ ID NO: 47830 - protein, 7 aa, synthetic construct
ILPAHTQ

SEQ ID NO: 47831 - protein, 7 aa, synthetic construct
GNGKSTA

SEQ ID NO: 47832 - protein, 7 aa, synthetic construct
HKSKQEE

SEQ ID NO: 47833 - protein, 7 aa, synthetic construct
AKTGQFG

SEQ ID NO: 47834 - protein, 7 aa, synthetic construct
QKNSVRE

SEQ ID NO: 47835 - protein, 7 aa, synthetic construct
MRVTNAT

SEQ ID NO: 47836 - protein, 7 aa, synthetic construct
VARNMGV

SEQ ID NO: 47837 - protein, 7 aa, synthetic construct
TNTAAKG

SEQ ID NO: 47838 - protein, 7 aa, synthetic construct
KNHSDKN

SEQ ID NO: 47839 - protein, 7 aa, synthetic construct
QGMKTGY

SEQ ID NO: 47840 - protein, 7 aa, synthetic construct
RTSGNSV

SEQ ID NO: 47841 - protein, 7 aa, synthetic construct
QKNPGGG

SEQ ID NO: 47842 - protein, 7 aa, synthetic construct
FDKVHMP

SEQ ID NO: 47843 - protein, 7 aa, synthetic construct
QKNSGYA

SEQ ID NO: 47844 - protein, 7 aa, synthetic construct
KTTGGQA

SEQ ID NO: 47845 - protein, 7 aa, synthetic construct
KSNNGNP

SEQ ID NO: 47846 - protein, 7 aa, synthetic construct
HGTERKD

SEQ ID NO: 47847 - protein, 7 aa, synthetic construct
PNKIWQE

SEQ ID NO: 47848 - protein, 7 aa, synthetic construct
QGVKMGA

SEQ ID NO: 47849 - protein, 7 aa, synthetic construct
ETARQTS

SEQ ID NO: 47850 - protein, 7 aa, synthetic construct
TGPPTKG

SEQ ID NO: 47851 - protein, 7 aa, synthetic construct
NPRTTQG

SEQ ID NO: 47852 - protein, 7 aa, synthetic construct
NKSTMSG

SEQ ID NO: 47853 - protein, 7 aa, synthetic construct
RSNHQVP

SEQ ID NO: 47854 - protein, 7 aa, synthetic construct
VKERSGI

SEQ ID NO: 47855 - protein, 7 aa, synthetic construct
LFATATP

SEQ ID NO: 47856 - protein, 7 aa, synthetic construct
TMGQKGG

SEQ ID NO: 47857 - protein, 7 aa, synthetic construct
TPYGDHK

SEQ ID NO: 47858 - protein, 7 aa, synthetic construct
QQRGATV

SEQ ID NO: 47859 - protein, 7 aa, synthetic construct
HKKSFSE

SEQ ID NO: 47860 - protein, 7 aa, synthetic construct
MLVNRND

SEQ ID NO: 47861 - protein, 7 aa, synthetic construct
RQFSKES

SEQ ID NO: 47862 - protein, 7 aa, synthetic construct
RVQGDVR

SEQ ID NO: 47863 - protein, 7 aa, synthetic construct
GLKDHRP

SEQ ID NO: 47864 - protein, 7 aa, synthetic construct
RGRFNEE

SEQ ID NO: 47865 - protein, 7 aa, synthetic construct
IFKQHEN

SEQ ID NO: 47866 - protein, 7 aa, synthetic construct
DGVKAIR

SEQ ID NO: 47867 - protein, 7 aa, synthetic construct
AHDRNSG

SEQ ID NO: 47868 - protein, 7 aa, synthetic construct
VHFTNTE

SEQ ID NO: 47869 - protein, 7 aa, synthetic construct
TRHQTFE

SEQ ID NO: 47870 - protein, 7 aa, synthetic construct
GKDHKWN

SEQ ID NO: 47871 - protein, 7 aa, synthetic construct
QNKTNVA

SEQ ID NO: 47872 - protein, 7 aa, synthetic construct
GPKQGMA

SEQ ID NO: 47873 - protein, 7 aa, synthetic construct
GSNKPQG

SEQ ID NO: 47874 - protein, 7 aa, synthetic construct
RNNSPTS

SEQ ID NO: 47875 - protein, 7 aa, synthetic construct
FGIVGNG

SEQ ID NO: 47876 - protein, 7 aa, synthetic construct
VLAPHRP

SEQ ID NO: 47877 - protein, 7 aa, synthetic construct
MAKAPHQ

SEQ ID NO: 47878 - protein, 7 aa, synthetic construct
QSGQKNG

SEQ ID NO: 47879 - protein, 7 aa, synthetic construct
LGLGQQR

SEQ ID NO: 47880 - protein, 7 aa, synthetic construct
VDRKMQA

SEQ ID NO: 47881 - protein, 7 aa, synthetic construct
LALVHKD

SEQ ID NO: 47882 - protein, 7 aa, synthetic construct
SSTTRAP

SEQ ID NO: 47883 - protein, 7 aa, synthetic construct
NHEHKAG

SEQ ID NO: 47884 - protein, 7 aa, synthetic construct
ILPGGPL

SEQ ID NO: 47885 - protein, 7 aa, synthetic construct
NGTKTSA

SEQ ID NO: 47886 - protein, 7 aa, synthetic construct
QPKPTMS

SEQ ID NO: 47887 - protein, 7 aa, synthetic construct
INDKSAM

SEQ ID NO: 47888 - protein, 7 aa, synthetic construct
SHERISK

SEQ ID NO: 47889 - protein, 7 aa, synthetic construct
ASKSNQG

SEQ ID NO: 47890 - protein, 7 aa, synthetic construct
GRTTTAP

SEQ ID NO: 47891 - protein, 7 aa, synthetic construct
VKEKSWS

SEQ ID NO: 47892 - protein, 7 aa, synthetic construct
GKTGNVG

SEQ ID NO: 47893 - protein, 7 aa, synthetic construct
NKVVQLK

SEQ ID NO: 47894 - protein, 7 aa, synthetic construct
DQSAKKM

SEQ ID NO: 47895 - protein, 7 aa, synthetic construct
YSSRVTT

SEQ ID NO: 47896 - protein, 7 aa, synthetic construct
NRMQSNP

SEQ ID NO: 47897 - protein, 7 aa, synthetic construct
TISTKMA

SEQ ID NO: 47898 - protein, 7 aa, synthetic construct
LQANSRI

SEQ ID NO: 47899 - protein, 7 aa, synthetic construct
YKVQMKN

SEQ ID NO: 47900 - protein, 7 aa, synthetic construct
PVKSGRD

SEQ ID NO: 47901 - protein, 7 aa, synthetic construct
TAAQRQG

SEQ ID NO: 47902 - protein, 7 aa, synthetic construct
RPASSNP

SEQ ID NO: 47903 - protein, 7 aa, synthetic construct
SMKGTQG

SEQ ID NO: 47904 - protein, 7 aa, synthetic construct
RNSAHYE

SEQ ID NO: 47905 - protein, 7 aa, synthetic construct
RNSSQAP

SEQ ID NO: 47906 - protein, 7 aa, synthetic construct
YAGRNQI

SEQ ID NO: 47907 - protein, 7 aa, synthetic construct
VKNPGGL

SEQ ID NO: 47908 - protein, 7 aa, synthetic construct
LAQNKQY

SEQ ID NO: 47909 - protein, 7 aa, synthetic construct
GTQSPHP

SEQ ID NO: 47910 - protein, 7 aa, synthetic construct
TPVNKSP

SEQ ID NO: 47911 - protein, 7 aa, synthetic construct
TTNSHKT

SEQ ID NO: 47912 - protein, 7 aa, synthetic construct
RNGSQQA

SEQ ID NO: 47913 - protein, 7 aa, synthetic construct
VKMKVQE

SEQ ID NO: 47914 - protein, 7 aa, synthetic construct
TKPHLTA

SEQ ID NO: 47915 - protein, 7 aa, synthetic construct
WKARIDA

SEQ ID NO: 47916 - protein, 7 aa, synthetic construct
SRQSTSI

SEQ ID NO: 47917 - protein, 7 aa, synthetic construct
HTVHIKP

SEQ ID NO: 47918 - protein, 7 aa, synthetic construct
ERHITIA

SEQ ID NO: 47919 - protein, 7 aa, synthetic construct
KNQSAPS

SEQ ID NO: 47920 - protein, 7 aa, synthetic construct
KNYIAES

SEQ ID NO: 47921 - protein, 7 aa, synthetic construct
RQKDSFA

SEQ ID NO: 47922 - protein, 7 aa, synthetic construct
MRNQMSG

SEQ ID NO: 47923 - protein, 7 aa, synthetic construct
KPSRTLE

SEQ ID NO: 47924 - protein, 7 aa, synthetic construct
GGQNKFM

SEQ ID NO: 47925 - protein, 7 aa, synthetic construct
TNGARTM

SEQ ID NO: 47926 - protein, 7 aa, synthetic construct
NKPPYGG

SEQ ID NO: 47927 - protein, 7 aa, synthetic construct
GNSKAVG

SEQ ID NO: 47928 - protein, 7 aa, synthetic construct
QQKNSVG

SEQ ID NO: 47929 - protein, 7 aa, synthetic construct
ADGRFQK

SEQ ID NO: 47930 - protein, 7 aa, synthetic construct
HIKQGPP

SEQ ID NO: 47931 - protein, 7 aa, synthetic construct
LYHVANE

SEQ ID NO: 47932 - protein, 7 aa, synthetic construct
SKWNKDE

SEQ ID NO: 47933 - protein, 7 aa, synthetic construct
KPNNGLG

SEQ ID NO: 47934 - protein, 7 aa, synthetic construct
TTPKQGQ

SEQ ID NO: 47935 - protein, 7 aa, synthetic construct
KMGPGTA

SEQ ID NO: 47936 - protein, 7 aa, synthetic construct
SPKLVKG

SEQ ID NO: 47937 - protein, 7 aa, synthetic construct
VTGSQKG

SEQ ID NO: 47938 - protein, 7 aa, synthetic construct
KQPGMVA

SEQ ID NO: 47939 - protein, 7 aa, synthetic construct
QRMNMPH

SEQ ID NO: 47940 - protein, 7 aa, synthetic construct
TKTQTAS

SEQ ID NO: 47941 - protein, 7 aa, synthetic construct
KVGVSQV

SEQ ID NO: 47942 - protein, 7 aa, synthetic construct
AKPSSSD

SEQ ID NO: 47943 - protein, 7 aa, synthetic construct
INSHLPV

SEQ ID NO: 47944 - protein, 7 aa, synthetic construct
NDGLRTG

SEQ ID NO: 47945 - protein, 7 aa, synthetic construct
GYKSTNG

SEQ ID NO: 47946 - protein, 7 aa, synthetic construct
SAAQTAG

SEQ ID NO: 47947 - protein, 7 aa, synthetic construct
KQPPTAA

SEQ ID NO: 47948 - protein, 7 aa, synthetic construct
SQRTNVD

SEQ ID NO: 47949 - protein, 7 aa, synthetic construct
RGQVLTS

SEQ ID NO: 47950 - protein, 7 aa, synthetic construct
KSPATMG

SEQ ID NO: 47951 - protein, 7 aa, synthetic construct
DRHKMNG

SEQ ID NO: 47952 - protein, 7 aa, synthetic construct
MPLHPAD

SEQ ID NO: 47953 - protein, 7 aa, synthetic construct
TSRRELE

SEQ ID NO: 47954 - protein, 7 aa, synthetic construct
AERHTST

SEQ ID NO: 47955 - protein, 7 aa, synthetic construct
QFVKTHP

SEQ ID NO: 47956 - protein, 7 aa, synthetic construct
SPQKSGG

SEQ ID NO: 47957 - protein, 7 aa, synthetic construct
ATRTPQM

SEQ ID NO: 47958 - protein, 7 aa, synthetic construct
VSQRTQG

SEQ ID NO: 47959 - protein, 7 aa, synthetic construct
TQQTRQS

SEQ ID NO: 47960 - protein, 7 aa, synthetic construct
KPPATTP

SEQ ID NO: 47961 - protein, 7 aa, synthetic construct
YQKQSSS

SEQ ID NO: 47962 - protein, 7 aa, synthetic construct
TGAAAGR

SEQ ID NO: 47963 - protein, 7 aa, synthetic construct
LKFLNTP

SEQ ID NO: 47964 - protein, 7 aa, synthetic construct
ANRSQNA

SEQ ID NO: 47965 - protein, 7 aa, synthetic construct
LQRQAHS

SEQ ID NO: 47966 - protein, 7 aa, synthetic construct
MTHIREN

SEQ ID NO: 47967 - protein, 7 aa, synthetic construct
TQRNQNV

SEQ ID NO: 47968 - protein, 7 aa, synthetic construct
FNAKADK

SEQ ID NO: 47969 - protein, 7 aa, synthetic construct
KNPNQQT

SEQ ID NO: 47970 - protein, 7 aa, synthetic construct
RLANIQS

SEQ ID NO: 47971 - protein, 7 aa, synthetic construct
MSRTGNG

SEQ ID NO: 47972 - protein, 7 aa, synthetic construct
QRAIQVA

SEQ ID NO: 47973 - protein, 7 aa, synthetic construct
RTGSLDR

SEQ ID NO: 47974 - protein, 7 aa, synthetic construct
HKSQTVI

SEQ ID NO: 47975 - protein, 7 aa, synthetic construct
MHPKHSA

SEQ ID NO: 47976 - protein, 7 aa, synthetic construct
TLYGAHA

SEQ ID NO: 47977 - protein, 7 aa, synthetic construct
TDIRKTS

SEQ ID NO: 47978 - protein, 7 aa, synthetic construct
PSNASKV

SEQ ID NO: 47979 - protein, 7 aa, synthetic construct
PGQAKSG

SEQ ID NO: 47980 - protein, 7 aa, synthetic construct
NGAKSTG

SEQ ID NO: 47981 - protein, 7 aa, synthetic construct
SPPHSGN

SEQ ID NO: 47982 - protein, 7 aa, synthetic construct
SNSFERD

SEQ ID NO: 47983 - protein, 7 aa, synthetic construct
SQFKGSA

SEQ ID NO: 47984 - protein, 7 aa, synthetic construct
NGPNARS

SEQ ID NO: 47985 - protein, 7 aa, synthetic construct
PKSSVMG

SEQ ID NO: 47986 - protein, 7 aa, synthetic construct
MKDPRYT

SEQ ID NO: 47987 - protein, 7 aa, synthetic construct
SLAAKTG

SEQ ID NO: 47988 - protein, 7 aa, synthetic construct
MKMGNSS

SEQ ID NO: 47989 - protein, 7 aa, synthetic construct
HGQMKMA

SEQ ID NO: 47990 - protein, 7 aa, synthetic construct
QAVGPNR

SEQ ID NO: 47991 - protein, 7 aa, synthetic construct
MHKPNTS

SEQ ID NO: 47992 - protein, 7 aa, synthetic construct
NTKKSDA

SEQ ID NO: 47993 - protein, 7 aa, synthetic construct
YLGSNFS

SEQ ID NO: 47994 - protein, 7 aa, synthetic construct
KTSQGMG

SEQ ID NO: 47995 - protein, 7 aa, synthetic construct
KNTSNNV

SEQ ID NO: 47996 - protein, 7 aa, synthetic construct
NTRSVTG

SEQ ID NO: 47997 - protein, 7 aa, synthetic construct
QPRAASM

SEQ ID NO: 47998 - protein, 7 aa, synthetic construct
QTRHAEE

SEQ ID NO: 47999 - protein, 7 aa, synthetic construct
CPPRAQC

SEQ ID NO: 48000 - protein, 7 aa, synthetic construct
KTPTMAG

SEQ ID NO: 48001 - protein, 7 aa, synthetic construct
TSKQQSA

SEQ ID NO: 48002 - protein, 7 aa, synthetic construct
SKQHMGD

SEQ ID NO: 48003 - protein, 7 aa, synthetic construct
IRDIVNG

SEQ ID NO: 48004 - protein, 7 aa, synthetic construct
YSNTRDA

SEQ ID NO: 48005 - protein, 7 aa, synthetic construct
HQMMSKN

SEQ ID NO: 48006 - protein, 7 aa, synthetic construct
VQNQFKN

SEQ ID NO: 48007 - protein, 7 aa, synthetic construct
HPKQNSA

SEQ ID NO: 48008 - protein, 7 aa, synthetic construct
KGVNMAM

SEQ ID NO: 48009 - protein, 7 aa, synthetic construct
TGVHPRS

SEQ ID NO: 48010 - protein, 7 aa, synthetic construct
NFKAGSV

SEQ ID NO: 48011 - protein, 7 aa, synthetic construct
HNAERGT

SEQ ID NO: 48012 - protein, 7 aa, synthetic construct
QVHLKGE

SEQ ID NO: 48013 - protein, 7 aa, synthetic construct
SKGDRAA

SEQ ID NO: 48014 - protein, 7 aa, synthetic construct
KNMMSQA

SEQ ID NO: 48015 - protein, 7 aa, synthetic construct
TRNMNGF

SEQ ID NO: 48016 - protein, 7 aa, synthetic construct
ILRLTDG

SEQ ID NO: 48017 - protein, 7 aa, synthetic construct
MYPGKDR

SEQ ID NO: 48018 - protein, 7 aa, synthetic construct
MFNRAES

SEQ ID NO: 48019 - protein, 7 aa, synthetic construct
FKSQERA

SEQ ID NO: 48020 - protein, 7 aa, synthetic construct
HGQGPMV

SEQ ID NO: 48021 - protein, 7 aa, synthetic construct
RPNTQSG

SEQ ID NO: 48022 - protein, 7 aa, synthetic construct
QQGKTHL

SEQ ID NO: 48023 - protein, 7 aa, synthetic construct
SYTAKSP

SEQ ID NO: 48024 - protein, 7 aa, synthetic construct
AAQNGHG

SEQ ID NO: 48025 - protein, 7 aa, synthetic construct
QHKPMQD

SEQ ID NO: 48026 - protein, 7 aa, synthetic construct
IEIRRVE

SEQ ID NO: 48027 - protein, 7 aa, synthetic construct
QFANRMG

SEQ ID NO: 48028 - protein, 7 aa, synthetic construct
AMSKPLN

SEQ ID NO: 48029 - protein, 7 aa, synthetic construct
GSNFAIP

SEQ ID NO: 48030 - protein, 7 aa, synthetic construct
NAREHGW

SEQ ID NO: 48031 - protein, 7 aa, synthetic construct
SQRTSST

SEQ ID NO: 48032 - protein, 7 aa, synthetic construct
KGGTLMS

SEQ ID NO: 48033 - protein, 7 aa, synthetic construct
MRQAGPI

SEQ ID NO: 48034 - protein, 7 aa, synthetic construct
DRADPRR

SEQ ID NO: 48035 - protein, 7 aa, synthetic construct
NQNRRFD

SEQ ID NO: 48036 - protein, 7 aa, synthetic construct
QKWAMAE

SEQ ID NO: 48037 - protein, 7 aa, synthetic construct
TMTAKYG

SEQ ID NO: 48038 - protein, 7 aa, synthetic construct
SVPSIKF

SEQ ID NO: 48039 - protein, 7 aa, synthetic construct
QKNSQAG

SEQ ID NO: 48040 - protein, 7 aa, synthetic construct
EWQAKNG

SEQ ID NO: 48041 - protein, 7 aa, synthetic construct
NNSKGGG

SEQ ID NO: 48042 - protein, 7 aa, synthetic construct
KVPMKQE

SEQ ID NO: 48043 - protein, 7 aa, synthetic construct
LKHLHES

SEQ ID NO: 48044 - protein, 7 aa, synthetic construct
ISSTDRN

SEQ ID NO: 48045 - protein, 7 aa, synthetic construct
KSGMGQG

SEQ ID NO: 48046 - protein, 7 aa, synthetic construct
RNQNNQA

SEQ ID NO: 48047 - protein, 7 aa, synthetic construct
NAIHKRD

SEQ ID NO: 48048 - protein, 7 aa, synthetic construct
MNGGFSG

SEQ ID NO: 48049 - protein, 7 aa, synthetic construct
QYNGRVA

SEQ ID NO: 48050 - protein, 7 aa, synthetic construct
TQKGDHN

SEQ ID NO: 48051 - protein, 7 aa, synthetic construct
FGHTNVN

SEQ ID NO: 48052 - protein, 7 aa, synthetic construct
YAQDPFK

SEQ ID NO: 48053 - protein, 7 aa, synthetic construct
TSKPSGA

SEQ ID NO: 48054 - protein, 7 aa, synthetic construct
DFSGGKN

SEQ ID NO: 48055 - protein, 7 aa, synthetic construct
NAGGKGA

SEQ ID NO: 48056 - protein, 7 aa, synthetic construct
YEQRHAS

SEQ ID NO: 48057 - protein, 7 aa, synthetic construct
TAKMSTN

SEQ ID NO: 48058 - protein, 7 aa, synthetic construct
KNNTGTP

SEQ ID NO: 48059 - protein, 7 aa, synthetic construct
YVKATEK

SEQ ID NO: 48060 - protein, 7 aa, synthetic construct
YKHGNIE

SEQ ID NO: 48061 - protein, 7 aa, synthetic construct
RGPSTAV

SEQ ID NO: 48062 - protein, 7 aa, synthetic construct
NQSQSST

SEQ ID NO: 48063 - protein, 7 aa, synthetic construct
TRSAHDV

SEQ ID NO: 48064 - protein, 7 aa, synthetic construct
SKSAKDA

SEQ ID NO: 48065 - protein, 7 aa, synthetic construct
PYKTHID

SEQ ID NO: 48066 - protein, 7 aa, synthetic construct
YSGPNPR

SEQ ID NO: 48067 - protein, 7 aa, synthetic construct
MPSRQGA

SEQ ID NO: 48068 - protein, 7 aa, synthetic construct
QGGVTKP

SEQ ID NO: 48069 - protein, 7 aa, synthetic construct
ASALKGG

SEQ ID NO: 48070 - protein, 7 aa, synthetic construct
KHVSNNP

SEQ ID NO: 48071 - protein, 7 aa, synthetic construct
QQVRVEG

SEQ ID NO: 48072 - protein, 7 aa, synthetic construct
REHKPQS

SEQ ID NO: 48073 - protein, 7 aa, synthetic construct
KHDMVFS

SEQ ID NO: 48074 - protein, 7 aa, synthetic construct
WSATSTF

SEQ ID NO: 48075 - protein, 7 aa, synthetic construct
TLAVQTG

SEQ ID NO: 48076 - protein, 7 aa, synthetic construct
PKTNIGG

SEQ ID NO: 48077 - protein, 7 aa, synthetic construct
KLNNSLA

SEQ ID NO: 48078 - protein, 7 aa, synthetic construct
RQDRLQS

SEQ ID NO: 48079 - protein, 7 aa, synthetic construct
NLSGRDP

SEQ ID NO: 48080 - protein, 7 aa, synthetic construct
LGGYAQG

SEQ ID NO: 48081 - protein, 7 aa, synthetic construct
YVSTKSG

SEQ ID NO: 48082 - protein, 7 aa, synthetic construct
PRGIPSE

SEQ ID NO: 48083 - protein, 7 aa, synthetic construct
QMGNMKA

SEQ ID NO: 48084 - protein, 7 aa, synthetic construct
LFAALPS

SEQ ID NO: 48085 - protein, 7 aa, synthetic construct
MGNTRFG

SEQ ID NO: 48086 - protein, 7 aa, synthetic construct
KQNATVG

SEQ ID NO: 48087 - protein, 7 aa, synthetic construct
VARQTIQ

SEQ ID NO: 48088 - protein, 7 aa, synthetic construct
RDHFAAG

SEQ ID NO: 48089 - protein, 7 aa, synthetic construct
GRPIVTG

SEQ ID NO: 48090 - protein, 7 aa, synthetic construct
YGVVKQG

SEQ ID NO: 48091 - protein, 7 aa, synthetic construct
FKTGVAA

SEQ ID NO: 48092 - protein, 7 aa, synthetic construct
KDQQRHG

SEQ ID NO: 48093 - protein, 7 aa, synthetic construct
GNGPQKA

SEQ ID NO: 48094 - protein, 7 aa, synthetic construct
FGKSGVN

SEQ ID NO: 48095 - protein, 7 aa, synthetic construct
LAGGSIA

SEQ ID NO: 48096 - protein, 7 aa, synthetic construct
LHGREGL

SEQ ID NO: 48097 - protein, 7 aa, synthetic construct
SRQLNNA

SEQ ID NO: 48098 - protein, 7 aa, synthetic construct
WTQESPS

SEQ ID NO: 48099 - protein, 7 aa, synthetic construct
WNHTGPL

SEQ ID NO: 48100 - protein, 7 aa, synthetic construct
PQKQTMA

SEQ ID NO: 48101 - protein, 7 aa, synthetic construct
PDSHSRV

SEQ ID NO: 48102 - protein, 7 aa, synthetic construct
NSRAGNW

SEQ ID NO: 48103 - protein, 7 aa, synthetic construct
HLIGING

SEQ ID NO: 48104 - protein, 7 aa, synthetic construct
QKTPNPS

SEQ ID NO: 48105 - protein, 7 aa, synthetic construct
RFHGQIE

SEQ ID NO: 48106 - protein, 7 aa, synthetic construct
GMRNEQM

SEQ ID NO: 48107 - protein, 7 aa, synthetic construct
KGHNGDT

SEQ ID NO: 48108 - protein, 7 aa, synthetic construct
GPSKMNA

SEQ ID NO: 48109 - protein, 7 aa, synthetic construct
SGQTRVG

SEQ ID NO: 48110 - protein, 7 aa, synthetic construct
KKMPAEG

SEQ ID NO: 48111 - protein, 7 aa, synthetic construct
HKAADVG

SEQ ID NO: 48112 - protein, 7 aa, synthetic construct
QQYHASA

SEQ ID NO: 48113 - protein, 7 aa, synthetic construct
TPKGGMA

SEQ ID NO: 48114 - protein, 7 aa, synthetic construct
YTSQGKG

SEQ ID NO: 48115 - protein, 7 aa, synthetic construct
GQSQPNK

SEQ ID NO: 48116 - protein, 7 aa, synthetic construct
IDGIRTR

SEQ ID NO: 48117 - protein, 7 aa, synthetic construct
VQRNTNA

SEQ ID NO: 48118 - protein, 7 aa, synthetic construct
RQGTGGA

SEQ ID NO: 48119 - protein, 7 aa, synthetic construct
GRPPGIS

SEQ ID NO: 48120 - protein, 7 aa, synthetic construct
MKHGIQD

SEQ ID NO: 48121 - protein, 7 aa, synthetic construct
TGTAKMN

SEQ ID NO: 48122 - protein, 7 aa, synthetic construct
DFAKHKV

SEQ ID NO: 48123 - protein, 7 aa, synthetic construct
TGTARAG

SEQ ID NO: 48124 - protein, 7 aa, synthetic construct
FPLLSTA

SEQ ID NO: 48125 - protein, 7 aa, synthetic construct
YKAPGSN

SEQ ID NO: 48126 - protein, 7 aa, synthetic construct
KPSQNTP

SEQ ID NO: 48127 - protein, 7 aa, synthetic construct
NSPKSQS

SEQ ID NO: 48128 - protein, 7 aa, synthetic construct
HTSQRTG

SEQ ID NO: 48129 - protein, 7 aa, synthetic construct
VYNLSGG

SEQ ID NO: 48130 - protein, 7 aa, synthetic construct
MTGARQT

SEQ ID NO: 48131 - protein, 7 aa, synthetic construct
NRPSVAP

SEQ ID NO: 48132 - protein, 7 aa, synthetic construct
LKKFDFE

SEQ ID NO: 48133 - protein, 7 aa, synthetic construct
DKGGTRV

SEQ ID NO: 48134 - protein, 7 aa, synthetic construct
NPNHRPP

SEQ ID NO: 48135 - protein, 7 aa, synthetic construct
TVPTKLH

SEQ ID NO: 48136 - protein, 7 aa, synthetic construct
DGMKMYK

SEQ ID NO: 48137 - protein, 7 aa, synthetic construct
FTGGHGI

SEQ ID NO: 48138 - protein, 7 aa, synthetic construct
LRTTPQT

SEQ ID NO: 48139 - protein, 7 aa, synthetic construct
KTTGIRE

SEQ ID NO: 48140 - protein, 7 aa, synthetic construct
RNPSSAG

SEQ ID NO: 48141 - protein, 7 aa, synthetic construct
WKQAGPA

SEQ ID NO: 48142 - protein, 7 aa, synthetic construct
NRPAAGF

SEQ ID NO: 48143 - protein, 7 aa, synthetic construct
YKAGMKE

SEQ ID NO: 48144 - protein, 7 aa, synthetic construct
PAVGVSG

SEQ ID NO: 48145 - protein, 7 aa, synthetic construct
KPQHQDW

SEQ ID NO: 48146 - protein, 7 aa, synthetic construct
SSPPYKY

SEQ ID NO: 48147 - protein, 7 aa, synthetic construct
GRQSTAA

SEQ ID NO: 48148 - protein, 7 aa, synthetic construct
GTHSNQS

SEQ ID NO: 48149 - protein, 7 aa, synthetic construct
VLSNTER

SEQ ID NO: 48150 - protein, 7 aa, synthetic construct
NSKPTNM

SEQ ID NO: 48151 - protein, 7 aa, synthetic construct
PRPTGAA

SEQ ID NO: 48152 - protein, 7 aa, synthetic construct
KSMGNAS

SEQ ID NO: 48153 - protein, 7 aa, synthetic construct
LKTSPAG

SEQ ID NO: 48154 - protein, 7 aa, synthetic construct
RGDKGPS

SEQ ID NO: 48155 - protein, 7 aa, synthetic construct
DHKAAMG

SEQ ID NO: 48156 - protein, 7 aa, synthetic construct
KGPSMAT

SEQ ID NO: 48157 - protein, 7 aa, synthetic construct
LRERTER

SEQ ID NO: 48158 - protein, 7 aa, synthetic construct
NRTTNSA

SEQ ID NO: 48159 - protein, 7 aa, synthetic construct
HHPRQLD

SEQ ID NO: 48160 - protein, 7 aa, synthetic construct
KPISNAG

SEQ ID NO: 48161 - protein, 7 aa, synthetic construct
HKSYPTI

SEQ ID NO: 48162 - protein, 7 aa, synthetic construct
TVPNGKG

SEQ ID NO: 48163 - protein, 7 aa, synthetic construct
KTHQSVE

SEQ ID NO: 48164 - protein, 7 aa, synthetic construct
MSPIYKQ

SEQ ID NO: 48165 - protein, 7 aa, synthetic construct
MNAKAGM

SEQ ID NO: 48166 - protein, 7 aa, synthetic construct
AHPMRPA

SEQ ID NO: 48167 - protein, 7 aa, synthetic construct
KFQTSTG

SEQ ID NO: 48168 - protein, 7 aa, synthetic construct
VGTSRGP

SEQ ID NO: 48169 - protein, 7 aa, synthetic construct
TNIMTQA

SEQ ID NO: 48170 - protein, 7 aa, synthetic construct
GTRTASI

SEQ ID NO: 48171 - protein, 7 aa, synthetic construct
MNPRGNA

SEQ ID NO: 48172 - protein, 7 aa, synthetic construct
QKNYAEA

SEQ ID NO: 48173 - protein, 7 aa, synthetic construct
THMHSRA

SEQ ID NO: 48174 - protein, 7 aa, synthetic construct
GANYPNH

SEQ ID NO: 48175 - protein, 7 aa, synthetic construct
RQSATQG

SEQ ID NO: 48176 - protein, 7 aa, synthetic construct
TMKITTE

SEQ ID NO: 48177 - protein, 7 aa, synthetic construct
MRGTGVN

SEQ ID NO: 48178 - protein, 7 aa, synthetic construct
VADKRGG

SEQ ID NO: 48179 - protein, 7 aa, synthetic construct
SKQSGYG

SEQ ID NO: 48180 - protein, 7 aa, synthetic construct
KFGSMPV

SEQ ID NO: 48181 - protein, 7 aa, synthetic construct
HIKHSAM

SEQ ID NO: 48182 - protein, 7 aa, synthetic construct
CHKLNCA

SEQ ID NO: 48183 - protein, 7 aa, synthetic construct
QPKNMTG

SEQ ID NO: 48184 - protein, 7 aa, synthetic construct
KMPGQID

SEQ ID NO: 48185 - protein, 7 aa, synthetic construct
NTAKSGG

SEQ ID NO: 48186 - protein, 7 aa, synthetic construct
RTNGFVG

SEQ ID NO: 48187 - protein, 7 aa, synthetic construct
PRGNGGA

SEQ ID NO: 48188 - protein, 7 aa, synthetic construct
YQPKKEG

SEQ ID NO: 48189 - protein, 7 aa, synthetic construct
SNFVQTP

SEQ ID NO: 48190 - protein, 7 aa, synthetic construct
KTSSAKE

SEQ ID NO: 48191 - protein, 7 aa, synthetic construct
QNQRVGG

SEQ ID NO: 48192 - protein, 7 aa, synthetic construct
TKTVARE

SEQ ID NO: 48193 - protein, 7 aa, synthetic construct
AMPRMMD

SEQ ID NO: 48194 - protein, 7 aa, synthetic construct
AFQAQTV

SEQ ID NO: 48195 - protein, 7 aa, synthetic construct
MQGRNVA

SEQ ID NO: 48196 - protein, 7 aa, synthetic construct
MKQSTQN

SEQ ID NO: 48197 - protein, 7 aa, synthetic construct
HLNRGAG

SEQ ID NO: 48198 - protein, 7 aa, synthetic construct
SPGKPGA

SEQ ID NO: 48199 - protein, 7 aa, synthetic construct
GKQQTMG

SEQ ID NO: 48200 - protein, 7 aa, synthetic construct
AGTNRSS

SEQ ID NO: 48201 - protein, 7 aa, synthetic construct
NNKDKQG

SEQ ID NO: 48202 - protein, 7 aa, synthetic construct
QYKNAHP

SEQ ID NO: 48203 - protein, 7 aa, synthetic construct
QFSASDR

SEQ ID NO: 48204 - protein, 7 aa, synthetic construct
TRGIDKG

SEQ ID NO: 48205 - protein, 7 aa, synthetic construct
VNTGRVY

SEQ ID NO: 48206 - protein, 7 aa, synthetic construct
SKPSYHD

SEQ ID NO: 48207 - protein, 7 aa, synthetic construct
IGTLYRS

SEQ ID NO: 48208 - protein, 7 aa, synthetic construct
NNFDRKD

SEQ ID NO: 48209 - protein, 7 aa, synthetic construct
DSSKKSE

SEQ ID NO: 48210 - protein, 7 aa, synthetic construct
KTNTQAS

SEQ ID NO: 48211 - protein, 7 aa, synthetic construct
KPTNGTP

SEQ ID NO: 48212 - protein, 7 aa, synthetic construct
QSSGSGK

SEQ ID NO: 48213 - protein, 7 aa, synthetic construct
HMSARLG

SEQ ID NO: 48214 - protein, 7 aa, synthetic construct
AWQGTGP

SEQ ID NO: 48215 - protein, 7 aa, synthetic construct
VRTEHHG

SEQ ID NO: 48216 - protein, 7 aa, synthetic construct
NPRAQNP

SEQ ID NO: 48217 - protein, 7 aa, synthetic construct
APKKNGD

SEQ ID NO: 48218 - protein, 7 aa, synthetic construct
KPTGSVS

SEQ ID NO: 48219 - protein, 7 aa, synthetic construct
NFQSHKT

SEQ ID NO: 48220 - protein, 7 aa, synthetic construct
IKPTQRD

SEQ ID NO: 48221 - protein, 7 aa, synthetic construct
ASRISNT

SEQ ID NO: 48222 - protein, 7 aa, synthetic construct
LRPNVSG

SEQ ID NO: 48223 - protein, 7 aa, synthetic construct
TSNKTVA

SEQ ID NO: 48224 - protein, 7 aa, synthetic construct
QKAVSVH

SEQ ID NO: 48225 - protein, 7 aa, synthetic construct
NYSAKNG

SEQ ID NO: 48226 - protein, 7 aa, synthetic construct
ERHPHPP

SEQ ID NO: 48227 - protein, 7 aa, synthetic construct
KYPNAQS

SEQ ID NO: 48228 - protein, 7 aa, synthetic construct
YKMSAKD

SEQ ID NO: 48229 - protein, 7 aa, synthetic construct
TQRATMG

SEQ ID NO: 48230 - protein, 7 aa, synthetic construct
SFKHNNH

SEQ ID NO: 48231 - protein, 7 aa, synthetic construct
IKSSSNP

SEQ ID NO: 48232 - protein, 7 aa, synthetic construct
EFKVKYN

SEQ ID NO: 48233 - protein, 7 aa, synthetic construct
RFVNNTE

SEQ ID NO: 48234 - protein, 7 aa, synthetic construct
NYVNRQP

SEQ ID NO: 48235 - protein, 7 aa, synthetic construct
MPKMSQS

SEQ ID NO: 48236 - protein, 7 aa, synthetic construct
MQHGYTA

SEQ ID NO: 48237 - protein, 7 aa, synthetic construct
PPTPTKW

SEQ ID NO: 48238 - protein, 7 aa, synthetic construct
NVAHRSM

SEQ ID NO: 48239 - protein, 7 aa, synthetic construct
HRTSETN

SEQ ID NO: 48240 - protein, 7 aa, synthetic construct
GSAKPLF

SEQ ID NO: 48241 - protein, 7 aa, synthetic construct
PYSSTTI

SEQ ID NO: 48242 - protein, 7 aa, synthetic construct
RPGGGYE

SEQ ID NO: 48243 - protein, 7 aa, synthetic construct
RPSSANS

SEQ ID NO: 48244 - protein, 7 aa, synthetic construct
VHKMNNF

SEQ ID NO: 48245 - protein, 7 aa, synthetic construct
QPTTSRE

SEQ ID NO: 48246 - protein, 7 aa, synthetic construct
HPVKTGA

SEQ ID NO: 48247 - protein, 7 aa, synthetic construct
GYNRITA

SEQ ID NO: 48248 - protein, 7 aa, synthetic construct
WEKPKNS

SEQ ID NO: 48249 - protein, 7 aa, synthetic construct
MNGRAIP

SEQ ID NO: 48250 - protein, 7 aa, synthetic construct
GNPAVGS

SEQ ID NO: 48251 - protein, 7 aa, synthetic construct
GPRATVA

SEQ ID NO: 48252 - protein, 7 aa, synthetic construct
NGPRVGG

SEQ ID NO: 48253 - protein, 7 aa, synthetic construct
NENFRSP

SEQ ID NO: 48254 - protein, 7 aa, synthetic construct
ATPYGDA

SEQ ID NO: 48255 - protein, 7 aa, synthetic construct
FKPGGMA

SEQ ID NO: 48256 - protein, 7 aa, synthetic construct
PRNADVI

SEQ ID NO: 48257 - protein, 7 aa, synthetic construct
HSMAQNG

SEQ ID NO: 48258 - protein, 7 aa, synthetic construct
AAMHTME

SEQ ID NO: 48259 - protein, 7 aa, synthetic construct
KTGANGA

SEQ ID NO: 48260 - protein, 7 aa, synthetic construct
QPPFHPD

SEQ ID NO: 48261 - protein, 7 aa, synthetic construct
FDTYRKA

SEQ ID NO: 48262 - protein, 7 aa, synthetic construct
NSQIRSN

SEQ ID NO: 48263 - protein, 7 aa, synthetic construct
GPMKSAA

SEQ ID NO: 48264 - protein, 7 aa, synthetic construct
RMAIGAE

SEQ ID NO: 48265 - protein, 7 aa, synthetic construct
TAQNRSA

SEQ ID NO: 48266 - protein, 7 aa, synthetic construct
RLYGQLD

SEQ ID NO: 48267 - protein, 7 aa, synthetic construct
NKHLVMA

SEQ ID NO: 48268 - protein, 7 aa, synthetic construct
TRSVNNA

SEQ ID NO: 48269 - protein, 7 aa, synthetic construct
KMAQVNA

SEQ ID NO: 48270 - protein, 7 aa, synthetic construct
DRLHVPP

SEQ ID NO: 48271 - protein, 7 aa, synthetic construct
TAQPKWG

SEQ ID NO: 48272 - protein, 7 aa, synthetic construct
PRSSRDE

SEQ ID NO: 48273 - protein, 7 aa, synthetic construct
RGDTRSW

SEQ ID NO: 48274 - protein, 7 aa, synthetic construct
YPTSDNR

SEQ ID NO: 48275 - protein, 7 aa, synthetic construct
ESRSHAM

SEQ ID NO: 48276 - protein, 7 aa, synthetic construct
YGSKVGG

SEQ ID NO: 48277 - protein, 7 aa, synthetic construct
KSNPSNG

SEQ ID NO: 48278 - protein, 7 aa, synthetic construct
NRSAPMG

SEQ ID NO: 48279 - protein, 7 aa, synthetic construct
QARNQNP

SEQ ID NO: 48280 - protein, 7 aa, synthetic construct
DNGIAKL

SEQ ID NO: 48281 - protein, 7 aa, synthetic construct
YQKQNLG

SEQ ID NO: 48282 - protein, 7 aa, synthetic construct
HKERNKE

SEQ ID NO: 48283 - protein, 7 aa, synthetic construct
GKASTTA

SEQ ID NO: 48284 - protein, 7 aa, synthetic construct
PSKTNSF

SEQ ID NO: 48285 - protein, 7 aa, synthetic construct
KKDSGAA

SEQ ID NO: 48286 - protein, 7 aa, synthetic construct
YSTNYSI

SEQ ID NO: 48287 - protein, 7 aa, synthetic construct
KPPNAAQ

SEQ ID NO: 48288 - protein, 7 aa, synthetic construct
PMPLPKP

SEQ ID NO: 48289 - protein, 7 aa, synthetic construct
TDQGRKE

SEQ ID NO: 48290 - protein, 7 aa, synthetic construct
SNSKTGP

SEQ ID NO: 48291 - protein, 7 aa, synthetic construct
NHPQEYV

SEQ ID NO: 48292 - protein, 7 aa, synthetic construct
FNKTKSE

SEQ ID NO: 48293 - protein, 7 aa, synthetic construct
RTSQNNG

SEQ ID NO: 48294 - protein, 7 aa, synthetic construct
MRTSGVG

SEQ ID NO: 48295 - protein, 7 aa, synthetic construct
KPTHVAA

SEQ ID NO: 48296 - protein, 7 aa, synthetic construct
KVTSIPT

SEQ ID NO: 48297 - protein, 7 aa, synthetic construct
TMKGWNG

SEQ ID NO: 48298 - protein, 7 aa, synthetic construct
KTNSVAN

SEQ ID NO: 48299 - protein, 7 aa, synthetic construct
GKDQRSA

SEQ ID NO: 48300 - protein, 7 aa, synthetic construct
HPPTIRN

SEQ ID NO: 48301 - protein, 7 aa, synthetic construct
AQPYMTG

SEQ ID NO: 48302 - protein, 7 aa, synthetic construct
TSSVHRE

SEQ ID NO: 48303 - protein, 7 aa, synthetic construct
SWPTGTG

SEQ ID NO: 48304 - protein, 7 aa, synthetic construct
QSANGKP

SEQ ID NO: 48305 - protein, 7 aa, synthetic construct
KLARYAE

SEQ ID NO: 48306 - protein, 7 aa, synthetic construct
VNHDGRM

SEQ ID NO: 48307 - protein, 7 aa, synthetic construct
SQERGYG

SEQ ID NO: 48308 - protein, 7 aa, synthetic construct
RNQAVGA

SEQ ID NO: 48309 - protein, 7 aa, synthetic construct
SMFHQGG

SEQ ID NO: 48310 - protein, 7 aa, synthetic construct
SGRSPTE

SEQ ID NO: 48311 - protein, 7 aa, synthetic construct
QPGIHAP

SEQ ID NO: 48312 - protein, 7 aa, synthetic construct
RKHGDEG

SEQ ID NO: 48313 - protein, 7 aa, synthetic construct
LQHKSLF

SEQ ID NO: 48314 - protein, 7 aa, synthetic construct
EFRAHEP

SEQ ID NO: 48315 - protein, 7 aa, synthetic construct
NMAGQKG

SEQ ID NO: 48316 - protein, 7 aa, synthetic construct
KTQGSMQ

SEQ ID NO: 48317 - protein, 7 aa, synthetic construct
KPDKIPK

SEQ ID NO: 48318 - protein, 7 aa, synthetic construct
TRSSGTP

SEQ ID NO: 48319 - protein, 7 aa, synthetic construct
KPPTNVS

SEQ ID NO: 48320 - protein, 7 aa, synthetic construct
EGRRYEM

SEQ ID NO: 48321 - protein, 7 aa, synthetic construct
SIRNLVP

SEQ ID NO: 48322 - protein, 7 aa, synthetic construct
LHTRYGE

SEQ ID NO: 48323 - protein, 7 aa, synthetic construct
MLRKSID

SEQ ID NO: 48324 - protein, 7 aa, synthetic construct
LPPYAKM

SEQ ID NO: 48325 - protein, 7 aa, synthetic construct
LGKQAND

SEQ ID NO: 48326 - protein, 7 aa, synthetic construct
IDSRPMS

SEQ ID NO: 48327 - protein, 7 aa, synthetic construct
MPDTTKM

SEQ ID NO: 48328 - protein, 7 aa, synthetic construct
QHEARGS

SEQ ID NO: 48329 - protein, 7 aa, synthetic construct
RSNNGYG

SEQ ID NO: 48330 - protein, 7 aa, synthetic construct
KVTDWNA

SEQ ID NO: 48331 - protein, 7 aa, synthetic construct
LFRNGGQ

SEQ ID NO: 48332 - protein, 7 aa, synthetic construct
GKQMSNP

SEQ ID NO: 48333 - protein, 7 aa, synthetic construct
SEPKRQI

SEQ ID NO: 48334 - protein, 7 aa, synthetic construct
NARTNNG

SEQ ID NO: 48335 - protein, 7 aa, synthetic construct
TMAPAKG

SEQ ID NO: 48336 - protein, 7 aa, synthetic construct
RYGKDTQ

SEQ ID NO: 48337 - protein, 7 aa, synthetic construct
HTPHTGP

SEQ ID NO: 48338 - protein, 7 aa, synthetic construct
EGTFKMA

SEQ ID NO: 48339 - protein, 7 aa, synthetic construct
FFKKGTE

SEQ ID NO: 48340 - protein, 7 aa, synthetic construct
LENRYAH

SEQ ID NO: 48341 - protein, 7 aa, synthetic construct
KYSQGQA

SEQ ID NO: 48342 - protein, 7 aa, synthetic construct
FDRQHLH

SEQ ID NO: 48343 - protein, 7 aa, synthetic construct
KPSGAGA

SEQ ID NO: 48344 - protein, 7 aa, synthetic construct
YHENRSG

SEQ ID NO: 48345 - protein, 7 aa, synthetic construct
KSNSVKE

SEQ ID NO: 48346 - protein, 7 aa, synthetic construct
VYTHSGE

SEQ ID NO: 48347 - protein, 7 aa, synthetic construct
QHNTKGL

SEQ ID NO: 48348 - protein, 7 aa, synthetic construct
NSRTSVA

SEQ ID NO: 48349 - protein, 7 aa, synthetic construct
NTAARSD

SEQ ID NO: 48350 - protein, 7 aa, synthetic construct
YKAHIEL

SEQ ID NO: 48351 - protein, 7 aa, synthetic construct
HERLGQK

SEQ ID NO: 48352 - protein, 7 aa, synthetic construct
LRNAHVN

SEQ ID NO: 48353 - protein, 7 aa, synthetic construct
FRDGKQA

SEQ ID NO: 48354 - protein, 7 aa, synthetic construct
IGTKANV

SEQ ID NO: 48355 - protein, 7 aa, synthetic construct
VKKDATG

SEQ ID NO: 48356 - protein, 7 aa, synthetic construct
HFPQAKA

SEQ ID NO: 48357 - protein, 7 aa, synthetic construct
QNNSNQG

SEQ ID NO: 48358 - protein, 7 aa, synthetic construct
PSQKGVG

SEQ ID NO: 48359 - protein, 7 aa, synthetic construct
TRGNPAS

SEQ ID NO: 48360 - protein, 7 aa, synthetic construct
ARGARDP

SEQ ID NO: 48361 - protein, 7 aa, synthetic construct
IKGSSNV

SEQ ID NO: 48362 - protein, 7 aa, synthetic construct
MSKSAGV

SEQ ID NO: 48363 - protein, 7 aa, synthetic construct
IFKLHTE

SEQ ID NO: 48364 - protein, 7 aa, synthetic construct
FKRELQF

SEQ ID NO: 48365 - protein, 7 aa, synthetic construct
FPNQRQQ

SEQ ID NO: 48366 - protein, 7 aa, synthetic construct
GPGTVHQ

SEQ ID NO: 48367 - protein, 7 aa, synthetic construct
TQRPTAG

SEQ ID NO: 48368 - protein, 7 aa, synthetic construct
GIPTKPW

SEQ ID NO: 48369 - protein, 7 aa, synthetic construct
QMSFNKG

SEQ ID NO: 48370 - protein, 7 aa, synthetic construct
TRTMNGA

SEQ ID NO: 48371 - protein, 7 aa, synthetic construct
RAEVKEI

SEQ ID NO: 48372 - protein, 7 aa, synthetic construct
DRNKIIP

SEQ ID NO: 48373 - protein, 7 aa, synthetic construct
STLKPGI

SEQ ID NO: 48374 - protein, 7 aa, synthetic construct
MNGAPKG

SEQ ID NO: 48375 - protein, 7 aa, synthetic construct
GSMKADG

SEQ ID NO: 48376 - protein, 7 aa, synthetic construct
AMNHQPA

SEQ ID NO: 48377 - protein, 7 aa, synthetic construct
RDNSNFH

SEQ ID NO: 48378 - protein, 7 aa, synthetic construct
NTMFVKE

SEQ ID NO: 48379 - protein, 7 aa, synthetic construct
HVRDMSL

SEQ ID NO: 48380 - protein, 7 aa, synthetic construct
AASHQQG

SEQ ID NO: 48381 - protein, 7 aa, synthetic construct
PKPSQGM

SEQ ID NO: 48382 - protein, 7 aa, synthetic construct
HLPNIGG

SEQ ID NO: 48383 - protein, 7 aa, synthetic construct
TGPKAAN

SEQ ID NO: 48384 - protein, 7 aa, synthetic construct
SLRHNEH

SEQ ID NO: 48385 - protein, 7 aa, synthetic construct
IKVIVPD

SEQ ID NO: 48386 - protein, 7 aa, synthetic construct
VHGQANN

SEQ ID NO: 48387 - protein, 7 aa, synthetic construct
SKNGNTA

SEQ ID NO: 48388 - protein, 7 aa, synthetic construct
HNQHRLP

SEQ ID NO: 48389 - protein, 7 aa, synthetic construct
HNHNTIP

SEQ ID NO: 48390 - protein, 7 aa, synthetic construct
VFRDSGR

SEQ ID NO: 48391 - protein, 7 aa, synthetic construct
KTAHQMP

SEQ ID NO: 48392 - protein, 7 aa, synthetic construct
LMARAAP

SEQ ID NO: 48393 - protein, 7 aa, synthetic construct
RDPLPFD

SEQ ID NO: 48394 - protein, 7 aa, synthetic construct
KVGSGAA

SEQ ID NO: 48395 - protein, 7 aa, synthetic construct
QFGQKAD

SEQ ID NO: 48396 - protein, 7 aa, synthetic construct
DTKQHYM

SEQ ID NO: 48397 - protein, 7 aa, synthetic construct
IGSKSQA

SEQ ID NO: 48398 - protein, 7 aa, synthetic construct
QLPLNYE

SEQ ID NO: 48399 - protein, 7 aa, synthetic construct
HWVSEEY

SEQ ID NO: 48400 - protein, 7 aa, synthetic construct
KRVEHGD

SEQ ID NO: 48401 - protein, 7 aa, synthetic construct
TNQNRGD

SEQ ID NO: 48402 - protein, 7 aa, synthetic construct
SHRTIHL

SEQ ID NO: 48403 - protein, 7 aa, synthetic construct
VRGHFSE

SEQ ID NO: 48404 - protein, 7 aa, synthetic construct
NVIRVNP

SEQ ID NO: 48405 - protein, 7 aa, synthetic construct
NKKDVKE

SEQ ID NO: 48406 - protein, 7 aa, synthetic construct
TKAATPG

SEQ ID NO: 48407 - protein, 7 aa, synthetic construct
IKTHAMI

SEQ ID NO: 48408 - protein, 7 aa, synthetic construct
MQGKSNA

SEQ ID NO: 48409 - protein, 7 aa, synthetic construct
RPTSSVS

SEQ ID NO: 48410 - protein, 7 aa, synthetic construct
NMVRGEF

SEQ ID NO: 48411 - protein, 7 aa, synthetic construct
GQQGHAL

SEQ ID NO: 48412 - protein, 7 aa, synthetic construct
NLQKDQI

SEQ ID NO: 48413 - protein, 7 aa, synthetic construct
YARQDQS

SEQ ID NO: 48414 - protein, 7 aa, synthetic construct
KFPGGQG

SEQ ID NO: 48415 - protein, 7 aa, synthetic construct
EVLLRQS

SEQ ID NO: 48416 - protein, 7 aa, synthetic construct
KVGGMAG

SEQ ID NO: 48417 - protein, 7 aa, synthetic construct
GRPYSAD

SEQ ID NO: 48418 - protein, 7 aa, synthetic construct
YKKDVNG

SEQ ID NO: 48419 - protein, 7 aa, synthetic construct
STNARNG

SEQ ID NO: 48420 - protein, 7 aa, synthetic construct
RFMDQTE

SEQ ID NO: 48421 - protein, 7 aa, synthetic construct
MSQTKVQ

SEQ ID NO: 48422 - protein, 7 aa, synthetic construct
VTTTRGT

SEQ ID NO: 48423 - protein, 7 aa, synthetic construct
SRENHRV

SEQ ID NO: 48424 - protein, 7 aa, synthetic construct
WDKVRNH

SEQ ID NO: 48425 - protein, 7 aa, synthetic construct
IVPSQHA

SEQ ID NO: 48426 - protein, 7 aa, synthetic construct
QSRIESS

SEQ ID NO: 48427 - protein, 7 aa, synthetic construct
IEKKYST

SEQ ID NO: 48428 - protein, 7 aa, synthetic construct
YVKAMMN

SEQ ID NO: 48429 - protein, 7 aa, synthetic construct
YTGKISP

SEQ ID NO: 48430 - protein, 7 aa, synthetic construct
QQGSGQT

SEQ ID NO: 48431 - protein, 7 aa, synthetic construct
PKSTMSG

SEQ ID NO: 48432 - protein, 7 aa, synthetic construct
VAFKTME

SEQ ID NO: 48433 - protein, 7 aa, synthetic construct
RPMQSTG

SEQ ID NO: 48434 - protein, 7 aa, synthetic construct
VPRNSQA

SEQ ID NO: 48435 - protein, 7 aa, synthetic construct
TRPVRDE

SEQ ID NO: 48436 - protein, 7 aa, synthetic construct
HQHRNNS

SEQ ID NO: 48437 - protein, 7 aa, synthetic construct
PNDHYKV

SEQ ID NO: 48438 - protein, 7 aa, synthetic construct
STTSVKV

SEQ ID NO: 48439 - protein, 7 aa, synthetic construct
FSNYLKG

SEQ ID NO: 48440 - protein, 7 aa, synthetic construct
QMGMTYA

SEQ ID NO: 48441 - protein, 7 aa, synthetic construct
YVGNKNG

SEQ ID NO: 48442 - protein, 7 aa, synthetic construct
IRSDPQK

SEQ ID NO: 48443 - protein, 7 aa, synthetic construct
IKGNSNP

SEQ ID NO: 48444 - protein, 7 aa, synthetic construct
GKNQTSG

SEQ ID NO: 48445 - protein, 7 aa, synthetic construct
YQGVGDH

SEQ ID NO: 48446 - protein, 7 aa, synthetic construct
KMGQTAA

SEQ ID NO: 48447 - protein, 7 aa, synthetic construct
QGPKMTA

SEQ ID NO: 48448 - protein, 7 aa, synthetic construct
HPVGTRD

SEQ ID NO: 48449 - protein, 7 aa, synthetic construct
HGNSNIP

SEQ ID NO: 48450 - protein, 7 aa, synthetic construct
VPPRVQH

SEQ ID NO: 48451 - protein, 7 aa, synthetic construct
TTSKNAA

SEQ ID NO: 48452 - protein, 7 aa, synthetic construct
QNHKRDA

SEQ ID NO: 48453 - protein, 7 aa, synthetic construct
HAVRNGD

SEQ ID NO: 48454 - protein, 7 aa, synthetic construct
GTEQFRG

SEQ ID NO: 48455 - protein, 7 aa, synthetic construct
TDAMAKM

SEQ ID NO: 48456 - protein, 7 aa, synthetic construct
DANKSYR

SEQ ID NO: 48457 - protein, 7 aa, synthetic construct
HNMTEPL

SEQ ID NO: 48458 - protein, 7 aa, synthetic construct
TGSTKGG

SEQ ID NO: 48459 - protein, 7 aa, synthetic construct
PAQRNFM

SEQ ID NO: 48460 - protein, 7 aa, synthetic construct
RMSEKPG

SEQ ID NO: 48461 - protein, 7 aa, synthetic construct
TLSQRGS

SEQ ID NO: 48462 - protein, 7 aa, synthetic construct
STQSRQG

SEQ ID NO: 48463 - protein, 7 aa, synthetic construct
IGQQTRG

SEQ ID NO: 48464 - protein, 7 aa, synthetic construct
LSSQHSH

SEQ ID NO: 48465 - protein, 7 aa, synthetic construct
GIRHANA

SEQ ID NO: 48466 - protein, 7 aa, synthetic construct
KGDKAMN

SEQ ID NO: 48467 - protein, 7 aa, synthetic construct
PKVNNGA

SEQ ID NO: 48468 - protein, 7 aa, synthetic construct
KNNSNSA

SEQ ID NO: 48469 - protein, 7 aa, synthetic construct
KGNTQSS

SEQ ID NO: 48470 - protein, 7 aa, synthetic construct
SSKIVGP

SEQ ID NO: 48471 - protein, 7 aa, synthetic construct
EAAARKI

SEQ ID NO: 48472 - protein, 7 aa, synthetic construct
RMNSGQG

SEQ ID NO: 48473 - protein, 7 aa, synthetic construct
GKSGSGQ

SEQ ID NO: 48474 - protein, 7 aa, synthetic construct
VKGISSG

SEQ ID NO: 48475 - protein, 7 aa, synthetic construct
KTGPGFG

SEQ ID NO: 48476 - protein, 7 aa, synthetic construct
SSSNHRM

SEQ ID NO: 48477 - protein, 7 aa, synthetic construct
SLKSAMI

SEQ ID NO: 48478 - protein, 7 aa, synthetic construct
YQHNMNA

SEQ ID NO: 48479 - protein, 7 aa, synthetic construct
QNKNQVL

SEQ ID NO: 48480 - protein, 7 aa, synthetic construct
PNKAVGS

SEQ ID NO: 48481 - protein, 7 aa, synthetic construct
TQKNARE

SEQ ID NO: 48482 - protein, 7 aa, synthetic construct
HGRPETK

SEQ ID NO: 48483 - protein, 7 aa, synthetic construct
GNTVGHP

SEQ ID NO: 48484 - protein, 7 aa, synthetic construct
NMKTKVG

SEQ ID NO: 48485 - protein, 7 aa, synthetic construct
PHMNVGG

SEQ ID NO: 48486 - protein, 7 aa, synthetic construct
HSQPFTA

SEQ ID NO: 48487 - protein, 7 aa, synthetic construct
FRQGASD

SEQ ID NO: 48488 - protein, 7 aa, synthetic construct
DSRMKDG

SEQ ID NO: 48489 - protein, 7 aa, synthetic construct
KPDFMSN

SEQ ID NO: 48490 - protein, 7 aa, synthetic construct
GFKYQPE

SEQ ID NO: 48491 - protein, 7 aa, synthetic construct
TPINTKN

SEQ ID NO: 48492 - protein, 7 aa, synthetic construct
SKPTKEM

SEQ ID NO: 48493 - protein, 7 aa, synthetic construct
WQNLGHG

SEQ ID NO: 48494 - protein, 7 aa, synthetic construct
TGQFKDM

SEQ ID NO: 48495 - protein, 7 aa, synthetic construct
WQRVTPE

SEQ ID NO: 48496 - protein, 7 aa, synthetic construct
KIYDAER

SEQ ID NO: 48497 - protein, 7 aa, synthetic construct
SATVHKG

SEQ ID NO: 48498 - protein, 7 aa, synthetic construct
YKHNFQG

SEQ ID NO: 48499 - protein, 7 aa, synthetic construct
GTAQKSG

SEQ ID NO: 48500 - protein, 7 aa, synthetic construct
SQIKWPE

SEQ ID NO: 48501 - protein, 7 aa, synthetic construct
KREKSFD

SEQ ID NO: 48502 - protein, 7 aa, synthetic construct
FIPGGFN

SEQ ID NO: 48503 - protein, 7 aa, synthetic construct
KDSQLRV

SEQ ID NO: 48504 - protein, 7 aa, synthetic construct
SRSTPHP

SEQ ID NO: 48505 - protein, 7 aa, synthetic construct
YQGKNSA

SEQ ID NO: 48506 - protein, 7 aa, synthetic construct
RHLSSGP

SEQ ID NO: 48507 - protein, 7 aa, synthetic construct
MEPARAQ

SEQ ID NO: 48508 - protein, 7 aa, synthetic construct
KDRSIAG

SEQ ID NO: 48509 - protein, 7 aa, synthetic construct
TGTRTVS

SEQ ID NO: 48510 - protein, 7 aa, synthetic construct
NNGVNKG

SEQ ID NO: 48511 - protein, 7 aa, synthetic construct
LKNFEST

SEQ ID NO: 48512 - protein, 7 aa, synthetic construct
RAQSNGA

SEQ ID NO: 48513 - protein, 7 aa, synthetic construct
FPGIVKT

SEQ ID NO: 48514 - protein, 7 aa, synthetic construct
LKKDSDK

SEQ ID NO: 48515 - protein, 7 aa, synthetic construct
DRIGVVK

SEQ ID NO: 48516 - protein, 7 aa, synthetic construct
WNTSSRM

SEQ ID NO: 48517 - protein, 7 aa, synthetic construct
TKDGKRD

SEQ ID NO: 48518 - protein, 7 aa, synthetic construct
KGELYSG

SEQ ID NO: 48519 - protein, 7 aa, synthetic construct
LKSSQHG

SEQ ID NO: 48520 - protein, 7 aa, synthetic construct
VNIKKME

SEQ ID NO: 48521 - protein, 7 aa, synthetic construct
PKMGSVP

SEQ ID NO: 48522 - protein, 7 aa, synthetic construct
HLKPGIG

SEQ ID NO: 48523 - protein, 7 aa, synthetic construct
SSMMKSA

SEQ ID NO: 48524 - protein, 7 aa, synthetic construct
GKMGTLG

SEQ ID NO: 48525 - protein, 7 aa, synthetic construct
NVSGAAI

SEQ ID NO: 48526 - protein, 7 aa, synthetic construct
AQYKDGH

SEQ ID NO: 48527 - protein, 7 aa, synthetic construct
RKTFQQD

SEQ ID NO: 48528 - protein, 7 aa, synthetic construct
MPNGGRQ

SEQ ID NO: 48529 - protein, 7 aa, synthetic construct
KPPSAAS

SEQ ID NO: 48530 - protein, 7 aa, synthetic construct
WHAKPEH

SEQ ID NO: 48531 - protein, 7 aa, synthetic construct
ARIPRVE

SEQ ID NO: 48532 - protein, 7 aa, synthetic construct
QATGMPQ

SEQ ID NO: 48533 - protein, 7 aa, synthetic construct
KDINKQP

SEQ ID NO: 48534 - protein, 7 aa, synthetic construct
KISKVVE

SEQ ID NO: 48535 - protein, 7 aa, synthetic construct
SSRVAPA

SEQ ID NO: 48536 - protein, 7 aa, synthetic construct
QRTNANG

SEQ ID NO: 48537 - protein, 7 aa, synthetic construct
TNSNSKG

SEQ ID NO: 48538 - protein, 7 aa, synthetic construct
GNYKSDE

SEQ ID NO: 48539 - protein, 7 aa, synthetic construct
SWKNNPP

SEQ ID NO: 48540 - protein, 7 aa, synthetic construct
NKTNSVP

SEQ ID NO: 48541 - protein, 7 aa, synthetic construct
SYKATNN

SEQ ID NO: 48542 - protein, 7 aa, synthetic construct
LANGMKS

SEQ ID NO: 48543 - protein, 7 aa, synthetic construct
VHSAGRM

SEQ ID NO: 48544 - protein, 7 aa, synthetic construct
EKHANHV

SEQ ID NO: 48545 - protein, 7 aa, synthetic construct
QNARGTP

SEQ ID NO: 48546 - protein, 7 aa, synthetic construct
KTSQSNP

SEQ ID NO: 48547 - protein, 7 aa, synthetic construct
SSNAAKA

SEQ ID NO: 48548 - protein, 7 aa, synthetic construct
LPIASSH

SEQ ID NO: 48549 - protein, 7 aa, synthetic construct
DPWPNKS

SEQ ID NO: 48550 - protein, 7 aa, synthetic construct
NFDPARA

SEQ ID NO: 48551 - protein, 7 aa, synthetic construct
NHEKPMN

SEQ ID NO: 48552 - protein, 7 aa, synthetic construct
FGKTSGS

SEQ ID NO: 48553 - protein, 7 aa, synthetic construct
KQSAAMA

SEQ ID NO: 48554 - protein, 7 aa, synthetic construct
MHSSHAS

SEQ ID NO: 48555 - protein, 7 aa, synthetic construct
NFSAGPG

SEQ ID NO: 48556 - protein, 7 aa, synthetic construct
KREMKDD

SEQ ID NO: 48557 - protein, 7 aa, synthetic construct
MAHKSGP

SEQ ID NO: 48558 - protein, 7 aa, synthetic construct
RHLENLG

SEQ ID NO: 48559 - protein, 7 aa, synthetic construct
GTQRANA

SEQ ID NO: 48560 - protein, 7 aa, synthetic construct
GEDKAVI

SEQ ID NO: 48561 - protein, 7 aa, synthetic construct
NTAARNA

SEQ ID NO: 48562 - protein, 7 aa, synthetic construct
MSSGTNA

SEQ ID NO: 48563 - protein, 7 aa, synthetic construct
NQKGMNA

SEQ ID NO: 48564 - protein, 7 aa, synthetic construct
NPQSKQG

SEQ ID NO: 48565 - protein, 7 aa, synthetic construct
QNTRGNP

SEQ ID NO: 48566 - protein, 7 aa, synthetic construct
FGQKSVS

SEQ ID NO: 48567 - protein, 7 aa, synthetic construct
KSMNVMM

SEQ ID NO: 48568 - protein, 7 aa, synthetic construct
KGKLDST

SEQ ID NO: 48569 - protein, 7 aa, synthetic construct
SKAPVNG

SEQ ID NO: 48570 - protein, 7 aa, synthetic construct
FTNVGNV

SEQ ID NO: 48571 - protein, 7 aa, synthetic construct
KTMTGGP

SEQ ID NO: 48572 - protein, 7 aa, synthetic construct
SKQQTQA

SEQ ID NO: 48573 - protein, 7 aa, synthetic construct
GPGPVVA

SEQ ID NO: 48574 - protein, 7 aa, synthetic construct
TMESVKP

SEQ ID NO: 48575 - protein, 7 aa, synthetic construct
SDPRILR

SEQ ID NO: 48576 - protein, 7 aa, synthetic construct
LPMKSMG

SEQ ID NO: 48577 - protein, 7 aa, synthetic construct
GMSQKPA

SEQ ID NO: 48578 - protein, 7 aa, synthetic construct
SLSGRAE

SEQ ID NO: 48579 - protein, 7 aa, synthetic construct
RPSQPQT

SEQ ID NO: 48580 - protein, 7 aa, synthetic construct
FKNSGTM

SEQ ID NO: 48581 - protein, 7 aa, synthetic construct
RSQASQA

SEQ ID NO: 48582 - protein, 7 aa, synthetic construct
KPTNTQS

SEQ ID NO: 48583 - protein, 7 aa, synthetic construct
QAKPSNA

SEQ ID NO: 48584 - protein, 7 aa, synthetic construct
KTVKLIE

SEQ ID NO: 48585 - protein, 7 aa, synthetic construct
RQSSQMG

SEQ ID NO: 48586 - protein, 7 aa, synthetic construct
TQPSRQG

SEQ ID NO: 48587 - protein, 7 aa, synthetic construct
YKIGAKD

SEQ ID NO: 48588 - protein, 7 aa, synthetic construct
QRNAQPH

SEQ ID NO: 48589 - protein, 7 aa, synthetic construct
KSPSLIH

SEQ ID NO: 48590 - protein, 7 aa, synthetic construct
LTAHRTT

SEQ ID NO: 48591 - protein, 7 aa, synthetic construct
MKNVQGA

SEQ ID NO: 48592 - protein, 7 aa, synthetic construct
SKASVAG

SEQ ID NO: 48593 - protein, 7 aa, synthetic construct
RPQSATG

SEQ ID NO: 48594 - protein, 7 aa, synthetic construct
SRGNAGA

SEQ ID NO: 48595 - protein, 7 aa, synthetic construct
IHASNLI

SEQ ID NO: 48596 - protein, 7 aa, synthetic construct
SDQIYKG

SEQ ID NO: 48597 - protein, 7 aa, synthetic construct
MREGNRG

SEQ ID NO: 48598 - protein, 7 aa, synthetic construct
KQNGAAN

SEQ ID NO: 48599 - protein, 7 aa, synthetic construct
GYANKTA

SEQ ID NO: 48600 - protein, 7 aa, synthetic construct
QHFDANR

SEQ ID NO: 48601 - protein, 7 aa, synthetic construct
TKGTMPS

SEQ ID NO: 48602 - protein, 7 aa, synthetic construct
QERPVGA

SEQ ID NO: 48603 - protein, 7 aa, synthetic construct
RGSHFAA

SEQ ID NO: 48604 - protein, 7 aa, synthetic construct
YKPFFEE

SEQ ID NO: 48605 - protein, 7 aa, synthetic construct
MAKNQGN

SEQ ID NO: 48606 - protein, 7 aa, synthetic construct
KPNAPTG

SEQ ID NO: 48607 - protein, 7 aa, synthetic construct
LQRGEPP

SEQ ID NO: 48608 - protein, 7 aa, synthetic construct
NERMTTS

SEQ ID NO: 48609 - protein, 7 aa, synthetic construct
SGVRNAV

SEQ ID NO: 48610 - protein, 7 aa, synthetic construct
RNHGSVP

SEQ ID NO: 48611 - protein, 7 aa, synthetic construct
LSTLHTS

SEQ ID NO: 48612 - protein, 7 aa, synthetic construct
RPTYESG

SEQ ID NO: 48613 - protein, 7 aa, synthetic construct
KYLQEHP

SEQ ID NO: 48614 - protein, 7 aa, synthetic construct
GEGQKSP

SEQ ID NO: 48615 - protein, 7 aa, synthetic construct
RKNTSEP

SEQ ID NO: 48616 - protein, 7 aa, synthetic construct
HKPMPEA

SEQ ID NO: 48617 - protein, 7 aa, synthetic construct
DVRFKLE

SEQ ID NO: 48618 - protein, 7 aa, synthetic construct
NPIHKDR

SEQ ID NO: 48619 - protein, 7 aa, synthetic construct
KQGTASA

SEQ ID NO: 48620 - protein, 7 aa, synthetic construct
PGRTNMD

SEQ ID NO: 48621 - protein, 7 aa, synthetic construct
TPRGTMT

SEQ ID NO: 48622 - protein, 7 aa, synthetic construct
DKYRMNS

SEQ ID NO: 48623 - protein, 7 aa, synthetic construct
IKGNAVA

SEQ ID NO: 48624 - protein, 7 aa, synthetic construct
MPPKMYH

SEQ ID NO: 48625 - protein, 7 aa, synthetic construct
TYQKHAT

SEQ ID NO: 48626 - protein, 7 aa, synthetic construct
NGIGQRS

SEQ ID NO: 48627 - protein, 7 aa, synthetic construct
YNDIKSG

SEQ ID NO: 48628 - protein, 7 aa, synthetic construct
PTKTQSG

SEQ ID NO: 48629 - protein, 7 aa, synthetic construct
PIGQHRM

SEQ ID NO: 48630 - protein, 7 aa, synthetic construct
KAKDTGP

SEQ ID NO: 48631 - protein, 7 aa, synthetic construct
AKAQSGI

SEQ ID NO: 48632 - protein, 7 aa, synthetic construct
TKKEQSG

SEQ ID NO: 48633 - protein, 7 aa, synthetic construct
QNARTPQ

SEQ ID NO: 48634 - protein, 7 aa, synthetic construct
SPSKSVA

SEQ ID NO: 48635 - protein, 7 aa, synthetic construct
QRQTYMD

SEQ ID NO: 48636 - protein, 7 aa, synthetic construct
MKQKSGE

SEQ ID NO: 48637 - protein, 7 aa, synthetic construct
WLGKDKP

SEQ ID NO: 48638 - protein, 7 aa, synthetic construct
YRTEGHN

SEQ ID NO: 48639 - protein, 7 aa, synthetic construct
LTTFNVE

SEQ ID NO: 48640 - protein, 7 aa, synthetic construct
HSPTMTS

SEQ ID NO: 48641 - protein, 7 aa, synthetic construct
YSGHPHG

SEQ ID NO: 48642 - protein, 7 aa, synthetic construct
FHRNTHD

SEQ ID NO: 48643 - protein, 7 aa, synthetic construct
KFANGSA

SEQ ID NO: 48644 - protein, 7 aa, synthetic construct
TSRNDNP

SEQ ID NO: 48645 - protein, 7 aa, synthetic construct
RSSSATS

SEQ ID NO: 48646 - protein, 7 aa, synthetic construct
HNGSKIE

SEQ ID NO: 48647 - protein, 7 aa, synthetic construct
NHMKQGS

SEQ ID NO: 48648 - protein, 7 aa, synthetic construct
YKRELLS

SEQ ID NO: 48649 - protein, 7 aa, synthetic construct
NKGFAEP

SEQ ID NO: 48650 - protein, 7 aa, synthetic construct
HKMSVIS

SEQ ID NO: 48651 - protein, 7 aa, synthetic construct
NIHTSNF

SEQ ID NO: 48652 - protein, 7 aa, synthetic construct
PTPRQGG

SEQ ID NO: 48653 - protein, 7 aa, synthetic construct
SYDHSKS

SEQ ID NO: 48654 - protein, 7 aa, synthetic construct
HYGAPKT

SEQ ID NO: 48655 - protein, 7 aa, synthetic construct
VRPATQA

SEQ ID NO: 48656 - protein, 7 aa, synthetic construct
NQSARTG

SEQ ID NO: 48657 - protein, 7 aa, synthetic construct
KATPSNA

SEQ ID NO: 48658 - protein, 7 aa, synthetic construct
VPKLYNG

SEQ ID NO: 48659 - protein, 7 aa, synthetic construct
HAKVWAD

SEQ ID NO: 48660 - protein, 7 aa, synthetic construct
TTKRDDP

SEQ ID NO: 48661 - protein, 7 aa, synthetic construct
HGPNWER

SEQ ID NO: 48662 - protein, 7 aa, synthetic construct
LRTNNDI

SEQ ID NO: 48663 - protein, 7 aa, synthetic construct
ARSQQMG

SEQ ID NO: 48664 - protein, 7 aa, synthetic construct
VANMIHG

SEQ ID NO: 48665 - protein, 7 aa, synthetic construct
TYGTKQA

SEQ ID NO: 48666 - protein, 7 aa, synthetic construct
LNSQKQY

SEQ ID NO: 48667 - protein, 7 aa, synthetic construct
KSSASIG

SEQ ID NO: 48668 - protein, 7 aa, synthetic construct
YKSHMAD

SEQ ID NO: 48669 - protein, 7 aa, synthetic construct
QHKQIME

SEQ ID NO: 48670 - protein, 7 aa, synthetic construct
KYGNATA

SEQ ID NO: 48671 - protein, 7 aa, synthetic construct
MAQSRPT

SEQ ID NO: 48672 - protein, 7 aa, synthetic construct
QDVRQTK

SEQ ID NO: 48673 - protein, 7 aa, synthetic construct
EPGKMPG

SEQ ID NO: 48674 - protein, 7 aa, synthetic construct
TQGRVNI

SEQ ID NO: 48675 - protein, 7 aa, synthetic construct
VAGKVHF

SEQ ID NO: 48676 - protein, 7 aa, synthetic construct
GPALVKG

SEQ ID NO: 48677 - protein, 7 aa, synthetic construct
MRQSNVA

SEQ ID NO: 48678 - protein, 7 aa, synthetic construct
HANAGSG

SEQ ID NO: 48679 - protein, 7 aa, synthetic construct
NKWAASE

SEQ ID NO: 48680 - protein, 7 aa, synthetic construct
TKSAVQG

SEQ ID NO: 48681 - protein, 7 aa, synthetic construct
THSRTDH

SEQ ID NO: 48682 - protein, 7 aa, synthetic construct
TYSNKTG

SEQ ID NO: 48683 - protein, 7 aa, synthetic construct
MAPASHA

SEQ ID NO: 48684 - protein, 7 aa, synthetic construct
LSNKHTE

SEQ ID NO: 48685 - protein, 7 aa, synthetic construct
TSSKAMG

SEQ ID NO: 48686 - protein, 7 aa, synthetic construct
SYKQQLT

SEQ ID NO: 48687 - protein, 7 aa, synthetic construct
DPKFATE

SEQ ID NO: 48688 - protein, 7 aa, synthetic construct
WKGHSQD

SEQ ID NO: 48689 - protein, 7 aa, synthetic construct
GSGYQQA

SEQ ID NO: 48690 - protein, 7 aa, synthetic construct
VNSARNG

SEQ ID NO: 48691 - protein, 7 aa, synthetic construct
NMDYGKS

SEQ ID NO: 48692 - protein, 7 aa, synthetic construct
YPGALHT

SEQ ID NO: 48693 - protein, 7 aa, synthetic construct
QWQKQPS

SEQ ID NO: 48694 - protein, 7 aa, synthetic construct
RNNQMQG

SEQ ID NO: 48695 - protein, 7 aa, synthetic construct
FGKTTSG

SEQ ID NO: 48696 - protein, 7 aa, synthetic construct
VMKSGAG

SEQ ID NO: 48697 - protein, 7 aa, synthetic construct
ALKPEYG

SEQ ID NO: 48698 - protein, 7 aa, synthetic construct
PVKPPTA

SEQ ID NO: 48699 - protein, 7 aa, synthetic construct
WHQIAKG

SEQ ID NO: 48700 - protein, 7 aa, synthetic construct
AGTKIQF

SEQ ID NO: 48701 - protein, 7 aa, synthetic construct
MKNAPGG

SEQ ID NO: 48702 - protein, 7 aa, synthetic construct
SPRSPQH

SEQ ID NO: 48703 - protein, 7 aa, synthetic construct
RKETWGD

SEQ ID NO: 48704 - protein, 7 aa, synthetic construct
QIFTGKE

SEQ ID NO: 48705 - protein, 7 aa, synthetic construct
GKMMGKD

SEQ ID NO: 48706 - protein, 7 aa, synthetic construct
RTSQSSI

SEQ ID NO: 48707 - protein, 7 aa, synthetic construct
GVNRGTP

SEQ ID NO: 48708 - protein, 7 aa, synthetic construct
KNTNGIL

SEQ ID NO: 48709 - protein, 7 aa, synthetic construct
HMKNQVV

SEQ ID NO: 48710 - protein, 7 aa, synthetic construct
DVPRAAS

SEQ ID NO: 48711 - protein, 7 aa, synthetic construct
NLSVRDK

SEQ ID NO: 48712 - protein, 7 aa, synthetic construct
RYNVGPA

SEQ ID NO: 48713 - protein, 7 aa, synthetic construct
FAKVNTS

SEQ ID NO: 48714 - protein, 7 aa, synthetic construct
IVGRVTH

SEQ ID NO: 48715 - protein, 7 aa, synthetic construct
QRPSGFN

SEQ ID NO: 48716 - protein, 7 aa, synthetic construct
DQIPTRR

SEQ ID NO: 48717 - protein, 7 aa, synthetic construct
ARPVVDH

SEQ ID NO: 48718 - protein, 7 aa, synthetic construct
ATRAMSP

SEQ ID NO: 48719 - protein, 7 aa, synthetic construct
SKQDLTF

SEQ ID NO: 48720 - protein, 7 aa, synthetic construct
YPKVNFS

SEQ ID NO: 48721 - protein, 7 aa, synthetic construct
ARQTSTG

SEQ ID NO: 48722 - protein, 7 aa, synthetic construct
WHGTPPD

SEQ ID NO: 48723 - protein, 7 aa, synthetic construct
TNAKTVG

SEQ ID NO: 48724 - protein, 7 aa, synthetic construct
GRNTNAN

SEQ ID NO: 48725 - protein, 7 aa, synthetic construct
ADRKYAE

SEQ ID NO: 48726 - protein, 7 aa, synthetic construct
HYHNHGP

SEQ ID NO: 48727 - protein, 7 aa, synthetic construct
QARGNFV

SEQ ID NO: 48728 - protein, 7 aa, synthetic construct
RQSAYEG

SEQ ID NO: 48729 - protein, 7 aa, synthetic construct
RPQAQTV

SEQ ID NO: 48730 - protein, 7 aa, synthetic construct
WDKLTRM

SEQ ID NO: 48731 - protein, 7 aa, synthetic construct
QFPVTSG

SEQ ID NO: 48732 - protein, 7 aa, synthetic construct
WGKDLNF

SEQ ID NO: 48733 - protein, 7 aa, synthetic construct
IFNNINR

SEQ ID NO: 48734 - protein, 7 aa, synthetic construct
QMRSQQS

SEQ ID NO: 48735 - protein, 7 aa, synthetic construct
KNQPSQN

SEQ ID NO: 48736 - protein, 7 aa, synthetic construct
KQGASSP

SEQ ID NO: 48737 - protein, 7 aa, synthetic construct
GQGSSPG

SEQ ID NO: 48738 - protein, 7 aa, synthetic construct
QPLLHGG

SEQ ID NO: 48739 - protein, 7 aa, synthetic construct
TNGGLGG

SEQ ID NO: 48740 - protein, 7 aa, synthetic construct
FKPTGSS

SEQ ID NO: 48741 - protein, 7 aa, synthetic construct
YGGQRVS

SEQ ID NO: 48742 - protein, 7 aa, synthetic construct
SMKMNQG

SEQ ID NO: 48743 - protein, 7 aa, synthetic construct
NPQYHQS

SEQ ID NO: 48744 - protein, 7 aa, synthetic construct
YKGIANA

SEQ ID NO: 48745 - protein, 7 aa, synthetic construct
DEMRVKA

SEQ ID NO: 48746 - protein, 7 aa, synthetic construct
PNIKMGQ

SEQ ID NO: 48747 - protein, 7 aa, synthetic construct
IGQEKSQ

SEQ ID NO: 48748 - protein, 7 aa, synthetic construct
SKGTQAT

SEQ ID NO: 48749 - protein, 7 aa, synthetic construct
KDRSTHF

SEQ ID NO: 48750 - protein, 7 aa, synthetic construct
RQMGNNG

SEQ ID NO: 48751 - protein, 7 aa, synthetic construct
SKGTPQA

SEQ ID NO: 48752 - protein, 7 aa, synthetic construct
RLEQLTA

SEQ ID NO: 48753 - protein, 7 aa, synthetic construct
VKNNSGP

SEQ ID NO: 48754 - protein, 7 aa, synthetic construct
YNHDHKG

SEQ ID NO: 48755 - protein, 7 aa, synthetic construct
FANHTQG

SEQ ID NO: 48756 - protein, 7 aa, synthetic construct
GGSGKSG

SEQ ID NO: 48757 - protein, 7 aa, synthetic construct
KNGTYHP

SEQ ID NO: 48758 - protein, 7 aa, synthetic construct
GKNPNGA

SEQ ID NO: 48759 - protein, 7 aa, synthetic construct
NGPYSSG

SEQ ID NO: 48760 - protein, 7 aa, synthetic construct
KTSAQKE

SEQ ID NO: 48761 - protein, 7 aa, synthetic construct
PPKYNDP

SEQ ID NO: 48762 - protein, 7 aa, synthetic construct
FKNSPSS

SEQ ID NO: 48763 - protein, 7 aa, synthetic construct
PAIRATA

SEQ ID NO: 48764 - protein, 7 aa, synthetic construct
MPRGNQV

SEQ ID NO: 48765 - protein, 7 aa, synthetic construct
PTKGAHA

SEQ ID NO: 48766 - protein, 7 aa, synthetic construct
SQGRGDG

SEQ ID NO: 48767 - protein, 7 aa, synthetic construct
VGNRAGP

SEQ ID NO: 48768 - protein, 7 aa, synthetic construct
TRVKDLE

SEQ ID NO: 48769 - protein, 7 aa, synthetic construct
KQGAKQE

SEQ ID NO: 48770 - protein, 7 aa, synthetic construct
MNGSARG

SEQ ID NO: 48771 - protein, 7 aa, synthetic construct
AKMYTVD

SEQ ID NO: 48772 - protein, 7 aa, synthetic construct
RHHGYME

SEQ ID NO: 48773 - protein, 7 aa, synthetic construct
MVGMERS

SEQ ID NO: 48774 - protein, 7 aa, synthetic construct
QKTTAHP

SEQ ID NO: 48775 - protein, 7 aa, synthetic construct
VGKAIVG

SEQ ID NO: 48776 - protein, 7 aa, synthetic construct
NDMKYMK

SEQ ID NO: 48777 - protein, 7 aa, synthetic construct
YKNLTGA

SEQ ID NO: 48778 - protein, 7 aa, synthetic construct
LGPRTTG

SEQ ID NO: 48779 - protein, 7 aa, synthetic construct
HFTETSR

SEQ ID NO: 48780 - protein, 7 aa, synthetic construct
NKPTGQG

SEQ ID NO: 48781 - protein, 7 aa, synthetic construct
TPKGYQG

SEQ ID NO: 48782 - protein, 7 aa, synthetic construct
VGIKKDP

SEQ ID NO: 48783 - protein, 7 aa, synthetic construct
YGTKSTP

SEQ ID NO: 48784 - protein, 7 aa, synthetic construct
WKQHDNN

SEQ ID NO: 48785 - protein, 7 aa, synthetic construct
KKPGGVP

SEQ ID NO: 48786 - protein, 7 aa, synthetic construct
GNQQKNA

SEQ ID NO: 48787 - protein, 7 aa, synthetic construct
MNKNMQG

SEQ ID NO: 48788 - protein, 7 aa, synthetic construct
LPGQRLS

SEQ ID NO: 48789 - protein, 7 aa, synthetic construct
SMKSIGA

SEQ ID NO: 48790 - protein, 7 aa, synthetic construct
KTKMNED

SEQ ID NO: 48791 - protein, 7 aa, synthetic construct
ATSIRQG

SEQ ID NO: 48792 - protein, 7 aa, synthetic construct
MPKMEHW

SEQ ID NO: 48793 - protein, 7 aa, synthetic construct
SANHRPE

SEQ ID NO: 48794 - protein, 7 aa, synthetic construct
ISSKKDG

SEQ ID NO: 48795 - protein, 7 aa, synthetic construct
NKFQSPA

SEQ ID NO: 48796 - protein, 7 aa, synthetic construct
MPRTFQE

SEQ ID NO: 48797 - protein, 7 aa, synthetic construct
GNHPIIP

SEQ ID NO: 48798 - protein, 7 aa, synthetic construct
MMKVSAP

SEQ ID NO: 48799 - protein, 7 aa, synthetic construct
NRAPTGA

SEQ ID NO: 48800 - protein, 7 aa, synthetic construct
KTQGSMP

SEQ ID NO: 48801 - protein, 7 aa, synthetic construct
SAGIKIG

SEQ ID NO: 48802 - protein, 7 aa, synthetic construct
AKQVPAG

SEQ ID NO: 48803 - protein, 7 aa, synthetic construct
TRKEFQS

SEQ ID NO: 48804 - protein, 7 aa, synthetic construct
GELSPYP

SEQ ID NO: 48805 - protein, 7 aa, synthetic construct
QTKQGKD

SEQ ID NO: 48806 - protein, 7 aa, synthetic construct
GVKATSG

SEQ ID NO: 48807 - protein, 7 aa, synthetic construct
GKQSIKE

SEQ ID NO: 48808 - protein, 7 aa, synthetic construct
TVSTHQA

SEQ ID NO: 48809 - protein, 7 aa, synthetic construct
MRTPNIS

SEQ ID NO: 48810 - protein, 7 aa, synthetic construct
GLRAEPK

SEQ ID NO: 48811 - protein, 7 aa, synthetic construct
SMKHNQP

SEQ ID NO: 48812 - protein, 7 aa, synthetic construct
NLSKKDQ

SEQ ID NO: 48813 - protein, 7 aa, synthetic construct
SLHITTA

SEQ ID NO: 48814 - protein, 7 aa, synthetic construct
LTTGGVG

SEQ ID NO: 48815 - protein, 7 aa, synthetic construct
MRAGAQM

SEQ ID NO: 48816 - protein, 7 aa, synthetic construct
GAPNMSG

SEQ ID NO: 48817 - protein, 7 aa, synthetic construct
MKVKYDS

SEQ ID NO: 48818 - protein, 7 aa, synthetic construct
RDQMNGK

SEQ ID NO: 48819 - protein, 7 aa, synthetic construct
TDKRQQA

SEQ ID NO: 48820 - protein, 7 aa, synthetic construct
KMMNGEG

SEQ ID NO: 48821 - protein, 7 aa, synthetic construct
SMPGQAP

SEQ ID NO: 48822 - protein, 7 aa, synthetic construct
HIVKAGH

SEQ ID NO: 48823 - protein, 7 aa, synthetic construct
TRTHGSD

SEQ ID NO: 48824 - protein, 7 aa, synthetic construct
MRDSPPP

SEQ ID NO: 48825 - protein, 7 aa, synthetic construct
NSNIRNS

SEQ ID NO: 48826 - protein, 7 aa, synthetic construct
HQGKLSG

SEQ ID NO: 48827 - protein, 7 aa, synthetic construct
VSTKNGM

SEQ ID NO: 48828 - protein, 7 aa, synthetic construct
YAMNKGH

SEQ ID NO: 48829 - protein, 7 aa, synthetic construct
DNHITMK

SEQ ID NO: 48830 - protein, 7 aa, synthetic construct
GAKQGSN

SEQ ID NO: 48831 - protein, 7 aa, synthetic construct
PSIGGKQ

SEQ ID NO: 48832 - protein, 7 aa, synthetic construct
RGISGNI

SEQ ID NO: 48833 - protein, 7 aa, synthetic construct
SQHSAYS

SEQ ID NO: 48834 - protein, 7 aa, synthetic construct
RSNSAQP

SEQ ID NO: 48835 - protein, 7 aa, synthetic construct
MGKQLTQ

SEQ ID NO: 48836 - protein, 7 aa, synthetic construct
QFLQGKA

SEQ ID NO: 48837 - protein, 7 aa, synthetic construct
TPKASNG

SEQ ID NO: 48838 - protein, 7 aa, synthetic construct
QTKGGQG

SEQ ID NO: 48839 - protein, 7 aa, synthetic construct
KTSRDDG

SEQ ID NO: 48840 - protein, 7 aa, synthetic construct
QQTYTKN

SEQ ID NO: 48841 - protein, 7 aa, synthetic construct
LKVQGPH

SEQ ID NO: 48842 - protein, 7 aa, synthetic construct
VGPLAGG

SEQ ID NO: 48843 - protein, 7 aa, synthetic construct
NGNKAQG

SEQ ID NO: 48844 - protein, 7 aa, synthetic construct
THAHIVS

SEQ ID NO: 48845 - protein, 7 aa, synthetic construct
QRGMNGD

SEQ ID NO: 48846 - protein, 7 aa, synthetic construct
ERQGGPK

SEQ ID NO: 48847 - protein, 7 aa, synthetic construct
YIKHAHD

SEQ ID NO: 48848 - protein, 7 aa, synthetic construct
AKENKYV

SEQ ID NO: 48849 - protein, 7 aa, synthetic construct
GASMKTG

SEQ ID NO: 48850 - protein, 7 aa, synthetic construct
QKNTTTS

SEQ ID NO: 48851 - protein, 7 aa, synthetic construct
QKYGQAP

SEQ ID NO: 48852 - protein, 7 aa, synthetic construct
KASMGMN

SEQ ID NO: 48853 - protein, 7 aa, synthetic construct
PYKMQAE

SEQ ID NO: 48854 - protein, 7 aa, synthetic construct
FRNIHDE

SEQ ID NO: 48855 - protein, 7 aa, synthetic construct
DWTGKRT

SEQ ID NO: 48856 - protein, 7 aa, synthetic construct
FATTQNW

SEQ ID NO: 48857 - protein, 7 aa, synthetic construct
TNGRIQT

SEQ ID NO: 48858 - protein, 7 aa, synthetic construct
FGNAKQT

SEQ ID NO: 48859 - protein, 7 aa, synthetic construct
SHRDPTS

SEQ ID NO: 48860 - protein, 7 aa, synthetic construct
AKAANTY

SEQ ID NO: 48861 - protein, 7 aa, synthetic construct
QKAAVKD

SEQ ID NO: 48862 - protein, 7 aa, synthetic construct
INPNSMS

SEQ ID NO: 48863 - protein, 7 aa, synthetic construct
EQQIRIA

SEQ ID NO: 48864 - protein, 7 aa, synthetic construct
MSGNRVG

SEQ ID NO: 48865 - protein, 7 aa, synthetic construct
SHKRDED

SEQ ID NO: 48866 - protein, 7 aa, synthetic construct
YDQTARA

SEQ ID NO: 48867 - protein, 7 aa, synthetic construct
TRSATAG

SEQ ID NO: 48868 - protein, 7 aa, synthetic construct
RQPVDRV

SEQ ID NO: 48869 - protein, 7 aa, synthetic construct
TRNNMQD

SEQ ID NO: 48870 - protein, 7 aa, synthetic construct
STQRAAG

SEQ ID NO: 48871 - protein, 7 aa, synthetic construct
STGNSRS

SEQ ID NO: 48872 - protein, 7 aa, synthetic construct
KNTSIAA

SEQ ID NO: 48873 - protein, 7 aa, synthetic construct
HPAKGNP

SEQ ID NO: 48874 - protein, 7 aa, synthetic construct
RYQPNDK

SEQ ID NO: 48875 - protein, 7 aa, synthetic construct
YLDYINA

SEQ ID NO: 48876 - protein, 7 aa, synthetic construct
LTKPQDR

SEQ ID NO: 48877 - protein, 7 aa, synthetic construct
IRTIEME

SEQ ID NO: 48878 - protein, 7 aa, synthetic construct
PSNRTGD

SEQ ID NO: 48879 - protein, 7 aa, synthetic construct
GQKSVSS

SEQ ID NO: 48880 - protein, 7 aa, synthetic construct
GMRGEAS

SEQ ID NO: 48881 - protein, 7 aa, synthetic construct
IATYKNS

SEQ ID NO: 48882 - protein, 7 aa, synthetic construct
LSVNIPP

SEQ ID NO: 48883 - protein, 7 aa, synthetic construct
HHPHFTG

SEQ ID NO: 48884 - protein, 7 aa, synthetic construct
KLKGTVD

SEQ ID NO: 48885 - protein, 7 aa, synthetic construct
TLGSLKL

SEQ ID NO: 48886 - protein, 7 aa, synthetic construct
YGSTKMN

SEQ ID NO: 48887 - protein, 7 aa, synthetic construct
KQSAPQN

SEQ ID NO: 48888 - protein, 7 aa, synthetic construct
LNKHIMN

SEQ ID NO: 48889 - protein, 7 aa, synthetic construct
SKTSQQP

SEQ ID NO: 48890 - protein, 7 aa, synthetic construct
ARQHNQT

SEQ ID NO: 48891 - protein, 7 aa, synthetic construct
FDHHTPP

SEQ ID NO: 48892 - protein, 7 aa, synthetic construct
PYPGGRD

SEQ ID NO: 48893 - protein, 7 aa, synthetic construct
NAKATFI

SEQ ID NO: 48894 - protein, 7 aa, synthetic construct
KIRDATS

SEQ ID NO: 48895 - protein, 7 aa, synthetic construct
MSSGSKA

SEQ ID NO: 48896 - protein, 7 aa, synthetic construct
NKAGPNM

SEQ ID NO: 48897 - protein, 7 aa, synthetic construct
NMGAMRM

SEQ ID NO: 48898 - protein, 7 aa, synthetic construct
TSRSQGM

SEQ ID NO: 48899 - protein, 7 aa, synthetic construct
RQPNQTG

SEQ ID NO: 48900 - protein, 7 aa, synthetic construct
NMHTKSD

SEQ ID NO: 48901 - protein, 7 aa, synthetic construct
MGPRTGA

SEQ ID NO: 48902 - protein, 7 aa, synthetic construct
GGHKEVG

SEQ ID NO: 48903 - protein, 7 aa, synthetic construct
VSGMKTG

SEQ ID NO: 48904 - protein, 7 aa, synthetic construct
VKIPNFI

SEQ ID NO: 48905 - protein, 7 aa, synthetic construct
HFAHGHA

SEQ ID NO: 48906 - protein, 7 aa, synthetic construct
ERKTMAA

SEQ ID NO: 48907 - protein, 7 aa, synthetic construct
HGRPSLE

SEQ ID NO: 48908 - protein, 7 aa, synthetic construct
MVSTMKG

SEQ ID NO: 48909 - protein, 7 aa, synthetic construct
NEYQRAG

SEQ ID NO: 48910 - protein, 7 aa, synthetic construct
VKSVQSG

SEQ ID NO: 48911 - protein, 7 aa, synthetic construct
MVSGRQI

SEQ ID NO: 48912 - protein, 7 aa, synthetic construct
VVKYEKG

SEQ ID NO: 48913 - protein, 7 aa, synthetic construct
QLKWSVE

SEQ ID NO: 48914 - protein, 7 aa, synthetic construct
GQSVHNM

SEQ ID NO: 48915 - protein, 7 aa, synthetic construct
SNQVHHH

SEQ ID NO: 48916 - protein, 7 aa, synthetic construct
TGPTRRD

SEQ ID NO: 48917 - protein, 7 aa, synthetic construct
QQSGGNM

SEQ ID NO: 48918 - protein, 7 aa, synthetic construct
NPGKAMS

SEQ ID NO: 48919 - protein, 7 aa, synthetic construct
KFNNQGA

SEQ ID NO: 48920 - protein, 7 aa, synthetic construct
VHAFGVD

SEQ ID NO: 48921 - protein, 7 aa, synthetic construct
SKVSTGG

SEQ ID NO: 48922 - protein, 7 aa, synthetic construct
VRTGGAD

SEQ ID NO: 48923 - protein, 7 aa, synthetic construct
YGNMNNS

SEQ ID NO: 48924 - protein, 7 aa, synthetic construct
KTNMVSG

SEQ ID NO: 48925 - protein, 7 aa, synthetic construct
QVVKFPG

SEQ ID NO: 48926 - protein, 7 aa, synthetic construct
RAGMNYI

SEQ ID NO: 48927 - protein, 7 aa, synthetic construct
TGKQTTA

SEQ ID NO: 48928 - protein, 7 aa, synthetic construct
LSGMRQV

SEQ ID NO: 48929 - protein, 7 aa, synthetic construct
GTGNNKN

SEQ ID NO: 48930 - protein, 7 aa, synthetic construct
HTKGPNN

SEQ ID NO: 48931 - protein, 7 aa, synthetic construct
YTAKSSL

SEQ ID NO: 48932 - protein, 7 aa, synthetic construct
EKMTPKS

SEQ ID NO: 48933 - protein, 7 aa, synthetic construct
QIPQNQG

SEQ ID NO: 48934 - protein, 7 aa, synthetic construct
AQKTSAA

SEQ ID NO: 48935 - protein, 7 aa, synthetic construct
INNSMPK

SEQ ID NO: 48936 - protein, 7 aa, synthetic construct
TRGTQDG

SEQ ID NO: 48937 - protein, 7 aa, synthetic construct
NTGVNKG

SEQ ID NO: 48938 - protein, 7 aa, synthetic construct
MRNTEQR

SEQ ID NO: 48939 - protein, 7 aa, synthetic construct
FNKAAHM

SEQ ID NO: 48940 - protein, 7 aa, synthetic construct
GGSIRET

SEQ ID NO: 48941 - protein, 7 aa, synthetic construct
GPPNKSL

SEQ ID NO: 48942 - protein, 7 aa, synthetic construct
WGQRGND

SEQ ID NO: 48943 - protein, 7 aa, synthetic construct
TKSAAKE

SEQ ID NO: 48944 - protein, 7 aa, synthetic construct
NAKYSQG

SEQ ID NO: 48945 - protein, 7 aa, synthetic construct
LTRPNSF

SEQ ID NO: 48946 - protein, 7 aa, synthetic construct
VVKGQGQ

SEQ ID NO: 48947 - protein, 7 aa, synthetic construct
WIQKHDM

SEQ ID NO: 48948 - protein, 7 aa, synthetic construct
VKTNMSG

SEQ ID NO: 48949 - protein, 7 aa, synthetic construct
SAPTHQG

SEQ ID NO: 48950 - protein, 7 aa, synthetic construct
QAALHKT

SEQ ID NO: 48951 - protein, 7 aa, synthetic construct
PRSTGQG

SEQ ID NO: 48952 - protein, 7 aa, synthetic construct
NYNHIQN

SEQ ID NO: 48953 - protein, 7 aa, synthetic construct
NLNSIRG

SEQ ID NO: 48954 - protein, 7 aa, synthetic construct
RMDRMGD

SEQ ID NO: 48955 - protein, 7 aa, synthetic construct
FPKTADG

SEQ ID NO: 48956 - protein, 7 aa, synthetic construct
KKVANQE

SEQ ID NO: 48957 - protein, 7 aa, synthetic construct
VRNMGQA

SEQ ID NO: 48958 - protein, 7 aa, synthetic construct
SKGQVAM

SEQ ID NO: 48959 - protein, 7 aa, synthetic construct
PRQSSGM

SEQ ID NO: 48960 - protein, 7 aa, synthetic construct
TEHGHKA

SEQ ID NO: 48961 - protein, 7 aa, synthetic construct
RREGLGM

SEQ ID NO: 48962 - protein, 7 aa, synthetic construct
QRDTHYA

SEQ ID NO: 48963 - protein, 7 aa, synthetic construct
QGRPETF

SEQ ID NO: 48964 - protein, 7 aa, synthetic construct
ILSAKDT

SEQ ID NO: 48965 - protein, 7 aa, synthetic construct
LGKTSGG

SEQ ID NO: 48966 - protein, 7 aa, synthetic construct
HGAYNTP

SEQ ID NO: 48967 - protein, 7 aa, synthetic construct
DGRSSVA

SEQ ID NO: 48968 - protein, 7 aa, synthetic construct
TYKNHLP

SEQ ID NO: 48969 - protein, 7 aa, synthetic construct
KSVSNQA

SEQ ID NO: 48970 - protein, 7 aa, synthetic construct
QDGKRQF

SEQ ID NO: 48971 - protein, 7 aa, synthetic construct
ESRSNQG

SEQ ID NO: 48972 - protein, 7 aa, synthetic construct
TKPAMAG

SEQ ID NO: 48973 - protein, 7 aa, synthetic construct
PKNSNGS

SEQ ID NO: 48974 - protein, 7 aa, synthetic construct
MPQRRID

SEQ ID NO: 48975 - protein, 7 aa, synthetic construct
PYRSSEG

SEQ ID NO: 48976 - protein, 7 aa, synthetic construct
YHPKYTG

SEQ ID NO: 48977 - protein, 7 aa, synthetic construct
TPKNQPS

SEQ ID NO: 48978 - protein, 7 aa, synthetic construct
YPAGATN

SEQ ID NO: 48979 - protein, 7 aa, synthetic construct
KGMAMNS

SEQ ID NO: 48980 - protein, 7 aa, synthetic construct
LNAARPP

SEQ ID NO: 48981 - protein, 7 aa, synthetic construct
QKPVPMQ

SEQ ID NO: 48982 - protein, 7 aa, synthetic construct
PNGQRQG

SEQ ID NO: 48983 - protein, 7 aa, synthetic construct
QPKSAHT

SEQ ID NO: 48984 - protein, 7 aa, synthetic construct
LGNKYNG

SEQ ID NO: 48985 - protein, 7 aa, synthetic construct
SVSPSVK

SEQ ID NO: 48986 - protein, 7 aa, synthetic construct
WHPKAQP

SEQ ID NO: 48987 - protein, 7 aa, synthetic construct
GKATMRE

SEQ ID NO: 48988 - protein, 7 aa, synthetic construct
NHSAKVV

SEQ ID NO: 48989 - protein, 7 aa, synthetic construct
KNQPGMA

SEQ ID NO: 48990 - protein, 7 aa, synthetic construct
KQNIGAM

SEQ ID NO: 48991 - protein, 7 aa, synthetic construct
TRIHGMA

SEQ ID NO: 48992 - protein, 7 aa, synthetic construct
TGSSAKL

SEQ ID NO: 48993 - protein, 7 aa, synthetic construct
NQKPSQG

SEQ ID NO: 48994 - protein, 7 aa, synthetic construct
KSINSQI

SEQ ID NO: 48995 - protein, 7 aa, synthetic construct
LNTNKLY

SEQ ID NO: 48996 - protein, 7 aa, synthetic construct
NHYMVKG

SEQ ID NO: 48997 - protein, 7 aa, synthetic construct
GALQSRQ

SEQ ID NO: 48998 - protein, 7 aa, synthetic construct
MHGPNVA

SEQ ID NO: 48999 - protein, 7 aa, synthetic construct
HGKATSE

SEQ ID NO: 49000 - protein, 7 aa, synthetic construct
SSQTKLP

SEQ ID NO: 49001 - protein, 7 aa, synthetic construct
YANKQYT

SEQ ID NO: 49002 - protein, 7 aa, synthetic construct
QHPKYQM

SEQ ID NO: 49003 - protein, 7 aa, synthetic construct
RNPNVNA

SEQ ID NO: 49004 - protein, 7 aa, synthetic construct
HSQGMKM

SEQ ID NO: 49005 - protein, 7 aa, synthetic construct
TKMNGSG

SEQ ID NO: 49006 - protein, 7 aa, synthetic construct
PFKEKGM

SEQ ID NO: 49007 - protein, 7 aa, synthetic construct
SQRSHIG

SEQ ID NO: 49008 - protein, 7 aa, synthetic construct
RIGARME

SEQ ID NO: 49009 - protein, 7 aa, synthetic construct
SQNRQSF

SEQ ID NO: 49010 - protein, 7 aa, synthetic construct
PTRQSNG

SEQ ID NO: 49011 - protein, 7 aa, synthetic construct
PPKQSGG

SEQ ID NO: 49012 - protein, 7 aa, synthetic construct
QSPNRAA

SEQ ID NO: 49013 - protein, 7 aa, synthetic construct
WGRDTRQ

SEQ ID NO: 49014 - protein, 7 aa, synthetic construct
HPGGREG

SEQ ID NO: 49015 - protein, 7 aa, synthetic construct
GQGSQKA

SEQ ID NO: 49016 - protein, 7 aa, synthetic construct
LPSRGDH

SEQ ID NO: 49017 - protein, 7 aa, synthetic construct
VQMKSNA

SEQ ID NO: 49018 - protein, 7 aa, synthetic construct
HFDMMKN

SEQ ID NO: 49019 - protein, 7 aa, synthetic construct
SQPPFLG

SEQ ID NO: 49020 - protein, 7 aa, synthetic construct
NGAAKAG

SEQ ID NO: 49021 - protein, 7 aa, synthetic construct
VGHRGDG

SEQ ID NO: 49022 - protein, 7 aa, synthetic construct
GTREKER

SEQ ID NO: 49023 - protein, 7 aa, synthetic construct
TNRAPGL

SEQ ID NO: 49024 - protein, 7 aa, synthetic construct
RPTGMSG

SEQ ID NO: 49025 - protein, 7 aa, synthetic construct
KYPMGKD

SEQ ID NO: 49026 - protein, 7 aa, synthetic construct
QPTMHSG

SEQ ID NO: 49027 - protein, 7 aa, synthetic construct
PGKSTTG

SEQ ID NO: 49028 - protein, 7 aa, synthetic construct
YERHSIN

SEQ ID NO: 49029 - protein, 7 aa, synthetic construct
TAVKYLE

SEQ ID NO: 49030 - protein, 7 aa, synthetic construct
ALPKDGH

SEQ ID NO: 49031 - protein, 7 aa, synthetic construct
NSKQNAG

SEQ ID NO: 49032 - protein, 7 aa, synthetic construct
QQTGRSP

SEQ ID NO: 49033 - protein, 7 aa, synthetic construct
KPAGGGS

SEQ ID NO: 49034 - protein, 7 aa, synthetic construct
FTRQANS

SEQ ID NO: 49035 - protein, 7 aa, synthetic construct
LTNASSH

SEQ ID NO: 49036 - protein, 7 aa, synthetic construct
QKNVPTA

SEQ ID NO: 49037 - protein, 7 aa, synthetic construct
NYNDKKL

SEQ ID NO: 49038 - protein, 7 aa, synthetic construct
FGQTKGG

SEQ ID NO: 49039 - protein, 7 aa, synthetic construct
MKSSFTG

SEQ ID NO: 49040 - protein, 7 aa, synthetic construct
ERGRGTE

SEQ ID NO: 49041 - protein, 7 aa, synthetic construct
LANRNEH

SEQ ID NO: 49042 - protein, 7 aa, synthetic construct
ARTTAGG

SEQ ID NO: 49043 - protein, 7 aa, synthetic construct
SKNGNAA

SEQ ID NO: 49044 - protein, 7 aa, synthetic construct
RAVAAHG

SEQ ID NO: 49045 - protein, 7 aa, synthetic construct
RHYDPKD

SEQ ID NO: 49046 - protein, 7 aa, synthetic construct
TLQFAGM

SEQ ID NO: 49047 - protein, 7 aa, synthetic construct
YAKSTQA

SEQ ID NO: 49048 - protein, 7 aa, synthetic construct
MSNGRVG

SEQ ID NO: 49049 - protein, 7 aa, synthetic construct
VQHVRHS

SEQ ID NO: 49050 - protein, 7 aa, synthetic construct
NKPAYQG

SEQ ID NO: 49051 - protein, 7 aa, synthetic construct
ATPGARG

SEQ ID NO: 49052 - protein, 7 aa, synthetic construct
SANTTFR

SEQ ID NO: 49053 - protein, 7 aa, synthetic construct
KPAGQGQ

SEQ ID NO: 49054 - protein, 7 aa, synthetic construct
NHKTHEG

SEQ ID NO: 49055 - protein, 7 aa, synthetic construct
NKSYSSG

SEQ ID NO: 49056 - protein, 7 aa, synthetic construct
MNQHMIG

SEQ ID NO: 49057 - protein, 7 aa, synthetic construct
HHQMGQV

SEQ ID NO: 49058 - protein, 7 aa, synthetic construct
RQSSVAP

SEQ ID NO: 49059 - protein, 7 aa, synthetic construct
LYKEVPG

SEQ ID NO: 49060 - protein, 7 aa, synthetic construct
YGVTHKE

SEQ ID NO: 49061 - protein, 7 aa, synthetic construct
RTNQTSS

SEQ ID NO: 49062 - protein, 7 aa, synthetic construct
TPSHIAG

SEQ ID NO: 49063 - protein, 7 aa, synthetic construct
MTLRSVP

SEQ ID NO: 49064 - protein, 7 aa, synthetic construct
SMKGAAG

SEQ ID NO: 49065 - protein, 7 aa, synthetic construct
AWNTAGP

SEQ ID NO: 49066 - protein, 7 aa, synthetic construct
MNNSMGG

SEQ ID NO: 49067 - protein, 7 aa, synthetic construct
KTQNGSA

SEQ ID NO: 49068 - protein, 7 aa, synthetic construct
HDRQRPG

SEQ ID NO: 49069 - protein, 7 aa, synthetic construct
TTKSKDA

SEQ ID NO: 49070 - protein, 7 aa, synthetic construct
QNSQAKS

SEQ ID NO: 49071 - protein, 7 aa, synthetic construct
QIGAKIE

SEQ ID NO: 49072 - protein, 7 aa, synthetic construct
NRVSTNA

SEQ ID NO: 49073 - protein, 7 aa, synthetic construct
VPKNIKE

SEQ ID NO: 49074 - protein, 7 aa, synthetic construct
TKTAPAV

SEQ ID NO: 49075 - protein, 7 aa, synthetic construct
NKSSASA

SEQ ID NO: 49076 - protein, 7 aa, synthetic construct
TMQRQSS

SEQ ID NO: 49077 - protein, 7 aa, synthetic construct
MVVNTQG

SEQ ID NO: 49078 - protein, 7 aa, synthetic construct
STQRQVG

SEQ ID NO: 49079 - protein, 7 aa, synthetic construct
TGHKLTG

SEQ ID NO: 49080 - protein, 7 aa, synthetic construct
TPRTGNP

SEQ ID NO: 49081 - protein, 7 aa, synthetic construct
GEKKTGN

SEQ ID NO: 49082 - protein, 7 aa, synthetic construct
GQDQRKD

SEQ ID NO: 49083 - protein, 7 aa, synthetic construct
NLKTSQG

SEQ ID NO: 49084 - protein, 7 aa, synthetic construct
TKPMKNE

SEQ ID NO: 49085 - protein, 7 aa, synthetic construct
SKAHVVG

SEQ ID NO: 49086 - protein, 7 aa, synthetic construct
DNRKSTY

SEQ ID NO: 49087 - protein, 7 aa, synthetic construct
TRGPPSN

SEQ ID NO: 49088 - protein, 7 aa, synthetic construct
FVHLKGS

SEQ ID NO: 49089 - protein, 7 aa, synthetic construct
VKNMSQV

SEQ ID NO: 49090 - protein, 7 aa, synthetic construct
GPEMRMQ

SEQ ID NO: 49091 - protein, 7 aa, synthetic construct
NAGRTSA

SEQ ID NO: 49092 - protein, 7 aa, synthetic construct
FMAHKVA

SEQ ID NO: 49093 - protein, 7 aa, synthetic construct
HGMVITG

SEQ ID NO: 49094 - protein, 7 aa, synthetic construct
RQHQVLD

SEQ ID NO: 49095 - protein, 7 aa, synthetic construct
VAQNRPQ

SEQ ID NO: 49096 - protein, 7 aa, synthetic construct
NQKASSP

SEQ ID NO: 49097 - protein, 7 aa, synthetic construct
MRGSSAA

SEQ ID NO: 49098 - protein, 7 aa, synthetic construct
KSSSAGY

SEQ ID NO: 49099 - protein, 7 aa, synthetic construct
MARTMDV

SEQ ID NO: 49100 - protein, 7 aa, synthetic construct
MVMNEKR

SEQ ID NO: 49101 - protein, 7 aa, synthetic construct
KNNGNSP

SEQ ID NO: 49102 - protein, 7 aa, synthetic construct
HTLKNIQ

SEQ ID NO: 49103 - protein, 7 aa, synthetic construct
TAAKMAS

SEQ ID NO: 49104 - protein, 7 aa, synthetic construct
PPAGGHH

SEQ ID NO: 49105 - protein, 7 aa, synthetic construct
HWKDPHG

SEQ ID NO: 49106 - protein, 7 aa, synthetic construct
KETRTVG

SEQ ID NO: 49107 - protein, 7 aa, synthetic construct
LFPREHT

SEQ ID NO: 49108 - protein, 7 aa, synthetic construct
AKSKLTE

SEQ ID NO: 49109 - protein, 7 aa, synthetic construct
GFADQHK

SEQ ID NO: 49110 - protein, 7 aa, synthetic construct
FQSGGQS

SEQ ID NO: 49111 - protein, 7 aa, synthetic construct
KGNLGSV

SEQ ID NO: 49112 - protein, 7 aa, synthetic construct
NFSKAGG

SEQ ID NO: 49113 - protein, 7 aa, synthetic construct
ITKFSHN

SEQ ID NO: 49114 - protein, 7 aa, synthetic construct
NHARSNP

SEQ ID NO: 49115 - protein, 7 aa, synthetic construct
GFLGQHA

SEQ ID NO: 49116 - protein, 7 aa, synthetic construct
TQGVKKD

SEQ ID NO: 49117 - protein, 7 aa, synthetic construct
MARTQAG

SEQ ID NO: 49118 - protein, 7 aa, synthetic construct
VKNTSGP

SEQ ID NO: 49119 - protein, 7 aa, synthetic construct
SRAISHM

SEQ ID NO: 49120 - protein, 7 aa, synthetic construct
KATNQMG

SEQ ID NO: 49121 - protein, 7 aa, synthetic construct
REITGKG

SEQ ID NO: 49122 - protein, 7 aa, synthetic construct
LETKTKL

SEQ ID NO: 49123 - protein, 7 aa, synthetic construct
QKKDTSS

SEQ ID NO: 49124 - protein, 7 aa, synthetic construct
QNRNNGG

SEQ ID NO: 49125 - protein, 7 aa, synthetic construct
EKKQNQA

SEQ ID NO: 49126 - protein, 7 aa, synthetic construct
PKTQSIG

SEQ ID NO: 49127 - protein, 7 aa, synthetic construct
KAKEINT

SEQ ID NO: 49128 - protein, 7 aa, synthetic construct
AKPGKPA

SEQ ID NO: 49129 - protein, 7 aa, synthetic construct
NQKSQAG

SEQ ID NO: 49130 - protein, 7 aa, synthetic construct
QGPAYKI

SEQ ID NO: 49131 - protein, 7 aa, synthetic construct
FGIGDTK

SEQ ID NO: 49132 - protein, 7 aa, synthetic construct
RNNIHIQ

SEQ ID NO: 49133 - protein, 7 aa, synthetic construct
KNSDKQG

SEQ ID NO: 49134 - protein, 7 aa, synthetic construct
ISKFIDR

SEQ ID NO: 49135 - protein, 7 aa, synthetic construct
QKQNGQP

SEQ ID NO: 49136 - protein, 7 aa, synthetic construct
GRFSQSM

SEQ ID NO: 49137 - protein, 7 aa, synthetic construct
LYLSTNP

SEQ ID NO: 49138 - protein, 7 aa, synthetic construct
NRNSGNV

SEQ ID NO: 49139 - protein, 7 aa, synthetic construct
QMARPMQ

SEQ ID NO: 49140 - protein, 7 aa, synthetic construct
DMSAKRE

SEQ ID NO: 49141 - protein, 7 aa, synthetic construct
AHSTKSP

SEQ ID NO: 49142 - protein, 7 aa, synthetic construct
VQAQKSP

SEQ ID NO: 49143 - protein, 7 aa, synthetic construct
WRDGKGH

SEQ ID NO: 49144 - protein, 7 aa, synthetic construct
TAQNKTP

SEQ ID NO: 49145 - protein, 7 aa, synthetic construct
QRKEVVS

SEQ ID NO: 49146 - protein, 7 aa, synthetic construct
RPGSNMV

SEQ ID NO: 49147 - protein, 7 aa, synthetic construct
VRNQQQA

SEQ ID NO: 49148 - protein, 7 aa, synthetic construct
NAPRIGA

SEQ ID NO: 49149 - protein, 7 aa, synthetic construct
PKYNEQG

SEQ ID NO: 49150 - protein, 7 aa, synthetic construct
FQTTKPD

SEQ ID NO: 49151 - protein, 7 aa, synthetic construct
QKEKMSG

SEQ ID NO: 49152 - protein, 7 aa, synthetic construct
MWDQGLA

SEQ ID NO: 49153 - protein, 7 aa, synthetic construct
KGARFDS

SEQ ID NO: 49154 - protein, 7 aa, synthetic construct
YKTNTTN

SEQ ID NO: 49155 - protein, 7 aa, synthetic construct
NREGVHF

SEQ ID NO: 49156 - protein, 7 aa, synthetic construct
YGASKTP

SEQ ID NO: 49157 - protein, 7 aa, synthetic construct
KEQANTA

SEQ ID NO: 49158 - protein, 7 aa, synthetic construct
KKETFAG

SEQ ID NO: 49159 - protein, 7 aa, synthetic construct
LSNPKTP

SEQ ID NO: 49160 - protein, 7 aa, synthetic construct
SGRHSDD

SEQ ID NO: 49161 - protein, 7 aa, synthetic construct
SSVKRDV

SEQ ID NO: 49162 - protein, 7 aa, synthetic construct
YAGQSIT

SEQ ID NO: 49163 - protein, 7 aa, synthetic construct
RVGAGQV

SEQ ID NO: 49164 - protein, 7 aa, synthetic construct
TQTGRSP

SEQ ID NO: 49165 - protein, 7 aa, synthetic construct
MHTATTM

SEQ ID NO: 49166 - protein, 7 aa, synthetic construct
YHKQHNE

SEQ ID NO: 49167 - protein, 7 aa, synthetic construct
DRRDGYS

SEQ ID NO: 49168 - protein, 7 aa, synthetic construct
KTSGVGY

SEQ ID NO: 49169 - protein, 7 aa, synthetic construct
TTTQPYA

SEQ ID NO: 49170 - protein, 7 aa, synthetic construct
TIVQGQP

SEQ ID NO: 49171 - protein, 7 aa, synthetic construct
LGKHDAF

SEQ ID NO: 49172 - protein, 7 aa, synthetic construct
MTEITRN

SEQ ID NO: 49173 - protein, 7 aa, synthetic construct
IKPRPYE

SEQ ID NO: 49174 - protein, 7 aa, synthetic construct
LKEGKLG

SEQ ID NO: 49175 - protein, 7 aa, synthetic construct
VNPRHDA

SEQ ID NO: 49176 - protein, 7 aa, synthetic construct
MKFDHAN

SEQ ID NO: 49177 - protein, 7 aa, synthetic construct
APRVANV

SEQ ID NO: 49178 - protein, 7 aa, synthetic construct
IPFPSQE

SEQ ID NO: 49179 - protein, 7 aa, synthetic construct
SKIGNPV

SEQ ID NO: 49180 - protein, 7 aa, synthetic construct
FVPTRQQ

SEQ ID NO: 49181 - protein, 7 aa, synthetic construct
YPGATLN

SEQ ID NO: 49182 - protein, 7 aa, synthetic construct
PYKVSTQ

SEQ ID NO: 49183 - protein, 7 aa, synthetic construct
MGKHPIT

SEQ ID NO: 49184 - protein, 7 aa, synthetic construct
QTSRQGH

SEQ ID NO: 49185 - protein, 7 aa, synthetic construct
NTAAGHS

SEQ ID NO: 49186 - protein, 7 aa, synthetic construct
REKGGSW

SEQ ID NO: 49187 - protein, 7 aa, synthetic construct
GLAVGQG

SEQ ID NO: 49188 - protein, 7 aa, synthetic construct
TAKTGGA

SEQ ID NO: 49189 - protein, 7 aa, synthetic construct
QVKNGGG

SEQ ID NO: 49190 - protein, 7 aa, synthetic construct
YNGGMAS

SEQ ID NO: 49191 - protein, 7 aa, synthetic construct
AKTMSQN

SEQ ID NO: 49192 - protein, 7 aa, synthetic construct
VRNSEPG

SEQ ID NO: 49193 - protein, 7 aa, synthetic construct
TRINMSQ

SEQ ID NO: 49194 - protein, 7 aa, synthetic construct
SKPAVSA

SEQ ID NO: 49195 - protein, 7 aa, synthetic construct
PPTQMER

SEQ ID NO: 49196 - protein, 7 aa, synthetic construct
FLKMTSA

SEQ ID NO: 49197 - protein, 7 aa, synthetic construct
KSQQSIT

SEQ ID NO: 49198 - protein, 7 aa, synthetic construct
VTARPTN

SEQ ID NO: 49199 - protein, 7 aa, synthetic construct
TYHKEHA

SEQ ID NO: 49200 - protein, 7 aa, synthetic construct
SKQMHIP

SEQ ID NO: 49201 - protein, 7 aa, synthetic construct
VRPFDQE

SEQ ID NO: 49202 - protein, 7 aa, synthetic construct
RSNGVVT

SEQ ID NO: 49203 - protein, 7 aa, synthetic construct
LKNSAPA

SEQ ID NO: 49204 - protein, 7 aa, synthetic construct
RARTEGG

SEQ ID NO: 49205 - protein, 7 aa, synthetic construct
NNANKAA

SEQ ID NO: 49206 - protein, 7 aa, synthetic construct
KNSAVNG

SEQ ID NO: 49207 - protein, 7 aa, synthetic construct
DGLRKTN

SEQ ID NO: 49208 - protein, 7 aa, synthetic construct
GMSPSKG

SEQ ID NO: 49209 - protein, 7 aa, synthetic construct
HTALGAD

SEQ ID NO: 49210 - protein, 7 aa, synthetic construct
HVPRHAG

SEQ ID NO: 49211 - protein, 7 aa, synthetic construct
MSRSPTS

SEQ ID NO: 49212 - protein, 7 aa, synthetic construct
NGKVSHT

SEQ ID NO: 49213 - protein, 7 aa, synthetic construct
NKPSMDL

SEQ ID NO: 49214 - protein, 7 aa, synthetic construct
TVQARQG

SEQ ID NO: 49215 - protein, 7 aa, synthetic construct
GYNKPHN

SEQ ID NO: 49216 - protein, 7 aa, synthetic construct
TTHAAGV

SEQ ID NO: 49217 - protein, 7 aa, synthetic construct
HMAGRMA

SEQ ID NO: 49218 - protein, 7 aa, synthetic construct
NPGGKIG

SEQ ID NO: 49219 - protein, 7 aa, synthetic construct
QRDGWSP

SEQ ID NO: 49220 - protein, 7 aa, synthetic construct
GHQTVMQ

SEQ ID NO: 49221 - protein, 7 aa, synthetic construct
QHFKPPS

SEQ ID NO: 49222 - protein, 7 aa, synthetic construct
SVTHTQN

SEQ ID NO: 49223 - protein, 7 aa, synthetic construct
KANTASA

SEQ ID NO: 49224 - protein, 7 aa, synthetic construct
DKARGPL

SEQ ID NO: 49225 - protein, 7 aa, synthetic construct
RAHQEAF

SEQ ID NO: 49226 - protein, 7 aa, synthetic construct
STMKFHE

SEQ ID NO: 49227 - protein, 7 aa, synthetic construct
YHDMNGK

SEQ ID NO: 49228 - protein, 7 aa, synthetic construct
NPGTKMG

SEQ ID NO: 49229 - protein, 7 aa, synthetic construct
GSPSKTA

SEQ ID NO: 49230 - protein, 7 aa, synthetic construct
PMSGHTI

SEQ ID NO: 49231 - protein, 7 aa, synthetic construct
TLKVPNI

SEQ ID NO: 49232 - protein, 7 aa, synthetic construct
AIGIHTD

SEQ ID NO: 49233 - protein, 7 aa, synthetic construct
TSRNNVA

SEQ ID NO: 49234 - protein, 7 aa, synthetic construct
FKGGIAA

SEQ ID NO: 49235 - protein, 7 aa, synthetic construct
GGRFNGD

SEQ ID NO: 49236 - protein, 7 aa, synthetic construct
MMKSGQG

SEQ ID NO: 49237 - protein, 7 aa, synthetic construct
IGKVVVA

SEQ ID NO: 49238 - protein, 7 aa, synthetic construct
RSQTSQM

SEQ ID NO: 49239 - protein, 7 aa, synthetic construct
MLKAIPN

SEQ ID NO: 49240 - protein, 7 aa, synthetic construct
YELNKTR

SEQ ID NO: 49241 - protein, 7 aa, synthetic construct
ELGNRGA

SEQ ID NO: 49242 - protein, 7 aa, synthetic construct
QAAGSGH

SEQ ID NO: 49243 - protein, 7 aa, synthetic construct
HGQHYGS

SEQ ID NO: 49244 - protein, 7 aa, synthetic construct
IRPAGSV

SEQ ID NO: 49245 - protein, 7 aa, synthetic construct
HFHEPDR

SEQ ID NO: 49246 - protein, 7 aa, synthetic construct
DTHFSPR

SEQ ID NO: 49247 - protein, 7 aa, synthetic construct
SGKTQMA

SEQ ID NO: 49248 - protein, 7 aa, synthetic construct
RTGNSTP

SEQ ID NO: 49249 - protein, 7 aa, synthetic construct
ASSIKTS

SEQ ID NO: 49250 - protein, 7 aa, synthetic construct
VKNPANG

SEQ ID NO: 49251 - protein, 7 aa, synthetic construct
NQKSPGS

SEQ ID NO: 49252 - protein, 7 aa, synthetic construct
RFQGQST

SEQ ID NO: 49253 - protein, 7 aa, synthetic construct
TGTRSNP

SEQ ID NO: 49254 - protein, 7 aa, synthetic construct
HATGMGF

SEQ ID NO: 49255 - protein, 7 aa, synthetic construct
DNYAHKA

SEQ ID NO: 49256 - protein, 7 aa, synthetic construct
KNNQVSG

SEQ ID NO: 49257 - protein, 7 aa, synthetic construct
HWTAKGD

SEQ ID NO: 49258 - protein, 7 aa, synthetic construct
LGKGADG

SEQ ID NO: 49259 - protein, 7 aa, synthetic construct
FDKGIQM

SEQ ID NO: 49260 - protein, 7 aa, synthetic construct
IKTSMKD

SEQ ID NO: 49261 - protein, 7 aa, synthetic construct
KPSGVVG

SEQ ID NO: 49262 - protein, 7 aa, synthetic construct
KLHTEPG

SEQ ID NO: 49263 - protein, 7 aa, synthetic construct
QAQNVNF

SEQ ID NO: 49264 - protein, 7 aa, synthetic construct
INGKFSP

SEQ ID NO: 49265 - protein, 7 aa, synthetic construct
TKGSGIV

SEQ ID NO: 49266 - protein, 7 aa, synthetic construct
PVHKSQS

SEQ ID NO: 49267 - protein, 7 aa, synthetic construct
YGANKDK

SEQ ID NO: 49268 - protein, 7 aa, synthetic construct
DSIYAKA

SEQ ID NO: 49269 - protein, 7 aa, synthetic construct
KTSGIGA

SEQ ID NO: 49270 - protein, 7 aa, synthetic construct
SMKQSNP

SEQ ID NO: 49271 - protein, 7 aa, synthetic construct
MIKQGIP

SEQ ID NO: 49272 - protein, 7 aa, synthetic construct
KGNNTET

SEQ ID NO: 49273 - protein, 7 aa, synthetic construct
HKPTNSP

SEQ ID NO: 49274 - protein, 7 aa, synthetic construct
MDHMSRS

SEQ ID NO: 49275 - protein, 7 aa, synthetic construct
KGTHGPD

SEQ ID NO: 49276 - protein, 7 aa, synthetic construct
LIPHVIG

SEQ ID NO: 49277 - protein, 7 aa, synthetic construct
KNPSAMP

SEQ ID NO: 49278 - protein, 7 aa, synthetic construct
VRNMSEN

SEQ ID NO: 49279 - protein, 7 aa, synthetic construct
HPSAKTA

SEQ ID NO: 49280 - protein, 7 aa, synthetic construct
TRHPGTH

SEQ ID NO: 49281 - protein, 7 aa, synthetic construct
FGVIKNM

SEQ ID NO: 49282 - protein, 7 aa, synthetic construct
ESIHSNK

SEQ ID NO: 49283 - protein, 7 aa, synthetic construct
GKYGENK

SEQ ID NO: 49284 - protein, 7 aa, synthetic construct
SNMTRVG

SEQ ID NO: 49285 - protein, 7 aa, synthetic construct
MRNNATP

SEQ ID NO: 49286 - protein, 7 aa, synthetic construct
TKNVTQG

SEQ ID NO: 49287 - protein, 7 aa, synthetic construct
NKTLGKD

SEQ ID NO: 49288 - protein, 7 aa, synthetic construct
AFRRGEE

SEQ ID NO: 49289 - protein, 7 aa, synthetic construct
RNNTSAA

SEQ ID NO: 49290 - protein, 7 aa, synthetic construct
QNFRGPD

SEQ ID NO: 49291 - protein, 7 aa, synthetic construct
PKIGNMG

SEQ ID NO: 49292 - protein, 7 aa, synthetic construct
HYANHIG

SEQ ID NO: 49293 - protein, 7 aa, synthetic construct
SFSTLRD

SEQ ID NO: 49294 - protein, 7 aa, synthetic construct
YSEGKRV

SEQ ID NO: 49295 - protein, 7 aa, synthetic construct
QNKHQMQ

SEQ ID NO: 49296 - protein, 7 aa, synthetic construct
KNNSPAS

SEQ ID NO: 49297 - protein, 7 aa, synthetic construct
LSGQRSP

SEQ ID NO: 49298 - protein, 7 aa, synthetic construct
QKVVPGN

SEQ ID NO: 49299 - protein, 7 aa, synthetic construct
HPYVKDE

SEQ ID NO: 49300 - protein, 7 aa, synthetic construct
TGAKLIG

SEQ ID NO: 49301 - protein, 7 aa, synthetic construct
KTSTANG

SEQ ID NO: 49302 - protein, 7 aa, synthetic construct
YGKSGTA

SEQ ID NO: 49303 - protein, 7 aa, synthetic construct
LQSHTAM

SEQ ID NO: 49304 - protein, 7 aa, synthetic construct
KPVSGNA

SEQ ID NO: 49305 - protein, 7 aa, synthetic construct
TGVKMGN

SEQ ID NO: 49306 - protein, 7 aa, synthetic construct
KVPMNQG

SEQ ID NO: 49307 - protein, 7 aa, synthetic construct
RNPSNTP

SEQ ID NO: 49308 - protein, 7 aa, synthetic construct
FNGNRNG

SEQ ID NO: 49309 - protein, 7 aa, synthetic construct
ISGQLAS

SEQ ID NO: 49310 - protein, 7 aa, synthetic construct
EHKTSHY

SEQ ID NO: 49311 - protein, 7 aa, synthetic construct
QVAHAIA

SEQ ID NO: 49312 - protein, 7 aa, synthetic construct
DPNVVRP

SEQ ID NO: 49313 - protein, 7 aa, synthetic construct
KGYNTVV

SEQ ID NO: 49314 - protein, 7 aa, synthetic construct
GTNLKGN

SEQ ID NO: 49315 - protein, 7 aa, synthetic construct
KNMQGAA

SEQ ID NO: 49316 - protein, 7 aa, synthetic construct
KNQSVAG

SEQ ID NO: 49317 - protein, 7 aa, synthetic construct
QEGAKWP

SEQ ID NO: 49318 - protein, 7 aa, synthetic construct
SQQALHS

SEQ ID NO: 49319 - protein, 7 aa, synthetic construct
LQRGTQL

SEQ ID NO: 49320 - protein, 7 aa, synthetic construct
AYKSTVS

SEQ ID NO: 49321 - protein, 7 aa, synthetic construct
ALRTSHN

SEQ ID NO: 49322 - protein, 7 aa, synthetic construct
SAMPIPR

SEQ ID NO: 49323 - protein, 7 aa, synthetic construct
TKIHPEY

SEQ ID NO: 49324 - protein, 7 aa, synthetic construct
TKNQPLG

SEQ ID NO: 49325 - protein, 7 aa, synthetic construct
KNPSAGS

SEQ ID NO: 49326 - protein, 7 aa, synthetic construct
KKASGFD

SEQ ID NO: 49327 - protein, 7 aa, synthetic construct
SHFNSAS

SEQ ID NO: 49328 - protein, 7 aa, synthetic construct
WTGSGDK

SEQ ID NO: 49329 - protein, 7 aa, synthetic construct
IHKPANY

SEQ ID NO: 49330 - protein, 7 aa, synthetic construct
WSPVSSS

SEQ ID NO: 49331 - protein, 7 aa, synthetic construct
SSAALPH

SEQ ID NO: 49332 - protein, 7 aa, synthetic construct
KGTSNAA

SEQ ID NO: 49333 - protein, 7 aa, synthetic construct
GANRLGA

SEQ ID NO: 49334 - protein, 7 aa, synthetic construct
KGDKSQA

SEQ ID NO: 49335 - protein, 7 aa, synthetic construct
TKTNVRD

SEQ ID NO: 49336 - protein, 7 aa, synthetic construct
KDRYSNE

SEQ ID NO: 49337 - protein, 7 aa, synthetic construct
QTMGLIS

SEQ ID NO: 49338 - protein, 7 aa, synthetic construct
NKTAARE

SEQ ID NO: 49339 - protein, 7 aa, synthetic construct
SKQSTNS

SEQ ID NO: 49340 - protein, 7 aa, synthetic construct
TNQRAQG

SEQ ID NO: 49341 - protein, 7 aa, synthetic construct
RETANAS

SEQ ID NO: 49342 - protein, 7 aa, synthetic construct
NPPSKGA

SEQ ID NO: 49343 - protein, 7 aa, synthetic construct
REPMRTQ

SEQ ID NO: 49344 - protein, 7 aa, synthetic construct
RGPGNGP

SEQ ID NO: 49345 - protein, 7 aa, synthetic construct
NYKSNSA

SEQ ID NO: 49346 - protein, 7 aa, synthetic construct
IMSVGGH

SEQ ID NO: 49347 - protein, 7 aa, synthetic construct
FAGSVKP

SEQ ID NO: 49348 - protein, 7 aa, synthetic construct
QITPRSQ

SEQ ID NO: 49349 - protein, 7 aa, synthetic construct
HREGRSG

SEQ ID NO: 49350 - protein, 7 aa, synthetic construct
SMKQAGG

SEQ ID NO: 49351 - protein, 7 aa, synthetic construct
LDIVKTA

SEQ ID NO: 49352 - protein, 7 aa, synthetic construct
MNSKTSP

SEQ ID NO: 49353 - protein, 7 aa, synthetic construct
MPTKVKD

SEQ ID NO: 49354 - protein, 7 aa, synthetic construct
KSYKPEI

SEQ ID NO: 49355 - protein, 7 aa, synthetic construct
NFKGTEA

SEQ ID NO: 49356 - protein, 7 aa, synthetic construct
LSSNSVK

SEQ ID NO: 49357 - protein, 7 aa, synthetic construct
KQQSNLA

SEQ ID NO: 49358 - protein, 7 aa, synthetic construct
RDLKHIG

SEQ ID NO: 49359 - protein, 7 aa, synthetic construct
NKQTNAS

SEQ ID NO: 49360 - protein, 7 aa, synthetic construct
TKWEMHP

SEQ ID NO: 49361 - protein, 7 aa, synthetic construct
TSRGEDH

SEQ ID NO: 49362 - protein, 7 aa, synthetic construct
YRQQDAE

SEQ ID NO: 49363 - protein, 7 aa, synthetic construct
DNKLSMI

SEQ ID NO: 49364 - protein, 7 aa, synthetic construct
LDMNYAK

SEQ ID NO: 49365 - protein, 7 aa, synthetic construct
PPKNNGG

SEQ ID NO: 49366 - protein, 7 aa, synthetic construct
IKYKVSD

SEQ ID NO: 49367 - protein, 7 aa, synthetic construct
RSPAIKD

SEQ ID NO: 49368 - protein, 7 aa, synthetic construct
IKRNEAE

SEQ ID NO: 49369 - protein, 7 aa, synthetic construct
ANAKTGH

SEQ ID NO: 49370 - protein, 7 aa, synthetic construct
QFRTHGP

SEQ ID NO: 49371 - protein, 7 aa, synthetic construct
VNNKQQG

SEQ ID NO: 49372 - protein, 7 aa, synthetic construct
RVAQLGG

SEQ ID NO: 49373 - protein, 7 aa, synthetic construct
LGKHIYA

SEQ ID NO: 49374 - protein, 7 aa, synthetic construct
PVRHQNM

SEQ ID NO: 49375 - protein, 7 aa, synthetic construct
SRSSTQS

SEQ ID NO: 49376 - protein, 7 aa, synthetic construct
KHRNEHD

SEQ ID NO: 49377 - protein, 7 aa, synthetic construct
WGNYSEG

SEQ ID NO: 49378 - protein, 7 aa, synthetic construct
MTKSSNV

SEQ ID NO: 49379 - protein, 7 aa, synthetic construct
QVTAKNT

SEQ ID NO: 49380 - protein, 7 aa, synthetic construct
LTAQAQQ

SEQ ID NO: 49381 - protein, 7 aa, synthetic construct
QGIQHLG

SEQ ID NO: 49382 - protein, 7 aa, synthetic construct
NGLNKSP

SEQ ID NO: 49383 - protein, 7 aa, synthetic construct
NKEVGTW

SEQ ID NO: 49384 - protein, 7 aa, synthetic construct
HLGVSRN

SEQ ID NO: 49385 - protein, 7 aa, synthetic construct
NAHARPF

SEQ ID NO: 49386 - protein, 7 aa, synthetic construct
SSRIKEF

SEQ ID NO: 49387 - protein, 7 aa, synthetic construct
SKQPMKD

SEQ ID NO: 49388 - protein, 7 aa, synthetic construct
DYNRNNA

SEQ ID NO: 49389 - protein, 7 aa, synthetic construct
KPAGNMA

SEQ ID NO: 49390 - protein, 7 aa, synthetic construct
MPRSQNP

SEQ ID NO: 49391 - protein, 7 aa, synthetic construct
RMDNHKV

SEQ ID NO: 49392 - protein, 7 aa, synthetic construct
SSTMKIS

SEQ ID NO: 49393 - protein, 7 aa, synthetic construct
FRGGAND

SEQ ID NO: 49394 - protein, 7 aa, synthetic construct
SKTPSPP

SEQ ID NO: 49395 - protein, 7 aa, synthetic construct
GKPTSYI

SEQ ID NO: 49396 - protein, 7 aa, synthetic construct
MKPVNMQ

SEQ ID NO: 49397 - protein, 7 aa, synthetic construct
SKPFRDP

SEQ ID NO: 49398 - protein, 7 aa, synthetic construct
IKDAGPN

SEQ ID NO: 49399 - protein, 7 aa, synthetic construct
STANQRA

SEQ ID NO: 49400 - protein, 7 aa, synthetic construct
SQFSQHG

SEQ ID NO: 49401 - protein, 7 aa, synthetic construct
VKVTTEP

SEQ ID NO: 49402 - protein, 7 aa, synthetic construct
GKGTASQ

SEQ ID NO: 49403 - protein, 7 aa, synthetic construct
NREIRTT

SEQ ID NO: 49404 - protein, 7 aa, synthetic construct
RQTTTSN

SEQ ID NO: 49405 - protein, 7 aa, synthetic construct
KPTHMNE

SEQ ID NO: 49406 - protein, 7 aa, synthetic construct
STPKNGA

SEQ ID NO: 49407 - protein, 7 aa, synthetic construct
AHMNNTP

SEQ ID NO: 49408 - protein, 7 aa, synthetic construct
NSRATGP

SEQ ID NO: 49409 - protein, 7 aa, synthetic construct
VAKGMSG

SEQ ID NO: 49410 - protein, 7 aa, synthetic construct
QAALKMA

SEQ ID NO: 49411 - protein, 7 aa, synthetic construct
KGDKSMG

SEQ ID NO: 49412 - protein, 7 aa, synthetic construct
KMQQSQN

SEQ ID NO: 49413 - protein, 7 aa, synthetic construct
LEQKYIK

SEQ ID NO: 49414 - protein, 7 aa, synthetic construct
TKAQSNA

SEQ ID NO: 49415 - protein, 7 aa, synthetic construct
FKHDRAE

SEQ ID NO: 49416 - protein, 7 aa, synthetic construct
GPNMRAA

SEQ ID NO: 49417 - protein, 7 aa, synthetic construct
TMKTTGY

SEQ ID NO: 49418 - protein, 7 aa, synthetic construct
VLATKAG

SEQ ID NO: 49419 - protein, 7 aa, synthetic construct
LILGKPP

SEQ ID NO: 49420 - protein, 7 aa, synthetic construct
PGKPLAP

SEQ ID NO: 49421 - protein, 7 aa, synthetic construct
AYGAAVE

SEQ ID NO: 49422 - protein, 7 aa, synthetic construct
PQFNAER

SEQ ID NO: 49423 - protein, 7 aa, synthetic construct
VPGIVQN

SEQ ID NO: 49424 - protein, 7 aa, synthetic construct
SRPKPDN

SEQ ID NO: 49425 - protein, 7 aa, synthetic construct
RNAAQTA

SEQ ID NO: 49426 - protein, 7 aa, synthetic construct
KNSITPS

SEQ ID NO: 49427 - protein, 7 aa, synthetic construct
LERHNPS

SEQ ID NO: 49428 - protein, 7 aa, synthetic construct
YAKESST

SEQ ID NO: 49429 - protein, 7 aa, synthetic construct
ATQPKSG

SEQ ID NO: 49430 - protein, 7 aa, synthetic construct
KKEGFVG

SEQ ID NO: 49431 - protein, 7 aa, synthetic construct
TARQSGF

SEQ ID NO: 49432 - protein, 7 aa, synthetic construct
KLTSVAS

SEQ ID NO: 49433 - protein, 7 aa, synthetic construct
SHNPRGY

SEQ ID NO: 49434 - protein, 7 aa, synthetic construct
QKFKVHE

SEQ ID NO: 49435 - protein, 7 aa, synthetic construct
LQGVRPE

SEQ ID NO: 49436 - protein, 7 aa, synthetic construct
PRQGGAP

SEQ ID NO: 49437 - protein, 7 aa, synthetic construct
DDRRTMN

SEQ ID NO: 49438 - protein, 7 aa, synthetic construct
TGNRGQP

SEQ ID NO: 49439 - protein, 7 aa, synthetic construct
GRMEPQA

SEQ ID NO: 49440 - protein, 7 aa, synthetic construct
NPKQNTG

SEQ ID NO: 49441 - protein, 7 aa, synthetic construct
FTGPNTN

SEQ ID NO: 49442 - protein, 7 aa, synthetic construct
MQSKGQA

SEQ ID NO: 49443 - protein, 7 aa, synthetic construct
LKIQPTV

SEQ ID NO: 49444 - protein, 7 aa, synthetic construct
KPGSGTV

SEQ ID NO: 49445 - protein, 7 aa, synthetic construct
HQAVSRD

SEQ ID NO: 49446 - protein, 7 aa, synthetic construct
LNRPKDQ

SEQ ID NO: 49447 - protein, 7 aa, synthetic construct
SAQSRAG

SEQ ID NO: 49448 - protein, 7 aa, synthetic construct
HVNPRLM

SEQ ID NO: 49449 - protein, 7 aa, synthetic construct
MTHRAQT

SEQ ID NO: 49450 - protein, 7 aa, synthetic construct
FKTGSGA

SEQ ID NO: 49451 - protein, 7 aa, synthetic construct
SSFNMVP

SEQ ID NO: 49452 - protein, 7 aa, synthetic construct
PSKSTTM

SEQ ID NO: 49453 - protein, 7 aa, synthetic construct
TDHLRQP

SEQ ID NO: 49454 - protein, 7 aa, synthetic construct
HVMTGVN

SEQ ID NO: 49455 - protein, 7 aa, synthetic construct
KKDQEIH

SEQ ID NO: 49456 - protein, 7 aa, synthetic construct
KGKDNQG

SEQ ID NO: 49457 - protein, 7 aa, synthetic construct
GQSKATG

SEQ ID NO: 49458 - protein, 7 aa, synthetic construct
RNSSNGN

SEQ ID NO: 49459 - protein, 7 aa, synthetic construct
QEGHYAA

SEQ ID NO: 49460 - protein, 7 aa, synthetic construct
KGKSDES

SEQ ID NO: 49461 - protein, 7 aa, synthetic construct
AFGHLQP

SEQ ID NO: 49462 - protein, 7 aa, synthetic construct
MAGYGAA

SEQ ID NO: 49463 - protein, 7 aa, synthetic construct
IRQRSDM

SEQ ID NO: 49464 - protein, 7 aa, synthetic construct
SKVVSGG

SEQ ID NO: 49465 - protein, 7 aa, synthetic construct
YLNRGDA

SEQ ID NO: 49466 - protein, 7 aa, synthetic construct
SSQSKAG

SEQ ID NO: 49467 - protein, 7 aa, synthetic construct
FGNSARA

SEQ ID NO: 49468 - protein, 7 aa, synthetic construct
GARPQKE

SEQ ID NO: 49469 - protein, 7 aa, synthetic construct
PMNRSMD

SEQ ID NO: 49470 - protein, 7 aa, synthetic construct
RSPAGSA

SEQ ID NO: 49471 - protein, 7 aa, synthetic construct
IRSAVSG

SEQ ID NO: 49472 - protein, 7 aa, synthetic construct
IGQAKWA

SEQ ID NO: 49473 - protein, 7 aa, synthetic construct
PKDFVGP

SEQ ID NO: 49474 - protein, 7 aa, synthetic construct
KNGMGMA

SEQ ID NO: 49475 - protein, 7 aa, synthetic construct
KPISNHT

SEQ ID NO: 49476 - protein, 7 aa, synthetic construct
TQQKNTS

SEQ ID NO: 49477 - protein, 7 aa, synthetic construct
EQKRPYF

SEQ ID NO: 49478 - protein, 7 aa, synthetic construct
LTATKDI

SEQ ID NO: 49479 - protein, 7 aa, synthetic construct
QKTAMSA

SEQ ID NO: 49480 - protein, 7 aa, synthetic construct
RVNAVGE

SEQ ID NO: 49481 - protein, 7 aa, synthetic construct
IHEFKHS

SEQ ID NO: 49482 - protein, 7 aa, synthetic construct
KPAMHMV

SEQ ID NO: 49483 - protein, 7 aa, synthetic construct
ILKIHTE

SEQ ID NO: 49484 - protein, 7 aa, synthetic construct
LHVNAKG

SEQ ID NO: 49485 - protein, 7 aa, synthetic construct
QMKTQNG

SEQ ID NO: 49486 - protein, 7 aa, synthetic construct
NKGSGGG

SEQ ID NO: 49487 - protein, 7 aa, synthetic construct
PTKGPQA

SEQ ID NO: 49488 - protein, 7 aa, synthetic construct
SDKRTVM

SEQ ID NO: 49489 - protein, 7 aa, synthetic construct
RRDENMN

SEQ ID NO: 49490 - protein, 7 aa, synthetic construct
FKSTTSA

SEQ ID NO: 49491 - protein, 7 aa, synthetic construct
SNDFQTK

SEQ ID NO: 49492 - protein, 7 aa, synthetic construct
RPGTAVA

SEQ ID NO: 49493 - protein, 7 aa, synthetic construct
ILSPGQV

SEQ ID NO: 49494 - protein, 7 aa, synthetic construct
KSSTMDG

SEQ ID NO: 49495 - protein, 7 aa, synthetic construct
YRPNFHG

SEQ ID NO: 49496 - protein, 7 aa, synthetic construct
LGGHIMV

SEQ ID NO: 49497 - protein, 7 aa, synthetic construct
TGNAKGG

SEQ ID NO: 49498 - protein, 7 aa, synthetic construct
HKKDIEG

SEQ ID NO: 49499 - protein, 7 aa, synthetic construct
NATQHRN

SEQ ID NO: 49500 - protein, 7 aa, synthetic construct
TQGQQNG

SEQ ID NO: 49501 - protein, 7 aa, synthetic construct
RNMSTTA

SEQ ID NO: 49502 - protein, 7 aa, synthetic construct
KPNGASF

SEQ ID NO: 49503 - protein, 7 aa, synthetic construct
HKTGTRD

SEQ ID NO: 49504 - protein, 7 aa, synthetic construct
IGGNRFN

SEQ ID NO: 49505 - protein, 7 aa, synthetic construct
PVGTFGP

SEQ ID NO: 49506 - protein, 7 aa, synthetic construct
NKGTRDP

SEQ ID NO: 49507 - protein, 7 aa, synthetic construct
VAGSQQG

SEQ ID NO: 49508 - protein, 7 aa, synthetic construct
KSSSAVG

SEQ ID NO: 49509 - protein, 7 aa, synthetic construct
TSNSQKG

SEQ ID NO: 49510 - protein, 7 aa, synthetic construct
TRNPATS

SEQ ID NO: 49511 - protein, 7 aa, synthetic construct
IHGINSS

SEQ ID NO: 49512 - protein, 7 aa, synthetic construct
GPYHLEG

SEQ ID NO: 49513 - protein, 7 aa, synthetic construct
RQTPTGA

SEQ ID NO: 49514 - protein, 7 aa, synthetic construct
QDHKHPY

SEQ ID NO: 49515 - protein, 7 aa, synthetic construct
QMPRISE

SEQ ID NO: 49516 - protein, 7 aa, synthetic construct
RMTSASP

SEQ ID NO: 49517 - protein, 7 aa, synthetic construct
GKSAGTA

SEQ ID NO: 49518 - protein, 7 aa, synthetic construct
KHGNNMD

SEQ ID NO: 49519 - protein, 7 aa, synthetic construct
VAQSKAF

SEQ ID NO: 49520 - protein, 7 aa, synthetic construct
KKQTGID

SEQ ID NO: 49521 - protein, 7 aa, synthetic construct
VGVKSIP

SEQ ID NO: 49522 - protein, 7 aa, synthetic construct
GNQSSRP

SEQ ID NO: 49523 - protein, 7 aa, synthetic construct
SHINTGS

SEQ ID NO: 49524 - protein, 7 aa, synthetic construct
WGEHRTY

SEQ ID NO: 49525 - protein, 7 aa, synthetic construct
LHDPQRG

SEQ ID NO: 49526 - protein, 7 aa, synthetic construct
THPEMRR

SEQ ID NO: 49527 - protein, 7 aa, synthetic construct
SSKFNSE

SEQ ID NO: 49528 - protein, 7 aa, synthetic construct
NHLQQLP

SEQ ID NO: 49529 - protein, 7 aa, synthetic construct
FKSGTNS

SEQ ID NO: 49530 - protein, 7 aa, synthetic construct
QRAGTQW

SEQ ID NO: 49531 - protein, 7 aa, synthetic construct
YKGDSMV

SEQ ID NO: 49532 - protein, 7 aa, synthetic construct
MMTNEKR

SEQ ID NO: 49533 - protein, 7 aa, synthetic construct
IIHSRQP

SEQ ID NO: 49534 - protein, 7 aa, synthetic construct
GKNAGTQ

SEQ ID NO: 49535 - protein, 7 aa, synthetic construct
DKTTATV

SEQ ID NO: 49536 - protein, 7 aa, synthetic construct
SSKHLHA

SEQ ID NO: 49537 - protein, 7 aa, synthetic construct
LYNSTSD

SEQ ID NO: 49538 - protein, 7 aa, synthetic construct
RQDFGTS

SEQ ID NO: 49539 - protein, 7 aa, synthetic construct
MMTAGAT

SEQ ID NO: 49540 - protein, 7 aa, synthetic construct
QSTANSS

SEQ ID NO: 49541 - protein, 7 aa, synthetic construct
GKKSTDA

SEQ ID NO: 49542 - protein, 7 aa, synthetic construct
KPPGMSG

SEQ ID NO: 49543 - protein, 7 aa, synthetic construct
IWSKGDN

SEQ ID NO: 49544 - protein, 7 aa, synthetic construct
SLGHNNV

SEQ ID NO: 49545 - protein, 7 aa, synthetic construct
NVGSQKA

SEQ ID NO: 49546 - protein, 7 aa, synthetic construct
KFQNAQA

SEQ ID NO: 49547 - protein, 7 aa, synthetic construct
NKNSTTV

SEQ ID NO: 49548 - protein, 7 aa, synthetic construct
HRTSSED

SEQ ID NO: 49549 - protein, 7 aa, synthetic construct
VKVGGIS

SEQ ID NO: 49550 - protein, 7 aa, synthetic construct
GKNSIQA

SEQ ID NO: 49551 - protein, 7 aa, synthetic construct
NNAKGNF

SEQ ID NO: 49552 - protein, 7 aa, synthetic construct
NGRNLPN

SEQ ID NO: 49553 - protein, 7 aa, synthetic construct
NFQKVDL

SEQ ID NO: 49554 - protein, 7 aa, synthetic construct
SAQNRNQ

SEQ ID NO: 49555 - protein, 7 aa, synthetic construct
HSRDNRM

SEQ ID NO: 49556 - protein, 7 aa, synthetic construct
TPTHAFQ

SEQ ID NO: 49557 - protein, 7 aa, synthetic construct
SPKNGVG

SEQ ID NO: 49558 - protein, 7 aa, synthetic construct
EIRNPQK

SEQ ID NO: 49559 - protein, 7 aa, synthetic construct
GQDHHPS

SEQ ID NO: 49560 - protein, 7 aa, synthetic construct
TKHNNLD

SEQ ID NO: 49561 - protein, 7 aa, synthetic construct
QTKGAIA

SEQ ID NO: 49562 - protein, 7 aa, synthetic construct
YNSTKVG

SEQ ID NO: 49563 - protein, 7 aa, synthetic construct
MMHSANG

SEQ ID NO: 49564 - protein, 7 aa, synthetic construct
TVVERMN

SEQ ID NO: 49565 - protein, 7 aa, synthetic construct
KQTTPSH

SEQ ID NO: 49566 - protein, 7 aa, synthetic construct
RPQSAMS

SEQ ID NO: 49567 - protein, 7 aa, synthetic construct
FMGTKST

SEQ ID NO: 49568 - protein, 7 aa, synthetic construct
IPRATAA

SEQ ID NO: 49569 - protein, 7 aa, synthetic construct
KTQFMNP

SEQ ID NO: 49570 - protein, 7 aa, synthetic construct
KSVASVV

SEQ ID NO: 49571 - protein, 7 aa, synthetic construct
QSHGIGT

SEQ ID NO: 49572 - protein, 7 aa, synthetic construct
NPNRSGG

SEQ ID NO: 49573 - protein, 7 aa, synthetic construct
WQKNHSQ

SEQ ID NO: 49574 - protein, 7 aa, synthetic construct
SQLRALP

SEQ ID NO: 49575 - protein, 7 aa, synthetic construct
RNVDTYG

SEQ ID NO: 49576 - protein, 7 aa, synthetic construct
VLRGAQN

SEQ ID NO: 49577 - protein, 7 aa, synthetic construct
QMGRNPG

SEQ ID NO: 49578 - protein, 7 aa, synthetic construct
VHLIQKA

SEQ ID NO: 49579 - protein, 7 aa, synthetic construct
HTYVSQA

SEQ ID NO: 49580 - protein, 7 aa, synthetic construct
MTGSQRM

SEQ ID NO: 49581 - protein, 7 aa, synthetic construct
RPNVQNG

SEQ ID NO: 49582 - protein, 7 aa, synthetic construct
IKIGDGG

SEQ ID NO: 49583 - protein, 7 aa, synthetic construct
IPTSMKH

SEQ ID NO: 49584 - protein, 7 aa, synthetic construct
QGGVNVQ

SEQ ID NO: 49585 - protein, 7 aa, synthetic construct
KPNAASG

SEQ ID NO: 49586 - protein, 7 aa, synthetic construct
ETGGTGK

SEQ ID NO: 49587 - protein, 7 aa, synthetic construct
PRTAQGS

SEQ ID NO: 49588 - protein, 7 aa, synthetic construct
NRTANTG

SEQ ID NO: 49589 - protein, 7 aa, synthetic construct
IYSVRSP

SEQ ID NO: 49590 - protein, 7 aa, synthetic construct
IKNRPYD

SEQ ID NO: 49591 - protein, 7 aa, synthetic construct
YQGTRGS

SEQ ID NO: 49592 - protein, 7 aa, synthetic construct
QMLDRRG

SEQ ID NO: 49593 - protein, 7 aa, synthetic construct
TMGVNTQ

SEQ ID NO: 49594 - protein, 7 aa, synthetic construct
KSTNSPG

SEQ ID NO: 49595 - protein, 7 aa, synthetic construct
DSAIARA

SEQ ID NO: 49596 - protein, 7 aa, synthetic construct
RTISSGA

SEQ ID NO: 49597 - protein, 7 aa, synthetic construct
YMSSIRP

SEQ ID NO: 49598 - protein, 7 aa, synthetic construct
RRQNDDA

SEQ ID NO: 49599 - protein, 7 aa, synthetic construct
VHAGRAD

SEQ ID NO: 49600 - protein, 7 aa, synthetic construct
TRHGHPS

SEQ ID NO: 49601 - protein, 7 aa, synthetic construct
RYQSNQG

SEQ ID NO: 49602 - protein, 7 aa, synthetic construct
MKNSGSV

SEQ ID NO: 49603 - protein, 7 aa, synthetic construct
VAYSPED

SEQ ID NO: 49604 - protein, 7 aa, synthetic construct
PQNAMKG

SEQ ID NO: 49605 - protein, 7 aa, synthetic construct
KGGVEMR

SEQ ID NO: 49606 - protein, 7 aa, synthetic construct
KTNSPAG

SEQ ID NO: 49607 - protein, 7 aa, synthetic construct
MGRFIDA

SEQ ID NO: 49608 - protein, 7 aa, synthetic construct
TPSRGIA

SEQ ID NO: 49609 - protein, 7 aa, synthetic construct
TKPEHNS

SEQ ID NO: 49610 - protein, 7 aa, synthetic construct
QRSSMGP

SEQ ID NO: 49611 - protein, 7 aa, synthetic construct
LRVDKAL

SEQ ID NO: 49612 - protein, 7 aa, synthetic construct
RPNIQTA

SEQ ID NO: 49613 - protein, 7 aa, synthetic construct
QHVSRQD

SEQ ID NO: 49614 - protein, 7 aa, synthetic construct
RHGHPNA

SEQ ID NO: 49615 - protein, 7 aa, synthetic construct
TANAIIG

SEQ ID NO: 49616 - protein, 7 aa, synthetic construct
MSSILRA

SEQ ID NO: 49617 - protein, 7 aa, synthetic construct
SLRIKEN

SEQ ID NO: 49618 - protein, 7 aa, synthetic construct
MKTIRME

SEQ ID NO: 49619 - protein, 7 aa, synthetic construct
HGIRGAT

SEQ ID NO: 49620 - protein, 7 aa, synthetic construct
MKNVREA

SEQ ID NO: 49621 - protein, 7 aa, synthetic construct
SVRDKTV

SEQ ID NO: 49622 - protein, 7 aa, synthetic construct
AKDHGNS

SEQ ID NO: 49623 - protein, 7 aa, synthetic construct
NQQQPKF

SEQ ID NO: 49624 - protein, 7 aa, synthetic construct
HIHTQVA

SEQ ID NO: 49625 - protein, 7 aa, synthetic construct
NVSRVTG

SEQ ID NO: 49626 - protein, 7 aa, synthetic construct
GAATRTG

SEQ ID NO: 49627 - protein, 7 aa, synthetic construct
SRTVTQA

SEQ ID NO: 49628 - protein, 7 aa, synthetic construct
VNTRGPP

SEQ ID NO: 49629 - protein, 7 aa, synthetic construct
SRHLGTA

SEQ ID NO: 49630 - protein, 7 aa, synthetic construct
SYQGPNP

SEQ ID NO: 49631 - protein, 7 aa, synthetic construct
HGMGYQS

SEQ ID NO: 49632 - protein, 7 aa, synthetic construct
IQHGGRE

SEQ ID NO: 49633 - protein, 7 aa, synthetic construct
YTGGKGG

SEQ ID NO: 49634 - protein, 7 aa, synthetic construct
YNTGKTN

SEQ ID NO: 49635 - protein, 7 aa, synthetic construct
LNPNAPM

SEQ ID NO: 49636 - protein, 7 aa, synthetic construct
VAAERTG

SEQ ID NO: 49637 - protein, 7 aa, synthetic construct
QMTKEHA

SEQ ID NO: 49638 - protein, 7 aa, synthetic construct
QKNSMIG

SEQ ID NO: 49639 - protein, 7 aa, synthetic construct
QRDFMSE

SEQ ID NO: 49640 - protein, 7 aa, synthetic construct
WTGKSTD

SEQ ID NO: 49641 - protein, 7 aa, synthetic construct
KESHKSP

SEQ ID NO: 49642 - protein, 7 aa, synthetic construct
NNTKSSG

SEQ ID NO: 49643 - protein, 7 aa, synthetic construct
QGSKPGA

SEQ ID NO: 49644 - protein, 7 aa, synthetic construct
AFVKDAS

SEQ ID NO: 49645 - protein, 7 aa, synthetic construct
YPKISEE

SEQ ID NO: 49646 - protein, 7 aa, synthetic construct
APDFGHR

SEQ ID NO: 49647 - protein, 7 aa, synthetic construct
YNKVAKE

SEQ ID NO: 49648 - protein, 7 aa, synthetic construct
GFKNQNA

SEQ ID NO: 49649 - protein, 7 aa, synthetic construct
NTKSGLG

SEQ ID NO: 49650 - protein, 7 aa, synthetic construct
MKSTAAS

SEQ ID NO: 49651 - protein, 7 aa, synthetic construct
NTGKNQP

SEQ ID NO: 49652 - protein, 7 aa, synthetic construct
TRPMKGE

SEQ ID NO: 49653 - protein, 7 aa, synthetic construct
HKMIDNM

SEQ ID NO: 49654 - protein, 7 aa, synthetic construct
DVRQRLE

SEQ ID NO: 49655 - protein, 7 aa, synthetic construct
MEARHAS

SEQ ID NO: 49656 - protein, 7 aa, synthetic construct
RPGTTNS

SEQ ID NO: 49657 - protein, 7 aa, synthetic construct
KFSTQNG

SEQ ID NO: 49658 - protein, 7 aa, synthetic construct
SPKSINA

SEQ ID NO: 49659 - protein, 7 aa, synthetic construct
MRPSQTG

SEQ ID NO: 49660 - protein, 7 aa, synthetic construct
RASGTTA

SEQ ID NO: 49661 - protein, 7 aa, synthetic construct
KTAPTNG

SEQ ID NO: 49662 - protein, 7 aa, synthetic construct
KSNSSVT

SEQ ID NO: 49663 - protein, 7 aa, synthetic construct
KSPSIPQ

SEQ ID NO: 49664 - protein, 7 aa, synthetic construct
YNVKHDR

SEQ ID NO: 49665 - protein, 7 aa, synthetic construct
QPLHAEA

SEQ ID NO: 49666 - protein, 7 aa, synthetic construct
TNQEKMG

SEQ ID NO: 49667 - protein, 7 aa, synthetic construct
NAQSKIA

SEQ ID NO: 49668 - protein, 7 aa, synthetic construct
GPAPNKT

SEQ ID NO: 49669 - protein, 7 aa, synthetic construct
PPRGLHT

SEQ ID NO: 49670 - protein, 7 aa, synthetic construct
KQITVDG

SEQ ID NO: 49671 - protein, 7 aa, synthetic construct
SLKGPPT

SEQ ID NO: 49672 - protein, 7 aa, synthetic construct
VPSINQQ

SEQ ID NO: 49673 - protein, 7 aa, synthetic construct
LHPSHKE

SEQ ID NO: 49674 - protein, 7 aa, synthetic construct
QKGTQTN

SEQ ID NO: 49675 - protein, 7 aa, synthetic construct
RNHSQDS

SEQ ID NO: 49676 - protein, 7 aa, synthetic construct
HRAIGVQ

SEQ ID NO: 49677 - protein, 7 aa, synthetic construct
SKGYPLS

SEQ ID NO: 49678 - protein, 7 aa, synthetic construct
ARSTLDG

SEQ ID NO: 49679 - protein, 7 aa, synthetic construct
VSVHMAM

SEQ ID NO: 49680 - protein, 7 aa, synthetic construct
HKGTVMV

SEQ ID NO: 49681 - protein, 7 aa, synthetic construct
LEKGPSG

SEQ ID NO: 49682 - protein, 7 aa, synthetic construct
PTVGRAP

SEQ ID NO: 49683 - protein, 7 aa, synthetic construct
AYQHREL

SEQ ID NO: 49684 - protein, 7 aa, synthetic construct
YKSTANG

SEQ ID NO: 49685 - protein, 7 aa, synthetic construct
VRNAQGA

SEQ ID NO: 49686 - protein, 7 aa, synthetic construct
SHTVPSL

SEQ ID NO: 49687 - protein, 7 aa, synthetic construct
TKSIQRE

SEQ ID NO: 49688 - protein, 7 aa, synthetic construct
QKHLSID

SEQ ID NO: 49689 - protein, 7 aa, synthetic construct
LVTKWTE

SEQ ID NO: 49690 - protein, 7 aa, synthetic construct
KSMATQG

SEQ ID NO: 49691 - protein, 7 aa, synthetic construct
LKDGRSA

SEQ ID NO: 49692 - protein, 7 aa, synthetic construct
ETFKTMT

SEQ ID NO: 49693 - protein, 7 aa, synthetic construct
MKSAGVL

SEQ ID NO: 49694 - protein, 7 aa, synthetic construct
VSNNKDR

SEQ ID NO: 49695 - protein, 7 aa, synthetic construct
TKVAVRD

SEQ ID NO: 49696 - protein, 7 aa, synthetic construct
SQFSRIG

SEQ ID NO: 49697 - protein, 7 aa, synthetic construct
DLNAKRW

SEQ ID NO: 49698 - protein, 7 aa, synthetic construct
SQKSSHL

SEQ ID NO: 49699 - protein, 7 aa, synthetic construct
VEKHNYR

SEQ ID NO: 49700 - protein, 7 aa, synthetic construct
NGKTSGG

SEQ ID NO: 49701 - protein, 7 aa, synthetic construct
PKVNSSG

SEQ ID NO: 49702 - protein, 7 aa, synthetic construct
KPSSQSA

SEQ ID NO: 49703 - protein, 7 aa, synthetic construct
KTSNAGS

SEQ ID NO: 49704 - protein, 7 aa, synthetic construct
IMNRRHE

SEQ ID NO: 49705 - protein, 7 aa, synthetic construct
KMAGKTD

SEQ ID NO: 49706 - protein, 7 aa, synthetic construct
STGATHG

SEQ ID NO: 49707 - protein, 7 aa, synthetic construct
TRNFEVM

SEQ ID NO: 49708 - protein, 7 aa, synthetic construct
MGPNRGS

SEQ ID NO: 49709 - protein, 7 aa, synthetic construct
AFGPREP

SEQ ID NO: 49710 - protein, 7 aa, synthetic construct
VPQWSRE

SEQ ID NO: 49711 - protein, 7 aa, synthetic construct
KAPNHYM

SEQ ID NO: 49712 - protein, 7 aa, synthetic construct
IAPAMHA

SEQ ID NO: 49713 - protein, 7 aa, synthetic construct
KFGDKSG

SEQ ID NO: 49714 - protein, 7 aa, synthetic construct
AAASRNF

SEQ ID NO: 49715 - protein, 7 aa, synthetic construct
AMKQQAP

SEQ ID NO: 49716 - protein, 7 aa, synthetic construct
MGNAVKG

SEQ ID NO: 49717 - protein, 7 aa, synthetic construct
MKNVQSA

SEQ ID NO: 49718 - protein, 7 aa, synthetic construct
IFAVHQD

SEQ ID NO: 49719 - protein, 7 aa, synthetic construct
DRRASES

SEQ ID NO: 49720 - protein, 7 aa, synthetic construct
THQGRQY

SEQ ID NO: 49721 - protein, 7 aa, synthetic construct
GLARESR

SEQ ID NO: 49722 - protein, 7 aa, synthetic construct
KITSTFV

SEQ ID NO: 49723 - protein, 7 aa, synthetic construct
SQGHSII

SEQ ID NO: 49724 - protein, 7 aa, synthetic construct
PSGMRSD

SEQ ID NO: 49725 - protein, 7 aa, synthetic construct
LKDPKMM

SEQ ID NO: 49726 - protein, 7 aa, synthetic construct
VNGGKGG

SEQ ID NO: 49727 - protein, 7 aa, synthetic construct
TPKGTFG

SEQ ID NO: 49728 - protein, 7 aa, synthetic construct
SRSTVGG

SEQ ID NO: 49729 - protein, 7 aa, synthetic construct
KPPSMAA

SEQ ID NO: 49730 - protein, 7 aa, synthetic construct
NMGKALP

SEQ ID NO: 49731 - protein, 7 aa, synthetic construct
NKSATAG

SEQ ID NO: 49732 - protein, 7 aa, synthetic construct
KYHATAE

SEQ ID NO: 49733 - protein, 7 aa, synthetic construct
PRNASTE

SEQ ID NO: 49734 - protein, 7 aa, synthetic construct
EYQKYPA

SEQ ID NO: 49735 - protein, 7 aa, synthetic construct
QSSRVSP

SEQ ID NO: 49736 - protein, 7 aa, synthetic construct
FSDYGGK

SEQ ID NO: 49737 - protein, 7 aa, synthetic construct
TRGLQID

SEQ ID NO: 49738 - protein, 7 aa, synthetic construct
MHHISEA

SEQ ID NO: 49739 - protein, 7 aa, synthetic construct
MPFKEVP

SEQ ID NO: 49740 - protein, 7 aa, synthetic construct
MGGMKNP

SEQ ID NO: 49741 - protein, 7 aa, synthetic construct
FKVSTGG

SEQ ID NO: 49742 - protein, 7 aa, synthetic construct
SFKRVQE

SEQ ID NO: 49743 - protein, 7 aa, synthetic construct
QTSQRAP

SEQ ID NO: 49744 - protein, 7 aa, synthetic construct
NQYNNVK

SEQ ID NO: 49745 - protein, 7 aa, synthetic construct
GEKHNNS

SEQ ID NO: 49746 - protein, 7 aa, synthetic construct
YHKSGDA

SEQ ID NO: 49747 - protein, 7 aa, synthetic construct
RPNSASA

SEQ ID NO: 49748 - protein, 7 aa, synthetic construct
GSVRSNP

SEQ ID NO: 49749 - protein, 7 aa, synthetic construct
KNNSGPV

SEQ ID NO: 49750 - protein, 7 aa, synthetic construct
SPGNHVA

SEQ ID NO: 49751 - protein, 7 aa, synthetic construct
IGGQYGG

SEQ ID NO: 49752 - protein, 7 aa, synthetic construct
YYKSEHS

SEQ ID NO: 49753 - protein, 7 aa, synthetic construct
MTGALRV

SEQ ID NO: 49754 - protein, 7 aa, synthetic construct
SGTMTKG

SEQ ID NO: 49755 - protein, 7 aa, synthetic construct
TRGAMGI

SEQ ID NO: 49756 - protein, 7 aa, synthetic construct
TTKGAFG

SEQ ID NO: 49757 - protein, 7 aa, synthetic construct
QSKQNKE

SEQ ID NO: 49758 - protein, 7 aa, synthetic construct
INRNMMP

SEQ ID NO: 49759 - protein, 7 aa, synthetic construct
SITQHRP

SEQ ID NO: 49760 - protein, 7 aa, synthetic construct
DQGKQPA

SEQ ID NO: 49761 - protein, 7 aa, synthetic construct
MHNTSTA

SEQ ID NO: 49762 - protein, 7 aa, synthetic construct
PYKNVTV

SEQ ID NO: 49763 - protein, 7 aa, synthetic construct
TNGGLKG

SEQ ID NO: 49764 - protein, 7 aa, synthetic construct
KTAPNSS

SEQ ID NO: 49765 - protein, 7 aa, synthetic construct
PKGQTQG

SEQ ID NO: 49766 - protein, 7 aa, synthetic construct
MGSKWGD

SEQ ID NO: 49767 - protein, 7 aa, synthetic construct
TKGTGRD

SEQ ID NO: 49768 - protein, 7 aa, synthetic construct
RESWSNG

SEQ ID NO: 49769 - protein, 7 aa, synthetic construct
NFAAHKQ

SEQ ID NO: 49770 - protein, 7 aa, synthetic construct
GARGAMQ

SEQ ID NO: 49771 - protein, 7 aa, synthetic construct
GGKQNLI

SEQ ID NO: 49772 - protein, 7 aa, synthetic construct
TGTAVPQ

SEQ ID NO: 49773 - protein, 7 aa, synthetic construct
QKDGTQY

SEQ ID NO: 49774 - protein, 7 aa, synthetic construct
EKWRTDS

SEQ ID NO: 49775 - protein, 7 aa, synthetic construct
TKGSGYA

SEQ ID NO: 49776 - protein, 7 aa, synthetic construct
GHRTLTN

SEQ ID NO: 49777 - protein, 7 aa, synthetic construct
GHQKSQS

SEQ ID NO: 49778 - protein, 7 aa, synthetic construct
NPNPGNA

SEQ ID NO: 49779 - protein, 7 aa, synthetic construct
IAGKHNF

SEQ ID NO: 49780 - protein, 7 aa, synthetic construct
AIPLHMP

SEQ ID NO: 49781 - protein, 7 aa, synthetic construct
SQKQTGA

SEQ ID NO: 49782 - protein, 7 aa, synthetic construct
RSVSWEA

SEQ ID NO: 49783 - protein, 7 aa, synthetic construct
DRHAREG

SEQ ID NO: 49784 - protein, 7 aa, synthetic construct
FGNWMKE

SEQ ID NO: 49785 - protein, 7 aa, synthetic construct
KPTSASD

SEQ ID NO: 49786 - protein, 7 aa, synthetic construct
TGQGHNQ

SEQ ID NO: 49787 - protein, 7 aa, synthetic construct
ILSRNQA

SEQ ID NO: 49788 - protein, 7 aa, synthetic construct
YTEKHMT

SEQ ID NO: 49789 - protein, 7 aa, synthetic construct
GRTVSVG

SEQ ID NO: 49790 - protein, 7 aa, synthetic construct
RKDNVSL

SEQ ID NO: 49791 - protein, 7 aa, synthetic construct
LKSYNAM

SEQ ID NO: 49792 - protein, 7 aa, synthetic construct
PKSNSAS

SEQ ID NO: 49793 - protein, 7 aa, synthetic construct
SGRQDPP

SEQ ID NO: 49794 - protein, 7 aa, synthetic construct
KGPKQDG

SEQ ID NO: 49795 - protein, 7 aa, synthetic construct
HKPTMFD

SEQ ID NO: 49796 - protein, 7 aa, synthetic construct
YGPYVNN

SEQ ID NO: 49797 - protein, 7 aa, synthetic construct
MGVQHPA

SEQ ID NO: 49798 - protein, 7 aa, synthetic construct
VQKQSSA

SEQ ID NO: 49799 - protein, 7 aa, synthetic construct
HHSNANY

SEQ ID NO: 49800 - protein, 7 aa, synthetic construct
TTPGRGA

SEQ ID NO: 49801 - protein, 7 aa, synthetic construct
SPRQYKE

SEQ ID NO: 49802 - protein, 7 aa, synthetic construct
NKPGKDG

SEQ ID NO: 49803 - protein, 7 aa, synthetic construct
RGVNNDT

SEQ ID NO: 49804 - protein, 7 aa, synthetic construct
RDAKSTG

SEQ ID NO: 49805 - protein, 7 aa, synthetic construct
GANTKSA

SEQ ID NO: 49806 - protein, 7 aa, synthetic construct
LIHSQPD

SEQ ID NO: 49807 - protein, 7 aa, synthetic construct
NVQRAQA

SEQ ID NO: 49808 - protein, 7 aa, synthetic construct
KKNDARE

SEQ ID NO: 49809 - protein, 7 aa, synthetic construct
WQKGYGA

SEQ ID NO: 49810 - protein, 7 aa, synthetic construct
YQTVGRT

SEQ ID NO: 49811 - protein, 7 aa, synthetic construct
SNAPVTA

SEQ ID NO: 49812 - protein, 7 aa, synthetic construct
VILSKMG

SEQ ID NO: 49813 - protein, 7 aa, synthetic construct
MAGADKQ

SEQ ID NO: 49814 - protein, 7 aa, synthetic construct
IAGMGGK

SEQ ID NO: 49815 - protein, 7 aa, synthetic construct
YGFLSQD

SEQ ID NO: 49816 - protein, 7 aa, synthetic construct
VPTLQVA

SEQ ID NO: 49817 - protein, 7 aa, synthetic construct
ISRSFAQ

SEQ ID NO: 49818 - protein, 7 aa, synthetic construct
QGKSMVH

SEQ ID NO: 49819 - protein, 7 aa, synthetic construct
QKNTSQP

SEQ ID NO: 49820 - protein, 7 aa, synthetic construct
NQKGQTN

SEQ ID NO: 49821 - protein, 7 aa, synthetic construct
DLPISKH

SEQ ID NO: 49822 - protein, 7 aa, synthetic construct
RKDQPIS

SEQ ID NO: 49823 - protein, 7 aa, synthetic construct
TGKYGAG

SEQ ID NO: 49824 - protein, 7 aa, synthetic construct
GTKVNQG

SEQ ID NO: 49825 - protein, 7 aa, synthetic construct
YENKPHK

SEQ ID NO: 49826 - protein, 7 aa, synthetic construct
RSTDPMG

SEQ ID NO: 49827 - protein, 7 aa, synthetic construct
QNLRDHV

SEQ ID NO: 49828 - protein, 7 aa, synthetic construct
NKKDSAG

SEQ ID NO: 49829 - protein, 7 aa, synthetic construct
ETGRKTE

SEQ ID NO: 49830 - protein, 7 aa, synthetic construct
HPAGRKD

SEQ ID NO: 49831 - protein, 7 aa, synthetic construct
RKNDRQE

SEQ ID NO: 49832 - protein, 7 aa, synthetic construct
GPKGAMN

SEQ ID NO: 49833 - protein, 7 aa, synthetic construct
ARTSVGG

SEQ ID NO: 49834 - protein, 7 aa, synthetic construct
GPPVKPF

SEQ ID NO: 49835 - protein, 7 aa, synthetic construct
GIYTISA

SEQ ID NO: 49836 - protein, 7 aa, synthetic construct
TNTGKYG

SEQ ID NO: 49837 - protein, 7 aa, synthetic construct
YLADAAK

SEQ ID NO: 49838 - protein, 7 aa, synthetic construct
KTTTSGN

SEQ ID NO: 49839 - protein, 7 aa, synthetic construct
TSIKYPD

SEQ ID NO: 49840 - protein, 7 aa, synthetic construct
SMVELKP

SEQ ID NO: 49841 - protein, 7 aa, synthetic construct
RMNSNSP

SEQ ID NO: 49842 - protein, 7 aa, synthetic construct
GNKTSPM

SEQ ID NO: 49843 - protein, 7 aa, synthetic construct
SRVTSQV

SEQ ID NO: 49844 - protein, 7 aa, synthetic construct
TTNRERA

SEQ ID NO: 49845 - protein, 7 aa, synthetic construct
QATGSKV

SEQ ID NO: 49846 - protein, 7 aa, synthetic construct
QAVQGRA

SEQ ID NO: 49847 - protein, 7 aa, synthetic construct
KTKGDHP

SEQ ID NO: 49848 - protein, 7 aa, synthetic construct
GMRTSTP

SEQ ID NO: 49849 - protein, 7 aa, synthetic construct
MNRAYEG

SEQ ID NO: 49850 - protein, 7 aa, synthetic construct
SPKPYGG

SEQ ID NO: 49851 - protein, 7 aa, synthetic construct
KANGNGG

SEQ ID NO: 49852 - protein, 7 aa, synthetic construct
YKMKDLE

SEQ ID NO: 49853 - protein, 7 aa, synthetic construct
QPISHKN

SEQ ID NO: 49854 - protein, 7 aa, synthetic construct
ERHKMYD

SEQ ID NO: 49855 - protein, 7 aa, synthetic construct
MRPASGA

SEQ ID NO: 49856 - protein, 7 aa, synthetic construct
GKQGSNS

SEQ ID NO: 49857 - protein, 7 aa, synthetic construct
EKHLDPP

SEQ ID NO: 49858 - protein, 7 aa, synthetic construct
NTHSSRL

SEQ ID NO: 49859 - protein, 7 aa, synthetic construct
ITNGRPF

SEQ ID NO: 49860 - protein, 7 aa, synthetic construct
KDKVGAA

SEQ ID NO: 49861 - protein, 7 aa, synthetic construct
KNSNSAG

SEQ ID NO: 49862 - protein, 7 aa, synthetic construct
YMGTQRV

SEQ ID NO: 49863 - protein, 7 aa, synthetic construct
KNVGTGQ

SEQ ID NO: 49864 - protein, 7 aa, synthetic construct
MSKTPNA

SEQ ID NO: 49865 - protein, 7 aa, synthetic construct
YAVTGQS

SEQ ID NO: 49866 - protein, 7 aa, synthetic construct
FGKGSSG

SEQ ID NO: 49867 - protein, 7 aa, synthetic construct
KPTSSDL

SEQ ID NO: 49868 - protein, 7 aa, synthetic construct
PRPTASG

SEQ ID NO: 49869 - protein, 7 aa, synthetic construct
KQFSGAP

SEQ ID NO: 49870 - protein, 7 aa, synthetic construct
SDAARAQ

SEQ ID NO: 49871 - protein, 7 aa, synthetic construct
SRTQPQG

SEQ ID NO: 49872 - protein, 7 aa, synthetic construct
GKGNVRD

SEQ ID NO: 49873 - protein, 7 aa, synthetic construct
NKMGLTS

SEQ ID NO: 49874 - protein, 7 aa, synthetic construct
TKIWVED

SEQ ID NO: 49875 - protein, 7 aa, synthetic construct
NKQPAAA

SEQ ID NO: 49876 - protein, 7 aa, synthetic construct
VLYKHAN

SEQ ID NO: 49877 - protein, 7 aa, synthetic construct
RQSGIEY

SEQ ID NO: 49878 - protein, 7 aa, synthetic construct
PQRTGVS

SEQ ID NO: 49879 - protein, 7 aa, synthetic construct
TKHDFKA

SEQ ID NO: 49880 - protein, 7 aa, synthetic construct
KSGGVNS

SEQ ID NO: 49881 - protein, 7 aa, synthetic construct
QPGHSNL

SEQ ID NO: 49882 - protein, 7 aa, synthetic construct
NMGRSQG

SEQ ID NO: 49883 - protein, 7 aa, synthetic construct
EQQRRTP

SEQ ID NO: 49884 - protein, 7 aa, synthetic construct
GFGKDGY

SEQ ID NO: 49885 - protein, 7 aa, synthetic construct
SYNTTKP

SEQ ID NO: 49886 - protein, 7 aa, synthetic construct
DKNKQGA

SEQ ID NO: 49887 - protein, 7 aa, synthetic construct
VMAPREG

SEQ ID NO: 49888 - protein, 7 aa, synthetic construct
NGMKAGA

SEQ ID NO: 49889 - protein, 7 aa, synthetic construct
GQKGSMQ

SEQ ID NO: 49890 - protein, 7 aa, synthetic construct
KRNSVED

SEQ ID NO: 49891 - protein, 7 aa, synthetic construct
LYPQSKP

SEQ ID NO: 49892 - protein, 7 aa, synthetic construct
MKSSVKE

SEQ ID NO: 49893 - protein, 7 aa, synthetic construct
LLNTKDK

SEQ ID NO: 49894 - protein, 7 aa, synthetic construct
PATGMAS

SEQ ID NO: 49895 - protein, 7 aa, synthetic construct
VNYAAKG

SEQ ID NO: 49896 - protein, 7 aa, synthetic construct
MNNPKSS

SEQ ID NO: 49897 - protein, 7 aa, synthetic construct
LRTYDQA

SEQ ID NO: 49898 - protein, 7 aa, synthetic construct
MQKSLGG

SEQ ID NO: 49899 - protein, 7 aa, synthetic construct
RDKATGG

SEQ ID NO: 49900 - protein, 7 aa, synthetic construct
PKQPTGG

SEQ ID NO: 49901 - protein, 7 aa, synthetic construct
VTKVSTG

SEQ ID NO: 49902 - protein, 7 aa, synthetic construct
YKQQPQS

SEQ ID NO: 49903 - protein, 7 aa, synthetic construct
PTKNVGP

SEQ ID NO: 49904 - protein, 7 aa, synthetic construct
LPEKARY

SEQ ID NO: 49905 - protein, 7 aa, synthetic construct
TRSQSTG

SEQ ID NO: 49906 - protein, 7 aa, synthetic construct
QPKPGQG

SEQ ID NO: 49907 - protein, 7 aa, synthetic construct
TSGAVKQ

SEQ ID NO: 49908 - protein, 7 aa, synthetic construct
MQIGAST

SEQ ID NO: 49909 - protein, 7 aa, synthetic construct
IKPMNAE

SEQ ID NO: 49910 - protein, 7 aa, synthetic construct
IREHHAS

SEQ ID NO: 49911 - protein, 7 aa, synthetic construct
KTMSSSA

SEQ ID NO: 49912 - protein, 7 aa, synthetic construct
DRHAPQT

SEQ ID NO: 49913 - protein, 7 aa, synthetic construct
TRSANQS

SEQ ID NO: 49914 - protein, 7 aa, synthetic construct
TNGQRQP

SEQ ID NO: 49915 - protein, 7 aa, synthetic construct
NGGTRGG

SEQ ID NO: 49916 - protein, 7 aa, synthetic construct
LQRADIQ

SEQ ID NO: 49917 - protein, 7 aa, synthetic construct
TKAVNQG

SEQ ID NO: 49918 - protein, 7 aa, synthetic construct
SRDGYAA

SEQ ID NO: 49919 - protein, 7 aa, synthetic construct
AGAVAIA

SEQ ID NO: 49920 - protein, 7 aa, synthetic construct
KTTPNTA

SEQ ID NO: 49921 - protein, 7 aa, synthetic construct
YPGPKVA

SEQ ID NO: 49922 - protein, 7 aa, synthetic construct
SGQRQES

SEQ ID NO: 49923 - protein, 7 aa, synthetic construct
VQNMHKP

SEQ ID NO: 49924 - protein, 7 aa, synthetic construct
DGMKNRE

SEQ ID NO: 49925 - protein, 7 aa, synthetic construct
STTHRPV

SEQ ID NO: 49926 - protein, 7 aa, synthetic construct
MNQRATA

SEQ ID NO: 49927 - protein, 7 aa, synthetic construct
GSGPHRF

SEQ ID NO: 49928 - protein, 7 aa, synthetic construct
YESRGGH

SEQ ID NO: 49929 - protein, 7 aa, synthetic construct
MSTTAKS

SEQ ID NO: 49930 - protein, 7 aa, synthetic construct
TPTAQRQ

SEQ ID NO: 49931 - protein, 7 aa, synthetic construct
NQNVTRN

SEQ ID NO: 49932 - protein, 7 aa, synthetic construct
QMKGHNG

SEQ ID NO: 49933 - protein, 7 aa, synthetic construct
MRPKPDQ

SEQ ID NO: 49934 - protein, 7 aa, synthetic construct
KGPTINP

SEQ ID NO: 49935 - protein, 7 aa, synthetic construct
LSKLVTD

SEQ ID NO: 49936 - protein, 7 aa, synthetic construct
QHSQHPA

SEQ ID NO: 49937 - protein, 7 aa, synthetic construct
VAKSIKD

SEQ ID NO: 49938 - protein, 7 aa, synthetic construct
WIRTTGE

SEQ ID NO: 49939 - protein, 7 aa, synthetic construct
RIMGERQ

SEQ ID NO: 49940 - protein, 7 aa, synthetic construct
TTKSQSA

SEQ ID NO: 49941 - protein, 7 aa, synthetic construct
IKNTRAE

SEQ ID NO: 49942 - protein, 7 aa, synthetic construct
KQSQMIP

SEQ ID NO: 49943 - protein, 7 aa, synthetic construct
NAMKRHE

SEQ ID NO: 49944 - protein, 7 aa, synthetic construct
DHSRTSG

SEQ ID NO: 49945 - protein, 7 aa, synthetic construct
HKSNPPD

SEQ ID NO: 49946 - protein, 7 aa, synthetic construct
YGGNRDL

SEQ ID NO: 49947 - protein, 7 aa, synthetic construct
DMQPKSI

SEQ ID NO: 49948 - protein, 7 aa, synthetic construct
SKTGPSA

SEQ ID NO: 49949 - protein, 7 aa, synthetic construct
PSSIMQG

SEQ ID NO: 49950 - protein, 7 aa, synthetic construct
NRSAMAA

SEQ ID NO: 49951 - protein, 7 aa, synthetic construct
FTNRTVA

SEQ ID NO: 49952 - protein, 7 aa, synthetic construct
HNVIQGS

SEQ ID NO: 49953 - protein, 7 aa, synthetic construct
NKQSTPG

SEQ ID NO: 49954 - protein, 7 aa, synthetic construct
VHRTTEH

SEQ ID NO: 49955 - protein, 7 aa, synthetic construct
LPRSGAP

SEQ ID NO: 49956 - protein, 7 aa, synthetic construct
SRHQNAY

SEQ ID NO: 49957 - protein, 7 aa, synthetic construct
WDGKHPG

SEQ ID NO: 49958 - protein, 7 aa, synthetic construct
LASMQKV

SEQ ID NO: 49959 - protein, 7 aa, synthetic construct
IKSTSQS

SEQ ID NO: 49960 - protein, 7 aa, synthetic construct
TLGSGNM

SEQ ID NO: 49961 - protein, 7 aa, synthetic construct
HAKGSTG

SEQ ID NO: 49962 - protein, 7 aa, synthetic construct
KTTAAKE

SEQ ID NO: 49963 - protein, 7 aa, synthetic construct
FNKAVNH

SEQ ID NO: 49964 - protein, 7 aa, synthetic construct
KSSGIQG

SEQ ID NO: 49965 - protein, 7 aa, synthetic construct
HAQYPRA

SEQ ID NO: 49966 - protein, 7 aa, synthetic construct
AADQRGG

SEQ ID NO: 49967 - protein, 7 aa, synthetic construct
SKGTMVG

SEQ ID NO: 49968 - protein, 7 aa, synthetic construct
KPNQAYG

SEQ ID NO: 49969 - protein, 7 aa, synthetic construct
FRAANQN

SEQ ID NO: 49970 - protein, 7 aa, synthetic construct
TSAKSSA

SEQ ID NO: 49971 - protein, 7 aa, synthetic construct
TFGQQQE

SEQ ID NO: 49972 - protein, 7 aa, synthetic construct
KTANGIG

SEQ ID NO: 49973 - protein, 7 aa, synthetic construct
RMSAPEE

SEQ ID NO: 49974 - protein, 7 aa, synthetic construct
QVRDNNK

SEQ ID NO: 49975 - protein, 7 aa, synthetic construct
KIITGTA

SEQ ID NO: 49976 - protein, 7 aa, synthetic construct
SIHPTTH

SEQ ID NO: 49977 - protein, 7 aa, synthetic construct
NSLKTSH

SEQ ID NO: 49978 - protein, 7 aa, synthetic construct
AGKTSGA

SEQ ID NO: 49979 - protein, 7 aa, synthetic construct
YPQSKSS

SEQ ID NO: 49980 - protein, 7 aa, synthetic construct
TAVLIHG

SEQ ID NO: 49981 - protein, 7 aa, synthetic construct
ADRTSNA

SEQ ID NO: 49982 - protein, 7 aa, synthetic construct
GQNKMGS

SEQ ID NO: 49983 - protein, 7 aa, synthetic construct
PKQNARE

SEQ ID NO: 49984 - protein, 7 aa, synthetic construct
KLYKQDG

SEQ ID NO: 49985 - protein, 7 aa, synthetic construct
QGKAAQG

SEQ ID NO: 49986 - protein, 7 aa, synthetic construct
QGSTKQG

SEQ ID NO: 49987 - protein, 7 aa, synthetic construct
QGQRSAS

SEQ ID NO: 49988 - protein, 7 aa, synthetic construct
VKQTVGG

SEQ ID NO: 49989 - protein, 7 aa, synthetic construct
QTSNRAP

SEQ ID NO: 49990 - protein, 7 aa, synthetic construct
MSTGNQR

SEQ ID NO: 49991 - protein, 7 aa, synthetic construct
NKTPMKE

SEQ ID NO: 49992 - protein, 7 aa, synthetic construct
HRSSTGS

SEQ ID NO: 49993 - protein, 7 aa, synthetic construct
NSKMSAD

SEQ ID NO: 49994 - protein, 7 aa, synthetic construct
GHANGVA

SEQ ID NO: 49995 - protein, 7 aa, synthetic construct
DMRARHE

SEQ ID NO: 49996 - protein, 7 aa, synthetic construct
TTTTNKA

SEQ ID NO: 49997 - protein, 7 aa, synthetic construct
YQYHSDM

SEQ ID NO: 49998 - protein, 7 aa, synthetic construct
GKQWSGE

SEQ ID NO: 49999 - protein, 7 aa, synthetic construct
NRNNAVG

SEQ ID NO: 50000 - protein, 7 aa, synthetic construct
FPAKTDL

SEQ ID NO: 50001 - protein, 7 aa, synthetic construct
AGVSRAP

SEQ ID NO: 50002 - protein, 7 aa, synthetic construct
KQTGITG

SEQ ID NO: 50003 - protein, 7 aa, synthetic construct
PSKVSGG

SEQ ID NO: 50004 - protein, 7 aa, synthetic construct
RYNSGNA

SEQ ID NO: 50005 - protein, 7 aa, synthetic construct
ATQKVPM

SEQ ID NO: 50006 - protein, 7 aa, synthetic construct
KEFTKTE

SEQ ID NO: 50007 - protein, 7 aa, synthetic construct
PYNSGVS

SEQ ID NO: 50008 - protein, 7 aa, synthetic construct
SKATATF

SEQ ID NO: 50009 - protein, 7 aa, synthetic construct
TPRGMQG

SEQ ID NO: 50010 - protein, 7 aa, synthetic construct
DKRTAFA

SEQ ID NO: 50011 - protein, 7 aa, synthetic construct
KQKGDQD

SEQ ID NO: 50012 - protein, 7 aa, synthetic construct
NSLKMET

SEQ ID NO: 50013 - protein, 7 aa, synthetic construct
PYHGLKG

SEQ ID NO: 50014 - protein, 7 aa, synthetic construct
SSHMTVN

SEQ ID NO: 50015 - protein, 7 aa, synthetic construct
TPMQHGG

SEQ ID NO: 50016 - protein, 7 aa, synthetic construct
QWQKSVP

SEQ ID NO: 50017 - protein, 7 aa, synthetic construct
TKPANQN

SEQ ID NO: 50018 - protein, 7 aa, synthetic construct
KTNAVSG

SEQ ID NO: 50019 - protein, 7 aa, synthetic construct
MTHGMPN

SEQ ID NO: 50020 - protein, 7 aa, synthetic construct
IMPKGYD

SEQ ID NO: 50021 - protein, 7 aa, synthetic construct
AEPYVVA

SEQ ID NO: 50022 - protein, 7 aa, synthetic construct
HGTNVNP

SEQ ID NO: 50023 - protein, 7 aa, synthetic construct
IMPLDHG

SEQ ID NO: 50024 - protein, 7 aa, synthetic construct
QNHLFKE

SEQ ID NO: 50025 - protein, 7 aa, synthetic construct
RQKDMSA

SEQ ID NO: 50026 - protein, 7 aa, synthetic construct
TSPRQVE

SEQ ID NO: 50027 - protein, 7 aa, synthetic construct
SNPSKQG

SEQ ID NO: 50028 - protein, 7 aa, synthetic construct
GMSTKGG

SEQ ID NO: 50029 - protein, 7 aa, synthetic construct
RKEVSSM

SEQ ID NO: 50030 - protein, 7 aa, synthetic construct
IARDAAF

SEQ ID NO: 50031 - protein, 7 aa, synthetic construct
SAINRRD

SEQ ID NO: 50032 - protein, 7 aa, synthetic construct
QRPTSTA

SEQ ID NO: 50033 - protein, 7 aa, synthetic construct
STSQRQP

SEQ ID NO: 50034 - protein, 7 aa, synthetic construct
IDPRHLG

SEQ ID NO: 50035 - protein, 7 aa, synthetic construct
YGARNHS

SEQ ID NO: 50036 - protein, 7 aa, synthetic construct
FQNGQKQ

SEQ ID NO: 50037 - protein, 7 aa, synthetic construct
IGTIKML

SEQ ID NO: 50038 - protein, 7 aa, synthetic construct
HTRLSNG

SEQ ID NO: 50039 - protein, 7 aa, synthetic construct
YIPGHPT

SEQ ID NO: 50040 - protein, 7 aa, synthetic construct
VRASNTG

SEQ ID NO: 50041 - protein, 7 aa, synthetic construct
VMHGRVD

SEQ ID NO: 50042 - protein, 7 aa, synthetic construct
QREGKAA

SEQ ID NO: 50043 - protein, 7 aa, synthetic construct
RQNNSGG

SEQ ID NO: 50044 - protein, 7 aa, synthetic construct
MVPAHIA

SEQ ID NO: 50045 - protein, 7 aa, synthetic construct
KKEGRGD

SEQ ID NO: 50046 - protein, 7 aa, synthetic construct
LPHQNAT

SEQ ID NO: 50047 - protein, 7 aa, synthetic construct
PINHKDH

SEQ ID NO: 50048 - protein, 7 aa, synthetic construct
MKSGVSN

SEQ ID NO: 50049 - protein, 7 aa, synthetic construct
ITHIGEM

SEQ ID NO: 50050 - protein, 7 aa, synthetic construct
LRLKNGE

SEQ ID NO: 50051 - protein, 7 aa, synthetic construct
TNRGSAA

SEQ ID NO: 50052 - protein, 7 aa, synthetic construct
NNKTMVA

SEQ ID NO: 50053 - protein, 7 aa, synthetic construct
YVKGDKS

SEQ ID NO: 50054 - protein, 7 aa, synthetic construct
NYKGITI

SEQ ID NO: 50055 - protein, 7 aa, synthetic construct
RQGRNNE

SEQ ID NO: 50056 - protein, 7 aa, synthetic construct
SKNNNMD

SEQ ID NO: 50057 - protein, 7 aa, synthetic construct
HGYVKDA

SEQ ID NO: 50058 - protein, 7 aa, synthetic construct
MGAKSWD

SEQ ID NO: 50059 - protein, 7 aa, synthetic construct
NKQGNVG

SEQ ID NO: 50060 - protein, 7 aa, synthetic construct
VKNHPSG

SEQ ID NO: 50061 - protein, 7 aa, synthetic construct
QPTMIKG

SEQ ID NO: 50062 - protein, 7 aa, synthetic construct
KNAGMTA

SEQ ID NO: 50063 - protein, 7 aa, synthetic construct
PHSKTEA

SEQ ID NO: 50064 - protein, 7 aa, synthetic construct
KVNLTQS

SEQ ID NO: 50065 - protein, 7 aa, synthetic construct
KQNTTGA

SEQ ID NO: 50066 - protein, 7 aa, synthetic construct
SKPSGIG

SEQ ID NO: 50067 - protein, 7 aa, synthetic construct
TTKSIQV

SEQ ID NO: 50068 - protein, 7 aa, synthetic construct
MRPVNGG

SEQ ID NO: 50069 - protein, 7 aa, synthetic construct
KTHSEMN

SEQ ID NO: 50070 - protein, 7 aa, synthetic construct
NHTSRML

SEQ ID NO: 50071 - protein, 7 aa, synthetic construct
HTVSVGA

SEQ ID NO: 50072 - protein, 7 aa, synthetic construct
DRGVASA

SEQ ID NO: 50073 - protein, 7 aa, synthetic construct
LASRYVA

SEQ ID NO: 50074 - protein, 7 aa, synthetic construct
TRSPQTA

SEQ ID NO: 50075 - protein, 7 aa, synthetic construct
YQTTSKG

SEQ ID NO: 50076 - protein, 7 aa, synthetic construct
IGMRREH

SEQ ID NO: 50077 - protein, 7 aa, synthetic construct
GSSMQAR

SEQ ID NO: 50078 - protein, 7 aa, synthetic construct
GRFREGP

SEQ ID NO: 50079 - protein, 7 aa, synthetic construct
SSQMRHD

SEQ ID NO: 50080 - protein, 7 aa, synthetic construct
PLKTANS

SEQ ID NO: 50081 - protein, 7 aa, synthetic construct
YGRGADA

SEQ ID NO: 50082 - protein, 7 aa, synthetic construct
QPKNGTS

SEQ ID NO: 50083 - protein, 7 aa, synthetic construct
MKQANAG

SEQ ID NO: 50084 - protein, 7 aa, synthetic construct
WVKDAGM

SEQ ID NO: 50085 - protein, 7 aa, synthetic construct
VKNQSQN

SEQ ID NO: 50086 - protein, 7 aa, synthetic construct
QHGRDAQ

SEQ ID NO: 50087 - protein, 7 aa, synthetic construct
TSPPMMG

SEQ ID NO: 50088 - protein, 7 aa, synthetic construct
AVGRLPP

SEQ ID NO: 50089 - protein, 7 aa, synthetic construct
AYIREKE

SEQ ID NO: 50090 - protein, 7 aa, synthetic construct
AVRQKEN

SEQ ID NO: 50091 - protein, 7 aa, synthetic construct
SGKQTSA

SEQ ID NO: 50092 - protein, 7 aa, synthetic construct
EVRMGIV

SEQ ID NO: 50093 - protein, 7 aa, synthetic construct
EFKRSQG

SEQ ID NO: 50094 - protein, 7 aa, synthetic construct
FGGKTQA

SEQ ID NO: 50095 - protein, 7 aa, synthetic construct
KAKEHRD

SEQ ID NO: 50096 - protein, 7 aa, synthetic construct
GVKMGAG

SEQ ID NO: 50097 - protein, 7 aa, synthetic construct
ARQQPTS

SEQ ID NO: 50098 - protein, 7 aa, synthetic construct
SHANKHT

SEQ ID NO: 50099 - protein, 7 aa, synthetic construct
WPKQNNV

SEQ ID NO: 50100 - protein, 7 aa, synthetic construct
LDHFNTA

SEQ ID NO: 50101 - protein, 7 aa, synthetic construct
GARNNNE

SEQ ID NO: 50102 - protein, 7 aa, synthetic construct
YRNEYKT

SEQ ID NO: 50103 - protein, 7 aa, synthetic construct
GHKLGPN

SEQ ID NO: 50104 - protein, 7 aa, synthetic construct
NAGTQYG

SEQ ID NO: 50105 - protein, 7 aa, synthetic construct
VAGMGTR

SEQ ID NO: 50106 - protein, 7 aa, synthetic construct
HIGMLKE

SEQ ID NO: 50107 - protein, 7 aa, synthetic construct
KFSQNQS

SEQ ID NO: 50108 - protein, 7 aa, synthetic construct
RPGFNEK

SEQ ID NO: 50109 - protein, 7 aa, synthetic construct
QTSRASP

SEQ ID NO: 50110 - protein, 7 aa, synthetic construct
TVGIQPH

SEQ ID NO: 50111 - protein, 7 aa, synthetic construct
NKNNNAA

SEQ ID NO: 50112 - protein, 7 aa, synthetic construct
QQQLKAQ

SEQ ID NO: 50113 - protein, 7 aa, synthetic construct
KPNPGGG

SEQ ID NO: 50114 - protein, 7 aa, synthetic construct
SPSKQQG

SEQ ID NO: 50115 - protein, 7 aa, synthetic construct
QNKSNNS

SEQ ID NO: 50116 - protein, 7 aa, synthetic construct
SPSMKDS

SEQ ID NO: 50117 - protein, 7 aa, synthetic construct
NRSASVG

SEQ ID NO: 50118 - protein, 7 aa, synthetic construct
YHGGRND

SEQ ID NO: 50119 - protein, 7 aa, synthetic construct
ADHVSRP

SEQ ID NO: 50120 - protein, 7 aa, synthetic construct
AKLPADY

SEQ ID NO: 50121 - protein, 7 aa, synthetic construct
VQSHMGS

SEQ ID NO: 50122 - protein, 7 aa, synthetic construct
TKMGSMA

SEQ ID NO: 50123 - protein, 7 aa, synthetic construct
SAQGSNG

SEQ ID NO: 50124 - protein, 7 aa, synthetic construct
TTSNQRA

SEQ ID NO: 50125 - protein, 7 aa, synthetic construct
YGHNFKD

SEQ ID NO: 50126 - protein, 7 aa, synthetic construct
PKTNQQG

SEQ ID NO: 50127 - protein, 7 aa, synthetic construct
TQGQKYA

SEQ ID NO: 50128 - protein, 7 aa, synthetic construct
TKQQSAQ

SEQ ID NO: 50129 - protein, 7 aa, synthetic construct
FHSHGTE

SEQ ID NO: 50130 - protein, 7 aa, synthetic construct
HGNGDRN

SEQ ID NO: 50131 - protein, 7 aa, synthetic construct
RTFLDKD

SEQ ID NO: 50132 - protein, 7 aa, synthetic construct
RFQGPLG

SEQ ID NO: 50133 - protein, 7 aa, synthetic construct
GTKQEAP

SEQ ID NO: 50134 - protein, 7 aa, synthetic construct
VRTAQLD

SEQ ID NO: 50135 - protein, 7 aa, synthetic construct
GAHYKQA

SEQ ID NO: 50136 - protein, 7 aa, synthetic construct
KGHPDYM

SEQ ID NO: 50137 - protein, 7 aa, synthetic construct
FKGIPGS

SEQ ID NO: 50138 - protein, 7 aa, synthetic construct
LKSQQSF

SEQ ID NO: 50139 - protein, 7 aa, synthetic construct
NQSRYSE

SEQ ID NO: 50140 - protein, 7 aa, synthetic construct
WSHSASA

SEQ ID NO: 50141 - protein, 7 aa, synthetic construct
VRGTNSP

SEQ ID NO: 50142 - protein, 7 aa, synthetic construct
STERGMS

SEQ ID NO: 50143 - protein, 7 aa, synthetic construct
PYSAKAD

SEQ ID NO: 50144 - protein, 7 aa, synthetic construct
TQNYNTG

SEQ ID NO: 50145 - protein, 7 aa, synthetic construct
RGQERGV

SEQ ID NO: 50146 - protein, 7 aa, synthetic construct
RNPSATA

SEQ ID NO: 50147 - protein, 7 aa, synthetic construct
TNSKQDM

SEQ ID NO: 50148 - protein, 7 aa, synthetic construct
RTGTAVV

SEQ ID NO: 50149 - protein, 7 aa, synthetic construct
GHQSHNI

SEQ ID NO: 50150 - protein, 7 aa, synthetic construct
APAKTNF

SEQ ID NO: 50151 - protein, 7 aa, synthetic construct
NSNTRQW

SEQ ID NO: 50152 - protein, 7 aa, synthetic construct
YQKESKG

SEQ ID NO: 50153 - protein, 7 aa, synthetic construct
GSAYPIA

SEQ ID NO: 50154 - protein, 7 aa, synthetic construct
KMAGANG

SEQ ID NO: 50155 - protein, 7 aa, synthetic construct
ERGGAGG

SEQ ID NO: 50156 - protein, 7 aa, synthetic construct
WMKDQGM

SEQ ID NO: 50157 - protein, 7 aa, synthetic construct
YSHVSGA

SEQ ID NO: 50158 - protein, 7 aa, synthetic construct
YHAKMTS

SEQ ID NO: 50159 - protein, 7 aa, synthetic construct
FKQNSHG

SEQ ID NO: 50160 - protein, 7 aa, synthetic construct
QYKLPEF

SEQ ID NO: 50161 - protein, 7 aa, synthetic construct
SNSRVHI

SEQ ID NO: 50162 - protein, 7 aa, synthetic construct
LFQNNAG

SEQ ID NO: 50163 - protein, 7 aa, synthetic construct
TNKPMGG

SEQ ID NO: 50164 - protein, 7 aa, synthetic construct
PRSGQGY

SEQ ID NO: 50165 - protein, 7 aa, synthetic construct
GIILPAG

SEQ ID NO: 50166 - protein, 7 aa, synthetic construct
MSKANAG

SEQ ID NO: 50167 - protein, 7 aa, synthetic construct
SKNQSMD

SEQ ID NO: 50168 - protein, 7 aa, synthetic construct
RVNDNNR

SEQ ID NO: 50169 - protein, 7 aa, synthetic construct
VPNRSPT

SEQ ID NO: 50170 - protein, 7 aa, synthetic construct
AAGMRGI

SEQ ID NO: 50171 - protein, 7 aa, synthetic construct
RPPSAVG

SEQ ID NO: 50172 - protein, 7 aa, synthetic construct
TRETQDR

SEQ ID NO: 50173 - protein, 7 aa, synthetic construct
PQSAKML

SEQ ID NO: 50174 - protein, 7 aa, synthetic construct
PPAREVH

SEQ ID NO: 50175 - protein, 7 aa, synthetic construct
NQAQGRG

SEQ ID NO: 50176 - protein, 7 aa, synthetic construct
NQPKSSP

SEQ ID NO: 50177 - protein, 7 aa, synthetic construct
GNVVTQY

SEQ ID NO: 50178 - protein, 7 aa, synthetic construct
VLPGFHP

SEQ ID NO: 50179 - protein, 7 aa, synthetic construct
GARASMG

SEQ ID NO: 50180 - protein, 7 aa, synthetic construct
IPHIRVQ

SEQ ID NO: 50181 - protein, 7 aa, synthetic construct
IGGNAKG

SEQ ID NO: 50182 - protein, 7 aa, synthetic construct
ISHVGAP

SEQ ID NO: 50183 - protein, 7 aa, synthetic construct
SNSISVV

SEQ ID NO: 50184 - protein, 7 aa, synthetic construct
FGGTRVV

SEQ ID NO: 50185 - protein, 7 aa, synthetic construct
ANKERLV

SEQ ID NO: 50186 - protein, 7 aa, synthetic construct
FLRESMG

SEQ ID NO: 50187 - protein, 7 aa, synthetic construct
KNTTASV

SEQ ID NO: 50188 - protein, 7 aa, synthetic construct
NWKGRDE

SEQ ID NO: 50189 - protein, 7 aa, synthetic construct
KAGSMLA

SEQ ID NO: 50190 - protein, 7 aa, synthetic construct
RPGNTNG

SEQ ID NO: 50191 - protein, 7 aa, synthetic construct
IPSRMQS

SEQ ID NO: 50192 - protein, 7 aa, synthetic construct
SPGLKMA

SEQ ID NO: 50193 - protein, 7 aa, synthetic construct
RSTGIKD

SEQ ID NO: 50194 - protein, 7 aa, synthetic construct
CMKRTCD

SEQ ID NO: 50195 - protein, 7 aa, synthetic construct
RVPDKWD

SEQ ID NO: 50196 - protein, 7 aa, synthetic construct
KHMQLTD

SEQ ID NO: 50197 - protein, 7 aa, synthetic construct
QPKISGG

SEQ ID NO: 50198 - protein, 7 aa, synthetic construct
TMQYNDK

SEQ ID NO: 50199 - protein, 7 aa, synthetic construct
SPKGYSG

SEQ ID NO: 50200 - protein, 7 aa, synthetic construct
AQPYQRD

SEQ ID NO: 50201 - protein, 7 aa, synthetic construct
DQLAKRM

SEQ ID NO: 50202 - protein, 7 aa, synthetic construct
VNKTQGG

SEQ ID NO: 50203 - protein, 7 aa, synthetic construct
EGRMQML

SEQ ID NO: 50204 - protein, 7 aa, synthetic construct
TATAFKN

SEQ ID NO: 50205 - protein, 7 aa, synthetic construct
NRKDAQN

SEQ ID NO: 50206 - protein, 7 aa, synthetic construct
KFNSNAA

SEQ ID NO: 50207 - protein, 7 aa, synthetic construct
VTNSHFA

SEQ ID NO: 50208 - protein, 7 aa, synthetic construct
TSPSRML

SEQ ID NO: 50209 - protein, 7 aa, synthetic construct
INQTFPP

SEQ ID NO: 50210 - protein, 7 aa, synthetic construct
NQTGRTA

SEQ ID NO: 50211 - protein, 7 aa, synthetic construct
MPSRAQA

SEQ ID NO: 50212 - protein, 7 aa, synthetic construct
DRIQIPA

SEQ ID NO: 50213 - protein, 7 aa, synthetic construct
NIKFQVP

SEQ ID NO: 50214 - protein, 7 aa, synthetic construct
EPSPIRH

SEQ ID NO: 50215 - protein, 7 aa, synthetic construct
NRAGAGV

SEQ ID NO: 50216 - protein, 7 aa, synthetic construct
RPSTSQA

SEQ ID NO: 50217 - protein, 7 aa, synthetic construct
KNNPGSN

SEQ ID NO: 50218 - protein, 7 aa, synthetic construct
MAKLYRE

SEQ ID NO: 50219 - protein, 7 aa, synthetic construct
DKRSGAD

SEQ ID NO: 50220 - protein, 7 aa, synthetic construct
WRQSTHD

SEQ ID NO: 50221 - protein, 7 aa, synthetic construct
ATKNGKE

SEQ ID NO: 50222 - protein, 7 aa, synthetic construct
QKAMKGP

SEQ ID NO: 50223 - protein, 7 aa, synthetic construct
QRNSTTA

SEQ ID NO: 50224 - protein, 7 aa, synthetic construct
QAGAHTM

SEQ ID NO: 50225 - protein, 7 aa, synthetic construct
IKAIPRN

SEQ ID NO: 50226 - protein, 7 aa, synthetic construct
SAKGTIA

SEQ ID NO: 50227 - protein, 7 aa, synthetic construct
QRNPVTG

SEQ ID NO: 50228 - protein, 7 aa, synthetic construct
GKANMAG

SEQ ID NO: 50229 - protein, 7 aa, synthetic construct
MDLKRSG

SEQ ID NO: 50230 - protein, 7 aa, synthetic construct
NSIQHRM

SEQ ID NO: 50231 - protein, 7 aa, synthetic construct
EMGRTRI

SEQ ID NO: 50232 - protein, 7 aa, synthetic construct
AIEIHRG

SEQ ID NO: 50233 - protein, 7 aa, synthetic construct
DKSHSQG

SEQ ID NO: 50234 - protein, 7 aa, synthetic construct
HRHHPEN

SEQ ID NO: 50235 - protein, 7 aa, synthetic construct
YHRKHED

SEQ ID NO: 50236 - protein, 7 aa, synthetic construct
NNFNTER

SEQ ID NO: 50237 - protein, 7 aa, synthetic construct
KMNNAPG

SEQ ID NO: 50238 - protein, 7 aa, synthetic construct
MGSKVSG

SEQ ID NO: 50239 - protein, 7 aa, synthetic construct
SKQQKDG

SEQ ID NO: 50240 - protein, 7 aa, synthetic construct
TKPQGAY

SEQ ID NO: 50241 - protein, 7 aa, synthetic construct
QRPKVDL

SEQ ID NO: 50242 - protein, 7 aa, synthetic construct
WAGMGRA

SEQ ID NO: 50243 - protein, 7 aa, synthetic construct
GITKTMG

SEQ ID NO: 50244 - protein, 7 aa, synthetic construct
KRDVLAA

SEQ ID NO: 50245 - protein, 7 aa, synthetic construct
TKNINQG

SEQ ID NO: 50246 - protein, 7 aa, synthetic construct
KGIGGSD

SEQ ID NO: 50247 - protein, 7 aa, synthetic construct
SKTASSA

SEQ ID NO: 50248 - protein, 7 aa, synthetic construct
LVNQGMG

SEQ ID NO: 50249 - protein, 7 aa, synthetic construct
LKINQQS

SEQ ID NO: 50250 - protein, 7 aa, synthetic construct
MKSNAAN

SEQ ID NO: 50251 - protein, 7 aa, synthetic construct
FKSGPQG

SEQ ID NO: 50252 - protein, 7 aa, synthetic construct
RTPTHQQ

SEQ ID NO: 50253 - protein, 7 aa, synthetic construct
PKFANED

SEQ ID NO: 50254 - protein, 7 aa, synthetic construct
ITKQGKD

SEQ ID NO: 50255 - protein, 7 aa, synthetic construct
YNGKMQN

SEQ ID NO: 50256 - protein, 7 aa, synthetic construct
SAPSVHG

SEQ ID NO: 50257 - protein, 7 aa, synthetic construct
FPVNNIN

SEQ ID NO: 50258 - protein, 7 aa, synthetic construct
MKSPQRD

SEQ ID NO: 50259 - protein, 7 aa, synthetic construct
TNGKSVG

SEQ ID NO: 50260 - protein, 7 aa, synthetic construct
STYGGPQ

SEQ ID NO: 50261 - protein, 7 aa, synthetic construct
PQSVGNV

SEQ ID NO: 50262 - protein, 7 aa, synthetic construct
PPTRAGL

SEQ ID NO: 50263 - protein, 7 aa, synthetic construct
PAFHDQR

SEQ ID NO: 50264 - protein, 7 aa, synthetic construct
VRATSSP

SEQ ID NO: 50265 - protein, 7 aa, synthetic construct
NSSMKPY

SEQ ID NO: 50266 - protein, 7 aa, synthetic construct
YRPSFDS

SEQ ID NO: 50267 - protein, 7 aa, synthetic construct
NLRAQDA

SEQ ID NO: 50268 - protein, 7 aa, synthetic construct
KSPNIGG

SEQ ID NO: 50269 - protein, 7 aa, synthetic construct
GQNGKGG

SEQ ID NO: 50270 - protein, 7 aa, synthetic construct
IKSQMRD

SEQ ID NO: 50271 - protein, 7 aa, synthetic construct
NSKGAQG

SEQ ID NO: 50272 - protein, 7 aa, synthetic construct
GQTKTIG

SEQ ID NO: 50273 - protein, 7 aa, synthetic construct
HKSEPLF

SEQ ID NO: 50274 - protein, 7 aa, synthetic construct
YRKVDLP

SEQ ID NO: 50275 - protein, 7 aa, synthetic construct
WTSLGKD

SEQ ID NO: 50276 - protein, 7 aa, synthetic construct
KVPSGNG

SEQ ID NO: 50277 - protein, 7 aa, synthetic construct
NNKSGGM

SEQ ID NO: 50278 - protein, 7 aa, synthetic construct
NNGRSVP

SEQ ID NO: 50279 - protein, 7 aa, synthetic construct
KTPTVAG

SEQ ID NO: 50280 - protein, 7 aa, synthetic construct
DRPHEIR

SEQ ID NO: 50281 - protein, 7 aa, synthetic construct
TFRQGDH

SEQ ID NO: 50282 - protein, 7 aa, synthetic construct
TRQVNGH

SEQ ID NO: 50283 - protein, 7 aa, synthetic construct
GTNGKSA

SEQ ID NO: 50284 - protein, 7 aa, synthetic construct
VINMNKS

SEQ ID NO: 50285 - protein, 7 aa, synthetic construct
RNERSPA

SEQ ID NO: 50286 - protein, 7 aa, synthetic construct
GFMQSHP

SEQ ID NO: 50287 - protein, 7 aa, synthetic construct
YTRNGMS

SEQ ID NO: 50288 - protein, 7 aa, synthetic construct
QKANGQG

SEQ ID NO: 50289 - protein, 7 aa, synthetic construct
YQGAGMM

SEQ ID NO: 50290 - protein, 7 aa, synthetic construct
PPNGSTK

SEQ ID NO: 50291 - protein, 7 aa, synthetic construct
GQSKAQV

SEQ ID NO: 50292 - protein, 7 aa, synthetic construct
PHGGREY

SEQ ID NO: 50293 - protein, 7 aa, synthetic construct
YDKNIPV

SEQ ID NO: 50294 - protein, 7 aa, synthetic construct
KMQTSTA

SEQ ID NO: 50295 - protein, 7 aa, synthetic construct
HMLAKPD

SEQ ID NO: 50296 - protein, 7 aa, synthetic construct
GGQRTVG

SEQ ID NO: 50297 - protein, 7 aa, synthetic construct
PRLRHDE

SEQ ID NO: 50298 - protein, 7 aa, synthetic construct
KTQASAS

SEQ ID NO: 50299 - protein, 7 aa, synthetic construct
GQRNTMA

SEQ ID NO: 50300 - protein, 7 aa, synthetic construct
RGPQTPM

SEQ ID NO: 50301 - protein, 7 aa, synthetic construct
FKPNAGT

SEQ ID NO: 50302 - protein, 7 aa, synthetic construct
WDNKVGA

SEQ ID NO: 50303 - protein, 7 aa, synthetic construct
FKQGNQN

SEQ ID NO: 50304 - protein, 7 aa, synthetic construct
ALPMLRG

SEQ ID NO: 50305 - protein, 7 aa, synthetic construct
KSVHGAP

SEQ ID NO: 50306 - protein, 7 aa, synthetic construct
RSPQTSP

SEQ ID NO: 50307 - protein, 7 aa, synthetic construct
MALNKFD

SEQ ID NO: 50308 - protein, 7 aa, synthetic construct
MPHHDKQ

SEQ ID NO: 50309 - protein, 7 aa, synthetic construct
GKTASTN

SEQ ID NO: 50310 - protein, 7 aa, synthetic construct
DNVSKSS

SEQ ID NO: 50311 - protein, 7 aa, synthetic construct
GDKVRAV

SEQ ID NO: 50312 - protein, 7 aa, synthetic construct
LKGMGIG

SEQ ID NO: 50313 - protein, 7 aa, synthetic construct
THHMRGG

SEQ ID NO: 50314 - protein, 7 aa, synthetic construct
NAPDLRP

SEQ ID NO: 50315 - protein, 7 aa, synthetic construct
VNQKMSP

SEQ ID NO: 50316 - protein, 7 aa, synthetic construct
YAKSHMT

SEQ ID NO: 50317 - protein, 7 aa, synthetic construct
WKQEKHG

SEQ ID NO: 50318 - protein, 7 aa, synthetic construct
KGNNNVA

SEQ ID NO: 50319 - protein, 7 aa, synthetic construct
TYGNTVR

SEQ ID NO: 50320 - protein, 7 aa, synthetic construct
RSGQPTG

SEQ ID NO: 50321 - protein, 7 aa, synthetic construct
MGQVPNT

SEQ ID NO: 50322 - protein, 7 aa, synthetic construct
KGINRAD

SEQ ID NO: 50323 - protein, 7 aa, synthetic construct
SNAHKNA

SEQ ID NO: 50324 - protein, 7 aa, synthetic construct
RGIGGQN

SEQ ID NO: 50325 - protein, 7 aa, synthetic construct
GAAVKVV

SEQ ID NO: 50326 - protein, 7 aa, synthetic construct
TILQMGS

SEQ ID NO: 50327 - protein, 7 aa, synthetic construct
KKNAEMN

SEQ ID NO: 50328 - protein, 7 aa, synthetic construct
NKPTMQS

SEQ ID NO: 50329 - protein, 7 aa, synthetic construct
MQKSPNF

SEQ ID NO: 50330 - protein, 7 aa, synthetic construct
RKGPTDD

SEQ ID NO: 50331 - protein, 7 aa, synthetic construct
KSSGGVN

SEQ ID NO: 50332 - protein, 7 aa, synthetic construct
QVRQTNP

SEQ ID NO: 50333 - protein, 7 aa, synthetic construct
RSGTSNG

SEQ ID NO: 50334 - protein, 7 aa, synthetic construct
YVTNRSM

SEQ ID NO: 50335 - protein, 7 aa, synthetic construct
IIGTNSI

SEQ ID NO: 50336 - protein, 7 aa, synthetic construct
SGINRTA

SEQ ID NO: 50337 - protein, 7 aa, synthetic construct
KMSKEMS

SEQ ID NO: 50338 - protein, 7 aa, synthetic construct
YPMSQVA

SEQ ID NO: 50339 - protein, 7 aa, synthetic construct
TKPSSAG

SEQ ID NO: 50340 - protein, 7 aa, synthetic construct
THGMGGS

SEQ ID NO: 50341 - protein, 7 aa, synthetic construct
NTQSVRN

SEQ ID NO: 50342 - protein, 7 aa, synthetic construct
PVYGGEG

SEQ ID NO: 50343 - protein, 7 aa, synthetic construct
FRSFNNE

SEQ ID NO: 50344 - protein, 7 aa, synthetic construct
MANKTGG

SEQ ID NO: 50345 - protein, 7 aa, synthetic construct
AKAKDIM

SEQ ID NO: 50346 - protein, 7 aa, synthetic construct
KPMQNSA

SEQ ID NO: 50347 - protein, 7 aa, synthetic construct
KFGGFSP

SEQ ID NO: 50348 - protein, 7 aa, synthetic construct
SKPASQG

SEQ ID NO: 50349 - protein, 7 aa, synthetic construct
DRTAVKH

SEQ ID NO: 50350 - protein, 7 aa, synthetic construct
YAQRGQP

SEQ ID NO: 50351 - protein, 7 aa, synthetic construct
MAGSGGP

SEQ ID NO: 50352 - protein, 7 aa, synthetic construct
ANGVVNG

SEQ ID NO: 50353 - protein, 7 aa, synthetic construct
QIGDKKG

SEQ ID NO: 50354 - protein, 7 aa, synthetic construct
MANPARG

SEQ ID NO: 50355 - protein, 7 aa, synthetic construct
IPTRSQM

SEQ ID NO: 50356 - protein, 7 aa, synthetic construct
TMSQKTP

SEQ ID NO: 50357 - protein, 7 aa, synthetic construct
KRNQDDA

SEQ ID NO: 50358 - protein, 7 aa, synthetic construct
RIHGNSA

SEQ ID NO: 50359 - protein, 7 aa, synthetic construct
SKAVSKD

SEQ ID NO: 50360 - protein, 7 aa, synthetic construct
KTQSSAS

SEQ ID NO: 50361 - protein, 7 aa, synthetic construct
QRDAKNQ

SEQ ID NO: 50362 - protein, 7 aa, synthetic construct
GPSKVMG

SEQ ID NO: 50363 - protein, 7 aa, synthetic construct
QLAVRPS

SEQ ID NO: 50364 - protein, 7 aa, synthetic construct
VLGNAHA

SEQ ID NO: 50365 - protein, 7 aa, synthetic construct
QRSFESS

SEQ ID NO: 50366 - protein, 7 aa, synthetic construct
VNRSGQT

SEQ ID NO: 50367 - protein, 7 aa, synthetic construct
TWKQGDM

SEQ ID NO: 50368 - protein, 7 aa, synthetic construct
RAPGFNN

SEQ ID NO: 50369 - protein, 7 aa, synthetic construct
FHNGHEG

SEQ ID NO: 50370 - protein, 7 aa, synthetic construct
RHMLQEP

SEQ ID NO: 50371 - protein, 7 aa, synthetic construct
TRTVSGG

SEQ ID NO: 50372 - protein, 7 aa, synthetic construct
TPKASKE

SEQ ID NO: 50373 - protein, 7 aa, synthetic construct
RLDKQGF

SEQ ID NO: 50374 - protein, 7 aa, synthetic construct
HFPTLRE

SEQ ID NO: 50375 - protein, 7 aa, synthetic construct
TNTAIPP

SEQ ID NO: 50376 - protein, 7 aa, synthetic construct
WRAVGTG

SEQ ID NO: 50377 - protein, 7 aa, synthetic construct
GAKTGPM

SEQ ID NO: 50378 - protein, 7 aa, synthetic construct
NLTKPAM

SEQ ID NO: 50379 - protein, 7 aa, synthetic construct
RENQSSN

SEQ ID NO: 50380 - protein, 7 aa, synthetic construct
AGNKTQA

SEQ ID NO: 50381 - protein, 7 aa, synthetic construct
HNPMHKP

SEQ ID NO: 50382 - protein, 7 aa, synthetic construct
NVGQKTG

SEQ ID NO: 50383 - protein, 7 aa, synthetic construct
PDFKIGR

SEQ ID NO: 50384 - protein, 7 aa, synthetic construct
TKVASHG

SEQ ID NO: 50385 - protein, 7 aa, synthetic construct
YHKTIIS

SEQ ID NO: 50386 - protein, 7 aa, synthetic construct
NPVGGKG

SEQ ID NO: 50387 - protein, 7 aa, synthetic construct
DFKTVHS

SEQ ID NO: 50388 - protein, 7 aa, synthetic construct
TPVTHNN

SEQ ID NO: 50389 - protein, 7 aa, synthetic construct
TLEYART

SEQ ID NO: 50390 - protein, 7 aa, synthetic construct
KHHTGMA

SEQ ID NO: 50391 - protein, 7 aa, synthetic construct
VMQAVRG

SEQ ID NO: 50392 - protein, 7 aa, synthetic construct
TNKQMQG

SEQ ID NO: 50393 - protein, 7 aa, synthetic construct
WRTGVPG

SEQ ID NO: 50394 - protein, 7 aa, synthetic construct
TKTGSKE

SEQ ID NO: 50395 - protein, 7 aa, synthetic construct
MLAHQHA

SEQ ID NO: 50396 - protein, 7 aa, synthetic construct
TARISHV

SEQ ID NO: 50397 - protein, 7 aa, synthetic construct
SNRSGTG

SEQ ID NO: 50398 - protein, 7 aa, synthetic construct
TNSGRIG

SEQ ID NO: 50399 - protein, 7 aa, synthetic construct
RPSGNDA

SEQ ID NO: 50400 - protein, 7 aa, synthetic construct
NSKFGGE

SEQ ID NO: 50401 - protein, 7 aa, synthetic construct
GMGTRGT

SEQ ID NO: 50402 - protein, 7 aa, synthetic construct
GGAIGNP

SEQ ID NO: 50403 - protein, 7 aa, synthetic construct
KLGADKA

SEQ ID NO: 50404 - protein, 7 aa, synthetic construct
KANNIPG

SEQ ID NO: 50405 - protein, 7 aa, synthetic construct
IDNRPAI

SEQ ID NO: 50406 - protein, 7 aa, synthetic construct
EAKMNAH

SEQ ID NO: 50407 - protein, 7 aa, synthetic construct
LGVLTAG

SEQ ID NO: 50408 - protein, 7 aa, synthetic construct
IGQAIKA

SEQ ID NO: 50409 - protein, 7 aa, synthetic construct
PQKNGQG

SEQ ID NO: 50410 - protein, 7 aa, synthetic construct
EKTHPVP

SEQ ID NO: 50411 - protein, 7 aa, synthetic construct
FSKEYRN

SEQ ID NO: 50412 - protein, 7 aa, synthetic construct
SKTNSAV

SEQ ID NO: 50413 - protein, 7 aa, synthetic construct
VPNYVKE

SEQ ID NO: 50414 - protein, 7 aa, synthetic construct
RGSYSEP

SEQ ID NO: 50415 - protein, 7 aa, synthetic construct
NTTARQA

SEQ ID NO: 50416 - protein, 7 aa, synthetic construct
TMNTKVA

SEQ ID NO: 50417 - protein, 7 aa, synthetic construct
AVPNQKP

SEQ ID NO: 50418 - protein, 7 aa, synthetic construct
MPHHSKQ

SEQ ID NO: 50419 - protein, 7 aa, synthetic construct
SSSGYTG

SEQ ID NO: 50420 - protein, 7 aa, synthetic construct
YKVHEQV

SEQ ID NO: 50421 - protein, 7 aa, synthetic construct
RPVTQNG

SEQ ID NO: 50422 - protein, 7 aa, synthetic construct
GHFHVSP

SEQ ID NO: 50423 - protein, 7 aa, synthetic construct
KFVQNLP

SEQ ID NO: 50424 - protein, 7 aa, synthetic construct
DKANKFS

SEQ ID NO: 50425 - protein, 7 aa, synthetic construct
PSKAAQS

SEQ ID NO: 50426 - protein, 7 aa, synthetic construct
QVHKIAS

SEQ ID NO: 50427 - protein, 7 aa, synthetic construct
SPKGFGN

SEQ ID NO: 50428 - protein, 7 aa, synthetic construct
IIGRAGP

SEQ ID NO: 50429 - protein, 7 aa, synthetic construct
MGKSPSV

SEQ ID NO: 50430 - protein, 7 aa, synthetic construct
GARQVNG

SEQ ID NO: 50431 - protein, 7 aa, synthetic construct
YSSKGLH

SEQ ID NO: 50432 - protein, 7 aa, synthetic construct
QKMSNSP

SEQ ID NO: 50433 - protein, 7 aa, synthetic construct
VWTSGHP

SEQ ID NO: 50434 - protein, 7 aa, synthetic construct
LNAVKIP

SEQ ID NO: 50435 - protein, 7 aa, synthetic construct
TQITNKT

SEQ ID NO: 50436 - protein, 7 aa, synthetic construct
KSTGNFA

SEQ ID NO: 50437 - protein, 7 aa, synthetic construct
NGNLSRP

SEQ ID NO: 50438 - protein, 7 aa, synthetic construct
FKMSVPD

SEQ ID NO: 50439 - protein, 7 aa, synthetic construct
KNAPTAG

SEQ ID NO: 50440 - protein, 7 aa, synthetic construct
VKNASSA

SEQ ID NO: 50441 - protein, 7 aa, synthetic construct
MFREGKE

SEQ ID NO: 50442 - protein, 7 aa, synthetic construct
FNTVGGV

SEQ ID NO: 50443 - protein, 7 aa, synthetic construct
IFNTKTE

SEQ ID NO: 50444 - protein, 7 aa, synthetic construct
NSRHVVP

SEQ ID NO: 50445 - protein, 7 aa, synthetic construct
YGKTLHP

SEQ ID NO: 50446 - protein, 7 aa, synthetic construct
QKGGSGG

SEQ ID NO: 50447 - protein, 7 aa, synthetic construct
KNQASSP

SEQ ID NO: 50448 - protein, 7 aa, synthetic construct
RADFTQA

SEQ ID NO: 50449 - protein, 7 aa, synthetic construct
KMFGGTE

SEQ ID NO: 50450 - protein, 7 aa, synthetic construct
NGKTGSG

SEQ ID NO: 50451 - protein, 7 aa, synthetic construct
AIRSGNQ

SEQ ID NO: 50452 - protein, 7 aa, synthetic construct
TKNGSNN

SEQ ID NO: 50453 - protein, 7 aa, synthetic construct
RTTQAQA

SEQ ID NO: 50454 - protein, 7 aa, synthetic construct
SNRMPNS

SEQ ID NO: 50455 - protein, 7 aa, synthetic construct
MPLNISS

SEQ ID NO: 50456 - protein, 7 aa, synthetic construct
QASFITA

SEQ ID NO: 50457 - protein, 7 aa, synthetic construct
PRMNIPS

SEQ ID NO: 50458 - protein, 7 aa, synthetic construct
QTTHQGP

SEQ ID NO: 50459 - protein, 7 aa, synthetic construct
QAIHGAV

SEQ ID NO: 50460 - protein, 7 aa, synthetic construct
LRVGENK

SEQ ID NO: 50461 - protein, 7 aa, synthetic construct
RKSVEQD

SEQ ID NO: 50462 - protein, 7 aa, synthetic construct
ETGKGWS

SEQ ID NO: 50463 - protein, 7 aa, synthetic construct
FNSVKFE

SEQ ID NO: 50464 - protein, 7 aa, synthetic construct
QGTRTAA

SEQ ID NO: 50465 - protein, 7 aa, synthetic construct
SAKKADV

SEQ ID NO: 50466 - protein, 7 aa, synthetic construct
GRTGQTN

SEQ ID NO: 50467 - protein, 7 aa, synthetic construct
KSSVTRE

SEQ ID NO: 50468 - protein, 7 aa, synthetic construct
YNQASNK

SEQ ID NO: 50469 - protein, 7 aa, synthetic construct
SPIVKTM

SEQ ID NO: 50470 - protein, 7 aa, synthetic construct
APQHKQY

SEQ ID NO: 50471 - protein, 7 aa, synthetic construct
IGSQMIT

SEQ ID NO: 50472 - protein, 7 aa, synthetic construct
STKQHTP

SEQ ID NO: 50473 - protein, 7 aa, synthetic construct
FSKTGSS

SEQ ID NO: 50474 - protein, 7 aa, synthetic construct
EAARLEK

SEQ ID NO: 50475 - protein, 7 aa, synthetic construct
MGKFPHL

SEQ ID NO: 50476 - protein, 7 aa, synthetic construct
RYGGLSE

SEQ ID NO: 50477 - protein, 7 aa, synthetic construct
KKDNLSG

SEQ ID NO: 50478 - protein, 7 aa, synthetic construct
VMRQHAG

SEQ ID NO: 50479 - protein, 7 aa, synthetic construct
NKLWQDG

SEQ ID NO: 50480 - protein, 7 aa, synthetic construct
YGGQQTG

SEQ ID NO: 50481 - protein, 7 aa, synthetic construct
QDLRKSP

SEQ ID NO: 50482 - protein, 7 aa, synthetic construct
KQNQPSA

SEQ ID NO: 50483 - protein, 7 aa, synthetic construct
HQNQIPM

SEQ ID NO: 50484 - protein, 7 aa, synthetic construct
TRSSVQT

SEQ ID NO: 50485 - protein, 7 aa, synthetic construct
EPKRHTE

SEQ ID NO: 50486 - protein, 7 aa, synthetic construct
TKEYSIA

SEQ ID NO: 50487 - protein, 7 aa, synthetic construct
TKSSTTA

SEQ ID NO: 50488 - protein, 7 aa, synthetic construct
DLVREKR

SEQ ID NO: 50489 - protein, 7 aa, synthetic construct
KTNAQPP

SEQ ID NO: 50490 - protein, 7 aa, synthetic construct
ADTTKVW

SEQ ID NO: 50491 - protein, 7 aa, synthetic construct
WAQHKNA

SEQ ID NO: 50492 - protein, 7 aa, synthetic construct
YFKGNNG

SEQ ID NO: 50493 - protein, 7 aa, synthetic construct
LWNSKGG

SEQ ID NO: 50494 - protein, 7 aa, synthetic construct
LFGHDKP

SEQ ID NO: 50495 - protein, 7 aa, synthetic construct
YRMGAHN

SEQ ID NO: 50496 - protein, 7 aa, synthetic construct
HPPRALV

SEQ ID NO: 50497 - protein, 7 aa, synthetic construct
MKNQPQG

SEQ ID NO: 50498 - protein, 7 aa, synthetic construct
KMNTPES

SEQ ID NO: 50499 - protein, 7 aa, synthetic construct
NPGIREK

SEQ ID NO: 50500 - protein, 7 aa, synthetic construct
NPMFEHS

SEQ ID NO: 50501 - protein, 7 aa, synthetic construct
GMGMKQG

SEQ ID NO: 50502 - protein, 7 aa, synthetic construct
NKQTGQS

SEQ ID NO: 50503 - protein, 7 aa, synthetic construct
KGTGIAM

SEQ ID NO: 50504 - protein, 7 aa, synthetic construct
VRNALDM

SEQ ID NO: 50505 - protein, 7 aa, synthetic construct
VYPKQTG

SEQ ID NO: 50506 - protein, 7 aa, synthetic construct
QAPNFMA

SEQ ID NO: 50507 - protein, 7 aa, synthetic construct
GNKAHFV

SEQ ID NO: 50508 - protein, 7 aa, synthetic construct
IHFRGSE

SEQ ID NO: 50509 - protein, 7 aa, synthetic construct
RQPATSS

SEQ ID NO: 50510 - protein, 7 aa, synthetic construct
LPHHPQP

SEQ ID NO: 50511 - protein, 7 aa, synthetic construct
DKKTWEK

SEQ ID NO: 50512 - protein, 7 aa, synthetic construct
THNSIRA

SEQ ID NO: 50513 - protein, 7 aa, synthetic construct
RPNHVSM

SEQ ID NO: 50514 - protein, 7 aa, synthetic construct
INTGSAP

SEQ ID NO: 50515 - protein, 7 aa, synthetic construct
MKNTMTG

SEQ ID NO: 50516 - protein, 7 aa, synthetic construct
YRTKMSE

SEQ ID NO: 50517 - protein, 7 aa, synthetic construct
SPTNMKV

SEQ ID NO: 50518 - protein, 7 aa, synthetic construct
VNFKVGE

SEQ ID NO: 50519 - protein, 7 aa, synthetic construct
QGPTKNA

SEQ ID NO: 50520 - protein, 7 aa, synthetic construct
DKVRSQQ

SEQ ID NO: 50521 - protein, 7 aa, synthetic construct
SKKDSYS

SEQ ID NO: 50522 - protein, 7 aa, synthetic construct
VITQAQA

SEQ ID NO: 50523 - protein, 7 aa, synthetic construct
DVQYKVV

SEQ ID NO: 50524 - protein, 7 aa, synthetic construct
AKSSGSG

SEQ ID NO: 50525 - protein, 7 aa, synthetic construct
MKMKGDG

SEQ ID NO: 50526 - protein, 7 aa, synthetic construct
SRQSQGA

SEQ ID NO: 50527 - protein, 7 aa, synthetic construct
WKQFRDG

SEQ ID NO: 50528 - protein, 7 aa, synthetic construct
RNHDTRN

SEQ ID NO: 50529 - protein, 7 aa, synthetic construct
NRHAHND

SEQ ID NO: 50530 - protein, 7 aa, synthetic construct
GTMSHAH

SEQ ID NO: 50531 - protein, 7 aa, synthetic construct
PSKSGAA

SEQ ID NO: 50532 - protein, 7 aa, synthetic construct
MNQGNQR

SEQ ID NO: 50533 - protein, 7 aa, synthetic construct
NKVERSY

SEQ ID NO: 50534 - protein, 7 aa, synthetic construct
DKWGMTS

SEQ ID NO: 50535 - protein, 7 aa, synthetic construct
ANALKNQ

SEQ ID NO: 50536 - protein, 7 aa, synthetic construct
ANKTAVG

SEQ ID NO: 50537 - protein, 7 aa, synthetic construct
GHPPSIL

SEQ ID NO: 50538 - protein, 7 aa, synthetic construct
KHQPILT

SEQ ID NO: 50539 - protein, 7 aa, synthetic construct
KFQDLRT

SEQ ID NO: 50540 - protein, 7 aa, synthetic construct
RNGGVAG

SEQ ID NO: 50541 - protein, 7 aa, synthetic construct
QPKPTMG

SEQ ID NO: 50542 - protein, 7 aa, synthetic construct
GSNHVKS

SEQ ID NO: 50543 - protein, 7 aa, synthetic construct
TAQQATY

SEQ ID NO: 50544 - protein, 7 aa, synthetic construct
KGSVSAA

SEQ ID NO: 50545 - protein, 7 aa, synthetic construct
TKNGGRD

SEQ ID NO: 50546 - protein, 7 aa, synthetic construct
AHHTHKG

SEQ ID NO: 50547 - protein, 7 aa, synthetic construct
YGGMKSP

SEQ ID NO: 50548 - protein, 7 aa, synthetic construct
SEARVTP

SEQ ID NO: 50549 - protein, 7 aa, synthetic construct
TNIGMKQ

SEQ ID NO: 50550 - protein, 7 aa, synthetic construct
VSRYGGE

SEQ ID NO: 50551 - protein, 7 aa, synthetic construct
NRPIQLG

SEQ ID NO: 50552 - protein, 7 aa, synthetic construct
MPGINHQ

SEQ ID NO: 50553 - protein, 7 aa, synthetic construct
TKFGAHM

SEQ ID NO: 50554 - protein, 7 aa, synthetic construct
KGTRADD

SEQ ID NO: 50555 - protein, 7 aa, synthetic construct
SHRGNEY

SEQ ID NO: 50556 - protein, 7 aa, synthetic construct
FGKPTQG

SEQ ID NO: 50557 - protein, 7 aa, synthetic construct
YNNKFQN

SEQ ID NO: 50558 - protein, 7 aa, synthetic construct
TGQSKMG

SEQ ID NO: 50559 - protein, 7 aa, synthetic construct
PSKGTAP

SEQ ID NO: 50560 - protein, 7 aa, synthetic construct
MTFNNGP

SEQ ID NO: 50561 - protein, 7 aa, synthetic construct
YDLQRSP

SEQ ID NO: 50562 - protein, 7 aa, synthetic construct
NPDKAPM

SEQ ID NO: 50563 - protein, 7 aa, synthetic construct
YYQAKTG

SEQ ID NO: 50564 - protein, 7 aa, synthetic construct
EFAVRNG

SEQ ID NO: 50565 - protein, 7 aa, synthetic construct
NKQSNMA

SEQ ID NO: 50566 - protein, 7 aa, synthetic construct
LEAQKWQ

SEQ ID NO: 50567 - protein, 7 aa, synthetic construct
YMMKQKE

SEQ ID NO: 50568 - protein, 7 aa, synthetic construct
TETNRQT

SEQ ID NO: 50569 - protein, 7 aa, synthetic construct
MYKEPHL

SEQ ID NO: 50570 - protein, 7 aa, synthetic construct
RPVIGNG

SEQ ID NO: 50571 - protein, 7 aa, synthetic construct
PEKPPWK

SEQ ID NO: 50572 - protein, 7 aa, synthetic construct
ENHRNII

SEQ ID NO: 50573 - protein, 7 aa, synthetic construct
NGKNPGT

SEQ ID NO: 50574 - protein, 7 aa, synthetic construct
KAVMATV

SEQ ID NO: 50575 - protein, 7 aa, synthetic construct
MPGFSGM

SEQ ID NO: 50576 - protein, 7 aa, synthetic construct
MGAHNPM

SEQ ID NO: 50577 - protein, 7 aa, synthetic construct
GHTSTKI

SEQ ID NO: 50578 - protein, 7 aa, synthetic construct
YQQSKSG

SEQ ID NO: 50579 - protein, 7 aa, synthetic construct
PSRDKTY

SEQ ID NO: 50580 - protein, 7 aa, synthetic construct
NRAQTGA

SEQ ID NO: 50581 - protein, 7 aa, synthetic construct
MRPKDGV

SEQ ID NO: 50582 - protein, 7 aa, synthetic construct
RLTQVKD

SEQ ID NO: 50583 - protein, 7 aa, synthetic construct
YTGSKSS

SEQ ID NO: 50584 - protein, 7 aa, synthetic construct
RTGTSTL

SEQ ID NO: 50585 - protein, 7 aa, synthetic construct
DKFQNRG

SEQ ID NO: 50586 - protein, 7 aa, synthetic construct
HIVNGKG

SEQ ID NO: 50587 - protein, 7 aa, synthetic construct
VKAIGDR

SEQ ID NO: 50588 - protein, 7 aa, synthetic construct
PDGISHR

SEQ ID NO: 50589 - protein, 7 aa, synthetic construct
SKAGQSS

SEQ ID NO: 50590 - protein, 7 aa, synthetic construct
GPDGIRP

SEQ ID NO: 50591 - protein, 7 aa, synthetic construct
IGLHARD

SEQ ID NO: 50592 - protein, 7 aa, synthetic construct
NRSFEKG

SEQ ID NO: 50593 - protein, 7 aa, synthetic construct
GYRNIAG

SEQ ID NO: 50594 - protein, 7 aa, synthetic construct
NRGTQFS

SEQ ID NO: 50595 - protein, 7 aa, synthetic construct
RNTSAMG

SEQ ID NO: 50596 - protein, 7 aa, synthetic construct
HSIQLTA

SEQ ID NO: 50597 - protein, 7 aa, synthetic construct
KTQTQQA

SEQ ID NO: 50598 - protein, 7 aa, synthetic construct
SPRGATA

SEQ ID NO: 50599 - protein, 7 aa, synthetic construct
HRAMSTP

SEQ ID NO: 50600 - protein, 7 aa, synthetic construct
TKTGPVG

SEQ ID NO: 50601 - protein, 7 aa, synthetic construct
QRMFKGE

SEQ ID NO: 50602 - protein, 7 aa, synthetic construct
VGPKPGM

SEQ ID NO: 50603 - protein, 7 aa, synthetic construct
RNSSQAT

SEQ ID NO: 50604 - protein, 7 aa, synthetic construct
DHPRKFD

SEQ ID NO: 50605 - protein, 7 aa, synthetic construct
RGVVTAG

SEQ ID NO: 50606 - protein, 7 aa, synthetic construct
QSKTGNG

SEQ ID NO: 50607 - protein, 7 aa, synthetic construct
SGQMRHD

SEQ ID NO: 50608 - protein, 7 aa, synthetic construct
AAQVRHA

SEQ ID NO: 50609 - protein, 7 aa, synthetic construct
SKAFAHD

SEQ ID NO: 50610 - protein, 7 aa, synthetic construct
KVGSSAA

SEQ ID NO: 50611 - protein, 7 aa, synthetic construct
RTNNPIM

SEQ ID NO: 50612 - protein, 7 aa, synthetic construct
QQFGRTA

SEQ ID NO: 50613 - protein, 7 aa, synthetic construct
RAPGNTG

SEQ ID NO: 50614 - protein, 7 aa, synthetic construct
NPRVQNA

SEQ ID NO: 50615 - protein, 7 aa, synthetic construct
PQKFSSH

SEQ ID NO: 50616 - protein, 7 aa, synthetic construct
QSNKANG

SEQ ID NO: 50617 - protein, 7 aa, synthetic construct
IAKRENA

SEQ ID NO: 50618 - protein, 7 aa, synthetic construct
RAGPGLG

SEQ ID NO: 50619 - protein, 7 aa, synthetic construct
SRDAKAM

SEQ ID NO: 50620 - protein, 7 aa, synthetic construct
MPHRKVD

SEQ ID NO: 50621 - protein, 7 aa, synthetic construct
NMKGNVG

SEQ ID NO: 50622 - protein, 7 aa, synthetic construct
TIAPTRD

SEQ ID NO: 50623 - protein, 7 aa, synthetic construct
YAHHTMV

SEQ ID NO: 50624 - protein, 7 aa, synthetic construct
SILKVQG

SEQ ID NO: 50625 - protein, 7 aa, synthetic construct
VQNGRQA

SEQ ID NO: 50626 - protein, 7 aa, synthetic construct
NPKQGAA

SEQ ID NO: 50627 - protein, 7 aa, synthetic construct
YKFNMGD

SEQ ID NO: 50628 - protein, 7 aa, synthetic construct
WVPHGHD

SEQ ID NO: 50629 - protein, 7 aa, synthetic construct
QHSIDDV

SEQ ID NO: 50630 - protein, 7 aa, synthetic construct
SKTHGLA

SEQ ID NO: 50631 - protein, 7 aa, synthetic construct
AFLRNNP

SEQ ID NO: 50632 - protein, 7 aa, synthetic construct
QKNGIKD

SEQ ID NO: 50633 - protein, 7 aa, synthetic construct
KENQRYS

SEQ ID NO: 50634 - protein, 7 aa, synthetic construct
TSATGQR

SEQ ID NO: 50635 - protein, 7 aa, synthetic construct
LLIKNEQ

SEQ ID NO: 50636 - protein, 7 aa, synthetic construct
QIAMTPA

SEQ ID NO: 50637 - protein, 7 aa, synthetic construct
TNGGKMG

SEQ ID NO: 50638 - protein, 7 aa, synthetic construct
KTSSDTR

SEQ ID NO: 50639 - protein, 7 aa, synthetic construct
THPIKFE

SEQ ID NO: 50640 - protein, 7 aa, synthetic construct
RHTLKDE

SEQ ID NO: 50641 - protein, 7 aa, synthetic construct
LHEKFQG

SEQ ID NO: 50642 - protein, 7 aa, synthetic construct
MKNSGRE

SEQ ID NO: 50643 - protein, 7 aa, synthetic construct
SKGTAMA

SEQ ID NO: 50644 - protein, 7 aa, synthetic construct
NRQNVNA

SEQ ID NO: 50645 - protein, 7 aa, synthetic construct
GHGRQDG

SEQ ID NO: 50646 - protein, 7 aa, synthetic construct
DNKQHRT

SEQ ID NO: 50647 - protein, 7 aa, synthetic construct
QGSRTSE

SEQ ID NO: 50648 - protein, 7 aa, synthetic construct
YHQNATI

SEQ ID NO: 50649 - protein, 7 aa, synthetic construct
SAPGSKQ

SEQ ID NO: 50650 - protein, 7 aa, synthetic construct
WGIMKHE

SEQ ID NO: 50651 - protein, 7 aa, synthetic construct
MGPRKPE

SEQ ID NO: 50652 - protein, 7 aa, synthetic construct
LEFKNVM

SEQ ID NO: 50653 - protein, 7 aa, synthetic construct
MYNTHKS

SEQ ID NO: 50654 - protein, 7 aa, synthetic construct
WLARVKE

SEQ ID NO: 50655 - protein, 7 aa, synthetic construct
GSTTHRN

SEQ ID NO: 50656 - protein, 7 aa, synthetic construct
PNNVKDV

SEQ ID NO: 50657 - protein, 7 aa, synthetic construct
AYLNVTG

SEQ ID NO: 50658 - protein, 7 aa, synthetic construct
GPMKASY

SEQ ID NO: 50659 - protein, 7 aa, synthetic construct
YMPGSRS

SEQ ID NO: 50660 - protein, 7 aa, synthetic construct
LIVRTGG

SEQ ID NO: 50661 - protein, 7 aa, synthetic construct
KQGQVMY

SEQ ID NO: 50662 - protein, 7 aa, synthetic construct
SRVGIHQ

SEQ ID NO: 50663 - protein, 7 aa, synthetic construct
RIVEKTG

SEQ ID NO: 50664 - protein, 7 aa, synthetic construct
FRAQMAD

SEQ ID NO: 50665 - protein, 7 aa, synthetic construct
WQMNQQG

SEQ ID NO: 50666 - protein, 7 aa, synthetic construct
YIHKTTE

SEQ ID NO: 50667 - protein, 7 aa, synthetic construct
NYKSQTG

SEQ ID NO: 50668 - protein, 7 aa, synthetic construct
KVPGMVS

SEQ ID NO: 50669 - protein, 7 aa, synthetic construct
KSAVVAP

SEQ ID NO: 50670 - protein, 7 aa, synthetic construct
TGEVRKW

SEQ ID NO: 50671 - protein, 7 aa, synthetic construct
LAIHSIS

SEQ ID NO: 50672 - protein, 7 aa, synthetic construct
AKNSASG

SEQ ID NO: 50673 - protein, 7 aa, synthetic construct
VRSRDDT

SEQ ID NO: 50674 - protein, 7 aa, synthetic construct
YNEWKHS

SEQ ID NO: 50675 - protein, 7 aa, synthetic construct
VKTNATA

SEQ ID NO: 50676 - protein, 7 aa, synthetic construct
FMERRTN

SEQ ID NO: 50677 - protein, 7 aa, synthetic construct
GKVAMHD

SEQ ID NO: 50678 - protein, 7 aa, synthetic construct
NVKQSGA

SEQ ID NO: 50679 - protein, 7 aa, synthetic construct
STKSIGE

SEQ ID NO: 50680 - protein, 7 aa, synthetic construct
GASNKNG

SEQ ID NO: 50681 - protein, 7 aa, synthetic construct
NGASRNP

SEQ ID NO: 50682 - protein, 7 aa, synthetic construct
KIKAHTD

SEQ ID NO: 50683 - protein, 7 aa, synthetic construct
QGMRVPP

SEQ ID NO: 50684 - protein, 7 aa, synthetic construct
YTHTKAY

SEQ ID NO: 50685 - protein, 7 aa, synthetic construct
EFRDRPP

SEQ ID NO: 50686 - protein, 7 aa, synthetic construct
AYSGTMV

SEQ ID NO: 50687 - protein, 7 aa, synthetic construct
NTAKAAG

SEQ ID NO: 50688 - protein, 7 aa, synthetic construct
TTRTSGG

SEQ ID NO: 50689 - protein, 7 aa, synthetic construct
VTGSARP

SEQ ID NO: 50690 - protein, 7 aa, synthetic construct
SKSVGYG

SEQ ID NO: 50691 - protein, 7 aa, synthetic construct
ATNTAYA

SEQ ID NO: 50692 - protein, 7 aa, synthetic construct
WAGVKDS

SEQ ID NO: 50693 - protein, 7 aa, synthetic construct
IRPTSQS

SEQ ID NO: 50694 - protein, 7 aa, synthetic construct
GYTAVVS

SEQ ID NO: 50695 - protein, 7 aa, synthetic construct
GFKTQAG

SEQ ID NO: 50696 - protein, 7 aa, synthetic construct
VPPVNKQ

SEQ ID NO: 50697 - protein, 7 aa, synthetic construct
QMTGNGK

SEQ ID NO: 50698 - protein, 7 aa, synthetic construct
MEKPMAR

SEQ ID NO: 50699 - protein, 7 aa, synthetic construct
ASRPQGS

SEQ ID NO: 50700 - protein, 7 aa, synthetic construct
GFSRPDH

SEQ ID NO: 50701 - protein, 7 aa, synthetic construct
RPSSMPG

SEQ ID NO: 50702 - protein, 7 aa, synthetic construct
SHAGIRE

SEQ ID NO: 50703 - protein, 7 aa, synthetic construct
NRTNTGP

SEQ ID NO: 50704 - protein, 7 aa, synthetic construct
TMMAREG

SEQ ID NO: 50705 - protein, 7 aa, synthetic construct
KPTSGTN

SEQ ID NO: 50706 - protein, 7 aa, synthetic construct
GRVANTI

SEQ ID NO: 50707 - protein, 7 aa, synthetic construct
FENRSKQ

SEQ ID NO: 50708 - protein, 7 aa, synthetic construct
VGNKAAG

SEQ ID NO: 50709 - protein, 7 aa, synthetic construct
MAKAQNS

SEQ ID NO: 50710 - protein, 7 aa, synthetic construct
TVQRQQA

SEQ ID NO: 50711 - protein, 7 aa, synthetic construct
AAATSNY

SEQ ID NO: 50712 - protein, 7 aa, synthetic construct
NVQSRSA

SEQ ID NO: 50713 - protein, 7 aa, synthetic construct
LQARSIV

SEQ ID NO: 50714 - protein, 7 aa, synthetic construct
RVSQGSA

SEQ ID NO: 50715 - protein, 7 aa, synthetic construct
TPKTQQA

SEQ ID NO: 50716 - protein, 7 aa, synthetic construct
LAKAFTA

SEQ ID NO: 50717 - protein, 7 aa, synthetic construct
KKEGARE

SEQ ID NO: 50718 - protein, 7 aa, synthetic construct
DYKGYPH

SEQ ID NO: 50719 - protein, 7 aa, synthetic construct
KTPASAP

SEQ ID NO: 50720 - protein, 7 aa, synthetic construct
NPQKQQA

SEQ ID NO: 50721 - protein, 7 aa, synthetic construct
GVKSTAA

SEQ ID NO: 50722 - protein, 7 aa, synthetic construct
KASATPP

SEQ ID NO: 50723 - protein, 7 aa, synthetic construct
NGTNVRG

SEQ ID NO: 50724 - protein, 7 aa, synthetic construct
HPYPQRG

SEQ ID NO: 50725 - protein, 7 aa, synthetic construct
ARHVTQG

SEQ ID NO: 50726 - protein, 7 aa, synthetic construct
MLGNKAA

SEQ ID NO: 50727 - protein, 7 aa, synthetic construct
NFHAPKP

SEQ ID NO: 50728 - protein, 7 aa, synthetic construct
EGKLVIG

SEQ ID NO: 50729 - protein, 7 aa, synthetic construct
YPASKSS

SEQ ID NO: 50730 - protein, 7 aa, synthetic construct
VGNKINS

SEQ ID NO: 50731 - protein, 7 aa, synthetic construct
NTQKNSH

SEQ ID NO: 50732 - protein, 7 aa, synthetic construct
GTGLPTP

SEQ ID NO: 50733 - protein, 7 aa, synthetic construct
RVSHQDH

SEQ ID NO: 50734 - protein, 7 aa, synthetic construct
HGFSGKP

SEQ ID NO: 50735 - protein, 7 aa, synthetic construct
NNSSGKG

SEQ ID NO: 50736 - protein, 7 aa, synthetic construct
IPRSTDY

SEQ ID NO: 50737 - protein, 7 aa, synthetic construct
STPKQMS

SEQ ID NO: 50738 - protein, 7 aa, synthetic construct
RPTKEDS

SEQ ID NO: 50739 - protein, 7 aa, synthetic construct
GGKATHS

SEQ ID NO: 50740 - protein, 7 aa, synthetic construct
SNMSVMK

SEQ ID NO: 50741 - protein, 7 aa, synthetic construct
RNMQQNI

SEQ ID NO: 50742 - protein, 7 aa, synthetic construct
GRQNSTV

SEQ ID NO: 50743 - protein, 7 aa, synthetic construct
VNARSVD

SEQ ID NO: 50744 - protein, 7 aa, synthetic construct
FTANASQ

SEQ ID NO: 50745 - protein, 7 aa, synthetic construct
DHHPKPA

SEQ ID NO: 50746 - protein, 7 aa, synthetic construct
QNPTNHY

SEQ ID NO: 50747 - protein, 7 aa, synthetic construct
IAPKSNT

SEQ ID NO: 50748 - protein, 7 aa, synthetic construct
GQPAVKG

SEQ ID NO: 50749 - protein, 7 aa, synthetic construct
MSTVSQS

SEQ ID NO: 50750 - protein, 7 aa, synthetic construct
QHRANDP

SEQ ID NO: 50751 - protein, 7 aa, synthetic construct
QPHNPTF

SEQ ID NO: 50752 - protein, 7 aa, synthetic construct
DRTDTPY

SEQ ID NO: 50753 - protein, 7 aa, synthetic construct
KNAGNTG

SEQ ID NO: 50754 - protein, 7 aa, synthetic construct
WAPQHNN

SEQ ID NO: 50755 - protein, 7 aa, synthetic construct
TSARGAN

SEQ ID NO: 50756 - protein, 7 aa, synthetic construct
KHLNIQG

SEQ ID NO: 50757 - protein, 7 aa, synthetic construct
GSRGAYI

SEQ ID NO: 50758 - protein, 7 aa, synthetic construct
PPIGRPA

SEQ ID NO: 50759 - protein, 7 aa, synthetic construct
QQKPNQG

SEQ ID NO: 50760 - protein, 7 aa, synthetic construct
TTAHEPR

SEQ ID NO: 50761 - protein, 7 aa, synthetic construct
KKASMAE

SEQ ID NO: 50762 - protein, 7 aa, synthetic construct
DHQRHGP

SEQ ID NO: 50763 - protein, 7 aa, synthetic construct
KFQNMGG

SEQ ID NO: 50764 - protein, 7 aa, synthetic construct
KMSTNNG

SEQ ID NO: 50765 - protein, 7 aa, synthetic construct
RPAGTAP

SEQ ID NO: 50766 - protein, 7 aa, synthetic construct
PPYIKQE

SEQ ID NO: 50767 - protein, 7 aa, synthetic construct
QKTPGQA

SEQ ID NO: 50768 - protein, 7 aa, synthetic construct
AKTNNSA

SEQ ID NO: 50769 - protein, 7 aa, synthetic construct
GLPNRAA

SEQ ID NO: 50770 - protein, 7 aa, synthetic construct
FHHAFPD

SEQ ID NO: 50771 - protein, 7 aa, synthetic construct
TPGSQKA

SEQ ID NO: 50772 - protein, 7 aa, synthetic construct
RNQATAS

SEQ ID NO: 50773 - protein, 7 aa, synthetic construct
NHPKNMI

SEQ ID NO: 50774 - protein, 7 aa, synthetic construct
MKTGMGG

SEQ ID NO: 50775 - protein, 7 aa, synthetic construct
DGVKKPY

SEQ ID NO: 50776 - protein, 7 aa, synthetic construct
KNSSHLE

SEQ ID NO: 50777 - protein, 7 aa, synthetic construct
TSNKHVE

SEQ ID NO: 50778 - protein, 7 aa, synthetic construct
HSVHMSP

SEQ ID NO: 50779 - protein, 7 aa, synthetic construct
MKVINQE

SEQ ID NO: 50780 - protein, 7 aa, synthetic construct
PKPQTGS

SEQ ID NO: 50781 - protein, 7 aa, synthetic construct
CGATKIC

SEQ ID NO: 50782 - protein, 7 aa, synthetic construct
SKYSGGS

SEQ ID NO: 50783 - protein, 7 aa, synthetic construct
KGPQTAM

SEQ ID NO: 50784 - protein, 7 aa, synthetic construct
SKGAQQG

SEQ ID NO: 50785 - protein, 7 aa, synthetic construct
INKSGSA

SEQ ID NO: 50786 - protein, 7 aa, synthetic construct
MEKQWKG

SEQ ID NO: 50787 - protein, 7 aa, synthetic construct
RDGPWPS

SEQ ID NO: 50788 - protein, 7 aa, synthetic construct
SKPNMMA

SEQ ID NO: 50789 - protein, 7 aa, synthetic construct
HAYSQTG

SEQ ID NO: 50790 - protein, 7 aa, synthetic construct
RTTANQG

SEQ ID NO: 50791 - protein, 7 aa, synthetic construct
NYSAAEK

SEQ ID NO: 50792 - protein, 7 aa, synthetic construct
RPSSTTP

SEQ ID NO: 50793 - protein, 7 aa, synthetic construct
KTNGAFA

SEQ ID NO: 50794 - protein, 7 aa, synthetic construct
VSGKMGG

SEQ ID NO: 50795 - protein, 7 aa, synthetic construct
WKMSESS

SEQ ID NO: 50796 - protein, 7 aa, synthetic construct
YRHAVPA

SEQ ID NO: 50797 - protein, 7 aa, synthetic construct
YRHFQGE

SEQ ID NO: 50798 - protein, 7 aa, synthetic construct
TTELRRT

SEQ ID NO: 50799 - protein, 7 aa, synthetic construct
PGQKNVG

SEQ ID NO: 50800 - protein, 7 aa, synthetic construct
MGPIVNI

SEQ ID NO: 50801 - protein, 7 aa, synthetic construct
KNSGMGS

SEQ ID NO: 50802 - protein, 7 aa, synthetic construct
ARTYTME

SEQ ID NO: 50803 - protein, 7 aa, synthetic construct
TPYGNRT

SEQ ID NO: 50804 - protein, 7 aa, synthetic construct
GNLRLPP

SEQ ID NO: 50805 - protein, 7 aa, synthetic construct
DYPVQTG

SEQ ID NO: 50806 - protein, 7 aa, synthetic construct
QTGTKNA

SEQ ID NO: 50807 - protein, 7 aa, synthetic construct
NPRNQQG

SEQ ID NO: 50808 - protein, 7 aa, synthetic construct
TEVYHRE

SEQ ID NO: 50809 - protein, 7 aa, synthetic construct
NDAQIKK

SEQ ID NO: 50810 - protein, 7 aa, synthetic construct
MAVAKMA

SEQ ID NO: 50811 - protein, 7 aa, synthetic construct
KQPNGSM

SEQ ID NO: 50812 - protein, 7 aa, synthetic construct
KTAASTA

SEQ ID NO: 50813 - protein, 7 aa, synthetic construct
QRRPGEL

SEQ ID NO: 50814 - protein, 7 aa, synthetic construct
VGQKTGA

SEQ ID NO: 50815 - protein, 7 aa, synthetic construct
RPSINTG

SEQ ID NO: 50816 - protein, 7 aa, synthetic construct
MYDTKFA

SEQ ID NO: 50817 - protein, 7 aa, synthetic construct
GSKTGGG

SEQ ID NO: 50818 - protein, 7 aa, synthetic construct
KFGSSHV

SEQ ID NO: 50819 - protein, 7 aa, synthetic construct
NAGNAKG

SEQ ID NO: 50820 - protein, 7 aa, synthetic construct
RSSQGII

SEQ ID NO: 50821 - protein, 7 aa, synthetic construct
QGPQHYV

SEQ ID NO: 50822 - protein, 7 aa, synthetic construct
QGHARPP

SEQ ID NO: 50823 - protein, 7 aa, synthetic construct
PRNAGSV

SEQ ID NO: 50824 - protein, 7 aa, synthetic construct
AQSLRAG

SEQ ID NO: 50825 - protein, 7 aa, synthetic construct
QAGMKSG

SEQ ID NO: 50826 - protein, 7 aa, synthetic construct
GARQQAQ

SEQ ID NO: 50827 - protein, 7 aa, synthetic construct
RTPGMTG

SEQ ID NO: 50828 - protein, 7 aa, synthetic construct
QKRLFDE

SEQ ID NO: 50829 - protein, 7 aa, synthetic construct
SPAGAPT

SEQ ID NO: 50830 - protein, 7 aa, synthetic construct
KSPQAYS

SEQ ID NO: 50831 - protein, 7 aa, synthetic construct
RQIEARG

SEQ ID NO: 50832 - protein, 7 aa, synthetic construct
KAAIPLQ

SEQ ID NO: 50833 - protein, 7 aa, synthetic construct
QGVRELG

SEQ ID NO: 50834 - protein, 7 aa, synthetic construct
FDRTVGG

SEQ ID NO: 50835 - protein, 7 aa, synthetic construct
ISKGIFT

SEQ ID NO: 50836 - protein, 7 aa, synthetic construct
MKVTPVH

SEQ ID NO: 50837 - protein, 7 aa, synthetic construct
YMKGTMA

SEQ ID NO: 50838 - protein, 7 aa, synthetic construct
KSLSTKD

SEQ ID NO: 50839 - protein, 7 aa, synthetic construct
SFPSQSK

SEQ ID NO: 50840 - protein, 7 aa, synthetic construct
VVNAGKG

SEQ ID NO: 50841 - protein, 7 aa, synthetic construct
MARPNQA

SEQ ID NO: 50842 - protein, 7 aa, synthetic construct
KSMGNNA

SEQ ID NO: 50843 - protein, 7 aa, synthetic construct
NAKYQQG

SEQ ID NO: 50844 - protein, 7 aa, synthetic construct
LMRGQQQ

SEQ ID NO: 50845 - protein, 7 aa, synthetic construct
KNSQNGG

SEQ ID NO: 50846 - protein, 7 aa, synthetic construct
FRTNHST

SEQ ID NO: 50847 - protein, 7 aa, synthetic construct
KHLSYPQ

SEQ ID NO: 50848 - protein, 7 aa, synthetic construct
NSKITNP

SEQ ID NO: 50849 - protein, 7 aa, synthetic construct
TRGPMQG

SEQ ID NO: 50850 - protein, 7 aa, synthetic construct
MRGTAQG

SEQ ID NO: 50851 - protein, 7 aa, synthetic construct
VPKLGGP

SEQ ID NO: 50852 - protein, 7 aa, synthetic construct
KMPQGEM

SEQ ID NO: 50853 - protein, 7 aa, synthetic construct
KGGKDFP

SEQ ID NO: 50854 - protein, 7 aa, synthetic construct
SPDRPTR

SEQ ID NO: 50855 - protein, 7 aa, synthetic construct
MQPHRQT

SEQ ID NO: 50856 - protein, 7 aa, synthetic construct
FQKERAT

SEQ ID NO: 50857 - protein, 7 aa, synthetic construct
DNARYTT

SEQ ID NO: 50858 - protein, 7 aa, synthetic construct
RNTQNQA

SEQ ID NO: 50859 - protein, 7 aa, synthetic construct
YAPGPMS

SEQ ID NO: 50860 - protein, 7 aa, synthetic construct
TSKTHAS

SEQ ID NO: 50861 - protein, 7 aa, synthetic construct
NQHHTTN

SEQ ID NO: 50862 - protein, 7 aa, synthetic construct
LSKYADD

SEQ ID NO: 50863 - protein, 7 aa, synthetic construct
IPHMASG

SEQ ID NO: 50864 - protein, 7 aa, synthetic construct
MKPMGRD

SEQ ID NO: 50865 - protein, 7 aa, synthetic construct
SKESKSV

SEQ ID NO: 50866 - protein, 7 aa, synthetic construct
KREDQKP

SEQ ID NO: 50867 - protein, 7 aa, synthetic construct
TRAIDSG

SEQ ID NO: 50868 - protein, 7 aa, synthetic construct
PDMKPIK

SEQ ID NO: 50869 - protein, 7 aa, synthetic construct
RDKQGTG

SEQ ID NO: 50870 - protein, 7 aa, synthetic construct
SHGNTML

SEQ ID NO: 50871 - protein, 7 aa, synthetic construct
KELKQIG

SEQ ID NO: 50872 - protein, 7 aa, synthetic construct
GPKYGND

SEQ ID NO: 50873 - protein, 7 aa, synthetic construct
PSWKDVP

SEQ ID NO: 50874 - protein, 7 aa, synthetic construct
ALNAQRD

SEQ ID NO: 50875 - protein, 7 aa, synthetic construct
RPGAGNV

SEQ ID NO: 50876 - protein, 7 aa, synthetic construct
FLGNTNS

SEQ ID NO: 50877 - protein, 7 aa, synthetic construct
KKDWAND

SEQ ID NO: 50878 - protein, 7 aa, synthetic construct
AKTMGNA

SEQ ID NO: 50879 - protein, 7 aa, synthetic construct
NSGAKAG

SEQ ID NO: 50880 - protein, 7 aa, synthetic construct
PVGHSKD

SEQ ID NO: 50881 - protein, 7 aa, synthetic construct
GQQKAMG

SEQ ID NO: 50882 - protein, 7 aa, synthetic construct
IHELRVG

SEQ ID NO: 50883 - protein, 7 aa, synthetic construct
RQAPAGS

SEQ ID NO: 50884 - protein, 7 aa, synthetic construct
NKNTSAQ

SEQ ID NO: 50885 - protein, 7 aa, synthetic construct
LIEGYKA

SEQ ID NO: 50886 - protein, 7 aa, synthetic construct
VMRQKDE

SEQ ID NO: 50887 - protein, 7 aa, synthetic construct
RELQTVP

SEQ ID NO: 50888 - protein, 7 aa, synthetic construct
TTIKGMV

SEQ ID NO: 50889 - protein, 7 aa, synthetic construct
VRGSALP

SEQ ID NO: 50890 - protein, 7 aa, synthetic construct
MYAHSGP

SEQ ID NO: 50891 - protein, 7 aa, synthetic construct
NRTGVNA

SEQ ID NO: 50892 - protein, 7 aa, synthetic construct
PNKGMVG

SEQ ID NO: 50893 - protein, 7 aa, synthetic construct
QTRTISG

SEQ ID NO: 50894 - protein, 7 aa, synthetic construct
AAQKTFS

SEQ ID NO: 50895 - protein, 7 aa, synthetic construct
PNKGVSP

SEQ ID NO: 50896 - protein, 7 aa, synthetic construct
TLSKNDG

SEQ ID NO: 50897 - protein, 7 aa, synthetic construct
EKPGTQK

SEQ ID NO: 50898 - protein, 7 aa, synthetic construct
NNYNQEG

SEQ ID NO: 50899 - protein, 7 aa, synthetic construct
SPQRYGE

SEQ ID NO: 50900 - protein, 7 aa, synthetic construct
VKVHSQA

SEQ ID NO: 50901 - protein, 7 aa, synthetic construct
QDSPHHR

SEQ ID NO: 50902 - protein, 7 aa, synthetic construct
GTPGKAG

SEQ ID NO: 50903 - protein, 7 aa, synthetic construct
MRNGNQS

SEQ ID NO: 50904 - protein, 7 aa, synthetic construct
NQRSGGV

SEQ ID NO: 50905 - protein, 7 aa, synthetic construct
NKQSTNG

SEQ ID NO: 50906 - protein, 7 aa, synthetic construct
MKNAKGE

SEQ ID NO: 50907 - protein, 7 aa, synthetic construct
VGSKLTQ

SEQ ID NO: 50908 - protein, 7 aa, synthetic construct
MERGSTR

SEQ ID NO: 50909 - protein, 7 aa, synthetic construct
AQKGTAG

SEQ ID NO: 50910 - protein, 7 aa, synthetic construct
RPNMATN

SEQ ID NO: 50911 - protein, 7 aa, synthetic construct
KSAQSQS

SEQ ID NO: 50912 - protein, 7 aa, synthetic construct
FGVQQHA

SEQ ID NO: 50913 - protein, 7 aa, synthetic construct
MGQKHPP

SEQ ID NO: 50914 - protein, 7 aa, synthetic construct
MPKPVAQ

SEQ ID NO: 50915 - protein, 7 aa, synthetic construct
DMTRQPF

SEQ ID NO: 50916 - protein, 7 aa, synthetic construct
KAPTTAG

SEQ ID NO: 50917 - protein, 7 aa, synthetic construct
NKVSGGA

SEQ ID NO: 50918 - protein, 7 aa, synthetic construct
HQSKMSY

SEQ ID NO: 50919 - protein, 7 aa, synthetic construct
TGLKPAL

SEQ ID NO: 50920 - protein, 7 aa, synthetic construct
MGRHVEH

SEQ ID NO: 50921 - protein, 7 aa, synthetic construct
SNFRLVE

SEQ ID NO: 50922 - protein, 7 aa, synthetic construct
AASKTFA

SEQ ID NO: 50923 - protein, 7 aa, synthetic construct
VTKGMTN

SEQ ID NO: 50924 - protein, 7 aa, synthetic construct
PRSGMAY

SEQ ID NO: 50925 - protein, 7 aa, synthetic construct
VIQPKQN

SEQ ID NO: 50926 - protein, 7 aa, synthetic construct
PIMQQMP

SEQ ID NO: 50927 - protein, 7 aa, synthetic construct
NQMKMLN

SEQ ID NO: 50928 - protein, 7 aa, synthetic construct
KQNYLKE

SEQ ID NO: 50929 - protein, 7 aa, synthetic construct
DKRNGVA

SEQ ID NO: 50930 - protein, 7 aa, synthetic construct
QKQNEEK

SEQ ID NO: 50931 - protein, 7 aa, synthetic construct
NKAMKNE

SEQ ID NO: 50932 - protein, 7 aa, synthetic construct
TPSQSKA

SEQ ID NO: 50933 - protein, 7 aa, synthetic construct
VQHMGAN

SEQ ID NO: 50934 - protein, 7 aa, synthetic construct
FKDPPSK

SEQ ID NO: 50935 - protein, 7 aa, synthetic construct
YRPAASS

SEQ ID NO: 50936 - protein, 7 aa, synthetic construct
NGNRSTA

SEQ ID NO: 50937 - protein, 7 aa, synthetic construct
RIVSGLN

SEQ ID NO: 50938 - protein, 7 aa, synthetic construct
ARDKFST

SEQ ID NO: 50939 - protein, 7 aa, synthetic construct
QMKTGAA

SEQ ID NO: 50940 - protein, 7 aa, synthetic construct
NRGQSAA

SEQ ID NO: 50941 - protein, 7 aa, synthetic construct
VGTNTAK

SEQ ID NO: 50942 - protein, 7 aa, synthetic construct
ASVVKAA

SEQ ID NO: 50943 - protein, 7 aa, synthetic construct
LIRGQYG

SEQ ID NO: 50944 - protein, 7 aa, synthetic construct
EFRNMQP

SEQ ID NO: 50945 - protein, 7 aa, synthetic construct
KNQVMAA

SEQ ID NO: 50946 - protein, 7 aa, synthetic construct
EQGKQMA

SEQ ID NO: 50947 - protein, 7 aa, synthetic construct
AEKKMAI

SEQ ID NO: 50948 - protein, 7 aa, synthetic construct
VQVKRDT

SEQ ID NO: 50949 - protein, 7 aa, synthetic construct
QRNGVPM

SEQ ID NO: 50950 - protein, 7 aa, synthetic construct
TPHGGPH

SEQ ID NO: 50951 - protein, 7 aa, synthetic construct
KPLDQHI

SEQ ID NO: 50952 - protein, 7 aa, synthetic construct
MIHAKDM

SEQ ID NO: 50953 - protein, 7 aa, synthetic construct
QKTANAS

SEQ ID NO: 50954 - protein, 7 aa, synthetic construct
WENLKPT

SEQ ID NO: 50955 - protein, 7 aa, synthetic construct
VGHRDMG

SEQ ID NO: 50956 - protein, 7 aa, synthetic construct
TPHREYL

SEQ ID NO: 50957 - protein, 7 aa, synthetic construct
FEKQTPS

SEQ ID NO: 50958 - protein, 7 aa, synthetic construct
GPRNSTP

SEQ ID NO: 50959 - protein, 7 aa, synthetic construct
KTPVQVN

SEQ ID NO: 50960 - protein, 7 aa, synthetic construct
RKFQDLS

SEQ ID NO: 50961 - protein, 7 aa, synthetic construct
QSSYPQG

SEQ ID NO: 50962 - protein, 7 aa, synthetic construct
QQAISKN

SEQ ID NO: 50963 - protein, 7 aa, synthetic construct
QTRQIAD

SEQ ID NO: 50964 - protein, 7 aa, synthetic construct
THANRSP

SEQ ID NO: 50965 - protein, 7 aa, synthetic construct
SVHVKMQ

SEQ ID NO: 50966 - protein, 7 aa, synthetic construct
LAKPIGA

SEQ ID NO: 50967 - protein, 7 aa, synthetic construct
MGTAKIE

SEQ ID NO: 50968 - protein, 7 aa, synthetic construct
DRGKVEA

SEQ ID NO: 50969 - protein, 7 aa, synthetic construct
FKTPGTA

SEQ ID NO: 50970 - protein, 7 aa, synthetic construct
TKPNVGM

SEQ ID NO: 50971 - protein, 7 aa, synthetic construct
TQASRQP

SEQ ID NO: 50972 - protein, 7 aa, synthetic construct
KNTGPGE

SEQ ID NO: 50973 - protein, 7 aa, synthetic construct
FKTHAHI

SEQ ID NO: 50974 - protein, 7 aa, synthetic construct
PARQADG

SEQ ID NO: 50975 - protein, 7 aa, synthetic construct
KSSSTAY

SEQ ID NO: 50976 - protein, 7 aa, synthetic construct
QPRNGQS

SEQ ID NO: 50977 - protein, 7 aa, synthetic construct
TNKYSSM

SEQ ID NO: 50978 - protein, 7 aa, synthetic construct
QSSKGTG

SEQ ID NO: 50979 - protein, 7 aa, synthetic construct
LRSETFN

SEQ ID NO: 50980 - protein, 7 aa, synthetic construct
NIKHDQN

SEQ ID NO: 50981 - protein, 7 aa, synthetic construct
LMRDSDF

SEQ ID NO: 50982 - protein, 7 aa, synthetic construct
EGGVIRI

SEQ ID NO: 50983 - protein, 7 aa, synthetic construct
VKSNGTS

SEQ ID NO: 50984 - protein, 7 aa, synthetic construct
TEKPYHG

SEQ ID NO: 50985 - protein, 7 aa, synthetic construct
QPFKHVE

SEQ ID NO: 50986 - protein, 7 aa, synthetic construct
GVEVRMG

SEQ ID NO: 50987 - protein, 7 aa, synthetic construct
RTQTQGG

SEQ ID NO: 50988 - protein, 7 aa, synthetic construct
TRPAMAA

SEQ ID NO: 50989 - protein, 7 aa, synthetic construct
KERMPQI

SEQ ID NO: 50990 - protein, 7 aa, synthetic construct
LHQNKQA

SEQ ID NO: 50991 - protein, 7 aa, synthetic construct
RKNEGFY

SEQ ID NO: 50992 - protein, 7 aa, synthetic construct
VHHGLEM

SEQ ID NO: 50993 - protein, 7 aa, synthetic construct
RPRSMDD

SEQ ID NO: 50994 - protein, 7 aa, synthetic construct
YSMSGLS

SEQ ID NO: 50995 - protein, 7 aa, synthetic construct
KGYQAGS

SEQ ID NO: 50996 - protein, 7 aa, synthetic construct
ERVPSSN

SEQ ID NO: 50997 - protein, 7 aa, synthetic construct
FQKAATT

SEQ ID NO: 50998 - protein, 7 aa, synthetic construct
QGHIISS

SEQ ID NO: 50999 - protein, 7 aa, synthetic construct
RQGVNSP

SEQ ID NO: 51000 - protein, 7 aa, synthetic construct
SRQSAVA

SEQ ID NO: 51001 - protein, 7 aa, synthetic construct
KDQRLVA

SEQ ID NO: 51002 - protein, 7 aa, synthetic construct
RGHSNLP

SEQ ID NO: 51003 - protein, 7 aa, synthetic construct
WFKNGAS

SEQ ID NO: 51004 - protein, 7 aa, synthetic construct
TQVKKDD

SEQ ID NO: 51005 - protein, 7 aa, synthetic construct
HSNAKQG

SEQ ID NO: 51006 - protein, 7 aa, synthetic construct
QTQNRNG

SEQ ID NO: 51007 - protein, 7 aa, synthetic construct
TKMVSSG

SEQ ID NO: 51008 - protein, 7 aa, synthetic construct
VSHAFKP

SEQ ID NO: 51009 - protein, 7 aa, synthetic construct
HQMHTAE

SEQ ID NO: 51010 - protein, 7 aa, synthetic construct
SKMGQQP

SEQ ID NO: 51011 - protein, 7 aa, synthetic construct
YFPEHKG

SEQ ID NO: 51012 - protein, 7 aa, synthetic construct
KGSSNWE

SEQ ID NO: 51013 - protein, 7 aa, synthetic construct
RNDIRFQ

SEQ ID NO: 51014 - protein, 7 aa, synthetic construct
KSSSVGY

SEQ ID NO: 51015 - protein, 7 aa, synthetic construct
SKTNGYA

SEQ ID NO: 51016 - protein, 7 aa, synthetic construct
YTGGRAN

SEQ ID NO: 51017 - protein, 7 aa, synthetic construct
HHNMNRP

SEQ ID NO: 51018 - protein, 7 aa, synthetic construct
RPNTQAA

SEQ ID NO: 51019 - protein, 7 aa, synthetic construct
GIRAGLQ

SEQ ID NO: 51020 - protein, 7 aa, synthetic construct
KDNLHHS

SEQ ID NO: 51021 - protein, 7 aa, synthetic construct
NGPIISA

SEQ ID NO: 51022 - protein, 7 aa, synthetic construct
RNATQNT

SEQ ID NO: 51023 - protein, 7 aa, synthetic construct
EKIGFHV

SEQ ID NO: 51024 - protein, 7 aa, synthetic construct
GSPYMTQ

SEQ ID NO: 51025 - protein, 7 aa, synthetic construct
SKSNSIA

SEQ ID NO: 51026 - protein, 7 aa, synthetic construct
ARDRAVG

SEQ ID NO: 51027 - protein, 7 aa, synthetic construct
VGPSGAM

SEQ ID NO: 51028 - protein, 7 aa, synthetic construct
QSQFVQK

SEQ ID NO: 51029 - protein, 7 aa, synthetic construct
SGVKDAK

SEQ ID NO: 51030 - protein, 7 aa, synthetic construct
RNSSVSG

SEQ ID NO: 51031 - protein, 7 aa, synthetic construct
KVDRSGN

SEQ ID NO: 51032 - protein, 7 aa, synthetic construct
GKPGQMN

SEQ ID NO: 51033 - protein, 7 aa, synthetic construct
HVRDMPG

SEQ ID NO: 51034 - protein, 7 aa, synthetic construct
VPMHNMN

SEQ ID NO: 51035 - protein, 7 aa, synthetic construct
IQSRGMA

SEQ ID NO: 51036 - protein, 7 aa, synthetic construct
TTVANRD

SEQ ID NO: 51037 - protein, 7 aa, synthetic construct
MKFGGAA

SEQ ID NO: 51038 - protein, 7 aa, synthetic construct
DVKQRTE

SEQ ID NO: 51039 - protein, 7 aa, synthetic construct
THQEKKY

SEQ ID NO: 51040 - protein, 7 aa, synthetic construct
VTTSTKG

SEQ ID NO: 51041 - protein, 7 aa, synthetic construct
IIKAQGA

SEQ ID NO: 51042 - protein, 7 aa, synthetic construct
KFHHIEE

SEQ ID NO: 51043 - protein, 7 aa, synthetic construct
QDMATKR

SEQ ID NO: 51044 - protein, 7 aa, synthetic construct
NQNAKTG

SEQ ID NO: 51045 - protein, 7 aa, synthetic construct
RANQRSD

SEQ ID NO: 51046 - protein, 7 aa, synthetic construct
AAAKDTY

SEQ ID NO: 51047 - protein, 7 aa, synthetic construct
MKLKDHQ

SEQ ID NO: 51048 - protein, 7 aa, synthetic construct
MLSDRGM

SEQ ID NO: 51049 - protein, 7 aa, synthetic construct
TNSSMKA

SEQ ID NO: 51050 - protein, 7 aa, synthetic construct
WGVQQSP

SEQ ID NO: 51051 - protein, 7 aa, synthetic construct
DSRKFQD

SEQ ID NO: 51052 - protein, 7 aa, synthetic construct
STRQTAN

SEQ ID NO: 51053 - protein, 7 aa, synthetic construct
GKPSFQS

SEQ ID NO: 51054 - protein, 7 aa, synthetic construct
QVRLGHA

SEQ ID NO: 51055 - protein, 7 aa, synthetic construct
VDRQRNP

SEQ ID NO: 51056 - protein, 7 aa, synthetic construct
DMHAGAM

SEQ ID NO: 51057 - protein, 7 aa, synthetic construct
RHAQRPE

SEQ ID NO: 51058 - protein, 7 aa, synthetic construct
VTRIHDV

SEQ ID NO: 51059 - protein, 7 aa, synthetic construct
DGISKYT

SEQ ID NO: 51060 - protein, 7 aa, synthetic construct
VGAVITQ

SEQ ID NO: 51061 - protein, 7 aa, synthetic construct
MPKANRD

SEQ ID NO: 51062 - protein, 7 aa, synthetic construct
NKSQSAN

SEQ ID NO: 51063 - protein, 7 aa, synthetic construct
YSHAGAI

SEQ ID NO: 51064 - protein, 7 aa, synthetic construct
KHFMGEV

SEQ ID NO: 51065 - protein, 7 aa, synthetic construct
MTVGKGG

SEQ ID NO: 51066 - protein, 7 aa, synthetic construct
WAARDKN

SEQ ID NO: 51067 - protein, 7 aa, synthetic construct
SEHWKDM

SEQ ID NO: 51068 - protein, 7 aa, synthetic construct
DGKGFRD

SEQ ID NO: 51069 - protein, 7 aa, synthetic construct
MSRAGVG

SEQ ID NO: 51070 - protein, 7 aa, synthetic construct
FMHGPNS

SEQ ID NO: 51071 - protein, 7 aa, synthetic construct
ITMTATS

SEQ ID NO: 51072 - protein, 7 aa, synthetic construct
TMWATEG

SEQ ID NO: 51073 - protein, 7 aa, synthetic construct
DRKYEQP

SEQ ID NO: 51074 - protein, 7 aa, synthetic construct
LPRDALH

SEQ ID NO: 51075 - protein, 7 aa, synthetic construct
SSRSEGA

SEQ ID NO: 51076 - protein, 7 aa, synthetic construct
KPSSPNG

SEQ ID NO: 51077 - protein, 7 aa, synthetic construct
KPDRSVG

SEQ ID NO: 51078 - protein, 7 aa, synthetic construct
GQQRSTG

SEQ ID NO: 51079 - protein, 7 aa, synthetic construct
SKSVNQA

SEQ ID NO: 51080 - protein, 7 aa, synthetic construct
AHRGKEV

SEQ ID NO: 51081 - protein, 7 aa, synthetic construct
SGQNDNR

SEQ ID NO: 51082 - protein, 7 aa, synthetic construct
LQTQQKS

SEQ ID NO: 51083 - protein, 7 aa, synthetic construct
NKYSQGG

SEQ ID NO: 51084 - protein, 7 aa, synthetic construct
QETQKRM

SEQ ID NO: 51085 - protein, 7 aa, synthetic construct
MERKDMG

SEQ ID NO: 51086 - protein, 7 aa, synthetic construct
HTQTYKP

SEQ ID NO: 51087 - protein, 7 aa, synthetic construct
SKQVGKD

SEQ ID NO: 51088 - protein, 7 aa, synthetic construct
EGRSSMG

SEQ ID NO: 51089 - protein, 7 aa, synthetic construct
KFQKLDV

SEQ ID NO: 51090 - protein, 7 aa, synthetic construct
TKNPFPI

SEQ ID NO: 51091 - protein, 7 aa, synthetic construct
RLSIGAG

SEQ ID NO: 51092 - protein, 7 aa, synthetic construct
NTANKGG

SEQ ID NO: 51093 - protein, 7 aa, synthetic construct
IDPLTRK

SEQ ID NO: 51094 - protein, 7 aa, synthetic construct
HHHTGSQ

SEQ ID NO: 51095 - protein, 7 aa, synthetic construct
QSSKAPS

SEQ ID NO: 51096 - protein, 7 aa, synthetic construct
RPGQGTG

SEQ ID NO: 51097 - protein, 7 aa, synthetic construct
TPWRTEG

SEQ ID NO: 51098 - protein, 7 aa, synthetic construct
EHYSKQS

SEQ ID NO: 51099 - protein, 7 aa, synthetic construct
FGTSAVP

SEQ ID NO: 51100 - protein, 7 aa, synthetic construct
INRNSES

SEQ ID NO: 51101 - protein, 7 aa, synthetic construct
FRSEKTS

SEQ ID NO: 51102 - protein, 7 aa, synthetic construct
NPPGQQR

SEQ ID NO: 51103 - protein, 7 aa, synthetic construct
YFKNSDH

SEQ ID NO: 51104 - protein, 7 aa, synthetic construct
IKSYKES

SEQ ID NO: 51105 - protein, 7 aa, synthetic construct
AARGLVD

SEQ ID NO: 51106 - protein, 7 aa, synthetic construct
TASKSGG

SEQ ID NO: 51107 - protein, 7 aa, synthetic construct
IRGKEEN

SEQ ID NO: 51108 - protein, 7 aa, synthetic construct
DIVSKKN

SEQ ID NO: 51109 - protein, 7 aa, synthetic construct
PKSAGNV

SEQ ID NO: 51110 - protein, 7 aa, synthetic construct
RMQSNNA

SEQ ID NO: 51111 - protein, 7 aa, synthetic construct
VNRATGG

SEQ ID NO: 51112 - protein, 7 aa, synthetic construct
QQLKQTP

SEQ ID NO: 51113 - protein, 7 aa, synthetic construct
DPQKHHP

SEQ ID NO: 51114 - protein, 7 aa, synthetic construct
MKHNTAQ

SEQ ID NO: 51115 - protein, 7 aa, synthetic construct
KTATTRD

SEQ ID NO: 51116 - protein, 7 aa, synthetic construct
AWKKDGG

SEQ ID NO: 51117 - protein, 7 aa, synthetic construct
TGRNTVA

SEQ ID NO: 51118 - protein, 7 aa, synthetic construct
TMSGHTH

SEQ ID NO: 51119 - protein, 7 aa, synthetic construct
KTGNSVN

SEQ ID NO: 51120 - protein, 7 aa, synthetic construct
VGTRLME

SEQ ID NO: 51121 - protein, 7 aa, synthetic construct
PENRPPW

SEQ ID NO: 51122 - protein, 7 aa, synthetic construct
KEMSQKS

SEQ ID NO: 51123 - protein, 7 aa, synthetic construct
TIRGFDV

SEQ ID NO: 51124 - protein, 7 aa, synthetic construct
GANHTRY

SEQ ID NO: 51125 - protein, 7 aa, synthetic construct
MRTAPQS

SEQ ID NO: 51126 - protein, 7 aa, synthetic construct
FRHPMGE

SEQ ID NO: 51127 - protein, 7 aa, synthetic construct
TPTGKSI

SEQ ID NO: 51128 - protein, 7 aa, synthetic construct
SKGIANV

SEQ ID NO: 51129 - protein, 7 aa, synthetic construct
TGAASKG

SEQ ID NO: 51130 - protein, 7 aa, synthetic construct
GTYKNQT

SEQ ID NO: 51131 - protein, 7 aa, synthetic construct
KSALHTG

SEQ ID NO: 51132 - protein, 7 aa, synthetic construct
IDSRQSK

SEQ ID NO: 51133 - protein, 7 aa, synthetic construct
MKAGNNA

SEQ ID NO: 51134 - protein, 7 aa, synthetic construct
QSHMKNQ

SEQ ID NO: 51135 - protein, 7 aa, synthetic construct
IYQQSTH

SEQ ID NO: 51136 - protein, 7 aa, synthetic construct
LTDAKYG

SEQ ID NO: 51137 - protein, 7 aa, synthetic construct
SQQAIKA

SEQ ID NO: 51138 - protein, 7 aa, synthetic construct
HNRSQEN

SEQ ID NO: 51139 - protein, 7 aa, synthetic construct
LPRTGSG

SEQ ID NO: 51140 - protein, 7 aa, synthetic construct
HRRTTDD

SEQ ID NO: 51141 - protein, 7 aa, synthetic construct
QPGRHQD

SEQ ID NO: 51142 - protein, 7 aa, synthetic construct
PRGNGVS

SEQ ID NO: 51143 - protein, 7 aa, synthetic construct
DMFLTKG

SEQ ID NO: 51144 - protein, 7 aa, synthetic construct
GMSSKSA

SEQ ID NO: 51145 - protein, 7 aa, synthetic construct
KAGHEGP

SEQ ID NO: 51146 - protein, 7 aa, synthetic construct
TKAMTKE

SEQ ID NO: 51147 - protein, 7 aa, synthetic construct
SGAVRHE

SEQ ID NO: 51148 - protein, 7 aa, synthetic construct
DRKMGVD

SEQ ID NO: 51149 - protein, 7 aa, synthetic construct
RSTQSMG

SEQ ID NO: 51150 - protein, 7 aa, synthetic construct
AERQPNS

SEQ ID NO: 51151 - protein, 7 aa, synthetic construct
FHTGYKG

SEQ ID NO: 51152 - protein, 7 aa, synthetic construct
MKQGSTA

SEQ ID NO: 51153 - protein, 7 aa, synthetic construct
NNRMNAP

SEQ ID NO: 51154 - protein, 7 aa, synthetic construct
QGRTSGV

SEQ ID NO: 51155 - protein, 7 aa, synthetic construct
GPPTKAG

SEQ ID NO: 51156 - protein, 7 aa, synthetic construct
MEQNSRR

SEQ ID NO: 51157 - protein, 7 aa, synthetic construct
RGPAVSI

SEQ ID NO: 51158 - protein, 7 aa, synthetic construct
DHKGSMG

SEQ ID NO: 51159 - protein, 7 aa, synthetic construct
YGGAGRP

SEQ ID NO: 51160 - protein, 7 aa, synthetic construct
NGIIFRE

SEQ ID NO: 51161 - protein, 7 aa, synthetic construct
LFSPGRA

SEQ ID NO: 51162 - protein, 7 aa, synthetic construct
SNWKKET

SEQ ID NO: 51163 - protein, 7 aa, synthetic construct
WKEPSGA

SEQ ID NO: 51164 - protein, 7 aa, synthetic construct
PMHGPPS

SEQ ID NO: 51165 - protein, 7 aa, synthetic construct
SKQGHMP

SEQ ID NO: 51166 - protein, 7 aa, synthetic construct
VHTSSKA

SEQ ID NO: 51167 - protein, 7 aa, synthetic construct
GAPNKGI

SEQ ID NO: 51168 - protein, 7 aa, synthetic construct
KNNDHSS

SEQ ID NO: 51169 - protein, 7 aa, synthetic construct
QGSTSAT

SEQ ID NO: 51170 - protein, 7 aa, synthetic construct
RNAGMDG

SEQ ID NO: 51171 - protein, 7 aa, synthetic construct
NNQWAAA

SEQ ID NO: 51172 - protein, 7 aa, synthetic construct
MPKSQGG

SEQ ID NO: 51173 - protein, 7 aa, synthetic construct
RPHGEPG

SEQ ID NO: 51174 - protein, 7 aa, synthetic construct
AKMVKGD

SEQ ID NO: 51175 - protein, 7 aa, synthetic construct
QTAPADM

SEQ ID NO: 51176 - protein, 7 aa, synthetic construct
NMNMKSG

SEQ ID NO: 51177 - protein, 7 aa, synthetic construct
RITSHSG

SEQ ID NO: 51178 - protein, 7 aa, synthetic construct
HIYKIQE

SEQ ID NO: 51179 - protein, 7 aa, synthetic construct
WHDKPTM

SEQ ID NO: 51180 - protein, 7 aa, synthetic construct
PQSKLAP

SEQ ID NO: 51181 - protein, 7 aa, synthetic construct
AVQSPSP

SEQ ID NO: 51182 - protein, 7 aa, synthetic construct
THTGEMR

SEQ ID NO: 51183 - protein, 7 aa, synthetic construct
AGQKTAN

SEQ ID NO: 51184 - protein, 7 aa, synthetic construct
TKSGIVG

SEQ ID NO: 51185 - protein, 7 aa, synthetic construct
KSQNVMG

SEQ ID NO: 51186 - protein, 7 aa, synthetic construct
QSAQKKE

SEQ ID NO: 51187 - protein, 7 aa, synthetic construct
YAKAVAY

SEQ ID NO: 51188 - protein, 7 aa, synthetic construct
KDHGVRE

SEQ ID NO: 51189 - protein, 7 aa, synthetic construct
FPKNAQS

SEQ ID NO: 51190 - protein, 7 aa, synthetic construct
QGGNKIG

SEQ ID NO: 51191 - protein, 7 aa, synthetic construct
VTQKGSN

SEQ ID NO: 51192 - protein, 7 aa, synthetic construct
HHATMVA

SEQ ID NO: 51193 - protein, 7 aa, synthetic construct
FQTNSAG

SEQ ID NO: 51194 - protein, 7 aa, synthetic construct
PPFKQAD

SEQ ID NO: 51195 - protein, 7 aa, synthetic construct
SGNNVVH

SEQ ID NO: 51196 - protein, 7 aa, synthetic construct
YAKHSLP

SEQ ID NO: 51197 - protein, 7 aa, synthetic construct
RMINVLD

SEQ ID NO: 51198 - protein, 7 aa, synthetic construct
IPRMATM

SEQ ID NO: 51199 - protein, 7 aa, synthetic construct
NNKQHPG

SEQ ID NO: 51200 - protein, 7 aa, synthetic construct
QGATRGG

SEQ ID NO: 51201 - protein, 7 aa, synthetic construct
HARIDDS

SEQ ID NO: 51202 - protein, 7 aa, synthetic construct
GIKFSHN

SEQ ID NO: 51203 - protein, 7 aa, synthetic construct
THAQVTV

SEQ ID NO: 51204 - protein, 7 aa, synthetic construct
NGQKAAP

SEQ ID NO: 51205 - protein, 7 aa, synthetic construct
HAPSKYL

SEQ ID NO: 51206 - protein, 7 aa, synthetic construct
RMSQSNG

SEQ ID NO: 51207 - protein, 7 aa, synthetic construct
ANQNRSA

SEQ ID NO: 51208 - protein, 7 aa, synthetic construct
RDTFYAE

SEQ ID NO: 51209 - protein, 7 aa, synthetic construct
KNGTGYV

SEQ ID NO: 51210 - protein, 7 aa, synthetic construct
VGGNLPN

SEQ ID NO: 51211 - protein, 7 aa, synthetic construct
YNPQRVA

SEQ ID NO: 51212 - protein, 7 aa, synthetic construct
GALPGKQ

SEQ ID NO: 51213 - protein, 7 aa, synthetic construct
VKIQAAV

SEQ ID NO: 51214 - protein, 7 aa, synthetic construct
GKTSIAG

SEQ ID NO: 51215 - protein, 7 aa, synthetic construct
SKSNANS

SEQ ID NO: 51216 - protein, 7 aa, synthetic construct
VLNAQVA

SEQ ID NO: 51217 - protein, 7 aa, synthetic construct
GRVSAAH

SEQ ID NO: 51218 - protein, 7 aa, synthetic construct
KEIPSGP

SEQ ID NO: 51219 - protein, 7 aa, synthetic construct
NSQKTQA

SEQ ID NO: 51220 - protein, 7 aa, synthetic construct
TMKANQA

SEQ ID NO: 51221 - protein, 7 aa, synthetic construct
YQKEKPI

SEQ ID NO: 51222 - protein, 7 aa, synthetic construct
TKWEVMG

SEQ ID NO: 51223 - protein, 7 aa, synthetic construct
IQYKNMG

SEQ ID NO: 51224 - protein, 7 aa, synthetic construct
IKSQHSF

SEQ ID NO: 51225 - protein, 7 aa, synthetic construct
TRGGEEK

SEQ ID NO: 51226 - protein, 7 aa, synthetic construct
QPKTMAY

SEQ ID NO: 51227 - protein, 7 aa, synthetic construct
ATSANKG

SEQ ID NO: 51228 - protein, 7 aa, synthetic construct
GKPQTTD

SEQ ID NO: 51229 - protein, 7 aa, synthetic construct
SAQRGDP

SEQ ID NO: 51230 - protein, 7 aa, synthetic construct
TPQQRNA

SEQ ID NO: 51231 - protein, 7 aa, synthetic construct
DHIKGMA

SEQ ID NO: 51232 - protein, 7 aa, synthetic construct
GVKQVVS

SEQ ID NO: 51233 - protein, 7 aa, synthetic construct
TGAQMKM

SEQ ID NO: 51234 - protein, 7 aa, synthetic construct
LKQQATM

SEQ ID NO: 51235 - protein, 7 aa, synthetic construct
NKSTSGA

SEQ ID NO: 51236 - protein, 7 aa, synthetic construct
KYVNGQP

SEQ ID NO: 51237 - protein, 7 aa, synthetic construct
KTQPSQS

SEQ ID NO: 51238 - protein, 7 aa, synthetic construct
RSSSSMS

SEQ ID NO: 51239 - protein, 7 aa, synthetic construct
KPKLDSG

SEQ ID NO: 51240 - protein, 7 aa, synthetic construct
SQKANWG

SEQ ID NO: 51241 - protein, 7 aa, synthetic construct
NSQQRGA

SEQ ID NO: 51242 - protein, 7 aa, synthetic construct
NKDWQSG

SEQ ID NO: 51243 - protein, 7 aa, synthetic construct
RPNVAQS

SEQ ID NO: 51244 - protein, 7 aa, synthetic construct
VTGRIHQ

SEQ ID NO: 51245 - protein, 7 aa, synthetic construct
NAREGRN

SEQ ID NO: 51246 - protein, 7 aa, synthetic construct
PDARFTH

SEQ ID NO: 51247 - protein, 7 aa, synthetic construct
ETYPGKA

SEQ ID NO: 51248 - protein, 7 aa, synthetic construct
GMSAMTL

SEQ ID NO: 51249 - protein, 7 aa, synthetic construct
NHPMREG

SEQ ID NO: 51250 - protein, 7 aa, synthetic construct
YWKNESN

SEQ ID NO: 51251 - protein, 7 aa, synthetic construct
AVKNSGG

SEQ ID NO: 51252 - protein, 7 aa, synthetic construct
HLFRDQP

SEQ ID NO: 51253 - protein, 7 aa, synthetic construct
MQHLKHE

SEQ ID NO: 51254 - protein, 7 aa, synthetic construct
RPATTPG

SEQ ID NO: 51255 - protein, 7 aa, synthetic construct
MFHPHAA

SEQ ID NO: 51256 - protein, 7 aa, synthetic construct
IPMKETP

SEQ ID NO: 51257 - protein, 7 aa, synthetic construct
MYSLKDA

SEQ ID NO: 51258 - protein, 7 aa, synthetic construct
SKGTVNG

SEQ ID NO: 51259 - protein, 7 aa, synthetic construct
KNPGAVN

SEQ ID NO: 51260 - protein, 7 aa, synthetic construct
VTNHQSA

SEQ ID NO: 51261 - protein, 7 aa, synthetic construct
PTTNKGG

SEQ ID NO: 51262 - protein, 7 aa, synthetic construct
RQSGSPS

SEQ ID NO: 51263 - protein, 7 aa, synthetic construct
DRSQGSQ

SEQ ID NO: 51264 - protein, 7 aa, synthetic construct
AGPGTIY

SEQ ID NO: 51265 - protein, 7 aa, synthetic construct
SAIIAKV

SEQ ID NO: 51266 - protein, 7 aa, synthetic construct
LPKRLPE

SEQ ID NO: 51267 - protein, 7 aa, synthetic construct
SSTGAMP

SEQ ID NO: 51268 - protein, 7 aa, synthetic construct
KASMGSA

SEQ ID NO: 51269 - protein, 7 aa, synthetic construct
GYQGFSG

SEQ ID NO: 51270 - protein, 7 aa, synthetic construct
RTPTPDG

SEQ ID NO: 51271 - protein, 7 aa, synthetic construct
VKGEGGR

SEQ ID NO: 51272 - protein, 7 aa, synthetic construct
SKPSNQP

SEQ ID NO: 51273 - protein, 7 aa, synthetic construct
RDKGMAS

SEQ ID NO: 51274 - protein, 7 aa, synthetic construct
HIRMATN

SEQ ID NO: 51275 - protein, 7 aa, synthetic construct
QRVSNNG

SEQ ID NO: 51276 - protein, 7 aa, synthetic construct
TAKTTSG

SEQ ID NO: 51277 - protein, 7 aa, synthetic construct
NIRDTSG

SEQ ID NO: 51278 - protein, 7 aa, synthetic construct
LMAPPKP

SEQ ID NO: 51279 - protein, 7 aa, synthetic construct
TNNKQTL

SEQ ID NO: 51280 - protein, 7 aa, synthetic construct
FSTKGPV

SEQ ID NO: 51281 - protein, 7 aa, synthetic construct
YGTRTEI

SEQ ID NO: 51282 - protein, 7 aa, synthetic construct
FFKETAH

SEQ ID NO: 51283 - protein, 7 aa, synthetic construct
FKGSPVA

SEQ ID NO: 51284 - protein, 7 aa, synthetic construct
IKTGIKD

SEQ ID NO: 51285 - protein, 7 aa, synthetic construct
QFKVTDQ

SEQ ID NO: 51286 - protein, 7 aa, synthetic construct
HIQKREV

SEQ ID NO: 51287 - protein, 7 aa, synthetic construct
NFSNAKS

SEQ ID NO: 51288 - protein, 7 aa, synthetic construct
KGFAGDQ

SEQ ID NO: 51289 - protein, 7 aa, synthetic construct
YTTTIKT

SEQ ID NO: 51290 - protein, 7 aa, synthetic construct
QKGGVMP

SEQ ID NO: 51291 - protein, 7 aa, synthetic construct
IKEPRVT

SEQ ID NO: 51292 - protein, 7 aa, synthetic construct
AAPKGIY

SEQ ID NO: 51293 - protein, 7 aa, synthetic construct
KPVAYKD

SEQ ID NO: 51294 - protein, 7 aa, synthetic construct
RTQNNMG

SEQ ID NO: 51295 - protein, 7 aa, synthetic construct
NKVGMQM

SEQ ID NO: 51296 - protein, 7 aa, synthetic construct
PRNHAVT

SEQ ID NO: 51297 - protein, 7 aa, synthetic construct
GVPDKHF

SEQ ID NO: 51298 - protein, 7 aa, synthetic construct
KSNSGNA

SEQ ID NO: 51299 - protein, 7 aa, synthetic construct
VHRLPVD

SEQ ID NO: 51300 - protein, 7 aa, synthetic construct
MEKYREG

SEQ ID NO: 51301 - protein, 7 aa, synthetic construct
QISRMTS

SEQ ID NO: 51302 - protein, 7 aa, synthetic construct
QLHKAVG

SEQ ID NO: 51303 - protein, 7 aa, synthetic construct
NKRDTVG

SEQ ID NO: 51304 - protein, 7 aa, synthetic construct
RPEMRNF

SEQ ID NO: 51305 - protein, 7 aa, synthetic construct
GYTIGSG

SEQ ID NO: 51306 - protein, 7 aa, synthetic construct
TQKPAAM

SEQ ID NO: 51307 - protein, 7 aa, synthetic construct
QTYKAGY

SEQ ID NO: 51308 - protein, 7 aa, synthetic construct
ASTRKDE

SEQ ID NO: 51309 - protein, 7 aa, synthetic construct
MNHMRPS

SEQ ID NO: 51310 - protein, 7 aa, synthetic construct
QQNNSNT

SEQ ID NO: 51311 - protein, 7 aa, synthetic construct
SMKPNPS

SEQ ID NO: 51312 - protein, 7 aa, synthetic construct
QRNPSNN

SEQ ID NO: 51313 - protein, 7 aa, synthetic construct
RMNGGTG

SEQ ID NO: 51314 - protein, 7 aa, synthetic construct
HFNRDAG

SEQ ID NO: 51315 - protein, 7 aa, synthetic construct
KGAYSTG

SEQ ID NO: 51316 - protein, 7 aa, synthetic construct
RIPTSMT

SEQ ID NO: 51317 - protein, 7 aa, synthetic construct
TVKSSAI

SEQ ID NO: 51318 - protein, 7 aa, synthetic construct
NSQPIDK

SEQ ID NO: 51319 - protein, 7 aa, synthetic construct
YAGQLKT

SEQ ID NO: 51320 - protein, 7 aa, synthetic construct
TLVQRTP

SEQ ID NO: 51321 - protein, 7 aa, synthetic construct
MNKTPAG

SEQ ID NO: 51322 - protein, 7 aa, synthetic construct
VGTIVIG

SEQ ID NO: 51323 - protein, 7 aa, synthetic construct
AVKSNSV

SEQ ID NO: 51324 - protein, 7 aa, synthetic construct
IHATYRD

SEQ ID NO: 51325 - protein, 7 aa, synthetic construct
LDRKVAG

SEQ ID NO: 51326 - protein, 7 aa, synthetic construct
GKQWHSE

SEQ ID NO: 51327 - protein, 7 aa, synthetic construct
GIYSMTE

SEQ ID NO: 51328 - protein, 7 aa, synthetic construct
RSSMAEH

SEQ ID NO: 51329 - protein, 7 aa, synthetic construct
STKPSNS

SEQ ID NO: 51330 - protein, 7 aa, synthetic construct
YKLAKDN

SEQ ID NO: 51331 - protein, 7 aa, synthetic construct
KLDIDPW

SEQ ID NO: 51332 - protein, 7 aa, synthetic construct
CIGTQCL

SEQ ID NO: 51333 - protein, 7 aa, synthetic construct
ISQQFPP

SEQ ID NO: 51334 - protein, 7 aa, synthetic construct
TTTITTK

SEQ ID NO: 51335 - protein, 7 aa, synthetic construct
SRNPHSN

SEQ ID NO: 51336 - protein, 7 aa, synthetic construct
QGSMVVQ

SEQ ID NO: 51337 - protein, 7 aa, synthetic construct
HAGVKEN

SEQ ID NO: 51338 - protein, 7 aa, synthetic construct
GASTRSP

SEQ ID NO: 51339 - protein, 7 aa, synthetic construct
QNSIKHE

SEQ ID NO: 51340 - protein, 7 aa, synthetic construct
TRGPDGM

SEQ ID NO: 51341 - protein, 7 aa, synthetic construct
KSSTAGM

SEQ ID NO: 51342 - protein, 7 aa, synthetic construct
QPRTAEL

SEQ ID NO: 51343 - protein, 7 aa, synthetic construct
HRGTVMM

SEQ ID NO: 51344 - protein, 7 aa, synthetic construct
GNKATVG

SEQ ID NO: 51345 - protein, 7 aa, synthetic construct
YSMYTKP

SEQ ID NO: 51346 - protein, 7 aa, synthetic construct
VRGISGF

SEQ ID NO: 51347 - protein, 7 aa, synthetic construct
TKATYIH

SEQ ID NO: 51348 - protein, 7 aa, synthetic construct
QQKYSTH

SEQ ID NO: 51349 - protein, 7 aa, synthetic construct
WKNVSPT

SEQ ID NO: 51350 - protein, 7 aa, synthetic construct
QRSMNVQ

SEQ ID NO: 51351 - protein, 7 aa, synthetic construct
PSGSTKT

SEQ ID NO: 51352 - protein, 7 aa, synthetic construct
NKGEASL

SEQ ID NO: 51353 - protein, 7 aa, synthetic construct
MAPRADA

SEQ ID NO: 51354 - protein, 7 aa, synthetic construct
DIWPGKS

SEQ ID NO: 51355 - protein, 7 aa, synthetic construct
THPKVSA

SEQ ID NO: 51356 - protein, 7 aa, synthetic construct
LTPQFGG

SEQ ID NO: 51357 - protein, 7 aa, synthetic construct
MPGRMAP

SEQ ID NO: 51358 - protein, 7 aa, synthetic construct
AYKPHGM

SEQ ID NO: 51359 - protein, 7 aa, synthetic construct
RLKPAGE

SEQ ID NO: 51360 - protein, 7 aa, synthetic construct
VIVGARP

SEQ ID NO: 51361 - protein, 7 aa, synthetic construct
MGPYQNH

SEQ ID NO: 51362 - protein, 7 aa, synthetic construct
KKNTMEM

SEQ ID NO: 51363 - protein, 7 aa, synthetic construct
TRGQQPA

SEQ ID NO: 51364 - protein, 7 aa, synthetic construct
GSNFPVP

SEQ ID NO: 51365 - protein, 7 aa, synthetic construct
SDIKMNG

SEQ ID NO: 51366 - protein, 7 aa, synthetic construct
SEIIKHA

SEQ ID NO: 51367 - protein, 7 aa, synthetic construct
RTNSMTP

SEQ ID NO: 51368 - protein, 7 aa, synthetic construct
QHSGYAL

SEQ ID NO: 51369 - protein, 7 aa, synthetic construct
GRYGVPS

SEQ ID NO: 51370 - protein, 7 aa, synthetic construct
ARAQYAE

SEQ ID NO: 51371 - protein, 7 aa, synthetic construct
NVKAFTE

SEQ ID NO: 51372 - protein, 7 aa, synthetic construct
TKNTTAS

SEQ ID NO: 51373 - protein, 7 aa, synthetic construct
AVNRKDL

SEQ ID NO: 51374 - protein, 7 aa, synthetic construct
MKEQSRP

SEQ ID NO: 51375 - protein, 7 aa, synthetic construct
KGGQRAE

SEQ ID NO: 51376 - protein, 7 aa, synthetic construct
LKERQVD

SEQ ID NO: 51377 - protein, 7 aa, synthetic construct
STKVAAA

SEQ ID NO: 51378 - protein, 7 aa, synthetic construct
YEKWTMA

SEQ ID NO: 51379 - protein, 7 aa, synthetic construct
SPPNHRQ

SEQ ID NO: 51380 - protein, 7 aa, synthetic construct
LGLDKTS

SEQ ID NO: 51381 - protein, 7 aa, synthetic construct
PKQMANA

SEQ ID NO: 51382 - protein, 7 aa, synthetic construct
QEGRQYG

SEQ ID NO: 51383 - protein, 7 aa, synthetic construct
RPHRVEE

SEQ ID NO: 51384 - protein, 7 aa, synthetic construct
VGHIPQL

SEQ ID NO: 51385 - protein, 7 aa, synthetic construct
MALKGTA

SEQ ID NO: 51386 - protein, 7 aa, synthetic construct
VTRPNIS

SEQ ID NO: 51387 - protein, 7 aa, synthetic construct
MKNTTTY

SEQ ID NO: 51388 - protein, 7 aa, synthetic construct
SPKQHTW

SEQ ID NO: 51389 - protein, 7 aa, synthetic construct
DKLIPRP

SEQ ID NO: 51390 - protein, 7 aa, synthetic construct
VELMQKS

SEQ ID NO: 51391 - protein, 7 aa, synthetic construct
AGKNTER

SEQ ID NO: 51392 - protein, 7 aa, synthetic construct
RPTLGTD

SEQ ID NO: 51393 - protein, 7 aa, synthetic construct
RIPHGGY

SEQ ID NO: 51394 - protein, 7 aa, synthetic construct
RRINEAT

SEQ ID NO: 51395 - protein, 7 aa, synthetic construct
TTKSNNP

SEQ ID NO: 51396 - protein, 7 aa, synthetic construct
KNPTMRD

SEQ ID NO: 51397 - protein, 7 aa, synthetic construct
NLHLPIS

SEQ ID NO: 51398 - protein, 7 aa, synthetic construct
FLNFTSD

SEQ ID NO: 51399 - protein, 7 aa, synthetic construct
QITKNTF

SEQ ID NO: 51400 - protein, 7 aa, synthetic construct
HAVGPPP

SEQ ID NO: 51401 - protein, 7 aa, synthetic construct
QKGVGNS

SEQ ID NO: 51402 - protein, 7 aa, synthetic construct
KDQYGAK

SEQ ID NO: 51403 - protein, 7 aa, synthetic construct
PVKVLTS

SEQ ID NO: 51404 - protein, 7 aa, synthetic construct
RATSNSG

SEQ ID NO: 51405 - protein, 7 aa, synthetic construct
PSPKIDP

SEQ ID NO: 51406 - protein, 7 aa, synthetic construct
YLSQAGV

SEQ ID NO: 51407 - protein, 7 aa, synthetic construct
PFANTHS

SEQ ID NO: 51408 - protein, 7 aa, synthetic construct
TRSSVNV

SEQ ID NO: 51409 - protein, 7 aa, synthetic construct
QHHKENA

SEQ ID NO: 51410 - protein, 7 aa, synthetic construct
ANGADRS

SEQ ID NO: 51411 - protein, 7 aa, synthetic construct
NRQSIVD

SEQ ID NO: 51412 - protein, 7 aa, synthetic construct
YPKVTSM

SEQ ID NO: 51413 - protein, 7 aa, synthetic construct
RPAHGSE

SEQ ID NO: 51414 - protein, 7 aa, synthetic construct
TKGDHAK

SEQ ID NO: 51415 - protein, 7 aa, synthetic construct
THIASPG

SEQ ID NO: 51416 - protein, 7 aa, synthetic construct
AASRNMA

SEQ ID NO: 51417 - protein, 7 aa, synthetic construct
PPRNQGS

SEQ ID NO: 51418 - protein, 7 aa, synthetic construct
ILKKMAD

SEQ ID NO: 51419 - protein, 7 aa, synthetic construct
NKHPSTY

SEQ ID NO: 51420 - protein, 7 aa, synthetic construct
NHEMRNA

SEQ ID NO: 51421 - protein, 7 aa, synthetic construct
GKNSPDS

SEQ ID NO: 51422 - protein, 7 aa, synthetic construct
NLRVGGH

SEQ ID NO: 51423 - protein, 7 aa, synthetic construct
STRNTNG

SEQ ID NO: 51424 - protein, 7 aa, synthetic construct
SESSMKI

SEQ ID NO: 51425 - protein, 7 aa, synthetic construct
TMQKLPP

SEQ ID NO: 51426 - protein, 7 aa, synthetic construct
PVTHKTS

SEQ ID NO: 51427 - protein, 7 aa, synthetic construct
DPMWNKS

SEQ ID NO: 51428 - protein, 7 aa, synthetic construct
MTKGPPQ

SEQ ID NO: 51429 - protein, 7 aa, synthetic construct
QYSTKTA

SEQ ID NO: 51430 - protein, 7 aa, synthetic construct
PPALSPG

SEQ ID NO: 51431 - protein, 7 aa, synthetic construct
RQNVNTG

SEQ ID NO: 51432 - protein, 7 aa, synthetic construct
VKGASAA

SEQ ID NO: 51433 - protein, 7 aa, synthetic construct
QAGLNYH

SEQ ID NO: 51434 - protein, 7 aa, synthetic construct
KSERILM

SEQ ID NO: 51435 - protein, 7 aa, synthetic construct
TRNVSNG

SEQ ID NO: 51436 - protein, 7 aa, synthetic construct
KTPQTSM

SEQ ID NO: 51437 - protein, 7 aa, synthetic construct
RPNPQNA

SEQ ID NO: 51438 - protein, 7 aa, synthetic construct
SRSFASA

SEQ ID NO: 51439 - protein, 7 aa, synthetic construct
VNDKNRV

SEQ ID NO: 51440 - protein, 7 aa, synthetic construct
TRSVSMA

SEQ ID NO: 51441 - protein, 7 aa, synthetic construct
GKGNSLG

SEQ ID NO: 51442 - protein, 7 aa, synthetic construct
MNQKGGN

SEQ ID NO: 51443 - protein, 7 aa, synthetic construct
GNHTMPK

SEQ ID NO: 51444 - protein, 7 aa, synthetic construct
VKVNSGG

SEQ ID NO: 51445 - protein, 7 aa, synthetic construct
YNKQQHV

SEQ ID NO: 51446 - protein, 7 aa, synthetic construct
RLPSNVG

SEQ ID NO: 51447 - protein, 7 aa, synthetic construct
GAHNMLV

SEQ ID NO: 51448 - protein, 7 aa, synthetic construct
VASRAAH

SEQ ID NO: 51449 - protein, 7 aa, synthetic construct
QRNNAPA

SEQ ID NO: 51450 - protein, 7 aa, synthetic construct
LLKDRSI

SEQ ID NO: 51451 - protein, 7 aa, synthetic construct
QSNQKMN

SEQ ID NO: 51452 - protein, 7 aa, synthetic construct
PRGQGAV

SEQ ID NO: 51453 - protein, 7 aa, synthetic construct
QGPVTSV

SEQ ID NO: 51454 - protein, 7 aa, synthetic construct
SNRQNEG

SEQ ID NO: 51455 - protein, 7 aa, synthetic construct
MHRAIDQ

SEQ ID NO: 51456 - protein, 7 aa, synthetic construct
KPGWQMD

SEQ ID NO: 51457 - protein, 7 aa, synthetic construct
FQKDARS

SEQ ID NO: 51458 - protein, 7 aa, synthetic construct
GTKSSNS

SEQ ID NO: 51459 - protein, 7 aa, synthetic construct
KPNGSAV

SEQ ID NO: 51460 - protein, 7 aa, synthetic construct
KNKFASE

SEQ ID NO: 51461 - protein, 7 aa, synthetic construct
TAGVRDY

SEQ ID NO: 51462 - protein, 7 aa, synthetic construct
TNKYSTN

SEQ ID NO: 51463 - protein, 7 aa, synthetic construct
ATQQRAG

SEQ ID NO: 51464 - protein, 7 aa, synthetic construct
ATVKGIG

SEQ ID NO: 51465 - protein, 7 aa, synthetic construct
NQPKTQA

SEQ ID NO: 51466 - protein, 7 aa, synthetic construct
LNHQKPF

SEQ ID NO: 51467 - protein, 7 aa, synthetic construct
ASSQKGY

SEQ ID NO: 51468 - protein, 7 aa, synthetic construct
GKTGKDA

SEQ ID NO: 51469 - protein, 7 aa, synthetic construct
TPKSGVG

SEQ ID NO: 51470 - protein, 7 aa, synthetic construct
RHNIGTM

SEQ ID NO: 51471 - protein, 7 aa, synthetic construct
GQGKPPP

SEQ ID NO: 51472 - protein, 7 aa, synthetic construct
GSYAISG

SEQ ID NO: 51473 - protein, 7 aa, synthetic construct
ASNPIKA

SEQ ID NO: 51474 - protein, 7 aa, synthetic construct
LLLKNPV

SEQ ID NO: 51475 - protein, 7 aa, synthetic construct
MAKMANP

SEQ ID NO: 51476 - protein, 7 aa, synthetic construct
KPNLTQQ

SEQ ID NO: 51477 - protein, 7 aa, synthetic construct
GPARVAD

SEQ ID NO: 51478 - protein, 7 aa, synthetic construct
HKHSPGG

SEQ ID NO: 51479 - protein, 7 aa, synthetic construct
MGHNKMA

SEQ ID NO: 51480 - protein, 7 aa, synthetic construct
VMKVTNA

SEQ ID NO: 51481 - protein, 7 aa, synthetic construct
GKISTTA

SEQ ID NO: 51482 - protein, 7 aa, synthetic construct
SMFDSTR

SEQ ID NO: 51483 - protein, 7 aa, synthetic construct
SVKYIEH

SEQ ID NO: 51484 - protein, 7 aa, synthetic construct
MKMQTQS

SEQ ID NO: 51485 - protein, 7 aa, synthetic construct
RASSQAG

SEQ ID NO: 51486 - protein, 7 aa, synthetic construct
QHMTGIA

SEQ ID NO: 51487 - protein, 7 aa, synthetic construct
GKNAITG

SEQ ID NO: 51488 - protein, 7 aa, synthetic construct
HADSRPM

SEQ ID NO: 51489 - protein, 7 aa, synthetic construct
IVSQGTG

SEQ ID NO: 51490 - protein, 7 aa, synthetic construct
IKGATAS

SEQ ID NO: 51491 - protein, 7 aa, synthetic construct
MHKVIED

SEQ ID NO: 51492 - protein, 7 aa, synthetic construct
NLRHPPQ

SEQ ID NO: 51493 - protein, 7 aa, synthetic construct
IGTNKAT

SEQ ID NO: 51494 - protein, 7 aa, synthetic construct
SKQSNNH

SEQ ID NO: 51495 - protein, 7 aa, synthetic construct
ARPGNTA

SEQ ID NO: 51496 - protein, 7 aa, synthetic construct
KTPANSN

SEQ ID NO: 51497 - protein, 7 aa, synthetic construct
IGRTALQ

SEQ ID NO: 51498 - protein, 7 aa, synthetic construct
SPQTMPA

SEQ ID NO: 51499 - protein, 7 aa, synthetic construct
FIVPGPG

SEQ ID NO: 51500 - protein, 7 aa, synthetic construct
MSRSPPP

SEQ ID NO: 51501 - protein, 7 aa, synthetic construct
KMNQVYD

SEQ ID NO: 51502 - protein, 7 aa, synthetic construct
EKITKFE

SEQ ID NO: 51503 - protein, 7 aa, synthetic construct
RSSTQGS

SEQ ID NO: 51504 - protein, 7 aa, synthetic construct
TEGRRSE

SEQ ID NO: 51505 - protein, 7 aa, synthetic construct
MGGMKGG

SEQ ID NO: 51506 - protein, 7 aa, synthetic construct
SREPKQG

SEQ ID NO: 51507 - protein, 7 aa, synthetic construct
YRTNEKP

SEQ ID NO: 51508 - protein, 7 aa, synthetic construct
KIGASPE

SEQ ID NO: 51509 - protein, 7 aa, synthetic construct
NRATSVG

SEQ ID NO: 51510 - protein, 7 aa, synthetic construct
NHTYKQQ

SEQ ID NO: 51511 - protein, 7 aa, synthetic construct
HDHRSPP

SEQ ID NO: 51512 - protein, 7 aa, synthetic construct
SYKGTTA

SEQ ID NO: 51513 - protein, 7 aa, synthetic construct
KSTGIAG

SEQ ID NO: 51514 - protein, 7 aa, synthetic construct
WPSQKYE

SEQ ID NO: 51515 - protein, 7 aa, synthetic construct
RSTPNQG

SEQ ID NO: 51516 - protein, 7 aa, synthetic construct
FKSSNSM

SEQ ID NO: 51517 - protein, 7 aa, synthetic construct
NEMFSMG

SEQ ID NO: 51518 - protein, 7 aa, synthetic construct
AKDYIPQ

SEQ ID NO: 51519 - protein, 7 aa, synthetic construct
QPRTTQP

SEQ ID NO: 51520 - protein, 7 aa, synthetic construct
TYQGLKP

SEQ ID NO: 51521 - protein, 7 aa, synthetic construct
FQQTALN

SEQ ID NO: 51522 - protein, 7 aa, synthetic construct
NEPGTSS

SEQ ID NO: 51523 - protein, 7 aa, synthetic construct
YLEMQKQ

SEQ ID NO: 51524 - protein, 7 aa, synthetic construct
KMTNAQS

SEQ ID NO: 51525 - protein, 7 aa, synthetic construct
YKEPKSA

SEQ ID NO: 51526 - protein, 7 aa, synthetic construct
TQRDKTP

SEQ ID NO: 51527 - protein, 7 aa, synthetic construct
FVPVKHG

SEQ ID NO: 51528 - protein, 7 aa, synthetic construct
RMPMNTP

SEQ ID NO: 51529 - protein, 7 aa, synthetic construct
WRQPERD

SEQ ID NO: 51530 - protein, 7 aa, synthetic construct
KSSGTQP

SEQ ID NO: 51531 - protein, 7 aa, synthetic construct
NEMRLRA

SEQ ID NO: 51532 - protein, 7 aa, synthetic construct
IPERQLQ

SEQ ID NO: 51533 - protein, 7 aa, synthetic construct
YMKPSQG

SEQ ID NO: 51534 - protein, 7 aa, synthetic construct
RPNYTIN

SEQ ID NO: 51535 - protein, 7 aa, synthetic construct
YHRPQDP

SEQ ID NO: 51536 - protein, 7 aa, synthetic construct
WQRETQA

SEQ ID NO: 51537 - protein, 7 aa, synthetic construct
TYAGVRP

SEQ ID NO: 51538 - protein, 7 aa, synthetic construct
KHSTMME

SEQ ID NO: 51539 - protein, 7 aa, synthetic construct
TGPQMRN

SEQ ID NO: 51540 - protein, 7 aa, synthetic construct
RNDKNGS

SEQ ID NO: 51541 - protein, 7 aa, synthetic construct
VQGNRNA

SEQ ID NO: 51542 - protein, 7 aa, synthetic construct
LKGQPMY

SEQ ID NO: 51543 - protein, 7 aa, synthetic construct
MKTGING

SEQ ID NO: 51544 - protein, 7 aa, synthetic construct
GMKAAKD

SEQ ID NO: 51545 - protein, 7 aa, synthetic construct
YPPIREQ

SEQ ID NO: 51546 - protein, 7 aa, synthetic construct
LPHGYKE

SEQ ID NO: 51547 - protein, 7 aa, synthetic construct
NNFRHKE

SEQ ID NO: 51548 - protein, 7 aa, synthetic construct
SIKMNIG

SEQ ID NO: 51549 - protein, 7 aa, synthetic construct
FFNGKGT

SEQ ID NO: 51550 - protein, 7 aa, synthetic construct
SKTQMQA

SEQ ID NO: 51551 - protein, 7 aa, synthetic construct
KSTGSSS

SEQ ID NO: 51552 - protein, 7 aa, synthetic construct
DSKYKLL

SEQ ID NO: 51553 - protein, 7 aa, synthetic construct
SLGRGAS

SEQ ID NO: 51554 - protein, 7 aa, synthetic construct
GPVTKMG

SEQ ID NO: 51555 - protein, 7 aa, synthetic construct
ANQKTTG

SEQ ID NO: 51556 - protein, 7 aa, synthetic construct
SKSGVMV

SEQ ID NO: 51557 - protein, 7 aa, synthetic construct
GHSDWQP

SEQ ID NO: 51558 - protein, 7 aa, synthetic construct
DKLRGLN

SEQ ID NO: 51559 - protein, 7 aa, synthetic construct
MQSSAAK

SEQ ID NO: 51560 - protein, 7 aa, synthetic construct
NVQPNRG

SEQ ID NO: 51561 - protein, 7 aa, synthetic construct
DKESRRA

SEQ ID NO: 51562 - protein, 7 aa, synthetic construct
MKSNNAA

SEQ ID NO: 51563 - protein, 7 aa, synthetic construct
SGHSNTT

SEQ ID NO: 51564 - protein, 7 aa, synthetic construct
HDNFPKA

SEQ ID NO: 51565 - protein, 7 aa, synthetic construct
KMSTPGN

SEQ ID NO: 51566 - protein, 7 aa, synthetic construct
SLINTHG

SEQ ID NO: 51567 - protein, 7 aa, synthetic construct
PYPPGRE

SEQ ID NO: 51568 - protein, 7 aa, synthetic construct
TKITIKG

SEQ ID NO: 51569 - protein, 7 aa, synthetic construct
ITKMAAY

SEQ ID NO: 51570 - protein, 7 aa, synthetic construct
VPARSDP

SEQ ID NO: 51571 - protein, 7 aa, synthetic construct
TKNNAQN

SEQ ID NO: 51572 - protein, 7 aa, synthetic construct
RANSSSG

SEQ ID NO: 51573 - protein, 7 aa, synthetic construct
MVDFNRG

SEQ ID NO: 51574 - protein, 7 aa, synthetic construct
VGYLIAD

SEQ ID NO: 51575 - protein, 7 aa, synthetic construct
RPQSVAS

SEQ ID NO: 51576 - protein, 7 aa, synthetic construct
NPFERHE

SEQ ID NO: 51577 - protein, 7 aa, synthetic construct
TGAAKSG

SEQ ID NO: 51578 - protein, 7 aa, synthetic construct
MQTKMAA

SEQ ID NO: 51579 - protein, 7 aa, synthetic construct
DMVGPRP

SEQ ID NO: 51580 - protein, 7 aa, synthetic construct
AARAASM

SEQ ID NO: 51581 - protein, 7 aa, synthetic construct
LRHTPEV

SEQ ID NO: 51582 - protein, 7 aa, synthetic construct
KTSGVGP

SEQ ID NO: 51583 - protein, 7 aa, synthetic construct
ERTSMPA

SEQ ID NO: 51584 - protein, 7 aa, synthetic construct
QSRKDDA

SEQ ID NO: 51585 - protein, 7 aa, synthetic construct
YHMRDKI

SEQ ID NO: 51586 - protein, 7 aa, synthetic construct
VSGKGPM

SEQ ID NO: 51587 - protein, 7 aa, synthetic construct
NAHKTNW

SEQ ID NO: 51588 - protein, 7 aa, synthetic construct
PGKAVQS

SEQ ID NO: 51589 - protein, 7 aa, synthetic construct
TNAQVKA

SEQ ID NO: 51590 - protein, 7 aa, synthetic construct
TDFSPGK

SEQ ID NO: 51591 - protein, 7 aa, synthetic construct
SHITKNG

SEQ ID NO: 51592 - protein, 7 aa, synthetic construct
TPFSPIS

SEQ ID NO: 51593 - protein, 7 aa, synthetic construct
HGSRSEL

SEQ ID NO: 51594 - protein, 7 aa, synthetic construct
ERQPSMA

SEQ ID NO: 51595 - protein, 7 aa, synthetic construct
KNNGAMA

SEQ ID NO: 51596 - protein, 7 aa, synthetic construct
AQNRQAI

SEQ ID NO: 51597 - protein, 7 aa, synthetic construct
RTQSVTA

SEQ ID NO: 51598 - protein, 7 aa, synthetic construct
GYQNIPN

SEQ ID NO: 51599 - protein, 7 aa, synthetic construct
VTHFNGS

SEQ ID NO: 51600 - protein, 7 aa, synthetic construct
SANKTSA

SEQ ID NO: 51601 - protein, 7 aa, synthetic construct
TRPTSTV

SEQ ID NO: 51602 - protein, 7 aa, synthetic construct
NYKNGLS

SEQ ID NO: 51603 - protein, 7 aa, synthetic construct
EQQRPQH

SEQ ID NO: 51604 - protein, 7 aa, synthetic construct
YGSQSKG

SEQ ID NO: 51605 - protein, 7 aa, synthetic construct
RQTNGVA

SEQ ID NO: 51606 - protein, 7 aa, synthetic construct
RNGENHQ

SEQ ID NO: 51607 - protein, 7 aa, synthetic construct
KSQVNQA

SEQ ID NO: 51608 - protein, 7 aa, synthetic construct
TNGRGVH

SEQ ID NO: 51609 - protein, 7 aa, synthetic construct
MNPKHDK

SEQ ID NO: 51610 - protein, 7 aa, synthetic construct
GTSITKV

SEQ ID NO: 51611 - protein, 7 aa, synthetic construct
FAPKGPT

SEQ ID NO: 51612 - protein, 7 aa, synthetic construct
PRRLSEE

SEQ ID NO: 51613 - protein, 7 aa, synthetic construct
TGNPGRT

SEQ ID NO: 51614 - protein, 7 aa, synthetic construct
PTGVNQW

SEQ ID NO: 51615 - protein, 7 aa, synthetic construct
GKNSTSA

SEQ ID NO: 51616 - protein, 7 aa, synthetic construct
HPKFAHD

SEQ ID NO: 51617 - protein, 7 aa, synthetic construct
SNNSVKY

SEQ ID NO: 51618 - protein, 7 aa, synthetic construct
VARQVVP

SEQ ID NO: 51619 - protein, 7 aa, synthetic construct
GPHGWAS

SEQ ID NO: 51620 - protein, 7 aa, synthetic construct
TTNRNSP

SEQ ID NO: 51621 - protein, 7 aa, synthetic construct
AHTHGNG

SEQ ID NO: 51622 - protein, 7 aa, synthetic construct
NTRQSAG

SEQ ID NO: 51623 - protein, 7 aa, synthetic construct
KMGAHGP

SEQ ID NO: 51624 - protein, 7 aa, synthetic construct
MVKSSNP

SEQ ID NO: 51625 - protein, 7 aa, synthetic construct
KMPQGHM

SEQ ID NO: 51626 - protein, 7 aa, synthetic construct
NKTSGGT

SEQ ID NO: 51627 - protein, 7 aa, synthetic construct
IAPVVKV

SEQ ID NO: 51628 - protein, 7 aa, synthetic construct
MTNTNAV

SEQ ID NO: 51629 - protein, 7 aa, synthetic construct
EPGLSSG

SEQ ID NO: 51630 - protein, 7 aa, synthetic construct
MAGLAPN

SEQ ID NO: 51631 - protein, 7 aa, synthetic construct
DKHRPQG

SEQ ID NO: 51632 - protein, 7 aa, synthetic construct
FGAKPGT

SEQ ID NO: 51633 - protein, 7 aa, synthetic construct
YSHTHKG

SEQ ID NO: 51634 - protein, 7 aa, synthetic construct
RDAQKQG

SEQ ID NO: 51635 - protein, 7 aa, synthetic construct
QNSYTHD

SEQ ID NO: 51636 - protein, 7 aa, synthetic construct
TRTYTTT

SEQ ID NO: 51637 - protein, 7 aa, synthetic construct
TPFGHKT

SEQ ID NO: 51638 - protein, 7 aa, synthetic construct
QKASAQS

SEQ ID NO: 51639 - protein, 7 aa, synthetic construct
KARDESR

SEQ ID NO: 51640 - protein, 7 aa, synthetic construct
SNQNFSM

SEQ ID NO: 51641 - protein, 7 aa, synthetic construct
SYMKKES

SEQ ID NO: 51642 - protein, 7 aa, synthetic construct
YKEGKSG

SEQ ID NO: 51643 - protein, 7 aa, synthetic construct
LQRPFGE

SEQ ID NO: 51644 - protein, 7 aa, synthetic construct
TGTNTNR

SEQ ID NO: 51645 - protein, 7 aa, synthetic construct
KKGSDGG

SEQ ID NO: 51646 - protein, 7 aa, synthetic construct
KPDRMGN

SEQ ID NO: 51647 - protein, 7 aa, synthetic construct
KSTMSSP

SEQ ID NO: 51648 - protein, 7 aa, synthetic construct
LEKARPM

SEQ ID NO: 51649 - protein, 7 aa, synthetic construct
MVKMDIN

SEQ ID NO: 51650 - protein, 7 aa, synthetic construct
IFSNGNS

SEQ ID NO: 51651 - protein, 7 aa, synthetic construct
NSFRTEP

SEQ ID NO: 51652 - protein, 7 aa, synthetic construct
GKLASEM

SEQ ID NO: 51653 - protein, 7 aa, synthetic construct
MKPLPNL

SEQ ID NO: 51654 - protein, 7 aa, synthetic construct
KAPEKAN

SEQ ID NO: 51655 - protein, 7 aa, synthetic construct
HVVRPPT

SEQ ID NO: 51656 - protein, 7 aa, synthetic construct
TMTQKSP

SEQ ID NO: 51657 - protein, 7 aa, synthetic construct
QRDKIDY

SEQ ID NO: 51658 - protein, 7 aa, synthetic construct
LGKTNNG

SEQ ID NO: 51659 - protein, 7 aa, synthetic construct
TDLRFQG

SEQ ID NO: 51660 - protein, 7 aa, synthetic construct
HGDNRMS

SEQ ID NO: 51661 - protein, 7 aa, synthetic construct
NGNRQTH

SEQ ID NO: 51662 - protein, 7 aa, synthetic construct
QTGKGGS

SEQ ID NO: 51663 - protein, 7 aa, synthetic construct
MTRNVDI

SEQ ID NO: 51664 - protein, 7 aa, synthetic construct
QRQAGQS

SEQ ID NO: 51665 - protein, 7 aa, synthetic construct
HDKGGHG

SEQ ID NO: 51666 - protein, 7 aa, synthetic construct
NAKQGQG

SEQ ID NO: 51667 - protein, 7 aa, synthetic construct
GSTREPS

SEQ ID NO: 51668 - protein, 7 aa, synthetic construct
NQTKPSV

SEQ ID NO: 51669 - protein, 7 aa, synthetic construct
LPKLNHG

SEQ ID NO: 51670 - protein, 7 aa, synthetic construct
FSGMSTG

SEQ ID NO: 51671 - protein, 7 aa, synthetic construct
SPRSIQG

SEQ ID NO: 51672 - protein, 7 aa, synthetic construct
WTNVFKD

SEQ ID NO: 51673 - protein, 7 aa, synthetic construct
YKQNPNS

SEQ ID NO: 51674 - protein, 7 aa, synthetic construct
TPRVPPT

SEQ ID NO: 51675 - protein, 7 aa, synthetic construct
RGTNVGD

SEQ ID NO: 51676 - protein, 7 aa, synthetic construct
DRNVTRA

SEQ ID NO: 51677 - protein, 7 aa, synthetic construct
KLTHWPD

SEQ ID NO: 51678 - protein, 7 aa, synthetic construct
TTLARGP

SEQ ID NO: 51679 - protein, 7 aa, synthetic construct
KTRQEFE

SEQ ID NO: 51680 - protein, 7 aa, synthetic construct
NNRDHLM

SEQ ID NO: 51681 - protein, 7 aa, synthetic construct
YKQGSSS

SEQ ID NO: 51682 - protein, 7 aa, synthetic construct
WKTVAEK

SEQ ID NO: 51683 - protein, 7 aa, synthetic construct
WLTRNSE

SEQ ID NO: 51684 - protein, 7 aa, synthetic construct
KQNSGQF

SEQ ID NO: 51685 - protein, 7 aa, synthetic construct
PKSANVG

SEQ ID NO: 51686 - protein, 7 aa, synthetic construct
GPKPGGT

SEQ ID NO: 51687 - protein, 7 aa, synthetic construct
NKNYGHV

SEQ ID NO: 51688 - protein, 7 aa, synthetic construct
SYKTSSP

SEQ ID NO: 51689 - protein, 7 aa, synthetic construct
NSVKHDY

SEQ ID NO: 51690 - protein, 7 aa, synthetic construct
EKLWKEE

SEQ ID NO: 51691 - protein, 7 aa, synthetic construct
SHAQSQR

SEQ ID NO: 51692 - protein, 7 aa, synthetic construct
RPMSTTE

SEQ ID NO: 51693 - protein, 7 aa, synthetic construct
MRMAGPG

SEQ ID NO: 51694 - protein, 7 aa, synthetic construct
RPGQSHE

SEQ ID NO: 51695 - protein, 7 aa, synthetic construct
TTTSRAP

SEQ ID NO: 51696 - protein, 7 aa, synthetic construct
RSTSSGA

SEQ ID NO: 51697 - protein, 7 aa, synthetic construct
GKQQERN

SEQ ID NO: 51698 - protein, 7 aa, synthetic construct
KVGTAGA

SEQ ID NO: 51699 - protein, 7 aa, synthetic construct
AHPHIKG

SEQ ID NO: 51700 - protein, 7 aa, synthetic construct
NNQNIRG

SEQ ID NO: 51701 - protein, 7 aa, synthetic construct
PKKEQSS

SEQ ID NO: 51702 - protein, 7 aa, synthetic construct
RKSDSMG

SEQ ID NO: 51703 - protein, 7 aa, synthetic construct
EKANKGF

SEQ ID NO: 51704 - protein, 7 aa, synthetic construct
LKGLAAE

SEQ ID NO: 51705 - protein, 7 aa, synthetic construct
GFQDRHS

SEQ ID NO: 51706 - protein, 7 aa, synthetic construct
PKTAMNE

SEQ ID NO: 51707 - protein, 7 aa, synthetic construct
PGGLPTK

SEQ ID NO: 51708 - protein, 7 aa, synthetic construct
LHVRMPE

SEQ ID NO: 51709 - protein, 7 aa, synthetic construct
TLKGIVG

SEQ ID NO: 51710 - protein, 7 aa, synthetic construct
RLYGNEA

SEQ ID NO: 51711 - protein, 7 aa, synthetic construct
HNDLRMA

SEQ ID NO: 51712 - protein, 7 aa, synthetic construct
HKQQDIM

SEQ ID NO: 51713 - protein, 7 aa, synthetic construct
GKNNTIG

SEQ ID NO: 51714 - protein, 7 aa, synthetic construct
YHQLAPN

SEQ ID NO: 51715 - protein, 7 aa, synthetic construct
FYGNNMP

SEQ ID NO: 51716 - protein, 7 aa, synthetic construct
QLATLGA

SEQ ID NO: 51717 - protein, 7 aa, synthetic construct
KSQTTSS

SEQ ID NO: 51718 - protein, 7 aa, synthetic construct
LPLSQYA

SEQ ID NO: 51719 - protein, 7 aa, synthetic construct
TKMAKFD

SEQ ID NO: 51720 - protein, 7 aa, synthetic construct
HPYGGQP

SEQ ID NO: 51721 - protein, 7 aa, synthetic construct
ANSLTPG

SEQ ID NO: 51722 - protein, 7 aa, synthetic construct
VARSTGF

SEQ ID NO: 51723 - protein, 7 aa, synthetic construct
PRGQSTP

SEQ ID NO: 51724 - protein, 7 aa, synthetic construct
RPNAIHT

SEQ ID NO: 51725 - protein, 7 aa, synthetic construct
KSNPGNG

SEQ ID NO: 51726 - protein, 7 aa, synthetic construct
HLGIREG

SEQ ID NO: 51727 - protein, 7 aa, synthetic construct
FKTGQAA

SEQ ID NO: 51728 - protein, 7 aa, synthetic construct
TMKGGSG

SEQ ID NO: 51729 - protein, 7 aa, synthetic construct
LIPAFSE

SEQ ID NO: 51730 - protein, 7 aa, synthetic construct
GRLETER

SEQ ID NO: 51731 - protein, 7 aa, synthetic construct
KSTTGLG

SEQ ID NO: 51732 - protein, 7 aa, synthetic construct
GMGHLPV

SEQ ID NO: 51733 - protein, 7 aa, synthetic construct
KQVSKVE

SEQ ID NO: 51734 - protein, 7 aa, synthetic construct
YVNKTAV

SEQ ID NO: 51735 - protein, 7 aa, synthetic construct
WKRPMVE

SEQ ID NO: 51736 - protein, 7 aa, synthetic construct
NRLHNHE

SEQ ID NO: 51737 - protein, 7 aa, synthetic construct
NHLAPNA

SEQ ID NO: 51738 - protein, 7 aa, synthetic construct
WMNVKVQ

SEQ ID NO: 51739 - protein, 7 aa, synthetic construct
LVRTSAH

SEQ ID NO: 51740 - protein, 7 aa, synthetic construct
KQGVKVP

SEQ ID NO: 51741 - protein, 7 aa, synthetic construct
NERAITA

SEQ ID NO: 51742 - protein, 7 aa, synthetic construct
NSDNHKV

SEQ ID NO: 51743 - protein, 7 aa, synthetic construct
TDRHGSI

SEQ ID NO: 51744 - protein, 7 aa, synthetic construct
SRSGASG

SEQ ID NO: 51745 - protein, 7 aa, synthetic construct
HHSTSRV

SEQ ID NO: 51746 - protein, 7 aa, synthetic construct
KHELGIS

SEQ ID NO: 51747 - protein, 7 aa, synthetic construct
GKSITSG

SEQ ID NO: 51748 - protein, 7 aa, synthetic construct
HKHWAEA

SEQ ID NO: 51749 - protein, 7 aa, synthetic construct
KQGATNG

SEQ ID NO: 51750 - protein, 7 aa, synthetic construct
VNGSTHV

SEQ ID NO: 51751 - protein, 7 aa, synthetic construct
KIDLPNN

SEQ ID NO: 51752 - protein, 7 aa, synthetic construct
LSSPTKT

SEQ ID NO: 51753 - protein, 7 aa, synthetic construct
QNSIKPP

SEQ ID NO: 51754 - protein, 7 aa, synthetic construct
SPAMRGG

SEQ ID NO: 51755 - protein, 7 aa, synthetic construct
WDPNRRS

SEQ ID NO: 51756 - protein, 7 aa, synthetic construct
KATTVSA

SEQ ID NO: 51757 - protein, 7 aa, synthetic construct
QKPNGGF

SEQ ID NO: 51758 - protein, 7 aa, synthetic construct
VSNKKEA

SEQ ID NO: 51759 - protein, 7 aa, synthetic construct
QTLMPKA

SEQ ID NO: 51760 - protein, 7 aa, synthetic construct
SKVTERM

SEQ ID NO: 51761 - protein, 7 aa, synthetic construct
HAYDREG

SEQ ID NO: 51762 - protein, 7 aa, synthetic construct
NKQNSPA

SEQ ID NO: 51763 - protein, 7 aa, synthetic construct
TKQIGKD

SEQ ID NO: 51764 - protein, 7 aa, synthetic construct
MPKASYG

SEQ ID NO: 51765 - protein, 7 aa, synthetic construct
TGREWTT

SEQ ID NO: 51766 - protein, 7 aa, synthetic construct
QKTNMNP

SEQ ID NO: 51767 - protein, 7 aa, synthetic construct
VKLFKSE

SEQ ID NO: 51768 - protein, 7 aa, synthetic construct
KANKETN

SEQ ID NO: 51769 - protein, 7 aa, synthetic construct
HVTMQGG

SEQ ID NO: 51770 - protein, 7 aa, synthetic construct
DYMERGH

SEQ ID NO: 51771 - protein, 7 aa, synthetic construct
MYPGKQQ

SEQ ID NO: 51772 - protein, 7 aa, synthetic construct
LPTTLSG

SEQ ID NO: 51773 - protein, 7 aa, synthetic construct
PRTNSSG

SEQ ID NO: 51774 - protein, 7 aa, synthetic construct
QPKQYGG

SEQ ID NO: 51775 - protein, 7 aa, synthetic construct
KEQNSSY

SEQ ID NO: 51776 - protein, 7 aa, synthetic construct
TRDMATH

SEQ ID NO: 51777 - protein, 7 aa, synthetic construct
DSSKSVG

SEQ ID NO: 51778 - protein, 7 aa, synthetic construct
RHDHINM

SEQ ID NO: 51779 - protein, 7 aa, synthetic construct
TAQRNQA

SEQ ID NO: 51780 - protein, 7 aa, synthetic construct
QKHKPNE

SEQ ID NO: 51781 - protein, 7 aa, synthetic construct
DNSLRMV

SEQ ID NO: 51782 - protein, 7 aa, synthetic construct
PKNMSQG

SEQ ID NO: 51783 - protein, 7 aa, synthetic construct
FQSNTPV

SEQ ID NO: 51784 - protein, 7 aa, synthetic construct
KTKAEYA

SEQ ID NO: 51785 - protein, 7 aa, synthetic construct
NGKSMAP

SEQ ID NO: 51786 - protein, 7 aa, synthetic construct
HPTQAPS

SEQ ID NO: 51787 - protein, 7 aa, synthetic construct
QANIQHG

SEQ ID NO: 51788 - protein, 7 aa, synthetic construct
KSGQGKE

SEQ ID NO: 51789 - protein, 7 aa, synthetic construct
KVKQGDY

SEQ ID NO: 51790 - protein, 7 aa, synthetic construct
VKHREID

SEQ ID NO: 51791 - protein, 7 aa, synthetic construct
SYVKKEI

SEQ ID NO: 51792 - protein, 7 aa, synthetic construct
HNNARIL

SEQ ID NO: 51793 - protein, 7 aa, synthetic construct
QGQQMTR

SEQ ID NO: 51794 - protein, 7 aa, synthetic construct
QQNKTQG

SEQ ID NO: 51795 - protein, 7 aa, synthetic construct
TPTKSTI

SEQ ID NO: 51796 - protein, 7 aa, synthetic construct
ISQHFDG

SEQ ID NO: 51797 - protein, 7 aa, synthetic construct
DSRTKYF

SEQ ID NO: 51798 - protein, 7 aa, synthetic construct
VKNSVPS

SEQ ID NO: 51799 - protein, 7 aa, synthetic construct
GRYNVPS

SEQ ID NO: 51800 - protein, 7 aa, synthetic construct
VETRKVA

SEQ ID NO: 51801 - protein, 7 aa, synthetic construct
GKTNGVG

SEQ ID NO: 51802 - protein, 7 aa, synthetic construct
EHRSKDT

SEQ ID NO: 51803 - protein, 7 aa, synthetic construct
PSTINRP

SEQ ID NO: 51804 - protein, 7 aa, synthetic construct
NSQKASA

SEQ ID NO: 51805 - protein, 7 aa, synthetic construct
PKVQAVA

SEQ ID NO: 51806 - protein, 7 aa, synthetic construct
PKHVTNE

SEQ ID NO: 51807 - protein, 7 aa, synthetic construct
QFHAPVG

SEQ ID NO: 51808 - protein, 7 aa, synthetic construct
HSKNAYT

SEQ ID NO: 51809 - protein, 7 aa, synthetic construct
YPKSSTT

SEQ ID NO: 51810 - protein, 7 aa, synthetic construct
GYSNLPH

SEQ ID NO: 51811 - protein, 7 aa, synthetic construct
DTHRSQL

SEQ ID NO: 51812 - protein, 7 aa, synthetic construct
HTRVAMS

SEQ ID NO: 51813 - protein, 7 aa, synthetic construct
PYKGIDR

SEQ ID NO: 51814 - protein, 7 aa, synthetic construct
QSSTHKP

SEQ ID NO: 51815 - protein, 7 aa, synthetic construct
IGMSTMT

SEQ ID NO: 51816 - protein, 7 aa, synthetic construct
ARPSMPP

SEQ ID NO: 51817 - protein, 7 aa, synthetic construct
AKTDRGQ

SEQ ID NO: 51818 - protein, 7 aa, synthetic construct
YKSDGIL

SEQ ID NO: 51819 - protein, 7 aa, synthetic construct
KKSDYDG

SEQ ID NO: 51820 - protein, 7 aa, synthetic construct
PRPGNGP

SEQ ID NO: 51821 - protein, 7 aa, synthetic construct
RHEAIPE

SEQ ID NO: 51822 - protein, 7 aa, synthetic construct
SGMGHVE

SEQ ID NO: 51823 - protein, 7 aa, synthetic construct
SGTDQRP

SEQ ID NO: 51824 - protein, 7 aa, synthetic construct
ENRAKAA

SEQ ID NO: 51825 - protein, 7 aa, synthetic construct
EKGFITH

SEQ ID NO: 51826 - protein, 7 aa, synthetic construct
IIGSTMM

SEQ ID NO: 51827 - protein, 7 aa, synthetic construct
TRANWNE

SEQ ID NO: 51828 - protein, 7 aa, synthetic construct
EDSFKAG

SEQ ID NO: 51829 - protein, 7 aa, synthetic construct
VWGTGTS

SEQ ID NO: 51830 - protein, 7 aa, synthetic construct
QRPSTVA

SEQ ID NO: 51831 - protein, 7 aa, synthetic construct
WGVQKYE

SEQ ID NO: 51832 - protein, 7 aa, synthetic construct
RDGSLHT

SEQ ID NO: 51833 - protein, 7 aa, synthetic construct
KTNNSNV

SEQ ID NO: 51834 - protein, 7 aa, synthetic construct
NPVKGKE

SEQ ID NO: 51835 - protein, 7 aa, synthetic construct
QYSRTVD

SEQ ID NO: 51836 - protein, 7 aa, synthetic construct
FMDRRSA

SEQ ID NO: 51837 - protein, 7 aa, synthetic construct
IDGKHNT

SEQ ID NO: 51838 - protein, 7 aa, synthetic construct
HAKMTLP

SEQ ID NO: 51839 - protein, 7 aa, synthetic construct
RPGHAMT

SEQ ID NO: 51840 - protein, 7 aa, synthetic construct
HKFQSNS

SEQ ID NO: 51841 - protein, 7 aa, synthetic construct
HMRKDEG

SEQ ID NO: 51842 - protein, 7 aa, synthetic construct
EFEPKKR

SEQ ID NO: 51843 - protein, 7 aa, synthetic construct
HMSRMEV

SEQ ID NO: 51844 - protein, 7 aa, synthetic construct
GQENRKY

SEQ ID NO: 51845 - protein, 7 aa, synthetic construct
KNPPTTP

SEQ ID NO: 51846 - protein, 7 aa, synthetic construct
MQKTWEM

SEQ ID NO: 51847 - protein, 7 aa, synthetic construct
SLTSGAL

SEQ ID NO: 51848 - protein, 7 aa, synthetic construct
KQQPTAY

SEQ ID NO: 51849 - protein, 7 aa, synthetic construct
WRGGNVQ

SEQ ID NO: 51850 - protein, 7 aa, synthetic construct
AIHRHQG

SEQ ID NO: 51851 - protein, 7 aa, synthetic construct
YHSLLKD

SEQ ID NO: 51852 - protein, 7 aa, synthetic construct
NSRQSVG

SEQ ID NO: 51853 - protein, 7 aa, synthetic construct
KSSTSPA

SEQ ID NO: 51854 - protein, 7 aa, synthetic construct
LNQSMKG

SEQ ID NO: 51855 - protein, 7 aa, synthetic construct
DYSLKGI

SEQ ID NO: 51856 - protein, 7 aa, synthetic construct
NNIRYTH

SEQ ID NO: 51857 - protein, 7 aa, synthetic construct
YRLESSN

SEQ ID NO: 51858 - protein, 7 aa, synthetic construct
KMGERSA

SEQ ID NO: 51859 - protein, 7 aa, synthetic construct
PIRSNGA

SEQ ID NO: 51860 - protein, 7 aa, synthetic construct
QHRVEEA

SEQ ID NO: 51861 - protein, 7 aa, synthetic construct
MPTSHVG

SEQ ID NO: 51862 - protein, 7 aa, synthetic construct
DHLVKKF

SEQ ID NO: 51863 - protein, 7 aa, synthetic construct
KSDKSMF

SEQ ID NO: 51864 - protein, 7 aa, synthetic construct
RTGVNSA

SEQ ID NO: 51865 - protein, 7 aa, synthetic construct
FRNANHA

SEQ ID NO: 51866 - protein, 7 aa, synthetic construct
YTNNGKA

SEQ ID NO: 51867 - protein, 7 aa, synthetic construct
QAVKFAS

SEQ ID NO: 51868 - protein, 7 aa, synthetic construct
GTRLMSG

SEQ ID NO: 51869 - protein, 7 aa, synthetic construct
AGHPGIG

SEQ ID NO: 51870 - protein, 7 aa, synthetic construct
VNKSQTG

SEQ ID NO: 51871 - protein, 7 aa, synthetic construct
KIGISHQ

SEQ ID NO: 51872 - protein, 7 aa, synthetic construct
YHANAQG

SEQ ID NO: 51873 - protein, 7 aa, synthetic construct
RNDKASS

SEQ ID NO: 51874 - protein, 7 aa, synthetic construct
TRSTPGA

SEQ ID NO: 51875 - protein, 7 aa, synthetic construct
RSEQNRG

SEQ ID NO: 51876 - protein, 7 aa, synthetic construct
ANKGSGG

SEQ ID NO: 51877 - protein, 7 aa, synthetic construct
GPQKQNG

SEQ ID NO: 51878 - protein, 7 aa, synthetic construct
PKTGQAP

SEQ ID NO: 51879 - protein, 7 aa, synthetic construct
TMSGRAA

SEQ ID NO: 51880 - protein, 7 aa, synthetic construct
GKWVNNP

SEQ ID NO: 51881 - protein, 7 aa, synthetic construct
LPTVSGA

SEQ ID NO: 51882 - protein, 7 aa, synthetic construct
LTGLQSA

SEQ ID NO: 51883 - protein, 7 aa, synthetic construct
NKGTNNS

SEQ ID NO: 51884 - protein, 7 aa, synthetic construct
QRASTNG

SEQ ID NO: 51885 - protein, 7 aa, synthetic construct
KGPLVVN

SEQ ID NO: 51886 - protein, 7 aa, synthetic construct
RPSNDRD

SEQ ID NO: 51887 - protein, 7 aa, synthetic construct
ERSSGQG

SEQ ID NO: 51888 - protein, 7 aa, synthetic construct
HNKIEQR

SEQ ID NO: 51889 - protein, 7 aa, synthetic construct
NKIATPP

SEQ ID NO: 51890 - protein, 7 aa, synthetic construct
QPQVHKI

SEQ ID NO: 51891 - protein, 7 aa, synthetic construct
ENGHRTA

SEQ ID NO: 51892 - protein, 7 aa, synthetic construct
GHRATSD

SEQ ID NO: 51893 - protein, 7 aa, synthetic construct
YPSKSTA

SEQ ID NO: 51894 - protein, 7 aa, synthetic construct
VNPMTIQ

SEQ ID NO: 51895 - protein, 7 aa, synthetic construct
SISHKTN

SEQ ID NO: 51896 - protein, 7 aa, synthetic construct
DKHRSGI

SEQ ID NO: 51897 - protein, 7 aa, synthetic construct
HAKSPSV

SEQ ID NO: 51898 - protein, 7 aa, synthetic construct
QNSQRFA

SEQ ID NO: 51899 - protein, 7 aa, synthetic construct
REAKGYH

SEQ ID NO: 51900 - protein, 7 aa, synthetic construct
FKQGEIP

SEQ ID NO: 51901 - protein, 7 aa, synthetic construct
RPKDANS

SEQ ID NO: 51902 - protein, 7 aa, synthetic construct
FAPISHA

SEQ ID NO: 51903 - protein, 7 aa, synthetic construct
SLPQFHA

SEQ ID NO: 51904 - protein, 7 aa, synthetic construct
MARMHAT

SEQ ID NO: 51905 - protein, 7 aa, synthetic construct
LVGTPVT

SEQ ID NO: 51906 - protein, 7 aa, synthetic construct
RVSNKPE

SEQ ID NO: 51907 - protein, 7 aa, synthetic construct
SKQSVQA

SEQ ID NO: 51908 - protein, 7 aa, synthetic construct
HRSVQDQ

SEQ ID NO: 51909 - protein, 7 aa, synthetic construct
MRHNLAP

SEQ ID NO: 51910 - protein, 7 aa, synthetic construct
TSYAINA

SEQ ID NO: 51911 - protein, 7 aa, synthetic construct
KNMSQQA

SEQ ID NO: 51912 - protein, 7 aa, synthetic construct
SYRGQIP

SEQ ID NO: 51913 - protein, 7 aa, synthetic construct
KQSRSED

SEQ ID NO: 51914 - protein, 7 aa, synthetic construct
TRTANEP

SEQ ID NO: 51915 - protein, 7 aa, synthetic construct
QALRPSQ

SEQ ID NO: 51916 - protein, 7 aa, synthetic construct
KTREASE

SEQ ID NO: 51917 - protein, 7 aa, synthetic construct
WMKDVKA

SEQ ID NO: 51918 - protein, 7 aa, synthetic construct
THKPQGE

SEQ ID NO: 51919 - protein, 7 aa, synthetic construct
AQAHKGN

SEQ ID NO: 51920 - protein, 7 aa, synthetic construct
DHRNGGI

SEQ ID NO: 51921 - protein, 7 aa, synthetic construct
RSTSHSF

SEQ ID NO: 51922 - protein, 7 aa, synthetic construct
PVQIGTG

SEQ ID NO: 51923 - protein, 7 aa, synthetic construct
VTPHKAN

SEQ ID NO: 51924 - protein, 7 aa, synthetic construct
NGGGWTG

SEQ ID NO: 51925 - protein, 7 aa, synthetic construct
GQKAAGG

SEQ ID NO: 51926 - protein, 7 aa, synthetic construct
MARTTQA

SEQ ID NO: 51927 - protein, 7 aa, synthetic construct
MLSGMKS

SEQ ID NO: 51928 - protein, 7 aa, synthetic construct
QKNTSTS

SEQ ID NO: 51929 - protein, 7 aa, synthetic construct
LAKYKEL

SEQ ID NO: 51930 - protein, 7 aa, synthetic construct
KHDVTGR

SEQ ID NO: 51931 - protein, 7 aa, synthetic construct
MNKTTQG

SEQ ID NO: 51932 - protein, 7 aa, synthetic construct
SPLHSGG

SEQ ID NO: 51933 - protein, 7 aa, synthetic construct
ARQQHAP

SEQ ID NO: 51934 - protein, 7 aa, synthetic construct
QYEHHHA

SEQ ID NO: 51935 - protein, 7 aa, synthetic construct
QMNMRMG

SEQ ID NO: 51936 - protein, 7 aa, synthetic construct
THMREAL

SEQ ID NO: 51937 - protein, 7 aa, synthetic construct
TQKFTSA

SEQ ID NO: 51938 - protein, 7 aa, synthetic construct
QRPTGTG

SEQ ID NO: 51939 - protein, 7 aa, synthetic construct
NSKDRTP

SEQ ID NO: 51940 - protein, 7 aa, synthetic construct
KPNGSAF

SEQ ID NO: 51941 - protein, 7 aa, synthetic construct
DFKKMPD

SEQ ID NO: 51942 - protein, 7 aa, synthetic construct
MIPNHSI

SEQ ID NO: 51943 - protein, 7 aa, synthetic construct
RSPAASV

SEQ ID NO: 51944 - protein, 7 aa, synthetic construct
SPTGKQG

SEQ ID NO: 51945 - protein, 7 aa, synthetic construct
MDLTKQM

SEQ ID NO: 51946 - protein, 7 aa, synthetic construct
LAVGSLA

SEQ ID NO: 51947 - protein, 7 aa, synthetic construct
RTNSSYI

SEQ ID NO: 51948 - protein, 7 aa, synthetic construct
QKAYSHE

SEQ ID NO: 51949 - protein, 7 aa, synthetic construct
AYSSGKS

SEQ ID NO: 51950 - protein, 7 aa, synthetic construct
IGSTRGG

SEQ ID NO: 51951 - protein, 7 aa, synthetic construct
MMQYKSE

SEQ ID NO: 51952 - protein, 7 aa, synthetic construct
TYQAKHG

SEQ ID NO: 51953 - protein, 7 aa, synthetic construct
NIPSFRP

SEQ ID NO: 51954 - protein, 7 aa, synthetic construct
GRQAAFT

SEQ ID NO: 51955 - protein, 7 aa, synthetic construct
PPSGMGG

SEQ ID NO: 51956 - protein, 7 aa, synthetic construct
TALKNGS

SEQ ID NO: 51957 - protein, 7 aa, synthetic construct
PKTNVAA

SEQ ID NO: 51958 - protein, 7 aa, synthetic construct
DRLGFQG

SEQ ID NO: 51959 - protein, 7 aa, synthetic construct
NREHKEL

SEQ ID NO: 51960 - protein, 7 aa, synthetic construct
RPTPEAM

SEQ ID NO: 51961 - protein, 7 aa, synthetic construct
KNGSGTG

SEQ ID NO: 51962 - protein, 7 aa, synthetic construct
SHVAHSA

SEQ ID NO: 51963 - protein, 7 aa, synthetic construct
LQGRGPI

SEQ ID NO: 51964 - protein, 7 aa, synthetic construct
DAVHQRP

SEQ ID NO: 51965 - protein, 7 aa, synthetic construct
NNGGKTG

SEQ ID NO: 51966 - protein, 7 aa, synthetic construct
NRTSTGV

SEQ ID NO: 51967 - protein, 7 aa, synthetic construct
TWKNNEL

SEQ ID NO: 51968 - protein, 7 aa, synthetic construct
MKSQPMT

SEQ ID NO: 51969 - protein, 7 aa, synthetic construct
VMGTTMA

SEQ ID NO: 51970 - protein, 7 aa, synthetic construct
MNPGHSM

SEQ ID NO: 51971 - protein, 7 aa, synthetic construct
SHPGNKM

SEQ ID NO: 51972 - protein, 7 aa, synthetic construct
VIPSSVG

SEQ ID NO: 51973 - protein, 7 aa, synthetic construct
KKYVEQQ

SEQ ID NO: 51974 - protein, 7 aa, synthetic construct
SYGAHKV

SEQ ID NO: 51975 - protein, 7 aa, synthetic construct
TGGQKAG

SEQ ID NO: 51976 - protein, 7 aa, synthetic construct
EPRPGMP

SEQ ID NO: 51977 - protein, 7 aa, synthetic construct
RGDKMGG

SEQ ID NO: 51978 - protein, 7 aa, synthetic construct
NSNRQGG

SEQ ID NO: 51979 - protein, 7 aa, synthetic construct
LGANSRT

SEQ ID NO: 51980 - protein, 7 aa, synthetic construct
RQNSHHG

SEQ ID NO: 51981 - protein, 7 aa, synthetic construct
EMHKSGY

SEQ ID NO: 51982 - protein, 7 aa, synthetic construct
GAMYKGE

SEQ ID NO: 51983 - protein, 7 aa, synthetic construct
SGGRMVS

SEQ ID NO: 51984 - protein, 7 aa, synthetic construct
QSRHPSA

SEQ ID NO: 51985 - protein, 7 aa, synthetic construct
GVRAHPY

SEQ ID NO: 51986 - protein, 7 aa, synthetic construct
FKNDPKN

SEQ ID NO: 51987 - protein, 7 aa, synthetic construct
RPQTSIG

SEQ ID NO: 51988 - protein, 7 aa, synthetic construct
PMSTKPN

SEQ ID NO: 51989 - protein, 7 aa, synthetic construct
AMQKMSG

SEQ ID NO: 51990 - protein, 7 aa, synthetic construct
YPYGQKN

SEQ ID NO: 51991 - protein, 7 aa, synthetic construct
FMPRVHD

SEQ ID NO: 51992 - protein, 7 aa, synthetic construct
GVQRTNS

SEQ ID NO: 51993 - protein, 7 aa, synthetic construct
YKDYNDR

SEQ ID NO: 51994 - protein, 7 aa, synthetic construct
KPSNGIE

SEQ ID NO: 51995 - protein, 7 aa, synthetic construct
PHGNYVK

SEQ ID NO: 51996 - protein, 7 aa, synthetic construct
GQGRFPH

SEQ ID NO: 51997 - protein, 7 aa, synthetic construct
NKAAGTG

SEQ ID NO: 51998 - protein, 7 aa, synthetic construct
VKNPGNA

SEQ ID NO: 51999 - protein, 7 aa, synthetic construct
MYEHKTG

SEQ ID NO: 52000 - protein, 7 aa, synthetic construct
MPRNGQS

SEQ ID NO: 52001 - protein, 7 aa, synthetic construct
INGQGAT

SEQ ID NO: 52002 - protein, 7 aa, synthetic construct
SSNSNHV

SEQ ID NO: 52003 - protein, 7 aa, synthetic construct
GLRSTTP

SEQ ID NO: 52004 - protein, 7 aa, synthetic construct
RQSAQTG

SEQ ID NO: 52005 - protein, 7 aa, synthetic construct
EPKIREM

SEQ ID NO: 52006 - protein, 7 aa, synthetic construct
NMSKPEV

SEQ ID NO: 52007 - protein, 7 aa, synthetic construct
LPTNPAS

SEQ ID NO: 52008 - protein, 7 aa, synthetic construct
AERLKNS

SEQ ID NO: 52009 - protein, 7 aa, synthetic construct
LHIGVSQ

SEQ ID NO: 52010 - protein, 7 aa, synthetic construct
NPHQKAN

SEQ ID NO: 52011 - protein, 7 aa, synthetic construct
LIAQKGY

SEQ ID NO: 52012 - protein, 7 aa, synthetic construct
MRTMSGT

SEQ ID NO: 52013 - protein, 7 aa, synthetic construct
LKGPAGG

SEQ ID NO: 52014 - protein, 7 aa, synthetic construct
HNNTFAG

SEQ ID NO: 52015 - protein, 7 aa, synthetic construct
TSKSSQG

SEQ ID NO: 52016 - protein, 7 aa, synthetic construct
KKDQARP

SEQ ID NO: 52017 - protein, 7 aa, synthetic construct
NKTFGPE

SEQ ID NO: 52018 - protein, 7 aa, synthetic construct
NKPPTGA

SEQ ID NO: 52019 - protein, 7 aa, synthetic construct
IKSSGMG

SEQ ID NO: 52020 - protein, 7 aa, synthetic construct
FKASTSP

SEQ ID NO: 52021 - protein, 7 aa, synthetic construct
KSHPAES

SEQ ID NO: 52022 - protein, 7 aa, synthetic construct
SQPYSTE

SEQ ID NO: 52023 - protein, 7 aa, synthetic construct
VRTVSGP

SEQ ID NO: 52024 - protein, 7 aa, synthetic construct
FGGAKQG

SEQ ID NO: 52025 - protein, 7 aa, synthetic construct
QQSHNSA

SEQ ID NO: 52026 - protein, 7 aa, synthetic construct
NMPERGL

SEQ ID NO: 52027 - protein, 7 aa, synthetic construct
NNPYGHG

SEQ ID NO: 52028 - protein, 7 aa, synthetic construct
VEKNSSG

SEQ ID NO: 52029 - protein, 7 aa, synthetic construct
PSRDKGA

SEQ ID NO: 52030 - protein, 7 aa, synthetic construct
SNGSAGS

SEQ ID NO: 52031 - protein, 7 aa, synthetic construct
SQKQMGG

SEQ ID NO: 52032 - protein, 7 aa, synthetic construct
SSNKALL

SEQ ID NO: 52033 - protein, 7 aa, synthetic construct
KTSMANG

SEQ ID NO: 52034 - protein, 7 aa, synthetic construct
SPPRYHA

SEQ ID NO: 52035 - protein, 7 aa, synthetic construct
WHGRDNM

SEQ ID NO: 52036 - protein, 7 aa, synthetic construct
KQAGVYE

SEQ ID NO: 52037 - protein, 7 aa, synthetic construct
MFKSGTN

SEQ ID NO: 52038 - protein, 7 aa, synthetic construct
RPSPAQG

SEQ ID NO: 52039 - protein, 7 aa, synthetic construct
LANTKQA

SEQ ID NO: 52040 - protein, 7 aa, synthetic construct
TRQAVAM

SEQ ID NO: 52041 - protein, 7 aa, synthetic construct
KERNVSS

SEQ ID NO: 52042 - protein, 7 aa, synthetic construct
KTPSMRE

SEQ ID NO: 52043 - protein, 7 aa, synthetic construct
KLFPSDE

SEQ ID NO: 52044 - protein, 7 aa, synthetic construct
QNTRQVG

SEQ ID NO: 52045 - protein, 7 aa, synthetic construct
PTKSSQS

SEQ ID NO: 52046 - protein, 7 aa, synthetic construct
DKTGKTA

SEQ ID NO: 52047 - protein, 7 aa, synthetic construct
MPDIHGR

SEQ ID NO: 52048 - protein, 7 aa, synthetic construct
VNPGLYG

SEQ ID NO: 52049 - protein, 7 aa, synthetic construct
KHPVADR

SEQ ID NO: 52050 - protein, 7 aa, synthetic construct
SKVQNNG

SEQ ID NO: 52051 - protein, 7 aa, synthetic construct
TAHSIKG

SEQ ID NO: 52052 - protein, 7 aa, synthetic construct
YDGGRIS

SEQ ID NO: 52053 - protein, 7 aa, synthetic construct
NKVEKPN

SEQ ID NO: 52054 - protein, 7 aa, synthetic construct
GYQKDVV

SEQ ID NO: 52055 - protein, 7 aa, synthetic construct
FNGRSQA

SEQ ID NO: 52056 - protein, 7 aa, synthetic construct
QPSYKND

SEQ ID NO: 52057 - protein, 7 aa, synthetic construct
GHRVGIP

SEQ ID NO: 52058 - protein, 7 aa, synthetic construct
MKGLGTT

SEQ ID NO: 52059 - protein, 7 aa, synthetic construct
SVRSGHE

SEQ ID NO: 52060 - protein, 7 aa, synthetic construct
GQNNYHL

SEQ ID NO: 52061 - protein, 7 aa, synthetic construct
KQAMITS

SEQ ID NO: 52062 - protein, 7 aa, synthetic construct
GDPARMG

SEQ ID NO: 52063 - protein, 7 aa, synthetic construct
QRNNNTA

SEQ ID NO: 52064 - protein, 7 aa, synthetic construct
MTKSQQG

SEQ ID NO: 52065 - protein, 7 aa, synthetic construct
IGNRPDY

SEQ ID NO: 52066 - protein, 7 aa, synthetic construct
GTPRGLG

SEQ ID NO: 52067 - protein, 7 aa, synthetic construct
KLAGSQG

SEQ ID NO: 52068 - protein, 7 aa, synthetic construct
NKSGSVT

SEQ ID NO: 52069 - protein, 7 aa, synthetic construct
DAPKMEK

SEQ ID NO: 52070 - protein, 7 aa, synthetic construct
ANYKTER

SEQ ID NO: 52071 - protein, 7 aa, synthetic construct
TNNRPAS

SEQ ID NO: 52072 - protein, 7 aa, synthetic construct
MKMHNNA

SEQ ID NO: 52073 - protein, 7 aa, synthetic construct
PSKMNDM

SEQ ID NO: 52074 - protein, 7 aa, synthetic construct
GKDMRAG

SEQ ID NO: 52075 - protein, 7 aa, synthetic construct
TSGKPPH

SEQ ID NO: 52076 - protein, 7 aa, synthetic construct
HSVPMDI

SEQ ID NO: 52077 - protein, 7 aa, synthetic construct
TMHVSRS

SEQ ID NO: 52078 - protein, 7 aa, synthetic construct
RVPGPGG

SEQ ID NO: 52079 - protein, 7 aa, synthetic construct
NERGGYA

SEQ ID NO: 52080 - protein, 7 aa, synthetic construct
GRAGMAF

SEQ ID NO: 52081 - protein, 7 aa, synthetic construct
PYTKLSV

SEQ ID NO: 52082 - protein, 7 aa, synthetic construct
GTQRNSG

SEQ ID NO: 52083 - protein, 7 aa, synthetic construct
TALQTSV

SEQ ID NO: 52084 - protein, 7 aa, synthetic construct
KIAATIS

SEQ ID NO: 52085 - protein, 7 aa, synthetic construct
RSSLSEA

SEQ ID NO: 52086 - protein, 7 aa, synthetic construct
DYSIKIS

SEQ ID NO: 52087 - protein, 7 aa, synthetic construct
GQPVKIY

SEQ ID NO: 52088 - protein, 7 aa, synthetic construct
PNNQKAG

SEQ ID NO: 52089 - protein, 7 aa, synthetic construct
RPSTSPE

SEQ ID NO: 52090 - protein, 7 aa, synthetic construct
QQKHTSD

SEQ ID NO: 52091 - protein, 7 aa, synthetic construct
RNSGTQP

SEQ ID NO: 52092 - protein, 7 aa, synthetic construct
FNKQSKD

SEQ ID NO: 52093 - protein, 7 aa, synthetic construct
EKKAPYG

SEQ ID NO: 52094 - protein, 7 aa, synthetic construct
APLMPMA

SEQ ID NO: 52095 - protein, 7 aa, synthetic construct
AKGTGNM

SEQ ID NO: 52096 - protein, 7 aa, synthetic construct
SGNMKGD

SEQ ID NO: 52097 - protein, 7 aa, synthetic construct
NQKMGGG

SEQ ID NO: 52098 - protein, 7 aa, synthetic construct
GTKQAQS

SEQ ID NO: 52099 - protein, 7 aa, synthetic construct
MKNNGMA

SEQ ID NO: 52100 - protein, 7 aa, synthetic construct
NNDDRRR

SEQ ID NO: 52101 - protein, 7 aa, synthetic construct
TNAGKSN

SEQ ID NO: 52102 - protein, 7 aa, synthetic construct
EPAKGRV

SEQ ID NO: 52103 - protein, 7 aa, synthetic construct
PMKQSNP

SEQ ID NO: 52104 - protein, 7 aa, synthetic construct
SKTNVSA

SEQ ID NO: 52105 - protein, 7 aa, synthetic construct
RMASGVG

SEQ ID NO: 52106 - protein, 7 aa, synthetic construct
LPLGQRD

SEQ ID NO: 52107 - protein, 7 aa, synthetic construct
SREHSTR

SEQ ID NO: 52108 - protein, 7 aa, synthetic construct
GPKEYVA

SEQ ID NO: 52109 - protein, 7 aa, synthetic construct
APKATMS

SEQ ID NO: 52110 - protein, 7 aa, synthetic construct
YHGMGMN

SEQ ID NO: 52111 - protein, 7 aa, synthetic construct
YTSQMVL

SEQ ID NO: 52112 - protein, 7 aa, synthetic construct
QQGIRIT

SEQ ID NO: 52113 - protein, 7 aa, synthetic construct
KNDKTGA

SEQ ID NO: 52114 - protein, 7 aa, synthetic construct
HQFTKIG

SEQ ID NO: 52115 - protein, 7 aa, synthetic construct
YSPAAGG

SEQ ID NO: 52116 - protein, 7 aa, synthetic construct
GMKNSAS

SEQ ID NO: 52117 - protein, 7 aa, synthetic construct
NKGEMNF

SEQ ID NO: 52118 - protein, 7 aa, synthetic construct
EDKHLRT

SEQ ID NO: 52119 - protein, 7 aa, synthetic construct
YSRQSAG

SEQ ID NO: 52120 - protein, 7 aa, synthetic construct
FGERHVG

SEQ ID NO: 52121 - protein, 7 aa, synthetic construct
HHTQIPG

SEQ ID NO: 52122 - protein, 7 aa, synthetic construct
MNKTASA

SEQ ID NO: 52123 - protein, 7 aa, synthetic construct
YKNNILI

SEQ ID NO: 52124 - protein, 7 aa, synthetic construct
RAIEGTV

SEQ ID NO: 52125 - protein, 7 aa, synthetic construct
MRNVMAE

SEQ ID NO: 52126 - protein, 7 aa, synthetic construct
YTTNGKT

SEQ ID NO: 52127 - protein, 7 aa, synthetic construct
DILSHGR

SEQ ID NO: 52128 - protein, 7 aa, synthetic construct
KNTPSAG

SEQ ID NO: 52129 - protein, 7 aa, synthetic construct
NQGKTQY

SEQ ID NO: 52130 - protein, 7 aa, synthetic construct
TFGVSRS

SEQ ID NO: 52131 - protein, 7 aa, synthetic construct
FSATKTG

SEQ ID NO: 52132 - protein, 7 aa, synthetic construct
PQRSHAL

SEQ ID NO: 52133 - protein, 7 aa, synthetic construct
WNSSHQS

SEQ ID NO: 52134 - protein, 7 aa, synthetic construct
NTYQKIT

SEQ ID NO: 52135 - protein, 7 aa, synthetic construct
LHPATPH

SEQ ID NO: 52136 - protein, 7 aa, synthetic construct
FRSQDHL

SEQ ID NO: 52137 - protein, 7 aa, synthetic construct
HRQIMGG

SEQ ID NO: 52138 - protein, 7 aa, synthetic construct
QANKVIV

SEQ ID NO: 52139 - protein, 7 aa, synthetic construct
FGVYHSA

SEQ ID NO: 52140 - protein, 7 aa, synthetic construct
NVGAKTG

SEQ ID NO: 52141 - protein, 7 aa, synthetic construct
TPARTNG

SEQ ID NO: 52142 - protein, 7 aa, synthetic construct
RHRVYDE

SEQ ID NO: 52143 - protein, 7 aa, synthetic construct
QYGPGNP

SEQ ID NO: 52144 - protein, 7 aa, synthetic construct
RNNSDYP

SEQ ID NO: 52145 - protein, 7 aa, synthetic construct
SENKTFG

SEQ ID NO: 52146 - protein, 7 aa, synthetic construct
YSQKGDK

SEQ ID NO: 52147 - protein, 7 aa, synthetic construct
KPMNTTG

SEQ ID NO: 52148 - protein, 7 aa, synthetic construct
PSSIKEF

SEQ ID NO: 52149 - protein, 7 aa, synthetic construct
NPRQTPA

SEQ ID NO: 52150 - protein, 7 aa, synthetic construct
RIDSVGH

SEQ ID NO: 52151 - protein, 7 aa, synthetic construct
MNMMRAE

SEQ ID NO: 52152 - protein, 7 aa, synthetic construct
MSTHSPK

SEQ ID NO: 52153 - protein, 7 aa, synthetic construct
MNQQTRY

SEQ ID NO: 52154 - protein, 7 aa, synthetic construct
VSGEIRA

SEQ ID NO: 52155 - protein, 7 aa, synthetic construct
TSHHSNT

SEQ ID NO: 52156 - protein, 7 aa, synthetic construct
SPKGTQG

SEQ ID NO: 52157 - protein, 7 aa, synthetic construct
TFQKNSN

SEQ ID NO: 52158 - protein, 7 aa, synthetic construct
KTPAYTA

SEQ ID NO: 52159 - protein, 7 aa, synthetic construct
TKLPHFD

SEQ ID NO: 52160 - protein, 7 aa, synthetic construct
YNGMKQG

SEQ ID NO: 52161 - protein, 7 aa, synthetic construct
NVKEQLP

SEQ ID NO: 52162 - protein, 7 aa, synthetic construct
LLPGFKQ

SEQ ID NO: 52163 - protein, 7 aa, synthetic construct
YKGPANS

SEQ ID NO: 52164 - protein, 7 aa, synthetic construct
KRQLIDG

SEQ ID NO: 52165 - protein, 7 aa, synthetic construct
RQNTGSV

SEQ ID NO: 52166 - protein, 7 aa, synthetic construct
QGSSIRQ

SEQ ID NO: 52167 - protein, 7 aa, synthetic construct
YASMHIE

SEQ ID NO: 52168 - protein, 7 aa, synthetic construct
KVAHVVA

SEQ ID NO: 52169 - protein, 7 aa, synthetic construct
SGQYTVV

SEQ ID NO: 52170 - protein, 7 aa, synthetic construct
MSKGLSG

SEQ ID NO: 52171 - protein, 7 aa, synthetic construct
VTQKHPF

SEQ ID NO: 52172 - protein, 7 aa, synthetic construct
TGKMTAP

SEQ ID NO: 52173 - protein, 7 aa, synthetic construct
YNKQSMS

SEQ ID NO: 52174 - protein, 7 aa, synthetic construct
SPPLHLT

SEQ ID NO: 52175 - protein, 7 aa, synthetic construct
TTQKGSF

SEQ ID NO: 52176 - protein, 7 aa, synthetic construct
LNLPSRA

SEQ ID NO: 52177 - protein, 7 aa, synthetic construct
ITTMNKP

SEQ ID NO: 52178 - protein, 7 aa, synthetic construct
TKRDVGG

SEQ ID NO: 52179 - protein, 7 aa, synthetic construct
KVHLDQY

SEQ ID NO: 52180 - protein, 7 aa, synthetic construct
YNNHDNH

SEQ ID NO: 52181 - protein, 7 aa, synthetic construct
QPENFRQ

SEQ ID NO: 52182 - protein, 7 aa, synthetic construct
SLVSARD

SEQ ID NO: 52183 - protein, 7 aa, synthetic construct
KGTSSSP

SEQ ID NO: 52184 - protein, 7 aa, synthetic construct
YKVSATG

SEQ ID NO: 52185 - protein, 7 aa, synthetic construct
KSPTTAA

SEQ ID NO: 52186 - protein, 7 aa, synthetic construct
KTQSSAP

SEQ ID NO: 52187 - protein, 7 aa, synthetic construct
KIIGENG

SEQ ID NO: 52188 - protein, 7 aa, synthetic construct
GVIDKRG

SEQ ID NO: 52189 - protein, 7 aa, synthetic construct
KRTSDDA

SEQ ID NO: 52190 - protein, 7 aa, synthetic construct
NKYNSQP

SEQ ID NO: 52191 - protein, 7 aa, synthetic construct
GPGAKGA

SEQ ID NO: 52192 - protein, 7 aa, synthetic construct
THTAIGH

SEQ ID NO: 52193 - protein, 7 aa, synthetic construct
NYKLNDP

SEQ ID NO: 52194 - protein, 7 aa, synthetic construct
NSNKNVW

SEQ ID NO: 52195 - protein, 7 aa, synthetic construct
QLGFDKA

SEQ ID NO: 52196 - protein, 7 aa, synthetic construct
GWGGVKE

SEQ ID NO: 52197 - protein, 7 aa, synthetic construct
RNNPGAG

SEQ ID NO: 52198 - protein, 7 aa, synthetic construct
AKEMKTS

SEQ ID NO: 52199 - protein, 7 aa, synthetic construct
PERHSGA

SEQ ID NO: 52200 - protein, 7 aa, synthetic construct
MKLGSTG

SEQ ID NO: 52201 - protein, 7 aa, synthetic construct
QKSGNNS

SEQ ID NO: 52202 - protein, 7 aa, synthetic construct
NTDIKRA

SEQ ID NO: 52203 - protein, 7 aa, synthetic construct
FARNDGG

SEQ ID NO: 52204 - protein, 7 aa, synthetic construct
HSPIHKQ

SEQ ID NO: 52205 - protein, 7 aa, synthetic construct
QVKKYPD

SEQ ID NO: 52206 - protein, 7 aa, synthetic construct
NNMKGVG

SEQ ID NO: 52207 - protein, 7 aa, synthetic construct
ATMRNIN

SEQ ID NO: 52208 - protein, 7 aa, synthetic construct
VTTRTQP

SEQ ID NO: 52209 - protein, 7 aa, synthetic construct
GPINHKD

SEQ ID NO: 52210 - protein, 7 aa, synthetic construct
INKITPF

SEQ ID NO: 52211 - protein, 7 aa, synthetic construct
MTNFNGG

SEQ ID NO: 52212 - protein, 7 aa, synthetic construct
MKASWSG

SEQ ID NO: 52213 - protein, 7 aa, synthetic construct
MNKQPVN

SEQ ID NO: 52214 - protein, 7 aa, synthetic construct
YVPHHQS

SEQ ID NO: 52215 - protein, 7 aa, synthetic construct
MQKAIVN

SEQ ID NO: 52216 - protein, 7 aa, synthetic construct
YSPQSGY

SEQ ID NO: 52217 - protein, 7 aa, synthetic construct
KTWSNEV

SEQ ID NO: 52218 - protein, 7 aa, synthetic construct
NNYKKGD

SEQ ID NO: 52219 - protein, 7 aa, synthetic construct
STKSQAS

SEQ ID NO: 52220 - protein, 7 aa, synthetic construct
EPIKHRM

SEQ ID NO: 52221 - protein, 7 aa, synthetic construct
RGHSQIE

SEQ ID NO: 52222 - protein, 7 aa, synthetic construct
WNKMEKI

SEQ ID NO: 52223 - protein, 7 aa, synthetic construct
RDPLHEF

SEQ ID NO: 52224 - protein, 7 aa, synthetic construct
IGHVEIG

SEQ ID NO: 52225 - protein, 7 aa, synthetic construct
VKSNMGA

SEQ ID NO: 52226 - protein, 7 aa, synthetic construct
APMDRAT

SEQ ID NO: 52227 - protein, 7 aa, synthetic construct
QKANGMG

SEQ ID NO: 52228 - protein, 7 aa, synthetic construct
DNTRIKS

SEQ ID NO: 52229 - protein, 7 aa, synthetic construct
HTMGATG

SEQ ID NO: 52230 - protein, 7 aa, synthetic construct
FERNHPT

SEQ ID NO: 52231 - protein, 7 aa, synthetic construct
KNFVADI

SEQ ID NO: 52232 - protein, 7 aa, synthetic construct
EKFHHEG

SEQ ID NO: 52233 - protein, 7 aa, synthetic construct
AGASAGV

SEQ ID NO: 52234 - protein, 7 aa, synthetic construct
KSDKLGG

SEQ ID NO: 52235 - protein, 7 aa, synthetic construct
GPGMTHM

SEQ ID NO: 52236 - protein, 7 aa, synthetic construct
QKNVQSA

SEQ ID NO: 52237 - protein, 7 aa, synthetic construct
TPQSHGM

SEQ ID NO: 52238 - protein, 7 aa, synthetic construct
QHGNKQW

SEQ ID NO: 52239 - protein, 7 aa, synthetic construct
IVAKYGM

SEQ ID NO: 52240 - protein, 7 aa, synthetic construct
STKYGIM

SEQ ID NO: 52241 - protein, 7 aa, synthetic construct
MSTGNSA

SEQ ID NO: 52242 - protein, 7 aa, synthetic construct
EGPRSQS

SEQ ID NO: 52243 - protein, 7 aa, synthetic construct
NTLGYTS

SEQ ID NO: 52244 - protein, 7 aa, synthetic construct
IRTNFDK

SEQ ID NO: 52245 - protein, 7 aa, synthetic construct
TAFVSGP

SEQ ID NO: 52246 - protein, 7 aa, synthetic construct
TAHREYS

SEQ ID NO: 52247 - protein, 7 aa, synthetic construct
HAVRMHG

SEQ ID NO: 52248 - protein, 7 aa, synthetic construct
GQQSRAP

SEQ ID NO: 52249 - protein, 7 aa, synthetic construct
IHNSTQT

SEQ ID NO: 52250 - protein, 7 aa, synthetic construct
RQNATTS

SEQ ID NO: 52251 - protein, 7 aa, synthetic construct
NQSQKGI

SEQ ID NO: 52252 - protein, 7 aa, synthetic construct
RDFKTEF

SEQ ID NO: 52253 - protein, 7 aa, synthetic construct
RHKEVMG

SEQ ID NO: 52254 - protein, 7 aa, synthetic construct
NGAQSKG

SEQ ID NO: 52255 - protein, 7 aa, synthetic construct
LNGRMGV

SEQ ID NO: 52256 - protein, 7 aa, synthetic construct
HHHNNIN

SEQ ID NO: 52257 - protein, 7 aa, synthetic construct
TKAGKMD

SEQ ID NO: 52258 - protein, 7 aa, synthetic construct
KGEGALG

SEQ ID NO: 52259 - protein, 7 aa, synthetic construct
KSDRSMV

SEQ ID NO: 52260 - protein, 7 aa, synthetic construct
RHELGGP

SEQ ID NO: 52261 - protein, 7 aa, synthetic construct
QAISRAD

SEQ ID NO: 52262 - protein, 7 aa, synthetic construct
GVRPEVA

SEQ ID NO: 52263 - protein, 7 aa, synthetic construct
MKPTSNT

SEQ ID NO: 52264 - protein, 7 aa, synthetic construct
MPNGNTR

SEQ ID NO: 52265 - protein, 7 aa, synthetic construct
VSKTMRE

SEQ ID NO: 52266 - protein, 7 aa, synthetic construct
GLHERHE

SEQ ID NO: 52267 - protein, 7 aa, synthetic construct
DQRMRGI

SEQ ID NO: 52268 - protein, 7 aa, synthetic construct
PLDFVKS

SEQ ID NO: 52269 - protein, 7 aa, synthetic construct
LSHLMHA

SEQ ID NO: 52270 - protein, 7 aa, synthetic construct
SASPTSK

SEQ ID NO: 52271 - protein, 7 aa, synthetic construct
TKQAAKD

SEQ ID NO: 52272 - protein, 7 aa, synthetic construct
TVMQQAS

SEQ ID NO: 52273 - protein, 7 aa, synthetic construct
EASRYIG

SEQ ID NO: 52274 - protein, 7 aa, synthetic construct
TRGSTQA

SEQ ID NO: 52275 - protein, 7 aa, synthetic construct
RANPISP

SEQ ID NO: 52276 - protein, 7 aa, synthetic construct
NKSGATN

SEQ ID NO: 52277 - protein, 7 aa, synthetic construct
NPAKSNV

SEQ ID NO: 52278 - protein, 7 aa, synthetic construct
NQHKTNV

SEQ ID NO: 52279 - protein, 7 aa, synthetic construct
RENSSSW

SEQ ID NO: 52280 - protein, 7 aa, synthetic construct
MNMGTRG

SEQ ID NO: 52281 - protein, 7 aa, synthetic construct
DRTTKVL

SEQ ID NO: 52282 - protein, 7 aa, synthetic construct
RPMNNNG

SEQ ID NO: 52283 - protein, 7 aa, synthetic construct
NSKTFKD

SEQ ID NO: 52284 - protein, 7 aa, synthetic construct
NSASEKM

SEQ ID NO: 52285 - protein, 7 aa, synthetic construct
GKTPHTA

SEQ ID NO: 52286 - protein, 7 aa, synthetic construct
QRAETTQ

SEQ ID NO: 52287 - protein, 7 aa, synthetic construct
MSHSKSG

SEQ ID NO: 52288 - protein, 7 aa, synthetic construct
EGGYPKL

SEQ ID NO: 52289 - protein, 7 aa, synthetic construct
TAHYQQT

SEQ ID NO: 52290 - protein, 7 aa, synthetic construct
MDLRERS

SEQ ID NO: 52291 - protein, 7 aa, synthetic construct
YKGTHPS

SEQ ID NO: 52292 - protein, 7 aa, synthetic construct
PRSKEGF

SEQ ID NO: 52293 - protein, 7 aa, synthetic construct
KTGTAIG

SEQ ID NO: 52294 - protein, 7 aa, synthetic construct
SYKDGQN

SEQ ID NO: 52295 - protein, 7 aa, synthetic construct
IFTKSSI

SEQ ID NO: 52296 - protein, 7 aa, synthetic construct
LRYGEQV

SEQ ID NO: 52297 - protein, 7 aa, synthetic construct
KAHDETK

SEQ ID NO: 52298 - protein, 7 aa, synthetic construct
TTSTKMG

SEQ ID NO: 52299 - protein, 7 aa, synthetic construct
KNSGGFG

SEQ ID NO: 52300 - protein, 7 aa, synthetic construct
NQKAMNV

SEQ ID NO: 52301 - protein, 7 aa, synthetic construct
NSKTSQG

SEQ ID NO: 52302 - protein, 7 aa, synthetic construct
VGSNRQG

SEQ ID NO: 52303 - protein, 7 aa, synthetic construct
TLRFTDD

SEQ ID NO: 52304 - protein, 7 aa, synthetic construct
KRDTQIA

SEQ ID NO: 52305 - protein, 7 aa, synthetic construct
FHGAPNA

SEQ ID NO: 52306 - protein, 7 aa, synthetic construct
KHYAHET

SEQ ID NO: 52307 - protein, 7 aa, synthetic construct
STTTPHI

SEQ ID NO: 52308 - protein, 7 aa, synthetic construct
KYTHPMQ

SEQ ID NO: 52309 - protein, 7 aa, synthetic construct
MKGNQTA

SEQ ID NO: 52310 - protein, 7 aa, synthetic construct
SRANTTE

SEQ ID NO: 52311 - protein, 7 aa, synthetic construct
RSTSTVG

SEQ ID NO: 52312 - protein, 7 aa, synthetic construct
TIDRAPR

SEQ ID NO: 52313 - protein, 7 aa, synthetic construct
SPFIRTD

SEQ ID NO: 52314 - protein, 7 aa, synthetic construct
ERGEGKN

SEQ ID NO: 52315 - protein, 7 aa, synthetic construct
TNGRGST

SEQ ID NO: 52316 - protein, 7 aa, synthetic construct
GTKPNQE

SEQ ID NO: 52317 - protein, 7 aa, synthetic construct
DLDRQMH

SEQ ID NO: 52318 - protein, 7 aa, synthetic construct
GKDRSGL

SEQ ID NO: 52319 - protein, 7 aa, synthetic construct
GNPQKMA

SEQ ID NO: 52320 - protein, 7 aa, synthetic construct
GGGKVMG

SEQ ID NO: 52321 - protein, 7 aa, synthetic construct
YGLSGYP

SEQ ID NO: 52322 - protein, 7 aa, synthetic construct
PKSGNLF

SEQ ID NO: 52323 - protein, 7 aa, synthetic construct
YLRRTDP

SEQ ID NO: 52324 - protein, 7 aa, synthetic construct
HGGWKGE

SEQ ID NO: 52325 - protein, 7 aa, synthetic construct
DISHGLM

SEQ ID NO: 52326 - protein, 7 aa, synthetic construct
DLGGHKN

SEQ ID NO: 52327 - protein, 7 aa, synthetic construct
TKMQMQA

SEQ ID NO: 52328 - protein, 7 aa, synthetic construct
SPTNHST

SEQ ID NO: 52329 - protein, 7 aa, synthetic construct
VGKMTAS

SEQ ID NO: 52330 - protein, 7 aa, synthetic construct
EVTQRYG

SEQ ID NO: 52331 - protein, 7 aa, synthetic construct
VPKNGAG

SEQ ID NO: 52332 - protein, 7 aa, synthetic construct
TPAAQRD

SEQ ID NO: 52333 - protein, 7 aa, synthetic construct
LMSKVGM

SEQ ID NO: 52334 - protein, 7 aa, synthetic construct
IRGSLST

SEQ ID NO: 52335 - protein, 7 aa, synthetic construct
NKSTSRE

SEQ ID NO: 52336 - protein, 7 aa, synthetic construct
PNRSTEW

SEQ ID NO: 52337 - protein, 7 aa, synthetic construct
TYPGTLS

SEQ ID NO: 52338 - protein, 7 aa, synthetic construct
DKNQHRD

SEQ ID NO: 52339 - protein, 7 aa, synthetic construct
TATQRQA

SEQ ID NO: 52340 - protein, 7 aa, synthetic construct
GAWAADK

SEQ ID NO: 52341 - protein, 7 aa, synthetic construct
TSPVVTS

SEQ ID NO: 52342 - protein, 7 aa, synthetic construct
YFKSQTM

SEQ ID NO: 52343 - protein, 7 aa, synthetic construct
YSGRSAD

SEQ ID NO: 52344 - protein, 7 aa, synthetic construct
FSMKATN

SEQ ID NO: 52345 - protein, 7 aa, synthetic construct
MHSKVGN

SEQ ID NO: 52346 - protein, 7 aa, synthetic construct
LDFGRNN

SEQ ID NO: 52347 - protein, 7 aa, synthetic construct
VIGQHLP

SEQ ID NO: 52348 - protein, 7 aa, synthetic construct
PNYPMDR

SEQ ID NO: 52349 - protein, 7 aa, synthetic construct
YPSPSMG

SEQ ID NO: 52350 - protein, 7 aa, synthetic construct
HQNVKEN

SEQ ID NO: 52351 - protein, 7 aa, synthetic construct
TMRDGHS

SEQ ID NO: 52352 - protein, 7 aa, synthetic construct
HGINMTP

SEQ ID NO: 52353 - protein, 7 aa, synthetic construct
TGTFKEP

SEQ ID NO: 52354 - protein, 7 aa, synthetic construct
SGSKTYP

SEQ ID NO: 52355 - protein, 7 aa, synthetic construct
GKEQKGS

SEQ ID NO: 52356 - protein, 7 aa, synthetic construct
PNKASAG

SEQ ID NO: 52357 - protein, 7 aa, synthetic construct
TRPAMAG

SEQ ID NO: 52358 - protein, 7 aa, synthetic construct
SKNPNTG

SEQ ID NO: 52359 - protein, 7 aa, synthetic construct
ETKFQRA

SEQ ID NO: 52360 - protein, 7 aa, synthetic construct
VGKTQSF

SEQ ID NO: 52361 - protein, 7 aa, synthetic construct
AKNTNGP

SEQ ID NO: 52362 - protein, 7 aa, synthetic construct
ASTNHQA

SEQ ID NO: 52363 - protein, 7 aa, synthetic construct
GMGPYPR

SEQ ID NO: 52364 - protein, 7 aa, synthetic construct
RNELNSM

SEQ ID NO: 52365 - protein, 7 aa, synthetic construct
KNSMGMV

SEQ ID NO: 52366 - protein, 7 aa, synthetic construct
GNKATIG

SEQ ID NO: 52367 - protein, 7 aa, synthetic construct
DDLRVKP

SEQ ID NO: 52368 - protein, 7 aa, synthetic construct
HGQQKSI

SEQ ID NO: 52369 - protein, 7 aa, synthetic construct
NLALTHG

SEQ ID NO: 52370 - protein, 7 aa, synthetic construct
AAKLPYL

SEQ ID NO: 52371 - protein, 7 aa, synthetic construct
TRPERIA

SEQ ID NO: 52372 - protein, 7 aa, synthetic construct
VKMIFGE

SEQ ID NO: 52373 - protein, 7 aa, synthetic construct
QQREVKI

SEQ ID NO: 52374 - protein, 7 aa, synthetic construct
TPQNNAP

SEQ ID NO: 52375 - protein, 7 aa, synthetic construct
SIFPGHE

SEQ ID NO: 52376 - protein, 7 aa, synthetic construct
TLDHSKS

SEQ ID NO: 52377 - protein, 7 aa, synthetic construct
NTAPKDA

SEQ ID NO: 52378 - protein, 7 aa, synthetic construct
IPNKSDH

SEQ ID NO: 52379 - protein, 7 aa, synthetic construct
MQGKMVH

SEQ ID NO: 52380 - protein, 7 aa, synthetic construct
WRETRAG

SEQ ID NO: 52381 - protein, 7 aa, synthetic construct
IGAVMVP

SEQ ID NO: 52382 - protein, 7 aa, synthetic construct
FGGSVRN

SEQ ID NO: 52383 - protein, 7 aa, synthetic construct
TSINVTP

SEQ ID NO: 52384 - protein, 7 aa, synthetic construct
NKFQGAA

SEQ ID NO: 52385 - protein, 7 aa, synthetic construct
MHKNPAI

SEQ ID NO: 52386 - protein, 7 aa, synthetic construct
NQLRGAN

SEQ ID NO: 52387 - protein, 7 aa, synthetic construct
VASMEFF

SEQ ID NO: 52388 - protein, 7 aa, synthetic construct
GAHNHAP

SEQ ID NO: 52389 - protein, 7 aa, synthetic construct
NGQKTGG

SEQ ID NO: 52390 - protein, 7 aa, synthetic construct
SSVTRSA

SEQ ID NO: 52391 - protein, 7 aa, synthetic construct
STRGVTP

SEQ ID NO: 52392 - protein, 7 aa, synthetic construct
HQPRVNN

SEQ ID NO: 52393 - protein, 7 aa, synthetic construct
PQRTTSP

SEQ ID NO: 52394 - protein, 7 aa, synthetic construct
KDKNTER

SEQ ID NO: 52395 - protein, 7 aa, synthetic construct
MLVTAGA

SEQ ID NO: 52396 - protein, 7 aa, synthetic construct
GYERLNG

SEQ ID NO: 52397 - protein, 7 aa, synthetic construct
KQAINFE

SEQ ID NO: 52398 - protein, 7 aa, synthetic construct
VPILQRD

SEQ ID NO: 52399 - protein, 7 aa, synthetic construct
AMKPPNG

SEQ ID NO: 52400 - protein, 7 aa, synthetic construct
KVRQELM

SEQ ID NO: 52401 - protein, 7 aa, synthetic construct
HTQGRAN

SEQ ID NO: 52402 - protein, 7 aa, synthetic construct
TSQQKYA

SEQ ID NO: 52403 - protein, 7 aa, synthetic construct
PRTTGLA

SEQ ID NO: 52404 - protein, 7 aa, synthetic construct
LAHMRSG

SEQ ID NO: 52405 - protein, 7 aa, synthetic construct
GLSLSSA

SEQ ID NO: 52406 - protein, 7 aa, synthetic construct
EKTNHRL

SEQ ID NO: 52407 - protein, 7 aa, synthetic construct
RAPQSNA

SEQ ID NO: 52408 - protein, 7 aa, synthetic construct
QKTVAGS

SEQ ID NO: 52409 - protein, 7 aa, synthetic construct
VNQSKFM

SEQ ID NO: 52410 - protein, 7 aa, synthetic construct
MQKNAPS

SEQ ID NO: 52411 - protein, 7 aa, synthetic construct
FKDMSRQ

SEQ ID NO: 52412 - protein, 7 aa, synthetic construct
RKLANDN

SEQ ID NO: 52413 - protein, 7 aa, synthetic construct
FKNTGNS

SEQ ID NO: 52414 - protein, 7 aa, synthetic construct
RMPNTGG

SEQ ID NO: 52415 - protein, 7 aa, synthetic construct
SDQNKQM

SEQ ID NO: 52416 - protein, 7 aa, synthetic construct
YLQRSQN

SEQ ID NO: 52417 - protein, 7 aa, synthetic construct
CPKQLCI

SEQ ID NO: 52418 - protein, 7 aa, synthetic construct
NGPMQPT

SEQ ID NO: 52419 - protein, 7 aa, synthetic construct
LHQQGTM

SEQ ID NO: 52420 - protein, 7 aa, synthetic construct
QRTPAVT

SEQ ID NO: 52421 - protein, 7 aa, synthetic construct
KQTSSQV

SEQ ID NO: 52422 - protein, 7 aa, synthetic construct
TTRSVNG

SEQ ID NO: 52423 - protein, 7 aa, synthetic construct
FAHKVDV

SEQ ID NO: 52424 - protein, 7 aa, synthetic construct
SVPRATS

SEQ ID NO: 52425 - protein, 7 aa, synthetic construct
RERSTNL

SEQ ID NO: 52426 - protein, 7 aa, synthetic construct
HGGRVDP

SEQ ID NO: 52427 - protein, 7 aa, synthetic construct
FNAKPQS

SEQ ID NO: 52428 - protein, 7 aa, synthetic construct
RDQFSRP

SEQ ID NO: 52429 - protein, 7 aa, synthetic construct
RMTTGQA

SEQ ID NO: 52430 - protein, 7 aa, synthetic construct
ANQGNPM

SEQ ID NO: 52431 - protein, 7 aa, synthetic construct
KTKMVDD

SEQ ID NO: 52432 - protein, 7 aa, synthetic construct
DQKFPKT

SEQ ID NO: 52433 - protein, 7 aa, synthetic construct
ESHFTKT

SEQ ID NO: 52434 - protein, 7 aa, synthetic construct
MGTSSTI

SEQ ID NO: 52435 - protein, 7 aa, synthetic construct
WRPEKDG

SEQ ID NO: 52436 - protein, 7 aa, synthetic construct
RIPAERF

SEQ ID NO: 52437 - protein, 7 aa, synthetic construct
SAKHVAF

SEQ ID NO: 52438 - protein, 7 aa, synthetic construct
HKTHDTS

SEQ ID NO: 52439 - protein, 7 aa, synthetic construct
RSNNMTM

SEQ ID NO: 52440 - protein, 7 aa, synthetic construct
NKGKPGE

SEQ ID NO: 52441 - protein, 7 aa, synthetic construct
GSLELKN

SEQ ID NO: 52442 - protein, 7 aa, synthetic construct
LEKRLNM

SEQ ID NO: 52443 - protein, 7 aa, synthetic construct
NKVGNNP

SEQ ID NO: 52444 - protein, 7 aa, synthetic construct
KQTATGS

SEQ ID NO: 52445 - protein, 7 aa, synthetic construct
QNATNKG

SEQ ID NO: 52446 - protein, 7 aa, synthetic construct
PQKLNGS

SEQ ID NO: 52447 - protein, 7 aa, synthetic construct
HNSPEKL

SEQ ID NO: 52448 - protein, 7 aa, synthetic construct
MKANQNN

SEQ ID NO: 52449 - protein, 7 aa, synthetic construct
DKFTSGF

SEQ ID NO: 52450 - protein, 7 aa, synthetic construct
NMFRDSI

SEQ ID NO: 52451 - protein, 7 aa, synthetic construct
HFNKNNI

SEQ ID NO: 52452 - protein, 7 aa, synthetic construct
TQKLHQM

SEQ ID NO: 52453 - protein, 7 aa, synthetic construct
MQRGIEP

SEQ ID NO: 52454 - protein, 7 aa, synthetic construct
FKKEMSG

SEQ ID NO: 52455 - protein, 7 aa, synthetic construct
KSNMNQP

SEQ ID NO: 52456 - protein, 7 aa, synthetic construct
SEQKIAY

SEQ ID NO: 52457 - protein, 7 aa, synthetic construct
NSMSRGA

SEQ ID NO: 52458 - protein, 7 aa, synthetic construct
SWAQKEE

SEQ ID NO: 52459 - protein, 7 aa, synthetic construct
TFRGQPS

SEQ ID NO: 52460 - protein, 7 aa, synthetic construct
YGSPANP

SEQ ID NO: 52461 - protein, 7 aa, synthetic construct
KQTTSSP

SEQ ID NO: 52462 - protein, 7 aa, synthetic construct
SSTKSAA

SEQ ID NO: 52463 - protein, 7 aa, synthetic construct
YIHNQPT

SEQ ID NO: 52464 - protein, 7 aa, synthetic construct
TPSKVQS

SEQ ID NO: 52465 - protein, 7 aa, synthetic construct
WGKYVHD

SEQ ID NO: 52466 - protein, 7 aa, synthetic construct
SHGHYKE

SEQ ID NO: 52467 - protein, 7 aa, synthetic construct
LDTATYK

SEQ ID NO: 52468 - protein, 7 aa, synthetic construct
ADARLAA

SEQ ID NO: 52469 - protein, 7 aa, synthetic construct
GEIIHLG

SEQ ID NO: 52470 - protein, 7 aa, synthetic construct
NRDNLTM

SEQ ID NO: 52471 - protein, 7 aa, synthetic construct
PHQVKTP

SEQ ID NO: 52472 - protein, 7 aa, synthetic construct
GNVTFPP

SEQ ID NO: 52473 - protein, 7 aa, synthetic construct
RQDIKPN

SEQ ID NO: 52474 - protein, 7 aa, synthetic construct
KAQSTQG

SEQ ID NO: 52475 - protein, 7 aa, synthetic construct
TSQKVPL

SEQ ID NO: 52476 - protein, 7 aa, synthetic construct
QTHMTER

SEQ ID NO: 52477 - protein, 7 aa, synthetic construct
MNHKAGP

SEQ ID NO: 52478 - protein, 7 aa, synthetic construct
KTNQSNS

SEQ ID NO: 52479 - protein, 7 aa, synthetic construct
LMGGSKT

SEQ ID NO: 52480 - protein, 7 aa, synthetic construct
LRNFPAG

SEQ ID NO: 52481 - protein, 7 aa, synthetic construct
PPRNTPG

SEQ ID NO: 52482 - protein, 7 aa, synthetic construct
QGMIAAG

SEQ ID NO: 52483 - protein, 7 aa, synthetic construct
PKYQPGM

SEQ ID NO: 52484 - protein, 7 aa, synthetic construct
MVSPTGV

SEQ ID NO: 52485 - protein, 7 aa, synthetic construct
KTNQTAG

SEQ ID NO: 52486 - protein, 7 aa, synthetic construct
KVSPMKD

SEQ ID NO: 52487 - protein, 7 aa, synthetic construct
SRNPTSH

SEQ ID NO: 52488 - protein, 7 aa, synthetic construct
YKAPTSG

SEQ ID NO: 52489 - protein, 7 aa, synthetic construct
DVRARHA

SEQ ID NO: 52490 - protein, 7 aa, synthetic construct
NRPSAAP

SEQ ID NO: 52491 - protein, 7 aa, synthetic construct
KITTKAE

SEQ ID NO: 52492 - protein, 7 aa, synthetic construct
THQNGVI

SEQ ID NO: 52493 - protein, 7 aa, synthetic construct
QRSEVQR

SEQ ID NO: 52494 - protein, 7 aa, synthetic construct
FAQNRDF

SEQ ID NO: 52495 - protein, 7 aa, synthetic construct
NGKSPTN

SEQ ID NO: 52496 - protein, 7 aa, synthetic construct
MTQAAVN

SEQ ID NO: 52497 - protein, 7 aa, synthetic construct
NHVAKNA

SEQ ID NO: 52498 - protein, 7 aa, synthetic construct
KQSNSQP

SEQ ID NO: 52499 - protein, 7 aa, synthetic construct
EPTKMKP

SEQ ID NO: 52500 - protein, 7 aa, synthetic construct
FKSNNNP

SEQ ID NO: 52501 - protein, 7 aa, synthetic construct
GTRATNA

SEQ ID NO: 52502 - protein, 7 aa, synthetic construct
NTPRGEF

SEQ ID NO: 52503 - protein, 7 aa, synthetic construct
KSNHETP

SEQ ID NO: 52504 - protein, 7 aa, synthetic construct
PHTNFPT

SEQ ID NO: 52505 - protein, 7 aa, synthetic construct
NRGTNGA

SEQ ID NO: 52506 - protein, 7 aa, synthetic construct
WTQTQGS

SEQ ID NO: 52507 - protein, 7 aa, synthetic construct
NNMREHV

SEQ ID NO: 52508 - protein, 7 aa, synthetic construct
MKSKYND

SEQ ID NO: 52509 - protein, 7 aa, synthetic construct
AGYKTIT

SEQ ID NO: 52510 - protein, 7 aa, synthetic construct
NRAQQNY

SEQ ID NO: 52511 - protein, 7 aa, synthetic construct
FKPSQNA

SEQ ID NO: 52512 - protein, 7 aa, synthetic construct
NYKPANA

SEQ ID NO: 52513 - protein, 7 aa, synthetic construct
VSNVTTS

SEQ ID NO: 52514 - protein, 7 aa, synthetic construct
LVDFHTG

SEQ ID NO: 52515 - protein, 7 aa, synthetic construct
MRANNSG

SEQ ID NO: 52516 - protein, 7 aa, synthetic construct
GRPLPLQ

SEQ ID NO: 52517 - protein, 7 aa, synthetic construct
KQLQQFG

SEQ ID NO: 52518 - protein, 7 aa, synthetic construct
GQMPASG

SEQ ID NO: 52519 - protein, 7 aa, synthetic construct
LAKYRDN

SEQ ID NO: 52520 - protein, 7 aa, synthetic construct
QSFDTGK

SEQ ID NO: 52521 - protein, 7 aa, synthetic construct
KGLNPTS

SEQ ID NO: 52522 - protein, 7 aa, synthetic construct
SVRDVKG

SEQ ID NO: 52523 - protein, 7 aa, synthetic construct
KTNGSVM

SEQ ID NO: 52524 - protein, 7 aa, synthetic construct
KNHVAGM

SEQ ID NO: 52525 - protein, 7 aa, synthetic construct
RNPYIAE

SEQ ID NO: 52526 - protein, 7 aa, synthetic construct
QKPHGVF

SEQ ID NO: 52527 - protein, 7 aa, synthetic construct
KNTSTSM

SEQ ID NO: 52528 - protein, 7 aa, synthetic construct
RSTTSVS

SEQ ID NO: 52529 - protein, 7 aa, synthetic construct
QNKMEKV

SEQ ID NO: 52530 - protein, 7 aa, synthetic construct
PQHHSPA

SEQ ID NO: 52531 - protein, 7 aa, synthetic construct
KGHMAVI

SEQ ID NO: 52532 - protein, 7 aa, synthetic construct
FPAGAGQ

SEQ ID NO: 52533 - protein, 7 aa, synthetic construct
RMAAGPE

SEQ ID NO: 52534 - protein, 7 aa, synthetic construct
ADHHHTL

SEQ ID NO: 52535 - protein, 7 aa, synthetic construct
SRPMAIG

SEQ ID NO: 52536 - protein, 7 aa, synthetic construct
GSGVQYK

SEQ ID NO: 52537 - protein, 7 aa, synthetic construct
SHGGPMS

SEQ ID NO: 52538 - protein, 7 aa, synthetic construct
GYKEMSY

SEQ ID NO: 52539 - protein, 7 aa, synthetic construct
SKSAVSA

SEQ ID NO: 52540 - protein, 7 aa, synthetic construct
VHVKAEF

SEQ ID NO: 52541 - protein, 7 aa, synthetic construct
LKGDGMN

SEQ ID NO: 52542 - protein, 7 aa, synthetic construct
QMRNPDM

SEQ ID NO: 52543 - protein, 7 aa, synthetic construct
QKSAGSP

SEQ ID NO: 52544 - protein, 7 aa, synthetic construct
VSQVIRT

SEQ ID NO: 52545 - protein, 7 aa, synthetic construct
APKGIPS

SEQ ID NO: 52546 - protein, 7 aa, synthetic construct
HKMNMSI

SEQ ID NO: 52547 - protein, 7 aa, synthetic construct
VRDFTQN

SEQ ID NO: 52548 - protein, 7 aa, synthetic construct
RNPQAAS

SEQ ID NO: 52549 - protein, 7 aa, synthetic construct
ILRISAA

SEQ ID NO: 52550 - protein, 7 aa, synthetic construct
RSNQSGA

SEQ ID NO: 52551 - protein, 7 aa, synthetic construct
RPGYAAE

SEQ ID NO: 52552 - protein, 7 aa, synthetic construct
AQKTTYE

SEQ ID NO: 52553 - protein, 7 aa, synthetic construct
DVRPQVS

SEQ ID NO: 52554 - protein, 7 aa, synthetic construct
TTFGQAK

SEQ ID NO: 52555 - protein, 7 aa, synthetic construct
QPGSKVG

SEQ ID NO: 52556 - protein, 7 aa, synthetic construct
SVKGDNR

SEQ ID NO: 52557 - protein, 7 aa, synthetic construct
LVPQIGG

SEQ ID NO: 52558 - protein, 7 aa, synthetic construct
KPSVVVK

SEQ ID NO: 52559 - protein, 7 aa, synthetic construct
LFGDPGG

SEQ ID NO: 52560 - protein, 7 aa, synthetic construct
MSRSSGE

SEQ ID NO: 52561 - protein, 7 aa, synthetic construct
MFKVSMA

SEQ ID NO: 52562 - protein, 7 aa, synthetic construct
FATSKNG

SEQ ID NO: 52563 - protein, 7 aa, synthetic construct
VKASMRD

SEQ ID NO: 52564 - protein, 7 aa, synthetic construct
WRHQAMD

SEQ ID NO: 52565 - protein, 7 aa, synthetic construct
FHKERGY

SEQ ID NO: 52566 - protein, 7 aa, synthetic construct
NVKVGLD

SEQ ID NO: 52567 - protein, 7 aa, synthetic construct
QSKNSSP

SEQ ID NO: 52568 - protein, 7 aa, synthetic construct
DKQPKSP

SEQ ID NO: 52569 - protein, 7 aa, synthetic construct
NNGSRMA

SEQ ID NO: 52570 - protein, 7 aa, synthetic construct
MQEGIRN

SEQ ID NO: 52571 - protein, 7 aa, synthetic construct
RDKQNMT

SEQ ID NO: 52572 - protein, 7 aa, synthetic construct
RDKQVTA

SEQ ID NO: 52573 - protein, 7 aa, synthetic construct
TASNVYK

SEQ ID NO: 52574 - protein, 7 aa, synthetic construct
AHNHNQS

SEQ ID NO: 52575 - protein, 7 aa, synthetic construct
SIANPKG

SEQ ID NO: 52576 - protein, 7 aa, synthetic construct
ASPRVND

SEQ ID NO: 52577 - protein, 7 aa, synthetic construct
LQAHRNF

SEQ ID NO: 52578 - protein, 7 aa, synthetic construct
VHNNFKG

SEQ ID NO: 52579 - protein, 7 aa, synthetic construct
TQRGQPL

SEQ ID NO: 52580 - protein, 7 aa, synthetic construct
SNASFSK

SEQ ID NO: 52581 - protein, 7 aa, synthetic construct
IHGKFHG

SEQ ID NO: 52582 - protein, 7 aa, synthetic construct
KPATALG

SEQ ID NO: 52583 - protein, 7 aa, synthetic construct
IISRGPM

SEQ ID NO: 52584 - protein, 7 aa, synthetic construct
NSTNKSN

SEQ ID NO: 52585 - protein, 7 aa, synthetic construct
YHSVQDK

SEQ ID NO: 52586 - protein, 7 aa, synthetic construct
KNTNVPA

SEQ ID NO: 52587 - protein, 7 aa, synthetic construct
QKGGMGA

SEQ ID NO: 52588 - protein, 7 aa, synthetic construct
KPMQSGS

SEQ ID NO: 52589 - protein, 7 aa, synthetic construct
TKTTTGS

SEQ ID NO: 52590 - protein, 7 aa, synthetic construct
MGNKVAH

SEQ ID NO: 52591 - protein, 7 aa, synthetic construct
NAQSRSP

SEQ ID NO: 52592 - protein, 7 aa, synthetic construct
NTQYSHM

SEQ ID NO: 52593 - protein, 7 aa, synthetic construct
DHPRGMQ

SEQ ID NO: 52594 - protein, 7 aa, synthetic construct
AKNQANG

SEQ ID NO: 52595 - protein, 7 aa, synthetic construct
RNGPASQ

SEQ ID NO: 52596 - protein, 7 aa, synthetic construct
NVTGKGV

SEQ ID NO: 52597 - protein, 7 aa, synthetic construct
KVMAGRE

SEQ ID NO: 52598 - protein, 7 aa, synthetic construct
MDIRRSP

SEQ ID NO: 52599 - protein, 7 aa, synthetic construct
PKSSGAG

SEQ ID NO: 52600 - protein, 7 aa, synthetic construct
TTRQTQS

SEQ ID NO: 52601 - protein, 7 aa, synthetic construct
RPTTSQD

SEQ ID NO: 52602 - protein, 7 aa, synthetic construct
DVYNKQH

SEQ ID NO: 52603 - protein, 7 aa, synthetic construct
VTPMVPH

SEQ ID NO: 52604 - protein, 7 aa, synthetic construct
MSKDIYA

SEQ ID NO: 52605 - protein, 7 aa, synthetic construct
MMNSKSG

SEQ ID NO: 52606 - protein, 7 aa, synthetic construct
GYAGVAP

SEQ ID NO: 52607 - protein, 7 aa, synthetic construct
REKMSIQ

SEQ ID NO: 52608 - protein, 7 aa, synthetic construct
TSSQSKA

SEQ ID NO: 52609 - protein, 7 aa, synthetic construct
PDRIQSL

SEQ ID NO: 52610 - protein, 7 aa, synthetic construct
KPPTNQS

SEQ ID NO: 52611 - protein, 7 aa, synthetic construct
GEPMKKN

SEQ ID NO: 52612 - protein, 7 aa, synthetic construct
PKGRPSE

SEQ ID NO: 52613 - protein, 7 aa, synthetic construct
WHQHPEH

SEQ ID NO: 52614 - protein, 7 aa, synthetic construct
NGQSKAA

SEQ ID NO: 52615 - protein, 7 aa, synthetic construct
KNSVVTG

SEQ ID NO: 52616 - protein, 7 aa, synthetic construct
FSNIERL

SEQ ID NO: 52617 - protein, 7 aa, synthetic construct
THAFNPA

SEQ ID NO: 52618 - protein, 7 aa, synthetic construct
HNSVEWD

SEQ ID NO: 52619 - protein, 7 aa, synthetic construct
QIKEYKS

SEQ ID NO: 52620 - protein, 7 aa, synthetic construct
APHPNFP

SEQ ID NO: 52621 - protein, 7 aa, synthetic construct
MGTFAIG

SEQ ID NO: 52622 - protein, 7 aa, synthetic construct
FKSNGPA

SEQ ID NO: 52623 - protein, 7 aa, synthetic construct
IGGKITT

SEQ ID NO: 52624 - protein, 7 aa, synthetic construct
GGKQTSA

SEQ ID NO: 52625 - protein, 7 aa, synthetic construct
IFKTAHL

SEQ ID NO: 52626 - protein, 7 aa, synthetic construct
QNMGAKG

SEQ ID NO: 52627 - protein, 7 aa, synthetic construct
LRNNGSD

SEQ ID NO: 52628 - protein, 7 aa, synthetic construct
KVPVNNK

SEQ ID NO: 52629 - protein, 7 aa, synthetic construct
PSRSMAS

SEQ ID NO: 52630 - protein, 7 aa, synthetic construct
PKAATVS

SEQ ID NO: 52631 - protein, 7 aa, synthetic construct
IRNKVET

SEQ ID NO: 52632 - protein, 7 aa, synthetic construct
HPGSPMS

SEQ ID NO: 52633 - protein, 7 aa, synthetic construct
QHVAMSP

SEQ ID NO: 52634 - protein, 7 aa, synthetic construct
RMTQPSQ

SEQ ID NO: 52635 - protein, 7 aa, synthetic construct
KQGTTNG

SEQ ID NO: 52636 - protein, 7 aa, synthetic construct
TYNKEMT

SEQ ID NO: 52637 - protein, 7 aa, synthetic construct
YNKPNTN

SEQ ID NO: 52638 - protein, 7 aa, synthetic construct
NKDTRQS

SEQ ID NO: 52639 - protein, 7 aa, synthetic construct
PKYGNGA

SEQ ID NO: 52640 - protein, 7 aa, synthetic construct
TPTFTTH

SEQ ID NO: 52641 - protein, 7 aa, synthetic construct
HARPPQL

SEQ ID NO: 52642 - protein, 7 aa, synthetic construct
QNVISVG

SEQ ID NO: 52643 - protein, 7 aa, synthetic construct
TRPNSNG

SEQ ID NO: 52644 - protein, 7 aa, synthetic construct
DRILRIS

SEQ ID NO: 52645 - protein, 7 aa, synthetic construct
HRNFHDG

SEQ ID NO: 52646 - protein, 7 aa, synthetic construct
ARSGQLQ

SEQ ID NO: 52647 - protein, 7 aa, synthetic construct
MVHQTGA

SEQ ID NO: 52648 - protein, 7 aa, synthetic construct
GRTASTG

SEQ ID NO: 52649 - protein, 7 aa, synthetic construct
VNPHSAI

SEQ ID NO: 52650 - protein, 7 aa, synthetic construct
NTGNRIP

SEQ ID NO: 52651 - protein, 7 aa, synthetic construct
QRVLTAG

SEQ ID NO: 52652 - protein, 7 aa, synthetic construct
DRAREQG

SEQ ID NO: 52653 - protein, 7 aa, synthetic construct
RTNQNGA

SEQ ID NO: 52654 - protein, 7 aa, synthetic construct
KSHGVHE

SEQ ID NO: 52655 - protein, 7 aa, synthetic construct
TKPQALT

SEQ ID NO: 52656 - protein, 7 aa, synthetic construct
RSDNVMN

SEQ ID NO: 52657 - protein, 7 aa, synthetic construct
RHEAAKD

SEQ ID NO: 52658 - protein, 7 aa, synthetic construct
GPRPVGM

SEQ ID NO: 52659 - protein, 7 aa, synthetic construct
FPTQSKE

SEQ ID NO: 52660 - protein, 7 aa, synthetic construct
RPPQDHA

SEQ ID NO: 52661 - protein, 7 aa, synthetic construct
VKGFQPD

SEQ ID NO: 52662 - protein, 7 aa, synthetic construct
QFGPTQG

SEQ ID NO: 52663 - protein, 7 aa, synthetic construct
YSKPATG

SEQ ID NO: 52664 - protein, 7 aa, synthetic construct
ADYNAKA

SEQ ID NO: 52665 - protein, 7 aa, synthetic construct
SKNPSQM

SEQ ID NO: 52666 - protein, 7 aa, synthetic construct
GRTTAMT

SEQ ID NO: 52667 - protein, 7 aa, synthetic construct
KVMPNVQ

SEQ ID NO: 52668 - protein, 7 aa, synthetic construct
GMGTGKG

SEQ ID NO: 52669 - protein, 7 aa, synthetic construct
SGYKGSV

SEQ ID NO: 52670 - protein, 7 aa, synthetic construct
ELKPHGP

SEQ ID NO: 52671 - protein, 7 aa, synthetic construct
LQQYASS

SEQ ID NO: 52672 - protein, 7 aa, synthetic construct
WKDHGAL

SEQ ID NO: 52673 - protein, 7 aa, synthetic construct
KDISHGM

SEQ ID NO: 52674 - protein, 7 aa, synthetic construct
HLAAQKP

SEQ ID NO: 52675 - protein, 7 aa, synthetic construct
TGRLYSP

SEQ ID NO: 52676 - protein, 7 aa, synthetic construct
GSQKTSP

SEQ ID NO: 52677 - protein, 7 aa, synthetic construct
ATNTGNK

SEQ ID NO: 52678 - protein, 7 aa, synthetic construct
KAAQSMG

SEQ ID NO: 52679 - protein, 7 aa, synthetic construct
QSSSMSV

SEQ ID NO: 52680 - protein, 7 aa, synthetic construct
RMSSGGA

SEQ ID NO: 52681 - protein, 7 aa, synthetic construct
IKPMNKD

SEQ ID NO: 52682 - protein, 7 aa, synthetic construct
ATNRGSN

SEQ ID NO: 52683 - protein, 7 aa, synthetic construct
TNHVSYG

SEQ ID NO: 52684 - protein, 7 aa, synthetic construct
MKGIENV

SEQ ID NO: 52685 - protein, 7 aa, synthetic construct
NKMMSLH

SEQ ID NO: 52686 - protein, 7 aa, synthetic construct
QTSKGVG

SEQ ID NO: 52687 - protein, 7 aa, synthetic construct
EGGQSRI

SEQ ID NO: 52688 - protein, 7 aa, synthetic construct
NREHQIT

SEQ ID NO: 52689 - protein, 7 aa, synthetic construct
TMGYNSA

SEQ ID NO: 52690 - protein, 7 aa, synthetic construct
NKAPPPP

SEQ ID NO: 52691 - protein, 7 aa, synthetic construct
AGGATQA

SEQ ID NO: 52692 - protein, 7 aa, synthetic construct
SPLNGGL

SEQ ID NO: 52693 - protein, 7 aa, synthetic construct
LQHLAKE

SEQ ID NO: 52694 - protein, 7 aa, synthetic construct
GREMKSW

SEQ ID NO: 52695 - protein, 7 aa, synthetic construct
YNKQGAN

SEQ ID NO: 52696 - protein, 7 aa, synthetic construct
YYHGLPV

SEQ ID NO: 52697 - protein, 7 aa, synthetic construct
FKNSGQS

SEQ ID NO: 52698 - protein, 7 aa, synthetic construct
KAPPVHD

SEQ ID NO: 52699 - protein, 7 aa, synthetic construct
QKMAPFV

SEQ ID NO: 52700 - protein, 7 aa, synthetic construct
LGHIIQN

SEQ ID NO: 52701 - protein, 7 aa, synthetic construct
YPANRGS

SEQ ID NO: 52702 - protein, 7 aa, synthetic construct
HRVEHRG

SEQ ID NO: 52703 - protein, 7 aa, synthetic construct
QTAVKSA

SEQ ID NO: 52704 - protein, 7 aa, synthetic construct
KPQTNLA

SEQ ID NO: 52705 - protein, 7 aa, synthetic construct
GSHSAMS

SEQ ID NO: 52706 - protein, 7 aa, synthetic construct
DMKGHET

SEQ ID NO: 52707 - protein, 7 aa, synthetic construct
PARGMQE

SEQ ID NO: 52708 - protein, 7 aa, synthetic construct
MVSSRGG

SEQ ID NO: 52709 - protein, 7 aa, synthetic construct
SRPHDIG

SEQ ID NO: 52710 - protein, 7 aa, synthetic construct
FVKGERS

SEQ ID NO: 52711 - protein, 7 aa, synthetic construct
NKSSQIG

SEQ ID NO: 52712 - protein, 7 aa, synthetic construct
VSGQPVK

SEQ ID NO: 52713 - protein, 7 aa, synthetic construct
GKMAAGG

SEQ ID NO: 52714 - protein, 7 aa, synthetic construct
STTNRGP

SEQ ID NO: 52715 - protein, 7 aa, synthetic construct
TKYQTID

SEQ ID NO: 52716 - protein, 7 aa, synthetic construct
IAGKRDQ

SEQ ID NO: 52717 - protein, 7 aa, synthetic construct
TVTGIHA

SEQ ID NO: 52718 - protein, 7 aa, synthetic construct
GPRTTVE

SEQ ID NO: 52719 - protein, 7 aa, synthetic construct
GHVRADT

SEQ ID NO: 52720 - protein, 7 aa, synthetic construct
VTNVRLA

SEQ ID NO: 52721 - protein, 7 aa, synthetic construct
MQVLIKE

SEQ ID NO: 52722 - protein, 7 aa, synthetic construct
SRTIGTP

SEQ ID NO: 52723 - protein, 7 aa, synthetic construct
KREVATD

SEQ ID NO: 52724 - protein, 7 aa, synthetic construct
QRTNQQS

SEQ ID NO: 52725 - protein, 7 aa, synthetic construct
KSTGTVY

SEQ ID NO: 52726 - protein, 7 aa, synthetic construct
NTRQMPY

SEQ ID NO: 52727 - protein, 7 aa, synthetic construct
QSYAKNV

SEQ ID NO: 52728 - protein, 7 aa, synthetic construct
VHGTNNA

SEQ ID NO: 52729 - protein, 7 aa, synthetic construct
YYKELAL

SEQ ID NO: 52730 - protein, 7 aa, synthetic construct
KSNTSQS

SEQ ID NO: 52731 - protein, 7 aa, synthetic construct
DKMDGVF

SEQ ID NO: 52732 - protein, 7 aa, synthetic construct
AQGGIHS

SEQ ID NO: 52733 - protein, 7 aa, synthetic construct
IGKIRAE

SEQ ID NO: 52734 - protein, 7 aa, synthetic construct
GNGKMTG

SEQ ID NO: 52735 - protein, 7 aa, synthetic construct
NGGKSTP

SEQ ID NO: 52736 - protein, 7 aa, synthetic construct
THGIPRV

SEQ ID NO: 52737 - protein, 7 aa, synthetic construct
MNGHVGV

SEQ ID NO: 52738 - protein, 7 aa, synthetic construct
MTPSRYD

SEQ ID NO: 52739 - protein, 7 aa, synthetic construct
QGGQKYP

SEQ ID NO: 52740 - protein, 7 aa, synthetic construct
GPGVFRA

SEQ ID NO: 52741 - protein, 7 aa, synthetic construct
ERKGDFS

SEQ ID NO: 52742 - protein, 7 aa, synthetic construct
GNGMNKV

SEQ ID NO: 52743 - protein, 7 aa, synthetic construct
KTRQAEG

SEQ ID NO: 52744 - protein, 7 aa, synthetic construct
QSTKMGA

SEQ ID NO: 52745 - protein, 7 aa, synthetic construct
SKWRDME

SEQ ID NO: 52746 - protein, 7 aa, synthetic construct
QQRPHAA

SEQ ID NO: 52747 - protein, 7 aa, synthetic construct
IHPQTIH

SEQ ID NO: 52748 - protein, 7 aa, synthetic construct
HIKNNNW

SEQ ID NO: 52749 - protein, 7 aa, synthetic construct
EAAGIKS

SEQ ID NO: 52750 - protein, 7 aa, synthetic construct
NFVKQQG

SEQ ID NO: 52751 - protein, 7 aa, synthetic construct
NNHVANH

SEQ ID NO: 52752 - protein, 7 aa, synthetic construct
KTTQSGG

SEQ ID NO: 52753 - protein, 7 aa, synthetic construct
GVKLVPL

SEQ ID NO: 52754 - protein, 7 aa, synthetic construct
NSKQQVP

SEQ ID NO: 52755 - protein, 7 aa, synthetic construct
FGGQTLG

SEQ ID NO: 52756 - protein, 7 aa, synthetic construct
HRHHDQP

SEQ ID NO: 52757 - protein, 7 aa, synthetic construct
VNNPRNE

SEQ ID NO: 52758 - protein, 7 aa, synthetic construct
AVGNFAK

SEQ ID NO: 52759 - protein, 7 aa, synthetic construct
VTGGVGQ

SEQ ID NO: 52760 - protein, 7 aa, synthetic construct
FAQAKQS

SEQ ID NO: 52761 - protein, 7 aa, synthetic construct
ESRSIDK

SEQ ID NO: 52762 - protein, 7 aa, synthetic construct
MTGNRQS

SEQ ID NO: 52763 - protein, 7 aa, synthetic construct
QPKQGFA

SEQ ID NO: 52764 - protein, 7 aa, synthetic construct
RPHAETP

SEQ ID NO: 52765 - protein, 7 aa, synthetic construct
VSQKIDG

SEQ ID NO: 52766 - protein, 7 aa, synthetic construct
HQQNRPD

SEQ ID NO: 52767 - protein, 7 aa, synthetic construct
AWQTSPS

SEQ ID NO: 52768 - protein, 7 aa, synthetic construct
EKRPVNQ

SEQ ID NO: 52769 - protein, 7 aa, synthetic construct
TAHGHMN

SEQ ID NO: 52770 - protein, 7 aa, synthetic construct
RGHISPD

SEQ ID NO: 52771 - protein, 7 aa, synthetic construct
SYETPKP

SEQ ID NO: 52772 - protein, 7 aa, synthetic construct
FQVASNA

SEQ ID NO: 52773 - protein, 7 aa, synthetic construct
QASVGGG

SEQ ID NO: 52774 - protein, 7 aa, synthetic construct
RNTHNVG

SEQ ID NO: 52775 - protein, 7 aa, synthetic construct
TKNAAIG

SEQ ID NO: 52776 - protein, 7 aa, synthetic construct
TQTKVGG

SEQ ID NO: 52777 - protein, 7 aa, synthetic construct
FKNAVNG

SEQ ID NO: 52778 - protein, 7 aa, synthetic construct
RGETHVG

SEQ ID NO: 52779 - protein, 7 aa, synthetic construct
MKGMSVG

SEQ ID NO: 52780 - protein, 7 aa, synthetic construct
EPRQQTT

SEQ ID NO: 52781 - protein, 7 aa, synthetic construct
NMSGMKG

SEQ ID NO: 52782 - protein, 7 aa, synthetic construct
FKAVNTD

SEQ ID NO: 52783 - protein, 7 aa, synthetic construct
MGQTMRM

SEQ ID NO: 52784 - protein, 7 aa, synthetic construct
FNNMNTG

SEQ ID NO: 52785 - protein, 7 aa, synthetic construct
HQMVGPG

SEQ ID NO: 52786 - protein, 7 aa, synthetic construct
MNQGGQR

SEQ ID NO: 52787 - protein, 7 aa, synthetic construct
GGKNVSV

SEQ ID NO: 52788 - protein, 7 aa, synthetic construct
APSVTFG

SEQ ID NO: 52789 - protein, 7 aa, synthetic construct
SSPNNIG

SEQ ID NO: 52790 - protein, 7 aa, synthetic construct
TSTAKVA

SEQ ID NO: 52791 - protein, 7 aa, synthetic construct
LVNKGTP

SEQ ID NO: 52792 - protein, 7 aa, synthetic construct
SKYGGQG

SEQ ID NO: 52793 - protein, 7 aa, synthetic construct
VQPKQYP

SEQ ID NO: 52794 - protein, 7 aa, synthetic construct
HDRVRMT

SEQ ID NO: 52795 - protein, 7 aa, synthetic construct
FRVRDEA

SEQ ID NO: 52796 - protein, 7 aa, synthetic construct
IPKTTTG

SEQ ID NO: 52797 - protein, 7 aa, synthetic construct
YRNNMPL

SEQ ID NO: 52798 - protein, 7 aa, synthetic construct
RVDGKAP

SEQ ID NO: 52799 - protein, 7 aa, synthetic construct
KNLNQSP

SEQ ID NO: 52800 - protein, 7 aa, synthetic construct
AVNNGRT

SEQ ID NO: 52801 - protein, 7 aa, synthetic construct
QYREGEK

SEQ ID NO: 52802 - protein, 7 aa, synthetic construct
NKLNPVP

SEQ ID NO: 52803 - protein, 7 aa, synthetic construct
QQHRDAR

SEQ ID NO: 52804 - protein, 7 aa, synthetic construct
SRSNQMS

SEQ ID NO: 52805 - protein, 7 aa, synthetic construct
GGMRQPD

SEQ ID NO: 52806 - protein, 7 aa, synthetic construct
GPHTHNI

SEQ ID NO: 52807 - protein, 7 aa, synthetic construct
TDIHRKD

SEQ ID NO: 52808 - protein, 7 aa, synthetic construct
MGGHIDG

SEQ ID NO: 52809 - protein, 7 aa, synthetic construct
TNASKGG

SEQ ID NO: 52810 - protein, 7 aa, synthetic construct
RGHMQAQ

SEQ ID NO: 52811 - protein, 7 aa, synthetic construct
FISGTNN

SEQ ID NO: 52812 - protein, 7 aa, synthetic construct
ESKSPRG

SEQ ID NO: 52813 - protein, 7 aa, synthetic construct
FHQAANG

SEQ ID NO: 52814 - protein, 7 aa, synthetic construct
AQNQLSP

SEQ ID NO: 52815 - protein, 7 aa, synthetic construct
VGSFIER

SEQ ID NO: 52816 - protein, 7 aa, synthetic construct
ALKPEHI

SEQ ID NO: 52817 - protein, 7 aa, synthetic construct
WSQQWPD

SEQ ID NO: 52818 - protein, 7 aa, synthetic construct
SIRYAAG

SEQ ID NO: 52819 - protein, 7 aa, synthetic construct
PKGGNAA

SEQ ID NO: 52820 - protein, 7 aa, synthetic construct
SNRAMGA

SEQ ID NO: 52821 - protein, 7 aa, synthetic construct
KYQPERI

SEQ ID NO: 52822 - protein, 7 aa, synthetic construct
DRNAHNS

SEQ ID NO: 52823 - protein, 7 aa, synthetic construct
NSKDQRA

SEQ ID NO: 52824 - protein, 7 aa, synthetic construct
TRMFKVD

SEQ ID NO: 52825 - protein, 7 aa, synthetic construct
WPEKQSQ

SEQ ID NO: 52826 - protein, 7 aa, synthetic construct
KNGSTSS

SEQ ID NO: 52827 - protein, 7 aa, synthetic construct
RGDWADG

SEQ ID NO: 52828 - protein, 7 aa, synthetic construct
GPKNTAA

SEQ ID NO: 52829 - protein, 7 aa, synthetic construct
IGDRLAM

SEQ ID NO: 52830 - protein, 7 aa, synthetic construct
GKNSTQT

SEQ ID NO: 52831 - protein, 7 aa, synthetic construct
GSHSYHT

SEQ ID NO: 52832 - protein, 7 aa, synthetic construct
QRSPMQA

SEQ ID NO: 52833 - protein, 7 aa, synthetic construct
ANNASKP

SEQ ID NO: 52834 - protein, 7 aa, synthetic construct
KRQTGDP

SEQ ID NO: 52835 - protein, 7 aa, synthetic construct
KLVGNLH

SEQ ID NO: 52836 - protein, 7 aa, synthetic construct
YRNTNHN

SEQ ID NO: 52837 - protein, 7 aa, synthetic construct
NHQMRDP

SEQ ID NO: 52838 - protein, 7 aa, synthetic construct
LTERLGT

SEQ ID NO: 52839 - protein, 7 aa, synthetic construct
EKHMVIS

SEQ ID NO: 52840 - protein, 7 aa, synthetic construct
TMKTQQA

SEQ ID NO: 52841 - protein, 7 aa, synthetic construct
VGKSVTA

SEQ ID NO: 52842 - protein, 7 aa, synthetic construct
EKSTSTA

SEQ ID NO: 52843 - protein, 7 aa, synthetic construct
FQSGYNP

SEQ ID NO: 52844 - protein, 7 aa, synthetic construct
MNNTNKL

SEQ ID NO: 52845 - protein, 7 aa, synthetic construct
EKERLSM

SEQ ID NO: 52846 - protein, 7 aa, synthetic construct
RWPEQGT

SEQ ID NO: 52847 - protein, 7 aa, synthetic construct
PRTATMG

SEQ ID NO: 52848 - protein, 7 aa, synthetic construct
HPAHVAV

SEQ ID NO: 52849 - protein, 7 aa, synthetic construct
PRNVNGL

SEQ ID NO: 52850 - protein, 7 aa, synthetic construct
GMHNSQG

SEQ ID NO: 52851 - protein, 7 aa, synthetic construct
MSQNQRV

SEQ ID NO: 52852 - protein, 7 aa, synthetic construct
SRNPGAV

SEQ ID NO: 52853 - protein, 7 aa, synthetic construct
GPSKPTT

SEQ ID NO: 52854 - protein, 7 aa, synthetic construct
FSATHVL

SEQ ID NO: 52855 - protein, 7 aa, synthetic construct
YHSNGRQ

SEQ ID NO: 52856 - protein, 7 aa, synthetic construct
EVQPKKH

SEQ ID NO: 52857 - protein, 7 aa, synthetic construct
SQAIKNN

SEQ ID NO: 52858 - protein, 7 aa, synthetic construct
HKSIGLM

SEQ ID NO: 52859 - protein, 7 aa, synthetic construct
RSTSAAP

SEQ ID NO: 52860 - protein, 7 aa, synthetic construct
RDKPTHS

SEQ ID NO: 52861 - protein, 7 aa, synthetic construct
SKGTYLT

SEQ ID NO: 52862 - protein, 7 aa, synthetic construct
VHGKALM

SEQ ID NO: 52863 - protein, 7 aa, synthetic construct
QRLGAPT

SEQ ID NO: 52864 - protein, 7 aa, synthetic construct
TKAYGLM

SEQ ID NO: 52865 - protein, 7 aa, synthetic construct
KSSHHDF

SEQ ID NO: 52866 - protein, 7 aa, synthetic construct
TNSRLSY

SEQ ID NO: 52867 - protein, 7 aa, synthetic construct
AKQASQA

SEQ ID NO: 52868 - protein, 7 aa, synthetic construct
FRSNDNN

SEQ ID NO: 52869 - protein, 7 aa, synthetic construct
PYKANQG

SEQ ID NO: 52870 - protein, 7 aa, synthetic construct
HPPIGVP

SEQ ID NO: 52871 - protein, 7 aa, synthetic construct
QLDPIKP

SEQ ID NO: 52872 - protein, 7 aa, synthetic construct
LMRPADS

SEQ ID NO: 52873 - protein, 7 aa, synthetic construct
RHNEIKA

SEQ ID NO: 52874 - protein, 7 aa, synthetic construct
KNVSSQG

SEQ ID NO: 52875 - protein, 7 aa, synthetic construct
RQSPTGA

SEQ ID NO: 52876 - protein, 7 aa, synthetic construct
NRANNGG

SEQ ID NO: 52877 - protein, 7 aa, synthetic construct
IYSNGTV

SEQ ID NO: 52878 - protein, 7 aa, synthetic construct
STRTASA

SEQ ID NO: 52879 - protein, 7 aa, synthetic construct
NVMSRST

SEQ ID NO: 52880 - protein, 7 aa, synthetic construct
VMKTQGP

SEQ ID NO: 52881 - protein, 7 aa, synthetic construct
HEPGYPG

SEQ ID NO: 52882 - protein, 7 aa, synthetic construct
GPPMKDT

SEQ ID NO: 52883 - protein, 7 aa, synthetic construct
MVPSKHD

SEQ ID NO: 52884 - protein, 7 aa, synthetic construct
MHKRNEP

SEQ ID NO: 52885 - protein, 7 aa, synthetic construct
PFKMKEF

SEQ ID NO: 52886 - protein, 7 aa, synthetic construct
QKADNSF

SEQ ID NO: 52887 - protein, 7 aa, synthetic construct
WGAKNFA

SEQ ID NO: 52888 - protein, 7 aa, synthetic construct
YTASKNG

SEQ ID NO: 52889 - protein, 7 aa, synthetic construct
WRQFQND

SEQ ID NO: 52890 - protein, 7 aa, synthetic construct
RQHNKDD

SEQ ID NO: 52891 - protein, 7 aa, synthetic construct
IKNLMGA

SEQ ID NO: 52892 - protein, 7 aa, synthetic construct
QGNNKQA

SEQ ID NO: 52893 - protein, 7 aa, synthetic construct
LHGGGVP

SEQ ID NO: 52894 - protein, 7 aa, synthetic construct
RSNSTQN

SEQ ID NO: 52895 - protein, 7 aa, synthetic construct
QAHQGPG

SEQ ID NO: 52896 - protein, 7 aa, synthetic construct
GFRGLRD

SEQ ID NO: 52897 - protein, 7 aa, synthetic construct
RPAGSAS

SEQ ID NO: 52898 - protein, 7 aa, synthetic construct
RTSTPQA

SEQ ID NO: 52899 - protein, 7 aa, synthetic construct
DGYKKSD

SEQ ID NO: 52900 - protein, 7 aa, synthetic construct
GPHTTGA

SEQ ID NO: 52901 - protein, 7 aa, synthetic construct
MMKNGSG

SEQ ID NO: 52902 - protein, 7 aa, synthetic construct
MNGRQAP

SEQ ID NO: 52903 - protein, 7 aa, synthetic construct
PRIGPEL

SEQ ID NO: 52904 - protein, 7 aa, synthetic construct
PDRQKLT

SEQ ID NO: 52905 - protein, 7 aa, synthetic construct
ISNMSAN

SEQ ID NO: 52906 - protein, 7 aa, synthetic construct
ISPRSQM

SEQ ID NO: 52907 - protein, 7 aa, synthetic construct
LMRHEQA

SEQ ID NO: 52908 - protein, 7 aa, synthetic construct
VHERRYE

SEQ ID NO: 52909 - protein, 7 aa, synthetic construct
GKMQQMS

SEQ ID NO: 52910 - protein, 7 aa, synthetic construct
PGTDPNR

SEQ ID NO: 52911 - protein, 7 aa, synthetic construct
KDLRFQG

SEQ ID NO: 52912 - protein, 7 aa, synthetic construct
GKSPQMF

SEQ ID NO: 52913 - protein, 7 aa, synthetic construct
KATQVIP

SEQ ID NO: 52914 - protein, 7 aa, synthetic construct
KQKPETN

SEQ ID NO: 52915 - protein, 7 aa, synthetic construct
PMKSQDK

SEQ ID NO: 52916 - protein, 7 aa, synthetic construct
KQDMIRG

SEQ ID NO: 52917 - protein, 7 aa, synthetic construct
VATYMHE

SEQ ID NO: 52918 - protein, 7 aa, synthetic construct
AKYEGQP

SEQ ID NO: 52919 - protein, 7 aa, synthetic construct
HKAAGQM

SEQ ID NO: 52920 - protein, 7 aa, synthetic construct
DRKTIMN

SEQ ID NO: 52921 - protein, 7 aa, synthetic construct
ASTQRTV

SEQ ID NO: 52922 - protein, 7 aa, synthetic construct
MSQNAAF

SEQ ID NO: 52923 - protein, 7 aa, synthetic construct
VKPHNHI

SEQ ID NO: 52924 - protein, 7 aa, synthetic construct
YDQSRAV

SEQ ID NO: 52925 - protein, 7 aa, synthetic construct
IKHSVEG

SEQ ID NO: 52926 - protein, 7 aa, synthetic construct
AGSLGQP

SEQ ID NO: 52927 - protein, 7 aa, synthetic construct
EKPIRSQ

SEQ ID NO: 52928 - protein, 7 aa, synthetic construct
GFSRHGG

SEQ ID NO: 52929 - protein, 7 aa, synthetic construct
RPSTSVA

SEQ ID NO: 52930 - protein, 7 aa, synthetic construct
TKQMSGM

SEQ ID NO: 52931 - protein, 7 aa, synthetic construct
FSAKATG

SEQ ID NO: 52932 - protein, 7 aa, synthetic construct
LGNISGA

SEQ ID NO: 52933 - protein, 7 aa, synthetic construct
KTSNVGY

SEQ ID NO: 52934 - protein, 7 aa, synthetic construct
KTTSTGP

SEQ ID NO: 52935 - protein, 7 aa, synthetic construct
RKDQTGA

SEQ ID NO: 52936 - protein, 7 aa, synthetic construct
QGTKKDN

SEQ ID NO: 52937 - protein, 7 aa, synthetic construct
QAQLRQD

SEQ ID NO: 52938 - protein, 7 aa, synthetic construct
ARPDAGR

SEQ ID NO: 52939 - protein, 7 aa, synthetic construct
DAHQRNA

SEQ ID NO: 52940 - protein, 7 aa, synthetic construct
GNIVPVP

SEQ ID NO: 52941 - protein, 7 aa, synthetic construct
PSINSDR

SEQ ID NO: 52942 - protein, 7 aa, synthetic construct
AAGNHSS

SEQ ID NO: 52943 - protein, 7 aa, synthetic construct
TKDYTAI

SEQ ID NO: 52944 - protein, 7 aa, synthetic construct
TKTTAVA

SEQ ID NO: 52945 - protein, 7 aa, synthetic construct
TKMANKD

SEQ ID NO: 52946 - protein, 7 aa, synthetic construct
QRPVPNS

SEQ ID NO: 52947 - protein, 7 aa, synthetic construct
RPRIENA

SEQ ID NO: 52948 - protein, 7 aa, synthetic construct
GVHFTEF

SEQ ID NO: 52949 - protein, 7 aa, synthetic construct
NKQQTGG

SEQ ID NO: 52950 - protein, 7 aa, synthetic construct
FSKEHKS

SEQ ID NO: 52951 - protein, 7 aa, synthetic construct
IPSQQKG

SEQ ID NO: 52952 - protein, 7 aa, synthetic construct
MNSSKMG

SEQ ID NO: 52953 - protein, 7 aa, synthetic construct
HGLGTSM

SEQ ID NO: 52954 - protein, 7 aa, synthetic construct
SAGNKMP

SEQ ID NO: 52955 - protein, 7 aa, synthetic construct
HFGKVPA

SEQ ID NO: 52956 - protein, 7 aa, synthetic construct
GMRQNSP

SEQ ID NO: 52957 - protein, 7 aa, synthetic construct
DKRAMQG

SEQ ID NO: 52958 - protein, 7 aa, synthetic construct
KKKEEQD

SEQ ID NO: 52959 - protein, 7 aa, synthetic construct
RNQLHTQ

SEQ ID NO: 52960 - protein, 7 aa, synthetic construct
SRDHSTM

SEQ ID NO: 52961 - protein, 7 aa, synthetic construct
NKMDKQW

SEQ ID NO: 52962 - protein, 7 aa, synthetic construct
IHGNGQS

SEQ ID NO: 52963 - protein, 7 aa, synthetic construct
TDRAKNN

SEQ ID NO: 52964 - protein, 7 aa, synthetic construct
EHRHTGG

SEQ ID NO: 52965 - protein, 7 aa, synthetic construct
TKNSATT

SEQ ID NO: 52966 - protein, 7 aa, synthetic construct
IPREASQ

SEQ ID NO: 52967 - protein, 7 aa, synthetic construct
MNKTINA

SEQ ID NO: 52968 - protein, 7 aa, synthetic construct
SAFRHEN

SEQ ID NO: 52969 - protein, 7 aa, synthetic construct
TRAYIGE

SEQ ID NO: 52970 - protein, 7 aa, synthetic construct
SHTIGRA

SEQ ID NO: 52971 - protein, 7 aa, synthetic construct
NKIGPNP

SEQ ID NO: 52972 - protein, 7 aa, synthetic construct
GHHNKGT

SEQ ID NO: 52973 - protein, 7 aa, synthetic construct
PEQRSKN

SEQ ID NO: 52974 - protein, 7 aa, synthetic construct
KGISAGA

SEQ ID NO: 52975 - protein, 7 aa, synthetic construct
DKPTHHQ

SEQ ID NO: 52976 - protein, 7 aa, synthetic construct
MGNKQSY

SEQ ID NO: 52977 - protein, 7 aa, synthetic construct
GHIGVAF

SEQ ID NO: 52978 - protein, 7 aa, synthetic construct
RKPGENG

SEQ ID NO: 52979 - protein, 7 aa, synthetic construct
GHNKPGW

SEQ ID NO: 52980 - protein, 7 aa, synthetic construct
MSQNYIA

SEQ ID NO: 52981 - protein, 7 aa, synthetic construct
GTGGKSG

SEQ ID NO: 52982 - protein, 7 aa, synthetic construct
HQDKHNG

SEQ ID NO: 52983 - protein, 7 aa, synthetic construct
LQKNMEL

SEQ ID NO: 52984 - protein, 7 aa, synthetic construct
WSNSGNL

SEQ ID NO: 52985 - protein, 7 aa, synthetic construct
MGGRISA

SEQ ID NO: 52986 - protein, 7 aa, synthetic construct
NGRNNGP

SEQ ID NO: 52987 - protein, 7 aa, synthetic construct
MVPRMEM

SEQ ID NO: 52988 - protein, 7 aa, synthetic construct
YLNQTKA

SEQ ID NO: 52989 - protein, 7 aa, synthetic construct
TKNASGS

SEQ ID NO: 52990 - protein, 7 aa, synthetic construct
YKGHPEL

SEQ ID NO: 52991 - protein, 7 aa, synthetic construct
HNRKDMV

SEQ ID NO: 52992 - protein, 7 aa, synthetic construct
IKNSPTM

SEQ ID NO: 52993 - protein, 7 aa, synthetic construct
QSITQPG

SEQ ID NO: 52994 - protein, 7 aa, synthetic construct
VGGIVPK

SEQ ID NO: 52995 - protein, 7 aa, synthetic construct
EFRQGYG

SEQ ID NO: 52996 - protein, 7 aa, synthetic construct
VLKMVDS

SEQ ID NO: 52997 - protein, 7 aa, synthetic construct
TKHMALH

SEQ ID NO: 52998 - protein, 7 aa, synthetic construct
YNGTSKG

SEQ ID NO: 52999 - protein, 7 aa, synthetic construct
RGPGVAN

SEQ ID NO: 53000 - protein, 7 aa, synthetic construct
GVKTGVG

SEQ ID NO: 53001 - protein, 7 aa, synthetic construct
HHRLPEG

SEQ ID NO: 53002 - protein, 7 aa, synthetic construct
RDNVFIG

SEQ ID NO: 53003 - protein, 7 aa, synthetic construct
TEKGKVA

SEQ ID NO: 53004 - protein, 7 aa, synthetic construct
DGRNQPQ

SEQ ID NO: 53005 - protein, 7 aa, synthetic construct
KMQGMRE

SEQ ID NO: 53006 - protein, 7 aa, synthetic construct
IADRRSA

SEQ ID NO: 53007 - protein, 7 aa, synthetic construct
YDGYKMA

SEQ ID NO: 53008 - protein, 7 aa, synthetic construct
KEARHTF

SEQ ID NO: 53009 - protein, 7 aa, synthetic construct
MASGKNG

SEQ ID NO: 53010 - protein, 7 aa, synthetic construct
KDMVKGG

SEQ ID NO: 53011 - protein, 7 aa, synthetic construct
GKGTPHV

SEQ ID NO: 53012 - protein, 7 aa, synthetic construct
PTPRTGG

SEQ ID NO: 53013 - protein, 7 aa, synthetic construct
SISGQRT

SEQ ID NO: 53014 - protein, 7 aa, synthetic construct
VNQTIKN

SEQ ID NO: 53015 - protein, 7 aa, synthetic construct
PYKMGQG

SEQ ID NO: 53016 - protein, 7 aa, synthetic construct
HGNLNRV

SEQ ID NO: 53017 - protein, 7 aa, synthetic construct
MVSGHRQ

SEQ ID NO: 53018 - protein, 7 aa, synthetic construct
GAPRTAN

SEQ ID NO: 53019 - protein, 7 aa, synthetic construct
SMGTKTT

SEQ ID NO: 53020 - protein, 7 aa, synthetic construct
VRPNQQG

SEQ ID NO: 53021 - protein, 7 aa, synthetic construct
TMMKLGD

SEQ ID NO: 53022 - protein, 7 aa, synthetic construct
VREHTRD

SEQ ID NO: 53023 - protein, 7 aa, synthetic construct
INKGWEP

SEQ ID NO: 53024 - protein, 7 aa, synthetic construct
VSEFEFY

SEQ ID NO: 53025 - protein, 7 aa, synthetic construct
GQRSDSS

SEQ ID NO: 53026 - protein, 7 aa, synthetic construct
IGMARDG

SEQ ID NO: 53027 - protein, 7 aa, synthetic construct
NKVSQSA

SEQ ID NO: 53028 - protein, 7 aa, synthetic construct
LRHGTSH

SEQ ID NO: 53029 - protein, 7 aa, synthetic construct
WKQGASY

SEQ ID NO: 53030 - protein, 7 aa, synthetic construct
TSKMGTG

SEQ ID NO: 53031 - protein, 7 aa, synthetic construct
YKTTGPG

SEQ ID NO: 53032 - protein, 7 aa, synthetic construct
KPTAAKE

SEQ ID NO: 53033 - protein, 7 aa, synthetic construct
SARGLHA

SEQ ID NO: 53034 - protein, 7 aa, synthetic construct
RPSGNGM

SEQ ID NO: 53035 - protein, 7 aa, synthetic construct
KNMGQAG

SEQ ID NO: 53036 - protein, 7 aa, synthetic construct
PLSQKNY

SEQ ID NO: 53037 - protein, 7 aa, synthetic construct
YAMANRG

SEQ ID NO: 53038 - protein, 7 aa, synthetic construct
KIPYNVN

SEQ ID NO: 53039 - protein, 7 aa, synthetic construct
LIPKKPE

SEQ ID NO: 53040 - protein, 7 aa, synthetic construct
LKMDRIA

SEQ ID NO: 53041 - protein, 7 aa, synthetic construct
SKASAIN

SEQ ID NO: 53042 - protein, 7 aa, synthetic construct
KGVQQHQ

SEQ ID NO: 53043 - protein, 7 aa, synthetic construct
SAKMSAG

SEQ ID NO: 53044 - protein, 7 aa, synthetic construct
RLGVQAA

SEQ ID NO: 53045 - protein, 7 aa, synthetic construct
FRPTKPD

SEQ ID NO: 53046 - protein, 7 aa, synthetic construct
KQNTPLP

SEQ ID NO: 53047 - protein, 7 aa, synthetic construct
QDFQNKG

SEQ ID NO: 53048 - protein, 7 aa, synthetic construct
FPKSQMG

SEQ ID NO: 53049 - protein, 7 aa, synthetic construct
GRGPIMG

SEQ ID NO: 53050 - protein, 7 aa, synthetic construct
NYTTERS

SEQ ID NO: 53051 - protein, 7 aa, synthetic construct
NPSQAYG

SEQ ID NO: 53052 - protein, 7 aa, synthetic construct
KKPDTAA

SEQ ID NO: 53053 - protein, 7 aa, synthetic construct
NPPQKNG

SEQ ID NO: 53054 - protein, 7 aa, synthetic construct
NTIGKNG

SEQ ID NO: 53055 - protein, 7 aa, synthetic construct
SRVFKLE

SEQ ID NO: 53056 - protein, 7 aa, synthetic construct
GLPRATN

SEQ ID NO: 53057 - protein, 7 aa, synthetic construct
DKGPPRE

SEQ ID NO: 53058 - protein, 7 aa, synthetic construct
GSNTNQG

SEQ ID NO: 53059 - protein, 7 aa, synthetic construct
SKNVEKS

SEQ ID NO: 53060 - protein, 7 aa, synthetic construct
KSSGGSV

SEQ ID NO: 53061 - protein, 7 aa, synthetic construct
NSAKMAG

SEQ ID NO: 53062 - protein, 7 aa, synthetic construct
KWDMGEA

SEQ ID NO: 53063 - protein, 7 aa, synthetic construct
SMKVQYA

SEQ ID NO: 53064 - protein, 7 aa, synthetic construct
MMDMARP

SEQ ID NO: 53065 - protein, 7 aa, synthetic construct
IGVVKSG

SEQ ID NO: 53066 - protein, 7 aa, synthetic construct
SKTSMPG

SEQ ID NO: 53067 - protein, 7 aa, synthetic construct
VVMNAKP

SEQ ID NO: 53068 - protein, 7 aa, synthetic construct
LPDRLQT

SEQ ID NO: 53069 - protein, 7 aa, synthetic construct
IMGKMAG

SEQ ID NO: 53070 - protein, 7 aa, synthetic construct
THNVTAY

SEQ ID NO: 53071 - protein, 7 aa, synthetic construct
KMNSMPM

SEQ ID NO: 53072 - protein, 7 aa, synthetic construct
MRIHQNA

SEQ ID NO: 53073 - protein, 7 aa, synthetic construct
LKMVKDP

SEQ ID NO: 53074 - protein, 7 aa, synthetic construct
YEKNVQN

SEQ ID NO: 53075 - protein, 7 aa, synthetic construct
SKKQGDD

SEQ ID NO: 53076 - protein, 7 aa, synthetic construct
QNVRSAP

SEQ ID NO: 53077 - protein, 7 aa, synthetic construct
FVTGSSH

SEQ ID NO: 53078 - protein, 7 aa, synthetic construct
RHMDHMG

SEQ ID NO: 53079 - protein, 7 aa, synthetic construct
NPKQSNP

SEQ ID NO: 53080 - protein, 7 aa, synthetic construct
KGAITNI

SEQ ID NO: 53081 - protein, 7 aa, synthetic construct
GDRQRND

SEQ ID NO: 53082 - protein, 7 aa, synthetic construct
QGKSMQP

SEQ ID NO: 53083 - protein, 7 aa, synthetic construct
DTSHVKQ

SEQ ID NO: 53084 - protein, 7 aa, synthetic construct
KDKQSTF

SEQ ID NO: 53085 - protein, 7 aa, synthetic construct
SRNNTGV

SEQ ID NO: 53086 - protein, 7 aa, synthetic construct
QKDSGRA

SEQ ID NO: 53087 - protein, 7 aa, synthetic construct
GNSKTTG

SEQ ID NO: 53088 - protein, 7 aa, synthetic construct
FPKNAET

SEQ ID NO: 53089 - protein, 7 aa, synthetic construct
RTDAFQP

SEQ ID NO: 53090 - protein, 7 aa, synthetic construct
SFQKSAA

SEQ ID NO: 53091 - protein, 7 aa, synthetic construct
KKENGKD

SEQ ID NO: 53092 - protein, 7 aa, synthetic construct
RQNPNMG

SEQ ID NO: 53093 - protein, 7 aa, synthetic construct
TLVHSHS

SEQ ID NO: 53094 - protein, 7 aa, synthetic construct
QRDGFNH

SEQ ID NO: 53095 - protein, 7 aa, synthetic construct
QKMGKGD

SEQ ID NO: 53096 - protein, 7 aa, synthetic construct
LSIPGQQ

SEQ ID NO: 53097 - protein, 7 aa, synthetic construct
SKTLSNM

SEQ ID NO: 53098 - protein, 7 aa, synthetic construct
RQNGNNA

SEQ ID NO: 53099 - protein, 7 aa, synthetic construct
RQPPVTG

SEQ ID NO: 53100 - protein, 7 aa, synthetic construct
SLNLGMG

SEQ ID NO: 53101 - protein, 7 aa, synthetic construct
LNEAKSY

SEQ ID NO: 53102 - protein, 7 aa, synthetic construct
KPNMVRD

SEQ ID NO: 53103 - protein, 7 aa, synthetic construct
AARTSRE

SEQ ID NO: 53104 - protein, 7 aa, synthetic construct
MHALVKE

SEQ ID NO: 53105 - protein, 7 aa, synthetic construct
YSQRGDA

SEQ ID NO: 53106 - protein, 7 aa, synthetic construct
AGPQYAH

SEQ ID NO: 53107 - protein, 7 aa, synthetic construct
NTAKAGG

SEQ ID NO: 53108 - protein, 7 aa, synthetic construct
AALGAQR

SEQ ID NO: 53109 - protein, 7 aa, synthetic construct
KTSAANP

SEQ ID NO: 53110 - protein, 7 aa, synthetic construct
KPNFSFE

SEQ ID NO: 53111 - protein, 7 aa, synthetic construct
NTRTSPF

SEQ ID NO: 53112 - protein, 7 aa, synthetic construct
GKTYPDR

SEQ ID NO: 53113 - protein, 7 aa, synthetic construct
QNASQHP

SEQ ID NO: 53114 - protein, 7 aa, synthetic construct
GQARNQP

SEQ ID NO: 53115 - protein, 7 aa, synthetic construct
GTNNHRQ

SEQ ID NO: 53116 - protein, 7 aa, synthetic construct
HSRGGIG

SEQ ID NO: 53117 - protein, 7 aa, synthetic construct
FSQDGTK

SEQ ID NO: 53118 - protein, 7 aa, synthetic construct
QSNVKTV

SEQ ID NO: 53119 - protein, 7 aa, synthetic construct
PVQHPAR

SEQ ID NO: 53120 - protein, 7 aa, synthetic construct
DMKGTVY

SEQ ID NO: 53121 - protein, 7 aa, synthetic construct
IRAGVDK

SEQ ID NO: 53122 - protein, 7 aa, synthetic construct
SSQPFPM

SEQ ID NO: 53123 - protein, 7 aa, synthetic construct
NNARSQG

SEQ ID NO: 53124 - protein, 7 aa, synthetic construct
TNKPVQG

SEQ ID NO: 53125 - protein, 7 aa, synthetic construct
YRATTGH

SEQ ID NO: 53126 - protein, 7 aa, synthetic construct
FKSTNPG

SEQ ID NO: 53127 - protein, 7 aa, synthetic construct
KSTGMNS

SEQ ID NO: 53128 - protein, 7 aa, synthetic construct
PKIGMPD

SEQ ID NO: 53129 - protein, 7 aa, synthetic construct
MATSRAS

SEQ ID NO: 53130 - protein, 7 aa, synthetic construct
GKVAKGE

SEQ ID NO: 53131 - protein, 7 aa, synthetic construct
NATHAQS

SEQ ID NO: 53132 - protein, 7 aa, synthetic construct
KQTQGTA

SEQ ID NO: 53133 - protein, 7 aa, synthetic construct
LTTNGQQ

SEQ ID NO: 53134 - protein, 7 aa, synthetic construct
QRGGNQG

SEQ ID NO: 53135 - protein, 7 aa, synthetic construct
TKMVNAD

SEQ ID NO: 53136 - protein, 7 aa, synthetic construct
MGKMPHA

SEQ ID NO: 53137 - protein, 7 aa, synthetic construct
RYHQGQP

SEQ ID NO: 53138 - protein, 7 aa, synthetic construct
QENDRKR

SEQ ID NO: 53139 - protein, 7 aa, synthetic construct
TFTGKTY

SEQ ID NO: 53140 - protein, 7 aa, synthetic construct
DARSNHT

SEQ ID NO: 53141 - protein, 7 aa, synthetic construct
FKDQWKV

SEQ ID NO: 53142 - protein, 7 aa, synthetic construct
LQFAKRE

SEQ ID NO: 53143 - protein, 7 aa, synthetic construct
TGKDRQN

SEQ ID NO: 53144 - protein, 7 aa, synthetic construct
THREIIT

SEQ ID NO: 53145 - protein, 7 aa, synthetic construct
KATSSAP

SEQ ID NO: 53146 - protein, 7 aa, synthetic construct
FVNHKDA

SEQ ID NO: 53147 - protein, 7 aa, synthetic construct
IPQERKY

SEQ ID NO: 53148 - protein, 7 aa, synthetic construct
YGKNTQN

SEQ ID NO: 53149 - protein, 7 aa, synthetic construct
RANWHNE

SEQ ID NO: 53150 - protein, 7 aa, synthetic construct
VNARGQA

SEQ ID NO: 53151 - protein, 7 aa, synthetic construct
FEAPNRR

SEQ ID NO: 53152 - protein, 7 aa, synthetic construct
NSRAQGG

SEQ ID NO: 53153 - protein, 7 aa, synthetic construct
HTRDIPP

SEQ ID NO: 53154 - protein, 7 aa, synthetic construct
PRAMNNP

SEQ ID NO: 53155 - protein, 7 aa, synthetic construct
MVKAPKV

SEQ ID NO: 53156 - protein, 7 aa, synthetic construct
IDQQKSY

SEQ ID NO: 53157 - protein, 7 aa, synthetic construct
QAMRAAD

SEQ ID NO: 53158 - protein, 7 aa, synthetic construct
SMNGKTG

SEQ ID NO: 53159 - protein, 7 aa, synthetic construct
ARKMTDG

SEQ ID NO: 53160 - protein, 7 aa, synthetic construct
NMKNSSG

SEQ ID NO: 53161 - protein, 7 aa, synthetic construct
VDRSKLY

SEQ ID NO: 53162 - protein, 7 aa, synthetic construct
LNRVNAM

SEQ ID NO: 53163 - protein, 7 aa, synthetic construct
LHRELNV

SEQ ID NO: 53164 - protein, 7 aa, synthetic construct
KTQNPMI

SEQ ID NO: 53165 - protein, 7 aa, synthetic construct
GPHKSGA

SEQ ID NO: 53166 - protein, 7 aa, synthetic construct
NIVGKGS

SEQ ID NO: 53167 - protein, 7 aa, synthetic construct
QRNNSGG

SEQ ID NO: 53168 - protein, 7 aa, synthetic construct
PSKQSGS

SEQ ID NO: 53169 - protein, 7 aa, synthetic construct
KVMNGLV

SEQ ID NO: 53170 - protein, 7 aa, synthetic construct
FKAAANN

SEQ ID NO: 53171 - protein, 7 aa, synthetic construct
RMNSNQN

SEQ ID NO: 53172 - protein, 7 aa, synthetic construct
GKQNTVG

SEQ ID NO: 53173 - protein, 7 aa, synthetic construct
MKSGAMG

SEQ ID NO: 53174 - protein, 7 aa, synthetic construct
YFQNQQV

SEQ ID NO: 53175 - protein, 7 aa, synthetic construct
SQMKGSA

SEQ ID NO: 53176 - protein, 7 aa, synthetic construct
TFHKSVE

SEQ ID NO: 53177 - protein, 7 aa, synthetic construct
GKSTTPS

SEQ ID NO: 53178 - protein, 7 aa, synthetic construct
EKQNPPQ

SEQ ID NO: 53179 - protein, 7 aa, synthetic construct
VNQKFVM

SEQ ID NO: 53180 - protein, 7 aa, synthetic construct
NRPTTVG

SEQ ID NO: 53181 - protein, 7 aa, synthetic construct
SPHSPEK

SEQ ID NO: 53182 - protein, 7 aa, synthetic construct
FGRTSGD

SEQ ID NO: 53183 - protein, 7 aa, synthetic construct
HHPLTVP

SEQ ID NO: 53184 - protein, 7 aa, synthetic construct
NKGTNSP

SEQ ID NO: 53185 - protein, 7 aa, synthetic construct
LTPAKQV

SEQ ID NO: 53186 - protein, 7 aa, synthetic construct
NQLHSGH

SEQ ID NO: 53187 - protein, 7 aa, synthetic construct
QWGSGGA

SEQ ID NO: 53188 - protein, 7 aa, synthetic construct
ERHANHG

SEQ ID NO: 53189 - protein, 7 aa, synthetic construct
RMSMEAG

SEQ ID NO: 53190 - protein, 7 aa, synthetic construct
RTNTGQP

SEQ ID NO: 53191 - protein, 7 aa, synthetic construct
MPRGGMA

SEQ ID NO: 53192 - protein, 7 aa, synthetic construct
NQNFGLG

SEQ ID NO: 53193 - protein, 7 aa, synthetic construct
FSTGSPA

SEQ ID NO: 53194 - protein, 7 aa, synthetic construct
FERLTVN

SEQ ID NO: 53195 - protein, 7 aa, synthetic construct
TQKAMAG

SEQ ID NO: 53196 - protein, 7 aa, synthetic construct
HALLTSG

SEQ ID NO: 53197 - protein, 7 aa, synthetic construct
VKASENW

SEQ ID NO: 53198 - protein, 7 aa, synthetic construct
KNDRSQV

SEQ ID NO: 53199 - protein, 7 aa, synthetic construct
HEPKMTP

SEQ ID NO: 53200 - protein, 7 aa, synthetic construct
TNKAGAG

SEQ ID NO: 53201 - protein, 7 aa, synthetic construct
QKSSIMG

SEQ ID NO: 53202 - protein, 7 aa, synthetic construct
SISLRHG

SEQ ID NO: 53203 - protein, 7 aa, synthetic construct
ENRPHQA

SEQ ID NO: 53204 - protein, 7 aa, synthetic construct
TDSKPYV

SEQ ID NO: 53205 - protein, 7 aa, synthetic construct
NPQRASA

SEQ ID NO: 53206 - protein, 7 aa, synthetic construct
RLDRNQG

SEQ ID NO: 53207 - protein, 7 aa, synthetic construct
KTVNSGG

SEQ ID NO: 53208 - protein, 7 aa, synthetic construct
DRVARFE

SEQ ID NO: 53209 - protein, 7 aa, synthetic construct
IPGHEMR

SEQ ID NO: 53210 - protein, 7 aa, synthetic construct
QAQSHAA

SEQ ID NO: 53211 - protein, 7 aa, synthetic construct
FKDHVLG

SEQ ID NO: 53212 - protein, 7 aa, synthetic construct
RQNFDNT

SEQ ID NO: 53213 - protein, 7 aa, synthetic construct
AEFHGKS

SEQ ID NO: 53214 - protein, 7 aa, synthetic construct
TWEMSKE

SEQ ID NO: 53215 - protein, 7 aa, synthetic construct
KIQANPT

SEQ ID NO: 53216 - protein, 7 aa, synthetic construct
MKTMGQA

SEQ ID NO: 53217 - protein, 7 aa, synthetic construct
KYSSNVA

SEQ ID NO: 53218 - protein, 7 aa, synthetic construct
NKPIGIA

SEQ ID NO: 53219 - protein, 7 aa, synthetic construct
FIYSENS

SEQ ID NO: 53220 - protein, 7 aa, synthetic construct
PHYSKQG

SEQ ID NO: 53221 - protein, 7 aa, synthetic construct
TSKSTSG

SEQ ID NO: 53222 - protein, 7 aa, synthetic construct
IQKVSEN

SEQ ID NO: 53223 - protein, 7 aa, synthetic construct
QKDQLVR

SEQ ID NO: 53224 - protein, 7 aa, synthetic construct
WPEVSNM

SEQ ID NO: 53225 - protein, 7 aa, synthetic construct
NNTNRIA

SEQ ID NO: 53226 - protein, 7 aa, synthetic construct
MKANNNP

SEQ ID NO: 53227 - protein, 7 aa, synthetic construct
TKGNMTS

SEQ ID NO: 53228 - protein, 7 aa, synthetic construct
AQWQGGK

SEQ ID NO: 53229 - protein, 7 aa, synthetic construct
IQPQQGV

SEQ ID NO: 53230 - protein, 7 aa, synthetic construct
DNPSRSV

SEQ ID NO: 53231 - protein, 7 aa, synthetic construct
TFNPKIG

SEQ ID NO: 53232 - protein, 7 aa, synthetic construct
HRHVDNT

SEQ ID NO: 53233 - protein, 7 aa, synthetic construct
LVTSVRP

SEQ ID NO: 53234 - protein, 7 aa, synthetic construct
GPGKMVG

SEQ ID NO: 53235 - protein, 7 aa, synthetic construct
NATQRGT

SEQ ID NO: 53236 - protein, 7 aa, synthetic construct
KKDAHAN

SEQ ID NO: 53237 - protein, 7 aa, synthetic construct
NNYTKHQ

SEQ ID NO: 53238 - protein, 7 aa, synthetic construct
RPLGGID

SEQ ID NO: 53239 - protein, 7 aa, synthetic construct
NQKMSNG

SEQ ID NO: 53240 - protein, 7 aa, synthetic construct
RQSNTNA

SEQ ID NO: 53241 - protein, 7 aa, synthetic construct
SKSGFVG

SEQ ID NO: 53242 - protein, 7 aa, synthetic construct
ATRGTQA

SEQ ID NO: 53243 - protein, 7 aa, synthetic construct
NKTSKET

SEQ ID NO: 53244 - protein, 7 aa, synthetic construct
GGRANAD

SEQ ID NO: 53245 - protein, 7 aa, synthetic construct
FDKISMG

SEQ ID NO: 53246 - protein, 7 aa, synthetic construct
PLRDPIR

SEQ ID NO: 53247 - protein, 7 aa, synthetic construct
VTTTGAK

SEQ ID NO: 53248 - protein, 7 aa, synthetic construct
APIGNRP

SEQ ID NO: 53249 - protein, 7 aa, synthetic construct
NQKMTNG

SEQ ID NO: 53250 - protein, 7 aa, synthetic construct
RETHTIT

SEQ ID NO: 53251 - protein, 7 aa, synthetic construct
SEPRGNV

SEQ ID NO: 53252 - protein, 7 aa, synthetic construct
YKPAVVV

SEQ ID NO: 53253 - protein, 7 aa, synthetic construct
PNNKGMA

SEQ ID NO: 53254 - protein, 7 aa, synthetic construct
QNNSNIY

SEQ ID NO: 53255 - protein, 7 aa, synthetic construct
PNFKDAG

SEQ ID NO: 53256 - protein, 7 aa, synthetic construct
KNYKEIG

SEQ ID NO: 53257 - protein, 7 aa, synthetic construct
EWSRGEA

SEQ ID NO: 53258 - protein, 7 aa, synthetic construct
PSIRSNS

SEQ ID NO: 53259 - protein, 7 aa, synthetic construct
GRPAEAA

SEQ ID NO: 53260 - protein, 7 aa, synthetic construct
PRQGSTG

SEQ ID NO: 53261 - protein, 7 aa, synthetic construct
QLGFKMN

SEQ ID NO: 53262 - protein, 7 aa, synthetic construct
HNPMGKQ

SEQ ID NO: 53263 - protein, 7 aa, synthetic construct
FKNNSGP

SEQ ID NO: 53264 - protein, 7 aa, synthetic construct
IDNWKKS

SEQ ID NO: 53265 - protein, 7 aa, synthetic construct
NSKIGMG

SEQ ID NO: 53266 - protein, 7 aa, synthetic construct
RAYKADA

SEQ ID NO: 53267 - protein, 7 aa, synthetic construct
AERGHHG

SEQ ID NO: 53268 - protein, 7 aa, synthetic construct
HHPASIS

SEQ ID NO: 53269 - protein, 7 aa, synthetic construct
LITGRET

SEQ ID NO: 53270 - protein, 7 aa, synthetic construct
LPELPMN

SEQ ID NO: 53271 - protein, 7 aa, synthetic construct
KELHGHD

SEQ ID NO: 53272 - protein, 7 aa, synthetic construct
HAPELHY

SEQ ID NO: 53273 - protein, 7 aa, synthetic construct
QILRSKD

SEQ ID NO: 53274 - protein, 7 aa, synthetic construct
HFHNHDS

SEQ ID NO: 53275 - protein, 7 aa, synthetic construct
LSNSQKL

SEQ ID NO: 53276 - protein, 7 aa, synthetic construct
TSISGKA

SEQ ID NO: 53277 - protein, 7 aa, synthetic construct
KVGANQP

SEQ ID NO: 53278 - protein, 7 aa, synthetic construct
GKVSNTG

SEQ ID NO: 53279 - protein, 7 aa, synthetic construct
GAPGPRN

SEQ ID NO: 53280 - protein, 7 aa, synthetic construct
IPSQLKS

SEQ ID NO: 53281 - protein, 7 aa, synthetic construct
TANYNKA

SEQ ID NO: 53282 - protein, 7 aa, synthetic construct
PSQNGPS

SEQ ID NO: 53283 - protein, 7 aa, synthetic construct
EGQRRMD

SEQ ID NO: 53284 - protein, 7 aa, synthetic construct
VNGKQAA

SEQ ID NO: 53285 - protein, 7 aa, synthetic construct
MDARQKQ

SEQ ID NO: 53286 - protein, 7 aa, synthetic construct
LTGAKSG

SEQ ID NO: 53287 - protein, 7 aa, synthetic construct
SKSNYGA

SEQ ID NO: 53288 - protein, 7 aa, synthetic construct
QRAASGT

SEQ ID NO: 53289 - protein, 7 aa, synthetic construct
TKQTPAA

SEQ ID NO: 53290 - protein, 7 aa, synthetic construct
RPSQGFA

SEQ ID NO: 53291 - protein, 7 aa, synthetic construct
TKKDGQA

SEQ ID NO: 53292 - protein, 7 aa, synthetic construct
KPSTLAP

SEQ ID NO: 53293 - protein, 7 aa, synthetic construct
LRSAMQD

SEQ ID NO: 53294 - protein, 7 aa, synthetic construct
DIQRKFM

SEQ ID NO: 53295 - protein, 7 aa, synthetic construct
KNGNSGQ

SEQ ID NO: 53296 - protein, 7 aa, synthetic construct
INNLNSV

SEQ ID NO: 53297 - protein, 7 aa, synthetic construct
TRNTDVT

SEQ ID NO: 53298 - protein, 7 aa, synthetic construct
RKDGNII

SEQ ID NO: 53299 - protein, 7 aa, synthetic construct
SLSHATG

SEQ ID NO: 53300 - protein, 7 aa, synthetic construct
QASQGRA

SEQ ID NO: 53301 - protein, 7 aa, synthetic construct
WKSHMDT

SEQ ID NO: 53302 - protein, 7 aa, synthetic construct
QGAHQSP

SEQ ID NO: 53303 - protein, 7 aa, synthetic construct
GSRTEGA

SEQ ID NO: 53304 - protein, 7 aa, synthetic construct
SPNGKSA

SEQ ID NO: 53305 - protein, 7 aa, synthetic construct
IKGDKNS

SEQ ID NO: 53306 - protein, 7 aa, synthetic construct
ALGPRHE

SEQ ID NO: 53307 - protein, 7 aa, synthetic construct
PASGKLS

SEQ ID NO: 53308 - protein, 7 aa, synthetic construct
MGPNHMG

SEQ ID NO: 53309 - protein, 7 aa, synthetic construct
GSFKQVT

SEQ ID NO: 53310 - protein, 7 aa, synthetic construct
RGGQRSE

SEQ ID NO: 53311 - protein, 7 aa, synthetic construct
QLPAKYQ

SEQ ID NO: 53312 - protein, 7 aa, synthetic construct
QSNRTVV

SEQ ID NO: 53313 - protein, 7 aa, synthetic construct
YTKREES

SEQ ID NO: 53314 - protein, 7 aa, synthetic construct
KSPPHGT

SEQ ID NO: 53315 - protein, 7 aa, synthetic construct
RREMQTP

SEQ ID NO: 53316 - protein, 7 aa, synthetic construct
FRAGVIN

SEQ ID NO: 53317 - protein, 7 aa, synthetic construct
SNPHVVN

SEQ ID NO: 53318 - protein, 7 aa, synthetic construct
FSSHSSG

SEQ ID NO: 53319 - protein, 7 aa, synthetic construct
MKPSTRE

SEQ ID NO: 53320 - protein, 7 aa, synthetic construct
TKTNNQA

SEQ ID NO: 53321 - protein, 7 aa, synthetic construct
RLINGIQ

SEQ ID NO: 53322 - protein, 7 aa, synthetic construct
MNGTAKI

SEQ ID NO: 53323 - protein, 7 aa, synthetic construct
SGQSKEV

SEQ ID NO: 53324 - protein, 7 aa, synthetic construct
MRHDANY

SEQ ID NO: 53325 - protein, 7 aa, synthetic construct
TSTPQKQ

SEQ ID NO: 53326 - protein, 7 aa, synthetic construct
TKMSMQA

SEQ ID NO: 53327 - protein, 7 aa, synthetic construct
NVRQGYA

SEQ ID NO: 53328 - protein, 7 aa, synthetic construct
SSAKTTG

SEQ ID NO: 53329 - protein, 7 aa, synthetic construct
QQMAMKP

SEQ ID NO: 53330 - protein, 7 aa, synthetic construct
AKPNGSA

SEQ ID NO: 53331 - protein, 7 aa, synthetic construct
GMKNQGG

SEQ ID NO: 53332 - protein, 7 aa, synthetic construct
GKLPKTE

SEQ ID NO: 53333 - protein, 7 aa, synthetic construct
PPAKGAG

SEQ ID NO: 53334 - protein, 7 aa, synthetic construct
GPTYQTS

SEQ ID NO: 53335 - protein, 7 aa, synthetic construct
RSNEPYP

SEQ ID NO: 53336 - protein, 7 aa, synthetic construct
TEIKPTL

SEQ ID NO: 53337 - protein, 7 aa, synthetic construct
WERQSLQ

SEQ ID NO: 53338 - protein, 7 aa, synthetic construct
ELRLSHS

SEQ ID NO: 53339 - protein, 7 aa, synthetic construct
MKTRVME

SEQ ID NO: 53340 - protein, 7 aa, synthetic construct
KVAMNKV

SEQ ID NO: 53341 - protein, 7 aa, synthetic construct
LSNLGKF

SEQ ID NO: 53342 - protein, 7 aa, synthetic construct
NAIAAPA

SEQ ID NO: 53343 - protein, 7 aa, synthetic construct
YSTSSRE

SEQ ID NO: 53344 - protein, 7 aa, synthetic construct
YKGSAMG

SEQ ID NO: 53345 - protein, 7 aa, synthetic construct
FQSQGHR

SEQ ID NO: 53346 - protein, 7 aa, synthetic construct
SKATANA

SEQ ID NO: 53347 - protein, 7 aa, synthetic construct
RDKIIHP

SEQ ID NO: 53348 - protein, 7 aa, synthetic construct
KHSNYDH

SEQ ID NO: 53349 - protein, 7 aa, synthetic construct
VWGKEVK

SEQ ID NO: 53350 - protein, 7 aa, synthetic construct
AVKGTLF

SEQ ID NO: 53351 - protein, 7 aa, synthetic construct
NKDGRAG

SEQ ID NO: 53352 - protein, 7 aa, synthetic construct
KTSASPV

SEQ ID NO: 53353 - protein, 7 aa, synthetic construct
KSTTNSP

SEQ ID NO: 53354 - protein, 7 aa, synthetic construct
VPHEKNH

SEQ ID NO: 53355 - protein, 7 aa, synthetic construct
FSPRPHS

SEQ ID NO: 53356 - protein, 7 aa, synthetic construct
AHMHKTG

SEQ ID NO: 53357 - protein, 7 aa, synthetic construct
KINSTVL

SEQ ID NO: 53358 - protein, 7 aa, synthetic construct
RASMTTA

SEQ ID NO: 53359 - protein, 7 aa, synthetic construct
GKIKISE

SEQ ID NO: 53360 - protein, 7 aa, synthetic construct
NRVPSTP

SEQ ID NO: 53361 - protein, 7 aa, synthetic construct
RLPILGD

SEQ ID NO: 53362 - protein, 7 aa, synthetic construct
KTGFKPE

SEQ ID NO: 53363 - protein, 7 aa, synthetic construct
KEQYSGG

SEQ ID NO: 53364 - protein, 7 aa, synthetic construct
QKHSQMV

SEQ ID NO: 53365 - protein, 7 aa, synthetic construct
MKNVGRD

SEQ ID NO: 53366 - protein, 7 aa, synthetic construct
KGSIGAV

SEQ ID NO: 53367 - protein, 7 aa, synthetic construct
SSKQGTA

SEQ ID NO: 53368 - protein, 7 aa, synthetic construct
RGPSGTA

SEQ ID NO: 53369 - protein, 7 aa, synthetic construct
IDYKSRT

SEQ ID NO: 53370 - protein, 7 aa, synthetic construct
LPHKGND

SEQ ID NO: 53371 - protein, 7 aa, synthetic construct
KFGKNEH

SEQ ID NO: 53372 - protein, 7 aa, synthetic construct
FFKRDDE

SEQ ID NO: 53373 - protein, 7 aa, synthetic construct
TQTKVTE

SEQ ID NO: 53374 - protein, 7 aa, synthetic construct
VGNVPVG

SEQ ID NO: 53375 - protein, 7 aa, synthetic construct
TGQKVSG

SEQ ID NO: 53376 - protein, 7 aa, synthetic construct
HDARHIV

SEQ ID NO: 53377 - protein, 7 aa, synthetic construct
SRIQTVP

SEQ ID NO: 53378 - protein, 7 aa, synthetic construct
PSHTNLG

SEQ ID NO: 53379 - protein, 7 aa, synthetic construct
RNMQSVE

SEQ ID NO: 53380 - protein, 7 aa, synthetic construct
LHKKVDQ

SEQ ID NO: 53381 - protein, 7 aa, synthetic construct
FGSTNGS

SEQ ID NO: 53382 - protein, 7 aa, synthetic construct
TYQRGRD

SEQ ID NO: 53383 - protein, 7 aa, synthetic construct
GPRNATG

SEQ ID NO: 53384 - protein, 7 aa, synthetic construct
SGSRMTF

SEQ ID NO: 53385 - protein, 7 aa, synthetic construct
DSSTNLG

SEQ ID NO: 53386 - protein, 7 aa, synthetic construct
NKWNPAD

SEQ ID NO: 53387 - protein, 7 aa, synthetic construct
PAKSSPA

SEQ ID NO: 53388 - protein, 7 aa, synthetic construct
LNSMHGP

SEQ ID NO: 53389 - protein, 7 aa, synthetic construct
AKNSAGF

SEQ ID NO: 53390 - protein, 7 aa, synthetic construct
IYSKVVT

SEQ ID NO: 53391 - protein, 7 aa, synthetic construct
HSHNGHV

SEQ ID NO: 53392 - protein, 7 aa, synthetic construct
RLGPQTQ

SEQ ID NO: 53393 - protein, 7 aa, synthetic construct
TKNSMPA

SEQ ID NO: 53394 - protein, 7 aa, synthetic construct
DVRNARQ

SEQ ID NO: 53395 - protein, 7 aa, synthetic construct
LHSPVIN

SEQ ID NO: 53396 - protein, 7 aa, synthetic construct
GQAKGSN

SEQ ID NO: 53397 - protein, 7 aa, synthetic construct
RPTPNQG

SEQ ID NO: 53398 - protein, 7 aa, synthetic construct
LLRPMTQ

SEQ ID NO: 53399 - protein, 7 aa, synthetic construct
QMGHKVP

SEQ ID NO: 53400 - protein, 7 aa, synthetic construct
RSPKGHE

SEQ ID NO: 53401 - protein, 7 aa, synthetic construct
FSGSKSW

SEQ ID NO: 53402 - protein, 7 aa, synthetic construct
VKTMGRE

SEQ ID NO: 53403 - protein, 7 aa, synthetic construct
TPTWNKA

SEQ ID NO: 53404 - protein, 7 aa, synthetic construct
RGREVHE

SEQ ID NO: 53405 - protein, 7 aa, synthetic construct
KTHGGQV

SEQ ID NO: 53406 - protein, 7 aa, synthetic construct
PKEKATG

SEQ ID NO: 53407 - protein, 7 aa, synthetic construct
TKQGKME

SEQ ID NO: 53408 - protein, 7 aa, synthetic construct
LFRVQEA

SEQ ID NO: 53409 - protein, 7 aa, synthetic construct
QKTNSPG

SEQ ID NO: 53410 - protein, 7 aa, synthetic construct
TQHSGKS

SEQ ID NO: 53411 - protein, 7 aa, synthetic construct
SKKEIAV

SEQ ID NO: 53412 - protein, 7 aa, synthetic construct
SNKNGEW

SEQ ID NO: 53413 - protein, 7 aa, synthetic construct
DRLSGLL

SEQ ID NO: 53414 - protein, 7 aa, synthetic construct
LQVHQSP

SEQ ID NO: 53415 - protein, 7 aa, synthetic construct
TLQHKGY

SEQ ID NO: 53416 - protein, 7 aa, synthetic construct
EWVHKTP

SEQ ID NO: 53417 - protein, 7 aa, synthetic construct
FTRIQDH

SEQ ID NO: 53418 - protein, 7 aa, synthetic construct
KGTSMKE

SEQ ID NO: 53419 - protein, 7 aa, synthetic construct
WDSQNRV

SEQ ID NO: 53420 - protein, 7 aa, synthetic construct
NKFFQHE

SEQ ID NO: 53421 - protein, 7 aa, synthetic construct
LAKAPYA

SEQ ID NO: 53422 - protein, 7 aa, synthetic construct
AGGHTHP

SEQ ID NO: 53423 - protein, 7 aa, synthetic construct
GRNDLYT

SEQ ID NO: 53424 - protein, 7 aa, synthetic construct
SGQRMTD

SEQ ID NO: 53425 - protein, 7 aa, synthetic construct
VRRPDSL

SEQ ID NO: 53426 - protein, 7 aa, synthetic construct
RWSAEDN

SEQ ID NO: 53427 - protein, 7 aa, synthetic construct
IHLNKNP

SEQ ID NO: 53428 - protein, 7 aa, synthetic construct
RGPAAQN

SEQ ID NO: 53429 - protein, 7 aa, synthetic construct
FHNVNIA

SEQ ID NO: 53430 - protein, 7 aa, synthetic construct
FHHATVI

SEQ ID NO: 53431 - protein, 7 aa, synthetic construct
KNMGSGG

SEQ ID NO: 53432 - protein, 7 aa, synthetic construct
SEQRKYA

SEQ ID NO: 53433 - protein, 7 aa, synthetic construct
QVVGGTS

SEQ ID NO: 53434 - protein, 7 aa, synthetic construct
RDQSTKV

SEQ ID NO: 53435 - protein, 7 aa, synthetic construct
PATINYK

SEQ ID NO: 53436 - protein, 7 aa, synthetic construct
KQFQQLA

SEQ ID NO: 53437 - protein, 7 aa, synthetic construct
KFNHIEH

SEQ ID NO: 53438 - protein, 7 aa, synthetic construct
KKINLAD

SEQ ID NO: 53439 - protein, 7 aa, synthetic construct
SHNVFRE

SEQ ID NO: 53440 - protein, 7 aa, synthetic construct
TRLGMQS

SEQ ID NO: 53441 - protein, 7 aa, synthetic construct
QHHHTSP

SEQ ID NO: 53442 - protein, 7 aa, synthetic construct
VPHLTSP

SEQ ID NO: 53443 - protein, 7 aa, synthetic construct
QKGAQSA

SEQ ID NO: 53444 - protein, 7 aa, synthetic construct
SKDTRQS

SEQ ID NO: 53445 - protein, 7 aa, synthetic construct
FAHKHEI

SEQ ID NO: 53446 - protein, 7 aa, synthetic construct
LNRITMD

SEQ ID NO: 53447 - protein, 7 aa, synthetic construct
TKVTMGD

SEQ ID NO: 53448 - protein, 7 aa, synthetic construct
GQAGWKV

SEQ ID NO: 53449 - protein, 7 aa, synthetic construct
FKNASMN

SEQ ID NO: 53450 - protein, 7 aa, synthetic construct
LGKVSGA

SEQ ID NO: 53451 - protein, 7 aa, synthetic construct
ALRGKEV

SEQ ID NO: 53452 - protein, 7 aa, synthetic construct
TGSVRGG

SEQ ID NO: 53453 - protein, 7 aa, synthetic construct
RMGSHNS

SEQ ID NO: 53454 - protein, 7 aa, synthetic construct
RSPVTDY

SEQ ID NO: 53455 - protein, 7 aa, synthetic construct
TEYVTKM

SEQ ID NO: 53456 - protein, 7 aa, synthetic construct
QAVANKA

SEQ ID NO: 53457 - protein, 7 aa, synthetic construct
TPIRAQD

SEQ ID NO: 53458 - protein, 7 aa, synthetic construct
GTVKATG

SEQ ID NO: 53459 - protein, 7 aa, synthetic construct
KNSTAQM

SEQ ID NO: 53460 - protein, 7 aa, synthetic construct
RTSHDDM

SEQ ID NO: 53461 - protein, 7 aa, synthetic construct
TWGHERP

SEQ ID NO: 53462 - protein, 7 aa, synthetic construct
QAHRSAL

SEQ ID NO: 53463 - protein, 7 aa, synthetic construct
QHRSQEM

SEQ ID NO: 53464 - protein, 7 aa, synthetic construct
YFDGKAA

SEQ ID NO: 53465 - protein, 7 aa, synthetic construct
HPGYPQS

SEQ ID NO: 53466 - protein, 7 aa, synthetic construct
HKSNMTP

SEQ ID NO: 53467 - protein, 7 aa, synthetic construct
PPSPNHN

SEQ ID NO: 53468 - protein, 7 aa, synthetic construct
YKSQIDM

SEQ ID NO: 53469 - protein, 7 aa, synthetic construct
HNNFMKP

SEQ ID NO: 53470 - protein, 7 aa, synthetic construct
RNQAQTI

SEQ ID NO: 53471 - protein, 7 aa, synthetic construct
MKQGPHH

SEQ ID NO: 53472 - protein, 7 aa, synthetic construct
SKFKAQP

SEQ ID NO: 53473 - protein, 7 aa, synthetic construct
PNRQTQA

SEQ ID NO: 53474 - protein, 7 aa, synthetic construct
TAKNDGR

SEQ ID NO: 53475 - protein, 7 aa, synthetic construct
RATVTGQ

SEQ ID NO: 53476 - protein, 7 aa, synthetic construct
KSQPSQG

SEQ ID NO: 53477 - protein, 7 aa, synthetic construct
SRGGTMG

SEQ ID NO: 53478 - protein, 7 aa, synthetic construct
KTGMKAE

SEQ ID NO: 53479 - protein, 7 aa, synthetic construct
DQHHKMA

SEQ ID NO: 53480 - protein, 7 aa, synthetic construct
VTQPHFG

SEQ ID NO: 53481 - protein, 7 aa, synthetic construct
GGYVKTP

SEQ ID NO: 53482 - protein, 7 aa, synthetic construct
FKSQPTS

SEQ ID NO: 53483 - protein, 7 aa, synthetic construct
FQHAKTS

SEQ ID NO: 53484 - protein, 7 aa, synthetic construct
SGKTMDD

SEQ ID NO: 53485 - protein, 7 aa, synthetic construct
AGKVGLM

SEQ ID NO: 53486 - protein, 7 aa, synthetic construct
TRTVNQA

SEQ ID NO: 53487 - protein, 7 aa, synthetic construct
FHYQPES

SEQ ID NO: 53488 - protein, 7 aa, synthetic construct
TGARTVQ

SEQ ID NO: 53489 - protein, 7 aa, synthetic construct
GREFREG

SEQ ID NO: 53490 - protein, 7 aa, synthetic construct
AIGQGNK

SEQ ID NO: 53491 - protein, 7 aa, synthetic construct
YSKQSEG

SEQ ID NO: 53492 - protein, 7 aa, synthetic construct
ITGVQGL

SEQ ID NO: 53493 - protein, 7 aa, synthetic construct
QSKMSVT

SEQ ID NO: 53494 - protein, 7 aa, synthetic construct
TVNKVNG

SEQ ID NO: 53495 - protein, 7 aa, synthetic construct
RPYHEQG

SEQ ID NO: 53496 - protein, 7 aa, synthetic construct
MHDKRSD

SEQ ID NO: 53497 - protein, 7 aa, synthetic construct
HNAMKLG

SEQ ID NO: 53498 - protein, 7 aa, synthetic construct
TNQKAAP

SEQ ID NO: 53499 - protein, 7 aa, synthetic construct
VPQNRVA

SEQ ID NO: 53500 - protein, 7 aa, synthetic construct
MHVAQPG

SEQ ID NO: 53501 - protein, 7 aa, synthetic construct
RHDYGKD

SEQ ID NO: 53502 - protein, 7 aa, synthetic construct
GQAMPKA

SEQ ID NO: 53503 - protein, 7 aa, synthetic construct
IQGRPSN

SEQ ID NO: 53504 - protein, 7 aa, synthetic construct
NVGTKGG

SEQ ID NO: 53505 - protein, 7 aa, synthetic construct
IVTMKKE

SEQ ID NO: 53506 - protein, 7 aa, synthetic construct
KHNNGFD

SEQ ID NO: 53507 - protein, 7 aa, synthetic construct
IRKSEPT

SEQ ID NO: 53508 - protein, 7 aa, synthetic construct
PGRHSAE

SEQ ID NO: 53509 - protein, 7 aa, synthetic construct
RPSLVPT

SEQ ID NO: 53510 - protein, 7 aa, synthetic construct
MNTWQSE

SEQ ID NO: 53511 - protein, 7 aa, synthetic construct
YSGKAQG

SEQ ID NO: 53512 - protein, 7 aa, synthetic construct
IFTKGDS

SEQ ID NO: 53513 - protein, 7 aa, synthetic construct
WTKTNVA

SEQ ID NO: 53514 - protein, 7 aa, synthetic construct
LKPKYPD

SEQ ID NO: 53515 - protein, 7 aa, synthetic construct
LYKSHAT

SEQ ID NO: 53516 - protein, 7 aa, synthetic construct
FPPRNTE

SEQ ID NO: 53517 - protein, 7 aa, synthetic construct
QSRLPSD

SEQ ID NO: 53518 - protein, 7 aa, synthetic construct
APDWKHD

SEQ ID NO: 53519 - protein, 7 aa, synthetic construct
HVNQRQA

SEQ ID NO: 53520 - protein, 7 aa, synthetic construct
KGANFIQ

SEQ ID NO: 53521 - protein, 7 aa, synthetic construct
IQTKQAT

SEQ ID NO: 53522 - protein, 7 aa, synthetic construct
SDSRATG

SEQ ID NO: 53523 - protein, 7 aa, synthetic construct
LPTTARI

SEQ ID NO: 53524 - protein, 7 aa, synthetic construct
ARDHKER

SEQ ID NO: 53525 - protein, 7 aa, synthetic construct
DHGGRVG

SEQ ID NO: 53526 - protein, 7 aa, synthetic construct
RTTISVE

SEQ ID NO: 53527 - protein, 7 aa, synthetic construct
NQGLMPR

SEQ ID NO: 53528 - protein, 7 aa, synthetic construct
KWSQAKD

SEQ ID NO: 53529 - protein, 7 aa, synthetic construct
TSRSLVM

SEQ ID NO: 53530 - protein, 7 aa, synthetic construct
PAMNTPI

SEQ ID NO: 53531 - protein, 7 aa, synthetic construct
TGLQQMS

SEQ ID NO: 53532 - protein, 7 aa, synthetic construct
LHNRFVE

SEQ ID NO: 53533 - protein, 7 aa, synthetic construct
SKSTMNH

SEQ ID NO: 53534 - protein, 7 aa, synthetic construct
PIGTGLA

SEQ ID NO: 53535 - protein, 7 aa, synthetic construct
KSKDSSA

SEQ ID NO: 53536 - protein, 7 aa, synthetic construct
ARSHTQA

SEQ ID NO: 53537 - protein, 7 aa, synthetic construct
QKAGHTP

SEQ ID NO: 53538 - protein, 7 aa, synthetic construct
TSPKNNG

SEQ ID NO: 53539 - protein, 7 aa, synthetic construct
RRNGLET

SEQ ID NO: 53540 - protein, 7 aa, synthetic construct
TAWSTEG

SEQ ID NO: 53541 - protein, 7 aa, synthetic construct
GFGPYKD

SEQ ID NO: 53542 - protein, 7 aa, synthetic construct
HRQKAEP

SEQ ID NO: 53543 - protein, 7 aa, synthetic construct
YKYSAGS

SEQ ID NO: 53544 - protein, 7 aa, synthetic construct
YGGIPLT

SEQ ID NO: 53545 - protein, 7 aa, synthetic construct
IGMSSRA

SEQ ID NO: 53546 - protein, 7 aa, synthetic construct
QSKTSGG

SEQ ID NO: 53547 - protein, 7 aa, synthetic construct
HSTKILP

SEQ ID NO: 53548 - protein, 7 aa, synthetic construct
VRSTSAG

SEQ ID NO: 53549 - protein, 7 aa, synthetic construct
FPNATQV

SEQ ID NO: 53550 - protein, 7 aa, synthetic construct
NSRQVAG

SEQ ID NO: 53551 - protein, 7 aa, synthetic construct
TVHQSYK

SEQ ID NO: 53552 - protein, 7 aa, synthetic construct
TAHTSHA

SEQ ID NO: 53553 - protein, 7 aa, synthetic construct
TETNKPS

SEQ ID NO: 53554 - protein, 7 aa, synthetic construct
QPNKMTP

SEQ ID NO: 53555 - protein, 7 aa, synthetic construct
GTMHKGG

SEQ ID NO: 53556 - protein, 7 aa, synthetic construct
GPKQAMA

SEQ ID NO: 53557 - protein, 7 aa, synthetic construct
VRNNVSG

SEQ ID NO: 53558 - protein, 7 aa, synthetic construct
VLARKEN

SEQ ID NO: 53559 - protein, 7 aa, synthetic construct
KSAMPRV

SEQ ID NO: 53560 - protein, 7 aa, synthetic construct
PAPMMKD

SEQ ID NO: 53561 - protein, 7 aa, synthetic construct
ITMTGLG

SEQ ID NO: 53562 - protein, 7 aa, synthetic construct
NSHKAFP

SEQ ID NO: 53563 - protein, 7 aa, synthetic construct
RTAGKTE

SEQ ID NO: 53564 - protein, 7 aa, synthetic construct
VKKAEGS

SEQ ID NO: 53565 - protein, 7 aa, synthetic construct
VKQNTAA

SEQ ID NO: 53566 - protein, 7 aa, synthetic construct
NTHVKPM

SEQ ID NO: 53567 - protein, 7 aa, synthetic construct
RQNSMAP

SEQ ID NO: 53568 - protein, 7 aa, synthetic construct
VMNRQNG

SEQ ID NO: 53569 - protein, 7 aa, synthetic construct
MVPPRVP

SEQ ID NO: 53570 - protein, 7 aa, synthetic construct
SSKSSEK

SEQ ID NO: 53571 - protein, 7 aa, synthetic construct
SHAMAKD

SEQ ID NO: 53572 - protein, 7 aa, synthetic construct
IKGSTMG

SEQ ID NO: 53573 - protein, 7 aa, synthetic construct
TWQQNNM

SEQ ID NO: 53574 - protein, 7 aa, synthetic construct
GRQTANA

SEQ ID NO: 53575 - protein, 7 aa, synthetic construct
NYTHMRE

SEQ ID NO: 53576 - protein, 7 aa, synthetic construct
QNKTGMA

SEQ ID NO: 53577 - protein, 7 aa, synthetic construct
LTNAIST

SEQ ID NO: 53578 - protein, 7 aa, synthetic construct
KPPNGDT

SEQ ID NO: 53579 - protein, 7 aa, synthetic construct
KSPQNNS

SEQ ID NO: 53580 - protein, 7 aa, synthetic construct
TRVPSNF

SEQ ID NO: 53581 - protein, 7 aa, synthetic construct
HQGIRDH

SEQ ID NO: 53582 - protein, 7 aa, synthetic construct
TKLNGPS

SEQ ID NO: 53583 - protein, 7 aa, synthetic construct
RKAPDEA

SEQ ID NO: 53584 - protein, 7 aa, synthetic construct
KSNMQGP

SEQ ID NO: 53585 - protein, 7 aa, synthetic construct
MRHDLEL

SEQ ID NO: 53586 - protein, 7 aa, synthetic construct
AYAKEYI

SEQ ID NO: 53587 - protein, 7 aa, synthetic construct
SQFVNVG

SEQ ID NO: 53588 - protein, 7 aa, synthetic construct
AVRTSHQ

SEQ ID NO: 53589 - protein, 7 aa, synthetic construct
TKAPKFD

SEQ ID NO: 53590 - protein, 7 aa, synthetic construct
FGPSRQT

SEQ ID NO: 53591 - protein, 7 aa, synthetic construct
RNHVAAD

SEQ ID NO: 53592 - protein, 7 aa, synthetic construct
ELPHTQA

SEQ ID NO: 53593 - protein, 7 aa, synthetic construct
APKIVMG

SEQ ID NO: 53594 - protein, 7 aa, synthetic construct
QDNGRNG

SEQ ID NO: 53595 - protein, 7 aa, synthetic construct
RGHPGLG

SEQ ID NO: 53596 - protein, 7 aa, synthetic construct
RSHNEKV

SEQ ID NO: 53597 - protein, 7 aa, synthetic construct
NNQVRGP

SEQ ID NO: 53598 - protein, 7 aa, synthetic construct
KPNGPLN

SEQ ID NO: 53599 - protein, 7 aa, synthetic construct
RWKEQLS

SEQ ID NO: 53600 - protein, 7 aa, synthetic construct
TRQGDGQ

SEQ ID NO: 53601 - protein, 7 aa, synthetic construct
YNGIKIP

SEQ ID NO: 53602 - protein, 7 aa, synthetic construct
MSKQVTG

SEQ ID NO: 53603 - protein, 7 aa, synthetic construct
EHKHVSI

SEQ ID NO: 53604 - protein, 7 aa, synthetic construct
LSSIAGK

SEQ ID NO: 53605 - protein, 7 aa, synthetic construct
TPPNTSG

SEQ ID NO: 53606 - protein, 7 aa, synthetic construct
NIGHREG

SEQ ID NO: 53607 - protein, 7 aa, synthetic construct
VINNSYG

SEQ ID NO: 53608 - protein, 7 aa, synthetic construct
EKGAGGI

SEQ ID NO: 53609 - protein, 7 aa, synthetic construct
SNKNGQG

SEQ ID NO: 53610 - protein, 7 aa, synthetic construct
KPASMQA

SEQ ID NO: 53611 - protein, 7 aa, synthetic construct
HEKGLFN

SEQ ID NO: 53612 - protein, 7 aa, synthetic construct
FMPGWSD

SEQ ID NO: 53613 - protein, 7 aa, synthetic construct
GGKNINV

SEQ ID NO: 53614 - protein, 7 aa, synthetic construct
EVKFNTG

SEQ ID NO: 53615 - protein, 7 aa, synthetic construct
YYDKAGN

SEQ ID NO: 53616 - protein, 7 aa, synthetic construct
MGNTKPA

SEQ ID NO: 53617 - protein, 7 aa, synthetic construct
NQFQKDR

SEQ ID NO: 53618 - protein, 7 aa, synthetic construct
RIQKQDA

SEQ ID NO: 53619 - protein, 7 aa, synthetic construct
RFNVEQT

SEQ ID NO: 53620 - protein, 7 aa, synthetic construct
TMGRTNG

SEQ ID NO: 53621 - protein, 7 aa, synthetic construct
SKRMPEA

SEQ ID NO: 53622 - protein, 7 aa, synthetic construct
DKSSQYN

SEQ ID NO: 53623 - protein, 7 aa, synthetic construct
PKQSGTA

SEQ ID NO: 53624 - protein, 7 aa, synthetic construct
ARNGYDS

SEQ ID NO: 53625 - protein, 7 aa, synthetic construct
WSRESRT

SEQ ID NO: 53626 - protein, 7 aa, synthetic construct
ARNATNA

SEQ ID NO: 53627 - protein, 7 aa, synthetic construct
HRNKQDP

SEQ ID NO: 53628 - protein, 7 aa, synthetic construct
TGSKVNG

SEQ ID NO: 53629 - protein, 7 aa, synthetic construct
IIRPTMD

SEQ ID NO: 53630 - protein, 7 aa, synthetic construct
QAQLQKE

SEQ ID NO: 53631 - protein, 7 aa, synthetic construct
WVKDTKD

SEQ ID NO: 53632 - protein, 7 aa, synthetic construct
PRAHTQL

SEQ ID NO: 53633 - protein, 7 aa, synthetic construct
NVKNSMG

SEQ ID NO: 53634 - protein, 7 aa, synthetic construct
RDKNSNP

SEQ ID NO: 53635 - protein, 7 aa, synthetic construct
LPTVNRE

SEQ ID NO: 53636 - protein, 7 aa, synthetic construct
QRQTGQG

SEQ ID NO: 53637 - protein, 7 aa, synthetic construct
QRSSMAG

SEQ ID NO: 53638 - protein, 7 aa, synthetic construct
QQPINPI

SEQ ID NO: 53639 - protein, 7 aa, synthetic construct
EKAKTQV

SEQ ID NO: 53640 - protein, 7 aa, synthetic construct
RPASGNA

SEQ ID NO: 53641 - protein, 7 aa, synthetic construct
QKTSAQH

SEQ ID NO: 53642 - protein, 7 aa, synthetic construct
KQTSAQS

SEQ ID NO: 53643 - protein, 7 aa, synthetic construct
LEFDRKP

SEQ ID NO: 53644 - protein, 7 aa, synthetic construct
GKAVTSF

SEQ ID NO: 53645 - protein, 7 aa, synthetic construct
KATMSKD

SEQ ID NO: 53646 - protein, 7 aa, synthetic construct
KQGQTGA

SEQ ID NO: 53647 - protein, 7 aa, synthetic construct
RAEVSGA

SEQ ID NO: 53648 - protein, 7 aa, synthetic construct
NKQNQAG

SEQ ID NO: 53649 - protein, 7 aa, synthetic construct
MGKVMGG

SEQ ID NO: 53650 - protein, 7 aa, synthetic construct
GPAASKG

SEQ ID NO: 53651 - protein, 7 aa, synthetic construct
GNNHVAY

SEQ ID NO: 53652 - protein, 7 aa, synthetic construct
KQGIAAS

SEQ ID NO: 53653 - protein, 7 aa, synthetic construct
TKPQGNN

SEQ ID NO: 53654 - protein, 7 aa, synthetic construct
YKSSQMG

SEQ ID NO: 53655 - protein, 7 aa, synthetic construct
ERMKAYA

SEQ ID NO: 53656 - protein, 7 aa, synthetic construct
IQMNRNP

SEQ ID NO: 53657 - protein, 7 aa, synthetic construct
NISTHMT

SEQ ID NO: 53658 - protein, 7 aa, synthetic construct
HKPNNYI

SEQ ID NO: 53659 - protein, 7 aa, synthetic construct
KSTNTVT

SEQ ID NO: 53660 - protein, 7 aa, synthetic construct
QNGSIKA

SEQ ID NO: 53661 - protein, 7 aa, synthetic construct
MPSKGQG

SEQ ID NO: 53662 - protein, 7 aa, synthetic construct
QHAKVGV

SEQ ID NO: 53663 - protein, 7 aa, synthetic construct
SGDRMIV

SEQ ID NO: 53664 - protein, 7 aa, synthetic construct
GQMGTLP

SEQ ID NO: 53665 - protein, 7 aa, synthetic construct
KLPGWLG

SEQ ID NO: 53666 - protein, 7 aa, synthetic construct
WIPMQKN

SEQ ID NO: 53667 - protein, 7 aa, synthetic construct
HFNKQAE

SEQ ID NO: 53668 - protein, 7 aa, synthetic construct
DMIQQKA

SEQ ID NO: 53669 - protein, 7 aa, synthetic construct
VVPGRQT

SEQ ID NO: 53670 - protein, 7 aa, synthetic construct
RQPQNGP

SEQ ID NO: 53671 - protein, 7 aa, synthetic construct
LSKATGS

SEQ ID NO: 53672 - protein, 7 aa, synthetic construct
NRQGATA

SEQ ID NO: 53673 - protein, 7 aa, synthetic construct
GTKQNVL

SEQ ID NO: 53674 - protein, 7 aa, synthetic construct
VPKIDLH

SEQ ID NO: 53675 - protein, 7 aa, synthetic construct
TYPRQQT

SEQ ID NO: 53676 - protein, 7 aa, synthetic construct
GNSKAAA

SEQ ID NO: 53677 - protein, 7 aa, synthetic construct
LTHFNHT

SEQ ID NO: 53678 - protein, 7 aa, synthetic construct
KTPQGYG

SEQ ID NO: 53679 - protein, 7 aa, synthetic construct
AQRIQGS

SEQ ID NO: 53680 - protein, 7 aa, synthetic construct
ERDRSVY

SEQ ID NO: 53681 - protein, 7 aa, synthetic construct
PVPKESS

SEQ ID NO: 53682 - protein, 7 aa, synthetic construct
ALPRDKA

SEQ ID NO: 53683 - protein, 7 aa, synthetic construct
SKPSVMY

SEQ ID NO: 53684 - protein, 7 aa, synthetic construct
SGSKMQA

SEQ ID NO: 53685 - protein, 7 aa, synthetic construct
YQATIHS

SEQ ID NO: 53686 - protein, 7 aa, synthetic construct
RVAQQES

SEQ ID NO: 53687 - protein, 7 aa, synthetic construct
SKGSSTT

SEQ ID NO: 53688 - protein, 7 aa, synthetic construct
KDMAMKG

SEQ ID NO: 53689 - protein, 7 aa, synthetic construct
KTTNPQG

SEQ ID NO: 53690 - protein, 7 aa, synthetic construct
AKQGGAF

SEQ ID NO: 53691 - protein, 7 aa, synthetic construct
TMKAVSG

SEQ ID NO: 53692 - protein, 7 aa, synthetic construct
KIMTMPD

SEQ ID NO: 53693 - protein, 7 aa, synthetic construct
FHHGQPM

SEQ ID NO: 53694 - protein, 7 aa, synthetic construct
VRKGQPD

SEQ ID NO: 53695 - protein, 7 aa, synthetic construct
GAVVPMG

SEQ ID NO: 53696 - protein, 7 aa, synthetic construct
WVKHQPQ

SEQ ID NO: 53697 - protein, 7 aa, synthetic construct
NKGQSAP

SEQ ID NO: 53698 - protein, 7 aa, synthetic construct
PTKPSNA

SEQ ID NO: 53699 - protein, 7 aa, synthetic construct
VMDIDHY

SEQ ID NO: 53700 - protein, 7 aa, synthetic construct
TRPSIVM

SEQ ID NO: 53701 - protein, 7 aa, synthetic construct
PGKTQAP

SEQ ID NO: 53702 - protein, 7 aa, synthetic construct
SQPPMDK

SEQ ID NO: 53703 - protein, 7 aa, synthetic construct
PLQPRMN

SEQ ID NO: 53704 - protein, 7 aa, synthetic construct
ENHVKGQ

SEQ ID NO: 53705 - protein, 7 aa, synthetic construct
CRANCVP

SEQ ID NO: 53706 - protein, 7 aa, synthetic construct
NQYRPDI

SEQ ID NO: 53707 - protein, 7 aa, synthetic construct
LDLKPVI

SEQ ID NO: 53708 - protein, 7 aa, synthetic construct
PRQSGNS

SEQ ID NO: 53709 - protein, 7 aa, synthetic construct
QLRGVGP

SEQ ID NO: 53710 - protein, 7 aa, synthetic construct
KNGMSTP

SEQ ID NO: 53711 - protein, 7 aa, synthetic construct
KNAVTYT

SEQ ID NO: 53712 - protein, 7 aa, synthetic construct
RDERASA

SEQ ID NO: 53713 - protein, 7 aa, synthetic construct
DMKIGHA

SEQ ID NO: 53714 - protein, 7 aa, synthetic construct
MKERNKE

SEQ ID NO: 53715 - protein, 7 aa, synthetic construct
KATMMKS

SEQ ID NO: 53716 - protein, 7 aa, synthetic construct
KEQGGHR

SEQ ID NO: 53717 - protein, 7 aa, synthetic construct
VVRQSER

SEQ ID NO: 53718 - protein, 7 aa, synthetic construct
QTGARQA

SEQ ID NO: 53719 - protein, 7 aa, synthetic construct
QTSQRTP

SEQ ID NO: 53720 - protein, 7 aa, synthetic construct
ESHKQLN

SEQ ID NO: 53721 - protein, 7 aa, synthetic construct
NKGSTSM

SEQ ID NO: 53722 - protein, 7 aa, synthetic construct
PGHENRG

SEQ ID NO: 53723 - protein, 7 aa, synthetic construct
VRNVVQN

SEQ ID NO: 53724 - protein, 7 aa, synthetic construct
KDKKQDD

SEQ ID NO: 53725 - protein, 7 aa, synthetic construct
QSKNSTS

SEQ ID NO: 53726 - protein, 7 aa, synthetic construct
PNTGRGP

SEQ ID NO: 53727 - protein, 7 aa, synthetic construct
QRMVTAA

SEQ ID NO: 53728 - protein, 7 aa, synthetic construct
ERMPMKG

SEQ ID NO: 53729 - protein, 7 aa, synthetic construct
VTSGRQP

SEQ ID NO: 53730 - protein, 7 aa, synthetic construct
DKGKPFA

SEQ ID NO: 53731 - protein, 7 aa, synthetic construct
VRPQTNG

SEQ ID NO: 53732 - protein, 7 aa, synthetic construct
PSSKSNP

SEQ ID NO: 53733 - protein, 7 aa, synthetic construct
YNTKSGG

SEQ ID NO: 53734 - protein, 7 aa, synthetic construct
SPGKQSG

SEQ ID NO: 53735 - protein, 7 aa, synthetic construct
FSVKRVE

SEQ ID NO: 53736 - protein, 7 aa, synthetic construct
YDKRHPT

SEQ ID NO: 53737 - protein, 7 aa, synthetic construct
FPKDYGS

SEQ ID NO: 53738 - protein, 7 aa, synthetic construct
QKVQTFA

SEQ ID NO: 53739 - protein, 7 aa, synthetic construct
GGNDHRA

SEQ ID NO: 53740 - protein, 7 aa, synthetic construct
NKQSSVN

SEQ ID NO: 53741 - protein, 7 aa, synthetic construct
SNPQRHD

SEQ ID NO: 53742 - protein, 7 aa, synthetic construct
TNPNAKF

SEQ ID NO: 53743 - protein, 7 aa, synthetic construct
KSPQQLE

SEQ ID NO: 53744 - protein, 7 aa, synthetic construct
RADFKEY

SEQ ID NO: 53745 - protein, 7 aa, synthetic construct
NARTNQF

SEQ ID NO: 53746 - protein, 7 aa, synthetic construct
IHNVHDN

SEQ ID NO: 53747 - protein, 7 aa, synthetic construct
KKIEAVA

SEQ ID NO: 53748 - protein, 7 aa, synthetic construct
ISYKQTE

SEQ ID NO: 53749 - protein, 7 aa, synthetic construct
FQGKVEK

SEQ ID NO: 53750 - protein, 7 aa, synthetic construct
NNFGGSV

SEQ ID NO: 53751 - protein, 7 aa, synthetic construct
EHYQKYP

SEQ ID NO: 53752 - protein, 7 aa, synthetic construct
LMTKNTQ

SEQ ID NO: 53753 - protein, 7 aa, synthetic construct
YMKTSTA

SEQ ID NO: 53754 - protein, 7 aa, synthetic construct
SQFIGKN

SEQ ID NO: 53755 - protein, 7 aa, synthetic construct
TKSVKGD

SEQ ID NO: 53756 - protein, 7 aa, synthetic construct
NRHMGMD

SEQ ID NO: 53757 - protein, 7 aa, synthetic construct
GISGLGS

SEQ ID NO: 53758 - protein, 7 aa, synthetic construct
SDLKRIS

SEQ ID NO: 53759 - protein, 7 aa, synthetic construct
HISKHDT

SEQ ID NO: 53760 - protein, 7 aa, synthetic construct
FSKGVMS

SEQ ID NO: 53761 - protein, 7 aa, synthetic construct
ADHGKFS

SEQ ID NO: 53762 - protein, 7 aa, synthetic construct
VSSKLAT

SEQ ID NO: 53763 - protein, 7 aa, synthetic construct
NHPRMTD

SEQ ID NO: 53764 - protein, 7 aa, synthetic construct
PQSRGAP

SEQ ID NO: 53765 - protein, 7 aa, synthetic construct
RYENPDR

SEQ ID NO: 53766 - protein, 7 aa, synthetic construct
WHNKPTL

SEQ ID NO: 53767 - protein, 7 aa, synthetic construct
SQHHTIG

SEQ ID NO: 53768 - protein, 7 aa, synthetic construct
FPKLGQG

SEQ ID NO: 53769 - protein, 7 aa, synthetic construct
LNKQHIM

SEQ ID NO: 53770 - protein, 7 aa, synthetic construct
RTKIFDG

SEQ ID NO: 53771 - protein, 7 aa, synthetic construct
GKTNPVG

SEQ ID NO: 53772 - protein, 7 aa, synthetic construct
TGHYPLK

SEQ ID NO: 53773 - protein, 7 aa, synthetic construct
LNVNNQK

SEQ ID NO: 53774 - protein, 7 aa, synthetic construct
INPLKIK

SEQ ID NO: 53775 - protein, 7 aa, synthetic construct
YGHTQLP

SEQ ID NO: 53776 - protein, 7 aa, synthetic construct
RYGFPEE

SEQ ID NO: 53777 - protein, 7 aa, synthetic construct
QPNGQKM

SEQ ID NO: 53778 - protein, 7 aa, synthetic construct
HAKTGPW

SEQ ID NO: 53779 - protein, 7 aa, synthetic construct
KQQMTGG

SEQ ID NO: 53780 - protein, 7 aa, synthetic construct
VMPQNLG

SEQ ID NO: 53781 - protein, 7 aa, synthetic construct
KREMKGD

SEQ ID NO: 53782 - protein, 7 aa, synthetic construct
THSTGTS

SEQ ID NO: 53783 - protein, 7 aa, synthetic construct
KPGQFSE

SEQ ID NO: 53784 - protein, 7 aa, synthetic construct
QKDTQQI

SEQ ID NO: 53785 - protein, 7 aa, synthetic construct
RGDREQL

SEQ ID NO: 53786 - protein, 7 aa, synthetic construct
TKNMGSG

SEQ ID NO: 53787 - protein, 7 aa, synthetic construct
KTPQANG

SEQ ID NO: 53788 - protein, 7 aa, synthetic construct
GFLGVKS

SEQ ID NO: 53789 - protein, 7 aa, synthetic construct
FKQNAGA

SEQ ID NO: 53790 - protein, 7 aa, synthetic construct
GQPKVAG

SEQ ID NO: 53791 - protein, 7 aa, synthetic construct
QKNQTKE

SEQ ID NO: 53792 - protein, 7 aa, synthetic construct
LHTKPDS

SEQ ID NO: 53793 - protein, 7 aa, synthetic construct
VMHFRAD

SEQ ID NO: 53794 - protein, 7 aa, synthetic construct
LGGNKFG

SEQ ID NO: 53795 - protein, 7 aa, synthetic construct
QFTGKAP

SEQ ID NO: 53796 - protein, 7 aa, synthetic construct
NKQQYEL

SEQ ID NO: 53797 - protein, 7 aa, synthetic construct
TRPNSQW

SEQ ID NO: 53798 - protein, 7 aa, synthetic construct
GQGYAGG

SEQ ID NO: 53799 - protein, 7 aa, synthetic construct
AVPSHTG

SEQ ID NO: 53800 - protein, 7 aa, synthetic construct
LKMDPVD

SEQ ID NO: 53801 - protein, 7 aa, synthetic construct
TVLTPRT

SEQ ID NO: 53802 - protein, 7 aa, synthetic construct
SNIKGST

SEQ ID NO: 53803 - protein, 7 aa, synthetic construct
NKNMQGG

SEQ ID NO: 53804 - protein, 7 aa, synthetic construct
YPKTGNG

SEQ ID NO: 53805 - protein, 7 aa, synthetic construct
TSARVNG

SEQ ID NO: 53806 - protein, 7 aa, synthetic construct
RGEMGGN

SEQ ID NO: 53807 - protein, 7 aa, synthetic construct
GSQGPRM

SEQ ID NO: 53808 - protein, 7 aa, synthetic construct
IHHSMDK

SEQ ID NO: 53809 - protein, 7 aa, synthetic construct
KNVKEQL

SEQ ID NO: 53810 - protein, 7 aa, synthetic construct
KPTQPMG

SEQ ID NO: 53811 - protein, 7 aa, synthetic construct
NGNAKTA

SEQ ID NO: 53812 - protein, 7 aa, synthetic construct
YSRPPIE

SEQ ID NO: 53813 - protein, 7 aa, synthetic construct
FKTTAVG

SEQ ID NO: 53814 - protein, 7 aa, synthetic construct
VNKSVNA

SEQ ID NO: 53815 - protein, 7 aa, synthetic construct
GKWQLDG

SEQ ID NO: 53816 - protein, 7 aa, synthetic construct
YTKGATY

SEQ ID NO: 53817 - protein, 7 aa, synthetic construct
EKNVNHT

SEQ ID NO: 53818 - protein, 7 aa, synthetic construct
RDKDSRN

SEQ ID NO: 53819 - protein, 7 aa, synthetic construct
WATNKGH

SEQ ID NO: 53820 - protein, 7 aa, synthetic construct
QKPTSSA

SEQ ID NO: 53821 - protein, 7 aa, synthetic construct
YGRGEAL

SEQ ID NO: 53822 - protein, 7 aa, synthetic construct
KQQSSSM

SEQ ID NO: 53823 - protein, 7 aa, synthetic construct
DRRIQID

SEQ ID NO: 53824 - protein, 7 aa, synthetic construct
LDSMRMP

SEQ ID NO: 53825 - protein, 7 aa, synthetic construct
TRPPSNN

SEQ ID NO: 53826 - protein, 7 aa, synthetic construct
PQKGVSM

SEQ ID NO: 53827 - protein, 7 aa, synthetic construct
TRQIHGN

SEQ ID NO: 53828 - protein, 7 aa, synthetic construct
NMNMPGH

SEQ ID NO: 53829 - protein, 7 aa, synthetic construct
FKNMVMA

SEQ ID NO: 53830 - protein, 7 aa, synthetic construct
HQQRTSE

SEQ ID NO: 53831 - protein, 7 aa, synthetic construct
VRTTSSI

SEQ ID NO: 53832 - protein, 7 aa, synthetic construct
KTNVGGS

SEQ ID NO: 53833 - protein, 7 aa, synthetic construct
SGRNEMT

SEQ ID NO: 53834 - protein, 7 aa, synthetic construct
GTARQSV

SEQ ID NO: 53835 - protein, 7 aa, synthetic construct
PRTGGGP

SEQ ID NO: 53836 - protein, 7 aa, synthetic construct
RKTEAVM

SEQ ID NO: 53837 - protein, 7 aa, synthetic construct
SDAKPVM

SEQ ID NO: 53838 - protein, 7 aa, synthetic construct
NRAPNSA

SEQ ID NO: 53839 - protein, 7 aa, synthetic construct
GSKTGTA

SEQ ID NO: 53840 - protein, 7 aa, synthetic construct
TATVKSG

SEQ ID NO: 53841 - protein, 7 aa, synthetic construct
KTNAASN

SEQ ID NO: 53842 - protein, 7 aa, synthetic construct
MVKQTPS

SEQ ID NO: 53843 - protein, 7 aa, synthetic construct
YDRRHIE

SEQ ID NO: 53844 - protein, 7 aa, synthetic construct
QPGSQKD

SEQ ID NO: 53845 - protein, 7 aa, synthetic construct
NRQNAVG

SEQ ID NO: 53846 - protein, 7 aa, synthetic construct
YNRNGFQ

SEQ ID NO: 53847 - protein, 7 aa, synthetic construct
KIQASTM

SEQ ID NO: 53848 - protein, 7 aa, synthetic construct
KEKGPIH

SEQ ID NO: 53849 - protein, 7 aa, synthetic construct
NPRQTQP

SEQ ID NO: 53850 - protein, 7 aa, synthetic construct
PNRDNHR

SEQ ID NO: 53851 - protein, 7 aa, synthetic construct
ASPYPKG

SEQ ID NO: 53852 - protein, 7 aa, synthetic construct
MKRPYDE

SEQ ID NO: 53853 - protein, 7 aa, synthetic construct
TGLRHAE

SEQ ID NO: 53854 - protein, 7 aa, synthetic construct
AYKKIEM

SEQ ID NO: 53855 - protein, 7 aa, synthetic construct
GTSAGYI

SEQ ID NO: 53856 - protein, 7 aa, synthetic construct
VSKHMAQ

SEQ ID NO: 53857 - protein, 7 aa, synthetic construct
KPSSQAA

SEQ ID NO: 53858 - protein, 7 aa, synthetic construct
ATQNIHT

SEQ ID NO: 53859 - protein, 7 aa, synthetic construct
RVDKGYT

SEQ ID NO: 53860 - protein, 7 aa, synthetic construct
MRVPSMT

SEQ ID NO: 53861 - protein, 7 aa, synthetic construct
NRFETRG

SEQ ID NO: 53862 - protein, 7 aa, synthetic construct
RSKDTSV

SEQ ID NO: 53863 - protein, 7 aa, synthetic construct
FKGVATG

SEQ ID NO: 53864 - protein, 7 aa, synthetic construct
QKPGSYL

SEQ ID NO: 53865 - protein, 7 aa, synthetic construct
SQIKSQA

SEQ ID NO: 53866 - protein, 7 aa, synthetic construct
GKDIQKG

SEQ ID NO: 53867 - protein, 7 aa, synthetic construct
KQPGNGT

SEQ ID NO: 53868 - protein, 7 aa, synthetic construct
KPRETLP

SEQ ID NO: 53869 - protein, 7 aa, synthetic construct
RFDNYKD

SEQ ID NO: 53870 - protein, 7 aa, synthetic construct
SGMVRAP

SEQ ID NO: 53871 - protein, 7 aa, synthetic construct
SQKTIVS

SEQ ID NO: 53872 - protein, 7 aa, synthetic construct
MIKHQPQ

SEQ ID NO: 53873 - protein, 7 aa, synthetic construct
RRMDGQT

SEQ ID NO: 53874 - protein, 7 aa, synthetic construct
KPSTLGG

SEQ ID NO: 53875 - protein, 7 aa, synthetic construct
MKPQYQG

SEQ ID NO: 53876 - protein, 7 aa, synthetic construct
SNGTIHG

SEQ ID NO: 53877 - protein, 7 aa, synthetic construct
EDIKKRT

SEQ ID NO: 53878 - protein, 7 aa, synthetic construct
RPDQKGA

SEQ ID NO: 53879 - protein, 7 aa, synthetic construct
IKSNVGN

SEQ ID NO: 53880 - protein, 7 aa, synthetic construct
KVAKSGD

SEQ ID NO: 53881 - protein, 7 aa, synthetic construct
TGNAQQI

SEQ ID NO: 53882 - protein, 7 aa, synthetic construct
VAGPMSA

SEQ ID NO: 53883 - protein, 7 aa, synthetic construct
INSSGGR

SEQ ID NO: 53884 - protein, 7 aa, synthetic construct
RPTSVHA

SEQ ID NO: 53885 - protein, 7 aa, synthetic construct
VKSMGQG

SEQ ID NO: 53886 - protein, 7 aa, synthetic construct
GEPRVQP

SEQ ID NO: 53887 - protein, 7 aa, synthetic construct
TEVRQHA

SEQ ID NO: 53888 - protein, 7 aa, synthetic construct
YGKDGKG

SEQ ID NO: 53889 - protein, 7 aa, synthetic construct
MVTSSYP

SEQ ID NO: 53890 - protein, 7 aa, synthetic construct
FTRTNRE

SEQ ID NO: 53891 - protein, 7 aa, synthetic construct
RDTHGKL

SEQ ID NO: 53892 - protein, 7 aa, synthetic construct
QMAKSQG

SEQ ID NO: 53893 - protein, 7 aa, synthetic construct
QRQQSMA

SEQ ID NO: 53894 - protein, 7 aa, synthetic construct
KKTEVQS

SEQ ID NO: 53895 - protein, 7 aa, synthetic construct
KGVSSQP

SEQ ID NO: 53896 - protein, 7 aa, synthetic construct
QHAVSKE

SEQ ID NO: 53897 - protein, 7 aa, synthetic construct
YKADPYA

SEQ ID NO: 53898 - protein, 7 aa, synthetic construct
MQGISMQ

SEQ ID NO: 53899 - protein, 7 aa, synthetic construct
NTPLIKT

SEQ ID NO: 53900 - protein, 7 aa, synthetic construct
PKGSVAP

SEQ ID NO: 53901 - protein, 7 aa, synthetic construct
YASQMRD

SEQ ID NO: 53902 - protein, 7 aa, synthetic construct
YHRGGID

SEQ ID NO: 53903 - protein, 7 aa, synthetic construct
LVHRSQH

SEQ ID NO: 53904 - protein, 7 aa, synthetic construct
VKQYDLP

SEQ ID NO: 53905 - protein, 7 aa, synthetic construct
HANSHMP

SEQ ID NO: 53906 - protein, 7 aa, synthetic construct
ARGTTQS

SEQ ID NO: 53907 - protein, 7 aa, synthetic construct
QMKPIHN

SEQ ID NO: 53908 - protein, 7 aa, synthetic construct
QDKSKAG

SEQ ID NO: 53909 - protein, 7 aa, synthetic construct
KTQNTRD

SEQ ID NO: 53910 - protein, 7 aa, synthetic construct
NKVALSG

SEQ ID NO: 53911 - protein, 7 aa, synthetic construct
GNNGVRS

SEQ ID NO: 53912 - protein, 7 aa, synthetic construct
MVKTIAE

SEQ ID NO: 53913 - protein, 7 aa, synthetic construct
NNRDINR

SEQ ID NO: 53914 - protein, 7 aa, synthetic construct
RGSEKPM

SEQ ID NO: 53915 - protein, 7 aa, synthetic construct
QNPPKAM

SEQ ID NO: 53916 - protein, 7 aa, synthetic construct
VLHLAHG

SEQ ID NO: 53917 - protein, 7 aa, synthetic construct
IRNNQAF

SEQ ID NO: 53918 - protein, 7 aa, synthetic construct
NKGGMSA

SEQ ID NO: 53919 - protein, 7 aa, synthetic construct
NIVSNNH

SEQ ID NO: 53920 - protein, 7 aa, synthetic construct
TSTHQAM

SEQ ID NO: 53921 - protein, 7 aa, synthetic construct
YSRAHTD

SEQ ID NO: 53922 - protein, 7 aa, synthetic construct
SAMQVRP

SEQ ID NO: 53923 - protein, 7 aa, synthetic construct
WAGNTEG

SEQ ID NO: 53924 - protein, 7 aa, synthetic construct
AHPRIMA

SEQ ID NO: 53925 - protein, 7 aa, synthetic construct
SKGMHVP

SEQ ID NO: 53926 - protein, 7 aa, synthetic construct
MAHWMKE

SEQ ID NO: 53927 - protein, 7 aa, synthetic construct
VMTGMQA

SEQ ID NO: 53928 - protein, 7 aa, synthetic construct
PNGAKTA

SEQ ID NO: 53929 - protein, 7 aa, synthetic construct
NTQKQSN

SEQ ID NO: 53930 - protein, 7 aa, synthetic construct
NTKTQNP

SEQ ID NO: 53931 - protein, 7 aa, synthetic construct
FEAKHHP

SEQ ID NO: 53932 - protein, 7 aa, synthetic construct
LNKPREF

SEQ ID NO: 53933 - protein, 7 aa, synthetic construct
VREQWKG

SEQ ID NO: 53934 - protein, 7 aa, synthetic construct
NRSGGNG

SEQ ID NO: 53935 - protein, 7 aa, synthetic construct
HNNQGRY

SEQ ID NO: 53936 - protein, 7 aa, synthetic construct
AGTYTRA

SEQ ID NO: 53937 - protein, 7 aa, synthetic construct
VGGTGTN

SEQ ID NO: 53938 - protein, 7 aa, synthetic construct
YTISHES

SEQ ID NO: 53939 - protein, 7 aa, synthetic construct
THNGPMD

SEQ ID NO: 53940 - protein, 7 aa, synthetic construct
AKSPQNT

SEQ ID NO: 53941 - protein, 7 aa, synthetic construct
YKNSGAN

SEQ ID NO: 53942 - protein, 7 aa, synthetic construct
KGYPASA

SEQ ID NO: 53943 - protein, 7 aa, synthetic construct
ARASTGA

SEQ ID NO: 53944 - protein, 7 aa, synthetic construct
MPRANTG

SEQ ID NO: 53945 - protein, 7 aa, synthetic construct
QQKASSG

SEQ ID NO: 53946 - protein, 7 aa, synthetic construct
HLKGQES

SEQ ID NO: 53947 - protein, 7 aa, synthetic construct
PNKSSGS

SEQ ID NO: 53948 - protein, 7 aa, synthetic construct
VQKGGNG

SEQ ID NO: 53949 - protein, 7 aa, synthetic construct
SPPRHGP

SEQ ID NO: 53950 - protein, 7 aa, synthetic construct
LPGKLGS

SEQ ID NO: 53951 - protein, 7 aa, synthetic construct
SSPNGKQ

SEQ ID NO: 53952 - protein, 7 aa, synthetic construct
ARMPGGA

SEQ ID NO: 53953 - protein, 7 aa, synthetic construct
PRNASVG

SEQ ID NO: 53954 - protein, 7 aa, synthetic construct
YPQHQLK

SEQ ID NO: 53955 - protein, 7 aa, synthetic construct
SRVVMGN

SEQ ID NO: 53956 - protein, 7 aa, synthetic construct
STRTLSH

SEQ ID NO: 53957 - protein, 7 aa, synthetic construct
NMYAAQG

SEQ ID NO: 53958 - protein, 7 aa, synthetic construct
YARGQDV

SEQ ID NO: 53959 - protein, 7 aa, synthetic construct
NKPNTNH

SEQ ID NO: 53960 - protein, 7 aa, synthetic construct
AKYTNYV

SEQ ID NO: 53961 - protein, 7 aa, synthetic construct
MKNSGSG

SEQ ID NO: 53962 - protein, 7 aa, synthetic construct
YKATMAN

SEQ ID NO: 53963 - protein, 7 aa, synthetic construct
IEIRGPS

SEQ ID NO: 53964 - protein, 7 aa, synthetic construct
DMIKSSK

SEQ ID NO: 53965 - protein, 7 aa, synthetic construct
TKSQNAM

SEQ ID NO: 53966 - protein, 7 aa, synthetic construct
YKSPPTS

SEQ ID NO: 53967 - protein, 7 aa, synthetic construct
IYKTIGA

SEQ ID NO: 53968 - protein, 7 aa, synthetic construct
WPKHMND

SEQ ID NO: 53969 - protein, 7 aa, synthetic construct
GKSMNMP

SEQ ID NO: 53970 - protein, 7 aa, synthetic construct
RHGSPTN

SEQ ID NO: 53971 - protein, 7 aa, synthetic construct
KASNGSS

SEQ ID NO: 53972 - protein, 7 aa, synthetic construct
SKASIKE

SEQ ID NO: 53973 - protein, 7 aa, synthetic construct
WAMNSAG

SEQ ID NO: 53974 - protein, 7 aa, synthetic construct
NRMQSQY

SEQ ID NO: 53975 - protein, 7 aa, synthetic construct
FKQNQSS

SEQ ID NO: 53976 - protein, 7 aa, synthetic construct
HNQNKNI

SEQ ID NO: 53977 - protein, 7 aa, synthetic construct
KLTNVNY

SEQ ID NO: 53978 - protein, 7 aa, synthetic construct
RAQDKSA

SEQ ID NO: 53979 - protein, 7 aa, synthetic construct
VQKGSMG

SEQ ID NO: 53980 - protein, 7 aa, synthetic construct
QMHFVTA

SEQ ID NO: 53981 - protein, 7 aa, synthetic construct
VGVKVVQ

SEQ ID NO: 53982 - protein, 7 aa, synthetic construct
MRPNSQA

SEQ ID NO: 53983 - protein, 7 aa, synthetic construct
SILKGEY

SEQ ID NO: 53984 - protein, 7 aa, synthetic construct
YTERIGN

SEQ ID NO: 53985 - protein, 7 aa, synthetic construct
MTNFRND

SEQ ID NO: 53986 - protein, 7 aa, synthetic construct
GQIKSTA

SEQ ID NO: 53987 - protein, 7 aa, synthetic construct
LRREGFA

SEQ ID NO: 53988 - protein, 7 aa, synthetic construct
NPAFPQN

SEQ ID NO: 53989 - protein, 7 aa, synthetic construct
PMNKDLK

SEQ ID NO: 53990 - protein, 7 aa, synthetic construct
RPANVSP

SEQ ID NO: 53991 - protein, 7 aa, synthetic construct
HTLTGPG

SEQ ID NO: 53992 - protein, 7 aa, synthetic construct
RDKTTAA

SEQ ID NO: 53993 - protein, 7 aa, synthetic construct
LNSAHNQ

SEQ ID NO: 53994 - protein, 7 aa, synthetic construct
KVPIRLE

SEQ ID NO: 53995 - protein, 7 aa, synthetic construct
QHNAIVA

SEQ ID NO: 53996 - protein, 7 aa, synthetic construct
NHPTSAF

SEQ ID NO: 53997 - protein, 7 aa, synthetic construct
RVHDDNI

SEQ ID NO: 53998 - protein, 7 aa, synthetic construct
LAHQVKN

SEQ ID NO: 53999 - protein, 7 aa, synthetic construct
SLVRDSR

SEQ ID NO: 54000 - protein, 7 aa, synthetic construct
GQKTTNP

SEQ ID NO: 54001 - protein, 7 aa, synthetic construct
KYSNSNA

SEQ ID NO: 54002 - protein, 7 aa, synthetic construct
VSTKGGA

SEQ ID NO: 54003 - protein, 7 aa, synthetic construct
QKGPVAG

SEQ ID NO: 54004 - protein, 7 aa, synthetic construct
TKHTGHL

SEQ ID NO: 54005 - protein, 7 aa, synthetic construct
DFKRMEK

SEQ ID NO: 54006 - protein, 7 aa, synthetic construct
LKPQNGS

SEQ ID NO: 54007 - protein, 7 aa, synthetic construct
IQLSQRE

SEQ ID NO: 54008 - protein, 7 aa, synthetic construct
LDKPYRP

SEQ ID NO: 54009 - protein, 7 aa, synthetic construct
EGKRDWA

SEQ ID NO: 54010 - protein, 7 aa, synthetic construct
WNNGATR

SEQ ID NO: 54011 - protein, 7 aa, synthetic construct
HHRTETL

SEQ ID NO: 54012 - protein, 7 aa, synthetic construct
GKPDVYM

SEQ ID NO: 54013 - protein, 7 aa, synthetic construct
IIGSTGN

SEQ ID NO: 54014 - protein, 7 aa, synthetic construct
SSKTGAP

SEQ ID NO: 54015 - protein, 7 aa, synthetic construct
ERQMQKE

SEQ ID NO: 54016 - protein, 7 aa, synthetic construct
WPPQMMA

SEQ ID NO: 54017 - protein, 7 aa, synthetic construct
RNTNGTG

SEQ ID NO: 54018 - protein, 7 aa, synthetic construct
TDTRRMQ

SEQ ID NO: 54019 - protein, 7 aa, synthetic construct
RTTSNSV

SEQ ID NO: 54020 - protein, 7 aa, synthetic construct
TSKSSQS

SEQ ID NO: 54021 - protein, 7 aa, synthetic construct
QKNRPEE

SEQ ID NO: 54022 - protein, 7 aa, synthetic construct
TSNKMTG

SEQ ID NO: 54023 - protein, 7 aa, synthetic construct
VRQNQVV

SEQ ID NO: 54024 - protein, 7 aa, synthetic construct
KMPSSTG

SEQ ID NO: 54025 - protein, 7 aa, synthetic construct
TFRNPDV

SEQ ID NO: 54026 - protein, 7 aa, synthetic construct
PRPTTGG

SEQ ID NO: 54027 - protein, 7 aa, synthetic construct
QVKSNHH

SEQ ID NO: 54028 - protein, 7 aa, synthetic construct
QRPQNMA

SEQ ID NO: 54029 - protein, 7 aa, synthetic construct
HSTHRPN

SEQ ID NO: 54030 - protein, 7 aa, synthetic construct
ASAHFGA

SEQ ID NO: 54031 - protein, 7 aa, synthetic construct
TKQMKTE

SEQ ID NO: 54032 - protein, 7 aa, synthetic construct
YNSKQNG

SEQ ID NO: 54033 - protein, 7 aa, synthetic construct
NVRERPD

SEQ ID NO: 54034 - protein, 7 aa, synthetic construct
KITHIEG

SEQ ID NO: 54035 - protein, 7 aa, synthetic construct
YTSAKAY

SEQ ID NO: 54036 - protein, 7 aa, synthetic construct
NTRATVG

SEQ ID NO: 54037 - protein, 7 aa, synthetic construct
ITKFQQI

SEQ ID NO: 54038 - protein, 7 aa, synthetic construct
FERAAMN

SEQ ID NO: 54039 - protein, 7 aa, synthetic construct
FTNRMNA

SEQ ID NO: 54040 - protein, 7 aa, synthetic construct
MPKSPQA

SEQ ID NO: 54041 - protein, 7 aa, synthetic construct
LEDITKN

SEQ ID NO: 54042 - protein, 7 aa, synthetic construct
AKKDGMT

SEQ ID NO: 54043 - protein, 7 aa, synthetic construct
NRIQAVM

SEQ ID NO: 54044 - protein, 7 aa, synthetic construct
IKAIAAE

SEQ ID NO: 54045 - protein, 7 aa, synthetic construct
PETLRLR

SEQ ID NO: 54046 - protein, 7 aa, synthetic construct
VKVERYA

SEQ ID NO: 54047 - protein, 7 aa, synthetic construct
PTTGRDA

SEQ ID NO: 54048 - protein, 7 aa, synthetic construct
MKMNIRD

SEQ ID NO: 54049 - protein, 7 aa, synthetic construct
TGKDRTS

SEQ ID NO: 54050 - protein, 7 aa, synthetic construct
VKPNSAW

SEQ ID NO: 54051 - protein, 7 aa, synthetic construct
QNKGMMQ

SEQ ID NO: 54052 - protein, 7 aa, synthetic construct
SAMSTNR

SEQ ID NO: 54053 - protein, 7 aa, synthetic construct
FQNKHNN

SEQ ID NO: 54054 - protein, 7 aa, synthetic construct
LGAHMAT

SEQ ID NO: 54055 - protein, 7 aa, synthetic construct
ILQQYKG

SEQ ID NO: 54056 - protein, 7 aa, synthetic construct
PPKLSEP

SEQ ID NO: 54057 - protein, 7 aa, synthetic construct
QVGGSRE

SEQ ID NO: 54058 - protein, 7 aa, synthetic construct
MRQQATG

SEQ ID NO: 54059 - protein, 7 aa, synthetic construct
KTPTSTS

SEQ ID NO: 54060 - protein, 7 aa, synthetic construct
KQLSAST

SEQ ID NO: 54061 - protein, 7 aa, synthetic construct
NPVGTKN

SEQ ID NO: 54062 - protein, 7 aa, synthetic construct
KPTGGLG

SEQ ID NO: 54063 - protein, 7 aa, synthetic construct
DTRHVIP

SEQ ID NO: 54064 - protein, 7 aa, synthetic construct
KITGAQI

SEQ ID NO: 54065 - protein, 7 aa, synthetic construct
QMSQMKA

SEQ ID NO: 54066 - protein, 7 aa, synthetic construct
RKTGGDY

SEQ ID NO: 54067 - protein, 7 aa, synthetic construct
WANGHAM

SEQ ID NO: 54068 - protein, 7 aa, synthetic construct
SPHHSNN

SEQ ID NO: 54069 - protein, 7 aa, synthetic construct
TKVNTMA

SEQ ID NO: 54070 - protein, 7 aa, synthetic construct
YSSTRND

SEQ ID NO: 54071 - protein, 7 aa, synthetic construct
REPRTGA

SEQ ID NO: 54072 - protein, 7 aa, synthetic construct
STKNTQG

SEQ ID NO: 54073 - protein, 7 aa, synthetic construct
EKGLHAV

SEQ ID NO: 54074 - protein, 7 aa, synthetic construct
TNSNKVA

SEQ ID NO: 54075 - protein, 7 aa, synthetic construct
SKMGIDK

SEQ ID NO: 54076 - protein, 7 aa, synthetic construct
SSTPYKP

SEQ ID NO: 54077 - protein, 7 aa, synthetic construct
NPARQGN

SEQ ID NO: 54078 - protein, 7 aa, synthetic construct
KDKQSQS

SEQ ID NO: 54079 - protein, 7 aa, synthetic construct
KNGTSQA

SEQ ID NO: 54080 - protein, 7 aa, synthetic construct
IKHHVTT

SEQ ID NO: 54081 - protein, 7 aa, synthetic construct
TKIGWQA

SEQ ID NO: 54082 - protein, 7 aa, synthetic construct
KPSSNMV

SEQ ID NO: 54083 - protein, 7 aa, synthetic construct
GIRLKAD

SEQ ID NO: 54084 - protein, 7 aa, synthetic construct
QKGFIEF

SEQ ID NO: 54085 - protein, 7 aa, synthetic construct
RDQLRNA

SEQ ID NO: 54086 - protein, 7 aa, synthetic construct
TTKQDQT

SEQ ID NO: 54087 - protein, 7 aa, synthetic construct
LPRTGDH

SEQ ID NO: 54088 - protein, 7 aa, synthetic construct
REMAERV

SEQ ID NO: 54089 - protein, 7 aa, synthetic construct
MKGPTNL

SEQ ID NO: 54090 - protein, 7 aa, synthetic construct
GPQVAAH

SEQ ID NO: 54091 - protein, 7 aa, synthetic construct
VYKNEGG

SEQ ID NO: 54092 - protein, 7 aa, synthetic construct
RPSNITG

SEQ ID NO: 54093 - protein, 7 aa, synthetic construct
DRAGAHM

SEQ ID NO: 54094 - protein, 7 aa, synthetic construct
PKHSYPE

SEQ ID NO: 54095 - protein, 7 aa, synthetic construct
GARQREA

SEQ ID NO: 54096 - protein, 7 aa, synthetic construct
TQFIGKS

SEQ ID NO: 54097 - protein, 7 aa, synthetic construct
KFDHSQD

SEQ ID NO: 54098 - protein, 7 aa, synthetic construct
RQSTTAL

SEQ ID NO: 54099 - protein, 7 aa, synthetic construct
HTYAKGG

SEQ ID NO: 54100 - protein, 7 aa, synthetic construct
RGMGPSY

SEQ ID NO: 54101 - protein, 7 aa, synthetic construct
KNPVTQG

SEQ ID NO: 54102 - protein, 7 aa, synthetic construct
TGPALSA

SEQ ID NO: 54103 - protein, 7 aa, synthetic construct
KLHILNG

SEQ ID NO: 54104 - protein, 7 aa, synthetic construct
AKAVNSN

SEQ ID NO: 54105 - protein, 7 aa, synthetic construct
EQQRQPD

SEQ ID NO: 54106 - protein, 7 aa, synthetic construct
KQSGTQA

SEQ ID NO: 54107 - protein, 7 aa, synthetic construct
LMTGNGK

SEQ ID NO: 54108 - protein, 7 aa, synthetic construct
GIMSGYA

SEQ ID NO: 54109 - protein, 7 aa, synthetic construct
TKQPSMS

SEQ ID NO: 54110 - protein, 7 aa, synthetic construct
RQAPGAA

SEQ ID NO: 54111 - protein, 7 aa, synthetic construct
IVNKTNA

SEQ ID NO: 54112 - protein, 7 aa, synthetic construct
RDRPELH

SEQ ID NO: 54113 - protein, 7 aa, synthetic construct
ASAKMNN

SEQ ID NO: 54114 - protein, 7 aa, synthetic construct
IKQSQVG

SEQ ID NO: 54115 - protein, 7 aa, synthetic construct
GMVSIHM

SEQ ID NO: 54116 - protein, 7 aa, synthetic construct
VAQTVIG

SEQ ID NO: 54117 - protein, 7 aa, synthetic construct
SPYRANP

SEQ ID NO: 54118 - protein, 7 aa, synthetic construct
KEHLKIG

SEQ ID NO: 54119 - protein, 7 aa, synthetic construct
APGSSTK

SEQ ID NO: 54120 - protein, 7 aa, synthetic construct
NSNRTVG

SEQ ID NO: 54121 - protein, 7 aa, synthetic construct
QQHSQAV

SEQ ID NO: 54122 - protein, 7 aa, synthetic construct
KQTVTAP

SEQ ID NO: 54123 - protein, 7 aa, synthetic construct
RPSNATI

SEQ ID NO: 54124 - protein, 7 aa, synthetic construct
VQKSLQV

SEQ ID NO: 54125 - protein, 7 aa, synthetic construct
LSNSTGG

SEQ ID NO: 54126 - protein, 7 aa, synthetic construct
YPSTKQS

SEQ ID NO: 54127 - protein, 7 aa, synthetic construct
YALQAKD

SEQ ID NO: 54128 - protein, 7 aa, synthetic construct
EGQTRVN

SEQ ID NO: 54129 - protein, 7 aa, synthetic construct
IKSNIDG

SEQ ID NO: 54130 - protein, 7 aa, synthetic construct
TKVTTHG

SEQ ID NO: 54131 - protein, 7 aa, synthetic construct
THNDPLK

SEQ ID NO: 54132 - protein, 7 aa, synthetic construct
YQKWQME

SEQ ID NO: 54133 - protein, 7 aa, synthetic construct
YTKYKEH

SEQ ID NO: 54134 - protein, 7 aa, synthetic construct
HMRVGFE

SEQ ID NO: 54135 - protein, 7 aa, synthetic construct
SNKQSYE

SEQ ID NO: 54136 - protein, 7 aa, synthetic construct
TNVNHAR

SEQ ID NO: 54137 - protein, 7 aa, synthetic construct
HGPKMDS

SEQ ID NO: 54138 - protein, 7 aa, synthetic construct
RGPNGTA

SEQ ID NO: 54139 - protein, 7 aa, synthetic construct
MPGRGGE

SEQ ID NO: 54140 - protein, 7 aa, synthetic construct
KFGMRTD

SEQ ID NO: 54141 - protein, 7 aa, synthetic construct
SGQGANG

SEQ ID NO: 54142 - protein, 7 aa, synthetic construct
FDKVKLG

SEQ ID NO: 54143 - protein, 7 aa, synthetic construct
GNLPLNI

SEQ ID NO: 54144 - protein, 7 aa, synthetic construct
PDMSRAL

SEQ ID NO: 54145 - protein, 7 aa, synthetic construct
HEPKFVM

SEQ ID NO: 54146 - protein, 7 aa, synthetic construct
SRHIAIQ

SEQ ID NO: 54147 - protein, 7 aa, synthetic construct
KSVQSNA

SEQ ID NO: 54148 - protein, 7 aa, synthetic construct
YKSNTPQ

SEQ ID NO: 54149 - protein, 7 aa, synthetic construct
GPQFSHN

SEQ ID NO: 54150 - protein, 7 aa, synthetic construct
NTGMKQG

SEQ ID NO: 54151 - protein, 7 aa, synthetic construct
YHPQAER

SEQ ID NO: 54152 - protein, 7 aa, synthetic construct
QYPHPLQ

SEQ ID NO: 54153 - protein, 7 aa, synthetic construct
KRVGVLE

SEQ ID NO: 54154 - protein, 7 aa, synthetic construct
IWKNENE

SEQ ID NO: 54155 - protein, 7 aa, synthetic construct
KNHVGDP

SEQ ID NO: 54156 - protein, 7 aa, synthetic construct
KSGNVVG

SEQ ID NO: 54157 - protein, 7 aa, synthetic construct
MVGKVNQ

SEQ ID NO: 54158 - protein, 7 aa, synthetic construct
MPKGSQN

SEQ ID NO: 54159 - protein, 7 aa, synthetic construct
GVTKIHY

SEQ ID NO: 54160 - protein, 7 aa, synthetic construct
QNKQMQA

SEQ ID NO: 54161 - protein, 7 aa, synthetic construct
TMSRKDD

SEQ ID NO: 54162 - protein, 7 aa, synthetic construct
PQSHHGV

SEQ ID NO: 54163 - protein, 7 aa, synthetic construct
TAKQHGA

SEQ ID NO: 54164 - protein, 7 aa, synthetic construct
IKTASQT

SEQ ID NO: 54165 - protein, 7 aa, synthetic construct
YKTHHAF

SEQ ID NO: 54166 - protein, 7 aa, synthetic construct
FYDTQKV

SEQ ID NO: 54167 - protein, 7 aa, synthetic construct
QIKMNKE

SEQ ID NO: 54168 - protein, 7 aa, synthetic construct
GNSIVKW

SEQ ID NO: 54169 - protein, 7 aa, synthetic construct
TKPSFQG

SEQ ID NO: 54170 - protein, 7 aa, synthetic construct
NAKQSMM

SEQ ID NO: 54171 - protein, 7 aa, synthetic construct
VYKASTE

SEQ ID NO: 54172 - protein, 7 aa, synthetic construct
NYGSHTV

SEQ ID NO: 54173 - protein, 7 aa, synthetic construct
VKETRFA

SEQ ID NO: 54174 - protein, 7 aa, synthetic construct
HAAQPIN

SEQ ID NO: 54175 - protein, 7 aa, synthetic construct
RTQGTVG

SEQ ID NO: 54176 - protein, 7 aa, synthetic construct
RDKGSTA

SEQ ID NO: 54177 - protein, 7 aa, synthetic construct
VKTSMTG

SEQ ID NO: 54178 - protein, 7 aa, synthetic construct
FEPRKNY

SEQ ID NO: 54179 - protein, 7 aa, synthetic construct
ANNGRAP

SEQ ID NO: 54180 - protein, 7 aa, synthetic construct
THKGEPG

SEQ ID NO: 54181 - protein, 7 aa, synthetic construct
PMYKNFD

SEQ ID NO: 54182 - protein, 7 aa, synthetic construct
YRSYKDS

SEQ ID NO: 54183 - protein, 7 aa, synthetic construct
KGTSTKD

SEQ ID NO: 54184 - protein, 7 aa, synthetic construct
LPKRGND

SEQ ID NO: 54185 - protein, 7 aa, synthetic construct
KGSSTAP

SEQ ID NO: 54186 - protein, 7 aa, synthetic construct
DRHEIHA

SEQ ID NO: 54187 - protein, 7 aa, synthetic construct
PRAASNG

SEQ ID NO: 54188 - protein, 7 aa, synthetic construct
QGNSRNF

SEQ ID NO: 54189 - protein, 7 aa, synthetic construct
HGGQAVT

SEQ ID NO: 54190 - protein, 7 aa, synthetic construct
FFKERGE

SEQ ID NO: 54191 - protein, 7 aa, synthetic construct
RPGSTPT

SEQ ID NO: 54192 - protein, 7 aa, synthetic construct
QSQMKNA

SEQ ID NO: 54193 - protein, 7 aa, synthetic construct
INFHGQS

SEQ ID NO: 54194 - protein, 7 aa, synthetic construct
TARNHTN

SEQ ID NO: 54195 - protein, 7 aa, synthetic construct
QSMGGPI

SEQ ID NO: 54196 - protein, 7 aa, synthetic construct
LLGVERA

SEQ ID NO: 54197 - protein, 7 aa, synthetic construct
ASTSRTE

SEQ ID NO: 54198 - protein, 7 aa, synthetic construct
IGNNHAG

SEQ ID NO: 54199 - protein, 7 aa, synthetic construct
YTAAISN

SEQ ID NO: 54200 - protein, 7 aa, synthetic construct
LQKAVIM

SEQ ID NO: 54201 - protein, 7 aa, synthetic construct
YRQNVSV

SEQ ID NO: 54202 - protein, 7 aa, synthetic construct
TKMHEQL

SEQ ID NO: 54203 - protein, 7 aa, synthetic construct
MMQGTDN

SEQ ID NO: 54204 - protein, 7 aa, synthetic construct
GQSNAPK

SEQ ID NO: 54205 - protein, 7 aa, synthetic construct
PNRQSVG

SEQ ID NO: 54206 - protein, 7 aa, synthetic construct
GTNGKGH

SEQ ID NO: 54207 - protein, 7 aa, synthetic construct
LGPGGSG

SEQ ID NO: 54208 - protein, 7 aa, synthetic construct
TGNRQVD

SEQ ID NO: 54209 - protein, 7 aa, synthetic construct
SRPNQNP

SEQ ID NO: 54210 - protein, 7 aa, synthetic construct
AYKVNPP

SEQ ID NO: 54211 - protein, 7 aa, synthetic construct
GYGKTTM

SEQ ID NO: 54212 - protein, 7 aa, synthetic construct
QKNNVTA

SEQ ID NO: 54213 - protein, 7 aa, synthetic construct
QNNMRGP

SEQ ID NO: 54214 - protein, 7 aa, synthetic construct
NSGVLAA

SEQ ID NO: 54215 - protein, 7 aa, synthetic construct
NSKPQPA

SEQ ID NO: 54216 - protein, 7 aa, synthetic construct
LPDFKVQ

SEQ ID NO: 54217 - protein, 7 aa, synthetic construct
ANGTKNG

SEQ ID NO: 54218 - protein, 7 aa, synthetic construct
SQTSTKE

SEQ ID NO: 54219 - protein, 7 aa, synthetic construct
PSQRAAN

SEQ ID NO: 54220 - protein, 7 aa, synthetic construct
TPGITTN

SEQ ID NO: 54221 - protein, 7 aa, synthetic construct
KVDSRVT

SEQ ID NO: 54222 - protein, 7 aa, synthetic construct
SNSKNEY

SEQ ID NO: 54223 - protein, 7 aa, synthetic construct
SKQFPGP

SEQ ID NO: 54224 - protein, 7 aa, synthetic construct
ASDHKRN

SEQ ID NO: 54225 - protein, 7 aa, synthetic construct
VFGNQAI

SEQ ID NO: 54226 - protein, 7 aa, synthetic construct
PPRGTDV

SEQ ID NO: 54227 - protein, 7 aa, synthetic construct
KHHKQED

SEQ ID NO: 54228 - protein, 7 aa, synthetic construct
TKDYAHY

SEQ ID NO: 54229 - protein, 7 aa, synthetic construct
KPQSITG

SEQ ID NO: 54230 - protein, 7 aa, synthetic construct
KGNMTRE

SEQ ID NO: 54231 - protein, 7 aa, synthetic construct
YATDFKG

SEQ ID NO: 54232 - protein, 7 aa, synthetic construct
YNNHAHL

SEQ ID NO: 54233 - protein, 7 aa, synthetic construct
SLSGIKG

SEQ ID NO: 54234 - protein, 7 aa, synthetic construct
FSNKQNA

SEQ ID NO: 54235 - protein, 7 aa, synthetic construct
RSPQSAP

SEQ ID NO: 54236 - protein, 7 aa, synthetic construct
THKPGDY

SEQ ID NO: 54237 - protein, 7 aa, synthetic construct
SVSASRF

SEQ ID NO: 54238 - protein, 7 aa, synthetic construct
PWKAEAD

SEQ ID NO: 54239 - protein, 7 aa, synthetic construct
RPNAMQS

SEQ ID NO: 54240 - protein, 7 aa, synthetic construct
HEFITKN

SEQ ID NO: 54241 - protein, 7 aa, synthetic construct
NTMKVIT

SEQ ID NO: 54242 - protein, 7 aa, synthetic construct
VQKNSPS

SEQ ID NO: 54243 - protein, 7 aa, synthetic construct
ATTQRGA

SEQ ID NO: 54244 - protein, 7 aa, synthetic construct
YSQMHHG

SEQ ID NO: 54245 - protein, 7 aa, synthetic construct
AATMRHE

SEQ ID NO: 54246 - protein, 7 aa, synthetic construct
QRTDTGH

SEQ ID NO: 54247 - protein, 7 aa, synthetic construct
TPDKKNA

SEQ ID NO: 54248 - protein, 7 aa, synthetic construct
NFGKISP

SEQ ID NO: 54249 - protein, 7 aa, synthetic construct
KLGSMKD

SEQ ID NO: 54250 - protein, 7 aa, synthetic construct
RNGTAAI

SEQ ID NO: 54251 - protein, 7 aa, synthetic construct
VEPQFRM

SEQ ID NO: 54252 - protein, 7 aa, synthetic construct
DNNSKQR

SEQ ID NO: 54253 - protein, 7 aa, synthetic construct
PLHGGNE

SEQ ID NO: 54254 - protein, 7 aa, synthetic construct
HREKWSA

SEQ ID NO: 54255 - protein, 7 aa, synthetic construct
ILQNAAR

SEQ ID NO: 54256 - protein, 7 aa, synthetic construct
TSKGVMG

SEQ ID NO: 54257 - protein, 7 aa, synthetic construct
NAQLIPA

SEQ ID NO: 54258 - protein, 7 aa, synthetic construct
VNVMTVN

SEQ ID NO: 54259 - protein, 7 aa, synthetic construct
YSKFIMG

SEQ ID NO: 54260 - protein, 7 aa, synthetic construct
GQYHGSP

SEQ ID NO: 54261 - protein, 7 aa, synthetic construct
GQNLRTH

SEQ ID NO: 54262 - protein, 7 aa, synthetic construct
KQVGERV

SEQ ID NO: 54263 - protein, 7 aa, synthetic construct
NQKHNQA

SEQ ID NO: 54264 - protein, 7 aa, synthetic construct
YQRQHTE

SEQ ID NO: 54265 - protein, 7 aa, synthetic construct
IPSSKNQ

SEQ ID NO: 54266 - protein, 7 aa, synthetic construct
GSAKQQN

SEQ ID NO: 54267 - protein, 7 aa, synthetic construct
HRHADPM

SEQ ID NO: 54268 - protein, 7 aa, synthetic construct
HIKGQGE

SEQ ID NO: 54269 - protein, 7 aa, synthetic construct
QKGANAG

SEQ ID NO: 54270 - protein, 7 aa, synthetic construct
YKNSQQA

SEQ ID NO: 54271 - protein, 7 aa, synthetic construct
SVKGYNN

SEQ ID NO: 54272 - protein, 7 aa, synthetic construct
TRQSGIG

SEQ ID NO: 54273 - protein, 7 aa, synthetic construct
ITSHHKL

SEQ ID NO: 54274 - protein, 7 aa, synthetic construct
TTGQKSG

SEQ ID NO: 54275 - protein, 7 aa, synthetic construct
STKQTTG

SEQ ID NO: 54276 - protein, 7 aa, synthetic construct
EQSRIQG

SEQ ID NO: 54277 - protein, 7 aa, synthetic construct
YTGKNTA

SEQ ID NO: 54278 - protein, 7 aa, synthetic construct
SFPRVTE

SEQ ID NO: 54279 - protein, 7 aa, synthetic construct
STSAARP

SEQ ID NO: 54280 - protein, 7 aa, synthetic construct
TRYTGPD

SEQ ID NO: 54281 - protein, 7 aa, synthetic construct
FRPSQND

SEQ ID NO: 54282 - protein, 7 aa, synthetic construct
TAAVTGK

SEQ ID NO: 54283 - protein, 7 aa, synthetic construct
KNNHLHA

SEQ ID NO: 54284 - protein, 7 aa, synthetic construct
NQRNPGW

SEQ ID NO: 54285 - protein, 7 aa, synthetic construct
LNQRDLG

SEQ ID NO: 54286 - protein, 7 aa, synthetic construct
GARSIGS

SEQ ID NO: 54287 - protein, 7 aa, synthetic construct
TSAHPSY

SEQ ID NO: 54288 - protein, 7 aa, synthetic construct
NKPRSDD

SEQ ID NO: 54289 - protein, 7 aa, synthetic construct
QKQSAQS

SEQ ID NO: 54290 - protein, 7 aa, synthetic construct
RTPNGNV

SEQ ID NO: 54291 - protein, 7 aa, synthetic construct
KATRDER

SEQ ID NO: 54292 - protein, 7 aa, synthetic construct
VKPHAPG

SEQ ID NO: 54293 - protein, 7 aa, synthetic construct
GHQKHME

SEQ ID NO: 54294 - protein, 7 aa, synthetic construct
VAERSMV

SEQ ID NO: 54295 - protein, 7 aa, synthetic construct
HNRVSLS

SEQ ID NO: 54296 - protein, 7 aa, synthetic construct
FKGPSQS

SEQ ID NO: 54297 - protein, 7 aa, synthetic construct
KQKDGQG

SEQ ID NO: 54298 - protein, 7 aa, synthetic construct
YQSANHP

SEQ ID NO: 54299 - protein, 7 aa, synthetic construct
QTRDPRG

SEQ ID NO: 54300 - protein, 7 aa, synthetic construct
NKSVQRE

SEQ ID NO: 54301 - protein, 7 aa, synthetic construct
THGTNGS

SEQ ID NO: 54302 - protein, 7 aa, synthetic construct
RQQPTTA

SEQ ID NO: 54303 - protein, 7 aa, synthetic construct
NNRNTSP

SEQ ID NO: 54304 - protein, 7 aa, synthetic construct
GPGPVLS

SEQ ID NO: 54305 - protein, 7 aa, synthetic construct
TTKQTNP

SEQ ID NO: 54306 - protein, 7 aa, synthetic construct
NTTAKTG

SEQ ID NO: 54307 - protein, 7 aa, synthetic construct
KTSGFAD

SEQ ID NO: 54308 - protein, 7 aa, synthetic construct
LMKSTPG

SEQ ID NO: 54309 - protein, 7 aa, synthetic construct
NRQRTDD

SEQ ID NO: 54310 - protein, 7 aa, synthetic construct
TGPMRIE

SEQ ID NO: 54311 - protein, 7 aa, synthetic construct
KVGATSG

SEQ ID NO: 54312 - protein, 7 aa, synthetic construct
GGRSVIG

SEQ ID NO: 54313 - protein, 7 aa, synthetic construct
NQAVARA

SEQ ID NO: 54314 - protein, 7 aa, synthetic construct
SKDQQRS

SEQ ID NO: 54315 - protein, 7 aa, synthetic construct
DSKHSGS

SEQ ID NO: 54316 - protein, 7 aa, synthetic construct
SRDTHIG

SEQ ID NO: 54317 - protein, 7 aa, synthetic construct
HRMATDA

SEQ ID NO: 54318 - protein, 7 aa, synthetic construct
TGKVISE

SEQ ID NO: 54319 - protein, 7 aa, synthetic construct
QKSHTPL

SEQ ID NO: 54320 - protein, 7 aa, synthetic construct
KPGNTLG

SEQ ID NO: 54321 - protein, 7 aa, synthetic construct
LLGPNKP

SEQ ID NO: 54322 - protein, 7 aa, synthetic construct
GKSVQPS

SEQ ID NO: 54323 - protein, 7 aa, synthetic construct
TGQKDKS

SEQ ID NO: 54324 - protein, 7 aa, synthetic construct
LNSLGHT

SEQ ID NO: 54325 - protein, 7 aa, synthetic construct
QKDGRVA

SEQ ID NO: 54326 - protein, 7 aa, synthetic construct
QQGQRMG

SEQ ID NO: 54327 - protein, 7 aa, synthetic construct
EKNIGGR

SEQ ID NO: 54328 - protein, 7 aa, synthetic construct
AQSGRMP

SEQ ID NO: 54329 - protein, 7 aa, synthetic construct
FMKVGQN

SEQ ID NO: 54330 - protein, 7 aa, synthetic construct
TTGTYRD

SEQ ID NO: 54331 - protein, 7 aa, synthetic construct
SDINKSS

SEQ ID NO: 54332 - protein, 7 aa, synthetic construct
MKKSDLQ

SEQ ID NO: 54333 - protein, 7 aa, synthetic construct
SYNKERA

SEQ ID NO: 54334 - protein, 7 aa, synthetic construct
GTGTREF

SEQ ID NO: 54335 - protein, 7 aa, synthetic construct
EAKPHLN

SEQ ID NO: 54336 - protein, 7 aa, synthetic construct
YMNGEML

SEQ ID NO: 54337 - protein, 7 aa, synthetic construct
DKPGTHS

SEQ ID NO: 54338 - protein, 7 aa, synthetic construct
HKPRLFE

SEQ ID NO: 54339 - protein, 7 aa, synthetic construct
PTGYSQG

SEQ ID NO: 54340 - protein, 7 aa, synthetic construct
MADQKLA

SEQ ID NO: 54341 - protein, 7 aa, synthetic construct
NQKNPNA

SEQ ID NO: 54342 - protein, 7 aa, synthetic construct
KREVQTG

SEQ ID NO: 54343 - protein, 7 aa, synthetic construct
KEVGRGN

SEQ ID NO: 54344 - protein, 7 aa, synthetic construct
NKTNHTP

SEQ ID NO: 54345 - protein, 7 aa, synthetic construct
MQRPTGG

SEQ ID NO: 54346 - protein, 7 aa, synthetic construct
IKSSVRD

SEQ ID NO: 54347 - protein, 7 aa, synthetic construct
PAVTSHA

SEQ ID NO: 54348 - protein, 7 aa, synthetic construct
IKHPDKE

SEQ ID NO: 54349 - protein, 7 aa, synthetic construct
ASKGQFA

SEQ ID NO: 54350 - protein, 7 aa, synthetic construct
LAMNNKY

SEQ ID NO: 54351 - protein, 7 aa, synthetic construct
EPKMALS

SEQ ID NO: 54352 - protein, 7 aa, synthetic construct
QANSLRQ

SEQ ID NO: 54353 - protein, 7 aa, synthetic construct
FHKANHD

SEQ ID NO: 54354 - protein, 7 aa, synthetic construct
YRTGGNP

SEQ ID NO: 54355 - protein, 7 aa, synthetic construct
LQRSIAG

SEQ ID NO: 54356 - protein, 7 aa, synthetic construct
TNKTNPE

SEQ ID NO: 54357 - protein, 7 aa, synthetic construct
KHSGYLV

SEQ ID NO: 54358 - protein, 7 aa, synthetic construct
GQIGRNP

SEQ ID NO: 54359 - protein, 7 aa, synthetic construct
NKAPWAG

SEQ ID NO: 54360 - protein, 7 aa, synthetic construct
YDINYKN

SEQ ID NO: 54361 - protein, 7 aa, synthetic construct
TNNMKAG

SEQ ID NO: 54362 - protein, 7 aa, synthetic construct
YSYHGEA

SEQ ID NO: 54363 - protein, 7 aa, synthetic construct
SKAPTNS

SEQ ID NO: 54364 - protein, 7 aa, synthetic construct
SKPSTVN

SEQ ID NO: 54365 - protein, 7 aa, synthetic construct
LSDATRN

SEQ ID NO: 54366 - protein, 7 aa, synthetic construct
RFNNTNQ

SEQ ID NO: 54367 - protein, 7 aa, synthetic construct
RPGSDYQ

SEQ ID NO: 54368 - protein, 7 aa, synthetic construct
FKGTPTA

SEQ ID NO: 54369 - protein, 7 aa, synthetic construct
PKVAAPP

SEQ ID NO: 54370 - protein, 7 aa, synthetic construct
TGNSKNP

SEQ ID NO: 54371 - protein, 7 aa, synthetic construct
APKNAGG

SEQ ID NO: 54372 - protein, 7 aa, synthetic construct
MNQAQGK

SEQ ID NO: 54373 - protein, 7 aa, synthetic construct
TERKKEQ

SEQ ID NO: 54374 - protein, 7 aa, synthetic construct
ARLHGDG

SEQ ID NO: 54375 - protein, 7 aa, synthetic construct
TPQLRIH

SEQ ID NO: 54376 - protein, 7 aa, synthetic construct
TQGNKQL

SEQ ID NO: 54377 - protein, 7 aa, synthetic construct
SRAGQNA

SEQ ID NO: 54378 - protein, 7 aa, synthetic construct
TNRPGAV

SEQ ID NO: 54379 - protein, 7 aa, synthetic construct
RNGASMA

SEQ ID NO: 54380 - protein, 7 aa, synthetic construct
HFNLNSP

SEQ ID NO: 54381 - protein, 7 aa, synthetic construct
RDMKVSP

SEQ ID NO: 54382 - protein, 7 aa, synthetic construct
PGYKNLS

SEQ ID NO: 54383 - protein, 7 aa, synthetic construct
NGQGRTA

SEQ ID NO: 54384 - protein, 7 aa, synthetic construct
KQTGVVA

SEQ ID NO: 54385 - protein, 7 aa, synthetic construct
KGTQSAT

SEQ ID NO: 54386 - protein, 7 aa, synthetic construct
RQPQSAS

SEQ ID NO: 54387 - protein, 7 aa, synthetic construct
AKVQMSA

SEQ ID NO: 54388 - protein, 7 aa, synthetic construct
MGKQSQI

SEQ ID NO: 54389 - protein, 7 aa, synthetic construct
KPSHQAH

SEQ ID NO: 54390 - protein, 7 aa, synthetic construct
LVTTPHN

SEQ ID NO: 54391 - protein, 7 aa, synthetic construct
KTGQATG

SEQ ID NO: 54392 - protein, 7 aa, synthetic construct
LNRGLNP

SEQ ID NO: 54393 - protein, 7 aa, synthetic construct
RPALHQG

SEQ ID NO: 54394 - protein, 7 aa, synthetic construct
HFRVTDE

SEQ ID NO: 54395 - protein, 7 aa, synthetic construct
TNKNWAS

SEQ ID NO: 54396 - protein, 7 aa, synthetic construct
ISLIRAE

SEQ ID NO: 54397 - protein, 7 aa, synthetic construct
GPRPNAS

SEQ ID NO: 54398 - protein, 7 aa, synthetic construct
QRPSNTG

SEQ ID NO: 54399 - protein, 7 aa, synthetic construct
QGGKQTA

SEQ ID NO: 54400 - protein, 7 aa, synthetic construct
EVRERHG

SEQ ID NO: 54401 - protein, 7 aa, synthetic construct
YSQNAAS

SEQ ID NO: 54402 - protein, 7 aa, synthetic construct
IHADYRG

SEQ ID NO: 54403 - protein, 7 aa, synthetic construct
ILRKTGD

SEQ ID NO: 54404 - protein, 7 aa, synthetic construct
NSTNSPH

SEQ ID NO: 54405 - protein, 7 aa, synthetic construct
QNHLTTD

SEQ ID NO: 54406 - protein, 7 aa, synthetic construct
TRNGQSP

SEQ ID NO: 54407 - protein, 7 aa, synthetic construct
FKFGAET

SEQ ID NO: 54408 - protein, 7 aa, synthetic construct
GQSRDTY

SEQ ID NO: 54409 - protein, 7 aa, synthetic construct
KMHAHGF

SEQ ID NO: 54410 - protein, 7 aa, synthetic construct
RQPINPD

SEQ ID NO: 54411 - protein, 7 aa, synthetic construct
DKSFKSG

SEQ ID NO: 54412 - protein, 7 aa, synthetic construct
NMTRAQH

SEQ ID NO: 54413 - protein, 7 aa, synthetic construct
NGSNKMG

SEQ ID NO: 54414 - protein, 7 aa, synthetic construct
MQSARND

SEQ ID NO: 54415 - protein, 7 aa, synthetic construct
MKKDHNW

SEQ ID NO: 54416 - protein, 7 aa, synthetic construct
MGHANNM

SEQ ID NO: 54417 - protein, 7 aa, synthetic construct
NRTHDQA

SEQ ID NO: 54418 - protein, 7 aa, synthetic construct
NRASGVA

SEQ ID NO: 54419 - protein, 7 aa, synthetic construct
VKAGGSM

SEQ ID NO: 54420 - protein, 7 aa, synthetic construct
NERGVRF

SEQ ID NO: 54421 - protein, 7 aa, synthetic construct
WGKIFKD

SEQ ID NO: 54422 - protein, 7 aa, synthetic construct
VSVHHEK

SEQ ID NO: 54423 - protein, 7 aa, synthetic construct
GSNQKQG

SEQ ID NO: 54424 - protein, 7 aa, synthetic construct
RTSTNSA

SEQ ID NO: 54425 - protein, 7 aa, synthetic construct
MGIHTTA

SEQ ID NO: 54426 - protein, 7 aa, synthetic construct
YVNQKHI

SEQ ID NO: 54427 - protein, 7 aa, synthetic construct
RMADSPG

SEQ ID NO: 54428 - protein, 7 aa, synthetic construct
KHVTHMN

SEQ ID NO: 54429 - protein, 7 aa, synthetic construct
HTQGNNW

SEQ ID NO: 54430 - protein, 7 aa, synthetic construct
PNYPGRE

SEQ ID NO: 54431 - protein, 7 aa, synthetic construct
FTQKTTG

SEQ ID NO: 54432 - protein, 7 aa, synthetic construct
KSNHGVS

SEQ ID NO: 54433 - protein, 7 aa, synthetic construct
RRDTEPL

SEQ ID NO: 54434 - protein, 7 aa, synthetic construct
GLEAKTR

SEQ ID NO: 54435 - protein, 7 aa, synthetic construct
PKPQSGA

SEQ ID NO: 54436 - protein, 7 aa, synthetic construct
VSHIKNQ

SEQ ID NO: 54437 - protein, 7 aa, synthetic construct
QNKVVNL

SEQ ID NO: 54438 - protein, 7 aa, synthetic construct
QQKYVAY

SEQ ID NO: 54439 - protein, 7 aa, synthetic construct
LGGQMHN

SEQ ID NO: 54440 - protein, 7 aa, synthetic construct
AQAKSTF

SEQ ID NO: 54441 - protein, 7 aa, synthetic construct
TTHGGKG

SEQ ID NO: 54442 - protein, 7 aa, synthetic construct
VNKNSQP

SEQ ID NO: 54443 - protein, 7 aa, synthetic construct
LKNHVLN

SEQ ID NO: 54444 - protein, 7 aa, synthetic construct
IQQGTHH

SEQ ID NO: 54445 - protein, 7 aa, synthetic construct
TKIGLKP

SEQ ID NO: 54446 - protein, 7 aa, synthetic construct
YEQPSKR

SEQ ID NO: 54447 - protein, 7 aa, synthetic construct
VKSNSQT

SEQ ID NO: 54448 - protein, 7 aa, synthetic construct
HKTGPGA

SEQ ID NO: 54449 - protein, 7 aa, synthetic construct
GANKQTG

SEQ ID NO: 54450 - protein, 7 aa, synthetic construct
RNQHNDY

SEQ ID NO: 54451 - protein, 7 aa, synthetic construct
WSKSRFE

SEQ ID NO: 54452 - protein, 7 aa, synthetic construct
TPSPPRD

SEQ ID NO: 54453 - protein, 7 aa, synthetic construct
QDLVRGP

SEQ ID NO: 54454 - protein, 7 aa, synthetic construct
MNPGQKV

SEQ ID NO: 54455 - protein, 7 aa, synthetic construct
IPRYKET

SEQ ID NO: 54456 - protein, 7 aa, synthetic construct
KTPTQMG

SEQ ID NO: 54457 - protein, 7 aa, synthetic construct
YTRVNAL

SEQ ID NO: 54458 - protein, 7 aa, synthetic construct
DNRGSAP

SEQ ID NO: 54459 - protein, 7 aa, synthetic construct
TKYNNTE

SEQ ID NO: 54460 - protein, 7 aa, synthetic construct
HRGDAHV

SEQ ID NO: 54461 - protein, 7 aa, synthetic construct
GGLTTKA

SEQ ID NO: 54462 - protein, 7 aa, synthetic construct
MKATSAG

SEQ ID NO: 54463 - protein, 7 aa, synthetic construct
TKNPQMQ

SEQ ID NO: 54464 - protein, 7 aa, synthetic construct
RQSAIHN

SEQ ID NO: 54465 - protein, 7 aa, synthetic construct
VGIHGER

SEQ ID NO: 54466 - protein, 7 aa, synthetic construct
SIKMANS

SEQ ID NO: 54467 - protein, 7 aa, synthetic construct
GSGQRNS

SEQ ID NO: 54468 - protein, 7 aa, synthetic construct
KYAPTQI

SEQ ID NO: 54469 - protein, 7 aa, synthetic construct
HVKTAHG

SEQ ID NO: 54470 - protein, 7 aa, synthetic construct
WQHVERG

SEQ ID NO: 54471 - protein, 7 aa, synthetic construct
GFKTGQA

SEQ ID NO: 54472 - protein, 7 aa, synthetic construct
SGKSGQG

SEQ ID NO: 54473 - protein, 7 aa, synthetic construct
TLGVKMA

SEQ ID NO: 54474 - protein, 7 aa, synthetic construct
RDKVVTY

SEQ ID NO: 54475 - protein, 7 aa, synthetic construct
FQGRHIV

SEQ ID NO: 54476 - protein, 7 aa, synthetic construct
RVSNTTA

SEQ ID NO: 54477 - protein, 7 aa, synthetic construct
IHSHKVV

SEQ ID NO: 54478 - protein, 7 aa, synthetic construct
RVAATTG

SEQ ID NO: 54479 - protein, 7 aa, synthetic construct
LTGQRIM

SEQ ID NO: 54480 - protein, 7 aa, synthetic construct
QTKMVKE

SEQ ID NO: 54481 - protein, 7 aa, synthetic construct
HFNHKDG

SEQ ID NO: 54482 - protein, 7 aa, synthetic construct
SAQHYAS

SEQ ID NO: 54483 - protein, 7 aa, synthetic construct
IGGMQGQ

SEQ ID NO: 54484 - protein, 7 aa, synthetic construct
YNGYRDE

SEQ ID NO: 54485 - protein, 7 aa, synthetic construct
KGGMSSP

SEQ ID NO: 54486 - protein, 7 aa, synthetic construct
RNNSASP

SEQ ID NO: 54487 - protein, 7 aa, synthetic construct
KNQAMNG

SEQ ID NO: 54488 - protein, 7 aa, synthetic construct
VKHTNNY

SEQ ID NO: 54489 - protein, 7 aa, synthetic construct
STAQTKG

SEQ ID NO: 54490 - protein, 7 aa, synthetic construct
SRNMNQA

SEQ ID NO: 54491 - protein, 7 aa, synthetic construct
PFRDHSP

SEQ ID NO: 54492 - protein, 7 aa, synthetic construct
RPPATLP

SEQ ID NO: 54493 - protein, 7 aa, synthetic construct
NRQGAAA

SEQ ID NO: 54494 - protein, 7 aa, synthetic construct
LFEVRRD

SEQ ID NO: 54495 - protein, 7 aa, synthetic construct
HQRLGHG

SEQ ID NO: 54496 - protein, 7 aa, synthetic construct
NGMRMQE

SEQ ID NO: 54497 - protein, 7 aa, synthetic construct
NFKGGSA

SEQ ID NO: 54498 - protein, 7 aa, synthetic construct
GKNMPQW

SEQ ID NO: 54499 - protein, 7 aa, synthetic construct
TRETAMV

SEQ ID NO: 54500 - protein, 7 aa, synthetic construct
MSGARSA

SEQ ID NO: 54501 - protein, 7 aa, synthetic construct
NNNKSSN

SEQ ID NO: 54502 - protein, 7 aa, synthetic construct
KYAQTGP

SEQ ID NO: 54503 - protein, 7 aa, synthetic construct
RHVNYGA

SEQ ID NO: 54504 - protein, 7 aa, synthetic construct
MNTAGSA

SEQ ID NO: 54505 - protein, 7 aa, synthetic construct
ASVKVYG

SEQ ID NO: 54506 - protein, 7 aa, synthetic construct
YIMGGTN

SEQ ID NO: 54507 - protein, 7 aa, synthetic construct
GKVASQL

SEQ ID NO: 54508 - protein, 7 aa, synthetic construct
RGPSATY

SEQ ID NO: 54509 - protein, 7 aa, synthetic construct
KDKHVQY

SEQ ID NO: 54510 - protein, 7 aa, synthetic construct
KATQKGD

SEQ ID NO: 54511 - protein, 7 aa, synthetic construct
PKNSANP

SEQ ID NO: 54512 - protein, 7 aa, synthetic construct
MAGNTVP

SEQ ID NO: 54513 - protein, 7 aa, synthetic construct
HASGGTA

SEQ ID NO: 54514 - protein, 7 aa, synthetic construct
TTKGPSG

SEQ ID NO: 54515 - protein, 7 aa, synthetic construct
KFGDISI

SEQ ID NO: 54516 - protein, 7 aa, synthetic construct
QKKAAEM

SEQ ID NO: 54517 - protein, 7 aa, synthetic construct
QRQQSGP

SEQ ID NO: 54518 - protein, 7 aa, synthetic construct
SRTTGGI

SEQ ID NO: 54519 - protein, 7 aa, synthetic construct
SVSMPKF

SEQ ID NO: 54520 - protein, 7 aa, synthetic construct
GKWGVEK

SEQ ID NO: 54521 - protein, 7 aa, synthetic construct
RNHSQTV

SEQ ID NO: 54522 - protein, 7 aa, synthetic construct
RIAAIRE

SEQ ID NO: 54523 - protein, 7 aa, synthetic construct
SKENIGG

SEQ ID NO: 54524 - protein, 7 aa, synthetic construct
SVHRAGI

SEQ ID NO: 54525 - protein, 7 aa, synthetic construct
SSKAPNV

SEQ ID NO: 54526 - protein, 7 aa, synthetic construct
ANRPIGP

SEQ ID NO: 54527 - protein, 7 aa, synthetic construct
KDKNVAP

SEQ ID NO: 54528 - protein, 7 aa, synthetic construct
TYNNPAR

SEQ ID NO: 54529 - protein, 7 aa, synthetic construct
QTPGVKV

SEQ ID NO: 54530 - protein, 7 aa, synthetic construct
NTGARSP

SEQ ID NO: 54531 - protein, 7 aa, synthetic construct
KDNHTRY

SEQ ID NO: 54532 - protein, 7 aa, synthetic construct
IGGPKTL

SEQ ID NO: 54533 - protein, 7 aa, synthetic construct
PTPQSKG

SEQ ID NO: 54534 - protein, 7 aa, synthetic construct
RHKLDDQ

SEQ ID NO: 54535 - protein, 7 aa, synthetic construct
PNGAFRE

SEQ ID NO: 54536 - protein, 7 aa, synthetic construct
PDSVSKT

SEQ ID NO: 54537 - protein, 7 aa, synthetic construct
GGPVHAQ

SEQ ID NO: 54538 - protein, 7 aa, synthetic construct
MRGQSSQ

SEQ ID NO: 54539 - protein, 7 aa, synthetic construct
KDWGGMG

SEQ ID NO: 54540 - protein, 7 aa, synthetic construct
INTNMGS

SEQ ID NO: 54541 - protein, 7 aa, synthetic construct
HIVGNPS

SEQ ID NO: 54542 - protein, 7 aa, synthetic construct
NKDQKQG

SEQ ID NO: 54543 - protein, 7 aa, synthetic construct
QKPAIGN

SEQ ID NO: 54544 - protein, 7 aa, synthetic construct
DVRHREH

SEQ ID NO: 54545 - protein, 7 aa, synthetic construct
MGTTQAQ

SEQ ID NO: 54546 - protein, 7 aa, synthetic construct
WGQEKQH

SEQ ID NO: 54547 - protein, 7 aa, synthetic construct
YRADHNG

SEQ ID NO: 54548 - protein, 7 aa, synthetic construct
LNMAVAS

SEQ ID NO: 54549 - protein, 7 aa, synthetic construct
YHNGGTQ

SEQ ID NO: 54550 - protein, 7 aa, synthetic construct
REQAMRG

SEQ ID NO: 54551 - protein, 7 aa, synthetic construct
VRTNNQA

SEQ ID NO: 54552 - protein, 7 aa, synthetic construct
GDVYRIA

SEQ ID NO: 54553 - protein, 7 aa, synthetic construct
NARSVNP

SEQ ID NO: 54554 - protein, 7 aa, synthetic construct
LSPRTSI

SEQ ID NO: 54555 - protein, 7 aa, synthetic construct
NHTNSYK

SEQ ID NO: 54556 - protein, 7 aa, synthetic construct
NWSAKNP

SEQ ID NO: 54557 - protein, 7 aa, synthetic construct
TQRSSIA

SEQ ID NO: 54558 - protein, 7 aa, synthetic construct
GHKQHTF

SEQ ID NO: 54559 - protein, 7 aa, synthetic construct
NILSLTA

SEQ ID NO: 54560 - protein, 7 aa, synthetic construct
VISMTHG

SEQ ID NO: 54561 - protein, 7 aa, synthetic construct
KATNAAG

SEQ ID NO: 54562 - protein, 7 aa, synthetic construct
GKGTGQG

SEQ ID NO: 54563 - protein, 7 aa, synthetic construct
ARPVKSD

SEQ ID NO: 54564 - protein, 7 aa, synthetic construct
NGKQSMN

SEQ ID NO: 54565 - protein, 7 aa, synthetic construct
LNHTGSM

SEQ ID NO: 54566 - protein, 7 aa, synthetic construct
VIHKQEL

SEQ ID NO: 54567 - protein, 7 aa, synthetic construct
NKFSNSA

SEQ ID NO: 54568 - protein, 7 aa, synthetic construct
VFSNGYS

SEQ ID NO: 54569 - protein, 7 aa, synthetic construct
RDKGNMA

SEQ ID NO: 54570 - protein, 7 aa, synthetic construct
WHVKKDG

SEQ ID NO: 54571 - protein, 7 aa, synthetic construct
EKIKTAN

SEQ ID NO: 54572 - protein, 7 aa, synthetic construct
GPNNGQK

SEQ ID NO: 54573 - protein, 7 aa, synthetic construct
NGASKQN

SEQ ID NO: 54574 - protein, 7 aa, synthetic construct
KIPSANA

SEQ ID NO: 54575 - protein, 7 aa, synthetic construct
FTAAIPP

SEQ ID NO: 54576 - protein, 7 aa, synthetic construct
MVGRGES

SEQ ID NO: 54577 - protein, 7 aa, synthetic construct
GVSQSPF

SEQ ID NO: 54578 - protein, 7 aa, synthetic construct
LTDLRQG

SEQ ID NO: 54579 - protein, 7 aa, synthetic construct
PQNVRAG

SEQ ID NO: 54580 - protein, 7 aa, synthetic construct
SYRDREV

SEQ ID NO: 54581 - protein, 7 aa, synthetic construct
YELRPHG

SEQ ID NO: 54582 - protein, 7 aa, synthetic construct
AAQSIKP

SEQ ID NO: 54583 - protein, 7 aa, synthetic construct
GGRLTHG

SEQ ID NO: 54584 - protein, 7 aa, synthetic construct
SMVSLNP

SEQ ID NO: 54585 - protein, 7 aa, synthetic construct
HTKMQNQ

SEQ ID NO: 54586 - protein, 7 aa, synthetic construct
TDRKPQT

SEQ ID NO: 54587 - protein, 7 aa, synthetic construct
FGVNYHG

SEQ ID NO: 54588 - protein, 7 aa, synthetic construct
KVANQTF

SEQ ID NO: 54589 - protein, 7 aa, synthetic construct
KQPGTSM

SEQ ID NO: 54590 - protein, 7 aa, synthetic construct
PFKQSSE

SEQ ID NO: 54591 - protein, 7 aa, synthetic construct
RQGDTAP

SEQ ID NO: 54592 - protein, 7 aa, synthetic construct
LNPPHKG

SEQ ID NO: 54593 - protein, 7 aa, synthetic construct
SKSTGFV

SEQ ID NO: 54594 - protein, 7 aa, synthetic construct
SPVSQPV

SEQ ID NO: 54595 - protein, 7 aa, synthetic construct
ANTIAKP

SEQ ID NO: 54596 - protein, 7 aa, synthetic construct
KLLHAFD

SEQ ID NO: 54597 - protein, 7 aa, synthetic construct
TNHIFPE

SEQ ID NO: 54598 - protein, 7 aa, synthetic construct
EVKLHHK

SEQ ID NO: 54599 - protein, 7 aa, synthetic construct
NRQQSSA

SEQ ID NO: 54600 - protein, 7 aa, synthetic construct
FREQVVG

SEQ ID NO: 54601 - protein, 7 aa, synthetic construct
SRGAQGP

SEQ ID NO: 54602 - protein, 7 aa, synthetic construct
IDTRWAP

SEQ ID NO: 54603 - protein, 7 aa, synthetic construct
KFPTTSG

SEQ ID NO: 54604 - protein, 7 aa, synthetic construct
SRSNELS

SEQ ID NO: 54605 - protein, 7 aa, synthetic construct
HKSSSSY

SEQ ID NO: 54606 - protein, 7 aa, synthetic construct
VKNNMGA

SEQ ID NO: 54607 - protein, 7 aa, synthetic construct
EAGRWPG

SEQ ID NO: 54608 - protein, 7 aa, synthetic construct
GINKPQP

SEQ ID NO: 54609 - protein, 7 aa, synthetic construct
PRMNNEY

SEQ ID NO: 54610 - protein, 7 aa, synthetic construct
NRSSQAA

SEQ ID NO: 54611 - protein, 7 aa, synthetic construct
GKTQGYG

SEQ ID NO: 54612 - protein, 7 aa, synthetic construct
LMGHKQM

SEQ ID NO: 54613 - protein, 7 aa, synthetic construct
GKNGQSG

SEQ ID NO: 54614 - protein, 7 aa, synthetic construct
FNKQHTG

SEQ ID NO: 54615 - protein, 7 aa, synthetic construct
HTHRSMG

SEQ ID NO: 54616 - protein, 7 aa, synthetic construct
MNKYSQV

SEQ ID NO: 54617 - protein, 7 aa, synthetic construct
GRGNTDI

SEQ ID NO: 54618 - protein, 7 aa, synthetic construct
QGVTSVH

SEQ ID NO: 54619 - protein, 7 aa, synthetic construct
VNAGANN

SEQ ID NO: 54620 - protein, 7 aa, synthetic construct
REPITHM

SEQ ID NO: 54621 - protein, 7 aa, synthetic construct
YKSSSPA

SEQ ID NO: 54622 - protein, 7 aa, synthetic construct
KTQGNAS

SEQ ID NO: 54623 - protein, 7 aa, synthetic construct
EQRNRQA

SEQ ID NO: 54624 - protein, 7 aa, synthetic construct
KKMESTN

SEQ ID NO: 54625 - protein, 7 aa, synthetic construct
SHHHADA

SEQ ID NO: 54626 - protein, 7 aa, synthetic construct
AMRPGIN

SEQ ID NO: 54627 - protein, 7 aa, synthetic construct
RAGPRFD

SEQ ID NO: 54628 - protein, 7 aa, synthetic construct
KAHNPVP

SEQ ID NO: 54629 - protein, 7 aa, synthetic construct
RSTQGSP

SEQ ID NO: 54630 - protein, 7 aa, synthetic construct
NRGDPNG

SEQ ID NO: 54631 - protein, 7 aa, synthetic construct
IYDRDKG

SEQ ID NO: 54632 - protein, 7 aa, synthetic construct
SSKATMG

SEQ ID NO: 54633 - protein, 7 aa, synthetic construct
QRIGVQL

SEQ ID NO: 54634 - protein, 7 aa, synthetic construct
PDSMKVR

SEQ ID NO: 54635 - protein, 7 aa, synthetic construct
YKAQVKD

SEQ ID NO: 54636 - protein, 7 aa, synthetic construct
LGIHGSH

SEQ ID NO: 54637 - protein, 7 aa, synthetic construct
WQQVAKS

SEQ ID NO: 54638 - protein, 7 aa, synthetic construct
GLRGTSY

SEQ ID NO: 54639 - protein, 7 aa, synthetic construct
VLDTHNR

SEQ ID NO: 54640 - protein, 7 aa, synthetic construct
ARMSEDI

SEQ ID NO: 54641 - protein, 7 aa, synthetic construct
KMYDKVA

SEQ ID NO: 54642 - protein, 7 aa, synthetic construct
GNPHNIQ

SEQ ID NO: 54643 - protein, 7 aa, synthetic construct
PSQAHGG

SEQ ID NO: 54644 - protein, 7 aa, synthetic construct
SQQWGKE

SEQ ID NO: 54645 - protein, 7 aa, synthetic construct
HPKGEQT

SEQ ID NO: 54646 - protein, 7 aa, synthetic construct
EKGSGHN

SEQ ID NO: 54647 - protein, 7 aa, synthetic construct
NAKAWPA

SEQ ID NO: 54648 - protein, 7 aa, synthetic construct
RVQQSGM

SEQ ID NO: 54649 - protein, 7 aa, synthetic construct
RQATNAA

SEQ ID NO: 54650 - protein, 7 aa, synthetic construct
GPQRIAG

SEQ ID NO: 54651 - protein, 7 aa, synthetic construct
RLQIQNQ

SEQ ID NO: 54652 - protein, 7 aa, synthetic construct
GKSHAHA

SEQ ID NO: 54653 - protein, 7 aa, synthetic construct
AHPLLEV

SEQ ID NO: 54654 - protein, 7 aa, synthetic construct
NMPYAVG

SEQ ID NO: 54655 - protein, 7 aa, synthetic construct
YPAQTKG

SEQ ID NO: 54656 - protein, 7 aa, synthetic construct
LAPHKSG

SEQ ID NO: 54657 - protein, 7 aa, synthetic construct
NMKPSGG

SEQ ID NO: 54658 - protein, 7 aa, synthetic construct
STKTALG

SEQ ID NO: 54659 - protein, 7 aa, synthetic construct
TMSTPRG

SEQ ID NO: 54660 - protein, 7 aa, synthetic construct
LQRSVAN

SEQ ID NO: 54661 - protein, 7 aa, synthetic construct
KTGGITN

SEQ ID NO: 54662 - protein, 7 aa, synthetic construct
PRMGYAE

SEQ ID NO: 54663 - protein, 7 aa, synthetic construct
GWQHALE

SEQ ID NO: 54664 - protein, 7 aa, synthetic construct
KSGNAAA

SEQ ID NO: 54665 - protein, 7 aa, synthetic construct
PAKPTTS

SEQ ID NO: 54666 - protein, 7 aa, synthetic construct
PRTDHLM

SEQ ID NO: 54667 - protein, 7 aa, synthetic construct
AEKSAHA

SEQ ID NO: 54668 - protein, 7 aa, synthetic construct
GSPKQNG

SEQ ID NO: 54669 - protein, 7 aa, synthetic construct
HHSNASS

SEQ ID NO: 54670 - protein, 7 aa, synthetic construct
KSNASIA

SEQ ID NO: 54671 - protein, 7 aa, synthetic construct
HQVKTFP

SEQ ID NO: 54672 - protein, 7 aa, synthetic construct
RNMQGQG

SEQ ID NO: 54673 - protein, 7 aa, synthetic construct
SYNAGTP

SEQ ID NO: 54674 - protein, 7 aa, synthetic construct
IKYDGKS

SEQ ID NO: 54675 - protein, 7 aa, synthetic construct
QKTVSKD

SEQ ID NO: 54676 - protein, 7 aa, synthetic construct
KNTVQQA

SEQ ID NO: 54677 - protein, 7 aa, synthetic construct
KEMGGVG

SEQ ID NO: 54678 - protein, 7 aa, synthetic construct
TQFIQHA

SEQ ID NO: 54679 - protein, 7 aa, synthetic construct
RLKPYND

SEQ ID NO: 54680 - protein, 7 aa, synthetic construct
GMGVYKD

SEQ ID NO: 54681 - protein, 7 aa, synthetic construct
VPKTHMS

SEQ ID NO: 54682 - protein, 7 aa, synthetic construct
FIANGMK

SEQ ID NO: 54683 - protein, 7 aa, synthetic construct
QRVSAQP

SEQ ID NO: 54684 - protein, 7 aa, synthetic construct
MQPFQEK

SEQ ID NO: 54685 - protein, 7 aa, synthetic construct
IGQQKPV

SEQ ID NO: 54686 - protein, 7 aa, synthetic construct
QEMSPHD

SEQ ID NO: 54687 - protein, 7 aa, synthetic construct
NARQATG

SEQ ID NO: 54688 - protein, 7 aa, synthetic construct
YHTRTGE

SEQ ID NO: 54689 - protein, 7 aa, synthetic construct
HNTSRSN

SEQ ID NO: 54690 - protein, 7 aa, synthetic construct
SVTTQNS

SEQ ID NO: 54691 - protein, 7 aa, synthetic construct
YSNKMTG

SEQ ID NO: 54692 - protein, 7 aa, synthetic construct
NDPVSKR

SEQ ID NO: 54693 - protein, 7 aa, synthetic construct
MKSQKGE

SEQ ID NO: 54694 - protein, 7 aa, synthetic construct
QSKGTNG

SEQ ID NO: 54695 - protein, 7 aa, synthetic construct
VDTGYRG

SEQ ID NO: 54696 - protein, 7 aa, synthetic construct
QGVKSSG

SEQ ID NO: 54697 - protein, 7 aa, synthetic construct
WMTKEHI

SEQ ID NO: 54698 - protein, 7 aa, synthetic construct
KYDSGLK

SEQ ID NO: 54699 - protein, 7 aa, synthetic construct
QVSKSQA

SEQ ID NO: 54700 - protein, 7 aa, synthetic construct
TSTKVET

SEQ ID NO: 54701 - protein, 7 aa, synthetic construct
GVTHRQQ

SEQ ID NO: 54702 - protein, 7 aa, synthetic construct
DVRANIV

SEQ ID NO: 54703 - protein, 7 aa, synthetic construct
GAHSNQL

SEQ ID NO: 54704 - protein, 7 aa, synthetic construct
FKTASQS

SEQ ID NO: 54705 - protein, 7 aa, synthetic construct
MHKQFAQ

SEQ ID NO: 54706 - protein, 7 aa, synthetic construct
NKGGATA

SEQ ID NO: 54707 - protein, 7 aa, synthetic construct
NAHQTSY

SEQ ID NO: 54708 - protein, 7 aa, synthetic construct
NMAFRHD

SEQ ID NO: 54709 - protein, 7 aa, synthetic construct
MKAHWEE

SEQ ID NO: 54710 - protein, 7 aa, synthetic construct
RPTNAQT

SEQ ID NO: 54711 - protein, 7 aa, synthetic construct
NKNNGAN

SEQ ID NO: 54712 - protein, 7 aa, synthetic construct
FRPDPTT

SEQ ID NO: 54713 - protein, 7 aa, synthetic construct
KATSSIG

SEQ ID NO: 54714 - protein, 7 aa, synthetic construct
TDSMNWE

SEQ ID NO: 54715 - protein, 7 aa, synthetic construct
FSKLDES

SEQ ID NO: 54716 - protein, 7 aa, synthetic construct
HTKFPRD

SEQ ID NO: 54717 - protein, 7 aa, synthetic construct
NGNSYVY

SEQ ID NO: 54718 - protein, 7 aa, synthetic construct
NQAQAPK

SEQ ID NO: 54719 - protein, 7 aa, synthetic construct
ITRSNPD

SEQ ID NO: 54720 - protein, 7 aa, synthetic construct
KSTPNTS

SEQ ID NO: 54721 - protein, 7 aa, synthetic construct
GNGQGMK

SEQ ID NO: 54722 - protein, 7 aa, synthetic construct
KDRNSQF

SEQ ID NO: 54723 - protein, 7 aa, synthetic construct
LGKDKVG

SEQ ID NO: 54724 - protein, 7 aa, synthetic construct
IGFTGGN

SEQ ID NO: 54725 - protein, 7 aa, synthetic construct
LNPPSAP

SEQ ID NO: 54726 - protein, 7 aa, synthetic construct
RLHINQP

SEQ ID NO: 54727 - protein, 7 aa, synthetic construct
ATGTNKV

SEQ ID NO: 54728 - protein, 7 aa, synthetic construct
NHIIKSE

SEQ ID NO: 54729 - protein, 7 aa, synthetic construct
NGARADW

SEQ ID NO: 54730 - protein, 7 aa, synthetic construct
HTQGKPP

SEQ ID NO: 54731 - protein, 7 aa, synthetic construct
SGSRNEP

SEQ ID NO: 54732 - protein, 7 aa, synthetic construct
RPKSEHP

SEQ ID NO: 54733 - protein, 7 aa, synthetic construct
SKPGNTA

SEQ ID NO: 54734 - protein, 7 aa, synthetic construct
TGSNKQP

SEQ ID NO: 54735 - protein, 7 aa, synthetic construct
NTQSRQG

SEQ ID NO: 54736 - protein, 7 aa, synthetic construct
GKPNAVQ

SEQ ID NO: 54737 - protein, 7 aa, synthetic construct
ATQPMMM

SEQ ID NO: 54738 - protein, 7 aa, synthetic construct
AYSSNVA

SEQ ID NO: 54739 - protein, 7 aa, synthetic construct
TAHKGPN

SEQ ID NO: 54740 - protein, 7 aa, synthetic construct
MRTAQMT

SEQ ID NO: 54741 - protein, 7 aa, synthetic construct
HMGSVMA

SEQ ID NO: 54742 - protein, 7 aa, synthetic construct
QAIRMSQ

SEQ ID NO: 54743 - protein, 7 aa, synthetic construct
ILDPSLR

SEQ ID NO: 54744 - protein, 7 aa, synthetic construct
VKYQHVE

SEQ ID NO: 54745 - protein, 7 aa, synthetic construct
TSKMTAP

SEQ ID NO: 54746 - protein, 7 aa, synthetic construct
YEDVTKR

SEQ ID NO: 54747 - protein, 7 aa, synthetic construct
TSKGYHD

SEQ ID NO: 54748 - protein, 7 aa, synthetic construct
VGGGLKV

SEQ ID NO: 54749 - protein, 7 aa, synthetic construct
FSSANRQ

SEQ ID NO: 54750 - protein, 7 aa, synthetic construct
RYGNPME

SEQ ID NO: 54751 - protein, 7 aa, synthetic construct
FRTSPDM

SEQ ID NO: 54752 - protein, 7 aa, synthetic construct
GGRAMNV

SEQ ID NO: 54753 - protein, 7 aa, synthetic construct
SKGANSG

SEQ ID NO: 54754 - protein, 7 aa, synthetic construct
VTARGTT

SEQ ID NO: 54755 - protein, 7 aa, synthetic construct
YKSATTA

SEQ ID NO: 54756 - protein, 7 aa, synthetic construct
HRGNGQT

SEQ ID NO: 54757 - protein, 7 aa, synthetic construct
VRPNGMD

SEQ ID NO: 54758 - protein, 7 aa, synthetic construct
AVRYGSE

SEQ ID NO: 54759 - protein, 7 aa, synthetic construct
DKYPVGL

SEQ ID NO: 54760 - protein, 7 aa, synthetic construct
MDRTNGP

SEQ ID NO: 54761 - protein, 7 aa, synthetic construct
ETQKHNG

SEQ ID NO: 54762 - protein, 7 aa, synthetic construct
DMARQPK

SEQ ID NO: 54763 - protein, 7 aa, synthetic construct
DKINPMP

SEQ ID NO: 54764 - protein, 7 aa, synthetic construct
GLHDTTP

SEQ ID NO: 54765 - protein, 7 aa, synthetic construct
KTNGTSM

SEQ ID NO: 54766 - protein, 7 aa, synthetic construct
KTFPNIQ

SEQ ID NO: 54767 - protein, 7 aa, synthetic construct
GPSNTNN

SEQ ID NO: 54768 - protein, 7 aa, synthetic construct
PNGDRKG

SEQ ID NO: 54769 - protein, 7 aa, synthetic construct
RFNSGAD

SEQ ID NO: 54770 - protein, 7 aa, synthetic construct
VKLPKLP

SEQ ID NO: 54771 - protein, 7 aa, synthetic construct
VANQRVD

SEQ ID NO: 54772 - protein, 7 aa, synthetic construct
FKERNAE

SEQ ID NO: 54773 - protein, 7 aa, synthetic construct
PKVSQAA

SEQ ID NO: 54774 - protein, 7 aa, synthetic construct
KVPTAMA

SEQ ID NO: 54775 - protein, 7 aa, synthetic construct
FANKSAA

SEQ ID NO: 54776 - protein, 7 aa, synthetic construct
TPYSKGT

SEQ ID NO: 54777 - protein, 7 aa, synthetic construct
VGKTTGM

SEQ ID NO: 54778 - protein, 7 aa, synthetic construct
SFAKTQA

SEQ ID NO: 54779 - protein, 7 aa, synthetic construct
QKTTSIG

SEQ ID NO: 54780 - protein, 7 aa, synthetic construct
NHVERNQ

SEQ ID NO: 54781 - protein, 7 aa, synthetic construct
GGTKVSG

SEQ ID NO: 54782 - protein, 7 aa, synthetic construct
LLGNPSM

SEQ ID NO: 54783 - protein, 7 aa, synthetic construct
FKNIAKD

SEQ ID NO: 54784 - protein, 7 aa, synthetic construct
RGPSTGQ

SEQ ID NO: 54785 - protein, 7 aa, synthetic construct
NIKYGSA

SEQ ID NO: 54786 - protein, 7 aa, synthetic construct
APLPKES

SEQ ID NO: 54787 - protein, 7 aa, synthetic construct
NPKQATM

SEQ ID NO: 54788 - protein, 7 aa, synthetic construct
IKKTVDM

SEQ ID NO: 54789 - protein, 7 aa, synthetic construct
TKATVKD

SEQ ID NO: 54790 - protein, 7 aa, synthetic construct
VPFPERA

SEQ ID NO: 54791 - protein, 7 aa, synthetic construct
DRYTPGL

SEQ ID NO: 54792 - protein, 7 aa, synthetic construct
RDAMNRA

SEQ ID NO: 54793 - protein, 7 aa, synthetic construct
NNSGAMY

SEQ ID NO: 54794 - protein, 7 aa, synthetic construct
RAEYPKA

SEQ ID NO: 54795 - protein, 7 aa, synthetic construct
SPMRHEP

SEQ ID NO: 54796 - protein, 7 aa, synthetic construct
GVKTMTA

SEQ ID NO: 54797 - protein, 7 aa, synthetic construct
NQNKAPI

SEQ ID NO: 54798 - protein, 7 aa, synthetic construct
AYGYGTA

SEQ ID NO: 54799 - protein, 7 aa, synthetic construct
ARQARMD

SEQ ID NO: 54800 - protein, 7 aa, synthetic construct
RVNQAND

SEQ ID NO: 54801 - protein, 7 aa, synthetic construct
QDMHGRG

SEQ ID NO: 54802 - protein, 7 aa, synthetic construct
KQPANTA

SEQ ID NO: 54803 - protein, 7 aa, synthetic construct
QKNVAAV

SEQ ID NO: 54804 - protein, 7 aa, synthetic construct
SKKPSND

SEQ ID NO: 54805 - protein, 7 aa, synthetic construct
NQRVAEQ

SEQ ID NO: 54806 - protein, 7 aa, synthetic construct
LTRGHEM

SEQ ID NO: 54807 - protein, 7 aa, synthetic construct
RERNQMA

SEQ ID NO: 54808 - protein, 7 aa, synthetic construct
QHKLVAV

SEQ ID NO: 54809 - protein, 7 aa, synthetic construct
VKHSMQA

SEQ ID NO: 54810 - protein, 7 aa, synthetic construct
FKPSSQP

SEQ ID NO: 54811 - protein, 7 aa, synthetic construct
RKLSEEI

SEQ ID NO: 54812 - protein, 7 aa, synthetic construct
RDLVMKS

SEQ ID NO: 54813 - protein, 7 aa, synthetic construct
PTRGTLG

SEQ ID NO: 54814 - protein, 7 aa, synthetic construct
NKVVGLL

SEQ ID NO: 54815 - protein, 7 aa, synthetic construct
TNKAATN

SEQ ID NO: 54816 - protein, 7 aa, synthetic construct
YVSQRPE

SEQ ID NO: 54817 - protein, 7 aa, synthetic construct
SARPMPS

SEQ ID NO: 54818 - protein, 7 aa, synthetic construct
HRSDPHD

SEQ ID NO: 54819 - protein, 7 aa, synthetic construct
GKMSNNP

SEQ ID NO: 54820 - protein, 7 aa, synthetic construct
QIAQATG

SEQ ID NO: 54821 - protein, 7 aa, synthetic construct
KFDWEQP

SEQ ID NO: 54822 - protein, 7 aa, synthetic construct
YGANKNG

SEQ ID NO: 54823 - protein, 7 aa, synthetic construct
SSPDSQR

SEQ ID NO: 54824 - protein, 7 aa, synthetic construct
LTKQSYE

SEQ ID NO: 54825 - protein, 7 aa, synthetic construct
SQISMNK

SEQ ID NO: 54826 - protein, 7 aa, synthetic construct
GPNSKNA

SEQ ID NO: 54827 - protein, 7 aa, synthetic construct
NYPQTRE

SEQ ID NO: 54828 - protein, 7 aa, synthetic construct
YKQSLNP

SEQ ID NO: 54829 - protein, 7 aa, synthetic construct
RGEGMKY

SEQ ID NO: 54830 - protein, 7 aa, synthetic construct
KTTMGQG

SEQ ID NO: 54831 - protein, 7 aa, synthetic construct
AVPLNLA

SEQ ID NO: 54832 - protein, 7 aa, synthetic construct
GHAKHTD

SEQ ID NO: 54833 - protein, 7 aa, synthetic construct
NRTQSAG

SEQ ID NO: 54834 - protein, 7 aa, synthetic construct
RGNVEVK

SEQ ID NO: 54835 - protein, 7 aa, synthetic construct
KGNSGMV

SEQ ID NO: 54836 - protein, 7 aa, synthetic construct
DHKGNIA

SEQ ID NO: 54837 - protein, 7 aa, synthetic construct
TDPKRMT

SEQ ID NO: 54838 - protein, 7 aa, synthetic construct
WGGGLIT

SEQ ID NO: 54839 - protein, 7 aa, synthetic construct
REQRQVG

SEQ ID NO: 54840 - protein, 7 aa, synthetic construct
YGLARPA

SEQ ID NO: 54841 - protein, 7 aa, synthetic construct
APTTRGP

SEQ ID NO: 54842 - protein, 7 aa, synthetic construct
VPHSKVA

SEQ ID NO: 54843 - protein, 7 aa, synthetic construct
FSNSLSA

SEQ ID NO: 54844 - protein, 7 aa, synthetic construct
WSAVKDQ

SEQ ID NO: 54845 - protein, 7 aa, synthetic construct
RNVTGQP

SEQ ID NO: 54846 - protein, 7 aa, synthetic construct
SKKDMDI

SEQ ID NO: 54847 - protein, 7 aa, synthetic construct
KGYGDQA

SEQ ID NO: 54848 - protein, 7 aa, synthetic construct
VAATIHG

SEQ ID NO: 54849 - protein, 7 aa, synthetic construct
KRSNWED

SEQ ID NO: 54850 - protein, 7 aa, synthetic construct
LGSTMVR

SEQ ID NO: 54851 - protein, 7 aa, synthetic construct
RMDYGNE

SEQ ID NO: 54852 - protein, 7 aa, synthetic construct
HFNLEKV

SEQ ID NO: 54853 - protein, 7 aa, synthetic construct
ATRSSTP

SEQ ID NO: 54854 - protein, 7 aa, synthetic construct
QSSSHLT

SEQ ID NO: 54855 - protein, 7 aa, synthetic construct
VKAGSEM

SEQ ID NO: 54856 - protein, 7 aa, synthetic construct
PMKALTP

SEQ ID NO: 54857 - protein, 7 aa, synthetic construct
NKDKSSM

SEQ ID NO: 54858 - protein, 7 aa, synthetic construct
GNKISTG

SEQ ID NO: 54859 - protein, 7 aa, synthetic construct
SRTTLNV

SEQ ID NO: 54860 - protein, 7 aa, synthetic construct
KSSAVSA

SEQ ID NO: 54861 - protein, 7 aa, synthetic construct
SRGMSSD

SEQ ID NO: 54862 - protein, 7 aa, synthetic construct
QYQKGKD

SEQ ID NO: 54863 - protein, 7 aa, synthetic construct
ARATSLS

SEQ ID NO: 54864 - protein, 7 aa, synthetic construct
PNSGKVG

SEQ ID NO: 54865 - protein, 7 aa, synthetic construct
KPGMYSE

SEQ ID NO: 54866 - protein, 7 aa, synthetic construct
NTSIKSP

SEQ ID NO: 54867 - protein, 7 aa, synthetic construct
YMKAREM

SEQ ID NO: 54868 - protein, 7 aa, synthetic construct
TWAVNKE

SEQ ID NO: 54869 - protein, 7 aa, synthetic construct
HLSAANP

SEQ ID NO: 54870 - protein, 7 aa, synthetic construct
QLGSKVG

SEQ ID NO: 54871 - protein, 7 aa, synthetic construct
TKYASQE

SEQ ID NO: 54872 - protein, 7 aa, synthetic construct
TPGKPPA

SEQ ID NO: 54873 - protein, 7 aa, synthetic construct
MMRPSNP

SEQ ID NO: 54874 - protein, 7 aa, synthetic construct
KGQAAGG

SEQ ID NO: 54875 - protein, 7 aa, synthetic construct
QIRTTVH

SEQ ID NO: 54876 - protein, 7 aa, synthetic construct
KKEWTGQ

SEQ ID NO: 54877 - protein, 7 aa, synthetic construct
VAGITMG

SEQ ID NO: 54878 - protein, 7 aa, synthetic construct
SSPRTMG

SEQ ID NO: 54879 - protein, 7 aa, synthetic construct
RNSESPY

SEQ ID NO: 54880 - protein, 7 aa, synthetic construct
PNQGHTS

SEQ ID NO: 54881 - protein, 7 aa, synthetic construct
HIKNGDV

SEQ ID NO: 54882 - protein, 7 aa, synthetic construct
LEAVKAS

SEQ ID NO: 54883 - protein, 7 aa, synthetic construct
IKSMSLV

SEQ ID NO: 54884 - protein, 7 aa, synthetic construct
RATNVPD

SEQ ID NO: 54885 - protein, 7 aa, synthetic construct
ARSAVKE

SEQ ID NO: 54886 - protein, 7 aa, synthetic construct
MKQKENT

SEQ ID NO: 54887 - protein, 7 aa, synthetic construct
YGASFTG

SEQ ID NO: 54888 - protein, 7 aa, synthetic construct
KNAGATP

SEQ ID NO: 54889 - protein, 7 aa, synthetic construct
KQSDTKP

SEQ ID NO: 54890 - protein, 7 aa, synthetic construct
NPNANHS

SEQ ID NO: 54891 - protein, 7 aa, synthetic construct
SRQGSTA

SEQ ID NO: 54892 - protein, 7 aa, synthetic construct
DRFNNRT

SEQ ID NO: 54893 - protein, 7 aa, synthetic construct
KSGNYEH

SEQ ID NO: 54894 - protein, 7 aa, synthetic construct
IMGQNPQ

SEQ ID NO: 54895 - protein, 7 aa, synthetic construct
AIHRGPM

SEQ ID NO: 54896 - protein, 7 aa, synthetic construct
FRGAITV

SEQ ID NO: 54897 - protein, 7 aa, synthetic construct
YNTKSTA

SEQ ID NO: 54898 - protein, 7 aa, synthetic construct
TPVKDQG

SEQ ID NO: 54899 - protein, 7 aa, synthetic construct
GSSIHTP

SEQ ID NO: 54900 - protein, 7 aa, synthetic construct
YKQPTSA

SEQ ID NO: 54901 - protein, 7 aa, synthetic construct
IPPTPQG

SEQ ID NO: 54902 - protein, 7 aa, synthetic construct
KQTQGTS

SEQ ID NO: 54903 - protein, 7 aa, synthetic construct
KFVSGDF

SEQ ID NO: 54904 - protein, 7 aa, synthetic construct
LKSSPER

SEQ ID NO: 54905 - protein, 7 aa, synthetic construct
REGMQGW

SEQ ID NO: 54906 - protein, 7 aa, synthetic construct
VPLRSGA

SEQ ID NO: 54907 - protein, 7 aa, synthetic construct
QRSQQTP

SEQ ID NO: 54908 - protein, 7 aa, synthetic construct
HMKMVPE

SEQ ID NO: 54909 - protein, 7 aa, synthetic construct
TIHAERM

SEQ ID NO: 54910 - protein, 7 aa, synthetic construct
RASSGVG

SEQ ID NO: 54911 - protein, 7 aa, synthetic construct
TIHNGTR

SEQ ID NO: 54912 - protein, 7 aa, synthetic construct
YGYRLKE

SEQ ID NO: 54913 - protein, 7 aa, synthetic construct
LNAMARG

SEQ ID NO: 54914 - protein, 7 aa, synthetic construct
FMHARGS

SEQ ID NO: 54915 - protein, 7 aa, synthetic construct
VSNSKQG

SEQ ID NO: 54916 - protein, 7 aa, synthetic construct
AKPVQPQ

SEQ ID NO: 54917 - protein, 7 aa, synthetic construct
RTAMPSN

SEQ ID NO: 54918 - protein, 7 aa, synthetic construct
KQPPVGG

SEQ ID NO: 54919 - protein, 7 aa, synthetic construct
RPPNASN

SEQ ID NO: 54920 - protein, 7 aa, synthetic construct
VTGTMRG

SEQ ID NO: 54921 - protein, 7 aa, synthetic construct
HGTAKGP

SEQ ID NO: 54922 - protein, 7 aa, synthetic construct
YQMHSKQ

SEQ ID NO: 54923 - protein, 7 aa, synthetic construct
QNSKSGG

SEQ ID NO: 54924 - protein, 7 aa, synthetic construct
LYARVGD

SEQ ID NO: 54925 - protein, 7 aa, synthetic construct
QGDYSSH

SEQ ID NO: 54926 - protein, 7 aa, synthetic construct
VGSTYVM

SEQ ID NO: 54927 - protein, 7 aa, synthetic construct
TTSTTRP

SEQ ID NO: 54928 - protein, 7 aa, synthetic construct
VNSKGAT

SEQ ID NO: 54929 - protein, 7 aa, synthetic construct
RQKDITG

SEQ ID NO: 54930 - protein, 7 aa, synthetic construct
QNAHAGP

SEQ ID NO: 54931 - protein, 7 aa, synthetic construct
HVKIVVG

SEQ ID NO: 54932 - protein, 7 aa, synthetic construct
YYSKQQS

SEQ ID NO: 54933 - protein, 7 aa, synthetic construct
APVHSVS

SEQ ID NO: 54934 - protein, 7 aa, synthetic construct
VMDKQYS

SEQ ID NO: 54935 - protein, 7 aa, synthetic construct
KQGAMGA

SEQ ID NO: 54936 - protein, 7 aa, synthetic construct
YRGENIN

SEQ ID NO: 54937 - protein, 7 aa, synthetic construct
NASDMKG

SEQ ID NO: 54938 - protein, 7 aa, synthetic construct
MLDFQQA

SEQ ID NO: 54939 - protein, 7 aa, synthetic construct
RGDYSDT

SEQ ID NO: 54940 - protein, 7 aa, synthetic construct
SQYKTHV

SEQ ID NO: 54941 - protein, 7 aa, synthetic construct
EIEVKHA

SEQ ID NO: 54942 - protein, 7 aa, synthetic construct
IAENNRK

SEQ ID NO: 54943 - protein, 7 aa, synthetic construct
TWNKEHS

SEQ ID NO: 54944 - protein, 7 aa, synthetic construct
RARESEL

SEQ ID NO: 54945 - protein, 7 aa, synthetic construct
VPRTNQS

SEQ ID NO: 54946 - protein, 7 aa, synthetic construct
NHYGTNE

SEQ ID NO: 54947 - protein, 7 aa, synthetic construct
DEYGGRS

SEQ ID NO: 54948 - protein, 7 aa, synthetic construct
ARQTSNP

SEQ ID NO: 54949 - protein, 7 aa, synthetic construct
QTPTTAH

SEQ ID NO: 54950 - protein, 7 aa, synthetic construct
NSARPVL

SEQ ID NO: 54951 - protein, 7 aa, synthetic construct
AMSGGQW

SEQ ID NO: 54952 - protein, 7 aa, synthetic construct
RGGVLGD

SEQ ID NO: 54953 - protein, 7 aa, synthetic construct
GMFGPTS

SEQ ID NO: 54954 - protein, 7 aa, synthetic construct
GSKTMKE

SEQ ID NO: 54955 - protein, 7 aa, synthetic construct
LKGKESN

SEQ ID NO: 54956 - protein, 7 aa, synthetic construct
SKDPRWA

SEQ ID NO: 54957 - protein, 7 aa, synthetic construct
GTKSSDP

SEQ ID NO: 54958 - protein, 7 aa, synthetic construct
TDKHNIP

SEQ ID NO: 54959 - protein, 7 aa, synthetic construct
RNGTMGG

SEQ ID NO: 54960 - protein, 7 aa, synthetic construct
INRNTVI

SEQ ID NO: 54961 - protein, 7 aa, synthetic construct
HGHWTGD

SEQ ID NO: 54962 - protein, 7 aa, synthetic construct
QAKNAQG

SEQ ID NO: 54963 - protein, 7 aa, synthetic construct
QKGMNYD

SEQ ID NO: 54964 - protein, 7 aa, synthetic construct
EMYKKQT

SEQ ID NO: 54965 - protein, 7 aa, synthetic construct
HQHSGRM

SEQ ID NO: 54966 - protein, 7 aa, synthetic construct
IEYRHSE

SEQ ID NO: 54967 - protein, 7 aa, synthetic construct
KVGGNEL

SEQ ID NO: 54968 - protein, 7 aa, synthetic construct
KISAGKD

SEQ ID NO: 54969 - protein, 7 aa, synthetic construct
ELQAKAA

SEQ ID NO: 54970 - protein, 7 aa, synthetic construct
HVTMRVN

SEQ ID NO: 54971 - protein, 7 aa, synthetic construct
KPATQKD

SEQ ID NO: 54972 - protein, 7 aa, synthetic construct
YSGPQIP

SEQ ID NO: 54973 - protein, 7 aa, synthetic construct
QMREPNA

SEQ ID NO: 54974 - protein, 7 aa, synthetic construct
RGEPFKG

SEQ ID NO: 54975 - protein, 7 aa, synthetic construct
SMGKNSP

SEQ ID NO: 54976 - protein, 7 aa, synthetic construct
KQAHTIL

SEQ ID NO: 54977 - protein, 7 aa, synthetic construct
MADHKNA

SEQ ID NO: 54978 - protein, 7 aa, synthetic construct
GKPQYNV

SEQ ID NO: 54979 - protein, 7 aa, synthetic construct
IGQRDVV

SEQ ID NO: 54980 - protein, 7 aa, synthetic construct
WMKFTEA

SEQ ID NO: 54981 - protein, 7 aa, synthetic construct
LPNQTNI

SEQ ID NO: 54982 - protein, 7 aa, synthetic construct
SKSNNPA

SEQ ID NO: 54983 - protein, 7 aa, synthetic construct
FHSNRES

SEQ ID NO: 54984 - protein, 7 aa, synthetic construct
VGNQKQG

SEQ ID NO: 54985 - protein, 7 aa, synthetic construct
MLSVTTP

SEQ ID NO: 54986 - protein, 7 aa, synthetic construct
VEIRGHA

SEQ ID NO: 54987 - protein, 7 aa, synthetic construct
KDRHRED

SEQ ID NO: 54988 - protein, 7 aa, synthetic construct
QPNKMQG

SEQ ID NO: 54989 - protein, 7 aa, synthetic construct
MKAPAGS

SEQ ID NO: 54990 - protein, 7 aa, synthetic construct
TGNSQKP

SEQ ID NO: 54991 - protein, 7 aa, synthetic construct
YSPTSHS

SEQ ID NO: 54992 - protein, 7 aa, synthetic construct
NAKASVG

SEQ ID NO: 54993 - protein, 7 aa, synthetic construct
TGVNKTA

SEQ ID NO: 54994 - protein, 7 aa, synthetic construct
RQTSAQA

SEQ ID NO: 54995 - protein, 7 aa, synthetic construct
NMKPGSM

SEQ ID NO: 54996 - protein, 7 aa, synthetic construct
DRQGQSL

SEQ ID NO: 54997 - protein, 7 aa, synthetic construct
QKNPGQA

SEQ ID NO: 54998 - protein, 7 aa, synthetic construct
IKNLRLP

SEQ ID NO: 54999 - protein, 7 aa, synthetic construct
NKSNTAA

SEQ ID NO: 55000 - protein, 7 aa, synthetic construct
NKSGKEA

SEQ ID NO: 55001 - protein, 7 aa, synthetic construct
NGKSPGA

SEQ ID NO: 55002 - protein, 7 aa, synthetic construct
YRPTIEA

SEQ ID NO: 55003 - protein, 7 aa, synthetic construct
QGTRITH

SEQ ID NO: 55004 - protein, 7 aa, synthetic construct
RISGASQ

SEQ ID NO: 55005 - protein, 7 aa, synthetic construct
TDNQFKY

SEQ ID NO: 55006 - protein, 7 aa, synthetic construct
KNVSSFP

SEQ ID NO: 55007 - protein, 7 aa, synthetic construct
NEMARVA

SEQ ID NO: 55008 - protein, 7 aa, synthetic construct
EPARLPH

SEQ ID NO: 55009 - protein, 7 aa, synthetic construct
MSEKMSP

SEQ ID NO: 55010 - protein, 7 aa, synthetic construct
VRPIMEL

SEQ ID NO: 55011 - protein, 7 aa, synthetic construct
IEAHARN

SEQ ID NO: 55012 - protein, 7 aa, synthetic construct
NNKKEMG

SEQ ID NO: 55013 - protein, 7 aa, synthetic construct
YLQHNRP

SEQ ID NO: 55014 - protein, 7 aa, synthetic construct
TNKPTGS

SEQ ID NO: 55015 - protein, 7 aa, synthetic construct
ESMATRR

SEQ ID NO: 55016 - protein, 7 aa, synthetic construct
YKPQTTS

SEQ ID NO: 55017 - protein, 7 aa, synthetic construct
AKPVDST

SEQ ID NO: 55018 - protein, 7 aa, synthetic construct
TGNNAKA

SEQ ID NO: 55019 - protein, 7 aa, synthetic construct
YTGKPSG

SEQ ID NO: 55020 - protein, 7 aa, synthetic construct
SSNSKMV

SEQ ID NO: 55021 - protein, 7 aa, synthetic construct
KQRIEGD

SEQ ID NO: 55022 - protein, 7 aa, synthetic construct
RSEVMHS

SEQ ID NO: 55023 - protein, 7 aa, synthetic construct
TGRPLMD

SEQ ID NO: 55024 - protein, 7 aa, synthetic construct
SVGATHF

SEQ ID NO: 55025 - protein, 7 aa, synthetic construct
AMTQIPS

SEQ ID NO: 55026 - protein, 7 aa, synthetic construct
VNNTQNG

SEQ ID NO: 55027 - protein, 7 aa, synthetic construct
PKSVSSF

SEQ ID NO: 55028 - protein, 7 aa, synthetic construct
TVHTKTP

SEQ ID NO: 55029 - protein, 7 aa, synthetic construct
YHNSPKG

SEQ ID NO: 55030 - protein, 7 aa, synthetic construct
GKKDTAN

SEQ ID NO: 55031 - protein, 7 aa, synthetic construct
YPKVKME

SEQ ID NO: 55032 - protein, 7 aa, synthetic construct
APAARGS

SEQ ID NO: 55033 - protein, 7 aa, synthetic construct
KNNGTSG

SEQ ID NO: 55034 - protein, 7 aa, synthetic construct
YKMKAEA

SEQ ID NO: 55035 - protein, 7 aa, synthetic construct
TYGPRLE

SEQ ID NO: 55036 - protein, 7 aa, synthetic construct
RPQATQA

SEQ ID NO: 55037 - protein, 7 aa, synthetic construct
MYNGQSP

SEQ ID NO: 55038 - protein, 7 aa, synthetic construct
AIPYPHP

SEQ ID NO: 55039 - protein, 7 aa, synthetic construct
PIKSSGY

SEQ ID NO: 55040 - protein, 7 aa, synthetic construct
KNPNGAM

SEQ ID NO: 55041 - protein, 7 aa, synthetic construct
RKGQPDL

SEQ ID NO: 55042 - protein, 7 aa, synthetic construct
KLPSSAA

SEQ ID NO: 55043 - protein, 7 aa, synthetic construct
QGGGNTW

SEQ ID NO: 55044 - protein, 7 aa, synthetic construct
KDKHSVM

SEQ ID NO: 55045 - protein, 7 aa, synthetic construct
MKGPAKD

SEQ ID NO: 55046 - protein, 7 aa, synthetic construct
NLAQRGG

SEQ ID NO: 55047 - protein, 7 aa, synthetic construct
FKPSQPT

SEQ ID NO: 55048 - protein, 7 aa, synthetic construct
NKTILKN

SEQ ID NO: 55049 - protein, 7 aa, synthetic construct
YMKSTSA

SEQ ID NO: 55050 - protein, 7 aa, synthetic construct
GKYSNMV

SEQ ID NO: 55051 - protein, 7 aa, synthetic construct
SVAKGFT

SEQ ID NO: 55052 - protein, 7 aa, synthetic construct
GSPHNGM

SEQ ID NO: 55053 - protein, 7 aa, synthetic construct
QGSSKMG

SEQ ID NO: 55054 - protein, 7 aa, synthetic construct
QRMGSHN

SEQ ID NO: 55055 - protein, 7 aa, synthetic construct
MKNSPQN

SEQ ID NO: 55056 - protein, 7 aa, synthetic construct
NERKPGY

SEQ ID NO: 55057 - protein, 7 aa, synthetic construct
YAHYKLD

SEQ ID NO: 55058 - protein, 7 aa, synthetic construct
GRNQTIP

SEQ ID NO: 55059 - protein, 7 aa, synthetic construct
WKHFEGA

SEQ ID NO: 55060 - protein, 7 aa, synthetic construct
QFKASMV

SEQ ID NO: 55061 - protein, 7 aa, synthetic construct
RMIGQDK

SEQ ID NO: 55062 - protein, 7 aa, synthetic construct
NTYNRHE

SEQ ID NO: 55063 - protein, 7 aa, synthetic construct
YPEHKHT

SEQ ID NO: 55064 - protein, 7 aa, synthetic construct
TNHPGPF

SEQ ID NO: 55065 - protein, 7 aa, synthetic construct
TDHRSSG

SEQ ID NO: 55066 - protein, 7 aa, synthetic construct
SKTMSSM

SEQ ID NO: 55067 - protein, 7 aa, synthetic construct
ENNRWPG

SEQ ID NO: 55068 - protein, 7 aa, synthetic construct
DAHMRKN

SEQ ID NO: 55069 - protein, 7 aa, synthetic construct
THANRGL

SEQ ID NO: 55070 - protein, 7 aa, synthetic construct
GKSVGMG

SEQ ID NO: 55071 - protein, 7 aa, synthetic construct
ASKMTQA

SEQ ID NO: 55072 - protein, 7 aa, synthetic construct
STKSNMA

SEQ ID NO: 55073 - protein, 7 aa, synthetic construct
PHRNDHV

SEQ ID NO: 55074 - protein, 7 aa, synthetic construct
KQQPDKF

SEQ ID NO: 55075 - protein, 7 aa, synthetic construct
TFNSTMR

SEQ ID NO: 55076 - protein, 7 aa, synthetic construct
YKHPRDL

SEQ ID NO: 55077 - protein, 7 aa, synthetic construct
VNKQNHV

SEQ ID NO: 55078 - protein, 7 aa, synthetic construct
LLMAQAG

SEQ ID NO: 55079 - protein, 7 aa, synthetic construct
HSKDLKG

SEQ ID NO: 55080 - protein, 7 aa, synthetic construct
PSKNSHE

SEQ ID NO: 55081 - protein, 7 aa, synthetic construct
LHHGSNA

SEQ ID NO: 55082 - protein, 7 aa, synthetic construct
KQPQQTS

SEQ ID NO: 55083 - protein, 7 aa, synthetic construct
TKSNRDD

SEQ ID NO: 55084 - protein, 7 aa, synthetic construct
GGHSNNG

SEQ ID NO: 55085 - protein, 7 aa, synthetic construct
KQIHING

SEQ ID NO: 55086 - protein, 7 aa, synthetic construct
SGTLKIV

SEQ ID NO: 55087 - protein, 7 aa, synthetic construct
HNIDTRI

SEQ ID NO: 55088 - protein, 7 aa, synthetic construct
MKGTGAP

SEQ ID NO: 55089 - protein, 7 aa, synthetic construct
MNRQSGP

SEQ ID NO: 55090 - protein, 7 aa, synthetic construct
VAKHYHE

SEQ ID NO: 55091 - protein, 7 aa, synthetic construct
MTGRTAG

SEQ ID NO: 55092 - protein, 7 aa, synthetic construct
SKRDAYE

SEQ ID NO: 55093 - protein, 7 aa, synthetic construct
GEKRSFI

SEQ ID NO: 55094 - protein, 7 aa, synthetic construct
MATGVKQ

SEQ ID NO: 55095 - protein, 7 aa, synthetic construct
LQVHMHP

SEQ ID NO: 55096 - protein, 7 aa, synthetic construct
TSYRMEK

SEQ ID NO: 55097 - protein, 7 aa, synthetic construct
QWNRGNP

SEQ ID NO: 55098 - protein, 7 aa, synthetic construct
MVNGGHT

SEQ ID NO: 55099 - protein, 7 aa, synthetic construct
QSRGRED

SEQ ID NO: 55100 - protein, 7 aa, synthetic construct
SKMTSQP

SEQ ID NO: 55101 - protein, 7 aa, synthetic construct
TGKVNVI

SEQ ID NO: 55102 - protein, 7 aa, synthetic construct
PFHNVTA

SEQ ID NO: 55103 - protein, 7 aa, synthetic construct
KVQDQIM

SEQ ID NO: 55104 - protein, 7 aa, synthetic construct
EHKLHAM

SEQ ID NO: 55105 - protein, 7 aa, synthetic construct
LVMSRNP

SEQ ID NO: 55106 - protein, 7 aa, synthetic construct
QSNRSDP

SEQ ID NO: 55107 - protein, 7 aa, synthetic construct
QNRQANA

SEQ ID NO: 55108 - protein, 7 aa, synthetic construct
NPAKGNG

SEQ ID NO: 55109 - protein, 7 aa, synthetic construct
FHKADAN

SEQ ID NO: 55110 - protein, 7 aa, synthetic construct
YKNAEAN

SEQ ID NO: 55111 - protein, 7 aa, synthetic construct
HHIKIPQ

SEQ ID NO: 55112 - protein, 7 aa, synthetic construct
KSRAPDM

SEQ ID NO: 55113 - protein, 7 aa, synthetic construct
GNSPTGV

SEQ ID NO: 55114 - protein, 7 aa, synthetic construct
QNNKAYA

SEQ ID NO: 55115 - protein, 7 aa, synthetic construct
NFEQRTA

SEQ ID NO: 55116 - protein, 7 aa, synthetic construct
FIGYKNE

SEQ ID NO: 55117 - protein, 7 aa, synthetic construct
NGRGTAQ

SEQ ID NO: 55118 - protein, 7 aa, synthetic construct
QTVRSHL

SEQ ID NO: 55119 - protein, 7 aa, synthetic construct
LGPTAGK

SEQ ID NO: 55120 - protein, 7 aa, synthetic construct
SGGNHKV

SEQ ID NO: 55121 - protein, 7 aa, synthetic construct
GLGQKQV

SEQ ID NO: 55122 - protein, 7 aa, synthetic construct
RWANQEV

SEQ ID NO: 55123 - protein, 7 aa, synthetic construct
NGSSHGS

SEQ ID NO: 55124 - protein, 7 aa, synthetic construct
MAYTSAP

SEQ ID NO: 55125 - protein, 7 aa, synthetic construct
ISVYTKQ

SEQ ID NO: 55126 - protein, 7 aa, synthetic construct
QNSGVKE

SEQ ID NO: 55127 - protein, 7 aa, synthetic construct
PTSRTIH

SEQ ID NO: 55128 - protein, 7 aa, synthetic construct
TQRAAQA

SEQ ID NO: 55129 - protein, 7 aa, synthetic construct
YVTLGSG

SEQ ID NO: 55130 - protein, 7 aa, synthetic construct
TPNFNTI

SEQ ID NO: 55131 - protein, 7 aa, synthetic construct
SSQSHVF

SEQ ID NO: 55132 - protein, 7 aa, synthetic construct
RTSATAA

SEQ ID NO: 55133 - protein, 7 aa, synthetic construct
KIPGEAN

SEQ ID NO: 55134 - protein, 7 aa, synthetic construct
MTKDYKG

SEQ ID NO: 55135 - protein, 7 aa, synthetic construct
MTSGTKV

SEQ ID NO: 55136 - protein, 7 aa, synthetic construct
TQSRTGD

SEQ ID NO: 55137 - protein, 7 aa, synthetic construct
RTQNTQA

SEQ ID NO: 55138 - protein, 7 aa, synthetic construct
RPIISDT

SEQ ID NO: 55139 - protein, 7 aa, synthetic construct
IGMIGHM

SEQ ID NO: 55140 - protein, 7 aa, synthetic construct
DIRTQAI

SEQ ID NO: 55141 - protein, 7 aa, synthetic construct
MPFTNHP

SEQ ID NO: 55142 - protein, 7 aa, synthetic construct
PGTAGAW

SEQ ID NO: 55143 - protein, 7 aa, synthetic construct
RGDNRHY

SEQ ID NO: 55144 - protein, 7 aa, synthetic construct
LQPRMPL

SEQ ID NO: 55145 - protein, 7 aa, synthetic construct
VYSKPHT

SEQ ID NO: 55146 - protein, 7 aa, synthetic construct
AEKTLKD

SEQ ID NO: 55147 - protein, 7 aa, synthetic construct
HGISKSN

SEQ ID NO: 55148 - protein, 7 aa, synthetic construct
MNPIRQG

SEQ ID NO: 55149 - protein, 7 aa, synthetic construct
VADRTHG

SEQ ID NO: 55150 - protein, 7 aa, synthetic construct
HHLKMPE

SEQ ID NO: 55151 - protein, 7 aa, synthetic construct
VHGGNSK

SEQ ID NO: 55152 - protein, 7 aa, synthetic construct
TQRTTNA

SEQ ID NO: 55153 - protein, 7 aa, synthetic construct
ASFKPSI

SEQ ID NO: 55154 - protein, 7 aa, synthetic construct
SRMNNHD

SEQ ID NO: 55155 - protein, 7 aa, synthetic construct
DLKKALG

SEQ ID NO: 55156 - protein, 7 aa, synthetic construct
KPTNQAN

SEQ ID NO: 55157 - protein, 7 aa, synthetic construct
LHDKQLM

SEQ ID NO: 55158 - protein, 7 aa, synthetic construct
GLSIHNN

SEQ ID NO: 55159 - protein, 7 aa, synthetic construct
RKDGGNA

SEQ ID NO: 55160 - protein, 7 aa, synthetic construct
YGMNKIP

SEQ ID NO: 55161 - protein, 7 aa, synthetic construct
VVRKDPE

SEQ ID NO: 55162 - protein, 7 aa, synthetic construct
KSQSIRE

SEQ ID NO: 55163 - protein, 7 aa, synthetic construct
QGPAMNY

SEQ ID NO: 55164 - protein, 7 aa, synthetic construct
QPYRAGL

SEQ ID NO: 55165 - protein, 7 aa, synthetic construct
VSANIEG

SEQ ID NO: 55166 - protein, 7 aa, synthetic construct
MTKPQNN

SEQ ID NO: 55167 - protein, 7 aa, synthetic construct
YIPHGSP

SEQ ID NO: 55168 - protein, 7 aa, synthetic construct
QHTLTQE

SEQ ID NO: 55169 - protein, 7 aa, synthetic construct
RQQSVPN

SEQ ID NO: 55170 - protein, 7 aa, synthetic construct
NQAKSAG

SEQ ID NO: 55171 - protein, 7 aa, synthetic construct
LVKGSEY

SEQ ID NO: 55172 - protein, 7 aa, synthetic construct
PKHLADF

SEQ ID NO: 55173 - protein, 7 aa, synthetic construct
DATKAGF

SEQ ID NO: 55174 - protein, 7 aa, synthetic construct
MNPHWEQ

SEQ ID NO: 55175 - protein, 7 aa, synthetic construct
KPTGAKE

SEQ ID NO: 55176 - protein, 7 aa, synthetic construct
TGRNAQP

SEQ ID NO: 55177 - protein, 7 aa, synthetic construct
NTNTKNG

SEQ ID NO: 55178 - protein, 7 aa, synthetic construct
VKQQQLP

SEQ ID NO: 55179 - protein, 7 aa, synthetic construct
MGLQGVP

SEQ ID NO: 55180 - protein, 7 aa, synthetic construct
KPKDLLI

SEQ ID NO: 55181 - protein, 7 aa, synthetic construct
TYKIKAE

SEQ ID NO: 55182 - protein, 7 aa, synthetic construct
TPKMKEY

SEQ ID NO: 55183 - protein, 7 aa, synthetic construct
KERFQDL

SEQ ID NO: 55184 - protein, 7 aa, synthetic construct
YGKMKEP

SEQ ID NO: 55185 - protein, 7 aa, synthetic construct
SLQNGPE

SEQ ID NO: 55186 - protein, 7 aa, synthetic construct
TATSKQI

SEQ ID NO: 55187 - protein, 7 aa, synthetic construct
THPTANN

SEQ ID NO: 55188 - protein, 7 aa, synthetic construct
VKKGDTP

SEQ ID NO: 55189 - protein, 7 aa, synthetic construct
TKNQSNV

SEQ ID NO: 55190 - protein, 7 aa, synthetic construct
NLGSPKD

SEQ ID NO: 55191 - protein, 7 aa, synthetic construct
KQNNNAS

SEQ ID NO: 55192 - protein, 7 aa, synthetic construct
SKAAGTG

SEQ ID NO: 55193 - protein, 7 aa, synthetic construct
IKPNYPF

SEQ ID NO: 55194 - protein, 7 aa, synthetic construct
ERRMTQD

SEQ ID NO: 55195 - protein, 7 aa, synthetic construct
YKNGGVG

SEQ ID NO: 55196 - protein, 7 aa, synthetic construct
TTSQRYG

SEQ ID NO: 55197 - protein, 7 aa, synthetic construct
TSRAMQG

SEQ ID NO: 55198 - protein, 7 aa, synthetic construct
NAKNQTG

SEQ ID NO: 55199 - protein, 7 aa, synthetic construct
NRSSLSG

SEQ ID NO: 55200 - protein, 7 aa, synthetic construct
EINTSRI

SEQ ID NO: 55201 - protein, 7 aa, synthetic construct
YAQFTGP

SEQ ID NO: 55202 - protein, 7 aa, synthetic construct
YSPKDYK

SEQ ID NO: 55203 - protein, 7 aa, synthetic construct
PMANKSF

SEQ ID NO: 55204 - protein, 7 aa, synthetic construct
KSTNQKE

SEQ ID NO: 55205 - protein, 7 aa, synthetic construct
YHGMKSN

SEQ ID NO: 55206 - protein, 7 aa, synthetic construct
MDRNALQ

SEQ ID NO: 55207 - protein, 7 aa, synthetic construct
LGKVNGT

SEQ ID NO: 55208 - protein, 7 aa, synthetic construct
YRIHTEQ

SEQ ID NO: 55209 - protein, 7 aa, synthetic construct
MGAHRSV

SEQ ID NO: 55210 - protein, 7 aa, synthetic construct
STIKSGN

SEQ ID NO: 55211 - protein, 7 aa, synthetic construct
EHKFSGA

SEQ ID NO: 55212 - protein, 7 aa, synthetic construct
FKGNHSI

SEQ ID NO: 55213 - protein, 7 aa, synthetic construct
RLLNETP

SEQ ID NO: 55214 - protein, 7 aa, synthetic construct
NGQASQN

SEQ ID NO: 55215 - protein, 7 aa, synthetic construct
IHQKGLA

SEQ ID NO: 55216 - protein, 7 aa, synthetic construct
TTAAKMS

SEQ ID NO: 55217 - protein, 7 aa, synthetic construct
DEKKVVP

SEQ ID NO: 55218 - protein, 7 aa, synthetic construct
MQRTHVE

SEQ ID NO: 55219 - protein, 7 aa, synthetic construct
YRLHSTS

SEQ ID NO: 55220 - protein, 7 aa, synthetic construct
KVMGSEG

SEQ ID NO: 55221 - protein, 7 aa, synthetic construct
EKKITSD

SEQ ID NO: 55222 - protein, 7 aa, synthetic construct
AENYVKH

SEQ ID NO: 55223 - protein, 7 aa, synthetic construct
QRQNMAA

SEQ ID NO: 55224 - protein, 7 aa, synthetic construct
RYGAATS

SEQ ID NO: 55225 - protein, 7 aa, synthetic construct
FGSGQTP

SEQ ID NO: 55226 - protein, 7 aa, synthetic construct
ARNQDSG

SEQ ID NO: 55227 - protein, 7 aa, synthetic construct
HGSNHNM

SEQ ID NO: 55228 - protein, 7 aa, synthetic construct
SADKQRH

SEQ ID NO: 55229 - protein, 7 aa, synthetic construct
GNQKPNG

SEQ ID NO: 55230 - protein, 7 aa, synthetic construct
NRPDLYQ

SEQ ID NO: 55231 - protein, 7 aa, synthetic construct
ISNRNFT

SEQ ID NO: 55232 - protein, 7 aa, synthetic construct
TKNPAQM

SEQ ID NO: 55233 - protein, 7 aa, synthetic construct
TQLATNP

SEQ ID NO: 55234 - protein, 7 aa, synthetic construct
NRSLNTN

SEQ ID NO: 55235 - protein, 7 aa, synthetic construct
DKKMHDV

SEQ ID NO: 55236 - protein, 7 aa, synthetic construct
PGERSHN

SEQ ID NO: 55237 - protein, 7 aa, synthetic construct
QGNKMQA

SEQ ID NO: 55238 - protein, 7 aa, synthetic construct
FMLHGQG

SEQ ID NO: 55239 - protein, 7 aa, synthetic construct
GLQTRNY

SEQ ID NO: 55240 - protein, 7 aa, synthetic construct
DKHTYGG

SEQ ID NO: 55241 - protein, 7 aa, synthetic construct
TKTGQMV

SEQ ID NO: 55242 - protein, 7 aa, synthetic construct
KQFAVAD

SEQ ID NO: 55243 - protein, 7 aa, synthetic construct
RPANVTA

SEQ ID NO: 55244 - protein, 7 aa, synthetic construct
KLKHEDD

SEQ ID NO: 55245 - protein, 7 aa, synthetic construct
GNSNSGI

SEQ ID NO: 55246 - protein, 7 aa, synthetic construct
SVQWGPG

SEQ ID NO: 55247 - protein, 7 aa, synthetic construct
QGRTQQG

SEQ ID NO: 55248 - protein, 7 aa, synthetic construct
KPLNASG

SEQ ID NO: 55249 - protein, 7 aa, synthetic construct
KGNSDRN

SEQ ID NO: 55250 - protein, 7 aa, synthetic construct
GLPRGEP

SEQ ID NO: 55251 - protein, 7 aa, synthetic construct
GYDRAVN

SEQ ID NO: 55252 - protein, 7 aa, synthetic construct
MKPGGDK

SEQ ID NO: 55253 - protein, 7 aa, synthetic construct
PVKGGNV

SEQ ID NO: 55254 - protein, 7 aa, synthetic construct
NYQVPNK

SEQ ID NO: 55255 - protein, 7 aa, synthetic construct
GRNDQNR

SEQ ID NO: 55256 - protein, 7 aa, synthetic construct
GIKSTEL

SEQ ID NO: 55257 - protein, 7 aa, synthetic construct
KMSEYNG

SEQ ID NO: 55258 - protein, 7 aa, synthetic construct
VQGASRT

SEQ ID NO: 55259 - protein, 7 aa, synthetic construct
VNSSRMA

SEQ ID NO: 55260 - protein, 7 aa, synthetic construct
NMPQNYK

SEQ ID NO: 55261 - protein, 7 aa, synthetic construct
QTQKSDR

SEQ ID NO: 55262 - protein, 7 aa, synthetic construct
MFKGHGP

SEQ ID NO: 55263 - protein, 7 aa, synthetic construct
NSAQKVT

SEQ ID NO: 55264 - protein, 7 aa, synthetic construct
WHRENNG

SEQ ID NO: 55265 - protein, 7 aa, synthetic construct
GKIGVPP

SEQ ID NO: 55266 - protein, 7 aa, synthetic construct
KGATSVG

SEQ ID NO: 55267 - protein, 7 aa, synthetic construct
QKNTAMA

SEQ ID NO: 55268 - protein, 7 aa, synthetic construct
HMTVPSQ

SEQ ID NO: 55269 - protein, 7 aa, synthetic construct
HASAGGR

SEQ ID NO: 55270 - protein, 7 aa, synthetic construct
EASHYKP

SEQ ID NO: 55271 - protein, 7 aa, synthetic construct
VRVSNQS

SEQ ID NO: 55272 - protein, 7 aa, synthetic construct
TQGGTRV

SEQ ID NO: 55273 - protein, 7 aa, synthetic construct
FGRGRED

SEQ ID NO: 55274 - protein, 7 aa, synthetic construct
LHNKMEM

SEQ ID NO: 55275 - protein, 7 aa, synthetic construct
SVLREQH

SEQ ID NO: 55276 - protein, 7 aa, synthetic construct
WQTGLGS

SEQ ID NO: 55277 - protein, 7 aa, synthetic construct
ATASHIL

SEQ ID NO: 55278 - protein, 7 aa, synthetic construct
TGMASAK

SEQ ID NO: 55279 - protein, 7 aa, synthetic construct
NPAARPG

SEQ ID NO: 55280 - protein, 7 aa, synthetic construct
NSTHSRF

SEQ ID NO: 55281 - protein, 7 aa, synthetic construct
TKSQARD

SEQ ID NO: 55282 - protein, 7 aa, synthetic construct
GDDNTRR

SEQ ID NO: 55283 - protein, 7 aa, synthetic construct
TSLSGSA

SEQ ID NO: 55284 - protein, 7 aa, synthetic construct
NYGQKAP

SEQ ID NO: 55285 - protein, 7 aa, synthetic construct
KLVASVD

SEQ ID NO: 55286 - protein, 7 aa, synthetic construct
TKDLPRQ

SEQ ID NO: 55287 - protein, 7 aa, synthetic construct
LYRTEDK

SEQ ID NO: 55288 - protein, 7 aa, synthetic construct
GQVRQNV

SEQ ID NO: 55289 - protein, 7 aa, synthetic construct
GNRQSDM

SEQ ID NO: 55290 - protein, 7 aa, synthetic construct
LQSPPVA

SEQ ID NO: 55291 - protein, 7 aa, synthetic construct
QRIPTNQ

SEQ ID NO: 55292 - protein, 7 aa, synthetic construct
VNANQKG

SEQ ID NO: 55293 - protein, 7 aa, synthetic construct
VKTIQPN

SEQ ID NO: 55294 - protein, 7 aa, synthetic construct
NSGKHES

SEQ ID NO: 55295 - protein, 7 aa, synthetic construct
KERGPDH

SEQ ID NO: 55296 - protein, 7 aa, synthetic construct
LFADQKN

SEQ ID NO: 55297 - protein, 7 aa, synthetic construct
QKFKELS

SEQ ID NO: 55298 - protein, 7 aa, synthetic construct
IPVYGQD

SEQ ID NO: 55299 - protein, 7 aa, synthetic construct
NVPQRTV

SEQ ID NO: 55300 - protein, 7 aa, synthetic construct
RNTSQTG

SEQ ID NO: 55301 - protein, 7 aa, synthetic construct
IKGQTVT

SEQ ID NO: 55302 - protein, 7 aa, synthetic construct
RKSPEYM

SEQ ID NO: 55303 - protein, 7 aa, synthetic construct
EPIKWKE

SEQ ID NO: 55304 - protein, 7 aa, synthetic construct
LRHETRD

SEQ ID NO: 55305 - protein, 7 aa, synthetic construct
FPAVKGQ

SEQ ID NO: 55306 - protein, 7 aa, synthetic construct
AKIDNTK

SEQ ID NO: 55307 - protein, 7 aa, synthetic construct
LMTGRQP

SEQ ID NO: 55308 - protein, 7 aa, synthetic construct
TKNSMQS

SEQ ID NO: 55309 - protein, 7 aa, synthetic construct
QFKTGAE

SEQ ID NO: 55310 - protein, 7 aa, synthetic construct
MGNRASP

SEQ ID NO: 55311 - protein, 7 aa, synthetic construct
VGNFKGQ

SEQ ID NO: 55312 - protein, 7 aa, synthetic construct
KHGTDEF

SEQ ID NO: 55313 - protein, 7 aa, synthetic construct
PNGKSAA

SEQ ID NO: 55314 - protein, 7 aa, synthetic construct
NKPSNYN

SEQ ID NO: 55315 - protein, 7 aa, synthetic construct
SREANRT

SEQ ID NO: 55316 - protein, 7 aa, synthetic construct
YPAQKNG

SEQ ID NO: 55317 - protein, 7 aa, synthetic construct
KPQPGNG

SEQ ID NO: 55318 - protein, 7 aa, synthetic construct
KGNYAEL

SEQ ID NO: 55319 - protein, 7 aa, synthetic construct
RWTGGSD

SEQ ID NO: 55320 - protein, 7 aa, synthetic construct
RPPNVVS

SEQ ID NO: 55321 - protein, 7 aa, synthetic construct
RQPSGAQ

SEQ ID NO: 55322 - protein, 7 aa, synthetic construct
GRKQIDD

SEQ ID NO: 55323 - protein, 7 aa, synthetic construct
TTAGYVS

SEQ ID NO: 55324 - protein, 7 aa, synthetic construct
LDGRRGE

SEQ ID NO: 55325 - protein, 7 aa, synthetic construct
QKNHTLS

SEQ ID NO: 55326 - protein, 7 aa, synthetic construct
RTTSGAL

SEQ ID NO: 55327 - protein, 7 aa, synthetic construct
CKGAACS

SEQ ID NO: 55328 - protein, 7 aa, synthetic construct
GQPTGKG

SEQ ID NO: 55329 - protein, 7 aa, synthetic construct
FKKDVTG

SEQ ID NO: 55330 - protein, 7 aa, synthetic construct
KKDNRGE

SEQ ID NO: 55331 - protein, 7 aa, synthetic construct
SMNQRGG

SEQ ID NO: 55332 - protein, 7 aa, synthetic construct
ISGTMPT

SEQ ID NO: 55333 - protein, 7 aa, synthetic construct
GMDRGSR

SEQ ID NO: 55334 - protein, 7 aa, synthetic construct
LLSAKDY

SEQ ID NO: 55335 - protein, 7 aa, synthetic construct
HPLKDMR

SEQ ID NO: 55336 - protein, 7 aa, synthetic construct
KGMMMRE

SEQ ID NO: 55337 - protein, 7 aa, synthetic construct
VQKSVAS

SEQ ID NO: 55338 - protein, 7 aa, synthetic construct
NQSGRQP

SEQ ID NO: 55339 - protein, 7 aa, synthetic construct
AGINAKP

SEQ ID NO: 55340 - protein, 7 aa, synthetic construct
SKTNGSP

SEQ ID NO: 55341 - protein, 7 aa, synthetic construct
NVMPYKG

SEQ ID NO: 55342 - protein, 7 aa, synthetic construct
MKSGREV

SEQ ID NO: 55343 - protein, 7 aa, synthetic construct
SKRNNDD

SEQ ID NO: 55344 - protein, 7 aa, synthetic construct
YSTSKNA

SEQ ID NO: 55345 - protein, 7 aa, synthetic construct
KPVGVKG

SEQ ID NO: 55346 - protein, 7 aa, synthetic construct
KTQWSVE

SEQ ID NO: 55347 - protein, 7 aa, synthetic construct
TKIGMNM

SEQ ID NO: 55348 - protein, 7 aa, synthetic construct
RKGVEIN

SEQ ID NO: 55349 - protein, 7 aa, synthetic construct
GIRPAGP

SEQ ID NO: 55350 - protein, 7 aa, synthetic construct
SNGVNFG

SEQ ID NO: 55351 - protein, 7 aa, synthetic construct
LRAETTT

SEQ ID NO: 55352 - protein, 7 aa, synthetic construct
NHREAKA

SEQ ID NO: 55353 - protein, 7 aa, synthetic construct
HPAQKIA

SEQ ID NO: 55354 - protein, 7 aa, synthetic construct
AGPVKNE

SEQ ID NO: 55355 - protein, 7 aa, synthetic construct
GTSTKVG

SEQ ID NO: 55356 - protein, 7 aa, synthetic construct
RETNTLS

SEQ ID NO: 55357 - protein, 7 aa, synthetic construct
PFNGVRD

SEQ ID NO: 55358 - protein, 7 aa, synthetic construct
PHNATMA

SEQ ID NO: 55359 - protein, 7 aa, synthetic construct
LGSLTAG

SEQ ID NO: 55360 - protein, 7 aa, synthetic construct
GMNGRNQ

SEQ ID NO: 55361 - protein, 7 aa, synthetic construct
FNKHQGS

SEQ ID NO: 55362 - protein, 7 aa, synthetic construct
DDKYAKR

SEQ ID NO: 55363 - protein, 7 aa, synthetic construct
PGRQTGP

SEQ ID NO: 55364 - protein, 7 aa, synthetic construct
TPVVKAG

SEQ ID NO: 55365 - protein, 7 aa, synthetic construct
WVSRVPN

SEQ ID NO: 55366 - protein, 7 aa, synthetic construct
GKPSGQG

SEQ ID NO: 55367 - protein, 7 aa, synthetic construct
KGNSQQP

SEQ ID NO: 55368 - protein, 7 aa, synthetic construct
TSNKGVA

SEQ ID NO: 55369 - protein, 7 aa, synthetic construct
TRVDLRM

SEQ ID NO: 55370 - protein, 7 aa, synthetic construct
KNTPASA

SEQ ID NO: 55371 - protein, 7 aa, synthetic construct
PAARLAP

SEQ ID NO: 55372 - protein, 7 aa, synthetic construct
NFRSIQD

SEQ ID NO: 55373 - protein, 7 aa, synthetic construct
MQHPRNG

SEQ ID NO: 55374 - protein, 7 aa, synthetic construct
KHPAYMG

SEQ ID NO: 55375 - protein, 7 aa, synthetic construct
QKVNRVE

SEQ ID NO: 55376 - protein, 7 aa, synthetic construct
TVSKASM

SEQ ID NO: 55377 - protein, 7 aa, synthetic construct
KDIPSRT

SEQ ID NO: 55378 - protein, 7 aa, synthetic construct
QTYRSME

SEQ ID NO: 55379 - protein, 7 aa, synthetic construct
KKMDTQG

SEQ ID NO: 55380 - protein, 7 aa, synthetic construct
PKRSMDI

SEQ ID NO: 55381 - protein, 7 aa, synthetic construct
EARNWDK

SEQ ID NO: 55382 - protein, 7 aa, synthetic construct
SQKNAPP

SEQ ID NO: 55383 - protein, 7 aa, synthetic construct
ANSTMAL

SEQ ID NO: 55384 - protein, 7 aa, synthetic construct
VYALRKE

SEQ ID NO: 55385 - protein, 7 aa, synthetic construct
LGQFMDK

SEQ ID NO: 55386 - protein, 7 aa, synthetic construct
QHKAQLD

SEQ ID NO: 55387 - protein, 7 aa, synthetic construct
YVHPQRD

SEQ ID NO: 55388 - protein, 7 aa, synthetic construct
TMKNSNP

SEQ ID NO: 55389 - protein, 7 aa, synthetic construct
GTKVNSG

SEQ ID NO: 55390 - protein, 7 aa, synthetic construct
KPQVTSL

SEQ ID NO: 55391 - protein, 7 aa, synthetic construct
LGERNRL

SEQ ID NO: 55392 - protein, 7 aa, synthetic construct
RGGQVYM

SEQ ID NO: 55393 - protein, 7 aa, synthetic construct
YRKDSGQ

SEQ ID NO: 55394 - protein, 7 aa, synthetic construct
MGSIAQM

SEQ ID NO: 55395 - protein, 7 aa, synthetic construct
NLGRIGN

SEQ ID NO: 55396 - protein, 7 aa, synthetic construct
NMNAIAP

SEQ ID NO: 55397 - protein, 7 aa, synthetic construct
QSNNHLA

SEQ ID NO: 55398 - protein, 7 aa, synthetic construct
KQTETTN

SEQ ID NO: 55399 - protein, 7 aa, synthetic construct
GYATKQG

SEQ ID NO: 55400 - protein, 7 aa, synthetic construct
AHFPKTE

SEQ ID NO: 55401 - protein, 7 aa, synthetic construct
RHTSSMM

SEQ ID NO: 55402 - protein, 7 aa, synthetic construct
IHRVQQD

SEQ ID NO: 55403 - protein, 7 aa, synthetic construct
AIRLHND

SEQ ID NO: 55404 - protein, 7 aa, synthetic construct
NRQQGAP

SEQ ID NO: 55405 - protein, 7 aa, synthetic construct
SMKSPTI

SEQ ID NO: 55406 - protein, 7 aa, synthetic construct
DYRQVRE

SEQ ID NO: 55407 - protein, 7 aa, synthetic construct
YKPYSAS

SEQ ID NO: 55408 - protein, 7 aa, synthetic construct
YRVDRVQ

SEQ ID NO: 55409 - protein, 7 aa, synthetic construct
MSSNGHG

SEQ ID NO: 55410 - protein, 7 aa, synthetic construct
DPRNMGG

SEQ ID NO: 55411 - protein, 7 aa, synthetic construct
GKMNVQA

SEQ ID NO: 55412 - protein, 7 aa, synthetic construct
KLHEPYA

SEQ ID NO: 55413 - protein, 7 aa, synthetic construct
RPQGAMV

SEQ ID NO: 55414 - protein, 7 aa, synthetic construct
TVRPNQS

SEQ ID NO: 55415 - protein, 7 aa, synthetic construct
ARNGHEY

SEQ ID NO: 55416 - protein, 7 aa, synthetic construct
PSARPNE

SEQ ID NO: 55417 - protein, 7 aa, synthetic construct
RSQTGTA

SEQ ID NO: 55418 - protein, 7 aa, synthetic construct
IRHGMKD

SEQ ID NO: 55419 - protein, 7 aa, synthetic construct
IVNYQTN

SEQ ID NO: 55420 - protein, 7 aa, synthetic construct
AFQHQVG

SEQ ID NO: 55421 - protein, 7 aa, synthetic construct
SKTQSAY

SEQ ID NO: 55422 - protein, 7 aa, synthetic construct
RDGMRGF

SEQ ID NO: 55423 - protein, 7 aa, synthetic construct
TSPTAGA

SEQ ID NO: 55424 - protein, 7 aa, synthetic construct
RQGSTHE

SEQ ID NO: 55425 - protein, 7 aa, synthetic construct
RMKEQMS

SEQ ID NO: 55426 - protein, 7 aa, synthetic construct
QAHKEYP

SEQ ID NO: 55427 - protein, 7 aa, synthetic construct
HPGKQDW

SEQ ID NO: 55428 - protein, 7 aa, synthetic construct
HEPFHKH

SEQ ID NO: 55429 - protein, 7 aa, synthetic construct
KTNGAGP

SEQ ID NO: 55430 - protein, 7 aa, synthetic construct
TYRAGVE

SEQ ID NO: 55431 - protein, 7 aa, synthetic construct
NLGESIG

SEQ ID NO: 55432 - protein, 7 aa, synthetic construct
FKSHGSP

SEQ ID NO: 55433 - protein, 7 aa, synthetic construct
RKTDATG

SEQ ID NO: 55434 - protein, 7 aa, synthetic construct
RVSAAEF

SEQ ID NO: 55435 - protein, 7 aa, synthetic construct
KADKQYI

SEQ ID NO: 55436 - protein, 7 aa, synthetic construct
HLGNSQF

SEQ ID NO: 55437 - protein, 7 aa, synthetic construct
TRSNFME

SEQ ID NO: 55438 - protein, 7 aa, synthetic construct
SVQPKND

SEQ ID NO: 55439 - protein, 7 aa, synthetic construct
NNQGKLI

SEQ ID NO: 55440 - protein, 7 aa, synthetic construct
TDSSVRI

SEQ ID NO: 55441 - protein, 7 aa, synthetic construct
MGKAPQN

SEQ ID NO: 55442 - protein, 7 aa, synthetic construct
KQSNAKD

SEQ ID NO: 55443 - protein, 7 aa, synthetic construct
NINFNNM

SEQ ID NO: 55444 - protein, 7 aa, synthetic construct
SWNRTDE

SEQ ID NO: 55445 - protein, 7 aa, synthetic construct
LRSHPEG

SEQ ID NO: 55446 - protein, 7 aa, synthetic construct
DKMNEDG

SEQ ID NO: 55447 - protein, 7 aa, synthetic construct
QMHSGRH

SEQ ID NO: 55448 - protein, 7 aa, synthetic construct
NDLRQIR

SEQ ID NO: 55449 - protein, 7 aa, synthetic construct
FVKGQQV

SEQ ID NO: 55450 - protein, 7 aa, synthetic construct
MFAKQEG

SEQ ID NO: 55451 - protein, 7 aa, synthetic construct
FSKMSDR

SEQ ID NO: 55452 - protein, 7 aa, synthetic construct
NNIRARE

SEQ ID NO: 55453 - protein, 7 aa, synthetic construct
TTGKFPV

SEQ ID NO: 55454 - protein, 7 aa, synthetic construct
ATGPKSG

SEQ ID NO: 55455 - protein, 7 aa, synthetic construct
KRSNESN

SEQ ID NO: 55456 - protein, 7 aa, synthetic construct
GDRNKLG

SEQ ID NO: 55457 - protein, 7 aa, synthetic construct
LSNKTMQ

SEQ ID NO: 55458 - protein, 7 aa, synthetic construct
FATGGRF

SEQ ID NO: 55459 - protein, 7 aa, synthetic construct
KGNSVNG

SEQ ID NO: 55460 - protein, 7 aa, synthetic construct
RLPGFSP

SEQ ID NO: 55461 - protein, 7 aa, synthetic construct
QKGSSSM

SEQ ID NO: 55462 - protein, 7 aa, synthetic construct
YTQGVSQ

SEQ ID NO: 55463 - protein, 7 aa, synthetic construct
RMNQSQA

SEQ ID NO: 55464 - protein, 7 aa, synthetic construct
RTPMPQA

SEQ ID NO: 55465 - protein, 7 aa, synthetic construct
HLTHKMA

SEQ ID NO: 55466 - protein, 7 aa, synthetic construct
HGAVHIN

SEQ ID NO: 55467 - protein, 7 aa, synthetic construct
SRFREEG

SEQ ID NO: 55468 - protein, 7 aa, synthetic construct
YGQMAHG

SEQ ID NO: 55469 - protein, 7 aa, synthetic construct
KGSQTQG

SEQ ID NO: 55470 - protein, 7 aa, synthetic construct
YGQTKGG

SEQ ID NO: 55471 - protein, 7 aa, synthetic construct
SMKGSQA

SEQ ID NO: 55472 - protein, 7 aa, synthetic construct
TQPHIAV

SEQ ID NO: 55473 - protein, 7 aa, synthetic construct
RKDTTGN

SEQ ID NO: 55474 - protein, 7 aa, synthetic construct
NGMSKGG

SEQ ID NO: 55475 - protein, 7 aa, synthetic construct
EIGFTIA

SEQ ID NO: 55476 - protein, 7 aa, synthetic construct
NRPGMNI

SEQ ID NO: 55477 - protein, 7 aa, synthetic construct
VHHDKYI

SEQ ID NO: 55478 - protein, 7 aa, synthetic construct
RPAHESL

SEQ ID NO: 55479 - protein, 7 aa, synthetic construct
TNKTNGP

SEQ ID NO: 55480 - protein, 7 aa, synthetic construct
WEGSKQG

SEQ ID NO: 55481 - protein, 7 aa, synthetic construct
NQRTTGS

SEQ ID NO: 55482 - protein, 7 aa, synthetic construct
NKQATRE

SEQ ID NO: 55483 - protein, 7 aa, synthetic construct
LGSTSQP

SEQ ID NO: 55484 - protein, 7 aa, synthetic construct
NNQHHGM

SEQ ID NO: 55485 - protein, 7 aa, synthetic construct
MAFSGHE

SEQ ID NO: 55486 - protein, 7 aa, synthetic construct
AKPEAKS

SEQ ID NO: 55487 - protein, 7 aa, synthetic construct
RVNLGPS

SEQ ID NO: 55488 - protein, 7 aa, synthetic construct
KVTQAEM

SEQ ID NO: 55489 - protein, 7 aa, synthetic construct
YLKQQTE

SEQ ID NO: 55490 - protein, 7 aa, synthetic construct
DPYHKQM

SEQ ID NO: 55491 - protein, 7 aa, synthetic construct
NKSTMPA

SEQ ID NO: 55492 - protein, 7 aa, synthetic construct
EVVGQPA

SEQ ID NO: 55493 - protein, 7 aa, synthetic construct
PRKDGIP

SEQ ID NO: 55494 - protein, 7 aa, synthetic construct
QLGTVKS

SEQ ID NO: 55495 - protein, 7 aa, synthetic construct
HGGQPVM

SEQ ID NO: 55496 - protein, 7 aa, synthetic construct
TQRSGVG

SEQ ID NO: 55497 - protein, 7 aa, synthetic construct
QQHNNVI

SEQ ID NO: 55498 - protein, 7 aa, synthetic construct
TKQIGGM

SEQ ID NO: 55499 - protein, 7 aa, synthetic construct
GGKQPSQ

SEQ ID NO: 55500 - protein, 7 aa, synthetic construct
VMNQQRL

SEQ ID NO: 55501 - protein, 7 aa, synthetic construct
LRSNMQA

SEQ ID NO: 55502 - protein, 7 aa, synthetic construct
DMQSTKY

SEQ ID NO: 55503 - protein, 7 aa, synthetic construct
FSNKSTG

SEQ ID NO: 55504 - protein, 7 aa, synthetic construct
HMNNRMV

SEQ ID NO: 55505 - protein, 7 aa, synthetic construct
MSKAPGQ

SEQ ID NO: 55506 - protein, 7 aa, synthetic construct
RHGNMVG

SEQ ID NO: 55507 - protein, 7 aa, synthetic construct
YALKGEA

SEQ ID NO: 55508 - protein, 7 aa, synthetic construct
QFPATTH

SEQ ID NO: 55509 - protein, 7 aa, synthetic construct
YNAPTAR

SEQ ID NO: 55510 - protein, 7 aa, synthetic construct
VRNSHVM

SEQ ID NO: 55511 - protein, 7 aa, synthetic construct
VRQTSQS

SEQ ID NO: 55512 - protein, 7 aa, synthetic construct
SQQSRAP

SEQ ID NO: 55513 - protein, 7 aa, synthetic construct
RSSNHAV

SEQ ID NO: 55514 - protein, 7 aa, synthetic construct
TQPSRQS

SEQ ID NO: 55515 - protein, 7 aa, synthetic construct
VRTSNQP

SEQ ID NO: 55516 - protein, 7 aa, synthetic construct
PMKGGSG

SEQ ID NO: 55517 - protein, 7 aa, synthetic construct
YSKTNSS

SEQ ID NO: 55518 - protein, 7 aa, synthetic construct
HSITSHG

SEQ ID NO: 55519 - protein, 7 aa, synthetic construct
KKETNHG

SEQ ID NO: 55520 - protein, 7 aa, synthetic construct
RLIRTGD

SEQ ID NO: 55521 - protein, 7 aa, synthetic construct
ITPSKMY

SEQ ID NO: 55522 - protein, 7 aa, synthetic construct
TVFNPQA

SEQ ID NO: 55523 - protein, 7 aa, synthetic construct
QLYQHVE

SEQ ID NO: 55524 - protein, 7 aa, synthetic construct
NIGYNGA

SEQ ID NO: 55525 - protein, 7 aa, synthetic construct
HGGNREA

SEQ ID NO: 55526 - protein, 7 aa, synthetic construct
TTTPHNA

SEQ ID NO: 55527 - protein, 7 aa, synthetic construct
NYSPQLG

SEQ ID NO: 55528 - protein, 7 aa, synthetic construct
RQNGGPL

SEQ ID NO: 55529 - protein, 7 aa, synthetic construct
RTQTSAP

SEQ ID NO: 55530 - protein, 7 aa, synthetic construct
HAPGQVP

SEQ ID NO: 55531 - protein, 7 aa, synthetic construct
MQSGNKG

SEQ ID NO: 55532 - protein, 7 aa, synthetic construct
SRTGTVA

SEQ ID NO: 55533 - protein, 7 aa, synthetic construct
VKQNGIS

SEQ ID NO: 55534 - protein, 7 aa, synthetic construct
YAHQPGT

SEQ ID NO: 55535 - protein, 7 aa, synthetic construct
QKPSVNA

SEQ ID NO: 55536 - protein, 7 aa, synthetic construct
GPKMSPN

SEQ ID NO: 55537 - protein, 7 aa, synthetic construct
KANSNNP

SEQ ID NO: 55538 - protein, 7 aa, synthetic construct
KTSSAGA

SEQ ID NO: 55539 - protein, 7 aa, synthetic construct
EWAQKHA

SEQ ID NO: 55540 - protein, 7 aa, synthetic construct
YGKPENM

SEQ ID NO: 55541 - protein, 7 aa, synthetic construct
EIHIPMD

SEQ ID NO: 55542 - protein, 7 aa, synthetic construct
QNHHTIG

SEQ ID NO: 55543 - protein, 7 aa, synthetic construct
SEIQRPS

SEQ ID NO: 55544 - protein, 7 aa, synthetic construct
RGTASTP

SEQ ID NO: 55545 - protein, 7 aa, synthetic construct
IGGEFQI

SEQ ID NO: 55546 - protein, 7 aa, synthetic construct
NHNINGG

SEQ ID NO: 55547 - protein, 7 aa, synthetic construct
KTTESPA

SEQ ID NO: 55548 - protein, 7 aa, synthetic construct
TNRPESG

SEQ ID NO: 55549 - protein, 7 aa, synthetic construct
KFPQNQG

SEQ ID NO: 55550 - protein, 7 aa, synthetic construct
NLSLQHA

SEQ ID NO: 55551 - protein, 7 aa, synthetic construct
HKDYRIQ

SEQ ID NO: 55552 - protein, 7 aa, synthetic construct
GFKSVHL

SEQ ID NO: 55553 - protein, 7 aa, synthetic construct
GRLPHSH

SEQ ID NO: 55554 - protein, 7 aa, synthetic construct
FRAQHHG

SEQ ID NO: 55555 - protein, 7 aa, synthetic construct
TTEKYIP

SEQ ID NO: 55556 - protein, 7 aa, synthetic construct
PRAAGMG

SEQ ID NO: 55557 - protein, 7 aa, synthetic construct
GNWGTAP

SEQ ID NO: 55558 - protein, 7 aa, synthetic construct
NARANVG

SEQ ID NO: 55559 - protein, 7 aa, synthetic construct
ARYQPTP

SEQ ID NO: 55560 - protein, 7 aa, synthetic construct
KPTSNQT

SEQ ID NO: 55561 - protein, 7 aa, synthetic construct
DVTRQIS

SEQ ID NO: 55562 - protein, 7 aa, synthetic construct
NQTHNKW

SEQ ID NO: 55563 - protein, 7 aa, synthetic construct
MPKEREY

SEQ ID NO: 55564 - protein, 7 aa, synthetic construct
RSGPSEH

SEQ ID NO: 55565 - protein, 7 aa, synthetic construct
KPYNGTP

SEQ ID NO: 55566 - protein, 7 aa, synthetic construct
LGQKMTG

SEQ ID NO: 55567 - protein, 7 aa, synthetic construct
AQSTARS

SEQ ID NO: 55568 - protein, 7 aa, synthetic construct
TVTNNLN

SEQ ID NO: 55569 - protein, 7 aa, synthetic construct
VPRSEVM

SEQ ID NO: 55570 - protein, 7 aa, synthetic construct
TADASRQ

SEQ ID NO: 55571 - protein, 7 aa, synthetic construct
NHWQNKD

SEQ ID NO: 55572 - protein, 7 aa, synthetic construct
MRNTTND

SEQ ID NO: 55573 - protein, 7 aa, synthetic construct
AFVASQG

SEQ ID NO: 55574 - protein, 7 aa, synthetic construct
GRSTSAM

SEQ ID NO: 55575 - protein, 7 aa, synthetic construct
NKQNAGN

SEQ ID NO: 55576 - protein, 7 aa, synthetic construct
TNQRLQG

SEQ ID NO: 55577 - protein, 7 aa, synthetic construct
EFRLGHE

SEQ ID NO: 55578 - protein, 7 aa, synthetic construct
SSRIDTN

SEQ ID NO: 55579 - protein, 7 aa, synthetic construct
GKVVITE

SEQ ID NO: 55580 - protein, 7 aa, synthetic construct
SRHDHQA

SEQ ID NO: 55581 - protein, 7 aa, synthetic construct
WESKQMS

SEQ ID NO: 55582 - protein, 7 aa, synthetic construct
QNNAKAG

SEQ ID NO: 55583 - protein, 7 aa, synthetic construct
LPKHNQM

SEQ ID NO: 55584 - protein, 7 aa, synthetic construct
GKASSAP

SEQ ID NO: 55585 - protein, 7 aa, synthetic construct
IHHNTYA

SEQ ID NO: 55586 - protein, 7 aa, synthetic construct
QPNFSIG

SEQ ID NO: 55587 - protein, 7 aa, synthetic construct
IRYGSAS

SEQ ID NO: 55588 - protein, 7 aa, synthetic construct
ERMHNVS

SEQ ID NO: 55589 - protein, 7 aa, synthetic construct
FGIVKIG

SEQ ID NO: 55590 - protein, 7 aa, synthetic construct
TTNSNQK

SEQ ID NO: 55591 - protein, 7 aa, synthetic construct
YTNQKFN

SEQ ID NO: 55592 - protein, 7 aa, synthetic construct
AAKAMVS

SEQ ID NO: 55593 - protein, 7 aa, synthetic construct
HQKREET

SEQ ID NO: 55594 - protein, 7 aa, synthetic construct
DVFAAHA

SEQ ID NO: 55595 - protein, 7 aa, synthetic construct
GQHGSSY

SEQ ID NO: 55596 - protein, 7 aa, synthetic construct
QQSQRGG

SEQ ID NO: 55597 - protein, 7 aa, synthetic construct
GMQKSAA

SEQ ID NO: 55598 - protein, 7 aa, synthetic construct
KSQNAQG

SEQ ID NO: 55599 - protein, 7 aa, synthetic construct
SASKTMV

SEQ ID NO: 55600 - protein, 7 aa, synthetic construct
VNAGTRS

SEQ ID NO: 55601 - protein, 7 aa, synthetic construct
MRDAKVV

SEQ ID NO: 55602 - protein, 7 aa, synthetic construct
KEKVSNA

SEQ ID NO: 55603 - protein, 7 aa, synthetic construct
SRTATAP

SEQ ID NO: 55604 - protein, 7 aa, synthetic construct
MAQYTTS

SEQ ID NO: 55605 - protein, 7 aa, synthetic construct
KMHNANI

SEQ ID NO: 55606 - protein, 7 aa, synthetic construct
TATVRSV

SEQ ID NO: 55607 - protein, 7 aa, synthetic construct
VKDKPFA

SEQ ID NO: 55608 - protein, 7 aa, synthetic construct
QQDRRDP

SEQ ID NO: 55609 - protein, 7 aa, synthetic construct
EFKNTGK

SEQ ID NO: 55610 - protein, 7 aa, synthetic construct
TVVNKPY

SEQ ID NO: 55611 - protein, 7 aa, synthetic construct
NAHVGKQ

SEQ ID NO: 55612 - protein, 7 aa, synthetic construct
PTVKGSN

SEQ ID NO: 55613 - protein, 7 aa, synthetic construct
NKDGRAA

SEQ ID NO: 55614 - protein, 7 aa, synthetic construct
TQNRTPG

SEQ ID NO: 55615 - protein, 7 aa, synthetic construct
KQQGHVV

SEQ ID NO: 55616 - protein, 7 aa, synthetic construct
PTKVSSG

SEQ ID NO: 55617 - protein, 7 aa, synthetic construct
SAPFAHP

SEQ ID NO: 55618 - protein, 7 aa, synthetic construct
RRSQADV

SEQ ID NO: 55619 - protein, 7 aa, synthetic construct
TRSAGQG

SEQ ID NO: 55620 - protein, 7 aa, synthetic construct
TGKQNSP

SEQ ID NO: 55621 - protein, 7 aa, synthetic construct
KVDMQVG

SEQ ID NO: 55622 - protein, 7 aa, synthetic construct
KSATNAV

SEQ ID NO: 55623 - protein, 7 aa, synthetic construct
TMQGGQG

SEQ ID NO: 55624 - protein, 7 aa, synthetic construct
SYGNASP

SEQ ID NO: 55625 - protein, 7 aa, synthetic construct
YAHLTGD

SEQ ID NO: 55626 - protein, 7 aa, synthetic construct
NPMKTIQ

SEQ ID NO: 55627 - protein, 7 aa, synthetic construct
QPVKMAA

SEQ ID NO: 55628 - protein, 7 aa, synthetic construct
QLKKNDY

SEQ ID NO: 55629 - protein, 7 aa, synthetic construct
AGGSRAT

SEQ ID NO: 55630 - protein, 7 aa, synthetic construct
GKATFKE

SEQ ID NO: 55631 - protein, 7 aa, synthetic construct
GPVIRDD

SEQ ID NO: 55632 - protein, 7 aa, synthetic construct
HFGDIGR

SEQ ID NO: 55633 - protein, 7 aa, synthetic construct
WNPGSHS

SEQ ID NO: 55634 - protein, 7 aa, synthetic construct
RALRGEP

SEQ ID NO: 55635 - protein, 7 aa, synthetic construct
GRPSAYD

SEQ ID NO: 55636 - protein, 7 aa, synthetic construct
DMKPGQE

SEQ ID NO: 55637 - protein, 7 aa, synthetic construct
FKHNEGL

SEQ ID NO: 55638 - protein, 7 aa, synthetic construct
RIMKASD

SEQ ID NO: 55639 - protein, 7 aa, synthetic construct
TTQHAHH

SEQ ID NO: 55640 - protein, 7 aa, synthetic construct
NPATSAH

SEQ ID NO: 55641 - protein, 7 aa, synthetic construct
QKAGSTG

SEQ ID NO: 55642 - protein, 7 aa, synthetic construct
RRTEETV

SEQ ID NO: 55643 - protein, 7 aa, synthetic construct
MTDMRRN

SEQ ID NO: 55644 - protein, 7 aa, synthetic construct
MGGHAPF

SEQ ID NO: 55645 - protein, 7 aa, synthetic construct
YQKQSTA

SEQ ID NO: 55646 - protein, 7 aa, synthetic construct
TEYTARH

SEQ ID NO: 55647 - protein, 7 aa, synthetic construct
GNKSSLP

SEQ ID NO: 55648 - protein, 7 aa, synthetic construct
RDNRMGN

SEQ ID NO: 55649 - protein, 7 aa, synthetic construct
FAAGPTN

SEQ ID NO: 55650 - protein, 7 aa, synthetic construct
PKYGSGA

SEQ ID NO: 55651 - protein, 7 aa, synthetic construct
FKTLYTA

SEQ ID NO: 55652 - protein, 7 aa, synthetic construct
ALRTMEM

SEQ ID NO: 55653 - protein, 7 aa, synthetic construct
KNPPSTG

SEQ ID NO: 55654 - protein, 7 aa, synthetic construct
FDGFPKQ

SEQ ID NO: 55655 - protein, 7 aa, synthetic construct
FSKTASP

SEQ ID NO: 55656 - protein, 7 aa, synthetic construct
SFQGGNL

SEQ ID NO: 55657 - protein, 7 aa, synthetic construct
NAGHAGL

SEQ ID NO: 55658 - protein, 7 aa, synthetic construct
HANQAIP

SEQ ID NO: 55659 - protein, 7 aa, synthetic construct
MQKPPGV

SEQ ID NO: 55660 - protein, 7 aa, synthetic construct
DATWPKP

SEQ ID NO: 55661 - protein, 7 aa, synthetic construct
KQQQSSA

SEQ ID NO: 55662 - protein, 7 aa, synthetic construct
LVRMPQS

SEQ ID NO: 55663 - protein, 7 aa, synthetic construct
FPHPTTG

SEQ ID NO: 55664 - protein, 7 aa, synthetic construct
FKKSNDD

SEQ ID NO: 55665 - protein, 7 aa, synthetic construct
MRPVADY

SEQ ID NO: 55666 - protein, 7 aa, synthetic construct
LQNNMRN

SEQ ID NO: 55667 - protein, 7 aa, synthetic construct
AIGNSYA

SEQ ID NO: 55668 - protein, 7 aa, synthetic construct
QMGQTMA

SEQ ID NO: 55669 - protein, 7 aa, synthetic construct
SVNGRNP

SEQ ID NO: 55670 - protein, 7 aa, synthetic construct
SMNKMDT

SEQ ID NO: 55671 - protein, 7 aa, synthetic construct
LRAGQHA

SEQ ID NO: 55672 - protein, 7 aa, synthetic construct
MGTNKTA

SEQ ID NO: 55673 - protein, 7 aa, synthetic construct
MQTRDHL

SEQ ID NO: 55674 - protein, 7 aa, synthetic construct
MMDKFKM

SEQ ID NO: 55675 - protein, 7 aa, synthetic construct
LFKHEIT

SEQ ID NO: 55676 - protein, 7 aa, synthetic construct
ARHLTTS

SEQ ID NO: 55677 - protein, 7 aa, synthetic construct
TRKDERV

SEQ ID NO: 55678 - protein, 7 aa, synthetic construct
TSRTERE

SEQ ID NO: 55679 - protein, 7 aa, synthetic construct
PKGQISD

SEQ ID NO: 55680 - protein, 7 aa, synthetic construct
EQKTHQM

SEQ ID NO: 55681 - protein, 7 aa, synthetic construct
RQTGTQG

SEQ ID NO: 55682 - protein, 7 aa, synthetic construct
KMTNNAG

SEQ ID NO: 55683 - protein, 7 aa, synthetic construct
EKQGYPR

SEQ ID NO: 55684 - protein, 7 aa, synthetic construct
ISGNMKN

SEQ ID NO: 55685 - protein, 7 aa, synthetic construct
GANSRLV

SEQ ID NO: 55686 - protein, 7 aa, synthetic construct
VPNKTTA

SEQ ID NO: 55687 - protein, 7 aa, synthetic construct
YSVVSHQ

SEQ ID NO: 55688 - protein, 7 aa, synthetic construct
QGHNPPA

SEQ ID NO: 55689 - protein, 7 aa, synthetic construct
VLKMPQG

SEQ ID NO: 55690 - protein, 7 aa, synthetic construct
GIANKNP

SEQ ID NO: 55691 - protein, 7 aa, synthetic construct
KTTNGMP

SEQ ID NO: 55692 - protein, 7 aa, synthetic construct
YGTGKNP

SEQ ID NO: 55693 - protein, 7 aa, synthetic construct
NPDKHES

SEQ ID NO: 55694 - protein, 7 aa, synthetic construct
KTVAGGA

SEQ ID NO: 55695 - protein, 7 aa, synthetic construct
ARTTSNA

SEQ ID NO: 55696 - protein, 7 aa, synthetic construct
YNSNNQK

SEQ ID NO: 55697 - protein, 7 aa, synthetic construct
MAQTAPS

SEQ ID NO: 55698 - protein, 7 aa, synthetic construct
SKGSSIG

SEQ ID NO: 55699 - protein, 7 aa, synthetic construct
FPTIAHH

SEQ ID NO: 55700 - protein, 7 aa, synthetic construct
IKQGLMD

SEQ ID NO: 55701 - protein, 7 aa, synthetic construct
HKMQMAG

SEQ ID NO: 55702 - protein, 7 aa, synthetic construct
ANPLHRE

SEQ ID NO: 55703 - protein, 7 aa, synthetic construct
RAEGGIA

SEQ ID NO: 55704 - protein, 7 aa, synthetic construct
KVSGTMA

SEQ ID NO: 55705 - protein, 7 aa, synthetic construct
ISMALGH

SEQ ID NO: 55706 - protein, 7 aa, synthetic construct
KVNVGHE

SEQ ID NO: 55707 - protein, 7 aa, synthetic construct
EAGYRKD

SEQ ID NO: 55708 - protein, 7 aa, synthetic construct
ASRFEET

SEQ ID NO: 55709 - protein, 7 aa, synthetic construct
RDKTQQG

SEQ ID NO: 55710 - protein, 7 aa, synthetic construct
PNKMKIE

SEQ ID NO: 55711 - protein, 7 aa, synthetic construct
SQISQLT

SEQ ID NO: 55712 - protein, 7 aa, synthetic construct
WGEKGMK

SEQ ID NO: 55713 - protein, 7 aa, synthetic construct
NMHLGQS

SEQ ID NO: 55714 - protein, 7 aa, synthetic construct
SHQPAQR

SEQ ID NO: 55715 - protein, 7 aa, synthetic construct
QKSTTMI

SEQ ID NO: 55716 - protein, 7 aa, synthetic construct
QGGRVSA

SEQ ID NO: 55717 - protein, 7 aa, synthetic construct
NPPRPEG

SEQ ID NO: 55718 - protein, 7 aa, synthetic construct
VGEPRTG

SEQ ID NO: 55719 - protein, 7 aa, synthetic construct
IWTNKQD

SEQ ID NO: 55720 - protein, 7 aa, synthetic construct
TALLKVG

SEQ ID NO: 55721 - protein, 7 aa, synthetic construct
WDRHNLG

SEQ ID NO: 55722 - protein, 7 aa, synthetic construct
ENKGQKN

SEQ ID NO: 55723 - protein, 7 aa, synthetic construct
GYQKAHM

SEQ ID NO: 55724 - protein, 7 aa, synthetic construct
MGGNNKP

SEQ ID NO: 55725 - protein, 7 aa, synthetic construct
TKFQLVS

SEQ ID NO: 55726 - protein, 7 aa, synthetic construct
LPHIHTS

SEQ ID NO: 55727 - protein, 7 aa, synthetic construct
PNTNKTA

SEQ ID NO: 55728 - protein, 7 aa, synthetic construct
YKVAGSD

SEQ ID NO: 55729 - protein, 7 aa, synthetic construct
RDSGIFQ

SEQ ID NO: 55730 - protein, 7 aa, synthetic construct
LAHSHGV

SEQ ID NO: 55731 - protein, 7 aa, synthetic construct
FNVSQTG

SEQ ID NO: 55732 - protein, 7 aa, synthetic construct
AATAKGA

SEQ ID NO: 55733 - protein, 7 aa, synthetic construct
MRSGSQA

SEQ ID NO: 55734 - protein, 7 aa, synthetic construct
GILVTGH

SEQ ID NO: 55735 - protein, 7 aa, synthetic construct
TRPSNES

SEQ ID NO: 55736 - protein, 7 aa, synthetic construct
HKYAQAA

SEQ ID NO: 55737 - protein, 7 aa, synthetic construct
SNSKAMP

SEQ ID NO: 55738 - protein, 7 aa, synthetic construct
MDPHQGM

SEQ ID NO: 55739 - protein, 7 aa, synthetic construct
PRPTSGL

SEQ ID NO: 55740 - protein, 7 aa, synthetic construct
FGSKQTP

SEQ ID NO: 55741 - protein, 7 aa, synthetic construct
NGKSYAM

SEQ ID NO: 55742 - protein, 7 aa, synthetic construct
TIHFQKG

SEQ ID NO: 55743 - protein, 7 aa, synthetic construct
VNNIPRM

SEQ ID NO: 55744 - protein, 7 aa, synthetic construct
MPNHRHL

SEQ ID NO: 55745 - protein, 7 aa, synthetic construct
MHGTFKH

SEQ ID NO: 55746 - protein, 7 aa, synthetic construct
RSSPGSA

SEQ ID NO: 55747 - protein, 7 aa, synthetic construct
WRSPDAV

SEQ ID NO: 55748 - protein, 7 aa, synthetic construct
NSRNTQA

SEQ ID NO: 55749 - protein, 7 aa, synthetic construct
DRAHAGF

SEQ ID NO: 55750 - protein, 7 aa, synthetic construct
GGKNGMG

SEQ ID NO: 55751 - protein, 7 aa, synthetic construct
WPTREDK

SEQ ID NO: 55752 - protein, 7 aa, synthetic construct
MSQNAYK

SEQ ID NO: 55753 - protein, 7 aa, synthetic construct
NMKTNTG

SEQ ID NO: 55754 - protein, 7 aa, synthetic construct
TMLRDKH

SEQ ID NO: 55755 - protein, 7 aa, synthetic construct
KEGIAMG

SEQ ID NO: 55756 - protein, 7 aa, synthetic construct
FENYRKD

SEQ ID NO: 55757 - protein, 7 aa, synthetic construct
GMYYKAD

SEQ ID NO: 55758 - protein, 7 aa, synthetic construct
RPGVAMV

SEQ ID NO: 55759 - protein, 7 aa, synthetic construct
KSSQTYS

SEQ ID NO: 55760 - protein, 7 aa, synthetic construct
INTQVFS

SEQ ID NO: 55761 - protein, 7 aa, synthetic construct
GMQPFAG

SEQ ID NO: 55762 - protein, 7 aa, synthetic construct
ILNHQKM

SEQ ID NO: 55763 - protein, 7 aa, synthetic construct
NANKGTA

SEQ ID NO: 55764 - protein, 7 aa, synthetic construct
HKYPNHE

SEQ ID NO: 55765 - protein, 7 aa, synthetic construct
TGQHNSG

SEQ ID NO: 55766 - protein, 7 aa, synthetic construct
KSTPANS

SEQ ID NO: 55767 - protein, 7 aa, synthetic construct
NNKWDKA

SEQ ID NO: 55768 - protein, 7 aa, synthetic construct
TKVTYNP

SEQ ID NO: 55769 - protein, 7 aa, synthetic construct
INPTPRN

SEQ ID NO: 55770 - protein, 7 aa, synthetic construct
TGNSATK

SEQ ID NO: 55771 - protein, 7 aa, synthetic construct
KTNAGGF

SEQ ID NO: 55772 - protein, 7 aa, synthetic construct
HQAHHPS

SEQ ID NO: 55773 - protein, 7 aa, synthetic construct
QGKSTVT

SEQ ID NO: 55774 - protein, 7 aa, synthetic construct
GVSRGMD

SEQ ID NO: 55775 - protein, 7 aa, synthetic construct
LKPTMPP

SEQ ID NO: 55776 - protein, 7 aa, synthetic construct
LSVVNIG

SEQ ID NO: 55777 - protein, 7 aa, synthetic construct
KQFNAPS

SEQ ID NO: 55778 - protein, 7 aa, synthetic construct
PQSAHQP

SEQ ID NO: 55779 - protein, 7 aa, synthetic construct
NNDHRPK

SEQ ID NO: 55780 - protein, 7 aa, synthetic construct
KDSKTSL

SEQ ID NO: 55781 - protein, 7 aa, synthetic construct
NNEMKLG

SEQ ID NO: 55782 - protein, 7 aa, synthetic construct
VGPHAGT

SEQ ID NO: 55783 - protein, 7 aa, synthetic construct
KMQASPG

SEQ ID NO: 55784 - protein, 7 aa, synthetic construct
TRQQQAS

SEQ ID NO: 55785 - protein, 7 aa, synthetic construct
RQNSMTA

SEQ ID NO: 55786 - protein, 7 aa, synthetic construct
PPKGENA

SEQ ID NO: 55787 - protein, 7 aa, synthetic construct
RQPMVIA

SEQ ID NO: 55788 - protein, 7 aa, synthetic construct
HGRLNDD

SEQ ID NO: 55789 - protein, 7 aa, synthetic construct
FETKGKM

SEQ ID NO: 55790 - protein, 7 aa, synthetic construct
HPNHAVQ

SEQ ID NO: 55791 - protein, 7 aa, synthetic construct
PVKAAAA

SEQ ID NO: 55792 - protein, 7 aa, synthetic construct
GSKQFAG

SEQ ID NO: 55793 - protein, 7 aa, synthetic construct
QKPQHPT

SEQ ID NO: 55794 - protein, 7 aa, synthetic construct
YKTGSEG

SEQ ID NO: 55795 - protein, 7 aa, synthetic construct
DHKNSSR

SEQ ID NO: 55796 - protein, 7 aa, synthetic construct
SQGMKQS

SEQ ID NO: 55797 - protein, 7 aa, synthetic construct
REYKSDS

SEQ ID NO: 55798 - protein, 7 aa, synthetic construct
PQKNGMA

SEQ ID NO: 55799 - protein, 7 aa, synthetic construct
YHASTRE

SEQ ID NO: 55800 - protein, 7 aa, synthetic construct
SKHMQHQ

SEQ ID NO: 55801 - protein, 7 aa, synthetic construct
HNKGHVP

SEQ ID NO: 55802 - protein, 7 aa, synthetic construct
ANYKSEY

SEQ ID NO: 55803 - protein, 7 aa, synthetic construct
FPSKVQG

SEQ ID NO: 55804 - protein, 7 aa, synthetic construct
KNVQSMG

SEQ ID NO: 55805 - protein, 7 aa, synthetic construct
WGNRLSN

SEQ ID NO: 55806 - protein, 7 aa, synthetic construct
PTNIKQN

SEQ ID NO: 55807 - protein, 7 aa, synthetic construct
QTKIGIN

SEQ ID NO: 55808 - protein, 7 aa, synthetic construct
TFSTGPG

SEQ ID NO: 55809 - protein, 7 aa, synthetic construct
MRMNKGD

SEQ ID NO: 55810 - protein, 7 aa, synthetic construct
YGSSTER

SEQ ID NO: 55811 - protein, 7 aa, synthetic construct
KLLSASG

SEQ ID NO: 55812 - protein, 7 aa, synthetic construct
TSHEKPI

SEQ ID NO: 55813 - protein, 7 aa, synthetic construct
RKSVEYE

SEQ ID NO: 55814 - protein, 7 aa, synthetic construct
SMVRTGY

SEQ ID NO: 55815 - protein, 7 aa, synthetic construct
RSAASND

SEQ ID NO: 55816 - protein, 7 aa, synthetic construct
DVFQRHP

SEQ ID NO: 55817 - protein, 7 aa, synthetic construct
AVNVKDA

SEQ ID NO: 55818 - protein, 7 aa, synthetic construct
ARTTTQT

SEQ ID NO: 55819 - protein, 7 aa, synthetic construct
KNGSQGV

SEQ ID NO: 55820 - protein, 7 aa, synthetic construct
NFRRHED

SEQ ID NO: 55821 - protein, 7 aa, synthetic construct
KMGDWNG

SEQ ID NO: 55822 - protein, 7 aa, synthetic construct
KTSQLME

SEQ ID NO: 55823 - protein, 7 aa, synthetic construct
SKGGGTP

SEQ ID NO: 55824 - protein, 7 aa, synthetic construct
LMESHKG

SEQ ID NO: 55825 - protein, 7 aa, synthetic construct
PEGTKAM

SEQ ID NO: 55826 - protein, 7 aa, synthetic construct
KRDGGTS

SEQ ID NO: 55827 - protein, 7 aa, synthetic construct
GFAANKA

SEQ ID NO: 55828 - protein, 7 aa, synthetic construct
KNQISSA

SEQ ID NO: 55829 - protein, 7 aa, synthetic construct
GQNPPMR

SEQ ID NO: 55830 - protein, 7 aa, synthetic construct
NPTNKED

SEQ ID NO: 55831 - protein, 7 aa, synthetic construct
YDGFAAA

SEQ ID NO: 55832 - protein, 7 aa, synthetic construct
KPSAEKV

SEQ ID NO: 55833 - protein, 7 aa, synthetic construct
PAWSGEA

SEQ ID NO: 55834 - protein, 7 aa, synthetic construct
NQPAKGA

SEQ ID NO: 55835 - protein, 7 aa, synthetic construct
KSQQKEP

SEQ ID NO: 55836 - protein, 7 aa, synthetic construct
MDIRYHG

SEQ ID NO: 55837 - protein, 7 aa, synthetic construct
AMPHMLP

SEQ ID NO: 55838 - protein, 7 aa, synthetic construct
VPKNGNG

SEQ ID NO: 55839 - protein, 7 aa, synthetic construct
KASNSGS

SEQ ID NO: 55840 - protein, 7 aa, synthetic construct
PEGATRK

SEQ ID NO: 55841 - protein, 7 aa, synthetic construct
AQMIKHG

SEQ ID NO: 55842 - protein, 7 aa, synthetic construct
GVNSKSG

SEQ ID NO: 55843 - protein, 7 aa, synthetic construct
NPNFSSA

SEQ ID NO: 55844 - protein, 7 aa, synthetic construct
TLNQKEK

SEQ ID NO: 55845 - protein, 7 aa, synthetic construct
HEGYGHI

SEQ ID NO: 55846 - protein, 7 aa, synthetic construct
GYQAKNQ

SEQ ID NO: 55847 - protein, 7 aa, synthetic construct
GPTGVSS

SEQ ID NO: 55848 - protein, 7 aa, synthetic construct
YPPQKSG

SEQ ID NO: 55849 - protein, 7 aa, synthetic construct
PQRASSP

SEQ ID NO: 55850 - protein, 7 aa, synthetic construct
PGITPHP

SEQ ID NO: 55851 - protein, 7 aa, synthetic construct
YKEKLLS

SEQ ID NO: 55852 - protein, 7 aa, synthetic construct
QIGFKSD

SEQ ID NO: 55853 - protein, 7 aa, synthetic construct
NAIGRQD

SEQ ID NO: 55854 - protein, 7 aa, synthetic construct
FKMSTQG

SEQ ID NO: 55855 - protein, 7 aa, synthetic construct
HNKFNDG

SEQ ID NO: 55856 - protein, 7 aa, synthetic construct
NKPGQGT

SEQ ID NO: 55857 - protein, 7 aa, synthetic construct
KQEPSRE

SEQ ID NO: 55858 - protein, 7 aa, synthetic construct
RQDKSQA

SEQ ID NO: 55859 - protein, 7 aa, synthetic construct
IPPMRNG

SEQ ID NO: 55860 - protein, 7 aa, synthetic construct
PGQARSF

SEQ ID NO: 55861 - protein, 7 aa, synthetic construct
RAGHSLP

SEQ ID NO: 55862 - protein, 7 aa, synthetic construct
GNRLVVS

SEQ ID NO: 55863 - protein, 7 aa, synthetic construct
TMPKFEV

SEQ ID NO: 55864 - protein, 7 aa, synthetic construct
RVGNKED

SEQ ID NO: 55865 - protein, 7 aa, synthetic construct
PMGAASP

SEQ ID NO: 55866 - protein, 7 aa, synthetic construct
RSQGNDS

SEQ ID NO: 55867 - protein, 7 aa, synthetic construct
MVKTAKD

SEQ ID NO: 55868 - protein, 7 aa, synthetic construct
QPQVNER

SEQ ID NO: 55869 - protein, 7 aa, synthetic construct
TKYQLNE

SEQ ID NO: 55870 - protein, 7 aa, synthetic construct
IRGSTES

SEQ ID NO: 55871 - protein, 7 aa, synthetic construct
VKYNAVN

SEQ ID NO: 55872 - protein, 7 aa, synthetic construct
SSARTNP

SEQ ID NO: 55873 - protein, 7 aa, synthetic construct
AHEAIKN

SEQ ID NO: 55874 - protein, 7 aa, synthetic construct
NPGMEKI

SEQ ID NO: 55875 - protein, 7 aa, synthetic construct
ISDWQQP

SEQ ID NO: 55876 - protein, 7 aa, synthetic construct
GVRHLHA

SEQ ID NO: 55877 - protein, 7 aa, synthetic construct
PDPRVGV

SEQ ID NO: 55878 - protein, 7 aa, synthetic construct
SVKATMP

SEQ ID NO: 55879 - protein, 7 aa, synthetic construct
RGNTTAV

SEQ ID NO: 55880 - protein, 7 aa, synthetic construct
NNVSATR

SEQ ID NO: 55881 - protein, 7 aa, synthetic construct
QRPSAVA

SEQ ID NO: 55882 - protein, 7 aa, synthetic construct
NKQNLGP

SEQ ID NO: 55883 - protein, 7 aa, synthetic construct
KMSSSQI

SEQ ID NO: 55884 - protein, 7 aa, synthetic construct
FQNLQKG

SEQ ID NO: 55885 - protein, 7 aa, synthetic construct
TKKEGSN

SEQ ID NO: 55886 - protein, 7 aa, synthetic construct
LSVRNTS

SEQ ID NO: 55887 - protein, 7 aa, synthetic construct
TDPVRMQ

SEQ ID NO: 55888 - protein, 7 aa, synthetic construct
LNRVGGH

SEQ ID NO: 55889 - protein, 7 aa, synthetic construct
HMNGTSM

SEQ ID NO: 55890 - protein, 7 aa, synthetic construct
KKDIERS

SEQ ID NO: 55891 - protein, 7 aa, synthetic construct
TANQNTE

SEQ ID NO: 55892 - protein, 7 aa, synthetic construct
TGQMMKM

SEQ ID NO: 55893 - protein, 7 aa, synthetic construct
SNQVTAW

SEQ ID NO: 55894 - protein, 7 aa, synthetic construct
NQSRNNP

SEQ ID NO: 55895 - protein, 7 aa, synthetic construct
RFAAPHG

SEQ ID NO: 55896 - protein, 7 aa, synthetic construct
LASVVAN

SEQ ID NO: 55897 - protein, 7 aa, synthetic construct
DNKTSPR

SEQ ID NO: 55898 - protein, 7 aa, synthetic construct
HHKMMTD

SEQ ID NO: 55899 - protein, 7 aa, synthetic construct
QPNATSV

SEQ ID NO: 55900 - protein, 7 aa, synthetic construct
SLNNSFS

SEQ ID NO: 55901 - protein, 7 aa, synthetic construct
YNAFKQI

SEQ ID NO: 55902 - protein, 7 aa, synthetic construct
WLNVRQA

SEQ ID NO: 55903 - protein, 7 aa, synthetic construct
IVTPHRN

SEQ ID NO: 55904 - protein, 7 aa, synthetic construct
NLQMSVS

SEQ ID NO: 55905 - protein, 7 aa, synthetic construct
VGTRNHA

SEQ ID NO: 55906 - protein, 7 aa, synthetic construct
QNPGSNR

SEQ ID NO: 55907 - protein, 7 aa, synthetic construct
GFNGKNS

SEQ ID NO: 55908 - protein, 7 aa, synthetic construct
ERNSGGG

SEQ ID NO: 55909 - protein, 7 aa, synthetic construct
KFSEPMR

SEQ ID NO: 55910 - protein, 7 aa, synthetic construct
MKDHPHA

SEQ ID NO: 55911 - protein, 7 aa, synthetic construct
KTGTGLG

SEQ ID NO: 55912 - protein, 7 aa, synthetic construct
KQTASAP

SEQ ID NO: 55913 - protein, 7 aa, synthetic construct
DHAKHAP

SEQ ID NO: 55914 - protein, 7 aa, synthetic construct
YTHRKEA

SEQ ID NO: 55915 - protein, 7 aa, synthetic construct
KYDHGQL

SEQ ID NO: 55916 - protein, 7 aa, synthetic construct
MYHGKDA

SEQ ID NO: 55917 - protein, 7 aa, synthetic construct
NGGNAIT

SEQ ID NO: 55918 - protein, 7 aa, synthetic construct
YSSPKHG

SEQ ID NO: 55919 - protein, 7 aa, synthetic construct
PVPNINA

SEQ ID NO: 55920 - protein, 7 aa, synthetic construct
RQNTTSS

SEQ ID NO: 55921 - protein, 7 aa, synthetic construct
VAYNSEK

SEQ ID NO: 55922 - protein, 7 aa, synthetic construct
RYQDKHE

SEQ ID NO: 55923 - protein, 7 aa, synthetic construct
PSKSTGM

SEQ ID NO: 55924 - protein, 7 aa, synthetic construct
RNSAHES

SEQ ID NO: 55925 - protein, 7 aa, synthetic construct
MALGHRA

SEQ ID NO: 55926 - protein, 7 aa, synthetic construct
QKSAKQD

SEQ ID NO: 55927 - protein, 7 aa, synthetic construct
RAKQDTM

SEQ ID NO: 55928 - protein, 7 aa, synthetic construct
RKDPTMA

SEQ ID NO: 55929 - protein, 7 aa, synthetic construct
QKYNERN

SEQ ID NO: 55930 - protein, 7 aa, synthetic construct
ADMTVRK

SEQ ID NO: 55931 - protein, 7 aa, synthetic construct
QQAGTPN

SEQ ID NO: 55932 - protein, 7 aa, synthetic construct
GPFREAT

SEQ ID NO: 55933 - protein, 7 aa, synthetic construct
PRSVHST

SEQ ID NO: 55934 - protein, 7 aa, synthetic construct
KDKYTGI

SEQ ID NO: 55935 - protein, 7 aa, synthetic construct
TKDSRGG

SEQ ID NO: 55936 - protein, 7 aa, synthetic construct
PKNTSGA

SEQ ID NO: 55937 - protein, 7 aa, synthetic construct
HSYLAKD

SEQ ID NO: 55938 - protein, 7 aa, synthetic construct
FLDGKGG

SEQ ID NO: 55939 - protein, 7 aa, synthetic construct
RADYAPA

SEQ ID NO: 55940 - protein, 7 aa, synthetic construct
EKSKVDY

SEQ ID NO: 55941 - protein, 7 aa, synthetic construct
VKSNSSS

SEQ ID NO: 55942 - protein, 7 aa, synthetic construct
GNHNGVF

SEQ ID NO: 55943 - protein, 7 aa, synthetic construct
MTGSKQY

SEQ ID NO: 55944 - protein, 7 aa, synthetic construct
KASHVSI

SEQ ID NO: 55945 - protein, 7 aa, synthetic construct
TRKVSEG

SEQ ID NO: 55946 - protein, 7 aa, synthetic construct
APSGNDK

SEQ ID NO: 55947 - protein, 7 aa, synthetic construct
EIAHGRV

SEQ ID NO: 55948 - protein, 7 aa, synthetic construct
HNFAQAG

SEQ ID NO: 55949 - protein, 7 aa, synthetic construct
WRQKELT

SEQ ID NO: 55950 - protein, 7 aa, synthetic construct
WSTAHSG

SEQ ID NO: 55951 - protein, 7 aa, synthetic construct
MNMQQPA

SEQ ID NO: 55952 - protein, 7 aa, synthetic construct
TDKRGVF

SEQ ID NO: 55953 - protein, 7 aa, synthetic construct
NQNRAAA

SEQ ID NO: 55954 - protein, 7 aa, synthetic construct
RDGANGK

SEQ ID NO: 55955 - protein, 7 aa, synthetic construct
PSARTMG

SEQ ID NO: 55956 - protein, 7 aa, synthetic construct
RSGVEGA

SEQ ID NO: 55957 - protein, 7 aa, synthetic construct
GRNTQSG

SEQ ID NO: 55958 - protein, 7 aa, synthetic construct
DKNKSTG

SEQ ID NO: 55959 - protein, 7 aa, synthetic construct
RDGTRQS

SEQ ID NO: 55960 - protein, 7 aa, synthetic construct
WGGGAKM

SEQ ID NO: 55961 - protein, 7 aa, synthetic construct
FGFEGRG

SEQ ID NO: 55962 - protein, 7 aa, synthetic construct
PTKKDFL

SEQ ID NO: 55963 - protein, 7 aa, synthetic construct
MGQYTQV

SEQ ID NO: 55964 - protein, 7 aa, synthetic construct
SKQNMHD

SEQ ID NO: 55965 - protein, 7 aa, synthetic construct
NNVKASG

SEQ ID NO: 55966 - protein, 7 aa, synthetic construct
NKHVREE

SEQ ID NO: 55967 - protein, 7 aa, synthetic construct
VLSFSNG

SEQ ID NO: 55968 - protein, 7 aa, synthetic construct
RRLQDNT

SEQ ID NO: 55969 - protein, 7 aa, synthetic construct
FKNTSQP

SEQ ID NO: 55970 - protein, 7 aa, synthetic construct
HNHRLAP

SEQ ID NO: 55971 - protein, 7 aa, synthetic construct
SINKQKE

SEQ ID NO: 55972 - protein, 7 aa, synthetic construct
MFEQIPE

SEQ ID NO: 55973 - protein, 7 aa, synthetic construct
FHKVYPD

SEQ ID NO: 55974 - protein, 7 aa, synthetic construct
KPLAHEA

SEQ ID NO: 55975 - protein, 7 aa, synthetic construct
KNSSNGM

SEQ ID NO: 55976 - protein, 7 aa, synthetic construct
RGSGKQE

SEQ ID NO: 55977 - protein, 7 aa, synthetic construct
PSDSRVG

SEQ ID NO: 55978 - protein, 7 aa, synthetic construct
QKVSANG

SEQ ID NO: 55979 - protein, 7 aa, synthetic construct
RQSNAQP

SEQ ID NO: 55980 - protein, 7 aa, synthetic construct
WVKASRD

SEQ ID NO: 55981 - protein, 7 aa, synthetic construct
DIYGTKN

SEQ ID NO: 55982 - protein, 7 aa, synthetic construct
IPNRIGP

SEQ ID NO: 55983 - protein, 7 aa, synthetic construct
DAKARQV

SEQ ID NO: 55984 - protein, 7 aa, synthetic construct
IHYSPAG

SEQ ID NO: 55985 - protein, 7 aa, synthetic construct
IRSHVTS

SEQ ID NO: 55986 - protein, 7 aa, synthetic construct
IGKPYQV

SEQ ID NO: 55987 - protein, 7 aa, synthetic construct
ISVHKIA

SEQ ID NO: 55988 - protein, 7 aa, synthetic construct
AKMHGLG

SEQ ID NO: 55989 - protein, 7 aa, synthetic construct
NFEHKHA

SEQ ID NO: 55990 - protein, 7 aa, synthetic construct
SQSQGRQ

SEQ ID NO: 55991 - protein, 7 aa, synthetic construct
GFQGHRG

SEQ ID NO: 55992 - protein, 7 aa, synthetic construct
TKNPHHA

SEQ ID NO: 55993 - protein, 7 aa, synthetic construct
PKKSDSE

SEQ ID NO: 55994 - protein, 7 aa, synthetic construct
SYKLNKE

SEQ ID NO: 55995 - protein, 7 aa, synthetic construct
HGLAPTG

SEQ ID NO: 55996 - protein, 7 aa, synthetic construct
KKDTKND

SEQ ID NO: 55997 - protein, 7 aa, synthetic construct
WPNISQG

SEQ ID NO: 55998 - protein, 7 aa, synthetic construct
VTPKQHS

SEQ ID NO: 55999 - protein, 7 aa, synthetic construct
VGVASNK

SEQ ID NO: 56000 - protein, 7 aa, synthetic construct
AERHAIQ

SEQ ID NO: 56001 - protein, 7 aa, synthetic construct
KVGFDNY

SEQ ID NO: 56002 - protein, 7 aa, synthetic construct
MQKSWVA

SEQ ID NO: 56003 - protein, 7 aa, synthetic construct
QVGQKTA

SEQ ID NO: 56004 - protein, 7 aa, synthetic construct
SGTPKNP

SEQ ID NO: 56005 - protein, 7 aa, synthetic construct
DRSAHNI

SEQ ID NO: 56006 - protein, 7 aa, synthetic construct
QNKGNHS

SEQ ID NO: 56007 - protein, 7 aa, synthetic construct
LGRSGFD

SEQ ID NO: 56008 - protein, 7 aa, synthetic construct
YGQSLHK

SEQ ID NO: 56009 - protein, 7 aa, synthetic construct
NNKHQGG

SEQ ID NO: 56010 - protein, 7 aa, synthetic construct
LKGDKMG

SEQ ID NO: 56011 - protein, 7 aa, synthetic construct
KPPQTNA

SEQ ID NO: 56012 - protein, 7 aa, synthetic construct
QLPRTPT

SEQ ID NO: 56013 - protein, 7 aa, synthetic construct
YKSASVG

SEQ ID NO: 56014 - protein, 7 aa, synthetic construct
YIAGQES

SEQ ID NO: 56015 - protein, 7 aa, synthetic construct
WPHGDSM

SEQ ID NO: 56016 - protein, 7 aa, synthetic construct
LDKYHMQ

SEQ ID NO: 56017 - protein, 7 aa, synthetic construct
NRYGNSI

SEQ ID NO: 56018 - protein, 7 aa, synthetic construct
QNRTGSS

SEQ ID NO: 56019 - protein, 7 aa, synthetic construct
LTDGKGY

SEQ ID NO: 56020 - protein, 7 aa, synthetic construct
VMHMHKN

SEQ ID NO: 56021 - protein, 7 aa, synthetic construct
KLVAQNH

SEQ ID NO: 56022 - protein, 7 aa, synthetic construct
VEGRGAV

SEQ ID NO: 56023 - protein, 7 aa, synthetic construct
SPAPKYL

SEQ ID NO: 56024 - protein, 7 aa, synthetic construct
NRVSSVG

SEQ ID NO: 56025 - protein, 7 aa, synthetic construct
KNQGQVG

SEQ ID NO: 56026 - protein, 7 aa, synthetic construct
KPRDQQD

SEQ ID NO: 56027 - protein, 7 aa, synthetic construct
SWQAESV

SEQ ID NO: 56028 - protein, 7 aa, synthetic construct
TNKGGQA

SEQ ID NO: 56029 - protein, 7 aa, synthetic construct
GKSVNSA

SEQ ID NO: 56030 - protein, 7 aa, synthetic construct
SVNRAQG

SEQ ID NO: 56031 - protein, 7 aa, synthetic construct
LAGVAPS

SEQ ID NO: 56032 - protein, 7 aa, synthetic construct
KPMGNQS

SEQ ID NO: 56033 - protein, 7 aa, synthetic construct
NMRQAAS

SEQ ID NO: 56034 - protein, 7 aa, synthetic construct
FATPQSG

SEQ ID NO: 56035 - protein, 7 aa, synthetic construct
KNQPQTA

SEQ ID NO: 56036 - protein, 7 aa, synthetic construct
MHSERGF

SEQ ID NO: 56037 - protein, 7 aa, synthetic construct
IGGSAKN

SEQ ID NO: 56038 - protein, 7 aa, synthetic construct
TMFHHEG

SEQ ID NO: 56039 - protein, 7 aa, synthetic construct
YLRGDER

SEQ ID NO: 56040 - protein, 7 aa, synthetic construct
NGKTSAV

SEQ ID NO: 56041 - protein, 7 aa, synthetic construct
QSMVAGA

SEQ ID NO: 56042 - protein, 7 aa, synthetic construct
FGAASHG

SEQ ID NO: 56043 - protein, 7 aa, synthetic construct
KTGHYQN

SEQ ID NO: 56044 - protein, 7 aa, synthetic construct
NLHMGID

SEQ ID NO: 56045 - protein, 7 aa, synthetic construct
ANRIAGV

SEQ ID NO: 56046 - protein, 7 aa, synthetic construct
FQFAPNG

SEQ ID NO: 56047 - protein, 7 aa, synthetic construct
ASSPMRN

SEQ ID NO: 56048 - protein, 7 aa, synthetic construct
VQQSSKQ

SEQ ID NO: 56049 - protein, 7 aa, synthetic construct
IHNQEVK

SEQ ID NO: 56050 - protein, 7 aa, synthetic construct
GKPVSEH

SEQ ID NO: 56051 - protein, 7 aa, synthetic construct
TTTGRPV

SEQ ID NO: 56052 - protein, 7 aa, synthetic construct
QGKMERG

SEQ ID NO: 56053 - protein, 7 aa, synthetic construct
LHQNHQI

SEQ ID NO: 56054 - protein, 7 aa, synthetic construct
DRGTHEA

SEQ ID NO: 56055 - protein, 7 aa, synthetic construct
GKSFGLE

SEQ ID NO: 56056 - protein, 7 aa, synthetic construct
YLKKDNF

SEQ ID NO: 56057 - protein, 7 aa, synthetic construct
TQGVGGV

SEQ ID NO: 56058 - protein, 7 aa, synthetic construct
MTSKQML

SEQ ID NO: 56059 - protein, 7 aa, synthetic construct
NIHQKVN

SEQ ID NO: 56060 - protein, 7 aa, synthetic construct
SRNQTTP

SEQ ID NO: 56061 - protein, 7 aa, synthetic construct
IDQRATT

SEQ ID NO: 56062 - protein, 7 aa, synthetic construct
MQKNQNA

SEQ ID NO: 56063 - protein, 7 aa, synthetic construct
QLKKDYV

SEQ ID NO: 56064 - protein, 7 aa, synthetic construct
NARSHYE

SEQ ID NO: 56065 - protein, 7 aa, synthetic construct
RSSDQLG

SEQ ID NO: 56066 - protein, 7 aa, synthetic construct
NLRTMNE

SEQ ID NO: 56067 - protein, 7 aa, synthetic construct
TAKGFLG

SEQ ID NO: 56068 - protein, 7 aa, synthetic construct
EMNKIAH

SEQ ID NO: 56069 - protein, 7 aa, synthetic construct
NRLALHG

SEQ ID NO: 56070 - protein, 7 aa, synthetic construct
SLAKMGE

SEQ ID NO: 56071 - protein, 7 aa, synthetic construct
GQKGASG

SEQ ID NO: 56072 - protein, 7 aa, synthetic construct
NKSGSSF

SEQ ID NO: 56073 - protein, 7 aa, synthetic construct
TPQGNKG

SEQ ID NO: 56074 - protein, 7 aa, synthetic construct
TKGVKEM

SEQ ID NO: 56075 - protein, 7 aa, synthetic construct
TFAPHTD

SEQ ID NO: 56076 - protein, 7 aa, synthetic construct
HSQRTIT

SEQ ID NO: 56077 - protein, 7 aa, synthetic construct
SEKWFKE

SEQ ID NO: 56078 - protein, 7 aa, synthetic construct
NSAGTKH

SEQ ID NO: 56079 - protein, 7 aa, synthetic construct
GWGVKPA

SEQ ID NO: 56080 - protein, 7 aa, synthetic construct
QGDMLKP

SEQ ID NO: 56081 - protein, 7 aa, synthetic construct
SNKAVQG

SEQ ID NO: 56082 - protein, 7 aa, synthetic construct
NPVPGKT

SEQ ID NO: 56083 - protein, 7 aa, synthetic construct
PSMKGTA

SEQ ID NO: 56084 - protein, 7 aa, synthetic construct
QRVKFPD

SEQ ID NO: 56085 - protein, 7 aa, synthetic construct
SNNGQST

SEQ ID NO: 56086 - protein, 7 aa, synthetic construct
ERYKSIP

SEQ ID NO: 56087 - protein, 7 aa, synthetic construct
QSFKQNN

SEQ ID NO: 56088 - protein, 7 aa, synthetic construct
RDHNRSF

SEQ ID NO: 56089 - protein, 7 aa, synthetic construct
AHNAAKN

SEQ ID NO: 56090 - protein, 7 aa, synthetic construct
DKGVKQM

SEQ ID NO: 56091 - protein, 7 aa, synthetic construct
KNHLDGA

SEQ ID NO: 56092 - protein, 7 aa, synthetic construct
MTMHKPP

SEQ ID NO: 56093 - protein, 7 aa, synthetic construct
NPAGQGM

SEQ ID NO: 56094 - protein, 7 aa, synthetic construct
FKTSQGN

SEQ ID NO: 56095 - protein, 7 aa, synthetic construct
TPYTPME

SEQ ID NO: 56096 - protein, 7 aa, synthetic construct
HKYVNET

SEQ ID NO: 56097 - protein, 7 aa, synthetic construct
GSRTANP

SEQ ID NO: 56098 - protein, 7 aa, synthetic construct
KKQLNNE

SEQ ID NO: 56099 - protein, 7 aa, synthetic construct
GYSGIAA

SEQ ID NO: 56100 - protein, 7 aa, synthetic construct
LNPARNQ

SEQ ID NO: 56101 - protein, 7 aa, synthetic construct
TKNPPNT

SEQ ID NO: 56102 - protein, 7 aa, synthetic construct
SQGIHMG

SEQ ID NO: 56103 - protein, 7 aa, synthetic construct
KRDTMST

SEQ ID NO: 56104 - protein, 7 aa, synthetic construct
GYHPNPK

SEQ ID NO: 56105 - protein, 7 aa, synthetic construct
GGNKMNP

SEQ ID NO: 56106 - protein, 7 aa, synthetic construct
DMKGNLK

SEQ ID NO: 56107 - protein, 7 aa, synthetic construct
HKIQGGD

SEQ ID NO: 56108 - protein, 7 aa, synthetic construct
LIQHNNG

SEQ ID NO: 56109 - protein, 7 aa, synthetic construct
QTARSSP

SEQ ID NO: 56110 - protein, 7 aa, synthetic construct
YKNTTQG

SEQ ID NO: 56111 - protein, 7 aa, synthetic construct
AGHQTSM

SEQ ID NO: 56112 - protein, 7 aa, synthetic construct
AVQVGRP

SEQ ID NO: 56113 - protein, 7 aa, synthetic construct
FPTKATT

SEQ ID NO: 56114 - protein, 7 aa, synthetic construct
SKNTSAM

SEQ ID NO: 56115 - protein, 7 aa, synthetic construct
RAVTGTM

SEQ ID NO: 56116 - protein, 7 aa, synthetic construct
FKTVSKD

SEQ ID NO: 56117 - protein, 7 aa, synthetic construct
NQTGKLM

SEQ ID NO: 56118 - protein, 7 aa, synthetic construct
TMPGGKG

SEQ ID NO: 56119 - protein, 7 aa, synthetic construct
SSKNTQF

SEQ ID NO: 56120 - protein, 7 aa, synthetic construct
GVQNMYP

SEQ ID NO: 56121 - protein, 7 aa, synthetic construct
NSKHAMG

SEQ ID NO: 56122 - protein, 7 aa, synthetic construct
ANRGGEY

SEQ ID NO: 56123 - protein, 7 aa, synthetic construct
GPNKGPV

SEQ ID NO: 56124 - protein, 7 aa, synthetic construct
PPSMRDG

SEQ ID NO: 56125 - protein, 7 aa, synthetic construct
RPDSLGF

SEQ ID NO: 56126 - protein, 7 aa, synthetic construct
QRQQSQP

SEQ ID NO: 56127 - protein, 7 aa, synthetic construct
NINDRMG

SEQ ID NO: 56128 - protein, 7 aa, synthetic construct
DAIVKLS

SEQ ID NO: 56129 - protein, 7 aa, synthetic construct
NQQTRSA

SEQ ID NO: 56130 - protein, 7 aa, synthetic construct
HKEYPDP

SEQ ID NO: 56131 - protein, 7 aa, synthetic construct
NASKGQG

SEQ ID NO: 56132 - protein, 7 aa, synthetic construct
GQHRPQP

SEQ ID NO: 56133 - protein, 7 aa, synthetic construct
PKGNTGS

SEQ ID NO: 56134 - protein, 7 aa, synthetic construct
GWRTQGE

SEQ ID NO: 56135 - protein, 7 aa, synthetic construct
RYKGTDD

SEQ ID NO: 56136 - protein, 7 aa, synthetic construct
MLREKPG

SEQ ID NO: 56137 - protein, 7 aa, synthetic construct
MQRNSAG

SEQ ID NO: 56138 - protein, 7 aa, synthetic construct
FKMPTTS

SEQ ID NO: 56139 - protein, 7 aa, synthetic construct
TPKISVG

SEQ ID NO: 56140 - protein, 7 aa, synthetic construct
AGRYSDE

SEQ ID NO: 56141 - protein, 7 aa, synthetic construct
NFDIKGR

SEQ ID NO: 56142 - protein, 7 aa, synthetic construct
LSKHGGM

SEQ ID NO: 56143 - protein, 7 aa, synthetic construct
STTKFQG

SEQ ID NO: 56144 - protein, 7 aa, synthetic construct
RITKAHE

SEQ ID NO: 56145 - protein, 7 aa, synthetic construct
HMAKGSI

SEQ ID NO: 56146 - protein, 7 aa, synthetic construct
INPLIMG

SEQ ID NO: 56147 - protein, 7 aa, synthetic construct
QNGKNNA

SEQ ID NO: 56148 - protein, 7 aa, synthetic construct
YPQKSGN

SEQ ID NO: 56149 - protein, 7 aa, synthetic construct
PKPMNGS

SEQ ID NO: 56150 - protein, 7 aa, synthetic construct
QKNTTSP

SEQ ID NO: 56151 - protein, 7 aa, synthetic construct
ERMVRTP

SEQ ID NO: 56152 - protein, 7 aa, synthetic construct
RMLRSEE

SEQ ID NO: 56153 - protein, 7 aa, synthetic construct
HKSQAIF

SEQ ID NO: 56154 - protein, 7 aa, synthetic construct
PQQANRA

SEQ ID NO: 56155 - protein, 7 aa, synthetic construct
GVTGNAG

SEQ ID NO: 56156 - protein, 7 aa, synthetic construct
VRSAAPN

SEQ ID NO: 56157 - protein, 7 aa, synthetic construct
VERHPAK

SEQ ID NO: 56158 - protein, 7 aa, synthetic construct
TFRSTDG

SEQ ID NO: 56159 - protein, 7 aa, synthetic construct
TPRTMSD

SEQ ID NO: 56160 - protein, 7 aa, synthetic construct
YDPGFKG

SEQ ID NO: 56161 - protein, 7 aa, synthetic construct
VNKMHIS

SEQ ID NO: 56162 - protein, 7 aa, synthetic construct
SNNAAPR

SEQ ID NO: 56163 - protein, 7 aa, synthetic construct
TVKTQPY

SEQ ID NO: 56164 - protein, 7 aa, synthetic construct
REHQYMG

SEQ ID NO: 56165 - protein, 7 aa, synthetic construct
KKVIAEG

SEQ ID NO: 56166 - protein, 7 aa, synthetic construct
TAQLRLA

SEQ ID NO: 56167 - protein, 7 aa, synthetic construct
AKYNPNL

SEQ ID NO: 56168 - protein, 7 aa, synthetic construct
REGRIGS

SEQ ID NO: 56169 - protein, 7 aa, synthetic construct
RLPTVPS

SEQ ID NO: 56170 - protein, 7 aa, synthetic construct
KHKDEMT

SEQ ID NO: 56171 - protein, 7 aa, synthetic construct
NSTDSMR

SEQ ID NO: 56172 - protein, 7 aa, synthetic construct
KNGPFKE

SEQ ID NO: 56173 - protein, 7 aa, synthetic construct
GNSSHGV

SEQ ID NO: 56174 - protein, 7 aa, synthetic construct
RMKLPEE

SEQ ID NO: 56175 - protein, 7 aa, synthetic construct
AQRKEGI

SEQ ID NO: 56176 - protein, 7 aa, synthetic construct
THKTNHH

SEQ ID NO: 56177 - protein, 7 aa, synthetic construct
HHLQNHG

SEQ ID NO: 56178 - protein, 7 aa, synthetic construct
PTKNMGA

SEQ ID NO: 56179 - protein, 7 aa, synthetic construct
NHHNSIT

SEQ ID NO: 56180 - protein, 7 aa, synthetic construct
KKDSGQA

SEQ ID NO: 56181 - protein, 7 aa, synthetic construct
YSKPTQA

SEQ ID NO: 56182 - protein, 7 aa, synthetic construct
YNNKTNP

SEQ ID NO: 56183 - protein, 7 aa, synthetic construct
RSTDQSP

SEQ ID NO: 56184 - protein, 7 aa, synthetic construct
RVQAGSI

SEQ ID NO: 56185 - protein, 7 aa, synthetic construct
MRSGTMH

SEQ ID NO: 56186 - protein, 7 aa, synthetic construct
KFLRGDP

SEQ ID NO: 56187 - protein, 7 aa, synthetic construct
ANTNATV

SEQ ID NO: 56188 - protein, 7 aa, synthetic construct
MKGMGQA

SEQ ID NO: 56189 - protein, 7 aa, synthetic construct
RHPQYES

SEQ ID NO: 56190 - protein, 7 aa, synthetic construct
MGVKFAT

SEQ ID NO: 56191 - protein, 7 aa, synthetic construct
PYKGQMG

SEQ ID NO: 56192 - protein, 7 aa, synthetic construct
GSKQQLP

SEQ ID NO: 56193 - protein, 7 aa, synthetic construct
MKTAHTA

SEQ ID NO: 56194 - protein, 7 aa, synthetic construct
YVPHKNH

SEQ ID NO: 56195 - protein, 7 aa, synthetic construct
NPGTHVS

SEQ ID NO: 56196 - protein, 7 aa, synthetic construct
LGTKMKE

SEQ ID NO: 56197 - protein, 7 aa, synthetic construct
LKSSNQS

SEQ ID NO: 56198 - protein, 7 aa, synthetic construct
AAKSGTP

SEQ ID NO: 56199 - protein, 7 aa, synthetic construct
DNPTTTR

SEQ ID NO: 56200 - protein, 7 aa, synthetic construct
QSDKGFM

SEQ ID NO: 56201 - protein, 7 aa, synthetic construct
FKHTVNT

SEQ ID NO: 56202 - protein, 7 aa, synthetic construct
TRLQMQP

SEQ ID NO: 56203 - protein, 7 aa, synthetic construct
HHHQGPV

SEQ ID NO: 56204 - protein, 7 aa, synthetic construct
SKQHGDI

SEQ ID NO: 56205 - protein, 7 aa, synthetic construct
MLTATRG

SEQ ID NO: 56206 - protein, 7 aa, synthetic construct
SHDLRRV

SEQ ID NO: 56207 - protein, 7 aa, synthetic construct
RPQQSGT

SEQ ID NO: 56208 - protein, 7 aa, synthetic construct
NAKAPSS

SEQ ID NO: 56209 - protein, 7 aa, synthetic construct
HNGFSSD

SEQ ID NO: 56210 - protein, 7 aa, synthetic construct
LSSNGAK

SEQ ID NO: 56211 - protein, 7 aa, synthetic construct
GLLATIG

SEQ ID NO: 56212 - protein, 7 aa, synthetic construct
VKLTPKA

SEQ ID NO: 56213 - protein, 7 aa, synthetic construct
SKQQNEM

SEQ ID NO: 56214 - protein, 7 aa, synthetic construct
GVQGAGV

SEQ ID NO: 56215 - protein, 7 aa, synthetic construct
LRELKSN

SEQ ID NO: 56216 - protein, 7 aa, synthetic construct
GKSFTNG

SEQ ID NO: 56217 - protein, 7 aa, synthetic construct
GNGNKAS

SEQ ID NO: 56218 - protein, 7 aa, synthetic construct
GINGNSK

SEQ ID NO: 56219 - protein, 7 aa, synthetic construct
QHISNER

SEQ ID NO: 56220 - protein, 7 aa, synthetic construct
GHGGNLN

SEQ ID NO: 56221 - protein, 7 aa, synthetic construct
SSHVRPL

SEQ ID NO: 56222 - protein, 7 aa, synthetic construct
RVMNQDM

SEQ ID NO: 56223 - protein, 7 aa, synthetic construct
LRGYNDV

SEQ ID NO: 56224 - protein, 7 aa, synthetic construct
DKGFMNE

SEQ ID NO: 56225 - protein, 7 aa, synthetic construct
NQHHPAP

SEQ ID NO: 56226 - protein, 7 aa, synthetic construct
MNSISHQ

SEQ ID NO: 56227 - protein, 7 aa, synthetic construct
RDRSTND

SEQ ID NO: 56228 - protein, 7 aa, synthetic construct
SKMQSGG

SEQ ID NO: 56229 - protein, 7 aa, synthetic construct
QRRVNDE

SEQ ID NO: 56230 - protein, 7 aa, synthetic construct
AKSAGMG

SEQ ID NO: 56231 - protein, 7 aa, synthetic construct
DKFKVIA

SEQ ID NO: 56232 - protein, 7 aa, synthetic construct
GFGNYKQ

SEQ ID NO: 56233 - protein, 7 aa, synthetic construct
APPRVIA

SEQ ID NO: 56234 - protein, 7 aa, synthetic construct
FQHMRDE

SEQ ID NO: 56235 - protein, 7 aa, synthetic construct
NAAKTTG

SEQ ID NO: 56236 - protein, 7 aa, synthetic construct
AKLPGTH

SEQ ID NO: 56237 - protein, 7 aa, synthetic construct
QKGLGSP

SEQ ID NO: 56238 - protein, 7 aa, synthetic construct
YVKNHFN

SEQ ID NO: 56239 - protein, 7 aa, synthetic construct
EGQWHKT

SEQ ID NO: 56240 - protein, 7 aa, synthetic construct
NQQNHPL

SEQ ID NO: 56241 - protein, 7 aa, synthetic construct
TRTPGQS

SEQ ID NO: 56242 - protein, 7 aa, synthetic construct
FLDVRGS

SEQ ID NO: 56243 - protein, 7 aa, synthetic construct
TITKHSF

SEQ ID NO: 56244 - protein, 7 aa, synthetic construct
IPKQMTS

SEQ ID NO: 56245 - protein, 7 aa, synthetic construct
MWPGGSQ

SEQ ID NO: 56246 - protein, 7 aa, synthetic construct
ISKQHHS

SEQ ID NO: 56247 - protein, 7 aa, synthetic construct
MNFSPGH

SEQ ID NO: 56248 - protein, 7 aa, synthetic construct
QRTGPTM

SEQ ID NO: 56249 - protein, 7 aa, synthetic construct
PHTREVR

SEQ ID NO: 56250 - protein, 7 aa, synthetic construct
QTQGIPQ

SEQ ID NO: 56251 - protein, 7 aa, synthetic construct
PRSVTAG

SEQ ID NO: 56252 - protein, 7 aa, synthetic construct
NTTNGPH

SEQ ID NO: 56253 - protein, 7 aa, synthetic construct
RNNSANV

SEQ ID NO: 56254 - protein, 7 aa, synthetic construct
SPHPRDI

SEQ ID NO: 56255 - protein, 7 aa, synthetic construct
KMPFEKP

SEQ ID NO: 56256 - protein, 7 aa, synthetic construct
VDQDRKR

SEQ ID NO: 56257 - protein, 7 aa, synthetic construct
RQNAAPA

SEQ ID NO: 56258 - protein, 7 aa, synthetic construct
YKAGKLS

SEQ ID NO: 56259 - protein, 7 aa, synthetic construct
NTHRTME

SEQ ID NO: 56260 - protein, 7 aa, synthetic construct
VPVQKVG

SEQ ID NO: 56261 - protein, 7 aa, synthetic construct
PISGHKL

SEQ ID NO: 56262 - protein, 7 aa, synthetic construct
RGPNSQG

SEQ ID NO: 56263 - protein, 7 aa, synthetic construct
VEQKKIS

SEQ ID NO: 56264 - protein, 7 aa, synthetic construct
TNMGKAG

SEQ ID NO: 56265 - protein, 7 aa, synthetic construct
GQTTGAW

SEQ ID NO: 56266 - protein, 7 aa, synthetic construct
DVPAKHR

SEQ ID NO: 56267 - protein, 7 aa, synthetic construct
TGHIANA

SEQ ID NO: 56268 - protein, 7 aa, synthetic construct
TSRVALE

SEQ ID NO: 56269 - protein, 7 aa, synthetic construct
QRSFTKE

SEQ ID NO: 56270 - protein, 7 aa, synthetic construct
QYQGQSM

SEQ ID NO: 56271 - protein, 7 aa, synthetic construct
PNKQGVG

SEQ ID NO: 56272 - protein, 7 aa, synthetic construct
QNEHIKP

SEQ ID NO: 56273 - protein, 7 aa, synthetic construct
VQRDRGA

SEQ ID NO: 56274 - protein, 7 aa, synthetic construct
TGQTKQT

SEQ ID NO: 56275 - protein, 7 aa, synthetic construct
HNHNSQG

SEQ ID NO: 56276 - protein, 7 aa, synthetic construct
KYTYHEG

SEQ ID NO: 56277 - protein, 7 aa, synthetic construct
IIEGSRS

SEQ ID NO: 56278 - protein, 7 aa, synthetic construct
GAKVAER

SEQ ID NO: 56279 - protein, 7 aa, synthetic construct
WAASKLG

SEQ ID NO: 56280 - protein, 7 aa, synthetic construct
WQTKNAH

SEQ ID NO: 56281 - protein, 7 aa, synthetic construct
SQKAVKD

SEQ ID NO: 56282 - protein, 7 aa, synthetic construct
QTKPSGS

SEQ ID NO: 56283 - protein, 7 aa, synthetic construct
TSTQHDS

SEQ ID NO: 56284 - protein, 7 aa, synthetic construct
APIKMGQ

SEQ ID NO: 56285 - protein, 7 aa, synthetic construct
QKVISLD

SEQ ID NO: 56286 - protein, 7 aa, synthetic construct
TSQRGAA

SEQ ID NO: 56287 - protein, 7 aa, synthetic construct
TTGPPHN

SEQ ID NO: 56288 - protein, 7 aa, synthetic construct
RPHMADA

SEQ ID NO: 56289 - protein, 7 aa, synthetic construct
VKPNTNA

SEQ ID NO: 56290 - protein, 7 aa, synthetic construct
IAHANTM

SEQ ID NO: 56291 - protein, 7 aa, synthetic construct
TVGNKVG

SEQ ID NO: 56292 - protein, 7 aa, synthetic construct
FGKPMTG

SEQ ID NO: 56293 - protein, 7 aa, synthetic construct
TSFKQDQ

SEQ ID NO: 56294 - protein, 7 aa, synthetic construct
MNAGRAQ

SEQ ID NO: 56295 - protein, 7 aa, synthetic construct
GDPKAMS

SEQ ID NO: 56296 - protein, 7 aa, synthetic construct
NISNHGG

SEQ ID NO: 56297 - protein, 7 aa, synthetic construct
WQRHSIE

SEQ ID NO: 56298 - protein, 7 aa, synthetic construct
ETNVRVS

SEQ ID NO: 56299 - protein, 7 aa, synthetic construct
RITHPDE

SEQ ID NO: 56300 - protein, 7 aa, synthetic construct
KTQQSGS

SEQ ID NO: 56301 - protein, 7 aa, synthetic construct
DVHANKS

SEQ ID NO: 56302 - protein, 7 aa, synthetic construct
AGTHDKK

SEQ ID NO: 56303 - protein, 7 aa, synthetic construct
LGPAKQQ

SEQ ID NO: 56304 - protein, 7 aa, synthetic construct
KNNNSGV

SEQ ID NO: 56305 - protein, 7 aa, synthetic construct
PYTLKYE

SEQ ID NO: 56306 - protein, 7 aa, synthetic construct
KNMTGQT

SEQ ID NO: 56307 - protein, 7 aa, synthetic construct
RASTQNA

SEQ ID NO: 56308 - protein, 7 aa, synthetic construct
TILSSNM

SEQ ID NO: 56309 - protein, 7 aa, synthetic construct
ESGVSLA

SEQ ID NO: 56310 - protein, 7 aa, synthetic construct
TGGRMQQ

SEQ ID NO: 56311 - protein, 7 aa, synthetic construct
RPSQQMA

SEQ ID NO: 56312 - protein, 7 aa, synthetic construct
SKMERGM

SEQ ID NO: 56313 - protein, 7 aa, synthetic construct
KFNGQQG

SEQ ID NO: 56314 - protein, 7 aa, synthetic construct
THQHITS

SEQ ID NO: 56315 - protein, 7 aa, synthetic construct
NMMGLMG

SEQ ID NO: 56316 - protein, 7 aa, synthetic construct
MKGGALY

SEQ ID NO: 56317 - protein, 7 aa, synthetic construct
KANSSTT

SEQ ID NO: 56318 - protein, 7 aa, synthetic construct
MRQSVAL

SEQ ID NO: 56319 - protein, 7 aa, synthetic construct
WGHVNEN

SEQ ID NO: 56320 - protein, 7 aa, synthetic construct
FNKISQP

SEQ ID NO: 56321 - protein, 7 aa, synthetic construct
YGGRSTD

SEQ ID NO: 56322 - protein, 7 aa, synthetic construct
KNQSTHA

SEQ ID NO: 56323 - protein, 7 aa, synthetic construct
AQRDAMK

SEQ ID NO: 56324 - protein, 7 aa, synthetic construct
GKQQPMQ

SEQ ID NO: 56325 - protein, 7 aa, synthetic construct
ESPFSSP

SEQ ID NO: 56326 - protein, 7 aa, synthetic construct
PAGAIAS

SEQ ID NO: 56327 - protein, 7 aa, synthetic construct
TTARHML

SEQ ID NO: 56328 - protein, 7 aa, synthetic construct
SNDISYP

SEQ ID NO: 56329 - protein, 7 aa, synthetic construct
YGALGAV

SEQ ID NO: 56330 - protein, 7 aa, synthetic construct
LVAKTTG

SEQ ID NO: 56331 - protein, 7 aa, synthetic construct
KYDIGDK

SEQ ID NO: 56332 - protein, 7 aa, synthetic construct
AGNGHPF

SEQ ID NO: 56333 - protein, 7 aa, synthetic construct
PQGPKMP

SEQ ID NO: 56334 - protein, 7 aa, synthetic construct
IFKHDMG

SEQ ID NO: 56335 - protein, 7 aa, synthetic construct
GEKLGYH

SEQ ID NO: 56336 - protein, 7 aa, synthetic construct
THHNVAK

SEQ ID NO: 56337 - protein, 7 aa, synthetic construct
VKNGGVF

SEQ ID NO: 56338 - protein, 7 aa, synthetic construct
GSAPRND

SEQ ID NO: 56339 - protein, 7 aa, synthetic construct
LGMQSTT

SEQ ID NO: 56340 - protein, 7 aa, synthetic construct
LKHQSHQ

SEQ ID NO: 56341 - protein, 7 aa, synthetic construct
VTNKTVV

SEQ ID NO: 56342 - protein, 7 aa, synthetic construct
TGNSKVA

SEQ ID NO: 56343 - protein, 7 aa, synthetic construct
MSTNAKY

SEQ ID NO: 56344 - protein, 7 aa, synthetic construct
NGKNMGA

SEQ ID NO: 56345 - protein, 7 aa, synthetic construct
TTTKPIG

SEQ ID NO: 56346 - protein, 7 aa, synthetic construct
SLRDPPR

SEQ ID NO: 56347 - protein, 7 aa, synthetic construct
THQTGFS

SEQ ID NO: 56348 - protein, 7 aa, synthetic construct
RASAAQP

SEQ ID NO: 56349 - protein, 7 aa, synthetic construct
KAPYSGG

SEQ ID NO: 56350 - protein, 7 aa, synthetic construct
WEPKKMG

SEQ ID NO: 56351 - protein, 7 aa, synthetic construct
RNAKFLD

SEQ ID NO: 56352 - protein, 7 aa, synthetic construct
LRNQPVA

SEQ ID NO: 56353 - protein, 7 aa, synthetic construct
ASVAKHP

SEQ ID NO: 56354 - protein, 7 aa, synthetic construct
NKTAMSG

SEQ ID NO: 56355 - protein, 7 aa, synthetic construct
FNPRESL

SEQ ID NO: 56356 - protein, 7 aa, synthetic construct
AEHHKIQ

SEQ ID NO: 56357 - protein, 7 aa, synthetic construct
FSPTHGP

SEQ ID NO: 56358 - protein, 7 aa, synthetic construct
EPRFERG

SEQ ID NO: 56359 - protein, 7 aa, synthetic construct
RPILTES

SEQ ID NO: 56360 - protein, 7 aa, synthetic construct
SPKMMGT

SEQ ID NO: 56361 - protein, 7 aa, synthetic construct
TNKQIQA

SEQ ID NO: 56362 - protein, 7 aa, synthetic construct
VHSRSAN

SEQ ID NO: 56363 - protein, 7 aa, synthetic construct
NIQKPHP

SEQ ID NO: 56364 - protein, 7 aa, synthetic construct
IHTVPKN

SEQ ID NO: 56365 - protein, 7 aa, synthetic construct
TKPSNSN

SEQ ID NO: 56366 - protein, 7 aa, synthetic construct
TQRLPNA

SEQ ID NO: 56367 - protein, 7 aa, synthetic construct
QQRGVNA

SEQ ID NO: 56368 - protein, 7 aa, synthetic construct
GTHHTAN

SEQ ID NO: 56369 - protein, 7 aa, synthetic construct
LKSNTVN

SEQ ID NO: 56370 - protein, 7 aa, synthetic construct
DRISNMD

SEQ ID NO: 56371 - protein, 7 aa, synthetic construct
KHAEQVT

SEQ ID NO: 56372 - protein, 7 aa, synthetic construct
PLSRQVG

SEQ ID NO: 56373 - protein, 7 aa, synthetic construct
RATTQAG

SEQ ID NO: 56374 - protein, 7 aa, synthetic construct
QDTREKK

SEQ ID NO: 56375 - protein, 7 aa, synthetic construct
HHGRQAD

SEQ ID NO: 56376 - protein, 7 aa, synthetic construct
DSRVHAT

SEQ ID NO: 56377 - protein, 7 aa, synthetic construct
HVVMKGT

SEQ ID NO: 56378 - protein, 7 aa, synthetic construct
WARDHSN

SEQ ID NO: 56379 - protein, 7 aa, synthetic construct
LKVFPHE

SEQ ID NO: 56380 - protein, 7 aa, synthetic construct
EFNRRPD

SEQ ID NO: 56381 - protein, 7 aa, synthetic construct
MHGSTFS

SEQ ID NO: 56382 - protein, 7 aa, synthetic construct
KNNGSTI

SEQ ID NO: 56383 - protein, 7 aa, synthetic construct
HSTIVSG

SEQ ID NO: 56384 - protein, 7 aa, synthetic construct
PSKGPGV

SEQ ID NO: 56385 - protein, 7 aa, synthetic construct
YSNTVSI

SEQ ID NO: 56386 - protein, 7 aa, synthetic construct
RVARGGE

SEQ ID NO: 56387 - protein, 7 aa, synthetic construct
AKTISNT

SEQ ID NO: 56388 - protein, 7 aa, synthetic construct
KMGHEHF

SEQ ID NO: 56389 - protein, 7 aa, synthetic construct
GNMSQPP

SEQ ID NO: 56390 - protein, 7 aa, synthetic construct
HRTTQEQ

SEQ ID NO: 56391 - protein, 7 aa, synthetic construct
QNSGSRP

SEQ ID NO: 56392 - protein, 7 aa, synthetic construct
VAKDSQL

SEQ ID NO: 56393 - protein, 7 aa, synthetic construct
YVGVDRS

SEQ ID NO: 56394 - protein, 7 aa, synthetic construct
SSGMIPM

SEQ ID NO: 56395 - protein, 7 aa, synthetic construct
PQGKSAP

SEQ ID NO: 56396 - protein, 7 aa, synthetic construct
YKGAATS

SEQ ID NO: 56397 - protein, 7 aa, synthetic construct
PLSRPGD

SEQ ID NO: 56398 - protein, 7 aa, synthetic construct
GMPSRAL

SEQ ID NO: 56399 - protein, 7 aa, synthetic construct
RPEFQMV

SEQ ID NO: 56400 - protein, 7 aa, synthetic construct
PVGMTHS

SEQ ID NO: 56401 - protein, 7 aa, synthetic construct
VYDAKIP

SEQ ID NO: 56402 - protein, 7 aa, synthetic construct
MTKTQQS

SEQ ID NO: 56403 - protein, 7 aa, synthetic construct
STMHLVS

SEQ ID NO: 56404 - protein, 7 aa, synthetic construct
VPKYNDG

SEQ ID NO: 56405 - protein, 7 aa, synthetic construct
EHTNMKE

SEQ ID NO: 56406 - protein, 7 aa, synthetic construct
NQRFDPG

SEQ ID NO: 56407 - protein, 7 aa, synthetic construct
LDQRNKT

SEQ ID NO: 56408 - protein, 7 aa, synthetic construct
LGHSPTL

SEQ ID NO: 56409 - protein, 7 aa, synthetic construct
IFNDKKI

SEQ ID NO: 56410 - protein, 7 aa, synthetic construct
IGGLLKA

SEQ ID NO: 56411 - protein, 7 aa, synthetic construct
RIAEQPL

SEQ ID NO: 56412 - protein, 7 aa, synthetic construct
TPDSSNR

SEQ ID NO: 56413 - protein, 7 aa, synthetic construct
HLSNHVG

SEQ ID NO: 56414 - protein, 7 aa, synthetic construct
QRPGPVA

SEQ ID NO: 56415 - protein, 7 aa, synthetic construct
FKSTQAS

SEQ ID NO: 56416 - protein, 7 aa, synthetic construct
GHEPRYS

SEQ ID NO: 56417 - protein, 7 aa, synthetic construct
PTRAVGE

SEQ ID NO: 56418 - protein, 7 aa, synthetic construct
RGNSMAD

SEQ ID NO: 56419 - protein, 7 aa, synthetic construct
RHSSSMT

SEQ ID NO: 56420 - protein, 7 aa, synthetic construct
MTHTSNP

SEQ ID NO: 56421 - protein, 7 aa, synthetic construct
KSNSVVP

SEQ ID NO: 56422 - protein, 7 aa, synthetic construct
TGALMPH

SEQ ID NO: 56423 - protein, 7 aa, synthetic construct
KGTEGRL

SEQ ID NO: 56424 - protein, 7 aa, synthetic construct
QNRPIGG

SEQ ID NO: 56425 - protein, 7 aa, synthetic construct
KQAHHSP

SEQ ID NO: 56426 - protein, 7 aa, synthetic construct
RDRQWVD

SEQ ID NO: 56427 - protein, 7 aa, synthetic construct
LKPHDIV

SEQ ID NO: 56428 - protein, 7 aa, synthetic construct
KSNPASN

SEQ ID NO: 56429 - protein, 7 aa, synthetic construct
KPSTNNP

SEQ ID NO: 56430 - protein, 7 aa, synthetic construct
KNQAFKD

SEQ ID NO: 56431 - protein, 7 aa, synthetic construct
YMKYMNS

SEQ ID NO: 56432 - protein, 7 aa, synthetic construct
KTQPMGA

SEQ ID NO: 56433 - protein, 7 aa, synthetic construct
MGGLHQE

SEQ ID NO: 56434 - protein, 7 aa, synthetic construct
DSPIQQK

SEQ ID NO: 56435 - protein, 7 aa, synthetic construct
SLTALQG

SEQ ID NO: 56436 - protein, 7 aa, synthetic construct
QYKGKEW

SEQ ID NO: 56437 - protein, 7 aa, synthetic construct
AGRVTVP

SEQ ID NO: 56438 - protein, 7 aa, synthetic construct
YKTGMYT

SEQ ID NO: 56439 - protein, 7 aa, synthetic construct
DRPYEPR

SEQ ID NO: 56440 - protein, 7 aa, synthetic construct
QLPLQAV

SEQ ID NO: 56441 - protein, 7 aa, synthetic construct
SKVNFRD

SEQ ID NO: 56442 - protein, 7 aa, synthetic construct
GMNNPHT

SEQ ID NO: 56443 - protein, 7 aa, synthetic construct
TGAPPKN

SEQ ID NO: 56444 - protein, 7 aa, synthetic construct
YKPQPNG

SEQ ID NO: 56445 - protein, 7 aa, synthetic construct
PRPTGGM

SEQ ID NO: 56446 - protein, 7 aa, synthetic construct
HFKPTAT

SEQ ID NO: 56447 - protein, 7 aa, synthetic construct
GLGMKNG

SEQ ID NO: 56448 - protein, 7 aa, synthetic construct
QKTYEPD

SEQ ID NO: 56449 - protein, 7 aa, synthetic construct
DPQKHQG

SEQ ID NO: 56450 - protein, 7 aa, synthetic construct
RVGINSD

SEQ ID NO: 56451 - protein, 7 aa, synthetic construct
MVGTKVV

SEQ ID NO: 56452 - protein, 7 aa, synthetic construct
NTVAAKG

SEQ ID NO: 56453 - protein, 7 aa, synthetic construct
GDRTHSW

SEQ ID NO: 56454 - protein, 7 aa, synthetic construct
NTGNAKG

SEQ ID NO: 56455 - protein, 7 aa, synthetic construct
EKAWPVA

SEQ ID NO: 56456 - protein, 7 aa, synthetic construct
DAKKAHL

SEQ ID NO: 56457 - protein, 7 aa, synthetic construct
SLIGHLP

SEQ ID NO: 56458 - protein, 7 aa, synthetic construct
HPEVKPS

SEQ ID NO: 56459 - protein, 7 aa, synthetic construct
FTKQNKE

SEQ ID NO: 56460 - protein, 7 aa, synthetic construct
SAGHMAG

SEQ ID NO: 56461 - protein, 7 aa, synthetic construct
GNPMNFK

SEQ ID NO: 56462 - protein, 7 aa, synthetic construct
TSNKNVD

SEQ ID NO: 56463 - protein, 7 aa, synthetic construct
KDRQGGG

SEQ ID NO: 56464 - protein, 7 aa, synthetic construct
KPGSWPQ

SEQ ID NO: 56465 - protein, 7 aa, synthetic construct
QSRTNNP

SEQ ID NO: 56466 - protein, 7 aa, synthetic construct
MNPAKHI

SEQ ID NO: 56467 - protein, 7 aa, synthetic construct
PYIGAHA

SEQ ID NO: 56468 - protein, 7 aa, synthetic construct
MRGPDMS

SEQ ID NO: 56469 - protein, 7 aa, synthetic construct
TPMKLVP

SEQ ID NO: 56470 - protein, 7 aa, synthetic construct
LRPSAMN

SEQ ID NO: 56471 - protein, 7 aa, synthetic construct
NRHDFGS

SEQ ID NO: 56472 - protein, 7 aa, synthetic construct
TGGGKTN

SEQ ID NO: 56473 - protein, 7 aa, synthetic construct
ARPNIMG

SEQ ID NO: 56474 - protein, 7 aa, synthetic construct
RAQQSAD

SEQ ID NO: 56475 - protein, 7 aa, synthetic construct
KMSGVGM

SEQ ID NO: 56476 - protein, 7 aa, synthetic construct
QRPTNGN

SEQ ID NO: 56477 - protein, 7 aa, synthetic construct
NQNPVKS

SEQ ID NO: 56478 - protein, 7 aa, synthetic construct
AYPGKEP

SEQ ID NO: 56479 - protein, 7 aa, synthetic construct
QTRSAGA

SEQ ID NO: 56480 - protein, 7 aa, synthetic construct
ISKQESH

SEQ ID NO: 56481 - protein, 7 aa, synthetic construct
VGGGTYG

SEQ ID NO: 56482 - protein, 7 aa, synthetic construct
KQTPNMA

SEQ ID NO: 56483 - protein, 7 aa, synthetic construct
MKPTLTA

SEQ ID NO: 56484 - protein, 7 aa, synthetic construct
VAFPGTM

SEQ ID NO: 56485 - protein, 7 aa, synthetic construct
WKQLHDA

SEQ ID NO: 56486 - protein, 7 aa, synthetic construct
GPPRTQE

SEQ ID NO: 56487 - protein, 7 aa, synthetic construct
RTPGQVA

SEQ ID NO: 56488 - protein, 7 aa, synthetic construct
GTSNKPM

SEQ ID NO: 56489 - protein, 7 aa, synthetic construct
QKPSYSE

SEQ ID NO: 56490 - protein, 7 aa, synthetic construct
MLGQQMN

SEQ ID NO: 56491 - protein, 7 aa, synthetic construct
HGHVRDM

SEQ ID NO: 56492 - protein, 7 aa, synthetic construct
TNRGSTV

SEQ ID NO: 56493 - protein, 7 aa, synthetic construct
HKQNHAT

SEQ ID NO: 56494 - protein, 7 aa, synthetic construct
NIGSKGA

SEQ ID NO: 56495 - protein, 7 aa, synthetic construct
NFQKEKI

SEQ ID NO: 56496 - protein, 7 aa, synthetic construct
HKKEDVF

SEQ ID NO: 56497 - protein, 7 aa, synthetic construct
KQTNPNM

SEQ ID NO: 56498 - protein, 7 aa, synthetic construct
LSNFNKH

SEQ ID NO: 56499 - protein, 7 aa, synthetic construct
SYSPIPA

SEQ ID NO: 56500 - protein, 7 aa, synthetic construct
RPSQAMG

SEQ ID NO: 56501 - protein, 7 aa, synthetic construct
AAIRMQP

SEQ ID NO: 56502 - protein, 7 aa, synthetic construct
AVGQRDD

SEQ ID NO: 56503 - protein, 7 aa, synthetic construct
LAGTTHR

SEQ ID NO: 56504 - protein, 7 aa, synthetic construct
WSSNSYA

SEQ ID NO: 56505 - protein, 7 aa, synthetic construct
LVSHGMA

SEQ ID NO: 56506 - protein, 7 aa, synthetic construct
MGNSKSP

SEQ ID NO: 56507 - protein, 7 aa, synthetic construct
SKGNGSG

SEQ ID NO: 56508 - protein, 7 aa, synthetic construct
KATNHDH

SEQ ID NO: 56509 - protein, 7 aa, synthetic construct
KNTQMSA

SEQ ID NO: 56510 - protein, 7 aa, synthetic construct
VHTVRTA

SEQ ID NO: 56511 - protein, 7 aa, synthetic construct
TPVHTSQ

SEQ ID NO: 56512 - protein, 7 aa, synthetic construct
TGNHRFE

SEQ ID NO: 56513 - protein, 7 aa, synthetic construct
WNGHTQI

SEQ ID NO: 56514 - protein, 7 aa, synthetic construct
KSMSAQI

SEQ ID NO: 56515 - protein, 7 aa, synthetic construct
NRHISHG

SEQ ID NO: 56516 - protein, 7 aa, synthetic construct
LQESVGA

SEQ ID NO: 56517 - protein, 7 aa, synthetic construct
HKPEWTP

SEQ ID NO: 56518 - protein, 7 aa, synthetic construct
KEHIVPS

SEQ ID NO: 56519 - protein, 7 aa, synthetic construct
IPSSKQG

SEQ ID NO: 56520 - protein, 7 aa, synthetic construct
TSTKKDG

SEQ ID NO: 56521 - protein, 7 aa, synthetic construct
LHTVKES

SEQ ID NO: 56522 - protein, 7 aa, synthetic construct
FDQMKYP

SEQ ID NO: 56523 - protein, 7 aa, synthetic construct
NMKYTTA

SEQ ID NO: 56524 - protein, 7 aa, synthetic construct
QLHFKQD

SEQ ID NO: 56525 - protein, 7 aa, synthetic construct
TYALGKG

SEQ ID NO: 56526 - protein, 7 aa, synthetic construct
NKKDAAS

SEQ ID NO: 56527 - protein, 7 aa, synthetic construct
KMNATNA

SEQ ID NO: 56528 - protein, 7 aa, synthetic construct
HLPMFHA

SEQ ID NO: 56529 - protein, 7 aa, synthetic construct
RGNPVPQ

SEQ ID NO: 56530 - protein, 7 aa, synthetic construct
KFAGVHT

SEQ ID NO: 56531 - protein, 7 aa, synthetic construct
SKHDKTW

SEQ ID NO: 56532 - protein, 7 aa, synthetic construct
KWEKQNF

SEQ ID NO: 56533 - protein, 7 aa, synthetic construct
SYKVSPV

SEQ ID NO: 56534 - protein, 7 aa, synthetic construct
KPATNKE

SEQ ID NO: 56535 - protein, 7 aa, synthetic construct
SYGGARD

SEQ ID NO: 56536 - protein, 7 aa, synthetic construct
VNSGNRG

SEQ ID NO: 56537 - protein, 7 aa, synthetic construct
FSVKAAA

SEQ ID NO: 56538 - protein, 7 aa, synthetic construct
LKGTGYD

SEQ ID NO: 56539 - protein, 7 aa, synthetic construct
KVLVRDG

SEQ ID NO: 56540 - protein, 7 aa, synthetic construct
NKSNNIG

SEQ ID NO: 56541 - protein, 7 aa, synthetic construct
KMGSHMS

SEQ ID NO: 56542 - protein, 7 aa, synthetic construct
KDKNSQP

SEQ ID NO: 56543 - protein, 7 aa, synthetic construct
QNKIDWI

SEQ ID NO: 56544 - protein, 7 aa, synthetic construct
NFKTEMT

SEQ ID NO: 56545 - protein, 7 aa, synthetic construct
WKSGAFQ

SEQ ID NO: 56546 - protein, 7 aa, synthetic construct
FAQRSHQ

SEQ ID NO: 56547 - protein, 7 aa, synthetic construct
QGGHGSL

SEQ ID NO: 56548 - protein, 7 aa, synthetic construct
TGPHRPD

SEQ ID NO: 56549 - protein, 7 aa, synthetic construct
HFGTMAA

SEQ ID NO: 56550 - protein, 7 aa, synthetic construct
MDGYKPI

SEQ ID NO: 56551 - protein, 7 aa, synthetic construct
YGTTMHP

SEQ ID NO: 56552 - protein, 7 aa, synthetic construct
SQFNGKQ

SEQ ID NO: 56553 - protein, 7 aa, synthetic construct
QGSGKVG

SEQ ID NO: 56554 - protein, 7 aa, synthetic construct
KRELFAE

SEQ ID NO: 56555 - protein, 7 aa, synthetic construct
FKRENDY

SEQ ID NO: 56556 - protein, 7 aa, synthetic construct
KIYEGQG

SEQ ID NO: 56557 - protein, 7 aa, synthetic construct
VKDRGGN

SEQ ID NO: 56558 - protein, 7 aa, synthetic construct
TPQGKMG

SEQ ID NO: 56559 - protein, 7 aa, synthetic construct
MKGGNIG

SEQ ID NO: 56560 - protein, 7 aa, synthetic construct
TVQQNRA

SEQ ID NO: 56561 - protein, 7 aa, synthetic construct
GNKTVSP

SEQ ID NO: 56562 - protein, 7 aa, synthetic construct
PGKVTPN

SEQ ID NO: 56563 - protein, 7 aa, synthetic construct
PVSAGAW

SEQ ID NO: 56564 - protein, 7 aa, synthetic construct
QEPRLAA

SEQ ID NO: 56565 - protein, 7 aa, synthetic construct
FAAGGPA

SEQ ID NO: 56566 - protein, 7 aa, synthetic construct
MKMMPQS

SEQ ID NO: 56567 - protein, 7 aa, synthetic construct
SFSGTKA

SEQ ID NO: 56568 - protein, 7 aa, synthetic construct
FKTFDRE

SEQ ID NO: 56569 - protein, 7 aa, synthetic construct
GHGHSMS

SEQ ID NO: 56570 - protein, 7 aa, synthetic construct
SHLPTPH

SEQ ID NO: 56571 - protein, 7 aa, synthetic construct
NKQNQHW

SEQ ID NO: 56572 - protein, 7 aa, synthetic construct
MYRDARV

SEQ ID NO: 56573 - protein, 7 aa, synthetic construct
GMKPAQA

SEQ ID NO: 56574 - protein, 7 aa, synthetic construct
FKRIDEP

SEQ ID NO: 56575 - protein, 7 aa, synthetic construct
NGVSKNF

SEQ ID NO: 56576 - protein, 7 aa, synthetic construct
QNPQWPT

SEQ ID NO: 56577 - protein, 7 aa, synthetic construct
NQRQSMA

SEQ ID NO: 56578 - protein, 7 aa, synthetic construct
MREGYRD

SEQ ID NO: 56579 - protein, 7 aa, synthetic construct
KFVGKLE

SEQ ID NO: 56580 - protein, 7 aa, synthetic construct
GPPHLMA

SEQ ID NO: 56581 - protein, 7 aa, synthetic construct
NQGMSKG

SEQ ID NO: 56582 - protein, 7 aa, synthetic construct
SDINARF

SEQ ID NO: 56583 - protein, 7 aa, synthetic construct
HTNITHP

SEQ ID NO: 56584 - protein, 7 aa, synthetic construct
NKKGQPD

SEQ ID NO: 56585 - protein, 7 aa, synthetic construct
SAPVGHA

SEQ ID NO: 56586 - protein, 7 aa, synthetic construct
NGQKQNG

SEQ ID NO: 56587 - protein, 7 aa, synthetic construct
SYIAGQA

SEQ ID NO: 56588 - protein, 7 aa, synthetic construct
MKPLMIE

SEQ ID NO: 56589 - protein, 7 aa, synthetic construct
VKQGGSG

SEQ ID NO: 56590 - protein, 7 aa, synthetic construct
TANYRTG

SEQ ID NO: 56591 - protein, 7 aa, synthetic construct
DMARLEA

SEQ ID NO: 56592 - protein, 7 aa, synthetic construct
SAFNNTN

SEQ ID NO: 56593 - protein, 7 aa, synthetic construct
SLLLTKS

SEQ ID NO: 56594 - protein, 7 aa, synthetic construct
IQNRVIN

SEQ ID NO: 56595 - protein, 7 aa, synthetic construct
QKGVDNM

SEQ ID NO: 56596 - protein, 7 aa, synthetic construct
RTGAIRD

SEQ ID NO: 56597 - protein, 7 aa, synthetic construct
HNTKMPS

SEQ ID NO: 56598 - protein, 7 aa, synthetic construct
NLATPLN

SEQ ID NO: 56599 - protein, 7 aa, synthetic construct
NASKMSG

SEQ ID NO: 56600 - protein, 7 aa, synthetic construct
INPISNV

SEQ ID NO: 56601 - protein, 7 aa, synthetic construct
LFNLKQP

SEQ ID NO: 56602 - protein, 7 aa, synthetic construct
SQRDNVM

SEQ ID NO: 56603 - protein, 7 aa, synthetic construct
TTGRASN

SEQ ID NO: 56604 - protein, 7 aa, synthetic construct
QGQYQTQ

SEQ ID NO: 56605 - protein, 7 aa, synthetic construct
GKATKFE

SEQ ID NO: 56606 - protein, 7 aa, synthetic construct
FNASKGA

SEQ ID NO: 56607 - protein, 7 aa, synthetic construct
GIKPMER

SEQ ID NO: 56608 - protein, 7 aa, synthetic construct
RDAHQNN

SEQ ID NO: 56609 - protein, 7 aa, synthetic construct
LKPHVHA

SEQ ID NO: 56610 - protein, 7 aa, synthetic construct
MYLNNSS

SEQ ID NO: 56611 - protein, 7 aa, synthetic construct
TVGLTQA

SEQ ID NO: 56612 - protein, 7 aa, synthetic construct
NKPYNGA

SEQ ID NO: 56613 - protein, 7 aa, synthetic construct
SKGTNMG

SEQ ID NO: 56614 - protein, 7 aa, synthetic construct
FIKMQPA

SEQ ID NO: 56615 - protein, 7 aa, synthetic construct
LSSAVRA

SEQ ID NO: 56616 - protein, 7 aa, synthetic construct
GQMKASG

SEQ ID NO: 56617 - protein, 7 aa, synthetic construct
QNKQSVG

SEQ ID NO: 56618 - protein, 7 aa, synthetic construct
GKMPSNA

SEQ ID NO: 56619 - protein, 7 aa, synthetic construct
ALVGTRP

SEQ ID NO: 56620 - protein, 7 aa, synthetic construct
DGNHWSK

SEQ ID NO: 56621 - protein, 7 aa, synthetic construct
HYGGATD

SEQ ID NO: 56622 - protein, 7 aa, synthetic construct
RTKVEPF

SEQ ID NO: 56623 - protein, 7 aa, synthetic construct
YPKTQQN

SEQ ID NO: 56624 - protein, 7 aa, synthetic construct
GMLKSHV

SEQ ID NO: 56625 - protein, 7 aa, synthetic construct
VHKTERN

SEQ ID NO: 56626 - protein, 7 aa, synthetic construct
AISNTSG

SEQ ID NO: 56627 - protein, 7 aa, synthetic construct
TKTVAGA

SEQ ID NO: 56628 - protein, 7 aa, synthetic construct
GWSTNKG

SEQ ID NO: 56629 - protein, 7 aa, synthetic construct
SGEYSVR

SEQ ID NO: 56630 - protein, 7 aa, synthetic construct
TFKVDRA

SEQ ID NO: 56631 - protein, 7 aa, synthetic construct
HNPRLGD

SEQ ID NO: 56632 - protein, 7 aa, synthetic construct
TPGHSMA

SEQ ID NO: 56633 - protein, 7 aa, synthetic construct
YNGGPMQ

SEQ ID NO: 56634 - protein, 7 aa, synthetic construct
GNNHQLV

SEQ ID NO: 56635 - protein, 7 aa, synthetic construct
GGGGRAD

SEQ ID NO: 56636 - protein, 7 aa, synthetic construct
SKDNKGN

SEQ ID NO: 56637 - protein, 7 aa, synthetic construct
AENRIAS

SEQ ID NO: 56638 - protein, 7 aa, synthetic construct
QKSGMVA

SEQ ID NO: 56639 - protein, 7 aa, synthetic construct
HANFNRN

SEQ ID NO: 56640 - protein, 7 aa, synthetic construct
WNSGPSG

SEQ ID NO: 56641 - protein, 7 aa, synthetic construct
KPMVAEN

SEQ ID NO: 56642 - protein, 7 aa, synthetic construct
FVKNNSA

SEQ ID NO: 56643 - protein, 7 aa, synthetic construct
SKQGQSG

SEQ ID NO: 56644 - protein, 7 aa, synthetic construct
APQHRPN

SEQ ID NO: 56645 - protein, 7 aa, synthetic construct
QVRTTGG

SEQ ID NO: 56646 - protein, 7 aa, synthetic construct
KSQNNDG

SEQ ID NO: 56647 - protein, 7 aa, synthetic construct
YKLPHAN

SEQ ID NO: 56648 - protein, 7 aa, synthetic construct
RTSQNLN

SEQ ID NO: 56649 - protein, 7 aa, synthetic construct
VLTMVGP

SEQ ID NO: 56650 - protein, 7 aa, synthetic construct
YPPNKNS

SEQ ID NO: 56651 - protein, 7 aa, synthetic construct
KATGLQQ

SEQ ID NO: 56652 - protein, 7 aa, synthetic construct
LGHLHTV

SEQ ID NO: 56653 - protein, 7 aa, synthetic construct
QQTRSNP

SEQ ID NO: 56654 - protein, 7 aa, synthetic construct
KVGFPQN

SEQ ID NO: 56655 - protein, 7 aa, synthetic construct
KVDRGGF

SEQ ID NO: 56656 - protein, 7 aa, synthetic construct
IPNAKVP

SEQ ID NO: 56657 - protein, 7 aa, synthetic construct
KDSRTVG

SEQ ID NO: 56658 - protein, 7 aa, synthetic construct
TANNRAP

SEQ ID NO: 56659 - protein, 7 aa, synthetic construct
ARQAAMD

SEQ ID NO: 56660 - protein, 7 aa, synthetic construct
VQAIGNK

SEQ ID NO: 56661 - protein, 7 aa, synthetic construct
VRNSAFV

SEQ ID NO: 56662 - protein, 7 aa, synthetic construct
VAMRQDY

SEQ ID NO: 56663 - protein, 7 aa, synthetic construct
INYTPKV

SEQ ID NO: 56664 - protein, 7 aa, synthetic construct
FNKMGIH

SEQ ID NO: 56665 - protein, 7 aa, synthetic construct
MRNQYEH

SEQ ID NO: 56666 - protein, 7 aa, synthetic construct
IREGSRY

SEQ ID NO: 56667 - protein, 7 aa, synthetic construct
STNGVKM

SEQ ID NO: 56668 - protein, 7 aa, synthetic construct
FPAASKN

SEQ ID NO: 56669 - protein, 7 aa, synthetic construct
AMQHIRQ

SEQ ID NO: 56670 - protein, 7 aa, synthetic construct
TVWRDGD

SEQ ID NO: 56671 - protein, 7 aa, synthetic construct
IEMRPMR

SEQ ID NO: 56672 - protein, 7 aa, synthetic construct
NGKHYDH

SEQ ID NO: 56673 - protein, 7 aa, synthetic construct
KTPHGTV

SEQ ID NO: 56674 - protein, 7 aa, synthetic construct
HQSPPVT

SEQ ID NO: 56675 - protein, 7 aa, synthetic construct
TEYMIRD

SEQ ID NO: 56676 - protein, 7 aa, synthetic construct
MVVHTPA

SEQ ID NO: 56677 - protein, 7 aa, synthetic construct
GQATAKV

SEQ ID NO: 56678 - protein, 7 aa, synthetic construct
TESNNKK

SEQ ID NO: 56679 - protein, 7 aa, synthetic construct
IGNSVTV

SEQ ID NO: 56680 - protein, 7 aa, synthetic construct
RTIMGDP

SEQ ID NO: 56681 - protein, 7 aa, synthetic construct
SPRPSHM

SEQ ID NO: 56682 - protein, 7 aa, synthetic construct
QRPSIFD

SEQ ID NO: 56683 - protein, 7 aa, synthetic construct
KNEWSEQ

SEQ ID NO: 56684 - protein, 7 aa, synthetic construct
VYHKEMH

SEQ ID NO: 56685 - protein, 7 aa, synthetic construct
VEKMTFS

SEQ ID NO: 56686 - protein, 7 aa, synthetic construct
VNVLTPS

SEQ ID NO: 56687 - protein, 7 aa, synthetic construct
QFQKSQP

SEQ ID NO: 56688 - protein, 7 aa, synthetic construct
AGKGPAV

SEQ ID NO: 56689 - protein, 7 aa, synthetic construct
MRTEGLS

SEQ ID NO: 56690 - protein, 7 aa, synthetic construct
GNKPGTM

SEQ ID NO: 56691 - protein, 7 aa, synthetic construct
NHPGSYV

SEQ ID NO: 56692 - protein, 7 aa, synthetic construct
NKGPHHP

SEQ ID NO: 56693 - protein, 7 aa, synthetic construct
HIKDWEG

SEQ ID NO: 56694 - protein, 7 aa, synthetic construct
DYKMIQG

SEQ ID NO: 56695 - protein, 7 aa, synthetic construct
AARSVDV

SEQ ID NO: 56696 - protein, 7 aa, synthetic construct
MQRAVQS

SEQ ID NO: 56697 - protein, 7 aa, synthetic construct
SMKAVGP

SEQ ID NO: 56698 - protein, 7 aa, synthetic construct
NPASKMI

SEQ ID NO: 56699 - protein, 7 aa, synthetic construct
VAVANHG

SEQ ID NO: 56700 - protein, 7 aa, synthetic construct
VAEKRYS

SEQ ID NO: 56701 - protein, 7 aa, synthetic construct
LQQGEKS

SEQ ID NO: 56702 - protein, 7 aa, synthetic construct
LDGRHHS

SEQ ID NO: 56703 - protein, 7 aa, synthetic construct
TGATNRG

SEQ ID NO: 56704 - protein, 7 aa, synthetic construct
TRVVHEA

SEQ ID NO: 56705 - protein, 7 aa, synthetic construct
SKQSHTI

SEQ ID NO: 56706 - protein, 7 aa, synthetic construct
KDFKPYS

SEQ ID NO: 56707 - protein, 7 aa, synthetic construct
TAHTKLN

SEQ ID NO: 56708 - protein, 7 aa, synthetic construct
TKMGRDP

SEQ ID NO: 56709 - protein, 7 aa, synthetic construct
YPLSNTV

SEQ ID NO: 56710 - protein, 7 aa, synthetic construct
TPPHATR

SEQ ID NO: 56711 - protein, 7 aa, synthetic construct
MNHMKDR

SEQ ID NO: 56712 - protein, 7 aa, synthetic construct
NRTAGNA

SEQ ID NO: 56713 - protein, 7 aa, synthetic construct
VRGIAHQ

SEQ ID NO: 56714 - protein, 7 aa, synthetic construct
PSTRYTE

SEQ ID NO: 56715 - protein, 7 aa, synthetic construct
HGGPNHT

SEQ ID NO: 56716 - protein, 7 aa, synthetic construct
KNTSTMA

SEQ ID NO: 56717 - protein, 7 aa, synthetic construct
KFHTEEN

SEQ ID NO: 56718 - protein, 7 aa, synthetic construct
LEWKPGN

SEQ ID NO: 56719 - protein, 7 aa, synthetic construct
DKTPYKP

SEQ ID NO: 56720 - protein, 7 aa, synthetic construct
KYHPHVG

SEQ ID NO: 56721 - protein, 7 aa, synthetic construct
YSDVKQN

SEQ ID NO: 56722 - protein, 7 aa, synthetic construct
RTHEGMM

SEQ ID NO: 56723 - protein, 7 aa, synthetic construct
SAKSETF

SEQ ID NO: 56724 - protein, 7 aa, synthetic construct
RSNGSGI

SEQ ID NO: 56725 - protein, 7 aa, synthetic construct
RQMGTNA

SEQ ID NO: 56726 - protein, 7 aa, synthetic construct
HFRDTSQ

SEQ ID NO: 56727 - protein, 7 aa, synthetic construct
CKKLADC

SEQ ID NO: 56728 - protein, 7 aa, synthetic construct
RALHPEH

SEQ ID NO: 56729 - protein, 7 aa, synthetic construct
GAAKASM

SEQ ID NO: 56730 - protein, 7 aa, synthetic construct
IRQMTYE

SEQ ID NO: 56731 - protein, 7 aa, synthetic construct
TKPSTQM

SEQ ID NO: 56732 - protein, 7 aa, synthetic construct
MGAFRHD

SEQ ID NO: 56733 - protein, 7 aa, synthetic construct
MNYGTQA

SEQ ID NO: 56734 - protein, 7 aa, synthetic construct
LIQQPNN

SEQ ID NO: 56735 - protein, 7 aa, synthetic construct
KMNPQTS

SEQ ID NO: 56736 - protein, 7 aa, synthetic construct
HNKGIET

SEQ ID NO: 56737 - protein, 7 aa, synthetic construct
NELIKTV

SEQ ID NO: 56738 - protein, 7 aa, synthetic construct
KGPKYED

SEQ ID NO: 56739 - protein, 7 aa, synthetic construct
WKGVKEF

SEQ ID NO: 56740 - protein, 7 aa, synthetic construct
FKEMVRD

SEQ ID NO: 56741 - protein, 7 aa, synthetic construct
RNSKTEP

SEQ ID NO: 56742 - protein, 7 aa, synthetic construct
GQMQMKG

SEQ ID NO: 56743 - protein, 7 aa, synthetic construct
EATKGSG

SEQ ID NO: 56744 - protein, 7 aa, synthetic construct
NKGNALG

SEQ ID NO: 56745 - protein, 7 aa, synthetic construct
NTNQAQF

SEQ ID NO: 56746 - protein, 7 aa, synthetic construct
IYPVGGV

SEQ ID NO: 56747 - protein, 7 aa, synthetic construct
VGARINP

SEQ ID NO: 56748 - protein, 7 aa, synthetic construct
QPQKDRF

SEQ ID NO: 56749 - protein, 7 aa, synthetic construct
SRFADRG

SEQ ID NO: 56750 - protein, 7 aa, synthetic construct
KADPWPS

SEQ ID NO: 56751 - protein, 7 aa, synthetic construct
KPGSTQP

SEQ ID NO: 56752 - protein, 7 aa, synthetic construct
NNVGTMM

SEQ ID NO: 56753 - protein, 7 aa, synthetic construct
ERPSTYP

SEQ ID NO: 56754 - protein, 7 aa, synthetic construct
PNGTQYH

SEQ ID NO: 56755 - protein, 7 aa, synthetic construct
NNNQRGG

SEQ ID NO: 56756 - protein, 7 aa, synthetic construct
MGDFLKP

SEQ ID NO: 56757 - protein, 7 aa, synthetic construct
YPVQANQ

SEQ ID NO: 56758 - protein, 7 aa, synthetic construct
GSSPPYT

SEQ ID NO: 56759 - protein, 7 aa, synthetic construct
QTSLAPP

SEQ ID NO: 56760 - protein, 7 aa, synthetic construct
TTSQRAP

SEQ ID NO: 56761 - protein, 7 aa, synthetic construct
KDKSHLA

SEQ ID NO: 56762 - protein, 7 aa, synthetic construct
DHFNSRE

SEQ ID NO: 56763 - protein, 7 aa, synthetic construct
LKMSAKD

SEQ ID NO: 56764 - protein, 7 aa, synthetic construct
EKPKVLA

SEQ ID NO: 56765 - protein, 7 aa, synthetic construct
FKETADR

SEQ ID NO: 56766 - protein, 7 aa, synthetic construct
GSRTTMM

SEQ ID NO: 56767 - protein, 7 aa, synthetic construct
NPPYKAP

SEQ ID NO: 56768 - protein, 7 aa, synthetic construct
GNMGKSG

SEQ ID NO: 56769 - protein, 7 aa, synthetic construct
NQRYNNG

SEQ ID NO: 56770 - protein, 7 aa, synthetic construct
GRATYNE

SEQ ID NO: 56771 - protein, 7 aa, synthetic construct
YSQMLQG

SEQ ID NO: 56772 - protein, 7 aa, synthetic construct
KLDGKVA

SEQ ID NO: 56773 - protein, 7 aa, synthetic construct
VMPGVAM

SEQ ID NO: 56774 - protein, 7 aa, synthetic construct
MFKQIAA

SEQ ID NO: 56775 - protein, 7 aa, synthetic construct
KAYEVTE

SEQ ID NO: 56776 - protein, 7 aa, synthetic construct
SHKAHDM

SEQ ID NO: 56777 - protein, 7 aa, synthetic construct
ERGINST

SEQ ID NO: 56778 - protein, 7 aa, synthetic construct
GANPTMH

SEQ ID NO: 56779 - protein, 7 aa, synthetic construct
WQTKSPT

SEQ ID NO: 56780 - protein, 7 aa, synthetic construct
MSGSQQV

SEQ ID NO: 56781 - protein, 7 aa, synthetic construct
SKPQAYH

SEQ ID NO: 56782 - protein, 7 aa, synthetic construct
PRVSGGG

SEQ ID NO: 56783 - protein, 7 aa, synthetic construct
QSSSQFG

SEQ ID NO: 56784 - protein, 7 aa, synthetic construct
DLRRTIV

SEQ ID NO: 56785 - protein, 7 aa, synthetic construct
KIPAVLP

SEQ ID NO: 56786 - protein, 7 aa, synthetic construct
GRNKMPE

SEQ ID NO: 56787 - protein, 7 aa, synthetic construct
HNPQKQE

SEQ ID NO: 56788 - protein, 7 aa, synthetic construct
TQFPRND

SEQ ID NO: 56789 - protein, 7 aa, synthetic construct
GFVQGIH

SEQ ID NO: 56790 - protein, 7 aa, synthetic construct
TQHTLAY

SEQ ID NO: 56791 - protein, 7 aa, synthetic construct
MKQTTGA

SEQ ID NO: 56792 - protein, 7 aa, synthetic construct
QSKMTAA

SEQ ID NO: 56793 - protein, 7 aa, synthetic construct
TMRIGAT

SEQ ID NO: 56794 - protein, 7 aa, synthetic construct
IRPADAQ

SEQ ID NO: 56795 - protein, 7 aa, synthetic construct
ISYGPSA

SEQ ID NO: 56796 - protein, 7 aa, synthetic construct
THSTGVQ

SEQ ID NO: 56797 - protein, 7 aa, synthetic construct
TPQKVYH

SEQ ID NO: 56798 - protein, 7 aa, synthetic construct
FNTSQNP

SEQ ID NO: 56799 - protein, 7 aa, synthetic construct
RGDAPAK

SEQ ID NO: 56800 - protein, 7 aa, synthetic construct
VKSMNQS

SEQ ID NO: 56801 - protein, 7 aa, synthetic construct
FERGYHG

SEQ ID NO: 56802 - protein, 7 aa, synthetic construct
KPNGSPY

SEQ ID NO: 56803 - protein, 7 aa, synthetic construct
KTGNNMA

SEQ ID NO: 56804 - protein, 7 aa, synthetic construct
MNNNRGA

SEQ ID NO: 56805 - protein, 7 aa, synthetic construct
SIAPGKH

SEQ ID NO: 56806 - protein, 7 aa, synthetic construct
MNMQASP

SEQ ID NO: 56807 - protein, 7 aa, synthetic construct
ATQSRTY

SEQ ID NO: 56808 - protein, 7 aa, synthetic construct
VKQTVKD

SEQ ID NO: 56809 - protein, 7 aa, synthetic construct
FKSNSPG

SEQ ID NO: 56810 - protein, 7 aa, synthetic construct
WGLNHSV

SEQ ID NO: 56811 - protein, 7 aa, synthetic construct
FTNEIHH

SEQ ID NO: 56812 - protein, 7 aa, synthetic construct
VINQLGN

SEQ ID NO: 56813 - protein, 7 aa, synthetic construct
NFPMGQA

SEQ ID NO: 56814 - protein, 7 aa, synthetic construct
YQNSTNL

SEQ ID NO: 56815 - protein, 7 aa, synthetic construct
PPNARSF

SEQ ID NO: 56816 - protein, 7 aa, synthetic construct
NPHSKME

SEQ ID NO: 56817 - protein, 7 aa, synthetic construct
KGPMNQI

SEQ ID NO: 56818 - protein, 7 aa, synthetic construct
HLYQKHP

SEQ ID NO: 56819 - protein, 7 aa, synthetic construct
FPAQMST

SEQ ID NO: 56820 - protein, 7 aa, synthetic construct
GNGRNEM

SEQ ID NO: 56821 - protein, 7 aa, synthetic construct
RTNTPYM

SEQ ID NO: 56822 - protein, 7 aa, synthetic construct
NGQKISP

SEQ ID NO: 56823 - protein, 7 aa, synthetic construct
RMPGGVG

SEQ ID NO: 56824 - protein, 7 aa, synthetic construct
KLGSPHV

SEQ ID NO: 56825 - protein, 7 aa, synthetic construct
KKPTDVG

SEQ ID NO: 56826 - protein, 7 aa, synthetic construct
HKPEMQW

SEQ ID NO: 56827 - protein, 7 aa, synthetic construct
MASMTNG

SEQ ID NO: 56828 - protein, 7 aa, synthetic construct
QVAQPGS

SEQ ID NO: 56829 - protein, 7 aa, synthetic construct
WKNIAEQ

SEQ ID NO: 56830 - protein, 7 aa, synthetic construct
LKVGNFS

SEQ ID NO: 56831 - protein, 7 aa, synthetic construct
FHNMKDT

SEQ ID NO: 56832 - protein, 7 aa, synthetic construct
EKGRTDA

SEQ ID NO: 56833 - protein, 7 aa, synthetic construct
YRVDNVG

SEQ ID NO: 56834 - protein, 7 aa, synthetic construct
YNGGNPY

SEQ ID NO: 56835 - protein, 7 aa, synthetic construct
KHGTFVE

SEQ ID NO: 56836 - protein, 7 aa, synthetic construct
RSDIPNF

SEQ ID NO: 56837 - protein, 7 aa, synthetic construct
TGKGSSA

SEQ ID NO: 56838 - protein, 7 aa, synthetic construct
KNNQPIP

SEQ ID NO: 56839 - protein, 7 aa, synthetic construct
DAPRYLG

SEQ ID NO: 56840 - protein, 7 aa, synthetic construct
DKIRMGS

SEQ ID NO: 56841 - protein, 7 aa, synthetic construct
EGYTKQN

SEQ ID NO: 56842 - protein, 7 aa, synthetic construct
VRNMDRE

SEQ ID NO: 56843 - protein, 7 aa, synthetic construct
SMNTKQM

SEQ ID NO: 56844 - protein, 7 aa, synthetic construct
TAVNYVA

SEQ ID NO: 56845 - protein, 7 aa, synthetic construct
MGQRRQE

SEQ ID NO: 56846 - protein, 7 aa, synthetic construct
DRPFNSI

SEQ ID NO: 56847 - protein, 7 aa, synthetic construct
PNAYQGH

SEQ ID NO: 56848 - protein, 7 aa, synthetic construct
WRKTDSL

SEQ ID NO: 56849 - protein, 7 aa, synthetic construct
ERPMPKP

SEQ ID NO: 56850 - protein, 7 aa, synthetic construct
LNHQTPF

SEQ ID NO: 56851 - protein, 7 aa, synthetic construct
PSSNKMD

SEQ ID NO: 56852 - protein, 7 aa, synthetic construct
MLQIQSA

SEQ ID NO: 56853 - protein, 7 aa, synthetic construct
GSYGPAS

SEQ ID NO: 56854 - protein, 7 aa, synthetic construct
HSSHGGI

SEQ ID NO: 56855 - protein, 7 aa, synthetic construct
SKQSGHF

SEQ ID NO: 56856 - protein, 7 aa, synthetic construct
PNKANNA

SEQ ID NO: 56857 - protein, 7 aa, synthetic construct
TSANGYR

SEQ ID NO: 56858 - protein, 7 aa, synthetic construct
YQYDPGA

SEQ ID NO: 56859 - protein, 7 aa, synthetic construct
GISRPIN

SEQ ID NO: 56860 - protein, 7 aa, synthetic construct
MKPNGII

SEQ ID NO: 56861 - protein, 7 aa, synthetic construct
KNTASSV

SEQ ID NO: 56862 - protein, 7 aa, synthetic construct
VPAQRQG

SEQ ID NO: 56863 - protein, 7 aa, synthetic construct
HQHGSIP

SEQ ID NO: 56864 - protein, 7 aa, synthetic construct
DPWKHTP

SEQ ID NO: 56865 - protein, 7 aa, synthetic construct
YKNAENA

SEQ ID NO: 56866 - protein, 7 aa, synthetic construct
SKMGSNP

SEQ ID NO: 56867 - protein, 7 aa, synthetic construct
TFIKMES

SEQ ID NO: 56868 - protein, 7 aa, synthetic construct
MRNTQGG

SEQ ID NO: 56869 - protein, 7 aa, synthetic construct
HNDFRAI

SEQ ID NO: 56870 - protein, 7 aa, synthetic construct
PRNTGSV

SEQ ID NO: 56871 - protein, 7 aa, synthetic construct
KMAGGAI

SEQ ID NO: 56872 - protein, 7 aa, synthetic construct
QTGWQKV

SEQ ID NO: 56873 - protein, 7 aa, synthetic construct
NIHSKTW

SEQ ID NO: 56874 - protein, 7 aa, synthetic construct
TKPPAFG

SEQ ID NO: 56875 - protein, 7 aa, synthetic construct
ALKASHY

SEQ ID NO: 56876 - protein, 7 aa, synthetic construct
VIPRPGQ

SEQ ID NO: 56877 - protein, 7 aa, synthetic construct
TFPPYSA

SEQ ID NO: 56878 - protein, 7 aa, synthetic construct
NERGFSN

SEQ ID NO: 56879 - protein, 7 aa, synthetic construct
RQNSPNA

SEQ ID NO: 56880 - protein, 7 aa, synthetic construct
QEYMKQP

SEQ ID NO: 56881 - protein, 7 aa, synthetic construct
TWGGAIP

SEQ ID NO: 56882 - protein, 7 aa, synthetic construct
MMKGEVM

SEQ ID NO: 56883 - protein, 7 aa, synthetic construct
QKATSAP

SEQ ID NO: 56884 - protein, 7 aa, synthetic construct
KAVSQVT

SEQ ID NO: 56885 - protein, 7 aa, synthetic construct
RNPAHPS

SEQ ID NO: 56886 - protein, 7 aa, synthetic construct
RRTNEQL

SEQ ID NO: 56887 - protein, 7 aa, synthetic construct
IHAAKHS

SEQ ID NO: 56888 - protein, 7 aa, synthetic construct
HWSPAGP

SEQ ID NO: 56889 - protein, 7 aa, synthetic construct
QKTVAAA

SEQ ID NO: 56890 - protein, 7 aa, synthetic construct
GKGPNGM

SEQ ID NO: 56891 - protein, 7 aa, synthetic construct
SKTGASA

SEQ ID NO: 56892 - protein, 7 aa, synthetic construct
MSVAKIP

SEQ ID NO: 56893 - protein, 7 aa, synthetic construct
GTEVRLV

SEQ ID NO: 56894 - protein, 7 aa, synthetic construct
RNMASVG

SEQ ID NO: 56895 - protein, 7 aa, synthetic construct
LFDKFQG

SEQ ID NO: 56896 - protein, 7 aa, synthetic construct
WDRLKMN

SEQ ID NO: 56897 - protein, 7 aa, synthetic construct
GQRETGH

SEQ ID NO: 56898 - protein, 7 aa, synthetic construct
ELHGRQG

SEQ ID NO: 56899 - protein, 7 aa, synthetic construct
NPKGMGI

SEQ ID NO: 56900 - protein, 7 aa, synthetic construct
VPRSDTI

SEQ ID NO: 56901 - protein, 7 aa, synthetic construct
TRPENLF

SEQ ID NO: 56902 - protein, 7 aa, synthetic construct
GIITRDS

SEQ ID NO: 56903 - protein, 7 aa, synthetic construct
HAGYSQA

SEQ ID NO: 56904 - protein, 7 aa, synthetic construct
NQLKSGS

SEQ ID NO: 56905 - protein, 7 aa, synthetic construct
TREKWKE

SEQ ID NO: 56906 - protein, 7 aa, synthetic construct
TNLKPVT

SEQ ID NO: 56907 - protein, 7 aa, synthetic construct
HAGKRVD

SEQ ID NO: 56908 - protein, 7 aa, synthetic construct
SHEKIQS

SEQ ID NO: 56909 - protein, 7 aa, synthetic construct
TLMRERE

SEQ ID NO: 56910 - protein, 7 aa, synthetic construct
SKYGVGG

SEQ ID NO: 56911 - protein, 7 aa, synthetic construct
EKKQTFV

SEQ ID NO: 56912 - protein, 7 aa, synthetic construct
ILSIRNP

SEQ ID NO: 56913 - protein, 7 aa, synthetic construct
KVNGTAG

SEQ ID NO: 56914 - protein, 7 aa, synthetic construct
HNTHTFG

SEQ ID NO: 56915 - protein, 7 aa, synthetic construct
GKNTPNA

SEQ ID NO: 56916 - protein, 7 aa, synthetic construct
RTLQENK

SEQ ID NO: 56917 - protein, 7 aa, synthetic construct
NRQQSTP

SEQ ID NO: 56918 - protein, 7 aa, synthetic construct
QKSMASG

SEQ ID NO: 56919 - protein, 7 aa, synthetic construct
GKVPQNG

SEQ ID NO: 56920 - protein, 7 aa, synthetic construct
PIDKWQK

SEQ ID NO: 56921 - protein, 7 aa, synthetic construct
DYRPGGG

SEQ ID NO: 56922 - protein, 7 aa, synthetic construct
GVKSGNH

SEQ ID NO: 56923 - protein, 7 aa, synthetic construct
NVKGYAA

SEQ ID NO: 56924 - protein, 7 aa, synthetic construct
SQNSGIT

SEQ ID NO: 56925 - protein, 7 aa, synthetic construct
IDKRVYH

SEQ ID NO: 56926 - protein, 7 aa, synthetic construct
GRSPVVA

SEQ ID NO: 56927 - protein, 7 aa, synthetic construct
GAKQGTH

SEQ ID NO: 56928 - protein, 7 aa, synthetic construct
SGIHLVA

SEQ ID NO: 56929 - protein, 7 aa, synthetic construct
ELKTHNI

SEQ ID NO: 56930 - protein, 7 aa, synthetic construct
YKKDSQP

SEQ ID NO: 56931 - protein, 7 aa, synthetic construct
AGNRPLL

SEQ ID NO: 56932 - protein, 7 aa, synthetic construct
TASVRMG

SEQ ID NO: 56933 - protein, 7 aa, synthetic construct
SMTKQAP

SEQ ID NO: 56934 - protein, 7 aa, synthetic construct
QSRTSNP

SEQ ID NO: 56935 - protein, 7 aa, synthetic construct
FSLGEPP

SEQ ID NO: 56936 - protein, 7 aa, synthetic construct
RNTNTNA

SEQ ID NO: 56937 - protein, 7 aa, synthetic construct
KGGPMQH

SEQ ID NO: 56938 - protein, 7 aa, synthetic construct
MSTPKMP

SEQ ID NO: 56939 - protein, 7 aa, synthetic construct
WQTENRS

SEQ ID NO: 56940 - protein, 7 aa, synthetic construct
KHHLTQD

SEQ ID NO: 56941 - protein, 7 aa, synthetic construct
TITNSKL

SEQ ID NO: 56942 - protein, 7 aa, synthetic construct
FEKHVGA

SEQ ID NO: 56943 - protein, 7 aa, synthetic construct
QTKEMHP

SEQ ID NO: 56944 - protein, 7 aa, synthetic construct
GRLTATA

SEQ ID NO: 56945 - protein, 7 aa, synthetic construct
SAPYPNH

SEQ ID NO: 56946 - protein, 7 aa, synthetic construct
RGQFSDP

SEQ ID NO: 56947 - protein, 7 aa, synthetic construct
KTMYDSI

SEQ ID NO: 56948 - protein, 7 aa, synthetic construct
TGNRSGG

SEQ ID NO: 56949 - protein, 7 aa, synthetic construct
RTDIGLS

SEQ ID NO: 56950 - protein, 7 aa, synthetic construct
FKPPNFG

SEQ ID NO: 56951 - protein, 7 aa, synthetic construct
VNSYPLK

SEQ ID NO: 56952 - protein, 7 aa, synthetic construct
AGGPKPM

SEQ ID NO: 56953 - protein, 7 aa, synthetic construct
RVPTSNA

SEQ ID NO: 56954 - protein, 7 aa, synthetic construct
MRNSMNS

SEQ ID NO: 56955 - protein, 7 aa, synthetic construct
QREMASH

SEQ ID NO: 56956 - protein, 7 aa, synthetic construct
WSRAQEH

SEQ ID NO: 56957 - protein, 7 aa, synthetic construct
TGKSNAA

SEQ ID NO: 56958 - protein, 7 aa, synthetic construct
YQSANRN

SEQ ID NO: 56959 - protein, 7 aa, synthetic construct
KKDQVRD

SEQ ID NO: 56960 - protein, 7 aa, synthetic construct
KKDTTSP

SEQ ID NO: 56961 - protein, 7 aa, synthetic construct
MRSIPTP

SEQ ID NO: 56962 - protein, 7 aa, synthetic construct
KFMRSDD

SEQ ID NO: 56963 - protein, 7 aa, synthetic construct
RPTPGVA

SEQ ID NO: 56964 - protein, 7 aa, synthetic construct
ANNVREI

SEQ ID NO: 56965 - protein, 7 aa, synthetic construct
EKMGGFK

SEQ ID NO: 56966 - protein, 7 aa, synthetic construct
LGNHRQV

SEQ ID NO: 56967 - protein, 7 aa, synthetic construct
DLTHYKS

SEQ ID NO: 56968 - protein, 7 aa, synthetic construct
MTSKTQG

SEQ ID NO: 56969 - protein, 7 aa, synthetic construct
MGKPVSV

SEQ ID NO: 56970 - protein, 7 aa, synthetic construct
FPVSVKN

SEQ ID NO: 56971 - protein, 7 aa, synthetic construct
SPSARTA

SEQ ID NO: 56972 - protein, 7 aa, synthetic construct
TKGNTTP

SEQ ID NO: 56973 - protein, 7 aa, synthetic construct
GLQKDYY

SEQ ID NO: 56974 - protein, 7 aa, synthetic construct
VAQLQHG

SEQ ID NO: 56975 - protein, 7 aa, synthetic construct
PKPGQGS

SEQ ID NO: 56976 - protein, 7 aa, synthetic construct
QADSRKA

SEQ ID NO: 56977 - protein, 7 aa, synthetic construct
SQNKTAA

SEQ ID NO: 56978 - protein, 7 aa, synthetic construct
KLVSIEP

SEQ ID NO: 56979 - protein, 7 aa, synthetic construct
PRLPLRD

SEQ ID NO: 56980 - protein, 7 aa, synthetic construct
KTSGQNS

SEQ ID NO: 56981 - protein, 7 aa, synthetic construct
GSPRHQQ

SEQ ID NO: 56982 - protein, 7 aa, synthetic construct
QRQNAGP

SEQ ID NO: 56983 - protein, 7 aa, synthetic construct
NKDFLQA

SEQ ID NO: 56984 - protein, 7 aa, synthetic construct
PKNSANA

SEQ ID NO: 56985 - protein, 7 aa, synthetic construct
SARAPPM

SEQ ID NO: 56986 - protein, 7 aa, synthetic construct
KSPTSYP

SEQ ID NO: 56987 - protein, 7 aa, synthetic construct
IKNISPH

SEQ ID NO: 56988 - protein, 7 aa, synthetic construct
KTNINGA

SEQ ID NO: 56989 - protein, 7 aa, synthetic construct
YHRSMSG

SEQ ID NO: 56990 - protein, 7 aa, synthetic construct
FNKADRE

SEQ ID NO: 56991 - protein, 7 aa, synthetic construct
NKMNTNG

SEQ ID NO: 56992 - protein, 7 aa, synthetic construct
QKPQMKD

SEQ ID NO: 56993 - protein, 7 aa, synthetic construct
LQQSNKG

SEQ ID NO: 56994 - protein, 7 aa, synthetic construct
KINVVTS

SEQ ID NO: 56995 - protein, 7 aa, synthetic construct
RSQNRDE

SEQ ID NO: 56996 - protein, 7 aa, synthetic construct
QRTGKDP

SEQ ID NO: 56997 - protein, 7 aa, synthetic construct
SQPITHG

SEQ ID NO: 56998 - protein, 7 aa, synthetic construct
NMSTTQL

SEQ ID NO: 56999 - protein, 7 aa, synthetic construct
WASFLKD

SEQ ID NO: 57000 - protein, 7 aa, synthetic construct
ANSQKIN

SEQ ID NO: 57001 - protein, 7 aa, synthetic construct
GNYIRVA

SEQ ID NO: 57002 - protein, 7 aa, synthetic construct
EKVGKSD

SEQ ID NO: 57003 - protein, 7 aa, synthetic construct
KLSTQYV

SEQ ID NO: 57004 - protein, 7 aa, synthetic construct
THHSQQE

SEQ ID NO: 57005 - protein, 7 aa, synthetic construct
LLQRGER

SEQ ID NO: 57006 - protein, 7 aa, synthetic construct
YKGQSNP

SEQ ID NO: 57007 - protein, 7 aa, synthetic construct
QKPLSSL

SEQ ID NO: 57008 - protein, 7 aa, synthetic construct
VADYKHS

SEQ ID NO: 57009 - protein, 7 aa, synthetic construct
SQRQANP

SEQ ID NO: 57010 - protein, 7 aa, synthetic construct
PGVPVDR

SEQ ID NO: 57011 - protein, 7 aa, synthetic construct
VMTVHRD

SEQ ID NO: 57012 - protein, 7 aa, synthetic construct
TGLGVSA

SEQ ID NO: 57013 - protein, 7 aa, synthetic construct
PHKKDEN

SEQ ID NO: 57014 - protein, 7 aa, synthetic construct
IKNDHQV

SEQ ID NO: 57015 - protein, 7 aa, synthetic construct
NPQRFSG

SEQ ID NO: 57016 - protein, 7 aa, synthetic construct
NKNVASA

SEQ ID NO: 57017 - protein, 7 aa, synthetic construct
SNKNNGA

SEQ ID NO: 57018 - protein, 7 aa, synthetic construct
ASNTHGR

SEQ ID NO: 57019 - protein, 7 aa, synthetic construct
SERALRM

SEQ ID NO: 57020 - protein, 7 aa, synthetic construct
DMTYRKA

SEQ ID NO: 57021 - protein, 7 aa, synthetic construct
SKIGTGI

SEQ ID NO: 57022 - protein, 7 aa, synthetic construct
ITRKHDD

SEQ ID NO: 57023 - protein, 7 aa, synthetic construct
YNSKSSS

SEQ ID NO: 57024 - protein, 7 aa, synthetic construct
KNDYVQQ

SEQ ID NO: 57025 - protein, 7 aa, synthetic construct
NQQHFAQ

SEQ ID NO: 57026 - protein, 7 aa, synthetic construct
NGKANAG

SEQ ID NO: 57027 - protein, 7 aa, synthetic construct
IYNAKFE

SEQ ID NO: 57028 - protein, 7 aa, synthetic construct
MREKYMG

SEQ ID NO: 57029 - protein, 7 aa, synthetic construct
KTNYQTP

SEQ ID NO: 57030 - protein, 7 aa, synthetic construct
IKGGNGG

SEQ ID NO: 57031 - protein, 7 aa, synthetic construct
SGSKFTS

SEQ ID NO: 57032 - protein, 7 aa, synthetic construct
SKQSTSA

SEQ ID NO: 57033 - protein, 7 aa, synthetic construct
LERMKES

SEQ ID NO: 57034 - protein, 7 aa, synthetic construct
AFSSKMT

SEQ ID NO: 57035 - protein, 7 aa, synthetic construct
QHLSQAK

SEQ ID NO: 57036 - protein, 7 aa, synthetic construct
INSTERG

SEQ ID NO: 57037 - protein, 7 aa, synthetic construct
NAQYEKI

SEQ ID NO: 57038 - protein, 7 aa, synthetic construct
NKMYKNE

SEQ ID NO: 57039 - protein, 7 aa, synthetic construct
APMIQKN

SEQ ID NO: 57040 - protein, 7 aa, synthetic construct
PPRTSGA

SEQ ID NO: 57041 - protein, 7 aa, synthetic construct
KSPSGTN

SEQ ID NO: 57042 - protein, 7 aa, synthetic construct
LKIPHER

SEQ ID NO: 57043 - protein, 7 aa, synthetic construct
KMRGMDI

SEQ ID NO: 57044 - protein, 7 aa, synthetic construct
GKSMFKE

SEQ ID NO: 57045 - protein, 7 aa, synthetic construct
QHSVSQI

SEQ ID NO: 57046 - protein, 7 aa, synthetic construct
RDSAKQY

SEQ ID NO: 57047 - protein, 7 aa, synthetic construct
LKPMHNM

SEQ ID NO: 57048 - protein, 7 aa, synthetic construct
LMRTQID

SEQ ID NO: 57049 - protein, 7 aa, synthetic construct
YRKLEGF

SEQ ID NO: 57050 - protein, 7 aa, synthetic construct
GTNKMHG

SEQ ID NO: 57051 - protein, 7 aa, synthetic construct
WGAIKVV

SEQ ID NO: 57052 - protein, 7 aa, synthetic construct
IAASISA

SEQ ID NO: 57053 - protein, 7 aa, synthetic construct
NSKVQAG

SEQ ID NO: 57054 - protein, 7 aa, synthetic construct
FKQYMNA

SEQ ID NO: 57055 - protein, 7 aa, synthetic construct
GVNGRSP

SEQ ID NO: 57056 - protein, 7 aa, synthetic construct
TAKEKNN

SEQ ID NO: 57057 - protein, 7 aa, synthetic construct
GQHAGKP

SEQ ID NO: 57058 - protein, 7 aa, synthetic construct
RPGDIHP

SEQ ID NO: 57059 - protein, 7 aa, synthetic construct
TGVTVKN

SEQ ID NO: 57060 - protein, 7 aa, synthetic construct
TKSMMHG

SEQ ID NO: 57061 - protein, 7 aa, synthetic construct
RTPIHDI

SEQ ID NO: 57062 - protein, 7 aa, synthetic construct
TNHHVPT

SEQ ID NO: 57063 - protein, 7 aa, synthetic construct
VNGKAVM

SEQ ID NO: 57064 - protein, 7 aa, synthetic construct
KIISVDN

SEQ ID NO: 57065 - protein, 7 aa, synthetic construct
SKADRYS

SEQ ID NO: 57066 - protein, 7 aa, synthetic construct
YDGTRVH

SEQ ID NO: 57067 - protein, 7 aa, synthetic construct
FAGSKLG

SEQ ID NO: 57068 - protein, 7 aa, synthetic construct
LKEIRKE

SEQ ID NO: 57069 - protein, 7 aa, synthetic construct
AQVRTSD

SEQ ID NO: 57070 - protein, 7 aa, synthetic construct
RWAENTS

SEQ ID NO: 57071 - protein, 7 aa, synthetic construct
LSGDKAT

SEQ ID NO: 57072 - protein, 7 aa, synthetic construct
GRHLPKD

SEQ ID NO: 57073 - protein, 7 aa, synthetic construct
KPYPGMD

SEQ ID NO: 57074 - protein, 7 aa, synthetic construct
HVPARES

SEQ ID NO: 57075 - protein, 7 aa, synthetic construct
IFQAKSD

SEQ ID NO: 57076 - protein, 7 aa, synthetic construct
HENRGMQ

SEQ ID NO: 57077 - protein, 7 aa, synthetic construct
RYSQTVG

SEQ ID NO: 57078 - protein, 7 aa, synthetic construct
NQKSVSA

SEQ ID NO: 57079 - protein, 7 aa, synthetic construct
QRQSREE

SEQ ID NO: 57080 - protein, 7 aa, synthetic construct
KNSQNQM

SEQ ID NO: 57081 - protein, 7 aa, synthetic construct
RSGMKDF

SEQ ID NO: 57082 - protein, 7 aa, synthetic construct
NGALIKD

SEQ ID NO: 57083 - protein, 7 aa, synthetic construct
PKATVTI

SEQ ID NO: 57084 - protein, 7 aa, synthetic construct
IKPWGAA

SEQ ID NO: 57085 - protein, 7 aa, synthetic construct
VKAKIDA

SEQ ID NO: 57086 - protein, 7 aa, synthetic construct
NVYKTPQ

SEQ ID NO: 57087 - protein, 7 aa, synthetic construct
HVGNTHT

SEQ ID NO: 57088 - protein, 7 aa, synthetic construct
DIIKQER

SEQ ID NO: 57089 - protein, 7 aa, synthetic construct
YKPMNQS

SEQ ID NO: 57090 - protein, 7 aa, synthetic construct
QHGMIHA

SEQ ID NO: 57091 - protein, 7 aa, synthetic construct
KASSSTV

SEQ ID NO: 57092 - protein, 7 aa, synthetic construct
YKEGRNG

SEQ ID NO: 57093 - protein, 7 aa, synthetic construct
RNKDSQD

SEQ ID NO: 57094 - protein, 7 aa, synthetic construct
RPRPNVD

SEQ ID NO: 57095 - protein, 7 aa, synthetic construct
TSRQQQE

SEQ ID NO: 57096 - protein, 7 aa, synthetic construct
TQHNGHT

SEQ ID NO: 57097 - protein, 7 aa, synthetic construct
KYNHPHG

SEQ ID NO: 57098 - protein, 7 aa, synthetic construct
VNNHNTM

SEQ ID NO: 57099 - protein, 7 aa, synthetic construct
TNKYSDP

SEQ ID NO: 57100 - protein, 7 aa, synthetic construct
VSANRQG

SEQ ID NO: 57101 - protein, 7 aa, synthetic construct
PFKGHYE

SEQ ID NO: 57102 - protein, 7 aa, synthetic construct
MRQTDNP

SEQ ID NO: 57103 - protein, 7 aa, synthetic construct
QTTKANA

SEQ ID NO: 57104 - protein, 7 aa, synthetic construct
IPNVTHM

SEQ ID NO: 57105 - protein, 7 aa, synthetic construct
DAVHIKN

SEQ ID NO: 57106 - protein, 7 aa, synthetic construct
DRQFKTP

SEQ ID NO: 57107 - protein, 7 aa, synthetic construct
GKKTGDF

SEQ ID NO: 57108 - protein, 7 aa, synthetic construct
QHGQNMR

SEQ ID NO: 57109 - protein, 7 aa, synthetic construct
VRLQVPE

SEQ ID NO: 57110 - protein, 7 aa, synthetic construct
MIVRSDA

SEQ ID NO: 57111 - protein, 7 aa, synthetic construct
FNKLNSG

SEQ ID NO: 57112 - protein, 7 aa, synthetic construct
KNSSATI

SEQ ID NO: 57113 - protein, 7 aa, synthetic construct
NHNPIMN

SEQ ID NO: 57114 - protein, 7 aa, synthetic construct
YKATGYG

SEQ ID NO: 57115 - protein, 7 aa, synthetic construct
AKSAMVA

SEQ ID NO: 57116 - protein, 7 aa, synthetic construct
MARSANA

SEQ ID NO: 57117 - protein, 7 aa, synthetic construct
PTPRTMD

SEQ ID NO: 57118 - protein, 7 aa, synthetic construct
DKFSKEG

SEQ ID NO: 57119 - protein, 7 aa, synthetic construct
SNTMSSP

SEQ ID NO: 57120 - protein, 7 aa, synthetic construct
MKTWPPE

SEQ ID NO: 57121 - protein, 7 aa, synthetic construct
YFREVRE

SEQ ID NO: 57122 - protein, 7 aa, synthetic construct
TPGAGRY

SEQ ID NO: 57123 - protein, 7 aa, synthetic construct
GKFNGLS

SEQ ID NO: 57124 - protein, 7 aa, synthetic construct
MMKGAQA

SEQ ID NO: 57125 - protein, 7 aa, synthetic construct
NKLTNYS

SEQ ID NO: 57126 - protein, 7 aa, synthetic construct
AKASSNA

SEQ ID NO: 57127 - protein, 7 aa, synthetic construct
RNSPYPE

SEQ ID NO: 57128 - protein, 7 aa, synthetic construct
HDETKTS

SEQ ID NO: 57129 - protein, 7 aa, synthetic construct
ISGVRSG

SEQ ID NO: 57130 - protein, 7 aa, synthetic construct
RKETGSI

SEQ ID NO: 57131 - protein, 7 aa, synthetic construct
SVGNQER

SEQ ID NO: 57132 - protein, 7 aa, synthetic construct
AAPHPPA

SEQ ID NO: 57133 - protein, 7 aa, synthetic construct
KTPERGE

SEQ ID NO: 57134 - protein, 7 aa, synthetic construct
SAMRPNQ

SEQ ID NO: 57135 - protein, 7 aa, synthetic construct
AEKQRSY

SEQ ID NO: 57136 - protein, 7 aa, synthetic construct
KYNQAGI

SEQ ID NO: 57137 - protein, 7 aa, synthetic construct
SQAKPPY

SEQ ID NO: 57138 - protein, 7 aa, synthetic construct
KPTLMQS

SEQ ID NO: 57139 - protein, 7 aa, synthetic construct
KMKDMMG

SEQ ID NO: 57140 - protein, 7 aa, synthetic construct
MDLRYQD

SEQ ID NO: 57141 - protein, 7 aa, synthetic construct
MLRSEVA

SEQ ID NO: 57142 - protein, 7 aa, synthetic construct
PTKAMSG

SEQ ID NO: 57143 - protein, 7 aa, synthetic construct
ASSHNQA

SEQ ID NO: 57144 - protein, 7 aa, synthetic construct
GSRQKED

SEQ ID NO: 57145 - protein, 7 aa, synthetic construct
TKATWSA

SEQ ID NO: 57146 - protein, 7 aa, synthetic construct
MAKSSMG

SEQ ID NO: 57147 - protein, 7 aa, synthetic construct
FSTSKPE

SEQ ID NO: 57148 - protein, 7 aa, synthetic construct
SARGGQE

SEQ ID NO: 57149 - protein, 7 aa, synthetic construct
PNRNPPP

SEQ ID NO: 57150 - protein, 7 aa, synthetic construct
ATSRTQP

SEQ ID NO: 57151 - protein, 7 aa, synthetic construct
RALQAAD

SEQ ID NO: 57152 - protein, 7 aa, synthetic construct
NGERHTP

SEQ ID NO: 57153 - protein, 7 aa, synthetic construct
FEPIKVA

SEQ ID NO: 57154 - protein, 7 aa, synthetic construct
EHTRPTL

SEQ ID NO: 57155 - protein, 7 aa, synthetic construct
NKTNAAN

SEQ ID NO: 57156 - protein, 7 aa, synthetic construct
PNSKSEM

SEQ ID NO: 57157 - protein, 7 aa, synthetic construct
TAKGLYE

SEQ ID NO: 57158 - protein, 7 aa, synthetic construct
SVKYHAS

SEQ ID NO: 57159 - protein, 7 aa, synthetic construct
LAKSGDR

SEQ ID NO: 57160 - protein, 7 aa, synthetic construct
QKSGNNG

SEQ ID NO: 57161 - protein, 7 aa, synthetic construct
AHPQAIL

SEQ ID NO: 57162 - protein, 7 aa, synthetic construct
FYGAGNS

SEQ ID NO: 57163 - protein, 7 aa, synthetic construct
KPVSVGA

SEQ ID NO: 57164 - protein, 7 aa, synthetic construct
TFNAHND

SEQ ID NO: 57165 - protein, 7 aa, synthetic construct
GQRTGGP

SEQ ID NO: 57166 - protein, 7 aa, synthetic construct
VTPRNMA

SEQ ID NO: 57167 - protein, 7 aa, synthetic construct
KNSQING

SEQ ID NO: 57168 - protein, 7 aa, synthetic construct
FVKKWSE

SEQ ID NO: 57169 - protein, 7 aa, synthetic construct
RITSDQI

SEQ ID NO: 57170 - protein, 7 aa, synthetic construct
IRGDTSL

SEQ ID NO: 57171 - protein, 7 aa, synthetic construct
DRVKDNP

SEQ ID NO: 57172 - protein, 7 aa, synthetic construct
PKQNTSD

SEQ ID NO: 57173 - protein, 7 aa, synthetic construct
FKHPNNG

SEQ ID NO: 57174 - protein, 7 aa, synthetic construct
GRSTVQG

SEQ ID NO: 57175 - protein, 7 aa, synthetic construct
PQSTRSP

SEQ ID NO: 57176 - protein, 7 aa, synthetic construct
NDAKHGF

SEQ ID NO: 57177 - protein, 7 aa, synthetic construct
TDRAKQV

SEQ ID NO: 57178 - protein, 7 aa, synthetic construct
KSVTGAA

SEQ ID NO: 57179 - protein, 7 aa, synthetic construct
QASHPLK

SEQ ID NO: 57180 - protein, 7 aa, synthetic construct
SQRVTNP

SEQ ID NO: 57181 - protein, 7 aa, synthetic construct
KGLQSTE

SEQ ID NO: 57182 - protein, 7 aa, synthetic construct
NTGKTYP

SEQ ID NO: 57183 - protein, 7 aa, synthetic construct
TNTLKHV

SEQ ID NO: 57184 - protein, 7 aa, synthetic construct
KHTHTEV

SEQ ID NO: 57185 - protein, 7 aa, synthetic construct
REKNQYV

SEQ ID NO: 57186 - protein, 7 aa, synthetic construct
VRPQTTA

SEQ ID NO: 57187 - protein, 7 aa, synthetic construct
NRSYVSD

SEQ ID NO: 57188 - protein, 7 aa, synthetic construct
TVFKSDL

SEQ ID NO: 57189 - protein, 7 aa, synthetic construct
TNARFEG

SEQ ID NO: 57190 - protein, 7 aa, synthetic construct
GSGIKGP

SEQ ID NO: 57191 - protein, 7 aa, synthetic construct
RQGSSMP

SEQ ID NO: 57192 - protein, 7 aa, synthetic construct
VKYGQSQ

SEQ ID NO: 57193 - protein, 7 aa, synthetic construct
YKPQAPQ

SEQ ID NO: 57194 - protein, 7 aa, synthetic construct
VQRRDII

SEQ ID NO: 57195 - protein, 7 aa, synthetic construct
GKGTTSP

SEQ ID NO: 57196 - protein, 7 aa, synthetic construct
NTVAKQG

SEQ ID NO: 57197 - protein, 7 aa, synthetic construct
GQKHQPG

SEQ ID NO: 57198 - protein, 7 aa, synthetic construct
ATMKNVD

SEQ ID NO: 57199 - protein, 7 aa, synthetic construct
RSLQPHV

SEQ ID NO: 57200 - protein, 7 aa, synthetic construct
LYERTEG

SEQ ID NO: 57201 - protein, 7 aa, synthetic construct
SGRTEGV

SEQ ID NO: 57202 - protein, 7 aa, synthetic construct
YKPAHTE

SEQ ID NO: 57203 - protein, 7 aa, synthetic construct
KPSNGQM

SEQ ID NO: 57204 - protein, 7 aa, synthetic construct
TRNNQNP

SEQ ID NO: 57205 - protein, 7 aa, synthetic construct
NKKSHDE

SEQ ID NO: 57206 - protein, 7 aa, synthetic construct
DDSNRKQ

SEQ ID NO: 57207 - protein, 7 aa, synthetic construct
MGGSHLI

SEQ ID NO: 57208 - protein, 7 aa, synthetic construct
RPSGQQP

SEQ ID NO: 57209 - protein, 7 aa, synthetic construct
TSNQRAG

SEQ ID NO: 57210 - protein, 7 aa, synthetic construct
KGDSKKD

SEQ ID NO: 57211 - protein, 7 aa, synthetic construct
PKTNATA

SEQ ID NO: 57212 - protein, 7 aa, synthetic construct
SVHSNKA

SEQ ID NO: 57213 - protein, 7 aa, synthetic construct
SNKTAVA

SEQ ID NO: 57214 - protein, 7 aa, synthetic construct
MPTKGAG

SEQ ID NO: 57215 - protein, 7 aa, synthetic construct
DKKDKQY

SEQ ID NO: 57216 - protein, 7 aa, synthetic construct
FHQSTRE

SEQ ID NO: 57217 - protein, 7 aa, synthetic construct
RPNVGTA

SEQ ID NO: 57218 - protein, 7 aa, synthetic construct
GTHAQPL

SEQ ID NO: 57219 - protein, 7 aa, synthetic construct
KMTGAQA

SEQ ID NO: 57220 - protein, 7 aa, synthetic construct
TKTFLTA

SEQ ID NO: 57221 - protein, 7 aa, synthetic construct
EVDRRNS

SEQ ID NO: 57222 - protein, 7 aa, synthetic construct
NLNPGKT

SEQ ID NO: 57223 - protein, 7 aa, synthetic construct
TSSALSS

SEQ ID NO: 57224 - protein, 7 aa, synthetic construct
DAAWKNI

SEQ ID NO: 57225 - protein, 7 aa, synthetic construct
TPLANTL

SEQ ID NO: 57226 - protein, 7 aa, synthetic construct
PSRLPTN

SEQ ID NO: 57227 - protein, 7 aa, synthetic construct
VQHQLPM

SEQ ID NO: 57228 - protein, 7 aa, synthetic construct
GKSDFMR

SEQ ID NO: 57229 - protein, 7 aa, synthetic construct
HQQVLAP

SEQ ID NO: 57230 - protein, 7 aa, synthetic construct
ANQKGSD

SEQ ID NO: 57231 - protein, 7 aa, synthetic construct
SPKHMNQ

SEQ ID NO: 57232 - protein, 7 aa, synthetic construct
AMSKTQA

SEQ ID NO: 57233 - protein, 7 aa, synthetic construct
TVPHGNK

SEQ ID NO: 57234 - protein, 7 aa, synthetic construct
NETYKNP

SEQ ID NO: 57235 - protein, 7 aa, synthetic construct
LATRESV

SEQ ID NO: 57236 - protein, 7 aa, synthetic construct
AKSAYVE

SEQ ID NO: 57237 - protein, 7 aa, synthetic construct
APPAHKG

SEQ ID NO: 57238 - protein, 7 aa, synthetic construct
TSIGFNG

SEQ ID NO: 57239 - protein, 7 aa, synthetic construct
SYPPGRP

SEQ ID NO: 57240 - protein, 7 aa, synthetic construct
WGREKPV

SEQ ID NO: 57241 - protein, 7 aa, synthetic construct
QGPRMLQ

SEQ ID NO: 57242 - protein, 7 aa, synthetic construct
ETRVGSH

SEQ ID NO: 57243 - protein, 7 aa, synthetic construct
LQPTNSV

SEQ ID NO: 57244 - protein, 7 aa, synthetic construct
VRAIDRV

SEQ ID NO: 57245 - protein, 7 aa, synthetic construct
GNMNTRV

SEQ ID NO: 57246 - protein, 7 aa, synthetic construct
YGLIKSS

SEQ ID NO: 57247 - protein, 7 aa, synthetic construct
WEGGKKV

SEQ ID NO: 57248 - protein, 7 aa, synthetic construct
YKPATSP

SEQ ID NO: 57249 - protein, 7 aa, synthetic construct
HLGHNVS

SEQ ID NO: 57250 - protein, 7 aa, synthetic construct
QTKMNQA

SEQ ID NO: 57251 - protein, 7 aa, synthetic construct
VRNEMLK

SEQ ID NO: 57252 - protein, 7 aa, synthetic construct
WHIGIKD

SEQ ID NO: 57253 - protein, 7 aa, synthetic construct
FIPHGKV

SEQ ID NO: 57254 - protein, 7 aa, synthetic construct
KTNMPNS

SEQ ID NO: 57255 - protein, 7 aa, synthetic construct
HGKTLTQ

SEQ ID NO: 57256 - protein, 7 aa, synthetic construct
QEYPSKQ

SEQ ID NO: 57257 - protein, 7 aa, synthetic construct
SMSKPAA

SEQ ID NO: 57258 - protein, 7 aa, synthetic construct
RSSNNTG

SEQ ID NO: 57259 - protein, 7 aa, synthetic construct
SPERVLV

SEQ ID NO: 57260 - protein, 7 aa, synthetic construct
TSNRAGG

SEQ ID NO: 57261 - protein, 7 aa, synthetic construct
NWAKMEK

SEQ ID NO: 57262 - protein, 7 aa, synthetic construct
KTTGNRE

SEQ ID NO: 57263 - protein, 7 aa, synthetic construct
GGKEWKA

SEQ ID NO: 57264 - protein, 7 aa, synthetic construct
AKTSTGL

SEQ ID NO: 57265 - protein, 7 aa, synthetic construct
MMGVGVN

SEQ ID NO: 57266 - protein, 7 aa, synthetic construct
QNKTVNA

SEQ ID NO: 57267 - protein, 7 aa, synthetic construct
KNEHRPA

SEQ ID NO: 57268 - protein, 7 aa, synthetic construct
TGHMLVA

SEQ ID NO: 57269 - protein, 7 aa, synthetic construct
VKQNNTN

SEQ ID NO: 57270 - protein, 7 aa, synthetic construct
KATPQVM

SEQ ID NO: 57271 - protein, 7 aa, synthetic construct
SYQGNKG

SEQ ID NO: 57272 - protein, 7 aa, synthetic construct
SSKAQSA

SEQ ID NO: 57273 - protein, 7 aa, synthetic construct
SKPNGKD

SEQ ID NO: 57274 - protein, 7 aa, synthetic construct
NRQTERE

SEQ ID NO: 57275 - protein, 7 aa, synthetic construct
DKVRVES

SEQ ID NO: 57276 - protein, 7 aa, synthetic construct
HHKGAET

SEQ ID NO: 57277 - protein, 7 aa, synthetic construct
TRGQMEG

SEQ ID NO: 57278 - protein, 7 aa, synthetic construct
LQPKREY

SEQ ID NO: 57279 - protein, 7 aa, synthetic construct
GHRGNSQ

SEQ ID NO: 57280 - protein, 7 aa, synthetic construct
GKNSVTS

SEQ ID NO: 57281 - protein, 7 aa, synthetic construct
MSRTAAP

SEQ ID NO: 57282 - protein, 7 aa, synthetic construct
KQMQTDR

SEQ ID NO: 57283 - protein, 7 aa, synthetic construct
VKDYQAS

SEQ ID NO: 57284 - protein, 7 aa, synthetic construct
SRTAAIE

SEQ ID NO: 57285 - protein, 7 aa, synthetic construct
TGPSSMR

SEQ ID NO: 57286 - protein, 7 aa, synthetic construct
INRSQGI

SEQ ID NO: 57287 - protein, 7 aa, synthetic construct
KQQIMQQ

SEQ ID NO: 57288 - protein, 7 aa, synthetic construct
FGNPVLG

SEQ ID NO: 57289 - protein, 7 aa, synthetic construct
LTIPNGR

SEQ ID NO: 57290 - protein, 7 aa, synthetic construct
PIKIAHT

SEQ ID NO: 57291 - protein, 7 aa, synthetic construct
RNMNDPA

SEQ ID NO: 57292 - protein, 7 aa, synthetic construct
LMMRHDS

SEQ ID NO: 57293 - protein, 7 aa, synthetic construct
KTNTNGA

SEQ ID NO: 57294 - protein, 7 aa, synthetic construct
NKAVARD

SEQ ID NO: 57295 - protein, 7 aa, synthetic construct
YQTGRTI

SEQ ID NO: 57296 - protein, 7 aa, synthetic construct
GKDHMRN

SEQ ID NO: 57297 - protein, 7 aa, synthetic construct
KNSTNTV

SEQ ID NO: 57298 - protein, 7 aa, synthetic construct
SAHYNHA

SEQ ID NO: 57299 - protein, 7 aa, synthetic construct
GFKAQGN

SEQ ID NO: 57300 - protein, 7 aa, synthetic construct
TQGSKMF

SEQ ID NO: 57301 - protein, 7 aa, synthetic construct
SGQKPQF

SEQ ID NO: 57302 - protein, 7 aa, synthetic construct
FKREPMI

SEQ ID NO: 57303 - protein, 7 aa, synthetic construct
KMQPTSI

SEQ ID NO: 57304 - protein, 7 aa, synthetic construct
GVKRTND

SEQ ID NO: 57305 - protein, 7 aa, synthetic construct
WKHQDHL

SEQ ID NO: 57306 - protein, 7 aa, synthetic construct
KNTPVTG

SEQ ID NO: 57307 - protein, 7 aa, synthetic construct
TMGMETP

SEQ ID NO: 57308 - protein, 7 aa, synthetic construct
TPTYRTQ

SEQ ID NO: 57309 - protein, 7 aa, synthetic construct
YPKEVHR

SEQ ID NO: 57310 - protein, 7 aa, synthetic construct
EGTASRA

SEQ ID NO: 57311 - protein, 7 aa, synthetic construct
NPYASGG

SEQ ID NO: 57312 - protein, 7 aa, synthetic construct
VSQRPLN

SEQ ID NO: 57313 - protein, 7 aa, synthetic construct
AREGPSL

SEQ ID NO: 57314 - protein, 7 aa, synthetic construct
GYNGTNG

SEQ ID NO: 57315 - protein, 7 aa, synthetic construct
SLKAHEL

SEQ ID NO: 57316 - protein, 7 aa, synthetic construct
IKHTMTE

SEQ ID NO: 57317 - protein, 7 aa, synthetic construct
ANATRLQ

SEQ ID NO: 57318 - protein, 7 aa, synthetic construct
QESNLRR

SEQ ID NO: 57319 - protein, 7 aa, synthetic construct
LGGNKVG

SEQ ID NO: 57320 - protein, 7 aa, synthetic construct
KGMTAQN

SEQ ID NO: 57321 - protein, 7 aa, synthetic construct
MHNPATP

SEQ ID NO: 57322 - protein, 7 aa, synthetic construct
EIRKSFE

SEQ ID NO: 57323 - protein, 7 aa, synthetic construct
IHKFGEP

SEQ ID NO: 57324 - protein, 7 aa, synthetic construct
SYQKTAL

SEQ ID NO: 57325 - protein, 7 aa, synthetic construct
AFHERRE

SEQ ID NO: 57326 - protein, 7 aa, synthetic construct
KYQSGAL

SEQ ID NO: 57327 - protein, 7 aa, synthetic construct
QNNSRET

SEQ ID NO: 57328 - protein, 7 aa, synthetic construct
KEKGMVG

SEQ ID NO: 57329 - protein, 7 aa, synthetic construct
FSHLTPG

SEQ ID NO: 57330 - protein, 7 aa, synthetic construct
GPRQNAP

SEQ ID NO: 57331 - protein, 7 aa, synthetic construct
SRLEKDV

SEQ ID NO: 57332 - protein, 7 aa, synthetic construct
RDSVYKA

SEQ ID NO: 57333 - protein, 7 aa, synthetic construct
LSMSHHS

SEQ ID NO: 57334 - protein, 7 aa, synthetic construct
QSSKSGM

SEQ ID NO: 57335 - protein, 7 aa, synthetic construct
NQIRRYE

SEQ ID NO: 57336 - protein, 7 aa, synthetic construct
KQGSVVA

SEQ ID NO: 57337 - protein, 7 aa, synthetic construct
YLMAKDN

SEQ ID NO: 57338 - protein, 7 aa, synthetic construct
KTSTTIA

SEQ ID NO: 57339 - protein, 7 aa, synthetic construct
NQSRNSP

SEQ ID NO: 57340 - protein, 7 aa, synthetic construct
EGRYEKV

SEQ ID NO: 57341 - protein, 7 aa, synthetic construct
KGNLVQA

SEQ ID NO: 57342 - protein, 7 aa, synthetic construct
GTRSAGP

SEQ ID NO: 57343 - protein, 7 aa, synthetic construct
STHQAKT

SEQ ID NO: 57344 - protein, 7 aa, synthetic construct
MPKANQS

SEQ ID NO: 57345 - protein, 7 aa, synthetic construct
TMHRQAS

SEQ ID NO: 57346 - protein, 7 aa, synthetic construct
PIGQQRE

SEQ ID NO: 57347 - protein, 7 aa, synthetic construct
VKQHQSY

SEQ ID NO: 57348 - protein, 7 aa, synthetic construct
WYDKKNG

SEQ ID NO: 57349 - protein, 7 aa, synthetic construct
GVQSKNA

SEQ ID NO: 57350 - protein, 7 aa, synthetic construct
KAVTLAN

SEQ ID NO: 57351 - protein, 7 aa, synthetic construct
SHTSREE

SEQ ID NO: 57352 - protein, 7 aa, synthetic construct
FGKNEIG

SEQ ID NO: 57353 - protein, 7 aa, synthetic construct
TSGQLRM

SEQ ID NO: 57354 - protein, 7 aa, synthetic construct
DHGPRLT

SEQ ID NO: 57355 - protein, 7 aa, synthetic construct
TAPRMGN

SEQ ID NO: 57356 - protein, 7 aa, synthetic construct
FHTLESP

SEQ ID NO: 57357 - protein, 7 aa, synthetic construct
KKDPNPA

SEQ ID NO: 57358 - protein, 7 aa, synthetic construct
YKGAMSG

SEQ ID NO: 57359 - protein, 7 aa, synthetic construct
VHAKKDD

SEQ ID NO: 57360 - protein, 7 aa, synthetic construct
NSYAGKP

SEQ ID NO: 57361 - protein, 7 aa, synthetic construct
INSAITG

SEQ ID NO: 57362 - protein, 7 aa, synthetic construct
QKRDHVF

SEQ ID NO: 57363 - protein, 7 aa, synthetic construct
RAPSASA

SEQ ID NO: 57364 - protein, 7 aa, synthetic construct
SLGFKDM

SEQ ID NO: 57365 - protein, 7 aa, synthetic construct
PRPLRED

SEQ ID NO: 57366 - protein, 7 aa, synthetic construct
NRNWTPE

SEQ ID NO: 57367 - protein, 7 aa, synthetic construct
VRQSSQS

SEQ ID NO: 57368 - protein, 7 aa, synthetic construct
HVKTEHF

SEQ ID NO: 57369 - protein, 7 aa, synthetic construct
KSSSTGE

SEQ ID NO: 57370 - protein, 7 aa, synthetic construct
TRPQNAA

SEQ ID NO: 57371 - protein, 7 aa, synthetic construct
IARTSMD

SEQ ID NO: 57372 - protein, 7 aa, synthetic construct
NPLAQSF

SEQ ID NO: 57373 - protein, 7 aa, synthetic construct
QGATRMG

SEQ ID NO: 57374 - protein, 7 aa, synthetic construct
DIKHRSI

SEQ ID NO: 57375 - protein, 7 aa, synthetic construct
QNKGPGQ

SEQ ID NO: 57376 - protein, 7 aa, synthetic construct
GVYGMIS

SEQ ID NO: 57377 - protein, 7 aa, synthetic construct
PRYGNND

SEQ ID NO: 57378 - protein, 7 aa, synthetic construct
IKDFMGH

SEQ ID NO: 57379 - protein, 7 aa, synthetic construct
KGKYEIV

SEQ ID NO: 57380 - protein, 7 aa, synthetic construct
VKAESGG

SEQ ID NO: 57381 - protein, 7 aa, synthetic construct
AHGSVKP

SEQ ID NO: 57382 - protein, 7 aa, synthetic construct
NYNKVSP

SEQ ID NO: 57383 - protein, 7 aa, synthetic construct
VSAMRGP

SEQ ID NO: 57384 - protein, 7 aa, synthetic construct
YSYPHKD

SEQ ID NO: 57385 - protein, 7 aa, synthetic construct
MTKPNEI

SEQ ID NO: 57386 - protein, 7 aa, synthetic construct
FGSNTSK

SEQ ID NO: 57387 - protein, 7 aa, synthetic construct
QNKSQFQ

SEQ ID NO: 57388 - protein, 7 aa, synthetic construct
GKVSMRE

SEQ ID NO: 57389 - protein, 7 aa, synthetic construct
MSMGTTP

SEQ ID NO: 57390 - protein, 7 aa, synthetic construct
GQGTVQF

SEQ ID NO: 57391 - protein, 7 aa, synthetic construct
VNMTMKV

SEQ ID NO: 57392 - protein, 7 aa, synthetic construct
ISTRIAT

SEQ ID NO: 57393 - protein, 7 aa, synthetic construct
ARSAKEF

SEQ ID NO: 57394 - protein, 7 aa, synthetic construct
AHTKGEP

SEQ ID NO: 57395 - protein, 7 aa, synthetic construct
TKLGLKG

SEQ ID NO: 57396 - protein, 7 aa, synthetic construct
QPSQKVG

SEQ ID NO: 57397 - protein, 7 aa, synthetic construct
SYPNGHQ

SEQ ID NO: 57398 - protein, 7 aa, synthetic construct
LNPHIKF

SEQ ID NO: 57399 - protein, 7 aa, synthetic construct
AKVAQAQ

SEQ ID NO: 57400 - protein, 7 aa, synthetic construct
AAAPGKH

SEQ ID NO: 57401 - protein, 7 aa, synthetic construct
IRKAPEF

SEQ ID NO: 57402 - protein, 7 aa, synthetic construct
SNSKADV

SEQ ID NO: 57403 - protein, 7 aa, synthetic construct
KTGPGIG

SEQ ID NO: 57404 - protein, 7 aa, synthetic construct
KNNSAQP

SEQ ID NO: 57405 - protein, 7 aa, synthetic construct
RNSTGSI

SEQ ID NO: 57406 - protein, 7 aa, synthetic construct
IAHVPNR

SEQ ID NO: 57407 - protein, 7 aa, synthetic construct
SLHTART

SEQ ID NO: 57408 - protein, 7 aa, synthetic construct
MNQGRSP

SEQ ID NO: 57409 - protein, 7 aa, synthetic construct
QGSRQGV

SEQ ID NO: 57410 - protein, 7 aa, synthetic construct
VPIKYPD

SEQ ID NO: 57411 - protein, 7 aa, synthetic construct
GQQQNHI

SEQ ID NO: 57412 - protein, 7 aa, synthetic construct
FNNRPQV

SEQ ID NO: 57413 - protein, 7 aa, synthetic construct
VGKMKGE

SEQ ID NO: 57414 - protein, 7 aa, synthetic construct
QSRAGPV

SEQ ID NO: 57415 - protein, 7 aa, synthetic construct
DHLKLVP

SEQ ID NO: 57416 - protein, 7 aa, synthetic construct
QSQTSRF

SEQ ID NO: 57417 - protein, 7 aa, synthetic construct
VSSRQIH

SEQ ID NO: 57418 - protein, 7 aa, synthetic construct
RLSTHVE

SEQ ID NO: 57419 - protein, 7 aa, synthetic construct
HSPKDGG

SEQ ID NO: 57420 - protein, 7 aa, synthetic construct
IAPKTHM

SEQ ID NO: 57421 - protein, 7 aa, synthetic construct
QWSKAAI

SEQ ID NO: 57422 - protein, 7 aa, synthetic construct
NKPASTS

SEQ ID NO: 57423 - protein, 7 aa, synthetic construct
KGGLGIS

SEQ ID NO: 57424 - protein, 7 aa, synthetic construct
YGTKTQP

SEQ ID NO: 57425 - protein, 7 aa, synthetic construct
YTPLTPV

SEQ ID NO: 57426 - protein, 7 aa, synthetic construct
AMGPSGS

SEQ ID NO: 57427 - protein, 7 aa, synthetic construct
LKTHNSD

SEQ ID NO: 57428 - protein, 7 aa, synthetic construct
TSMKQHP

SEQ ID NO: 57429 - protein, 7 aa, synthetic construct
DKMHRET

SEQ ID NO: 57430 - protein, 7 aa, synthetic construct
DAKNRLE

SEQ ID NO: 57431 - protein, 7 aa, synthetic construct
IGHEKFV

SEQ ID NO: 57432 - protein, 7 aa, synthetic construct
QISATRI

SEQ ID NO: 57433 - protein, 7 aa, synthetic construct
KAGTTQA

SEQ ID NO: 57434 - protein, 7 aa, synthetic construct
PKSTGQA

SEQ ID NO: 57435 - protein, 7 aa, synthetic construct
HAKGQFA

SEQ ID NO: 57436 - protein, 7 aa, synthetic construct
THDARVM

SEQ ID NO: 57437 - protein, 7 aa, synthetic construct
RNPPQNG

SEQ ID NO: 57438 - protein, 7 aa, synthetic construct
VAVFKTE

SEQ ID NO: 57439 - protein, 7 aa, synthetic construct
TRTSVAP

SEQ ID NO: 57440 - protein, 7 aa, synthetic construct
GLSPARG

SEQ ID NO: 57441 - protein, 7 aa, synthetic construct
WKTGDDR

SEQ ID NO: 57442 - protein, 7 aa, synthetic construct
GIQHITE

SEQ ID NO: 57443 - protein, 7 aa, synthetic construct
HQGSVPH

SEQ ID NO: 57444 - protein, 7 aa, synthetic construct
GPYGSSG

SEQ ID NO: 57445 - protein, 7 aa, synthetic construct
NPTLNRP

SEQ ID NO: 57446 - protein, 7 aa, synthetic construct
TPTFPQS

SEQ ID NO: 57447 - protein, 7 aa, synthetic construct
RSTTNQP

SEQ ID NO: 57448 - protein, 7 aa, synthetic construct
SREQTQN

SEQ ID NO: 57449 - protein, 7 aa, synthetic construct
KPNPTSD

SEQ ID NO: 57450 - protein, 7 aa, synthetic construct
YDSSRRS

SEQ ID NO: 57451 - protein, 7 aa, synthetic construct
PSQSHKS

SEQ ID NO: 57452 - protein, 7 aa, synthetic construct
GNSKGQG

SEQ ID NO: 57453 - protein, 7 aa, synthetic construct
AQVRNVV

SEQ ID NO: 57454 - protein, 7 aa, synthetic construct
IYGGQSP

SEQ ID NO: 57455 - protein, 7 aa, synthetic construct
SKPMVIP

SEQ ID NO: 57456 - protein, 7 aa, synthetic construct
HVTGQRP

SEQ ID NO: 57457 - protein, 7 aa, synthetic construct
LDKKFTQ

SEQ ID NO: 57458 - protein, 7 aa, synthetic construct
PMGGKYG

SEQ ID NO: 57459 - protein, 7 aa, synthetic construct
WDRMQAK

SEQ ID NO: 57460 - protein, 7 aa, synthetic construct
HEGYMVN

SEQ ID NO: 57461 - protein, 7 aa, synthetic construct
RTKDMQA

SEQ ID NO: 57462 - protein, 7 aa, synthetic construct
NPGRMGS

SEQ ID NO: 57463 - protein, 7 aa, synthetic construct
TKVKTTE

SEQ ID NO: 57464 - protein, 7 aa, synthetic construct
QMALVKD

SEQ ID NO: 57465 - protein, 7 aa, synthetic construct
LKNVNAA

SEQ ID NO: 57466 - protein, 7 aa, synthetic construct
FRPAGIT

SEQ ID NO: 57467 - protein, 7 aa, synthetic construct
TKHFDAF

SEQ ID NO: 57468 - protein, 7 aa, synthetic construct
MTGRVNA

SEQ ID NO: 57469 - protein, 7 aa, synthetic construct
KNNGMMG

SEQ ID NO: 57470 - protein, 7 aa, synthetic construct
NKQGGGV

SEQ ID NO: 57471 - protein, 7 aa, synthetic construct
TGPTNPS

SEQ ID NO: 57472 - protein, 7 aa, synthetic construct
QEPNIRT

SEQ ID NO: 57473 - protein, 7 aa, synthetic construct
PRSAVHS

SEQ ID NO: 57474 - protein, 7 aa, synthetic construct
SHYDPYD

SEQ ID NO: 57475 - protein, 7 aa, synthetic construct
IKGEGNA

SEQ ID NO: 57476 - protein, 7 aa, synthetic construct
TYPQKVG

SEQ ID NO: 57477 - protein, 7 aa, synthetic construct
QKNSSSP

SEQ ID NO: 57478 - protein, 7 aa, synthetic construct
ITNSDRG

SEQ ID NO: 57479 - protein, 7 aa, synthetic construct
PHTPNSG

SEQ ID NO: 57480 - protein, 7 aa, synthetic construct
MFQEHKI

SEQ ID NO: 57481 - protein, 7 aa, synthetic construct
RNPESYR

SEQ ID NO: 57482 - protein, 7 aa, synthetic construct
DGKSHSF

SEQ ID NO: 57483 - protein, 7 aa, synthetic construct
NKPSTYA

SEQ ID NO: 57484 - protein, 7 aa, synthetic construct
RPNTSQD

SEQ ID NO: 57485 - protein, 7 aa, synthetic construct
QAQNKSG

SEQ ID NO: 57486 - protein, 7 aa, synthetic construct
FAGQLRN

SEQ ID NO: 57487 - protein, 7 aa, synthetic construct
VSQGSSH

SEQ ID NO: 57488 - protein, 7 aa, synthetic construct
FGHAQSQ

SEQ ID NO: 57489 - protein, 7 aa, synthetic construct
TKQGTQS

SEQ ID NO: 57490 - protein, 7 aa, synthetic construct
WKEPAVH

SEQ ID NO: 57491 - protein, 7 aa, synthetic construct
DKRRDGE

SEQ ID NO: 57492 - protein, 7 aa, synthetic construct
DASKIEM

SEQ ID NO: 57493 - protein, 7 aa, synthetic construct
GHKHGDA

SEQ ID NO: 57494 - protein, 7 aa, synthetic construct
NYKSSQG

SEQ ID NO: 57495 - protein, 7 aa, synthetic construct
RGLDMDR

SEQ ID NO: 57496 - protein, 7 aa, synthetic construct
LPLNIKN

SEQ ID NO: 57497 - protein, 7 aa, synthetic construct
RNLVQTD

SEQ ID NO: 57498 - protein, 7 aa, synthetic construct
FQNSQKI

SEQ ID NO: 57499 - protein, 7 aa, synthetic construct
RYAVGNA

SEQ ID NO: 57500 - protein, 7 aa, synthetic construct
TRQASTS

SEQ ID NO: 57501 - protein, 7 aa, synthetic construct
RGGLTAT

SEQ ID NO: 57502 - protein, 7 aa, synthetic construct
RKDGFAG

SEQ ID NO: 57503 - protein, 7 aa, synthetic construct
QFQPASN

SEQ ID NO: 57504 - protein, 7 aa, synthetic construct
KSGHPIA

SEQ ID NO: 57505 - protein, 7 aa, synthetic construct
IHHSPDK

SEQ ID NO: 57506 - protein, 7 aa, synthetic construct
GHGVIIG

SEQ ID NO: 57507 - protein, 7 aa, synthetic construct
GHVPFSQ

SEQ ID NO: 57508 - protein, 7 aa, synthetic construct
DRYMPMA

SEQ ID NO: 57509 - protein, 7 aa, synthetic construct
FHRTIKD

SEQ ID NO: 57510 - protein, 7 aa, synthetic construct
HNFGGKQ

SEQ ID NO: 57511 - protein, 7 aa, synthetic construct
QAGSKFG

SEQ ID NO: 57512 - protein, 7 aa, synthetic construct
TTKVDFQ

SEQ ID NO: 57513 - protein, 7 aa, synthetic construct
AINAKTV

SEQ ID NO: 57514 - protein, 7 aa, synthetic construct
RIVSTGG

SEQ ID NO: 57515 - protein, 7 aa, synthetic construct
KVQSSSP

SEQ ID NO: 57516 - protein, 7 aa, synthetic construct
FTYKPEG

SEQ ID NO: 57517 - protein, 7 aa, synthetic construct
YSHKGND

SEQ ID NO: 57518 - protein, 7 aa, synthetic construct
SPQRVGA

SEQ ID NO: 57519 - protein, 7 aa, synthetic construct
PTVKHDI

SEQ ID NO: 57520 - protein, 7 aa, synthetic construct
QPRQGSI

SEQ ID NO: 57521 - protein, 7 aa, synthetic construct
SKNQTMA

SEQ ID NO: 57522 - protein, 7 aa, synthetic construct
MPKSVNN

SEQ ID NO: 57523 - protein, 7 aa, synthetic construct
HIVRDHG

SEQ ID NO: 57524 - protein, 7 aa, synthetic construct
VIERAHT

SEQ ID NO: 57525 - protein, 7 aa, synthetic construct
IGLSKGQ

SEQ ID NO: 57526 - protein, 7 aa, synthetic construct
PENHPNN

SEQ ID NO: 57527 - protein, 7 aa, synthetic construct
LFETGRS

SEQ ID NO: 57528 - protein, 7 aa, synthetic construct
NNQSGSK

SEQ ID NO: 57529 - protein, 7 aa, synthetic construct
NMENIKK

SEQ ID NO: 57530 - protein, 7 aa, synthetic construct
MVGRPDH

SEQ ID NO: 57531 - protein, 7 aa, synthetic construct
KNSGING

SEQ ID NO: 57532 - protein, 7 aa, synthetic construct
LVTGTTH

SEQ ID NO: 57533 - protein, 7 aa, synthetic construct
VNDGNGK

SEQ ID NO: 57534 - protein, 7 aa, synthetic construct
ALKQDQG

SEQ ID NO: 57535 - protein, 7 aa, synthetic construct
HPHLMNT

SEQ ID NO: 57536 - protein, 7 aa, synthetic construct
NWKSMQP

SEQ ID NO: 57537 - protein, 7 aa, synthetic construct
NYSHPHT

SEQ ID NO: 57538 - protein, 7 aa, synthetic construct
VGQYFAA

SEQ ID NO: 57539 - protein, 7 aa, synthetic construct
TVNKANG

SEQ ID NO: 57540 - protein, 7 aa, synthetic construct
KVNHVKD

SEQ ID NO: 57541 - protein, 7 aa, synthetic construct
GQSQRTM

SEQ ID NO: 57542 - protein, 7 aa, synthetic construct
VTKGNRE

SEQ ID NO: 57543 - protein, 7 aa, synthetic construct
QKRVIEL

SEQ ID NO: 57544 - protein, 7 aa, synthetic construct
IIGPAKP

SEQ ID NO: 57545 - protein, 7 aa, synthetic construct
TNGKHAI

SEQ ID NO: 57546 - protein, 7 aa, synthetic construct
DLRTSKH

SEQ ID NO: 57547 - protein, 7 aa, synthetic construct
REGLWTG

SEQ ID NO: 57548 - protein, 7 aa, synthetic construct
PTKTNMG

SEQ ID NO: 57549 - protein, 7 aa, synthetic construct
LPYNSLA

SEQ ID NO: 57550 - protein, 7 aa, synthetic construct
SNTRSYP

SEQ ID NO: 57551 - protein, 7 aa, synthetic construct
WGNYSKV

SEQ ID NO: 57552 - protein, 7 aa, synthetic construct
SVLQKAT

SEQ ID NO: 57553 - protein, 7 aa, synthetic construct
KVNSGSS

SEQ ID NO: 57554 - protein, 7 aa, synthetic construct
KMGNPTT

SEQ ID NO: 57555 - protein, 7 aa, synthetic construct
SKTQMMA

SEQ ID NO: 57556 - protein, 7 aa, synthetic construct
GRHYSDA

SEQ ID NO: 57557 - protein, 7 aa, synthetic construct
IKGQEEP

SEQ ID NO: 57558 - protein, 7 aa, synthetic construct
KPVTGTA

SEQ ID NO: 57559 - protein, 7 aa, synthetic construct
NHSRQNP

SEQ ID NO: 57560 - protein, 7 aa, synthetic construct
SSQKPGT

SEQ ID NO: 57561 - protein, 7 aa, synthetic construct
LMGKNNV

SEQ ID NO: 57562 - protein, 7 aa, synthetic construct
KNPGPDP

SEQ ID NO: 57563 - protein, 7 aa, synthetic construct
KVNTVAA

SEQ ID NO: 57564 - protein, 7 aa, synthetic construct
WKQQHVQ

SEQ ID NO: 57565 - protein, 7 aa, synthetic construct
TVHVKHN

SEQ ID NO: 57566 - protein, 7 aa, synthetic construct
GSHQQQT

SEQ ID NO: 57567 - protein, 7 aa, synthetic construct
QSGLAPY

SEQ ID NO: 57568 - protein, 7 aa, synthetic construct
QPTAKVD

SEQ ID NO: 57569 - protein, 7 aa, synthetic construct
ASGAVTR

SEQ ID NO: 57570 - protein, 7 aa, synthetic construct
RKEGDER

SEQ ID NO: 57571 - protein, 7 aa, synthetic construct
NMPGWAA

SEQ ID NO: 57572 - protein, 7 aa, synthetic construct
KAQYEAK

SEQ ID NO: 57573 - protein, 7 aa, synthetic construct
KQGTGGP

SEQ ID NO: 57574 - protein, 7 aa, synthetic construct
TWGHNKD

SEQ ID NO: 57575 - protein, 7 aa, synthetic construct
LQKTINA

SEQ ID NO: 57576 - protein, 7 aa, synthetic construct
VNAMAKG

SEQ ID NO: 57577 - protein, 7 aa, synthetic construct
TWPKGSS

SEQ ID NO: 57578 - protein, 7 aa, synthetic construct
TARGLGN

SEQ ID NO: 57579 - protein, 7 aa, synthetic construct
HHSSGSI

SEQ ID NO: 57580 - protein, 7 aa, synthetic construct
PKRSDDT

SEQ ID NO: 57581 - protein, 7 aa, synthetic construct
RSGTTEP

SEQ ID NO: 57582 - protein, 7 aa, synthetic construct
RSGGSDM

SEQ ID NO: 57583 - protein, 7 aa, synthetic construct
GRQNVSG

SEQ ID NO: 57584 - protein, 7 aa, synthetic construct
PRAQVSP

SEQ ID NO: 57585 - protein, 7 aa, synthetic construct
TQYKSDT

SEQ ID NO: 57586 - protein, 7 aa, synthetic construct
KPNSSST

SEQ ID NO: 57587 - protein, 7 aa, synthetic construct
RAQGEKW

SEQ ID NO: 57588 - protein, 7 aa, synthetic construct
ALKQQMG

SEQ ID NO: 57589 - protein, 7 aa, synthetic construct
QPSTTYM

SEQ ID NO: 57590 - protein, 7 aa, synthetic construct
NQYGSGP

SEQ ID NO: 57591 - protein, 7 aa, synthetic construct
KTQSGVG

SEQ ID NO: 57592 - protein, 7 aa, synthetic construct
TPNAGGR

SEQ ID NO: 57593 - protein, 7 aa, synthetic construct
KPPATHW

SEQ ID NO: 57594 - protein, 7 aa, synthetic construct
HGEKGLQ

SEQ ID NO: 57595 - protein, 7 aa, synthetic construct
DGKFDKA

SEQ ID NO: 57596 - protein, 7 aa, synthetic construct
IKHDGKS

SEQ ID NO: 57597 - protein, 7 aa, synthetic construct
HPAHTRL

SEQ ID NO: 57598 - protein, 7 aa, synthetic construct
LAKQGPI

SEQ ID NO: 57599 - protein, 7 aa, synthetic construct
KGNMAQP

SEQ ID NO: 57600 - protein, 7 aa, synthetic construct
APVPHRG

SEQ ID NO: 57601 - protein, 7 aa, synthetic construct
RAHMTQT

SEQ ID NO: 57602 - protein, 7 aa, synthetic construct
SYPRAPN

SEQ ID NO: 57603 - protein, 7 aa, synthetic construct
NTTKSAA

SEQ ID NO: 57604 - protein, 7 aa, synthetic construct
KQRDTSV

SEQ ID NO: 57605 - protein, 7 aa, synthetic construct
LPKASTV

SEQ ID NO: 57606 - protein, 7 aa, synthetic construct
AMHKKNE

SEQ ID NO: 57607 - protein, 7 aa, synthetic construct
SVPHNGP

SEQ ID NO: 57608 - protein, 7 aa, synthetic construct
NGPLNIK

SEQ ID NO: 57609 - protein, 7 aa, synthetic construct
ETKHFAM

SEQ ID NO: 57610 - protein, 7 aa, synthetic construct
VKMAPGL

SEQ ID NO: 57611 - protein, 7 aa, synthetic construct
HKNYTND

SEQ ID NO: 57612 - protein, 7 aa, synthetic construct
TGREASH

SEQ ID NO: 57613 - protein, 7 aa, synthetic construct
FKDPREG

SEQ ID NO: 57614 - protein, 7 aa, synthetic construct
TPNIKEI

SEQ ID NO: 57615 - protein, 7 aa, synthetic construct
KVQNATG

SEQ ID NO: 57616 - protein, 7 aa, synthetic construct
QNKSTEG

SEQ ID NO: 57617 - protein, 7 aa, synthetic construct
GTRDFLL

SEQ ID NO: 57618 - protein, 7 aa, synthetic construct
TATSASI

SEQ ID NO: 57619 - protein, 7 aa, synthetic construct
NNLTPTI

SEQ ID NO: 57620 - protein, 7 aa, synthetic construct
SKSNSAV

SEQ ID NO: 57621 - protein, 7 aa, synthetic construct
TSGMKQA

SEQ ID NO: 57622 - protein, 7 aa, synthetic construct
TPRPTYT

SEQ ID NO: 57623 - protein, 7 aa, synthetic construct
YLNHLGK

SEQ ID NO: 57624 - protein, 7 aa, synthetic construct
KYSSATS

SEQ ID NO: 57625 - protein, 7 aa, synthetic construct
RVHRVEG

SEQ ID NO: 57626 - protein, 7 aa, synthetic construct
KQTNSQT

SEQ ID NO: 57627 - protein, 7 aa, synthetic construct
KAASENS

SEQ ID NO: 57628 - protein, 7 aa, synthetic construct
IKKWPQE

SEQ ID NO: 57629 - protein, 7 aa, synthetic construct
QNLTGIV

SEQ ID NO: 57630 - protein, 7 aa, synthetic construct
RADHRPQ

SEQ ID NO: 57631 - protein, 7 aa, synthetic construct
KYAGNQV

SEQ ID NO: 57632 - protein, 7 aa, synthetic construct
QFSGMKT

SEQ ID NO: 57633 - protein, 7 aa, synthetic construct
QAKSSQP

SEQ ID NO: 57634 - protein, 7 aa, synthetic construct
GMSKVTG

SEQ ID NO: 57635 - protein, 7 aa, synthetic construct
WNQLSVG

SEQ ID NO: 57636 - protein, 7 aa, synthetic construct
GRQTLEL

SEQ ID NO: 57637 - protein, 7 aa, synthetic construct
HVGVFNA

SEQ ID NO: 57638 - protein, 7 aa, synthetic construct
PDTVSAS

SEQ ID NO: 57639 - protein, 7 aa, synthetic construct
GQIHSSG

SEQ ID NO: 57640 - protein, 7 aa, synthetic construct
RVQQGTD

SEQ ID NO: 57641 - protein, 7 aa, synthetic construct
KPVTNEN

SEQ ID NO: 57642 - protein, 7 aa, synthetic construct
YHNHGTE

SEQ ID NO: 57643 - protein, 7 aa, synthetic construct
YGSSLKS

SEQ ID NO: 57644 - protein, 7 aa, synthetic construct
NQERNSG

SEQ ID NO: 57645 - protein, 7 aa, synthetic construct
KGIIGAG

SEQ ID NO: 57646 - protein, 7 aa, synthetic construct
APPSKNG

SEQ ID NO: 57647 - protein, 7 aa, synthetic construct
SGQSTTA

SEQ ID NO: 57648 - protein, 7 aa, synthetic construct
HVHQIRG

SEQ ID NO: 57649 - protein, 7 aa, synthetic construct
RLDRATQ

SEQ ID NO: 57650 - protein, 7 aa, synthetic construct
VLTHKIN

SEQ ID NO: 57651 - protein, 7 aa, synthetic construct
RAPVTHG

SEQ ID NO: 57652 - protein, 7 aa, synthetic construct
DLATRNG

SEQ ID NO: 57653 - protein, 7 aa, synthetic construct
DHSGRMH

SEQ ID NO: 57654 - protein, 7 aa, synthetic construct
QRGAYQA

SEQ ID NO: 57655 - protein, 7 aa, synthetic construct
RGSPDAY

SEQ ID NO: 57656 - protein, 7 aa, synthetic construct
MAMHKTL

SEQ ID NO: 57657 - protein, 7 aa, synthetic construct
STKQQNG

SEQ ID NO: 57658 - protein, 7 aa, synthetic construct
EKNKGDY

SEQ ID NO: 57659 - protein, 7 aa, synthetic construct
NLLLREP

SEQ ID NO: 57660 - protein, 7 aa, synthetic construct
MIGLHDR

SEQ ID NO: 57661 - protein, 7 aa, synthetic construct
QHGVRQI

SEQ ID NO: 57662 - protein, 7 aa, synthetic construct
FKGMMSA

SEQ ID NO: 57663 - protein, 7 aa, synthetic construct
SSSHHMV

SEQ ID NO: 57664 - protein, 7 aa, synthetic construct
TSVHTMH

SEQ ID NO: 57665 - protein, 7 aa, synthetic construct
STSQVVK

SEQ ID NO: 57666 - protein, 7 aa, synthetic construct
TPTHLVN

SEQ ID NO: 57667 - protein, 7 aa, synthetic construct
PVQGKVF

SEQ ID NO: 57668 - protein, 7 aa, synthetic construct
KQAGMSI

SEQ ID NO: 57669 - protein, 7 aa, synthetic construct
PGSKMAG

SEQ ID NO: 57670 - protein, 7 aa, synthetic construct
AHSNQLP

SEQ ID NO: 57671 - protein, 7 aa, synthetic construct
FERHNNE

SEQ ID NO: 57672 - protein, 7 aa, synthetic construct
MQYKSTF

SEQ ID NO: 57673 - protein, 7 aa, synthetic construct
FQNTGAK

SEQ ID NO: 57674 - protein, 7 aa, synthetic construct
QSVHFGG

SEQ ID NO: 57675 - protein, 7 aa, synthetic construct
HVQNRQP

SEQ ID NO: 57676 - protein, 7 aa, synthetic construct
FRGGVLP

SEQ ID NO: 57677 - protein, 7 aa, synthetic construct
SHQVMKN

SEQ ID NO: 57678 - protein, 7 aa, synthetic construct
NAKNISH

SEQ ID NO: 57679 - protein, 7 aa, synthetic construct
MSTGKNT

SEQ ID NO: 57680 - protein, 7 aa, synthetic construct
YGGYNVG

SEQ ID NO: 57681 - protein, 7 aa, synthetic construct
VKAHNMA

SEQ ID NO: 57682 - protein, 7 aa, synthetic construct
MGDRAHR

SEQ ID NO: 57683 - protein, 7 aa, synthetic construct
LPAFRVE

SEQ ID NO: 57684 - protein, 7 aa, synthetic construct
NFKPGSH

SEQ ID NO: 57685 - protein, 7 aa, synthetic construct
LPVFSGD

SEQ ID NO: 57686 - protein, 7 aa, synthetic construct
FGIKLEQ

SEQ ID NO: 57687 - protein, 7 aa, synthetic construct
HWDKASA

SEQ ID NO: 57688 - protein, 7 aa, synthetic construct
PVGQTVR

SEQ ID NO: 57689 - protein, 7 aa, synthetic construct
RSSADVK

SEQ ID NO: 57690 - protein, 7 aa, synthetic construct
RRPLGDD

SEQ ID NO: 57691 - protein, 7 aa, synthetic construct
KTPSGAV

SEQ ID NO: 57692 - protein, 7 aa, synthetic construct
IKAMHQE

SEQ ID NO: 57693 - protein, 7 aa, synthetic construct
APMRAGT

SEQ ID NO: 57694 - protein, 7 aa, synthetic construct
QQKSPAS

SEQ ID NO: 57695 - protein, 7 aa, synthetic construct
YQAHTSM

SEQ ID NO: 57696 - protein, 7 aa, synthetic construct
RNSKEAV

SEQ ID NO: 57697 - protein, 7 aa, synthetic construct
DGRKFEA

SEQ ID NO: 57698 - protein, 7 aa, synthetic construct
EGFKVRD

SEQ ID NO: 57699 - protein, 7 aa, synthetic construct
IYQGSNS

SEQ ID NO: 57700 - protein, 7 aa, synthetic construct
LMPGGSA

SEQ ID NO: 57701 - protein, 7 aa, synthetic construct
HKSSNRD

SEQ ID NO: 57702 - protein, 7 aa, synthetic construct
TPQYASK

SEQ ID NO: 57703 - protein, 7 aa, synthetic construct
DKRMNTY

SEQ ID NO: 57704 - protein, 7 aa, synthetic construct
ITRSAHD

SEQ ID NO: 57705 - protein, 7 aa, synthetic construct
ISQASSN

SEQ ID NO: 57706 - protein, 7 aa, synthetic construct
VDGRGIK

SEQ ID NO: 57707 - protein, 7 aa, synthetic construct
RPAVGGG

SEQ ID NO: 57708 - protein, 7 aa, synthetic construct
WKSTREP

SEQ ID NO: 57709 - protein, 7 aa, synthetic construct
YKPNAQN

SEQ ID NO: 57710 - protein, 7 aa, synthetic construct
KSQTGQP

SEQ ID NO: 57711 - protein, 7 aa, synthetic construct
FKVNSAG

SEQ ID NO: 57712 - protein, 7 aa, synthetic construct
EKNGHHT

SEQ ID NO: 57713 - protein, 7 aa, synthetic construct
VGNIHSQ

SEQ ID NO: 57714 - protein, 7 aa, synthetic construct
LGPGHHQ

SEQ ID NO: 57715 - protein, 7 aa, synthetic construct
EHSLGHS

SEQ ID NO: 57716 - protein, 7 aa, synthetic construct
SDGFKTL

SEQ ID NO: 57717 - protein, 7 aa, synthetic construct
NHQMQKF

SEQ ID NO: 57718 - protein, 7 aa, synthetic construct
IDKNKTG

SEQ ID NO: 57719 - protein, 7 aa, synthetic construct
WEDHRAK

SEQ ID NO: 57720 - protein, 7 aa, synthetic construct
MSIVPNS

SEQ ID NO: 57721 - protein, 7 aa, synthetic construct
LTKFQPE

SEQ ID NO: 57722 - protein, 7 aa, synthetic construct
GVNLRQS

SEQ ID NO: 57723 - protein, 7 aa, synthetic construct
LRLREEP

SEQ ID NO: 57724 - protein, 7 aa, synthetic construct
YATNNYK

SEQ ID NO: 57725 - protein, 7 aa, synthetic construct
AQGRSYI

SEQ ID NO: 57726 - protein, 7 aa, synthetic construct
MSSQRGP

SEQ ID NO: 57727 - protein, 7 aa, synthetic construct
NTRTNAA

SEQ ID NO: 57728 - protein, 7 aa, synthetic construct
FNNKTQA

SEQ ID NO: 57729 - protein, 7 aa, synthetic construct
LSPGGFK

SEQ ID NO: 57730 - protein, 7 aa, synthetic construct
LPRTNTF

SEQ ID NO: 57731 - protein, 7 aa, synthetic construct
NVPIAVS

SEQ ID NO: 57732 - protein, 7 aa, synthetic construct
QGIMSPA

SEQ ID NO: 57733 - protein, 7 aa, synthetic construct
SPTHSTA

SEQ ID NO: 57734 - protein, 7 aa, synthetic construct
KFGGNGT

SEQ ID NO: 57735 - protein, 7 aa, synthetic construct
DQQRISS

SEQ ID NO: 57736 - protein, 7 aa, synthetic construct
MSPVRQA

SEQ ID NO: 57737 - protein, 7 aa, synthetic construct
RQEGGSA

SEQ ID NO: 57738 - protein, 7 aa, synthetic construct
WREALSG

SEQ ID NO: 57739 - protein, 7 aa, synthetic construct
AITNGRG

SEQ ID NO: 57740 - protein, 7 aa, synthetic construct
VGQQKVA

SEQ ID NO: 57741 - protein, 7 aa, synthetic construct
QTRIAND

SEQ ID NO: 57742 - protein, 7 aa, synthetic construct
QPYGQQS

SEQ ID NO: 57743 - protein, 7 aa, synthetic construct
TDMLQHK

SEQ ID NO: 57744 - protein, 7 aa, synthetic construct
TQTKGLT

SEQ ID NO: 57745 - protein, 7 aa, synthetic construct
SAKGNSE

SEQ ID NO: 57746 - protein, 7 aa, synthetic construct
FPNYNKS

SEQ ID NO: 57747 - protein, 7 aa, synthetic construct
DHKSPLQ

SEQ ID NO: 57748 - protein, 7 aa, synthetic construct
KDAKVAV

SEQ ID NO: 57749 - protein, 7 aa, synthetic construct
NGKSTGA

SEQ ID NO: 57750 - protein, 7 aa, synthetic construct
PKGSSVG

SEQ ID NO: 57751 - protein, 7 aa, synthetic construct
STQTTQF

SEQ ID NO: 57752 - protein, 7 aa, synthetic construct
KHTLSVA

SEQ ID NO: 57753 - protein, 7 aa, synthetic construct
TITHIGA

SEQ ID NO: 57754 - protein, 7 aa, synthetic construct
ARDLRPA

SEQ ID NO: 57755 - protein, 7 aa, synthetic construct
TNLVKYG

SEQ ID NO: 57756 - protein, 7 aa, synthetic construct
EGKKGMM

SEQ ID NO: 57757 - protein, 7 aa, synthetic construct
NKGQTDH

SEQ ID NO: 57758 - protein, 7 aa, synthetic construct
LKMPSSA

SEQ ID NO: 57759 - protein, 7 aa, synthetic construct
PIRSGLN

SEQ ID NO: 57760 - protein, 7 aa, synthetic construct
WTPMNRD

SEQ ID NO: 57761 - protein, 7 aa, synthetic construct
GPYVNAP

SEQ ID NO: 57762 - protein, 7 aa, synthetic construct
VAKTSQS

SEQ ID NO: 57763 - protein, 7 aa, synthetic construct
MHSKQHV

SEQ ID NO: 57764 - protein, 7 aa, synthetic construct
EQRQSGG

SEQ ID NO: 57765 - protein, 7 aa, synthetic construct
GSGKALV

SEQ ID NO: 57766 - protein, 7 aa, synthetic construct
LNNQPAK

SEQ ID NO: 57767 - protein, 7 aa, synthetic construct
GNKFPGP

SEQ ID NO: 57768 - protein, 7 aa, synthetic construct
INMRRSE

SEQ ID NO: 57769 - protein, 7 aa, synthetic construct
KSASGMA

SEQ ID NO: 57770 - protein, 7 aa, synthetic construct
YQKSNVT

SEQ ID NO: 57771 - protein, 7 aa, synthetic construct
MKIGYGP

SEQ ID NO: 57772 - protein, 7 aa, synthetic construct
NLPHAKM

SEQ ID NO: 57773 - protein, 7 aa, synthetic construct
KLGANTS

SEQ ID NO: 57774 - protein, 7 aa, synthetic construct
LPSVQAN

SEQ ID NO: 57775 - protein, 7 aa, synthetic construct
WPKIKES

SEQ ID NO: 57776 - protein, 7 aa, synthetic construct
KQSNPAA

SEQ ID NO: 57777 - protein, 7 aa, synthetic construct
TPREVHD

SEQ ID NO: 57778 - protein, 7 aa, synthetic construct
LDPWYHE

SEQ ID NO: 57779 - protein, 7 aa, synthetic construct
KEGWKGD

SEQ ID NO: 57780 - protein, 7 aa, synthetic construct
PSPKSGG

SEQ ID NO: 57781 - protein, 7 aa, synthetic construct
RDVGMQG

SEQ ID NO: 57782 - protein, 7 aa, synthetic construct
VSRFNET

SEQ ID NO: 57783 - protein, 7 aa, synthetic construct
TPDRRHL

SEQ ID NO: 57784 - protein, 7 aa, synthetic construct
GTQKSTP

SEQ ID NO: 57785 - protein, 7 aa, synthetic construct
GAPGYGT

SEQ ID NO: 57786 - protein, 7 aa, synthetic construct
RGVKDNV

SEQ ID NO: 57787 - protein, 7 aa, synthetic construct
LETMMSK

SEQ ID NO: 57788 - protein, 7 aa, synthetic construct
SRTASTS

SEQ ID NO: 57789 - protein, 7 aa, synthetic construct
VKQSVNS

SEQ ID NO: 57790 - protein, 7 aa, synthetic construct
PRQAGAG

SEQ ID NO: 57791 - protein, 7 aa, synthetic construct
NAFVNHT

SEQ ID NO: 57792 - protein, 7 aa, synthetic construct
MKQHNAS

SEQ ID NO: 57793 - protein, 7 aa, synthetic construct
SSQNRIF

SEQ ID NO: 57794 - protein, 7 aa, synthetic construct
MREIRAS

SEQ ID NO: 57795 - protein, 7 aa, synthetic construct
QTSNVIR

SEQ ID NO: 57796 - protein, 7 aa, synthetic construct
NGYKPDP

SEQ ID NO: 57797 - protein, 7 aa, synthetic construct
SRDHQPK

SEQ ID NO: 57798 - protein, 7 aa, synthetic construct
KMTSSGS

SEQ ID NO: 57799 - protein, 7 aa, synthetic construct
YKPSVGA

SEQ ID NO: 57800 - protein, 7 aa, synthetic construct
KMRGGAD

SEQ ID NO: 57801 - protein, 7 aa, synthetic construct
TNVSTKG

SEQ ID NO: 57802 - protein, 7 aa, synthetic construct
RQANTNA

SEQ ID NO: 57803 - protein, 7 aa, synthetic construct
AHTGSMG

SEQ ID NO: 57804 - protein, 7 aa, synthetic construct
RNSTNGP

SEQ ID NO: 57805 - protein, 7 aa, synthetic construct
MYKEGPA

SEQ ID NO: 57806 - protein, 7 aa, synthetic construct
INNRHLN

SEQ ID NO: 57807 - protein, 7 aa, synthetic construct
VHNAGML

SEQ ID NO: 57808 - protein, 7 aa, synthetic construct
KIKQRDE

SEQ ID NO: 57809 - protein, 7 aa, synthetic construct
MKMGGQS

SEQ ID NO: 57810 - protein, 7 aa, synthetic construct
LKNFTLS

SEQ ID NO: 57811 - protein, 7 aa, synthetic construct
FVERANG

SEQ ID NO: 57812 - protein, 7 aa, synthetic construct
ELQRAQG

SEQ ID NO: 57813 - protein, 7 aa, synthetic construct
VMGSNQG

SEQ ID NO: 57814 - protein, 7 aa, synthetic construct
LAVMHKG

SEQ ID NO: 57815 - protein, 7 aa, synthetic construct
DKVMGPG

SEQ ID NO: 57816 - protein, 7 aa, synthetic construct
HRPGFPN

SEQ ID NO: 57817 - protein, 7 aa, synthetic construct
RVTNKPE

SEQ ID NO: 57818 - protein, 7 aa, synthetic construct
IGMQKVP

SEQ ID NO: 57819 - protein, 7 aa, synthetic construct
RVGKFDD

SEQ ID NO: 57820 - protein, 7 aa, synthetic construct
GVSYSKV

SEQ ID NO: 57821 - protein, 7 aa, synthetic construct
QRQTSVA

SEQ ID NO: 57822 - protein, 7 aa, synthetic construct
PGTSTYV

SEQ ID NO: 57823 - protein, 7 aa, synthetic construct
RPNDNRD

SEQ ID NO: 57824 - protein, 7 aa, synthetic construct
EVPIRVH

SEQ ID NO: 57825 - protein, 7 aa, synthetic construct
AHVHTQG

SEQ ID NO: 57826 - protein, 7 aa, synthetic construct
MGQTTMM

SEQ ID NO: 57827 - protein, 7 aa, synthetic construct
HMGLNSK

SEQ ID NO: 57828 - protein, 7 aa, synthetic construct
NSHSGNH

SEQ ID NO: 57829 - protein, 7 aa, synthetic construct
GHESRVA

SEQ ID NO: 57830 - protein, 7 aa, synthetic construct
TPATNAH

SEQ ID NO: 57831 - protein, 7 aa, synthetic construct
QIALPVD

SEQ ID NO: 57832 - protein, 7 aa, synthetic construct
IARHEQY

SEQ ID NO: 57833 - protein, 7 aa, synthetic construct
GFNGIKP

SEQ ID NO: 57834 - protein, 7 aa, synthetic construct
VNSTAYP

SEQ ID NO: 57835 - protein, 7 aa, synthetic construct
TRATNSP

SEQ ID NO: 57836 - protein, 7 aa, synthetic construct
YNPIVNP

SEQ ID NO: 57837 - protein, 7 aa, synthetic construct
VQGIKSV

SEQ ID NO: 57838 - protein, 7 aa, synthetic construct
KVMATGY

SEQ ID NO: 57839 - protein, 7 aa, synthetic construct
LGTINKV

SEQ ID NO: 57840 - protein, 7 aa, synthetic construct
MDHKISK

SEQ ID NO: 57841 - protein, 7 aa, synthetic construct
QKEPRPS

SEQ ID NO: 57842 - protein, 7 aa, synthetic construct
DSSKRQY

SEQ ID NO: 57843 - protein, 7 aa, synthetic construct
SRIGTPN

SEQ ID NO: 57844 - protein, 7 aa, synthetic construct
GNMIAHH

SEQ ID NO: 57845 - protein, 7 aa, synthetic construct
NTPRTAP

SEQ ID NO: 57846 - protein, 7 aa, synthetic construct
HFPRPAE

SEQ ID NO: 57847 - protein, 7 aa, synthetic construct
KSPPGNA

SEQ ID NO: 57848 - protein, 7 aa, synthetic construct
LNNQKHA

SEQ ID NO: 57849 - protein, 7 aa, synthetic construct
FPPKSTS

SEQ ID NO: 57850 - protein, 7 aa, synthetic construct
SIPPKLD

SEQ ID NO: 57851 - protein, 7 aa, synthetic construct
NGASIYA

SEQ ID NO: 57852 - protein, 7 aa, synthetic construct
AGAQNRG

SEQ ID NO: 57853 - protein, 7 aa, synthetic construct
PYDKKMG

SEQ ID NO: 57854 - protein, 7 aa, synthetic construct
STKDKVW

SEQ ID NO: 57855 - protein, 7 aa, synthetic construct
QDTDMTK

SEQ ID NO: 57856 - protein, 7 aa, synthetic construct
HRNSADP

SEQ ID NO: 57857 - protein, 7 aa, synthetic construct
QKVAHPQ

SEQ ID NO: 57858 - protein, 7 aa, synthetic construct
MRTDKTE

SEQ ID NO: 57859 - protein, 7 aa, synthetic construct
LPLERPQ

SEQ ID NO: 57860 - protein, 7 aa, synthetic construct
LKPNDQW

SEQ ID NO: 57861 - protein, 7 aa, synthetic construct
GGVYHQA

SEQ ID NO: 57862 - protein, 7 aa, synthetic construct
HKFHETM

SEQ ID NO: 57863 - protein, 7 aa, synthetic construct
GTNKQAG

SEQ ID NO: 57864 - protein, 7 aa, synthetic construct
GHQVKQQ

SEQ ID NO: 57865 - protein, 7 aa, synthetic construct
QKNGKGD

SEQ ID NO: 57866 - protein, 7 aa, synthetic construct
RALNIDR

SEQ ID NO: 57867 - protein, 7 aa, synthetic construct
RNQNSMG

SEQ ID NO: 57868 - protein, 7 aa, synthetic construct
KSAGIGI

SEQ ID NO: 57869 - protein, 7 aa, synthetic construct
MQQFMAG

SEQ ID NO: 57870 - protein, 7 aa, synthetic construct
GRFDGPN

SEQ ID NO: 57871 - protein, 7 aa, synthetic construct
SPGVKQD

SEQ ID NO: 57872 - protein, 7 aa, synthetic construct
PQFKSLN

SEQ ID NO: 57873 - protein, 7 aa, synthetic construct
QKPIQMP

SEQ ID NO: 57874 - protein, 7 aa, synthetic construct
GIHVGTH

SEQ ID NO: 57875 - protein, 7 aa, synthetic construct
MPHVARV

SEQ ID NO: 57876 - protein, 7 aa, synthetic construct
STKNHAY

SEQ ID NO: 57877 - protein, 7 aa, synthetic construct
HAGYKHN

SEQ ID NO: 57878 - protein, 7 aa, synthetic construct
TVNKAAT

SEQ ID NO: 57879 - protein, 7 aa, synthetic construct
GWNGIQH

SEQ ID NO: 57880 - protein, 7 aa, synthetic construct
GNRHDMP

SEQ ID NO: 57881 - protein, 7 aa, synthetic construct
NGGKEKH

SEQ ID NO: 57882 - protein, 7 aa, synthetic construct
PPGNPYR

SEQ ID NO: 57883 - protein, 7 aa, synthetic construct
TDVRRER

SEQ ID NO: 57884 - protein, 7 aa, synthetic construct
SRLESRD

SEQ ID NO: 57885 - protein, 7 aa, synthetic construct
VFPAPEK

SEQ ID NO: 57886 - protein, 7 aa, synthetic construct
HKNSNII

SEQ ID NO: 57887 - protein, 7 aa, synthetic construct
LKVPGHE

SEQ ID NO: 57888 - protein, 7 aa, synthetic construct
RKSDTQN

SEQ ID NO: 57889 - protein, 7 aa, synthetic construct
RPNTSAS

SEQ ID NO: 57890 - protein, 7 aa, synthetic construct
MPERRPI

SEQ ID NO: 57891 - protein, 7 aa, synthetic construct
VMNNSQK

SEQ ID NO: 57892 - protein, 7 aa, synthetic construct
SRSIQVA

SEQ ID NO: 57893 - protein, 7 aa, synthetic construct
MINSISP

SEQ ID NO: 57894 - protein, 7 aa, synthetic construct
LKVQAAD

SEQ ID NO: 57895 - protein, 7 aa, synthetic construct
DRPGIMG

SEQ ID NO: 57896 - protein, 7 aa, synthetic construct
HTSQAIM

SEQ ID NO: 57897 - protein, 7 aa, synthetic construct
NPLKPME

SEQ ID NO: 57898 - protein, 7 aa, synthetic construct
TQKSSNS

SEQ ID NO: 57899 - protein, 7 aa, synthetic construct
RWHAGEP

SEQ ID NO: 57900 - protein, 7 aa, synthetic construct
PHPHASS

SEQ ID NO: 57901 - protein, 7 aa, synthetic construct
MNTARNG

SEQ ID NO: 57902 - protein, 7 aa, synthetic construct
MAKYSEE

SEQ ID NO: 57903 - protein, 7 aa, synthetic construct
MMRGKEF

SEQ ID NO: 57904 - protein, 7 aa, synthetic construct
SFKNKEA

SEQ ID NO: 57905 - protein, 7 aa, synthetic construct
GPMLGLS

SEQ ID NO: 57906 - protein, 7 aa, synthetic construct
DQHHRGG

SEQ ID NO: 57907 - protein, 7 aa, synthetic construct
KTGQMMV

SEQ ID NO: 57908 - protein, 7 aa, synthetic construct
GNGGRNV

SEQ ID NO: 57909 - protein, 7 aa, synthetic construct
FMGSKGS

SEQ ID NO: 57910 - protein, 7 aa, synthetic construct
NNKSNVG

SEQ ID NO: 57911 - protein, 7 aa, synthetic construct
MASSPAP

SEQ ID NO: 57912 - protein, 7 aa, synthetic construct
KKTDSNG

SEQ ID NO: 57913 - protein, 7 aa, synthetic construct
MGQYAAS

SEQ ID NO: 57914 - protein, 7 aa, synthetic construct
KNASGFG

SEQ ID NO: 57915 - protein, 7 aa, synthetic construct
LKSMVDN

SEQ ID NO: 57916 - protein, 7 aa, synthetic construct
KPMTAAG

SEQ ID NO: 57917 - protein, 7 aa, synthetic construct
AVVHKIQ

SEQ ID NO: 57918 - protein, 7 aa, synthetic construct
RQPQSTA

SEQ ID NO: 57919 - protein, 7 aa, synthetic construct
RDNKHVP

SEQ ID NO: 57920 - protein, 7 aa, synthetic construct
VGGQRTA

SEQ ID NO: 57921 - protein, 7 aa, synthetic construct
KGYSSHE

SEQ ID NO: 57922 - protein, 7 aa, synthetic construct
TGRGIND

SEQ ID NO: 57923 - protein, 7 aa, synthetic construct
RPTNAGG

SEQ ID NO: 57924 - protein, 7 aa, synthetic construct
DKDSRGS

SEQ ID NO: 57925 - protein, 7 aa, synthetic construct
IRIGVGH

SEQ ID NO: 57926 - protein, 7 aa, synthetic construct
QKNGANG

SEQ ID NO: 57927 - protein, 7 aa, synthetic construct
QQGKSAP

SEQ ID NO: 57928 - protein, 7 aa, synthetic construct
IHGSRLA

SEQ ID NO: 57929 - protein, 7 aa, synthetic construct
PGDRRPI

SEQ ID NO: 57930 - protein, 7 aa, synthetic construct
MRSGTPV

SEQ ID NO: 57931 - protein, 7 aa, synthetic construct
SMRTNNS

SEQ ID NO: 57932 - protein, 7 aa, synthetic construct
FRSVASN

SEQ ID NO: 57933 - protein, 7 aa, synthetic construct
DVSGSKE

SEQ ID NO: 57934 - protein, 7 aa, synthetic construct
GTNGKVG

SEQ ID NO: 57935 - protein, 7 aa, synthetic construct
KQSSTQT

SEQ ID NO: 57936 - protein, 7 aa, synthetic construct
NYQRPEM

SEQ ID NO: 57937 - protein, 7 aa, synthetic construct
NVTNHQM

SEQ ID NO: 57938 - protein, 7 aa, synthetic construct
HMSAMPP

SEQ ID NO: 57939 - protein, 7 aa, synthetic construct
TKLGGKD

SEQ ID NO: 57940 - protein, 7 aa, synthetic construct
NKNTPGF

SEQ ID NO: 57941 - protein, 7 aa, synthetic construct
RPPTSGS

SEQ ID NO: 57942 - protein, 7 aa, synthetic construct
KGMTNPA

SEQ ID NO: 57943 - protein, 7 aa, synthetic construct
QKQQIGP

SEQ ID NO: 57944 - protein, 7 aa, synthetic construct
VKTPNGG

SEQ ID NO: 57945 - protein, 7 aa, synthetic construct
NFNHNAG

SEQ ID NO: 57946 - protein, 7 aa, synthetic construct
SGKTIAN

SEQ ID NO: 57947 - protein, 7 aa, synthetic construct
ADVKTHR

SEQ ID NO: 57948 - protein, 7 aa, synthetic construct
QSAQRSG

SEQ ID NO: 57949 - protein, 7 aa, synthetic construct
AATYNAP

SEQ ID NO: 57950 - protein, 7 aa, synthetic construct
HSQKNPS

SEQ ID NO: 57951 - protein, 7 aa, synthetic construct
RGFNEVA

SEQ ID NO: 57952 - protein, 7 aa, synthetic construct
TSNHSAL

SEQ ID NO: 57953 - protein, 7 aa, synthetic construct
NEKGANI

SEQ ID NO: 57954 - protein, 7 aa, synthetic construct
SHGDMRP

SEQ ID NO: 57955 - protein, 7 aa, synthetic construct
PSMNGNP

SEQ ID NO: 57956 - protein, 7 aa, synthetic construct
KNPTTVG

SEQ ID NO: 57957 - protein, 7 aa, synthetic construct
AQRSAGM

SEQ ID NO: 57958 - protein, 7 aa, synthetic construct
FGGHPEI

SEQ ID NO: 57959 - protein, 7 aa, synthetic construct
NSTRTQA

SEQ ID NO: 57960 - protein, 7 aa, synthetic construct
LKPQNTL

SEQ ID NO: 57961 - protein, 7 aa, synthetic construct
RPPIPSI

SEQ ID NO: 57962 - protein, 7 aa, synthetic construct
RAGISEP

SEQ ID NO: 57963 - protein, 7 aa, synthetic construct
SGPTVVG

SEQ ID NO: 57964 - protein, 7 aa, synthetic construct
NRASTMA

SEQ ID NO: 57965 - protein, 7 aa, synthetic construct
DRSHGHN

SEQ ID NO: 57966 - protein, 7 aa, synthetic construct
YTTFHVD

SEQ ID NO: 57967 - protein, 7 aa, synthetic construct
LNNPQRD

SEQ ID NO: 57968 - protein, 7 aa, synthetic construct
FSDKNRV

SEQ ID NO: 57969 - protein, 7 aa, synthetic construct
PHTQKNG

SEQ ID NO: 57970 - protein, 7 aa, synthetic construct
MGKSAVA

SEQ ID NO: 57971 - protein, 7 aa, synthetic construct
IRETNHL

SEQ ID NO: 57972 - protein, 7 aa, synthetic construct
QKEHHRE

SEQ ID NO: 57973 - protein, 7 aa, synthetic construct
VEKRPLY

SEQ ID NO: 57974 - protein, 7 aa, synthetic construct
ALLGGNR

SEQ ID NO: 57975 - protein, 7 aa, synthetic construct
GAHRAHD

SEQ ID NO: 57976 - protein, 7 aa, synthetic construct
HMNRHPD

SEQ ID NO: 57977 - protein, 7 aa, synthetic construct
IGRTYQA

SEQ ID NO: 57978 - protein, 7 aa, synthetic construct
NNVQVQS

SEQ ID NO: 57979 - protein, 7 aa, synthetic construct
RSVNMNQ

SEQ ID NO: 57980 - protein, 7 aa, synthetic construct
AFQAQPG

SEQ ID NO: 57981 - protein, 7 aa, synthetic construct
KITQRDD

SEQ ID NO: 57982 - protein, 7 aa, synthetic construct
VPMNKFS

SEQ ID NO: 57983 - protein, 7 aa, synthetic construct
SVNFTAM

SEQ ID NO: 57984 - protein, 7 aa, synthetic construct
LAGHIAM

SEQ ID NO: 57985 - protein, 7 aa, synthetic construct
INVQPAR

SEQ ID NO: 57986 - protein, 7 aa, synthetic construct
QSTRSQS

SEQ ID NO: 57987 - protein, 7 aa, synthetic construct
PQMRHTA

SEQ ID NO: 57988 - protein, 7 aa, synthetic construct
LKAGTPQ

SEQ ID NO: 57989 - protein, 7 aa, synthetic construct
NGANRNH

SEQ ID NO: 57990 - protein, 7 aa, synthetic construct
RMNIGQD

SEQ ID NO: 57991 - protein, 7 aa, synthetic construct
HMSHNAA

SEQ ID NO: 57992 - protein, 7 aa, synthetic construct
YKNSPTG

SEQ ID NO: 57993 - protein, 7 aa, synthetic construct
VNSGQNY

SEQ ID NO: 57994 - protein, 7 aa, synthetic construct
RGQTNIG

SEQ ID NO: 57995 - protein, 7 aa, synthetic construct
SQIGTAG

SEQ ID NO: 57996 - protein, 7 aa, synthetic construct
PGPAHQM

SEQ ID NO: 57997 - protein, 7 aa, synthetic construct
NKTNMIN

SEQ ID NO: 57998 - protein, 7 aa, synthetic construct
TKVEFNS

SEQ ID NO: 57999 - protein, 7 aa, synthetic construct
MHGLPNQ

SEQ ID NO: 58000 - protein, 7 aa, synthetic construct
VHSLMVG

SEQ ID NO: 58001 - protein, 7 aa, synthetic construct
FKPSGMA

SEQ ID NO: 58002 - protein, 7 aa, synthetic construct
NGYTVAH

SEQ ID NO: 58003 - protein, 7 aa, synthetic construct
YHSRTVQ

SEQ ID NO: 58004 - protein, 7 aa, synthetic construct
SKTASVL

SEQ ID NO: 58005 - protein, 7 aa, synthetic construct
TRMQRVE

SEQ ID NO: 58006 - protein, 7 aa, synthetic construct
FASGQAV

SEQ ID NO: 58007 - protein, 7 aa, synthetic construct
HPMHALS

SEQ ID NO: 58008 - protein, 7 aa, synthetic construct
GGDSGQR

SEQ ID NO: 58009 - protein, 7 aa, synthetic construct
KNSPSNV

SEQ ID NO: 58010 - protein, 7 aa, synthetic construct
SRATLEG

SEQ ID NO: 58011 - protein, 7 aa, synthetic construct
ELGHGRG

SEQ ID NO: 58012 - protein, 7 aa, synthetic construct
ATGTSQP

SEQ ID NO: 58013 - protein, 7 aa, synthetic construct
RPPNQQA

SEQ ID NO: 58014 - protein, 7 aa, synthetic construct
RQDGHKY

SEQ ID NO: 58015 - protein, 7 aa, synthetic construct
NSKSMTF

SEQ ID NO: 58016 - protein, 7 aa, synthetic construct
DTRSLQF

SEQ ID NO: 58017 - protein, 7 aa, synthetic construct
PGPAMKP

SEQ ID NO: 58018 - protein, 7 aa, synthetic construct
NKMPMIS

SEQ ID NO: 58019 - protein, 7 aa, synthetic construct
GQVKDTP

SEQ ID NO: 58020 - protein, 7 aa, synthetic construct
HKPGKEM

SEQ ID NO: 58021 - protein, 7 aa, synthetic construct
THQNKGS

SEQ ID NO: 58022 - protein, 7 aa, synthetic construct
VVKNGAA

SEQ ID NO: 58023 - protein, 7 aa, synthetic construct
FEGWGAA

SEQ ID NO: 58024 - protein, 7 aa, synthetic construct
VEAGHKS

SEQ ID NO: 58025 - protein, 7 aa, synthetic construct
RLHQNTT

SEQ ID NO: 58026 - protein, 7 aa, synthetic construct
DPQHQIA

SEQ ID NO: 58027 - protein, 7 aa, synthetic construct
HYIGAKT

SEQ ID NO: 58028 - protein, 7 aa, synthetic construct
PKTTSNG

SEQ ID NO: 58029 - protein, 7 aa, synthetic construct
VKYSREP

SEQ ID NO: 58030 - protein, 7 aa, synthetic construct
FKAQKDG

SEQ ID NO: 58031 - protein, 7 aa, synthetic construct
LQKRGVD

SEQ ID NO: 58032 - protein, 7 aa, synthetic construct
FVPPLGG

SEQ ID NO: 58033 - protein, 7 aa, synthetic construct
NIQKGSA

SEQ ID NO: 58034 - protein, 7 aa, synthetic construct
APMKSAG

SEQ ID NO: 58035 - protein, 7 aa, synthetic construct
GALRFPG

SEQ ID NO: 58036 - protein, 7 aa, synthetic construct
LQASMAG

SEQ ID NO: 58037 - protein, 7 aa, synthetic construct
FSPHRNE

SEQ ID NO: 58038 - protein, 7 aa, synthetic construct
GFGTPHA

SEQ ID NO: 58039 - protein, 7 aa, synthetic construct
THIGKTP

SEQ ID NO: 58040 - protein, 7 aa, synthetic construct
IHPDHRT

SEQ ID NO: 58041 - protein, 7 aa, synthetic construct
GFKQNQG

SEQ ID NO: 58042 - protein, 7 aa, synthetic construct
LATVRQP

SEQ ID NO: 58043 - protein, 7 aa, synthetic construct
AEHHVHS

SEQ ID NO: 58044 - protein, 7 aa, synthetic construct
NSKSTKE

SEQ ID NO: 58045 - protein, 7 aa, synthetic construct
KSQTSSA

SEQ ID NO: 58046 - protein, 7 aa, synthetic construct
RPIIQQE

SEQ ID NO: 58047 - protein, 7 aa, synthetic construct
RKDPIQG

SEQ ID NO: 58048 - protein, 7 aa, synthetic construct
SIVHRHD

SEQ ID NO: 58049 - protein, 7 aa, synthetic construct
MFGKEPF

SEQ ID NO: 58050 - protein, 7 aa, synthetic construct
IRHAGSH

SEQ ID NO: 58051 - protein, 7 aa, synthetic construct
KMSIGEM

SEQ ID NO: 58052 - protein, 7 aa, synthetic construct
VRQTVGD

SEQ ID NO: 58053 - protein, 7 aa, synthetic construct
NKAIKDW

SEQ ID NO: 58054 - protein, 7 aa, synthetic construct
QPKQAPH

SEQ ID NO: 58055 - protein, 7 aa, synthetic construct
ISAEKHV

SEQ ID NO: 58056 - protein, 7 aa, synthetic construct
KMDSHFT

SEQ ID NO: 58057 - protein, 7 aa, synthetic construct
QMKMAKD

SEQ ID NO: 58058 - protein, 7 aa, synthetic construct
GEIQPKP

SEQ ID NO: 58059 - protein, 7 aa, synthetic construct
MMPRREH

SEQ ID NO: 58060 - protein, 7 aa, synthetic construct
GNQRAET

SEQ ID NO: 58061 - protein, 7 aa, synthetic construct
NIRFPDT

SEQ ID NO: 58062 - protein, 7 aa, synthetic construct
KPHLQPY

SEQ ID NO: 58063 - protein, 7 aa, synthetic construct
PRNSSAD

SEQ ID NO: 58064 - protein, 7 aa, synthetic construct
KTYEAPV

SEQ ID NO: 58065 - protein, 7 aa, synthetic construct
KKLGEVS

SEQ ID NO: 58066 - protein, 7 aa, synthetic construct
NSHMQGV

SEQ ID NO: 58067 - protein, 7 aa, synthetic construct
QHAIMKS

SEQ ID NO: 58068 - protein, 7 aa, synthetic construct
GDHGRGS

SEQ ID NO: 58069 - protein, 7 aa, synthetic construct
KSNNKDD

SEQ ID NO: 58070 - protein, 7 aa, synthetic construct
YGGHMQP

SEQ ID NO: 58071 - protein, 7 aa, synthetic construct
LDRQRPL

SEQ ID NO: 58072 - protein, 7 aa, synthetic construct
YKREEVL

SEQ ID NO: 58073 - protein, 7 aa, synthetic construct
PKSANAA

SEQ ID NO: 58074 - protein, 7 aa, synthetic construct
MNPKTTA

SEQ ID NO: 58075 - protein, 7 aa, synthetic construct
GGKVTMQ

SEQ ID NO: 58076 - protein, 7 aa, synthetic construct
SSTHHME

SEQ ID NO: 58077 - protein, 7 aa, synthetic construct
IARHHDD

SEQ ID NO: 58078 - protein, 7 aa, synthetic construct
SVGHSGD

SEQ ID NO: 58079 - protein, 7 aa, synthetic construct
SGSRHEV

SEQ ID NO: 58080 - protein, 7 aa, synthetic construct
FLQPKAD

SEQ ID NO: 58081 - protein, 7 aa, synthetic construct
PKFTLNE

SEQ ID NO: 58082 - protein, 7 aa, synthetic construct
FFGRQDG

SEQ ID NO: 58083 - protein, 7 aa, synthetic construct
PRNNREP

SEQ ID NO: 58084 - protein, 7 aa, synthetic construct
QPGQGTS

SEQ ID NO: 58085 - protein, 7 aa, synthetic construct
RVGGDMP

SEQ ID NO: 58086 - protein, 7 aa, synthetic construct
NKKDAVS

SEQ ID NO: 58087 - protein, 7 aa, synthetic construct
KTSASGG

SEQ ID NO: 58088 - protein, 7 aa, synthetic construct
RSNHGEH

SEQ ID NO: 58089 - protein, 7 aa, synthetic construct
IKDYQTT

SEQ ID NO: 58090 - protein, 7 aa, synthetic construct
KSSAPTM

SEQ ID NO: 58091 - protein, 7 aa, synthetic construct
GAQTDRG

SEQ ID NO: 58092 - protein, 7 aa, synthetic construct
FKNGSQP

SEQ ID NO: 58093 - protein, 7 aa, synthetic construct
KNDWGQP

SEQ ID NO: 58094 - protein, 7 aa, synthetic construct
YNGPTMG

SEQ ID NO: 58095 - protein, 7 aa, synthetic construct
GNAPTFK

SEQ ID NO: 58096 - protein, 7 aa, synthetic construct
KKNDSEG

SEQ ID NO: 58097 - protein, 7 aa, synthetic construct
GMIMSTP

SEQ ID NO: 58098 - protein, 7 aa, synthetic construct
QGPSKSA

SEQ ID NO: 58099 - protein, 7 aa, synthetic construct
PMKGSVG

SEQ ID NO: 58100 - protein, 7 aa, synthetic construct
STKQDHY

SEQ ID NO: 58101 - protein, 7 aa, synthetic construct
PPIHPEQ

SEQ ID NO: 58102 - protein, 7 aa, synthetic construct
FRDTTNI

SEQ ID NO: 58103 - protein, 7 aa, synthetic construct
QPKMQPS

SEQ ID NO: 58104 - protein, 7 aa, synthetic construct
INKHHVI

SEQ ID NO: 58105 - protein, 7 aa, synthetic construct
QSPTRGG

SEQ ID NO: 58106 - protein, 7 aa, synthetic construct
NLSNPPM

SEQ ID NO: 58107 - protein, 7 aa, synthetic construct
YIGGAPL

SEQ ID NO: 58108 - protein, 7 aa, synthetic construct
GMTGRGS

SEQ ID NO: 58109 - protein, 7 aa, synthetic construct
KENMSKP

SEQ ID NO: 58110 - protein, 7 aa, synthetic construct
AFDPRTT

SEQ ID NO: 58111 - protein, 7 aa, synthetic construct
QTTQKGG

SEQ ID NO: 58112 - protein, 7 aa, synthetic construct
IETHQQN

SEQ ID NO: 58113 - protein, 7 aa, synthetic construct
TPASHHV

SEQ ID NO: 58114 - protein, 7 aa, synthetic construct
QKPSNVG

SEQ ID NO: 58115 - protein, 7 aa, synthetic construct
KTGSPSA

SEQ ID NO: 58116 - protein, 7 aa, synthetic construct
TGRGNSV

SEQ ID NO: 58117 - protein, 7 aa, synthetic construct
VPYGHGE

SEQ ID NO: 58118 - protein, 7 aa, synthetic construct
GSNKGVV

SEQ ID NO: 58119 - protein, 7 aa, synthetic construct
NMNFEKK

SEQ ID NO: 58120 - protein, 7 aa, synthetic construct
PSHKMLA

SEQ ID NO: 58121 - protein, 7 aa, synthetic construct
QATHNGP

SEQ ID NO: 58122 - protein, 7 aa, synthetic construct
KVASNTA

SEQ ID NO: 58123 - protein, 7 aa, synthetic construct
NTGRDFP

SEQ ID NO: 58124 - protein, 7 aa, synthetic construct
VSPVGGV

SEQ ID NO: 58125 - protein, 7 aa, synthetic construct
QHIKDEG

SEQ ID NO: 58126 - protein, 7 aa, synthetic construct
DPSKAGR

SEQ ID NO: 58127 - protein, 7 aa, synthetic construct
NKNVNAA

SEQ ID NO: 58128 - protein, 7 aa, synthetic construct
RSPMTGM

SEQ ID NO: 58129 - protein, 7 aa, synthetic construct
KKDAGSH

SEQ ID NO: 58130 - protein, 7 aa, synthetic construct
RTASEGK

SEQ ID NO: 58131 - protein, 7 aa, synthetic construct
GHLNGTA

SEQ ID NO: 58132 - protein, 7 aa, synthetic construct
MNPSIVG

SEQ ID NO: 58133 - protein, 7 aa, synthetic construct
TFKAGDS

SEQ ID NO: 58134 - protein, 7 aa, synthetic construct
SPNIGKN

SEQ ID NO: 58135 - protein, 7 aa, synthetic construct
YSPRGQH

SEQ ID NO: 58136 - protein, 7 aa, synthetic construct
YLNKTSM

SEQ ID NO: 58137 - protein, 7 aa, synthetic construct
QKSSAQM

SEQ ID NO: 58138 - protein, 7 aa, synthetic construct
KQVIQES

SEQ ID NO: 58139 - protein, 7 aa, synthetic construct
AKTAIVA

SEQ ID NO: 58140 - protein, 7 aa, synthetic construct
MNRSNQS

SEQ ID NO: 58141 - protein, 7 aa, synthetic construct
QAANRGT

SEQ ID NO: 58142 - protein, 7 aa, synthetic construct
WIKPSSN

SEQ ID NO: 58143 - protein, 7 aa, synthetic construct
SGPTKGV

SEQ ID NO: 58144 - protein, 7 aa, synthetic construct
WIGSNGP

SEQ ID NO: 58145 - protein, 7 aa, synthetic construct
QLNNRSG

SEQ ID NO: 58146 - protein, 7 aa, synthetic construct
TTTHRVP

SEQ ID NO: 58147 - protein, 7 aa, synthetic construct
HMGISKV

SEQ ID NO: 58148 - protein, 7 aa, synthetic construct
KTAVSRD

SEQ ID NO: 58149 - protein, 7 aa, synthetic construct
QQGKFGS

SEQ ID NO: 58150 - protein, 7 aa, synthetic construct
KERGSSV

SEQ ID NO: 58151 - protein, 7 aa, synthetic construct
TRQQTMG

SEQ ID NO: 58152 - protein, 7 aa, synthetic construct
FRGNEPS

SEQ ID NO: 58153 - protein, 7 aa, synthetic construct
TTNGRFS

SEQ ID NO: 58154 - protein, 7 aa, synthetic construct
VTNSKPS

SEQ ID NO: 58155 - protein, 7 aa, synthetic construct
LKGSDHL

SEQ ID NO: 58156 - protein, 7 aa, synthetic construct
DQHGNTH

SEQ ID NO: 58157 - protein, 7 aa, synthetic construct
GQARVIG

SEQ ID NO: 58158 - protein, 7 aa, synthetic construct
LSAKFKE

SEQ ID NO: 58159 - protein, 7 aa, synthetic construct
NELHGAR

SEQ ID NO: 58160 - protein, 7 aa, synthetic construct
AKHSRPE

SEQ ID NO: 58161 - protein, 7 aa, synthetic construct
ANMIQNR

SEQ ID NO: 58162 - protein, 7 aa, synthetic construct
AREMEWL

SEQ ID NO: 58163 - protein, 7 aa, synthetic construct
KPSVVDM

SEQ ID NO: 58164 - protein, 7 aa, synthetic construct
THPKIFA

SEQ ID NO: 58165 - protein, 7 aa, synthetic construct
MLRGSLN

SEQ ID NO: 58166 - protein, 7 aa, synthetic construct
YATRVAP

SEQ ID NO: 58167 - protein, 7 aa, synthetic construct
FAKQGNG

SEQ ID NO: 58168 - protein, 7 aa, synthetic construct
GDRMKDG

SEQ ID NO: 58169 - protein, 7 aa, synthetic construct
IERGRMH

SEQ ID NO: 58170 - protein, 7 aa, synthetic construct
PPTKSNG

SEQ ID NO: 58171 - protein, 7 aa, synthetic construct
YGKPVTN

SEQ ID NO: 58172 - protein, 7 aa, synthetic construct
GQNNPTM

SEQ ID NO: 58173 - protein, 7 aa, synthetic construct
IAAKPYL

SEQ ID NO: 58174 - protein, 7 aa, synthetic construct
VGVAYRG

SEQ ID NO: 58175 - protein, 7 aa, synthetic construct
ESKYGSH

SEQ ID NO: 58176 - protein, 7 aa, synthetic construct
NASKMAD

SEQ ID NO: 58177 - protein, 7 aa, synthetic construct
EASTTKW

SEQ ID NO: 58178 - protein, 7 aa, synthetic construct
DNIRRTT

SEQ ID NO: 58179 - protein, 7 aa, synthetic construct
NTAHHMG

SEQ ID NO: 58180 - protein, 7 aa, synthetic construct
QSHQGVS

SEQ ID NO: 58181 - protein, 7 aa, synthetic construct
TRSQSQV

SEQ ID NO: 58182 - protein, 7 aa, synthetic construct
DNLTLGR

SEQ ID NO: 58183 - protein, 7 aa, synthetic construct
LTHLVRD

SEQ ID NO: 58184 - protein, 7 aa, synthetic construct
AGQYREP

SEQ ID NO: 58185 - protein, 7 aa, synthetic construct
KDKGRLE

SEQ ID NO: 58186 - protein, 7 aa, synthetic construct
VIHHASG

SEQ ID NO: 58187 - protein, 7 aa, synthetic construct
RQQEQHF

SEQ ID NO: 58188 - protein, 7 aa, synthetic construct
QAITGNS

SEQ ID NO: 58189 - protein, 7 aa, synthetic construct
IQMTHRD

SEQ ID NO: 58190 - protein, 7 aa, synthetic construct
SGHHGNM

SEQ ID NO: 58191 - protein, 7 aa, synthetic construct
RFTNGEN

SEQ ID NO: 58192 - protein, 7 aa, synthetic construct
TARQLPD

SEQ ID NO: 58193 - protein, 7 aa, synthetic construct
NMHNLVP

SEQ ID NO: 58194 - protein, 7 aa, synthetic construct
MGDRGRH

SEQ ID NO: 58195 - protein, 7 aa, synthetic construct
WEGNRSV

SEQ ID NO: 58196 - protein, 7 aa, synthetic construct
MKQSVSG

SEQ ID NO: 58197 - protein, 7 aa, synthetic construct
QPGSGKG

SEQ ID NO: 58198 - protein, 7 aa, synthetic construct
GKQSIKD

SEQ ID NO: 58199 - protein, 7 aa, synthetic construct
LVHHSDR

SEQ ID NO: 58200 - protein, 7 aa, synthetic construct
APNYGMG

SEQ ID NO: 58201 - protein, 7 aa, synthetic construct
VSKSSTG

SEQ ID NO: 58202 - protein, 7 aa, synthetic construct
GGGPKAA

SEQ ID NO: 58203 - protein, 7 aa, synthetic construct
REINIKQ

SEQ ID NO: 58204 - protein, 7 aa, synthetic construct
ALKGVFG

SEQ ID NO: 58205 - protein, 7 aa, synthetic construct
DIRMGHV

SEQ ID NO: 58206 - protein, 7 aa, synthetic construct
LSNKMTG

SEQ ID NO: 58207 - protein, 7 aa, synthetic construct
RESHTLL

SEQ ID NO: 58208 - protein, 7 aa, synthetic construct
TVVVRSQ

SEQ ID NO: 58209 - protein, 7 aa, synthetic construct
MSNVGKL

SEQ ID NO: 58210 - protein, 7 aa, synthetic construct
VKDHLAH

SEQ ID NO: 58211 - protein, 7 aa, synthetic construct
QTYKLDK

SEQ ID NO: 58212 - protein, 7 aa, synthetic construct
KKMIPEL

SEQ ID NO: 58213 - protein, 7 aa, synthetic construct
TSPTSST

SEQ ID NO: 58214 - protein, 7 aa, synthetic construct
KRTDSEG

SEQ ID NO: 58215 - protein, 7 aa, synthetic construct
HEKGSFP

SEQ ID NO: 58216 - protein, 7 aa, synthetic construct
GMRTEGY

SEQ ID NO: 58217 - protein, 7 aa, synthetic construct
QVIAPGG

SEQ ID NO: 58218 - protein, 7 aa, synthetic construct
MNQSTNK

SEQ ID NO: 58219 - protein, 7 aa, synthetic construct
MPRHEYK

SEQ ID NO: 58220 - protein, 7 aa, synthetic construct
GHVTKDA

SEQ ID NO: 58221 - protein, 7 aa, synthetic construct
GPTPRLI

SEQ ID NO: 58222 - protein, 7 aa, synthetic construct
TKNNVHM

SEQ ID NO: 58223 - protein, 7 aa, synthetic construct
DKTTKQG

SEQ ID NO: 58224 - protein, 7 aa, synthetic construct
FQNAPPM

SEQ ID NO: 58225 - protein, 7 aa, synthetic construct
KTQNNST

SEQ ID NO: 58226 - protein, 7 aa, synthetic construct
SGRIGTN

SEQ ID NO: 58227 - protein, 7 aa, synthetic construct
GARGHDS

SEQ ID NO: 58228 - protein, 7 aa, synthetic construct
VRQQTQH

SEQ ID NO: 58229 - protein, 7 aa, synthetic construct
TQKQIQP

SEQ ID NO: 58230 - protein, 7 aa, synthetic construct
EEKMRFA

SEQ ID NO: 58231 - protein, 7 aa, synthetic construct
NGRQAQA

SEQ ID NO: 58232 - protein, 7 aa, synthetic construct
TSGKSGA

SEQ ID NO: 58233 - protein, 7 aa, synthetic construct
QGTAQYH

SEQ ID NO: 58234 - protein, 7 aa, synthetic construct
LQFMGNG

SEQ ID NO: 58235 - protein, 7 aa, synthetic construct
VNGTKVN

SEQ ID NO: 58236 - protein, 7 aa, synthetic construct
RTKQGDN

SEQ ID NO: 58237 - protein, 7 aa, synthetic construct
SSIGKVD

SEQ ID NO: 58238 - protein, 7 aa, synthetic construct
IRNAYKE

SEQ ID NO: 58239 - protein, 7 aa, synthetic construct
AQKVPTP

SEQ ID NO: 58240 - protein, 7 aa, synthetic construct
AWKDHQI

SEQ ID NO: 58241 - protein, 7 aa, synthetic construct
VPSSHVA

SEQ ID NO: 58242 - protein, 7 aa, synthetic construct
GKETRQG

SEQ ID NO: 58243 - protein, 7 aa, synthetic construct
KDVAGFD

SEQ ID NO: 58244 - protein, 7 aa, synthetic construct
RANGIID

SEQ ID NO: 58245 - protein, 7 aa, synthetic construct
ARSAITG

SEQ ID NO: 58246 - protein, 7 aa, synthetic construct
KEHHPRP

SEQ ID NO: 58247 - protein, 7 aa, synthetic construct
KQLPMAM

SEQ ID NO: 58248 - protein, 7 aa, synthetic construct
EGYRAMS

SEQ ID NO: 58249 - protein, 7 aa, synthetic construct
DQSRLTP

SEQ ID NO: 58250 - protein, 7 aa, synthetic construct
GPDPNKV

SEQ ID NO: 58251 - protein, 7 aa, synthetic construct
YKQHNIH

SEQ ID NO: 58252 - protein, 7 aa, synthetic construct
YGNKSVN

SEQ ID NO: 58253 - protein, 7 aa, synthetic construct
KSSDMVW

SEQ ID NO: 58254 - protein, 7 aa, synthetic construct
GSSGMKA

SEQ ID NO: 58255 - protein, 7 aa, synthetic construct
QVVNKGD

SEQ ID NO: 58256 - protein, 7 aa, synthetic construct
QFSLRSD

SEQ ID NO: 58257 - protein, 7 aa, synthetic construct
RNGNPAF

SEQ ID NO: 58258 - protein, 7 aa, synthetic construct
KPSSNAA

SEQ ID NO: 58259 - protein, 7 aa, synthetic construct
EKNGLMT

SEQ ID NO: 58260 - protein, 7 aa, synthetic construct
WKAQETQ

SEQ ID NO: 58261 - protein, 7 aa, synthetic construct
IPKFAHE

SEQ ID NO: 58262 - protein, 7 aa, synthetic construct
WPKVTAD

SEQ ID NO: 58263 - protein, 7 aa, synthetic construct
QLNTTIH

SEQ ID NO: 58264 - protein, 7 aa, synthetic construct
RKPVMID

SEQ ID NO: 58265 - protein, 7 aa, synthetic construct
INHKHDV

SEQ ID NO: 58266 - protein, 7 aa, synthetic construct
EKAMSVV

SEQ ID NO: 58267 - protein, 7 aa, synthetic construct
TKNMAQS

SEQ ID NO: 58268 - protein, 7 aa, synthetic construct
AKDPHKY

SEQ ID NO: 58269 - protein, 7 aa, synthetic construct
PRAQQSA

SEQ ID NO: 58270 - protein, 7 aa, synthetic construct
TPRSGFG

SEQ ID NO: 58271 - protein, 7 aa, synthetic construct
GVAAGGP

SEQ ID NO: 58272 - protein, 7 aa, synthetic construct
FVEWKAD

SEQ ID NO: 58273 - protein, 7 aa, synthetic construct
PKTPVGA

SEQ ID NO: 58274 - protein, 7 aa, synthetic construct
ERSGRND

SEQ ID NO: 58275 - protein, 7 aa, synthetic construct
YGKTNNA

SEQ ID NO: 58276 - protein, 7 aa, synthetic construct
PGRGTAP

SEQ ID NO: 58277 - protein, 7 aa, synthetic construct
NNHNKNP

SEQ ID NO: 58278 - protein, 7 aa, synthetic construct
RTTVGTI

SEQ ID NO: 58279 - protein, 7 aa, synthetic construct
MKYENTK

SEQ ID NO: 58280 - protein, 7 aa, synthetic construct
VGTQSHE

SEQ ID NO: 58281 - protein, 7 aa, synthetic construct
RPQGSVP

SEQ ID NO: 58282 - protein, 7 aa, synthetic construct
PVVARQT

SEQ ID NO: 58283 - protein, 7 aa, synthetic construct
TAGVRSP

SEQ ID NO: 58284 - protein, 7 aa, synthetic construct
YSNKSQS

SEQ ID NO: 58285 - protein, 7 aa, synthetic construct
VTARHAF

SEQ ID NO: 58286 - protein, 7 aa, synthetic construct
NQYKPDF

SEQ ID NO: 58287 - protein, 7 aa, synthetic construct
SMYQSHS

SEQ ID NO: 58288 - protein, 7 aa, synthetic construct
LPNQLPK

SEQ ID NO: 58289 - protein, 7 aa, synthetic construct
NGSMHSS

SEQ ID NO: 58290 - protein, 7 aa, synthetic construct
HEFHTAS

SEQ ID NO: 58291 - protein, 7 aa, synthetic construct
RNSPAMG

SEQ ID NO: 58292 - protein, 7 aa, synthetic construct
DAKGWAQ

SEQ ID NO: 58293 - protein, 7 aa, synthetic construct
TMITKSG

SEQ ID NO: 58294 - protein, 7 aa, synthetic construct
DEGRVYH

SEQ ID NO: 58295 - protein, 7 aa, synthetic construct
NLKVTKE

SEQ ID NO: 58296 - protein, 7 aa, synthetic construct
GRNPIID

SEQ ID NO: 58297 - protein, 7 aa, synthetic construct
HPANRDH

SEQ ID NO: 58298 - protein, 7 aa, synthetic construct
MPWQEAA

SEQ ID NO: 58299 - protein, 7 aa, synthetic construct
MVTQYSG

SEQ ID NO: 58300 - protein, 7 aa, synthetic construct
YVKFPHA

SEQ ID NO: 58301 - protein, 7 aa, synthetic construct
TVPSYHG

SEQ ID NO: 58302 - protein, 7 aa, synthetic construct
MREHGMA

SEQ ID NO: 58303 - protein, 7 aa, synthetic construct
TFNKNDG

SEQ ID NO: 58304 - protein, 7 aa, synthetic construct
SQKSNQN

SEQ ID NO: 58305 - protein, 7 aa, synthetic construct
RPNEHSY

SEQ ID NO: 58306 - protein, 7 aa, synthetic construct
DTFRSTP

SEQ ID NO: 58307 - protein, 7 aa, synthetic construct
PMREIRA

SEQ ID NO: 58308 - protein, 7 aa, synthetic construct
SLQTRMQ

SEQ ID NO: 58309 - protein, 7 aa, synthetic construct
QNRGQQT

SEQ ID NO: 58310 - protein, 7 aa, synthetic construct
KFAVDHI

SEQ ID NO: 58311 - protein, 7 aa, synthetic construct
LNGSRAA

SEQ ID NO: 58312 - protein, 7 aa, synthetic construct
AIANKPT

SEQ ID NO: 58313 - protein, 7 aa, synthetic construct
YSQAKVN

SEQ ID NO: 58314 - protein, 7 aa, synthetic construct
TNRTTSP

SEQ ID NO: 58315 - protein, 7 aa, synthetic construct
GPARHGD

SEQ ID NO: 58316 - protein, 7 aa, synthetic construct
SHHPGMN

SEQ ID NO: 58317 - protein, 7 aa, synthetic construct
FPSHSKI

SEQ ID NO: 58318 - protein, 7 aa, synthetic construct
NRPTNYV

SEQ ID NO: 58319 - protein, 7 aa, synthetic construct
KYIRADA

SEQ ID NO: 58320 - protein, 7 aa, synthetic construct
THKQTTG

SEQ ID NO: 58321 - protein, 7 aa, synthetic construct
GSTSLQI

SEQ ID NO: 58322 - protein, 7 aa, synthetic construct
MKTAVGG

SEQ ID NO: 58323 - protein, 7 aa, synthetic construct
KNQQANS

SEQ ID NO: 58324 - protein, 7 aa, synthetic construct
MWKKDVG

SEQ ID NO: 58325 - protein, 7 aa, synthetic construct
SMAVTVG

SEQ ID NO: 58326 - protein, 7 aa, synthetic construct
YNNARSG

SEQ ID NO: 58327 - protein, 7 aa, synthetic construct
DSQISAR

SEQ ID NO: 58328 - protein, 7 aa, synthetic construct
KPGMAAV

SEQ ID NO: 58329 - protein, 7 aa, synthetic construct
GAHLHGG

SEQ ID NO: 58330 - protein, 7 aa, synthetic construct
RITDMVG

SEQ ID NO: 58331 - protein, 7 aa, synthetic construct
QAKLPPA

SEQ ID NO: 58332 - protein, 7 aa, synthetic construct
TKQSMSA

SEQ ID NO: 58333 - protein, 7 aa, synthetic construct
YTAHMHT

SEQ ID NO: 58334 - protein, 7 aa, synthetic construct
LHKMDRD

SEQ ID NO: 58335 - protein, 7 aa, synthetic construct
KGSMKYD

SEQ ID NO: 58336 - protein, 7 aa, synthetic construct
GKALGSI

SEQ ID NO: 58337 - protein, 7 aa, synthetic construct
KYKIVSE

SEQ ID NO: 58338 - protein, 7 aa, synthetic construct
VMQNNRA

SEQ ID NO: 58339 - protein, 7 aa, synthetic construct
YPGMNVG

SEQ ID NO: 58340 - protein, 7 aa, synthetic construct
MDHGYKD

SEQ ID NO: 58341 - protein, 7 aa, synthetic construct
EAHKIAS

SEQ ID NO: 58342 - protein, 7 aa, synthetic construct
SAQTANL

SEQ ID NO: 58343 - protein, 7 aa, synthetic construct
KKPDSFS

SEQ ID NO: 58344 - protein, 7 aa, synthetic construct
KERGSFP

SEQ ID NO: 58345 - protein, 7 aa, synthetic construct
VKTRIAD

SEQ ID NO: 58346 - protein, 7 aa, synthetic construct
WDQIPHA

SEQ ID NO: 58347 - protein, 7 aa, synthetic construct
YLKDEQH

SEQ ID NO: 58348 - protein, 7 aa, synthetic construct
PVKDREH

SEQ ID NO: 58349 - protein, 7 aa, synthetic construct
FKMGQTP

SEQ ID NO: 58350 - protein, 7 aa, synthetic construct
VSPNKNL

SEQ ID NO: 58351 - protein, 7 aa, synthetic construct
IPKRELN

SEQ ID NO: 58352 - protein, 7 aa, synthetic construct
TQINVQR

SEQ ID NO: 58353 - protein, 7 aa, synthetic construct
RMDHHKQ

SEQ ID NO: 58354 - protein, 7 aa, synthetic construct
LKMPSPM

SEQ ID NO: 58355 - protein, 7 aa, synthetic construct
RHMVVES

SEQ ID NO: 58356 - protein, 7 aa, synthetic construct
RGTYDKQ

SEQ ID NO: 58357 - protein, 7 aa, synthetic construct
SKTDLKN

SEQ ID NO: 58358 - protein, 7 aa, synthetic construct
SNKHDLA

SEQ ID NO: 58359 - protein, 7 aa, synthetic construct
QPTATKG

SEQ ID NO: 58360 - protein, 7 aa, synthetic construct
KGTSVTG

SEQ ID NO: 58361 - protein, 7 aa, synthetic construct
PQKSVAF

SEQ ID NO: 58362 - protein, 7 aa, synthetic construct
MPRNNGG

SEQ ID NO: 58363 - protein, 7 aa, synthetic construct
FTQKQST

SEQ ID NO: 58364 - protein, 7 aa, synthetic construct
KSGSIGG

SEQ ID NO: 58365 - protein, 7 aa, synthetic construct
TMSMHEI

SEQ ID NO: 58366 - protein, 7 aa, synthetic construct
MNVSTTS

SEQ ID NO: 58367 - protein, 7 aa, synthetic construct
YKHSAND

SEQ ID NO: 58368 - protein, 7 aa, synthetic construct
LNSNTMY

SEQ ID NO: 58369 - protein, 7 aa, synthetic construct
TSTWTHD

SEQ ID NO: 58370 - protein, 7 aa, synthetic construct
KTPSSDR

SEQ ID NO: 58371 - protein, 7 aa, synthetic construct
QRDHGTM

SEQ ID NO: 58372 - protein, 7 aa, synthetic construct
STQKTTV

SEQ ID NO: 58373 - protein, 7 aa, synthetic construct
PKSYQGP

SEQ ID NO: 58374 - protein, 7 aa, synthetic construct
WVSGKGN

SEQ ID NO: 58375 - protein, 7 aa, synthetic construct
TELHVPM

SEQ ID NO: 58376 - protein, 7 aa, synthetic construct
MAKLING

SEQ ID NO: 58377 - protein, 7 aa, synthetic construct
MGSPHPK

SEQ ID NO: 58378 - protein, 7 aa, synthetic construct
AIKSSRE

SEQ ID NO: 58379 - protein, 7 aa, synthetic construct
GKTVANV

SEQ ID NO: 58380 - protein, 7 aa, synthetic construct
KVSGSTG

SEQ ID NO: 58381 - protein, 7 aa, synthetic construct
SMGAERQ

SEQ ID NO: 58382 - protein, 7 aa, synthetic construct
GAPRYPV

SEQ ID NO: 58383 - protein, 7 aa, synthetic construct
TVRDIDY

SEQ ID NO: 58384 - protein, 7 aa, synthetic construct
PTRGIAG

SEQ ID NO: 58385 - protein, 7 aa, synthetic construct
FKHVQLG

SEQ ID NO: 58386 - protein, 7 aa, synthetic construct
HTEHYQG

SEQ ID NO: 58387 - protein, 7 aa, synthetic construct
VKLNKDA

SEQ ID NO: 58388 - protein, 7 aa, synthetic construct
RTPTMDG

SEQ ID NO: 58389 - protein, 7 aa, synthetic construct
LSKQIQT

SEQ ID NO: 58390 - protein, 7 aa, synthetic construct
RIVNADE

SEQ ID NO: 58391 - protein, 7 aa, synthetic construct
MRTHIEE

SEQ ID NO: 58392 - protein, 7 aa, synthetic construct
MKSSKTE

SEQ ID NO: 58393 - protein, 7 aa, synthetic construct
ATAKPNW

SEQ ID NO: 58394 - protein, 7 aa, synthetic construct
HQMVRME

SEQ ID NO: 58395 - protein, 7 aa, synthetic construct
FMEHQKA

SEQ ID NO: 58396 - protein, 7 aa, synthetic construct
GHPQGGN

SEQ ID NO: 58397 - protein, 7 aa, synthetic construct
SQLHGGA

SEQ ID NO: 58398 - protein, 7 aa, synthetic construct
FKTSNSP

SEQ ID NO: 58399 - protein, 7 aa, synthetic construct
KGLRNEL

SEQ ID NO: 58400 - protein, 7 aa, synthetic construct
LMPQGYN

SEQ ID NO: 58401 - protein, 7 aa, synthetic construct
NKTHLDV

SEQ ID NO: 58402 - protein, 7 aa, synthetic construct
DKDFRYG

SEQ ID NO: 58403 - protein, 7 aa, synthetic construct
GTAGKTA

SEQ ID NO: 58404 - protein, 7 aa, synthetic construct
TMTQKQG

SEQ ID NO: 58405 - protein, 7 aa, synthetic construct
FKGTNSA

SEQ ID NO: 58406 - protein, 7 aa, synthetic construct
YTDLKRA

SEQ ID NO: 58407 - protein, 7 aa, synthetic construct
RTGNGEW

SEQ ID NO: 58408 - protein, 7 aa, synthetic construct
VAATKNG

SEQ ID NO: 58409 - protein, 7 aa, synthetic construct
ETKRTDG

SEQ ID NO: 58410 - protein, 7 aa, synthetic construct
SKVSNTA

SEQ ID NO: 58411 - protein, 7 aa, synthetic construct
KVTYEQM

SEQ ID NO: 58412 - protein, 7 aa, synthetic construct
HAAGSFP

SEQ ID NO: 58413 - protein, 7 aa, synthetic construct
HISKHET

SEQ ID NO: 58414 - protein, 7 aa, synthetic construct
HHTKVEK

SEQ ID NO: 58415 - protein, 7 aa, synthetic construct
SNTTPVK

SEQ ID NO: 58416 - protein, 7 aa, synthetic construct
TAPTVKG

SEQ ID NO: 58417 - protein, 7 aa, synthetic construct
FKQAEMR

SEQ ID NO: 58418 - protein, 7 aa, synthetic construct
TGMRQTH

SEQ ID NO: 58419 - protein, 7 aa, synthetic construct
NPTAQFA

SEQ ID NO: 58420 - protein, 7 aa, synthetic construct
QTGQQKP

SEQ ID NO: 58421 - protein, 7 aa, synthetic construct
KEERASP

SEQ ID NO: 58422 - protein, 7 aa, synthetic construct
WATHKLP

SEQ ID NO: 58423 - protein, 7 aa, synthetic construct
TAKEKNI

SEQ ID NO: 58424 - protein, 7 aa, synthetic construct
HFTKANV

SEQ ID NO: 58425 - protein, 7 aa, synthetic construct
FKGPAGG

SEQ ID NO: 58426 - protein, 7 aa, synthetic construct
TFTPHDV

SEQ ID NO: 58427 - protein, 7 aa, synthetic construct
VRPAPGA

SEQ ID NO: 58428 - protein, 7 aa, synthetic construct
QKTFAVA

SEQ ID NO: 58429 - protein, 7 aa, synthetic construct
TKNVSNA

SEQ ID NO: 58430 - protein, 7 aa, synthetic construct
GARPQSS

SEQ ID NO: 58431 - protein, 7 aa, synthetic construct
INMIGGI

SEQ ID NO: 58432 - protein, 7 aa, synthetic construct
PISSGPK

SEQ ID NO: 58433 - protein, 7 aa, synthetic construct
IRKESVG

SEQ ID NO: 58434 - protein, 7 aa, synthetic construct
SQHTTRI

SEQ ID NO: 58435 - protein, 7 aa, synthetic construct
TANHAGA

SEQ ID NO: 58436 - protein, 7 aa, synthetic construct
NAGSAKN

SEQ ID NO: 58437 - protein, 7 aa, synthetic construct
YRQAMAE

SEQ ID NO: 58438 - protein, 7 aa, synthetic construct
WHSNMTG

SEQ ID NO: 58439 - protein, 7 aa, synthetic construct
ADQQSRY

SEQ ID NO: 58440 - protein, 7 aa, synthetic construct
VTRTTGP

SEQ ID NO: 58441 - protein, 7 aa, synthetic construct
PGQPKVS

SEQ ID NO: 58442 - protein, 7 aa, synthetic construct
FTGQKMS

SEQ ID NO: 58443 - protein, 7 aa, synthetic construct
TYNSKNS

SEQ ID NO: 58444 - protein, 7 aa, synthetic construct
MSKPQRD

SEQ ID NO: 58445 - protein, 7 aa, synthetic construct
HQKPGFA

SEQ ID NO: 58446 - protein, 7 aa, synthetic construct
HNFGSQG

SEQ ID NO: 58447 - protein, 7 aa, synthetic construct
ERYAQNE

SEQ ID NO: 58448 - protein, 7 aa, synthetic construct
GIMKPQG

SEQ ID NO: 58449 - protein, 7 aa, synthetic construct
RHTDMTI

SEQ ID NO: 58450 - protein, 7 aa, synthetic construct
IDLRSRS

SEQ ID NO: 58451 - protein, 7 aa, synthetic construct
GLGGAKH

SEQ ID NO: 58452 - protein, 7 aa, synthetic construct
EKWDNAK

SEQ ID NO: 58453 - protein, 7 aa, synthetic construct
YKRGVDE

SEQ ID NO: 58454 - protein, 7 aa, synthetic construct
FARGKDD

SEQ ID NO: 58455 - protein, 7 aa, synthetic construct
IAHSAVS

SEQ ID NO: 58456 - protein, 7 aa, synthetic construct
RVMGNNQ

SEQ ID NO: 58457 - protein, 7 aa, synthetic construct
KMHGEAH

SEQ ID NO: 58458 - protein, 7 aa, synthetic construct
YTSVQVG

SEQ ID NO: 58459 - protein, 7 aa, synthetic construct
GPYNNMS

SEQ ID NO: 58460 - protein, 7 aa, synthetic construct
GKSMAQA

SEQ ID NO: 58461 - protein, 7 aa, synthetic construct
KKNYEQF

SEQ ID NO: 58462 - protein, 7 aa, synthetic construct
RGDIGFT

SEQ ID NO: 58463 - protein, 7 aa, synthetic construct
KKDMHYE

SEQ ID NO: 58464 - protein, 7 aa, synthetic construct
YSSPAQG

SEQ ID NO: 58465 - protein, 7 aa, synthetic construct
TKYPGGD

SEQ ID NO: 58466 - protein, 7 aa, synthetic construct
RTGEQVY

SEQ ID NO: 58467 - protein, 7 aa, synthetic construct
DGKKTEV

SEQ ID NO: 58468 - protein, 7 aa, synthetic construct
LNKSMLE

SEQ ID NO: 58469 - protein, 7 aa, synthetic construct
TKMSNAI

SEQ ID NO: 58470 - protein, 7 aa, synthetic construct
KFAQPNS

SEQ ID NO: 58471 - protein, 7 aa, synthetic construct
DRQVPQA

SEQ ID NO: 58472 - protein, 7 aa, synthetic construct
GVNMKIE

SEQ ID NO: 58473 - protein, 7 aa, synthetic construct
FKSDTTR

SEQ ID NO: 58474 - protein, 7 aa, synthetic construct
ESKRNEA

SEQ ID NO: 58475 - protein, 7 aa, synthetic construct
MRPTHAD

SEQ ID NO: 58476 - protein, 7 aa, synthetic construct
YKNKESV

SEQ ID NO: 58477 - protein, 7 aa, synthetic construct
PGSNRAY

SEQ ID NO: 58478 - protein, 7 aa, synthetic construct
RVRQHED

SEQ ID NO: 58479 - protein, 7 aa, synthetic construct
TKLSPIG

SEQ ID NO: 58480 - protein, 7 aa, synthetic construct
RVNNSGA

SEQ ID NO: 58481 - protein, 7 aa, synthetic construct
NIGGYQG

SEQ ID NO: 58482 - protein, 7 aa, synthetic construct
GGRSYPD

SEQ ID NO: 58483 - protein, 7 aa, synthetic construct
KAPATSP

SEQ ID NO: 58484 - protein, 7 aa, synthetic construct
MASPAGS

SEQ ID NO: 58485 - protein, 7 aa, synthetic construct
RNNAVFE

SEQ ID NO: 58486 - protein, 7 aa, synthetic construct
QKPMSGN

SEQ ID NO: 58487 - protein, 7 aa, synthetic construct
VHTGMRT

SEQ ID NO: 58488 - protein, 7 aa, synthetic construct
TKNVIKD

SEQ ID NO: 58489 - protein, 7 aa, synthetic construct
VRTSSEF

SEQ ID NO: 58490 - protein, 7 aa, synthetic construct
QSPKSNA

SEQ ID NO: 58491 - protein, 7 aa, synthetic construct
NKNAASG

SEQ ID NO: 58492 - protein, 7 aa, synthetic construct
SMAQRDM

SEQ ID NO: 58493 - protein, 7 aa, synthetic construct
TTIAKTG

SEQ ID NO: 58494 - protein, 7 aa, synthetic construct
KMSSVQS

SEQ ID NO: 58495 - protein, 7 aa, synthetic construct
GSGIHND

SEQ ID NO: 58496 - protein, 7 aa, synthetic construct
GKSDFMA

SEQ ID NO: 58497 - protein, 7 aa, synthetic construct
AERVNFT

SEQ ID NO: 58498 - protein, 7 aa, synthetic construct
GASHPAA

SEQ ID NO: 58499 - protein, 7 aa, synthetic construct
NQRVTSG

SEQ ID NO: 58500 - protein, 7 aa, synthetic construct
VKQNDGT

SEQ ID NO: 58501 - protein, 7 aa, synthetic construct
NKFPSEE

SEQ ID NO: 58502 - protein, 7 aa, synthetic construct
GHPVHMS

SEQ ID NO: 58503 - protein, 7 aa, synthetic construct
YSGLSHS

SEQ ID NO: 58504 - protein, 7 aa, synthetic construct
HNMGRDA

SEQ ID NO: 58505 - protein, 7 aa, synthetic construct
QLRVNTE

SEQ ID NO: 58506 - protein, 7 aa, synthetic construct
TPQRASP

SEQ ID NO: 58507 - protein, 7 aa, synthetic construct
KNASPTG

SEQ ID NO: 58508 - protein, 7 aa, synthetic construct
HRQTTNA

SEQ ID NO: 58509 - protein, 7 aa, synthetic construct
QYVRGGT

SEQ ID NO: 58510 - protein, 7 aa, synthetic construct
LNRIEEH

SEQ ID NO: 58511 - protein, 7 aa, synthetic construct
RYSGLTA

SEQ ID NO: 58512 - protein, 7 aa, synthetic construct
TLAKALN

SEQ ID NO: 58513 - protein, 7 aa, synthetic construct
HKSESRM

SEQ ID NO: 58514 - protein, 7 aa, synthetic construct
GPKTIIQ

SEQ ID NO: 58515 - protein, 7 aa, synthetic construct
NPKPQQG

SEQ ID NO: 58516 - protein, 7 aa, synthetic construct
SERKVNL

SEQ ID NO: 58517 - protein, 7 aa, synthetic construct
NRKDQPI

SEQ ID NO: 58518 - protein, 7 aa, synthetic construct
AQKSMQY

SEQ ID NO: 58519 - protein, 7 aa, synthetic construct
SKKLEEW

SEQ ID NO: 58520 - protein, 7 aa, synthetic construct
KASGTNA

SEQ ID NO: 58521 - protein, 7 aa, synthetic construct
TYQQKNG

SEQ ID NO: 58522 - protein, 7 aa, synthetic construct
SRGSMVV

SEQ ID NO: 58523 - protein, 7 aa, synthetic construct
RRPESGP

SEQ ID NO: 58524 - protein, 7 aa, synthetic construct
LGSIRGN

SEQ ID NO: 58525 - protein, 7 aa, synthetic construct
KANNGNA

SEQ ID NO: 58526 - protein, 7 aa, synthetic construct
TVGHYQG

SEQ ID NO: 58527 - protein, 7 aa, synthetic construct
EKKTAST

SEQ ID NO: 58528 - protein, 7 aa, synthetic construct
PNPHMVS

SEQ ID NO: 58529 - protein, 7 aa, synthetic construct
IRGTFDS

SEQ ID NO: 58530 - protein, 7 aa, synthetic construct
NGSMTAG

SEQ ID NO: 58531 - protein, 7 aa, synthetic construct
TGASFKQ

SEQ ID NO: 58532 - protein, 7 aa, synthetic construct
QAQGLTP

SEQ ID NO: 58533 - protein, 7 aa, synthetic construct
KHERQFS

SEQ ID NO: 58534 - protein, 7 aa, synthetic construct
VIHRDII

SEQ ID NO: 58535 - protein, 7 aa, synthetic construct
LTKGGDK

SEQ ID NO: 58536 - protein, 7 aa, synthetic construct
SARFTHP

SEQ ID NO: 58537 - protein, 7 aa, synthetic construct
KAGGPVH

SEQ ID NO: 58538 - protein, 7 aa, synthetic construct
KSSGTTN

SEQ ID NO: 58539 - protein, 7 aa, synthetic construct
SGYGKNG

SEQ ID NO: 58540 - protein, 7 aa, synthetic construct
ENRAQNS

SEQ ID NO: 58541 - protein, 7 aa, synthetic construct
QGRYTVP

SEQ ID NO: 58542 - protein, 7 aa, synthetic construct
INQRQTQ

SEQ ID NO: 58543 - protein, 7 aa, synthetic construct
KTNTSVA

SEQ ID NO: 58544 - protein, 7 aa, synthetic construct
GAGPQKA

SEQ ID NO: 58545 - protein, 7 aa, synthetic construct
QIQQRSA

SEQ ID NO: 58546 - protein, 7 aa, synthetic construct
KKENYGG

SEQ ID NO: 58547 - protein, 7 aa, synthetic construct
TSGKTTA

SEQ ID NO: 58548 - protein, 7 aa, synthetic construct
WNSNRRE

SEQ ID NO: 58549 - protein, 7 aa, synthetic construct
VKVGHGL

SEQ ID NO: 58550 - protein, 7 aa, synthetic construct
RHQANYV

SEQ ID NO: 58551 - protein, 7 aa, synthetic construct
QRPNSVS

SEQ ID NO: 58552 - protein, 7 aa, synthetic construct
WASSPQM

SEQ ID NO: 58553 - protein, 7 aa, synthetic construct
HPGTQRQ

SEQ ID NO: 58554 - protein, 7 aa, synthetic construct
RNREDKP

SEQ ID NO: 58555 - protein, 7 aa, synthetic construct
NKPNRGE

SEQ ID NO: 58556 - protein, 7 aa, synthetic construct
HKYQEVT

SEQ ID NO: 58557 - protein, 7 aa, synthetic construct
RDAHHSP

SEQ ID NO: 58558 - protein, 7 aa, synthetic construct
RDNAQYL

SEQ ID NO: 58559 - protein, 7 aa, synthetic construct
QTGQTKT

SEQ ID NO: 58560 - protein, 7 aa, synthetic construct
VMHVDRG

SEQ ID NO: 58561 - protein, 7 aa, synthetic construct
GTHTFAA

SEQ ID NO: 58562 - protein, 7 aa, synthetic construct
QTVHPQL

SEQ ID NO: 58563 - protein, 7 aa, synthetic construct
NRDKMPP

SEQ ID NO: 58564 - protein, 7 aa, synthetic construct
IHREKNE

SEQ ID NO: 58565 - protein, 7 aa, synthetic construct
STHKDNI

SEQ ID NO: 58566 - protein, 7 aa, synthetic construct
RPAQQSG

SEQ ID NO: 58567 - protein, 7 aa, synthetic construct
QKGSFVG

SEQ ID NO: 58568 - protein, 7 aa, synthetic construct
LLHSMAP

SEQ ID NO: 58569 - protein, 7 aa, synthetic construct
WRAHIEN

SEQ ID NO: 58570 - protein, 7 aa, synthetic construct
AIEKVVS

SEQ ID NO: 58571 - protein, 7 aa, synthetic construct
HGKTGMT

SEQ ID NO: 58572 - protein, 7 aa, synthetic construct
YAIQKQS

SEQ ID NO: 58573 - protein, 7 aa, synthetic construct
HFHVMKE

SEQ ID NO: 58574 - protein, 7 aa, synthetic construct
YMNPRGH

SEQ ID NO: 58575 - protein, 7 aa, synthetic construct
TSDNRKS

SEQ ID NO: 58576 - protein, 7 aa, synthetic construct
ELTRNKM

SEQ ID NO: 58577 - protein, 7 aa, synthetic construct
QPRSITA

SEQ ID NO: 58578 - protein, 7 aa, synthetic construct
PRNNQSG

SEQ ID NO: 58579 - protein, 7 aa, synthetic construct
EIGKQHG

SEQ ID NO: 58580 - protein, 7 aa, synthetic construct
KATTARD

SEQ ID NO: 58581 - protein, 7 aa, synthetic construct
LSSNHLL

SEQ ID NO: 58582 - protein, 7 aa, synthetic construct
WPQGMSN

SEQ ID NO: 58583 - protein, 7 aa, synthetic construct
QGRQLTH

SEQ ID NO: 58584 - protein, 7 aa, synthetic construct
FAPVQKG

SEQ ID NO: 58585 - protein, 7 aa, synthetic construct
SSTGHEK

SEQ ID NO: 58586 - protein, 7 aa, synthetic construct
LSMPNSS

SEQ ID NO: 58587 - protein, 7 aa, synthetic construct
QATQTYH

SEQ ID NO: 58588 - protein, 7 aa, synthetic construct
GPNRDAV

SEQ ID NO: 58589 - protein, 7 aa, synthetic construct
MGPGQRA

SEQ ID NO: 58590 - protein, 7 aa, synthetic construct
TMQQSSS

SEQ ID NO: 58591 - protein, 7 aa, synthetic construct
WRTESRA

SEQ ID NO: 58592 - protein, 7 aa, synthetic construct
YSLKTPE

SEQ ID NO: 58593 - protein, 7 aa, synthetic construct
TRQPNVE

SEQ ID NO: 58594 - protein, 7 aa, synthetic construct
SNVTKWV

SEQ ID NO: 58595 - protein, 7 aa, synthetic construct
MSKGGNS

SEQ ID NO: 58596 - protein, 7 aa, synthetic construct
IGIRGEH

SEQ ID NO: 58597 - protein, 7 aa, synthetic construct
SKNGLSG

SEQ ID NO: 58598 - protein, 7 aa, synthetic construct
TTSSGKG

SEQ ID NO: 58599 - protein, 7 aa, synthetic construct
PAHTSID

SEQ ID NO: 58600 - protein, 7 aa, synthetic construct
KEITSYV

SEQ ID NO: 58601 - protein, 7 aa, synthetic construct
STNQVRV

SEQ ID NO: 58602 - protein, 7 aa, synthetic construct
RVSNSAG

SEQ ID NO: 58603 - protein, 7 aa, synthetic construct
KQTGSGS

SEQ ID NO: 58604 - protein, 7 aa, synthetic construct
HRSGDTL

SEQ ID NO: 58605 - protein, 7 aa, synthetic construct
AGHKAPV

SEQ ID NO: 58606 - protein, 7 aa, synthetic construct
FYGRTEH

SEQ ID NO: 58607 - protein, 7 aa, synthetic construct
HMRTGAN

SEQ ID NO: 58608 - protein, 7 aa, synthetic construct
QKAAIRD

SEQ ID NO: 58609 - protein, 7 aa, synthetic construct
HPSFKAV

SEQ ID NO: 58610 - protein, 7 aa, synthetic construct
NVAQRNA

SEQ ID NO: 58611 - protein, 7 aa, synthetic construct
KDDKRMT

SEQ ID NO: 58612 - protein, 7 aa, synthetic construct
FKSVEKS

SEQ ID NO: 58613 - protein, 7 aa, synthetic construct
VPMDRSY

SEQ ID NO: 58614 - protein, 7 aa, synthetic construct
MHAQNAA

SEQ ID NO: 58615 - protein, 7 aa, synthetic construct
QKVQANM

SEQ ID NO: 58616 - protein, 7 aa, synthetic construct
KNPGYVP

SEQ ID NO: 58617 - protein, 7 aa, synthetic construct
DVVGRIG

SEQ ID NO: 58618 - protein, 7 aa, synthetic construct
TNKGMNG

SEQ ID NO: 58619 - protein, 7 aa, synthetic construct
PKSQSTS

SEQ ID NO: 58620 - protein, 7 aa, synthetic construct
TKRPVDN

SEQ ID NO: 58621 - protein, 7 aa, synthetic construct
LGRMAVD

SEQ ID NO: 58622 - protein, 7 aa, synthetic construct
IDKFWDA

SEQ ID NO: 58623 - protein, 7 aa, synthetic construct
IRTSQPN

SEQ ID NO: 58624 - protein, 7 aa, synthetic construct
EMGKMQQ

SEQ ID NO: 58625 - protein, 7 aa, synthetic construct
PNHRPPI

SEQ ID NO: 58626 - protein, 7 aa, synthetic construct
SNVNRES

SEQ ID NO: 58627 - protein, 7 aa, synthetic construct
GVSVMQP

SEQ ID NO: 58628 - protein, 7 aa, synthetic construct
QKQHADG

SEQ ID NO: 58629 - protein, 7 aa, synthetic construct
KTASGYA

SEQ ID NO: 58630 - protein, 7 aa, synthetic construct
QTSTVHR

SEQ ID NO: 58631 - protein, 7 aa, synthetic construct
RSEHAVL

SEQ ID NO: 58632 - protein, 7 aa, synthetic construct
PKGDKLP

SEQ ID NO: 58633 - protein, 7 aa, synthetic construct
GPYVSRG

SEQ ID NO: 58634 - protein, 7 aa, synthetic construct
GQMRGQD

SEQ ID NO: 58635 - protein, 7 aa, synthetic construct
QKNASVA

SEQ ID NO: 58636 - protein, 7 aa, synthetic construct
DHNQAKK

SEQ ID NO: 58637 - protein, 7 aa, synthetic construct
NTQNRFQ

SEQ ID NO: 58638 - protein, 7 aa, synthetic construct
YQKGLHH

SEQ ID NO: 58639 - protein, 7 aa, synthetic construct
IVNQASS

SEQ ID NO: 58640 - protein, 7 aa, synthetic construct
HTMVAVG

SEQ ID NO: 58641 - protein, 7 aa, synthetic construct
MTKSSMG

SEQ ID NO: 58642 - protein, 7 aa, synthetic construct
VNYGIKD

SEQ ID NO: 58643 - protein, 7 aa, synthetic construct
HDKRWAE

SEQ ID NO: 58644 - protein, 7 aa, synthetic construct
QAKQTKE

SEQ ID NO: 58645 - protein, 7 aa, synthetic construct
GDPRMAG

SEQ ID NO: 58646 - protein, 7 aa, synthetic construct
HPHALSG

SEQ ID NO: 58647 - protein, 7 aa, synthetic construct
KQTPTNS

SEQ ID NO: 58648 - protein, 7 aa, synthetic construct
FDPVHSH

SEQ ID NO: 58649 - protein, 7 aa, synthetic construct
GKNTQSP

SEQ ID NO: 58650 - protein, 7 aa, synthetic construct
WRNLNQG

SEQ ID NO: 58651 - protein, 7 aa, synthetic construct
MRPGMKE

SEQ ID NO: 58652 - protein, 7 aa, synthetic construct
RDMASDK

SEQ ID NO: 58653 - protein, 7 aa, synthetic construct
TPHFDVM

SEQ ID NO: 58654 - protein, 7 aa, synthetic construct
TARAQHE

SEQ ID NO: 58655 - protein, 7 aa, synthetic construct
EGRSMSN

SEQ ID NO: 58656 - protein, 7 aa, synthetic construct
KLIHMEA

SEQ ID NO: 58657 - protein, 7 aa, synthetic construct
APQNPMP

SEQ ID NO: 58658 - protein, 7 aa, synthetic construct
FVVSASN

SEQ ID NO: 58659 - protein, 7 aa, synthetic construct
QRPTNVG

SEQ ID NO: 58660 - protein, 7 aa, synthetic construct
ARPNYEG

SEQ ID NO: 58661 - protein, 7 aa, synthetic construct
KTQPNQQ

SEQ ID NO: 58662 - protein, 7 aa, synthetic construct
DVIPRMA

SEQ ID NO: 58663 - protein, 7 aa, synthetic construct
YHPGTSL

SEQ ID NO: 58664 - protein, 7 aa, synthetic construct
VIGKATS

SEQ ID NO: 58665 - protein, 7 aa, synthetic construct
VQKGTAA

SEQ ID NO: 58666 - protein, 7 aa, synthetic construct
RPPQNMS

SEQ ID NO: 58667 - protein, 7 aa, synthetic construct
MKKTADE

SEQ ID NO: 58668 - protein, 7 aa, synthetic construct
RFTPTGE

SEQ ID NO: 58669 - protein, 7 aa, synthetic construct
QKAQSYA

SEQ ID NO: 58670 - protein, 7 aa, synthetic construct
SRQTTGA

SEQ ID NO: 58671 - protein, 7 aa, synthetic construct
LSANKDG

SEQ ID NO: 58672 - protein, 7 aa, synthetic construct
RPQQQNA

SEQ ID NO: 58673 - protein, 7 aa, synthetic construct
LAKSSDI

SEQ ID NO: 58674 - protein, 7 aa, synthetic construct
QHPEWHP

SEQ ID NO: 58675 - protein, 7 aa, synthetic construct
YGKMTAS

SEQ ID NO: 58676 - protein, 7 aa, synthetic construct
HPSHKND

SEQ ID NO: 58677 - protein, 7 aa, synthetic construct
VDLIKTA

SEQ ID NO: 58678 - protein, 7 aa, synthetic construct
FHVQRAG

SEQ ID NO: 58679 - protein, 7 aa, synthetic construct
KIHSMEA

SEQ ID NO: 58680 - protein, 7 aa, synthetic construct
FNKNAQA

SEQ ID NO: 58681 - protein, 7 aa, synthetic construct
QFKVGDD

SEQ ID NO: 58682 - protein, 7 aa, synthetic construct
EMVQRMG

SEQ ID NO: 58683 - protein, 7 aa, synthetic construct
KLRPGID

SEQ ID NO: 58684 - protein, 7 aa, synthetic construct
AKPSGMP

SEQ ID NO: 58685 - protein, 7 aa, synthetic construct
GDSVKRW

SEQ ID NO: 58686 - protein, 7 aa, synthetic construct
GNMSKFP

SEQ ID NO: 58687 - protein, 7 aa, synthetic construct
IRQPSEQ

SEQ ID NO: 58688 - protein, 7 aa, synthetic construct
RMNSQQA

SEQ ID NO: 58689 - protein, 7 aa, synthetic construct
GPKHIKE

SEQ ID NO: 58690 - protein, 7 aa, synthetic construct
QYMKHST

SEQ ID NO: 58691 - protein, 7 aa, synthetic construct
DSRKPGL

SEQ ID NO: 58692 - protein, 7 aa, synthetic construct
LFSNKNT

SEQ ID NO: 58693 - protein, 7 aa, synthetic construct
FPPHTRT

SEQ ID NO: 58694 - protein, 7 aa, synthetic construct
MVGKSDT

SEQ ID NO: 58695 - protein, 7 aa, synthetic construct
INNYHRQ

SEQ ID NO: 58696 - protein, 7 aa, synthetic construct
GMNRNDR

SEQ ID NO: 58697 - protein, 7 aa, synthetic construct
SVNRLMP

SEQ ID NO: 58698 - protein, 7 aa, synthetic construct
IGKGVVT

SEQ ID NO: 58699 - protein, 7 aa, synthetic construct
MKSYLDA

SEQ ID NO: 58700 - protein, 7 aa, synthetic construct
VKMLRSD

SEQ ID NO: 58701 - protein, 7 aa, synthetic construct
ISPNSAR

SEQ ID NO: 58702 - protein, 7 aa, synthetic construct
THHGAGG

SEQ ID NO: 58703 - protein, 7 aa, synthetic construct
AQIKHQA

SEQ ID NO: 58704 - protein, 7 aa, synthetic construct
TRSQTFS

SEQ ID NO: 58705 - protein, 7 aa, synthetic construct
QRSVPRE

SEQ ID NO: 58706 - protein, 7 aa, synthetic construct
YREGMQY

SEQ ID NO: 58707 - protein, 7 aa, synthetic construct
NGQRSNV

SEQ ID NO: 58708 - protein, 7 aa, synthetic construct
MVFPRDE

SEQ ID NO: 58709 - protein, 7 aa, synthetic construct
YGPKSVT

SEQ ID NO: 58710 - protein, 7 aa, synthetic construct
EMKRNAY

SEQ ID NO: 58711 - protein, 7 aa, synthetic construct
FKANVEP

SEQ ID NO: 58712 - protein, 7 aa, synthetic construct
YRNSQVT

SEQ ID NO: 58713 - protein, 7 aa, synthetic construct
MKPNLAA

SEQ ID NO: 58714 - protein, 7 aa, synthetic construct
VKHSNQW

SEQ ID NO: 58715 - protein, 7 aa, synthetic construct
RVPHVGP

SEQ ID NO: 58716 - protein, 7 aa, synthetic construct
LAKQKDN

SEQ ID NO: 58717 - protein, 7 aa, synthetic construct
KPNPGFA

SEQ ID NO: 58718 - protein, 7 aa, synthetic construct
FRTSGPI

SEQ ID NO: 58719 - protein, 7 aa, synthetic construct
KYSGNEM

SEQ ID NO: 58720 - protein, 7 aa, synthetic construct
TGPKMTG

SEQ ID NO: 58721 - protein, 7 aa, synthetic construct
TPMSFKA

SEQ ID NO: 58722 - protein, 7 aa, synthetic construct
QMRHGDD

SEQ ID NO: 58723 - protein, 7 aa, synthetic construct
PYNPNGF

SEQ ID NO: 58724 - protein, 7 aa, synthetic construct
ASGMRAD

SEQ ID NO: 58725 - protein, 7 aa, synthetic construct
ESKYQHS

SEQ ID NO: 58726 - protein, 7 aa, synthetic construct
TRAQDGY

SEQ ID NO: 58727 - protein, 7 aa, synthetic construct
SRPVNAG

SEQ ID NO: 58728 - protein, 7 aa, synthetic construct
VNLRVQQ

SEQ ID NO: 58729 - protein, 7 aa, synthetic construct
SRNIERG

SEQ ID NO: 58730 - protein, 7 aa, synthetic construct
TWKNSNE

SEQ ID NO: 58731 - protein, 7 aa, synthetic construct
STFRNGT

SEQ ID NO: 58732 - protein, 7 aa, synthetic construct
PQKSGVA

SEQ ID NO: 58733 - protein, 7 aa, synthetic construct
QHKANMW

SEQ ID NO: 58734 - protein, 7 aa, synthetic construct
IGQTKYI

SEQ ID NO: 58735 - protein, 7 aa, synthetic construct
FKTGSGP

SEQ ID NO: 58736 - protein, 7 aa, synthetic construct
LAYSTNN

SEQ ID NO: 58737 - protein, 7 aa, synthetic construct
KYHTVQP

SEQ ID NO: 58738 - protein, 7 aa, synthetic construct
DSKFAAV

SEQ ID NO: 58739 - protein, 7 aa, synthetic construct
ISPARAY

SEQ ID NO: 58740 - protein, 7 aa, synthetic construct
SKDRMAA

SEQ ID NO: 58741 - protein, 7 aa, synthetic construct
RMQPHSP

SEQ ID NO: 58742 - protein, 7 aa, synthetic construct
FFENMNS

SEQ ID NO: 58743 - protein, 7 aa, synthetic construct
HPPFTST

SEQ ID NO: 58744 - protein, 7 aa, synthetic construct
KDGRNSE

SEQ ID NO: 58745 - protein, 7 aa, synthetic construct
PTRDGSS

SEQ ID NO: 58746 - protein, 7 aa, synthetic construct
VKKDGKN

SEQ ID NO: 58747 - protein, 7 aa, synthetic construct
DNKTMNR

SEQ ID NO: 58748 - protein, 7 aa, synthetic construct
DKFGSAV

SEQ ID NO: 58749 - protein, 7 aa, synthetic construct
MEEKPWI

SEQ ID NO: 58750 - protein, 7 aa, synthetic construct
QKPVVQV

SEQ ID NO: 58751 - protein, 7 aa, synthetic construct
AFIKVGE

SEQ ID NO: 58752 - protein, 7 aa, synthetic construct
DRSMQGP

SEQ ID NO: 58753 - protein, 7 aa, synthetic construct
AGKLQVM

SEQ ID NO: 58754 - protein, 7 aa, synthetic construct
KYMKSVE

SEQ ID NO: 58755 - protein, 7 aa, synthetic construct
HPAKTAV

SEQ ID NO: 58756 - protein, 7 aa, synthetic construct
SGNKDDS

SEQ ID NO: 58757 - protein, 7 aa, synthetic construct
HAPHKMQ

SEQ ID NO: 58758 - protein, 7 aa, synthetic construct
HVDQRNS

SEQ ID NO: 58759 - protein, 7 aa, synthetic construct
GRHYQEV

SEQ ID NO: 58760 - protein, 7 aa, synthetic construct
RVTHGHP

SEQ ID NO: 58761 - protein, 7 aa, synthetic construct
VGPASVT

SEQ ID NO: 58762 - protein, 7 aa, synthetic construct
KQYGVEM

SEQ ID NO: 58763 - protein, 7 aa, synthetic construct
KTASSAP

SEQ ID NO: 58764 - protein, 7 aa, synthetic construct
MPMKRDN

SEQ ID NO: 58765 - protein, 7 aa, synthetic construct
HNKHTDT

SEQ ID NO: 58766 - protein, 7 aa, synthetic construct
KDRSGNV

SEQ ID NO: 58767 - protein, 7 aa, synthetic construct
DTHGFKV

SEQ ID NO: 58768 - protein, 7 aa, synthetic construct
TRMSTTG

SEQ ID NO: 58769 - protein, 7 aa, synthetic construct
NAKTSAA

SEQ ID NO: 58770 - protein, 7 aa, synthetic construct
KFQNSMV

SEQ ID NO: 58771 - protein, 7 aa, synthetic construct
GTHLPER

SEQ ID NO: 58772 - protein, 7 aa, synthetic construct
VQSRGAT

SEQ ID NO: 58773 - protein, 7 aa, synthetic construct
LHRANDH

SEQ ID NO: 58774 - protein, 7 aa, synthetic construct
HFNNGQV

SEQ ID NO: 58775 - protein, 7 aa, synthetic construct
WSKINEA

SEQ ID NO: 58776 - protein, 7 aa, synthetic construct
TGILGKT

SEQ ID NO: 58777 - protein, 7 aa, synthetic construct
KSGSAFG

SEQ ID NO: 58778 - protein, 7 aa, synthetic construct
DVIKNPR

SEQ ID NO: 58779 - protein, 7 aa, synthetic construct
HPMIAVA

SEQ ID NO: 58780 - protein, 7 aa, synthetic construct
PRTPTQT

SEQ ID NO: 58781 - protein, 7 aa, synthetic construct
KKSDSQM

SEQ ID NO: 58782 - protein, 7 aa, synthetic construct
HKPMESL

SEQ ID NO: 58783 - protein, 7 aa, synthetic construct
VSNARNG

SEQ ID NO: 58784 - protein, 7 aa, synthetic construct
GPNTGAT

SEQ ID NO: 58785 - protein, 7 aa, synthetic construct
MLSHAGS

SEQ ID NO: 58786 - protein, 7 aa, synthetic construct
QRSSGAA

SEQ ID NO: 58787 - protein, 7 aa, synthetic construct
NGATKAF

SEQ ID NO: 58788 - protein, 7 aa, synthetic construct
EVQTKIG

SEQ ID NO: 58789 - protein, 7 aa, synthetic construct
RAMDGVK

SEQ ID NO: 58790 - protein, 7 aa, synthetic construct
VKSTTMG

SEQ ID NO: 58791 - protein, 7 aa, synthetic construct
ARNMSYE

SEQ ID NO: 58792 - protein, 7 aa, synthetic construct
FKNPAQG

SEQ ID NO: 58793 - protein, 7 aa, synthetic construct
QENKSKA

SEQ ID NO: 58794 - protein, 7 aa, synthetic construct
YGSIHYS

SEQ ID NO: 58795 - protein, 7 aa, synthetic construct
WAGLGPN

SEQ ID NO: 58796 - protein, 7 aa, synthetic construct
MARFEEV

SEQ ID NO: 58797 - protein, 7 aa, synthetic construct
PIRGQTS

SEQ ID NO: 58798 - protein, 7 aa, synthetic construct
VNMMLSP

SEQ ID NO: 58799 - protein, 7 aa, synthetic construct
YTPGARM

SEQ ID NO: 58800 - protein, 7 aa, synthetic construct
NQINYKP

SEQ ID NO: 58801 - protein, 7 aa, synthetic construct
IMKSKEP

SEQ ID NO: 58802 - protein, 7 aa, synthetic construct
KVNSNTP

SEQ ID NO: 58803 - protein, 7 aa, synthetic construct
AMAGQTS

SEQ ID NO: 58804 - protein, 7 aa, synthetic construct
TSRAASP

SEQ ID NO: 58805 - protein, 7 aa, synthetic construct
KKQDPSG

SEQ ID NO: 58806 - protein, 7 aa, synthetic construct
GRTSAST

SEQ ID NO: 58807 - protein, 7 aa, synthetic construct
GDTYQRG

SEQ ID NO: 58808 - protein, 7 aa, synthetic construct
LDRMNNV

SEQ ID NO: 58809 - protein, 7 aa, synthetic construct
SKQNIMN

SEQ ID NO: 58810 - protein, 7 aa, synthetic construct
YFGKLPE

SEQ ID NO: 58811 - protein, 7 aa, synthetic construct
LFGQGNE

SEQ ID NO: 58812 - protein, 7 aa, synthetic construct
TKSPPFD

SEQ ID NO: 58813 - protein, 7 aa, synthetic construct
ERKMSFS

SEQ ID NO: 58814 - protein, 7 aa, synthetic construct
DARHRSP

SEQ ID NO: 58815 - protein, 7 aa, synthetic construct
MQQNPIN

SEQ ID NO: 58816 - protein, 7 aa, synthetic construct
ANHTVQS

SEQ ID NO: 58817 - protein, 7 aa, synthetic construct
LAKSGVM

SEQ ID NO: 58818 - protein, 7 aa, synthetic construct
NHVKRGE

SEQ ID NO: 58819 - protein, 7 aa, synthetic construct
GSSYEKI

SEQ ID NO: 58820 - protein, 7 aa, synthetic construct
KPSTAMN

SEQ ID NO: 58821 - protein, 7 aa, synthetic construct
LKPMENA

SEQ ID NO: 58822 - protein, 7 aa, synthetic construct
VPNINVP

SEQ ID NO: 58823 - protein, 7 aa, synthetic construct
SKGMNSG

SEQ ID NO: 58824 - protein, 7 aa, synthetic construct
GNSTDRG

SEQ ID NO: 58825 - protein, 7 aa, synthetic construct
NPGSIIH

SEQ ID NO: 58826 - protein, 7 aa, synthetic construct
AKNMNYA

SEQ ID NO: 58827 - protein, 7 aa, synthetic construct
TRDNAEP

SEQ ID NO: 58828 - protein, 7 aa, synthetic construct
SKQSSFA

SEQ ID NO: 58829 - protein, 7 aa, synthetic construct
VNSADKP

SEQ ID NO: 58830 - protein, 7 aa, synthetic construct
EHGVPAD

SEQ ID NO: 58831 - protein, 7 aa, synthetic construct
VQREKSQ

SEQ ID NO: 58832 - protein, 7 aa, synthetic construct
RQQHTTP

SEQ ID NO: 58833 - protein, 7 aa, synthetic construct
YNKSQNA

SEQ ID NO: 58834 - protein, 7 aa, synthetic construct
DLRSDSR

SEQ ID NO: 58835 - protein, 7 aa, synthetic construct
RTNQANP

SEQ ID NO: 58836 - protein, 7 aa, synthetic construct
WVKGKED

SEQ ID NO: 58837 - protein, 7 aa, synthetic construct
KTWGEAM

SEQ ID NO: 58838 - protein, 7 aa, synthetic construct
IHGPNKF

SEQ ID NO: 58839 - protein, 7 aa, synthetic construct
WGSFVAE

SEQ ID NO: 58840 - protein, 7 aa, synthetic construct
FNKGIIP

SEQ ID NO: 58841 - protein, 7 aa, synthetic construct
QKKEVIG

SEQ ID NO: 58842 - protein, 7 aa, synthetic construct
YYKEQKY

SEQ ID NO: 58843 - protein, 7 aa, synthetic construct
TVSGRAD

SEQ ID NO: 58844 - protein, 7 aa, synthetic construct
KEPYQGS

SEQ ID NO: 58845 - protein, 7 aa, synthetic construct
DKPMHQH

SEQ ID NO: 58846 - protein, 7 aa, synthetic construct
NVRADTV

SEQ ID NO: 58847 - protein, 7 aa, synthetic construct
AIPHVRN

SEQ ID NO: 58848 - protein, 7 aa, synthetic construct
HQKGSSP

SEQ ID NO: 58849 - protein, 7 aa, synthetic construct
IMNGGKL

SEQ ID NO: 58850 - protein, 7 aa, synthetic construct
NNNTTFK

SEQ ID NO: 58851 - protein, 7 aa, synthetic construct
VTKGQGA

SEQ ID NO: 58852 - protein, 7 aa, synthetic construct
VYDVQRP

SEQ ID NO: 58853 - protein, 7 aa, synthetic construct
GAGTRHD

SEQ ID NO: 58854 - protein, 7 aa, synthetic construct
FKNSSQS

SEQ ID NO: 58855 - protein, 7 aa, synthetic construct
FRIPNDQ

SEQ ID NO: 58856 - protein, 7 aa, synthetic construct
TFQPKFS

SEQ ID NO: 58857 - protein, 7 aa, synthetic construct
KAFGVES

SEQ ID NO: 58858 - protein, 7 aa, synthetic construct
VRPSFLD

SEQ ID NO: 58859 - protein, 7 aa, synthetic construct
GSVPGMN

SEQ ID NO: 58860 - protein, 7 aa, synthetic construct
YGNRMVD

SEQ ID NO: 58861 - protein, 7 aa, synthetic construct
ARDMPRN

SEQ ID NO: 58862 - protein, 7 aa, synthetic construct
GMSAVKN

SEQ ID NO: 58863 - protein, 7 aa, synthetic construct
NNSRTEV

SEQ ID NO: 58864 - protein, 7 aa, synthetic construct
SQAQMKP

SEQ ID NO: 58865 - protein, 7 aa, synthetic construct
KNQGSSV

SEQ ID NO: 58866 - protein, 7 aa, synthetic construct
GKQNHQW

SEQ ID NO: 58867 - protein, 7 aa, synthetic construct
KKYNFDE

SEQ ID NO: 58868 - protein, 7 aa, synthetic construct
HDKPTNF

SEQ ID NO: 58869 - protein, 7 aa, synthetic construct
KTNADHS

SEQ ID NO: 58870 - protein, 7 aa, synthetic construct
HAKGYMQ

SEQ ID NO: 58871 - protein, 7 aa, synthetic construct
PPDRQGH

SEQ ID NO: 58872 - protein, 7 aa, synthetic construct
VNGKSGG

SEQ ID NO: 58873 - protein, 7 aa, synthetic construct
KTQNYQA

SEQ ID NO: 58874 - protein, 7 aa, synthetic construct
KTQNQQS

SEQ ID NO: 58875 - protein, 7 aa, synthetic construct
LGPKSTG

SEQ ID NO: 58876 - protein, 7 aa, synthetic construct
PDMQKIA

SEQ ID NO: 58877 - protein, 7 aa, synthetic construct
KTPNAMI

SEQ ID NO: 58878 - protein, 7 aa, synthetic construct
FHGIHKG

SEQ ID NO: 58879 - protein, 7 aa, synthetic construct
KVRAEYN

SEQ ID NO: 58880 - protein, 7 aa, synthetic construct
KTSSIVT

SEQ ID NO: 58881 - protein, 7 aa, synthetic construct
INKATQV

SEQ ID NO: 58882 - protein, 7 aa, synthetic construct
ERTSSSV

SEQ ID NO: 58883 - protein, 7 aa, synthetic construct
HSGENYK

SEQ ID NO: 58884 - protein, 7 aa, synthetic construct
HENGSRA

SEQ ID NO: 58885 - protein, 7 aa, synthetic construct
NTTREAS

SEQ ID NO: 58886 - protein, 7 aa, synthetic construct
MMMHPSA

SEQ ID NO: 58887 - protein, 7 aa, synthetic construct
FFKDHQT

SEQ ID NO: 58888 - protein, 7 aa, synthetic construct
GIKYDQR

SEQ ID NO: 58889 - protein, 7 aa, synthetic construct
NEIRPAG

SEQ ID NO: 58890 - protein, 7 aa, synthetic construct
VSMGKNP

SEQ ID NO: 58891 - protein, 7 aa, synthetic construct
NVKNTMS

SEQ ID NO: 58892 - protein, 7 aa, synthetic construct
RPKDANA

SEQ ID NO: 58893 - protein, 7 aa, synthetic construct
SKKDTNN

SEQ ID NO: 58894 - protein, 7 aa, synthetic construct
GMGTRNA

SEQ ID NO: 58895 - protein, 7 aa, synthetic construct
GGANRVG

SEQ ID NO: 58896 - protein, 7 aa, synthetic construct
GRSDHTP

SEQ ID NO: 58897 - protein, 7 aa, synthetic construct
PFNRGNP

SEQ ID NO: 58898 - protein, 7 aa, synthetic construct
LLDNTGK

SEQ ID NO: 58899 - protein, 7 aa, synthetic construct
PPVSIRN

SEQ ID NO: 58900 - protein, 7 aa, synthetic construct
NSYHSEK

SEQ ID NO: 58901 - protein, 7 aa, synthetic construct
FIQGGRI

SEQ ID NO: 58902 - protein, 7 aa, synthetic construct
NQRASNP

SEQ ID NO: 58903 - protein, 7 aa, synthetic construct
MHKDRSV

SEQ ID NO: 58904 - protein, 7 aa, synthetic construct
SKGPTQA

SEQ ID NO: 58905 - protein, 7 aa, synthetic construct
NRHWETE

SEQ ID NO: 58906 - protein, 7 aa, synthetic construct
HRHMPGG

SEQ ID NO: 58907 - protein, 7 aa, synthetic construct
THTHSTA

SEQ ID NO: 58908 - protein, 7 aa, synthetic construct
FPKVLDG

SEQ ID NO: 58909 - protein, 7 aa, synthetic construct
SRFSTTI

SEQ ID NO: 58910 - protein, 7 aa, synthetic construct
KESHMAS

SEQ ID NO: 58911 - protein, 7 aa, synthetic construct
TTNFATA

SEQ ID NO: 58912 - protein, 7 aa, synthetic construct
NPSPRIF

SEQ ID NO: 58913 - protein, 7 aa, synthetic construct
GRTTNHY

SEQ ID NO: 58914 - protein, 7 aa, synthetic construct
SAFKLNE

SEQ ID NO: 58915 - protein, 7 aa, synthetic construct
SNFGTSI

SEQ ID NO: 58916 - protein, 7 aa, synthetic construct
KRPEGGN

SEQ ID NO: 58917 - protein, 7 aa, synthetic construct
MVKKEAA

SEQ ID NO: 58918 - protein, 7 aa, synthetic construct
GAKINTG

SEQ ID NO: 58919 - protein, 7 aa, synthetic construct
KQAHDSP

SEQ ID NO: 58920 - protein, 7 aa, synthetic construct
YAATKQN

SEQ ID NO: 58921 - protein, 7 aa, synthetic construct
PTKNAMT

SEQ ID NO: 58922 - protein, 7 aa, synthetic construct
YLINTKD

SEQ ID NO: 58923 - protein, 7 aa, synthetic construct
QKPTNGS

SEQ ID NO: 58924 - protein, 7 aa, synthetic construct
TLHLHAA

SEQ ID NO: 58925 - protein, 7 aa, synthetic construct
VSHMATG

SEQ ID NO: 58926 - protein, 7 aa, synthetic construct
GRKQIND

SEQ ID NO: 58927 - protein, 7 aa, synthetic construct
VKPQSGS

SEQ ID NO: 58928 - protein, 7 aa, synthetic construct
YTSLGKD

SEQ ID NO: 58929 - protein, 7 aa, synthetic construct
LRTVVGT

SEQ ID NO: 58930 - protein, 7 aa, synthetic construct
DGKFGTN

SEQ ID NO: 58931 - protein, 7 aa, synthetic construct
GNKMLDF

SEQ ID NO: 58932 - protein, 7 aa, synthetic construct
RYTETSV

SEQ ID NO: 58933 - protein, 7 aa, synthetic construct
HRDAAMN

SEQ ID NO: 58934 - protein, 7 aa, synthetic construct
YNHLHLA

SEQ ID NO: 58935 - protein, 7 aa, synthetic construct
RPVISQG

SEQ ID NO: 58936 - protein, 7 aa, synthetic construct
FNSHKNA

SEQ ID NO: 58937 - protein, 7 aa, synthetic construct
AALKSDP

SEQ ID NO: 58938 - protein, 7 aa, synthetic construct
GKPPSNA

SEQ ID NO: 58939 - protein, 7 aa, synthetic construct
SARANSP

SEQ ID NO: 58940 - protein, 7 aa, synthetic construct
SVQGQIV

SEQ ID NO: 58941 - protein, 7 aa, synthetic construct
TSGNNKT

SEQ ID NO: 58942 - protein, 7 aa, synthetic construct
LVRMTSQ

SEQ ID NO: 58943 - protein, 7 aa, synthetic construct
KMQNSSL

SEQ ID NO: 58944 - protein, 7 aa, synthetic construct
WKHPQET

SEQ ID NO: 58945 - protein, 7 aa, synthetic construct
IDNRSTH

SEQ ID NO: 58946 - protein, 7 aa, synthetic construct
KNTGSNV

SEQ ID NO: 58947 - protein, 7 aa, synthetic construct
NGREVSP

SEQ ID NO: 58948 - protein, 7 aa, synthetic construct
VKSMIVN

SEQ ID NO: 58949 - protein, 7 aa, synthetic construct
APKFSQG

SEQ ID NO: 58950 - protein, 7 aa, synthetic construct
LQTRENN

SEQ ID NO: 58951 - protein, 7 aa, synthetic construct
LSHFANQ

SEQ ID NO: 58952 - protein, 7 aa, synthetic construct
EIRNIVI

SEQ ID NO: 58953 - protein, 7 aa, synthetic construct
SHHASNP

SEQ ID NO: 58954 - protein, 7 aa, synthetic construct
FQSKGQN

SEQ ID NO: 58955 - protein, 7 aa, synthetic construct
KPPQTAA

SEQ ID NO: 58956 - protein, 7 aa, synthetic construct
QHVQGHS

SEQ ID NO: 58957 - protein, 7 aa, synthetic construct
MNNGTQR

SEQ ID NO: 58958 - protein, 7 aa, synthetic construct
TLLLTNP

SEQ ID NO: 58959 - protein, 7 aa, synthetic construct
KSPGTQT

SEQ ID NO: 58960 - protein, 7 aa, synthetic construct
QQTVKGY

SEQ ID NO: 58961 - protein, 7 aa, synthetic construct
HTKYQDG

SEQ ID NO: 58962 - protein, 7 aa, synthetic construct
KTATANA

SEQ ID NO: 58963 - protein, 7 aa, synthetic construct
KTQNVPS

SEQ ID NO: 58964 - protein, 7 aa, synthetic construct
QTMERHS

SEQ ID NO: 58965 - protein, 7 aa, synthetic construct
IKASDHW

SEQ ID NO: 58966 - protein, 7 aa, synthetic construct
KVTANNF

SEQ ID NO: 58967 - protein, 7 aa, synthetic construct
YKGTVAG

SEQ ID NO: 58968 - protein, 7 aa, synthetic construct
TGTNKMA

SEQ ID NO: 58969 - protein, 7 aa, synthetic construct
VPSEQKY

SEQ ID NO: 58970 - protein, 7 aa, synthetic construct
SNPPGQA

SEQ ID NO: 58971 - protein, 7 aa, synthetic construct
MASRSGP

SEQ ID NO: 58972 - protein, 7 aa, synthetic construct
KDFHDVP

SEQ ID NO: 58973 - protein, 7 aa, synthetic construct
KVHNDRV

SEQ ID NO: 58974 - protein, 7 aa, synthetic construct
ITINNTM

SEQ ID NO: 58975 - protein, 7 aa, synthetic construct
HNRTNTY

SEQ ID NO: 58976 - protein, 7 aa, synthetic construct
EYTLKSG

SEQ ID NO: 58977 - protein, 7 aa, synthetic construct
TLNVAHS

SEQ ID NO: 58978 - protein, 7 aa, synthetic construct
NKHSPNG

SEQ ID NO: 58979 - protein, 7 aa, synthetic construct
PFKHAEL

SEQ ID NO: 58980 - protein, 7 aa, synthetic construct
INGRTEY

SEQ ID NO: 58981 - protein, 7 aa, synthetic construct
IDVKWPN

SEQ ID NO: 58982 - protein, 7 aa, synthetic construct
NPGADLR

SEQ ID NO: 58983 - protein, 7 aa, synthetic construct
NTSGYQG

SEQ ID NO: 58984 - protein, 7 aa, synthetic construct
IDGAHKF

SEQ ID NO: 58985 - protein, 7 aa, synthetic construct
KPTYQAG

SEQ ID NO: 58986 - protein, 7 aa, synthetic construct
SKMHVHG

SEQ ID NO: 58987 - protein, 7 aa, synthetic construct
TKHVYPE

SEQ ID NO: 58988 - protein, 7 aa, synthetic construct
REKNSLG

SEQ ID NO: 58989 - protein, 7 aa, synthetic construct
YSKGMGQ

SEQ ID NO: 58990 - protein, 7 aa, synthetic construct
RDGSSYP

SEQ ID NO: 58991 - protein, 7 aa, synthetic construct
GMMFTTG

SEQ ID NO: 58992 - protein, 7 aa, synthetic construct
YPDMRER

SEQ ID NO: 58993 - protein, 7 aa, synthetic construct
FAEKRSS

SEQ ID NO: 58994 - protein, 7 aa, synthetic construct
VAGTNMR

SEQ ID NO: 58995 - protein, 7 aa, synthetic construct
HKGIQIY

SEQ ID NO: 58996 - protein, 7 aa, synthetic construct
EQKRMAA

SEQ ID NO: 58997 - protein, 7 aa, synthetic construct
PKYGSAD

SEQ ID NO: 58998 - protein, 7 aa, synthetic construct
KSASDHP

SEQ ID NO: 58999 - protein, 7 aa, synthetic construct
SPRTNVA

SEQ ID NO: 59000 - protein, 7 aa, synthetic construct
KMKSVEY

SEQ ID NO: 59001 - protein, 7 aa, synthetic construct
FKVPDFD

SEQ ID NO: 59002 - protein, 7 aa, synthetic construct
LRDPKWQ

SEQ ID NO: 59003 - protein, 7 aa, synthetic construct
KSMRPED

SEQ ID NO: 59004 - protein, 7 aa, synthetic construct
SHAAHQA

SEQ ID NO: 59005 - protein, 7 aa, synthetic construct
PKPINQH

SEQ ID NO: 59006 - protein, 7 aa, synthetic construct
YSKPAMP

SEQ ID NO: 59007 - protein, 7 aa, synthetic construct
WKTSHAA

SEQ ID NO: 59008 - protein, 7 aa, synthetic construct
SQNTHLM

SEQ ID NO: 59009 - protein, 7 aa, synthetic construct
RRDPSMA

SEQ ID NO: 59010 - protein, 7 aa, synthetic construct
DQPHIRQ

SEQ ID NO: 59011 - protein, 7 aa, synthetic construct
VSTNKTG

SEQ ID NO: 59012 - protein, 7 aa, synthetic construct
RQLKVDY

SEQ ID NO: 59013 - protein, 7 aa, synthetic construct
YQDTYKN

SEQ ID NO: 59014 - protein, 7 aa, synthetic construct
NIQAMPS

SEQ ID NO: 59015 - protein, 7 aa, synthetic construct
SMPRTIV

SEQ ID NO: 59016 - protein, 7 aa, synthetic construct
SKADWGK

SEQ ID NO: 59017 - protein, 7 aa, synthetic construct
IKVFPSG

SEQ ID NO: 59018 - protein, 7 aa, synthetic construct
VERPKLT

SEQ ID NO: 59019 - protein, 7 aa, synthetic construct
RDVKVGD

SEQ ID NO: 59020 - protein, 7 aa, synthetic construct
DGRGMGR

SEQ ID NO: 59021 - protein, 7 aa, synthetic construct
TKVQAVP

SEQ ID NO: 59022 - protein, 7 aa, synthetic construct
HQVHLVE

SEQ ID NO: 59023 - protein, 7 aa, synthetic construct
FNATREM

SEQ ID NO: 59024 - protein, 7 aa, synthetic construct
SKSQMSV

SEQ ID NO: 59025 - protein, 7 aa, synthetic construct
GTYPSKM

SEQ ID NO: 59026 - protein, 7 aa, synthetic construct
ARPNTTS

SEQ ID NO: 59027 - protein, 7 aa, synthetic construct
HEAIKNA

SEQ ID NO: 59028 - protein, 7 aa, synthetic construct
MRDLKGQ

SEQ ID NO: 59029 - protein, 7 aa, synthetic construct
YAKLDAS

SEQ ID NO: 59030 - protein, 7 aa, synthetic construct
HRERPDH

SEQ ID NO: 59031 - protein, 7 aa, synthetic construct
MVNTANK

SEQ ID NO: 59032 - protein, 7 aa, synthetic construct
VQKSIPH

SEQ ID NO: 59033 - protein, 7 aa, synthetic construct
KNTHELP

SEQ ID NO: 59034 - protein, 7 aa, synthetic construct
TRVNAEQ

SEQ ID NO: 59035 - protein, 7 aa, synthetic construct
NKPAAHF

SEQ ID NO: 59036 - protein, 7 aa, synthetic construct
GKANMKE

SEQ ID NO: 59037 - protein, 7 aa, synthetic construct
SHSLNEK

SEQ ID NO: 59038 - protein, 7 aa, synthetic construct
MVQPAKS

SEQ ID NO: 59039 - protein, 7 aa, synthetic construct
MKSMNMP

SEQ ID NO: 59040 - protein, 7 aa, synthetic construct
TKQTNSV

SEQ ID NO: 59041 - protein, 7 aa, synthetic construct
YQRIATA

SEQ ID NO: 59042 - protein, 7 aa, synthetic construct
YPNSATR

SEQ ID NO: 59043 - protein, 7 aa, synthetic construct
QQKTNNA

SEQ ID NO: 59044 - protein, 7 aa, synthetic construct
WRQHLSA

SEQ ID NO: 59045 - protein, 7 aa, synthetic construct
IPAMSAY

SEQ ID NO: 59046 - protein, 7 aa, synthetic construct
FQSGKYT

SEQ ID NO: 59047 - protein, 7 aa, synthetic construct
KTQFAAV

SEQ ID NO: 59048 - protein, 7 aa, synthetic construct
TRASADT

SEQ ID NO: 59049 - protein, 7 aa, synthetic construct
PIGKQMT

SEQ ID NO: 59050 - protein, 7 aa, synthetic construct
SNTYMKA

SEQ ID NO: 59051 - protein, 7 aa, synthetic construct
HTGTHGH

SEQ ID NO: 59052 - protein, 7 aa, synthetic construct
TVNQRAP

SEQ ID NO: 59053 - protein, 7 aa, synthetic construct
QSDRRDG

SEQ ID NO: 59054 - protein, 7 aa, synthetic construct
GPVKVLG

SEQ ID NO: 59055 - protein, 7 aa, synthetic construct
TSSEKSQ

SEQ ID NO: 59056 - protein, 7 aa, synthetic construct
FTPVVTP

SEQ ID NO: 59057 - protein, 7 aa, synthetic construct
GAHYANG

SEQ ID NO: 59058 - protein, 7 aa, synthetic construct
RESNHVF

SEQ ID NO: 59059 - protein, 7 aa, synthetic construct
KQGMQHI

SEQ ID NO: 59060 - protein, 7 aa, synthetic construct
MHRGNQE

SEQ ID NO: 59061 - protein, 7 aa, synthetic construct
QNHHAAT

SEQ ID NO: 59062 - protein, 7 aa, synthetic construct
AGPYPTP

SEQ ID NO: 59063 - protein, 7 aa, synthetic construct
HTQKHTA

SEQ ID NO: 59064 - protein, 7 aa, synthetic construct
NDRQGSR

SEQ ID NO: 59065 - protein, 7 aa, synthetic construct
VGIKQQN

SEQ ID NO: 59066 - protein, 7 aa, synthetic construct
MFTHKHD

SEQ ID NO: 59067 - protein, 7 aa, synthetic construct
YAHRTRE

SEQ ID NO: 59068 - protein, 7 aa, synthetic construct
RHDKGPH

SEQ ID NO: 59069 - protein, 7 aa, synthetic construct
TMQWIKE

SEQ ID NO: 59070 - protein, 7 aa, synthetic construct
TQNQRSP

SEQ ID NO: 59071 - protein, 7 aa, synthetic construct
TGTPNGS

SEQ ID NO: 59072 - protein, 7 aa, synthetic construct
TSKGTSP

SEQ ID NO: 59073 - protein, 7 aa, synthetic construct
LLNVTRE

SEQ ID NO: 59074 - protein, 7 aa, synthetic construct
KAGSKDA

SEQ ID NO: 59075 - protein, 7 aa, synthetic construct
RPDGKTQ

SEQ ID NO: 59076 - protein, 7 aa, synthetic construct
KNTATQA

SEQ ID NO: 59077 - protein, 7 aa, synthetic construct
PRANQTA

SEQ ID NO: 59078 - protein, 7 aa, synthetic construct
RDSSKMG

SEQ ID NO: 59079 - protein, 7 aa, synthetic construct
HNVRTID

SEQ ID NO: 59080 - protein, 7 aa, synthetic construct
MRTPVGS

SEQ ID NO: 59081 - protein, 7 aa, synthetic construct
IATYSTE

SEQ ID NO: 59082 - protein, 7 aa, synthetic construct
GSKMMQA

SEQ ID NO: 59083 - protein, 7 aa, synthetic construct
YRYEGEN

SEQ ID NO: 59084 - protein, 7 aa, synthetic construct
LEQFNRQ

SEQ ID NO: 59085 - protein, 7 aa, synthetic construct
ADHRHNV

SEQ ID NO: 59086 - protein, 7 aa, synthetic construct
SGKNANP

SEQ ID NO: 59087 - protein, 7 aa, synthetic construct
GLGMAGL

SEQ ID NO: 59088 - protein, 7 aa, synthetic construct
QSIVVHE

SEQ ID NO: 59089 - protein, 7 aa, synthetic construct
HKGNEYT

SEQ ID NO: 59090 - protein, 7 aa, synthetic construct
GKAGQVF

SEQ ID NO: 59091 - protein, 7 aa, synthetic construct
FPGKSSL

SEQ ID NO: 59092 - protein, 7 aa, synthetic construct
KTPGNGS

SEQ ID NO: 59093 - protein, 7 aa, synthetic construct
RFTQEHA

SEQ ID NO: 59094 - protein, 7 aa, synthetic construct
ANKQTSG

SEQ ID NO: 59095 - protein, 7 aa, synthetic construct
MAPSKSP

SEQ ID NO: 59096 - protein, 7 aa, synthetic construct
TKSAQQA

SEQ ID NO: 59097 - protein, 7 aa, synthetic construct
QDNLYRS

SEQ ID NO: 59098 - protein, 7 aa, synthetic construct
NKERVSS

SEQ ID NO: 59099 - protein, 7 aa, synthetic construct
RQGQAHP

SEQ ID NO: 59100 - protein, 7 aa, synthetic construct
TMPSQKI

SEQ ID NO: 59101 - protein, 7 aa, synthetic construct
MTPARHG

SEQ ID NO: 59102 - protein, 7 aa, synthetic construct
KDPATHN

SEQ ID NO: 59103 - protein, 7 aa, synthetic construct
RSVTNGA

SEQ ID NO: 59104 - protein, 7 aa, synthetic construct
DHGSRAA

SEQ ID NO: 59105 - protein, 7 aa, synthetic construct
MAKQDRQ

SEQ ID NO: 59106 - protein, 7 aa, synthetic construct
INSGTPR

SEQ ID NO: 59107 - protein, 7 aa, synthetic construct
SDRMKDR

SEQ ID NO: 59108 - protein, 7 aa, synthetic construct
QDRVAML

SEQ ID NO: 59109 - protein, 7 aa, synthetic construct
TNRGVNA

SEQ ID NO: 59110 - protein, 7 aa, synthetic construct
QHSKAVP

SEQ ID NO: 59111 - protein, 7 aa, synthetic construct
KSNIQMS

SEQ ID NO: 59112 - protein, 7 aa, synthetic construct
MHNDNMI

SEQ ID NO: 59113 - protein, 7 aa, synthetic construct
MALKSPP

SEQ ID NO: 59114 - protein, 7 aa, synthetic construct
VQSKVSG

SEQ ID NO: 59115 - protein, 7 aa, synthetic construct
IYNTKNT

SEQ ID NO: 59116 - protein, 7 aa, synthetic construct
NKSGVMA

SEQ ID NO: 59117 - protein, 7 aa, synthetic construct
TTKNVQA

SEQ ID NO: 59118 - protein, 7 aa, synthetic construct
SGIGLKS

SEQ ID NO: 59119 - protein, 7 aa, synthetic construct
YRGYGQA

SEQ ID NO: 59120 - protein, 7 aa, synthetic construct
HFNSKDE

SEQ ID NO: 59121 - protein, 7 aa, synthetic construct
YFRTKGE

SEQ ID NO: 59122 - protein, 7 aa, synthetic construct
PLDKNGP

SEQ ID NO: 59123 - protein, 7 aa, synthetic construct
TIISHMG

SEQ ID NO: 59124 - protein, 7 aa, synthetic construct
QFRDHRT

SEQ ID NO: 59125 - protein, 7 aa, synthetic construct
QHYGPMG

SEQ ID NO: 59126 - protein, 7 aa, synthetic construct
FDNNRGV

SEQ ID NO: 59127 - protein, 7 aa, synthetic construct
ERRGESP

SEQ ID NO: 59128 - protein, 7 aa, synthetic construct
SKFNENS

SEQ ID NO: 59129 - protein, 7 aa, synthetic construct
RPNQASG

SEQ ID NO: 59130 - protein, 7 aa, synthetic construct
WHKVSFD

SEQ ID NO: 59131 - protein, 7 aa, synthetic construct
SALKDHG

SEQ ID NO: 59132 - protein, 7 aa, synthetic construct
IGGRPDM

SEQ ID NO: 59133 - protein, 7 aa, synthetic construct
SPQTHNH

SEQ ID NO: 59134 - protein, 7 aa, synthetic construct
WRAGVFE

SEQ ID NO: 59135 - protein, 7 aa, synthetic construct
PPSKEYS

SEQ ID NO: 59136 - protein, 7 aa, synthetic construct
KPASTSW

SEQ ID NO: 59137 - protein, 7 aa, synthetic construct
AKDFFPG

SEQ ID NO: 59138 - protein, 7 aa, synthetic construct
IGGITHH

SEQ ID NO: 59139 - protein, 7 aa, synthetic construct
IDGRGSQ

SEQ ID NO: 59140 - protein, 7 aa, synthetic construct
GQTAVKG

SEQ ID NO: 59141 - protein, 7 aa, synthetic construct
SNKPAGA

SEQ ID NO: 59142 - protein, 7 aa, synthetic construct
AYATKTV

SEQ ID NO: 59143 - protein, 7 aa, synthetic construct
KAEWVHS

SEQ ID NO: 59144 - protein, 7 aa, synthetic construct
GVPKHTA

SEQ ID NO: 59145 - protein, 7 aa, synthetic construct
NQKNSDQ

SEQ ID NO: 59146 - protein, 7 aa, synthetic construct
GDNGSKY

SEQ ID NO: 59147 - protein, 7 aa, synthetic construct
SVKTNTA

SEQ ID NO: 59148 - protein, 7 aa, synthetic construct
SYPPSAG

SEQ ID NO: 59149 - protein, 7 aa, synthetic construct
KMQAGGA

SEQ ID NO: 59150 - protein, 7 aa, synthetic construct
KQNNQNP

SEQ ID NO: 59151 - protein, 7 aa, synthetic construct
MKGSNGA

SEQ ID NO: 59152 - protein, 7 aa, synthetic construct
PNPHRSP

SEQ ID NO: 59153 - protein, 7 aa, synthetic construct
YTPGSKP

SEQ ID NO: 59154 - protein, 7 aa, synthetic construct
KRDSNVA

SEQ ID NO: 59155 - protein, 7 aa, synthetic construct
GQIGVRG

SEQ ID NO: 59156 - protein, 7 aa, synthetic construct
RDKMSQP

SEQ ID NO: 59157 - protein, 7 aa, synthetic construct
LTTGNSG

SEQ ID NO: 59158 - protein, 7 aa, synthetic construct
RENRYPN

SEQ ID NO: 59159 - protein, 7 aa, synthetic construct
WRSGDSM

SEQ ID NO: 59160 - protein, 7 aa, synthetic construct
QPKGNFS

SEQ ID NO: 59161 - protein, 7 aa, synthetic construct
QRNTQNS

SEQ ID NO: 59162 - protein, 7 aa, synthetic construct
PSIQRAA

SEQ ID NO: 59163 - protein, 7 aa, synthetic construct
HPKPKSD

SEQ ID NO: 59164 - protein, 7 aa, synthetic construct
FGSAHSG

SEQ ID NO: 59165 - protein, 7 aa, synthetic construct
AGNTKAD

SEQ ID NO: 59166 - protein, 7 aa, synthetic construct
YRPTDRI

SEQ ID NO: 59167 - protein, 7 aa, synthetic construct
SSHTGKE

SEQ ID NO: 59168 - protein, 7 aa, synthetic construct
IMAGKST

SEQ ID NO: 59169 - protein, 7 aa, synthetic construct
TKDIRSP

SEQ ID NO: 59170 - protein, 7 aa, synthetic construct
RNMGMTN

SEQ ID NO: 59171 - protein, 7 aa, synthetic construct
YAPYQGK

SEQ ID NO: 59172 - protein, 7 aa, synthetic construct
RAVNQLD

SEQ ID NO: 59173 - protein, 7 aa, synthetic construct
RQGNKED

SEQ ID NO: 59174 - protein, 7 aa, synthetic construct
NKSSSQL

SEQ ID NO: 59175 - protein, 7 aa, synthetic construct
EKYGAQI

SEQ ID NO: 59176 - protein, 7 aa, synthetic construct
ARNTGAA

SEQ ID NO: 59177 - protein, 7 aa, synthetic construct
HLDTANM

SEQ ID NO: 59178 - protein, 7 aa, synthetic construct
KWHGENG

SEQ ID NO: 59179 - protein, 7 aa, synthetic construct
EKTTYGR

SEQ ID NO: 59180 - protein, 7 aa, synthetic construct
KSTNASN

SEQ ID NO: 59181 - protein, 7 aa, synthetic construct
TSGKATA

SEQ ID NO: 59182 - protein, 7 aa, synthetic construct
HPAKSYM

SEQ ID NO: 59183 - protein, 7 aa, synthetic construct
EQRQNWG

SEQ ID NO: 59184 - protein, 7 aa, synthetic construct
GTQSKQS

SEQ ID NO: 59185 - protein, 7 aa, synthetic construct
NITHLKN

SEQ ID NO: 59186 - protein, 7 aa, synthetic construct
KENLASK

SEQ ID NO: 59187 - protein, 7 aa, synthetic construct
LNQMGKP

SEQ ID NO: 59188 - protein, 7 aa, synthetic construct
LGTRGPP

SEQ ID NO: 59189 - protein, 7 aa, synthetic construct
FTNNKTT

SEQ ID NO: 59190 - protein, 7 aa, synthetic construct
GKELPYA

SEQ ID NO: 59191 - protein, 7 aa, synthetic construct
PPHMPGG

SEQ ID NO: 59192 - protein, 7 aa, synthetic construct
LNSTQLG

SEQ ID NO: 59193 - protein, 7 aa, synthetic construct
HFTNKDE

SEQ ID NO: 59194 - protein, 7 aa, synthetic construct
LVIGRTQ

SEQ ID NO: 59195 - protein, 7 aa, synthetic construct
MNNAQAQ

SEQ ID NO: 59196 - protein, 7 aa, synthetic construct
GNLNRQQ

SEQ ID NO: 59197 - protein, 7 aa, synthetic construct
KNNGAMP

SEQ ID NO: 59198 - protein, 7 aa, synthetic construct
NQKNGQA

SEQ ID NO: 59199 - protein, 7 aa, synthetic construct
KQGQSNP

SEQ ID NO: 59200 - protein, 7 aa, synthetic construct
PNKSQGS

SEQ ID NO: 59201 - protein, 7 aa, synthetic construct
MRDRANH

SEQ ID NO: 59202 - protein, 7 aa, synthetic construct
PKRPEHD

SEQ ID NO: 59203 - protein, 7 aa, synthetic construct
AHGGKNP

SEQ ID NO: 59204 - protein, 7 aa, synthetic construct
FGTKVPF

SEQ ID NO: 59205 - protein, 7 aa, synthetic construct
SSKFAIP

SEQ ID NO: 59206 - protein, 7 aa, synthetic construct
GNMHGTP

SEQ ID NO: 59207 - protein, 7 aa, synthetic construct
YHPIKHG

SEQ ID NO: 59208 - protein, 7 aa, synthetic construct
HQAQIPG

SEQ ID NO: 59209 - protein, 7 aa, synthetic construct
GGTGMVN

SEQ ID NO: 59210 - protein, 7 aa, synthetic construct
RPGRPES

SEQ ID NO: 59211 - protein, 7 aa, synthetic construct
VKMSLNM

SEQ ID NO: 59212 - protein, 7 aa, synthetic construct
TSKPTAG

SEQ ID NO: 59213 - protein, 7 aa, synthetic construct
SNLQKVE

SEQ ID NO: 59214 - protein, 7 aa, synthetic construct
QPQVTKQ

SEQ ID NO: 59215 - protein, 7 aa, synthetic construct
KDHMNMG

SEQ ID NO: 59216 - protein, 7 aa, synthetic construct
THGYNTA

SEQ ID NO: 59217 - protein, 7 aa, synthetic construct
QAQKMGS

SEQ ID NO: 59218 - protein, 7 aa, synthetic construct
PKQSNSS

SEQ ID NO: 59219 - protein, 7 aa, synthetic construct
MRMAVSD

SEQ ID NO: 59220 - protein, 7 aa, synthetic construct
YEPTHHG

SEQ ID NO: 59221 - protein, 7 aa, synthetic construct
MSRMPTM

SEQ ID NO: 59222 - protein, 7 aa, synthetic construct
MRAATAA

SEQ ID NO: 59223 - protein, 7 aa, synthetic construct
QQGTKSG

SEQ ID NO: 59224 - protein, 7 aa, synthetic construct
QNQTRIQ

SEQ ID NO: 59225 - protein, 7 aa, synthetic construct
VRNPEKI

SEQ ID NO: 59226 - protein, 7 aa, synthetic construct
QNPKSSA

SEQ ID NO: 59227 - protein, 7 aa, synthetic construct
TAMAKQD

SEQ ID NO: 59228 - protein, 7 aa, synthetic construct
KKPDMNN

SEQ ID NO: 59229 - protein, 7 aa, synthetic construct
MGAHVEY

SEQ ID NO: 59230 - protein, 7 aa, synthetic construct
RNHNTYG

SEQ ID NO: 59231 - protein, 7 aa, synthetic construct
YSIAQVP

SEQ ID NO: 59232 - protein, 7 aa, synthetic construct
LAGGAKA

SEQ ID NO: 59233 - protein, 7 aa, synthetic construct
THVGERL

SEQ ID NO: 59234 - protein, 7 aa, synthetic construct
VENYARV

SEQ ID NO: 59235 - protein, 7 aa, synthetic construct
SNALTLG

SEQ ID NO: 59236 - protein, 7 aa, synthetic construct
IRNTLQE

SEQ ID NO: 59237 - protein, 7 aa, synthetic construct
STKAGND

SEQ ID NO: 59238 - protein, 7 aa, synthetic construct
GTNGRMP

SEQ ID NO: 59239 - protein, 7 aa, synthetic construct
QMRIADT

SEQ ID NO: 59240 - protein, 7 aa, synthetic construct
RQPASVG

SEQ ID NO: 59241 - protein, 7 aa, synthetic construct
MKNKVEW

SEQ ID NO: 59242 - protein, 7 aa, synthetic construct
GHAITRA

SEQ ID NO: 59243 - protein, 7 aa, synthetic construct
WAAHKQS

SEQ ID NO: 59244 - protein, 7 aa, synthetic construct
AYKSMIP

SEQ ID NO: 59245 - protein, 7 aa, synthetic construct
VATSQKV

SEQ ID NO: 59246 - protein, 7 aa, synthetic construct
PKQNTAS

SEQ ID NO: 59247 - protein, 7 aa, synthetic construct
SELVRLG

SEQ ID NO: 59248 - protein, 7 aa, synthetic construct
PQPANRM

SEQ ID NO: 59249 - protein, 7 aa, synthetic construct
IRGTQNT

SEQ ID NO: 59250 - protein, 7 aa, synthetic construct
LQGARGV

SEQ ID NO: 59251 - protein, 7 aa, synthetic construct
RANQGYM

SEQ ID NO: 59252 - protein, 7 aa, synthetic construct
HKMPTHD

SEQ ID NO: 59253 - protein, 7 aa, synthetic construct
EDTKYVG

SEQ ID NO: 59254 - protein, 7 aa, synthetic construct
MKHITHS

SEQ ID NO: 59255 - protein, 7 aa, synthetic construct
HPGSWPA

SEQ ID NO: 59256 - protein, 7 aa, synthetic construct
NPRSGTD

SEQ ID NO: 59257 - protein, 7 aa, synthetic construct
MNGHKMP

SEQ ID NO: 59258 - protein, 7 aa, synthetic construct
RGDRMNG

SEQ ID NO: 59259 - protein, 7 aa, synthetic construct
INVKNLE

SEQ ID NO: 59260 - protein, 7 aa, synthetic construct
NFAGNMH

SEQ ID NO: 59261 - protein, 7 aa, synthetic construct
NLLNSVH

SEQ ID NO: 59262 - protein, 7 aa, synthetic construct
HASPQKF

SEQ ID NO: 59263 - protein, 7 aa, synthetic construct
AAVPRNS

SEQ ID NO: 59264 - protein, 7 aa, synthetic construct
ETMMIKA

SEQ ID NO: 59265 - protein, 7 aa, synthetic construct
MGARVPS

SEQ ID NO: 59266 - protein, 7 aa, synthetic construct
RTVVKTE

SEQ ID NO: 59267 - protein, 7 aa, synthetic construct
NAIWVEE

SEQ ID NO: 59268 - protein, 7 aa, synthetic construct
YPNAANP

SEQ ID NO: 59269 - protein, 7 aa, synthetic construct
FQGTPTP

SEQ ID NO: 59270 - protein, 7 aa, synthetic construct
VHVGRHE

SEQ ID NO: 59271 - protein, 7 aa, synthetic construct
KTNTTSN

SEQ ID NO: 59272 - protein, 7 aa, synthetic construct
LNNNLPT

SEQ ID NO: 59273 - protein, 7 aa, synthetic construct
KSAPGME

SEQ ID NO: 59274 - protein, 7 aa, synthetic construct
KVNNVSA

SEQ ID NO: 59275 - protein, 7 aa, synthetic construct
MQTGALI

SEQ ID NO: 59276 - protein, 7 aa, synthetic construct
KTNDRHD

SEQ ID NO: 59277 - protein, 7 aa, synthetic construct
DDKGKHS

SEQ ID NO: 59278 - protein, 7 aa, synthetic construct
PVQYGHN

SEQ ID NO: 59279 - protein, 7 aa, synthetic construct
PISDPGR

SEQ ID NO: 59280 - protein, 7 aa, synthetic construct
GKATMIA

SEQ ID NO: 59281 - protein, 7 aa, synthetic construct
KSPTNAP

SEQ ID NO: 59282 - protein, 7 aa, synthetic construct
TGQLSGS

SEQ ID NO: 59283 - protein, 7 aa, synthetic construct
QTNHVNL

SEQ ID NO: 59284 - protein, 7 aa, synthetic construct
FSTDKTR

SEQ ID NO: 59285 - protein, 7 aa, synthetic construct
NRYNTGS

SEQ ID NO: 59286 - protein, 7 aa, synthetic construct
AKESTVG

SEQ ID NO: 59287 - protein, 7 aa, synthetic construct
RTSGNQA

SEQ ID NO: 59288 - protein, 7 aa, synthetic construct
YAYNDGK

SEQ ID NO: 59289 - protein, 7 aa, synthetic construct
NSQRGSP

SEQ ID NO: 59290 - protein, 7 aa, synthetic construct
ILPSEIK

SEQ ID NO: 59291 - protein, 7 aa, synthetic construct
DTRHQNH

SEQ ID NO: 59292 - protein, 7 aa, synthetic construct
YDAKTPA

SEQ ID NO: 59293 - protein, 7 aa, synthetic construct
QKTTTSG

SEQ ID NO: 59294 - protein, 7 aa, synthetic construct
GTVHEVK

SEQ ID NO: 59295 - protein, 7 aa, synthetic construct
LNIKWQA

SEQ ID NO: 59296 - protein, 7 aa, synthetic construct
VKATMTQ

SEQ ID NO: 59297 - protein, 7 aa, synthetic construct
TGKATEN

SEQ ID NO: 59298 - protein, 7 aa, synthetic construct
AYGSHPP

SEQ ID NO: 59299 - protein, 7 aa, synthetic construct
YLKATIN

SEQ ID NO: 59300 - protein, 7 aa, synthetic construct
GYKTTSS

SEQ ID NO: 59301 - protein, 7 aa, synthetic construct
NAQKTTG

SEQ ID NO: 59302 - protein, 7 aa, synthetic construct
KPKEYTD

SEQ ID NO: 59303 - protein, 7 aa, synthetic construct
MPGVKAI

SEQ ID NO: 59304 - protein, 7 aa, synthetic construct
QPGSKQA

SEQ ID NO: 59305 - protein, 7 aa, synthetic construct
EKSGVRE

SEQ ID NO: 59306 - protein, 7 aa, synthetic construct
YTVKSDT

SEQ ID NO: 59307 - protein, 7 aa, synthetic construct
KKDTIRD

SEQ ID NO: 59308 - protein, 7 aa, synthetic construct
AKIHTNF

SEQ ID NO: 59309 - protein, 7 aa, synthetic construct
AKPQSTS

SEQ ID NO: 59310 - protein, 7 aa, synthetic construct
ITTKTGP

SEQ ID NO: 59311 - protein, 7 aa, synthetic construct
QAVHMNP

SEQ ID NO: 59312 - protein, 7 aa, synthetic construct
LTTTSGI

SEQ ID NO: 59313 - protein, 7 aa, synthetic construct
FKATTRD

SEQ ID NO: 59314 - protein, 7 aa, synthetic construct
IGAAQTS

SEQ ID NO: 59315 - protein, 7 aa, synthetic construct
VRTDSQR

SEQ ID NO: 59316 - protein, 7 aa, synthetic construct
GTNTVKG

SEQ ID NO: 59317 - protein, 7 aa, synthetic construct
GAERGLG

SEQ ID NO: 59318 - protein, 7 aa, synthetic construct
HNANKML

SEQ ID NO: 59319 - protein, 7 aa, synthetic construct
SFQAGNP

SEQ ID NO: 59320 - protein, 7 aa, synthetic construct
GGGNSLY

SEQ ID NO: 59321 - protein, 7 aa, synthetic construct
YVRSHHE

SEQ ID NO: 59322 - protein, 7 aa, synthetic construct
TEHPTRF

SEQ ID NO: 59323 - protein, 7 aa, synthetic construct
APGRIGH

SEQ ID NO: 59324 - protein, 7 aa, synthetic construct
WSDLAKN

SEQ ID NO: 59325 - protein, 7 aa, synthetic construct
HEPTSRS

SEQ ID NO: 59326 - protein, 7 aa, synthetic construct
STSFTQP

SEQ ID NO: 59327 - protein, 7 aa, synthetic construct
KMPGNLS

SEQ ID NO: 59328 - protein, 7 aa, synthetic construct
FETGKKN

SEQ ID NO: 59329 - protein, 7 aa, synthetic construct
KIGSHNQ

SEQ ID NO: 59330 - protein, 7 aa, synthetic construct
ANRQTQY

SEQ ID NO: 59331 - protein, 7 aa, synthetic construct
NGKVGGT

SEQ ID NO: 59332 - protein, 7 aa, synthetic construct
IPRDLTV

SEQ ID NO: 59333 - protein, 7 aa, synthetic construct
VLNHNQE

SEQ ID NO: 59334 - protein, 7 aa, synthetic construct
AVTPQSG

SEQ ID NO: 59335 - protein, 7 aa, synthetic construct
FTPMHQD

SEQ ID NO: 59336 - protein, 7 aa, synthetic construct
RPSSANN

SEQ ID NO: 59337 - protein, 7 aa, synthetic construct
RQSQVQS

SEQ ID NO: 59338 - protein, 7 aa, synthetic construct
TKSQGIG

SEQ ID NO: 59339 - protein, 7 aa, synthetic construct
YGQTNGI

SEQ ID NO: 59340 - protein, 7 aa, synthetic construct
NGGAQQY

SEQ ID NO: 59341 - protein, 7 aa, synthetic construct
PGNQNVL

SEQ ID NO: 59342 - protein, 7 aa, synthetic construct
HKGDSQI

SEQ ID NO: 59343 - protein, 7 aa, synthetic construct
LEWKKET

SEQ ID NO: 59344 - protein, 7 aa, synthetic construct
PSVKSDG

SEQ ID NO: 59345 - protein, 7 aa, synthetic construct
SKNQSIG

SEQ ID NO: 59346 - protein, 7 aa, synthetic construct
RTPAPDW

SEQ ID NO: 59347 - protein, 7 aa, synthetic construct
WGKGSQD

SEQ ID NO: 59348 - protein, 7 aa, synthetic construct
LAQHAKA

SEQ ID NO: 59349 - protein, 7 aa, synthetic construct
MKSNGQS

SEQ ID NO: 59350 - protein, 7 aa, synthetic construct
MTQFRDH

SEQ ID NO: 59351 - protein, 7 aa, synthetic construct
TEQRGKD

SEQ ID NO: 59352 - protein, 7 aa, synthetic construct
GTTKVVS

SEQ ID NO: 59353 - protein, 7 aa, synthetic construct
RNTQGVQ

SEQ ID NO: 59354 - protein, 7 aa, synthetic construct
GVQRVQS

SEQ ID NO: 59355 - protein, 7 aa, synthetic construct
AGYNLIA

SEQ ID NO: 59356 - protein, 7 aa, synthetic construct
YGQQSSN

SEQ ID NO: 59357 - protein, 7 aa, synthetic construct
RSLRETD

SEQ ID NO: 59358 - protein, 7 aa, synthetic construct
KVNTSVP

SEQ ID NO: 59359 - protein, 7 aa, synthetic construct
EAAANTK

SEQ ID NO: 59360 - protein, 7 aa, synthetic construct
FGMKSSH

SEQ ID NO: 59361 - protein, 7 aa, synthetic construct
VQHRAND

SEQ ID NO: 59362 - protein, 7 aa, synthetic construct
NNARQTV

SEQ ID NO: 59363 - protein, 7 aa, synthetic construct
PNPKHDG

SEQ ID NO: 59364 - protein, 7 aa, synthetic construct
YGNAKVP

SEQ ID NO: 59365 - protein, 7 aa, synthetic construct
HGNRQDW

SEQ ID NO: 59366 - protein, 7 aa, synthetic construct
ERGTLGH

SEQ ID NO: 59367 - protein, 7 aa, synthetic construct
IGNKAMA

SEQ ID NO: 59368 - protein, 7 aa, synthetic construct
LQAGPHV

SEQ ID NO: 59369 - protein, 7 aa, synthetic construct
WNHKDDN

SEQ ID NO: 59370 - protein, 7 aa, synthetic construct
KQNDGSR

SEQ ID NO: 59371 - protein, 7 aa, synthetic construct
EERFKLG

SEQ ID NO: 59372 - protein, 7 aa, synthetic construct
HDRKTAI

SEQ ID NO: 59373 - protein, 7 aa, synthetic construct
YPRSDAR

SEQ ID NO: 59374 - protein, 7 aa, synthetic construct
KVNSGIP

SEQ ID NO: 59375 - protein, 7 aa, synthetic construct
PKGTMSP

SEQ ID NO: 59376 - protein, 7 aa, synthetic construct
TRSTGQP

SEQ ID NO: 59377 - protein, 7 aa, synthetic construct
HKNNTHY

SEQ ID NO: 59378 - protein, 7 aa, synthetic construct
GPGTVMA

SEQ ID NO: 59379 - protein, 7 aa, synthetic construct
TKASVSG

SEQ ID NO: 59380 - protein, 7 aa, synthetic construct
LHSVVGG

SEQ ID NO: 59381 - protein, 7 aa, synthetic construct
MKHAHHA

SEQ ID NO: 59382 - protein, 7 aa, synthetic construct
ADKRDYV

SEQ ID NO: 59383 - protein, 7 aa, synthetic construct
WKNQVAL

SEQ ID NO: 59384 - protein, 7 aa, synthetic construct
KDDRHNA

SEQ ID NO: 59385 - protein, 7 aa, synthetic construct
QTQKVPM

SEQ ID NO: 59386 - protein, 7 aa, synthetic construct
RTTGQQA

SEQ ID NO: 59387 - protein, 7 aa, synthetic construct
PNKPSMA

SEQ ID NO: 59388 - protein, 7 aa, synthetic construct
MKAMNAA

SEQ ID NO: 59389 - protein, 7 aa, synthetic construct
KQRDNAH

SEQ ID NO: 59390 - protein, 7 aa, synthetic construct
YQMGQRM

SEQ ID NO: 59391 - protein, 7 aa, synthetic construct
SMNRMSD

SEQ ID NO: 59392 - protein, 7 aa, synthetic construct
NGGVTPA

SEQ ID NO: 59393 - protein, 7 aa, synthetic construct
GPGTNTA

SEQ ID NO: 59394 - protein, 7 aa, synthetic construct
YQRELPL

SEQ ID NO: 59395 - protein, 7 aa, synthetic construct
YVRNQRE

SEQ ID NO: 59396 - protein, 7 aa, synthetic construct
FARLDAS

SEQ ID NO: 59397 - protein, 7 aa, synthetic construct
VNARKVE

SEQ ID NO: 59398 - protein, 7 aa, synthetic construct
RNSAPIG

SEQ ID NO: 59399 - protein, 7 aa, synthetic construct
VPVRDRH

SEQ ID NO: 59400 - protein, 7 aa, synthetic construct
DLGIKHR

SEQ ID NO: 59401 - protein, 7 aa, synthetic construct
LHSKIMQ

SEQ ID NO: 59402 - protein, 7 aa, synthetic construct
SEQRQHV

SEQ ID NO: 59403 - protein, 7 aa, synthetic construct
TKNPSNS

SEQ ID NO: 59404 - protein, 7 aa, synthetic construct
RKHDVAP

SEQ ID NO: 59405 - protein, 7 aa, synthetic construct
AKNDTKG

SEQ ID NO: 59406 - protein, 7 aa, synthetic construct
TQRAQNP

SEQ ID NO: 59407 - protein, 7 aa, synthetic construct
SWTNGSV

SEQ ID NO: 59408 - protein, 7 aa, synthetic construct
MTATVHA

SEQ ID NO: 59409 - protein, 7 aa, synthetic construct
YHAAQPG

SEQ ID NO: 59410 - protein, 7 aa, synthetic construct
ASNGHTG

SEQ ID NO: 59411 - protein, 7 aa, synthetic construct
STNATKI

SEQ ID NO: 59412 - protein, 7 aa, synthetic construct
HVARPNA

SEQ ID NO: 59413 - protein, 7 aa, synthetic construct
QISKDPP

SEQ ID NO: 59414 - protein, 7 aa, synthetic construct
KAVSIRD

SEQ ID NO: 59415 - protein, 7 aa, synthetic construct
QQKPSVG

SEQ ID NO: 59416 - protein, 7 aa, synthetic construct
TPGKVEQ

SEQ ID NO: 59417 - protein, 7 aa, synthetic construct
SNAPFRG

SEQ ID NO: 59418 - protein, 7 aa, synthetic construct
VKENTFF

SEQ ID NO: 59419 - protein, 7 aa, synthetic construct
VNGKLTY

SEQ ID NO: 59420 - protein, 7 aa, synthetic construct
VHGQMTH

SEQ ID NO: 59421 - protein, 7 aa, synthetic construct
EEKYRAG

SEQ ID NO: 59422 - protein, 7 aa, synthetic construct
YMGQRSE

SEQ ID NO: 59423 - protein, 7 aa, synthetic construct
QRLGHDG

SEQ ID NO: 59424 - protein, 7 aa, synthetic construct
IYKSNDE

SEQ ID NO: 59425 - protein, 7 aa, synthetic construct
KIITMPD

SEQ ID NO: 59426 - protein, 7 aa, synthetic construct
WQHTSGA

SEQ ID NO: 59427 - protein, 7 aa, synthetic construct
KNGNNQA

SEQ ID NO: 59428 - protein, 7 aa, synthetic construct
KHHQVNA

SEQ ID NO: 59429 - protein, 7 aa, synthetic construct
KTNGGMS

SEQ ID NO: 59430 - protein, 7 aa, synthetic construct
NQPRTGA

SEQ ID NO: 59431 - protein, 7 aa, synthetic construct
TFVVQKP

SEQ ID NO: 59432 - protein, 7 aa, synthetic construct
PQGNAGY

SEQ ID NO: 59433 - protein, 7 aa, synthetic construct
THYPTPG

SEQ ID NO: 59434 - protein, 7 aa, synthetic construct
FKPTNAG

SEQ ID NO: 59435 - protein, 7 aa, synthetic construct
IHRESTS

SEQ ID NO: 59436 - protein, 7 aa, synthetic construct
KGREDYA

SEQ ID NO: 59437 - protein, 7 aa, synthetic construct
NTSSKQA

SEQ ID NO: 59438 - protein, 7 aa, synthetic construct
DFNKTVH

SEQ ID NO: 59439 - protein, 7 aa, synthetic construct
HFTPNSP

SEQ ID NO: 59440 - protein, 7 aa, synthetic construct
RNQGTST

SEQ ID NO: 59441 - protein, 7 aa, synthetic construct
GYKAPMS

SEQ ID NO: 59442 - protein, 7 aa, synthetic construct
LRPMYEK

SEQ ID NO: 59443 - protein, 7 aa, synthetic construct
KGFGTTG

SEQ ID NO: 59444 - protein, 7 aa, synthetic construct
KPNNVGA

SEQ ID NO: 59445 - protein, 7 aa, synthetic construct
IVKNMVA

SEQ ID NO: 59446 - protein, 7 aa, synthetic construct
KTNAGGA

SEQ ID NO: 59447 - protein, 7 aa, synthetic construct
YKPVQYN

SEQ ID NO: 59448 - protein, 7 aa, synthetic construct
NPPVWTS

SEQ ID NO: 59449 - protein, 7 aa, synthetic construct
PRSQVAP

SEQ ID NO: 59450 - protein, 7 aa, synthetic construct
NASEKSY

SEQ ID NO: 59451 - protein, 7 aa, synthetic construct
LGKGPNW

SEQ ID NO: 59452 - protein, 7 aa, synthetic construct
TGSHQVP

SEQ ID NO: 59453 - protein, 7 aa, synthetic construct
GKNATGS

SEQ ID NO: 59454 - protein, 7 aa, synthetic construct
RSQLMNE

SEQ ID NO: 59455 - protein, 7 aa, synthetic construct
TPTRAGA

SEQ ID NO: 59456 - protein, 7 aa, synthetic construct
GDYGYRE

SEQ ID NO: 59457 - protein, 7 aa, synthetic construct
EKNNIHR

SEQ ID NO: 59458 - protein, 7 aa, synthetic construct
DAIRKSD

SEQ ID NO: 59459 - protein, 7 aa, synthetic construct
MNGKPMP

SEQ ID NO: 59460 - protein, 7 aa, synthetic construct
FRSQTME

SEQ ID NO: 59461 - protein, 7 aa, synthetic construct
PSYRSDA

SEQ ID NO: 59462 - protein, 7 aa, synthetic construct
DANKIGA

SEQ ID NO: 59463 - protein, 7 aa, synthetic construct
HAHHTKV

SEQ ID NO: 59464 - protein, 7 aa, synthetic construct
WARQMTS

SEQ ID NO: 59465 - protein, 7 aa, synthetic construct
HTRGVDF

SEQ ID NO: 59466 - protein, 7 aa, synthetic construct
FTREVSP

SEQ ID NO: 59467 - protein, 7 aa, synthetic construct
FIGIFKE

SEQ ID NO: 59468 - protein, 7 aa, synthetic construct
DMTIKTV

SEQ ID NO: 59469 - protein, 7 aa, synthetic construct
HGPAAIP

SEQ ID NO: 59470 - protein, 7 aa, synthetic construct
DIIEKHG

SEQ ID NO: 59471 - protein, 7 aa, synthetic construct
MKSQTGS

SEQ ID NO: 59472 - protein, 7 aa, synthetic construct
ARVAAIQ

SEQ ID NO: 59473 - protein, 7 aa, synthetic construct
YSMGTGL

SEQ ID NO: 59474 - protein, 7 aa, synthetic construct
QQPRQMP

SEQ ID NO: 59475 - protein, 7 aa, synthetic construct
KSKDMNA

SEQ ID NO: 59476 - protein, 7 aa, synthetic construct
NTVRGIM

SEQ ID NO: 59477 - protein, 7 aa, synthetic construct
TVVYTQG

SEQ ID NO: 59478 - protein, 7 aa, synthetic construct
ISKVDIS

SEQ ID NO: 59479 - protein, 7 aa, synthetic construct
FKPPPDP

SEQ ID NO: 59480 - protein, 7 aa, synthetic construct
MKGTPQA

SEQ ID NO: 59481 - protein, 7 aa, synthetic construct
VAMRQQL

SEQ ID NO: 59482 - protein, 7 aa, synthetic construct
LHGTDRG

SEQ ID NO: 59483 - protein, 7 aa, synthetic construct
HSPVTQT

SEQ ID NO: 59484 - protein, 7 aa, synthetic construct
VPSHVVA

SEQ ID NO: 59485 - protein, 7 aa, synthetic construct
VNHNGSI

SEQ ID NO: 59486 - protein, 7 aa, synthetic construct
GKVMVSA

SEQ ID NO: 59487 - protein, 7 aa, synthetic construct
VEQWKNV

SEQ ID NO: 59488 - protein, 7 aa, synthetic construct
DQNHKAI

SEQ ID NO: 59489 - protein, 7 aa, synthetic construct
SSDKKLD

SEQ ID NO: 59490 - protein, 7 aa, synthetic construct
YKSYQLP

SEQ ID NO: 59491 - protein, 7 aa, synthetic construct
HVGKINP

SEQ ID NO: 59492 - protein, 7 aa, synthetic construct
IKQGNMM

SEQ ID NO: 59493 - protein, 7 aa, synthetic construct
GNKNNAG

SEQ ID NO: 59494 - protein, 7 aa, synthetic construct
TPQSMNM

SEQ ID NO: 59495 - protein, 7 aa, synthetic construct
LRDKSQM

SEQ ID NO: 59496 - protein, 7 aa, synthetic construct
ERLPSTR

SEQ ID NO: 59497 - protein, 7 aa, synthetic construct
LFGTIAP

SEQ ID NO: 59498 - protein, 7 aa, synthetic construct
GKWSIHE

SEQ ID NO: 59499 - protein, 7 aa, synthetic construct
SNEITKN

SEQ ID NO: 59500 - protein, 7 aa, synthetic construct
TINQRLP

SEQ ID NO: 59501 - protein, 7 aa, synthetic construct
EKRPTID

SEQ ID NO: 59502 - protein, 7 aa, synthetic construct
IHSKTYI

SEQ ID NO: 59503 - protein, 7 aa, synthetic construct
LFTKDGS

SEQ ID NO: 59504 - protein, 7 aa, synthetic construct
KEGSRFD

SEQ ID NO: 59505 - protein, 7 aa, synthetic construct
RDPLKQF

SEQ ID NO: 59506 - protein, 7 aa, synthetic construct
YKMSTNG

SEQ ID NO: 59507 - protein, 7 aa, synthetic construct
MNKNPQG

SEQ ID NO: 59508 - protein, 7 aa, synthetic construct
IRSSTQG

SEQ ID NO: 59509 - protein, 7 aa, synthetic construct
AMSKHQA

SEQ ID NO: 59510 - protein, 7 aa, synthetic construct
KMDKSPI

SEQ ID NO: 59511 - protein, 7 aa, synthetic construct
KGDRTQA

SEQ ID NO: 59512 - protein, 7 aa, synthetic construct
VKGSQFM

SEQ ID NO: 59513 - protein, 7 aa, synthetic construct
RSTSSGG

SEQ ID NO: 59514 - protein, 7 aa, synthetic construct
MKNQPAE

SEQ ID NO: 59515 - protein, 7 aa, synthetic construct
KHVGLLA

SEQ ID NO: 59516 - protein, 7 aa, synthetic construct
HASHNDL

SEQ ID NO: 59517 - protein, 7 aa, synthetic construct
FKNNGQA

SEQ ID NO: 59518 - protein, 7 aa, synthetic construct
SQRQGQA

SEQ ID NO: 59519 - protein, 7 aa, synthetic construct
RTGTAGA

SEQ ID NO: 59520 - protein, 7 aa, synthetic construct
AKWDQDP

SEQ ID NO: 59521 - protein, 7 aa, synthetic construct
ATKGLSE

SEQ ID NO: 59522 - protein, 7 aa, synthetic construct
FQPQKGS

SEQ ID NO: 59523 - protein, 7 aa, synthetic construct
REYASQP

SEQ ID NO: 59524 - protein, 7 aa, synthetic construct
MKTNVDR

SEQ ID NO: 59525 - protein, 7 aa, synthetic construct
QNNHQSF

SEQ ID NO: 59526 - protein, 7 aa, synthetic construct
KPSAWPD

SEQ ID NO: 59527 - protein, 7 aa, synthetic construct
PTNRLDH

SEQ ID NO: 59528 - protein, 7 aa, synthetic construct
KTFATNN

SEQ ID NO: 59529 - protein, 7 aa, synthetic construct
FTSAAKP

SEQ ID NO: 59530 - protein, 7 aa, synthetic construct
NGSAYRQ

SEQ ID NO: 59531 - protein, 7 aa, synthetic construct
FPPNLKM

SEQ ID NO: 59532 - protein, 7 aa, synthetic construct
RNPGASV

SEQ ID NO: 59533 - protein, 7 aa, synthetic construct
NDYTGVK

SEQ ID NO: 59534 - protein, 7 aa, synthetic construct
PIVNRTE

SEQ ID NO: 59535 - protein, 7 aa, synthetic construct
TKTSVQG

SEQ ID NO: 59536 - protein, 7 aa, synthetic construct
MEGLKTA

SEQ ID NO: 59537 - protein, 7 aa, synthetic construct
RHDLAQM

SEQ ID NO: 59538 - protein, 7 aa, synthetic construct
AKHQGES

SEQ ID NO: 59539 - protein, 7 aa, synthetic construct
KKDTFES

SEQ ID NO: 59540 - protein, 7 aa, synthetic construct
DFRHVVE

SEQ ID NO: 59541 - protein, 7 aa, synthetic construct
RDGVHNP

SEQ ID NO: 59542 - protein, 7 aa, synthetic construct
WARAAVE

SEQ ID NO: 59543 - protein, 7 aa, synthetic construct
SPNKVHW

SEQ ID NO: 59544 - protein, 7 aa, synthetic construct
GREHHGG

SEQ ID NO: 59545 - protein, 7 aa, synthetic construct
MKSVGNG

SEQ ID NO: 59546 - protein, 7 aa, synthetic construct
NNKTGTF

SEQ ID NO: 59547 - protein, 7 aa, synthetic construct
RQETKQP

SEQ ID NO: 59548 - protein, 7 aa, synthetic construct
LFRNTEK

SEQ ID NO: 59549 - protein, 7 aa, synthetic construct
KMGSNNP

SEQ ID NO: 59550 - protein, 7 aa, synthetic construct
KPGTQNP

SEQ ID NO: 59551 - protein, 7 aa, synthetic construct
QPRFPQE

SEQ ID NO: 59552 - protein, 7 aa, synthetic construct
MLQHQTG

SEQ ID NO: 59553 - protein, 7 aa, synthetic construct
DRQGSNY

SEQ ID NO: 59554 - protein, 7 aa, synthetic construct
GMKGSAG

SEQ ID NO: 59555 - protein, 7 aa, synthetic construct
QRAPSNP

SEQ ID NO: 59556 - protein, 7 aa, synthetic construct
MKTSQSA

SEQ ID NO: 59557 - protein, 7 aa, synthetic construct
RFGSTAD

SEQ ID NO: 59558 - protein, 7 aa, synthetic construct
YKVKEYE

SEQ ID NO: 59559 - protein, 7 aa, synthetic construct
MRNTTTV

SEQ ID NO: 59560 - protein, 7 aa, synthetic construct
NEAHRNN

SEQ ID NO: 59561 - protein, 7 aa, synthetic construct
GTKATHM

SEQ ID NO: 59562 - protein, 7 aa, synthetic construct
RNNNATG

SEQ ID NO: 59563 - protein, 7 aa, synthetic construct
NFKNTTA

SEQ ID NO: 59564 - protein, 7 aa, synthetic construct
WDRKSAS

SEQ ID NO: 59565 - protein, 7 aa, synthetic construct
VNKGATS

SEQ ID NO: 59566 - protein, 7 aa, synthetic construct
VGVVIPG

SEQ ID NO: 59567 - protein, 7 aa, synthetic construct
VKGDGKN

SEQ ID NO: 59568 - protein, 7 aa, synthetic construct
RPIGQLD

SEQ ID NO: 59569 - protein, 7 aa, synthetic construct
TAAMTSN

SEQ ID NO: 59570 - protein, 7 aa, synthetic construct
EANRSMA

SEQ ID NO: 59571 - protein, 7 aa, synthetic construct
ATKFHSD

SEQ ID NO: 59572 - protein, 7 aa, synthetic construct
QRQSTAF

SEQ ID NO: 59573 - protein, 7 aa, synthetic construct
EAARRNP

SEQ ID NO: 59574 - protein, 7 aa, synthetic construct
GIRHATP

SEQ ID NO: 59575 - protein, 7 aa, synthetic construct
AYHTSKP

SEQ ID NO: 59576 - protein, 7 aa, synthetic construct
FDKAYAD

SEQ ID NO: 59577 - protein, 7 aa, synthetic construct
SVKHLST

SEQ ID NO: 59578 - protein, 7 aa, synthetic construct
KAQTNQA

SEQ ID NO: 59579 - protein, 7 aa, synthetic construct
GHDWQKS

SEQ ID NO: 59580 - protein, 7 aa, synthetic construct
GRNAAIS

SEQ ID NO: 59581 - protein, 7 aa, synthetic construct
NGPYAAA

SEQ ID NO: 59582 - protein, 7 aa, synthetic construct
IRVEQQQ

SEQ ID NO: 59583 - protein, 7 aa, synthetic construct
KMSGIMG

SEQ ID NO: 59584 - protein, 7 aa, synthetic construct
TLNPNHY

SEQ ID NO: 59585 - protein, 7 aa, synthetic construct
TPYNQTA

SEQ ID NO: 59586 - protein, 7 aa, synthetic construct
SDHRGGW

SEQ ID NO: 59587 - protein, 7 aa, synthetic construct
LAFKPQT

SEQ ID NO: 59588 - protein, 7 aa, synthetic construct
GNAPMNP

SEQ ID NO: 59589 - protein, 7 aa, synthetic construct
RKDMDQN

SEQ ID NO: 59590 - protein, 7 aa, synthetic construct
STTKTNG

SEQ ID NO: 59591 - protein, 7 aa, synthetic construct
SQRMAIT

SEQ ID NO: 59592 - protein, 7 aa, synthetic construct
ASGTHAW

SEQ ID NO: 59593 - protein, 7 aa, synthetic construct
KGDSARS

SEQ ID NO: 59594 - protein, 7 aa, synthetic construct
HKNGSNS

SEQ ID NO: 59595 - protein, 7 aa, synthetic construct
NNPQKAA

SEQ ID NO: 59596 - protein, 7 aa, synthetic construct
FLSPNPS

SEQ ID NO: 59597 - protein, 7 aa, synthetic construct
SFKKTSE

SEQ ID NO: 59598 - protein, 7 aa, synthetic construct
AFNERIG

SEQ ID NO: 59599 - protein, 7 aa, synthetic construct
WGKPQVS

SEQ ID NO: 59600 - protein, 7 aa, synthetic construct
KRVEQYV

SEQ ID NO: 59601 - protein, 7 aa, synthetic construct
MGKPSVA

SEQ ID NO: 59602 - protein, 7 aa, synthetic construct
INSPQRP

SEQ ID NO: 59603 - protein, 7 aa, synthetic construct
YVSNQGP

SEQ ID NO: 59604 - protein, 7 aa, synthetic construct
SFSRDMP

SEQ ID NO: 59605 - protein, 7 aa, synthetic construct
HAAAGKV

SEQ ID NO: 59606 - protein, 7 aa, synthetic construct
SVKSGNV

SEQ ID NO: 59607 - protein, 7 aa, synthetic construct
MFMGVHE

SEQ ID NO: 59608 - protein, 7 aa, synthetic construct
KFQNQQV

SEQ ID NO: 59609 - protein, 7 aa, synthetic construct
KLPTSPQ

SEQ ID NO: 59610 - protein, 7 aa, synthetic construct
GRGQLAN

SEQ ID NO: 59611 - protein, 7 aa, synthetic construct
GGMKGQN

SEQ ID NO: 59612 - protein, 7 aa, synthetic construct
GANAHLK

SEQ ID NO: 59613 - protein, 7 aa, synthetic construct
LMGAYKT

SEQ ID NO: 59614 - protein, 7 aa, synthetic construct
HKSYAID

SEQ ID NO: 59615 - protein, 7 aa, synthetic construct
TKMTGIS

SEQ ID NO: 59616 - protein, 7 aa, synthetic construct
LGPAVNV

SEQ ID NO: 59617 - protein, 7 aa, synthetic construct
SQYATHE

SEQ ID NO: 59618 - protein, 7 aa, synthetic construct
MPIPRAV

SEQ ID NO: 59619 - protein, 7 aa, synthetic construct
GVGKYND

SEQ ID NO: 59620 - protein, 7 aa, synthetic construct
LTAQKVY

SEQ ID NO: 59621 - protein, 7 aa, synthetic construct
AKFTPGS

SEQ ID NO: 59622 - protein, 7 aa, synthetic construct
HVSQQLA

SEQ ID NO: 59623 - protein, 7 aa, synthetic construct
ETTKNKG

SEQ ID NO: 59624 - protein, 7 aa, synthetic construct
TKSIARE

SEQ ID NO: 59625 - protein, 7 aa, synthetic construct
NGSKNNG

SEQ ID NO: 59626 - protein, 7 aa, synthetic construct
TSARQQA

SEQ ID NO: 59627 - protein, 7 aa, synthetic construct
ITRHPDD

SEQ ID NO: 59628 - protein, 7 aa, synthetic construct
NKNGGTA

SEQ ID NO: 59629 - protein, 7 aa, synthetic construct
QAHHPTK

SEQ ID NO: 59630 - protein, 7 aa, synthetic construct
PKPATMQ

SEQ ID NO: 59631 - protein, 7 aa, synthetic construct
TDLRVAS

SEQ ID NO: 59632 - protein, 7 aa, synthetic construct
STLRQDR

SEQ ID NO: 59633 - protein, 7 aa, synthetic construct
PTKPQRD

SEQ ID NO: 59634 - protein, 7 aa, synthetic construct
TSKESRE

SEQ ID NO: 59635 - protein, 7 aa, synthetic construct
RETQIRG

SEQ ID NO: 59636 - protein, 7 aa, synthetic construct
KHTPGYQ

SEQ ID NO: 59637 - protein, 7 aa, synthetic construct
QHRQNQN

SEQ ID NO: 59638 - protein, 7 aa, synthetic construct
KYPNSGG

SEQ ID NO: 59639 - protein, 7 aa, synthetic construct
RDTNHFI

SEQ ID NO: 59640 - protein, 7 aa, synthetic construct
KMNEIKS

SEQ ID NO: 59641 - protein, 7 aa, synthetic construct
QRAPSTN

SEQ ID NO: 59642 - protein, 7 aa, synthetic construct
YSNRSVD

SEQ ID NO: 59643 - protein, 7 aa, synthetic construct
QTKPQVT

SEQ ID NO: 59644 - protein, 7 aa, synthetic construct
QRPANSA

SEQ ID NO: 59645 - protein, 7 aa, synthetic construct
GRGMNAT

SEQ ID NO: 59646 - protein, 7 aa, synthetic construct
NNKAMAG

SEQ ID NO: 59647 - protein, 7 aa, synthetic construct
FHGVMVA

SEQ ID NO: 59648 - protein, 7 aa, synthetic construct
RNGNNMG

SEQ ID NO: 59649 - protein, 7 aa, synthetic construct
MKPYPPP

SEQ ID NO: 59650 - protein, 7 aa, synthetic construct
NGAKSQP

SEQ ID NO: 59651 - protein, 7 aa, synthetic construct
GGNKSSP

SEQ ID NO: 59652 - protein, 7 aa, synthetic construct
YKERQQH

SEQ ID NO: 59653 - protein, 7 aa, synthetic construct
KDKSTMA

SEQ ID NO: 59654 - protein, 7 aa, synthetic construct
ISKAQGG

SEQ ID NO: 59655 - protein, 7 aa, synthetic construct
VKTTVSN

SEQ ID NO: 59656 - protein, 7 aa, synthetic construct
KAMSGGA

SEQ ID NO: 59657 - protein, 7 aa, synthetic construct
NYHRTEP

SEQ ID NO: 59658 - protein, 7 aa, synthetic construct
NLRGERS

SEQ ID NO: 59659 - protein, 7 aa, synthetic construct
FYPSLGS

SEQ ID NO: 59660 - protein, 7 aa, synthetic construct
HTKNFGP

SEQ ID NO: 59661 - protein, 7 aa, synthetic construct
QGSRSDP

SEQ ID NO: 59662 - protein, 7 aa, synthetic construct
RMSPQII

SEQ ID NO: 59663 - protein, 7 aa, synthetic construct
NKGPFGP

SEQ ID NO: 59664 - protein, 7 aa, synthetic construct
PQRGGLS

SEQ ID NO: 59665 - protein, 7 aa, synthetic construct
VTRQTNA

SEQ ID NO: 59666 - protein, 7 aa, synthetic construct
KQNVSGA

SEQ ID NO: 59667 - protein, 7 aa, synthetic construct
NGQVTRI

SEQ ID NO: 59668 - protein, 7 aa, synthetic construct
FPMNTHG

SEQ ID NO: 59669 - protein, 7 aa, synthetic construct
AGHQKHP

SEQ ID NO: 59670 - protein, 7 aa, synthetic construct
KPAQYGA

SEQ ID NO: 59671 - protein, 7 aa, synthetic construct
WRKEWDN

SEQ ID NO: 59672 - protein, 7 aa, synthetic construct
HVHQQAG

SEQ ID NO: 59673 - protein, 7 aa, synthetic construct
NNIRGPM

SEQ ID NO: 59674 - protein, 7 aa, synthetic construct
NKTMGNG

SEQ ID NO: 59675 - protein, 7 aa, synthetic construct
KMMGPKD

SEQ ID NO: 59676 - protein, 7 aa, synthetic construct
SGYQQHD

SEQ ID NO: 59677 - protein, 7 aa, synthetic construct
IEAKHNG

SEQ ID NO: 59678 - protein, 7 aa, synthetic construct
RATQGAG

SEQ ID NO: 59679 - protein, 7 aa, synthetic construct
QASQKHG

SEQ ID NO: 59680 - protein, 7 aa, synthetic construct
EMKLLTP

SEQ ID NO: 59681 - protein, 7 aa, synthetic construct
NNHGHQD

SEQ ID NO: 59682 - protein, 7 aa, synthetic construct
KPKDSQA

SEQ ID NO: 59683 - protein, 7 aa, synthetic construct
IHTKGRD

SEQ ID NO: 59684 - protein, 7 aa, synthetic construct
LIKTTDK

SEQ ID NO: 59685 - protein, 7 aa, synthetic construct
VHANAKG

SEQ ID NO: 59686 - protein, 7 aa, synthetic construct
TSAKFHY

SEQ ID NO: 59687 - protein, 7 aa, synthetic construct
NIRDTKN

SEQ ID NO: 59688 - protein, 7 aa, synthetic construct
GTPPQTK

SEQ ID NO: 59689 - protein, 7 aa, synthetic construct
GGTPKNG

SEQ ID NO: 59690 - protein, 7 aa, synthetic construct
ASPYTNH

SEQ ID NO: 59691 - protein, 7 aa, synthetic construct
HMEWKTS

SEQ ID NO: 59692 - protein, 7 aa, synthetic construct
KQGLGSM

SEQ ID NO: 59693 - protein, 7 aa, synthetic construct
GGVRIPM

SEQ ID NO: 59694 - protein, 7 aa, synthetic construct
TNFNVNP

SEQ ID NO: 59695 - protein, 7 aa, synthetic construct
AHPNLEV

SEQ ID NO: 59696 - protein, 7 aa, synthetic construct
LLHQANQ

SEQ ID NO: 59697 - protein, 7 aa, synthetic construct
EQYIRNG

SEQ ID NO: 59698 - protein, 7 aa, synthetic construct
VYHDQVR

SEQ ID NO: 59699 - protein, 7 aa, synthetic construct
AGKPVGI

SEQ ID NO: 59700 - protein, 7 aa, synthetic construct
IGKQYAP

SEQ ID NO: 59701 - protein, 7 aa, synthetic construct
GIPNRTN

SEQ ID NO: 59702 - protein, 7 aa, synthetic construct
KQTPTVG

SEQ ID NO: 59703 - protein, 7 aa, synthetic construct
QITQREH

SEQ ID NO: 59704 - protein, 7 aa, synthetic construct
PSKSGFP

SEQ ID NO: 59705 - protein, 7 aa, synthetic construct
KEFVAQN

SEQ ID NO: 59706 - protein, 7 aa, synthetic construct
PQPNSKG

SEQ ID NO: 59707 - protein, 7 aa, synthetic construct
KMNGNEN

SEQ ID NO: 59708 - protein, 7 aa, synthetic construct
LKSDGRT

SEQ ID NO: 59709 - protein, 7 aa, synthetic construct
MGNRQVG

SEQ ID NO: 59710 - protein, 7 aa, synthetic construct
QHNKYMA

SEQ ID NO: 59711 - protein, 7 aa, synthetic construct
QKHVGGP

SEQ ID NO: 59712 - protein, 7 aa, synthetic construct
NSPHSRD

SEQ ID NO: 59713 - protein, 7 aa, synthetic construct
RESGMSP

SEQ ID NO: 59714 - protein, 7 aa, synthetic construct
MVNNARN

SEQ ID NO: 59715 - protein, 7 aa, synthetic construct
FDMKKNS

SEQ ID NO: 59716 - protein, 7 aa, synthetic construct
KTTGANP

SEQ ID NO: 59717 - protein, 7 aa, synthetic construct
QERTTRD

SEQ ID NO: 59718 - protein, 7 aa, synthetic construct
NATNRAG

SEQ ID NO: 59719 - protein, 7 aa, synthetic construct
QRPSSTA

SEQ ID NO: 59720 - protein, 7 aa, synthetic construct
IGGARPV

SEQ ID NO: 59721 - protein, 7 aa, synthetic construct
VTQSWEK

SEQ ID NO: 59722 - protein, 7 aa, synthetic construct
ATNTQRG

SEQ ID NO: 59723 - protein, 7 aa, synthetic construct
KMGTVQG

SEQ ID NO: 59724 - protein, 7 aa, synthetic construct
WNNQKGA

SEQ ID NO: 59725 - protein, 7 aa, synthetic construct
TNQTIRE

SEQ ID NO: 59726 - protein, 7 aa, synthetic construct
TKDSRSD

SEQ ID NO: 59727 - protein, 7 aa, synthetic construct
RKDNTGE

SEQ ID NO: 59728 - protein, 7 aa, synthetic construct
MKPNQAP

SEQ ID NO: 59729 - protein, 7 aa, synthetic construct
ITATIHN

SEQ ID NO: 59730 - protein, 7 aa, synthetic construct
SAPVLSV

SEQ ID NO: 59731 - protein, 7 aa, synthetic construct
GAQLNDI

SEQ ID NO: 59732 - protein, 7 aa, synthetic construct
EPTTHTA

SEQ ID NO: 59733 - protein, 7 aa, synthetic construct
HRLGGVQ

SEQ ID NO: 59734 - protein, 7 aa, synthetic construct
TLTKFEG

SEQ ID NO: 59735 - protein, 7 aa, synthetic construct
FKPKENP

SEQ ID NO: 59736 - protein, 7 aa, synthetic construct
PRGTQTA

SEQ ID NO: 59737 - protein, 7 aa, synthetic construct
SHKQTEG

SEQ ID NO: 59738 - protein, 7 aa, synthetic construct
NAKQGTM

SEQ ID NO: 59739 - protein, 7 aa, synthetic construct
SRAETSA

SEQ ID NO: 59740 - protein, 7 aa, synthetic construct
NGRKEDV

SEQ ID NO: 59741 - protein, 7 aa, synthetic construct
TGTSRGP

SEQ ID NO: 59742 - protein, 7 aa, synthetic construct
PTGGGSG

SEQ ID NO: 59743 - protein, 7 aa, synthetic construct
IASYPRG

SEQ ID NO: 59744 - protein, 7 aa, synthetic construct
RRIANQE

SEQ ID NO: 59745 - protein, 7 aa, synthetic construct
PHYVERG

SEQ ID NO: 59746 - protein, 7 aa, synthetic construct
SKNSSGV

SEQ ID NO: 59747 - protein, 7 aa, synthetic construct
MTRIQTQ

SEQ ID NO: 59748 - protein, 7 aa, synthetic construct
PFKHNDY

SEQ ID NO: 59749 - protein, 7 aa, synthetic construct
VKMQTVP

SEQ ID NO: 59750 - protein, 7 aa, synthetic construct
KPNGSAA

SEQ ID NO: 59751 - protein, 7 aa, synthetic construct
ATVHGVK

SEQ ID NO: 59752 - protein, 7 aa, synthetic construct
HSGQSGK

SEQ ID NO: 59753 - protein, 7 aa, synthetic construct
FQNRAAV

SEQ ID NO: 59754 - protein, 7 aa, synthetic construct
ERVKQAP

SEQ ID NO: 59755 - protein, 7 aa, synthetic construct
VGTYTSR

SEQ ID NO: 59756 - protein, 7 aa, synthetic construct
QRHLEQH

SEQ ID NO: 59757 - protein, 7 aa, synthetic construct
FEKWAHA

SEQ ID NO: 59758 - protein, 7 aa, synthetic construct
MKQGGTG

SEQ ID NO: 59759 - protein, 7 aa, synthetic construct
PKMSGAP

SEQ ID NO: 59760 - protein, 7 aa, synthetic construct
GEKMIKS

SEQ ID NO: 59761 - protein, 7 aa, synthetic construct
NTRVDKI

SEQ ID NO: 59762 - protein, 7 aa, synthetic construct
MPSHSIG

SEQ ID NO: 59763 - protein, 7 aa, synthetic construct
VINVRHV

SEQ ID NO: 59764 - protein, 7 aa, synthetic construct
DHHKADR

SEQ ID NO: 59765 - protein, 7 aa, synthetic construct
SKTGSMN

SEQ ID NO: 59766 - protein, 7 aa, synthetic construct
TFHIRDD

SEQ ID NO: 59767 - protein, 7 aa, synthetic construct
SFSTDKY

SEQ ID NO: 59768 - protein, 7 aa, synthetic construct
HAQGGYT

SEQ ID NO: 59769 - protein, 7 aa, synthetic construct
KRIDLEN

SEQ ID NO: 59770 - protein, 7 aa, synthetic construct
TATHHMR

SEQ ID NO: 59771 - protein, 7 aa, synthetic construct
EKWPQAH

SEQ ID NO: 59772 - protein, 7 aa, synthetic construct
RPQNIAN

SEQ ID NO: 59773 - protein, 7 aa, synthetic construct
PKSSAMA

SEQ ID NO: 59774 - protein, 7 aa, synthetic construct
FNKNDVP

SEQ ID NO: 59775 - protein, 7 aa, synthetic construct
QKVASAS

SEQ ID NO: 59776 - protein, 7 aa, synthetic construct
STVYGQA

SEQ ID NO: 59777 - protein, 7 aa, synthetic construct
QEMRHAP

SEQ ID NO: 59778 - protein, 7 aa, synthetic construct
KKENDQN

SEQ ID NO: 59779 - protein, 7 aa, synthetic construct
QMHVIGT

SEQ ID NO: 59780 - protein, 7 aa, synthetic construct
HEPKQAS

SEQ ID NO: 59781 - protein, 7 aa, synthetic construct
IAHVKPM

SEQ ID NO: 59782 - protein, 7 aa, synthetic construct
MRGPPRD

SEQ ID NO: 59783 - protein, 7 aa, synthetic construct
TLKHAVS

SEQ ID NO: 59784 - protein, 7 aa, synthetic construct
YPMRNNA

SEQ ID NO: 59785 - protein, 7 aa, synthetic construct
SGKTDSV

SEQ ID NO: 59786 - protein, 7 aa, synthetic construct
ASAKSPS

SEQ ID NO: 59787 - protein, 7 aa, synthetic construct
FPQLPHD

SEQ ID NO: 59788 - protein, 7 aa, synthetic construct
GPREAKP

SEQ ID NO: 59789 - protein, 7 aa, synthetic construct
NVRTERI

SEQ ID NO: 59790 - protein, 7 aa, synthetic construct
QGNGRQG

SEQ ID NO: 59791 - protein, 7 aa, synthetic construct
PAVTLKG

SEQ ID NO: 59792 - protein, 7 aa, synthetic construct
HNLESKG

SEQ ID NO: 59793 - protein, 7 aa, synthetic construct
IFKAQHH

SEQ ID NO: 59794 - protein, 7 aa, synthetic construct
NRSFDPM

SEQ ID NO: 59795 - protein, 7 aa, synthetic construct
MTSRAGM

SEQ ID NO: 59796 - protein, 7 aa, synthetic construct
IGGQSPA

SEQ ID NO: 59797 - protein, 7 aa, synthetic construct
WSTHQLQ

SEQ ID NO: 59798 - protein, 7 aa, synthetic construct
SKIQKVD

SEQ ID NO: 59799 - protein, 7 aa, synthetic construct
RQNEKQA

SEQ ID NO: 59800 - protein, 7 aa, synthetic construct
KGNGAYG

SEQ ID NO: 59801 - protein, 7 aa, synthetic construct
RPDGTTI

SEQ ID NO: 59802 - protein, 7 aa, synthetic construct
NNKMGPG

SEQ ID NO: 59803 - protein, 7 aa, synthetic construct
NKGGTGA

SEQ ID NO: 59804 - protein, 7 aa, synthetic construct
VGNKSNA

SEQ ID NO: 59805 - protein, 7 aa, synthetic construct
VASSQKG

SEQ ID NO: 59806 - protein, 7 aa, synthetic construct
PSAKPAA

SEQ ID NO: 59807 - protein, 7 aa, synthetic construct
QGLQKGG

SEQ ID NO: 59808 - protein, 7 aa, synthetic construct
GNVHFKA

SEQ ID NO: 59809 - protein, 7 aa, synthetic construct
PRAQQGA

SEQ ID NO: 59810 - protein, 7 aa, synthetic construct
QKAGNSA

SEQ ID NO: 59811 - protein, 7 aa, synthetic construct
NNFTPGG

SEQ ID NO: 59812 - protein, 7 aa, synthetic construct
GKINHHD

SEQ ID NO: 59813 - protein, 7 aa, synthetic construct
PKGQDKG

SEQ ID NO: 59814 - protein, 7 aa, synthetic construct
ASIPYPA

SEQ ID NO: 59815 - protein, 7 aa, synthetic construct
SGHSHHG

SEQ ID NO: 59816 - protein, 7 aa, synthetic construct
SHTHQGP

SEQ ID NO: 59817 - protein, 7 aa, synthetic construct
RSDRMSP

SEQ ID NO: 59818 - protein, 7 aa, synthetic construct
ISAHQSV

SEQ ID NO: 59819 - protein, 7 aa, synthetic construct
FEKHVSH

SEQ ID NO: 59820 - protein, 7 aa, synthetic construct
YASTTPG

SEQ ID NO: 59821 - protein, 7 aa, synthetic construct
RQNHMEG

SEQ ID NO: 59822 - protein, 7 aa, synthetic construct
GNGRTAE

SEQ ID NO: 59823 - protein, 7 aa, synthetic construct
DRSGKLL

SEQ ID NO: 59824 - protein, 7 aa, synthetic construct
QNSNGTL

SEQ ID NO: 59825 - protein, 7 aa, synthetic construct
TAQTSKY

SEQ ID NO: 59826 - protein, 7 aa, synthetic construct
KNTQATG

SEQ ID NO: 59827 - protein, 7 aa, synthetic construct
KEKTWDT

SEQ ID NO: 59828 - protein, 7 aa, synthetic construct
QKSASQN

SEQ ID NO: 59829 - protein, 7 aa, synthetic construct
NLLKVDL

SEQ ID NO: 59830 - protein, 7 aa, synthetic construct
QLTHLEY

SEQ ID NO: 59831 - protein, 7 aa, synthetic construct
AQDKITS

SEQ ID NO: 59832 - protein, 7 aa, synthetic construct
TGPMSKG

SEQ ID NO: 59833 - protein, 7 aa, synthetic construct
TVRIAAE

SEQ ID NO: 59834 - protein, 7 aa, synthetic construct
KFSTMVE

SEQ ID NO: 59835 - protein, 7 aa, synthetic construct
MKFGHAG

SEQ ID NO: 59836 - protein, 7 aa, synthetic construct
NPKTYGG

SEQ ID NO: 59837 - protein, 7 aa, synthetic construct
NYHATPA

SEQ ID NO: 59838 - protein, 7 aa, synthetic construct
RTGNNAV

SEQ ID NO: 59839 - protein, 7 aa, synthetic construct
GDHIGHS

SEQ ID NO: 59840 - protein, 7 aa, synthetic construct
LSQKTPS

SEQ ID NO: 59841 - protein, 7 aa, synthetic construct
NPVGNNW

SEQ ID NO: 59842 - protein, 7 aa, synthetic construct
SKAMGSE

SEQ ID NO: 59843 - protein, 7 aa, synthetic construct
TDYRVPK

SEQ ID NO: 59844 - protein, 7 aa, synthetic construct
ISRIDSQ

SEQ ID NO: 59845 - protein, 7 aa, synthetic construct
LSRGDGR

SEQ ID NO: 59846 - protein, 7 aa, synthetic construct
YNQNGKS

SEQ ID NO: 59847 - protein, 7 aa, synthetic construct
TKATNQG

SEQ ID NO: 59848 - protein, 7 aa, synthetic construct
HQQNVKP

SEQ ID NO: 59849 - protein, 7 aa, synthetic construct
TMHHANV

SEQ ID NO: 59850 - protein, 7 aa, synthetic construct
AYDHGTI

SEQ ID NO: 59851 - protein, 7 aa, synthetic construct
MPLRGGT

SEQ ID NO: 59852 - protein, 7 aa, synthetic construct
KNQSAGG

SEQ ID NO: 59853 - protein, 7 aa, synthetic construct
NQSNRAA

SEQ ID NO: 59854 - protein, 7 aa, synthetic construct
DDRKIMQ

SEQ ID NO: 59855 - protein, 7 aa, synthetic construct
TKNSVNP

SEQ ID NO: 59856 - protein, 7 aa, synthetic construct
PKYGTTG

SEQ ID NO: 59857 - protein, 7 aa, synthetic construct
TSSGLRY

SEQ ID NO: 59858 - protein, 7 aa, synthetic construct
QKTAETS

SEQ ID NO: 59859 - protein, 7 aa, synthetic construct
YHLSGAM

SEQ ID NO: 59860 - protein, 7 aa, synthetic construct
DTSRPSN

SEQ ID NO: 59861 - protein, 7 aa, synthetic construct
LQAKTTP

SEQ ID NO: 59862 - protein, 7 aa, synthetic construct
KATTNNA

SEQ ID NO: 59863 - protein, 7 aa, synthetic construct
SMKSQNG

SEQ ID NO: 59864 - protein, 7 aa, synthetic construct
QRENTMR

SEQ ID NO: 59865 - protein, 7 aa, synthetic construct
GYKPAQS

SEQ ID NO: 59866 - protein, 7 aa, synthetic construct
IMTIPRG

SEQ ID NO: 59867 - protein, 7 aa, synthetic construct
DNQGRRS

SEQ ID NO: 59868 - protein, 7 aa, synthetic construct
YPPPTKS

SEQ ID NO: 59869 - protein, 7 aa, synthetic construct
LFPTMVP

SEQ ID NO: 59870 - protein, 7 aa, synthetic construct
LDRIILP

SEQ ID NO: 59871 - protein, 7 aa, synthetic construct
PSKHPQQ

SEQ ID NO: 59872 - protein, 7 aa, synthetic construct
PAQGKYA

SEQ ID NO: 59873 - protein, 7 aa, synthetic construct
HYPQNRT

SEQ ID NO: 59874 - protein, 7 aa, synthetic construct
YGTRTNS

SEQ ID NO: 59875 - protein, 7 aa, synthetic construct
MKPIHQI

SEQ ID NO: 59876 - protein, 7 aa, synthetic construct
LQLGTKI

SEQ ID NO: 59877 - protein, 7 aa, synthetic construct
FTDKNYH

SEQ ID NO: 59878 - protein, 7 aa, synthetic construct
PSRGSAD

SEQ ID NO: 59879 - protein, 7 aa, synthetic construct
VPRMMEV

SEQ ID NO: 59880 - protein, 7 aa, synthetic construct
GWGGAKQ

SEQ ID NO: 59881 - protein, 7 aa, synthetic construct
MGSTKTG

SEQ ID NO: 59882 - protein, 7 aa, synthetic construct
TLALKLE

SEQ ID NO: 59883 - protein, 7 aa, synthetic construct
HLTIPKT

SEQ ID NO: 59884 - protein, 7 aa, synthetic construct
KQAEMGM

SEQ ID NO: 59885 - protein, 7 aa, synthetic construct
VIPQHRV

SEQ ID NO: 59886 - protein, 7 aa, synthetic construct
PSFNGNK

SEQ ID NO: 59887 - protein, 7 aa, synthetic construct
WHKNGAQ

SEQ ID NO: 59888 - protein, 7 aa, synthetic construct
RKHNTED

SEQ ID NO: 59889 - protein, 7 aa, synthetic construct
RGSGMGA

SEQ ID NO: 59890 - protein, 7 aa, synthetic construct
SFTTTGV

SEQ ID NO: 59891 - protein, 7 aa, synthetic construct
VTQIGID

SEQ ID NO: 59892 - protein, 7 aa, synthetic construct
QMMHPSK

SEQ ID NO: 59893 - protein, 7 aa, synthetic construct
RNTQGPN

SEQ ID NO: 59894 - protein, 7 aa, synthetic construct
IPLVSVS

SEQ ID NO: 59895 - protein, 7 aa, synthetic construct
TMGNNSG

SEQ ID NO: 59896 - protein, 7 aa, synthetic construct
RDPRMSE

SEQ ID NO: 59897 - protein, 7 aa, synthetic construct
YVAGTYN

SEQ ID NO: 59898 - protein, 7 aa, synthetic construct
VYTKGSI

SEQ ID NO: 59899 - protein, 7 aa, synthetic construct
MQLHGLG

SEQ ID NO: 59900 - protein, 7 aa, synthetic construct
GTVRQGY

SEQ ID NO: 59901 - protein, 7 aa, synthetic construct
ATIRGSP

SEQ ID NO: 59902 - protein, 7 aa, synthetic construct
VSKKDHP

SEQ ID NO: 59903 - protein, 7 aa, synthetic construct
GGIAPFP

SEQ ID NO: 59904 - protein, 7 aa, synthetic construct
QLKSQHP

SEQ ID NO: 59905 - protein, 7 aa, synthetic construct
TAFMKLD

SEQ ID NO: 59906 - protein, 7 aa, synthetic construct
AKKPVEP

SEQ ID NO: 59907 - protein, 7 aa, synthetic construct
KMTQGQA

SEQ ID NO: 59908 - protein, 7 aa, synthetic construct
QRSNIGV

SEQ ID NO: 59909 - protein, 7 aa, synthetic construct
KTSSAVS

SEQ ID NO: 59910 - protein, 7 aa, synthetic construct
WHEGRQG

SEQ ID NO: 59911 - protein, 7 aa, synthetic construct
WTQIPDR

SEQ ID NO: 59912 - protein, 7 aa, synthetic construct
SETMRKI

SEQ ID NO: 59913 - protein, 7 aa, synthetic construct
SQIGKKE

SEQ ID NO: 59914 - protein, 7 aa, synthetic construct
MKNLGPQ

SEQ ID NO: 59915 - protein, 7 aa, synthetic construct
KTSHMTA

SEQ ID NO: 59916 - protein, 7 aa, synthetic construct
FPHTGYG

SEQ ID NO: 59917 - protein, 7 aa, synthetic construct
QKNSGRE

SEQ ID NO: 59918 - protein, 7 aa, synthetic construct
SQGMRAA

SEQ ID NO: 59919 - protein, 7 aa, synthetic construct
AIGNMSV

SEQ ID NO: 59920 - protein, 7 aa, synthetic construct
HMVQERG

SEQ ID NO: 59921 - protein, 7 aa, synthetic construct
SFNANDR

SEQ ID NO: 59922 - protein, 7 aa, synthetic construct
YNKASSN

SEQ ID NO: 59923 - protein, 7 aa, synthetic construct
PGQRTGP

SEQ ID NO: 59924 - protein, 7 aa, synthetic construct
KSPGIEW

SEQ ID NO: 59925 - protein, 7 aa, synthetic construct
KLASGVA

SEQ ID NO: 59926 - protein, 7 aa, synthetic construct
TSVRDMS

SEQ ID NO: 59927 - protein, 7 aa, synthetic construct
SRQDFDI

SEQ ID NO: 59928 - protein, 7 aa, synthetic construct
GGKFFAE

SEQ ID NO: 59929 - protein, 7 aa, synthetic construct
MKSPTAA

SEQ ID NO: 59930 - protein, 7 aa, synthetic construct
GKETRSV

SEQ ID NO: 59931 - protein, 7 aa, synthetic construct
DKPRSDL

SEQ ID NO: 59932 - protein, 7 aa, synthetic construct
TVNNGSS

SEQ ID NO: 59933 - protein, 7 aa, synthetic construct
QPLPKNV

SEQ ID NO: 59934 - protein, 7 aa, synthetic construct
KQSSTGV

SEQ ID NO: 59935 - protein, 7 aa, synthetic construct
DKGSYQG

SEQ ID NO: 59936 - protein, 7 aa, synthetic construct
PTRIAQT

SEQ ID NO: 59937 - protein, 7 aa, synthetic construct
TKVTNKE

SEQ ID NO: 59938 - protein, 7 aa, synthetic construct
NNRPNNI

SEQ ID NO: 59939 - protein, 7 aa, synthetic construct
FKSNGAP

SEQ ID NO: 59940 - protein, 7 aa, synthetic construct
LAAHGSQ

SEQ ID NO: 59941 - protein, 7 aa, synthetic construct
KMNGWAG

SEQ ID NO: 59942 - protein, 7 aa, synthetic construct
NMYTSKA

SEQ ID NO: 59943 - protein, 7 aa, synthetic construct
SPRSDTL

SEQ ID NO: 59944 - protein, 7 aa, synthetic construct
PKPSGQF

SEQ ID NO: 59945 - protein, 7 aa, synthetic construct
QHAQYPV

SEQ ID NO: 59946 - protein, 7 aa, synthetic construct
EAKGLQH

SEQ ID NO: 59947 - protein, 7 aa, synthetic construct
FGNKKTE

SEQ ID NO: 59948 - protein, 7 aa, synthetic construct
TSSGAKG

SEQ ID NO: 59949 - protein, 7 aa, synthetic construct
PFKEGFT

SEQ ID NO: 59950 - protein, 7 aa, synthetic construct
HITKMDT

SEQ ID NO: 59951 - protein, 7 aa, synthetic construct
QRVDPRE

SEQ ID NO: 59952 - protein, 7 aa, synthetic construct
RSNSGEN

SEQ ID NO: 59953 - protein, 7 aa, synthetic construct
EREKKIF

SEQ ID NO: 59954 - protein, 7 aa, synthetic construct
PPATANS

SEQ ID NO: 59955 - protein, 7 aa, synthetic construct
GTASPQG

SEQ ID NO: 59956 - protein, 7 aa, synthetic construct
HPMKQGN

SEQ ID NO: 59957 - protein, 7 aa, synthetic construct
QVTTAKP

SEQ ID NO: 59958 - protein, 7 aa, synthetic construct
GFHEKPY

SEQ ID NO: 59959 - protein, 7 aa, synthetic construct
MNTVIQG

SEQ ID NO: 59960 - protein, 7 aa, synthetic construct
YRPNHLN

SEQ ID NO: 59961 - protein, 7 aa, synthetic construct
DRGVKGQ

SEQ ID NO: 59962 - protein, 7 aa, synthetic construct
VDKMTMH

SEQ ID NO: 59963 - protein, 7 aa, synthetic construct
GRSNTSD

SEQ ID NO: 59964 - protein, 7 aa, synthetic construct
YGNARSA

SEQ ID NO: 59965 - protein, 7 aa, synthetic construct
GYPSREK

SEQ ID NO: 59966 - protein, 7 aa, synthetic construct
SKMSAMG

SEQ ID NO: 59967 - protein, 7 aa, synthetic construct
MYKHETG

SEQ ID NO: 59968 - protein, 7 aa, synthetic construct
KDANHHA

SEQ ID NO: 59969 - protein, 7 aa, synthetic construct
HMKFVVA

SEQ ID NO: 59970 - protein, 7 aa, synthetic construct
VKVSAQG

SEQ ID NO: 59971 - protein, 7 aa, synthetic construct
FGDKKTM

SEQ ID NO: 59972 - protein, 7 aa, synthetic construct
PVARSNP

SEQ ID NO: 59973 - protein, 7 aa, synthetic construct
KPTAAQG

SEQ ID NO: 59974 - protein, 7 aa, synthetic construct
PSPKQVA

SEQ ID NO: 59975 - protein, 7 aa, synthetic construct
MYQNVSP

SEQ ID NO: 59976 - protein, 7 aa, synthetic construct
NQKFSTQ

SEQ ID NO: 59977 - protein, 7 aa, synthetic construct
EVYQPKA

SEQ ID NO: 59978 - protein, 7 aa, synthetic construct
SLQKQVA

SEQ ID NO: 59979 - protein, 7 aa, synthetic construct
MFEPKHS

SEQ ID NO: 59980 - protein, 7 aa, synthetic construct
QPVAKVP

SEQ ID NO: 59981 - protein, 7 aa, synthetic construct
GPRSTEG

SEQ ID NO: 59982 - protein, 7 aa, synthetic construct
ESHKTAA

SEQ ID NO: 59983 - protein, 7 aa, synthetic construct
PKNINFD

SEQ ID NO: 59984 - protein, 7 aa, synthetic construct
IRHHGEP

SEQ ID NO: 59985 - protein, 7 aa, synthetic construct
HNLQKEN

SEQ ID NO: 59986 - protein, 7 aa, synthetic construct
FQKSATA

SEQ ID NO: 59987 - protein, 7 aa, synthetic construct
SGNPKNV

SEQ ID NO: 59988 - protein, 7 aa, synthetic construct
TKQSSMS

SEQ ID NO: 59989 - protein, 7 aa, synthetic construct
TQSGNNS

SEQ ID NO: 59990 - protein, 7 aa, synthetic construct
KTQVTSG

SEQ ID NO: 59991 - protein, 7 aa, synthetic construct
SIKDTMG

SEQ ID NO: 59992 - protein, 7 aa, synthetic construct
ARGTTLT

SEQ ID NO: 59993 - protein, 7 aa, synthetic construct
VKARQDS

SEQ ID NO: 59994 - protein, 7 aa, synthetic construct
GKPGTNG

SEQ ID NO: 59995 - protein, 7 aa, synthetic construct
VAPHAVA

SEQ ID NO: 59996 - protein, 7 aa, synthetic construct
PNSKYGH

SEQ ID NO: 59997 - protein, 7 aa, synthetic construct
RSQALNV

SEQ ID NO: 59998 - protein, 7 aa, synthetic construct
NRSNHQE

SEQ ID NO: 59999 - protein, 7 aa, synthetic construct
SNKSREF

SEQ ID NO: 60000 - protein, 7 aa, synthetic construct
NHARHPV

SEQ ID NO: 60001 - protein, 7 aa, synthetic construct
HSTGKGQ

SEQ ID NO: 60002 - protein, 7 aa, synthetic construct
TVTVKVN

SEQ ID NO: 60003 - protein, 7 aa, synthetic construct
NKAGDQG

SEQ ID NO: 60004 - protein, 7 aa, synthetic construct
VKDSYYN

SEQ ID NO: 60005 - protein, 7 aa, synthetic construct
QQPGKAG

SEQ ID NO: 60006 - protein, 7 aa, synthetic construct
DVKSKAD

SEQ ID NO: 60007 - protein, 7 aa, synthetic construct
SVVHAAG

SEQ ID NO: 60008 - protein, 7 aa, synthetic construct
YKTSGQA

SEQ ID NO: 60009 - protein, 7 aa, synthetic construct
NSKVVVE

SEQ ID NO: 60010 - protein, 7 aa, synthetic construct
HKPAKTE

SEQ ID NO: 60011 - protein, 7 aa, synthetic construct
KDSMRTV

SEQ ID NO: 60012 - protein, 7 aa, synthetic construct
AHPGAPN

SEQ ID NO: 60013 - protein, 7 aa, synthetic construct
YVGTARM

SEQ ID NO: 60014 - protein, 7 aa, synthetic construct
VKPDNRF

SEQ ID NO: 60015 - protein, 7 aa, synthetic construct
NGGSKNG

SEQ ID NO: 60016 - protein, 7 aa, synthetic construct
SRFPNGQ

SEQ ID NO: 60017 - protein, 7 aa, synthetic construct
INKEKFT

SEQ ID NO: 60018 - protein, 7 aa, synthetic construct
NNKNGTS

SEQ ID NO: 60019 - protein, 7 aa, synthetic construct
LITLSAP

SEQ ID NO: 60020 - protein, 7 aa, synthetic construct
KMPTNKE

SEQ ID NO: 60021 - protein, 7 aa, synthetic construct
NLKSAGS

SEQ ID NO: 60022 - protein, 7 aa, synthetic construct
TNSFQRA

SEQ ID NO: 60023 - protein, 7 aa, synthetic construct
TNNGKNG

SEQ ID NO: 60024 - protein, 7 aa, synthetic construct
QGVHHSP

SEQ ID NO: 60025 - protein, 7 aa, synthetic construct
REKYYEG

SEQ ID NO: 60026 - protein, 7 aa, synthetic construct
MGDKHAH

SEQ ID NO: 60027 - protein, 7 aa, synthetic construct
LHERANR

SEQ ID NO: 60028 - protein, 7 aa, synthetic construct
KSIGSQP

SEQ ID NO: 60029 - protein, 7 aa, synthetic construct
AAPAMLP

SEQ ID NO: 60030 - protein, 7 aa, synthetic construct
AHNEKPR

SEQ ID NO: 60031 - protein, 7 aa, synthetic construct
KNDQGAR

SEQ ID NO: 60032 - protein, 7 aa, synthetic construct
RDITGGG

SEQ ID NO: 60033 - protein, 7 aa, synthetic construct
EGMKIDI

SEQ ID NO: 60034 - protein, 7 aa, synthetic construct
YPPTTKQ

SEQ ID NO: 60035 - protein, 7 aa, synthetic construct
KLNESIA

SEQ ID NO: 60036 - protein, 7 aa, synthetic construct
EVMKPFR

SEQ ID NO: 60037 - protein, 7 aa, synthetic construct
NGSKPNM

SEQ ID NO: 60038 - protein, 7 aa, synthetic construct
PKSNSNV

SEQ ID NO: 60039 - protein, 7 aa, synthetic construct
KHNHNMA

SEQ ID NO: 60040 - protein, 7 aa, synthetic construct
MMHKLTE

SEQ ID NO: 60041 - protein, 7 aa, synthetic construct
GEIHTKQ

SEQ ID NO: 60042 - protein, 7 aa, synthetic construct
VGGKHNW

SEQ ID NO: 60043 - protein, 7 aa, synthetic construct
TSAKTQG

SEQ ID NO: 60044 - protein, 7 aa, synthetic construct
LRIEKSN

SEQ ID NO: 60045 - protein, 7 aa, synthetic construct
SKPADVG

SEQ ID NO: 60046 - protein, 7 aa, synthetic construct
ITNVKTV

SEQ ID NO: 60047 - protein, 7 aa, synthetic construct
QINPGQR

SEQ ID NO: 60048 - protein, 7 aa, synthetic construct
RASNSST

SEQ ID NO: 60049 - protein, 7 aa, synthetic construct
QKAPAQY

SEQ ID NO: 60050 - protein, 7 aa, synthetic construct
IQSRLTA

SEQ ID NO: 60051 - protein, 7 aa, synthetic construct
SIRGGDG

SEQ ID NO: 60052 - protein, 7 aa, synthetic construct
SPPYQGE

SEQ ID NO: 60053 - protein, 7 aa, synthetic construct
FGRMEAN

SEQ ID NO: 60054 - protein, 7 aa, synthetic construct
ETKQNGG

SEQ ID NO: 60055 - protein, 7 aa, synthetic construct
EHTPQKG

SEQ ID NO: 60056 - protein, 7 aa, synthetic construct
STKTTQQ

SEQ ID NO: 60057 - protein, 7 aa, synthetic construct
KLEMFHG

SEQ ID NO: 60058 - protein, 7 aa, synthetic construct
RAMQNAP

SEQ ID NO: 60059 - protein, 7 aa, synthetic construct
TMHHQAP

SEQ ID NO: 60060 - protein, 7 aa, synthetic construct
TPTGSMI

SEQ ID NO: 60061 - protein, 7 aa, synthetic construct
LVPNMAV

SEQ ID NO: 60062 - protein, 7 aa, synthetic construct
SKNGFQA

SEQ ID NO: 60063 - protein, 7 aa, synthetic construct
LKYASPM

SEQ ID NO: 60064 - protein, 7 aa, synthetic construct
KNPQSAS

SEQ ID NO: 60065 - protein, 7 aa, synthetic construct
NARETKG

SEQ ID NO: 60066 - protein, 7 aa, synthetic construct
TGMLTQG

SEQ ID NO: 60067 - protein, 7 aa, synthetic construct
SKTSGAS

SEQ ID NO: 60068 - protein, 7 aa, synthetic construct
SSKSSMI

SEQ ID NO: 60069 - protein, 7 aa, synthetic construct
NISYQSD

SEQ ID NO: 60070 - protein, 7 aa, synthetic construct
GVLKSDV

SEQ ID NO: 60071 - protein, 7 aa, synthetic construct
QTGTKSA

SEQ ID NO: 60072 - protein, 7 aa, synthetic construct
QRKAEID

SEQ ID NO: 60073 - protein, 7 aa, synthetic construct
KLGANHQ

SEQ ID NO: 60074 - protein, 7 aa, synthetic construct
GHNAGGG

SEQ ID NO: 60075 - protein, 7 aa, synthetic construct
TKNGMSA

SEQ ID NO: 60076 - protein, 7 aa, synthetic construct
MQREPHR

SEQ ID NO: 60077 - protein, 7 aa, synthetic construct
LKSGAIA

SEQ ID NO: 60078 - protein, 7 aa, synthetic construct
GKQHHEP

SEQ ID NO: 60079 - protein, 7 aa, synthetic construct
QNNQRTA

SEQ ID NO: 60080 - protein, 7 aa, synthetic construct
HRSSPTV

SEQ ID NO: 60081 - protein, 7 aa, synthetic construct
HMTMING

SEQ ID NO: 60082 - protein, 7 aa, synthetic construct
TNAQIRN

SEQ ID NO: 60083 - protein, 7 aa, synthetic construct
GRGPPTS

SEQ ID NO: 60084 - protein, 7 aa, synthetic construct
FNKPSSS

SEQ ID NO: 60085 - protein, 7 aa, synthetic construct
KQQTIGG

SEQ ID NO: 60086 - protein, 7 aa, synthetic construct
QQSHNKM

SEQ ID NO: 60087 - protein, 7 aa, synthetic construct
VKNGSTA

SEQ ID NO: 60088 - protein, 7 aa, synthetic construct
LVGPTFT

SEQ ID NO: 60089 - protein, 7 aa, synthetic construct
EIRTMKY

SEQ ID NO: 60090 - protein, 7 aa, synthetic construct
KFVVNDG

SEQ ID NO: 60091 - protein, 7 aa, synthetic construct
MNSNQYF

SEQ ID NO: 60092 - protein, 7 aa, synthetic construct
SITNQKT

SEQ ID NO: 60093 - protein, 7 aa, synthetic construct
GRDLKNL

SEQ ID NO: 60094 - protein, 7 aa, synthetic construct
ATGRASV

SEQ ID NO: 60095 - protein, 7 aa, synthetic construct
NNRSMEK

SEQ ID NO: 60096 - protein, 7 aa, synthetic construct
YGLKAVA

SEQ ID NO: 60097 - protein, 7 aa, synthetic construct
LGALPAQ

SEQ ID NO: 60098 - protein, 7 aa, synthetic construct
TRSHTHG

SEQ ID NO: 60099 - protein, 7 aa, synthetic construct
SRGTGGV

SEQ ID NO: 60100 - protein, 7 aa, synthetic construct
MTTKKDP

SEQ ID NO: 60101 - protein, 7 aa, synthetic construct
RPLGDQR

SEQ ID NO: 60102 - protein, 7 aa, synthetic construct
AANGRGF

SEQ ID NO: 60103 - protein, 7 aa, synthetic construct
GPWKNGQ

SEQ ID NO: 60104 - protein, 7 aa, synthetic construct
KPIQKVP

SEQ ID NO: 60105 - protein, 7 aa, synthetic construct
GGAVRIE

SEQ ID NO: 60106 - protein, 7 aa, synthetic construct
QNAGNRI

SEQ ID NO: 60107 - protein, 7 aa, synthetic construct
ISSNIQK

SEQ ID NO: 60108 - protein, 7 aa, synthetic construct
TPYAAQH

SEQ ID NO: 60109 - protein, 7 aa, synthetic construct
IYRTNNP

SEQ ID NO: 60110 - protein, 7 aa, synthetic construct
VQQISRA

SEQ ID NO: 60111 - protein, 7 aa, synthetic construct
PHGRQSS

SEQ ID NO: 60112 - protein, 7 aa, synthetic construct
TKSTTAG

SEQ ID NO: 60113 - protein, 7 aa, synthetic construct
VGGYTQR

SEQ ID NO: 60114 - protein, 7 aa, synthetic construct
PLMKAQN

SEQ ID NO: 60115 - protein, 7 aa, synthetic construct
RQGTLNV

SEQ ID NO: 60116 - protein, 7 aa, synthetic construct
AKANADV

SEQ ID NO: 60117 - protein, 7 aa, synthetic construct
YQARTTP

SEQ ID NO: 60118 - protein, 7 aa, synthetic construct
IGYQQQM

SEQ ID NO: 60119 - protein, 7 aa, synthetic construct
ITMSKAG

SEQ ID NO: 60120 - protein, 7 aa, synthetic construct
MKTKMSE

SEQ ID NO: 60121 - protein, 7 aa, synthetic construct
DQRSDNR

SEQ ID NO: 60122 - protein, 7 aa, synthetic construct
IRADVGV

SEQ ID NO: 60123 - protein, 7 aa, synthetic construct
RTNQATP

SEQ ID NO: 60124 - protein, 7 aa, synthetic construct
AIQLTTV

SEQ ID NO: 60125 - protein, 7 aa, synthetic construct
PKTGNDA

SEQ ID NO: 60126 - protein, 7 aa, synthetic construct
ASAHWKE

SEQ ID NO: 60127 - protein, 7 aa, synthetic construct
ANAHKYT

SEQ ID NO: 60128 - protein, 7 aa, synthetic construct
GQHHSAT

SEQ ID NO: 60129 - protein, 7 aa, synthetic construct
HQLRKEA

SEQ ID NO: 60130 - protein, 7 aa, synthetic construct
NQFNQSV

SEQ ID NO: 60131 - protein, 7 aa, synthetic construct
DKNSGAL

SEQ ID NO: 60132 - protein, 7 aa, synthetic construct
FTPHVAD

SEQ ID NO: 60133 - protein, 7 aa, synthetic construct
NSSHKPS

SEQ ID NO: 60134 - protein, 7 aa, synthetic construct
TQKKDHY

SEQ ID NO: 60135 - protein, 7 aa, synthetic construct
VAIKESA

SEQ ID NO: 60136 - protein, 7 aa, synthetic construct
PPIKAQI

SEQ ID NO: 60137 - protein, 7 aa, synthetic construct
NQGQLHG

SEQ ID NO: 60138 - protein, 7 aa, synthetic construct
GYKSDLA

SEQ ID NO: 60139 - protein, 7 aa, synthetic construct
AKGQHFN

SEQ ID NO: 60140 - protein, 7 aa, synthetic construct
KDRDAGG

SEQ ID NO: 60141 - protein, 7 aa, synthetic construct
RGGISGT

SEQ ID NO: 60142 - protein, 7 aa, synthetic construct
VHHIRVE

SEQ ID NO: 60143 - protein, 7 aa, synthetic construct
DRLRGAV

SEQ ID NO: 60144 - protein, 7 aa, synthetic construct
NRSQTSV

SEQ ID NO: 60145 - protein, 7 aa, synthetic construct
LQRATNN

SEQ ID NO: 60146 - protein, 7 aa, synthetic construct
KDGQKSA

SEQ ID NO: 60147 - protein, 7 aa, synthetic construct
KWPGHGD

SEQ ID NO: 60148 - protein, 7 aa, synthetic construct
PPKNGMA

SEQ ID NO: 60149 - protein, 7 aa, synthetic construct
AHFQPGS

SEQ ID NO: 60150 - protein, 7 aa, synthetic construct
RTPTMSA

SEQ ID NO: 60151 - protein, 7 aa, synthetic construct
NPPWSEP

SEQ ID NO: 60152 - protein, 7 aa, synthetic construct
NKTVQID

SEQ ID NO: 60153 - protein, 7 aa, synthetic construct
RREYQQD

SEQ ID NO: 60154 - protein, 7 aa, synthetic construct
ETRTMEK

SEQ ID NO: 60155 - protein, 7 aa, synthetic construct
MNKLAHN

SEQ ID NO: 60156 - protein, 7 aa, synthetic construct
VARQYHE

SEQ ID NO: 60157 - protein, 7 aa, synthetic construct
LSSVLNA

SEQ ID NO: 60158 - protein, 7 aa, synthetic construct
DQMRGLQ

SEQ ID NO: 60159 - protein, 7 aa, synthetic construct
KYSKMES

SEQ ID NO: 60160 - protein, 7 aa, synthetic construct
KPANQFS

SEQ ID NO: 60161 - protein, 7 aa, synthetic construct
MSIKPDG

SEQ ID NO: 60162 - protein, 7 aa, synthetic construct
MGSRFHA

SEQ ID NO: 60163 - protein, 7 aa, synthetic construct
VNKTMAG

SEQ ID NO: 60164 - protein, 7 aa, synthetic construct
KHRDSEE

SEQ ID NO: 60165 - protein, 7 aa, synthetic construct
LGPKTTL

SEQ ID NO: 60166 - protein, 7 aa, synthetic construct
YQSYTRS

SEQ ID NO: 60167 - protein, 7 aa, synthetic construct
YKDYSNP

SEQ ID NO: 60168 - protein, 7 aa, synthetic construct
YKVGYTA

SEQ ID NO: 60169 - protein, 7 aa, synthetic construct
LLQPAQT

SEQ ID NO: 60170 - protein, 7 aa, synthetic construct
TTEGGNK

SEQ ID NO: 60171 - protein, 7 aa, synthetic construct
VRQSTEF

SEQ ID NO: 60172 - protein, 7 aa, synthetic construct
RTNIQTP

SEQ ID NO: 60173 - protein, 7 aa, synthetic construct
RVGAPSH

SEQ ID NO: 60174 - protein, 7 aa, synthetic construct
MPHHRNE

SEQ ID NO: 60175 - protein, 7 aa, synthetic construct
EKYPIAT

SEQ ID NO: 60176 - protein, 7 aa, synthetic construct
FMSPPKS

SEQ ID NO: 60177 - protein, 7 aa, synthetic construct
MRHAMPE

SEQ ID NO: 60178 - protein, 7 aa, synthetic construct
VRPISGS

SEQ ID NO: 60179 - protein, 7 aa, synthetic construct
KNANIPG

SEQ ID NO: 60180 - protein, 7 aa, synthetic construct
ALHSSVI

SEQ ID NO: 60181 - protein, 7 aa, synthetic construct
GGKPNTA

SEQ ID NO: 60182 - protein, 7 aa, synthetic construct
GRNVAVI

SEQ ID NO: 60183 - protein, 7 aa, synthetic construct
GDWQNTK

SEQ ID NO: 60184 - protein, 7 aa, synthetic construct
IFHEAPS

SEQ ID NO: 60185 - protein, 7 aa, synthetic construct
YDSLHPL

SEQ ID NO: 60186 - protein, 7 aa, synthetic construct
TRTNNAA

SEQ ID NO: 60187 - protein, 7 aa, synthetic construct
VKPGSNA

SEQ ID NO: 60188 - protein, 7 aa, synthetic construct
TVGIVQN

SEQ ID NO: 60189 - protein, 7 aa, synthetic construct
EAFDRAG

SEQ ID NO: 60190 - protein, 7 aa, synthetic construct
VSKNANG

SEQ ID NO: 60191 - protein, 7 aa, synthetic construct
ETKKGLM

SEQ ID NO: 60192 - protein, 7 aa, synthetic construct
NRNANVA

SEQ ID NO: 60193 - protein, 7 aa, synthetic construct
SLGQLAK

SEQ ID NO: 60194 - protein, 7 aa, synthetic construct
YNHAEKN

SEQ ID NO: 60195 - protein, 7 aa, synthetic construct
RFEDGVR

SEQ ID NO: 60196 - protein, 7 aa, synthetic construct
MKGFAHT

SEQ ID NO: 60197 - protein, 7 aa, synthetic construct
AFTNMSR

SEQ ID NO: 60198 - protein, 7 aa, synthetic construct
GKNPGDM

SEQ ID NO: 60199 - protein, 7 aa, synthetic construct
NKAISNG

SEQ ID NO: 60200 - protein, 7 aa, synthetic construct
DDRTKER

SEQ ID NO: 60201 - protein, 7 aa, synthetic construct
MQQVAKA

SEQ ID NO: 60202 - protein, 7 aa, synthetic construct
KVPTAGV

SEQ ID NO: 60203 - protein, 7 aa, synthetic construct
MTNTQPY

SEQ ID NO: 60204 - protein, 7 aa, synthetic construct
NPGVRHF

SEQ ID NO: 60205 - protein, 7 aa, synthetic construct
IEMKASS

SEQ ID NO: 60206 - protein, 7 aa, synthetic construct
NAKNSGG

SEQ ID NO: 60207 - protein, 7 aa, synthetic construct
VYVSKTA

SEQ ID NO: 60208 - protein, 7 aa, synthetic construct
TFKMATT

SEQ ID NO: 60209 - protein, 7 aa, synthetic construct
KLADVHG

SEQ ID NO: 60210 - protein, 7 aa, synthetic construct
KHERNFQ

SEQ ID NO: 60211 - protein, 7 aa, synthetic construct
SPRYVDA

SEQ ID NO: 60212 - protein, 7 aa, synthetic construct
FNKPASN

SEQ ID NO: 60213 - protein, 7 aa, synthetic construct
IRTDTPQ

SEQ ID NO: 60214 - protein, 7 aa, synthetic construct
FQRFEPE

SEQ ID NO: 60215 - protein, 7 aa, synthetic construct
KRAHVEE

SEQ ID NO: 60216 - protein, 7 aa, synthetic construct
NFKDGKW

SEQ ID NO: 60217 - protein, 7 aa, synthetic construct
TTGGGRT

SEQ ID NO: 60218 - protein, 7 aa, synthetic construct
RTAISEI

SEQ ID NO: 60219 - protein, 7 aa, synthetic construct
VMNAANS

SEQ ID NO: 60220 - protein, 7 aa, synthetic construct
NEHIRSQ

SEQ ID NO: 60221 - protein, 7 aa, synthetic construct
QVHNRQY

SEQ ID NO: 60222 - protein, 7 aa, synthetic construct
APGWKVG

SEQ ID NO: 60223 - protein, 7 aa, synthetic construct
RMPGNTT

SEQ ID NO: 60224 - protein, 7 aa, synthetic construct
LAREINH

SEQ ID NO: 60225 - protein, 7 aa, synthetic construct
AVPGRHD

SEQ ID NO: 60226 - protein, 7 aa, synthetic construct
GARDHRD

SEQ ID NO: 60227 - protein, 7 aa, synthetic construct
MQRTNQA

SEQ ID NO: 60228 - protein, 7 aa, synthetic construct
GPRTATP

SEQ ID NO: 60229 - protein, 7 aa, synthetic construct
NNKFQHQ

SEQ ID NO: 60230 - protein, 7 aa, synthetic construct
TNSIEGY

SEQ ID NO: 60231 - protein, 7 aa, synthetic construct
WMKALSD

SEQ ID NO: 60232 - protein, 7 aa, synthetic construct
VSGKLSL

SEQ ID NO: 60233 - protein, 7 aa, synthetic construct
MGPTTML

SEQ ID NO: 60234 - protein, 7 aa, synthetic construct
FNHSAGH

SEQ ID NO: 60235 - protein, 7 aa, synthetic construct
LHKARDA

SEQ ID NO: 60236 - protein, 7 aa, synthetic construct
YNSGFSH

SEQ ID NO: 60237 - protein, 7 aa, synthetic construct
TMGVFKS

SEQ ID NO: 60238 - protein, 7 aa, synthetic construct
QRHNDMR

SEQ ID NO: 60239 - protein, 7 aa, synthetic construct
QGGYVNP

SEQ ID NO: 60240 - protein, 7 aa, synthetic construct
FHKLEFQ

SEQ ID NO: 60241 - protein, 7 aa, synthetic construct
RMNASTH

SEQ ID NO: 60242 - protein, 7 aa, synthetic construct
PAAIAHT

SEQ ID NO: 60243 - protein, 7 aa, synthetic construct
FKFPDMG

SEQ ID NO: 60244 - protein, 7 aa, synthetic construct
FTTGAPS

SEQ ID NO: 60245 - protein, 7 aa, synthetic construct
GRIHSNA

SEQ ID NO: 60246 - protein, 7 aa, synthetic construct
IGGAHMP

SEQ ID NO: 60247 - protein, 7 aa, synthetic construct
TNGARMA

SEQ ID NO: 60248 - protein, 7 aa, synthetic construct
HMRAGQS

SEQ ID NO: 60249 - protein, 7 aa, synthetic construct
GYSVHSD

SEQ ID NO: 60250 - protein, 7 aa, synthetic construct
MANLSKY

SEQ ID NO: 60251 - protein, 7 aa, synthetic construct
FIKTEEK

SEQ ID NO: 60252 - protein, 7 aa, synthetic construct
AQVMRGV

SEQ ID NO: 60253 - protein, 7 aa, synthetic construct
QHRPTTD

SEQ ID NO: 60254 - protein, 7 aa, synthetic construct
TRFVTIE

SEQ ID NO: 60255 - protein, 7 aa, synthetic construct
YRHEDGI

SEQ ID NO: 60256 - protein, 7 aa, synthetic construct
DKHFHQA

SEQ ID NO: 60257 - protein, 7 aa, synthetic construct
IQSQNAW

SEQ ID NO: 60258 - protein, 7 aa, synthetic construct
VQFHGHP

SEQ ID NO: 60259 - protein, 7 aa, synthetic construct
NNNSKAG

SEQ ID NO: 60260 - protein, 7 aa, synthetic construct
SQSVPRM

SEQ ID NO: 60261 - protein, 7 aa, synthetic construct
VRQPAVP

SEQ ID NO: 60262 - protein, 7 aa, synthetic construct
FEHAGGK

SEQ ID NO: 60263 - protein, 7 aa, synthetic construct
RNVTHDV

SEQ ID NO: 60264 - protein, 7 aa, synthetic construct
TKATFKD

SEQ ID NO: 60265 - protein, 7 aa, synthetic construct
MSKAMHN

SEQ ID NO: 60266 - protein, 7 aa, synthetic construct
HPSHPER

SEQ ID NO: 60267 - protein, 7 aa, synthetic construct
TTTQRQP

SEQ ID NO: 60268 - protein, 7 aa, synthetic construct
TSQGQYG

SEQ ID NO: 60269 - protein, 7 aa, synthetic construct
KLNQSSA

SEQ ID NO: 60270 - protein, 7 aa, synthetic construct
IGKQYIH

SEQ ID NO: 60271 - protein, 7 aa, synthetic construct
SGSVLAY

SEQ ID NO: 60272 - protein, 7 aa, synthetic construct
RPQTGTM

SEQ ID NO: 60273 - protein, 7 aa, synthetic construct
SDLRALS

SEQ ID NO: 60274 - protein, 7 aa, synthetic construct
PNQPDRG

SEQ ID NO: 60275 - protein, 7 aa, synthetic construct
LKIMVNS

SEQ ID NO: 60276 - protein, 7 aa, synthetic construct
KNIEIPS

SEQ ID NO: 60277 - protein, 7 aa, synthetic construct
FETKNVI

SEQ ID NO: 60278 - protein, 7 aa, synthetic construct
SKDGSTN

SEQ ID NO: 60279 - protein, 7 aa, synthetic construct
FTRAELG

SEQ ID NO: 60280 - protein, 7 aa, synthetic construct
RDKISSA

SEQ ID NO: 60281 - protein, 7 aa, synthetic construct
QGALHKV

SEQ ID NO: 60282 - protein, 7 aa, synthetic construct
VSQNMGR

SEQ ID NO: 60283 - protein, 7 aa, synthetic construct
KPGNQQS

SEQ ID NO: 60284 - protein, 7 aa, synthetic construct
LRHPREQ

SEQ ID NO: 60285 - protein, 7 aa, synthetic construct
LGMGSNP

SEQ ID NO: 60286 - protein, 7 aa, synthetic construct
IAKANAE

SEQ ID NO: 60287 - protein, 7 aa, synthetic construct
KHGQFIG

SEQ ID NO: 60288 - protein, 7 aa, synthetic construct
KAGGEFI

SEQ ID NO: 60289 - protein, 7 aa, synthetic construct
NGKMQSG

SEQ ID NO: 60290 - protein, 7 aa, synthetic construct
AGDHRKV

SEQ ID NO: 60291 - protein, 7 aa, synthetic construct
NGHSMGF

SEQ ID NO: 60292 - protein, 7 aa, synthetic construct
DQGVLQG

SEQ ID NO: 60293 - protein, 7 aa, synthetic construct
IRKEVVA

SEQ ID NO: 60294 - protein, 7 aa, synthetic construct
TTRDHQR

SEQ ID NO: 60295 - protein, 7 aa, synthetic construct
QGGGYAG

SEQ ID NO: 60296 - protein, 7 aa, synthetic construct
IHKTQGQ

SEQ ID NO: 60297 - protein, 7 aa, synthetic construct
GRHNPMV

SEQ ID NO: 60298 - protein, 7 aa, synthetic construct
SNMRNGP

SEQ ID NO: 60299 - protein, 7 aa, synthetic construct
NEKMTVL

SEQ ID NO: 60300 - protein, 7 aa, synthetic construct
DTKDRFS

SEQ ID NO: 60301 - protein, 7 aa, synthetic construct
QMHENKA

SEQ ID NO: 60302 - protein, 7 aa, synthetic construct
FVKKYID

SEQ ID NO: 60303 - protein, 7 aa, synthetic construct
QTRNAIE

SEQ ID NO: 60304 - protein, 7 aa, synthetic construct
TATANPR

SEQ ID NO: 60305 - protein, 7 aa, synthetic construct
KREIPTG

SEQ ID NO: 60306 - protein, 7 aa, synthetic construct
WPQKFSA

SEQ ID NO: 60307 - protein, 7 aa, synthetic construct
FGNRQHL

SEQ ID NO: 60308 - protein, 7 aa, synthetic construct
IPGLPQI

SEQ ID NO: 60309 - protein, 7 aa, synthetic construct
PVKTSNG

SEQ ID NO: 60310 - protein, 7 aa, synthetic construct
NKPSQPV

SEQ ID NO: 60311 - protein, 7 aa, synthetic construct
RGADFTK

SEQ ID NO: 60312 - protein, 7 aa, synthetic construct
VEKKQYN

SEQ ID NO: 60313 - protein, 7 aa, synthetic construct
PKQTSQS

SEQ ID NO: 60314 - protein, 7 aa, synthetic construct
TKIGGIH

SEQ ID NO: 60315 - protein, 7 aa, synthetic construct
NGTLNKG

SEQ ID NO: 60316 - protein, 7 aa, synthetic construct
TGGSMKI

SEQ ID NO: 60317 - protein, 7 aa, synthetic construct
GAMHPPR

SEQ ID NO: 60318 - protein, 7 aa, synthetic construct
RVDKGQG

SEQ ID NO: 60319 - protein, 7 aa, synthetic construct
WNAGRVA

SEQ ID NO: 60320 - protein, 7 aa, synthetic construct
RHSDSLS

SEQ ID NO: 60321 - protein, 7 aa, synthetic construct
RPIPNPG

SEQ ID NO: 60322 - protein, 7 aa, synthetic construct
TKPMVPN

SEQ ID NO: 60323 - protein, 7 aa, synthetic construct
QAGPNRM

SEQ ID NO: 60324 - protein, 7 aa, synthetic construct
TTKEWAP

SEQ ID NO: 60325 - protein, 7 aa, synthetic construct
DAQKMYA

SEQ ID NO: 60326 - protein, 7 aa, synthetic construct
AERIKND

SEQ ID NO: 60327 - protein, 7 aa, synthetic construct
KEPTAPQ

SEQ ID NO: 60328 - protein, 7 aa, synthetic construct
GGGAHTI

SEQ ID NO: 60329 - protein, 7 aa, synthetic construct
NRAHQPD

SEQ ID NO: 60330 - protein, 7 aa, synthetic construct
GAMSYER

SEQ ID NO: 60331 - protein, 7 aa, synthetic construct
PFVSQPA

SEQ ID NO: 60332 - protein, 7 aa, synthetic construct
NRAQQGG

SEQ ID NO: 60333 - protein, 7 aa, synthetic construct
PGSHQQA

SEQ ID NO: 60334 - protein, 7 aa, synthetic construct
FEHQSYG

SEQ ID NO: 60335 - protein, 7 aa, synthetic construct
KASAGSM

SEQ ID NO: 60336 - protein, 7 aa, synthetic construct
FNKQDKN

SEQ ID NO: 60337 - protein, 7 aa, synthetic construct
MGNNKSN

SEQ ID NO: 60338 - protein, 7 aa, synthetic construct
TTKIGVE

SEQ ID NO: 60339 - protein, 7 aa, synthetic construct
FKNNPMI

SEQ ID NO: 60340 - protein, 7 aa, synthetic construct
LKGMGVL

SEQ ID NO: 60341 - protein, 7 aa, synthetic construct
DGVMARK

SEQ ID NO: 60342 - protein, 7 aa, synthetic construct
IGKITNA

SEQ ID NO: 60343 - protein, 7 aa, synthetic construct
RQPNGTS

SEQ ID NO: 60344 - protein, 7 aa, synthetic construct
HRNQMET

SEQ ID NO: 60345 - protein, 7 aa, synthetic construct
MKPSNPA

SEQ ID NO: 60346 - protein, 7 aa, synthetic construct
KTHQSEK

SEQ ID NO: 60347 - protein, 7 aa, synthetic construct
VPMGQIS

SEQ ID NO: 60348 - protein, 7 aa, synthetic construct
SGMQREK

SEQ ID NO: 60349 - protein, 7 aa, synthetic construct
VEKHNAG

SEQ ID NO: 60350 - protein, 7 aa, synthetic construct
GGAVREH

SEQ ID NO: 60351 - protein, 7 aa, synthetic construct
ESQMRSK

SEQ ID NO: 60352 - protein, 7 aa, synthetic construct
NSKTNQA

SEQ ID NO: 60353 - protein, 7 aa, synthetic construct
AMKGWHE

SEQ ID NO: 60354 - protein, 7 aa, synthetic construct
SGHFSTE

SEQ ID NO: 60355 - protein, 7 aa, synthetic construct
PRSSMNA

SEQ ID NO: 60356 - protein, 7 aa, synthetic construct
KAQTTGG

SEQ ID NO: 60357 - protein, 7 aa, synthetic construct
YKAMDPI

SEQ ID NO: 60358 - protein, 7 aa, synthetic construct
RSNMTPV

SEQ ID NO: 60359 - protein, 7 aa, synthetic construct
WQQLATN

SEQ ID NO: 60360 - protein, 7 aa, synthetic construct
TQTKQSS

SEQ ID NO: 60361 - protein, 7 aa, synthetic construct
IRMGLPD

SEQ ID NO: 60362 - protein, 7 aa, synthetic construct
LGPAGTK

SEQ ID NO: 60363 - protein, 7 aa, synthetic construct
IHRSANQ

SEQ ID NO: 60364 - protein, 7 aa, synthetic construct
FKTTGKE

SEQ ID NO: 60365 - protein, 7 aa, synthetic construct
NKTGSPA

SEQ ID NO: 60366 - protein, 7 aa, synthetic construct
KGQGSIA

SEQ ID NO: 60367 - protein, 7 aa, synthetic construct
TKRGSDP

SEQ ID NO: 60368 - protein, 7 aa, synthetic construct
ISRNSGI

SEQ ID NO: 60369 - protein, 7 aa, synthetic construct
WKAMSTV

SEQ ID NO: 60370 - protein, 7 aa, synthetic construct
GAARLTQ

SEQ ID NO: 60371 - protein, 7 aa, synthetic construct
QRATVQG

SEQ ID NO: 60372 - protein, 7 aa, synthetic construct
NNQERTT

SEQ ID NO: 60373 - protein, 7 aa, synthetic construct
IMTYSDK

SEQ ID NO: 60374 - protein, 7 aa, synthetic construct
QNARTQP

SEQ ID NO: 60375 - protein, 7 aa, synthetic construct
HLKLNIG

SEQ ID NO: 60376 - protein, 7 aa, synthetic construct
LTPKKHD

SEQ ID NO: 60377 - protein, 7 aa, synthetic construct
HGIYERA

SEQ ID NO: 60378 - protein, 7 aa, synthetic construct
IVDFQSG

SEQ ID NO: 60379 - protein, 7 aa, synthetic construct
SRHITHE

SEQ ID NO: 60380 - protein, 7 aa, synthetic construct
IPTSGQF

SEQ ID NO: 60381 - protein, 7 aa, synthetic construct
QSSKMSP

SEQ ID NO: 60382 - protein, 7 aa, synthetic construct
FAKDVPY

SEQ ID NO: 60383 - protein, 7 aa, synthetic construct
FKTVSSA

SEQ ID NO: 60384 - protein, 7 aa, synthetic construct
AMQSRVT

SEQ ID NO: 60385 - protein, 7 aa, synthetic construct
TVTNRQG

SEQ ID NO: 60386 - protein, 7 aa, synthetic construct
MRDKHFE

SEQ ID NO: 60387 - protein, 7 aa, synthetic construct
RMAYNDT

SEQ ID NO: 60388 - protein, 7 aa, synthetic construct
WATFKNP

SEQ ID NO: 60389 - protein, 7 aa, synthetic construct
VRIPTET

SEQ ID NO: 60390 - protein, 7 aa, synthetic construct
GVKQNNP

SEQ ID NO: 60391 - protein, 7 aa, synthetic construct
TAKFYDA

SEQ ID NO: 60392 - protein, 7 aa, synthetic construct
YMVPSKN

SEQ ID NO: 60393 - protein, 7 aa, synthetic construct
QGSRSAE

SEQ ID NO: 60394 - protein, 7 aa, synthetic construct
NTHIPHS

SEQ ID NO: 60395 - protein, 7 aa, synthetic construct
ATAHPHV

SEQ ID NO: 60396 - protein, 7 aa, synthetic construct
PGDRFMK

SEQ ID NO: 60397 - protein, 7 aa, synthetic construct
DHRAGKQ

SEQ ID NO: 60398 - protein, 7 aa, synthetic construct
KKPDNLA

SEQ ID NO: 60399 - protein, 7 aa, synthetic construct
KVVLSHE

SEQ ID NO: 60400 - protein, 7 aa, synthetic construct
NNYKISP

SEQ ID NO: 60401 - protein, 7 aa, synthetic construct
VKTTSIN

SEQ ID NO: 60402 - protein, 7 aa, synthetic construct
RLAHGIS

SEQ ID NO: 60403 - protein, 7 aa, synthetic construct
KSNAGGM

SEQ ID NO: 60404 - protein, 7 aa, synthetic construct
HAMSSRS

SEQ ID NO: 60405 - protein, 7 aa, synthetic construct
WVPKEGG

SEQ ID NO: 60406 - protein, 7 aa, synthetic construct
QWKSQLE

SEQ ID NO: 60407 - protein, 7 aa, synthetic construct
FINPKDS

SEQ ID NO: 60408 - protein, 7 aa, synthetic construct
PERRGDS

SEQ ID NO: 60409 - protein, 7 aa, synthetic construct
TDRHSPA

SEQ ID NO: 60410 - protein, 7 aa, synthetic construct
ISRMEPV

SEQ ID NO: 60411 - protein, 7 aa, synthetic construct
NSRDAQY

SEQ ID NO: 60412 - protein, 7 aa, synthetic construct
RNKLDPQ

SEQ ID NO: 60413 - protein, 7 aa, synthetic construct
PRSDKYN

SEQ ID NO: 60414 - protein, 7 aa, synthetic construct
PRGVAPH

SEQ ID NO: 60415 - protein, 7 aa, synthetic construct
VARAQLN

SEQ ID NO: 60416 - protein, 7 aa, synthetic construct
KDRDRMP

SEQ ID NO: 60417 - protein, 7 aa, synthetic construct
SQHRLGI

SEQ ID NO: 60418 - protein, 7 aa, synthetic construct
MYTQSKV

SEQ ID NO: 60419 - protein, 7 aa, synthetic construct
LTNAMTR

SEQ ID NO: 60420 - protein, 7 aa, synthetic construct
VGGKTAG

SEQ ID NO: 60421 - protein, 7 aa, synthetic construct
RNPADNH

SEQ ID NO: 60422 - protein, 7 aa, synthetic construct
MIERGEK

SEQ ID NO: 60423 - protein, 7 aa, synthetic construct
DRMKTGY

SEQ ID NO: 60424 - protein, 7 aa, synthetic construct
ETGKHSY

SEQ ID NO: 60425 - protein, 7 aa, synthetic construct
EKLRFEQ

SEQ ID NO: 60426 - protein, 7 aa, synthetic construct
QNPGKVT

SEQ ID NO: 60427 - protein, 7 aa, synthetic construct
KSHQINH

SEQ ID NO: 60428 - protein, 7 aa, synthetic construct
VKEARVA

SEQ ID NO: 60429 - protein, 7 aa, synthetic construct
GKFRILE

SEQ ID NO: 60430 - protein, 7 aa, synthetic construct
KNSTSSL

SEQ ID NO: 60431 - protein, 7 aa, synthetic construct
SVSGRME

SEQ ID NO: 60432 - protein, 7 aa, synthetic construct
KSYNNVP

SEQ ID NO: 60433 - protein, 7 aa, synthetic construct
TGQKTNS

SEQ ID NO: 60434 - protein, 7 aa, synthetic construct
LELHYKG

SEQ ID NO: 60435 - protein, 7 aa, synthetic construct
ETTSARA

SEQ ID NO: 60436 - protein, 7 aa, synthetic construct
TKSSGYA

SEQ ID NO: 60437 - protein, 7 aa, synthetic construct
ALNNATT

SEQ ID NO: 60438 - protein, 7 aa, synthetic construct
QTYKHSE

SEQ ID NO: 60439 - protein, 7 aa, synthetic construct
FEMGKAI

SEQ ID NO: 60440 - protein, 7 aa, synthetic construct
AKQPVTT

SEQ ID NO: 60441 - protein, 7 aa, synthetic construct
LVPGLGT

SEQ ID NO: 60442 - protein, 7 aa, synthetic construct
YIKEAQK

SEQ ID NO: 60443 - protein, 7 aa, synthetic construct
GVRKDDM

SEQ ID NO: 60444 - protein, 7 aa, synthetic construct
MTSSKNG

SEQ ID NO: 60445 - protein, 7 aa, synthetic construct
VGSPMSM

SEQ ID NO: 60446 - protein, 7 aa, synthetic construct
KGGSTAG

SEQ ID NO: 60447 - protein, 7 aa, synthetic construct
PLTKHGY

SEQ ID NO: 60448 - protein, 7 aa, synthetic construct
TTKAMSS

SEQ ID NO: 60449 - protein, 7 aa, synthetic construct
WQAFTSE

SEQ ID NO: 60450 - protein, 7 aa, synthetic construct
TMSSPRI

SEQ ID NO: 60451 - protein, 7 aa, synthetic construct
KQMGAES

SEQ ID NO: 60452 - protein, 7 aa, synthetic construct
TGSRIYP

SEQ ID NO: 60453 - protein, 7 aa, synthetic construct
LNAFQGM

SEQ ID NO: 60454 - protein, 7 aa, synthetic construct
QLNSGHG

SEQ ID NO: 60455 - protein, 7 aa, synthetic construct
HQAREKD

SEQ ID NO: 60456 - protein, 7 aa, synthetic construct
TKGGGVG

SEQ ID NO: 60457 - protein, 7 aa, synthetic construct
MTKNTNL

SEQ ID NO: 60458 - protein, 7 aa, synthetic construct
NEKRPGV

SEQ ID NO: 60459 - protein, 7 aa, synthetic construct
FRGRTDD

SEQ ID NO: 60460 - protein, 7 aa, synthetic construct
IQASTNT

SEQ ID NO: 60461 - protein, 7 aa, synthetic construct
LDQVRRP

SEQ ID NO: 60462 - protein, 7 aa, synthetic construct
INNHDHV

SEQ ID NO: 60463 - protein, 7 aa, synthetic construct
GIPTVSG

SEQ ID NO: 60464 - protein, 7 aa, synthetic construct
YSLKEAS

SEQ ID NO: 60465 - protein, 7 aa, synthetic construct
TFYDKSA

SEQ ID NO: 60466 - protein, 7 aa, synthetic construct
MGKMQAG

SEQ ID NO: 60467 - protein, 7 aa, synthetic construct
MDKNYAK

SEQ ID NO: 60468 - protein, 7 aa, synthetic construct
PSNMAAR

SEQ ID NO: 60469 - protein, 7 aa, synthetic construct
MVPSTIP

SEQ ID NO: 60470 - protein, 7 aa, synthetic construct
RDGFKMQ

SEQ ID NO: 60471 - protein, 7 aa, synthetic construct
GPYESPR

SEQ ID NO: 60472 - protein, 7 aa, synthetic construct
KPSQNAP

SEQ ID NO: 60473 - protein, 7 aa, synthetic construct
NLTHGLE

SEQ ID NO: 60474 - protein, 7 aa, synthetic construct
VQQTTHM

SEQ ID NO: 60475 - protein, 7 aa, synthetic construct
YSGQQIR

SEQ ID NO: 60476 - protein, 7 aa, synthetic construct
WKGIAND

SEQ ID NO: 60477 - protein, 7 aa, synthetic construct
FMDDRRV

SEQ ID NO: 60478 - protein, 7 aa, synthetic construct
PGPPPTH

SEQ ID NO: 60479 - protein, 7 aa, synthetic construct
GKMMNVH

SEQ ID NO: 60480 - protein, 7 aa, synthetic construct
SHHASHV

SEQ ID NO: 60481 - protein, 7 aa, synthetic construct
KGIQVQI

SEQ ID NO: 60482 - protein, 7 aa, synthetic construct
MDFHGHT

SEQ ID NO: 60483 - protein, 7 aa, synthetic construct
RFYGQEA

SEQ ID NO: 60484 - protein, 7 aa, synthetic construct
HITNEGS

SEQ ID NO: 60485 - protein, 7 aa, synthetic construct
HTNRKQE

SEQ ID NO: 60486 - protein, 7 aa, synthetic construct
GKPSGSV

SEQ ID NO: 60487 - protein, 7 aa, synthetic construct
DFQGRGK

SEQ ID NO: 60488 - protein, 7 aa, synthetic construct
VAHAGPK

SEQ ID NO: 60489 - protein, 7 aa, synthetic construct
SPVAAHA

SEQ ID NO: 60490 - protein, 7 aa, synthetic construct
SQRDARV

SEQ ID NO: 60491 - protein, 7 aa, synthetic construct
KTQVGTP

SEQ ID NO: 60492 - protein, 7 aa, synthetic construct
TGGRTVA

SEQ ID NO: 60493 - protein, 7 aa, synthetic construct
LSPNSQA

SEQ ID NO: 60494 - protein, 7 aa, synthetic construct
YGISSQT

SEQ ID NO: 60495 - protein, 7 aa, synthetic construct
DLRLDLK

SEQ ID NO: 60496 - protein, 7 aa, synthetic construct
VNKGTSA

SEQ ID NO: 60497 - protein, 7 aa, synthetic construct
SQTHVAG

SEQ ID NO: 60498 - protein, 7 aa, synthetic construct
LDQFMKA

SEQ ID NO: 60499 - protein, 7 aa, synthetic construct
MSGGGIG

SEQ ID NO: 60500 - protein, 7 aa, synthetic construct
VMNQKIS

SEQ ID NO: 60501 - protein, 7 aa, synthetic construct
FSVAKEG

SEQ ID NO: 60502 - protein, 7 aa, synthetic construct
TKPAGAA

SEQ ID NO: 60503 - protein, 7 aa, synthetic construct
EKDTRIQ

SEQ ID NO: 60504 - protein, 7 aa, synthetic construct
MHNHMAD

SEQ ID NO: 60505 - protein, 7 aa, synthetic construct
VKPSVYG

SEQ ID NO: 60506 - protein, 7 aa, synthetic construct
NIRGMGD

SEQ ID NO: 60507 - protein, 7 aa, synthetic construct
EPKRKDG

SEQ ID NO: 60508 - protein, 7 aa, synthetic construct
KTQTGTH

SEQ ID NO: 60509 - protein, 7 aa, synthetic construct
NNYTSRA

SEQ ID NO: 60510 - protein, 7 aa, synthetic construct
PTHGAAM

SEQ ID NO: 60511 - protein, 7 aa, synthetic construct
LNGRTHV

SEQ ID NO: 60512 - protein, 7 aa, synthetic construct
QYAGAMG

SEQ ID NO: 60513 - protein, 7 aa, synthetic construct
SKHIMID

SEQ ID NO: 60514 - protein, 7 aa, synthetic construct
NSNATKF

SEQ ID NO: 60515 - protein, 7 aa, synthetic construct
NGIVSVG

SEQ ID NO: 60516 - protein, 7 aa, synthetic construct
TNGSQLG

SEQ ID NO: 60517 - protein, 7 aa, synthetic construct
PVGTSIM

SEQ ID NO: 60518 - protein, 7 aa, synthetic construct
FPHSVKE

SEQ ID NO: 60519 - protein, 7 aa, synthetic construct
FQANAHG

SEQ ID NO: 60520 - protein, 7 aa, synthetic construct
QNKTHTP

SEQ ID NO: 60521 - protein, 7 aa, synthetic construct
GPQRADQ

SEQ ID NO: 60522 - protein, 7 aa, synthetic construct
EKRTQSE

SEQ ID NO: 60523 - protein, 7 aa, synthetic construct
TGRPRDE

SEQ ID NO: 60524 - protein, 7 aa, synthetic construct
PQKGTDG

SEQ ID NO: 60525 - protein, 7 aa, synthetic construct
EHHPRHD

SEQ ID NO: 60526 - protein, 7 aa, synthetic construct
LQTHNGG

SEQ ID NO: 60527 - protein, 7 aa, synthetic construct
TTHNVLI

SEQ ID NO: 60528 - protein, 7 aa, synthetic construct
HQTWNRE

SEQ ID NO: 60529 - protein, 7 aa, synthetic construct
WKVGHQT

SEQ ID NO: 60530 - protein, 7 aa, synthetic construct
RGTNHSH

SEQ ID NO: 60531 - protein, 7 aa, synthetic construct
NAEIRGG

SEQ ID NO: 60532 - protein, 7 aa, synthetic construct
DERDSPY

SEQ ID NO: 60533 - protein, 7 aa, synthetic construct
NNQGAAK

SEQ ID NO: 60534 - protein, 7 aa, synthetic construct
VNPTKSG

SEQ ID NO: 60535 - protein, 7 aa, synthetic construct
KQTAVSA

SEQ ID NO: 60536 - protein, 7 aa, synthetic construct
RETSYGH

SEQ ID NO: 60537 - protein, 7 aa, synthetic construct
QKGASYE

SEQ ID NO: 60538 - protein, 7 aa, synthetic construct
FREAKGA

SEQ ID NO: 60539 - protein, 7 aa, synthetic construct
HNIGGVS

SEQ ID NO: 60540 - protein, 7 aa, synthetic construct
RAQTTVG

SEQ ID NO: 60541 - protein, 7 aa, synthetic construct
NQWQSHP

SEQ ID NO: 60542 - protein, 7 aa, synthetic construct
RDSTRYV

SEQ ID NO: 60543 - protein, 7 aa, synthetic construct
RFSVGEH

SEQ ID NO: 60544 - protein, 7 aa, synthetic construct
NHPTASQ

SEQ ID NO: 60545 - protein, 7 aa, synthetic construct
TPGGSNP

SEQ ID NO: 60546 - protein, 7 aa, synthetic construct
KSRSEDS

SEQ ID NO: 60547 - protein, 7 aa, synthetic construct
KLPAHIG

SEQ ID NO: 60548 - protein, 7 aa, synthetic construct
QPKDHSR

SEQ ID NO: 60549 - protein, 7 aa, synthetic construct
STNAKHM

SEQ ID NO: 60550 - protein, 7 aa, synthetic construct
QKKDGAA

SEQ ID NO: 60551 - protein, 7 aa, synthetic construct
KQGQVSG

SEQ ID NO: 60552 - protein, 7 aa, synthetic construct
YFPGMPH

SEQ ID NO: 60553 - protein, 7 aa, synthetic construct
YSNNTWA

SEQ ID NO: 60554 - protein, 7 aa, synthetic construct
TGTTRIT

SEQ ID NO: 60555 - protein, 7 aa, synthetic construct
RDGEFRQ

SEQ ID NO: 60556 - protein, 7 aa, synthetic construct
RDNRIQM

SEQ ID NO: 60557 - protein, 7 aa, synthetic construct
RYSNAIG

SEQ ID NO: 60558 - protein, 7 aa, synthetic construct
VIGIVAN

SEQ ID NO: 60559 - protein, 7 aa, synthetic construct
QLHNVVP

SEQ ID NO: 60560 - protein, 7 aa, synthetic construct
KFNVATG

SEQ ID NO: 60561 - protein, 7 aa, synthetic construct
ASTIKIS

SEQ ID NO: 60562 - protein, 7 aa, synthetic construct
NGSKGMM

SEQ ID NO: 60563 - protein, 7 aa, synthetic construct
FKQGSVA

SEQ ID NO: 60564 - protein, 7 aa, synthetic construct
DIQHRTE

SEQ ID NO: 60565 - protein, 7 aa, synthetic construct
SPQTMKG

SEQ ID NO: 60566 - protein, 7 aa, synthetic construct
GKTQGMG

SEQ ID NO: 60567 - protein, 7 aa, synthetic construct
VWANDKG

SEQ ID NO: 60568 - protein, 7 aa, synthetic construct
QGNHKTA

SEQ ID NO: 60569 - protein, 7 aa, synthetic construct
KPNESKG

SEQ ID NO: 60570 - protein, 7 aa, synthetic construct
MGKQNAA

SEQ ID NO: 60571 - protein, 7 aa, synthetic construct
QHRPEYE

SEQ ID NO: 60572 - protein, 7 aa, synthetic construct
QRTTWTD

SEQ ID NO: 60573 - protein, 7 aa, synthetic construct
TREEPKL

SEQ ID NO: 60574 - protein, 7 aa, synthetic construct
DKTIPHQ

SEQ ID NO: 60575 - protein, 7 aa, synthetic construct
DLTHKRM

SEQ ID NO: 60576 - protein, 7 aa, synthetic construct
TGPGEYR

SEQ ID NO: 60577 - protein, 7 aa, synthetic construct
VINRMQS

SEQ ID NO: 60578 - protein, 7 aa, synthetic construct
RKQIDQE

SEQ ID NO: 60579 - protein, 7 aa, synthetic construct
IVMASDK

SEQ ID NO: 60580 - protein, 7 aa, synthetic construct
MVAAKGT

SEQ ID NO: 60581 - protein, 7 aa, synthetic construct
FHAKETG

SEQ ID NO: 60582 - protein, 7 aa, synthetic construct
LGARGPM

SEQ ID NO: 60583 - protein, 7 aa, synthetic construct
NKSSSGN

SEQ ID NO: 60584 - protein, 7 aa, synthetic construct
RIVSGAG

SEQ ID NO: 60585 - protein, 7 aa, synthetic construct
QRQQGAA

SEQ ID NO: 60586 - protein, 7 aa, synthetic construct
MKPASYV

SEQ ID NO: 60587 - protein, 7 aa, synthetic construct
TTRTSGP

SEQ ID NO: 60588 - protein, 7 aa, synthetic construct
KSGQTFG

SEQ ID NO: 60589 - protein, 7 aa, synthetic construct
IDIHHAP

SEQ ID NO: 60590 - protein, 7 aa, synthetic construct
SNTTTVG

SEQ ID NO: 60591 - protein, 7 aa, synthetic construct
TQDFRNM

SEQ ID NO: 60592 - protein, 7 aa, synthetic construct
VGSHYDK

SEQ ID NO: 60593 - protein, 7 aa, synthetic construct
IKGPTNA

SEQ ID NO: 60594 - protein, 7 aa, synthetic construct
KHPQVLS

SEQ ID NO: 60595 - protein, 7 aa, synthetic construct
AHIGFTP

SEQ ID NO: 60596 - protein, 7 aa, synthetic construct
GSKKYDP

SEQ ID NO: 60597 - protein, 7 aa, synthetic construct
PSETLRR

SEQ ID NO: 60598 - protein, 7 aa, synthetic construct
EHMAAKA

SEQ ID NO: 60599 - protein, 7 aa, synthetic construct
DSPYIHE

SEQ ID NO: 60600 - protein, 7 aa, synthetic construct
QEGFLKK

SEQ ID NO: 60601 - protein, 7 aa, synthetic construct
KNFKFQD

SEQ ID NO: 60602 - protein, 7 aa, synthetic construct
QISTLTG

SEQ ID NO: 60603 - protein, 7 aa, synthetic construct
GREKSYM

SEQ ID NO: 60604 - protein, 7 aa, synthetic construct
FDARGIP

SEQ ID NO: 60605 - protein, 7 aa, synthetic construct
PSNQTMI

SEQ ID NO: 60606 - protein, 7 aa, synthetic construct
VDSKAGV

SEQ ID NO: 60607 - protein, 7 aa, synthetic construct
KPYQNQP

SEQ ID NO: 60608 - protein, 7 aa, synthetic construct
PSKNNAG

SEQ ID NO: 60609 - protein, 7 aa, synthetic construct
LNLKMYD

SEQ ID NO: 60610 - protein, 7 aa, synthetic construct
VSANRIL

SEQ ID NO: 60611 - protein, 7 aa, synthetic construct
RHTDSYM

SEQ ID NO: 60612 - protein, 7 aa, synthetic construct
LMPQQGH

SEQ ID NO: 60613 - protein, 7 aa, synthetic construct
GLPQKTQ

SEQ ID NO: 60614 - protein, 7 aa, synthetic construct
AYRQLGP

SEQ ID NO: 60615 - protein, 7 aa, synthetic construct
LQSAVKD

SEQ ID NO: 60616 - protein, 7 aa, synthetic construct
GQGSKRD

SEQ ID NO: 60617 - protein, 7 aa, synthetic construct
AMAYEKN

SEQ ID NO: 60618 - protein, 7 aa, synthetic construct
HAKNHDQ

SEQ ID NO: 60619 - protein, 7 aa, synthetic construct
NQTRRDE

SEQ ID NO: 60620 - protein, 7 aa, synthetic construct
HLQKQIM

SEQ ID NO: 60621 - protein, 7 aa, synthetic construct
PYGQQKD

SEQ ID NO: 60622 - protein, 7 aa, synthetic construct
PRSNGIT

SEQ ID NO: 60623 - protein, 7 aa, synthetic construct
TGKTTQS

SEQ ID NO: 60624 - protein, 7 aa, synthetic construct
KNTQGMG

SEQ ID NO: 60625 - protein, 7 aa, synthetic construct
QGNARNP

SEQ ID NO: 60626 - protein, 7 aa, synthetic construct
QRVPAGG

SEQ ID NO: 60627 - protein, 7 aa, synthetic construct
YAFVRDA

SEQ ID NO: 60628 - protein, 7 aa, synthetic construct
YNTVHGD

SEQ ID NO: 60629 - protein, 7 aa, synthetic construct
EVKHAVE

SEQ ID NO: 60630 - protein, 7 aa, synthetic construct
DPHPTIP

SEQ ID NO: 60631 - protein, 7 aa, synthetic construct
HNSTSAF

SEQ ID NO: 60632 - protein, 7 aa, synthetic construct
VANMTGS

SEQ ID NO: 60633 - protein, 7 aa, synthetic construct
MRSQEIY

SEQ ID NO: 60634 - protein, 7 aa, synthetic construct
RSQPDPT

SEQ ID NO: 60635 - protein, 7 aa, synthetic construct
KISGTQA

SEQ ID NO: 60636 - protein, 7 aa, synthetic construct
VRDLNYV

SEQ ID NO: 60637 - protein, 7 aa, synthetic construct
AALDHRA

SEQ ID NO: 60638 - protein, 7 aa, synthetic construct
RQSQNQD

SEQ ID NO: 60639 - protein, 7 aa, synthetic construct
TIGFQRD

SEQ ID NO: 60640 - protein, 7 aa, synthetic construct
TSTKMNV

SEQ ID NO: 60641 - protein, 7 aa, synthetic construct
NNNKSTG

SEQ ID NO: 60642 - protein, 7 aa, synthetic construct
VKSDSGL

SEQ ID NO: 60643 - protein, 7 aa, synthetic construct
SPRSTSA

SEQ ID NO: 60644 - protein, 7 aa, synthetic construct
TVQKYEA

SEQ ID NO: 60645 - protein, 7 aa, synthetic construct
AQRSTMG

SEQ ID NO: 60646 - protein, 7 aa, synthetic construct
REAWNPV

SEQ ID NO: 60647 - protein, 7 aa, synthetic construct
STIDRKQ

SEQ ID NO: 60648 - protein, 7 aa, synthetic construct
DRGRTPE

SEQ ID NO: 60649 - protein, 7 aa, synthetic construct
FGGKNEY

SEQ ID NO: 60650 - protein, 7 aa, synthetic construct
VSGFFKE

SEQ ID NO: 60651 - protein, 7 aa, synthetic construct
GTHGAHQ

SEQ ID NO: 60652 - protein, 7 aa, synthetic construct
FKGSTQG

SEQ ID NO: 60653 - protein, 7 aa, synthetic construct
QFRIGND

SEQ ID NO: 60654 - protein, 7 aa, synthetic construct
KSASISA

SEQ ID NO: 60655 - protein, 7 aa, synthetic construct
PSHAVQS

SEQ ID NO: 60656 - protein, 7 aa, synthetic construct
SYSTQKA

SEQ ID NO: 60657 - protein, 7 aa, synthetic construct
SGNHMPI

SEQ ID NO: 60658 - protein, 7 aa, synthetic construct
KKIEPEI

SEQ ID NO: 60659 - protein, 7 aa, synthetic construct
NGHQQGK

SEQ ID NO: 60660 - protein, 7 aa, synthetic construct
KLNPSTA

SEQ ID NO: 60661 - protein, 7 aa, synthetic construct
TLRSQYS

SEQ ID NO: 60662 - protein, 7 aa, synthetic construct
SFPQRTI

SEQ ID NO: 60663 - protein, 7 aa, synthetic construct
PKSAHTY

SEQ ID NO: 60664 - protein, 7 aa, synthetic construct
TKDGYQL

SEQ ID NO: 60665 - protein, 7 aa, synthetic construct
WEQTGTI

SEQ ID NO: 60666 - protein, 7 aa, synthetic construct
NKASTQQ

SEQ ID NO: 60667 - protein, 7 aa, synthetic construct
SGVNWKE

SEQ ID NO: 60668 - protein, 7 aa, synthetic construct
TQVGKPS

SEQ ID NO: 60669 - protein, 7 aa, synthetic construct
GYRAPEF

SEQ ID NO: 60670 - protein, 7 aa, synthetic construct
PNQVTTA

SEQ ID NO: 60671 - protein, 7 aa, synthetic construct
FAASMAT

SEQ ID NO: 60672 - protein, 7 aa, synthetic construct
SNRKNEL

SEQ ID NO: 60673 - protein, 7 aa, synthetic construct
RKEMNYD

SEQ ID NO: 60674 - protein, 7 aa, synthetic construct
GTHILAE

SEQ ID NO: 60675 - protein, 7 aa, synthetic construct
PKGATFG

SEQ ID NO: 60676 - protein, 7 aa, synthetic construct
VQRTIAV

SEQ ID NO: 60677 - protein, 7 aa, synthetic construct
PNSTASA

SEQ ID NO: 60678 - protein, 7 aa, synthetic construct
PQVHPGH

SEQ ID NO: 60679 - protein, 7 aa, synthetic construct
MSNKQSG

SEQ ID NO: 60680 - protein, 7 aa, synthetic construct
IHGSLGK

SEQ ID NO: 60681 - protein, 7 aa, synthetic construct
TGANNHA

SEQ ID NO: 60682 - protein, 7 aa, synthetic construct
SSKQNNA

SEQ ID NO: 60683 - protein, 7 aa, synthetic construct
PHSAPQS

SEQ ID NO: 60684 - protein, 7 aa, synthetic construct
WRTEYHN

SEQ ID NO: 60685 - protein, 7 aa, synthetic construct
WNKSSMV

SEQ ID NO: 60686 - protein, 7 aa, synthetic construct
GPQAHMA

SEQ ID NO: 60687 - protein, 7 aa, synthetic construct
NFAHVHE

SEQ ID NO: 60688 - protein, 7 aa, synthetic construct
MKGSIER

SEQ ID NO: 60689 - protein, 7 aa, synthetic construct
TSLPKPN

SEQ ID NO: 60690 - protein, 7 aa, synthetic construct
PKSQQNY

SEQ ID NO: 60691 - protein, 7 aa, synthetic construct
TPQHGLE

SEQ ID NO: 60692 - protein, 7 aa, synthetic construct
TPTHKER

SEQ ID NO: 60693 - protein, 7 aa, synthetic construct
QSGRGNV

SEQ ID NO: 60694 - protein, 7 aa, synthetic construct
QNNSTNK

SEQ ID NO: 60695 - protein, 7 aa, synthetic construct
LGQNGNW

SEQ ID NO: 60696 - protein, 7 aa, synthetic construct
NHSFREH

SEQ ID NO: 60697 - protein, 7 aa, synthetic construct
MMNRSVH

SEQ ID NO: 60698 - protein, 7 aa, synthetic construct
LNMPMKH

SEQ ID NO: 60699 - protein, 7 aa, synthetic construct
KAPSGIM

SEQ ID NO: 60700 - protein, 7 aa, synthetic construct
FKPFLPE

SEQ ID NO: 60701 - protein, 7 aa, synthetic construct
PFNGSRD

SEQ ID NO: 60702 - protein, 7 aa, synthetic construct
IDPKANH

SEQ ID NO: 60703 - protein, 7 aa, synthetic construct
RNGGHAM

SEQ ID NO: 60704 - protein, 7 aa, synthetic construct
MEKRMIN

SEQ ID NO: 60705 - protein, 7 aa, synthetic construct
QSNRNQP

SEQ ID NO: 60706 - protein, 7 aa, synthetic construct
MIMGSGT

SEQ ID NO: 60707 - protein, 7 aa, synthetic construct
NQVVSKG

SEQ ID NO: 60708 - protein, 7 aa, synthetic construct
AEQLTRK

SEQ ID NO: 60709 - protein, 7 aa, synthetic construct
KSTGIMS

SEQ ID NO: 60710 - protein, 7 aa, synthetic construct
RPEQNDR

SEQ ID NO: 60711 - protein, 7 aa, synthetic construct
RDPLKLD

SEQ ID NO: 60712 - protein, 7 aa, synthetic construct
DGMVEKK

SEQ ID NO: 60713 - protein, 7 aa, synthetic construct
LTSHAHM

SEQ ID NO: 60714 - protein, 7 aa, synthetic construct
KVIRDDL

SEQ ID NO: 60715 - protein, 7 aa, synthetic construct
EMKMHRN

SEQ ID NO: 60716 - protein, 7 aa, synthetic construct
LVQAGNS

SEQ ID NO: 60717 - protein, 7 aa, synthetic construct
PKDRVGV

SEQ ID NO: 60718 - protein, 7 aa, synthetic construct
NPRNNGP

SEQ ID NO: 60719 - protein, 7 aa, synthetic construct
KTQQKAE

SEQ ID NO: 60720 - protein, 7 aa, synthetic construct
LKYLGEA

SEQ ID NO: 60721 - protein, 7 aa, synthetic construct
TTSKGSA

SEQ ID NO: 60722 - protein, 7 aa, synthetic construct
PTIHQKE

SEQ ID NO: 60723 - protein, 7 aa, synthetic construct
SAQARPD

SEQ ID NO: 60724 - protein, 7 aa, synthetic construct
WGKQANG

SEQ ID NO: 60725 - protein, 7 aa, synthetic construct
TTFTRQE

SEQ ID NO: 60726 - protein, 7 aa, synthetic construct
KAFELTE

SEQ ID NO: 60727 - protein, 7 aa, synthetic construct
GTQPNPM

SEQ ID NO: 60728 - protein, 7 aa, synthetic construct
ATQHVAA

SEQ ID NO: 60729 - protein, 7 aa, synthetic construct
HRGTGEG

SEQ ID NO: 60730 - protein, 7 aa, synthetic construct
MNKPSQN

SEQ ID NO: 60731 - protein, 7 aa, synthetic construct
PQTGRLG

SEQ ID NO: 60732 - protein, 7 aa, synthetic construct
TRERTAY

SEQ ID NO: 60733 - protein, 7 aa, synthetic construct
GPPSRAE

SEQ ID NO: 60734 - protein, 7 aa, synthetic construct
KTGQVTV

SEQ ID NO: 60735 - protein, 7 aa, synthetic construct
RDRAVHD

SEQ ID NO: 60736 - protein, 7 aa, synthetic construct
MESMKTY

SEQ ID NO: 60737 - protein, 7 aa, synthetic construct
AYSPHNA

SEQ ID NO: 60738 - protein, 7 aa, synthetic construct
TDGQHKP

SEQ ID NO: 60739 - protein, 7 aa, synthetic construct
YAKSSPS

SEQ ID NO: 60740 - protein, 7 aa, synthetic construct
HYTHKQG

SEQ ID NO: 60741 - protein, 7 aa, synthetic construct
HAGHDSL

SEQ ID NO: 60742 - protein, 7 aa, synthetic construct
NKPPGFA

SEQ ID NO: 60743 - protein, 7 aa, synthetic construct
YMGRYTA

SEQ ID NO: 60744 - protein, 7 aa, synthetic construct
SHKHGDG

SEQ ID NO: 60745 - protein, 7 aa, synthetic construct
KKSDAQA

SEQ ID NO: 60746 - protein, 7 aa, synthetic construct
KLSVAGM

SEQ ID NO: 60747 - protein, 7 aa, synthetic construct
DWQKNHI

SEQ ID NO: 60748 - protein, 7 aa, synthetic construct
GTLKQTA

SEQ ID NO: 60749 - protein, 7 aa, synthetic construct
NHAHNMM

SEQ ID NO: 60750 - protein, 7 aa, synthetic construct
LSHTANT

SEQ ID NO: 60751 - protein, 7 aa, synthetic construct
TMQWTHE

SEQ ID NO: 60752 - protein, 7 aa, synthetic construct
FPKSLGM

SEQ ID NO: 60753 - protein, 7 aa, synthetic construct
SKPSTSN

SEQ ID NO: 60754 - protein, 7 aa, synthetic construct
PKPPAKV

SEQ ID NO: 60755 - protein, 7 aa, synthetic construct
GKVTANG

SEQ ID NO: 60756 - protein, 7 aa, synthetic construct
TFRDNGR

SEQ ID NO: 60757 - protein, 7 aa, synthetic construct
NLIKMGQ

SEQ ID NO: 60758 - protein, 7 aa, synthetic construct
GHTVYHP

SEQ ID NO: 60759 - protein, 7 aa, synthetic construct
PEKYNVS

SEQ ID NO: 60760 - protein, 7 aa, synthetic construct
FGGNNNM

SEQ ID NO: 60761 - protein, 7 aa, synthetic construct
HMQFVKP

SEQ ID NO: 60762 - protein, 7 aa, synthetic construct
VGARHAE

SEQ ID NO: 60763 - protein, 7 aa, synthetic construct
GGVRVHA

SEQ ID NO: 60764 - protein, 7 aa, synthetic construct
LRSTDTY

SEQ ID NO: 60765 - protein, 7 aa, synthetic construct
YYDKQPP

SEQ ID NO: 60766 - protein, 7 aa, synthetic construct
RASEFSH

SEQ ID NO: 60767 - protein, 7 aa, synthetic construct
TNKNMNG

SEQ ID NO: 60768 - protein, 7 aa, synthetic construct
AAYLDGR

SEQ ID NO: 60769 - protein, 7 aa, synthetic construct
TIQTNKP

SEQ ID NO: 60770 - protein, 7 aa, synthetic construct
HMTQITA

SEQ ID NO: 60771 - protein, 7 aa, synthetic construct
YSKLMDG

SEQ ID NO: 60772 - protein, 7 aa, synthetic construct
FRNSDKA

SEQ ID NO: 60773 - protein, 7 aa, synthetic construct
FTLHQPA

SEQ ID NO: 60774 - protein, 7 aa, synthetic construct
HRQQTTE

SEQ ID NO: 60775 - protein, 7 aa, synthetic construct
IKEVQKP

SEQ ID NO: 60776 - protein, 7 aa, synthetic construct
KMNMSKD

SEQ ID NO: 60777 - protein, 7 aa, synthetic construct
HMVHSPS

SEQ ID NO: 60778 - protein, 7 aa, synthetic construct
WPKNYTG

SEQ ID NO: 60779 - protein, 7 aa, synthetic construct
NTMGFSA

SEQ ID NO: 60780 - protein, 7 aa, synthetic construct
ERGHAFT

SEQ ID NO: 60781 - protein, 7 aa, synthetic construct
IKHTLMG

SEQ ID NO: 60782 - protein, 7 aa, synthetic construct
PNSPVIH

SEQ ID NO: 60783 - protein, 7 aa, synthetic construct
VAQMPGG

SEQ ID NO: 60784 - protein, 7 aa, synthetic construct
HVRDPRH

SEQ ID NO: 60785 - protein, 7 aa, synthetic construct
WDPRKMG

SEQ ID NO: 60786 - protein, 7 aa, synthetic construct
GSKNSSG

SEQ ID NO: 60787 - protein, 7 aa, synthetic construct
LGQYREK

SEQ ID NO: 60788 - protein, 7 aa, synthetic construct
ATQRTVT

SEQ ID NO: 60789 - protein, 7 aa, synthetic construct
KQTGQFP

SEQ ID NO: 60790 - protein, 7 aa, synthetic construct
GPENREA

SEQ ID NO: 60791 - protein, 7 aa, synthetic construct
KNTNSPP

SEQ ID NO: 60792 - protein, 7 aa, synthetic construct
KYQNNAM

SEQ ID NO: 60793 - protein, 7 aa, synthetic construct
GNKASQS

SEQ ID NO: 60794 - protein, 7 aa, synthetic construct
AESGRGY

SEQ ID NO: 60795 - protein, 7 aa, synthetic construct
VKNSNVA

SEQ ID NO: 60796 - protein, 7 aa, synthetic construct
DRSIKVN

SEQ ID NO: 60797 - protein, 7 aa, synthetic construct
FVPGHGD

SEQ ID NO: 60798 - protein, 7 aa, synthetic construct
ATERNKW

SEQ ID NO: 60799 - protein, 7 aa, synthetic construct
KTPVDKG

SEQ ID NO: 60800 - protein, 7 aa, synthetic construct
INHQVIK

SEQ ID NO: 60801 - protein, 7 aa, synthetic construct
MSKIMME

SEQ ID NO: 60802 - protein, 7 aa, synthetic construct
GRTTGNA

SEQ ID NO: 60803 - protein, 7 aa, synthetic construct
SKTMVNP

SEQ ID NO: 60804 - protein, 7 aa, synthetic construct
QGRGEHT

SEQ ID NO: 60805 - protein, 7 aa, synthetic construct
GARGLTE

SEQ ID NO: 60806 - protein, 7 aa, synthetic construct
EKHKGWP

SEQ ID NO: 60807 - protein, 7 aa, synthetic construct
ERKSNDS

SEQ ID NO: 60808 - protein, 7 aa, synthetic construct
FPSKTTA

SEQ ID NO: 60809 - protein, 7 aa, synthetic construct
RTTVMTA

SEQ ID NO: 60810 - protein, 7 aa, synthetic construct
GGAWEKA

SEQ ID NO: 60811 - protein, 7 aa, synthetic construct
RTGQAMH

SEQ ID NO: 60812 - protein, 7 aa, synthetic construct
AKYPKME

SEQ ID NO: 60813 - protein, 7 aa, synthetic construct
IPNLYPN

SEQ ID NO: 60814 - protein, 7 aa, synthetic construct
NKTTGSM

SEQ ID NO: 60815 - protein, 7 aa, synthetic construct
YMEKSIP

SEQ ID NO: 60816 - protein, 7 aa, synthetic construct
QQKYEAS

SEQ ID NO: 60817 - protein, 7 aa, synthetic construct
QPKTQSV

SEQ ID NO: 60818 - protein, 7 aa, synthetic construct
QKNTTNP

SEQ ID NO: 60819 - protein, 7 aa, synthetic construct
GMAATKI

SEQ ID NO: 60820 - protein, 7 aa, synthetic construct
NNKVNTA

SEQ ID NO: 60821 - protein, 7 aa, synthetic construct
VDTTKQF

SEQ ID NO: 60822 - protein, 7 aa, synthetic construct
KWNGEMM

SEQ ID NO: 60823 - protein, 7 aa, synthetic construct
HNPGEKQ

SEQ ID NO: 60824 - protein, 7 aa, synthetic construct
PKREGNW

SEQ ID NO: 60825 - protein, 7 aa, synthetic construct
YAKINTP

SEQ ID NO: 60826 - protein, 7 aa, synthetic construct
PSTDRGP

SEQ ID NO: 60827 - protein, 7 aa, synthetic construct
TTTNKSG

SEQ ID NO: 60828 - protein, 7 aa, synthetic construct
KQSGAQI

SEQ ID NO: 60829 - protein, 7 aa, synthetic construct
MNKISAI

SEQ ID NO: 60830 - protein, 7 aa, synthetic construct
KQVTTTA

SEQ ID NO: 60831 - protein, 7 aa, synthetic construct
HNAIHHD

SEQ ID NO: 60832 - protein, 7 aa, synthetic construct
YRDNLAP

SEQ ID NO: 60833 - protein, 7 aa, synthetic construct
YPFDHKS

SEQ ID NO: 60834 - protein, 7 aa, synthetic construct
KIPAKSE

SEQ ID NO: 60835 - protein, 7 aa, synthetic construct
MQSRPHG

SEQ ID NO: 60836 - protein, 7 aa, synthetic construct
GSGQSVG

SEQ ID NO: 60837 - protein, 7 aa, synthetic construct
ERSQILN

SEQ ID NO: 60838 - protein, 7 aa, synthetic construct
NQFQHHV

SEQ ID NO: 60839 - protein, 7 aa, synthetic construct
TMSLHEH

SEQ ID NO: 60840 - protein, 7 aa, synthetic construct
DREFIRA

SEQ ID NO: 60841 - protein, 7 aa, synthetic construct
GPNANAL

SEQ ID NO: 60842 - protein, 7 aa, synthetic construct
HHRPDHS

SEQ ID NO: 60843 - protein, 7 aa, synthetic construct
TPQMRME

SEQ ID NO: 60844 - protein, 7 aa, synthetic construct
DMERKRI

SEQ ID NO: 60845 - protein, 7 aa, synthetic construct
FQGKQTP

SEQ ID NO: 60846 - protein, 7 aa, synthetic construct
YSVRGVG

SEQ ID NO: 60847 - protein, 7 aa, synthetic construct
MGPLNGQ

SEQ ID NO: 60848 - protein, 7 aa, synthetic construct
KAMSIAP

SEQ ID NO: 60849 - protein, 7 aa, synthetic construct
PTEKPGH

SEQ ID NO: 60850 - protein, 7 aa, synthetic construct
KTERGDG

SEQ ID NO: 60851 - protein, 7 aa, synthetic construct
KKDPSTG

SEQ ID NO: 60852 - protein, 7 aa, synthetic construct
KTSDRMV

SEQ ID NO: 60853 - protein, 7 aa, synthetic construct
QNGHQDK

SEQ ID NO: 60854 - protein, 7 aa, synthetic construct
ASVRSVS

SEQ ID NO: 60855 - protein, 7 aa, synthetic construct
VLHIHDN

SEQ ID NO: 60856 - protein, 7 aa, synthetic construct
VKNVQEI

SEQ ID NO: 60857 - protein, 7 aa, synthetic construct
TEGMKIV

SEQ ID NO: 60858 - protein, 7 aa, synthetic construct
VTHMHGD

SEQ ID NO: 60859 - protein, 7 aa, synthetic construct
KRAVENS

SEQ ID NO: 60860 - protein, 7 aa, synthetic construct
NNQKNTG

SEQ ID NO: 60861 - protein, 7 aa, synthetic construct
RPPHAHM

SEQ ID NO: 60862 - protein, 7 aa, synthetic construct
MNKIPGI

SEQ ID NO: 60863 - protein, 7 aa, synthetic construct
KTTGIKG

SEQ ID NO: 60864 - protein, 7 aa, synthetic construct
KAGPGEV

SEQ ID NO: 60865 - protein, 7 aa, synthetic construct
RQPASVS

SEQ ID NO: 60866 - protein, 7 aa, synthetic construct
IARFTAP

SEQ ID NO: 60867 - protein, 7 aa, synthetic construct
NVGQPSQ

SEQ ID NO: 60868 - protein, 7 aa, synthetic construct
ARGALNP

SEQ ID NO: 60869 - protein, 7 aa, synthetic construct
SWEGIRG

SEQ ID NO: 60870 - protein, 7 aa, synthetic construct
WSGAGEG

SEQ ID NO: 60871 - protein, 7 aa, synthetic construct
RVQTDHE

SEQ ID NO: 60872 - protein, 7 aa, synthetic construct
RAMGGMS

SEQ ID NO: 60873 - protein, 7 aa, synthetic construct
KIPGSQP

SEQ ID NO: 60874 - protein, 7 aa, synthetic construct
LSKVPES

SEQ ID NO: 60875 - protein, 7 aa, synthetic construct
LISSTQP

SEQ ID NO: 60876 - protein, 7 aa, synthetic construct
MQTGRNP

SEQ ID NO: 60877 - protein, 7 aa, synthetic construct
AMHHLPP

SEQ ID NO: 60878 - protein, 7 aa, synthetic construct
GPKSVTG

SEQ ID NO: 60879 - protein, 7 aa, synthetic construct
WGTMRQN

SEQ ID NO: 60880 - protein, 7 aa, synthetic construct
VVGASVQ

SEQ ID NO: 60881 - protein, 7 aa, synthetic construct
QMGKSGV

SEQ ID NO: 60882 - protein, 7 aa, synthetic construct
FDQARKD

SEQ ID NO: 60883 - protein, 7 aa, synthetic construct
IVHKQDI

SEQ ID NO: 60884 - protein, 7 aa, synthetic construct
YNIKGGS

SEQ ID NO: 60885 - protein, 7 aa, synthetic construct
FTNHTNS

SEQ ID NO: 60886 - protein, 7 aa, synthetic construct
IGYSHEK

SEQ ID NO: 60887 - protein, 7 aa, synthetic construct
DHKTAGY

SEQ ID NO: 60888 - protein, 7 aa, synthetic construct
KHPPNQT

SEQ ID NO: 60889 - protein, 7 aa, synthetic construct
RINAPNG

SEQ ID NO: 60890 - protein, 7 aa, synthetic construct
ETVGKNW

SEQ ID NO: 60891 - protein, 7 aa, synthetic construct
QSIQGKN

SEQ ID NO: 60892 - protein, 7 aa, synthetic construct
EPTRSKS

SEQ ID NO: 60893 - protein, 7 aa, synthetic construct
QDTLFKG

SEQ ID NO: 60894 - protein, 7 aa, synthetic construct
SKGHEHL

SEQ ID NO: 60895 - protein, 7 aa, synthetic construct
GQQGHAK

SEQ ID NO: 60896 - protein, 7 aa, synthetic construct
SPSGGHF

SEQ ID NO: 60897 - protein, 7 aa, synthetic construct
GEAHTMK

SEQ ID NO: 60898 - protein, 7 aa, synthetic construct
ARTDQEY

SEQ ID NO: 60899 - protein, 7 aa, synthetic construct
GPPFSNG

SEQ ID NO: 60900 - protein, 7 aa, synthetic construct
SNQSGKS

SEQ ID NO: 60901 - protein, 7 aa, synthetic construct
GQAKQTG

SEQ ID NO: 60902 - protein, 7 aa, synthetic construct
VTVAKVP

SEQ ID NO: 60903 - protein, 7 aa, synthetic construct
QWNTSQS

SEQ ID NO: 60904 - protein, 7 aa, synthetic construct
FRERVKD

SEQ ID NO: 60905 - protein, 7 aa, synthetic construct
AHLSIDR

SEQ ID NO: 60906 - protein, 7 aa, synthetic construct
QQHSQMT

SEQ ID NO: 60907 - protein, 7 aa, synthetic construct
NATQVRG

SEQ ID NO: 60908 - protein, 7 aa, synthetic construct
KQMGAKD

SEQ ID NO: 60909 - protein, 7 aa, synthetic construct
TSQKASG

SEQ ID NO: 60910 - protein, 7 aa, synthetic construct
IFSGSRT

SEQ ID NO: 60911 - protein, 7 aa, synthetic construct
EAKTMPG

SEQ ID NO: 60912 - protein, 7 aa, synthetic construct
RDINMKS

SEQ ID NO: 60913 - protein, 7 aa, synthetic construct
YNHITRN

SEQ ID NO: 60914 - protein, 7 aa, synthetic construct
FSRQSTP

SEQ ID NO: 60915 - protein, 7 aa, synthetic construct
MTGVSQT

SEQ ID NO: 60916 - protein, 7 aa, synthetic construct
YGLGSAS

SEQ ID NO: 60917 - protein, 7 aa, synthetic construct
QQQSFEK

SEQ ID NO: 60918 - protein, 7 aa, synthetic construct
TRVQAAG

SEQ ID NO: 60919 - protein, 7 aa, synthetic construct
MPSNGPS

SEQ ID NO: 60920 - protein, 7 aa, synthetic construct
ITQSSHQ

SEQ ID NO: 60921 - protein, 7 aa, synthetic construct
YRAKPVE

SEQ ID NO: 60922 - protein, 7 aa, synthetic construct
LYREHPQ

SEQ ID NO: 60923 - protein, 7 aa, synthetic construct
TRVPEFQ

SEQ ID NO: 60924 - protein, 7 aa, synthetic construct
LGAKGDF

SEQ ID NO: 60925 - protein, 7 aa, synthetic construct
QSVSYHA

SEQ ID NO: 60926 - protein, 7 aa, synthetic construct
IPAPAEK

SEQ ID NO: 60927 - protein, 7 aa, synthetic construct
YIMQGTN

SEQ ID NO: 60928 - protein, 7 aa, synthetic construct
GAYKLNQ

SEQ ID NO: 60929 - protein, 7 aa, synthetic construct
TKMLPHP

SEQ ID NO: 60930 - protein, 7 aa, synthetic construct
FSTQTLH

SEQ ID NO: 60931 - protein, 7 aa, synthetic construct
WRAEHSS

SEQ ID NO: 60932 - protein, 7 aa, synthetic construct
PKNIPGS

SEQ ID NO: 60933 - protein, 7 aa, synthetic construct
FNHSRQM

SEQ ID NO: 60934 - protein, 7 aa, synthetic construct
TPQIQLT

SEQ ID NO: 60935 - protein, 7 aa, synthetic construct
YGIGTAA

SEQ ID NO: 60936 - protein, 7 aa, synthetic construct
GQHNPEF

SEQ ID NO: 60937 - protein, 7 aa, synthetic construct
KVNGQNG

SEQ ID NO: 60938 - protein, 7 aa, synthetic construct
KTVYQED

SEQ ID NO: 60939 - protein, 7 aa, synthetic construct
ASDPRAY

SEQ ID NO: 60940 - protein, 7 aa, synthetic construct
PPAKYGS

SEQ ID NO: 60941 - protein, 7 aa, synthetic construct
STSGTMG

SEQ ID NO: 60942 - protein, 7 aa, synthetic construct
SRFAERG

SEQ ID NO: 60943 - protein, 7 aa, synthetic construct
KGMDWSP

SEQ ID NO: 60944 - protein, 7 aa, synthetic construct
KKQDSFA

SEQ ID NO: 60945 - protein, 7 aa, synthetic construct
KLTTHLD

SEQ ID NO: 60946 - protein, 7 aa, synthetic construct
GIYKEDR

SEQ ID NO: 60947 - protein, 7 aa, synthetic construct
AHEFMTA

SEQ ID NO: 60948 - protein, 7 aa, synthetic construct
GQSKYPP

SEQ ID NO: 60949 - protein, 7 aa, synthetic construct
GRGQTNE

SEQ ID NO: 60950 - protein, 7 aa, synthetic construct
TAKTAAM

SEQ ID NO: 60951 - protein, 7 aa, synthetic construct
NRVKEDW

SEQ ID NO: 60952 - protein, 7 aa, synthetic construct
TMPYQRE

SEQ ID NO: 60953 - protein, 7 aa, synthetic construct
VSSPLRA

SEQ ID NO: 60954 - protein, 7 aa, synthetic construct
FEKHKSG

SEQ ID NO: 60955 - protein, 7 aa, synthetic construct
VSKNGPG

SEQ ID NO: 60956 - protein, 7 aa, synthetic construct
TELTKSI

SEQ ID NO: 60957 - protein, 7 aa, synthetic construct
FPYGQKM

SEQ ID NO: 60958 - protein, 7 aa, synthetic construct
GSQGRMG

SEQ ID NO: 60959 - protein, 7 aa, synthetic construct
ARVTGAV

SEQ ID NO: 60960 - protein, 7 aa, synthetic construct
KNNEHWT

SEQ ID NO: 60961 - protein, 7 aa, synthetic construct
WKAFDHE

SEQ ID NO: 60962 - protein, 7 aa, synthetic construct
VQAAYPL

SEQ ID NO: 60963 - protein, 7 aa, synthetic construct
LGQHIPT

SEQ ID NO: 60964 - protein, 7 aa, synthetic construct
KNMNAQG

SEQ ID NO: 60965 - protein, 7 aa, synthetic construct
PALGVHA

SEQ ID NO: 60966 - protein, 7 aa, synthetic construct
GSHNFKE

SEQ ID NO: 60967 - protein, 7 aa, synthetic construct
YLTKKDG

SEQ ID NO: 60968 - protein, 7 aa, synthetic construct
KTPSSVA

SEQ ID NO: 60969 - protein, 7 aa, synthetic construct
IRAWSEE

SEQ ID NO: 60970 - protein, 7 aa, synthetic construct
LNHHHQD

SEQ ID NO: 60971 - protein, 7 aa, synthetic construct
WKREIEG

SEQ ID NO: 60972 - protein, 7 aa, synthetic construct
PYPVSQD

SEQ ID NO: 60973 - protein, 7 aa, synthetic construct
PRKDAMT

SEQ ID NO: 60974 - protein, 7 aa, synthetic construct
EAPREVG

SEQ ID NO: 60975 - protein, 7 aa, synthetic construct
QKQPNGA

SEQ ID NO: 60976 - protein, 7 aa, synthetic construct
TKMTAKD

SEQ ID NO: 60977 - protein, 7 aa, synthetic construct
TPGNNKG

SEQ ID NO: 60978 - protein, 7 aa, synthetic construct
TEYAPGR

SEQ ID NO: 60979 - protein, 7 aa, synthetic construct
SKPHWMD

SEQ ID NO: 60980 - protein, 7 aa, synthetic construct
FGRQLNM

SEQ ID NO: 60981 - protein, 7 aa, synthetic construct
PSKTIES

SEQ ID NO: 60982 - protein, 7 aa, synthetic construct
GIIPIDH

SEQ ID NO: 60983 - protein, 7 aa, synthetic construct
HVPHNEP

SEQ ID NO: 60984 - protein, 7 aa, synthetic construct
FQKGHSA

SEQ ID NO: 60985 - protein, 7 aa, synthetic construct
EIVARGK

SEQ ID NO: 60986 - protein, 7 aa, synthetic construct
GKGPATQ

SEQ ID NO: 60987 - protein, 7 aa, synthetic construct
QGFAHTQ

SEQ ID NO: 60988 - protein, 7 aa, synthetic construct
YNKNQAN

SEQ ID NO: 60989 - protein, 7 aa, synthetic construct
RNHQTDR

SEQ ID NO: 60990 - protein, 7 aa, synthetic construct
HGAMRGQ

SEQ ID NO: 60991 - protein, 7 aa, synthetic construct
QGYQVNG

SEQ ID NO: 60992 - protein, 7 aa, synthetic construct
KPQGTSD

SEQ ID NO: 60993 - protein, 7 aa, synthetic construct
TKQTQEA

SEQ ID NO: 60994 - protein, 7 aa, synthetic construct
MNTAIGQ

SEQ ID NO: 60995 - protein, 7 aa, synthetic construct
QKTPNAG

SEQ ID NO: 60996 - protein, 7 aa, synthetic construct
VLKGRDE

SEQ ID NO: 60997 - protein, 7 aa, synthetic construct
ERGKSAD

SEQ ID NO: 60998 - protein, 7 aa, synthetic construct
GLKMIVT

SEQ ID NO: 60999 - protein, 7 aa, synthetic construct
TQLKANV

SEQ ID NO: 61000 - protein, 7 aa, synthetic construct
ELYKNKP

SEQ ID NO: 61001 - protein, 7 aa, synthetic construct
QSGGMGT

SEQ ID NO: 61002 - protein, 7 aa, synthetic construct
PRHNGMP

SEQ ID NO: 61003 - protein, 7 aa, synthetic construct
RPPNQMA

SEQ ID NO: 61004 - protein, 7 aa, synthetic construct
RVNTVSM

SEQ ID NO: 61005 - protein, 7 aa, synthetic construct
AHLNAQV

SEQ ID NO: 61006 - protein, 7 aa, synthetic construct
QMQGKNF

SEQ ID NO: 61007 - protein, 7 aa, synthetic construct
NKSIVRE

SEQ ID NO: 61008 - protein, 7 aa, synthetic construct
ANRAVVH

SEQ ID NO: 61009 - protein, 7 aa, synthetic construct
IKGSGTG

SEQ ID NO: 61010 - protein, 7 aa, synthetic construct
VVVKSSQ

SEQ ID NO: 61011 - protein, 7 aa, synthetic construct
FGMVPER

SEQ ID NO: 61012 - protein, 7 aa, synthetic construct
WEAKSAV

SEQ ID NO: 61013 - protein, 7 aa, synthetic construct
MPRGTAP

SEQ ID NO: 61014 - protein, 7 aa, synthetic construct
SPTKVGN

SEQ ID NO: 61015 - protein, 7 aa, synthetic construct
MNTSGTM

SEQ ID NO: 61016 - protein, 7 aa, synthetic construct
VQVVGLG

SEQ ID NO: 61017 - protein, 7 aa, synthetic construct
DKPHGRY

SEQ ID NO: 61018 - protein, 7 aa, synthetic construct
EPRYNGG

SEQ ID NO: 61019 - protein, 7 aa, synthetic construct
NFKAASA

SEQ ID NO: 61020 - protein, 7 aa, synthetic construct
NRTPGVG

SEQ ID NO: 61021 - protein, 7 aa, synthetic construct
TVPTVKS

SEQ ID NO: 61022 - protein, 7 aa, synthetic construct
KEHHTGI

SEQ ID NO: 61023 - protein, 7 aa, synthetic construct
TAGHTHM

SEQ ID NO: 61024 - protein, 7 aa, synthetic construct
VNKNTNA

SEQ ID NO: 61025 - protein, 7 aa, synthetic construct
HKEQIRD

SEQ ID NO: 61026 - protein, 7 aa, synthetic construct
GQQYKNP

SEQ ID NO: 61027 - protein, 7 aa, synthetic construct
TYGTDKA

SEQ ID NO: 61028 - protein, 7 aa, synthetic construct
PGHAIQA

SEQ ID NO: 61029 - protein, 7 aa, synthetic construct
RDRSKDM

SEQ ID NO: 61030 - protein, 7 aa, synthetic construct
VVRTAEP

SEQ ID NO: 61031 - protein, 7 aa, synthetic construct
RDSTKSA

SEQ ID NO: 61032 - protein, 7 aa, synthetic construct
NLHYGTS

SEQ ID NO: 61033 - protein, 7 aa, synthetic construct
IQAKISV

SEQ ID NO: 61034 - protein, 7 aa, synthetic construct
KPPNIMK

SEQ ID NO: 61035 - protein, 7 aa, synthetic construct
ARLDSGY

SEQ ID NO: 61036 - protein, 7 aa, synthetic construct
FGAKVSD

SEQ ID NO: 61037 - protein, 7 aa, synthetic construct
NRPVNQA

SEQ ID NO: 61038 - protein, 7 aa, synthetic construct
TPPFIKN

SEQ ID NO: 61039 - protein, 7 aa, synthetic construct
MTQVSAG

SEQ ID NO: 61040 - protein, 7 aa, synthetic construct
TKAGSPA

SEQ ID NO: 61041 - protein, 7 aa, synthetic construct
VGEIKMN

SEQ ID NO: 61042 - protein, 7 aa, synthetic construct
PDKIQMK

SEQ ID NO: 61043 - protein, 7 aa, synthetic construct
NKTMAGG

SEQ ID NO: 61044 - protein, 7 aa, synthetic construct
YNKWTLS

SEQ ID NO: 61045 - protein, 7 aa, synthetic construct
QRAPAQG

SEQ ID NO: 61046 - protein, 7 aa, synthetic construct
PRVGTLA

SEQ ID NO: 61047 - protein, 7 aa, synthetic construct
AHQGYQV

SEQ ID NO: 61048 - protein, 7 aa, synthetic construct
HNILMAG

SEQ ID NO: 61049 - protein, 7 aa, synthetic construct
KHTTEGS

SEQ ID NO: 61050 - protein, 7 aa, synthetic construct
RRADQPP

SEQ ID NO: 61051 - protein, 7 aa, synthetic construct
SGHAGVN

SEQ ID NO: 61052 - protein, 7 aa, synthetic construct
EQGKRSE

SEQ ID NO: 61053 - protein, 7 aa, synthetic construct
RKETAVP

SEQ ID NO: 61054 - protein, 7 aa, synthetic construct
PHRIEYP

SEQ ID NO: 61055 - protein, 7 aa, synthetic construct
TANSSKG

SEQ ID NO: 61056 - protein, 7 aa, synthetic construct
WMRATEA

SEQ ID NO: 61057 - protein, 7 aa, synthetic construct
VAGTQIQ

SEQ ID NO: 61058 - protein, 7 aa, synthetic construct
QHKPHGF

SEQ ID NO: 61059 - protein, 7 aa, synthetic construct
PQNMTLA

SEQ ID NO: 61060 - protein, 7 aa, synthetic construct
NSETPKN

SEQ ID NO: 61061 - protein, 7 aa, synthetic construct
NRFGKEF

SEQ ID NO: 61062 - protein, 7 aa, synthetic construct
TRGSPED

SEQ ID NO: 61063 - protein, 7 aa, synthetic construct
SMNKNRD

SEQ ID NO: 61064 - protein, 7 aa, synthetic construct
RPTTSAP

SEQ ID NO: 61065 - protein, 7 aa, synthetic construct
VKSNVAG

SEQ ID NO: 61066 - protein, 7 aa, synthetic construct
HYTRELG

SEQ ID NO: 61067 - protein, 7 aa, synthetic construct
TGPLPKM

SEQ ID NO: 61068 - protein, 7 aa, synthetic construct
LNNTYEM

SEQ ID NO: 61069 - protein, 7 aa, synthetic construct
VTSKGYG

SEQ ID NO: 61070 - protein, 7 aa, synthetic construct
GMKSNQI

SEQ ID NO: 61071 - protein, 7 aa, synthetic construct
FRGGELG

SEQ ID NO: 61072 - protein, 7 aa, synthetic construct
HQNRSDL

SEQ ID NO: 61073 - protein, 7 aa, synthetic construct
VKAYGEH

SEQ ID NO: 61074 - protein, 7 aa, synthetic construct
RANNAPD

SEQ ID NO: 61075 - protein, 7 aa, synthetic construct
KGPHERL

SEQ ID NO: 61076 - protein, 7 aa, synthetic construct
GMSHTKD

SEQ ID NO: 61077 - protein, 7 aa, synthetic construct
RLVPLHE

SEQ ID NO: 61078 - protein, 7 aa, synthetic construct
MAMSKSA

SEQ ID NO: 61079 - protein, 7 aa, synthetic construct
HDAVMKS

SEQ ID NO: 61080 - protein, 7 aa, synthetic construct
AMGYKLA

SEQ ID NO: 61081 - protein, 7 aa, synthetic construct
VSKFMES

SEQ ID NO: 61082 - protein, 7 aa, synthetic construct
ISPSMEI

SEQ ID NO: 61083 - protein, 7 aa, synthetic construct
KMAHHVN

SEQ ID NO: 61084 - protein, 7 aa, synthetic construct
NVASMAG

SEQ ID NO: 61085 - protein, 7 aa, synthetic construct
KNSSNSG

SEQ ID NO: 61086 - protein, 7 aa, synthetic construct
QNHHTSP

SEQ ID NO: 61087 - protein, 7 aa, synthetic construct
RGYTTKE

SEQ ID NO: 61088 - protein, 7 aa, synthetic construct
AHLNVNP

SEQ ID NO: 61089 - protein, 7 aa, synthetic construct
HRSDGGN

SEQ ID NO: 61090 - protein, 7 aa, synthetic construct
LISPHKM

SEQ ID NO: 61091 - protein, 7 aa, synthetic construct
QIGFAAS

SEQ ID NO: 61092 - protein, 7 aa, synthetic construct
MRMKMEG

SEQ ID NO: 61093 - protein, 7 aa, synthetic construct
TRNDISV

SEQ ID NO: 61094 - protein, 7 aa, synthetic construct
PGMPAER

SEQ ID NO: 61095 - protein, 7 aa, synthetic construct
YWAEQKG

SEQ ID NO: 61096 - protein, 7 aa, synthetic construct
PRLHAQD

SEQ ID NO: 61097 - protein, 7 aa, synthetic construct
THVRSAN

SEQ ID NO: 61098 - protein, 7 aa, synthetic construct
YNSKHLS

SEQ ID NO: 61099 - protein, 7 aa, synthetic construct
KPVTGSG

SEQ ID NO: 61100 - protein, 7 aa, synthetic construct
KIGGKPE

SEQ ID NO: 61101 - protein, 7 aa, synthetic construct
GHASRTG

SEQ ID NO: 61102 - protein, 7 aa, synthetic construct
QGMKTQA

SEQ ID NO: 61103 - protein, 7 aa, synthetic construct
GRDQTGA

SEQ ID NO: 61104 - protein, 7 aa, synthetic construct
NGGYPIK

SEQ ID NO: 61105 - protein, 7 aa, synthetic construct
AFRPAND

SEQ ID NO: 61106 - protein, 7 aa, synthetic construct
KSMVKGE

SEQ ID NO: 61107 - protein, 7 aa, synthetic construct
DRPNGWN

SEQ ID NO: 61108 - protein, 7 aa, synthetic construct
ELHVKLG

SEQ ID NO: 61109 - protein, 7 aa, synthetic construct
LKPVEAS

SEQ ID NO: 61110 - protein, 7 aa, synthetic construct
SERKHEL

SEQ ID NO: 61111 - protein, 7 aa, synthetic construct
ANFRAQE

SEQ ID NO: 61112 - protein, 7 aa, synthetic construct
TNGRQNA

SEQ ID NO: 61113 - protein, 7 aa, synthetic construct
EKHIRQE

SEQ ID NO: 61114 - protein, 7 aa, synthetic construct
ISNLKIE

SEQ ID NO: 61115 - protein, 7 aa, synthetic construct
THKVAER

SEQ ID NO: 61116 - protein, 7 aa, synthetic construct
MKASSNG

SEQ ID NO: 61117 - protein, 7 aa, synthetic construct
VKSSQQA

SEQ ID NO: 61118 - protein, 7 aa, synthetic construct
ARHPQNY

SEQ ID NO: 61119 - protein, 7 aa, synthetic construct
RNFRTEE

SEQ ID NO: 61120 - protein, 7 aa, synthetic construct
MPVRNTQ

SEQ ID NO: 61121 - protein, 7 aa, synthetic construct
KHAVYGG

SEQ ID NO: 61122 - protein, 7 aa, synthetic construct
GPMVRMA

SEQ ID NO: 61123 - protein, 7 aa, synthetic construct
GGNKETI

SEQ ID NO: 61124 - protein, 7 aa, synthetic construct
LRSAVGQ

SEQ ID NO: 61125 - protein, 7 aa, synthetic construct
VSEKTKG

SEQ ID NO: 61126 - protein, 7 aa, synthetic construct
NGRSTGP

SEQ ID NO: 61127 - protein, 7 aa, synthetic construct
KARPDTL

SEQ ID NO: 61128 - protein, 7 aa, synthetic construct
KSANGAG

SEQ ID NO: 61129 - protein, 7 aa, synthetic construct
SERKSAG

SEQ ID NO: 61130 - protein, 7 aa, synthetic construct
HRGTHPA

SEQ ID NO: 61131 - protein, 7 aa, synthetic construct
IPGTSAG

SEQ ID NO: 61132 - protein, 7 aa, synthetic construct
TTKIVSA

SEQ ID NO: 61133 - protein, 7 aa, synthetic construct
EKLGNVP

SEQ ID NO: 61134 - protein, 7 aa, synthetic construct
KTTHVHN

SEQ ID NO: 61135 - protein, 7 aa, synthetic construct
TKQTANA

SEQ ID NO: 61136 - protein, 7 aa, synthetic construct
GVSGKTV

SEQ ID NO: 61137 - protein, 7 aa, synthetic construct
KNQANMA

SEQ ID NO: 61138 - protein, 7 aa, synthetic construct
VHLKNHD

SEQ ID NO: 61139 - protein, 7 aa, synthetic construct
TQPLSHP

SEQ ID NO: 61140 - protein, 7 aa, synthetic construct
RPQTMTG

SEQ ID NO: 61141 - protein, 7 aa, synthetic construct
ARGIVEA

SEQ ID NO: 61142 - protein, 7 aa, synthetic construct
ISQSKQS

SEQ ID NO: 61143 - protein, 7 aa, synthetic construct
MNRTEGR

SEQ ID NO: 61144 - protein, 7 aa, synthetic construct
VASREGP

SEQ ID NO: 61145 - protein, 7 aa, synthetic construct
YRTDRQI

SEQ ID NO: 61146 - protein, 7 aa, synthetic construct
EQAHYKA

SEQ ID NO: 61147 - protein, 7 aa, synthetic construct
ERLVTHS

SEQ ID NO: 61148 - protein, 7 aa, synthetic construct
KSKMMED

SEQ ID NO: 61149 - protein, 7 aa, synthetic construct
MPFSHHE

SEQ ID NO: 61150 - protein, 7 aa, synthetic construct
HKYVVAN

SEQ ID NO: 61151 - protein, 7 aa, synthetic construct
PLNSQFM

SEQ ID NO: 61152 - protein, 7 aa, synthetic construct
MNSFKEN

SEQ ID NO: 61153 - protein, 7 aa, synthetic construct
QRMAEDS

SEQ ID NO: 61154 - protein, 7 aa, synthetic construct
NKGHIAA

SEQ ID NO: 61155 - protein, 7 aa, synthetic construct
NGNIRPV

SEQ ID NO: 61156 - protein, 7 aa, synthetic construct
NAASKFA

SEQ ID NO: 61157 - protein, 7 aa, synthetic construct
KDFARQE

SEQ ID NO: 61158 - protein, 7 aa, synthetic construct
RKDIMKE

SEQ ID NO: 61159 - protein, 7 aa, synthetic construct
LGKDREL

SEQ ID NO: 61160 - protein, 7 aa, synthetic construct
GNSPYHI

SEQ ID NO: 61161 - protein, 7 aa, synthetic construct
QGRIVEG

SEQ ID NO: 61162 - protein, 7 aa, synthetic construct
APKSLQS

SEQ ID NO: 61163 - protein, 7 aa, synthetic construct
TVNAHTL

SEQ ID NO: 61164 - protein, 7 aa, synthetic construct
YNGHRHE

SEQ ID NO: 61165 - protein, 7 aa, synthetic construct
QRSAGMG

SEQ ID NO: 61166 - protein, 7 aa, synthetic construct
LETHVYI

SEQ ID NO: 61167 - protein, 7 aa, synthetic construct
MHTHGIA

SEQ ID NO: 61168 - protein, 7 aa, synthetic construct
MLHHPDR

SEQ ID NO: 61169 - protein, 7 aa, synthetic construct
KPGVPTA

SEQ ID NO: 61170 - protein, 7 aa, synthetic construct
PTKQQQS

SEQ ID NO: 61171 - protein, 7 aa, synthetic construct
TGMNNQR

SEQ ID NO: 61172 - protein, 7 aa, synthetic construct
FLDTKQS

SEQ ID NO: 61173 - protein, 7 aa, synthetic construct
DSSPRHQ

SEQ ID NO: 61174 - protein, 7 aa, synthetic construct
IQHNPKF

SEQ ID NO: 61175 - protein, 7 aa, synthetic construct
MVKQTAP

SEQ ID NO: 61176 - protein, 7 aa, synthetic construct
SMQHGSH

SEQ ID NO: 61177 - protein, 7 aa, synthetic construct
NTRNQQP

SEQ ID NO: 61178 - protein, 7 aa, synthetic construct
ANMNKRE

SEQ ID NO: 61179 - protein, 7 aa, synthetic construct
VLHTIPP

SEQ ID NO: 61180 - protein, 7 aa, synthetic construct
PKFQMQG

SEQ ID NO: 61181 - protein, 7 aa, synthetic construct
HKTNSQA

SEQ ID NO: 61182 - protein, 7 aa, synthetic construct
HPKNHQA

SEQ ID NO: 61183 - protein, 7 aa, synthetic construct
SGMIKHE

SEQ ID NO: 61184 - protein, 7 aa, synthetic construct
NQSNARV

SEQ ID NO: 61185 - protein, 7 aa, synthetic construct
TTMRSGT

SEQ ID NO: 61186 - protein, 7 aa, synthetic construct
TKPATKP

SEQ ID NO: 61187 - protein, 7 aa, synthetic construct
NNKTVTG

SEQ ID NO: 61188 - protein, 7 aa, synthetic construct
MNVTSMS

SEQ ID NO: 61189 - protein, 7 aa, synthetic construct
FKGQTLA

SEQ ID NO: 61190 - protein, 7 aa, synthetic construct
DLKQQIQ

SEQ ID NO: 61191 - protein, 7 aa, synthetic construct
YHLRTNE

SEQ ID NO: 61192 - protein, 7 aa, synthetic construct
MKQSQGG

SEQ ID NO: 61193 - protein, 7 aa, synthetic construct
FKNIQLS

SEQ ID NO: 61194 - protein, 7 aa, synthetic construct
PAGAANM

SEQ ID NO: 61195 - protein, 7 aa, synthetic construct
DNKNFIE

SEQ ID NO: 61196 - protein, 7 aa, synthetic construct
ARNPVNV

SEQ ID NO: 61197 - protein, 7 aa, synthetic construct
KAKDSFG

SEQ ID NO: 61198 - protein, 7 aa, synthetic construct
PISRQQP

SEQ ID NO: 61199 - protein, 7 aa, synthetic construct
NPPVRSE

SEQ ID NO: 61200 - protein, 7 aa, synthetic construct
TMNKPNP

SEQ ID NO: 61201 - protein, 7 aa, synthetic construct
GNKTNSG

SEQ ID NO: 61202 - protein, 7 aa, synthetic construct
NSKTAQP

SEQ ID NO: 61203 - protein, 7 aa, synthetic construct
VMRDVPQ

SEQ ID NO: 61204 - protein, 7 aa, synthetic construct
PKQSMQA

SEQ ID NO: 61205 - protein, 7 aa, synthetic construct
FPHKYTG

SEQ ID NO: 61206 - protein, 7 aa, synthetic construct
SQKSMAA

SEQ ID NO: 61207 - protein, 7 aa, synthetic construct
LHVQFKE

SEQ ID NO: 61208 - protein, 7 aa, synthetic construct
NGNGQKG

SEQ ID NO: 61209 - protein, 7 aa, synthetic construct
FKDKWTV

SEQ ID NO: 61210 - protein, 7 aa, synthetic construct
SRTSTSG

SEQ ID NO: 61211 - protein, 7 aa, synthetic construct
NGMKSNP

SEQ ID NO: 61212 - protein, 7 aa, synthetic construct
PPQQRNG

SEQ ID NO: 61213 - protein, 7 aa, synthetic construct
TYKGHGS

SEQ ID NO: 61214 - protein, 7 aa, synthetic construct
MNGKPNG

SEQ ID NO: 61215 - protein, 7 aa, synthetic construct
MMLKHEH

SEQ ID NO: 61216 - protein, 7 aa, synthetic construct
GSGTKAN

SEQ ID NO: 61217 - protein, 7 aa, synthetic construct
SNTIPHS

SEQ ID NO: 61218 - protein, 7 aa, synthetic construct
TRDSVEK

SEQ ID NO: 61219 - protein, 7 aa, synthetic construct
KNYLSQE

SEQ ID NO: 61220 - protein, 7 aa, synthetic construct
QGNNRSG

SEQ ID NO: 61221 - protein, 7 aa, synthetic construct
QAKGTTG

SEQ ID NO: 61222 - protein, 7 aa, synthetic construct
QKLPTQQ

SEQ ID NO: 61223 - protein, 7 aa, synthetic construct
QGANYQT

SEQ ID NO: 61224 - protein, 7 aa, synthetic construct
VTMRDRA

SEQ ID NO: 61225 - protein, 7 aa, synthetic construct
AEHRGFG

SEQ ID NO: 61226 - protein, 7 aa, synthetic construct
LTAIHAG

SEQ ID NO: 61227 - protein, 7 aa, synthetic construct
TNNVPTP

SEQ ID NO: 61228 - protein, 7 aa, synthetic construct
KMQQQNN

SEQ ID NO: 61229 - protein, 7 aa, synthetic construct
IHNSQHQ

SEQ ID NO: 61230 - protein, 7 aa, synthetic construct
NDVRGRL

SEQ ID NO: 61231 - protein, 7 aa, synthetic construct
LMMNPEA

SEQ ID NO: 61232 - protein, 7 aa, synthetic construct
FVLKEGN

SEQ ID NO: 61233 - protein, 7 aa, synthetic construct
MNLKVEG

SEQ ID NO: 61234 - protein, 7 aa, synthetic construct
KVPMGSA

SEQ ID NO: 61235 - protein, 7 aa, synthetic construct
TPFERPQ

SEQ ID NO: 61236 - protein, 7 aa, synthetic construct
NWGPGPG

SEQ ID NO: 61237 - protein, 7 aa, synthetic construct
GLGNRQP

SEQ ID NO: 61238 - protein, 7 aa, synthetic construct
GQRKLEY

SEQ ID NO: 61239 - protein, 7 aa, synthetic construct
SKSTNQG

SEQ ID NO: 61240 - protein, 7 aa, synthetic construct
PKMTSAP

SEQ ID NO: 61241 - protein, 7 aa, synthetic construct
WTKRETD

SEQ ID NO: 61242 - protein, 7 aa, synthetic construct
HRSDTMT

SEQ ID NO: 61243 - protein, 7 aa, synthetic construct
SRNNGSP

SEQ ID NO: 61244 - protein, 7 aa, synthetic construct
LSRDNHI

SEQ ID NO: 61245 - protein, 7 aa, synthetic construct
KENHSDK

SEQ ID NO: 61246 - protein, 7 aa, synthetic construct
TIPPSKL

SEQ ID NO: 61247 - protein, 7 aa, synthetic construct
RMNSSSA

SEQ ID NO: 61248 - protein, 7 aa, synthetic construct
GMKLDAP

SEQ ID NO: 61249 - protein, 7 aa, synthetic construct
GRDRHTD

SEQ ID NO: 61250 - protein, 7 aa, synthetic construct
YETKAVA

SEQ ID NO: 61251 - protein, 7 aa, synthetic construct
GPSMHHI

SEQ ID NO: 61252 - protein, 7 aa, synthetic construct
KMHQAAD

SEQ ID NO: 61253 - protein, 7 aa, synthetic construct
ADRANKN

SEQ ID NO: 61254 - protein, 7 aa, synthetic construct
NKQQVAG

SEQ ID NO: 61255 - protein, 7 aa, synthetic construct
ANRKEQY

SEQ ID NO: 61256 - protein, 7 aa, synthetic construct
EPLISRP

SEQ ID NO: 61257 - protein, 7 aa, synthetic construct
TWGNSSP

SEQ ID NO: 61258 - protein, 7 aa, synthetic construct
PTKGNTA

SEQ ID NO: 61259 - protein, 7 aa, synthetic construct
YRQDKGA

SEQ ID NO: 61260 - protein, 7 aa, synthetic construct
FHMIQKG

SEQ ID NO: 61261 - protein, 7 aa, synthetic construct
TIMKSKE

SEQ ID NO: 61262 - protein, 7 aa, synthetic construct
QGSANLG

SEQ ID NO: 61263 - protein, 7 aa, synthetic construct
ALTSNSA

SEQ ID NO: 61264 - protein, 7 aa, synthetic construct
GKTLNHT

SEQ ID NO: 61265 - protein, 7 aa, synthetic construct
TGHAKNP

SEQ ID NO: 61266 - protein, 7 aa, synthetic construct
LNTGANK

SEQ ID NO: 61267 - protein, 7 aa, synthetic construct
RQPSAYG

SEQ ID NO: 61268 - protein, 7 aa, synthetic construct
MASHRQD

SEQ ID NO: 61269 - protein, 7 aa, synthetic construct
NVKNQQS

SEQ ID NO: 61270 - protein, 7 aa, synthetic construct
VNNARVG

SEQ ID NO: 61271 - protein, 7 aa, synthetic construct
YHDKNHL

SEQ ID NO: 61272 - protein, 7 aa, synthetic construct
LHNRPGF

SEQ ID NO: 61273 - protein, 7 aa, synthetic construct
YSPVSKG

SEQ ID NO: 61274 - protein, 7 aa, synthetic construct
LGKVPGD

SEQ ID NO: 61275 - protein, 7 aa, synthetic construct
MTRPTIE

SEQ ID NO: 61276 - protein, 7 aa, synthetic construct
SPKTTAT

SEQ ID NO: 61277 - protein, 7 aa, synthetic construct
MHPNSVN

SEQ ID NO: 61278 - protein, 7 aa, synthetic construct
AKATNSP

SEQ ID NO: 61279 - protein, 7 aa, synthetic construct
AKKESAG

SEQ ID NO: 61280 - protein, 7 aa, synthetic construct
HPPVTHM

SEQ ID NO: 61281 - protein, 7 aa, synthetic construct
PNKATQS

SEQ ID NO: 61282 - protein, 7 aa, synthetic construct
KQTAMAD

SEQ ID NO: 61283 - protein, 7 aa, synthetic construct
KQHVESP

SEQ ID NO: 61284 - protein, 7 aa, synthetic construct
RQANNST

SEQ ID NO: 61285 - protein, 7 aa, synthetic construct
SMPNQGS

SEQ ID NO: 61286 - protein, 7 aa, synthetic construct
GNPASQY

SEQ ID NO: 61287 - protein, 7 aa, synthetic construct
MDTRNGR

SEQ ID NO: 61288 - protein, 7 aa, synthetic construct
GFGKYQG

SEQ ID NO: 61289 - protein, 7 aa, synthetic construct
EEAKKGG

SEQ ID NO: 61290 - protein, 7 aa, synthetic construct
KSANTES

SEQ ID NO: 61291 - protein, 7 aa, synthetic construct
KVNMMQD

SEQ ID NO: 61292 - protein, 7 aa, synthetic construct
LSARTNP

SEQ ID NO: 61293 - protein, 7 aa, synthetic construct
MAQTIPK

SEQ ID NO: 61294 - protein, 7 aa, synthetic construct
EWKQEMG

SEQ ID NO: 61295 - protein, 7 aa, synthetic construct
RNKEEYI

SEQ ID NO: 61296 - protein, 7 aa, synthetic construct
MSTPLRN

SEQ ID NO: 61297 - protein, 7 aa, synthetic construct
GKPSTKE

SEQ ID NO: 61298 - protein, 7 aa, synthetic construct
KTALADM

SEQ ID NO: 61299 - protein, 7 aa, synthetic construct
KAQVEMV

SEQ ID NO: 61300 - protein, 7 aa, synthetic construct
WAPRSPE

SEQ ID NO: 61301 - protein, 7 aa, synthetic construct
TRAQEKI

SEQ ID NO: 61302 - protein, 7 aa, synthetic construct
VLMSQTP

SEQ ID NO: 61303 - protein, 7 aa, synthetic construct
GEQRHTA

SEQ ID NO: 61304 - protein, 7 aa, synthetic construct
VFQQGQA

SEQ ID NO: 61305 - protein, 7 aa, synthetic construct
GNDNRAI

SEQ ID NO: 61306 - protein, 7 aa, synthetic construct
QGVIDKI

SEQ ID NO: 61307 - protein, 7 aa, synthetic construct
RPNLPAI

SEQ ID NO: 61308 - protein, 7 aa, synthetic construct
VDSRRVQ

SEQ ID NO: 61309 - protein, 7 aa, synthetic construct
TNGKVQG

SEQ ID NO: 61310 - protein, 7 aa, synthetic construct
IENTRMV

SEQ ID NO: 61311 - protein, 7 aa, synthetic construct
WGANMHK

SEQ ID NO: 61312 - protein, 7 aa, synthetic construct
GVTSNAK

SEQ ID NO: 61313 - protein, 7 aa, synthetic construct
QPRTQAD

SEQ ID NO: 61314 - protein, 7 aa, synthetic construct
VEQLYKN

SEQ ID NO: 61315 - protein, 7 aa, synthetic construct
YGPHHYQ

SEQ ID NO: 61316 - protein, 7 aa, synthetic construct
NIHRTVD

SEQ ID NO: 61317 - protein, 7 aa, synthetic construct
DRDPVLR

SEQ ID NO: 61318 - protein, 7 aa, synthetic construct
TPPKNQS

SEQ ID NO: 61319 - protein, 7 aa, synthetic construct
APGHTTH

SEQ ID NO: 61320 - protein, 7 aa, synthetic construct
YNKTSLT

SEQ ID NO: 61321 - protein, 7 aa, synthetic construct
QQKKEMM

SEQ ID NO: 61322 - protein, 7 aa, synthetic construct
SIAKFGE

SEQ ID NO: 61323 - protein, 7 aa, synthetic construct
KTTLMMP

SEQ ID NO: 61324 - protein, 7 aa, synthetic construct
HFADINR

SEQ ID NO: 61325 - protein, 7 aa, synthetic construct
TDRRADT

SEQ ID NO: 61326 - protein, 7 aa, synthetic construct
IAPYLMD

SEQ ID NO: 61327 - protein, 7 aa, synthetic construct
TSKQFDS

SEQ ID NO: 61328 - protein, 7 aa, synthetic construct
MSATKEH

SEQ ID NO: 61329 - protein, 7 aa, synthetic construct
NGLARGY

SEQ ID NO: 61330 - protein, 7 aa, synthetic construct
LGMNKTY

SEQ ID NO: 61331 - protein, 7 aa, synthetic construct
HEPHGFV

SEQ ID NO: 61332 - protein, 7 aa, synthetic construct
SVNGYPH

SEQ ID NO: 61333 - protein, 7 aa, synthetic construct
SRPGSVL

SEQ ID NO: 61334 - protein, 7 aa, synthetic construct
HHGLSQH

SEQ ID NO: 61335 - protein, 7 aa, synthetic construct
GHMNVEL

SEQ ID NO: 61336 - protein, 7 aa, synthetic construct
PTPKLSF

SEQ ID NO: 61337 - protein, 7 aa, synthetic construct
FLPNEAK

SEQ ID NO: 61338 - protein, 7 aa, synthetic construct
KSNGVNP

SEQ ID NO: 61339 - protein, 7 aa, synthetic construct
MNPKAQG

SEQ ID NO: 61340 - protein, 7 aa, synthetic construct
RGPSGTV

SEQ ID NO: 61341 - protein, 7 aa, synthetic construct
ILGAGTS

SEQ ID NO: 61342 - protein, 7 aa, synthetic construct
RHLDGVM

SEQ ID NO: 61343 - protein, 7 aa, synthetic construct
RPSNINA

SEQ ID NO: 61344 - protein, 7 aa, synthetic construct
GIFQNIP

SEQ ID NO: 61345 - protein, 7 aa, synthetic construct
QTAMHAK

SEQ ID NO: 61346 - protein, 7 aa, synthetic construct
NNQKVSI

SEQ ID NO: 61347 - protein, 7 aa, synthetic construct
WKKVDAM

SEQ ID NO: 61348 - protein, 7 aa, synthetic construct
FRVNAAE

SEQ ID NO: 61349 - protein, 7 aa, synthetic construct
NQQRSNS

SEQ ID NO: 61350 - protein, 7 aa, synthetic construct
HFQNVVA

SEQ ID NO: 61351 - protein, 7 aa, synthetic construct
TTPASHN

SEQ ID NO: 61352 - protein, 7 aa, synthetic construct
IHKLSEA

SEQ ID NO: 61353 - protein, 7 aa, synthetic construct
NKNEVLQ

SEQ ID NO: 61354 - protein, 7 aa, synthetic construct
KSKGEYT

SEQ ID NO: 61355 - protein, 7 aa, synthetic construct
MTNNANK

SEQ ID NO: 61356 - protein, 7 aa, synthetic construct
NNRKDEH

SEQ ID NO: 61357 - protein, 7 aa, synthetic construct
KQKMDAL

SEQ ID NO: 61358 - protein, 7 aa, synthetic construct
ANILPEG

SEQ ID NO: 61359 - protein, 7 aa, synthetic construct
PSSGSAT

SEQ ID NO: 61360 - protein, 7 aa, synthetic construct
YLVQGPH

SEQ ID NO: 61361 - protein, 7 aa, synthetic construct
HDFKNAL

SEQ ID NO: 61362 - protein, 7 aa, synthetic construct
IKHMAQH

SEQ ID NO: 61363 - protein, 7 aa, synthetic construct
IVQQSSP

SEQ ID NO: 61364 - protein, 7 aa, synthetic construct
PSTNHTI

SEQ ID NO: 61365 - protein, 7 aa, synthetic construct
DNHHNKP

SEQ ID NO: 61366 - protein, 7 aa, synthetic construct
TPTRQYQ

SEQ ID NO: 61367 - protein, 7 aa, synthetic construct
SRVGADG

SEQ ID NO: 61368 - protein, 7 aa, synthetic construct
WKDLERV

SEQ ID NO: 61369 - protein, 7 aa, synthetic construct
LHSATYM

SEQ ID NO: 61370 - protein, 7 aa, synthetic construct
DLKNARI

SEQ ID NO: 61371 - protein, 7 aa, synthetic construct
ISPVSAR

SEQ ID NO: 61372 - protein, 7 aa, synthetic construct
RTKYIEN

SEQ ID NO: 61373 - protein, 7 aa, synthetic construct
EKGRMDG

SEQ ID NO: 61374 - protein, 7 aa, synthetic construct
TLPRFTP

SEQ ID NO: 61375 - protein, 7 aa, synthetic construct
NVHVRYD

SEQ ID NO: 61376 - protein, 7 aa, synthetic construct
NGPSGKV

SEQ ID NO: 61377 - protein, 7 aa, synthetic construct
GLGGHNG

SEQ ID NO: 61378 - protein, 7 aa, synthetic construct
KHTAIRD

SEQ ID NO: 61379 - protein, 7 aa, synthetic construct
NTSKSGS

SEQ ID NO: 61380 - protein, 7 aa, synthetic construct
HWGQGSG

SEQ ID NO: 61381 - protein, 7 aa, synthetic construct
SIKATGS

SEQ ID NO: 61382 - protein, 7 aa, synthetic construct
LPGHGGK

SEQ ID NO: 61383 - protein, 7 aa, synthetic construct
QVQMMTG

SEQ ID NO: 61384 - protein, 7 aa, synthetic construct
IGQKLIV

SEQ ID NO: 61385 - protein, 7 aa, synthetic construct
LNGFMVA

SEQ ID NO: 61386 - protein, 7 aa, synthetic construct
FKDKNGQ

SEQ ID NO: 61387 - protein, 7 aa, synthetic construct
QRNIQSI

SEQ ID NO: 61388 - protein, 7 aa, synthetic construct
AKFMEST

SEQ ID NO: 61389 - protein, 7 aa, synthetic construct
TKYPMET

SEQ ID NO: 61390 - protein, 7 aa, synthetic construct
MIPVPFD

SEQ ID NO: 61391 - protein, 7 aa, synthetic construct
IPKLYGS

SEQ ID NO: 61392 - protein, 7 aa, synthetic construct
VGGYHKI

SEQ ID NO: 61393 - protein, 7 aa, synthetic construct
FKNSSVS

SEQ ID NO: 61394 - protein, 7 aa, synthetic construct
FANRHQT

SEQ ID NO: 61395 - protein, 7 aa, synthetic construct
SKTGAAA

SEQ ID NO: 61396 - protein, 7 aa, synthetic construct
KSMTQSG

SEQ ID NO: 61397 - protein, 7 aa, synthetic construct
FGAFTAN

SEQ ID NO: 61398 - protein, 7 aa, synthetic construct
IFTKHNT

SEQ ID NO: 61399 - protein, 7 aa, synthetic construct
DLSAPRL

SEQ ID NO: 61400 - protein, 7 aa, synthetic construct
TSQSRTD

SEQ ID NO: 61401 - protein, 7 aa, synthetic construct
GTPSRGA

SEQ ID NO: 61402 - protein, 7 aa, synthetic construct
PMARSGG

SEQ ID NO: 61403 - protein, 7 aa, synthetic construct
DYNNKKD

SEQ ID NO: 61404 - protein, 7 aa, synthetic construct
YDHHPEK

SEQ ID NO: 61405 - protein, 7 aa, synthetic construct
KNSYSDI

SEQ ID NO: 61406 - protein, 7 aa, synthetic construct
RANSTGP

SEQ ID NO: 61407 - protein, 7 aa, synthetic construct
NFGPELA

SEQ ID NO: 61408 - protein, 7 aa, synthetic construct
EKQAPMI

SEQ ID NO: 61409 - protein, 7 aa, synthetic construct
TQMQGGN

SEQ ID NO: 61410 - protein, 7 aa, synthetic construct
KKMATDE

SEQ ID NO: 61411 - protein, 7 aa, synthetic construct
QVFKSEF

SEQ ID NO: 61412 - protein, 7 aa, synthetic construct
GYNHDMI

SEQ ID NO: 61413 - protein, 7 aa, synthetic construct
PRPMAAE

SEQ ID NO: 61414 - protein, 7 aa, synthetic construct
KGPNNIM

SEQ ID NO: 61415 - protein, 7 aa, synthetic construct
ERKMTYE

SEQ ID NO: 61416 - protein, 7 aa, synthetic construct
RQGLHVP

SEQ ID NO: 61417 - protein, 7 aa, synthetic construct
SQAASSS

SEQ ID NO: 61418 - protein, 7 aa, synthetic construct
PNKYNES

SEQ ID NO: 61419 - protein, 7 aa, synthetic construct
VGRNLMD

SEQ ID NO: 61420 - protein, 7 aa, synthetic construct
NSKYNSP

SEQ ID NO: 61421 - protein, 7 aa, synthetic construct
VGSLHNP

SEQ ID NO: 61422 - protein, 7 aa, synthetic construct
HQHQNAG

SEQ ID NO: 61423 - protein, 7 aa, synthetic construct
SGSPMER

SEQ ID NO: 61424 - protein, 7 aa, synthetic construct
AHKATDV

SEQ ID NO: 61425 - protein, 7 aa, synthetic construct
QRGTHSE

SEQ ID NO: 61426 - protein, 7 aa, synthetic construct
PQRGSEG

SEQ ID NO: 61427 - protein, 7 aa, synthetic construct
NAMKHHA

SEQ ID NO: 61428 - protein, 7 aa, synthetic construct
RGDNITY

SEQ ID NO: 61429 - protein, 7 aa, synthetic construct
TMKAGNA

SEQ ID NO: 61430 - protein, 7 aa, synthetic construct
KAANLSF

SEQ ID NO: 61431 - protein, 7 aa, synthetic construct
NAKGWQT

SEQ ID NO: 61432 - protein, 7 aa, synthetic construct
KNKEAQA

SEQ ID NO: 61433 - protein, 7 aa, synthetic construct
DSHNRYG

SEQ ID NO: 61434 - protein, 7 aa, synthetic construct
TEYIKMQ

SEQ ID NO: 61435 - protein, 7 aa, synthetic construct
STTSKQD

SEQ ID NO: 61436 - protein, 7 aa, synthetic construct
MGGSNKA

SEQ ID NO: 61437 - protein, 7 aa, synthetic construct
QNKNTSH

SEQ ID NO: 61438 - protein, 7 aa, synthetic construct
EKVFRDP

SEQ ID NO: 61439 - protein, 7 aa, synthetic construct
QNHISNR

SEQ ID NO: 61440 - protein, 7 aa, synthetic construct
MHPKAFN

SEQ ID NO: 61441 - protein, 7 aa, synthetic construct
LERTRNQ

SEQ ID NO: 61442 - protein, 7 aa, synthetic construct
IGPQRVL

SEQ ID NO: 61443 - protein, 7 aa, synthetic construct
VRSTGGA

SEQ ID NO: 61444 - protein, 7 aa, synthetic construct
LVAKNGF

SEQ ID NO: 61445 - protein, 7 aa, synthetic construct
RDRVASD

SEQ ID NO: 61446 - protein, 7 aa, synthetic construct
HEKNLRG

SEQ ID NO: 61447 - protein, 7 aa, synthetic construct
ASAPTRS

SEQ ID NO: 61448 - protein, 7 aa, synthetic construct
EYKGLGH

SEQ ID NO: 61449 - protein, 7 aa, synthetic construct
PEAYTHV

SEQ ID NO: 61450 - protein, 7 aa, synthetic construct
DARHNQS

SEQ ID NO: 61451 - protein, 7 aa, synthetic construct
NHAYKGV

SEQ ID NO: 61452 - protein, 7 aa, synthetic construct
QKWVAEG

SEQ ID NO: 61453 - protein, 7 aa, synthetic construct
QKTVGGN

SEQ ID NO: 61454 - protein, 7 aa, synthetic construct
QYANDRP

SEQ ID NO: 61455 - protein, 7 aa, synthetic construct
GALPKYE

SEQ ID NO: 61456 - protein, 7 aa, synthetic construct
EKAIRGD

SEQ ID NO: 61457 - protein, 7 aa, synthetic construct
SKPKTGD

SEQ ID NO: 61458 - protein, 7 aa, synthetic construct
YSTKSQA

SEQ ID NO: 61459 - protein, 7 aa, synthetic construct
IIGNMAA

SEQ ID NO: 61460 - protein, 7 aa, synthetic construct
QNNSGSL

SEQ ID NO: 61461 - protein, 7 aa, synthetic construct
RHVHTQD

SEQ ID NO: 61462 - protein, 7 aa, synthetic construct
NRQPGGA

SEQ ID NO: 61463 - protein, 7 aa, synthetic construct
DFKHTLP

SEQ ID NO: 61464 - protein, 7 aa, synthetic construct
AIRQERA

SEQ ID NO: 61465 - protein, 7 aa, synthetic construct
TKGMDPK

SEQ ID NO: 61466 - protein, 7 aa, synthetic construct
KGHEIRI

SEQ ID NO: 61467 - protein, 7 aa, synthetic construct
FRHGSEN

SEQ ID NO: 61468 - protein, 7 aa, synthetic construct
SSGHIHK

SEQ ID NO: 61469 - protein, 7 aa, synthetic construct
LKSNTQT

SEQ ID NO: 61470 - protein, 7 aa, synthetic construct
NYHRNAP

SEQ ID NO: 61471 - protein, 7 aa, synthetic construct
VIPHNSP

SEQ ID NO: 61472 - protein, 7 aa, synthetic construct
SQKASAG

SEQ ID NO: 61473 - protein, 7 aa, synthetic construct
NANGKAT

SEQ ID NO: 61474 - protein, 7 aa, synthetic construct
RDNNTMP

SEQ ID NO: 61475 - protein, 7 aa, synthetic construct
GRAPSVP

SEQ ID NO: 61476 - protein, 7 aa, synthetic construct
MTGNIKG

SEQ ID NO: 61477 - protein, 7 aa, synthetic construct
HNLKDRI

SEQ ID NO: 61478 - protein, 7 aa, synthetic construct
KMGIVAP

SEQ ID NO: 61479 - protein, 7 aa, synthetic construct
NPSKNNA

SEQ ID NO: 61480 - protein, 7 aa, synthetic construct
RTTTQTA

SEQ ID NO: 61481 - protein, 7 aa, synthetic construct
HPNYKSQ

SEQ ID NO: 61482 - protein, 7 aa, synthetic construct
KDDSKGG

SEQ ID NO: 61483 - protein, 7 aa, synthetic construct
TPKVAVY

SEQ ID NO: 61484 - protein, 7 aa, synthetic construct
ITPATSF

SEQ ID NO: 61485 - protein, 7 aa, synthetic construct
RDKSGVA

SEQ ID NO: 61486 - protein, 7 aa, synthetic construct
DRIETQA

SEQ ID NO: 61487 - protein, 7 aa, synthetic construct
SMGSAKA

SEQ ID NO: 61488 - protein, 7 aa, synthetic construct
QWKPDRS

SEQ ID NO: 61489 - protein, 7 aa, synthetic construct
PPNIHNK

SEQ ID NO: 61490 - protein, 7 aa, synthetic construct
VKIQMKE

SEQ ID NO: 61491 - protein, 7 aa, synthetic construct
HALGNAN

SEQ ID NO: 61492 - protein, 7 aa, synthetic construct
SQKEQKN

SEQ ID NO: 61493 - protein, 7 aa, synthetic construct
HKHVVTV

SEQ ID NO: 61494 - protein, 7 aa, synthetic construct
TIHSAGY

SEQ ID NO: 61495 - protein, 7 aa, synthetic construct
VTVPHSS

SEQ ID NO: 61496 - protein, 7 aa, synthetic construct
RLVEKLP

SEQ ID NO: 61497 - protein, 7 aa, synthetic construct
MFQHVPD

SEQ ID NO: 61498 - protein, 7 aa, synthetic construct
KMAANVF

SEQ ID NO: 61499 - protein, 7 aa, synthetic construct
KTNNVGN

SEQ ID NO: 61500 - protein, 7 aa, synthetic construct
IKDHRAS

SEQ ID NO: 61501 - protein, 7 aa, synthetic construct
PRNANVA

SEQ ID NO: 61502 - protein, 7 aa, synthetic construct
PRSDREM

SEQ ID NO: 61503 - protein, 7 aa, synthetic construct
MIFPAKE

SEQ ID NO: 61504 - protein, 7 aa, synthetic construct
NARAAMS

SEQ ID NO: 61505 - protein, 7 aa, synthetic construct
PFTRTQT

SEQ ID NO: 61506 - protein, 7 aa, synthetic construct
FAHDVMG

SEQ ID NO: 61507 - protein, 7 aa, synthetic construct
KRDTPVS

SEQ ID NO: 61508 - protein, 7 aa, synthetic construct
GKTTYPG

SEQ ID NO: 61509 - protein, 7 aa, synthetic construct
DHKERVM

SEQ ID NO: 61510 - protein, 7 aa, synthetic construct
RQSTASI

SEQ ID NO: 61511 - protein, 7 aa, synthetic construct
MPHFAHE

SEQ ID NO: 61512 - protein, 7 aa, synthetic construct
NQSYHAG

SEQ ID NO: 61513 - protein, 7 aa, synthetic construct
GWNGKPH

SEQ ID NO: 61514 - protein, 7 aa, synthetic construct
QFRTIDT

SEQ ID NO: 61515 - protein, 7 aa, synthetic construct
VNLGTRM

SEQ ID NO: 61516 - protein, 7 aa, synthetic construct
HGKSPAL

SEQ ID NO: 61517 - protein, 7 aa, synthetic construct
GQNAKQQ

SEQ ID NO: 61518 - protein, 7 aa, synthetic construct
QRSLDSG

SEQ ID NO: 61519 - protein, 7 aa, synthetic construct
PFDGRKE

SEQ ID NO: 61520 - protein, 7 aa, synthetic construct
YRHNVVV

SEQ ID NO: 61521 - protein, 7 aa, synthetic construct
HQRMDRV

SEQ ID NO: 61522 - protein, 7 aa, synthetic construct
KNGGIAA

SEQ ID NO: 61523 - protein, 7 aa, synthetic construct
AVRHSDP

SEQ ID NO: 61524 - protein, 7 aa, synthetic construct
YQHHDQV

SEQ ID NO: 61525 - protein, 7 aa, synthetic construct
TRDPQLF

SEQ ID NO: 61526 - protein, 7 aa, synthetic construct
TMKMAGT

SEQ ID NO: 61527 - protein, 7 aa, synthetic construct
WETNRLA

SEQ ID NO: 61528 - protein, 7 aa, synthetic construct
KPSNNAM

SEQ ID NO: 61529 - protein, 7 aa, synthetic construct
GRIAPMP

SEQ ID NO: 61530 - protein, 7 aa, synthetic construct
NRHFGQA

SEQ ID NO: 61531 - protein, 7 aa, synthetic construct
TITGKAF

SEQ ID NO: 61532 - protein, 7 aa, synthetic construct
SMRHGNT

SEQ ID NO: 61533 - protein, 7 aa, synthetic construct
GVGYSQG

SEQ ID NO: 61534 - protein, 7 aa, synthetic construct
KGTASNP

SEQ ID NO: 61535 - protein, 7 aa, synthetic construct
VFQKVPG

SEQ ID NO: 61536 - protein, 7 aa, synthetic construct
YRQLERP

SEQ ID NO: 61537 - protein, 7 aa, synthetic construct
NRQLVMP

SEQ ID NO: 61538 - protein, 7 aa, synthetic construct
HIHNRNM

SEQ ID NO: 61539 - protein, 7 aa, synthetic construct
PWDTSAK

SEQ ID NO: 61540 - protein, 7 aa, synthetic construct
MSARSHM

SEQ ID NO: 61541 - protein, 7 aa, synthetic construct
MQRHEAG

SEQ ID NO: 61542 - protein, 7 aa, synthetic construct
SNVKPLQ

SEQ ID NO: 61543 - protein, 7 aa, synthetic construct
TLAGSST

SEQ ID NO: 61544 - protein, 7 aa, synthetic construct
FPKSMSM

SEQ ID NO: 61545 - protein, 7 aa, synthetic construct
HLTQRNG

SEQ ID NO: 61546 - protein, 7 aa, synthetic construct
QLPHYGA

SEQ ID NO: 61547 - protein, 7 aa, synthetic construct
QREHRTL

SEQ ID NO: 61548 - protein, 7 aa, synthetic construct
IKANIMN

SEQ ID NO: 61549 - protein, 7 aa, synthetic construct
YKGQMKD

SEQ ID NO: 61550 - protein, 7 aa, synthetic construct
PIMRGEM

SEQ ID NO: 61551 - protein, 7 aa, synthetic construct
NTHNRAV

SEQ ID NO: 61552 - protein, 7 aa, synthetic construct
KQTHVTG

SEQ ID NO: 61553 - protein, 7 aa, synthetic construct
WTARASS

SEQ ID NO: 61554 - protein, 7 aa, synthetic construct
SKPEKLW

SEQ ID NO: 61555 - protein, 7 aa, synthetic construct
QFVKQEG

SEQ ID NO: 61556 - protein, 7 aa, synthetic construct
DHMVARG

SEQ ID NO: 61557 - protein, 7 aa, synthetic construct
DRLSMIE

SEQ ID NO: 61558 - protein, 7 aa, synthetic construct
TKMNMQG

SEQ ID NO: 61559 - protein, 7 aa, synthetic construct
QSDHGKS

SEQ ID NO: 61560 - protein, 7 aa, synthetic construct
VMNAGLN

SEQ ID NO: 61561 - protein, 7 aa, synthetic construct
NFSKPEW

SEQ ID NO: 61562 - protein, 7 aa, synthetic construct
TMNRNQA

SEQ ID NO: 61563 - protein, 7 aa, synthetic construct
KKTISDV

SEQ ID NO: 61564 - protein, 7 aa, synthetic construct
INGSQKG

SEQ ID NO: 61565 - protein, 7 aa, synthetic construct
NRPANMP

SEQ ID NO: 61566 - protein, 7 aa, synthetic construct
HSSGYSS

SEQ ID NO: 61567 - protein, 7 aa, synthetic construct
PSARMSD

SEQ ID NO: 61568 - protein, 7 aa, synthetic construct
NVNFKVE

SEQ ID NO: 61569 - protein, 7 aa, synthetic construct
GGAKKEP

SEQ ID NO: 61570 - protein, 7 aa, synthetic construct
PPKFQIS

SEQ ID NO: 61571 - protein, 7 aa, synthetic construct
TVQKGFE

SEQ ID NO: 61572 - protein, 7 aa, synthetic construct
TKINMAS

SEQ ID NO: 61573 - protein, 7 aa, synthetic construct
EKAVVPS

SEQ ID NO: 61574 - protein, 7 aa, synthetic construct
FKIVNGT

SEQ ID NO: 61575 - protein, 7 aa, synthetic construct
SKGSING

SEQ ID NO: 61576 - protein, 7 aa, synthetic construct
SLKDWKQ

SEQ ID NO: 61577 - protein, 7 aa, synthetic construct
IDLHKVV

SEQ ID NO: 61578 - protein, 7 aa, synthetic construct
SSFVGQT

SEQ ID NO: 61579 - protein, 7 aa, synthetic construct
YPPMRPG

SEQ ID NO: 61580 - protein, 7 aa, synthetic construct
AWKSHSP

SEQ ID NO: 61581 - protein, 7 aa, synthetic construct
SHKHLMV

SEQ ID NO: 61582 - protein, 7 aa, synthetic construct
YNMKHEP

SEQ ID NO: 61583 - protein, 7 aa, synthetic construct
NKHLAVD

SEQ ID NO: 61584 - protein, 7 aa, synthetic construct
QYNRPFD

SEQ ID NO: 61585 - protein, 7 aa, synthetic construct
SGKGVAY

SEQ ID NO: 61586 - protein, 7 aa, synthetic construct
FVQSQPV

SEQ ID NO: 61587 - protein, 7 aa, synthetic construct
MSQTVLS

SEQ ID NO: 61588 - protein, 7 aa, synthetic construct
GNKQSMS

SEQ ID NO: 61589 - protein, 7 aa, synthetic construct
MNDRHHM

SEQ ID NO: 61590 - protein, 7 aa, synthetic construct
NIVLSDK

SEQ ID NO: 61591 - protein, 7 aa, synthetic construct
KDHTKNS

SEQ ID NO: 61592 - protein, 7 aa, synthetic construct
YWHAKVE

SEQ ID NO: 61593 - protein, 7 aa, synthetic construct
GNKFPMP

SEQ ID NO: 61594 - protein, 7 aa, synthetic construct
THHTKNS

SEQ ID NO: 61595 - protein, 7 aa, synthetic construct
QKGNVFQ

SEQ ID NO: 61596 - protein, 7 aa, synthetic construct
KEQMGRP

SEQ ID NO: 61597 - protein, 7 aa, synthetic construct
TLRDPES

SEQ ID NO: 61598 - protein, 7 aa, synthetic construct
KSMTVMD

SEQ ID NO: 61599 - protein, 7 aa, synthetic construct
RSQTGGG

SEQ ID NO: 61600 - protein, 7 aa, synthetic construct
TVRVDQY

SEQ ID NO: 61601 - protein, 7 aa, synthetic construct
RTSNEGF

SEQ ID NO: 61602 - protein, 7 aa, synthetic construct
ETLKRIP

SEQ ID NO: 61603 - protein, 7 aa, synthetic construct
NYTPVQG

SEQ ID NO: 61604 - protein, 7 aa, synthetic construct
GNKMEAF

SEQ ID NO: 61605 - protein, 7 aa, synthetic construct
QMRANFE

SEQ ID NO: 61606 - protein, 7 aa, synthetic construct
GHYNQPH

SEQ ID NO: 61607 - protein, 7 aa, synthetic construct
IKYLNVE

SEQ ID NO: 61608 - protein, 7 aa, synthetic construct
LSLSNKE

SEQ ID NO: 61609 - protein, 7 aa, synthetic construct
GMGNTAY

SEQ ID NO: 61610 - protein, 7 aa, synthetic construct
LGSKNHY

SEQ ID NO: 61611 - protein, 7 aa, synthetic construct
PTSRDYM

SEQ ID NO: 61612 - protein, 7 aa, synthetic construct
SRSTGQP

SEQ ID NO: 61613 - protein, 7 aa, synthetic construct
PKPNAYA

SEQ ID NO: 61614 - protein, 7 aa, synthetic construct
TNQRATG

SEQ ID NO: 61615 - protein, 7 aa, synthetic construct
VNQHHLG

SEQ ID NO: 61616 - protein, 7 aa, synthetic construct
NKSPSGM

SEQ ID NO: 61617 - protein, 7 aa, synthetic construct
SSRSIPQ

SEQ ID NO: 61618 - protein, 7 aa, synthetic construct
YDHHYPP

SEQ ID NO: 61619 - protein, 7 aa, synthetic construct
HHFRHED

SEQ ID NO: 61620 - protein, 7 aa, synthetic construct
QYQKHPH

SEQ ID NO: 61621 - protein, 7 aa, synthetic construct
MAATTNH

SEQ ID NO: 61622 - protein, 7 aa, synthetic construct
GLNNPVI

SEQ ID NO: 61623 - protein, 7 aa, synthetic construct
FTRGVSD

SEQ ID NO: 61624 - protein, 7 aa, synthetic construct
SWGDQTK

SEQ ID NO: 61625 - protein, 7 aa, synthetic construct
NSQRHAP

SEQ ID NO: 61626 - protein, 7 aa, synthetic construct
RSATQGG

SEQ ID NO: 61627 - protein, 7 aa, synthetic construct
NPGRGMA

SEQ ID NO: 61628 - protein, 7 aa, synthetic construct
QNQIAKT

SEQ ID NO: 61629 - protein, 7 aa, synthetic construct
GEITIKM

SEQ ID NO: 61630 - protein, 7 aa, synthetic construct
HSPQNVI

SEQ ID NO: 61631 - protein, 7 aa, synthetic construct
EKQQMPN

SEQ ID NO: 61632 - protein, 7 aa, synthetic construct
HKNQPSD

SEQ ID NO: 61633 - protein, 7 aa, synthetic construct
HKDRFAA

SEQ ID NO: 61634 - protein, 7 aa, synthetic construct
ELRKKEA

SEQ ID NO: 61635 - protein, 7 aa, synthetic construct
TRNAMSA

SEQ ID NO: 61636 - protein, 7 aa, synthetic construct
IVHQTTR

SEQ ID NO: 61637 - protein, 7 aa, synthetic construct
YQRSQFQ

SEQ ID NO: 61638 - protein, 7 aa, synthetic construct
TGNKSFT

SEQ ID NO: 61639 - protein, 7 aa, synthetic construct
KADHPSQ

SEQ ID NO: 61640 - protein, 7 aa, synthetic construct
YDMIKNT

SEQ ID NO: 61641 - protein, 7 aa, synthetic construct
KQGNDLN

SEQ ID NO: 61642 - protein, 7 aa, synthetic construct
GKQSSTM

SEQ ID NO: 61643 - protein, 7 aa, synthetic construct
KTNVQTP

SEQ ID NO: 61644 - protein, 7 aa, synthetic construct
RFGEMPK

SEQ ID NO: 61645 - protein, 7 aa, synthetic construct
TYPKGEY

SEQ ID NO: 61646 - protein, 7 aa, synthetic construct
QPRGNMV

SEQ ID NO: 61647 - protein, 7 aa, synthetic construct
LHQTKMT

SEQ ID NO: 61648 - protein, 7 aa, synthetic construct
HQSNHQL

SEQ ID NO: 61649 - protein, 7 aa, synthetic construct
MGKAGAS

SEQ ID NO: 61650 - protein, 7 aa, synthetic construct
STYSALE

SEQ ID NO: 61651 - protein, 7 aa, synthetic construct
RKDGNPW

SEQ ID NO: 61652 - protein, 7 aa, synthetic construct
QASFKHQ

SEQ ID NO: 61653 - protein, 7 aa, synthetic construct
PTDKVNR

SEQ ID NO: 61654 - protein, 7 aa, synthetic construct
LKTYAQG

SEQ ID NO: 61655 - protein, 7 aa, synthetic construct
DFDKQRF

SEQ ID NO: 61656 - protein, 7 aa, synthetic construct
KQSVGNA

SEQ ID NO: 61657 - protein, 7 aa, synthetic construct
IVGRPLQ

SEQ ID NO: 61658 - protein, 7 aa, synthetic construct
KNNAPHQ

SEQ ID NO: 61659 - protein, 7 aa, synthetic construct
QSKGQLA

SEQ ID NO: 61660 - protein, 7 aa, synthetic construct
TVTQVGG

SEQ ID NO: 61661 - protein, 7 aa, synthetic construct
ATERRQD

SEQ ID NO: 61662 - protein, 7 aa, synthetic construct
ARQPTAD

SEQ ID NO: 61663 - protein, 7 aa, synthetic construct
HHKVNGL

SEQ ID NO: 61664 - protein, 7 aa, synthetic construct
DTRSREV

SEQ ID NO: 61665 - protein, 7 aa, synthetic construct
RGKDSHG

SEQ ID NO: 61666 - protein, 7 aa, synthetic construct
KVPPFIG

SEQ ID NO: 61667 - protein, 7 aa, synthetic construct
AGTMPRI

SEQ ID NO: 61668 - protein, 7 aa, synthetic construct
RVPNEGQ

SEQ ID NO: 61669 - protein, 7 aa, synthetic construct
YDKMKMQ

SEQ ID NO: 61670 - protein, 7 aa, synthetic construct
MTNPRPQ

SEQ ID NO: 61671 - protein, 7 aa, synthetic construct
SKTDLHF

SEQ ID NO: 61672 - protein, 7 aa, synthetic construct
QRHQQSD

SEQ ID NO: 61673 - protein, 7 aa, synthetic construct
VNGKQMS

SEQ ID NO: 61674 - protein, 7 aa, synthetic construct
GPQRTAP

SEQ ID NO: 61675 - protein, 7 aa, synthetic construct
SKPQTVG

SEQ ID NO: 61676 - protein, 7 aa, synthetic construct
TKSAVMN

SEQ ID NO: 61677 - protein, 7 aa, synthetic construct
NHYTNET

SEQ ID NO: 61678 - protein, 7 aa, synthetic construct
KTNQHKD

SEQ ID NO: 61679 - protein, 7 aa, synthetic construct
SHNSIKG

SEQ ID NO: 61680 - protein, 7 aa, synthetic construct
FAVTQSG

SEQ ID NO: 61681 - protein, 7 aa, synthetic construct
SRQTSGM

SEQ ID NO: 61682 - protein, 7 aa, synthetic construct
IRQGVLS

SEQ ID NO: 61683 - protein, 7 aa, synthetic construct
RGSPTQL

SEQ ID NO: 61684 - protein, 7 aa, synthetic construct
HQFENKE

SEQ ID NO: 61685 - protein, 7 aa, synthetic construct
SQGKANG

SEQ ID NO: 61686 - protein, 7 aa, synthetic construct
HQGEPFK

SEQ ID NO: 61687 - protein, 7 aa, synthetic construct
NRVDNRY

SEQ ID NO: 61688 - protein, 7 aa, synthetic construct
RNQGIEA

SEQ ID NO: 61689 - protein, 7 aa, synthetic construct
LNKTQMD

SEQ ID NO: 61690 - protein, 7 aa, synthetic construct
GGKSKEF

SEQ ID NO: 61691 - protein, 7 aa, synthetic construct
MNNKSGA

SEQ ID NO: 61692 - protein, 7 aa, synthetic construct
DRANHSI

SEQ ID NO: 61693 - protein, 7 aa, synthetic construct
QMKPTNA

SEQ ID NO: 61694 - protein, 7 aa, synthetic construct
TGWKPME

SEQ ID NO: 61695 - protein, 7 aa, synthetic construct
DYKNNMV

SEQ ID NO: 61696 - protein, 7 aa, synthetic construct
WRKTDDL

SEQ ID NO: 61697 - protein, 7 aa, synthetic construct
FPGGRET

SEQ ID NO: 61698 - protein, 7 aa, synthetic construct
GSRNAGT

SEQ ID NO: 61699 - protein, 7 aa, synthetic construct
PRNQSGV

SEQ ID NO: 61700 - protein, 7 aa, synthetic construct
LKGISLQ

SEQ ID NO: 61701 - protein, 7 aa, synthetic construct
TKQRLEN

SEQ ID NO: 61702 - protein, 7 aa, synthetic construct
PPKNSGM

SEQ ID NO: 61703 - protein, 7 aa, synthetic construct
LAMRPTV

SEQ ID NO: 61704 - protein, 7 aa, synthetic construct
VVHAKVA

SEQ ID NO: 61705 - protein, 7 aa, synthetic construct
LFNKTPN

SEQ ID NO: 61706 - protein, 7 aa, synthetic construct
NGKQTQA

SEQ ID NO: 61707 - protein, 7 aa, synthetic construct
SQWKAMD

SEQ ID NO: 61708 - protein, 7 aa, synthetic construct
GPVTNQK

SEQ ID NO: 61709 - protein, 7 aa, synthetic construct
NTYGMTE

SEQ ID NO: 61710 - protein, 7 aa, synthetic construct
GMFPGRP

SEQ ID NO: 61711 - protein, 7 aa, synthetic construct
LMLGERA

SEQ ID NO: 61712 - protein, 7 aa, synthetic construct
LAVAGRT

SEQ ID NO: 61713 - protein, 7 aa, synthetic construct
IYKLHSA

SEQ ID NO: 61714 - protein, 7 aa, synthetic construct
QGKYSPQ

SEQ ID NO: 61715 - protein, 7 aa, synthetic construct
QMTGAHI

SEQ ID NO: 61716 - protein, 7 aa, synthetic construct
HKIADMP

SEQ ID NO: 61717 - protein, 7 aa, synthetic construct
ISRDKEF

SEQ ID NO: 61718 - protein, 7 aa, synthetic construct
NKANIKD

SEQ ID NO: 61719 - protein, 7 aa, synthetic construct
RKEFTAD

SEQ ID NO: 61720 - protein, 7 aa, synthetic construct
AYTHNQG

SEQ ID NO: 61721 - protein, 7 aa, synthetic construct
HFQQQHP

SEQ ID NO: 61722 - protein, 7 aa, synthetic construct
KHTQHNG

SEQ ID NO: 61723 - protein, 7 aa, synthetic construct
YRKQDAE

SEQ ID NO: 61724 - protein, 7 aa, synthetic construct
QKTTDGT

SEQ ID NO: 61725 - protein, 7 aa, synthetic construct
HAHNIGA

SEQ ID NO: 61726 - protein, 7 aa, synthetic construct
ERRMDEF

SEQ ID NO: 61727 - protein, 7 aa, synthetic construct
RFDHIQD

SEQ ID NO: 61728 - protein, 7 aa, synthetic construct
RPPSGMN

SEQ ID NO: 61729 - protein, 7 aa, synthetic construct
HPKYAAN

SEQ ID NO: 61730 - protein, 7 aa, synthetic construct
SPNVFLD

SEQ ID NO: 61731 - protein, 7 aa, synthetic construct
SHNSGSI

SEQ ID NO: 61732 - protein, 7 aa, synthetic construct
RSSPGNA

SEQ ID NO: 61733 - protein, 7 aa, synthetic construct
AKNVTQN

SEQ ID NO: 61734 - protein, 7 aa, synthetic construct
HSMAITA

SEQ ID NO: 61735 - protein, 7 aa, synthetic construct
NTNRNGG

SEQ ID NO: 61736 - protein, 7 aa, synthetic construct
YMERTQQ

SEQ ID NO: 61737 - protein, 7 aa, synthetic construct
GSGDKIA

SEQ ID NO: 61738 - protein, 7 aa, synthetic construct
NINAKVS

SEQ ID NO: 61739 - protein, 7 aa, synthetic construct
NDYRVHA

SEQ ID NO: 61740 - protein, 7 aa, synthetic construct
KYDPESR

SEQ ID NO: 61741 - protein, 7 aa, synthetic construct
GFPLIGP

SEQ ID NO: 61742 - protein, 7 aa, synthetic construct
KQTTSAT

SEQ ID NO: 61743 - protein, 7 aa, synthetic construct
MQKNMHI

SEQ ID NO: 61744 - protein, 7 aa, synthetic construct
VVQNGNP

SEQ ID NO: 61745 - protein, 7 aa, synthetic construct
LGAAHKQ

SEQ ID NO: 61746 - protein, 7 aa, synthetic construct
QIHNMAS

SEQ ID NO: 61747 - protein, 7 aa, synthetic construct
EAKHHGF

SEQ ID NO: 61748 - protein, 7 aa, synthetic construct
TIYAKNN

SEQ ID NO: 61749 - protein, 7 aa, synthetic construct
ASTPTNV

SEQ ID NO: 61750 - protein, 7 aa, synthetic construct
NAGNSMP

SEQ ID NO: 61751 - protein, 7 aa, synthetic construct
SGGNRSD

SEQ ID NO: 61752 - protein, 7 aa, synthetic construct
TFSGATG

SEQ ID NO: 61753 - protein, 7 aa, synthetic construct
TGKGFDS

SEQ ID NO: 61754 - protein, 7 aa, synthetic construct
KEHGSAY

SEQ ID NO: 61755 - protein, 7 aa, synthetic construct
TAHHPLR

SEQ ID NO: 61756 - protein, 7 aa, synthetic construct
KSGTSMS

SEQ ID NO: 61757 - protein, 7 aa, synthetic construct
RKDQHSE

SEQ ID NO: 61758 - protein, 7 aa, synthetic construct
MKAVSRE

SEQ ID NO: 61759 - protein, 7 aa, synthetic construct
HLYDPKG

SEQ ID NO: 61760 - protein, 7 aa, synthetic construct
PSKNASA

SEQ ID NO: 61761 - protein, 7 aa, synthetic construct
EFAKKPE

SEQ ID NO: 61762 - protein, 7 aa, synthetic construct
YPIKPQQ

SEQ ID NO: 61763 - protein, 7 aa, synthetic construct
GNWNTKM

SEQ ID NO: 61764 - protein, 7 aa, synthetic construct
QRTNAGP

SEQ ID NO: 61765 - protein, 7 aa, synthetic construct
YMGGEKT

SEQ ID NO: 61766 - protein, 7 aa, synthetic construct
NRAERFM

SEQ ID NO: 61767 - protein, 7 aa, synthetic construct
NTRANTA

SEQ ID NO: 61768 - protein, 7 aa, synthetic construct
LQHRTQS

SEQ ID NO: 61769 - protein, 7 aa, synthetic construct
KTPGSNM

SEQ ID NO: 61770 - protein, 7 aa, synthetic construct
YEMHKYA

SEQ ID NO: 61771 - protein, 7 aa, synthetic construct
TRQTNQA

SEQ ID NO: 61772 - protein, 7 aa, synthetic construct
VHMQPRP

SEQ ID NO: 61773 - protein, 7 aa, synthetic construct
ERQVDRS

SEQ ID NO: 61774 - protein, 7 aa, synthetic construct
IKLNSGY

SEQ ID NO: 61775 - protein, 7 aa, synthetic construct
RQNKETH

SEQ ID NO: 61776 - protein, 7 aa, synthetic construct
QPYTKSP

SEQ ID NO: 61777 - protein, 7 aa, synthetic construct
LGFTRDS

SEQ ID NO: 61778 - protein, 7 aa, synthetic construct
KGGNNTG

SEQ ID NO: 61779 - protein, 7 aa, synthetic construct
QHKGVAQ

SEQ ID NO: 61780 - protein, 7 aa, synthetic construct
AHGGSAM

SEQ ID NO: 61781 - protein, 7 aa, synthetic construct
KKDVKFD

SEQ ID NO: 61782 - protein, 7 aa, synthetic construct
GPLQMVH

SEQ ID NO: 61783 - protein, 7 aa, synthetic construct
KPNGISA

SEQ ID NO: 61784 - protein, 7 aa, synthetic construct
GKHLPLQ

SEQ ID NO: 61785 - protein, 7 aa, synthetic construct
GKPDKQY

SEQ ID NO: 61786 - protein, 7 aa, synthetic construct
PYHKGSM

SEQ ID NO: 61787 - protein, 7 aa, synthetic construct
VNQNATK

SEQ ID NO: 61788 - protein, 7 aa, synthetic construct
KTPDTGR

SEQ ID NO: 61789 - protein, 7 aa, synthetic construct
VIHAEFG

SEQ ID NO: 61790 - protein, 7 aa, synthetic construct
RDQLNMR

SEQ ID NO: 61791 - protein, 7 aa, synthetic construct
FVKPNAD

SEQ ID NO: 61792 - protein, 7 aa, synthetic construct
YIGADRH

SEQ ID NO: 61793 - protein, 7 aa, synthetic construct
PAASARE

SEQ ID NO: 61794 - protein, 7 aa, synthetic construct
FHSSTPE

SEQ ID NO: 61795 - protein, 7 aa, synthetic construct
SNLQKEG

SEQ ID NO: 61796 - protein, 7 aa, synthetic construct
KVGGVDL

SEQ ID NO: 61797 - protein, 7 aa, synthetic construct
NRTSGQV

SEQ ID NO: 61798 - protein, 7 aa, synthetic construct
PSKGGMA

SEQ ID NO: 61799 - protein, 7 aa, synthetic construct
QGKEWRE

SEQ ID NO: 61800 - protein, 7 aa, synthetic construct
FKDGKSQ

SEQ ID NO: 61801 - protein, 7 aa, synthetic construct
IHHGNQF

SEQ ID NO: 61802 - protein, 7 aa, synthetic construct
KEHVQKM

SEQ ID NO: 61803 - protein, 7 aa, synthetic construct
AKQTEYT

SEQ ID NO: 61804 - protein, 7 aa, synthetic construct
TDPRVKF

SEQ ID NO: 61805 - protein, 7 aa, synthetic construct
HFKEQLA

SEQ ID NO: 61806 - protein, 7 aa, synthetic construct
AANATWI

SEQ ID NO: 61807 - protein, 7 aa, synthetic construct
TTARQQG

SEQ ID NO: 61808 - protein, 7 aa, synthetic construct
HPERSST

SEQ ID NO: 61809 - protein, 7 aa, synthetic construct
TREPQRF

SEQ ID NO: 61810 - protein, 7 aa, synthetic construct
NGGANPT

SEQ ID NO: 61811 - protein, 7 aa, synthetic construct
SQVHSES

SEQ ID NO: 61812 - protein, 7 aa, synthetic construct
WQGASNP

SEQ ID NO: 61813 - protein, 7 aa, synthetic construct
QAGGVGP

SEQ ID NO: 61814 - protein, 7 aa, synthetic construct
RIERGDI

SEQ ID NO: 61815 - protein, 7 aa, synthetic construct
PRPHDYV

SEQ ID NO: 61816 - protein, 7 aa, synthetic construct
SKMSTQP

SEQ ID NO: 61817 - protein, 7 aa, synthetic construct
PATQANK

SEQ ID NO: 61818 - protein, 7 aa, synthetic construct
RNNYEPV

SEQ ID NO: 61819 - protein, 7 aa, synthetic construct
DRTHNPK

SEQ ID NO: 61820 - protein, 7 aa, synthetic construct
WAKTAPD

SEQ ID NO: 61821 - protein, 7 aa, synthetic construct
GSKSWSG

SEQ ID NO: 61822 - protein, 7 aa, synthetic construct
FQLKDKE

SEQ ID NO: 61823 - protein, 7 aa, synthetic construct
GGKSNFQ

SEQ ID NO: 61824 - protein, 7 aa, synthetic construct
QVTRYPE

SEQ ID NO: 61825 - protein, 7 aa, synthetic construct
GGQRMGD

SEQ ID NO: 61826 - protein, 7 aa, synthetic construct
GRATLSN

SEQ ID NO: 61827 - protein, 7 aa, synthetic construct
KNTNFNA

SEQ ID NO: 61828 - protein, 7 aa, synthetic construct
GRNKMDD

SEQ ID NO: 61829 - protein, 7 aa, synthetic construct
LSSPLMG

SEQ ID NO: 61830 - protein, 7 aa, synthetic construct
EYGSRSG

SEQ ID NO: 61831 - protein, 7 aa, synthetic construct
TDKGLSV

SEQ ID NO: 61832 - protein, 7 aa, synthetic construct
MGGMKVG

SEQ ID NO: 61833 - protein, 7 aa, synthetic construct
ITQSQTL

SEQ ID NO: 61834 - protein, 7 aa, synthetic construct
TTTRFAH

SEQ ID NO: 61835 - protein, 7 aa, synthetic construct
LKNMPGY

SEQ ID NO: 61836 - protein, 7 aa, synthetic construct
GGKSTPG

SEQ ID NO: 61837 - protein, 7 aa, synthetic construct
PHIPSSQ

SEQ ID NO: 61838 - protein, 7 aa, synthetic construct
MPKTGNG

SEQ ID NO: 61839 - protein, 7 aa, synthetic construct
MNGSKSP

SEQ ID NO: 61840 - protein, 7 aa, synthetic construct
TASHGLS

SEQ ID NO: 61841 - protein, 7 aa, synthetic construct
LAHMYRD

SEQ ID NO: 61842 - protein, 7 aa, synthetic construct
HPNSMGY

SEQ ID NO: 61843 - protein, 7 aa, synthetic construct
FHTATIN

SEQ ID NO: 61844 - protein, 7 aa, synthetic construct
DNYFIKE

SEQ ID NO: 61845 - protein, 7 aa, synthetic construct
KAIGKME

SEQ ID NO: 61846 - protein, 7 aa, synthetic construct
SHDFVTH

SEQ ID NO: 61847 - protein, 7 aa, synthetic construct
ASPKYFD

SEQ ID NO: 61848 - protein, 7 aa, synthetic construct
APAMSHQ

SEQ ID NO: 61849 - protein, 7 aa, synthetic construct
TFTHSPE

SEQ ID NO: 61850 - protein, 7 aa, synthetic construct
DRWKVGE

SEQ ID NO: 61851 - protein, 7 aa, synthetic construct
QAHGAML

SEQ ID NO: 61852 - protein, 7 aa, synthetic construct
PANKASL

SEQ ID NO: 61853 - protein, 7 aa, synthetic construct
RAGQMVV

SEQ ID NO: 61854 - protein, 7 aa, synthetic construct
QNPARSP

SEQ ID NO: 61855 - protein, 7 aa, synthetic construct
PVLRATS

SEQ ID NO: 61856 - protein, 7 aa, synthetic construct
NNKSQVA

SEQ ID NO: 61857 - protein, 7 aa, synthetic construct
LMPQAKT

SEQ ID NO: 61858 - protein, 7 aa, synthetic construct
AKPSSMS

SEQ ID NO: 61859 - protein, 7 aa, synthetic construct
RPVHKEE

SEQ ID NO: 61860 - protein, 7 aa, synthetic construct
ILRVTAA

SEQ ID NO: 61861 - protein, 7 aa, synthetic construct
MKTMEMG

SEQ ID NO: 61862 - protein, 7 aa, synthetic construct
WPVKGDY

SEQ ID NO: 61863 - protein, 7 aa, synthetic construct
QFDTTRP

SEQ ID NO: 61864 - protein, 7 aa, synthetic construct
QPLTGAI

SEQ ID NO: 61865 - protein, 7 aa, synthetic construct
GRHHGHD

SEQ ID NO: 61866 - protein, 7 aa, synthetic construct
ESTHKFG

SEQ ID NO: 61867 - protein, 7 aa, synthetic construct
GTNTKVG

SEQ ID NO: 61868 - protein, 7 aa, synthetic construct
YGKSMAP

SEQ ID NO: 61869 - protein, 7 aa, synthetic construct
HRTGAQG

SEQ ID NO: 61870 - protein, 7 aa, synthetic construct
FKSSANA

SEQ ID NO: 61871 - protein, 7 aa, synthetic construct
QHHHTEE

SEQ ID NO: 61872 - protein, 7 aa, synthetic construct
QASRMDS

SEQ ID NO: 61873 - protein, 7 aa, synthetic construct
AMSQGNG

SEQ ID NO: 61874 - protein, 7 aa, synthetic construct
MKQQEHM

SEQ ID NO: 61875 - protein, 7 aa, synthetic construct
VVSRTSH

SEQ ID NO: 61876 - protein, 7 aa, synthetic construct
GNGKGGQ

SEQ ID NO: 61877 - protein, 7 aa, synthetic construct
HIKQHVQ

SEQ ID NO: 61878 - protein, 7 aa, synthetic construct
SRQPAQA

SEQ ID NO: 61879 - protein, 7 aa, synthetic construct
YSRTFTA

SEQ ID NO: 61880 - protein, 7 aa, synthetic construct
PLFGHQS

SEQ ID NO: 61881 - protein, 7 aa, synthetic construct
IRHEPMP

SEQ ID NO: 61882 - protein, 7 aa, synthetic construct
GHKGTIS

SEQ ID NO: 61883 - protein, 7 aa, synthetic construct
LSIAQKD

SEQ ID NO: 61884 - protein, 7 aa, synthetic construct
SSWDPSG

SEQ ID NO: 61885 - protein, 7 aa, synthetic construct
KVQASAW

SEQ ID NO: 61886 - protein, 7 aa, synthetic construct
KKLGDDP

SEQ ID NO: 61887 - protein, 7 aa, synthetic construct
YYEKSNR

SEQ ID NO: 61888 - protein, 7 aa, synthetic construct
ANKSSQV

SEQ ID NO: 61889 - protein, 7 aa, synthetic construct
QPPTTGP

SEQ ID NO: 61890 - protein, 7 aa, synthetic construct
IKSSIKE

SEQ ID NO: 61891 - protein, 7 aa, synthetic construct
YAQKFQQ

SEQ ID NO: 61892 - protein, 7 aa, synthetic construct
MRDQTMQ

SEQ ID NO: 61893 - protein, 7 aa, synthetic construct
KLSQSSP

SEQ ID NO: 61894 - protein, 7 aa, synthetic construct
QNSDRAS

SEQ ID NO: 61895 - protein, 7 aa, synthetic construct
PRQGQAA

SEQ ID NO: 61896 - protein, 7 aa, synthetic construct
MKDRLMQ

SEQ ID NO: 61897 - protein, 7 aa, synthetic construct
HHRNIEP

SEQ ID NO: 61898 - protein, 7 aa, synthetic construct
YDKERYS

SEQ ID NO: 61899 - protein, 7 aa, synthetic construct
MKDYQTN

SEQ ID NO: 61900 - protein, 7 aa, synthetic construct
NRGSLAG

SEQ ID NO: 61901 - protein, 7 aa, synthetic construct
GYHFKAE

SEQ ID NO: 61902 - protein, 7 aa, synthetic construct
GQNMGKA

SEQ ID NO: 61903 - protein, 7 aa, synthetic construct
KKNDGIG

SEQ ID NO: 61904 - protein, 7 aa, synthetic construct
PNAPGMR

SEQ ID NO: 61905 - protein, 7 aa, synthetic construct
YQALAGP

SEQ ID NO: 61906 - protein, 7 aa, synthetic construct
DGFHHHS

SEQ ID NO: 61907 - protein, 7 aa, synthetic construct
DKKSNTG

SEQ ID NO: 61908 - protein, 7 aa, synthetic construct
RTIPPDE

SEQ ID NO: 61909 - protein, 7 aa, synthetic construct
QSHLRNN

SEQ ID NO: 61910 - protein, 7 aa, synthetic construct
NARQSAP

SEQ ID NO: 61911 - protein, 7 aa, synthetic construct
GTGQKGG

SEQ ID NO: 61912 - protein, 7 aa, synthetic construct
LNLRHNE

SEQ ID NO: 61913 - protein, 7 aa, synthetic construct
YMNSTAE

SEQ ID NO: 61914 - protein, 7 aa, synthetic construct
QATYIPQ

SEQ ID NO: 61915 - protein, 7 aa, synthetic construct
LHANKTM

SEQ ID NO: 61916 - protein, 7 aa, synthetic construct
YTGTKQS

SEQ ID NO: 61917 - protein, 7 aa, synthetic construct
EYPASTA

SEQ ID NO: 61918 - protein, 7 aa, synthetic construct
PRPNSVP

SEQ ID NO: 61919 - protein, 7 aa, synthetic construct
KNMNNNA

SEQ ID NO: 61920 - protein, 7 aa, synthetic construct
EFIGKKS

SEQ ID NO: 61921 - protein, 7 aa, synthetic construct
IDPGYRG

SEQ ID NO: 61922 - protein, 7 aa, synthetic construct
RRHDQIA

SEQ ID NO: 61923 - protein, 7 aa, synthetic construct
GKMSKIE

SEQ ID NO: 61924 - protein, 7 aa, synthetic construct
MPNQNLA

SEQ ID NO: 61925 - protein, 7 aa, synthetic construct
HTAQDLR

SEQ ID NO: 61926 - protein, 7 aa, synthetic construct
AEMHSKI

SEQ ID NO: 61927 - protein, 7 aa, synthetic construct
RNHIGSV

SEQ ID NO: 61928 - protein, 7 aa, synthetic construct
SKTLNQP

SEQ ID NO: 61929 - protein, 7 aa, synthetic construct
KMTNQSA

SEQ ID NO: 61930 - protein, 7 aa, synthetic construct
KTGQASS

SEQ ID NO: 61931 - protein, 7 aa, synthetic construct
EGRNVRD

SEQ ID NO: 61932 - protein, 7 aa, synthetic construct
KQFHLHE

SEQ ID NO: 61933 - protein, 7 aa, synthetic construct
DISVKMM

SEQ ID NO: 61934 - protein, 7 aa, synthetic construct
ITNKKQE

SEQ ID NO: 61935 - protein, 7 aa, synthetic construct
LRKQELE

SEQ ID NO: 61936 - protein, 7 aa, synthetic construct
PVGLHRN

SEQ ID NO: 61937 - protein, 7 aa, synthetic construct
GMRDKLN

SEQ ID NO: 61938 - protein, 7 aa, synthetic construct
TRGGFSD

SEQ ID NO: 61939 - protein, 7 aa, synthetic construct
VNRGTAS

SEQ ID NO: 61940 - protein, 7 aa, synthetic construct
GNGKVQF

SEQ ID NO: 61941 - protein, 7 aa, synthetic construct
QNTGKNG

SEQ ID NO: 61942 - protein, 7 aa, synthetic construct
PTIHGER

SEQ ID NO: 61943 - protein, 7 aa, synthetic construct
MKHLTGE

SEQ ID NO: 61944 - protein, 7 aa, synthetic construct
PRDNSRV

SEQ ID NO: 61945 - protein, 7 aa, synthetic construct
VFQPAVQ

SEQ ID NO: 61946 - protein, 7 aa, synthetic construct
NNARPMV

SEQ ID NO: 61947 - protein, 7 aa, synthetic construct
TDRQTLR

SEQ ID NO: 61948 - protein, 7 aa, synthetic construct
PMRGNQP

SEQ ID NO: 61949 - protein, 7 aa, synthetic construct
KPNSKDP

SEQ ID NO: 61950 - protein, 7 aa, synthetic construct
QGFLIPD

SEQ ID NO: 61951 - protein, 7 aa, synthetic construct
LDHHMTK

SEQ ID NO: 61952 - protein, 7 aa, synthetic construct
TRQAGQS

SEQ ID NO: 61953 - protein, 7 aa, synthetic construct
HTNFKME

SEQ ID NO: 61954 - protein, 7 aa, synthetic construct
INKEMVM

SEQ ID NO: 61955 - protein, 7 aa, synthetic construct
WKTMKLD

SEQ ID NO: 61956 - protein, 7 aa, synthetic construct
PKIIMRE

SEQ ID NO: 61957 - protein, 7 aa, synthetic construct
KTKAISE

SEQ ID NO: 61958 - protein, 7 aa, synthetic construct
KGSNSPD

SEQ ID NO: 61959 - protein, 7 aa, synthetic construct
VQKSSMG

SEQ ID NO: 61960 - protein, 7 aa, synthetic construct
PRSVNAP

SEQ ID NO: 61961 - protein, 7 aa, synthetic construct
KDKLNTS

SEQ ID NO: 61962 - protein, 7 aa, synthetic construct
VSPVQPA

SEQ ID NO: 61963 - protein, 7 aa, synthetic construct
IVTKAVG

SEQ ID NO: 61964 - protein, 7 aa, synthetic construct
DQGKFRP

SEQ ID NO: 61965 - protein, 7 aa, synthetic construct
PDSVRAR

SEQ ID NO: 61966 - protein, 7 aa, synthetic construct
NLADIKG

SEQ ID NO: 61967 - protein, 7 aa, synthetic construct
GIQTPET

SEQ ID NO: 61968 - protein, 7 aa, synthetic construct
HSNSRDS

SEQ ID NO: 61969 - protein, 7 aa, synthetic construct
KDRDHNM

SEQ ID NO: 61970 - protein, 7 aa, synthetic construct
WVPNLNG

SEQ ID NO: 61971 - protein, 7 aa, synthetic construct
MRDHTPM

SEQ ID NO: 61972 - protein, 7 aa, synthetic construct
NQNQKFG

SEQ ID NO: 61973 - protein, 7 aa, synthetic construct
QTNGAGR

SEQ ID NO: 61974 - protein, 7 aa, synthetic construct
QRTAISD

SEQ ID NO: 61975 - protein, 7 aa, synthetic construct
LIVRNVP

SEQ ID NO: 61976 - protein, 7 aa, synthetic construct
QLNASVI

SEQ ID NO: 61977 - protein, 7 aa, synthetic construct
NSKTTGP

SEQ ID NO: 61978 - protein, 7 aa, synthetic construct
QRADRAP

SEQ ID NO: 61979 - protein, 7 aa, synthetic construct
TQVAQKA

SEQ ID NO: 61980 - protein, 7 aa, synthetic construct
KQDYPQN

SEQ ID NO: 61981 - protein, 7 aa, synthetic construct
KQYMVEA

SEQ ID NO: 61982 - protein, 7 aa, synthetic construct
TLHNQNL

SEQ ID NO: 61983 - protein, 7 aa, synthetic construct
TPNGTGK

SEQ ID NO: 61984 - protein, 7 aa, synthetic construct
DPGRIMH

SEQ ID NO: 61985 - protein, 7 aa, synthetic construct
PATGYSA

SEQ ID NO: 61986 - protein, 7 aa, synthetic construct
LGKFEGG

SEQ ID NO: 61987 - protein, 7 aa, synthetic construct
ERNGHST

SEQ ID NO: 61988 - protein, 7 aa, synthetic construct
QRAQTVT

SEQ ID NO: 61989 - protein, 7 aa, synthetic construct
ITSGAMG

SEQ ID NO: 61990 - protein, 7 aa, synthetic construct
WPNTNYA

SEQ ID NO: 61991 - protein, 7 aa, synthetic construct
EKALMGI

SEQ ID NO: 61992 - protein, 7 aa, synthetic construct
TRGGSVG

SEQ ID NO: 61993 - protein, 7 aa, synthetic construct
MQKSQAG

SEQ ID NO: 61994 - protein, 7 aa, synthetic construct
HMHLNAP

SEQ ID NO: 61995 - protein, 7 aa, synthetic construct
ERPGNFT

SEQ ID NO: 61996 - protein, 7 aa, synthetic construct
LDRNQNV

SEQ ID NO: 61997 - protein, 7 aa, synthetic construct
IANGPMH

SEQ ID NO: 61998 - protein, 7 aa, synthetic construct
DQKSHKY

SEQ ID NO: 61999 - protein, 7 aa, synthetic construct
FSKPNTA

SEQ ID NO: 62000 - protein, 7 aa, synthetic construct
NQWNDGG

SEQ ID NO: 62001 - protein, 7 aa, synthetic construct
YLSRNDK

SEQ ID NO: 62002 - protein, 7 aa, synthetic construct
KKSPENG

SEQ ID NO: 62003 - protein, 7 aa, synthetic construct
IREHATK

SEQ ID NO: 62004 - protein, 7 aa, synthetic construct
HKPTSHG

SEQ ID NO: 62005 - protein, 7 aa, synthetic construct
EVYNNKS

SEQ ID NO: 62006 - protein, 7 aa, synthetic construct
SWHAAEG

SEQ ID NO: 62007 - protein, 7 aa, synthetic construct
NRDHVGG

SEQ ID NO: 62008 - protein, 7 aa, synthetic construct
RQSNMPM

SEQ ID NO: 62009 - protein, 7 aa, synthetic construct
GTKNAVG

SEQ ID NO: 62010 - protein, 7 aa, synthetic construct
KHAMRDI

SEQ ID NO: 62011 - protein, 7 aa, synthetic construct
NRQPADL

SEQ ID NO: 62012 - protein, 7 aa, synthetic construct
KPYVPEI

SEQ ID NO: 62013 - protein, 7 aa, synthetic construct
FHSNIEH

SEQ ID NO: 62014 - protein, 7 aa, synthetic construct
DFMRTKD

SEQ ID NO: 62015 - protein, 7 aa, synthetic construct
NPGNKMG

SEQ ID NO: 62016 - protein, 7 aa, synthetic construct
GHPMKTQ

SEQ ID NO: 62017 - protein, 7 aa, synthetic construct
NTSNGAR

SEQ ID NO: 62018 - protein, 7 aa, synthetic construct
YNQKVTG

SEQ ID NO: 62019 - protein, 7 aa, synthetic construct
GVGTHHM

SEQ ID NO: 62020 - protein, 7 aa, synthetic construct
KTVGNGA

SEQ ID NO: 62021 - protein, 7 aa, synthetic construct
QRTNQDL

SEQ ID NO: 62022 - protein, 7 aa, synthetic construct
RIQAPGD

SEQ ID NO: 62023 - protein, 7 aa, synthetic construct
NTQKPLA

SEQ ID NO: 62024 - protein, 7 aa, synthetic construct
QAHGLTA

SEQ ID NO: 62025 - protein, 7 aa, synthetic construct
MPYKEMH

SEQ ID NO: 62026 - protein, 7 aa, synthetic construct
CNPRMCD

SEQ ID NO: 62027 - protein, 7 aa, synthetic construct
IGHYMDS

SEQ ID NO: 62028 - protein, 7 aa, synthetic construct
EFQHASG

SEQ ID NO: 62029 - protein, 7 aa, synthetic construct
KSHMNMN

SEQ ID NO: 62030 - protein, 7 aa, synthetic construct
ASRSTQE

SEQ ID NO: 62031 - protein, 7 aa, synthetic construct
SGSKVNI

SEQ ID NO: 62032 - protein, 7 aa, synthetic construct
EYAQFKG

SEQ ID NO: 62033 - protein, 7 aa, synthetic construct
WASFTKS

SEQ ID NO: 62034 - protein, 7 aa, synthetic construct
NNAIQRV

SEQ ID NO: 62035 - protein, 7 aa, synthetic construct
KSTMGAA

SEQ ID NO: 62036 - protein, 7 aa, synthetic construct
VIASMSN

SEQ ID NO: 62037 - protein, 7 aa, synthetic construct
NKIAIKT

SEQ ID NO: 62038 - protein, 7 aa, synthetic construct
EKNHNQW

SEQ ID NO: 62039 - protein, 7 aa, synthetic construct
VRISHDS

SEQ ID NO: 62040 - protein, 7 aa, synthetic construct
LAQTMSM

SEQ ID NO: 62041 - protein, 7 aa, synthetic construct
YDTSHQL

SEQ ID NO: 62042 - protein, 7 aa, synthetic construct
HARLGNL

SEQ ID NO: 62043 - protein, 7 aa, synthetic construct
QGSKISA

SEQ ID NO: 62044 - protein, 7 aa, synthetic construct
DNHSKKP

SEQ ID NO: 62045 - protein, 7 aa, synthetic construct
YRAEALS

SEQ ID NO: 62046 - protein, 7 aa, synthetic construct
RINIDTG

SEQ ID NO: 62047 - protein, 7 aa, synthetic construct
RQSGQTA

SEQ ID NO: 62048 - protein, 7 aa, synthetic construct
GTFHAPS

SEQ ID NO: 62049 - protein, 7 aa, synthetic construct
GKNQSFG

SEQ ID NO: 62050 - protein, 7 aa, synthetic construct
RSPGSAY

SEQ ID NO: 62051 - protein, 7 aa, synthetic construct
VNDRIQG

SEQ ID NO: 62052 - protein, 7 aa, synthetic construct
RASSTAP

SEQ ID NO: 62053 - protein, 7 aa, synthetic construct
RVQQQTA

SEQ ID NO: 62054 - protein, 7 aa, synthetic construct
AKHAMAG

SEQ ID NO: 62055 - protein, 7 aa, synthetic construct
QAMQPKD

SEQ ID NO: 62056 - protein, 7 aa, synthetic construct
FKFSDGP

SEQ ID NO: 62057 - protein, 7 aa, synthetic construct
DMRNLPQ

SEQ ID NO: 62058 - protein, 7 aa, synthetic construct
VTPLPHP

SEQ ID NO: 62059 - protein, 7 aa, synthetic construct
LRQGHAE

SEQ ID NO: 62060 - protein, 7 aa, synthetic construct
GGYKPAD

SEQ ID NO: 62061 - protein, 7 aa, synthetic construct
DRYVLSE

SEQ ID NO: 62062 - protein, 7 aa, synthetic construct
TFAGKVT

SEQ ID NO: 62063 - protein, 7 aa, synthetic construct
RNGTQSF

SEQ ID NO: 62064 - protein, 7 aa, synthetic construct
YEPVTPS

SEQ ID NO: 62065 - protein, 7 aa, synthetic construct
KNQNATG

SEQ ID NO: 62066 - protein, 7 aa, synthetic construct
DRYKQGY

SEQ ID NO: 62067 - protein, 7 aa, synthetic construct
AFHLHAP

SEQ ID NO: 62068 - protein, 7 aa, synthetic construct
QTVQFAG

SEQ ID NO: 62069 - protein, 7 aa, synthetic construct
NGTGQSS

SEQ ID NO: 62070 - protein, 7 aa, synthetic construct
GGPGSQV

SEQ ID NO: 62071 - protein, 7 aa, synthetic construct
MHSQIQI

SEQ ID NO: 62072 - protein, 7 aa, synthetic construct
YGQEWRG

SEQ ID NO: 62073 - protein, 7 aa, synthetic construct
SAMKNTA

SEQ ID NO: 62074 - protein, 7 aa, synthetic construct
MQPHSQT

SEQ ID NO: 62075 - protein, 7 aa, synthetic construct
KPEHHQR

SEQ ID NO: 62076 - protein, 7 aa, synthetic construct
GTSIKQW

SEQ ID NO: 62077 - protein, 7 aa, synthetic construct
MATWGTG

SEQ ID NO: 62078 - protein, 7 aa, synthetic construct
SQRMSLN

SEQ ID NO: 62079 - protein, 7 aa, synthetic construct
QINGASG

SEQ ID NO: 62080 - protein, 7 aa, synthetic construct
AKMSNGL

SEQ ID NO: 62081 - protein, 7 aa, synthetic construct
QPTKAFS

SEQ ID NO: 62082 - protein, 7 aa, synthetic construct
QMPSYRE

SEQ ID NO: 62083 - protein, 7 aa, synthetic construct
LFGQDRQ

SEQ ID NO: 62084 - protein, 7 aa, synthetic construct
IIQVNKS

SEQ ID NO: 62085 - protein, 7 aa, synthetic construct
IKNLHVE

SEQ ID NO: 62086 - protein, 7 aa, synthetic construct
AHPRAES

SEQ ID NO: 62087 - protein, 7 aa, synthetic construct
KNTNVNP

SEQ ID NO: 62088 - protein, 7 aa, synthetic construct
KGTYVLQ

SEQ ID NO: 62089 - protein, 7 aa, synthetic construct
YSQNSKS

SEQ ID NO: 62090 - protein, 7 aa, synthetic construct
TSKANTV

SEQ ID NO: 62091 - protein, 7 aa, synthetic construct
QYKNMAP

SEQ ID NO: 62092 - protein, 7 aa, synthetic construct
NKQDGHL

SEQ ID NO: 62093 - protein, 7 aa, synthetic construct
STQNLHY

SEQ ID NO: 62094 - protein, 7 aa, synthetic construct
QRQGMGA

SEQ ID NO: 62095 - protein, 7 aa, synthetic construct
GNHSLMG

SEQ ID NO: 62096 - protein, 7 aa, synthetic construct
TGKTSQS

SEQ ID NO: 62097 - protein, 7 aa, synthetic construct
IRQPVVV

SEQ ID NO: 62098 - protein, 7 aa, synthetic construct
KLKEFHE

SEQ ID NO: 62099 - protein, 7 aa, synthetic construct
GMKTTGA

SEQ ID NO: 62100 - protein, 7 aa, synthetic construct
RKDVSVG

SEQ ID NO: 62101 - protein, 7 aa, synthetic construct
VQSSKMV

SEQ ID NO: 62102 - protein, 7 aa, synthetic construct
RHPEQKV

SEQ ID NO: 62103 - protein, 7 aa, synthetic construct
HNFAGMN

SEQ ID NO: 62104 - protein, 7 aa, synthetic construct
GDSNLRK

SEQ ID NO: 62105 - protein, 7 aa, synthetic construct
ADAIRER

SEQ ID NO: 62106 - protein, 7 aa, synthetic construct
KGQPTVP

SEQ ID NO: 62107 - protein, 7 aa, synthetic construct
GKPSTMA

SEQ ID NO: 62108 - protein, 7 aa, synthetic construct
KKSAMME

SEQ ID NO: 62109 - protein, 7 aa, synthetic construct
DGGIARI

SEQ ID NO: 62110 - protein, 7 aa, synthetic construct
NGRGLPV

SEQ ID NO: 62111 - protein, 7 aa, synthetic construct
WGNPRVE

SEQ ID NO: 62112 - protein, 7 aa, synthetic construct
FKNGAVS

SEQ ID NO: 62113 - protein, 7 aa, synthetic construct
QTRSGAA

SEQ ID NO: 62114 - protein, 7 aa, synthetic construct
NKGGIVG

SEQ ID NO: 62115 - protein, 7 aa, synthetic construct
VVESRLA

SEQ ID NO: 62116 - protein, 7 aa, synthetic construct
PTRAATP

SEQ ID NO: 62117 - protein, 7 aa, synthetic construct
KTSGIQP

SEQ ID NO: 62118 - protein, 7 aa, synthetic construct
SNLQKFI

SEQ ID NO: 62119 - protein, 7 aa, synthetic construct
SERREGH

SEQ ID NO: 62120 - protein, 7 aa, synthetic construct
FKMGAQG

SEQ ID NO: 62121 - protein, 7 aa, synthetic construct
RDIKSAA

SEQ ID NO: 62122 - protein, 7 aa, synthetic construct
DSQGMQR

SEQ ID NO: 62123 - protein, 7 aa, synthetic construct
FGKSQTG

SEQ ID NO: 62124 - protein, 7 aa, synthetic construct
SANTNRP

SEQ ID NO: 62125 - protein, 7 aa, synthetic construct
QHMQGAA

SEQ ID NO: 62126 - protein, 7 aa, synthetic construct
NMGKTQA

SEQ ID NO: 62127 - protein, 7 aa, synthetic construct
KHMGDRA

SEQ ID NO: 62128 - protein, 7 aa, synthetic construct
KMPSIKD

SEQ ID NO: 62129 - protein, 7 aa, synthetic construct
FNTRQHE

SEQ ID NO: 62130 - protein, 7 aa, synthetic construct
GTFQMKE

SEQ ID NO: 62131 - protein, 7 aa, synthetic construct
GYQRSGE

SEQ ID NO: 62132 - protein, 7 aa, synthetic construct
HLKTLTQ

SEQ ID NO: 62133 - protein, 7 aa, synthetic construct
FQTNPNH

SEQ ID NO: 62134 - protein, 7 aa, synthetic construct
YAGEGGK

SEQ ID NO: 62135 - protein, 7 aa, synthetic construct
GREPMGP

SEQ ID NO: 62136 - protein, 7 aa, synthetic construct
RMSTNHI

SEQ ID NO: 62137 - protein, 7 aa, synthetic construct
VHKKIDL

SEQ ID NO: 62138 - protein, 7 aa, synthetic construct
WKPMQMA

SEQ ID NO: 62139 - protein, 7 aa, synthetic construct
VTASRFI

SEQ ID NO: 62140 - protein, 7 aa, synthetic construct
RNNATQA

SEQ ID NO: 62141 - protein, 7 aa, synthetic construct
KAPTNNA

SEQ ID NO: 62142 - protein, 7 aa, synthetic construct
DHRGNAT

SEQ ID NO: 62143 - protein, 7 aa, synthetic construct
IYATGTR

SEQ ID NO: 62144 - protein, 7 aa, synthetic construct
FNKPAAN

SEQ ID NO: 62145 - protein, 7 aa, synthetic construct
GAKVKNE

SEQ ID NO: 62146 - protein, 7 aa, synthetic construct
QTREGRH

SEQ ID NO: 62147 - protein, 7 aa, synthetic construct
LMSYKAA

SEQ ID NO: 62148 - protein, 7 aa, synthetic construct
DFTTNRG

SEQ ID NO: 62149 - protein, 7 aa, synthetic construct
KYEKYAA

SEQ ID NO: 62150 - protein, 7 aa, synthetic construct
PRGQTSP

SEQ ID NO: 62151 - protein, 7 aa, synthetic construct
KTSQNAG

SEQ ID NO: 62152 - protein, 7 aa, synthetic construct
MFSAQQD

SEQ ID NO: 62153 - protein, 7 aa, synthetic construct
TRSDGVM

SEQ ID NO: 62154 - protein, 7 aa, synthetic construct
QPQVGKA

SEQ ID NO: 62155 - protein, 7 aa, synthetic construct
PMRDPTM

SEQ ID NO: 62156 - protein, 7 aa, synthetic construct
NYQRMND

SEQ ID NO: 62157 - protein, 7 aa, synthetic construct
KVHTVTD

SEQ ID NO: 62158 - protein, 7 aa, synthetic construct
RTLDRYP

SEQ ID NO: 62159 - protein, 7 aa, synthetic construct
PKPTNNP

SEQ ID NO: 62160 - protein, 7 aa, synthetic construct
QAFRETV

SEQ ID NO: 62161 - protein, 7 aa, synthetic construct
VYKGPNI

SEQ ID NO: 62162 - protein, 7 aa, synthetic construct
TVSRSNP

SEQ ID NO: 62163 - protein, 7 aa, synthetic construct
TSVAMDR

SEQ ID NO: 62164 - protein, 7 aa, synthetic construct
AALPLLG

SEQ ID NO: 62165 - protein, 7 aa, synthetic construct
HHTRPGS

SEQ ID NO: 62166 - protein, 7 aa, synthetic construct
ASRSIAA

SEQ ID NO: 62167 - protein, 7 aa, synthetic construct
ASQNGHG

SEQ ID NO: 62168 - protein, 7 aa, synthetic construct
VYSNSHR

SEQ ID NO: 62169 - protein, 7 aa, synthetic construct
SNAPNGS

SEQ ID NO: 62170 - protein, 7 aa, synthetic construct
QMPGQAS

SEQ ID NO: 62171 - protein, 7 aa, synthetic construct
WKHDKHM

SEQ ID NO: 62172 - protein, 7 aa, synthetic construct
EVWGKAP

SEQ ID NO: 62173 - protein, 7 aa, synthetic construct
TKEHTTP

SEQ ID NO: 62174 - protein, 7 aa, synthetic construct
SPRHTVD

SEQ ID NO: 62175 - protein, 7 aa, synthetic construct
RAAQTDS

SEQ ID NO: 62176 - protein, 7 aa, synthetic construct
HYMKGTE

SEQ ID NO: 62177 - protein, 7 aa, synthetic construct
TKPNPGS

SEQ ID NO: 62178 - protein, 7 aa, synthetic construct
ITMKQNN

SEQ ID NO: 62179 - protein, 7 aa, synthetic construct
SIKTIHI

SEQ ID NO: 62180 - protein, 7 aa, synthetic construct
KTNGQPA

SEQ ID NO: 62181 - protein, 7 aa, synthetic construct
TMKSGKE

SEQ ID NO: 62182 - protein, 7 aa, synthetic construct
PDEFRIK

SEQ ID NO: 62183 - protein, 7 aa, synthetic construct
STSTKQT

SEQ ID NO: 62184 - protein, 7 aa, synthetic construct
DLQYRKP

SEQ ID NO: 62185 - protein, 7 aa, synthetic construct
NEKHQIR

SEQ ID NO: 62186 - protein, 7 aa, synthetic construct
MNSDRHY

SEQ ID NO: 62187 - protein, 7 aa, synthetic construct
KTFPDGH

SEQ ID NO: 62188 - protein, 7 aa, synthetic construct
TESHLKQ

SEQ ID NO: 62189 - protein, 7 aa, synthetic construct
GKGMNEK

SEQ ID NO: 62190 - protein, 7 aa, synthetic construct
KTPTSQG

SEQ ID NO: 62191 - protein, 7 aa, synthetic construct
SYNKLTG

SEQ ID NO: 62192 - protein, 7 aa, synthetic construct
DMLKHNP

SEQ ID NO: 62193 - protein, 7 aa, synthetic construct
RNQNGSG

SEQ ID NO: 62194 - protein, 7 aa, synthetic construct
DGKYMAN

SEQ ID NO: 62195 - protein, 7 aa, synthetic construct
FVASTAD

SEQ ID NO: 62196 - protein, 7 aa, synthetic construct
PTKSQSA

SEQ ID NO: 62197 - protein, 7 aa, synthetic construct
GNAKNDV

SEQ ID NO: 62198 - protein, 7 aa, synthetic construct
MKANQGE

SEQ ID NO: 62199 - protein, 7 aa, synthetic construct
TNKMIVG

SEQ ID NO: 62200 - protein, 7 aa, synthetic construct
DKFEKLA

SEQ ID NO: 62201 - protein, 7 aa, synthetic construct
RENQLVG

SEQ ID NO: 62202 - protein, 7 aa, synthetic construct
PGPHGNN

SEQ ID NO: 62203 - protein, 7 aa, synthetic construct
RPMNGAA

SEQ ID NO: 62204 - protein, 7 aa, synthetic construct
PLKSQYG

SEQ ID NO: 62205 - protein, 7 aa, synthetic construct
AVNRGQY

SEQ ID NO: 62206 - protein, 7 aa, synthetic construct
GRHPFTG

SEQ ID NO: 62207 - protein, 7 aa, synthetic construct
DPNHGPP

SEQ ID NO: 62208 - protein, 7 aa, synthetic construct
QVKNPHS

SEQ ID NO: 62209 - protein, 7 aa, synthetic construct
NSQARMG

SEQ ID NO: 62210 - protein, 7 aa, synthetic construct
SKIHSND

SEQ ID NO: 62211 - protein, 7 aa, synthetic construct
MRGIGDN

SEQ ID NO: 62212 - protein, 7 aa, synthetic construct
LAHIKVQ

SEQ ID NO: 62213 - protein, 7 aa, synthetic construct
MVPGITQ

SEQ ID NO: 62214 - protein, 7 aa, synthetic construct
INMNVVR

SEQ ID NO: 62215 - protein, 7 aa, synthetic construct
YLHDPRG

SEQ ID NO: 62216 - protein, 7 aa, synthetic construct
TRPSNIG

SEQ ID NO: 62217 - protein, 7 aa, synthetic construct
VLGHDYP

SEQ ID NO: 62218 - protein, 7 aa, synthetic construct
QRSNNDR

SEQ ID NO: 62219 - protein, 7 aa, synthetic construct
YMRHVTS

SEQ ID NO: 62220 - protein, 7 aa, synthetic construct
RDVHMSR

SEQ ID NO: 62221 - protein, 7 aa, synthetic construct
TMKSANA

SEQ ID NO: 62222 - protein, 7 aa, synthetic construct
SMRDRTV

SEQ ID NO: 62223 - protein, 7 aa, synthetic construct
LGIAENS

SEQ ID NO: 62224 - protein, 7 aa, synthetic construct
HSTSLFA

SEQ ID NO: 62225 - protein, 7 aa, synthetic construct
PSKTQGS

SEQ ID NO: 62226 - protein, 7 aa, synthetic construct
HAGNQDK

SEQ ID NO: 62227 - protein, 7 aa, synthetic construct
KQLPARD

SEQ ID NO: 62228 - protein, 7 aa, synthetic construct
PGKTGMS

SEQ ID NO: 62229 - protein, 7 aa, synthetic construct
KTAKEHD

SEQ ID NO: 62230 - protein, 7 aa, synthetic construct
GLRRTED

SEQ ID NO: 62231 - protein, 7 aa, synthetic construct
YPQKQQG

SEQ ID NO: 62232 - protein, 7 aa, synthetic construct
RQIGDDG

SEQ ID NO: 62233 - protein, 7 aa, synthetic construct
WAIQKAG

SEQ ID NO: 62234 - protein, 7 aa, synthetic construct
KNPPHQA

SEQ ID NO: 62235 - protein, 7 aa, synthetic construct
YASMGQN

SEQ ID NO: 62236 - protein, 7 aa, synthetic construct
SPQGRAP

SEQ ID NO: 62237 - protein, 7 aa, synthetic construct
IASQALH

SEQ ID NO: 62238 - protein, 7 aa, synthetic construct
MRPDKLS

SEQ ID NO: 62239 - protein, 7 aa, synthetic construct
RAAPPNI

SEQ ID NO: 62240 - protein, 7 aa, synthetic construct
KNSISQP

SEQ ID NO: 62241 - protein, 7 aa, synthetic construct
KGGGSID

SEQ ID NO: 62242 - protein, 7 aa, synthetic construct
GKAWGQA

SEQ ID NO: 62243 - protein, 7 aa, synthetic construct
VKPMGRD

SEQ ID NO: 62244 - protein, 7 aa, synthetic construct
MRREHAD

SEQ ID NO: 62245 - protein, 7 aa, synthetic construct
DQIRHVD

SEQ ID NO: 62246 - protein, 7 aa, synthetic construct
NPIVQVN

SEQ ID NO: 62247 - protein, 7 aa, synthetic construct
HSSAGMV

SEQ ID NO: 62248 - protein, 7 aa, synthetic construct
DPPRFRP

SEQ ID NO: 62249 - protein, 7 aa, synthetic construct
RASATAG

SEQ ID NO: 62250 - protein, 7 aa, synthetic construct
AYIDNAR

SEQ ID NO: 62251 - protein, 7 aa, synthetic construct
FGSHMGM

SEQ ID NO: 62252 - protein, 7 aa, synthetic construct
NGTRATP

SEQ ID NO: 62253 - protein, 7 aa, synthetic construct
HDRQLRS

SEQ ID NO: 62254 - protein, 7 aa, synthetic construct
QQKSTDK

SEQ ID NO: 62255 - protein, 7 aa, synthetic construct
YSQRNQG

SEQ ID NO: 62256 - protein, 7 aa, synthetic construct
WVSMKES

SEQ ID NO: 62257 - protein, 7 aa, synthetic construct
KYKGYAD

SEQ ID NO: 62258 - protein, 7 aa, synthetic construct
FHVTQKD

SEQ ID NO: 62259 - protein, 7 aa, synthetic construct
VKYHNAT

SEQ ID NO: 62260 - protein, 7 aa, synthetic construct
TGMQHII

SEQ ID NO: 62261 - protein, 7 aa, synthetic construct
PQLRMTG

SEQ ID NO: 62262 - protein, 7 aa, synthetic construct
SQSNKNG

SEQ ID NO: 62263 - protein, 7 aa, synthetic construct
HMVNKSP

SEQ ID NO: 62264 - protein, 7 aa, synthetic construct
NFPNKDM

SEQ ID NO: 62265 - protein, 7 aa, synthetic construct
IQTAKDI

SEQ ID NO: 62266 - protein, 7 aa, synthetic construct
QLREKID

SEQ ID NO: 62267 - protein, 7 aa, synthetic construct
KPRTDFG

SEQ ID NO: 62268 - protein, 7 aa, synthetic construct
NSTGRVA

SEQ ID NO: 62269 - protein, 7 aa, synthetic construct
GPSERTG

SEQ ID NO: 62270 - protein, 7 aa, synthetic construct
RINADPM

SEQ ID NO: 62271 - protein, 7 aa, synthetic construct
ELHRHTP

SEQ ID NO: 62272 - protein, 7 aa, synthetic construct
MQQRTGG

SEQ ID NO: 62273 - protein, 7 aa, synthetic construct
NHHPRPS

SEQ ID NO: 62274 - protein, 7 aa, synthetic construct
VQVKQST

SEQ ID NO: 62275 - protein, 7 aa, synthetic construct
KTVQNQV

SEQ ID NO: 62276 - protein, 7 aa, synthetic construct
VKPSSKD

SEQ ID NO: 62277 - protein, 7 aa, synthetic construct
SVMNLVA

SEQ ID NO: 62278 - protein, 7 aa, synthetic construct
LLLGTQN

SEQ ID NO: 62279 - protein, 7 aa, synthetic construct
EHGVGTN

SEQ ID NO: 62280 - protein, 7 aa, synthetic construct
GFGEGKK

SEQ ID NO: 62281 - protein, 7 aa, synthetic construct
PAKGNQA

SEQ ID NO: 62282 - protein, 7 aa, synthetic construct
TTDNRHN

SEQ ID NO: 62283 - protein, 7 aa, synthetic construct
TSRNLAS

SEQ ID NO: 62284 - protein, 7 aa, synthetic construct
SQYTKFQ

SEQ ID NO: 62285 - protein, 7 aa, synthetic construct
GKASTMA

SEQ ID NO: 62286 - protein, 7 aa, synthetic construct
TVQHELR

SEQ ID NO: 62287 - protein, 7 aa, synthetic construct
NKVPNTP

SEQ ID NO: 62288 - protein, 7 aa, synthetic construct
RDFQNIP

SEQ ID NO: 62289 - protein, 7 aa, synthetic construct
KQQPTMA

SEQ ID NO: 62290 - protein, 7 aa, synthetic construct
QASTPGD

SEQ ID NO: 62291 - protein, 7 aa, synthetic construct
GYKDSLQ

SEQ ID NO: 62292 - protein, 7 aa, synthetic construct
HAPAYSD

SEQ ID NO: 62293 - protein, 7 aa, synthetic construct
QPYGKPD

SEQ ID NO: 62294 - protein, 7 aa, synthetic construct
QKTIQLA

SEQ ID NO: 62295 - protein, 7 aa, synthetic construct
WGGSSMA

SEQ ID NO: 62296 - protein, 7 aa, synthetic construct
MAVRTPA

SEQ ID NO: 62297 - protein, 7 aa, synthetic construct
TIDRNHN

SEQ ID NO: 62298 - protein, 7 aa, synthetic construct
PSGKSQP

SEQ ID NO: 62299 - protein, 7 aa, synthetic construct
NNVIKSP

SEQ ID NO: 62300 - protein, 7 aa, synthetic construct
ISGRQAQ

SEQ ID NO: 62301 - protein, 7 aa, synthetic construct
SIKQNGA

SEQ ID NO: 62302 - protein, 7 aa, synthetic construct
NYKASTL

SEQ ID NO: 62303 - protein, 7 aa, synthetic construct
GSRTSQG

SEQ ID NO: 62304 - protein, 7 aa, synthetic construct
YHLKPSS

SEQ ID NO: 62305 - protein, 7 aa, synthetic construct
SDKTSSR

SEQ ID NO: 62306 - protein, 7 aa, synthetic construct
FTRLAAQ

SEQ ID NO: 62307 - protein, 7 aa, synthetic construct
KLTLADA

SEQ ID NO: 62308 - protein, 7 aa, synthetic construct
KWATKDN

SEQ ID NO: 62309 - protein, 7 aa, synthetic construct
KSPLYGV

SEQ ID NO: 62310 - protein, 7 aa, synthetic construct
VLGGRPT

SEQ ID NO: 62311 - protein, 7 aa, synthetic construct
SPTHMKV

SEQ ID NO: 62312 - protein, 7 aa, synthetic construct
EGKDKHA

SEQ ID NO: 62313 - protein, 7 aa, synthetic construct
NATKEKW

SEQ ID NO: 62314 - protein, 7 aa, synthetic construct
SAGSVNK

SEQ ID NO: 62315 - protein, 7 aa, synthetic construct
QKSFEGA

SEQ ID NO: 62316 - protein, 7 aa, synthetic construct
TPGNKAD

SEQ ID NO: 62317 - protein, 7 aa, synthetic construct
SMSKMVA

SEQ ID NO: 62318 - protein, 7 aa, synthetic construct
FKGAGPQ

SEQ ID NO: 62319 - protein, 7 aa, synthetic construct
TKGPANS

SEQ ID NO: 62320 - protein, 7 aa, synthetic construct
RFSNAVD

SEQ ID NO: 62321 - protein, 7 aa, synthetic construct
YKNETGA

SEQ ID NO: 62322 - protein, 7 aa, synthetic construct
SKVSSMG

SEQ ID NO: 62323 - protein, 7 aa, synthetic construct
VQPTGLG

SEQ ID NO: 62324 - protein, 7 aa, synthetic construct
HYRDNLV

SEQ ID NO: 62325 - protein, 7 aa, synthetic construct
RQSAANG

SEQ ID NO: 62326 - protein, 7 aa, synthetic construct
YESWKMA

SEQ ID NO: 62327 - protein, 7 aa, synthetic construct
SKEFKMM

SEQ ID NO: 62328 - protein, 7 aa, synthetic construct
YANRTGD

SEQ ID NO: 62329 - protein, 7 aa, synthetic construct
GTNNRTP

SEQ ID NO: 62330 - protein, 7 aa, synthetic construct
TARHNNA

SEQ ID NO: 62331 - protein, 7 aa, synthetic construct
VGYGGKT

SEQ ID NO: 62332 - protein, 7 aa, synthetic construct
RPEQMSS

SEQ ID NO: 62333 - protein, 7 aa, synthetic construct
GKMNVVE

SEQ ID NO: 62334 - protein, 7 aa, synthetic construct
PVQQRNF

SEQ ID NO: 62335 - protein, 7 aa, synthetic construct
FRHGSTE

SEQ ID NO: 62336 - protein, 7 aa, synthetic construct
ALNTPNP

SEQ ID NO: 62337 - protein, 7 aa, synthetic construct
MVGHLDV

SEQ ID NO: 62338 - protein, 7 aa, synthetic construct
MKPPTAA

SEQ ID NO: 62339 - protein, 7 aa, synthetic construct
VKGNNQP

SEQ ID NO: 62340 - protein, 7 aa, synthetic construct
QGEKAMY

SEQ ID NO: 62341 - protein, 7 aa, synthetic construct
HLNPAVG

SEQ ID NO: 62342 - protein, 7 aa, synthetic construct
MKNKEQA

SEQ ID NO: 62343 - protein, 7 aa, synthetic construct
GKNITSA

SEQ ID NO: 62344 - protein, 7 aa, synthetic construct
RPKDMPS

SEQ ID NO: 62345 - protein, 7 aa, synthetic construct
GPPIKAP

SEQ ID NO: 62346 - protein, 7 aa, synthetic construct
TPGVNFA

SEQ ID NO: 62347 - protein, 7 aa, synthetic construct
QGRLKEP

SEQ ID NO: 62348 - protein, 7 aa, synthetic construct
LQQQPVT

SEQ ID NO: 62349 - protein, 7 aa, synthetic construct
QRQKEEM

SEQ ID NO: 62350 - protein, 7 aa, synthetic construct
SKNVFHG

SEQ ID NO: 62351 - protein, 7 aa, synthetic construct
HGQKYTE

SEQ ID NO: 62352 - protein, 7 aa, synthetic construct
LGMSKIM

SEQ ID NO: 62353 - protein, 7 aa, synthetic construct
KLYGERN

SEQ ID NO: 62354 - protein, 7 aa, synthetic construct
EMNRSPS

SEQ ID NO: 62355 - protein, 7 aa, synthetic construct
IIHDPQH

SEQ ID NO: 62356 - protein, 7 aa, synthetic construct
MASHKII

SEQ ID NO: 62357 - protein, 7 aa, synthetic construct
DMKSKMH

SEQ ID NO: 62358 - protein, 7 aa, synthetic construct
NGHQNHM

SEQ ID NO: 62359 - protein, 7 aa, synthetic construct
IVGSGNL

SEQ ID NO: 62360 - protein, 7 aa, synthetic construct
KTTRMET

SEQ ID NO: 62361 - protein, 7 aa, synthetic construct
LTNMGLH

SEQ ID NO: 62362 - protein, 7 aa, synthetic construct
FSPKSMP

SEQ ID NO: 62363 - protein, 7 aa, synthetic construct
SVNGRSV

SEQ ID NO: 62364 - protein, 7 aa, synthetic construct
EKYKEAG

SEQ ID NO: 62365 - protein, 7 aa, synthetic construct
THENYKK

SEQ ID NO: 62366 - protein, 7 aa, synthetic construct
NQKVGQY

SEQ ID NO: 62367 - protein, 7 aa, synthetic construct
KAQVPDP

SEQ ID NO: 62368 - protein, 7 aa, synthetic construct
MNSRPIM

SEQ ID NO: 62369 - protein, 7 aa, synthetic construct
FKREHPM

SEQ ID NO: 62370 - protein, 7 aa, synthetic construct
ETGVSRH

SEQ ID NO: 62371 - protein, 7 aa, synthetic construct
GSKTVTP

SEQ ID NO: 62372 - protein, 7 aa, synthetic construct
DPVRRNT

SEQ ID NO: 62373 - protein, 7 aa, synthetic construct
HISMMNG

SEQ ID NO: 62374 - protein, 7 aa, synthetic construct
DRVYKSD

SEQ ID NO: 62375 - protein, 7 aa, synthetic construct
SKTSASN

SEQ ID NO: 62376 - protein, 7 aa, synthetic construct
KPQSPSI

SEQ ID NO: 62377 - protein, 7 aa, synthetic construct
LVRQREN

SEQ ID NO: 62378 - protein, 7 aa, synthetic construct
QDGYTYS

SEQ ID NO: 62379 - protein, 7 aa, synthetic construct
VKTQTSA

SEQ ID NO: 62380 - protein, 7 aa, synthetic construct
VQKKLTE

SEQ ID NO: 62381 - protein, 7 aa, synthetic construct
LRTLSVN

SEQ ID NO: 62382 - protein, 7 aa, synthetic construct
KPNVGTG

SEQ ID NO: 62383 - protein, 7 aa, synthetic construct
LLKTHMA

SEQ ID NO: 62384 - protein, 7 aa, synthetic construct
TLTIPKD

SEQ ID NO: 62385 - protein, 7 aa, synthetic construct
KQMPSQA

SEQ ID NO: 62386 - protein, 7 aa, synthetic construct
KTGASNG

SEQ ID NO: 62387 - protein, 7 aa, synthetic construct
QRQTGGM

SEQ ID NO: 62388 - protein, 7 aa, synthetic construct
RGHLPFE

SEQ ID NO: 62389 - protein, 7 aa, synthetic construct
RAQTDMQ

SEQ ID NO: 62390 - protein, 7 aa, synthetic construct
LVTTVSS

SEQ ID NO: 62391 - protein, 7 aa, synthetic construct
GYTSKEG

SEQ ID NO: 62392 - protein, 7 aa, synthetic construct
FTGNTYI

SEQ ID NO: 62393 - protein, 7 aa, synthetic construct
KNMANGA

SEQ ID NO: 62394 - protein, 7 aa, synthetic construct
LGRPVHE

SEQ ID NO: 62395 - protein, 7 aa, synthetic construct
KPFEIHE

SEQ ID NO: 62396 - protein, 7 aa, synthetic construct
INKDQRM

SEQ ID NO: 62397 - protein, 7 aa, synthetic construct
AHQQVHA

SEQ ID NO: 62398 - protein, 7 aa, synthetic construct
NIGNREV

SEQ ID NO: 62399 - protein, 7 aa, synthetic construct
KNNTGRD

SEQ ID NO: 62400 - protein, 7 aa, synthetic construct
MSGMRPV

SEQ ID NO: 62401 - protein, 7 aa, synthetic construct
RLTEKSA

SEQ ID NO: 62402 - protein, 7 aa, synthetic construct
DTSKVGK

SEQ ID NO: 62403 - protein, 7 aa, synthetic construct
LAPNHVH

SEQ ID NO: 62404 - protein, 7 aa, synthetic construct
IRSEMHN

SEQ ID NO: 62405 - protein, 7 aa, synthetic construct
EKSRSLP

SEQ ID NO: 62406 - protein, 7 aa, synthetic construct
KNPTSPA

SEQ ID NO: 62407 - protein, 7 aa, synthetic construct
INSHQGM

SEQ ID NO: 62408 - protein, 7 aa, synthetic construct
RDGGAVP

SEQ ID NO: 62409 - protein, 7 aa, synthetic construct
SPKQQSA

SEQ ID NO: 62410 - protein, 7 aa, synthetic construct
ARSTTTH

SEQ ID NO: 62411 - protein, 7 aa, synthetic construct
KHHGING

SEQ ID NO: 62412 - protein, 7 aa, synthetic construct
MVHSADN

SEQ ID NO: 62413 - protein, 7 aa, synthetic construct
KFTGRNE

SEQ ID NO: 62414 - protein, 7 aa, synthetic construct
GRDKTAA

SEQ ID NO: 62415 - protein, 7 aa, synthetic construct
TLATNVV

SEQ ID NO: 62416 - protein, 7 aa, synthetic construct
GNQEWRA

SEQ ID NO: 62417 - protein, 7 aa, synthetic construct
QIKQKEG

SEQ ID NO: 62418 - protein, 7 aa, synthetic construct
WMGAQKD

SEQ ID NO: 62419 - protein, 7 aa, synthetic construct
ETLGKAP

SEQ ID NO: 62420 - protein, 7 aa, synthetic construct
SFNLKAN

SEQ ID NO: 62421 - protein, 7 aa, synthetic construct
NIFSQRD

SEQ ID NO: 62422 - protein, 7 aa, synthetic construct
RQSGNVA

SEQ ID NO: 62423 - protein, 7 aa, synthetic construct
GPAGIRD

SEQ ID NO: 62424 - protein, 7 aa, synthetic construct
TRSNTQM

SEQ ID NO: 62425 - protein, 7 aa, synthetic construct
SKNGQGF

SEQ ID NO: 62426 - protein, 7 aa, synthetic construct
SLAKVTY

SEQ ID NO: 62427 - protein, 7 aa, synthetic construct
NPQGFAP

SEQ ID NO: 62428 - protein, 7 aa, synthetic construct
MKGEHGN

SEQ ID NO: 62429 - protein, 7 aa, synthetic construct
FTKEGSA

SEQ ID NO: 62430 - protein, 7 aa, synthetic construct
KYKPDGY

SEQ ID NO: 62431 - protein, 7 aa, synthetic construct
NQQVTQY

SEQ ID NO: 62432 - protein, 7 aa, synthetic construct
AIPQAPP

SEQ ID NO: 62433 - protein, 7 aa, synthetic construct
KWKDAGS

SEQ ID NO: 62434 - protein, 7 aa, synthetic construct
TMPSLIP

SEQ ID NO: 62435 - protein, 7 aa, synthetic construct
PRGSGVP

SEQ ID NO: 62436 - protein, 7 aa, synthetic construct
SGAAPHS

SEQ ID NO: 62437 - protein, 7 aa, synthetic construct
AGQSHTW

SEQ ID NO: 62438 - protein, 7 aa, synthetic construct
LKPEYSE

SEQ ID NO: 62439 - protein, 7 aa, synthetic construct
PVRSTIP

SEQ ID NO: 62440 - protein, 7 aa, synthetic construct
GINNQRY

SEQ ID NO: 62441 - protein, 7 aa, synthetic construct
SPPKDNV

SEQ ID NO: 62442 - protein, 7 aa, synthetic construct
DLMASKS

SEQ ID NO: 62443 - protein, 7 aa, synthetic construct
DAKIAVG

SEQ ID NO: 62444 - protein, 7 aa, synthetic construct
QQNGALK

SEQ ID NO: 62445 - protein, 7 aa, synthetic construct
HGTRLDM

SEQ ID NO: 62446 - protein, 7 aa, synthetic construct
YDIKMVQ

SEQ ID NO: 62447 - protein, 7 aa, synthetic construct
NGKVQYM

SEQ ID NO: 62448 - protein, 7 aa, synthetic construct
FPGISSS

SEQ ID NO: 62449 - protein, 7 aa, synthetic construct
FHKSQNE

SEQ ID NO: 62450 - protein, 7 aa, synthetic construct
NKQSKTD

SEQ ID NO: 62451 - protein, 7 aa, synthetic construct
IAISKSP

SEQ ID NO: 62452 - protein, 7 aa, synthetic construct
AAGGLIN

SEQ ID NO: 62453 - protein, 7 aa, synthetic construct
GQQNKQA

SEQ ID NO: 62454 - protein, 7 aa, synthetic construct
PERSQGH

SEQ ID NO: 62455 - protein, 7 aa, synthetic construct
FTTHTPG

SEQ ID NO: 62456 - protein, 7 aa, synthetic construct
YRHSGDD

SEQ ID NO: 62457 - protein, 7 aa, synthetic construct
QVGHQQM

SEQ ID NO: 62458 - protein, 7 aa, synthetic construct
TKNPVNA

SEQ ID NO: 62459 - protein, 7 aa, synthetic construct
QNWQKQD

SEQ ID NO: 62460 - protein, 7 aa, synthetic construct
TVRPEYP

SEQ ID NO: 62461 - protein, 7 aa, synthetic construct
HKHGGGL

SEQ ID NO: 62462 - protein, 7 aa, synthetic construct
KDRSGVA

SEQ ID NO: 62463 - protein, 7 aa, synthetic construct
MGTRREL

SEQ ID NO: 62464 - protein, 7 aa, synthetic construct
GNPTTKT

SEQ ID NO: 62465 - protein, 7 aa, synthetic construct
QQKAGMT

SEQ ID NO: 62466 - protein, 7 aa, synthetic construct
VIPFTKQ

SEQ ID NO: 62467 - protein, 7 aa, synthetic construct
SAPRFIA

SEQ ID NO: 62468 - protein, 7 aa, synthetic construct
PSKGTEN

SEQ ID NO: 62469 - protein, 7 aa, synthetic construct
RNNGMAA

SEQ ID NO: 62470 - protein, 7 aa, synthetic construct
RFSRAED

SEQ ID NO: 62471 - protein, 7 aa, synthetic construct
AYQANST

SEQ ID NO: 62472 - protein, 7 aa, synthetic construct
YNMITHA

SEQ ID NO: 62473 - protein, 7 aa, synthetic construct
MAPGPKH

SEQ ID NO: 62474 - protein, 7 aa, synthetic construct
TFDSRTT

SEQ ID NO: 62475 - protein, 7 aa, synthetic construct
KNNVGAG

SEQ ID NO: 62476 - protein, 7 aa, synthetic construct
GPVAVRE

SEQ ID NO: 62477 - protein, 7 aa, synthetic construct
GQGSPSP

SEQ ID NO: 62478 - protein, 7 aa, synthetic construct
ESHQRSS

SEQ ID NO: 62479 - protein, 7 aa, synthetic construct
WPKAGSE

SEQ ID NO: 62480 - protein, 7 aa, synthetic construct
QKNTSMS

SEQ ID NO: 62481 - protein, 7 aa, synthetic construct
GGVKNGQ

SEQ ID NO: 62482 - protein, 7 aa, synthetic construct
VKSHTHV

SEQ ID NO: 62483 - protein, 7 aa, synthetic construct
NNHPQAM

SEQ ID NO: 62484 - protein, 7 aa, synthetic construct
LRQPDTS

SEQ ID NO: 62485 - protein, 7 aa, synthetic construct
QHHMIQP

SEQ ID NO: 62486 - protein, 7 aa, synthetic construct
GVKKMDG

SEQ ID NO: 62487 - protein, 7 aa, synthetic construct
NRGQGTA

SEQ ID NO: 62488 - protein, 7 aa, synthetic construct
FKVSMNQ

SEQ ID NO: 62489 - protein, 7 aa, synthetic construct
YTDYLKN

SEQ ID NO: 62490 - protein, 7 aa, synthetic construct
DQKIGQA

SEQ ID NO: 62491 - protein, 7 aa, synthetic construct
EKGIRSG

SEQ ID NO: 62492 - protein, 7 aa, synthetic construct
QDQGPRW

SEQ ID NO: 62493 - protein, 7 aa, synthetic construct
MHPMYPQ

SEQ ID NO: 62494 - protein, 7 aa, synthetic construct
NYAQKNG

SEQ ID NO: 62495 - protein, 7 aa, synthetic construct
FNAQRQG

SEQ ID NO: 62496 - protein, 7 aa, synthetic construct
NPGGQAG

SEQ ID NO: 62497 - protein, 7 aa, synthetic construct
GRTQSQG

SEQ ID NO: 62498 - protein, 7 aa, synthetic construct
GTPHWRE

SEQ ID NO: 62499 - protein, 7 aa, synthetic construct
REQMNNM

SEQ ID NO: 62500 - protein, 7 aa, synthetic construct
AGGPRIE

SEQ ID NO: 62501 - protein, 7 aa, synthetic construct
TGLTNQA

SEQ ID NO: 62502 - protein, 7 aa, synthetic construct
VRNSVMG

SEQ ID NO: 62503 - protein, 7 aa, synthetic construct
YIHGAKD

SEQ ID NO: 62504 - protein, 7 aa, synthetic construct
QRAVTEP

SEQ ID NO: 62505 - protein, 7 aa, synthetic construct
ADNLNKA

SEQ ID NO: 62506 - protein, 7 aa, synthetic construct
NGGTGDR

SEQ ID NO: 62507 - protein, 7 aa, synthetic construct
KTPIGLT

SEQ ID NO: 62508 - protein, 7 aa, synthetic construct
TKNGSAA

SEQ ID NO: 62509 - protein, 7 aa, synthetic construct
VSLGAQG

SEQ ID NO: 62510 - protein, 7 aa, synthetic construct
QNRQASA

SEQ ID NO: 62511 - protein, 7 aa, synthetic construct
ERVYEKD

SEQ ID NO: 62512 - protein, 7 aa, synthetic construct
QMQKGPM

SEQ ID NO: 62513 - protein, 7 aa, synthetic construct
AFNGVKH

SEQ ID NO: 62514 - protein, 7 aa, synthetic construct
VQRPNKE

SEQ ID NO: 62515 - protein, 7 aa, synthetic construct
PKSGSQP

SEQ ID NO: 62516 - protein, 7 aa, synthetic construct
RQPATFG

SEQ ID NO: 62517 - protein, 7 aa, synthetic construct
LFGKQYG

SEQ ID NO: 62518 - protein, 7 aa, synthetic construct
YGVTPAG

SEQ ID NO: 62519 - protein, 7 aa, synthetic construct
EFVGPRN

SEQ ID NO: 62520 - protein, 7 aa, synthetic construct
VFPKMSQ

SEQ ID NO: 62521 - protein, 7 aa, synthetic construct
MSAGAEK

SEQ ID NO: 62522 - protein, 7 aa, synthetic construct
TTSIHRG

SEQ ID NO: 62523 - protein, 7 aa, synthetic construct
VMGQWSG

SEQ ID NO: 62524 - protein, 7 aa, synthetic construct
HVTAGNI

SEQ ID NO: 62525 - protein, 7 aa, synthetic construct
IQAKSAV

SEQ ID NO: 62526 - protein, 7 aa, synthetic construct
NKTPANP

SEQ ID NO: 62527 - protein, 7 aa, synthetic construct
LLDKRQW

SEQ ID NO: 62528 - protein, 7 aa, synthetic construct
GMRVAGS

SEQ ID NO: 62529 - protein, 7 aa, synthetic construct
NSSGRFT

SEQ ID NO: 62530 - protein, 7 aa, synthetic construct
GNKTTSP

SEQ ID NO: 62531 - protein, 7 aa, synthetic construct
PKAYAPT

SEQ ID NO: 62532 - protein, 7 aa, synthetic construct
GPVRHPS

SEQ ID NO: 62533 - protein, 7 aa, synthetic construct
HEFAKVG

SEQ ID NO: 62534 - protein, 7 aa, synthetic construct
HGIDNRA

SEQ ID NO: 62535 - protein, 7 aa, synthetic construct
MAKGDYS

SEQ ID NO: 62536 - protein, 7 aa, synthetic construct
CQGRDCS

SEQ ID NO: 62537 - protein, 7 aa, synthetic construct
YQNQKFP

SEQ ID NO: 62538 - protein, 7 aa, synthetic construct
KNNNAKE

SEQ ID NO: 62539 - protein, 7 aa, synthetic construct
RTGPEKP

SEQ ID NO: 62540 - protein, 7 aa, synthetic construct
HRDQYVA

SEQ ID NO: 62541 - protein, 7 aa, synthetic construct
WGPRYAD

SEQ ID NO: 62542 - protein, 7 aa, synthetic construct
TFHKQDK

SEQ ID NO: 62543 - protein, 7 aa, synthetic construct
THPQQIR

SEQ ID NO: 62544 - protein, 7 aa, synthetic construct
TDRVAQV

SEQ ID NO: 62545 - protein, 7 aa, synthetic construct
NAAQYGV

SEQ ID NO: 62546 - protein, 7 aa, synthetic construct
NAKLQTM

SEQ ID NO: 62547 - protein, 7 aa, synthetic construct
PQSMSRG

SEQ ID NO: 62548 - protein, 7 aa, synthetic construct
ANQKVGI

SEQ ID NO: 62549 - protein, 7 aa, synthetic construct
TESRANS

SEQ ID NO: 62550 - protein, 7 aa, synthetic construct
GNKNGQG

SEQ ID NO: 62551 - protein, 7 aa, synthetic construct
GTKTSPA

SEQ ID NO: 62552 - protein, 7 aa, synthetic construct
AQVLGVA

SEQ ID NO: 62553 - protein, 7 aa, synthetic construct
ETGKNDY

SEQ ID NO: 62554 - protein, 7 aa, synthetic construct
PHVRGFD

SEQ ID NO: 62555 - protein, 7 aa, synthetic construct
HEGKVVT

SEQ ID NO: 62556 - protein, 7 aa, synthetic construct
TAVAQKG

SEQ ID NO: 62557 - protein, 7 aa, synthetic construct
YYSSKHP

SEQ ID NO: 62558 - protein, 7 aa, synthetic construct
ISSKYFE

SEQ ID NO: 62559 - protein, 7 aa, synthetic construct
WKEGKLN

SEQ ID NO: 62560 - protein, 7 aa, synthetic construct
NKQATFD

SEQ ID NO: 62561 - protein, 7 aa, synthetic construct
QAKGTMA

SEQ ID NO: 62562 - protein, 7 aa, synthetic construct
IDMTPIP

SEQ ID NO: 62563 - protein, 7 aa, synthetic construct
KTTSQGG

SEQ ID NO: 62564 - protein, 7 aa, synthetic construct
RMSMIPE

SEQ ID NO: 62565 - protein, 7 aa, synthetic construct
HGAPAVR

SEQ ID NO: 62566 - protein, 7 aa, synthetic construct
LYTSNQE

SEQ ID NO: 62567 - protein, 7 aa, synthetic construct
RDNSQGY

SEQ ID NO: 62568 - protein, 7 aa, synthetic construct
GRDFMME

SEQ ID NO: 62569 - protein, 7 aa, synthetic construct
KPGGAEW

SEQ ID NO: 62570 - protein, 7 aa, synthetic construct
IPNIIHG

SEQ ID NO: 62571 - protein, 7 aa, synthetic construct
QIIKGDH

SEQ ID NO: 62572 - protein, 7 aa, synthetic construct
VYRDGAV

SEQ ID NO: 62573 - protein, 7 aa, synthetic construct
HGTLQRP

SEQ ID NO: 62574 - protein, 7 aa, synthetic construct
LHGPSRA

SEQ ID NO: 62575 - protein, 7 aa, synthetic construct
TNTSKAG

SEQ ID NO: 62576 - protein, 7 aa, synthetic construct
FETKAKS

SEQ ID NO: 62577 - protein, 7 aa, synthetic construct
LPARVGS

SEQ ID NO: 62578 - protein, 7 aa, synthetic construct
LRGELVH

SEQ ID NO: 62579 - protein, 7 aa, synthetic construct
FRSGWQD

SEQ ID NO: 62580 - protein, 7 aa, synthetic construct
WKNVGHN

SEQ ID NO: 62581 - protein, 7 aa, synthetic construct
SNAILHS

SEQ ID NO: 62582 - protein, 7 aa, synthetic construct
NNGTRLS

SEQ ID NO: 62583 - protein, 7 aa, synthetic construct
QPQVKAN

SEQ ID NO: 62584 - protein, 7 aa, synthetic construct
TLHIAKA

SEQ ID NO: 62585 - protein, 7 aa, synthetic construct
KTGTTSF

SEQ ID NO: 62586 - protein, 7 aa, synthetic construct
MNKTIQY

SEQ ID NO: 62587 - protein, 7 aa, synthetic construct
LKNNGSA

SEQ ID NO: 62588 - protein, 7 aa, synthetic construct
MMPKMAA

SEQ ID NO: 62589 - protein, 7 aa, synthetic construct
RSHHTSD

SEQ ID NO: 62590 - protein, 7 aa, synthetic construct
VHSSAPM

SEQ ID NO: 62591 - protein, 7 aa, synthetic construct
TKQIKQE

SEQ ID NO: 62592 - protein, 7 aa, synthetic construct
FNKNMSA

SEQ ID NO: 62593 - protein, 7 aa, synthetic construct
WREMGGS

SEQ ID NO: 62594 - protein, 7 aa, synthetic construct
IQASLEK

SEQ ID NO: 62595 - protein, 7 aa, synthetic construct
IPKDKFE

SEQ ID NO: 62596 - protein, 7 aa, synthetic construct
TAESHTY

SEQ ID NO: 62597 - protein, 7 aa, synthetic construct
KINQKMD

SEQ ID NO: 62598 - protein, 7 aa, synthetic construct
QKSNTQN

SEQ ID NO: 62599 - protein, 7 aa, synthetic construct
PPRAQYD

SEQ ID NO: 62600 - protein, 7 aa, synthetic construct
HHIDGNR

SEQ ID NO: 62601 - protein, 7 aa, synthetic construct
KAGFHQV

SEQ ID NO: 62602 - protein, 7 aa, synthetic construct
NARLETS

SEQ ID NO: 62603 - protein, 7 aa, synthetic construct
LQKAFLE

SEQ ID NO: 62604 - protein, 7 aa, synthetic construct
TMKYMND

SEQ ID NO: 62605 - protein, 7 aa, synthetic construct
TSHKGYN

SEQ ID NO: 62606 - protein, 7 aa, synthetic construct
TAFPATA

SEQ ID NO: 62607 - protein, 7 aa, synthetic construct
EKNGVGK

SEQ ID NO: 62608 - protein, 7 aa, synthetic construct
FKNAPTL

SEQ ID NO: 62609 - protein, 7 aa, synthetic construct
GYITLKG

SEQ ID NO: 62610 - protein, 7 aa, synthetic construct
GSHPKTA

SEQ ID NO: 62611 - protein, 7 aa, synthetic construct
HNQQANP

SEQ ID NO: 62612 - protein, 7 aa, synthetic construct
ALIGNAS

SEQ ID NO: 62613 - protein, 7 aa, synthetic construct
PLNRAVE

SEQ ID NO: 62614 - protein, 7 aa, synthetic construct
LDQKHIA

SEQ ID NO: 62615 - protein, 7 aa, synthetic construct
HNGESYS

SEQ ID NO: 62616 - protein, 7 aa, synthetic construct
YRDSTVA

SEQ ID NO: 62617 - protein, 7 aa, synthetic construct
GRQMQLG

SEQ ID NO: 62618 - protein, 7 aa, synthetic construct
QRDYIAG

SEQ ID NO: 62619 - protein, 7 aa, synthetic construct
GTRKSFE

SEQ ID NO: 62620 - protein, 7 aa, synthetic construct
LKTSGKE

SEQ ID NO: 62621 - protein, 7 aa, synthetic construct
LTQNQAQ

SEQ ID NO: 62622 - protein, 7 aa, synthetic construct
HKTARDE

SEQ ID NO: 62623 - protein, 7 aa, synthetic construct
SRSESNY

SEQ ID NO: 62624 - protein, 7 aa, synthetic construct
KGHSSDP

SEQ ID NO: 62625 - protein, 7 aa, synthetic construct
QQHNGSR

SEQ ID NO: 62626 - protein, 7 aa, synthetic construct
QKDWHGV

SEQ ID NO: 62627 - protein, 7 aa, synthetic construct
GAMSKMT

SEQ ID NO: 62628 - protein, 7 aa, synthetic construct
SHQPARE

SEQ ID NO: 62629 - protein, 7 aa, synthetic construct
TPPKSAA

SEQ ID NO: 62630 - protein, 7 aa, synthetic construct
DQFRATN

SEQ ID NO: 62631 - protein, 7 aa, synthetic construct
NKITTGH

SEQ ID NO: 62632 - protein, 7 aa, synthetic construct
LPHGFQK

SEQ ID NO: 62633 - protein, 7 aa, synthetic construct
NANPPLN

SEQ ID NO: 62634 - protein, 7 aa, synthetic construct
SAKVRDH

SEQ ID NO: 62635 - protein, 7 aa, synthetic construct
FKQPEHV

SEQ ID NO: 62636 - protein, 7 aa, synthetic construct
TTKTWQD

SEQ ID NO: 62637 - protein, 7 aa, synthetic construct
QWKSNQT

SEQ ID NO: 62638 - protein, 7 aa, synthetic construct
DLYVHKA

SEQ ID NO: 62639 - protein, 7 aa, synthetic construct
FNSAVNG

SEQ ID NO: 62640 - protein, 7 aa, synthetic construct
MNAGKQP

SEQ ID NO: 62641 - protein, 7 aa, synthetic construct
GKDKVQG

SEQ ID NO: 62642 - protein, 7 aa, synthetic construct
RLNRDMV

SEQ ID NO: 62643 - protein, 7 aa, synthetic construct
AKNTHVE

SEQ ID NO: 62644 - protein, 7 aa, synthetic construct
HIKFSID

SEQ ID NO: 62645 - protein, 7 aa, synthetic construct
LLSQPKN

SEQ ID NO: 62646 - protein, 7 aa, synthetic construct
HALSMNP

SEQ ID NO: 62647 - protein, 7 aa, synthetic construct
HDHKWPL

SEQ ID NO: 62648 - protein, 7 aa, synthetic construct
DRNNTRG

SEQ ID NO: 62649 - protein, 7 aa, synthetic construct
VMKEGSG

SEQ ID NO: 62650 - protein, 7 aa, synthetic construct
SERQQFK

SEQ ID NO: 62651 - protein, 7 aa, synthetic construct
GKMIGVE

SEQ ID NO: 62652 - protein, 7 aa, synthetic construct
PTSKHTT

SEQ ID NO: 62653 - protein, 7 aa, synthetic construct
GGNKVQL

SEQ ID NO: 62654 - protein, 7 aa, synthetic construct
HNGAVNN

SEQ ID NO: 62655 - protein, 7 aa, synthetic construct
KYPSEVQ

SEQ ID NO: 62656 - protein, 7 aa, synthetic construct
NFNAKNP

SEQ ID NO: 62657 - protein, 7 aa, synthetic construct
GKDHMVS

SEQ ID NO: 62658 - protein, 7 aa, synthetic construct
NNPAHGP

SEQ ID NO: 62659 - protein, 7 aa, synthetic construct
HPTHNPD

SEQ ID NO: 62660 - protein, 7 aa, synthetic construct
AHQLKEA

SEQ ID NO: 62661 - protein, 7 aa, synthetic construct
NVSDKHQ

SEQ ID NO: 62662 - protein, 7 aa, synthetic construct
YRSNTTD

SEQ ID NO: 62663 - protein, 7 aa, synthetic construct
TIRQMSN

SEQ ID NO: 62664 - protein, 7 aa, synthetic construct
ISAGAFS

SEQ ID NO: 62665 - protein, 7 aa, synthetic construct
IFPGMHG

SEQ ID NO: 62666 - protein, 7 aa, synthetic construct
QRSNNMV

SEQ ID NO: 62667 - protein, 7 aa, synthetic construct
QFRTLHE

SEQ ID NO: 62668 - protein, 7 aa, synthetic construct
PEKGNIN

SEQ ID NO: 62669 - protein, 7 aa, synthetic construct
RQGAGGG

SEQ ID NO: 62670 - protein, 7 aa, synthetic construct
VFEKGIN

SEQ ID NO: 62671 - protein, 7 aa, synthetic construct
VNSGLHP

SEQ ID NO: 62672 - protein, 7 aa, synthetic construct
NWKSQSP

SEQ ID NO: 62673 - protein, 7 aa, synthetic construct
QPKHSNV

SEQ ID NO: 62674 - protein, 7 aa, synthetic construct
ANRIMEP

SEQ ID NO: 62675 - protein, 7 aa, synthetic construct
LPQVNKQ

SEQ ID NO: 62676 - protein, 7 aa, synthetic construct
VKAINNS

SEQ ID NO: 62677 - protein, 7 aa, synthetic construct
VMAAEKQ

SEQ ID NO: 62678 - protein, 7 aa, synthetic construct
MGVKPAN

SEQ ID NO: 62679 - protein, 7 aa, synthetic construct
SKPAFIH

SEQ ID NO: 62680 - protein, 7 aa, synthetic construct
GSKTGMG

SEQ ID NO: 62681 - protein, 7 aa, synthetic construct
DDKQRKV

SEQ ID NO: 62682 - protein, 7 aa, synthetic construct
KPGGMTG

SEQ ID NO: 62683 - protein, 7 aa, synthetic construct
GPRIKFD

SEQ ID NO: 62684 - protein, 7 aa, synthetic construct
RPEQYKP

SEQ ID NO: 62685 - protein, 7 aa, synthetic construct
GGRIHTT

SEQ ID NO: 62686 - protein, 7 aa, synthetic construct
NKKDAMG

SEQ ID NO: 62687 - protein, 7 aa, synthetic construct
QERFDGR

SEQ ID NO: 62688 - protein, 7 aa, synthetic construct
PSKNAQG

SEQ ID NO: 62689 - protein, 7 aa, synthetic construct
GMRAQSD

SEQ ID NO: 62690 - protein, 7 aa, synthetic construct
TREKMLS

SEQ ID NO: 62691 - protein, 7 aa, synthetic construct
DEKRKPI

SEQ ID NO: 62692 - protein, 7 aa, synthetic construct
WLDRNAA

SEQ ID NO: 62693 - protein, 7 aa, synthetic construct
VENGINR

SEQ ID NO: 62694 - protein, 7 aa, synthetic construct
VVKTDKV

SEQ ID NO: 62695 - protein, 7 aa, synthetic construct
REDKQMG

SEQ ID NO: 62696 - protein, 7 aa, synthetic construct
QGHLSYA

SEQ ID NO: 62697 - protein, 7 aa, synthetic construct
QKNSPGG

SEQ ID NO: 62698 - protein, 7 aa, synthetic construct
IFTEGHK

SEQ ID NO: 62699 - protein, 7 aa, synthetic construct
NSQIHVA

SEQ ID NO: 62700 - protein, 7 aa, synthetic construct
TKQFNQG

SEQ ID NO: 62701 - protein, 7 aa, synthetic construct
GKVPYNV

SEQ ID NO: 62702 - protein, 7 aa, synthetic construct
YANNNNI

SEQ ID NO: 62703 - protein, 7 aa, synthetic construct
QRNQQNG

SEQ ID NO: 62704 - protein, 7 aa, synthetic construct
KNNMEWM

SEQ ID NO: 62705 - protein, 7 aa, synthetic construct
RHHAVSA

SEQ ID NO: 62706 - protein, 7 aa, synthetic construct
WKLHSVA

SEQ ID NO: 62707 - protein, 7 aa, synthetic construct
SYTSQTA

SEQ ID NO: 62708 - protein, 7 aa, synthetic construct
EPMVNKY

SEQ ID NO: 62709 - protein, 7 aa, synthetic construct
KQNAMAA

SEQ ID NO: 62710 - protein, 7 aa, synthetic construct
KMGAYGP

SEQ ID NO: 62711 - protein, 7 aa, synthetic construct
WPDNQRA

SEQ ID NO: 62712 - protein, 7 aa, synthetic construct
LREALGG

SEQ ID NO: 62713 - protein, 7 aa, synthetic construct
KNQVGPP

SEQ ID NO: 62714 - protein, 7 aa, synthetic construct
YASVQPG

SEQ ID NO: 62715 - protein, 7 aa, synthetic construct
NPTMPSR

SEQ ID NO: 62716 - protein, 7 aa, synthetic construct
LGAKDKA

SEQ ID NO: 62717 - protein, 7 aa, synthetic construct
YETKSPS

SEQ ID NO: 62718 - protein, 7 aa, synthetic construct
KTTGVAP

SEQ ID NO: 62719 - protein, 7 aa, synthetic construct
MRPTSGS

SEQ ID NO: 62720 - protein, 7 aa, synthetic construct
PSHGNAA

SEQ ID NO: 62721 - protein, 7 aa, synthetic construct
KGGMAAN

SEQ ID NO: 62722 - protein, 7 aa, synthetic construct
TNNPQKG

SEQ ID NO: 62723 - protein, 7 aa, synthetic construct
YKQTASP

SEQ ID NO: 62724 - protein, 7 aa, synthetic construct
NSIGHLS

SEQ ID NO: 62725 - protein, 7 aa, synthetic construct
KQTQSVN

SEQ ID NO: 62726 - protein, 7 aa, synthetic construct
LLDRKTG

SEQ ID NO: 62727 - protein, 7 aa, synthetic construct
MREETVR

SEQ ID NO: 62728 - protein, 7 aa, synthetic construct
AMDRQNP

SEQ ID NO: 62729 - protein, 7 aa, synthetic construct
NRAMVAD

SEQ ID NO: 62730 - protein, 7 aa, synthetic construct
TSNVRQA

SEQ ID NO: 62731 - protein, 7 aa, synthetic construct
NGHPTRA

SEQ ID NO: 62732 - protein, 7 aa, synthetic construct
DQGIRMD

SEQ ID NO: 62733 - protein, 7 aa, synthetic construct
LVKGEAQ

SEQ ID NO: 62734 - protein, 7 aa, synthetic construct
GKSNGTF

SEQ ID NO: 62735 - protein, 7 aa, synthetic construct
IDRPTKS

SEQ ID NO: 62736 - protein, 7 aa, synthetic construct
VSGQAGF

SEQ ID NO: 62737 - protein, 7 aa, synthetic construct
DQHKMQS

SEQ ID NO: 62738 - protein, 7 aa, synthetic construct
GHKMSDI

SEQ ID NO: 62739 - protein, 7 aa, synthetic construct
PANKEKW

SEQ ID NO: 62740 - protein, 7 aa, synthetic construct
MKMQTGS

SEQ ID NO: 62741 - protein, 7 aa, synthetic construct
YRNPGPD

SEQ ID NO: 62742 - protein, 7 aa, synthetic construct
MHRDRHP

SEQ ID NO: 62743 - protein, 7 aa, synthetic construct
NMTRDSI

SEQ ID NO: 62744 - protein, 7 aa, synthetic construct
TQRTNSA

SEQ ID NO: 62745 - protein, 7 aa, synthetic construct
SKNNHGV

SEQ ID NO: 62746 - protein, 7 aa, synthetic construct
QKQETQM

SEQ ID NO: 62747 - protein, 7 aa, synthetic construct
RPFDGHA

SEQ ID NO: 62748 - protein, 7 aa, synthetic construct
RAQMGHL

SEQ ID NO: 62749 - protein, 7 aa, synthetic construct
YKYYAEP

SEQ ID NO: 62750 - protein, 7 aa, synthetic construct
IINHGIE

SEQ ID NO: 62751 - protein, 7 aa, synthetic construct
NSNQRVG

SEQ ID NO: 62752 - protein, 7 aa, synthetic construct
YAKEMKS

SEQ ID NO: 62753 - protein, 7 aa, synthetic construct
QSKNVPP

SEQ ID NO: 62754 - protein, 7 aa, synthetic construct
GGLKHDG

SEQ ID NO: 62755 - protein, 7 aa, synthetic construct
RLTSNQD

SEQ ID NO: 62756 - protein, 7 aa, synthetic construct
DMRRETY

SEQ ID NO: 62757 - protein, 7 aa, synthetic construct
FSHAGAA

SEQ ID NO: 62758 - protein, 7 aa, synthetic construct
YKQDSKA

SEQ ID NO: 62759 - protein, 7 aa, synthetic construct
VTYNSEI

SEQ ID NO: 62760 - protein, 7 aa, synthetic construct
RGLLHQE

SEQ ID NO: 62761 - protein, 7 aa, synthetic construct
KHKEGGP

SEQ ID NO: 62762 - protein, 7 aa, synthetic construct
TFRDHTT

SEQ ID NO: 62763 - protein, 7 aa, synthetic construct
IQTKSNA

SEQ ID NO: 62764 - protein, 7 aa, synthetic construct
PKPNAMD

SEQ ID NO: 62765 - protein, 7 aa, synthetic construct
GLWQPTE

SEQ ID NO: 62766 - protein, 7 aa, synthetic construct
LYHSKSI

SEQ ID NO: 62767 - protein, 7 aa, synthetic construct
NMHHGAV

SEQ ID NO: 62768 - protein, 7 aa, synthetic construct
ATGRSGE

SEQ ID NO: 62769 - protein, 7 aa, synthetic construct
VQSISIN

SEQ ID NO: 62770 - protein, 7 aa, synthetic construct
RHDRTEY

SEQ ID NO: 62771 - protein, 7 aa, synthetic construct
AVRPIHP

SEQ ID NO: 62772 - protein, 7 aa, synthetic construct
VYKDNKG

SEQ ID NO: 62773 - protein, 7 aa, synthetic construct
HVDRKLF

SEQ ID NO: 62774 - protein, 7 aa, synthetic construct
LVHNTRD

SEQ ID NO: 62775 - protein, 7 aa, synthetic construct
FQHTHAD

SEQ ID NO: 62776 - protein, 7 aa, synthetic construct
FMQTRNN

SEQ ID NO: 62777 - protein, 7 aa, synthetic construct
RMNGQLE

SEQ ID NO: 62778 - protein, 7 aa, synthetic construct
GRVAIGP

SEQ ID NO: 62779 - protein, 7 aa, synthetic construct
MTEVRQG

SEQ ID NO: 62780 - protein, 7 aa, synthetic construct
TGTQRTP

SEQ ID NO: 62781 - protein, 7 aa, synthetic construct
IVGNGRE

SEQ ID NO: 62782 - protein, 7 aa, synthetic construct
FPEGRIH

SEQ ID NO: 62783 - protein, 7 aa, synthetic construct
LITHGTI

SEQ ID NO: 62784 - protein, 7 aa, synthetic construct
MKHDKPI

SEQ ID NO: 62785 - protein, 7 aa, synthetic construct
YRHEIVS

SEQ ID NO: 62786 - protein, 7 aa, synthetic construct
YETKVQQ

SEQ ID NO: 62787 - protein, 7 aa, synthetic construct
NSTGEKY

SEQ ID NO: 62788 - protein, 7 aa, synthetic construct
RQNNANG

SEQ ID NO: 62789 - protein, 7 aa, synthetic construct
QHQGVGI

SEQ ID NO: 62790 - protein, 7 aa, synthetic construct
DMDRAKG

SEQ ID NO: 62791 - protein, 7 aa, synthetic construct
YVPLRAP

SEQ ID NO: 62792 - protein, 7 aa, synthetic construct
GKTPVVP

SEQ ID NO: 62793 - protein, 7 aa, synthetic construct
DVPPFTR

SEQ ID NO: 62794 - protein, 7 aa, synthetic construct
TPARFEP

SEQ ID NO: 62795 - protein, 7 aa, synthetic construct
GGTKFSG

SEQ ID NO: 62796 - protein, 7 aa, synthetic construct
LPTGQKQ

SEQ ID NO: 62797 - protein, 7 aa, synthetic construct
YNPGLQQ

SEQ ID NO: 62798 - protein, 7 aa, synthetic construct
TTKMERW

SEQ ID NO: 62799 - protein, 7 aa, synthetic construct
RNFGHND

SEQ ID NO: 62800 - protein, 7 aa, synthetic construct
VNPAKTF

SEQ ID NO: 62801 - protein, 7 aa, synthetic construct
VYGKGLI

SEQ ID NO: 62802 - protein, 7 aa, synthetic construct
SQHDPQM

SEQ ID NO: 62803 - protein, 7 aa, synthetic construct
KFPRISD

SEQ ID NO: 62804 - protein, 7 aa, synthetic construct
YENGSKG

SEQ ID NO: 62805 - protein, 7 aa, synthetic construct
GYHPHHT

SEQ ID NO: 62806 - protein, 7 aa, synthetic construct
TFRETRV

SEQ ID NO: 62807 - protein, 7 aa, synthetic construct
QTAGVGN

SEQ ID NO: 62808 - protein, 7 aa, synthetic construct
VYKNLAV

SEQ ID NO: 62809 - protein, 7 aa, synthetic construct
QGSKMMG

SEQ ID NO: 62810 - protein, 7 aa, synthetic construct
DLQPPKR

SEQ ID NO: 62811 - protein, 7 aa, synthetic construct
GDRFGLA

SEQ ID NO: 62812 - protein, 7 aa, synthetic construct
NGTAGPR

SEQ ID NO: 62813 - protein, 7 aa, synthetic construct
YDNMFKV

SEQ ID NO: 62814 - protein, 7 aa, synthetic construct
TTGASKS

SEQ ID NO: 62815 - protein, 7 aa, synthetic construct
DRNSMAH

SEQ ID NO: 62816 - protein, 7 aa, synthetic construct
MMTGKQG

SEQ ID NO: 62817 - protein, 7 aa, synthetic construct
KFSNTAG

SEQ ID NO: 62818 - protein, 7 aa, synthetic construct
DTAIGKS

SEQ ID NO: 62819 - protein, 7 aa, synthetic construct
TPNFTQD

SEQ ID NO: 62820 - protein, 7 aa, synthetic construct
IKTENTY

SEQ ID NO: 62821 - protein, 7 aa, synthetic construct
NGQPKTG

SEQ ID NO: 62822 - protein, 7 aa, synthetic construct
TSGGQKS

SEQ ID NO: 62823 - protein, 7 aa, synthetic construct
TNKWANP

SEQ ID NO: 62824 - protein, 7 aa, synthetic construct
SHSHEAG

SEQ ID NO: 62825 - protein, 7 aa, synthetic construct
THRAHPV

SEQ ID NO: 62826 - protein, 7 aa, synthetic construct
QATAAKT

SEQ ID NO: 62827 - protein, 7 aa, synthetic construct
TRNDTTF

SEQ ID NO: 62828 - protein, 7 aa, synthetic construct
GRPGVPA

SEQ ID NO: 62829 - protein, 7 aa, synthetic construct
RKENSGG

SEQ ID NO: 62830 - protein, 7 aa, synthetic construct
KTQQGSM

SEQ ID NO: 62831 - protein, 7 aa, synthetic construct
VQHKDHP

SEQ ID NO: 62832 - protein, 7 aa, synthetic construct
QGKGPTP

SEQ ID NO: 62833 - protein, 7 aa, synthetic construct
KPKFDSI

SEQ ID NO: 62834 - protein, 7 aa, synthetic construct
KMNGAQG

SEQ ID NO: 62835 - protein, 7 aa, synthetic construct
FAGVGHM

SEQ ID NO: 62836 - protein, 7 aa, synthetic construct
RVINGSN

SEQ ID NO: 62837 - protein, 7 aa, synthetic construct
FGQFPNQ

SEQ ID NO: 62838 - protein, 7 aa, synthetic construct
HPNARDA

SEQ ID NO: 62839 - protein, 7 aa, synthetic construct
QRPDSAK

SEQ ID NO: 62840 - protein, 7 aa, synthetic construct
NDHAKSM

SEQ ID NO: 62841 - protein, 7 aa, synthetic construct
TPPLLNR

SEQ ID NO: 62842 - protein, 7 aa, synthetic construct
SKQPNNA

SEQ ID NO: 62843 - protein, 7 aa, synthetic construct
LPMSHPQ

SEQ ID NO: 62844 - protein, 7 aa, synthetic construct
SIGANKD

SEQ ID NO: 62845 - protein, 7 aa, synthetic construct
TVRHITN

SEQ ID NO: 62846 - protein, 7 aa, synthetic construct
RYNPSHA

SEQ ID NO: 62847 - protein, 7 aa, synthetic construct
HISQNDV

SEQ ID NO: 62848 - protein, 7 aa, synthetic construct
GMSTHLP

SEQ ID NO: 62849 - protein, 7 aa, synthetic construct
KIYAEQT

SEQ ID NO: 62850 - protein, 7 aa, synthetic construct
NNKSAQA

SEQ ID NO: 62851 - protein, 7 aa, synthetic construct
EHSRHEV

SEQ ID NO: 62852 - protein, 7 aa, synthetic construct
QFGGAGT

SEQ ID NO: 62853 - protein, 7 aa, synthetic construct
GGERPAL

SEQ ID NO: 62854 - protein, 7 aa, synthetic construct
MAHPQID

SEQ ID NO: 62855 - protein, 7 aa, synthetic construct
NKGQITG

SEQ ID NO: 62856 - protein, 7 aa, synthetic construct
KRFDTTS

SEQ ID NO: 62857 - protein, 7 aa, synthetic construct
TRQANVG

SEQ ID NO: 62858 - protein, 7 aa, synthetic construct
EYNATHA

SEQ ID NO: 62859 - protein, 7 aa, synthetic construct
RGHQNDP

SEQ ID NO: 62860 - protein, 7 aa, synthetic construct
SFKTEFV

SEQ ID NO: 62861 - protein, 7 aa, synthetic construct
GAKQNEW

SEQ ID NO: 62862 - protein, 7 aa, synthetic construct
VTKFSAQ

SEQ ID NO: 62863 - protein, 7 aa, synthetic construct
VPGVKYP

SEQ ID NO: 62864 - protein, 7 aa, synthetic construct
SAYVSIP

SEQ ID NO: 62865 - protein, 7 aa, synthetic construct
KFERNST

SEQ ID NO: 62866 - protein, 7 aa, synthetic construct
FKGSTKE

SEQ ID NO: 62867 - protein, 7 aa, synthetic construct
VAHQVLG

SEQ ID NO: 62868 - protein, 7 aa, synthetic construct
KMTGIKD

SEQ ID NO: 62869 - protein, 7 aa, synthetic construct
VGSKMGV

SEQ ID NO: 62870 - protein, 7 aa, synthetic construct
HMQNVPH

SEQ ID NO: 62871 - protein, 7 aa, synthetic construct
NYENKAA

SEQ ID NO: 62872 - protein, 7 aa, synthetic construct
QVNSKVP

SEQ ID NO: 62873 - protein, 7 aa, synthetic construct
ERIPARN

SEQ ID NO: 62874 - protein, 7 aa, synthetic construct
PNKERPP

SEQ ID NO: 62875 - protein, 7 aa, synthetic construct
QSAVQKI

SEQ ID NO: 62876 - protein, 7 aa, synthetic construct
TKPTVQA

SEQ ID NO: 62877 - protein, 7 aa, synthetic construct
REFGMPE

SEQ ID NO: 62878 - protein, 7 aa, synthetic construct
AISQKSA

SEQ ID NO: 62879 - protein, 7 aa, synthetic construct
SQMQKPM

SEQ ID NO: 62880 - protein, 7 aa, synthetic construct
TKFRDGV

SEQ ID NO: 62881 - protein, 7 aa, synthetic construct
KNSIMLE

SEQ ID NO: 62882 - protein, 7 aa, synthetic construct
IRSAGYP

SEQ ID NO: 62883 - protein, 7 aa, synthetic construct
HKGSGGT

SEQ ID NO: 62884 - protein, 7 aa, synthetic construct
PKVGQEV

SEQ ID NO: 62885 - protein, 7 aa, synthetic construct
DRQKPMS

SEQ ID NO: 62886 - protein, 7 aa, synthetic construct
NAAFPGA

SEQ ID NO: 62887 - protein, 7 aa, synthetic construct
MVPSMLK

SEQ ID NO: 62888 - protein, 7 aa, synthetic construct
QYTPGGS

SEQ ID NO: 62889 - protein, 7 aa, synthetic construct
QPRLDYG

SEQ ID NO: 62890 - protein, 7 aa, synthetic construct
QKVVASP

SEQ ID NO: 62891 - protein, 7 aa, synthetic construct
LSTHAHH

SEQ ID NO: 62892 - protein, 7 aa, synthetic construct
AAKGKEF

SEQ ID NO: 62893 - protein, 7 aa, synthetic construct
GKMIEHG

SEQ ID NO: 62894 - protein, 7 aa, synthetic construct
DQTVRKT

SEQ ID NO: 62895 - protein, 7 aa, synthetic construct
QLLGLKG

SEQ ID NO: 62896 - protein, 7 aa, synthetic construct
GDRQFPK

SEQ ID NO: 62897 - protein, 7 aa, synthetic construct
WDNKSRV

SEQ ID NO: 62898 - protein, 7 aa, synthetic construct
SKFDTGK

SEQ ID NO: 62899 - protein, 7 aa, synthetic construct
PKPNNGG

SEQ ID NO: 62900 - protein, 7 aa, synthetic construct
MQNGTYM

SEQ ID NO: 62901 - protein, 7 aa, synthetic construct
NKEPSKI

SEQ ID NO: 62902 - protein, 7 aa, synthetic construct
TSMGMKE

SEQ ID NO: 62903 - protein, 7 aa, synthetic construct
NKQEAAY

SEQ ID NO: 62904 - protein, 7 aa, synthetic construct
KSNGTPA

SEQ ID NO: 62905 - protein, 7 aa, synthetic construct
GGSAMKT

SEQ ID NO: 62906 - protein, 7 aa, synthetic construct
DVKVKQA

SEQ ID NO: 62907 - protein, 7 aa, synthetic construct
VKYEGMA

SEQ ID NO: 62908 - protein, 7 aa, synthetic construct
HFTVPEG

SEQ ID NO: 62909 - protein, 7 aa, synthetic construct
MRNYGVS

SEQ ID NO: 62910 - protein, 7 aa, synthetic construct
KQPSSSS

SEQ ID NO: 62911 - protein, 7 aa, synthetic construct
DRIQTLA

SEQ ID NO: 62912 - protein, 7 aa, synthetic construct
TNTGPGR

SEQ ID NO: 62913 - protein, 7 aa, synthetic construct
RTPSSEG

SEQ ID NO: 62914 - protein, 7 aa, synthetic construct
LKNLADS

SEQ ID NO: 62915 - protein, 7 aa, synthetic construct
SKVSTRE

SEQ ID NO: 62916 - protein, 7 aa, synthetic construct
KQNNTSG

SEQ ID NO: 62917 - protein, 7 aa, synthetic construct
TPSRAQP

SEQ ID NO: 62918 - protein, 7 aa, synthetic construct
VVGMVSH

SEQ ID NO: 62919 - protein, 7 aa, synthetic construct
ARLHPDV

SEQ ID NO: 62920 - protein, 7 aa, synthetic construct
NTHSRGV

SEQ ID NO: 62921 - protein, 7 aa, synthetic construct
QSFHNQT

SEQ ID NO: 62922 - protein, 7 aa, synthetic construct
GMHTGFT

SEQ ID NO: 62923 - protein, 7 aa, synthetic construct
HIKSLPF

SEQ ID NO: 62924 - protein, 7 aa, synthetic construct
YQVPARN

SEQ ID NO: 62925 - protein, 7 aa, synthetic construct
KFNVGPQ

SEQ ID NO: 62926 - protein, 7 aa, synthetic construct
GQKNNGA

SEQ ID NO: 62927 - protein, 7 aa, synthetic construct
HPHSKVP

SEQ ID NO: 62928 - protein, 7 aa, synthetic construct
AWSGTVG

SEQ ID NO: 62929 - protein, 7 aa, synthetic construct
GTLKIGS

SEQ ID NO: 62930 - protein, 7 aa, synthetic construct
FPNQAAT

SEQ ID NO: 62931 - protein, 7 aa, synthetic construct
SKQYGAV

SEQ ID NO: 62932 - protein, 7 aa, synthetic construct
RVGTLRE

SEQ ID NO: 62933 - protein, 7 aa, synthetic construct
GSQRTTA

SEQ ID NO: 62934 - protein, 7 aa, synthetic construct
TQSAQKM

SEQ ID NO: 62935 - protein, 7 aa, synthetic construct
MKQTGNG

SEQ ID NO: 62936 - protein, 7 aa, synthetic construct
YGTYHAN

SEQ ID NO: 62937 - protein, 7 aa, synthetic construct
THINNTA

SEQ ID NO: 62938 - protein, 7 aa, synthetic construct
YMHVREN

SEQ ID NO: 62939 - protein, 7 aa, synthetic construct
VYNTGPN

SEQ ID NO: 62940 - protein, 7 aa, synthetic construct
FKSSQGV

SEQ ID NO: 62941 - protein, 7 aa, synthetic construct
QQRQSVI

SEQ ID NO: 62942 - protein, 7 aa, synthetic construct
SSASTSG

SEQ ID NO: 62943 - protein, 7 aa, synthetic construct
NHVQSKP

SEQ ID NO: 62944 - protein, 7 aa, synthetic construct
GQYNNLA

SEQ ID NO: 62945 - protein, 7 aa, synthetic construct
VMTRGEA

SEQ ID NO: 62946 - protein, 7 aa, synthetic construct
KNKPNGE

SEQ ID NO: 62947 - protein, 7 aa, synthetic construct
WTIKSVA

SEQ ID NO: 62948 - protein, 7 aa, synthetic construct
KMDSAGM

SEQ ID NO: 62949 - protein, 7 aa, synthetic construct
TYKQSSG

SEQ ID NO: 62950 - protein, 7 aa, synthetic construct
AHFDNKG

SEQ ID NO: 62951 - protein, 7 aa, synthetic construct
NVGRSTM

SEQ ID NO: 62952 - protein, 7 aa, synthetic construct
NNFVATT

SEQ ID NO: 62953 - protein, 7 aa, synthetic construct
SSQNGTN

SEQ ID NO: 62954 - protein, 7 aa, synthetic construct
IPSNAQQ

SEQ ID NO: 62955 - protein, 7 aa, synthetic construct
MYKHHAG

SEQ ID NO: 62956 - protein, 7 aa, synthetic construct
GFKDYSA

SEQ ID NO: 62957 - protein, 7 aa, synthetic construct
NGKHAMF

SEQ ID NO: 62958 - protein, 7 aa, synthetic construct
GKLVLKE

SEQ ID NO: 62959 - protein, 7 aa, synthetic construct
MVRHPEF

SEQ ID NO: 62960 - protein, 7 aa, synthetic construct
HQHAADK

SEQ ID NO: 62961 - protein, 7 aa, synthetic construct
GKKDANA

SEQ ID NO: 62962 - protein, 7 aa, synthetic construct
HKNVNQI

SEQ ID NO: 62963 - protein, 7 aa, synthetic construct
RKERIDL

SEQ ID NO: 62964 - protein, 7 aa, synthetic construct
VDRVNYG

SEQ ID NO: 62965 - protein, 7 aa, synthetic construct
MTQQFGS

SEQ ID NO: 62966 - protein, 7 aa, synthetic construct
IYKKNEL

SEQ ID NO: 62967 - protein, 7 aa, synthetic construct
HQTGTVF

SEQ ID NO: 62968 - protein, 7 aa, synthetic construct
VPLRTEP

SEQ ID NO: 62969 - protein, 7 aa, synthetic construct
HAPGAKD

SEQ ID NO: 62970 - protein, 7 aa, synthetic construct
TMKPILD

SEQ ID NO: 62971 - protein, 7 aa, synthetic construct
QQLQLDA

SEQ ID NO: 62972 - protein, 7 aa, synthetic construct
SKDKSTA

SEQ ID NO: 62973 - protein, 7 aa, synthetic construct
GHVNTGS

SEQ ID NO: 62974 - protein, 7 aa, synthetic construct
MPNNRHS

SEQ ID NO: 62975 - protein, 7 aa, synthetic construct
VTPVAVA

SEQ ID NO: 62976 - protein, 7 aa, synthetic construct
STGVKSG

SEQ ID NO: 62977 - protein, 7 aa, synthetic construct
YGANMGM

SEQ ID NO: 62978 - protein, 7 aa, synthetic construct
SKPFNQP

SEQ ID NO: 62979 - protein, 7 aa, synthetic construct
YKMTSQG

SEQ ID NO: 62980 - protein, 7 aa, synthetic construct
ARSQTGA

SEQ ID NO: 62981 - protein, 7 aa, synthetic construct
KLMLNSA

SEQ ID NO: 62982 - protein, 7 aa, synthetic construct
DRDLVNR

SEQ ID NO: 62983 - protein, 7 aa, synthetic construct
AHQPEKV

SEQ ID NO: 62984 - protein, 7 aa, synthetic construct
IRQRGDL

SEQ ID NO: 62985 - protein, 7 aa, synthetic construct
RTGPTSG

SEQ ID NO: 62986 - protein, 7 aa, synthetic construct
MGTVRPA

SEQ ID NO: 62987 - protein, 7 aa, synthetic construct
GSPKSSP

SEQ ID NO: 62988 - protein, 7 aa, synthetic construct
GTNVKGG

SEQ ID NO: 62989 - protein, 7 aa, synthetic construct
RPHEGGM

SEQ ID NO: 62990 - protein, 7 aa, synthetic construct
KGPVLKG

SEQ ID NO: 62991 - protein, 7 aa, synthetic construct
MSASKHP

SEQ ID NO: 62992 - protein, 7 aa, synthetic construct
QSFHPTP

SEQ ID NO: 62993 - protein, 7 aa, synthetic construct
NRHHGMD

SEQ ID NO: 62994 - protein, 7 aa, synthetic construct
ANMQMRA

SEQ ID NO: 62995 - protein, 7 aa, synthetic construct
QPTGQQV

SEQ ID NO: 62996 - protein, 7 aa, synthetic construct
AKYDKFE

SEQ ID NO: 62997 - protein, 7 aa, synthetic construct
DSKWVAV

SEQ ID NO: 62998 - protein, 7 aa, synthetic construct
QYTDKRP

SEQ ID NO: 62999 - protein, 7 aa, synthetic construct
AIGNFDK

SEQ ID NO: 63000 - protein, 7 aa, synthetic construct
NVKEGQG

SEQ ID NO: 63001 - protein, 7 aa, synthetic construct
KYTSNHI

SEQ ID NO: 63002 - protein, 7 aa, synthetic construct
RAAKADD

SEQ ID NO: 63003 - protein, 7 aa, synthetic construct
SYPQKHM

SEQ ID NO: 63004 - protein, 7 aa, synthetic construct
QDPGKKQ

SEQ ID NO: 63005 - protein, 7 aa, synthetic construct
NYGPATM

SEQ ID NO: 63006 - protein, 7 aa, synthetic construct
VFKPVGG

SEQ ID NO: 63007 - protein, 7 aa, synthetic construct
WRSVLEG

SEQ ID NO: 63008 - protein, 7 aa, synthetic construct
PFRDGPG

SEQ ID NO: 63009 - protein, 7 aa, synthetic construct
SNPRNEW

SEQ ID NO: 63010 - protein, 7 aa, synthetic construct
WAETGQK

SEQ ID NO: 63011 - protein, 7 aa, synthetic construct
KQMSVNP

SEQ ID NO: 63012 - protein, 7 aa, synthetic construct
NGPTKVV

SEQ ID NO: 63013 - protein, 7 aa, synthetic construct
GARIREE

SEQ ID NO: 63014 - protein, 7 aa, synthetic construct
INKLHKE

SEQ ID NO: 63015 - protein, 7 aa, synthetic construct
NKRDEAS

SEQ ID NO: 63016 - protein, 7 aa, synthetic construct
NFKKEQL

SEQ ID NO: 63017 - protein, 7 aa, synthetic construct
QKGLEGN

SEQ ID NO: 63018 - protein, 7 aa, synthetic construct
MHQVAGQ

SEQ ID NO: 63019 - protein, 7 aa, synthetic construct
GDRSISH

SEQ ID NO: 63020 - protein, 7 aa, synthetic construct
KEVSNVG

SEQ ID NO: 63021 - protein, 7 aa, synthetic construct
QVPSISE

SEQ ID NO: 63022 - protein, 7 aa, synthetic construct
KQTGWGE

SEQ ID NO: 63023 - protein, 7 aa, synthetic construct
HGLKMST

SEQ ID NO: 63024 - protein, 7 aa, synthetic construct
GKQMAVP

SEQ ID NO: 63025 - protein, 7 aa, synthetic construct
QGKGSTD

SEQ ID NO: 63026 - protein, 7 aa, synthetic construct
PLSHTAA

SEQ ID NO: 63027 - protein, 7 aa, synthetic construct
SNQAKVY

SEQ ID NO: 63028 - protein, 7 aa, synthetic construct
YRAYASE

SEQ ID NO: 63029 - protein, 7 aa, synthetic construct
QRHTEKY

SEQ ID NO: 63030 - protein, 7 aa, synthetic construct
GQKSNVA

SEQ ID NO: 63031 - protein, 7 aa, synthetic construct
KNSPTQY

SEQ ID NO: 63032 - protein, 7 aa, synthetic construct
QKANPGS

SEQ ID NO: 63033 - protein, 7 aa, synthetic construct
NPKTMDT

SEQ ID NO: 63034 - protein, 7 aa, synthetic construct
TRVTESR

SEQ ID NO: 63035 - protein, 7 aa, synthetic construct
NRARADE

SEQ ID NO: 63036 - protein, 7 aa, synthetic construct
RNPTQAG

SEQ ID NO: 63037 - protein, 7 aa, synthetic construct
RNAGNSS

SEQ ID NO: 63038 - protein, 7 aa, synthetic construct
TAKGDMA

SEQ ID NO: 63039 - protein, 7 aa, synthetic construct
DTVKLNA

SEQ ID NO: 63040 - protein, 7 aa, synthetic construct
PRSTQQP

SEQ ID NO: 63041 - protein, 7 aa, synthetic construct
QPPKAGA

SEQ ID NO: 63042 - protein, 7 aa, synthetic construct
FGGTRHD

SEQ ID NO: 63043 - protein, 7 aa, synthetic construct
GMQSKNS

SEQ ID NO: 63044 - protein, 7 aa, synthetic construct
NQGSTIY

SEQ ID NO: 63045 - protein, 7 aa, synthetic construct
KNGTTKD

SEQ ID NO: 63046 - protein, 7 aa, synthetic construct
AYAKSRD

SEQ ID NO: 63047 - protein, 7 aa, synthetic construct
QKIPTVF

SEQ ID NO: 63048 - protein, 7 aa, synthetic construct
GKHGMNT

SEQ ID NO: 63049 - protein, 7 aa, synthetic construct
NSMSTQR

SEQ ID NO: 63050 - protein, 7 aa, synthetic construct
ATNSKAV

SEQ ID NO: 63051 - protein, 7 aa, synthetic construct
RDPKGSS

SEQ ID NO: 63052 - protein, 7 aa, synthetic construct
MATGAMG

SEQ ID NO: 63053 - protein, 7 aa, synthetic construct
DPGIKVS

SEQ ID NO: 63054 - protein, 7 aa, synthetic construct
IPQESNK

SEQ ID NO: 63055 - protein, 7 aa, synthetic construct
DTKNIHV

SEQ ID NO: 63056 - protein, 7 aa, synthetic construct
KVSSNIH

SEQ ID NO: 63057 - protein, 7 aa, synthetic construct
VKNIGGA

SEQ ID NO: 63058 - protein, 7 aa, synthetic construct
ARQFNPE

SEQ ID NO: 63059 - protein, 7 aa, synthetic construct
HRAHPGL

SEQ ID NO: 63060 - protein, 7 aa, synthetic construct
KATNSSV

SEQ ID NO: 63061 - protein, 7 aa, synthetic construct
KTNAAIQ

SEQ ID NO: 63062 - protein, 7 aa, synthetic construct
VSVKTKP

SEQ ID NO: 63063 - protein, 7 aa, synthetic construct
LRANPGY

SEQ ID NO: 63064 - protein, 7 aa, synthetic construct
HPHGNVS

SEQ ID NO: 63065 - protein, 7 aa, synthetic construct
MFKHFPA

SEQ ID NO: 63066 - protein, 7 aa, synthetic construct
TKNLGQS

SEQ ID NO: 63067 - protein, 7 aa, synthetic construct
IEPILKG

SEQ ID NO: 63068 - protein, 7 aa, synthetic construct
HRYDAGL

SEQ ID NO: 63069 - protein, 7 aa, synthetic construct
LARAQGT

SEQ ID NO: 63070 - protein, 7 aa, synthetic construct
NSTSKTG

SEQ ID NO: 63071 - protein, 7 aa, synthetic construct
TKKEPNG

SEQ ID NO: 63072 - protein, 7 aa, synthetic construct
YGSARSM

SEQ ID NO: 63073 - protein, 7 aa, synthetic construct
KEGHAPT

SEQ ID NO: 63074 - protein, 7 aa, synthetic construct
YPEKGNR

SEQ ID NO: 63075 - protein, 7 aa, synthetic construct
FKSTSMS

SEQ ID NO: 63076 - protein, 7 aa, synthetic construct
KTDGIRA

SEQ ID NO: 63077 - protein, 7 aa, synthetic construct
KHGSNFI

SEQ ID NO: 63078 - protein, 7 aa, synthetic construct
NKGPNSS

SEQ ID NO: 63079 - protein, 7 aa, synthetic construct
VTGPQRG

SEQ ID NO: 63080 - protein, 7 aa, synthetic construct
LLGDGSK

SEQ ID NO: 63081 - protein, 7 aa, synthetic construct
VDKPQKP

SEQ ID NO: 63082 - protein, 7 aa, synthetic construct
KQTPGPM

SEQ ID NO: 63083 - protein, 7 aa, synthetic construct
NTTSKQA

SEQ ID NO: 63084 - protein, 7 aa, synthetic construct
LLGNAYG

SEQ ID NO: 63085 - protein, 7 aa, synthetic construct
HPAPQKI

SEQ ID NO: 63086 - protein, 7 aa, synthetic construct
PMGPGKI

SEQ ID NO: 63087 - protein, 7 aa, synthetic construct
NAFHKMD

SEQ ID NO: 63088 - protein, 7 aa, synthetic construct
RHGTNTY

SEQ ID NO: 63089 - protein, 7 aa, synthetic construct
KQQMRQE

SEQ ID NO: 63090 - protein, 7 aa, synthetic construct
TFGMIRE

SEQ ID NO: 63091 - protein, 7 aa, synthetic construct
QKPDSKW

SEQ ID NO: 63092 - protein, 7 aa, synthetic construct
LAKATNY

SEQ ID NO: 63093 - protein, 7 aa, synthetic construct
VDRFKDS

SEQ ID NO: 63094 - protein, 7 aa, synthetic construct
MATFVKE

SEQ ID NO: 63095 - protein, 7 aa, synthetic construct
RGARIIE

SEQ ID NO: 63096 - protein, 7 aa, synthetic construct
GRDFAKT

SEQ ID NO: 63097 - protein, 7 aa, synthetic construct
ERPHHLA

SEQ ID NO: 63098 - protein, 7 aa, synthetic construct
HINTSVI

SEQ ID NO: 63099 - protein, 7 aa, synthetic construct
NKGDDNK

SEQ ID NO: 63100 - protein, 7 aa, synthetic construct
TERFIHG

SEQ ID NO: 63101 - protein, 7 aa, synthetic construct
RDPLIMS

SEQ ID NO: 63102 - protein, 7 aa, synthetic construct
REMTHRE

SEQ ID NO: 63103 - protein, 7 aa, synthetic construct
IVKIKDA

SEQ ID NO: 63104 - protein, 7 aa, synthetic construct
PRDGLIL

SEQ ID NO: 63105 - protein, 7 aa, synthetic construct
MKYGSGE

SEQ ID NO: 63106 - protein, 7 aa, synthetic construct
VTPNGYA

SEQ ID NO: 63107 - protein, 7 aa, synthetic construct
AGQRHHG

SEQ ID NO: 63108 - protein, 7 aa, synthetic construct
MIMKDQH

SEQ ID NO: 63109 - protein, 7 aa, synthetic construct
PPSKQGP

SEQ ID NO: 63110 - protein, 7 aa, synthetic construct
MQRGATG

SEQ ID NO: 63111 - protein, 7 aa, synthetic construct
MITSITP

SEQ ID NO: 63112 - protein, 7 aa, synthetic construct
FDGAKAP

SEQ ID NO: 63113 - protein, 7 aa, synthetic construct
RPVGKNE

SEQ ID NO: 63114 - protein, 7 aa, synthetic construct
MNSVAVY

SEQ ID NO: 63115 - protein, 7 aa, synthetic construct
RGETFSN

SEQ ID NO: 63116 - protein, 7 aa, synthetic construct
NHHSKNI

SEQ ID NO: 63117 - protein, 7 aa, synthetic construct
KTPTAQN

SEQ ID NO: 63118 - protein, 7 aa, synthetic construct
RATNYPM

SEQ ID NO: 63119 - protein, 7 aa, synthetic construct
FSKTNQA

SEQ ID NO: 63120 - protein, 7 aa, synthetic construct
NPSGRMA

SEQ ID NO: 63121 - protein, 7 aa, synthetic construct
KSFDPQM

SEQ ID NO: 63122 - protein, 7 aa, synthetic construct
KQALAVM

SEQ ID NO: 63123 - protein, 7 aa, synthetic construct
VLRDQEA

SEQ ID NO: 63124 - protein, 7 aa, synthetic construct
SKSAWPP

SEQ ID NO: 63125 - protein, 7 aa, synthetic construct
GDVKAMY

SEQ ID NO: 63126 - protein, 7 aa, synthetic construct
ALSQVQA

SEQ ID NO: 63127 - protein, 7 aa, synthetic construct
IAIHDRA

SEQ ID NO: 63128 - protein, 7 aa, synthetic construct
TMGSAMV

SEQ ID NO: 63129 - protein, 7 aa, synthetic construct
ETARPQA

SEQ ID NO: 63130 - protein, 7 aa, synthetic construct
DGIHHNV

SEQ ID NO: 63131 - protein, 7 aa, synthetic construct
APLYKTG

SEQ ID NO: 63132 - protein, 7 aa, synthetic construct
KTQRDQL

SEQ ID NO: 63133 - protein, 7 aa, synthetic construct
NQFVGTV

SEQ ID NO: 63134 - protein, 7 aa, synthetic construct
APSDKIH

SEQ ID NO: 63135 - protein, 7 aa, synthetic construct
NKMKDDS

SEQ ID NO: 63136 - protein, 7 aa, synthetic construct
DLKVMRQ

SEQ ID NO: 63137 - protein, 7 aa, synthetic construct
NGHRQGS

SEQ ID NO: 63138 - protein, 7 aa, synthetic construct
AQLNQPA

SEQ ID NO: 63139 - protein, 7 aa, synthetic construct
DVMNKRS

SEQ ID NO: 63140 - protein, 7 aa, synthetic construct
DLKYLKQ

SEQ ID NO: 63141 - protein, 7 aa, synthetic construct
NLRVNDY

SEQ ID NO: 63142 - protein, 7 aa, synthetic construct
LDQQAKG

SEQ ID NO: 63143 - protein, 7 aa, synthetic construct
TGNVKTG

SEQ ID NO: 63144 - protein, 7 aa, synthetic construct
MKGHETR

SEQ ID NO: 63145 - protein, 7 aa, synthetic construct
DGFKRMN

SEQ ID NO: 63146 - protein, 7 aa, synthetic construct
QKGSQVN

SEQ ID NO: 63147 - protein, 7 aa, synthetic construct
RAYIGGD

SEQ ID NO: 63148 - protein, 7 aa, synthetic construct
KTHKPEQ

SEQ ID NO: 63149 - protein, 7 aa, synthetic construct
FTVGKME

SEQ ID NO: 63150 - protein, 7 aa, synthetic construct
QNSNRGP

SEQ ID NO: 63151 - protein, 7 aa, synthetic construct
WATINAE

SEQ ID NO: 63152 - protein, 7 aa, synthetic construct
KDRMSDE

SEQ ID NO: 63153 - protein, 7 aa, synthetic construct
AMGGHGI

SEQ ID NO: 63154 - protein, 7 aa, synthetic construct
HRTASDL

SEQ ID NO: 63155 - protein, 7 aa, synthetic construct
LPVSNKQ

SEQ ID NO: 63156 - protein, 7 aa, synthetic construct
IVVGAHT

SEQ ID NO: 63157 - protein, 7 aa, synthetic construct
KHGHQMP

SEQ ID NO: 63158 - protein, 7 aa, synthetic construct
SKEIQNM

SEQ ID NO: 63159 - protein, 7 aa, synthetic construct
QRTAAQA

SEQ ID NO: 63160 - protein, 7 aa, synthetic construct
GTTSKQG

SEQ ID NO: 63161 - protein, 7 aa, synthetic construct
MLSHAGG

SEQ ID NO: 63162 - protein, 7 aa, synthetic construct
THKPSVG

SEQ ID NO: 63163 - protein, 7 aa, synthetic construct
KNAVNAD

SEQ ID NO: 63164 - protein, 7 aa, synthetic construct
IGLSTGK

SEQ ID NO: 63165 - protein, 7 aa, synthetic construct
HLPKTHG

SEQ ID NO: 63166 - protein, 7 aa, synthetic construct
KPNAGVP

SEQ ID NO: 63167 - protein, 7 aa, synthetic construct
NPGAQRA

SEQ ID NO: 63168 - protein, 7 aa, synthetic construct
TIARGSN

SEQ ID NO: 63169 - protein, 7 aa, synthetic construct
NRVQKDW

SEQ ID NO: 63170 - protein, 7 aa, synthetic construct
MGVRSQD

SEQ ID NO: 63171 - protein, 7 aa, synthetic construct
KHEVFPP

SEQ ID NO: 63172 - protein, 7 aa, synthetic construct
KESAKIA

SEQ ID NO: 63173 - protein, 7 aa, synthetic construct
QKSPSFA

SEQ ID NO: 63174 - protein, 7 aa, synthetic construct
RQGANNA

SEQ ID NO: 63175 - protein, 7 aa, synthetic construct
ITATQKT

SEQ ID NO: 63176 - protein, 7 aa, synthetic construct
SGPTKHY

SEQ ID NO: 63177 - protein, 7 aa, synthetic construct
NNNQAER

SEQ ID NO: 63178 - protein, 7 aa, synthetic construct
SNAKKEG

SEQ ID NO: 63179 - protein, 7 aa, synthetic construct
FLRTEFV

SEQ ID NO: 63180 - protein, 7 aa, synthetic construct
RERSSTP

SEQ ID NO: 63181 - protein, 7 aa, synthetic construct
QYKGNMV

SEQ ID NO: 63182 - protein, 7 aa, synthetic construct
KGGAGMM

SEQ ID NO: 63183 - protein, 7 aa, synthetic construct
KWVDKVA

SEQ ID NO: 63184 - protein, 7 aa, synthetic construct
ANGAKPS

SEQ ID NO: 63185 - protein, 7 aa, synthetic construct
KPAHQEG

SEQ ID NO: 63186 - protein, 7 aa, synthetic construct
TNITHTE

SEQ ID NO: 63187 - protein, 7 aa, synthetic construct
NQKQASD

SEQ ID NO: 63188 - protein, 7 aa, synthetic construct
MPHKAVT

SEQ ID NO: 63189 - protein, 7 aa, synthetic construct
KTTVNGA

SEQ ID NO: 63190 - protein, 7 aa, synthetic construct
STTGGIG

SEQ ID NO: 63191 - protein, 7 aa, synthetic construct
LVYGGAN

SEQ ID NO: 63192 - protein, 7 aa, synthetic construct
TYYKTEH

SEQ ID NO: 63193 - protein, 7 aa, synthetic construct
YMIAVKA

SEQ ID NO: 63194 - protein, 7 aa, synthetic construct
KNSAAMG

SEQ ID NO: 63195 - protein, 7 aa, synthetic construct
LNGVGKN

SEQ ID NO: 63196 - protein, 7 aa, synthetic construct
DGRYHVT

SEQ ID NO: 63197 - protein, 7 aa, synthetic construct
KYITSQP

SEQ ID NO: 63198 - protein, 7 aa, synthetic construct
DRGHLNE

SEQ ID NO: 63199 - protein, 7 aa, synthetic construct
TNMSGKP

SEQ ID NO: 63200 - protein, 7 aa, synthetic construct
MTAKHSD

SEQ ID NO: 63201 - protein, 7 aa, synthetic construct
PNGFNTI

SEQ ID NO: 63202 - protein, 7 aa, synthetic construct
YPRVNDP

SEQ ID NO: 63203 - protein, 7 aa, synthetic construct
MQEGHKG

SEQ ID NO: 63204 - protein, 7 aa, synthetic construct
GFELKQA

SEQ ID NO: 63205 - protein, 7 aa, synthetic construct
TVNPANA

SEQ ID NO: 63206 - protein, 7 aa, synthetic construct
SAIKHGS

SEQ ID NO: 63207 - protein, 7 aa, synthetic construct
MKNGAQS

SEQ ID NO: 63208 - protein, 7 aa, synthetic construct
MPSQPLD

SEQ ID NO: 63209 - protein, 7 aa, synthetic construct
YKGWTEI

SEQ ID NO: 63210 - protein, 7 aa, synthetic construct
WKAPAEM

SEQ ID NO: 63211 - protein, 7 aa, synthetic construct
QQPNKFS

SEQ ID NO: 63212 - protein, 7 aa, synthetic construct
NKSPAQN

SEQ ID NO: 63213 - protein, 7 aa, synthetic construct
MNQSKSF

SEQ ID NO: 63214 - protein, 7 aa, synthetic construct
NFNGKED

SEQ ID NO: 63215 - protein, 7 aa, synthetic construct
KQKEVMT

SEQ ID NO: 63216 - protein, 7 aa, synthetic construct
LNLKIDG

SEQ ID NO: 63217 - protein, 7 aa, synthetic construct
SVQMKTN

SEQ ID NO: 63218 - protein, 7 aa, synthetic construct
GQAKNDS

SEQ ID NO: 63219 - protein, 7 aa, synthetic construct
AARVEPL

SEQ ID NO: 63220 - protein, 7 aa, synthetic construct
HPHVHGA

SEQ ID NO: 63221 - protein, 7 aa, synthetic construct
HITRTHG

SEQ ID NO: 63222 - protein, 7 aa, synthetic construct
AGNMVSS

SEQ ID NO: 63223 - protein, 7 aa, synthetic construct
FQLKAME

SEQ ID NO: 63224 - protein, 7 aa, synthetic construct
WHSKSVQ

SEQ ID NO: 63225 - protein, 7 aa, synthetic construct
YGQHTVT

SEQ ID NO: 63226 - protein, 7 aa, synthetic construct
VDGARYA

SEQ ID NO: 63227 - protein, 7 aa, synthetic construct
TMKNAES

SEQ ID NO: 63228 - protein, 7 aa, synthetic construct
GKVMLQT

SEQ ID NO: 63229 - protein, 7 aa, synthetic construct
KMDFVRD

SEQ ID NO: 63230 - protein, 7 aa, synthetic construct
KIGQAQS

SEQ ID NO: 63231 - protein, 7 aa, synthetic construct
ASPMVKA

SEQ ID NO: 63232 - protein, 7 aa, synthetic construct
TPMSKPD

SEQ ID NO: 63233 - protein, 7 aa, synthetic construct
RNSIMMD

SEQ ID NO: 63234 - protein, 7 aa, synthetic construct
DKKGAMG

SEQ ID NO: 63235 - protein, 7 aa, synthetic construct
IVANNFA

SEQ ID NO: 63236 - protein, 7 aa, synthetic construct
VGKNASG

SEQ ID NO: 63237 - protein, 7 aa, synthetic construct
IMSHALK

SEQ ID NO: 63238 - protein, 7 aa, synthetic construct
NSNSTML

SEQ ID NO: 63239 - protein, 7 aa, synthetic construct
LGQTRNE

SEQ ID NO: 63240 - protein, 7 aa, synthetic construct
DFITNRA

SEQ ID NO: 63241 - protein, 7 aa, synthetic construct
GKVTMKD

SEQ ID NO: 63242 - protein, 7 aa, synthetic construct
TKQSAVG

SEQ ID NO: 63243 - protein, 7 aa, synthetic construct
SGRHSEV

SEQ ID NO: 63244 - protein, 7 aa, synthetic construct
MHKTKTE

SEQ ID NO: 63245 - protein, 7 aa, synthetic construct
SSSGTPV

SEQ ID NO: 63246 - protein, 7 aa, synthetic construct
QQQNNRD

SEQ ID NO: 63247 - protein, 7 aa, synthetic construct
QLRLGDK

SEQ ID NO: 63248 - protein, 7 aa, synthetic construct
LGMGQQF

SEQ ID NO: 63249 - protein, 7 aa, synthetic construct
RPSNGGS

SEQ ID NO: 63250 - protein, 7 aa, synthetic construct
PRSPQND

SEQ ID NO: 63251 - protein, 7 aa, synthetic construct
ILGYSTQ

SEQ ID NO: 63252 - protein, 7 aa, synthetic construct
SKDRVGA

SEQ ID NO: 63253 - protein, 7 aa, synthetic construct
GNKTQNP

SEQ ID NO: 63254 - protein, 7 aa, synthetic construct
AFPKHAN

SEQ ID NO: 63255 - protein, 7 aa, synthetic construct
VTSTGTT

SEQ ID NO: 63256 - protein, 7 aa, synthetic construct
YRRDASI

SEQ ID NO: 63257 - protein, 7 aa, synthetic construct
SQGAQQA

SEQ ID NO: 63258 - protein, 7 aa, synthetic construct
KQPAGQE

SEQ ID NO: 63259 - protein, 7 aa, synthetic construct
KQSSNAM

SEQ ID NO: 63260 - protein, 7 aa, synthetic construct
MLGKIIA

SEQ ID NO: 63261 - protein, 7 aa, synthetic construct
TKNSAMN

SEQ ID NO: 63262 - protein, 7 aa, synthetic construct
NKKDMGS

SEQ ID NO: 63263 - protein, 7 aa, synthetic construct
VPANRLN

SEQ ID NO: 63264 - protein, 7 aa, synthetic construct
EMSSQSS

SEQ ID NO: 63265 - protein, 7 aa, synthetic construct
VPRGEFI

SEQ ID NO: 63266 - protein, 7 aa, synthetic construct
LDHRMVQ

SEQ ID NO: 63267 - protein, 7 aa, synthetic construct
MTSHSQP

SEQ ID NO: 63268 - protein, 7 aa, synthetic construct
QYSNSIS

SEQ ID NO: 63269 - protein, 7 aa, synthetic construct
QKNQVKE

SEQ ID NO: 63270 - protein, 7 aa, synthetic construct
FHQVKYA

SEQ ID NO: 63271 - protein, 7 aa, synthetic construct
DAMVLKA

SEQ ID NO: 63272 - protein, 7 aa, synthetic construct
PENGGRK

SEQ ID NO: 63273 - protein, 7 aa, synthetic construct
DQTHASV

SEQ ID NO: 63274 - protein, 7 aa, synthetic construct
QHGHFEI

SEQ ID NO: 63275 - protein, 7 aa, synthetic construct
FQKTHLD

SEQ ID NO: 63276 - protein, 7 aa, synthetic construct
YFKGDPP

SEQ ID NO: 63277 - protein, 7 aa, synthetic construct
LAQAELR

SEQ ID NO: 63278 - protein, 7 aa, synthetic construct
RVAPLAD

SEQ ID NO: 63279 - protein, 7 aa, synthetic construct
NHSDFRG

SEQ ID NO: 63280 - protein, 7 aa, synthetic construct
YKTGYHE

SEQ ID NO: 63281 - protein, 7 aa, synthetic construct
QHHTPGN

SEQ ID NO: 63282 - protein, 7 aa, synthetic construct
AHYGRSP

SEQ ID NO: 63283 - protein, 7 aa, synthetic construct
GQFSRNV

SEQ ID NO: 63284 - protein, 7 aa, synthetic construct
TSPLTTH

SEQ ID NO: 63285 - protein, 7 aa, synthetic construct
QYQTARN

SEQ ID NO: 63286 - protein, 7 aa, synthetic construct
KPSQGIQ

SEQ ID NO: 63287 - protein, 7 aa, synthetic construct
KQYNTNP

SEQ ID NO: 63288 - protein, 7 aa, synthetic construct
VYADHGR

SEQ ID NO: 63289 - protein, 7 aa, synthetic construct
YKYSVTP

SEQ ID NO: 63290 - protein, 7 aa, synthetic construct
NGAYAKT

SEQ ID NO: 63291 - protein, 7 aa, synthetic construct
MPGGPNM

SEQ ID NO: 63292 - protein, 7 aa, synthetic construct
PVTKPET

SEQ ID NO: 63293 - protein, 7 aa, synthetic construct
LEVRSAN

SEQ ID NO: 63294 - protein, 7 aa, synthetic construct
HDKVKGI

SEQ ID NO: 63295 - protein, 7 aa, synthetic construct
TVGRRDD

SEQ ID NO: 63296 - protein, 7 aa, synthetic construct
MIQKSLG

SEQ ID NO: 63297 - protein, 7 aa, synthetic construct
SSKSSAS

SEQ ID NO: 63298 - protein, 7 aa, synthetic construct
RLEAIKN

SEQ ID NO: 63299 - protein, 7 aa, synthetic construct
NLFAAVE

SEQ ID NO: 63300 - protein, 7 aa, synthetic construct
ASHDKMG

SEQ ID NO: 63301 - protein, 7 aa, synthetic construct
AGMLVHA

SEQ ID NO: 63302 - protein, 7 aa, synthetic construct
TFKTTGI

SEQ ID NO: 63303 - protein, 7 aa, synthetic construct
PFGSVKP

SEQ ID NO: 63304 - protein, 7 aa, synthetic construct
LQAKMDH

SEQ ID NO: 63305 - protein, 7 aa, synthetic construct
GNFKVVG

SEQ ID NO: 63306 - protein, 7 aa, synthetic construct
KSGVQIM

SEQ ID NO: 63307 - protein, 7 aa, synthetic construct
TQMHSSV

SEQ ID NO: 63308 - protein, 7 aa, synthetic construct
NPVATIG

SEQ ID NO: 63309 - protein, 7 aa, synthetic construct
QPIPVNG

SEQ ID NO: 63310 - protein, 7 aa, synthetic construct
PLNYHKN

SEQ ID NO: 63311 - protein, 7 aa, synthetic construct
SNVTVKW

SEQ ID NO: 63312 - protein, 7 aa, synthetic construct
NVKVGGG

SEQ ID NO: 63313 - protein, 7 aa, synthetic construct
ERSMSVE

SEQ ID NO: 63314 - protein, 7 aa, synthetic construct
NRQVSGA

SEQ ID NO: 63315 - protein, 7 aa, synthetic construct
VLDYHAG

SEQ ID NO: 63316 - protein, 7 aa, synthetic construct
RNSHMSV

SEQ ID NO: 63317 - protein, 7 aa, synthetic construct
AHKHEQV

SEQ ID NO: 63318 - protein, 7 aa, synthetic construct
TNRLQEF

SEQ ID NO: 63319 - protein, 7 aa, synthetic construct
LQVPGPT

SEQ ID NO: 63320 - protein, 7 aa, synthetic construct
NKMNHSH

SEQ ID NO: 63321 - protein, 7 aa, synthetic construct
KPQQAMM

SEQ ID NO: 63322 - protein, 7 aa, synthetic construct
RQPASTP

SEQ ID NO: 63323 - protein, 7 aa, synthetic construct
ARDNVVP

SEQ ID NO: 63324 - protein, 7 aa, synthetic construct
GPKSISG

SEQ ID NO: 63325 - protein, 7 aa, synthetic construct
YKALMPA

SEQ ID NO: 63326 - protein, 7 aa, synthetic construct
GKQGIAG

SEQ ID NO: 63327 - protein, 7 aa, synthetic construct
NHTRGGY

SEQ ID NO: 63328 - protein, 7 aa, synthetic construct
QNRAFTG

SEQ ID NO: 63329 - protein, 7 aa, synthetic construct
HLNDYRS

SEQ ID NO: 63330 - protein, 7 aa, synthetic construct
SNPTRIT

SEQ ID NO: 63331 - protein, 7 aa, synthetic construct
WNDIKAM

SEQ ID NO: 63332 - protein, 7 aa, synthetic construct
NRSEHFM

SEQ ID NO: 63333 - protein, 7 aa, synthetic construct
HGGYHMP

SEQ ID NO: 63334 - protein, 7 aa, synthetic construct
KGVKDNI

SEQ ID NO: 63335 - protein, 7 aa, synthetic construct
DVRAAFK

SEQ ID NO: 63336 - protein, 7 aa, synthetic construct
SGTRAIE

SEQ ID NO: 63337 - protein, 7 aa, synthetic construct
RDHRFEQ

SEQ ID NO: 63338 - protein, 7 aa, synthetic construct
MSKQDKL

SEQ ID NO: 63339 - protein, 7 aa, synthetic construct
QHEFRQP

SEQ ID NO: 63340 - protein, 7 aa, synthetic construct
GINQKQF

SEQ ID NO: 63341 - protein, 7 aa, synthetic construct
WGQYATT

SEQ ID NO: 63342 - protein, 7 aa, synthetic construct
GDITKQV

SEQ ID NO: 63343 - protein, 7 aa, synthetic construct
GSTGKMA

SEQ ID NO: 63344 - protein, 7 aa, synthetic construct
KTTNQVA

SEQ ID NO: 63345 - protein, 7 aa, synthetic construct
PPWKDQV

SEQ ID NO: 63346 - protein, 7 aa, synthetic construct
HHARLTN

SEQ ID NO: 63347 - protein, 7 aa, synthetic construct
KGTPTVG

SEQ ID NO: 63348 - protein, 7 aa, synthetic construct
AYSGVVA

SEQ ID NO: 63349 - protein, 7 aa, synthetic construct
TMKSGNM

SEQ ID NO: 63350 - protein, 7 aa, synthetic construct
RKESTNA

SEQ ID NO: 63351 - protein, 7 aa, synthetic construct
SFQKYQA

SEQ ID NO: 63352 - protein, 7 aa, synthetic construct
FNGKQAG

SEQ ID NO: 63353 - protein, 7 aa, synthetic construct
NNRPITD

SEQ ID NO: 63354 - protein, 7 aa, synthetic construct
DSNHKKD

SEQ ID NO: 63355 - protein, 7 aa, synthetic construct
GNAQSKG

SEQ ID NO: 63356 - protein, 7 aa, synthetic construct
VTNRSTE

SEQ ID NO: 63357 - protein, 7 aa, synthetic construct
NTYPGTE

SEQ ID NO: 63358 - protein, 7 aa, synthetic construct
LDPFPKK

SEQ ID NO: 63359 - protein, 7 aa, synthetic construct
LAVITRE

SEQ ID NO: 63360 - protein, 7 aa, synthetic construct
EQMVKQA

SEQ ID NO: 63361 - protein, 7 aa, synthetic construct
TLKFSNP

SEQ ID NO: 63362 - protein, 7 aa, synthetic construct
SNARTSA

SEQ ID NO: 63363 - protein, 7 aa, synthetic construct
TLGTKVM

SEQ ID NO: 63364 - protein, 7 aa, synthetic construct
NISFKEG

SEQ ID NO: 63365 - protein, 7 aa, synthetic construct
LKGFAEV

SEQ ID NO: 63366 - protein, 7 aa, synthetic construct
LEAHQHV

SEQ ID NO: 63367 - protein, 7 aa, synthetic construct
GAKGMTG

SEQ ID NO: 63368 - protein, 7 aa, synthetic construct
TRREAQE

SEQ ID NO: 63369 - protein, 7 aa, synthetic construct
KSNAVAA

SEQ ID NO: 63370 - protein, 7 aa, synthetic construct
QALRDHA

SEQ ID NO: 63371 - protein, 7 aa, synthetic construct
VQVQSKE

SEQ ID NO: 63372 - protein, 7 aa, synthetic construct
HDRMMMG

SEQ ID NO: 63373 - protein, 7 aa, synthetic construct
TQTHQEY

SEQ ID NO: 63374 - protein, 7 aa, synthetic construct
MATGSQL

SEQ ID NO: 63375 - protein, 7 aa, synthetic construct
HMNPKMI

SEQ ID NO: 63376 - protein, 7 aa, synthetic construct
DLLGVKT

SEQ ID NO: 63377 - protein, 7 aa, synthetic construct
AARAEYR

SEQ ID NO: 63378 - protein, 7 aa, synthetic construct
APAWVKE

SEQ ID NO: 63379 - protein, 7 aa, synthetic construct
LKHERIP

SEQ ID NO: 63380 - protein, 7 aa, synthetic construct
KFNSQGP

SEQ ID NO: 63381 - protein, 7 aa, synthetic construct
KPPSIQE

SEQ ID NO: 63382 - protein, 7 aa, synthetic construct
DRNRTDF

SEQ ID NO: 63383 - protein, 7 aa, synthetic construct
KPAVTVE

SEQ ID NO: 63384 - protein, 7 aa, synthetic construct
LAREQPH

SEQ ID NO: 63385 - protein, 7 aa, synthetic construct
MHIQYKA

SEQ ID NO: 63386 - protein, 7 aa, synthetic construct
NRTNPDN

SEQ ID NO: 63387 - protein, 7 aa, synthetic construct
SPRNSGP

SEQ ID NO: 63388 - protein, 7 aa, synthetic construct
GTKMASG

SEQ ID NO: 63389 - protein, 7 aa, synthetic construct
YTKVEIT

SEQ ID NO: 63390 - protein, 7 aa, synthetic construct
IVKHMDQ

SEQ ID NO: 63391 - protein, 7 aa, synthetic construct
RQIPSDK

SEQ ID NO: 63392 - protein, 7 aa, synthetic construct
HIKIHPD

SEQ ID NO: 63393 - protein, 7 aa, synthetic construct
MRAQITA

SEQ ID NO: 63394 - protein, 7 aa, synthetic construct
ETQYYKE

SEQ ID NO: 63395 - protein, 7 aa, synthetic construct
GSKMPDK

SEQ ID NO: 63396 - protein, 7 aa, synthetic construct
KNSGSNA

SEQ ID NO: 63397 - protein, 7 aa, synthetic construct
VTRSYAE

SEQ ID NO: 63398 - protein, 7 aa, synthetic construct
KFSTTLS

SEQ ID NO: 63399 - protein, 7 aa, synthetic construct
ITHSGSS

SEQ ID NO: 63400 - protein, 7 aa, synthetic construct
TKGSSPA

SEQ ID NO: 63401 - protein, 7 aa, synthetic construct
HRDMIAN

SEQ ID NO: 63402 - protein, 7 aa, synthetic construct
TGHQHLS

SEQ ID NO: 63403 - protein, 7 aa, synthetic construct
GGFKGTP

SEQ ID NO: 63404 - protein, 7 aa, synthetic construct
RHMVGGI

SEQ ID NO: 63405 - protein, 7 aa, synthetic construct
PVPKFRE

SEQ ID NO: 63406 - protein, 7 aa, synthetic construct
KGPSKVE

SEQ ID NO: 63407 - protein, 7 aa, synthetic construct
NYHAGIT

SEQ ID NO: 63408 - protein, 7 aa, synthetic construct
VIKQNFM

SEQ ID NO: 63409 - protein, 7 aa, synthetic construct
RNNEFQQ

SEQ ID NO: 63410 - protein, 7 aa, synthetic construct
TLDLPKQ

SEQ ID NO: 63411 - protein, 7 aa, synthetic construct
QPAGRPT

SEQ ID NO: 63412 - protein, 7 aa, synthetic construct
RYAAQPD

SEQ ID NO: 63413 - protein, 7 aa, synthetic construct
PFKDFDG

SEQ ID NO: 63414 - protein, 7 aa, synthetic construct
KAQTNAI

SEQ ID NO: 63415 - protein, 7 aa, synthetic construct
SDFISMP

SEQ ID NO: 63416 - protein, 7 aa, synthetic construct
QKKTDMG

SEQ ID NO: 63417 - protein, 7 aa, synthetic construct
WKDNFVA

SEQ ID NO: 63418 - protein, 7 aa, synthetic construct
MARGAPI

SEQ ID NO: 63419 - protein, 7 aa, synthetic construct
MRAHAEH

SEQ ID NO: 63420 - protein, 7 aa, synthetic construct
YGTKAAQ

SEQ ID NO: 63421 - protein, 7 aa, synthetic construct
SQQLHTG

SEQ ID NO: 63422 - protein, 7 aa, synthetic construct
PQKSNSG

SEQ ID NO: 63423 - protein, 7 aa, synthetic construct
NIHRGQG

SEQ ID NO: 63424 - protein, 7 aa, synthetic construct
HVKSEIG

SEQ ID NO: 63425 - protein, 7 aa, synthetic construct
DAAKANI

SEQ ID NO: 63426 - protein, 7 aa, synthetic construct
HRENTIP

SEQ ID NO: 63427 - protein, 7 aa, synthetic construct
ETGKPMK

SEQ ID NO: 63428 - protein, 7 aa, synthetic construct
KADMNRP

SEQ ID NO: 63429 - protein, 7 aa, synthetic construct
PFGKNRD

SEQ ID NO: 63430 - protein, 7 aa, synthetic construct
VPWGGTS

SEQ ID NO: 63431 - protein, 7 aa, synthetic construct
QHKNPAA

SEQ ID NO: 63432 - protein, 7 aa, synthetic construct
KQNTAAN

SEQ ID NO: 63433 - protein, 7 aa, synthetic construct
SLMNTGF

SEQ ID NO: 63434 - protein, 7 aa, synthetic construct
FFKEEGR

SEQ ID NO: 63435 - protein, 7 aa, synthetic construct
VRHIKGD

SEQ ID NO: 63436 - protein, 7 aa, synthetic construct
VNSISSH

SEQ ID NO: 63437 - protein, 7 aa, synthetic construct
NKYDTKE

SEQ ID NO: 63438 - protein, 7 aa, synthetic construct
KTTHSIE

SEQ ID NO: 63439 - protein, 7 aa, synthetic construct
NGVKGGP

SEQ ID NO: 63440 - protein, 7 aa, synthetic construct
VTEARKG

SEQ ID NO: 63441 - protein, 7 aa, synthetic construct
NNQHGRQ

SEQ ID NO: 63442 - protein, 7 aa, synthetic construct
GDRGTFA

SEQ ID NO: 63443 - protein, 7 aa, synthetic construct
RTTGGDA

SEQ ID NO: 63444 - protein, 7 aa, synthetic construct
RDHARVE

SEQ ID NO: 63445 - protein, 7 aa, synthetic construct
GPPRAQS

SEQ ID NO: 63446 - protein, 7 aa, synthetic construct
FSHVKGP

SEQ ID NO: 63447 - protein, 7 aa, synthetic construct
GYAEIGR

SEQ ID NO: 63448 - protein, 7 aa, synthetic construct
FENKRAI

SEQ ID NO: 63449 - protein, 7 aa, synthetic construct
PVNGKAG

SEQ ID NO: 63450 - protein, 7 aa, synthetic construct
WDQKNRI

SEQ ID NO: 63451 - protein, 7 aa, synthetic construct
NPPNPHG

SEQ ID NO: 63452 - protein, 7 aa, synthetic construct
STFQDKS

SEQ ID NO: 63453 - protein, 7 aa, synthetic construct
TGKMTIG

SEQ ID NO: 63454 - protein, 7 aa, synthetic construct
TVLKPVQ

SEQ ID NO: 63455 - protein, 7 aa, synthetic construct
STTKPGF

SEQ ID NO: 63456 - protein, 7 aa, synthetic construct
SMNGRSG

SEQ ID NO: 63457 - protein, 7 aa, synthetic construct
SWQHENP

SEQ ID NO: 63458 - protein, 7 aa, synthetic construct
KALQPIS

SEQ ID NO: 63459 - protein, 7 aa, synthetic construct
QFGPKEH

SEQ ID NO: 63460 - protein, 7 aa, synthetic construct
MSRTVVD

SEQ ID NO: 63461 - protein, 7 aa, synthetic construct
YGQHSMS

SEQ ID NO: 63462 - protein, 7 aa, synthetic construct
FRDTVDL

SEQ ID NO: 63463 - protein, 7 aa, synthetic construct
AQGKYVY

SEQ ID NO: 63464 - protein, 7 aa, synthetic construct
GQQVHGS

SEQ ID NO: 63465 - protein, 7 aa, synthetic construct
TLNGRNP

SEQ ID NO: 63466 - protein, 7 aa, synthetic construct
LIGNGSR

SEQ ID NO: 63467 - protein, 7 aa, synthetic construct
KAQQPSH

SEQ ID NO: 63468 - protein, 7 aa, synthetic construct
DRKILMG

SEQ ID NO: 63469 - protein, 7 aa, synthetic construct
HTAVNIG

SEQ ID NO: 63470 - protein, 7 aa, synthetic construct
THKTIQY

SEQ ID NO: 63471 - protein, 7 aa, synthetic construct
ANYGQAA

SEQ ID NO: 63472 - protein, 7 aa, synthetic construct
ANKSQNA

SEQ ID NO: 63473 - protein, 7 aa, synthetic construct
GLDVVPG

SEQ ID NO: 63474 - protein, 7 aa, synthetic construct
AAKNSAM

SEQ ID NO: 63475 - protein, 7 aa, synthetic construct
LPYRSEF

SEQ ID NO: 63476 - protein, 7 aa, synthetic construct
KHGVAGY

SEQ ID NO: 63477 - protein, 7 aa, synthetic construct
MRNALNH

SEQ ID NO: 63478 - protein, 7 aa, synthetic construct
PQMGSKF

SEQ ID NO: 63479 - protein, 7 aa, synthetic construct
IPIHSQP

SEQ ID NO: 63480 - protein, 7 aa, synthetic construct
PGQQLEK

SEQ ID NO: 63481 - protein, 7 aa, synthetic construct
RPAAAPA

SEQ ID NO: 63482 - protein, 7 aa, synthetic construct
KVTRDTY

SEQ ID NO: 63483 - protein, 7 aa, synthetic construct
MGRSAAD

SEQ ID NO: 63484 - protein, 7 aa, synthetic construct
PSGTPYP

SEQ ID NO: 63485 - protein, 7 aa, synthetic construct
KSQKADG

SEQ ID NO: 63486 - protein, 7 aa, synthetic construct
KHESGFS

SEQ ID NO: 63487 - protein, 7 aa, synthetic construct
QHNMISA

SEQ ID NO: 63488 - protein, 7 aa, synthetic construct
GKQSPNS

SEQ ID NO: 63489 - protein, 7 aa, synthetic construct
FIPGRAP

SEQ ID NO: 63490 - protein, 7 aa, synthetic construct
LHMSQNG

SEQ ID NO: 63491 - protein, 7 aa, synthetic construct
RPATMGA

SEQ ID NO: 63492 - protein, 7 aa, synthetic construct
SGPLVSI

SEQ ID NO: 63493 - protein, 7 aa, synthetic construct
NGPQAVA

SEQ ID NO: 63494 - protein, 7 aa, synthetic construct
TEYVAKM

SEQ ID NO: 63495 - protein, 7 aa, synthetic construct
EFGTRSG

SEQ ID NO: 63496 - protein, 7 aa, synthetic construct
TGPYPHE

SEQ ID NO: 63497 - protein, 7 aa, synthetic construct
RDKILNN

SEQ ID NO: 63498 - protein, 7 aa, synthetic construct
KISGVTM

SEQ ID NO: 63499 - protein, 7 aa, synthetic construct
RPTTSPG

SEQ ID NO: 63500 - protein, 7 aa, synthetic construct
IHQNIVS

SEQ ID NO: 63501 - protein, 7 aa, synthetic construct
LANPRAF

SEQ ID NO: 63502 - protein, 7 aa, synthetic construct
LMTGIRQ

SEQ ID NO: 63503 - protein, 7 aa, synthetic construct
YNGQRNI

SEQ ID NO: 63504 - protein, 7 aa, synthetic construct
QVKNSMG

SEQ ID NO: 63505 - protein, 7 aa, synthetic construct
KPPTSSI

SEQ ID NO: 63506 - protein, 7 aa, synthetic construct
GSFRAEQ

SEQ ID NO: 63507 - protein, 7 aa, synthetic construct
NTNSYRP

SEQ ID NO: 63508 - protein, 7 aa, synthetic construct
ADVSRAS

SEQ ID NO: 63509 - protein, 7 aa, synthetic construct
KSIAKDD

SEQ ID NO: 63510 - protein, 7 aa, synthetic construct
KAAQAKD

SEQ ID NO: 63511 - protein, 7 aa, synthetic construct
QHKSSSA

SEQ ID NO: 63512 - protein, 7 aa, synthetic construct
LKSVAKD

SEQ ID NO: 63513 - protein, 7 aa, synthetic construct
HEHPKGF

SEQ ID NO: 63514 - protein, 7 aa, synthetic construct
AFGSMQK

SEQ ID NO: 63515 - protein, 7 aa, synthetic construct
RQFNQSA

SEQ ID NO: 63516 - protein, 7 aa, synthetic construct
IKGHEGP

SEQ ID NO: 63517 - protein, 7 aa, synthetic construct
YGTKALH

SEQ ID NO: 63518 - protein, 7 aa, synthetic construct
MSKGNAG

SEQ ID NO: 63519 - protein, 7 aa, synthetic construct
AKMSPDR

SEQ ID NO: 63520 - protein, 7 aa, synthetic construct
MGKAPTG

SEQ ID NO: 63521 - protein, 7 aa, synthetic construct
DNSVYKA

SEQ ID NO: 63522 - protein, 7 aa, synthetic construct
DQFDHSP

SEQ ID NO: 63523 - protein, 7 aa, synthetic construct
MQNFQRE

SEQ ID NO: 63524 - protein, 7 aa, synthetic construct
DGYANRN

SEQ ID NO: 63525 - protein, 7 aa, synthetic construct
KVQTQAN

SEQ ID NO: 63526 - protein, 7 aa, synthetic construct
TQGVIKG

SEQ ID NO: 63527 - protein, 7 aa, synthetic construct
QPTYTPH

SEQ ID NO: 63528 - protein, 7 aa, synthetic construct
TQGKNVP

SEQ ID NO: 63529 - protein, 7 aa, synthetic construct
RHSQNQD

SEQ ID NO: 63530 - protein, 7 aa, synthetic construct
TEKRREE

SEQ ID NO: 63531 - protein, 7 aa, synthetic construct
RQAPDAK

SEQ ID NO: 63532 - protein, 7 aa, synthetic construct
KTNSGIS

SEQ ID NO: 63533 - protein, 7 aa, synthetic construct
VVTNKQP

SEQ ID NO: 63534 - protein, 7 aa, synthetic construct
GVHNKGV

SEQ ID NO: 63535 - protein, 7 aa, synthetic construct
KPEQSQP

SEQ ID NO: 63536 - protein, 7 aa, synthetic construct
PAYNNGK

SEQ ID NO: 63537 - protein, 7 aa, synthetic construct
VKGPGPL

SEQ ID NO: 63538 - protein, 7 aa, synthetic construct
QAGGKND

SEQ ID NO: 63539 - protein, 7 aa, synthetic construct
VRGHENF

SEQ ID NO: 63540 - protein, 7 aa, synthetic construct
EFANARA

SEQ ID NO: 63541 - protein, 7 aa, synthetic construct
NKSQPSS

SEQ ID NO: 63542 - protein, 7 aa, synthetic construct
HTVRPAQ

SEQ ID NO: 63543 - protein, 7 aa, synthetic construct
WNKGSST

SEQ ID NO: 63544 - protein, 7 aa, synthetic construct
RATPNEN

SEQ ID NO: 63545 - protein, 7 aa, synthetic construct
YHVTSPG

SEQ ID NO: 63546 - protein, 7 aa, synthetic construct
NIKGELV

SEQ ID NO: 63547 - protein, 7 aa, synthetic construct
GERPPRH

SEQ ID NO: 63548 - protein, 7 aa, synthetic construct
MQNNYPQ

SEQ ID NO: 63549 - protein, 7 aa, synthetic construct
GMKMSGG

SEQ ID NO: 63550 - protein, 7 aa, synthetic construct
QNSMKGM

SEQ ID NO: 63551 - protein, 7 aa, synthetic construct
GHPKGHT

SEQ ID NO: 63552 - protein, 7 aa, synthetic construct
GPASYAK

SEQ ID NO: 63553 - protein, 7 aa, synthetic construct
PLAPKVN

SEQ ID NO: 63554 - protein, 7 aa, synthetic construct
MEKTAAK

SEQ ID NO: 63555 - protein, 7 aa, synthetic construct
WKTPAVG

SEQ ID NO: 63556 - protein, 7 aa, synthetic construct
IKGGIYG

SEQ ID NO: 63557 - protein, 7 aa, synthetic construct
AGYNSHG

SEQ ID NO: 63558 - protein, 7 aa, synthetic construct
FKASNLD

SEQ ID NO: 63559 - protein, 7 aa, synthetic construct
YKVHQLN

SEQ ID NO: 63560 - protein, 7 aa, synthetic construct
GKQTGGT

SEQ ID NO: 63561 - protein, 7 aa, synthetic construct
PQISSKG

SEQ ID NO: 63562 - protein, 7 aa, synthetic construct
MNIPLKG

SEQ ID NO: 63563 - protein, 7 aa, synthetic construct
GKAVTKD

SEQ ID NO: 63564 - protein, 7 aa, synthetic construct
IPMLQGH

SEQ ID NO: 63565 - protein, 7 aa, synthetic construct
APTSMQA

SEQ ID NO: 63566 - protein, 7 aa, synthetic construct
ASSLPRH

SEQ ID NO: 63567 - protein, 7 aa, synthetic construct
QKPNTVM

SEQ ID NO: 63568 - protein, 7 aa, synthetic construct
VHERSQA

SEQ ID NO: 63569 - protein, 7 aa, synthetic construct
YKPVDMG

SEQ ID NO: 63570 - protein, 7 aa, synthetic construct
NNGKALS

SEQ ID NO: 63571 - protein, 7 aa, synthetic construct
FANGMHA

SEQ ID NO: 63572 - protein, 7 aa, synthetic construct
KKEPGSG

SEQ ID NO: 63573 - protein, 7 aa, synthetic construct
SNQKITG

SEQ ID NO: 63574 - protein, 7 aa, synthetic construct
YDKQTYH

SEQ ID NO: 63575 - protein, 7 aa, synthetic construct
GLSRLTP

SEQ ID NO: 63576 - protein, 7 aa, synthetic construct
KSNTGGM

SEQ ID NO: 63577 - protein, 7 aa, synthetic construct
LNMSYMG

SEQ ID NO: 63578 - protein, 7 aa, synthetic construct
HPHGYIG

SEQ ID NO: 63579 - protein, 7 aa, synthetic construct
YPQAKSP

SEQ ID NO: 63580 - protein, 7 aa, synthetic construct
RNPSSMV

SEQ ID NO: 63581 - protein, 7 aa, synthetic construct
PRTSTMS

SEQ ID NO: 63582 - protein, 7 aa, synthetic construct
NRASIDA

SEQ ID NO: 63583 - protein, 7 aa, synthetic construct
DPRNGMM

SEQ ID NO: 63584 - protein, 7 aa, synthetic construct
LNTIGIG

SEQ ID NO: 63585 - protein, 7 aa, synthetic construct
ILGRIDQ

SEQ ID NO: 63586 - protein, 7 aa, synthetic construct
FPKSDSN

SEQ ID NO: 63587 - protein, 7 aa, synthetic construct
HSSMGTG

SEQ ID NO: 63588 - protein, 7 aa, synthetic construct
QRAPQNA

SEQ ID NO: 63589 - protein, 7 aa, synthetic construct
VTKMDNL

SEQ ID NO: 63590 - protein, 7 aa, synthetic construct
SSKTNMA

SEQ ID NO: 63591 - protein, 7 aa, synthetic construct
DLPSYKM

SEQ ID NO: 63592 - protein, 7 aa, synthetic construct
ANSRTVA

SEQ ID NO: 63593 - protein, 7 aa, synthetic construct
LPQVRTE

SEQ ID NO: 63594 - protein, 7 aa, synthetic construct
WKHTNGD

SEQ ID NO: 63595 - protein, 7 aa, synthetic construct
RNSQGGG

SEQ ID NO: 63596 - protein, 7 aa, synthetic construct
KGSSISA

SEQ ID NO: 63597 - protein, 7 aa, synthetic construct
FMKNMPY

SEQ ID NO: 63598 - protein, 7 aa, synthetic construct
QANVRQS

SEQ ID NO: 63599 - protein, 7 aa, synthetic construct
MKSKTGE

SEQ ID NO: 63600 - protein, 7 aa, synthetic construct
VAQSAKN

SEQ ID NO: 63601 - protein, 7 aa, synthetic construct
THRSDQG

SEQ ID NO: 63602 - protein, 7 aa, synthetic construct
FLASNKS

SEQ ID NO: 63603 - protein, 7 aa, synthetic construct
QQIGMGV

SEQ ID NO: 63604 - protein, 7 aa, synthetic construct
KDGSKGN

SEQ ID NO: 63605 - protein, 7 aa, synthetic construct
NDNIKYS

SEQ ID NO: 63606 - protein, 7 aa, synthetic construct
LHHTSKD

SEQ ID NO: 63607 - protein, 7 aa, synthetic construct
GKSQQQA

SEQ ID NO: 63608 - protein, 7 aa, synthetic construct
QSQVQRG

SEQ ID NO: 63609 - protein, 7 aa, synthetic construct
VTAARAS

SEQ ID NO: 63610 - protein, 7 aa, synthetic construct
QQKAVNQ

SEQ ID NO: 63611 - protein, 7 aa, synthetic construct
SSSKSGM

SEQ ID NO: 63612 - protein, 7 aa, synthetic construct
NHRDGNK

SEQ ID NO: 63613 - protein, 7 aa, synthetic construct
PNQMMPS

SEQ ID NO: 63614 - protein, 7 aa, synthetic construct
VLNVIRD

SEQ ID NO: 63615 - protein, 7 aa, synthetic construct
PAGKGAI

SEQ ID NO: 63616 - protein, 7 aa, synthetic construct
VPDKHRY

SEQ ID NO: 63617 - protein, 7 aa, synthetic construct
QSEHVKR

SEQ ID NO: 63618 - protein, 7 aa, synthetic construct
GSQATKG

SEQ ID NO: 63619 - protein, 7 aa, synthetic construct
FPNRDSQ

SEQ ID NO: 63620 - protein, 7 aa, synthetic construct
YKNLILE

SEQ ID NO: 63621 - protein, 7 aa, synthetic construct
IKNVGKE

SEQ ID NO: 63622 - protein, 7 aa, synthetic construct
AQYRNQE

SEQ ID NO: 63623 - protein, 7 aa, synthetic construct
NGHKRPD

SEQ ID NO: 63624 - protein, 7 aa, synthetic construct
EIVKTGG

SEQ ID NO: 63625 - protein, 7 aa, synthetic construct
GSSRPLY

SEQ ID NO: 63626 - protein, 7 aa, synthetic construct
QRVNTFT

SEQ ID NO: 63627 - protein, 7 aa, synthetic construct
TYSGAKS

SEQ ID NO: 63628 - protein, 7 aa, synthetic construct
NRNPNSS

SEQ ID NO: 63629 - protein, 7 aa, synthetic construct
LSLNKVE

SEQ ID NO: 63630 - protein, 7 aa, synthetic construct
SPNKNNG

SEQ ID NO: 63631 - protein, 7 aa, synthetic construct
WPSENNP

SEQ ID NO: 63632 - protein, 7 aa, synthetic construct
IHREPNM

SEQ ID NO: 63633 - protein, 7 aa, synthetic construct
HDANTRP

SEQ ID NO: 63634 - protein, 7 aa, synthetic construct
TVGPNRM

SEQ ID NO: 63635 - protein, 7 aa, synthetic construct
AKGTHDV

SEQ ID NO: 63636 - protein, 7 aa, synthetic construct
HNGTSAS

SEQ ID NO: 63637 - protein, 7 aa, synthetic construct
TKGDQKV

SEQ ID NO: 63638 - protein, 7 aa, synthetic construct
INAQPKF

SEQ ID NO: 63639 - protein, 7 aa, synthetic construct
TKATTRE

SEQ ID NO: 63640 - protein, 7 aa, synthetic construct
ESSNLQR

SEQ ID NO: 63641 - protein, 7 aa, synthetic construct
MIRAGTN

SEQ ID NO: 63642 - protein, 7 aa, synthetic construct
GKMSMNA

SEQ ID NO: 63643 - protein, 7 aa, synthetic construct
MFVAKVP

SEQ ID NO: 63644 - protein, 7 aa, synthetic construct
IPERRIS

SEQ ID NO: 63645 - protein, 7 aa, synthetic construct
PRLDLVS

SEQ ID NO: 63646 - protein, 7 aa, synthetic construct
TTREIPP

SEQ ID NO: 63647 - protein, 7 aa, synthetic construct
PYDKKYF

SEQ ID NO: 63648 - protein, 7 aa, synthetic construct
TKNMSPD

SEQ ID NO: 63649 - protein, 7 aa, synthetic construct
QEFGRPH

SEQ ID NO: 63650 - protein, 7 aa, synthetic construct
AAQSVQR

SEQ ID NO: 63651 - protein, 7 aa, synthetic construct
LEVTRTV

SEQ ID NO: 63652 - protein, 7 aa, synthetic construct
ARDLIDR

SEQ ID NO: 63653 - protein, 7 aa, synthetic construct
QKVSVGG

SEQ ID NO: 63654 - protein, 7 aa, synthetic construct
TKQHIAY

SEQ ID NO: 63655 - protein, 7 aa, synthetic construct
QGLMPHG

SEQ ID NO: 63656 - protein, 7 aa, synthetic construct
RVAAEYR

SEQ ID NO: 63657 - protein, 7 aa, synthetic construct
TRVMSVT

SEQ ID NO: 63658 - protein, 7 aa, synthetic construct
MQYDKTH

SEQ ID NO: 63659 - protein, 7 aa, synthetic construct
VFGNKDP

SEQ ID NO: 63660 - protein, 7 aa, synthetic construct
IHAGAGM

SEQ ID NO: 63661 - protein, 7 aa, synthetic construct
KPGTHGD

SEQ ID NO: 63662 - protein, 7 aa, synthetic construct
HRNAVHG

SEQ ID NO: 63663 - protein, 7 aa, synthetic construct
NLRGPVP

SEQ ID NO: 63664 - protein, 7 aa, synthetic construct
MPYRELS

SEQ ID NO: 63665 - protein, 7 aa, synthetic construct
TWMKQGD

SEQ ID NO: 63666 - protein, 7 aa, synthetic construct
FPNVALS

SEQ ID NO: 63667 - protein, 7 aa, synthetic construct
KKDSVKD

SEQ ID NO: 63668 - protein, 7 aa, synthetic construct
GNPAAKT

SEQ ID NO: 63669 - protein, 7 aa, synthetic construct
YEGQIQR

SEQ ID NO: 63670 - protein, 7 aa, synthetic construct
GQTNRMN

SEQ ID NO: 63671 - protein, 7 aa, synthetic construct
KVHDKQA

SEQ ID NO: 63672 - protein, 7 aa, synthetic construct
FTKYEIS

SEQ ID NO: 63673 - protein, 7 aa, synthetic construct
DKFSKQD

SEQ ID NO: 63674 - protein, 7 aa, synthetic construct
TIPSGAG

SEQ ID NO: 63675 - protein, 7 aa, synthetic construct
HGGRVSV

SEQ ID NO: 63676 - protein, 7 aa, synthetic construct
QPLLQQA

SEQ ID NO: 63677 - protein, 7 aa, synthetic construct
FGGAHGM

SEQ ID NO: 63678 - protein, 7 aa, synthetic construct
TQIHEMP

SEQ ID NO: 63679 - protein, 7 aa, synthetic construct
VPSTRMA

SEQ ID NO: 63680 - protein, 7 aa, synthetic construct
IRESGQI

SEQ ID NO: 63681 - protein, 7 aa, synthetic construct
KLTGHDG

SEQ ID NO: 63682 - protein, 7 aa, synthetic construct
WQDKPKL

SEQ ID NO: 63683 - protein, 7 aa, synthetic construct
KNQASMS

SEQ ID NO: 63684 - protein, 7 aa, synthetic construct
DGKPGHV

SEQ ID NO: 63685 - protein, 7 aa, synthetic construct
NYGVGRG

SEQ ID NO: 63686 - protein, 7 aa, synthetic construct
KPTGPMG

SEQ ID NO: 63687 - protein, 7 aa, synthetic construct
NVLKAGT

SEQ ID NO: 63688 - protein, 7 aa, synthetic construct
WTSRQAS

SEQ ID NO: 63689 - protein, 7 aa, synthetic construct
SFTVQNP

SEQ ID NO: 63690 - protein, 7 aa, synthetic construct
INPYTAV

SEQ ID NO: 63691 - protein, 7 aa, synthetic construct
PPLKPIS

SEQ ID NO: 63692 - protein, 7 aa, synthetic construct
KYEQGQE

SEQ ID NO: 63693 - protein, 7 aa, synthetic construct
QVPTAHG

SEQ ID NO: 63694 - protein, 7 aa, synthetic construct
RSSDGRA

SEQ ID NO: 63695 - protein, 7 aa, synthetic construct
NTSWNKG

SEQ ID NO: 63696 - protein, 7 aa, synthetic construct
KLDSKAG

SEQ ID NO: 63697 - protein, 7 aa, synthetic construct
HAREILP

SEQ ID NO: 63698 - protein, 7 aa, synthetic construct
WPHKTEQ

SEQ ID NO: 63699 - protein, 7 aa, synthetic construct
MGHRDQP

SEQ ID NO: 63700 - protein, 7 aa, synthetic construct
NNNINNM

SEQ ID NO: 63701 - protein, 7 aa, synthetic construct
MHPGMDK

SEQ ID NO: 63702 - protein, 7 aa, synthetic construct
SHTLKEG

SEQ ID NO: 63703 - protein, 7 aa, synthetic construct
GFKQSVG

SEQ ID NO: 63704 - protein, 7 aa, synthetic construct
DSGTIRG

SEQ ID NO: 63705 - protein, 7 aa, synthetic construct
SPNKSSE

SEQ ID NO: 63706 - protein, 7 aa, synthetic construct
STTTQSI

SEQ ID NO: 63707 - protein, 7 aa, synthetic construct
NSNKPGQ

SEQ ID NO: 63708 - protein, 7 aa, synthetic construct
RGNNGTA

SEQ ID NO: 63709 - protein, 7 aa, synthetic construct
NRRADIE

SEQ ID NO: 63710 - protein, 7 aa, synthetic construct
PVNTARG

SEQ ID NO: 63711 - protein, 7 aa, synthetic construct
MIYKVSE

SEQ ID NO: 63712 - protein, 7 aa, synthetic construct
NEGVYKS

SEQ ID NO: 63713 - protein, 7 aa, synthetic construct
EIKIMQG

SEQ ID NO: 63714 - protein, 7 aa, synthetic construct
AREQTRV

SEQ ID NO: 63715 - protein, 7 aa, synthetic construct
WGDMHQV

SEQ ID NO: 63716 - protein, 7 aa, synthetic construct
QINGFHA

SEQ ID NO: 63717 - protein, 7 aa, synthetic construct
INAKRLP

SEQ ID NO: 63718 - protein, 7 aa, synthetic construct
ESRGVGA

SEQ ID NO: 63719 - protein, 7 aa, synthetic construct
SLTGQTS

SEQ ID NO: 63720 - protein, 7 aa, synthetic construct
DSGFERR

SEQ ID NO: 63721 - protein, 7 aa, synthetic construct
KAFSGTP

SEQ ID NO: 63722 - protein, 7 aa, synthetic construct
HRTNDNF

SEQ ID NO: 63723 - protein, 7 aa, synthetic construct
SQSSKQP

SEQ ID NO: 63724 - protein, 7 aa, synthetic construct
VGPNYNK

SEQ ID NO: 63725 - protein, 7 aa, synthetic construct
QQPSKHE

SEQ ID NO: 63726 - protein, 7 aa, synthetic construct
NALRNDF

SEQ ID NO: 63727 - protein, 7 aa, synthetic construct
ADRHREY

SEQ ID NO: 63728 - protein, 7 aa, synthetic construct
THHNEPV

SEQ ID NO: 63729 - protein, 7 aa, synthetic construct
RHGQFSN

SEQ ID NO: 63730 - protein, 7 aa, synthetic construct
VRSYNTA

SEQ ID NO: 63731 - protein, 7 aa, synthetic construct
NSSQKPG

SEQ ID NO: 63732 - protein, 7 aa, synthetic construct
IAERVPP

SEQ ID NO: 63733 - protein, 7 aa, synthetic construct
EKYINTG

SEQ ID NO: 63734 - protein, 7 aa, synthetic construct
QPELSQK

SEQ ID NO: 63735 - protein, 7 aa, synthetic construct
NDHSQRA

SEQ ID NO: 63736 - protein, 7 aa, synthetic construct
SEKTKFP

SEQ ID NO: 63737 - protein, 7 aa, synthetic construct
LNPNNLL

SEQ ID NO: 63738 - protein, 7 aa, synthetic construct
GAKVPLN

SEQ ID NO: 63739 - protein, 7 aa, synthetic construct
YKQMKGE

SEQ ID NO: 63740 - protein, 7 aa, synthetic construct
SLFTGVA

SEQ ID NO: 63741 - protein, 7 aa, synthetic construct
KYPGTSV

SEQ ID NO: 63742 - protein, 7 aa, synthetic construct
QHSGQLS

SEQ ID NO: 63743 - protein, 7 aa, synthetic construct
EAHGHPL

SEQ ID NO: 63744 - protein, 7 aa, synthetic construct
FPTGHQG

SEQ ID NO: 63745 - protein, 7 aa, synthetic construct
IAGPKAN

SEQ ID NO: 63746 - protein, 7 aa, synthetic construct
TGKTVAA

SEQ ID NO: 63747 - protein, 7 aa, synthetic construct
SAGGHMP

SEQ ID NO: 63748 - protein, 7 aa, synthetic construct
THITPLS

SEQ ID NO: 63749 - protein, 7 aa, synthetic construct
SNSQKQV

SEQ ID NO: 63750 - protein, 7 aa, synthetic construct
KAMDRTP

SEQ ID NO: 63751 - protein, 7 aa, synthetic construct
TENQKMM

SEQ ID NO: 63752 - protein, 7 aa, synthetic construct
KSHSIVA

SEQ ID NO: 63753 - protein, 7 aa, synthetic construct
HALKFPE

SEQ ID NO: 63754 - protein, 7 aa, synthetic construct
TKTNATG

SEQ ID NO: 63755 - protein, 7 aa, synthetic construct
HNPKPTS

SEQ ID NO: 63756 - protein, 7 aa, synthetic construct
AQHNAYV

SEQ ID NO: 63757 - protein, 7 aa, synthetic construct
KPLQSSM

SEQ ID NO: 63758 - protein, 7 aa, synthetic construct
VPVGLSG

SEQ ID NO: 63759 - protein, 7 aa, synthetic construct
QMLSIQG

SEQ ID NO: 63760 - protein, 7 aa, synthetic construct
WESHQSP

SEQ ID NO: 63761 - protein, 7 aa, synthetic construct
VRVGVEG

SEQ ID NO: 63762 - protein, 7 aa, synthetic construct
GTSQKSG

SEQ ID NO: 63763 - protein, 7 aa, synthetic construct
SKTINQA

SEQ ID NO: 63764 - protein, 7 aa, synthetic construct
ALKSPDH

SEQ ID NO: 63765 - protein, 7 aa, synthetic construct
VQGVSQH

SEQ ID NO: 63766 - protein, 7 aa, synthetic construct
AGPHYPQ

SEQ ID NO: 63767 - protein, 7 aa, synthetic construct
WTKFQIA

SEQ ID NO: 63768 - protein, 7 aa, synthetic construct
FNATPKI

SEQ ID NO: 63769 - protein, 7 aa, synthetic construct
SKNSPAG

SEQ ID NO: 63770 - protein, 7 aa, synthetic construct
FHPADRN

SEQ ID NO: 63771 - protein, 7 aa, synthetic construct
ELTKPAS

SEQ ID NO: 63772 - protein, 7 aa, synthetic construct
QLASVKE

SEQ ID NO: 63773 - protein, 7 aa, synthetic construct
ERVGREG

SEQ ID NO: 63774 - protein, 7 aa, synthetic construct
MHSKYPA

SEQ ID NO: 63775 - protein, 7 aa, synthetic construct
GMRPRDF

SEQ ID NO: 63776 - protein, 7 aa, synthetic construct
QRGPRDD

SEQ ID NO: 63777 - protein, 7 aa, synthetic construct
MDHYLSA

SEQ ID NO: 63778 - protein, 7 aa, synthetic construct
NEAGVRP

SEQ ID NO: 63779 - protein, 7 aa, synthetic construct
VKNQPPN

SEQ ID NO: 63780 - protein, 7 aa, synthetic construct
AYITGTG

SEQ ID NO: 63781 - protein, 7 aa, synthetic construct
SGRIDNK

SEQ ID NO: 63782 - protein, 7 aa, synthetic construct
TLEQKLA

SEQ ID NO: 63783 - protein, 7 aa, synthetic construct
IPSFHTQ

SEQ ID NO: 63784 - protein, 7 aa, synthetic construct
QRSNYPS

SEQ ID NO: 63785 - protein, 7 aa, synthetic construct
ASPGRHY

SEQ ID NO: 63786 - protein, 7 aa, synthetic construct
IYNREST

SEQ ID NO: 63787 - protein, 7 aa, synthetic construct
QGSNTKG

SEQ ID NO: 63788 - protein, 7 aa, synthetic construct
GAFGDAK

SEQ ID NO: 63789 - protein, 7 aa, synthetic construct
SAHVKDI

SEQ ID NO: 63790 - protein, 7 aa, synthetic construct
SGKPNGS

SEQ ID NO: 63791 - protein, 7 aa, synthetic construct
PGNQKHD

SEQ ID NO: 63792 - protein, 7 aa, synthetic construct
NKPGPGN

SEQ ID NO: 63793 - protein, 7 aa, synthetic construct
HAEWTKH

SEQ ID NO: 63794 - protein, 7 aa, synthetic construct
GANRQLH

SEQ ID NO: 63795 - protein, 7 aa, synthetic construct
TNKANAA

SEQ ID NO: 63796 - protein, 7 aa, synthetic construct
FGHERNV

SEQ ID NO: 63797 - protein, 7 aa, synthetic construct
IVHKPYT

SEQ ID NO: 63798 - protein, 7 aa, synthetic construct
RSPMVAA

SEQ ID NO: 63799 - protein, 7 aa, synthetic construct
HDPWPQG

SEQ ID NO: 63800 - protein, 7 aa, synthetic construct
VRTLPPP

SEQ ID NO: 63801 - protein, 7 aa, synthetic construct
GIRQHDI

SEQ ID NO: 63802 - protein, 7 aa, synthetic construct
PYKGNLV

SEQ ID NO: 63803 - protein, 7 aa, synthetic construct
PRQHALS

SEQ ID NO: 63804 - protein, 7 aa, synthetic construct
KSNINAG

SEQ ID NO: 63805 - protein, 7 aa, synthetic construct
PHSMDVV

SEQ ID NO: 63806 - protein, 7 aa, synthetic construct
DKMTRGG

SEQ ID NO: 63807 - protein, 7 aa, synthetic construct
SVSQKLY

SEQ ID NO: 63808 - protein, 7 aa, synthetic construct
LSQFLDK

SEQ ID NO: 63809 - protein, 7 aa, synthetic construct
KDRNGGA

SEQ ID NO: 63810 - protein, 7 aa, synthetic construct
HLKNDST

SEQ ID NO: 63811 - protein, 7 aa, synthetic construct
IMRAPPP

SEQ ID NO: 63812 - protein, 7 aa, synthetic construct
KWIPEHP

SEQ ID NO: 63813 - protein, 7 aa, synthetic construct
IMKHAGH

SEQ ID NO: 63814 - protein, 7 aa, synthetic construct
VSGKPQT

SEQ ID NO: 63815 - protein, 7 aa, synthetic construct
GGRQVQD

SEQ ID NO: 63816 - protein, 7 aa, synthetic construct
VREKYQD

SEQ ID NO: 63817 - protein, 7 aa, synthetic construct
RVPNLTE

SEQ ID NO: 63818 - protein, 7 aa, synthetic construct
VEKSHVP

SEQ ID NO: 63819 - protein, 7 aa, synthetic construct
WMRGMEN

SEQ ID NO: 63820 - protein, 7 aa, synthetic construct
IQQTLKP

SEQ ID NO: 63821 - protein, 7 aa, synthetic construct
IAAYFPE

SEQ ID NO: 63822 - protein, 7 aa, synthetic construct
RNNQTFP

SEQ ID NO: 63823 - protein, 7 aa, synthetic construct
WQGHNSG

SEQ ID NO: 63824 - protein, 7 aa, synthetic construct
VFTKPSI

SEQ ID NO: 63825 - protein, 7 aa, synthetic construct
KPQMGMA

SEQ ID NO: 63826 - protein, 7 aa, synthetic construct
TIKHGHL

SEQ ID NO: 63827 - protein, 7 aa, synthetic construct
QKVVGPS

SEQ ID NO: 63828 - protein, 7 aa, synthetic construct
LDINRSF

SEQ ID NO: 63829 - protein, 7 aa, synthetic construct
GAYLKVT

SEQ ID NO: 63830 - protein, 7 aa, synthetic construct
QERTNIV

SEQ ID NO: 63831 - protein, 7 aa, synthetic construct
SVWRAEE

SEQ ID NO: 63832 - protein, 7 aa, synthetic construct
NTRDMKN

SEQ ID NO: 63833 - protein, 7 aa, synthetic construct
DFQKRTN

SEQ ID NO: 63834 - protein, 7 aa, synthetic construct
GPGVQQG

SEQ ID NO: 63835 - protein, 7 aa, synthetic construct
DKFQQAH

SEQ ID NO: 63836 - protein, 7 aa, synthetic construct
KVNTSGN

SEQ ID NO: 63837 - protein, 7 aa, synthetic construct
PFKKFDD

SEQ ID NO: 63838 - protein, 7 aa, synthetic construct
NREYTQS

SEQ ID NO: 63839 - protein, 7 aa, synthetic construct
ISNMASQ

SEQ ID NO: 63840 - protein, 7 aa, synthetic construct
NQHKTGA

SEQ ID NO: 63841 - protein, 7 aa, synthetic construct
SQNSKGI

SEQ ID NO: 63842 - protein, 7 aa, synthetic construct
KQTSAAA

SEQ ID NO: 63843 - protein, 7 aa, synthetic construct
HPMPRAT

SEQ ID NO: 63844 - protein, 7 aa, synthetic construct
KVAIAHD

SEQ ID NO: 63845 - protein, 7 aa, synthetic construct
KPMVGNI

SEQ ID NO: 63846 - protein, 7 aa, synthetic construct
VSAKHMT

SEQ ID NO: 63847 - protein, 7 aa, synthetic construct
LSKQMSP

SEQ ID NO: 63848 - protein, 7 aa, synthetic construct
SFGGMTH

SEQ ID NO: 63849 - protein, 7 aa, synthetic construct
QSKTGYM

SEQ ID NO: 63850 - protein, 7 aa, synthetic construct
RNHHPTP

SEQ ID NO: 63851 - protein, 7 aa, synthetic construct
PGINATV

SEQ ID NO: 63852 - protein, 7 aa, synthetic construct
VNEMQRT

SEQ ID NO: 63853 - protein, 7 aa, synthetic construct
QAGHGEG

SEQ ID NO: 63854 - protein, 7 aa, synthetic construct
RNAAGPV

SEQ ID NO: 63855 - protein, 7 aa, synthetic construct
KPQGVTA

SEQ ID NO: 63856 - protein, 7 aa, synthetic construct
KIRQPEQ

SEQ ID NO: 63857 - protein, 7 aa, synthetic construct
LLKQSNY

SEQ ID NO: 63858 - protein, 7 aa, synthetic construct
MKYPVET

SEQ ID NO: 63859 - protein, 7 aa, synthetic construct
WSAGVAK

SEQ ID NO: 63860 - protein, 7 aa, synthetic construct
VNHSHHA

SEQ ID NO: 63861 - protein, 7 aa, synthetic construct
PQGDNKA

SEQ ID NO: 63862 - protein, 7 aa, synthetic construct
GGQWFKE

SEQ ID NO: 63863 - protein, 7 aa, synthetic construct
QRTAASI

SEQ ID NO: 63864 - protein, 7 aa, synthetic construct
QIKVGAD

SEQ ID NO: 63865 - protein, 7 aa, synthetic construct
NVQRASN

SEQ ID NO: 63866 - protein, 7 aa, synthetic construct
SMAQKTF

SEQ ID NO: 63867 - protein, 7 aa, synthetic construct
QGKSGLV

SEQ ID NO: 63868 - protein, 7 aa, synthetic construct
MQRDWQG

SEQ ID NO: 63869 - protein, 7 aa, synthetic construct
QGTRVSP

SEQ ID NO: 63870 - protein, 7 aa, synthetic construct
ATSQQYM

SEQ ID NO: 63871 - protein, 7 aa, synthetic construct
SKKDSVA

SEQ ID NO: 63872 - protein, 7 aa, synthetic construct
GAPPRFS

SEQ ID NO: 63873 - protein, 7 aa, synthetic construct
VHTNSDA

SEQ ID NO: 63874 - protein, 7 aa, synthetic construct
GQKTPSA

SEQ ID NO: 63875 - protein, 7 aa, synthetic construct
HLEVVKP

SEQ ID NO: 63876 - protein, 7 aa, synthetic construct
TRTPQSG

SEQ ID NO: 63877 - protein, 7 aa, synthetic construct
QMKGQNT

SEQ ID NO: 63878 - protein, 7 aa, synthetic construct
DFPTLNA

SEQ ID NO: 63879 - protein, 7 aa, synthetic construct
NKTKIYP

SEQ ID NO: 63880 - protein, 7 aa, synthetic construct
GDFHVDR

SEQ ID NO: 63881 - protein, 7 aa, synthetic construct
ANTHAKP

SEQ ID NO: 63882 - protein, 7 aa, synthetic construct
SVFAGHS

SEQ ID NO: 63883 - protein, 7 aa, synthetic construct
HNFKQPN

SEQ ID NO: 63884 - protein, 7 aa, synthetic construct
GQTKDYG

SEQ ID NO: 63885 - protein, 7 aa, synthetic construct
LNQSRMP

SEQ ID NO: 63886 - protein, 7 aa, synthetic construct
MAPNGQN

SEQ ID NO: 63887 - protein, 7 aa, synthetic construct
FQRETTG

SEQ ID NO: 63888 - protein, 7 aa, synthetic construct
QKIANIE

SEQ ID NO: 63889 - protein, 7 aa, synthetic construct
HPDKIRM

SEQ ID NO: 63890 - protein, 7 aa, synthetic construct
NKAPFKE

SEQ ID NO: 63891 - protein, 7 aa, synthetic construct
FSKGGLS

SEQ ID NO: 63892 - protein, 7 aa, synthetic construct
PHSSREG

SEQ ID NO: 63893 - protein, 7 aa, synthetic construct
AFKKGEW

SEQ ID NO: 63894 - protein, 7 aa, synthetic construct
TSDSKVG

SEQ ID NO: 63895 - protein, 7 aa, synthetic construct
NARQDHA

SEQ ID NO: 63896 - protein, 7 aa, synthetic construct
MFTSAGV

SEQ ID NO: 63897 - protein, 7 aa, synthetic construct
METYKIE

SEQ ID NO: 63898 - protein, 7 aa, synthetic construct
RPNAKQD

SEQ ID NO: 63899 - protein, 7 aa, synthetic construct
GVVHTHV

SEQ ID NO: 63900 - protein, 7 aa, synthetic construct
LVGMGLK

SEQ ID NO: 63901 - protein, 7 aa, synthetic construct
PRPMVKE

SEQ ID NO: 63902 - protein, 7 aa, synthetic construct
GGGKGVM

SEQ ID NO: 63903 - protein, 7 aa, synthetic construct
PKPSHNF

SEQ ID NO: 63904 - protein, 7 aa, synthetic construct
PGFQSIG

SEQ ID NO: 63905 - protein, 7 aa, synthetic construct
MSKGGNF

SEQ ID NO: 63906 - protein, 7 aa, synthetic construct
KPTGSMN

SEQ ID NO: 63907 - protein, 7 aa, synthetic construct
GYRAIPN

SEQ ID NO: 63908 - protein, 7 aa, synthetic construct
VASMVGS

SEQ ID NO: 63909 - protein, 7 aa, synthetic construct
QPSSKNF

SEQ ID NO: 63910 - protein, 7 aa, synthetic construct
KAIDSQP

SEQ ID NO: 63911 - protein, 7 aa, synthetic construct
RGHESHF

SEQ ID NO: 63912 - protein, 7 aa, synthetic construct
RGTQNTA

SEQ ID NO: 63913 - protein, 7 aa, synthetic construct
YMTPPEK

SEQ ID NO: 63914 - protein, 7 aa, synthetic construct
FDGHLKG

SEQ ID NO: 63915 - protein, 7 aa, synthetic construct
NGSHSMM

SEQ ID NO: 63916 - protein, 7 aa, synthetic construct
TAQWNER

SEQ ID NO: 63917 - protein, 7 aa, synthetic construct
PAKKLAE

SEQ ID NO: 63918 - protein, 7 aa, synthetic construct
PFKEHHP

SEQ ID NO: 63919 - protein, 7 aa, synthetic construct
RAPQNNS

SEQ ID NO: 63920 - protein, 7 aa, synthetic construct
HYHVENK

SEQ ID NO: 63921 - protein, 7 aa, synthetic construct
GHNNKDG

SEQ ID NO: 63922 - protein, 7 aa, synthetic construct
VPHYEPE

SEQ ID NO: 63923 - protein, 7 aa, synthetic construct
MRSGVVT

SEQ ID NO: 63924 - protein, 7 aa, synthetic construct
WYKGSDP

SEQ ID NO: 63925 - protein, 7 aa, synthetic construct
PKATTMG

SEQ ID NO: 63926 - protein, 7 aa, synthetic construct
SKQQARD

SEQ ID NO: 63927 - protein, 7 aa, synthetic construct
FPGNHHD

SEQ ID NO: 63928 - protein, 7 aa, synthetic construct
KTPMAPA

SEQ ID NO: 63929 - protein, 7 aa, synthetic construct
SIQTSQH

SEQ ID NO: 63930 - protein, 7 aa, synthetic construct
PRQIVTD

SEQ ID NO: 63931 - protein, 7 aa, synthetic construct
RIQANTP

SEQ ID NO: 63932 - protein, 7 aa, synthetic construct
RAQTMDM

SEQ ID NO: 63933 - protein, 7 aa, synthetic construct
DGSLKSI

SEQ ID NO: 63934 - protein, 7 aa, synthetic construct
AFPSAHP

SEQ ID NO: 63935 - protein, 7 aa, synthetic construct
QGRMGAN

SEQ ID NO: 63936 - protein, 7 aa, synthetic construct
YQPTAPA

SEQ ID NO: 63937 - protein, 7 aa, synthetic construct
KHYAVGT

SEQ ID NO: 63938 - protein, 7 aa, synthetic construct
AKHLIHD

SEQ ID NO: 63939 - protein, 7 aa, synthetic construct
PGSKTAP

SEQ ID NO: 63940 - protein, 7 aa, synthetic construct
PEYRGQD

SEQ ID NO: 63941 - protein, 7 aa, synthetic construct
DIHGKGF

SEQ ID NO: 63942 - protein, 7 aa, synthetic construct
VHVAVRA

SEQ ID NO: 63943 - protein, 7 aa, synthetic construct
YGTKSNS

SEQ ID NO: 63944 - protein, 7 aa, synthetic construct
MGHARGL

SEQ ID NO: 63945 - protein, 7 aa, synthetic construct
LEINKAS

SEQ ID NO: 63946 - protein, 7 aa, synthetic construct
MKFNDKQ

SEQ ID NO: 63947 - protein, 7 aa, synthetic construct
FRQPHSM

SEQ ID NO: 63948 - protein, 7 aa, synthetic construct
VIKINND

SEQ ID NO: 63949 - protein, 7 aa, synthetic construct
FASPNDK

SEQ ID NO: 63950 - protein, 7 aa, synthetic construct
YSREMNG

SEQ ID NO: 63951 - protein, 7 aa, synthetic construct
SNDTVKG

SEQ ID NO: 63952 - protein, 7 aa, synthetic construct
NRTTNAP

SEQ ID NO: 63953 - protein, 7 aa, synthetic construct
PQQHNGG

SEQ ID NO: 63954 - protein, 7 aa, synthetic construct
NTQPAMV

SEQ ID NO: 63955 - protein, 7 aa, synthetic construct
FGTKTDN

SEQ ID NO: 63956 - protein, 7 aa, synthetic construct
RPHKEYP

SEQ ID NO: 63957 - protein, 7 aa, synthetic construct
LPDKPVA

SEQ ID NO: 63958 - protein, 7 aa, synthetic construct
INVNLHA

SEQ ID NO: 63959 - protein, 7 aa, synthetic construct
QQRAFGE

SEQ ID NO: 63960 - protein, 7 aa, synthetic construct
ILLQTPN

SEQ ID NO: 63961 - protein, 7 aa, synthetic construct
QKNGIAG

SEQ ID NO: 63962 - protein, 7 aa, synthetic construct
NMQGRQT

SEQ ID NO: 63963 - protein, 7 aa, synthetic construct
HDNQKHQ

SEQ ID NO: 63964 - protein, 7 aa, synthetic construct
PARLPTD

SEQ ID NO: 63965 - protein, 7 aa, synthetic construct
EHGLKRD

SEQ ID NO: 63966 - protein, 7 aa, synthetic construct
MVKSANG

SEQ ID NO: 63967 - protein, 7 aa, synthetic construct
SKALTAQ

SEQ ID NO: 63968 - protein, 7 aa, synthetic construct
STITKQA

SEQ ID NO: 63969 - protein, 7 aa, synthetic construct
KDNELRS

SEQ ID NO: 63970 - protein, 7 aa, synthetic construct
KAQSNQL

SEQ ID NO: 63971 - protein, 7 aa, synthetic construct
HDKNRQD

SEQ ID NO: 63972 - protein, 7 aa, synthetic construct
FKISGFD

SEQ ID NO: 63973 - protein, 7 aa, synthetic construct
TPNQQRN

SEQ ID NO: 63974 - protein, 7 aa, synthetic construct
SSHLKGG

SEQ ID NO: 63975 - protein, 7 aa, synthetic construct
YKVQVNH

SEQ ID NO: 63976 - protein, 7 aa, synthetic construct
SKSAEGR

SEQ ID NO: 63977 - protein, 7 aa, synthetic construct
MVHMLSG

SEQ ID NO: 63978 - protein, 7 aa, synthetic construct
LKAADLF

SEQ ID NO: 63979 - protein, 7 aa, synthetic construct
KYAQSGG

SEQ ID NO: 63980 - protein, 7 aa, synthetic construct
VGLPPHN

SEQ ID NO: 63981 - protein, 7 aa, synthetic construct
TTQTRST

SEQ ID NO: 63982 - protein, 7 aa, synthetic construct
NRQPNQA

SEQ ID NO: 63983 - protein, 7 aa, synthetic construct
GKTQAMS

SEQ ID NO: 63984 - protein, 7 aa, synthetic construct
SQQRSNP

SEQ ID NO: 63985 - protein, 7 aa, synthetic construct
GKKGNIE

SEQ ID NO: 63986 - protein, 7 aa, synthetic construct
TNGIRSV

SEQ ID NO: 63987 - protein, 7 aa, synthetic construct
EYRPAIG

SEQ ID NO: 63988 - protein, 7 aa, synthetic construct
VSKATYI

SEQ ID NO: 63989 - protein, 7 aa, synthetic construct
DNPGQRW

SEQ ID NO: 63990 - protein, 7 aa, synthetic construct
YEKNYPM

SEQ ID NO: 63991 - protein, 7 aa, synthetic construct
PEFKPGE

SEQ ID NO: 63992 - protein, 7 aa, synthetic construct
EREYGRV

SEQ ID NO: 63993 - protein, 7 aa, synthetic construct
TEQRTMF

SEQ ID NO: 63994 - protein, 7 aa, synthetic construct
PKNVIEL

SEQ ID NO: 63995 - protein, 7 aa, synthetic construct
NMNRVYI

SEQ ID NO: 63996 - protein, 7 aa, synthetic construct
TSKPPGF

SEQ ID NO: 63997 - protein, 7 aa, synthetic construct
PKGATMA

SEQ ID NO: 63998 - protein, 7 aa, synthetic construct
NPAKMMS

SEQ ID NO: 63999 - protein, 7 aa, synthetic construct
KSSPGSN

SEQ ID NO: 64000 - protein, 7 aa, synthetic construct
GSAALKA

SEQ ID NO: 64001 - protein, 7 aa, synthetic construct
QVTGTNA

SEQ ID NO: 64002 - protein, 7 aa, synthetic construct
KSQPSVS

SEQ ID NO: 64003 - protein, 7 aa, synthetic construct
KSQPGMA

SEQ ID NO: 64004 - protein, 7 aa, synthetic construct
PQLKGSA

SEQ ID NO: 64005 - protein, 7 aa, synthetic construct
LMMRNSE

SEQ ID NO: 64006 - protein, 7 aa, synthetic construct
DHRATFP

SEQ ID NO: 64007 - protein, 7 aa, synthetic construct
DANPRQG

SEQ ID NO: 64008 - protein, 7 aa, synthetic construct
FTQPKDP

SEQ ID NO: 64009 - protein, 7 aa, synthetic construct
HWNETAL

SEQ ID NO: 64010 - protein, 7 aa, synthetic construct
ITSAVPH

SEQ ID NO: 64011 - protein, 7 aa, synthetic construct
TNKPSGN

SEQ ID NO: 64012 - protein, 7 aa, synthetic construct
NSKPVDY

SEQ ID NO: 64013 - protein, 7 aa, synthetic construct
AHREPNT

SEQ ID NO: 64014 - protein, 7 aa, synthetic construct
QNRAASP

SEQ ID NO: 64015 - protein, 7 aa, synthetic construct
SGNVKHG

SEQ ID NO: 64016 - protein, 7 aa, synthetic construct
KQNSVLA

SEQ ID NO: 64017 - protein, 7 aa, synthetic construct
TQMVKEH

SEQ ID NO: 64018 - protein, 7 aa, synthetic construct
SMYPGRS

SEQ ID NO: 64019 - protein, 7 aa, synthetic construct
MKNMAQA

SEQ ID NO: 64020 - protein, 7 aa, synthetic construct
VGKFPDM

SEQ ID NO: 64021 - protein, 7 aa, synthetic construct
LNGPARM

SEQ ID NO: 64022 - protein, 7 aa, synthetic construct
IAYQKHT

SEQ ID NO: 64023 - protein, 7 aa, synthetic construct
TSQIKGG

SEQ ID NO: 64024 - protein, 7 aa, synthetic construct
QSKHTQV

SEQ ID NO: 64025 - protein, 7 aa, synthetic construct
PKLSMPD

SEQ ID NO: 64026 - protein, 7 aa, synthetic construct
TTVIVKE

SEQ ID NO: 64027 - protein, 7 aa, synthetic construct
HREPGFV

SEQ ID NO: 64028 - protein, 7 aa, synthetic construct
HREQVRT

SEQ ID NO: 64029 - protein, 7 aa, synthetic construct
GRMLPPE

SEQ ID NO: 64030 - protein, 7 aa, synthetic construct
VYAASKN

SEQ ID NO: 64031 - protein, 7 aa, synthetic construct
MNSGTVV

SEQ ID NO: 64032 - protein, 7 aa, synthetic construct
SHARSME

SEQ ID NO: 64033 - protein, 7 aa, synthetic construct
IDHNGQR

SEQ ID NO: 64034 - protein, 7 aa, synthetic construct
DNKRDDK

SEQ ID NO: 64035 - protein, 7 aa, synthetic construct
KNVQVAP

SEQ ID NO: 64036 - protein, 7 aa, synthetic construct
TKPVNAA

SEQ ID NO: 64037 - protein, 7 aa, synthetic construct
KLQNNNS

SEQ ID NO: 64038 - protein, 7 aa, synthetic construct
NTGGNVS

SEQ ID NO: 64039 - protein, 7 aa, synthetic construct
TYRDANL

SEQ ID NO: 64040 - protein, 7 aa, synthetic construct
NKQSITS

SEQ ID NO: 64041 - protein, 7 aa, synthetic construct
KQNGRAE

SEQ ID NO: 64042 - protein, 7 aa, synthetic construct
HHKSSET

SEQ ID NO: 64043 - protein, 7 aa, synthetic construct
KHSNWEE

SEQ ID NO: 64044 - protein, 7 aa, synthetic construct
KGAGNIE

SEQ ID NO: 64045 - protein, 7 aa, synthetic construct
YPKSPTG

SEQ ID NO: 64046 - protein, 7 aa, synthetic construct
MTGKPAS

SEQ ID NO: 64047 - protein, 7 aa, synthetic construct
MPERTHA

SEQ ID NO: 64048 - protein, 7 aa, synthetic construct
KIGNHET

SEQ ID NO: 64049 - protein, 7 aa, synthetic construct
MHGHKTP

SEQ ID NO: 64050 - protein, 7 aa, synthetic construct
SAYLKES

SEQ ID NO: 64051 - protein, 7 aa, synthetic construct
HPNALMD

SEQ ID NO: 64052 - protein, 7 aa, synthetic construct
THMAKST

SEQ ID NO: 64053 - protein, 7 aa, synthetic construct
RSVQPGI

SEQ ID NO: 64054 - protein, 7 aa, synthetic construct
NRSATTG

SEQ ID NO: 64055 - protein, 7 aa, synthetic construct
LDKKMQY

SEQ ID NO: 64056 - protein, 7 aa, synthetic construct
VQARSQD

SEQ ID NO: 64057 - protein, 7 aa, synthetic construct
KMTGNEF

SEQ ID NO: 64058 - protein, 7 aa, synthetic construct
NYNRSTS

SEQ ID NO: 64059 - protein, 7 aa, synthetic construct
RNKDSGA

SEQ ID NO: 64060 - protein, 7 aa, synthetic construct
DARTPNS

SEQ ID NO: 64061 - protein, 7 aa, synthetic construct
LNAGHVY

SEQ ID NO: 64062 - protein, 7 aa, synthetic construct
LQSKGSS

SEQ ID NO: 64063 - protein, 7 aa, synthetic construct
YRGSSTF

SEQ ID NO: 64064 - protein, 7 aa, synthetic construct
HGYVNTT

SEQ ID NO: 64065 - protein, 7 aa, synthetic construct
MWGTDAP

SEQ ID NO: 64066 - protein, 7 aa, synthetic construct
QGKSKDL

SEQ ID NO: 64067 - protein, 7 aa, synthetic construct
PKADLLH

SEQ ID NO: 64068 - protein, 7 aa, synthetic construct
HSRVNIT

SEQ ID NO: 64069 - protein, 7 aa, synthetic construct
FANSGYP

SEQ ID NO: 64070 - protein, 7 aa, synthetic construct
GDRKIYI

SEQ ID NO: 64071 - protein, 7 aa, synthetic construct
VSGNKTA

SEQ ID NO: 64072 - protein, 7 aa, synthetic construct
RQPNTND

SEQ ID NO: 64073 - protein, 7 aa, synthetic construct
SLNGQVN

SEQ ID NO: 64074 - protein, 7 aa, synthetic construct
YRIIGTE

SEQ ID NO: 64075 - protein, 7 aa, synthetic construct
STRSVQG

SEQ ID NO: 64076 - protein, 7 aa, synthetic construct
GYAGTER

SEQ ID NO: 64077 - protein, 7 aa, synthetic construct
SGTDRKY

SEQ ID NO: 64078 - protein, 7 aa, synthetic construct
MARGDVA

SEQ ID NO: 64079 - protein, 7 aa, synthetic construct
QTRAQAG

SEQ ID NO: 64080 - protein, 7 aa, synthetic construct
LSVRQAH

SEQ ID NO: 64081 - protein, 7 aa, synthetic construct
ERMGTGG

SEQ ID NO: 64082 - protein, 7 aa, synthetic construct
TYNGHGT

SEQ ID NO: 64083 - protein, 7 aa, synthetic construct
KTNPQNA

SEQ ID NO: 64084 - protein, 7 aa, synthetic construct
KNARELP

SEQ ID NO: 64085 - protein, 7 aa, synthetic construct
RGGDQGR

SEQ ID NO: 64086 - protein, 7 aa, synthetic construct
VSHIALN

SEQ ID NO: 64087 - protein, 7 aa, synthetic construct
PQKPGFA

SEQ ID NO: 64088 - protein, 7 aa, synthetic construct
QQNKAAF

SEQ ID NO: 64089 - protein, 7 aa, synthetic construct
AAPHSQP

SEQ ID NO: 64090 - protein, 7 aa, synthetic construct
LTHQAHI

SEQ ID NO: 64091 - protein, 7 aa, synthetic construct
YPSGTKS

SEQ ID NO: 64092 - protein, 7 aa, synthetic construct
QRVQLAS

SEQ ID NO: 64093 - protein, 7 aa, synthetic construct
YKDYSHP

SEQ ID NO: 64094 - protein, 7 aa, synthetic construct
FGTIKSP

SEQ ID NO: 64095 - protein, 7 aa, synthetic construct
DLVIGKF

SEQ ID NO: 64096 - protein, 7 aa, synthetic construct
AKTNPGA

SEQ ID NO: 64097 - protein, 7 aa, synthetic construct
GNSKTAA

SEQ ID NO: 64098 - protein, 7 aa, synthetic construct
KNATALE

SEQ ID NO: 64099 - protein, 7 aa, synthetic construct
PGANYSA

SEQ ID NO: 64100 - protein, 7 aa, synthetic construct
YGFKTDL

SEQ ID NO: 64101 - protein, 7 aa, synthetic construct
PDLRMAV

SEQ ID NO: 64102 - protein, 7 aa, synthetic construct
FTPQNRH

SEQ ID NO: 64103 - protein, 7 aa, synthetic construct
GSSTAHM

SEQ ID NO: 64104 - protein, 7 aa, synthetic construct
FKSPKSE

SEQ ID NO: 64105 - protein, 7 aa, synthetic construct
FAPQAHN

SEQ ID NO: 64106 - protein, 7 aa, synthetic construct
KPSSGGS

SEQ ID NO: 64107 - protein, 7 aa, synthetic construct
MKMSGNS

SEQ ID NO: 64108 - protein, 7 aa, synthetic construct
GKGTSVA

SEQ ID NO: 64109 - protein, 7 aa, synthetic construct
KKSDQNP

SEQ ID NO: 64110 - protein, 7 aa, synthetic construct
WNTSTQH

SEQ ID NO: 64111 - protein, 7 aa, synthetic construct
KMHLAPE

SEQ ID NO: 64112 - protein, 7 aa, synthetic construct
RNTGVSN

SEQ ID NO: 64113 - protein, 7 aa, synthetic construct
RDMQKIA

SEQ ID NO: 64114 - protein, 7 aa, synthetic construct
DVPKANA

SEQ ID NO: 64115 - protein, 7 aa, synthetic construct
DRGVNQG

SEQ ID NO: 64116 - protein, 7 aa, synthetic construct
RIIPTKD

SEQ ID NO: 64117 - protein, 7 aa, synthetic construct
YDNYKNV

SEQ ID NO: 64118 - protein, 7 aa, synthetic construct
SDRNKLL

SEQ ID NO: 64119 - protein, 7 aa, synthetic construct
AYQGKGF

SEQ ID NO: 64120 - protein, 7 aa, synthetic construct
NNINLSM

SEQ ID NO: 64121 - protein, 7 aa, synthetic construct
REDNPRT

SEQ ID NO: 64122 - protein, 7 aa, synthetic construct
NKNIGQA

SEQ ID NO: 64123 - protein, 7 aa, synthetic construct
YDPARPG

SEQ ID NO: 64124 - protein, 7 aa, synthetic construct
RMQGSSL

SEQ ID NO: 64125 - protein, 7 aa, synthetic construct
VGTNTMM

SEQ ID NO: 64126 - protein, 7 aa, synthetic construct
TTGDRMF

SEQ ID NO: 64127 - protein, 7 aa, synthetic construct
YPPKTNN

SEQ ID NO: 64128 - protein, 7 aa, synthetic construct
GKPRDGL

SEQ ID NO: 64129 - protein, 7 aa, synthetic construct
RTGNGES

SEQ ID NO: 64130 - protein, 7 aa, synthetic construct
RLEASQK

SEQ ID NO: 64131 - protein, 7 aa, synthetic construct
HNKTLIQ

SEQ ID NO: 64132 - protein, 7 aa, synthetic construct
AGDRMSK

SEQ ID NO: 64133 - protein, 7 aa, synthetic construct
AISQGAG

SEQ ID NO: 64134 - protein, 7 aa, synthetic construct
KSMSNSG

SEQ ID NO: 64135 - protein, 7 aa, synthetic construct
SRNRDEM

SEQ ID NO: 64136 - protein, 7 aa, synthetic construct
FMDHGQG

SEQ ID NO: 64137 - protein, 7 aa, synthetic construct
SPRMSNQ

SEQ ID NO: 64138 - protein, 7 aa, synthetic construct
FGLHTKP

SEQ ID NO: 64139 - protein, 7 aa, synthetic construct
SYSHRAA

SEQ ID NO: 64140 - protein, 7 aa, synthetic construct
WGNFNTG

SEQ ID NO: 64141 - protein, 7 aa, synthetic construct
SKDTRVT

SEQ ID NO: 64142 - protein, 7 aa, synthetic construct
EPVKHKE

SEQ ID NO: 64143 - protein, 7 aa, synthetic construct
PRTNQAA

SEQ ID NO: 64144 - protein, 7 aa, synthetic construct
HFLKPAG

SEQ ID NO: 64145 - protein, 7 aa, synthetic construct
VAGNQKP

SEQ ID NO: 64146 - protein, 7 aa, synthetic construct
YHAGGRM

SEQ ID NO: 64147 - protein, 7 aa, synthetic construct
DVKSGQN

SEQ ID NO: 64148 - protein, 7 aa, synthetic construct
EKKFQPY

SEQ ID NO: 64149 - protein, 7 aa, synthetic construct
ANLGFEE

SEQ ID NO: 64150 - protein, 7 aa, synthetic construct
KPSASRE

SEQ ID NO: 64151 - protein, 7 aa, synthetic construct
KAHANSM

SEQ ID NO: 64152 - protein, 7 aa, synthetic construct
EMRSTNM

SEQ ID NO: 64153 - protein, 7 aa, synthetic construct
TRQSQMG

SEQ ID NO: 64154 - protein, 7 aa, synthetic construct
SPKSTGS

SEQ ID NO: 64155 - protein, 7 aa, synthetic construct
RKEGNQT

SEQ ID NO: 64156 - protein, 7 aa, synthetic construct
RTKDAGT

SEQ ID NO: 64157 - protein, 7 aa, synthetic construct
TATRPTG

SEQ ID NO: 64158 - protein, 7 aa, synthetic construct
VKGHQQD

SEQ ID NO: 64159 - protein, 7 aa, synthetic construct
KSSGGTS

SEQ ID NO: 64160 - protein, 7 aa, synthetic construct
SEPQTTG

SEQ ID NO: 64161 - protein, 7 aa, synthetic construct
EPHNTGG

SEQ ID NO: 64162 - protein, 7 aa, synthetic construct
SNEKPII

SEQ ID NO: 64163 - protein, 7 aa, synthetic construct
TGQQRPV

SEQ ID NO: 64164 - protein, 7 aa, synthetic construct
HARQYND

SEQ ID NO: 64165 - protein, 7 aa, synthetic construct
QLVGTAG

SEQ ID NO: 64166 - protein, 7 aa, synthetic construct
KMAAVRE

SEQ ID NO: 64167 - protein, 7 aa, synthetic construct
YAVSNAY

SEQ ID NO: 64168 - protein, 7 aa, synthetic construct
SATNRGG

SEQ ID NO: 64169 - protein, 7 aa, synthetic construct
QQMSNPP

SEQ ID NO: 64170 - protein, 7 aa, synthetic construct
VSHRVPE

SEQ ID NO: 64171 - protein, 7 aa, synthetic construct
YTTMTVN

SEQ ID NO: 64172 - protein, 7 aa, synthetic construct
AQINTPK

SEQ ID NO: 64173 - protein, 7 aa, synthetic construct
RLGNTHD

SEQ ID NO: 64174 - protein, 7 aa, synthetic construct
SLKADVT

SEQ ID NO: 64175 - protein, 7 aa, synthetic construct
AAQWGPA

SEQ ID NO: 64176 - protein, 7 aa, synthetic construct
ETKHVNK

SEQ ID NO: 64177 - protein, 7 aa, synthetic construct
GKIGAAG

SEQ ID NO: 64178 - protein, 7 aa, synthetic construct
GYTSGLP

SEQ ID NO: 64179 - protein, 7 aa, synthetic construct
QMGNQHA

SEQ ID NO: 64180 - protein, 7 aa, synthetic construct
QTNRHNV

SEQ ID NO: 64181 - protein, 7 aa, synthetic construct
HPNTPKG

SEQ ID NO: 64182 - protein, 7 aa, synthetic construct
MWKTRDA

SEQ ID NO: 64183 - protein, 7 aa, synthetic construct
HHKASED

SEQ ID NO: 64184 - protein, 7 aa, synthetic construct
ALGKAMN

SEQ ID NO: 64185 - protein, 7 aa, synthetic construct
IPMTITA

SEQ ID NO: 64186 - protein, 7 aa, synthetic construct
HHGVNRI

SEQ ID NO: 64187 - protein, 7 aa, synthetic construct
TDHYKMS

SEQ ID NO: 64188 - protein, 7 aa, synthetic construct
PTRSNAS

SEQ ID NO: 64189 - protein, 7 aa, synthetic construct
GNFSRPS

SEQ ID NO: 64190 - protein, 7 aa, synthetic construct
MKTNGTA

SEQ ID NO: 64191 - protein, 7 aa, synthetic construct
TPAKSGG

SEQ ID NO: 64192 - protein, 7 aa, synthetic construct
RIDFAVG

SEQ ID NO: 64193 - protein, 7 aa, synthetic construct
NLSSRNA

SEQ ID NO: 64194 - protein, 7 aa, synthetic construct
PQKTVFD

SEQ ID NO: 64195 - protein, 7 aa, synthetic construct
RQNSGMG

SEQ ID NO: 64196 - protein, 7 aa, synthetic construct
DKTKSGA

SEQ ID NO: 64197 - protein, 7 aa, synthetic construct
DGRHTNN

SEQ ID NO: 64198 - protein, 7 aa, synthetic construct
NSKYSTG

SEQ ID NO: 64199 - protein, 7 aa, synthetic construct
VRVANVQ

SEQ ID NO: 64200 - protein, 7 aa, synthetic construct
RMGDANT

SEQ ID NO: 64201 - protein, 7 aa, synthetic construct
KPNTSQV

SEQ ID NO: 64202 - protein, 7 aa, synthetic construct
SQAPGST

SEQ ID NO: 64203 - protein, 7 aa, synthetic construct
KFNPNSL

SEQ ID NO: 64204 - protein, 7 aa, synthetic construct
HNKMQEI

SEQ ID NO: 64205 - protein, 7 aa, synthetic construct
VKPNANA

SEQ ID NO: 64206 - protein, 7 aa, synthetic construct
PKSTGAS

SEQ ID NO: 64207 - protein, 7 aa, synthetic construct
SGVVHHE

SEQ ID NO: 64208 - protein, 7 aa, synthetic construct
HNAGNLP

SEQ ID NO: 64209 - protein, 7 aa, synthetic construct
AVEKSQP

SEQ ID NO: 64210 - protein, 7 aa, synthetic construct
NMNRHQY

SEQ ID NO: 64211 - protein, 7 aa, synthetic construct
GKHYGKE

SEQ ID NO: 64212 - protein, 7 aa, synthetic construct
LKQMSAP

SEQ ID NO: 64213 - protein, 7 aa, synthetic construct
VLNQRNS

SEQ ID NO: 64214 - protein, 7 aa, synthetic construct
HYGVKAQ

SEQ ID NO: 64215 - protein, 7 aa, synthetic construct
IHGLESR

SEQ ID NO: 64216 - protein, 7 aa, synthetic construct
RVMKDMI

SEQ ID NO: 64217 - protein, 7 aa, synthetic construct
GSRVDMM

SEQ ID NO: 64218 - protein, 7 aa, synthetic construct
MLPTLNS

SEQ ID NO: 64219 - protein, 7 aa, synthetic construct
GKNLVLP

SEQ ID NO: 64220 - protein, 7 aa, synthetic construct
NLRILDP

SEQ ID NO: 64221 - protein, 7 aa, synthetic construct
KVQSTRE

SEQ ID NO: 64222 - protein, 7 aa, synthetic construct
YPAATKN

SEQ ID NO: 64223 - protein, 7 aa, synthetic construct
KTAIDVR

SEQ ID NO: 64224 - protein, 7 aa, synthetic construct
QTFSKMT

SEQ ID NO: 64225 - protein, 7 aa, synthetic construct
DRNVSET

SEQ ID NO: 64226 - protein, 7 aa, synthetic construct
NKNATPG

SEQ ID NO: 64227 - protein, 7 aa, synthetic construct
VVTHYTG

SEQ ID NO: 64228 - protein, 7 aa, synthetic construct
SLGTPGA

SEQ ID NO: 64229 - protein, 7 aa, synthetic construct
LGKSMQG

SEQ ID NO: 64230 - protein, 7 aa, synthetic construct
FKTDLNN

SEQ ID NO: 64231 - protein, 7 aa, synthetic construct
FKSTSGM

SEQ ID NO: 64232 - protein, 7 aa, synthetic construct
REIVGLI

SEQ ID NO: 64233 - protein, 7 aa, synthetic construct
KNSPQSA

SEQ ID NO: 64234 - protein, 7 aa, synthetic construct
AHRVPEM

SEQ ID NO: 64235 - protein, 7 aa, synthetic construct
PARSSAD

SEQ ID NO: 64236 - protein, 7 aa, synthetic construct
TQTMNSP

SEQ ID NO: 64237 - protein, 7 aa, synthetic construct
QLARAQI

SEQ ID NO: 64238 - protein, 7 aa, synthetic construct
RQSVSQN

SEQ ID NO: 64239 - protein, 7 aa, synthetic construct
TMAVKSG

SEQ ID NO: 64240 - protein, 7 aa, synthetic construct
QYPAPAD

SEQ ID NO: 64241 - protein, 7 aa, synthetic construct
HTPTRGE

SEQ ID NO: 64242 - protein, 7 aa, synthetic construct
KANMSQG

SEQ ID NO: 64243 - protein, 7 aa, synthetic construct
TKTHSNL

SEQ ID NO: 64244 - protein, 7 aa, synthetic construct
GQTMSRP

SEQ ID NO: 64245 - protein, 7 aa, synthetic construct
VKTTASG

SEQ ID NO: 64246 - protein, 7 aa, synthetic construct
KETGTSG

SEQ ID NO: 64247 - protein, 7 aa, synthetic construct
KMIESKA

SEQ ID NO: 64248 - protein, 7 aa, synthetic construct
VMHSGVS

SEQ ID NO: 64249 - protein, 7 aa, synthetic construct
QSHERQV

SEQ ID NO: 64250 - protein, 7 aa, synthetic construct
STRSADW

SEQ ID NO: 64251 - protein, 7 aa, synthetic construct
GNTGQSG

SEQ ID NO: 64252 - protein, 7 aa, synthetic construct
SKLGNIE

SEQ ID NO: 64253 - protein, 7 aa, synthetic construct
NRATGGA

SEQ ID NO: 64254 - protein, 7 aa, synthetic construct
ASKTNDG

SEQ ID NO: 64255 - protein, 7 aa, synthetic construct
LLSESRG

SEQ ID NO: 64256 - protein, 7 aa, synthetic construct
INPTPKP

SEQ ID NO: 64257 - protein, 7 aa, synthetic construct
RMERPNA

SEQ ID NO: 64258 - protein, 7 aa, synthetic construct
SWQGDKF

SEQ ID NO: 64259 - protein, 7 aa, synthetic construct
IAHNTHT

SEQ ID NO: 64260 - protein, 7 aa, synthetic construct
TVDPATR

SEQ ID NO: 64261 - protein, 7 aa, synthetic construct
VKQYSER

SEQ ID NO: 64262 - protein, 7 aa, synthetic construct
SYAKSSA

SEQ ID NO: 64263 - protein, 7 aa, synthetic construct
IFSPKQL

SEQ ID NO: 64264 - protein, 7 aa, synthetic construct
VPQNARL

SEQ ID NO: 64265 - protein, 7 aa, synthetic construct
NPEYKVA

SEQ ID NO: 64266 - protein, 7 aa, synthetic construct
NSNMKKE

SEQ ID NO: 64267 - protein, 7 aa, synthetic construct
FRPIQNP

SEQ ID NO: 64268 - protein, 7 aa, synthetic construct
DSRQWPG

SEQ ID NO: 64269 - protein, 7 aa, synthetic construct
LPTWQSP

SEQ ID NO: 64270 - protein, 7 aa, synthetic construct
ANKQGFG

SEQ ID NO: 64271 - protein, 7 aa, synthetic construct
TTMMGQG

SEQ ID NO: 64272 - protein, 7 aa, synthetic construct
DETKLSR

SEQ ID NO: 64273 - protein, 7 aa, synthetic construct
TMKNMSG

SEQ ID NO: 64274 - protein, 7 aa, synthetic construct
NSKIVDH

SEQ ID NO: 64275 - protein, 7 aa, synthetic construct
VDPWDRE

SEQ ID NO: 64276 - protein, 7 aa, synthetic construct
ISPSYNP

SEQ ID NO: 64277 - protein, 7 aa, synthetic construct
AKMPTQQ

SEQ ID NO: 64278 - protein, 7 aa, synthetic construct
RQRSEDA

SEQ ID NO: 64279 - protein, 7 aa, synthetic construct
AKPNQHS

SEQ ID NO: 64280 - protein, 7 aa, synthetic construct
YASTTNI

SEQ ID NO: 64281 - protein, 7 aa, synthetic construct
FTGRQSD

SEQ ID NO: 64282 - protein, 7 aa, synthetic construct
AKVVRDN

SEQ ID NO: 64283 - protein, 7 aa, synthetic construct
PIDKHGI

SEQ ID NO: 64284 - protein, 7 aa, synthetic construct
MARNNLT

SEQ ID NO: 64285 - protein, 7 aa, synthetic construct
INRDSVR

SEQ ID NO: 64286 - protein, 7 aa, synthetic construct
IATHKNH

SEQ ID NO: 64287 - protein, 7 aa, synthetic construct
HTSVTAQ

SEQ ID NO: 64288 - protein, 7 aa, synthetic construct
QKGLANM

SEQ ID NO: 64289 - protein, 7 aa, synthetic construct
SKSQLQS

SEQ ID NO: 64290 - protein, 7 aa, synthetic construct
EAKQERA

SEQ ID NO: 64291 - protein, 7 aa, synthetic construct
NMGKNVG

SEQ ID NO: 64292 - protein, 7 aa, synthetic construct
MNRTTAG

SEQ ID NO: 64293 - protein, 7 aa, synthetic construct
TPSHYAL

SEQ ID NO: 64294 - protein, 7 aa, synthetic construct
SRQTMVT

SEQ ID NO: 64295 - protein, 7 aa, synthetic construct
GTLRESR

SEQ ID NO: 64296 - protein, 7 aa, synthetic construct
MNRSTQP

SEQ ID NO: 64297 - protein, 7 aa, synthetic construct
RSGDHRA

SEQ ID NO: 64298 - protein, 7 aa, synthetic construct
LQSREAP

SEQ ID NO: 64299 - protein, 7 aa, synthetic construct
VVLGRSD

SEQ ID NO: 64300 - protein, 7 aa, synthetic construct
EEMIKVG

SEQ ID NO: 64301 - protein, 7 aa, synthetic construct
TKKQIMA

SEQ ID NO: 64302 - protein, 7 aa, synthetic construct
IYPGKEW

SEQ ID NO: 64303 - protein, 7 aa, synthetic construct
FFRGEGQ

SEQ ID NO: 64304 - protein, 7 aa, synthetic construct
HVSGENV

SEQ ID NO: 64305 - protein, 7 aa, synthetic construct
PKGNVQI

SEQ ID NO: 64306 - protein, 7 aa, synthetic construct
EHRRDNE

SEQ ID NO: 64307 - protein, 7 aa, synthetic construct
SHQNGLV

SEQ ID NO: 64308 - protein, 7 aa, synthetic construct
GAINMNS

SEQ ID NO: 64309 - protein, 7 aa, synthetic construct
ESMRGMH

SEQ ID NO: 64310 - protein, 7 aa, synthetic construct
ADMALKN

SEQ ID NO: 64311 - protein, 7 aa, synthetic construct
NNGIQST

SEQ ID NO: 64312 - protein, 7 aa, synthetic construct
QWGQSVP

SEQ ID NO: 64313 - protein, 7 aa, synthetic construct
ALTQRDH

SEQ ID NO: 64314 - protein, 7 aa, synthetic construct
AKPGLFH

SEQ ID NO: 64315 - protein, 7 aa, synthetic construct
MRTVKVD

SEQ ID NO: 64316 - protein, 7 aa, synthetic construct
MIPQQVQ

SEQ ID NO: 64317 - protein, 7 aa, synthetic construct
TSTNKAA

SEQ ID NO: 64318 - protein, 7 aa, synthetic construct
RKDMSWD

SEQ ID NO: 64319 - protein, 7 aa, synthetic construct
LPEWHKG

SEQ ID NO: 64320 - protein, 7 aa, synthetic construct
SNKPGNA

SEQ ID NO: 64321 - protein, 7 aa, synthetic construct
NKDVHVS

SEQ ID NO: 64322 - protein, 7 aa, synthetic construct
GKNVNSA

SEQ ID NO: 64323 - protein, 7 aa, synthetic construct
ITHTQFD

SEQ ID NO: 64324 - protein, 7 aa, synthetic construct
MYKNVQG

SEQ ID NO: 64325 - protein, 7 aa, synthetic construct
RSTNTAD

SEQ ID NO: 64326 - protein, 7 aa, synthetic construct
KPTGTSG

SEQ ID NO: 64327 - protein, 7 aa, synthetic construct
NTNKAEH

SEQ ID NO: 64328 - protein, 7 aa, synthetic construct
GGTQHLD

SEQ ID NO: 64329 - protein, 7 aa, synthetic construct
DPHLAKI

SEQ ID NO: 64330 - protein, 7 aa, synthetic construct
QNSKAQA

SEQ ID NO: 64331 - protein, 7 aa, synthetic construct
MNQAKVG

SEQ ID NO: 64332 - protein, 7 aa, synthetic construct
TPKQQYY

SEQ ID NO: 64333 - protein, 7 aa, synthetic construct
KKTVEHA

SEQ ID NO: 64334 - protein, 7 aa, synthetic construct
TKIFAQG

SEQ ID NO: 64335 - protein, 7 aa, synthetic construct
KVPMVDS

SEQ ID NO: 64336 - protein, 7 aa, synthetic construct
GQRTADM

SEQ ID NO: 64337 - protein, 7 aa, synthetic construct
GKSQNNS

SEQ ID NO: 64338 - protein, 7 aa, synthetic construct
LKNMIVG

SEQ ID NO: 64339 - protein, 7 aa, synthetic construct
KSQKSEW

SEQ ID NO: 64340 - protein, 7 aa, synthetic construct
MIQARSE

SEQ ID NO: 64341 - protein, 7 aa, synthetic construct
DPRPFQK

SEQ ID NO: 64342 - protein, 7 aa, synthetic construct
MKGIGTS

SEQ ID NO: 64343 - protein, 7 aa, synthetic construct
TKEKKGE

SEQ ID NO: 64344 - protein, 7 aa, synthetic construct
YKQSVGG

SEQ ID NO: 64345 - protein, 7 aa, synthetic construct
WGKVGAD

SEQ ID NO: 64346 - protein, 7 aa, synthetic construct
KQTAMGG

SEQ ID NO: 64347 - protein, 7 aa, synthetic construct
PRGFKEA

SEQ ID NO: 64348 - protein, 7 aa, synthetic construct
VGNKVAG

SEQ ID NO: 64349 - protein, 7 aa, synthetic construct
QEMKHKA

SEQ ID NO: 64350 - protein, 7 aa, synthetic construct
YLPTWKE

SEQ ID NO: 64351 - protein, 7 aa, synthetic construct
LLHQNPM

SEQ ID NO: 64352 - protein, 7 aa, synthetic construct
TAMGHMV

SEQ ID NO: 64353 - protein, 7 aa, synthetic construct
YNAVGSK

SEQ ID NO: 64354 - protein, 7 aa, synthetic construct
IGNKTLL

SEQ ID NO: 64355 - protein, 7 aa, synthetic construct
NGNNKFI

SEQ ID NO: 64356 - protein, 7 aa, synthetic construct
NMQESRR

SEQ ID NO: 64357 - protein, 7 aa, synthetic construct
NQMGHFD

SEQ ID NO: 64358 - protein, 7 aa, synthetic construct
NEIKTHW

SEQ ID NO: 64359 - protein, 7 aa, synthetic construct
KTTSDSV

SEQ ID NO: 64360 - protein, 7 aa, synthetic construct
QPHNAVT

SEQ ID NO: 64361 - protein, 7 aa, synthetic construct
KALTQHE

SEQ ID NO: 64362 - protein, 7 aa, synthetic construct
RSDAQRQ

SEQ ID NO: 64363 - protein, 7 aa, synthetic construct
FHDNPRP

SEQ ID NO: 64364 - protein, 7 aa, synthetic construct
YFTESGK

SEQ ID NO: 64365 - protein, 7 aa, synthetic construct
NGAKLFA

SEQ ID NO: 64366 - protein, 7 aa, synthetic construct
ETFKASK

SEQ ID NO: 64367 - protein, 7 aa, synthetic construct
SRPHDQF

SEQ ID NO: 64368 - protein, 7 aa, synthetic construct
EARPVPM

SEQ ID NO: 64369 - protein, 7 aa, synthetic construct
MHHIKEE

SEQ ID NO: 64370 - protein, 7 aa, synthetic construct
KDRGTGP

SEQ ID NO: 64371 - protein, 7 aa, synthetic construct
KSTQASS

SEQ ID NO: 64372 - protein, 7 aa, synthetic construct
SASTSMI

SEQ ID NO: 64373 - protein, 7 aa, synthetic construct
MNKVQSG

SEQ ID NO: 64374 - protein, 7 aa, synthetic construct
FSKQTQP

SEQ ID NO: 64375 - protein, 7 aa, synthetic construct
MPKQPKP

SEQ ID NO: 64376 - protein, 7 aa, synthetic construct
PPGLKDR

SEQ ID NO: 64377 - protein, 7 aa, synthetic construct
LYKPRDG

SEQ ID NO: 64378 - protein, 7 aa, synthetic construct
QSQGIWE

SEQ ID NO: 64379 - protein, 7 aa, synthetic construct
NKPGNSP

SEQ ID NO: 64380 - protein, 7 aa, synthetic construct
DYRNNHQ

SEQ ID NO: 64381 - protein, 7 aa, synthetic construct
LVPNQAH

SEQ ID NO: 64382 - protein, 7 aa, synthetic construct
SQYSQRI

SEQ ID NO: 64383 - protein, 7 aa, synthetic construct
KMGAGPY

SEQ ID NO: 64384 - protein, 7 aa, synthetic construct
DQQYANK

SEQ ID NO: 64385 - protein, 7 aa, synthetic construct
GNVQMER

SEQ ID NO: 64386 - protein, 7 aa, synthetic construct
QPPFPAG

SEQ ID NO: 64387 - protein, 7 aa, synthetic construct
WKQDWPS

SEQ ID NO: 64388 - protein, 7 aa, synthetic construct
ATKNTVV

SEQ ID NO: 64389 - protein, 7 aa, synthetic construct
RLGTSER

SEQ ID NO: 64390 - protein, 7 aa, synthetic construct
YKNETKL

SEQ ID NO: 64391 - protein, 7 aa, synthetic construct
AWNGGTI

SEQ ID NO: 64392 - protein, 7 aa, synthetic construct
GMSIIRD

SEQ ID NO: 64393 - protein, 7 aa, synthetic construct
YQNSQSA

SEQ ID NO: 64394 - protein, 7 aa, synthetic construct
PRAVNMT

SEQ ID NO: 64395 - protein, 7 aa, synthetic construct
NGKMSSG

SEQ ID NO: 64396 - protein, 7 aa, synthetic construct
NQKVSGA

SEQ ID NO: 64397 - protein, 7 aa, synthetic construct
APKFRNE

SEQ ID NO: 64398 - protein, 7 aa, synthetic construct
PQSGHLI

SEQ ID NO: 64399 - protein, 7 aa, synthetic construct
SPGANHT

SEQ ID NO: 64400 - protein, 7 aa, synthetic construct
YGRNITN

SEQ ID NO: 64401 - protein, 7 aa, synthetic construct
FREDKPM

SEQ ID NO: 64402 - protein, 7 aa, synthetic construct
RNGSGMG

SEQ ID NO: 64403 - protein, 7 aa, synthetic construct
PGQKSGT

SEQ ID NO: 64404 - protein, 7 aa, synthetic construct
KYNSGSP

SEQ ID NO: 64405 - protein, 7 aa, synthetic construct
TVAIVKE

SEQ ID NO: 64406 - protein, 7 aa, synthetic construct
HGTQHQH

SEQ ID NO: 64407 - protein, 7 aa, synthetic construct
PKMGSVG

SEQ ID NO: 64408 - protein, 7 aa, synthetic construct
FHREYKD

SEQ ID NO: 64409 - protein, 7 aa, synthetic construct
AAGMRIS

SEQ ID NO: 64410 - protein, 7 aa, synthetic construct
QRTQASA

SEQ ID NO: 64411 - protein, 7 aa, synthetic construct
KPATAAS

SEQ ID NO: 64412 - protein, 7 aa, synthetic construct
QHDKLLY

SEQ ID NO: 64413 - protein, 7 aa, synthetic construct
AKEPYAA

SEQ ID NO: 64414 - protein, 7 aa, synthetic construct
RVAGANH

SEQ ID NO: 64415 - protein, 7 aa, synthetic construct
KTNSGKD

SEQ ID NO: 64416 - protein, 7 aa, synthetic construct
YKQQSVP

SEQ ID NO: 64417 - protein, 7 aa, synthetic construct
NQTAMTP

SEQ ID NO: 64418 - protein, 7 aa, synthetic construct
NAPDKNG

SEQ ID NO: 64419 - protein, 7 aa, synthetic construct
VHSSQLM

SEQ ID NO: 64420 - protein, 7 aa, synthetic construct
SHSIQQN

SEQ ID NO: 64421 - protein, 7 aa, synthetic construct
GRNQASE

SEQ ID NO: 64422 - protein, 7 aa, synthetic construct
DALKAWE

SEQ ID NO: 64423 - protein, 7 aa, synthetic construct
VDQGRFG

SEQ ID NO: 64424 - protein, 7 aa, synthetic construct
TFHQNSG

SEQ ID NO: 64425 - protein, 7 aa, synthetic construct
LKSANGM

SEQ ID NO: 64426 - protein, 7 aa, synthetic construct
KSVGADG

SEQ ID NO: 64427 - protein, 7 aa, synthetic construct
KWEKHTM

SEQ ID NO: 64428 - protein, 7 aa, synthetic construct
LMGLNVK

SEQ ID NO: 64429 - protein, 7 aa, synthetic construct
RQNFVTE

SEQ ID NO: 64430 - protein, 7 aa, synthetic construct
HGSHFGG

SEQ ID NO: 64431 - protein, 7 aa, synthetic construct
NSSQIHI

SEQ ID NO: 64432 - protein, 7 aa, synthetic construct
IPKYNDS

SEQ ID NO: 64433 - protein, 7 aa, synthetic construct
TRYYPEA

SEQ ID NO: 64434 - protein, 7 aa, synthetic construct
KSTMKGE

SEQ ID NO: 64435 - protein, 7 aa, synthetic construct
RLNMTID

SEQ ID NO: 64436 - protein, 7 aa, synthetic construct
WSTTPNK

SEQ ID NO: 64437 - protein, 7 aa, synthetic construct
HGLQIGP

SEQ ID NO: 64438 - protein, 7 aa, synthetic construct
EMTYKKN

SEQ ID NO: 64439 - protein, 7 aa, synthetic construct
VNNRHDG

SEQ ID NO: 64440 - protein, 7 aa, synthetic construct
HKGMVIN

SEQ ID NO: 64441 - protein, 7 aa, synthetic construct
QWTHSAG

SEQ ID NO: 64442 - protein, 7 aa, synthetic construct
VKRPQIE

SEQ ID NO: 64443 - protein, 7 aa, synthetic construct
DSSRGGP

SEQ ID NO: 64444 - protein, 7 aa, synthetic construct
CQRVEAC

SEQ ID NO: 64445 - protein, 7 aa, synthetic construct
NGNKPSP

SEQ ID NO: 64446 - protein, 7 aa, synthetic construct
SNLSNMK

SEQ ID NO: 64447 - protein, 7 aa, synthetic construct
DAGRHSP

SEQ ID NO: 64448 - protein, 7 aa, synthetic construct
FKSAQSG

SEQ ID NO: 64449 - protein, 7 aa, synthetic construct
SGALQIN

SEQ ID NO: 64450 - protein, 7 aa, synthetic construct
KQPGTAN

SEQ ID NO: 64451 - protein, 7 aa, synthetic construct
KYHNPEG

SEQ ID NO: 64452 - protein, 7 aa, synthetic construct
YSGKLQG

SEQ ID NO: 64453 - protein, 7 aa, synthetic construct
FGQITHH

SEQ ID NO: 64454 - protein, 7 aa, synthetic construct
LIQGMGI

SEQ ID NO: 64455 - protein, 7 aa, synthetic construct
VEKFLPE

SEQ ID NO: 64456 - protein, 7 aa, synthetic construct
GHSAGPP

SEQ ID NO: 64457 - protein, 7 aa, synthetic construct
YVREQMH

SEQ ID NO: 64458 - protein, 7 aa, synthetic construct
IKTTSHA

SEQ ID NO: 64459 - protein, 7 aa, synthetic construct
TWQSNPS

SEQ ID NO: 64460 - protein, 7 aa, synthetic construct
SFPAISA

SEQ ID NO: 64461 - protein, 7 aa, synthetic construct
NPNVAPS

SEQ ID NO: 64462 - protein, 7 aa, synthetic construct
TAAGFQG

SEQ ID NO: 64463 - protein, 7 aa, synthetic construct
VNKANTG

SEQ ID NO: 64464 - protein, 7 aa, synthetic construct
KGGATGE

SEQ ID NO: 64465 - protein, 7 aa, synthetic construct
LRPEPSQ

SEQ ID NO: 64466 - protein, 7 aa, synthetic construct
LRAPDDR

SEQ ID NO: 64467 - protein, 7 aa, synthetic construct
QTKSPYV

SEQ ID NO: 64468 - protein, 7 aa, synthetic construct
KNGVQSG

SEQ ID NO: 64469 - protein, 7 aa, synthetic construct
KNKSPSD

SEQ ID NO: 64470 - protein, 7 aa, synthetic construct
DFREADH

SEQ ID NO: 64471 - protein, 7 aa, synthetic construct
QRPGNDT

SEQ ID NO: 64472 - protein, 7 aa, synthetic construct
QSSSKQV

SEQ ID NO: 64473 - protein, 7 aa, synthetic construct
MGKKEPD

SEQ ID NO: 64474 - protein, 7 aa, synthetic construct
KIPKFMD

SEQ ID NO: 64475 - protein, 7 aa, synthetic construct
PTPQYRS

SEQ ID NO: 64476 - protein, 7 aa, synthetic construct
IKAAVNV

SEQ ID NO: 64477 - protein, 7 aa, synthetic construct
ADQRKMS

SEQ ID NO: 64478 - protein, 7 aa, synthetic construct
VYHLHVD

SEQ ID NO: 64479 - protein, 7 aa, synthetic construct
QMTRKDP

SEQ ID NO: 64480 - protein, 7 aa, synthetic construct
HLKESQY

SEQ ID NO: 64481 - protein, 7 aa, synthetic construct
LSGNTPG

SEQ ID NO: 64482 - protein, 7 aa, synthetic construct
QGQRTPM

SEQ ID NO: 64483 - protein, 7 aa, synthetic construct
RIARIMD

SEQ ID NO: 64484 - protein, 7 aa, synthetic construct
ESHGILA

SEQ ID NO: 64485 - protein, 7 aa, synthetic construct
FIGAKEA

SEQ ID NO: 64486 - protein, 7 aa, synthetic construct
STYEHSG

SEQ ID NO: 64487 - protein, 7 aa, synthetic construct
GVNQPMT

SEQ ID NO: 64488 - protein, 7 aa, synthetic construct
PMKSNQS

SEQ ID NO: 64489 - protein, 7 aa, synthetic construct
QARTMEH

SEQ ID NO: 64490 - protein, 7 aa, synthetic construct
FKQVPMV

SEQ ID NO: 64491 - protein, 7 aa, synthetic construct
LSKLKEE

SEQ ID NO: 64492 - protein, 7 aa, synthetic construct
ANRLTAH

SEQ ID NO: 64493 - protein, 7 aa, synthetic construct
VAQKAYF

SEQ ID NO: 64494 - protein, 7 aa, synthetic construct
YRERSLD

SEQ ID NO: 64495 - protein, 7 aa, synthetic construct
AGNITIN

SEQ ID NO: 64496 - protein, 7 aa, synthetic construct
YAAVKDG

SEQ ID NO: 64497 - protein, 7 aa, synthetic construct
PTKNSGP

SEQ ID NO: 64498 - protein, 7 aa, synthetic construct
SVNHQQM

SEQ ID NO: 64499 - protein, 7 aa, synthetic construct
YGSAVER

SEQ ID NO: 64500 - protein, 7 aa, synthetic construct
HMGTSHG

SEQ ID NO: 64501 - protein, 7 aa, synthetic construct
HKLDSLN

SEQ ID NO: 64502 - protein, 7 aa, synthetic construct
NNQKTAA

SEQ ID NO: 64503 - protein, 7 aa, synthetic construct
VLGTNIH

SEQ ID NO: 64504 - protein, 7 aa, synthetic construct
NVTGMGQ

SEQ ID NO: 64505 - protein, 7 aa, synthetic construct
VAQMGYA

SEQ ID NO: 64506 - protein, 7 aa, synthetic construct
HVINRSN

SEQ ID NO: 64507 - protein, 7 aa, synthetic construct
FQDAKGP

SEQ ID NO: 64508 - protein, 7 aa, synthetic construct
PTTRTQI

SEQ ID NO: 64509 - protein, 7 aa, synthetic construct
VNSARTG

SEQ ID NO: 64510 - protein, 7 aa, synthetic construct
GPLFIKG

SEQ ID NO: 64511 - protein, 7 aa, synthetic construct
LNAIKMD

SEQ ID NO: 64512 - protein, 7 aa, synthetic construct
KTMQHTM

SEQ ID NO: 64513 - protein, 7 aa, synthetic construct
VRAGDGP

SEQ ID NO: 64514 - protein, 7 aa, synthetic construct
GTQGNKL

SEQ ID NO: 64515 - protein, 7 aa, synthetic construct
SREHDNV

SEQ ID NO: 64516 - protein, 7 aa, synthetic construct
KIPNESN

SEQ ID NO: 64517 - protein, 7 aa, synthetic construct
YEKQQAA

SEQ ID NO: 64518 - protein, 7 aa, synthetic construct
NKQQARE

SEQ ID NO: 64519 - protein, 7 aa, synthetic construct
TQNYSQG

SEQ ID NO: 64520 - protein, 7 aa, synthetic construct
VKTQPDM

SEQ ID NO: 64521 - protein, 7 aa, synthetic construct
KYNNSGP

SEQ ID NO: 64522 - protein, 7 aa, synthetic construct
RQQSGSA

SEQ ID NO: 64523 - protein, 7 aa, synthetic construct
QIDVKTG

SEQ ID NO: 64524 - protein, 7 aa, synthetic construct
MLKPKNE

SEQ ID NO: 64525 - protein, 7 aa, synthetic construct
RVSSTDY

SEQ ID NO: 64526 - protein, 7 aa, synthetic construct
DTHHPLN

SEQ ID NO: 64527 - protein, 7 aa, synthetic construct
WGKSTVA

SEQ ID NO: 64528 - protein, 7 aa, synthetic construct
EDKAGRR

SEQ ID NO: 64529 - protein, 7 aa, synthetic construct
GFQRSQL

SEQ ID NO: 64530 - protein, 7 aa, synthetic construct
RNSGSQA

SEQ ID NO: 64531 - protein, 7 aa, synthetic construct
KGTNTIG

SEQ ID NO: 64532 - protein, 7 aa, synthetic construct
WNMQSAG

SEQ ID NO: 64533 - protein, 7 aa, synthetic construct
TKDGRMG

SEQ ID NO: 64534 - protein, 7 aa, synthetic construct
DANKMTR

SEQ ID NO: 64535 - protein, 7 aa, synthetic construct
QTKNGTA

SEQ ID NO: 64536 - protein, 7 aa, synthetic construct
SHQKNIW

SEQ ID NO: 64537 - protein, 7 aa, synthetic construct
NSNGMMA

SEQ ID NO: 64538 - protein, 7 aa, synthetic construct
KASTVHA

SEQ ID NO: 64539 - protein, 7 aa, synthetic construct
PLYPATS

SEQ ID NO: 64540 - protein, 7 aa, synthetic construct
NQIQKVQ

SEQ ID NO: 64541 - protein, 7 aa, synthetic construct
LAQKGSG

SEQ ID NO: 64542 - protein, 7 aa, synthetic construct
KMNASMA

SEQ ID NO: 64543 - protein, 7 aa, synthetic construct
LLRNEHQ

SEQ ID NO: 64544 - protein, 7 aa, synthetic construct
LVHGSNV

SEQ ID NO: 64545 - protein, 7 aa, synthetic construct
QHIGREI

SEQ ID NO: 64546 - protein, 7 aa, synthetic construct
KAVVAND

SEQ ID NO: 64547 - protein, 7 aa, synthetic construct
SSPRNMA

SEQ ID NO: 64548 - protein, 7 aa, synthetic construct
MAIGISS

SEQ ID NO: 64549 - protein, 7 aa, synthetic construct
TISNPMI

SEQ ID NO: 64550 - protein, 7 aa, synthetic construct
QQARVSE

SEQ ID NO: 64551 - protein, 7 aa, synthetic construct
GQSKGTG

SEQ ID NO: 64552 - protein, 7 aa, synthetic construct
MYPSGGP

SEQ ID NO: 64553 - protein, 7 aa, synthetic construct
KAPSSAS

SEQ ID NO: 64554 - protein, 7 aa, synthetic construct
NGAQKAT

SEQ ID NO: 64555 - protein, 7 aa, synthetic construct
GDHRAQT

SEQ ID NO: 64556 - protein, 7 aa, synthetic construct
GSLNHRE

SEQ ID NO: 64557 - protein, 7 aa, synthetic construct
WKQYNGE

SEQ ID NO: 64558 - protein, 7 aa, synthetic construct
YGKMEGG

SEQ ID NO: 64559 - protein, 7 aa, synthetic construct
KDPHTGI

SEQ ID NO: 64560 - protein, 7 aa, synthetic construct
GPNIAKS

SEQ ID NO: 64561 - protein, 7 aa, synthetic construct
NISQRSI

SEQ ID NO: 64562 - protein, 7 aa, synthetic construct
VLHREPM

SEQ ID NO: 64563 - protein, 7 aa, synthetic construct
NTKTSFA

SEQ ID NO: 64564 - protein, 7 aa, synthetic construct
SPHNHPE

SEQ ID NO: 64565 - protein, 7 aa, synthetic construct
TSSKQGA

SEQ ID NO: 64566 - protein, 7 aa, synthetic construct
QMAGKAF

SEQ ID NO: 64567 - protein, 7 aa, synthetic construct
SKSASMA

SEQ ID NO: 64568 - protein, 7 aa, synthetic construct
QQRAIAP

SEQ ID NO: 64569 - protein, 7 aa, synthetic construct
QRIDTGP

SEQ ID NO: 64570 - protein, 7 aa, synthetic construct
PNQLVRP

SEQ ID NO: 64571 - protein, 7 aa, synthetic construct
NAKAMKE

SEQ ID NO: 64572 - protein, 7 aa, synthetic construct
VYTSQNG

SEQ ID NO: 64573 - protein, 7 aa, synthetic construct
VHTNMLV

SEQ ID NO: 64574 - protein, 7 aa, synthetic construct
KTNGNGN

SEQ ID NO: 64575 - protein, 7 aa, synthetic construct
VFMSSGP

SEQ ID NO: 64576 - protein, 7 aa, synthetic construct
TSYSQTI

SEQ ID NO: 64577 - protein, 7 aa, synthetic construct
NQQGEYG

SEQ ID NO: 64578 - protein, 7 aa, synthetic construct
QAIKTGS

SEQ ID NO: 64579 - protein, 7 aa, synthetic construct
SPQATIA

SEQ ID NO: 64580 - protein, 7 aa, synthetic construct
ILDTQFG

SEQ ID NO: 64581 - protein, 7 aa, synthetic construct
TFDRKER

SEQ ID NO: 64582 - protein, 7 aa, synthetic construct
KREFKDE

SEQ ID NO: 64583 - protein, 7 aa, synthetic construct
GVSKQAA

SEQ ID NO: 64584 - protein, 7 aa, synthetic construct
DKKASQG

SEQ ID NO: 64585 - protein, 7 aa, synthetic construct
QMQGLPA

SEQ ID NO: 64586 - protein, 7 aa, synthetic construct
KSFTSHE

SEQ ID NO: 64587 - protein, 7 aa, synthetic construct
GHSSMAP

SEQ ID NO: 64588 - protein, 7 aa, synthetic construct
LTKPMMD

SEQ ID NO: 64589 - protein, 7 aa, synthetic construct
NTRPTPA

SEQ ID NO: 64590 - protein, 7 aa, synthetic construct
RDKGKEF

SEQ ID NO: 64591 - protein, 7 aa, synthetic construct
YKNNNSG

SEQ ID NO: 64592 - protein, 7 aa, synthetic construct
NERRMDL

SEQ ID NO: 64593 - protein, 7 aa, synthetic construct
TVEKFAA

SEQ ID NO: 64594 - protein, 7 aa, synthetic construct
KTVMGRD

SEQ ID NO: 64595 - protein, 7 aa, synthetic construct
MNNGQRH

SEQ ID NO: 64596 - protein, 7 aa, synthetic construct
RPKEKDD

SEQ ID NO: 64597 - protein, 7 aa, synthetic construct
WHNTNQK

SEQ ID NO: 64598 - protein, 7 aa, synthetic construct
QSKTFVG

SEQ ID NO: 64599 - protein, 7 aa, synthetic construct
QQGDHRD

SEQ ID NO: 64600 - protein, 7 aa, synthetic construct
QFQKGYL

SEQ ID NO: 64601 - protein, 7 aa, synthetic construct
QKRQSDD

SEQ ID NO: 64602 - protein, 7 aa, synthetic construct
QPRIHAA

SEQ ID NO: 64603 - protein, 7 aa, synthetic construct
VQRTQMS

SEQ ID NO: 64604 - protein, 7 aa, synthetic construct
GYAKFPD

SEQ ID NO: 64605 - protein, 7 aa, synthetic construct
QKAHPEV

SEQ ID NO: 64606 - protein, 7 aa, synthetic construct
GGKTGQA

SEQ ID NO: 64607 - protein, 7 aa, synthetic construct
QKMQSAA

SEQ ID NO: 64608 - protein, 7 aa, synthetic construct
KTQTPQA

SEQ ID NO: 64609 - protein, 7 aa, synthetic construct
AMRKHEP

SEQ ID NO: 64610 - protein, 7 aa, synthetic construct
SPTRLNA

SEQ ID NO: 64611 - protein, 7 aa, synthetic construct
HKTMSIG

SEQ ID NO: 64612 - protein, 7 aa, synthetic construct
AGRIHTV

SEQ ID NO: 64613 - protein, 7 aa, synthetic construct
RQPPSNG

SEQ ID NO: 64614 - protein, 7 aa, synthetic construct
CTQKGCS

SEQ ID NO: 64615 - protein, 7 aa, synthetic construct
KKGEPEA

SEQ ID NO: 64616 - protein, 7 aa, synthetic construct
QALPTAE

SEQ ID NO: 64617 - protein, 7 aa, synthetic construct
IGKTYSN

SEQ ID NO: 64618 - protein, 7 aa, synthetic construct
YYRSTEN

SEQ ID NO: 64619 - protein, 7 aa, synthetic construct
FGQLTLE

SEQ ID NO: 64620 - protein, 7 aa, synthetic construct
GQAGVKA

SEQ ID NO: 64621 - protein, 7 aa, synthetic construct
QSRTNQP

SEQ ID NO: 64622 - protein, 7 aa, synthetic construct
WTSSTDH

SEQ ID NO: 64623 - protein, 7 aa, synthetic construct
KQNSSGT

SEQ ID NO: 64624 - protein, 7 aa, synthetic construct
LESTRNG

SEQ ID NO: 64625 - protein, 7 aa, synthetic construct
WTPVVTG

SEQ ID NO: 64626 - protein, 7 aa, synthetic construct
TIKTATP

SEQ ID NO: 64627 - protein, 7 aa, synthetic construct
LHNHPRA

SEQ ID NO: 64628 - protein, 7 aa, synthetic construct
NVATNSR

SEQ ID NO: 64629 - protein, 7 aa, synthetic construct
FRASYSG

SEQ ID NO: 64630 - protein, 7 aa, synthetic construct
QPVHDRR

SEQ ID NO: 64631 - protein, 7 aa, synthetic construct
RGVHPGV

SEQ ID NO: 64632 - protein, 7 aa, synthetic construct
QRTQNVA

SEQ ID NO: 64633 - protein, 7 aa, synthetic construct
REDIRKT

SEQ ID NO: 64634 - protein, 7 aa, synthetic construct
RKDGGQN

SEQ ID NO: 64635 - protein, 7 aa, synthetic construct
QIDTRRY

SEQ ID NO: 64636 - protein, 7 aa, synthetic construct
WGLQQDS

SEQ ID NO: 64637 - protein, 7 aa, synthetic construct
ITKQQIP

SEQ ID NO: 64638 - protein, 7 aa, synthetic construct
WNKTNPG

SEQ ID NO: 64639 - protein, 7 aa, synthetic construct
YPQKTTP

SEQ ID NO: 64640 - protein, 7 aa, synthetic construct
VGGYTKD

SEQ ID NO: 64641 - protein, 7 aa, synthetic construct
FKHETDI

SEQ ID NO: 64642 - protein, 7 aa, synthetic construct
KRSHDTP

SEQ ID NO: 64643 - protein, 7 aa, synthetic construct
QKSNAQS

SEQ ID NO: 64644 - protein, 7 aa, synthetic construct
TRMNGHS

SEQ ID NO: 64645 - protein, 7 aa, synthetic construct
PEQQHKY

SEQ ID NO: 64646 - protein, 7 aa, synthetic construct
RVGHLDH

SEQ ID NO: 64647 - protein, 7 aa, synthetic construct
IGKNGNS

SEQ ID NO: 64648 - protein, 7 aa, synthetic construct
MGQRTTY

SEQ ID NO: 64649 - protein, 7 aa, synthetic construct
GGRLHED

SEQ ID NO: 64650 - protein, 7 aa, synthetic construct
IVNAART

SEQ ID NO: 64651 - protein, 7 aa, synthetic construct
YYGKFAD

SEQ ID NO: 64652 - protein, 7 aa, synthetic construct
PTSHQQI

SEQ ID NO: 64653 - protein, 7 aa, synthetic construct
TPTPSNV

SEQ ID NO: 64654 - protein, 7 aa, synthetic construct
ESLKGER

SEQ ID NO: 64655 - protein, 7 aa, synthetic construct
SKGNMMG

SEQ ID NO: 64656 - protein, 7 aa, synthetic construct
FKPSGVA

SEQ ID NO: 64657 - protein, 7 aa, synthetic construct
QPRAAQP

SEQ ID NO: 64658 - protein, 7 aa, synthetic construct
VYKEGLR

SEQ ID NO: 64659 - protein, 7 aa, synthetic construct
YFKNFAG

SEQ ID NO: 64660 - protein, 7 aa, synthetic construct
EKITKEH

SEQ ID NO: 64661 - protein, 7 aa, synthetic construct
QVKPGYM

SEQ ID NO: 64662 - protein, 7 aa, synthetic construct
MKNSSVG

SEQ ID NO: 64663 - protein, 7 aa, synthetic construct
WPTNVRG

SEQ ID NO: 64664 - protein, 7 aa, synthetic construct
VKMDNTI

SEQ ID NO: 64665 - protein, 7 aa, synthetic construct
NANFSIV

SEQ ID NO: 64666 - protein, 7 aa, synthetic construct
GVFNRND

SEQ ID NO: 64667 - protein, 7 aa, synthetic construct
QSHTSVP

SEQ ID NO: 64668 - protein, 7 aa, synthetic construct
KGGPILY

SEQ ID NO: 64669 - protein, 7 aa, synthetic construct
NNVHTAR

SEQ ID NO: 64670 - protein, 7 aa, synthetic construct
RVAFGKE

SEQ ID NO: 64671 - protein, 7 aa, synthetic construct
NNGRNSA

SEQ ID NO: 64672 - protein, 7 aa, synthetic construct
RTVNVKE

SEQ ID NO: 64673 - protein, 7 aa, synthetic construct
AVPLTGG

SEQ ID NO: 64674 - protein, 7 aa, synthetic construct
YPTPSQI

SEQ ID NO: 64675 - protein, 7 aa, synthetic construct
RNNNSVE

SEQ ID NO: 64676 - protein, 7 aa, synthetic construct
TKGTSQG

SEQ ID NO: 64677 - protein, 7 aa, synthetic construct
NTKAGSQ

SEQ ID NO: 64678 - protein, 7 aa, synthetic construct
YGNTLKA

SEQ ID NO: 64679 - protein, 7 aa, synthetic construct
PNLSKER

SEQ ID NO: 64680 - protein, 7 aa, synthetic construct
NDTRRAQ

SEQ ID NO: 64681 - protein, 7 aa, synthetic construct
LMNTIHG

SEQ ID NO: 64682 - protein, 7 aa, synthetic construct
RDKVKDN

SEQ ID NO: 64683 - protein, 7 aa, synthetic construct
KELKFQT

SEQ ID NO: 64684 - protein, 7 aa, synthetic construct
KNPQQEG

SEQ ID NO: 64685 - protein, 7 aa, synthetic construct
DSTKGMI

SEQ ID NO: 64686 - protein, 7 aa, synthetic construct
FIQNMAN

SEQ ID NO: 64687 - protein, 7 aa, synthetic construct
NVHRLAS

SEQ ID NO: 64688 - protein, 7 aa, synthetic construct
ESKGIKP

SEQ ID NO: 64689 - protein, 7 aa, synthetic construct
YNKSNNF

SEQ ID NO: 64690 - protein, 7 aa, synthetic construct
VNQKYMH

SEQ ID NO: 64691 - protein, 7 aa, synthetic construct
HPPRIPE

SEQ ID NO: 64692 - protein, 7 aa, synthetic construct
TQFVLTP

SEQ ID NO: 64693 - protein, 7 aa, synthetic construct
THGAERY

SEQ ID NO: 64694 - protein, 7 aa, synthetic construct
SPRARYE

SEQ ID NO: 64695 - protein, 7 aa, synthetic construct
GIVGTTS

SEQ ID NO: 64696 - protein, 7 aa, synthetic construct
IPTAQPP

SEQ ID NO: 64697 - protein, 7 aa, synthetic construct
SKDRNQP

SEQ ID NO: 64698 - protein, 7 aa, synthetic construct
SQARGGI

SEQ ID NO: 64699 - protein, 7 aa, synthetic construct
ASHLREL

SEQ ID NO: 64700 - protein, 7 aa, synthetic construct
KADMHLA

SEQ ID NO: 64701 - protein, 7 aa, synthetic construct
LSKYHQM

SEQ ID NO: 64702 - protein, 7 aa, synthetic construct
AYGNGFG

SEQ ID NO: 64703 - protein, 7 aa, synthetic construct
QFNNMSR

SEQ ID NO: 64704 - protein, 7 aa, synthetic construct
YKDSISP

SEQ ID NO: 64705 - protein, 7 aa, synthetic construct
DKIMGTH

SEQ ID NO: 64706 - protein, 7 aa, synthetic construct
VAHVSKL

SEQ ID NO: 64707 - protein, 7 aa, synthetic construct
NRKPDER

SEQ ID NO: 64708 - protein, 7 aa, synthetic construct
TGARNVP

SEQ ID NO: 64709 - protein, 7 aa, synthetic construct
TLRYEVT

SEQ ID NO: 64710 - protein, 7 aa, synthetic construct
MRPNQMG

SEQ ID NO: 64711 - protein, 7 aa, synthetic construct
LSTQSNV

SEQ ID NO: 64712 - protein, 7 aa, synthetic construct
LQDYPKS

SEQ ID NO: 64713 - protein, 7 aa, synthetic construct
NQITLQS

SEQ ID NO: 64714 - protein, 7 aa, synthetic construct
PHFGHSD

SEQ ID NO: 64715 - protein, 7 aa, synthetic construct
TSDNKQN

SEQ ID NO: 64716 - protein, 7 aa, synthetic construct
PRSVVRD

SEQ ID NO: 64717 - protein, 7 aa, synthetic construct
MPHGMYP

SEQ ID NO: 64718 - protein, 7 aa, synthetic construct
NKHEYVP

SEQ ID NO: 64719 - protein, 7 aa, synthetic construct
GVNKMPY

SEQ ID NO: 64720 - protein, 7 aa, synthetic construct
SKNSTTM

SEQ ID NO: 64721 - protein, 7 aa, synthetic construct
HFKQINT

SEQ ID NO: 64722 - protein, 7 aa, synthetic construct
IRDPQHI

SEQ ID NO: 64723 - protein, 7 aa, synthetic construct
KFLQPQE

SEQ ID NO: 64724 - protein, 7 aa, synthetic construct
YHNHTSV

SEQ ID NO: 64725 - protein, 7 aa, synthetic construct
RTMQVDI

SEQ ID NO: 64726 - protein, 7 aa, synthetic construct
IYAPGET

SEQ ID NO: 64727 - protein, 7 aa, synthetic construct
INGYGQI

SEQ ID NO: 64728 - protein, 7 aa, synthetic construct
NGNKPSA

SEQ ID NO: 64729 - protein, 7 aa, synthetic construct
PEQKSWG

SEQ ID NO: 64730 - protein, 7 aa, synthetic construct
IYPTGRS

SEQ ID NO: 64731 - protein, 7 aa, synthetic construct
GKKDTAV

SEQ ID NO: 64732 - protein, 7 aa, synthetic construct
TNKQTNG

SEQ ID NO: 64733 - protein, 7 aa, synthetic construct
SPTPKQA

SEQ ID NO: 64734 - protein, 7 aa, synthetic construct
RDPFGVV

SEQ ID NO: 64735 - protein, 7 aa, synthetic construct
HTNFHHD

SEQ ID NO: 64736 - protein, 7 aa, synthetic construct
HIVREST

SEQ ID NO: 64737 - protein, 7 aa, synthetic construct
SPTKVGG

SEQ ID NO: 64738 - protein, 7 aa, synthetic construct
TTFKTEH

SEQ ID NO: 64739 - protein, 7 aa, synthetic construct
AYKAPPS

SEQ ID NO: 64740 - protein, 7 aa, synthetic construct
SGHSAAS

SEQ ID NO: 64741 - protein, 7 aa, synthetic construct
QLGVKGN

SEQ ID NO: 64742 - protein, 7 aa, synthetic construct
MKPSQQG

SEQ ID NO: 64743 - protein, 7 aa, synthetic construct
PKTMNGP

SEQ ID NO: 64744 - protein, 7 aa, synthetic construct
LRKSSED

SEQ ID NO: 64745 - protein, 7 aa, synthetic construct
WNRNTEG

SEQ ID NO: 64746 - protein, 7 aa, synthetic construct
QLKSDTN

SEQ ID NO: 64747 - protein, 7 aa, synthetic construct
RILDGHA

SEQ ID NO: 64748 - protein, 7 aa, synthetic construct
GFEFHAA

SEQ ID NO: 64749 - protein, 7 aa, synthetic construct
PMKSGQP

SEQ ID NO: 64750 - protein, 7 aa, synthetic construct
SMNGAGG

SEQ ID NO: 64751 - protein, 7 aa, synthetic construct
VKTGQMA

SEQ ID NO: 64752 - protein, 7 aa, synthetic construct
HFKSDNI

SEQ ID NO: 64753 - protein, 7 aa, synthetic construct
RSMNTQS

SEQ ID NO: 64754 - protein, 7 aa, synthetic construct
NTTYRES

SEQ ID NO: 64755 - protein, 7 aa, synthetic construct
PQRHVPH

SEQ ID NO: 64756 - protein, 7 aa, synthetic construct
LAHMERM

SEQ ID NO: 64757 - protein, 7 aa, synthetic construct
WSVHRSE

SEQ ID NO: 64758 - protein, 7 aa, synthetic construct
KNMTAHI

SEQ ID NO: 64759 - protein, 7 aa, synthetic construct
TMRTGGA

SEQ ID NO: 64760 - protein, 7 aa, synthetic construct
RDNKYNI

SEQ ID NO: 64761 - protein, 7 aa, synthetic construct
QNYANSP

SEQ ID NO: 64762 - protein, 7 aa, synthetic construct
NYKSSTG

SEQ ID NO: 64763 - protein, 7 aa, synthetic construct
TGNKAQS

SEQ ID NO: 64764 - protein, 7 aa, synthetic construct
VGNKNNA

SEQ ID NO: 64765 - protein, 7 aa, synthetic construct
NTKLQQL

SEQ ID NO: 64766 - protein, 7 aa, synthetic construct
IVRLQAT

SEQ ID NO: 64767 - protein, 7 aa, synthetic construct
TKTPNRD

SEQ ID NO: 64768 - protein, 7 aa, synthetic construct
GVSEDGP

SEQ ID NO: 64769 - protein, 7 aa, synthetic construct
ATASQGP

SEQ ID NO: 64770 - protein, 7 aa, synthetic construct
TMHENNA

SEQ ID NO: 64771 - protein, 7 aa, synthetic construct
NYPRDKA

SEQ ID NO: 64772 - protein, 7 aa, synthetic construct
VKGTNGA

SEQ ID NO: 64773 - protein, 7 aa, synthetic construct
NVKSANP

SEQ ID NO: 64774 - protein, 7 aa, synthetic construct
YAPLLTP

SEQ ID NO: 64775 - protein, 7 aa, synthetic construct
KNPTNQA

SEQ ID NO: 64776 - protein, 7 aa, synthetic construct
VQRSMGA

SEQ ID NO: 64777 - protein, 7 aa, synthetic construct
KPTNTVP

SEQ ID NO: 64778 - protein, 7 aa, synthetic construct
GHHKIPD

SEQ ID NO: 64779 - protein, 7 aa, synthetic construct
QFGIKNT

SEQ ID NO: 64780 - protein, 7 aa, synthetic construct
GSPKTNA

SEQ ID NO: 64781 - protein, 7 aa, synthetic construct
AMQTLQA

SEQ ID NO: 64782 - protein, 7 aa, synthetic construct
KKDTPMG

SEQ ID NO: 64783 - protein, 7 aa, synthetic construct
QVKTTQG

SEQ ID NO: 64784 - protein, 7 aa, synthetic construct
TKGHGDD

SEQ ID NO: 64785 - protein, 7 aa, synthetic construct
HRFHDQV

SEQ ID NO: 64786 - protein, 7 aa, synthetic construct
MILAKAP

SEQ ID NO: 64787 - protein, 7 aa, synthetic construct
GPSRVIT

SEQ ID NO: 64788 - protein, 7 aa, synthetic construct
LNNEKRG

SEQ ID NO: 64789 - protein, 7 aa, synthetic construct
SEPGRVT

SEQ ID NO: 64790 - protein, 7 aa, synthetic construct
FGHNANV

SEQ ID NO: 64791 - protein, 7 aa, synthetic construct
FIQRDSN

SEQ ID NO: 64792 - protein, 7 aa, synthetic construct
MDRLYIA

SEQ ID NO: 64793 - protein, 7 aa, synthetic construct
FPMAYKG

SEQ ID NO: 64794 - protein, 7 aa, synthetic construct
SQSYGAL

SEQ ID NO: 64795 - protein, 7 aa, synthetic construct
RPATSAP

SEQ ID NO: 64796 - protein, 7 aa, synthetic construct
YQHGNHH

SEQ ID NO: 64797 - protein, 7 aa, synthetic construct
GPKYTNA

SEQ ID NO: 64798 - protein, 7 aa, synthetic construct
HATTAFP

SEQ ID NO: 64799 - protein, 7 aa, synthetic construct
GHKQFPG

SEQ ID NO: 64800 - protein, 7 aa, synthetic construct
MTAQLRG

SEQ ID NO: 64801 - protein, 7 aa, synthetic construct
FRSTNVP

SEQ ID NO: 64802 - protein, 7 aa, synthetic construct
HYKSEDK

SEQ ID NO: 64803 - protein, 7 aa, synthetic construct
AMNQATV

SEQ ID NO: 64804 - protein, 7 aa, synthetic construct
GYNKAEY

SEQ ID NO: 64805 - protein, 7 aa, synthetic construct
RDANKPY

SEQ ID NO: 64806 - protein, 7 aa, synthetic construct
LWSGTAT

SEQ ID NO: 64807 - protein, 7 aa, synthetic construct
NHWAKET

SEQ ID NO: 64808 - protein, 7 aa, synthetic construct
QKTTKVG

SEQ ID NO: 64809 - protein, 7 aa, synthetic construct
HMHHHPA

SEQ ID NO: 64810 - protein, 7 aa, synthetic construct
MTKGNTG

SEQ ID NO: 64811 - protein, 7 aa, synthetic construct
IDPISRD

SEQ ID NO: 64812 - protein, 7 aa, synthetic construct
VHTAGRL

SEQ ID NO: 64813 - protein, 7 aa, synthetic construct
IAGKPVA

SEQ ID NO: 64814 - protein, 7 aa, synthetic construct
TKTSKDG

SEQ ID NO: 64815 - protein, 7 aa, synthetic construct
RGQKGHD

SEQ ID NO: 64816 - protein, 7 aa, synthetic construct
RNSTGSQ

SEQ ID NO: 64817 - protein, 7 aa, synthetic construct
STTRVEM

SEQ ID NO: 64818 - protein, 7 aa, synthetic construct
GKVEVYT

SEQ ID NO: 64819 - protein, 7 aa, synthetic construct
GASSYER

SEQ ID NO: 64820 - protein, 7 aa, synthetic construct
NKKDATN

SEQ ID NO: 64821 - protein, 7 aa, synthetic construct
YKAPDAR

SEQ ID NO: 64822 - protein, 7 aa, synthetic construct
GQAKAGG

SEQ ID NO: 64823 - protein, 7 aa, synthetic construct
YGNGHPI

SEQ ID NO: 64824 - protein, 7 aa, synthetic construct
PMSPGMK

SEQ ID NO: 64825 - protein, 7 aa, synthetic construct
NGASFTG

SEQ ID NO: 64826 - protein, 7 aa, synthetic construct
KATSPTG

SEQ ID NO: 64827 - protein, 7 aa, synthetic construct
QGPMTRM

SEQ ID NO: 64828 - protein, 7 aa, synthetic construct
RELQFGP

SEQ ID NO: 64829 - protein, 7 aa, synthetic construct
SMMPREE

SEQ ID NO: 64830 - protein, 7 aa, synthetic construct
STNSKGF

SEQ ID NO: 64831 - protein, 7 aa, synthetic construct
QGSHKAV

SEQ ID NO: 64832 - protein, 7 aa, synthetic construct
TSAKGGN

SEQ ID NO: 64833 - protein, 7 aa, synthetic construct
YGLSSRG

SEQ ID NO: 64834 - protein, 7 aa, synthetic construct
FKQESAS

SEQ ID NO: 64835 - protein, 7 aa, synthetic construct
NYMLKSG

SEQ ID NO: 64836 - protein, 7 aa, synthetic construct
FLGPGGV

SEQ ID NO: 64837 - protein, 7 aa, synthetic construct
HMNQIGL

SEQ ID NO: 64838 - protein, 7 aa, synthetic construct
NYKMDEK

SEQ ID NO: 64839 - protein, 7 aa, synthetic construct
RQTNTNP

SEQ ID NO: 64840 - protein, 7 aa, synthetic construct
SNYTPTK

SEQ ID NO: 64841 - protein, 7 aa, synthetic construct
TNKPVTG

SEQ ID NO: 64842 - protein, 7 aa, synthetic construct
TMQWDKP

SEQ ID NO: 64843 - protein, 7 aa, synthetic construct
STQKDSS

SEQ ID NO: 64844 - protein, 7 aa, synthetic construct
REPGKQE

SEQ ID NO: 64845 - protein, 7 aa, synthetic construct
FQYHKQD

SEQ ID NO: 64846 - protein, 7 aa, synthetic construct
SHKIAHI

SEQ ID NO: 64847 - protein, 7 aa, synthetic construct
NNHSYRV

SEQ ID NO: 64848 - protein, 7 aa, synthetic construct
RENGPHT

SEQ ID NO: 64849 - protein, 7 aa, synthetic construct
YPNPLDS

SEQ ID NO: 64850 - protein, 7 aa, synthetic construct
NSKANHW

SEQ ID NO: 64851 - protein, 7 aa, synthetic construct
YHLAKGH

SEQ ID NO: 64852 - protein, 7 aa, synthetic construct
YDRHSTT

SEQ ID NO: 64853 - protein, 7 aa, synthetic construct
DFTMRKM

SEQ ID NO: 64854 - protein, 7 aa, synthetic construct
IIKGDTL

SEQ ID NO: 64855 - protein, 7 aa, synthetic construct
HELGGMG

SEQ ID NO: 64856 - protein, 7 aa, synthetic construct
NHDMRAL

SEQ ID NO: 64857 - protein, 7 aa, synthetic construct
GNKSFGG

SEQ ID NO: 64858 - protein, 7 aa, synthetic construct
ITSNGHA

SEQ ID NO: 64859 - protein, 7 aa, synthetic construct
KGNNMSG

SEQ ID NO: 64860 - protein, 7 aa, synthetic construct
PYIRGQP

SEQ ID NO: 64861 - protein, 7 aa, synthetic construct
WSTKAGI

SEQ ID NO: 64862 - protein, 7 aa, synthetic construct
YDRALHE

SEQ ID NO: 64863 - protein, 7 aa, synthetic construct
GLIDKAV

SEQ ID NO: 64864 - protein, 7 aa, synthetic construct
QKNGGAP

SEQ ID NO: 64865 - protein, 7 aa, synthetic construct
YMGTKTF

SEQ ID NO: 64866 - protein, 7 aa, synthetic construct
FGPVQPG

SEQ ID NO: 64867 - protein, 7 aa, synthetic construct
YNKHIDP

SEQ ID NO: 64868 - protein, 7 aa, synthetic construct
SKTQIYP

SEQ ID NO: 64869 - protein, 7 aa, synthetic construct
MPSQKAP

SEQ ID NO: 64870 - protein, 7 aa, synthetic construct
QGHSSQT

SEQ ID NO: 64871 - protein, 7 aa, synthetic construct
NPQQNKF

SEQ ID NO: 64872 - protein, 7 aa, synthetic construct
NTNHATY

SEQ ID NO: 64873 - protein, 7 aa, synthetic construct
SKSSSQL

SEQ ID NO: 64874 - protein, 7 aa, synthetic construct
KPSTSQS

SEQ ID NO: 64875 - protein, 7 aa, synthetic construct
EPTKIQT

SEQ ID NO: 64876 - protein, 7 aa, synthetic construct
WTVPSAG

SEQ ID NO: 64877 - protein, 7 aa, synthetic construct
MQSNHPF

SEQ ID NO: 64878 - protein, 7 aa, synthetic construct
GVSASIK

SEQ ID NO: 64879 - protein, 7 aa, synthetic construct
ADRTQTP

SEQ ID NO: 64880 - protein, 7 aa, synthetic construct
YADMTKQ

SEQ ID NO: 64881 - protein, 7 aa, synthetic construct
KQALHKE

SEQ ID NO: 64882 - protein, 7 aa, synthetic construct
KKMLDPS

SEQ ID NO: 64883 - protein, 7 aa, synthetic construct
MQRATRD

SEQ ID NO: 64884 - protein, 7 aa, synthetic construct
NKDKSQG

SEQ ID NO: 64885 - protein, 7 aa, synthetic construct
LKGSSIW

SEQ ID NO: 64886 - protein, 7 aa, synthetic construct
AQHNLRP

SEQ ID NO: 64887 - protein, 7 aa, synthetic construct
KVHDRSM

SEQ ID NO: 64888 - protein, 7 aa, synthetic construct
DRGKGDT

SEQ ID NO: 64889 - protein, 7 aa, synthetic construct
FSDKKVW

SEQ ID NO: 64890 - protein, 7 aa, synthetic construct
YRDQQHK

SEQ ID NO: 64891 - protein, 7 aa, synthetic construct
SVKPGHQ

SEQ ID NO: 64892 - protein, 7 aa, synthetic construct
RNIIPVD

SEQ ID NO: 64893 - protein, 7 aa, synthetic construct
QNRTAQP

SEQ ID NO: 64894 - protein, 7 aa, synthetic construct
AGSRMGD

SEQ ID NO: 64895 - protein, 7 aa, synthetic construct
SYQLAHA

SEQ ID NO: 64896 - protein, 7 aa, synthetic construct
MHPRVMD

SEQ ID NO: 64897 - protein, 7 aa, synthetic construct
SMMKVTT

SEQ ID NO: 64898 - protein, 7 aa, synthetic construct
SRQVALI

SEQ ID NO: 64899 - protein, 7 aa, synthetic construct
WKAKGEE

SEQ ID NO: 64900 - protein, 7 aa, synthetic construct
TGSSQQL

SEQ ID NO: 64901 - protein, 7 aa, synthetic construct
QRADATI

SEQ ID NO: 64902 - protein, 7 aa, synthetic construct
WKKPQDM

SEQ ID NO: 64903 - protein, 7 aa, synthetic construct
YVSQKPA

SEQ ID NO: 64904 - protein, 7 aa, synthetic construct
GKPPASY

SEQ ID NO: 64905 - protein, 7 aa, synthetic construct
KDQKSAA

SEQ ID NO: 64906 - protein, 7 aa, synthetic construct
MSPDQRR

SEQ ID NO: 64907 - protein, 7 aa, synthetic construct
SMRNGTG

SEQ ID NO: 64908 - protein, 7 aa, synthetic construct
HSVRNIA

SEQ ID NO: 64909 - protein, 7 aa, synthetic construct
SGQHHMI

SEQ ID NO: 64910 - protein, 7 aa, synthetic construct
SRPPGNA

SEQ ID NO: 64911 - protein, 7 aa, synthetic construct
FKTNQQS

SEQ ID NO: 64912 - protein, 7 aa, synthetic construct
ENMKSTH

SEQ ID NO: 64913 - protein, 7 aa, synthetic construct
KAYKTDE

SEQ ID NO: 64914 - protein, 7 aa, synthetic construct
HMAHGAV

SEQ ID NO: 64915 - protein, 7 aa, synthetic construct
VYKTTQV

SEQ ID NO: 64916 - protein, 7 aa, synthetic construct
NSKMDNS

SEQ ID NO: 64917 - protein, 7 aa, synthetic construct
KAANSNM

SEQ ID NO: 64918 - protein, 7 aa, synthetic construct
NKTIQTG

SEQ ID NO: 64919 - protein, 7 aa, synthetic construct
YAGAYQP

SEQ ID NO: 64920 - protein, 7 aa, synthetic construct
TFKGSTA

SEQ ID NO: 64921 - protein, 7 aa, synthetic construct
GRINVGA

SEQ ID NO: 64922 - protein, 7 aa, synthetic construct
PNKPELV

SEQ ID NO: 64923 - protein, 7 aa, synthetic construct
NHYHPAS

SEQ ID NO: 64924 - protein, 7 aa, synthetic construct
KQGQPGM

SEQ ID NO: 64925 - protein, 7 aa, synthetic construct
KQGIGSN

SEQ ID NO: 64926 - protein, 7 aa, synthetic construct
IQKTGSP

SEQ ID NO: 64927 - protein, 7 aa, synthetic construct
TGLVNSK

SEQ ID NO: 64928 - protein, 7 aa, synthetic construct
KTNNVGS

SEQ ID NO: 64929 - protein, 7 aa, synthetic construct
KMQHSES

SEQ ID NO: 64930 - protein, 7 aa, synthetic construct
REHAGGT

SEQ ID NO: 64931 - protein, 7 aa, synthetic construct
HGYQQAS

SEQ ID NO: 64932 - protein, 7 aa, synthetic construct
SKGSSNG

SEQ ID NO: 64933 - protein, 7 aa, synthetic construct
PTRNGQV

SEQ ID NO: 64934 - protein, 7 aa, synthetic construct
HNKTDYM

SEQ ID NO: 64935 - protein, 7 aa, synthetic construct
TGLGSIH

SEQ ID NO: 64936 - protein, 7 aa, synthetic construct
GATSRSA

SEQ ID NO: 64937 - protein, 7 aa, synthetic construct
GSKNSQV

SEQ ID NO: 64938 - protein, 7 aa, synthetic construct
HSVTQLA

SEQ ID NO: 64939 - protein, 7 aa, synthetic construct
NRTAQST

SEQ ID NO: 64940 - protein, 7 aa, synthetic construct
FSQSYRA

SEQ ID NO: 64941 - protein, 7 aa, synthetic construct
QGYSEQS

SEQ ID NO: 64942 - protein, 7 aa, synthetic construct
QRERHMD

SEQ ID NO: 64943 - protein, 7 aa, synthetic construct
KTLRPEE

SEQ ID NO: 64944 - protein, 7 aa, synthetic construct
FTAKVHI

SEQ ID NO: 64945 - protein, 7 aa, synthetic construct
KAPRDVP

SEQ ID NO: 64946 - protein, 7 aa, synthetic construct
FGTKSTP

SEQ ID NO: 64947 - protein, 7 aa, synthetic construct
NHNTRMQ

SEQ ID NO: 64948 - protein, 7 aa, synthetic construct
NQLYPTK

SEQ ID NO: 64949 - protein, 7 aa, synthetic construct
KPRQEVW

SEQ ID NO: 64950 - protein, 7 aa, synthetic construct
KDRNSDA

SEQ ID NO: 64951 - protein, 7 aa, synthetic construct
APQGSPG

SEQ ID NO: 64952 - protein, 7 aa, synthetic construct
PTKKDYI

SEQ ID NO: 64953 - protein, 7 aa, synthetic construct
KTQQMNG

SEQ ID NO: 64954 - protein, 7 aa, synthetic construct
VRNSEKT

SEQ ID NO: 64955 - protein, 7 aa, synthetic construct
SVSMKVD

SEQ ID NO: 64956 - protein, 7 aa, synthetic construct
KNGVGHN

SEQ ID NO: 64957 - protein, 7 aa, synthetic construct
KKTEDYF

SEQ ID NO: 64958 - protein, 7 aa, synthetic construct
AHDKRAV

SEQ ID NO: 64959 - protein, 7 aa, synthetic construct
THTKLYI

SEQ ID NO: 64960 - protein, 7 aa, synthetic construct
ETMAKQM

SEQ ID NO: 64961 - protein, 7 aa, synthetic construct
VKYGKDY

SEQ ID NO: 64962 - protein, 7 aa, synthetic construct
MEPLGTR

SEQ ID NO: 64963 - protein, 7 aa, synthetic construct
EGSSTNK

SEQ ID NO: 64964 - protein, 7 aa, synthetic construct
KRSDQAI

SEQ ID NO: 64965 - protein, 7 aa, synthetic construct
FHGVNLE

SEQ ID NO: 64966 - protein, 7 aa, synthetic construct
NTPKNMM

SEQ ID NO: 64967 - protein, 7 aa, synthetic construct
HMPPDFM

SEQ ID NO: 64968 - protein, 7 aa, synthetic construct
FHHDRPA

SEQ ID NO: 64969 - protein, 7 aa, synthetic construct
LRKIEDV

SEQ ID NO: 64970 - protein, 7 aa, synthetic construct
WKPPISA

SEQ ID NO: 64971 - protein, 7 aa, synthetic construct
ENKMPPT

SEQ ID NO: 64972 - protein, 7 aa, synthetic construct
GITNQRI

SEQ ID NO: 64973 - protein, 7 aa, synthetic construct
TLNERSK

SEQ ID NO: 64974 - protein, 7 aa, synthetic construct
MPGHTRI

SEQ ID NO: 64975 - protein, 7 aa, synthetic construct
LPASGKT

SEQ ID NO: 64976 - protein, 7 aa, synthetic construct
PKPKKEE

SEQ ID NO: 64977 - protein, 7 aa, synthetic construct
NGNMKIP

SEQ ID NO: 64978 - protein, 7 aa, synthetic construct
HAFKDVE

SEQ ID NO: 64979 - protein, 7 aa, synthetic construct
DHHKPDL

SEQ ID NO: 64980 - protein, 7 aa, synthetic construct
GAVPYKM

SEQ ID NO: 64981 - protein, 7 aa, synthetic construct
RRPMEQS

SEQ ID NO: 64982 - protein, 7 aa, synthetic construct
QAMGNNM

SEQ ID NO: 64983 - protein, 7 aa, synthetic construct
MRHNEHT

SEQ ID NO: 64984 - protein, 7 aa, synthetic construct
MGPVFKP

SEQ ID NO: 64985 - protein, 7 aa, synthetic construct
ERPAKFI

SEQ ID NO: 64986 - protein, 7 aa, synthetic construct
NSNGRNM

SEQ ID NO: 64987 - protein, 7 aa, synthetic construct
FTGKAAA

SEQ ID NO: 64988 - protein, 7 aa, synthetic construct
QPSNILD

SEQ ID NO: 64989 - protein, 7 aa, synthetic construct
GKYIGPN

SEQ ID NO: 64990 - protein, 7 aa, synthetic construct
IAHNPLS

SEQ ID NO: 64991 - protein, 7 aa, synthetic construct
FGEKRPI

SEQ ID NO: 64992 - protein, 7 aa, synthetic construct
YAEVRNP

SEQ ID NO: 64993 - protein, 7 aa, synthetic construct
VKPEKDY

SEQ ID NO: 64994 - protein, 7 aa, synthetic construct
SRRDTMD

SEQ ID NO: 64995 - protein, 7 aa, synthetic construct
PFEKSYH

SEQ ID NO: 64996 - protein, 7 aa, synthetic construct
DHNQKLA

SEQ ID NO: 64997 - protein, 7 aa, synthetic construct
TQNNLHY

SEQ ID NO: 64998 - protein, 7 aa, synthetic construct
GINKNGG

SEQ ID NO: 64999 - protein, 7 aa, synthetic construct
GTKASTP

SEQ ID NO: 65000 - protein, 7 aa, synthetic construct
PTRQTHA

SEQ ID NO: 65001 - protein, 7 aa, synthetic construct
TTNRSNY

SEQ ID NO: 65002 - protein, 7 aa, synthetic construct
GQNKMMA

SEQ ID NO: 65003 - protein, 7 aa, synthetic construct
NPLHMEH

SEQ ID NO: 65004 - protein, 7 aa, synthetic construct
YRPAMSA

SEQ ID NO: 65005 - protein, 7 aa, synthetic construct
QHKMEPR

SEQ ID NO: 65006 - protein, 7 aa, synthetic construct
NHIKSHS

SEQ ID NO: 65007 - protein, 7 aa, synthetic construct
AKSSSHD

SEQ ID NO: 65008 - protein, 7 aa, synthetic construct
QTKGIIL

SEQ ID NO: 65009 - protein, 7 aa, synthetic construct
RPGSQGA

SEQ ID NO: 65010 - protein, 7 aa, synthetic construct
NNPPHAR

SEQ ID NO: 65011 - protein, 7 aa, synthetic construct
SAHIKIM

SEQ ID NO: 65012 - protein, 7 aa, synthetic construct
TQNKQNA

SEQ ID NO: 65013 - protein, 7 aa, synthetic construct
TSKEKYA

SEQ ID NO: 65014 - protein, 7 aa, synthetic construct
AEMTRKP

SEQ ID NO: 65015 - protein, 7 aa, synthetic construct
MSNHRQV

SEQ ID NO: 65016 - protein, 7 aa, synthetic construct
QNGNKTG

SEQ ID NO: 65017 - protein, 7 aa, synthetic construct
NARAHIS

SEQ ID NO: 65018 - protein, 7 aa, synthetic construct
AAQHFNH

SEQ ID NO: 65019 - protein, 7 aa, synthetic construct
LNTVVHS

SEQ ID NO: 65020 - protein, 7 aa, synthetic construct
GTNQRNG

SEQ ID NO: 65021 - protein, 7 aa, synthetic construct
INKGAGT

SEQ ID NO: 65022 - protein, 7 aa, synthetic construct
YRSDYAN

SEQ ID NO: 65023 - protein, 7 aa, synthetic construct
QELKAKA

SEQ ID NO: 65024 - protein, 7 aa, synthetic construct
NIGNKNT

SEQ ID NO: 65025 - protein, 7 aa, synthetic construct
TKPKDVP

SEQ ID NO: 65026 - protein, 7 aa, synthetic construct
SPVIIAG

SEQ ID NO: 65027 - protein, 7 aa, synthetic construct
WTPLTQA

SEQ ID NO: 65028 - protein, 7 aa, synthetic construct
LMRQMED

SEQ ID NO: 65029 - protein, 7 aa, synthetic construct
PEQYMKA

SEQ ID NO: 65030 - protein, 7 aa, synthetic construct
QGVKVGE

SEQ ID NO: 65031 - protein, 7 aa, synthetic construct
RSSNATD

SEQ ID NO: 65032 - protein, 7 aa, synthetic construct
YPQSVAR

SEQ ID NO: 65033 - protein, 7 aa, synthetic construct
HRQDPIG

SEQ ID NO: 65034 - protein, 7 aa, synthetic construct
TPYRPSA

SEQ ID NO: 65035 - protein, 7 aa, synthetic construct
SMRTANE

SEQ ID NO: 65036 - protein, 7 aa, synthetic construct
ATQKPTS

SEQ ID NO: 65037 - protein, 7 aa, synthetic construct
QNQGWPH

SEQ ID NO: 65038 - protein, 7 aa, synthetic construct
MSPVNKF

SEQ ID NO: 65039 - protein, 7 aa, synthetic construct
TKASHMT

SEQ ID NO: 65040 - protein, 7 aa, synthetic construct
EKTHPPG

SEQ ID NO: 65041 - protein, 7 aa, synthetic construct
VDKHGSA

SEQ ID NO: 65042 - protein, 7 aa, synthetic construct
PRPMGHE

SEQ ID NO: 65043 - protein, 7 aa, synthetic construct
MSSQRTG

SEQ ID NO: 65044 - protein, 7 aa, synthetic construct
TSRARDE

SEQ ID NO: 65045 - protein, 7 aa, synthetic construct
KATNGPV

SEQ ID NO: 65046 - protein, 7 aa, synthetic construct
YGQNRAT

SEQ ID NO: 65047 - protein, 7 aa, synthetic construct
NQKVATG

SEQ ID NO: 65048 - protein, 7 aa, synthetic construct
DGKSSGG

SEQ ID NO: 65049 - protein, 7 aa, synthetic construct
YKNQNQS

SEQ ID NO: 65050 - protein, 7 aa, synthetic construct
MIHTAQS

SEQ ID NO: 65051 - protein, 7 aa, synthetic construct
NMNSVRV

SEQ ID NO: 65052 - protein, 7 aa, synthetic construct
HANVSAG

SEQ ID NO: 65053 - protein, 7 aa, synthetic construct
ITEFSRG

SEQ ID NO: 65054 - protein, 7 aa, synthetic construct
VLQKYDG

SEQ ID NO: 65055 - protein, 7 aa, synthetic construct
VPMSSIS

SEQ ID NO: 65056 - protein, 7 aa, synthetic construct
GVGTRSP

SEQ ID NO: 65057 - protein, 7 aa, synthetic construct
GDTVHKV

SEQ ID NO: 65058 - protein, 7 aa, synthetic construct
MPNAKYG

SEQ ID NO: 65059 - protein, 7 aa, synthetic construct
GAEYHAG

SEQ ID NO: 65060 - protein, 7 aa, synthetic construct
YPNNYSV

SEQ ID NO: 65061 - protein, 7 aa, synthetic construct
MDVDRKR

SEQ ID NO: 65062 - protein, 7 aa, synthetic construct
GPGGFTP

SEQ ID NO: 65063 - protein, 7 aa, synthetic construct
GQKRQED

SEQ ID NO: 65064 - protein, 7 aa, synthetic construct
IGRASEG

SEQ ID NO: 65065 - protein, 7 aa, synthetic construct
AGKTQEM

SEQ ID NO: 65066 - protein, 7 aa, synthetic construct
QKPNGNA

SEQ ID NO: 65067 - protein, 7 aa, synthetic construct
AVNVKEM

SEQ ID NO: 65068 - protein, 7 aa, synthetic construct
SYATQGK

SEQ ID NO: 65069 - protein, 7 aa, synthetic construct
GANGHLY

SEQ ID NO: 65070 - protein, 7 aa, synthetic construct
KHVQHED

SEQ ID NO: 65071 - protein, 7 aa, synthetic construct
GVKNASA

SEQ ID NO: 65072 - protein, 7 aa, synthetic construct
ETRHSHE

SEQ ID NO: 65073 - protein, 7 aa, synthetic construct
KPINALA

SEQ ID NO: 65074 - protein, 7 aa, synthetic construct
MPNKYAE

SEQ ID NO: 65075 - protein, 7 aa, synthetic construct
RTERADL

SEQ ID NO: 65076 - protein, 7 aa, synthetic construct
KVAGPQV

SEQ ID NO: 65077 - protein, 7 aa, synthetic construct
PGKSLEA

SEQ ID NO: 65078 - protein, 7 aa, synthetic construct
VNKLLNM

SEQ ID NO: 65079 - protein, 7 aa, synthetic construct
FKSPGMN

SEQ ID NO: 65080 - protein, 7 aa, synthetic construct
RQDKMVD

SEQ ID NO: 65081 - protein, 7 aa, synthetic construct
NQKQMKD

SEQ ID NO: 65082 - protein, 7 aa, synthetic construct
WTEKRDS

SEQ ID NO: 65083 - protein, 7 aa, synthetic construct
LKPKEWQ

SEQ ID NO: 65084 - protein, 7 aa, synthetic construct
VARLGEA

SEQ ID NO: 65085 - protein, 7 aa, synthetic construct
KTDQRQA

SEQ ID NO: 65086 - protein, 7 aa, synthetic construct
RMTGDQH

SEQ ID NO: 65087 - protein, 7 aa, synthetic construct
RPGGETG

SEQ ID NO: 65088 - protein, 7 aa, synthetic construct
NVRQTNG

SEQ ID NO: 65089 - protein, 7 aa, synthetic construct
HRADPFV

SEQ ID NO: 65090 - protein, 7 aa, synthetic construct
FQRPQAE

SEQ ID NO: 65091 - protein, 7 aa, synthetic construct
KSNPNQN

SEQ ID NO: 65092 - protein, 7 aa, synthetic construct
GKTNNGA

SEQ ID NO: 65093 - protein, 7 aa, synthetic construct
QHELKNS

SEQ ID NO: 65094 - protein, 7 aa, synthetic construct
MKQASAA

SEQ ID NO: 65095 - protein, 7 aa, synthetic construct
KQKNFMD

SEQ ID NO: 65096 - protein, 7 aa, synthetic construct
QSRASTG

SEQ ID NO: 65097 - protein, 7 aa, synthetic construct
VISNSRM

SEQ ID NO: 65098 - protein, 7 aa, synthetic construct
TAIRNID

SEQ ID NO: 65099 - protein, 7 aa, synthetic construct
VMKSGSS

SEQ ID NO: 65100 - protein, 7 aa, synthetic construct
DWKRNHD

SEQ ID NO: 65101 - protein, 7 aa, synthetic construct
KDPHKGI

SEQ ID NO: 65102 - protein, 7 aa, synthetic construct
AYTNGQG

SEQ ID NO: 65103 - protein, 7 aa, synthetic construct
WEKSSGS

SEQ ID NO: 65104 - protein, 7 aa, synthetic construct
TKSTNAS

SEQ ID NO: 65105 - protein, 7 aa, synthetic construct
STSNNKA

SEQ ID NO: 65106 - protein, 7 aa, synthetic construct
RANDQHL

SEQ ID NO: 65107 - protein, 7 aa, synthetic construct
NYAKTQM

SEQ ID NO: 65108 - protein, 7 aa, synthetic construct
GSHRWPE

SEQ ID NO: 65109 - protein, 7 aa, synthetic construct
LSMGTKT

SEQ ID NO: 65110 - protein, 7 aa, synthetic construct
NIKLGIA

SEQ ID NO: 65111 - protein, 7 aa, synthetic construct
KSTAPQG

SEQ ID NO: 65112 - protein, 7 aa, synthetic construct
RQQNSNS

SEQ ID NO: 65113 - protein, 7 aa, synthetic construct
TKMQPSV

SEQ ID NO: 65114 - protein, 7 aa, synthetic construct
MAVTGAG

SEQ ID NO: 65115 - protein, 7 aa, synthetic construct
QLGYSEI

SEQ ID NO: 65116 - protein, 7 aa, synthetic construct
MPKGSGS

SEQ ID NO: 65117 - protein, 7 aa, synthetic construct
NTKKQLE

SEQ ID NO: 65118 - protein, 7 aa, synthetic construct
GGGNKGA

SEQ ID NO: 65119 - protein, 7 aa, synthetic construct
NRGQTNA

SEQ ID NO: 65120 - protein, 7 aa, synthetic construct
GPHASGN

SEQ ID NO: 65121 - protein, 7 aa, synthetic construct
GYDRTSL

SEQ ID NO: 65122 - protein, 7 aa, synthetic construct
DPHKNFG

SEQ ID NO: 65123 - protein, 7 aa, synthetic construct
NGAKISS

SEQ ID NO: 65124 - protein, 7 aa, synthetic construct
PMNGRAP

SEQ ID NO: 65125 - protein, 7 aa, synthetic construct
YNSGIRP

SEQ ID NO: 65126 - protein, 7 aa, synthetic construct
QHRINPV

SEQ ID NO: 65127 - protein, 7 aa, synthetic construct
MNWGAKD

SEQ ID NO: 65128 - protein, 7 aa, synthetic construct
VMHAGLT

SEQ ID NO: 65129 - protein, 7 aa, synthetic construct
LYGERSA

SEQ ID NO: 65130 - protein, 7 aa, synthetic construct
NSAVRVD

SEQ ID NO: 65131 - protein, 7 aa, synthetic construct
GMNKQQA

SEQ ID NO: 65132 - protein, 7 aa, synthetic construct
QSGSKPT

SEQ ID NO: 65133 - protein, 7 aa, synthetic construct
AHGSRYV

SEQ ID NO: 65134 - protein, 7 aa, synthetic construct
NWEPGNS

SEQ ID NO: 65135 - protein, 7 aa, synthetic construct
YIQNPDQ

SEQ ID NO: 65136 - protein, 7 aa, synthetic construct
QMSNGYH

SEQ ID NO: 65137 - protein, 7 aa, synthetic construct
IKTNGLG

SEQ ID NO: 65138 - protein, 7 aa, synthetic construct
MMRSANG

SEQ ID NO: 65139 - protein, 7 aa, synthetic construct
IIKRYEG

SEQ ID NO: 65140 - protein, 7 aa, synthetic construct
GTPQRES

SEQ ID NO: 65141 - protein, 7 aa, synthetic construct
RNNATVA

SEQ ID NO: 65142 - protein, 7 aa, synthetic construct
HHGNHGS

SEQ ID NO: 65143 - protein, 7 aa, synthetic construct
KVTNVGG

SEQ ID NO: 65144 - protein, 7 aa, synthetic construct
RQNNWPE

SEQ ID NO: 65145 - protein, 7 aa, synthetic construct
AKGTLGE

SEQ ID NO: 65146 - protein, 7 aa, synthetic construct
HPASARN

SEQ ID NO: 65147 - protein, 7 aa, synthetic construct
NTPGKMT

SEQ ID NO: 65148 - protein, 7 aa, synthetic construct
VHTHGRM

SEQ ID NO: 65149 - protein, 7 aa, synthetic construct
GTAGSSV

SEQ ID NO: 65150 - protein, 7 aa, synthetic construct
KPSHSPP

SEQ ID NO: 65151 - protein, 7 aa, synthetic construct
QSLKIDH

SEQ ID NO: 65152 - protein, 7 aa, synthetic construct
WVERATS

SEQ ID NO: 65153 - protein, 7 aa, synthetic construct
KPVNAAG

SEQ ID NO: 65154 - protein, 7 aa, synthetic construct
FTSQRGA

SEQ ID NO: 65155 - protein, 7 aa, synthetic construct
PRNDREA

SEQ ID NO: 65156 - protein, 7 aa, synthetic construct
GTEPRKN

SEQ ID NO: 65157 - protein, 7 aa, synthetic construct
HKQVTVA

SEQ ID NO: 65158 - protein, 7 aa, synthetic construct
KHGWTET

SEQ ID NO: 65159 - protein, 7 aa, synthetic construct
KPSQSMP

SEQ ID NO: 65160 - protein, 7 aa, synthetic construct
PMGYEKG

SEQ ID NO: 65161 - protein, 7 aa, synthetic construct
VPQFSPK

SEQ ID NO: 65162 - protein, 7 aa, synthetic construct
FGGKSVP

SEQ ID NO: 65163 - protein, 7 aa, synthetic construct
GFHEAKS

SEQ ID NO: 65164 - protein, 7 aa, synthetic construct
KLGTNNL

SEQ ID NO: 65165 - protein, 7 aa, synthetic construct
NIRDKDW

SEQ ID NO: 65166 - protein, 7 aa, synthetic construct
LGQAGSM

SEQ ID NO: 65167 - protein, 7 aa, synthetic construct
TRTDNKS

SEQ ID NO: 65168 - protein, 7 aa, synthetic construct
HPNQTLY

SEQ ID NO: 65169 - protein, 7 aa, synthetic construct
VEGFGAH

SEQ ID NO: 65170 - protein, 7 aa, synthetic construct
NQRSDMF

SEQ ID NO: 65171 - protein, 7 aa, synthetic construct
ELNRKNY

SEQ ID NO: 65172 - protein, 7 aa, synthetic construct
DKYPKMV

SEQ ID NO: 65173 - protein, 7 aa, synthetic construct
KRDTGFA

SEQ ID NO: 65174 - protein, 7 aa, synthetic construct
TTAQRQS

SEQ ID NO: 65175 - protein, 7 aa, synthetic construct
AAMTTNG

SEQ ID NO: 65176 - protein, 7 aa, synthetic construct
TTGGVFG

SEQ ID NO: 65177 - protein, 7 aa, synthetic construct
PNAKPIN

SEQ ID NO: 65178 - protein, 7 aa, synthetic construct
RPLVGLE

SEQ ID NO: 65179 - protein, 7 aa, synthetic construct
NEYHPRP

SEQ ID NO: 65180 - protein, 7 aa, synthetic construct
KSASSIS

SEQ ID NO: 65181 - protein, 7 aa, synthetic construct
PQNKTMA

SEQ ID NO: 65182 - protein, 7 aa, synthetic construct
GETRPYI

SEQ ID NO: 65183 - protein, 7 aa, synthetic construct
NNATRVT

SEQ ID NO: 65184 - protein, 7 aa, synthetic construct
MRAQSAP

SEQ ID NO: 65185 - protein, 7 aa, synthetic construct
TPRPDVR

SEQ ID NO: 65186 - protein, 7 aa, synthetic construct
TSMSKSM

SEQ ID NO: 65187 - protein, 7 aa, synthetic construct
KWDSKTE

SEQ ID NO: 65188 - protein, 7 aa, synthetic construct
FRRNEFE

SEQ ID NO: 65189 - protein, 7 aa, synthetic construct
RGMDVQV

SEQ ID NO: 65190 - protein, 7 aa, synthetic construct
NNKQTSP

SEQ ID NO: 65191 - protein, 7 aa, synthetic construct
LRPTQEA

SEQ ID NO: 65192 - protein, 7 aa, synthetic construct
NGGQRGG

SEQ ID NO: 65193 - protein, 7 aa, synthetic construct
SKPNQTS

SEQ ID NO: 65194 - protein, 7 aa, synthetic construct
SNSKPDP

SEQ ID NO: 65195 - protein, 7 aa, synthetic construct
ARENAQL

SEQ ID NO: 65196 - protein, 7 aa, synthetic construct
SPTHNKS

SEQ ID NO: 65197 - protein, 7 aa, synthetic construct
TQREVEY

SEQ ID NO: 65198 - protein, 7 aa, synthetic construct
FNPKNDF

SEQ ID NO: 65199 - protein, 7 aa, synthetic construct
MSKGQQS

SEQ ID NO: 65200 - protein, 7 aa, synthetic construct
QNFHGHG

SEQ ID NO: 65201 - protein, 7 aa, synthetic construct
KQRGEFD

SEQ ID NO: 65202 - protein, 7 aa, synthetic construct
HFREDGY

SEQ ID NO: 65203 - protein, 7 aa, synthetic construct
SERQSSR

SEQ ID NO: 65204 - protein, 7 aa, synthetic construct
FQPHHTP

SEQ ID NO: 65205 - protein, 7 aa, synthetic construct
HPRKFQE

SEQ ID NO: 65206 - protein, 7 aa, synthetic construct
SRKETQF

SEQ ID NO: 65207 - protein, 7 aa, synthetic construct
RPSSNQD

SEQ ID NO: 65208 - protein, 7 aa, synthetic construct
HPATWPG

SEQ ID NO: 65209 - protein, 7 aa, synthetic construct
RKNDESN

SEQ ID NO: 65210 - protein, 7 aa, synthetic construct
GQQYRMD

SEQ ID NO: 65211 - protein, 7 aa, synthetic construct
MKGQNPA

SEQ ID NO: 65212 - protein, 7 aa, synthetic construct
GVKHGMQ

SEQ ID NO: 65213 - protein, 7 aa, synthetic construct
KQVTGQP

SEQ ID NO: 65214 - protein, 7 aa, synthetic construct
LPVTPHS

SEQ ID NO: 65215 - protein, 7 aa, synthetic construct
PGKQVHA

SEQ ID NO: 65216 - protein, 7 aa, synthetic construct
RGYGPPD

SEQ ID NO: 65217 - protein, 7 aa, synthetic construct
QPHFKMG

SEQ ID NO: 65218 - protein, 7 aa, synthetic construct
WKDQKSG

SEQ ID NO: 65219 - protein, 7 aa, synthetic construct
QKGYDEK

SEQ ID NO: 65220 - protein, 7 aa, synthetic construct
RDNGKEG

SEQ ID NO: 65221 - protein, 7 aa, synthetic construct
VWKETSA

SEQ ID NO: 65222 - protein, 7 aa, synthetic construct
TSTVMIP

SEQ ID NO: 65223 - protein, 7 aa, synthetic construct
QKMNITP

SEQ ID NO: 65224 - protein, 7 aa, synthetic construct
GLTHQSM

SEQ ID NO: 65225 - protein, 7 aa, synthetic construct
EMHGYSG

SEQ ID NO: 65226 - protein, 7 aa, synthetic construct
HSSNTHP

SEQ ID NO: 65227 - protein, 7 aa, synthetic construct
TLRLQDG

SEQ ID NO: 65228 - protein, 7 aa, synthetic construct
SNSRTMA

SEQ ID NO: 65229 - protein, 7 aa, synthetic construct
GSQTTGK

SEQ ID NO: 65230 - protein, 7 aa, synthetic construct
NRSKDSD

SEQ ID NO: 65231 - protein, 7 aa, synthetic construct
YYGQLTA

SEQ ID NO: 65232 - protein, 7 aa, synthetic construct
SAKDGNR

SEQ ID NO: 65233 - protein, 7 aa, synthetic construct
YEKGKND

SEQ ID NO: 65234 - protein, 7 aa, synthetic construct
FRPTGMQ

SEQ ID NO: 65235 - protein, 7 aa, synthetic construct
FANQSKG

SEQ ID NO: 65236 - protein, 7 aa, synthetic construct
RNGGLTF

SEQ ID NO: 65237 - protein, 7 aa, synthetic construct
QPPKNQA

SEQ ID NO: 65238 - protein, 7 aa, synthetic construct
ASKGVVP

SEQ ID NO: 65239 - protein, 7 aa, synthetic construct
MKVSSSP

SEQ ID NO: 65240 - protein, 7 aa, synthetic construct
KMTAAGA

SEQ ID NO: 65241 - protein, 7 aa, synthetic construct
SPMKTIN

SEQ ID NO: 65242 - protein, 7 aa, synthetic construct
SRPQNIN

SEQ ID NO: 65243 - protein, 7 aa, synthetic construct
DRQKGGA

SEQ ID NO: 65244 - protein, 7 aa, synthetic construct
QHKDHIN

SEQ ID NO: 65245 - protein, 7 aa, synthetic construct
SRGETRQ

SEQ ID NO: 65246 - protein, 7 aa, synthetic construct
ASGHKGD

SEQ ID NO: 65247 - protein, 7 aa, synthetic construct
RAVVSDG

SEQ ID NO: 65248 - protein, 7 aa, synthetic construct
ARNASEM

SEQ ID NO: 65249 - protein, 7 aa, synthetic construct
KTGGDQK

SEQ ID NO: 65250 - protein, 7 aa, synthetic construct
SSSNMMI

SEQ ID NO: 65251 - protein, 7 aa, synthetic construct
LYNGVIA

SEQ ID NO: 65252 - protein, 7 aa, synthetic construct
TFGQRPQ

SEQ ID NO: 65253 - protein, 7 aa, synthetic construct
GGSGNQF

SEQ ID NO: 65254 - protein, 7 aa, synthetic construct
HVPNMGG

SEQ ID NO: 65255 - protein, 7 aa, synthetic construct
STNETRW

SEQ ID NO: 65256 - protein, 7 aa, synthetic construct
QQDIRAA

SEQ ID NO: 65257 - protein, 7 aa, synthetic construct
QLTHKFE

SEQ ID NO: 65258 - protein, 7 aa, synthetic construct
HNSYLPA

SEQ ID NO: 65259 - protein, 7 aa, synthetic construct
PSHTMAA

SEQ ID NO: 65260 - protein, 7 aa, synthetic construct
KYTLDEK

SEQ ID NO: 65261 - protein, 7 aa, synthetic construct
NKQQVNA

SEQ ID NO: 65262 - protein, 7 aa, synthetic construct
VTGTKTG

SEQ ID NO: 65263 - protein, 7 aa, synthetic construct
PLRDKLV

SEQ ID NO: 65264 - protein, 7 aa, synthetic construct
IGPHNVL

SEQ ID NO: 65265 - protein, 7 aa, synthetic construct
PQSQKNV

SEQ ID NO: 65266 - protein, 7 aa, synthetic construct
ADRRPMF

SEQ ID NO: 65267 - protein, 7 aa, synthetic construct
ANPKNAI

SEQ ID NO: 65268 - protein, 7 aa, synthetic construct
RSSEMNP

SEQ ID NO: 65269 - protein, 7 aa, synthetic construct
FGGTQKT

SEQ ID NO: 65270 - protein, 7 aa, synthetic construct
LMGLMRD

SEQ ID NO: 65271 - protein, 7 aa, synthetic construct
ATNRQMG

SEQ ID NO: 65272 - protein, 7 aa, synthetic construct
PPEAKSY

SEQ ID NO: 65273 - protein, 7 aa, synthetic construct
DRETRNA

SEQ ID NO: 65274 - protein, 7 aa, synthetic construct
DKITQRD

SEQ ID NO: 65275 - protein, 7 aa, synthetic construct
NIRRQME

SEQ ID NO: 65276 - protein, 7 aa, synthetic construct
QPYMKNV

SEQ ID NO: 65277 - protein, 7 aa, synthetic construct
PPQTQRT

SEQ ID NO: 65278 - protein, 7 aa, synthetic construct
DGITLRG

SEQ ID NO: 65279 - protein, 7 aa, synthetic construct
FFDAKRG

SEQ ID NO: 65280 - protein, 7 aa, synthetic construct
SKSAVVG

SEQ ID NO: 65281 - protein, 7 aa, synthetic construct
HRGLALQ

SEQ ID NO: 65282 - protein, 7 aa, synthetic construct
ENPKSAR

SEQ ID NO: 65283 - protein, 7 aa, synthetic construct
SDQTKPW

SEQ ID NO: 65284 - protein, 7 aa, synthetic construct
NKVKDVG

SEQ ID NO: 65285 - protein, 7 aa, synthetic construct
NPKGNAA

SEQ ID NO: 65286 - protein, 7 aa, synthetic construct
LVKLQSE

SEQ ID NO: 65287 - protein, 7 aa, synthetic construct
RPTQAVA

SEQ ID NO: 65288 - protein, 7 aa, synthetic construct
FVQKSLQ

SEQ ID NO: 65289 - protein, 7 aa, synthetic construct
DKATYTK

SEQ ID NO: 65290 - protein, 7 aa, synthetic construct
SQVVHMP

SEQ ID NO: 65291 - protein, 7 aa, synthetic construct
GDKGGGG

SEQ ID NO: 65292 - protein, 7 aa, synthetic construct
WEKGAIM

SEQ ID NO: 65293 - protein, 7 aa, synthetic construct
RGANSEV

SEQ ID NO: 65294 - protein, 7 aa, synthetic construct
GWTKLTD

SEQ ID NO: 65295 - protein, 7 aa, synthetic construct
TTGMHKQ

SEQ ID NO: 65296 - protein, 7 aa, synthetic construct
THLQLDK

SEQ ID NO: 65297 - protein, 7 aa, synthetic construct
FGGQPRI

SEQ ID NO: 65298 - protein, 7 aa, synthetic construct
QHNRPGP

SEQ ID NO: 65299 - protein, 7 aa, synthetic construct
WAGIVAE

SEQ ID NO: 65300 - protein, 7 aa, synthetic construct
KGSPGMV

SEQ ID NO: 65301 - protein, 7 aa, synthetic construct
RNATPAT

SEQ ID NO: 65302 - protein, 7 aa, synthetic construct
KTQSNFG

SEQ ID NO: 65303 - protein, 7 aa, synthetic construct
SYTKPPP

SEQ ID NO: 65304 - protein, 7 aa, synthetic construct
KTAQTQA

SEQ ID NO: 65305 - protein, 7 aa, synthetic construct
MFKFPSA

SEQ ID NO: 65306 - protein, 7 aa, synthetic construct
IKDHSAS

SEQ ID NO: 65307 - protein, 7 aa, synthetic construct
QFSSQTP

SEQ ID NO: 65308 - protein, 7 aa, synthetic construct
FRDVGKV

SEQ ID NO: 65309 - protein, 7 aa, synthetic construct
QGHYTEK

SEQ ID NO: 65310 - protein, 7 aa, synthetic construct
GIGPAKP

SEQ ID NO: 65311 - protein, 7 aa, synthetic construct
QPPEKRP

SEQ ID NO: 65312 - protein, 7 aa, synthetic construct
RTLVNES

SEQ ID NO: 65313 - protein, 7 aa, synthetic construct
DRPDHKS

SEQ ID NO: 65314 - protein, 7 aa, synthetic construct
QGATRNA

SEQ ID NO: 65315 - protein, 7 aa, synthetic construct
RIQQAEV

SEQ ID NO: 65316 - protein, 7 aa, synthetic construct
LHLAGKV

SEQ ID NO: 65317 - protein, 7 aa, synthetic construct
AAPHKPQ

SEQ ID NO: 65318 - protein, 7 aa, synthetic construct
QETVHKS

SEQ ID NO: 65319 - protein, 7 aa, synthetic construct
RWEAASQ

SEQ ID NO: 65320 - protein, 7 aa, synthetic construct
EARRGGV

SEQ ID NO: 65321 - protein, 7 aa, synthetic construct
RNTNGVS

SEQ ID NO: 65322 - protein, 7 aa, synthetic construct
RKNADGP

SEQ ID NO: 65323 - protein, 7 aa, synthetic construct
TVTKNSS

SEQ ID NO: 65324 - protein, 7 aa, synthetic construct
KRVDPAE

SEQ ID NO: 65325 - protein, 7 aa, synthetic construct
SKGFAMA

SEQ ID NO: 65326 - protein, 7 aa, synthetic construct
SLRFATG

SEQ ID NO: 65327 - protein, 7 aa, synthetic construct
FKTSAAN

SEQ ID NO: 65328 - protein, 7 aa, synthetic construct
HGTNQMI

SEQ ID NO: 65329 - protein, 7 aa, synthetic construct
TIKENHN

SEQ ID NO: 65330 - protein, 7 aa, synthetic construct
TTNNRGA

SEQ ID NO: 65331 - protein, 7 aa, synthetic construct
NQITKFA

SEQ ID NO: 65332 - protein, 7 aa, synthetic construct
MGFEKKA

SEQ ID NO: 65333 - protein, 7 aa, synthetic construct
KQPMVNV

SEQ ID NO: 65334 - protein, 7 aa, synthetic construct
AQGRYFE

SEQ ID NO: 65335 - protein, 7 aa, synthetic construct
THTYSKA

SEQ ID NO: 65336 - protein, 7 aa, synthetic construct
TGAATKN

SEQ ID NO: 65337 - protein, 7 aa, synthetic construct
MNDHYNK

SEQ ID NO: 65338 - protein, 7 aa, synthetic construct
IMKNNDM

SEQ ID NO: 65339 - protein, 7 aa, synthetic construct
APGHQVS

SEQ ID NO: 65340 - protein, 7 aa, synthetic construct
SKSMDSS

SEQ ID NO: 65341 - protein, 7 aa, synthetic construct
QMVHKRE

SEQ ID NO: 65342 - protein, 7 aa, synthetic construct
YAFAHTN

SEQ ID NO: 65343 - protein, 7 aa, synthetic construct
QRMQTEI

SEQ ID NO: 65344 - protein, 7 aa, synthetic construct
AYTPTRA

SEQ ID NO: 65345 - protein, 7 aa, synthetic construct
MRQPFPA

SEQ ID NO: 65346 - protein, 7 aa, synthetic construct
TFASNSA

SEQ ID NO: 65347 - protein, 7 aa, synthetic construct
MESGRIK

SEQ ID NO: 65348 - protein, 7 aa, synthetic construct
PRKVDQD

SEQ ID NO: 65349 - protein, 7 aa, synthetic construct
TYKDDAR

SEQ ID NO: 65350 - protein, 7 aa, synthetic construct
QLRFEGA

SEQ ID NO: 65351 - protein, 7 aa, synthetic construct
KMAAEGC

SEQ ID NO: 65352 - protein, 7 aa, synthetic construct
NNRENNG

SEQ ID NO: 65353 - protein, 7 aa, synthetic construct
PADKQKS

SEQ ID NO: 65354 - protein, 7 aa, synthetic construct
KSNGNYD

SEQ ID NO: 65355 - protein, 7 aa, synthetic construct
RNNSGGV

SEQ ID NO: 65356 - protein, 7 aa, synthetic construct
TLSSMLS

SEQ ID NO: 65357 - protein, 7 aa, synthetic construct
IHHMKEY

SEQ ID NO: 65358 - protein, 7 aa, synthetic construct
NSKPNMA

SEQ ID NO: 65359 - protein, 7 aa, synthetic construct
NKPANGA

SEQ ID NO: 65360 - protein, 7 aa, synthetic construct
FGAAVIG

SEQ ID NO: 65361 - protein, 7 aa, synthetic construct
MSKSSQV

SEQ ID NO: 65362 - protein, 7 aa, synthetic construct
IPEILKR

SEQ ID NO: 65363 - protein, 7 aa, synthetic construct
DHVHRDI

SEQ ID NO: 65364 - protein, 7 aa, synthetic construct
STGKDKH

SEQ ID NO: 65365 - protein, 7 aa, synthetic construct
LEKQPTF

SEQ ID NO: 65366 - protein, 7 aa, synthetic construct
RPATNQS

SEQ ID NO: 65367 - protein, 7 aa, synthetic construct
RPDKDFL

SEQ ID NO: 65368 - protein, 7 aa, synthetic construct
GKHSELN

SEQ ID NO: 65369 - protein, 7 aa, synthetic construct
QPKNAVN

SEQ ID NO: 65370 - protein, 7 aa, synthetic construct
SFVTPKT

SEQ ID NO: 65371 - protein, 7 aa, synthetic construct
SGPLHKE

SEQ ID NO: 65372 - protein, 7 aa, synthetic construct
NITHAVD

SEQ ID NO: 65373 - protein, 7 aa, synthetic construct
TISVEKM

SEQ ID NO: 65374 - protein, 7 aa, synthetic construct
DHHMKNM

SEQ ID NO: 65375 - protein, 7 aa, synthetic construct
QNVLVVP

SEQ ID NO: 65376 - protein, 7 aa, synthetic construct
YSPDKNP

SEQ ID NO: 65377 - protein, 7 aa, synthetic construct
SHMQADK

SEQ ID NO: 65378 - protein, 7 aa, synthetic construct
KMDGVYH

SEQ ID NO: 65379 - protein, 7 aa, synthetic construct
AEWKQIG

SEQ ID NO: 65380 - protein, 7 aa, synthetic construct
WHDTKVG

SEQ ID NO: 65381 - protein, 7 aa, synthetic construct
PASTKPI

SEQ ID NO: 65382 - protein, 7 aa, synthetic construct
GRADKAS

SEQ ID NO: 65383 - protein, 7 aa, synthetic construct
LGSQKPN

SEQ ID NO: 65384 - protein, 7 aa, synthetic construct
NMQRHQM

SEQ ID NO: 65385 - protein, 7 aa, synthetic construct
QIYQGKM

SEQ ID NO: 65386 - protein, 7 aa, synthetic construct
NPRGSPS

SEQ ID NO: 65387 - protein, 7 aa, synthetic construct
RITHERA

SEQ ID NO: 65388 - protein, 7 aa, synthetic construct
LSSSHTN

SEQ ID NO: 65389 - protein, 7 aa, synthetic construct
PRPPGHG

SEQ ID NO: 65390 - protein, 7 aa, synthetic construct
KKDNAHP

SEQ ID NO: 65391 - protein, 7 aa, synthetic construct
YKGIMKD

SEQ ID NO: 65392 - protein, 7 aa, synthetic construct
KEAQMKD

SEQ ID NO: 65393 - protein, 7 aa, synthetic construct
TKGSTGN

SEQ ID NO: 65394 - protein, 7 aa, synthetic construct
QKPFESQ

SEQ ID NO: 65395 - protein, 7 aa, synthetic construct
NGVGHAA

SEQ ID NO: 65396 - protein, 7 aa, synthetic construct
FSSHAMS

SEQ ID NO: 65397 - protein, 7 aa, synthetic construct
KGTQIMV

SEQ ID NO: 65398 - protein, 7 aa, synthetic construct
ERSSMNS

SEQ ID NO: 65399 - protein, 7 aa, synthetic construct
TNIKIPN

SEQ ID NO: 65400 - protein, 7 aa, synthetic construct
FRMVENA

SEQ ID NO: 65401 - protein, 7 aa, synthetic construct
YKQMTFD

SEQ ID NO: 65402 - protein, 7 aa, synthetic construct
QQRQPVM

SEQ ID NO: 65403 - protein, 7 aa, synthetic construct
YAATNIP

SEQ ID NO: 65404 - protein, 7 aa, synthetic construct
KLHKSVD

SEQ ID NO: 65405 - protein, 7 aa, synthetic construct
EVGTTRQ

SEQ ID NO: 65406 - protein, 7 aa, synthetic construct
QNKTIHQ

SEQ ID NO: 65407 - protein, 7 aa, synthetic construct
STKPGAG

SEQ ID NO: 65408 - protein, 7 aa, synthetic construct
GMARMTG

SEQ ID NO: 65409 - protein, 7 aa, synthetic construct
QKSFPTN

SEQ ID NO: 65410 - protein, 7 aa, synthetic construct
SQMHSRA

SEQ ID NO: 65411 - protein, 7 aa, synthetic construct
MEGRQSW

SEQ ID NO: 65412 - protein, 7 aa, synthetic construct
MDMKKNG

SEQ ID NO: 65413 - protein, 7 aa, synthetic construct
GKPNSPS

SEQ ID NO: 65414 - protein, 7 aa, synthetic construct
FSHSQNV

SEQ ID NO: 65415 - protein, 7 aa, synthetic construct
LDHGPRV

SEQ ID NO: 65416 - protein, 7 aa, synthetic construct
GGWHKDP

SEQ ID NO: 65417 - protein, 7 aa, synthetic construct
VKTIEVA

SEQ ID NO: 65418 - protein, 7 aa, synthetic construct
IRKDSHT

SEQ ID NO: 65419 - protein, 7 aa, synthetic construct
KQKGAME

SEQ ID NO: 65420 - protein, 7 aa, synthetic construct
KAHFPNN

SEQ ID NO: 65421 - protein, 7 aa, synthetic construct
SVLGPPR

SEQ ID NO: 65422 - protein, 7 aa, synthetic construct
VFQGFKP

SEQ ID NO: 65423 - protein, 7 aa, synthetic construct
QNKSPFS

SEQ ID NO: 65424 - protein, 7 aa, synthetic construct
TSNSRMG

SEQ ID NO: 65425 - protein, 7 aa, synthetic construct
MGQAYMS

SEQ ID NO: 65426 - protein, 7 aa, synthetic construct
IVKFDVG

SEQ ID NO: 65427 - protein, 7 aa, synthetic construct
VTTNTLK

SEQ ID NO: 65428 - protein, 7 aa, synthetic construct
VGFIPRE

SEQ ID NO: 65429 - protein, 7 aa, synthetic construct
TPENPKM

SEQ ID NO: 65430 - protein, 7 aa, synthetic construct
YKPGVNG

SEQ ID NO: 65431 - protein, 7 aa, synthetic construct
NTPKDYL

SEQ ID NO: 65432 - protein, 7 aa, synthetic construct
SGTVHVA

SEQ ID NO: 65433 - protein, 7 aa, synthetic construct
HPGNKMA

SEQ ID NO: 65434 - protein, 7 aa, synthetic construct
FEGLMKQ

SEQ ID NO: 65435 - protein, 7 aa, synthetic construct
AGQHGST

SEQ ID NO: 65436 - protein, 7 aa, synthetic construct
MSKPTQA

SEQ ID NO: 65437 - protein, 7 aa, synthetic construct
STSSHSG

SEQ ID NO: 65438 - protein, 7 aa, synthetic construct
NQHSRAF

SEQ ID NO: 65439 - protein, 7 aa, synthetic construct
HKPIMRE

SEQ ID NO: 65440 - protein, 7 aa, synthetic construct
RSFQGMT

SEQ ID NO: 65441 - protein, 7 aa, synthetic construct
LDALRQR

SEQ ID NO: 65442 - protein, 7 aa, synthetic construct
SKVSPKE

SEQ ID NO: 65443 - protein, 7 aa, synthetic construct
QNPRAVT

SEQ ID NO: 65444 - protein, 7 aa, synthetic construct
ATMQKNG

SEQ ID NO: 65445 - protein, 7 aa, synthetic construct
MKYKDNM

SEQ ID NO: 65446 - protein, 7 aa, synthetic construct
EARTTNS

SEQ ID NO: 65447 - protein, 7 aa, synthetic construct
SAAFMNA

SEQ ID NO: 65448 - protein, 7 aa, synthetic construct
IGGGKYH

SEQ ID NO: 65449 - protein, 7 aa, synthetic construct
QDKRLYE

SEQ ID NO: 65450 - protein, 7 aa, synthetic construct
MEPYRGV

SEQ ID NO: 65451 - protein, 7 aa, synthetic construct
HAKMAEN

SEQ ID NO: 65452 - protein, 7 aa, synthetic construct
RPTAGLP

SEQ ID NO: 65453 - protein, 7 aa, synthetic construct
KEQAATR

SEQ ID NO: 65454 - protein, 7 aa, synthetic construct
VKQMHME

SEQ ID NO: 65455 - protein, 7 aa, synthetic construct
VMSNHAL

SEQ ID NO: 65456 - protein, 7 aa, synthetic construct
QAMFDKP

SEQ ID NO: 65457 - protein, 7 aa, synthetic construct
PKSSATS

SEQ ID NO: 65458 - protein, 7 aa, synthetic construct
KAHLDLV

SEQ ID NO: 65459 - protein, 7 aa, synthetic construct
TVGPSKM

SEQ ID NO: 65460 - protein, 7 aa, synthetic construct
TPYHLNA

SEQ ID NO: 65461 - protein, 7 aa, synthetic construct
AGPMLRA

SEQ ID NO: 65462 - protein, 7 aa, synthetic construct
ESSISLS

SEQ ID NO: 65463 - protein, 7 aa, synthetic construct
QKEGHHL

SEQ ID NO: 65464 - protein, 7 aa, synthetic construct
NDRMGQQ

SEQ ID NO: 65465 - protein, 7 aa, synthetic construct
YNAKNSG

SEQ ID NO: 65466 - protein, 7 aa, synthetic construct
ARTSVGM

SEQ ID NO: 65467 - protein, 7 aa, synthetic construct
VGSILTA

SEQ ID NO: 65468 - protein, 7 aa, synthetic construct
NKQANTS

SEQ ID NO: 65469 - protein, 7 aa, synthetic construct
NITGTAW

SEQ ID NO: 65470 - protein, 7 aa, synthetic construct
RGHLFVD

SEQ ID NO: 65471 - protein, 7 aa, synthetic construct
QGSQTYH

SEQ ID NO: 65472 - protein, 7 aa, synthetic construct
VALGDRR

SEQ ID NO: 65473 - protein, 7 aa, synthetic construct
TAKDYIG

SEQ ID NO: 65474 - protein, 7 aa, synthetic construct
QKMAMRD

SEQ ID NO: 65475 - protein, 7 aa, synthetic construct
DFKIIAP

SEQ ID NO: 65476 - protein, 7 aa, synthetic construct
EMGQKNQ

SEQ ID NO: 65477 - protein, 7 aa, synthetic construct
RSKDEHW

SEQ ID NO: 65478 - protein, 7 aa, synthetic construct
RLGIRGD

SEQ ID NO: 65479 - protein, 7 aa, synthetic construct
IGAHMKQ

SEQ ID NO: 65480 - protein, 7 aa, synthetic construct
YKESAAY

SEQ ID NO: 65481 - protein, 7 aa, synthetic construct
HSMMKEG

SEQ ID NO: 65482 - protein, 7 aa, synthetic construct
GHSIGIL

SEQ ID NO: 65483 - protein, 7 aa, synthetic construct
GRHDMTT

SEQ ID NO: 65484 - protein, 7 aa, synthetic construct
AGGKQMA

SEQ ID NO: 65485 - protein, 7 aa, synthetic construct
QIAHQSM

SEQ ID NO: 65486 - protein, 7 aa, synthetic construct
NQPSRSW

SEQ ID NO: 65487 - protein, 7 aa, synthetic construct
STAKNIE

SEQ ID NO: 65488 - protein, 7 aa, synthetic construct
FRGPPVT

SEQ ID NO: 65489 - protein, 7 aa, synthetic construct
PYVNSNP

SEQ ID NO: 65490 - protein, 7 aa, synthetic construct
NKNGMSP

SEQ ID NO: 65491 - protein, 7 aa, synthetic construct
KTRIDVP

SEQ ID NO: 65492 - protein, 7 aa, synthetic construct
WGAPTSM

SEQ ID NO: 65493 - protein, 7 aa, synthetic construct
VGSANPS

SEQ ID NO: 65494 - protein, 7 aa, synthetic construct
WDHKSDI

SEQ ID NO: 65495 - protein, 7 aa, synthetic construct
SMNRHLG

SEQ ID NO: 65496 - protein, 7 aa, synthetic construct
WANKPAE

SEQ ID NO: 65497 - protein, 7 aa, synthetic construct
GQVVVKH

SEQ ID NO: 65498 - protein, 7 aa, synthetic construct
GLSRNIM

SEQ ID NO: 65499 - protein, 7 aa, synthetic construct
HTNRIVN

SEQ ID NO: 65500 - protein, 7 aa, synthetic construct
NDTSRLT

SEQ ID NO: 65501 - protein, 7 aa, synthetic construct
GKVQGEL

SEQ ID NO: 65502 - protein, 7 aa, synthetic construct
QFVARSG

SEQ ID NO: 65503 - protein, 7 aa, synthetic construct
SRNNGTG

SEQ ID NO: 65504 - protein, 7 aa, synthetic construct
GIINNSK

SEQ ID NO: 65505 - protein, 7 aa, synthetic construct
ASTSQSG

SEQ ID NO: 65506 - protein, 7 aa, synthetic construct
HAGVPYV

SEQ ID NO: 65507 - protein, 7 aa, synthetic construct
GHRQMTN

SEQ ID NO: 65508 - protein, 7 aa, synthetic construct
YVTTKTQ

SEQ ID NO: 65509 - protein, 7 aa, synthetic construct
SPHYKHV

SEQ ID NO: 65510 - protein, 7 aa, synthetic construct
FLHQFKD

SEQ ID NO: 65511 - protein, 7 aa, synthetic construct
NPHGRAE

SEQ ID NO: 65512 - protein, 7 aa, synthetic construct
RMGSMGI

SEQ ID NO: 65513 - protein, 7 aa, synthetic construct
VGMVGIH

SEQ ID NO: 65514 - protein, 7 aa, synthetic construct
TKPSVFT

SEQ ID NO: 65515 - protein, 7 aa, synthetic construct
KTSMAGA

SEQ ID NO: 65516 - protein, 7 aa, synthetic construct
HSQWRAE

SEQ ID NO: 65517 - protein, 7 aa, synthetic construct
AGKLLVG

SEQ ID NO: 65518 - protein, 7 aa, synthetic construct
GKYMNEA

SEQ ID NO: 65519 - protein, 7 aa, synthetic construct
PPAKNTG

SEQ ID NO: 65520 - protein, 7 aa, synthetic construct
NHRNIQT

SEQ ID NO: 65521 - protein, 7 aa, synthetic construct
SQPRGDG

SEQ ID NO: 65522 - protein, 7 aa, synthetic construct
RSSSQNG

SEQ ID NO: 65523 - protein, 7 aa, synthetic construct
QVAQGEH

SEQ ID NO: 65524 - protein, 7 aa, synthetic construct
HIQYQSA

SEQ ID NO: 65525 - protein, 7 aa, synthetic construct
IVDRKFM

SEQ ID NO: 65526 - protein, 7 aa, synthetic construct
YPQSTGI

SEQ ID NO: 65527 - protein, 7 aa, synthetic construct
DNMKRDM

SEQ ID NO: 65528 - protein, 7 aa, synthetic construct
EFGMMDK

SEQ ID NO: 65529 - protein, 7 aa, synthetic construct
FKVNATQ

SEQ ID NO: 65530 - protein, 7 aa, synthetic construct
MAKTHTL

SEQ ID NO: 65531 - protein, 7 aa, synthetic construct
RTNQVTG

SEQ ID NO: 65532 - protein, 7 aa, synthetic construct
KLMQNMG

SEQ ID NO: 65533 - protein, 7 aa, synthetic construct
NSKQTNA

SEQ ID NO: 65534 - protein, 7 aa, synthetic construct
ERQFNKT

SEQ ID NO: 65535 - protein, 7 aa, synthetic construct
PHQFGKA

SEQ ID NO: 65536 - protein, 7 aa, synthetic construct
HNTTLPQ

SEQ ID NO: 65537 - protein, 7 aa, synthetic construct
HYTTRID

SEQ ID NO: 65538 - protein, 7 aa, synthetic construct
ANGLMNV

SEQ ID NO: 65539 - protein, 7 aa, synthetic construct
FAKNGAI

SEQ ID NO: 65540 - protein, 7 aa, synthetic construct
TMGKTQY

SEQ ID NO: 65541 - protein, 7 aa, synthetic construct
VKQYPPQ

SEQ ID NO: 65542 - protein, 7 aa, synthetic construct
GMRFHED

SEQ ID NO: 65543 - protein, 7 aa, synthetic construct
CYNTAKC

SEQ ID NO: 65544 - protein, 7 aa, synthetic construct
TVAKYSS

SEQ ID NO: 65545 - protein, 7 aa, synthetic construct
KFQGAET

SEQ ID NO: 65546 - protein, 7 aa, synthetic construct
EGVKQHY

SEQ ID NO: 65547 - protein, 7 aa, synthetic construct
YPLMLKD

SEQ ID NO: 65548 - protein, 7 aa, synthetic construct
SYMESKP

SEQ ID NO: 65549 - protein, 7 aa, synthetic construct
SQHRSDG

SEQ ID NO: 65550 - protein, 7 aa, synthetic construct
WGTYVDK

SEQ ID NO: 65551 - protein, 7 aa, synthetic construct
GIVHANT

SEQ ID NO: 65552 - protein, 7 aa, synthetic construct
NVNAGFG

SEQ ID NO: 65553 - protein, 7 aa, synthetic construct
TNSSKTG

SEQ ID NO: 65554 - protein, 7 aa, synthetic construct
SRAPVHN

SEQ ID NO: 65555 - protein, 7 aa, synthetic construct
LPYDSIA

SEQ ID NO: 65556 - protein, 7 aa, synthetic construct
RKESQFE

SEQ ID NO: 65557 - protein, 7 aa, synthetic construct
KADYVSV

SEQ ID NO: 65558 - protein, 7 aa, synthetic construct
HAPGSFQ

SEQ ID NO: 65559 - protein, 7 aa, synthetic construct
ERQKLTY

SEQ ID NO: 65560 - protein, 7 aa, synthetic construct
MPKGPTL

SEQ ID NO: 65561 - protein, 7 aa, synthetic construct
RITKESL

SEQ ID NO: 65562 - protein, 7 aa, synthetic construct
PKDFTGM

SEQ ID NO: 65563 - protein, 7 aa, synthetic construct
IMHGLSH

SEQ ID NO: 65564 - protein, 7 aa, synthetic construct
KPKVVEP

SEQ ID NO: 65565 - protein, 7 aa, synthetic construct
NQQKQTA

SEQ ID NO: 65566 - protein, 7 aa, synthetic construct
QTQGTQS

SEQ ID NO: 65567 - protein, 7 aa, synthetic construct
SIKTQHQ

SEQ ID NO: 65568 - protein, 7 aa, synthetic construct
SLQKNGV

SEQ ID NO: 65569 - protein, 7 aa, synthetic construct
VGNHAPS

SEQ ID NO: 65570 - protein, 7 aa, synthetic construct
VTKSEIG

SEQ ID NO: 65571 - protein, 7 aa, synthetic construct
RPHQLYE

SEQ ID NO: 65572 - protein, 7 aa, synthetic construct
VKSPKAD

SEQ ID NO: 65573 - protein, 7 aa, synthetic construct
HQNNLPQ

SEQ ID NO: 65574 - protein, 7 aa, synthetic construct
KASNSSA

SEQ ID NO: 65575 - protein, 7 aa, synthetic construct
KSLNELP

SEQ ID NO: 65576 - protein, 7 aa, synthetic construct
YTQHGAP

SEQ ID NO: 65577 - protein, 7 aa, synthetic construct
GPTKLTA

SEQ ID NO: 65578 - protein, 7 aa, synthetic construct
MHTIPRS

SEQ ID NO: 65579 - protein, 7 aa, synthetic construct
VPNQKPA

SEQ ID NO: 65580 - protein, 7 aa, synthetic construct
DRSFNVS

SEQ ID NO: 65581 - protein, 7 aa, synthetic construct
IKNWYAE

SEQ ID NO: 65582 - protein, 7 aa, synthetic construct
LMMKNDR

SEQ ID NO: 65583 - protein, 7 aa, synthetic construct
HNLQGAS

SEQ ID NO: 65584 - protein, 7 aa, synthetic construct
MQPAPGT

SEQ ID NO: 65585 - protein, 7 aa, synthetic construct
IFDKRFG

SEQ ID NO: 65586 - protein, 7 aa, synthetic construct
ATTMGKN

SEQ ID NO: 65587 - protein, 7 aa, synthetic construct
SPNQIAP

SEQ ID NO: 65588 - protein, 7 aa, synthetic construct
KPRDQGA

SEQ ID NO: 65589 - protein, 7 aa, synthetic construct
GTNGGVN

SEQ ID NO: 65590 - protein, 7 aa, synthetic construct
SPLQHIP

SEQ ID NO: 65591 - protein, 7 aa, synthetic construct
SPLNIQK

SEQ ID NO: 65592 - protein, 7 aa, synthetic construct
RTDKGGS

SEQ ID NO: 65593 - protein, 7 aa, synthetic construct
IPLHHAD

SEQ ID NO: 65594 - protein, 7 aa, synthetic construct
HSKNLAE

SEQ ID NO: 65595 - protein, 7 aa, synthetic construct
MKMNSAG

SEQ ID NO: 65596 - protein, 7 aa, synthetic construct
QTQNQTA

SEQ ID NO: 65597 - protein, 7 aa, synthetic construct
VGLDSSR

SEQ ID NO: 65598 - protein, 7 aa, synthetic construct
KTYHMET

SEQ ID NO: 65599 - protein, 7 aa, synthetic construct
FNNNNQK

SEQ ID NO: 65600 - protein, 7 aa, synthetic construct
DKPNSLK

SEQ ID NO: 65601 - protein, 7 aa, synthetic construct
AATMHHA

SEQ ID NO: 65602 - protein, 7 aa, synthetic construct
QRMELGH

SEQ ID NO: 65603 - protein, 7 aa, synthetic construct
PHKTESV

SEQ ID NO: 65604 - protein, 7 aa, synthetic construct
DKFTVMP

SEQ ID NO: 65605 - protein, 7 aa, synthetic construct
GLQQRQA

SEQ ID NO: 65606 - protein, 7 aa, synthetic construct
TAYASGN

SEQ ID NO: 65607 - protein, 7 aa, synthetic construct
KERTNMM

SEQ ID NO: 65608 - protein, 7 aa, synthetic construct
ISNFVMN

SEQ ID NO: 65609 - protein, 7 aa, synthetic construct
VRVGTTS

SEQ ID NO: 65610 - protein, 7 aa, synthetic construct
GYQQGSS

SEQ ID NO: 65611 - protein, 7 aa, synthetic construct
KNYSHDA

SEQ ID NO: 65612 - protein, 7 aa, synthetic construct
MTASKHP

SEQ ID NO: 65613 - protein, 7 aa, synthetic construct
SYNGAKQ

SEQ ID NO: 65614 - protein, 7 aa, synthetic construct
SGHQMLA

SEQ ID NO: 65615 - protein, 7 aa, synthetic construct
KAGTELM

SEQ ID NO: 65616 - protein, 7 aa, synthetic construct
IRENADR

SEQ ID NO: 65617 - protein, 7 aa, synthetic construct
HMRMGET

SEQ ID NO: 65618 - protein, 7 aa, synthetic construct
PNHHNSA

SEQ ID NO: 65619 - protein, 7 aa, synthetic construct
MNKSVDR

SEQ ID NO: 65620 - protein, 7 aa, synthetic construct
QRMDVVG

SEQ ID NO: 65621 - protein, 7 aa, synthetic construct
TPVTHPT

SEQ ID NO: 65622 - protein, 7 aa, synthetic construct
SNTYVKE

SEQ ID NO: 65623 - protein, 7 aa, synthetic construct
AKPERDW

SEQ ID NO: 65624 - protein, 7 aa, synthetic construct
IANKINE

SEQ ID NO: 65625 - protein, 7 aa, synthetic construct
KGIGLAQ

SEQ ID NO: 65626 - protein, 7 aa, synthetic construct
DPVKQPI

SEQ ID NO: 65627 - protein, 7 aa, synthetic construct
NGMHPQT

SEQ ID NO: 65628 - protein, 7 aa, synthetic construct
LGAMKTD

SEQ ID NO: 65629 - protein, 7 aa, synthetic construct
KPGQINY

SEQ ID NO: 65630 - protein, 7 aa, synthetic construct
TFREGRP

SEQ ID NO: 65631 - protein, 7 aa, synthetic construct
KPSPSQH

SEQ ID NO: 65632 - protein, 7 aa, synthetic construct
NHTRMVE

SEQ ID NO: 65633 - protein, 7 aa, synthetic construct
RERSTPE

SEQ ID NO: 65634 - protein, 7 aa, synthetic construct
RHESMYG

SEQ ID NO: 65635 - protein, 7 aa, synthetic construct
FKGTAPN

SEQ ID NO: 65636 - protein, 7 aa, synthetic construct
ASLKSAT

SEQ ID NO: 65637 - protein, 7 aa, synthetic construct
PHGRTLL

SEQ ID NO: 65638 - protein, 7 aa, synthetic construct
GRGSYSD

SEQ ID NO: 65639 - protein, 7 aa, synthetic construct
AVRSNPE

SEQ ID NO: 65640 - protein, 7 aa, synthetic construct
RAQAAIS

SEQ ID NO: 65641 - protein, 7 aa, synthetic construct
RPSTVGN

SEQ ID NO: 65642 - protein, 7 aa, synthetic construct
QPTRISN

SEQ ID NO: 65643 - protein, 7 aa, synthetic construct
GAYTGQI

SEQ ID NO: 65644 - protein, 7 aa, synthetic construct
LYTNNMK

SEQ ID NO: 65645 - protein, 7 aa, synthetic construct
EGHIGKT

SEQ ID NO: 65646 - protein, 7 aa, synthetic construct
HGSQTHM

SEQ ID NO: 65647 - protein, 7 aa, synthetic construct
HTNTIGA

SEQ ID NO: 65648 - protein, 7 aa, synthetic construct
NNAGSKG

SEQ ID NO: 65649 - protein, 7 aa, synthetic construct
SFRIEDP

SEQ ID NO: 65650 - protein, 7 aa, synthetic construct
QMRGNTI

SEQ ID NO: 65651 - protein, 7 aa, synthetic construct
PPAGRVG

SEQ ID NO: 65652 - protein, 7 aa, synthetic construct
AIKANEN

SEQ ID NO: 65653 - protein, 7 aa, synthetic construct
HMGLKNE

SEQ ID NO: 65654 - protein, 7 aa, synthetic construct
KEGHSTY

SEQ ID NO: 65655 - protein, 7 aa, synthetic construct
HKTKEIA

SEQ ID NO: 65656 - protein, 7 aa, synthetic construct
RDGMNEP

SEQ ID NO: 65657 - protein, 7 aa, synthetic construct
AKPGHNA

SEQ ID NO: 65658 - protein, 7 aa, synthetic construct
DSYNHRG

SEQ ID NO: 65659 - protein, 7 aa, synthetic construct
NASQITV

SEQ ID NO: 65660 - protein, 7 aa, synthetic construct
IVYGVKP

SEQ ID NO: 65661 - protein, 7 aa, synthetic construct
HDARGTL

SEQ ID NO: 65662 - protein, 7 aa, synthetic construct
STTPRPQ

SEQ ID NO: 65663 - protein, 7 aa, synthetic construct
AQKYNNF

SEQ ID NO: 65664 - protein, 7 aa, synthetic construct
SNHQMEL

SEQ ID NO: 65665 - protein, 7 aa, synthetic construct
DTSSGGR

SEQ ID NO: 65666 - protein, 7 aa, synthetic construct
TNSMNMR

SEQ ID NO: 65667 - protein, 7 aa, synthetic construct
THNAQYI

SEQ ID NO: 65668 - protein, 7 aa, synthetic construct
RQMPSLG

SEQ ID NO: 65669 - protein, 7 aa, synthetic construct
MNKQTGP

SEQ ID NO: 65670 - protein, 7 aa, synthetic construct
LGARSQE

SEQ ID NO: 65671 - protein, 7 aa, synthetic construct
NRGGTSG

SEQ ID NO: 65672 - protein, 7 aa, synthetic construct
DQLVRVP

SEQ ID NO: 65673 - protein, 7 aa, synthetic construct
LPNRYSD

SEQ ID NO: 65674 - protein, 7 aa, synthetic construct
QIPTGKW

SEQ ID NO: 65675 - protein, 7 aa, synthetic construct
LLLKTEV

SEQ ID NO: 65676 - protein, 7 aa, synthetic construct
RMEYRET

SEQ ID NO: 65677 - protein, 7 aa, synthetic construct
RQVGVNF

SEQ ID NO: 65678 - protein, 7 aa, synthetic construct
NGYNKMA

SEQ ID NO: 65679 - protein, 7 aa, synthetic construct
YEGLQKN

SEQ ID NO: 65680 - protein, 7 aa, synthetic construct
RPGNDVS

SEQ ID NO: 65681 - protein, 7 aa, synthetic construct
SFAVTAT

SEQ ID NO: 65682 - protein, 7 aa, synthetic construct
PHQKSMP

SEQ ID NO: 65683 - protein, 7 aa, synthetic construct
PGSNYPP

SEQ ID NO: 65684 - protein, 7 aa, synthetic construct
TGVSIPS

SEQ ID NO: 65685 - protein, 7 aa, synthetic construct
WMAGIGS

SEQ ID NO: 65686 - protein, 7 aa, synthetic construct
RQSSMNA

SEQ ID NO: 65687 - protein, 7 aa, synthetic construct
RSGTMQG

SEQ ID NO: 65688 - protein, 7 aa, synthetic construct
HQGQVQR

SEQ ID NO: 65689 - protein, 7 aa, synthetic construct
AVNRDSH

SEQ ID NO: 65690 - protein, 7 aa, synthetic construct
PLQKNGY

SEQ ID NO: 65691 - protein, 7 aa, synthetic construct
FLKFTHD

SEQ ID NO: 65692 - protein, 7 aa, synthetic construct
SPANTGH

SEQ ID NO: 65693 - protein, 7 aa, synthetic construct
RTEREAV

SEQ ID NO: 65694 - protein, 7 aa, synthetic construct
QSKFAQF

SEQ ID NO: 65695 - protein, 7 aa, synthetic construct
KYGQPPI

SEQ ID NO: 65696 - protein, 7 aa, synthetic construct
QQNRGIT

SEQ ID NO: 65697 - protein, 7 aa, synthetic construct
NGSQGHM

SEQ ID NO: 65698 - protein, 7 aa, synthetic construct
KHYEGHG

SEQ ID NO: 65699 - protein, 7 aa, synthetic construct
EKTSSHP

SEQ ID NO: 65700 - protein, 7 aa, synthetic construct
QMIPHRE

SEQ ID NO: 65701 - protein, 7 aa, synthetic construct
FKGYEQR

SEQ ID NO: 65702 - protein, 7 aa, synthetic construct
QKPTSGT

SEQ ID NO: 65703 - protein, 7 aa, synthetic construct
PTTHATA

SEQ ID NO: 65704 - protein, 7 aa, synthetic construct
NGQMTQL

SEQ ID NO: 65705 - protein, 7 aa, synthetic construct
EKSNLRQ

SEQ ID NO: 65706 - protein, 7 aa, synthetic construct
HRGNADV

SEQ ID NO: 65707 - protein, 7 aa, synthetic construct
KLNHVNT

SEQ ID NO: 65708 - protein, 7 aa, synthetic construct
IDKHATN

SEQ ID NO: 65709 - protein, 7 aa, synthetic construct
TRPLNPE

SEQ ID NO: 65710 - protein, 7 aa, synthetic construct
IVTHQST

SEQ ID NO: 65711 - protein, 7 aa, synthetic construct
NSGAVKH

SEQ ID NO: 65712 - protein, 7 aa, synthetic construct
DTMVTVR

SEQ ID NO: 65713 - protein, 7 aa, synthetic construct
RPAPDHV

SEQ ID NO: 65714 - protein, 7 aa, synthetic construct
IQAGSKT

SEQ ID NO: 65715 - protein, 7 aa, synthetic construct
PKGPGVA

SEQ ID NO: 65716 - protein, 7 aa, synthetic construct
KEKYSAV

SEQ ID NO: 65717 - protein, 7 aa, synthetic construct
LGLNMPA

SEQ ID NO: 65718 - protein, 7 aa, synthetic construct
NSKVQEH

SEQ ID NO: 65719 - protein, 7 aa, synthetic construct
YRYEHSS

SEQ ID NO: 65720 - protein, 7 aa, synthetic construct
NKMQTTG

SEQ ID NO: 65721 - protein, 7 aa, synthetic construct
RMQSSNA

SEQ ID NO: 65722 - protein, 7 aa, synthetic construct
MNLKPND

SEQ ID NO: 65723 - protein, 7 aa, synthetic construct
RDTSYAG

SEQ ID NO: 65724 - protein, 7 aa, synthetic construct
STSQMNP

SEQ ID NO: 65725 - protein, 7 aa, synthetic construct
GSFVDRP

SEQ ID NO: 65726 - protein, 7 aa, synthetic construct
NDRYMPA

SEQ ID NO: 65727 - protein, 7 aa, synthetic construct
QKNSTQA

SEQ ID NO: 65728 - protein, 7 aa, synthetic construct
TWGKGPN

SEQ ID NO: 65729 - protein, 7 aa, synthetic construct
RKDDTAW

SEQ ID NO: 65730 - protein, 7 aa, synthetic construct
KVNSVHF

SEQ ID NO: 65731 - protein, 7 aa, synthetic construct
RLMAGHV

SEQ ID NO: 65732 - protein, 7 aa, synthetic construct
QYQTPTS

SEQ ID NO: 65733 - protein, 7 aa, synthetic construct
KLIPMAE

SEQ ID NO: 65734 - protein, 7 aa, synthetic construct
IVARGGH

SEQ ID NO: 65735 - protein, 7 aa, synthetic construct
LHHNNEP

SEQ ID NO: 65736 - protein, 7 aa, synthetic construct
IQQEARA

SEQ ID NO: 65737 - protein, 7 aa, synthetic construct
LVGSPAV

SEQ ID NO: 65738 - protein, 7 aa, synthetic construct
GNGRTHI

SEQ ID NO: 65739 - protein, 7 aa, synthetic construct
MNHKRDE

SEQ ID NO: 65740 - protein, 7 aa, synthetic construct
GYVKTAE

SEQ ID NO: 65741 - protein, 7 aa, synthetic construct
MHPGDLQ

SEQ ID NO: 65742 - protein, 7 aa, synthetic construct
AGMSATG

SEQ ID NO: 65743 - protein, 7 aa, synthetic construct
RHPIERP

SEQ ID NO: 65744 - protein, 7 aa, synthetic construct
TMAALKS

SEQ ID NO: 65745 - protein, 7 aa, synthetic construct
HLQSYEA

SEQ ID NO: 65746 - protein, 7 aa, synthetic construct
GLINGHA

SEQ ID NO: 65747 - protein, 7 aa, synthetic construct
YGRHEPM

SEQ ID NO: 65748 - protein, 7 aa, synthetic construct
PLSRDVY

SEQ ID NO: 65749 - protein, 7 aa, synthetic construct
MAKSAKD

SEQ ID NO: 65750 - protein, 7 aa, synthetic construct
QGHHRIS

SEQ ID NO: 65751 - protein, 7 aa, synthetic construct
VKGAYHM

SEQ ID NO: 65752 - protein, 7 aa, synthetic construct
QPNSVTA

SEQ ID NO: 65753 - protein, 7 aa, synthetic construct
YSARHDA

SEQ ID NO: 65754 - protein, 7 aa, synthetic construct
AVSPKAT

SEQ ID NO: 65755 - protein, 7 aa, synthetic construct
TMKHVNV

SEQ ID NO: 65756 - protein, 7 aa, synthetic construct
PKSQSVG

SEQ ID NO: 65757 - protein, 7 aa, synthetic construct
MSKSLEN

SEQ ID NO: 65758 - protein, 7 aa, synthetic construct
NFQYQKD

SEQ ID NO: 65759 - protein, 7 aa, synthetic construct
INNFSHT

SEQ ID NO: 65760 - protein, 7 aa, synthetic construct
GNSPQQG

SEQ ID NO: 65761 - protein, 7 aa, synthetic construct
KTETTQG

SEQ ID NO: 65762 - protein, 7 aa, synthetic construct
QFQTMHD

SEQ ID NO: 65763 - protein, 7 aa, synthetic construct
QAYHTNG

SEQ ID NO: 65764 - protein, 7 aa, synthetic construct
PVMSRQE

SEQ ID NO: 65765 - protein, 7 aa, synthetic construct
EPRTGLI

SEQ ID NO: 65766 - protein, 7 aa, synthetic construct
PHRPSGD

SEQ ID NO: 65767 - protein, 7 aa, synthetic construct
NFGVDHH

SEQ ID NO: 65768 - protein, 7 aa, synthetic construct
SKMGAGQ

SEQ ID NO: 65769 - protein, 7 aa, synthetic construct
NRENKNQ

SEQ ID NO: 65770 - protein, 7 aa, synthetic construct
ARYHGEY

SEQ ID NO: 65771 - protein, 7 aa, synthetic construct
RDTMVGP

SEQ ID NO: 65772 - protein, 7 aa, synthetic construct
AYGHSVG

SEQ ID NO: 65773 - protein, 7 aa, synthetic construct
YQKHTIT

SEQ ID NO: 65774 - protein, 7 aa, synthetic construct
SGVRYVE

SEQ ID NO: 65775 - protein, 7 aa, synthetic construct
GLSPTRA

SEQ ID NO: 65776 - protein, 7 aa, synthetic construct
TAEHKRL

SEQ ID NO: 65777 - protein, 7 aa, synthetic construct
PKPGMSH

SEQ ID NO: 65778 - protein, 7 aa, synthetic construct
KTGPMGV

SEQ ID NO: 65779 - protein, 7 aa, synthetic construct
MTQNKQA

SEQ ID NO: 65780 - protein, 7 aa, synthetic construct
PVGKFPM

SEQ ID NO: 65781 - protein, 7 aa, synthetic construct
KTPTTPA

SEQ ID NO: 65782 - protein, 7 aa, synthetic construct
YNSYHQN

SEQ ID NO: 65783 - protein, 7 aa, synthetic construct
IIGAVGM

SEQ ID NO: 65784 - protein, 7 aa, synthetic construct
PHVGPED

SEQ ID NO: 65785 - protein, 7 aa, synthetic construct
GARHTEG

SEQ ID NO: 65786 - protein, 7 aa, synthetic construct
DIVVTKA

SEQ ID NO: 65787 - protein, 7 aa, synthetic construct
SQNKQQF

SEQ ID NO: 65788 - protein, 7 aa, synthetic construct
ITNVGGR

SEQ ID NO: 65789 - protein, 7 aa, synthetic construct
SERTGKW

SEQ ID NO: 65790 - protein, 7 aa, synthetic construct
NTQRNTY

SEQ ID NO: 65791 - protein, 7 aa, synthetic construct
HKPTIYT

SEQ ID NO: 65792 - protein, 7 aa, synthetic construct
YERRTSQ

SEQ ID NO: 65793 - protein, 7 aa, synthetic construct
GYDKLTF

SEQ ID NO: 65794 - protein, 7 aa, synthetic construct
KSPGETL

SEQ ID NO: 65795 - protein, 7 aa, synthetic construct
VPRSNVP

SEQ ID NO: 65796 - protein, 7 aa, synthetic construct
VRPSTNG

SEQ ID NO: 65797 - protein, 7 aa, synthetic construct
KGNTVPD

SEQ ID NO: 65798 - protein, 7 aa, synthetic construct
QQGERRY

SEQ ID NO: 65799 - protein, 7 aa, synthetic construct
KFVMSEA

SEQ ID NO: 65800 - protein, 7 aa, synthetic construct
QKSSMNA

SEQ ID NO: 65801 - protein, 7 aa, synthetic construct
NATRHLD

SEQ ID NO: 65802 - protein, 7 aa, synthetic construct
ENSRGTT

SEQ ID NO: 65803 - protein, 7 aa, synthetic construct
QMKPSGY

SEQ ID NO: 65804 - protein, 7 aa, synthetic construct
LGEWQRP

SEQ ID NO: 65805 - protein, 7 aa, synthetic construct
LGQSTIR

SEQ ID NO: 65806 - protein, 7 aa, synthetic construct
TESKSLV

SEQ ID NO: 65807 - protein, 7 aa, synthetic construct
KNSSLYQ

SEQ ID NO: 65808 - protein, 7 aa, synthetic construct
PQPSGHN

SEQ ID NO: 65809 - protein, 7 aa, synthetic construct
VSQWQVA

SEQ ID NO: 65810 - protein, 7 aa, synthetic construct
TLAKATN

SEQ ID NO: 65811 - protein, 7 aa, synthetic construct
MGRTMAE

SEQ ID NO: 65812 - protein, 7 aa, synthetic construct
NNKQMNP

SEQ ID NO: 65813 - protein, 7 aa, synthetic construct
HSDPRYA

SEQ ID NO: 65814 - protein, 7 aa, synthetic construct
MLMSGRS

SEQ ID NO: 65815 - protein, 7 aa, synthetic construct
FTRLDQQ

SEQ ID NO: 65816 - protein, 7 aa, synthetic construct
QMNMGLG

SEQ ID NO: 65817 - protein, 7 aa, synthetic construct
KIGLMGE

SEQ ID NO: 65818 - protein, 7 aa, synthetic construct
MGRQETQ

SEQ ID NO: 65819 - protein, 7 aa, synthetic construct
THGRNDI

SEQ ID NO: 65820 - protein, 7 aa, synthetic construct
QKERATP

SEQ ID NO: 65821 - protein, 7 aa, synthetic construct
DKIPGHD

SEQ ID NO: 65822 - protein, 7 aa, synthetic construct
EIPLIKS

SEQ ID NO: 65823 - protein, 7 aa, synthetic construct
WQPDAKR

SEQ ID NO: 65824 - protein, 7 aa, synthetic construct
YNSPVTP

SEQ ID NO: 65825 - protein, 7 aa, synthetic construct
STYSGRN

SEQ ID NO: 65826 - protein, 7 aa, synthetic construct
MYISSSS

SEQ ID NO: 65827 - protein, 7 aa, synthetic construct
TAFDPIS

SEQ ID NO: 65828 - protein, 7 aa, synthetic construct
GSRIPHL

SEQ ID NO: 65829 - protein, 7 aa, synthetic construct
QRTEIHQ

SEQ ID NO: 65830 - protein, 7 aa, synthetic construct
SSIHPHQ

SEQ ID NO: 65831 - protein, 7 aa, synthetic construct
NKPEKFG

SEQ ID NO: 65832 - protein, 7 aa, synthetic construct
GQKPTMA

SEQ ID NO: 65833 - protein, 7 aa, synthetic construct
GQGKSNP

SEQ ID NO: 65834 - protein, 7 aa, synthetic construct
RRADVEP

SEQ ID NO: 65835 - protein, 7 aa, synthetic construct
SLKYLKD

SEQ ID NO: 65836 - protein, 7 aa, synthetic construct
GQRELPS

SEQ ID NO: 65837 - protein, 7 aa, synthetic construct
TWDNGKA

SEQ ID NO: 65838 - protein, 7 aa, synthetic construct
SHVKHET

SEQ ID NO: 65839 - protein, 7 aa, synthetic construct
HMSKDEM

SEQ ID NO: 65840 - protein, 7 aa, synthetic construct
GRQFEGM

SEQ ID NO: 65841 - protein, 7 aa, synthetic construct
GGHLPNI

SEQ ID NO: 65842 - protein, 7 aa, synthetic construct
SHPKVVM

SEQ ID NO: 65843 - protein, 7 aa, synthetic construct
VHPFNGE

SEQ ID NO: 65844 - protein, 7 aa, synthetic construct
GQFIKGS

SEQ ID NO: 65845 - protein, 7 aa, synthetic construct
SSHRLQP

SEQ ID NO: 65846 - protein, 7 aa, synthetic construct
NAGFVKL

SEQ ID NO: 65847 - protein, 7 aa, synthetic construct
PSANKAP

SEQ ID NO: 65848 - protein, 7 aa, synthetic construct
KSQVANG

SEQ ID NO: 65849 - protein, 7 aa, synthetic construct
TRQNTAA

SEQ ID NO: 65850 - protein, 7 aa, synthetic construct
TQVNNVA

SEQ ID NO: 65851 - protein, 7 aa, synthetic construct
RQPSPIQ

SEQ ID NO: 65852 - protein, 7 aa, synthetic construct
GSHIKGG

SEQ ID NO: 65853 - protein, 7 aa, synthetic construct
KQTAQAA

SEQ ID NO: 65854 - protein, 7 aa, synthetic construct
DQIPFKQ

SEQ ID NO: 65855 - protein, 7 aa, synthetic construct
TRNGTSG

SEQ ID NO: 65856 - protein, 7 aa, synthetic construct
YNRENHP

SEQ ID NO: 65857 - protein, 7 aa, synthetic construct
PQASYKG

SEQ ID NO: 65858 - protein, 7 aa, synthetic construct
YLTKQDA

SEQ ID NO: 65859 - protein, 7 aa, synthetic construct
SPSQVNF

SEQ ID NO: 65860 - protein, 7 aa, synthetic construct
KGAHATP

SEQ ID NO: 65861 - protein, 7 aa, synthetic construct
GPHAIPD

SEQ ID NO: 65862 - protein, 7 aa, synthetic construct
SRASHVN

SEQ ID NO: 65863 - protein, 7 aa, synthetic construct
TSTGSNG

SEQ ID NO: 65864 - protein, 7 aa, synthetic construct
DERRMVK

SEQ ID NO: 65865 - protein, 7 aa, synthetic construct
PRSATQG

SEQ ID NO: 65866 - protein, 7 aa, synthetic construct
QASGQGY

SEQ ID NO: 65867 - protein, 7 aa, synthetic construct
IWANGTV

SEQ ID NO: 65868 - protein, 7 aa, synthetic construct
GQRERDM

SEQ ID NO: 65869 - protein, 7 aa, synthetic construct
VTKATQV

SEQ ID NO: 65870 - protein, 7 aa, synthetic construct
MHRTKDM

SEQ ID NO: 65871 - protein, 7 aa, synthetic construct
PPKDHSH

SEQ ID NO: 65872 - protein, 7 aa, synthetic construct
LSMGTNY

SEQ ID NO: 65873 - protein, 7 aa, synthetic construct
VQNSGSS

SEQ ID NO: 65874 - protein, 7 aa, synthetic construct
QKHRIEY

SEQ ID NO: 65875 - protein, 7 aa, synthetic construct
KATTSNG

SEQ ID NO: 65876 - protein, 7 aa, synthetic construct
MYPGVVG

SEQ ID NO: 65877 - protein, 7 aa, synthetic construct
KSEQGKF

SEQ ID NO: 65878 - protein, 7 aa, synthetic construct
NRAQENR

SEQ ID NO: 65879 - protein, 7 aa, synthetic construct
DIGRTQR

SEQ ID NO: 65880 - protein, 7 aa, synthetic construct
RNGKNSD

SEQ ID NO: 65881 - protein, 7 aa, synthetic construct
FPGQAWA

SEQ ID NO: 65882 - protein, 7 aa, synthetic construct
SNARTTG

SEQ ID NO: 65883 - protein, 7 aa, synthetic construct
NSGKNAG

SEQ ID NO: 65884 - protein, 7 aa, synthetic construct
RPSHPTQ

SEQ ID NO: 65885 - protein, 7 aa, synthetic construct
FSKAQIN

SEQ ID NO: 65886 - protein, 7 aa, synthetic construct
IKERQFA

SEQ ID NO: 65887 - protein, 7 aa, synthetic construct
EHDKVRS

SEQ ID NO: 65888 - protein, 7 aa, synthetic construct
VTSSKVG

SEQ ID NO: 65889 - protein, 7 aa, synthetic construct
KKDGFGS

SEQ ID NO: 65890 - protein, 7 aa, synthetic construct
IGARFKE

SEQ ID NO: 65891 - protein, 7 aa, synthetic construct
RNQNNGA

SEQ ID NO: 65892 - protein, 7 aa, synthetic construct
RTYDPAM

SEQ ID NO: 65893 - protein, 7 aa, synthetic construct
SKVATPM

SEQ ID NO: 65894 - protein, 7 aa, synthetic construct
KHRSDFD

SEQ ID NO: 65895 - protein, 7 aa, synthetic construct
TRDRMGI

SEQ ID NO: 65896 - protein, 7 aa, synthetic construct
GKVANNL

SEQ ID NO: 65897 - protein, 7 aa, synthetic construct
LGTRTLD

SEQ ID NO: 65898 - protein, 7 aa, synthetic construct
NRDNTER

SEQ ID NO: 65899 - protein, 7 aa, synthetic construct
PLAHPTG

SEQ ID NO: 65900 - protein, 7 aa, synthetic construct
AANYSGL

SEQ ID NO: 65901 - protein, 7 aa, synthetic construct
GHNMSKG

SEQ ID NO: 65902 - protein, 7 aa, synthetic construct
AMPFSPG

SEQ ID NO: 65903 - protein, 7 aa, synthetic construct
IGKYVLM

SEQ ID NO: 65904 - protein, 7 aa, synthetic construct
LPERSGA

SEQ ID NO: 65905 - protein, 7 aa, synthetic construct
KWANTKD

SEQ ID NO: 65906 - protein, 7 aa, synthetic construct
THVHVHG

SEQ ID NO: 65907 - protein, 7 aa, synthetic construct
NSTKTAP

SEQ ID NO: 65908 - protein, 7 aa, synthetic construct
NHQKIEM

SEQ ID NO: 65909 - protein, 7 aa, synthetic construct
NIHREKP

SEQ ID NO: 65910 - protein, 7 aa, synthetic construct
NKYESQS

SEQ ID NO: 65911 - protein, 7 aa, synthetic construct
RNNPGGG

SEQ ID NO: 65912 - protein, 7 aa, synthetic construct
TRSTVTT

SEQ ID NO: 65913 - protein, 7 aa, synthetic construct
DKFGPVI

SEQ ID NO: 65914 - protein, 7 aa, synthetic construct
WNNSSNM

SEQ ID NO: 65915 - protein, 7 aa, synthetic construct
PQSAQKN

SEQ ID NO: 65916 - protein, 7 aa, synthetic construct
RNPGNTG

SEQ ID NO: 65917 - protein, 7 aa, synthetic construct
HNGDIRG

SEQ ID NO: 65918 - protein, 7 aa, synthetic construct
ANDPKMG

SEQ ID NO: 65919 - protein, 7 aa, synthetic construct
PRGHDHT

SEQ ID NO: 65920 - protein, 7 aa, synthetic construct
HMTQFNG

SEQ ID NO: 65921 - protein, 7 aa, synthetic construct
QSTIAAS

SEQ ID NO: 65922 - protein, 7 aa, synthetic construct
NQRMNDP

SEQ ID NO: 65923 - protein, 7 aa, synthetic construct
KNVFNGE

SEQ ID NO: 65924 - protein, 7 aa, synthetic construct
YVARADT

SEQ ID NO: 65925 - protein, 7 aa, synthetic construct
TQPYAGI

SEQ ID NO: 65926 - protein, 7 aa, synthetic construct
FANHMRS

SEQ ID NO: 65927 - protein, 7 aa, synthetic construct
GTQYIAK

SEQ ID NO: 65928 - protein, 7 aa, synthetic construct
WKESGNE

SEQ ID NO: 65929 - protein, 7 aa, synthetic construct
QYSTGGS

SEQ ID NO: 65930 - protein, 7 aa, synthetic construct
MKPTSYG

SEQ ID NO: 65931 - protein, 7 aa, synthetic construct
SVAAHRD

SEQ ID NO: 65932 - protein, 7 aa, synthetic construct
VKNNNGM

SEQ ID NO: 65933 - protein, 7 aa, synthetic construct
MRGDANR

SEQ ID NO: 65934 - protein, 7 aa, synthetic construct
RHQEWPN

SEQ ID NO: 65935 - protein, 7 aa, synthetic construct
IYHAGPT

SEQ ID NO: 65936 - protein, 7 aa, synthetic construct
SKTSAAS

SEQ ID NO: 65937 - protein, 7 aa, synthetic construct
HHDFKHG

SEQ ID NO: 65938 - protein, 7 aa, synthetic construct
PATVNYK

SEQ ID NO: 65939 - protein, 7 aa, synthetic construct
MIHKHRE

SEQ ID NO: 65940 - protein, 7 aa, synthetic construct
DFTHPTK

SEQ ID NO: 65941 - protein, 7 aa, synthetic construct
GSLVKQE

SEQ ID NO: 65942 - protein, 7 aa, synthetic construct
TNSQSAR

SEQ ID NO: 65943 - protein, 7 aa, synthetic construct
QHMHGGG

SEQ ID NO: 65944 - protein, 7 aa, synthetic construct
ARNTAMM

SEQ ID NO: 65945 - protein, 7 aa, synthetic construct
QIDKKNM

SEQ ID NO: 65946 - protein, 7 aa, synthetic construct
EAVHRQP

SEQ ID NO: 65947 - protein, 7 aa, synthetic construct
TWKDNSH

SEQ ID NO: 65948 - protein, 7 aa, synthetic construct
KNQPMGG

SEQ ID NO: 65949 - protein, 7 aa, synthetic construct
RNYGDEV

SEQ ID NO: 65950 - protein, 7 aa, synthetic construct
RKDITEP

SEQ ID NO: 65951 - protein, 7 aa, synthetic construct
YSHKPEP

SEQ ID NO: 65952 - protein, 7 aa, synthetic construct
ARNREHP

SEQ ID NO: 65953 - protein, 7 aa, synthetic construct
FDSIQGK

SEQ ID NO: 65954 - protein, 7 aa, synthetic construct
TSRVVQT

SEQ ID NO: 65955 - protein, 7 aa, synthetic construct
YKSGIEH

SEQ ID NO: 65956 - protein, 7 aa, synthetic construct
MRDKFPH

SEQ ID NO: 65957 - protein, 7 aa, synthetic construct
ITHHSLD

SEQ ID NO: 65958 - protein, 7 aa, synthetic construct
SQRTKDP

SEQ ID NO: 65959 - protein, 7 aa, synthetic construct
GQSKAQA

SEQ ID NO: 65960 - protein, 7 aa, synthetic construct
MKLNGGL

SEQ ID NO: 65961 - protein, 7 aa, synthetic construct
LHGIGNI

SEQ ID NO: 65962 - protein, 7 aa, synthetic construct
RTLEKHN

SEQ ID NO: 65963 - protein, 7 aa, synthetic construct
LTRDQVA

SEQ ID NO: 65964 - protein, 7 aa, synthetic construct
HHTHIAG

SEQ ID NO: 65965 - protein, 7 aa, synthetic construct
SQIGMHD

SEQ ID NO: 65966 - protein, 7 aa, synthetic construct
MHPLLQN

SEQ ID NO: 65967 - protein, 7 aa, synthetic construct
LGLKAHE

SEQ ID NO: 65968 - protein, 7 aa, synthetic construct
TYKTPDG

SEQ ID NO: 65969 - protein, 7 aa, synthetic construct
NSKTANG

SEQ ID NO: 65970 - protein, 7 aa, synthetic construct
KQVAYVG

SEQ ID NO: 65971 - protein, 7 aa, synthetic construct
NAKKAHE

SEQ ID NO: 65972 - protein, 7 aa, synthetic construct
NNVARIM

SEQ ID NO: 65973 - protein, 7 aa, synthetic construct
FNGMSQK

SEQ ID NO: 65974 - protein, 7 aa, synthetic construct
FVKSPVP

SEQ ID NO: 65975 - protein, 7 aa, synthetic construct
SNITHSF

SEQ ID NO: 65976 - protein, 7 aa, synthetic construct
PRTQGMS

SEQ ID NO: 65977 - protein, 7 aa, synthetic construct
QNFMQKD

SEQ ID NO: 65978 - protein, 7 aa, synthetic construct
SNKGGQA

SEQ ID NO: 65979 - protein, 7 aa, synthetic construct
TQPRAGA

SEQ ID NO: 65980 - protein, 7 aa, synthetic construct
HKQSMLM

SEQ ID NO: 65981 - protein, 7 aa, synthetic construct
GKTISGA

SEQ ID NO: 65982 - protein, 7 aa, synthetic construct
KPAVNIA

SEQ ID NO: 65983 - protein, 7 aa, synthetic construct
DPGSHRM

SEQ ID NO: 65984 - protein, 7 aa, synthetic construct
RKGDGFI

SEQ ID NO: 65985 - protein, 7 aa, synthetic construct
FFVHKDG

SEQ ID NO: 65986 - protein, 7 aa, synthetic construct
YGYVGEK

SEQ ID NO: 65987 - protein, 7 aa, synthetic construct
NNTQNKG

SEQ ID NO: 65988 - protein, 7 aa, synthetic construct
VGNVSAP

SEQ ID NO: 65989 - protein, 7 aa, synthetic construct
PTHHPHP

SEQ ID NO: 65990 - protein, 7 aa, synthetic construct
PSKATKE

SEQ ID NO: 65991 - protein, 7 aa, synthetic construct
GNKADKG

SEQ ID NO: 65992 - protein, 7 aa, synthetic construct
KSASAMV

SEQ ID NO: 65993 - protein, 7 aa, synthetic construct
MGGKNTA

SEQ ID NO: 65994 - protein, 7 aa, synthetic construct
NSGKGNA

SEQ ID NO: 65995 - protein, 7 aa, synthetic construct
YHASGPK

SEQ ID NO: 65996 - protein, 7 aa, synthetic construct
PRPLGLD

SEQ ID NO: 65997 - protein, 7 aa, synthetic construct
THVGYKI

SEQ ID NO: 65998 - protein, 7 aa, synthetic construct
NENKMAW

SEQ ID NO: 65999 - protein, 7 aa, synthetic construct
DIWHQHE

SEQ ID NO: 66000 - protein, 7 aa, synthetic construct
VAQRGLA

SEQ ID NO: 66001 - protein, 7 aa, synthetic construct
MVKSETS

SEQ ID NO: 66002 - protein, 7 aa, synthetic construct
VIHGGYG

SEQ ID NO: 66003 - protein, 7 aa, synthetic construct
KDVNREI

SEQ ID NO: 66004 - protein, 7 aa, synthetic construct
QSTKAAA

SEQ ID NO: 66005 - protein, 7 aa, synthetic construct
WNNNQER

SEQ ID NO: 66006 - protein, 7 aa, synthetic construct
KVTMTTT

SEQ ID NO: 66007 - protein, 7 aa, synthetic construct
MKHMLTS

SEQ ID NO: 66008 - protein, 7 aa, synthetic construct
SKTTSQA

SEQ ID NO: 66009 - protein, 7 aa, synthetic construct
CNRVEQC

SEQ ID NO: 66010 - protein, 7 aa, synthetic construct
STLSQGG

SEQ ID NO: 66011 - protein, 7 aa, synthetic construct
FRKEDDT

SEQ ID NO: 66012 - protein, 7 aa, synthetic construct
RNMHIDD

SEQ ID NO: 66013 - protein, 7 aa, synthetic construct
NMSTTHH

SEQ ID NO: 66014 - protein, 7 aa, synthetic construct
LKGTNSA

SEQ ID NO: 66015 - protein, 7 aa, synthetic construct
RMPKPHE

SEQ ID NO: 66016 - protein, 7 aa, synthetic construct
NGGPQRQ

SEQ ID NO: 66017 - protein, 7 aa, synthetic construct
TDRAINN

SEQ ID NO: 66018 - protein, 7 aa, synthetic construct
NKAASSG

SEQ ID NO: 66019 - protein, 7 aa, synthetic construct
KNSNPTG

SEQ ID NO: 66020 - protein, 7 aa, synthetic construct
TGMNTPK

SEQ ID NO: 66021 - protein, 7 aa, synthetic construct
NSGQRTG

SEQ ID NO: 66022 - protein, 7 aa, synthetic construct
LMPYSSE

SEQ ID NO: 66023 - protein, 7 aa, synthetic construct
YVNESPN

SEQ ID NO: 66024 - protein, 7 aa, synthetic construct
KIAGHAP

SEQ ID NO: 66025 - protein, 7 aa, synthetic construct
RGAHHAV

SEQ ID NO: 66026 - protein, 7 aa, synthetic construct
ISRMGNH

SEQ ID NO: 66027 - protein, 7 aa, synthetic construct
FETGWKH

SEQ ID NO: 66028 - protein, 7 aa, synthetic construct
VGTKYTA

SEQ ID NO: 66029 - protein, 7 aa, synthetic construct
KMGATSG

SEQ ID NO: 66030 - protein, 7 aa, synthetic construct
WATHKEN

SEQ ID NO: 66031 - protein, 7 aa, synthetic construct
DLRHGAA

SEQ ID NO: 66032 - protein, 7 aa, synthetic construct
YFDNTDK

SEQ ID NO: 66033 - protein, 7 aa, synthetic construct
DYGQIGR

SEQ ID NO: 66034 - protein, 7 aa, synthetic construct
SKNQAAG

SEQ ID NO: 66035 - protein, 7 aa, synthetic construct
PAFKAKE

SEQ ID NO: 66036 - protein, 7 aa, synthetic construct
KNTGVKD

SEQ ID NO: 66037 - protein, 7 aa, synthetic construct
EKSIQQK

SEQ ID NO: 66038 - protein, 7 aa, synthetic construct
ISMGTNG

SEQ ID NO: 66039 - protein, 7 aa, synthetic construct
HSKVHLA

SEQ ID NO: 66040 - protein, 7 aa, synthetic construct
HHHTNAG

SEQ ID NO: 66041 - protein, 7 aa, synthetic construct
RGQQLGP

SEQ ID NO: 66042 - protein, 7 aa, synthetic construct
GPNGKFS

SEQ ID NO: 66043 - protein, 7 aa, synthetic construct
GGHGRSG

SEQ ID NO: 66044 - protein, 7 aa, synthetic construct
FRHDFQG

SEQ ID NO: 66045 - protein, 7 aa, synthetic construct
YEVRSPH

SEQ ID NO: 66046 - protein, 7 aa, synthetic construct
DNNVKWI

SEQ ID NO: 66047 - protein, 7 aa, synthetic construct
KNQLTVG

SEQ ID NO: 66048 - protein, 7 aa, synthetic construct
NKGTGPA

SEQ ID NO: 66049 - protein, 7 aa, synthetic construct
GNNSVIT

SEQ ID NO: 66050 - protein, 7 aa, synthetic construct
RQSSVAG

SEQ ID NO: 66051 - protein, 7 aa, synthetic construct
AINAVPQ

SEQ ID NO: 66052 - protein, 7 aa, synthetic construct
NPSHQIT

SEQ ID NO: 66053 - protein, 7 aa, synthetic construct
KSSSQNG

SEQ ID NO: 66054 - protein, 7 aa, synthetic construct
GNKTGST

SEQ ID NO: 66055 - protein, 7 aa, synthetic construct
FGAVSDK

SEQ ID NO: 66056 - protein, 7 aa, synthetic construct
YAKTAKD

SEQ ID NO: 66057 - protein, 7 aa, synthetic construct
FKQQQSS

SEQ ID NO: 66058 - protein, 7 aa, synthetic construct
TDPRQMI

SEQ ID NO: 66059 - protein, 7 aa, synthetic construct
GTFSGPP

SEQ ID NO: 66060 - protein, 7 aa, synthetic construct
AQKTILS

SEQ ID NO: 66061 - protein, 7 aa, synthetic construct
AYGTAGP

SEQ ID NO: 66062 - protein, 7 aa, synthetic construct
NGAYPLH

SEQ ID NO: 66063 - protein, 7 aa, synthetic construct
QHEFKAD

SEQ ID NO: 66064 - protein, 7 aa, synthetic construct
MYDRGQA

SEQ ID NO: 66065 - protein, 7 aa, synthetic construct
RTDSGMQ

SEQ ID NO: 66066 - protein, 7 aa, synthetic construct
SQMSGFS

SEQ ID NO: 66067 - protein, 7 aa, synthetic construct
WMMVKTE

SEQ ID NO: 66068 - protein, 7 aa, synthetic construct
QPPKHSQ

SEQ ID NO: 66069 - protein, 7 aa, synthetic construct
HTQQGRQ

SEQ ID NO: 66070 - protein, 7 aa, synthetic construct
GFSQGLN

SEQ ID NO: 66071 - protein, 7 aa, synthetic construct
QIPGSTN

SEQ ID NO: 66072 - protein, 7 aa, synthetic construct
NTTATKD

SEQ ID NO: 66073 - protein, 7 aa, synthetic construct
HAQAAMP

SEQ ID NO: 66074 - protein, 7 aa, synthetic construct
QMKHASN

SEQ ID NO: 66075 - protein, 7 aa, synthetic construct
SNLKHTP

SEQ ID NO: 66076 - protein, 7 aa, synthetic construct
QSKAVTG

SEQ ID NO: 66077 - protein, 7 aa, synthetic construct
SNKLYSA

SEQ ID NO: 66078 - protein, 7 aa, synthetic construct
IVKIDNR

SEQ ID NO: 66079 - protein, 7 aa, synthetic construct
HYGKQDF

SEQ ID NO: 66080 - protein, 7 aa, synthetic construct
KLSSAKD

SEQ ID NO: 66081 - protein, 7 aa, synthetic construct
MREVSPA

SEQ ID NO: 66082 - protein, 7 aa, synthetic construct
IRDTARS

SEQ ID NO: 66083 - protein, 7 aa, synthetic construct
SKAILPQ

SEQ ID NO: 66084 - protein, 7 aa, synthetic construct
MDHAKRP

SEQ ID NO: 66085 - protein, 7 aa, synthetic construct
KIVMDMP

SEQ ID NO: 66086 - protein, 7 aa, synthetic construct
SSKMESV

SEQ ID NO: 66087 - protein, 7 aa, synthetic construct
EGNMKHV

SEQ ID NO: 66088 - protein, 7 aa, synthetic construct
VNNKNGA

SEQ ID NO: 66089 - protein, 7 aa, synthetic construct
VREGMNG

SEQ ID NO: 66090 - protein, 7 aa, synthetic construct
RISGIQM

SEQ ID NO: 66091 - protein, 7 aa, synthetic construct
QRGAMSA

SEQ ID NO: 66092 - protein, 7 aa, synthetic construct
VRNPAQG

SEQ ID NO: 66093 - protein, 7 aa, synthetic construct
KVPDRGL

SEQ ID NO: 66094 - protein, 7 aa, synthetic construct
MDKNHKI

SEQ ID NO: 66095 - protein, 7 aa, synthetic construct
KNVVTGN

SEQ ID NO: 66096 - protein, 7 aa, synthetic construct
NVQNHQG

SEQ ID NO: 66097 - protein, 7 aa, synthetic construct
VVPTPVQ

SEQ ID NO: 66098 - protein, 7 aa, synthetic construct
KAVMSSL

SEQ ID NO: 66099 - protein, 7 aa, synthetic construct
ANTSRDM

SEQ ID NO: 66100 - protein, 7 aa, synthetic construct
GMKSQGI

SEQ ID NO: 66101 - protein, 7 aa, synthetic construct
PKASTLV

SEQ ID NO: 66102 - protein, 7 aa, synthetic construct
HQQNSMA

SEQ ID NO: 66103 - protein, 7 aa, synthetic construct
YESRNPV

SEQ ID NO: 66104 - protein, 7 aa, synthetic construct
KFLDGDA

SEQ ID NO: 66105 - protein, 7 aa, synthetic construct
MGIAVPN

SEQ ID NO: 66106 - protein, 7 aa, synthetic construct
KIKEHNY

SEQ ID NO: 66107 - protein, 7 aa, synthetic construct
NRGSKDP

SEQ ID NO: 66108 - protein, 7 aa, synthetic construct
RLHAERN

SEQ ID NO: 66109 - protein, 7 aa, synthetic construct
GDKYMVS

SEQ ID NO: 66110 - protein, 7 aa, synthetic construct
NNGKAYL

SEQ ID NO: 66111 - protein, 7 aa, synthetic construct
YAMSPSK

SEQ ID NO: 66112 - protein, 7 aa, synthetic construct
AWGHQSP

SEQ ID NO: 66113 - protein, 7 aa, synthetic construct
SGFHQSM

SEQ ID NO: 66114 - protein, 7 aa, synthetic construct
IYDHKPK

SEQ ID NO: 66115 - protein, 7 aa, synthetic construct
QAEFSMA

SEQ ID NO: 66116 - protein, 7 aa, synthetic construct
NGHNIKQ

SEQ ID NO: 66117 - protein, 7 aa, synthetic construct
VKGLVDF

SEQ ID NO: 66118 - protein, 7 aa, synthetic construct
VHRTINI

SEQ ID NO: 66119 - protein, 7 aa, synthetic construct
LNVVKEG

SEQ ID NO: 66120 - protein, 7 aa, synthetic construct
RSPPVAL

SEQ ID NO: 66121 - protein, 7 aa, synthetic construct
YGKGVSS

SEQ ID NO: 66122 - protein, 7 aa, synthetic construct
QINKGTM

SEQ ID NO: 66123 - protein, 7 aa, synthetic construct
WMKDAHK

SEQ ID NO: 66124 - protein, 7 aa, synthetic construct
LMPSWQG

SEQ ID NO: 66125 - protein, 7 aa, synthetic construct
RQANGNV

SEQ ID NO: 66126 - protein, 7 aa, synthetic construct
SMRAGII

SEQ ID NO: 66127 - protein, 7 aa, synthetic construct
NAPHTTF

SEQ ID NO: 66128 - protein, 7 aa, synthetic construct
YAQHGPN

SEQ ID NO: 66129 - protein, 7 aa, synthetic construct
DRYVKSN

SEQ ID NO: 66130 - protein, 7 aa, synthetic construct
RHADTTQ

SEQ ID NO: 66131 - protein, 7 aa, synthetic construct
YHASNDK

SEQ ID NO: 66132 - protein, 7 aa, synthetic construct
GPPRGQV

SEQ ID NO: 66133 - protein, 7 aa, synthetic construct
AMRLAAP

SEQ ID NO: 66134 - protein, 7 aa, synthetic construct
VTVHRES

SEQ ID NO: 66135 - protein, 7 aa, synthetic construct
RPAQAGA

SEQ ID NO: 66136 - protein, 7 aa, synthetic construct
VKNQKEG

SEQ ID NO: 66137 - protein, 7 aa, synthetic construct
KSNMTKD

SEQ ID NO: 66138 - protein, 7 aa, synthetic construct
NRSTQVG

SEQ ID NO: 66139 - protein, 7 aa, synthetic construct
RRDATIM

SEQ ID NO: 66140 - protein, 7 aa, synthetic construct
YFPQKPN

SEQ ID NO: 66141 - protein, 7 aa, synthetic construct
HNNMTRN

SEQ ID NO: 66142 - protein, 7 aa, synthetic construct
MRELAHG

SEQ ID NO: 66143 - protein, 7 aa, synthetic construct
NLHVQTH

SEQ ID NO: 66144 - protein, 7 aa, synthetic construct
NQGNRMA

SEQ ID NO: 66145 - protein, 7 aa, synthetic construct
NIKENRG

SEQ ID NO: 66146 - protein, 7 aa, synthetic construct
FRSKPSE

SEQ ID NO: 66147 - protein, 7 aa, synthetic construct
LPISDKA

SEQ ID NO: 66148 - protein, 7 aa, synthetic construct
QRNSDPR

SEQ ID NO: 66149 - protein, 7 aa, synthetic construct
QPSSHGN

SEQ ID NO: 66150 - protein, 7 aa, synthetic construct
RSGASSV

SEQ ID NO: 66151 - protein, 7 aa, synthetic construct
SRVTTQP

SEQ ID NO: 66152 - protein, 7 aa, synthetic construct
RNDSKQA

SEQ ID NO: 66153 - protein, 7 aa, synthetic construct
PNAENRK

SEQ ID NO: 66154 - protein, 7 aa, synthetic construct
MSQYAKV

SEQ ID NO: 66155 - protein, 7 aa, synthetic construct
YMGSQAV

SEQ ID NO: 66156 - protein, 7 aa, synthetic construct
TVGQRVG

SEQ ID NO: 66157 - protein, 7 aa, synthetic construct
MTQNVNV

SEQ ID NO: 66158 - protein, 7 aa, synthetic construct
KQDQYGG

SEQ ID NO: 66159 - protein, 7 aa, synthetic construct
QQGNMQK

SEQ ID NO: 66160 - protein, 7 aa, synthetic construct
KMDPKFA

SEQ ID NO: 66161 - protein, 7 aa, synthetic construct
TTGKNQG

SEQ ID NO: 66162 - protein, 7 aa, synthetic construct
VKYPGDL

SEQ ID NO: 66163 - protein, 7 aa, synthetic construct
YYKVTED

SEQ ID NO: 66164 - protein, 7 aa, synthetic construct
SKAQYQG

SEQ ID NO: 66165 - protein, 7 aa, synthetic construct
HEVKQLP

SEQ ID NO: 66166 - protein, 7 aa, synthetic construct
MKNPANF

SEQ ID NO: 66167 - protein, 7 aa, synthetic construct
QGTKVLP

SEQ ID NO: 66168 - protein, 7 aa, synthetic construct
MNAMEAR

SEQ ID NO: 66169 - protein, 7 aa, synthetic construct
FNGKSQN

SEQ ID NO: 66170 - protein, 7 aa, synthetic construct
ISYKLGD

SEQ ID NO: 66171 - protein, 7 aa, synthetic construct
SKPNVKE

SEQ ID NO: 66172 - protein, 7 aa, synthetic construct
RNATTTP

SEQ ID NO: 66173 - protein, 7 aa, synthetic construct
YNSMRSV

SEQ ID NO: 66174 - protein, 7 aa, synthetic construct
GWPEQHG

SEQ ID NO: 66175 - protein, 7 aa, synthetic construct
STMHAAK

SEQ ID NO: 66176 - protein, 7 aa, synthetic construct
KYHPAGH

SEQ ID NO: 66177 - protein, 7 aa, synthetic construct
PARNTSV

SEQ ID NO: 66178 - protein, 7 aa, synthetic construct
HRNVIAA

SEQ ID NO: 66179 - protein, 7 aa, synthetic construct
TNRPLSN

SEQ ID NO: 66180 - protein, 7 aa, synthetic construct
GTARTGA

SEQ ID NO: 66181 - protein, 7 aa, synthetic construct
LTTAWRE

SEQ ID NO: 66182 - protein, 7 aa, synthetic construct
LTVQGRL

SEQ ID NO: 66183 - protein, 7 aa, synthetic construct
QKAGRDS

SEQ ID NO: 66184 - protein, 7 aa, synthetic construct
QSNKVSG

SEQ ID NO: 66185 - protein, 7 aa, synthetic construct
KVDKSLN

SEQ ID NO: 66186 - protein, 7 aa, synthetic construct
RNSNNQA

SEQ ID NO: 66187 - protein, 7 aa, synthetic construct
NRNSSVP

SEQ ID NO: 66188 - protein, 7 aa, synthetic construct
PRSTIDA

SEQ ID NO: 66189 - protein, 7 aa, synthetic construct
FDPHKTT

SEQ ID NO: 66190 - protein, 7 aa, synthetic construct
IRYENQT

SEQ ID NO: 66191 - protein, 7 aa, synthetic construct
TVGLTLP

SEQ ID NO: 66192 - protein, 7 aa, synthetic construct
KYNQNQG

SEQ ID NO: 66193 - protein, 7 aa, synthetic construct
TPQMGKS

SEQ ID NO: 66194 - protein, 7 aa, synthetic construct
TMVGHKM

SEQ ID NO: 66195 - protein, 7 aa, synthetic construct
HGAGAPE

SEQ ID NO: 66196 - protein, 7 aa, synthetic construct
PDMQLRG

SEQ ID NO: 66197 - protein, 7 aa, synthetic construct
QRGFTSS

SEQ ID NO: 66198 - protein, 7 aa, synthetic construct
KTYLDER

SEQ ID NO: 66199 - protein, 7 aa, synthetic construct
KNSGERI

SEQ ID NO: 66200 - protein, 7 aa, synthetic construct
FVEMKNQ

SEQ ID NO: 66201 - protein, 7 aa, synthetic construct
LSADKVN

SEQ ID NO: 66202 - protein, 7 aa, synthetic construct
VGTQQKP

SEQ ID NO: 66203 - protein, 7 aa, synthetic construct
IFRSAQA

SEQ ID NO: 66204 - protein, 7 aa, synthetic construct
KNANPAA

SEQ ID NO: 66205 - protein, 7 aa, synthetic construct
TGSSMIG

SEQ ID NO: 66206 - protein, 7 aa, synthetic construct
TMSIAPA

SEQ ID NO: 66207 - protein, 7 aa, synthetic construct
YMRLRDD

SEQ ID NO: 66208 - protein, 7 aa, synthetic construct
QRNELPA

SEQ ID NO: 66209 - protein, 7 aa, synthetic construct
NNKTPGA

SEQ ID NO: 66210 - protein, 7 aa, synthetic construct
YPKSMGN

SEQ ID NO: 66211 - protein, 7 aa, synthetic construct
EMAYAKA

SEQ ID NO: 66212 - protein, 7 aa, synthetic construct
RFGAEER

SEQ ID NO: 66213 - protein, 7 aa, synthetic construct
RYNMISG

SEQ ID NO: 66214 - protein, 7 aa, synthetic construct
YYGQPSK

SEQ ID NO: 66215 - protein, 7 aa, synthetic construct
NGTKATG

SEQ ID NO: 66216 - protein, 7 aa, synthetic construct
TKTLYGP

SEQ ID NO: 66217 - protein, 7 aa, synthetic construct
GFVANEH

SEQ ID NO: 66218 - protein, 7 aa, synthetic construct
LRQMSIS

SEQ ID NO: 66219 - protein, 7 aa, synthetic construct
NVKTAQA

SEQ ID NO: 66220 - protein, 7 aa, synthetic construct
PFTRGTE

SEQ ID NO: 66221 - protein, 7 aa, synthetic construct
FNFMYKE

SEQ ID NO: 66222 - protein, 7 aa, synthetic construct
LHHGQKL

SEQ ID NO: 66223 - protein, 7 aa, synthetic construct
NSPTFQG

SEQ ID NO: 66224 - protein, 7 aa, synthetic construct
HIDKRKE

SEQ ID NO: 66225 - protein, 7 aa, synthetic construct
GAGHAMH

SEQ ID NO: 66226 - protein, 7 aa, synthetic construct
VGMKQDT

SEQ ID NO: 66227 - protein, 7 aa, synthetic construct
RQKMAEN

SEQ ID NO: 66228 - protein, 7 aa, synthetic construct
AHPNQQY

SEQ ID NO: 66229 - protein, 7 aa, synthetic construct
QANNAMS

SEQ ID NO: 66230 - protein, 7 aa, synthetic construct
MPSVHHQ

SEQ ID NO: 66231 - protein, 7 aa, synthetic construct
TRSHSQF

SEQ ID NO: 66232 - protein, 7 aa, synthetic construct
RQFLQTE

SEQ ID NO: 66233 - protein, 7 aa, synthetic construct
SENYRVT

SEQ ID NO: 66234 - protein, 7 aa, synthetic construct
LTLAMQG

SEQ ID NO: 66235 - protein, 7 aa, synthetic construct
PERYQLK

SEQ ID NO: 66236 - protein, 7 aa, synthetic construct
GAMRAGL

SEQ ID NO: 66237 - protein, 7 aa, synthetic construct
TLRNNHS

SEQ ID NO: 66238 - protein, 7 aa, synthetic construct
LPGMHGP

SEQ ID NO: 66239 - protein, 7 aa, synthetic construct
DSIKRHI

SEQ ID NO: 66240 - protein, 7 aa, synthetic construct
MLRMSEN

SEQ ID NO: 66241 - protein, 7 aa, synthetic construct
NQMKTNS

SEQ ID NO: 66242 - protein, 7 aa, synthetic construct
WGPNSHD

SEQ ID NO: 66243 - protein, 7 aa, synthetic construct
TNTRPGV

SEQ ID NO: 66244 - protein, 7 aa, synthetic construct
LPGKITN

SEQ ID NO: 66245 - protein, 7 aa, synthetic construct
QSGKVTN

SEQ ID NO: 66246 - protein, 7 aa, synthetic construct
TNPDRSA

SEQ ID NO: 66247 - protein, 7 aa, synthetic construct
ATYHMTA

SEQ ID NO: 66248 - protein, 7 aa, synthetic construct
QNDIAHR

SEQ ID NO: 66249 - protein, 7 aa, synthetic construct
SEIKAIR

SEQ ID NO: 66250 - protein, 7 aa, synthetic construct
LPVKADN

SEQ ID NO: 66251 - protein, 7 aa, synthetic construct
FSGQHQQ

SEQ ID NO: 66252 - protein, 7 aa, synthetic construct
IQKIGSN

SEQ ID NO: 66253 - protein, 7 aa, synthetic construct
GPVYMNP

SEQ ID NO: 66254 - protein, 7 aa, synthetic construct
KTQNTIT

SEQ ID NO: 66255 - protein, 7 aa, synthetic construct
DHRRGDP

SEQ ID NO: 66256 - protein, 7 aa, synthetic construct
NKSTNTN

SEQ ID NO: 66257 - protein, 7 aa, synthetic construct
NRDGNHS

SEQ ID NO: 66258 - protein, 7 aa, synthetic construct
QFNPPQR

SEQ ID NO: 66259 - protein, 7 aa, synthetic construct
FSDTPDR

SEQ ID NO: 66260 - protein, 7 aa, synthetic construct
HVSKPYM

SEQ ID NO: 66261 - protein, 7 aa, synthetic construct
NPVAQRS

SEQ ID NO: 66262 - protein, 7 aa, synthetic construct
WSHIIKD

SEQ ID NO: 66263 - protein, 7 aa, synthetic construct
DHRSMGG

SEQ ID NO: 66264 - protein, 7 aa, synthetic construct
FGQHMSI

SEQ ID NO: 66265 - protein, 7 aa, synthetic construct
MKDHKLE

SEQ ID NO: 66266 - protein, 7 aa, synthetic construct
QIPQPTP

SEQ ID NO: 66267 - protein, 7 aa, synthetic construct
FVGHPER

SEQ ID NO: 66268 - protein, 7 aa, synthetic construct
DHQKFTE

SEQ ID NO: 66269 - protein, 7 aa, synthetic construct
IRTPTTQ

SEQ ID NO: 66270 - protein, 7 aa, synthetic construct
TATGRTP

SEQ ID NO: 66271 - protein, 7 aa, synthetic construct
MVGPTPQ

SEQ ID NO: 66272 - protein, 7 aa, synthetic construct
KPGLDGY

SEQ ID NO: 66273 - protein, 7 aa, synthetic construct
FGIERNK

SEQ ID NO: 66274 - protein, 7 aa, synthetic construct
KNLAQTA

SEQ ID NO: 66275 - protein, 7 aa, synthetic construct
VPKQFGV

SEQ ID NO: 66276 - protein, 7 aa, synthetic construct
ANRDQKN

SEQ ID NO: 66277 - protein, 7 aa, synthetic construct
QRQDSGW

SEQ ID NO: 66278 - protein, 7 aa, synthetic construct
LGIKLQD

SEQ ID NO: 66279 - protein, 7 aa, synthetic construct
PTSMTAK

SEQ ID NO: 66280 - protein, 7 aa, synthetic construct
ARYGTQD

SEQ ID NO: 66281 - protein, 7 aa, synthetic construct
MPMKMDS

SEQ ID NO: 66282 - protein, 7 aa, synthetic construct
YKQAPNS

SEQ ID NO: 66283 - protein, 7 aa, synthetic construct
STMTNAP

SEQ ID NO: 66284 - protein, 7 aa, synthetic construct
ERGNIAA

SEQ ID NO: 66285 - protein, 7 aa, synthetic construct
PKTSHTI

SEQ ID NO: 66286 - protein, 7 aa, synthetic construct
LTHRPLQ

SEQ ID NO: 66287 - protein, 7 aa, synthetic construct
SVNKTSN

SEQ ID NO: 66288 - protein, 7 aa, synthetic construct
FHRGIEI

SEQ ID NO: 66289 - protein, 7 aa, synthetic construct
ISVNGHV

SEQ ID NO: 66290 - protein, 7 aa, synthetic construct
WLSSIPP

SEQ ID NO: 66291 - protein, 7 aa, synthetic construct
RHAHGGI

SEQ ID NO: 66292 - protein, 7 aa, synthetic construct
KDMIERG

SEQ ID NO: 66293 - protein, 7 aa, synthetic construct
RNGKEQD

SEQ ID NO: 66294 - protein, 7 aa, synthetic construct
NVVLHGI

SEQ ID NO: 66295 - protein, 7 aa, synthetic construct
LRAQSGF

SEQ ID NO: 66296 - protein, 7 aa, synthetic construct
FATVRPP

SEQ ID NO: 66297 - protein, 7 aa, synthetic construct
MKSMANG

SEQ ID NO: 66298 - protein, 7 aa, synthetic construct
ANNGAMH

SEQ ID NO: 66299 - protein, 7 aa, synthetic construct
VPAVPRA

SEQ ID NO: 66300 - protein, 7 aa, synthetic construct
PNEKPYK

SEQ ID NO: 66301 - protein, 7 aa, synthetic construct
AKVMPAK

SEQ ID NO: 66302 - protein, 7 aa, synthetic construct
DYSKHSA

SEQ ID NO: 66303 - protein, 7 aa, synthetic construct
DTRSNYI

SEQ ID NO: 66304 - protein, 7 aa, synthetic construct
GPQKNSP

SEQ ID NO: 66305 - protein, 7 aa, synthetic construct
MKHAYPA

SEQ ID NO: 66306 - protein, 7 aa, synthetic construct
KRIGMDT

SEQ ID NO: 66307 - protein, 7 aa, synthetic construct
PQGKITP

SEQ ID NO: 66308 - protein, 7 aa, synthetic construct
FKNNDHW

SEQ ID NO: 66309 - protein, 7 aa, synthetic construct
MTGLHPT

SEQ ID NO: 66310 - protein, 7 aa, synthetic construct
LSAMTVK

SEQ ID NO: 66311 - protein, 7 aa, synthetic construct
MDHKAMK

SEQ ID NO: 66312 - protein, 7 aa, synthetic construct
EREYTAS

SEQ ID NO: 66313 - protein, 7 aa, synthetic construct
NGAAMKG

SEQ ID NO: 66314 - protein, 7 aa, synthetic construct
YGAKPSG

SEQ ID NO: 66315 - protein, 7 aa, synthetic construct
SATYPIS

SEQ ID NO: 66316 - protein, 7 aa, synthetic construct
VATHGAG

SEQ ID NO: 66317 - protein, 7 aa, synthetic construct
QHFEKHA

SEQ ID NO: 66318 - protein, 7 aa, synthetic construct
KHTPTNV

SEQ ID NO: 66319 - protein, 7 aa, synthetic construct
FSSTERV

SEQ ID NO: 66320 - protein, 7 aa, synthetic construct
KSDNPIP

SEQ ID NO: 66321 - protein, 7 aa, synthetic construct
YVKAIPN

SEQ ID NO: 66322 - protein, 7 aa, synthetic construct
HQKGASH

SEQ ID NO: 66323 - protein, 7 aa, synthetic construct
KYGDIRV

SEQ ID NO: 66324 - protein, 7 aa, synthetic construct
STKNQTV

SEQ ID NO: 66325 - protein, 7 aa, synthetic construct
ATAGKSN

SEQ ID NO: 66326 - protein, 7 aa, synthetic construct
HGFAEKI

SEQ ID NO: 66327 - protein, 7 aa, synthetic construct
GTWGSGQ

SEQ ID NO: 66328 - protein, 7 aa, synthetic construct
VLQNKGV

SEQ ID NO: 66329 - protein, 7 aa, synthetic construct
PPGNPVK

SEQ ID NO: 66330 - protein, 7 aa, synthetic construct
AQGKVDL

SEQ ID NO: 66331 - protein, 7 aa, synthetic construct
RQSAQGA

SEQ ID NO: 66332 - protein, 7 aa, synthetic construct
TFVKHPT

SEQ ID NO: 66333 - protein, 7 aa, synthetic construct
NTQARPP

SEQ ID NO: 66334 - protein, 7 aa, synthetic construct
QKTLDRQ

SEQ ID NO: 66335 - protein, 7 aa, synthetic construct
QASNDHK

SEQ ID NO: 66336 - protein, 7 aa, synthetic construct
KSPMIKG

SEQ ID NO: 66337 - protein, 7 aa, synthetic construct
QGHNMHI

SEQ ID NO: 66338 - protein, 7 aa, synthetic construct
YRDTLGK

SEQ ID NO: 66339 - protein, 7 aa, synthetic construct
ILPLNHD

SEQ ID NO: 66340 - protein, 7 aa, synthetic construct
QMAKNQD

SEQ ID NO: 66341 - protein, 7 aa, synthetic construct
AISNHVM

SEQ ID NO: 66342 - protein, 7 aa, synthetic construct
MQERRSN

SEQ ID NO: 66343 - protein, 7 aa, synthetic construct
QMDRTGF

SEQ ID NO: 66344 - protein, 7 aa, synthetic construct
MQSHKMD

SEQ ID NO: 66345 - protein, 7 aa, synthetic construct
SQKSAAA

SEQ ID NO: 66346 - protein, 7 aa, synthetic construct
PPRIHTG

SEQ ID NO: 66347 - protein, 7 aa, synthetic construct
PTANKLS

SEQ ID NO: 66348 - protein, 7 aa, synthetic construct
DIRIKQS

SEQ ID NO: 66349 - protein, 7 aa, synthetic construct
PAQRTAG

SEQ ID NO: 66350 - protein, 7 aa, synthetic construct
MTKPSAP

SEQ ID NO: 66351 - protein, 7 aa, synthetic construct
PLKTNFE

SEQ ID NO: 66352 - protein, 7 aa, synthetic construct
IANYTAP

SEQ ID NO: 66353 - protein, 7 aa, synthetic construct
RSTTTQA

SEQ ID NO: 66354 - protein, 7 aa, synthetic construct
KANSNMP

SEQ ID NO: 66355 - protein, 7 aa, synthetic construct
RIEIKEY

SEQ ID NO: 66356 - protein, 7 aa, synthetic construct
NKMFPKD

SEQ ID NO: 66357 - protein, 7 aa, synthetic construct
LRAVNME

SEQ ID NO: 66358 - protein, 7 aa, synthetic construct
SISINQS

SEQ ID NO: 66359 - protein, 7 aa, synthetic construct
QSMKERA

SEQ ID NO: 66360 - protein, 7 aa, synthetic construct
VLGKGQW

SEQ ID NO: 66361 - protein, 7 aa, synthetic construct
KQNATQA

SEQ ID NO: 66362 - protein, 7 aa, synthetic construct
KTYHGSV

SEQ ID NO: 66363 - protein, 7 aa, synthetic construct
NTLPHDR

SEQ ID NO: 66364 - protein, 7 aa, synthetic construct
NQTRGSS

SEQ ID NO: 66365 - protein, 7 aa, synthetic construct
AAAYDSK

SEQ ID NO: 66366 - protein, 7 aa, synthetic construct
SKGNGQD

SEQ ID NO: 66367 - protein, 7 aa, synthetic construct
MKGQVAG

SEQ ID NO: 66368 - protein, 7 aa, synthetic construct
SKTQATI

SEQ ID NO: 66369 - protein, 7 aa, synthetic construct
VTMHKGP

SEQ ID NO: 66370 - protein, 7 aa, synthetic construct
MPDRNHM

SEQ ID NO: 66371 - protein, 7 aa, synthetic construct
YKGGVEF

SEQ ID NO: 66372 - protein, 7 aa, synthetic construct
KNAQDLI

SEQ ID NO: 66373 - protein, 7 aa, synthetic construct
WSRSSIN

SEQ ID NO: 66374 - protein, 7 aa, synthetic construct
GFAHSMD

SEQ ID NO: 66375 - protein, 7 aa, synthetic construct
QKIEADF

SEQ ID NO: 66376 - protein, 7 aa, synthetic construct
ALHHQPQ

SEQ ID NO: 66377 - protein, 7 aa, synthetic construct
FDNWRKD

SEQ ID NO: 66378 - protein, 7 aa, synthetic construct
QAGYTAT

SEQ ID NO: 66379 - protein, 7 aa, synthetic construct
VPPFQRV

SEQ ID NO: 66380 - protein, 7 aa, synthetic construct
YNERQHM

SEQ ID NO: 66381 - protein, 7 aa, synthetic construct
KLGILPP

SEQ ID NO: 66382 - protein, 7 aa, synthetic construct
RYDNAVE

SEQ ID NO: 66383 - protein, 7 aa, synthetic construct
KQVPNSP

SEQ ID NO: 66384 - protein, 7 aa, synthetic construct
FMQHKAQ

SEQ ID NO: 66385 - protein, 7 aa, synthetic construct
DGVFHAP

SEQ ID NO: 66386 - protein, 7 aa, synthetic construct
NSQRGTP

SEQ ID NO: 66387 - protein, 7 aa, synthetic construct
IGHAREY

SEQ ID NO: 66388 - protein, 7 aa, synthetic construct
NTKHMAV

SEQ ID NO: 66389 - protein, 7 aa, synthetic construct
LREEYRN

SEQ ID NO: 66390 - protein, 7 aa, synthetic construct
GKSHKDS

SEQ ID NO: 66391 - protein, 7 aa, synthetic construct
DTKSLPK

SEQ ID NO: 66392 - protein, 7 aa, synthetic construct
KNSDMRG

SEQ ID NO: 66393 - protein, 7 aa, synthetic construct
VMNGRQG

SEQ ID NO: 66394 - protein, 7 aa, synthetic construct
SLKPQGS

SEQ ID NO: 66395 - protein, 7 aa, synthetic construct
TMKTHGL

SEQ ID NO: 66396 - protein, 7 aa, synthetic construct
FTKQTNH

SEQ ID NO: 66397 - protein, 7 aa, synthetic construct
TTKEQDK

SEQ ID NO: 66398 - protein, 7 aa, synthetic construct
AGQYHEK

SEQ ID NO: 66399 - protein, 7 aa, synthetic construct
KQWHAAE

SEQ ID NO: 66400 - protein, 7 aa, synthetic construct
EAVHRRD

SEQ ID NO: 66401 - protein, 7 aa, synthetic construct
IGKKNEI

SEQ ID NO: 66402 - protein, 7 aa, synthetic construct
FNGSKQS

SEQ ID NO: 66403 - protein, 7 aa, synthetic construct
QQNTSTY

SEQ ID NO: 66404 - protein, 7 aa, synthetic construct
AHLTPFA

SEQ ID NO: 66405 - protein, 7 aa, synthetic construct
DKINLSM

SEQ ID NO: 66406 - protein, 7 aa, synthetic construct
VSMEIRG

SEQ ID NO: 66407 - protein, 7 aa, synthetic construct
RPGAATA

SEQ ID NO: 66408 - protein, 7 aa, synthetic construct
TKVEQRS

SEQ ID NO: 66409 - protein, 7 aa, synthetic construct
LKYTPTV

SEQ ID NO: 66410 - protein, 7 aa, synthetic construct
NSVQRFA

SEQ ID NO: 66411 - protein, 7 aa, synthetic construct
AWKDNYA

SEQ ID NO: 66412 - protein, 7 aa, synthetic construct
YTRPDSM

SEQ ID NO: 66413 - protein, 7 aa, synthetic construct
VIASQNH

SEQ ID NO: 66414 - protein, 7 aa, synthetic construct
LITRAGS

SEQ ID NO: 66415 - protein, 7 aa, synthetic construct
NKPQSQA

SEQ ID NO: 66416 - protein, 7 aa, synthetic construct
QGAKSSA

SEQ ID NO: 66417 - protein, 7 aa, synthetic construct
KDPYINA

SEQ ID NO: 66418 - protein, 7 aa, synthetic construct
ASKLNNM

SEQ ID NO: 66419 - protein, 7 aa, synthetic construct
GTFIAKG

SEQ ID NO: 66420 - protein, 7 aa, synthetic construct
SPVAQTA

SEQ ID NO: 66421 - protein, 7 aa, synthetic construct
SPNTKGG

SEQ ID NO: 66422 - protein, 7 aa, synthetic construct
TASKMQG

SEQ ID NO: 66423 - protein, 7 aa, synthetic construct
YTSAQQN

SEQ ID NO: 66424 - protein, 7 aa, synthetic construct
YAKANNF

SEQ ID NO: 66425 - protein, 7 aa, synthetic construct
KYSIISD

SEQ ID NO: 66426 - protein, 7 aa, synthetic construct
TIKASQN

SEQ ID NO: 66427 - protein, 7 aa, synthetic construct
QTAIDKV

SEQ ID NO: 66428 - protein, 7 aa, synthetic construct
YRTLNGE

SEQ ID NO: 66429 - protein, 7 aa, synthetic construct
AAKMGTG

SEQ ID NO: 66430 - protein, 7 aa, synthetic construct
CARNSTC

SEQ ID NO: 66431 - protein, 7 aa, synthetic construct
DSFTPFK

SEQ ID NO: 66432 - protein, 7 aa, synthetic construct
PNMKNMG

SEQ ID NO: 66433 - protein, 7 aa, synthetic construct
GAYHLEK

SEQ ID NO: 66434 - protein, 7 aa, synthetic construct
NTINKTN

SEQ ID NO: 66435 - protein, 7 aa, synthetic construct
DSKQYQS

SEQ ID NO: 66436 - protein, 7 aa, synthetic construct
VMKQSQA

SEQ ID NO: 66437 - protein, 7 aa, synthetic construct
NEWQFAE

SEQ ID NO: 66438 - protein, 7 aa, synthetic construct
VNGLSSI

SEQ ID NO: 66439 - protein, 7 aa, synthetic construct
GNRAPIM

SEQ ID NO: 66440 - protein, 7 aa, synthetic construct
TAMVNKG

SEQ ID NO: 66441 - protein, 7 aa, synthetic construct
MSGFQQS

SEQ ID NO: 66442 - protein, 7 aa, synthetic construct
SQKSLVS

SEQ ID NO: 66443 - protein, 7 aa, synthetic construct
LMQQSHS

SEQ ID NO: 66444 - protein, 7 aa, synthetic construct
ILRDIDG

SEQ ID NO: 66445 - protein, 7 aa, synthetic construct
KDIHHPM

SEQ ID NO: 66446 - protein, 7 aa, synthetic construct
PQKQREW

SEQ ID NO: 66447 - protein, 7 aa, synthetic construct
NRGGVAS

SEQ ID NO: 66448 - protein, 7 aa, synthetic construct
AQKRDVV

SEQ ID NO: 66449 - protein, 7 aa, synthetic construct
GKPSAAS

SEQ ID NO: 66450 - protein, 7 aa, synthetic construct
QRQHLTA

SEQ ID NO: 66451 - protein, 7 aa, synthetic construct
DHRGGGS

SEQ ID NO: 66452 - protein, 7 aa, synthetic construct
GVSVARG

SEQ ID NO: 66453 - protein, 7 aa, synthetic construct
GTKPNVG

SEQ ID NO: 66454 - protein, 7 aa, synthetic construct
HPKLITG

SEQ ID NO: 66455 - protein, 7 aa, synthetic construct
QEAVKYA

SEQ ID NO: 66456 - protein, 7 aa, synthetic construct
SFGPQVQ

SEQ ID NO: 66457 - protein, 7 aa, synthetic construct
RHSENWP

SEQ ID NO: 66458 - protein, 7 aa, synthetic construct
TNVGKNA

SEQ ID NO: 66459 - protein, 7 aa, synthetic construct
KHNELEV

SEQ ID NO: 66460 - protein, 7 aa, synthetic construct
NYNAKTV

SEQ ID NO: 66461 - protein, 7 aa, synthetic construct
TEIRLKQ

SEQ ID NO: 66462 - protein, 7 aa, synthetic construct
REFKQNI

SEQ ID NO: 66463 - protein, 7 aa, synthetic construct
EQNKLMM

SEQ ID NO: 66464 - protein, 7 aa, synthetic construct
KHETNVL

SEQ ID NO: 66465 - protein, 7 aa, synthetic construct
WKDKMAF

SEQ ID NO: 66466 - protein, 7 aa, synthetic construct
KPQQTPS

SEQ ID NO: 66467 - protein, 7 aa, synthetic construct
VLQMQDH

SEQ ID NO: 66468 - protein, 7 aa, synthetic construct
NFSQDRP

SEQ ID NO: 66469 - protein, 7 aa, synthetic construct
TTKSAGG

SEQ ID NO: 66470 - protein, 7 aa, synthetic construct
SFKVGAP

SEQ ID NO: 66471 - protein, 7 aa, synthetic construct
EGFTHGA

SEQ ID NO: 66472 - protein, 7 aa, synthetic construct
GEGRAVI

SEQ ID NO: 66473 - protein, 7 aa, synthetic construct
GQKHEPM

SEQ ID NO: 66474 - protein, 7 aa, synthetic construct
RWKHGED

SEQ ID NO: 66475 - protein, 7 aa, synthetic construct
QNAKSSP

SEQ ID NO: 66476 - protein, 7 aa, synthetic construct
MNITNRD

SEQ ID NO: 66477 - protein, 7 aa, synthetic construct
QNGRYPE

SEQ ID NO: 66478 - protein, 7 aa, synthetic construct
LKITGEL

SEQ ID NO: 66479 - protein, 7 aa, synthetic construct
SDRVNMI

SEQ ID NO: 66480 - protein, 7 aa, synthetic construct
NLAQSKS

SEQ ID NO: 66481 - protein, 7 aa, synthetic construct
LTKTQDY

SEQ ID NO: 66482 - protein, 7 aa, synthetic construct
GRATISH

SEQ ID NO: 66483 - protein, 7 aa, synthetic construct
YRPQQTE

SEQ ID NO: 66484 - protein, 7 aa, synthetic construct
KDAKNEI

SEQ ID NO: 66485 - protein, 7 aa, synthetic construct
MKVSDQI

SEQ ID NO: 66486 - protein, 7 aa, synthetic construct
GHNADIP

SEQ ID NO: 66487 - protein, 7 aa, synthetic construct
MNRHGVG

SEQ ID NO: 66488 - protein, 7 aa, synthetic construct
NKQSANN

SEQ ID NO: 66489 - protein, 7 aa, synthetic construct
AFTNGGG

SEQ ID NO: 66490 - protein, 7 aa, synthetic construct
MQAGPNP

SEQ ID NO: 66491 - protein, 7 aa, synthetic construct
LPTQINV

SEQ ID NO: 66492 - protein, 7 aa, synthetic construct
NKQKEWP

SEQ ID NO: 66493 - protein, 7 aa, synthetic construct
SPRAMDV

SEQ ID NO: 66494 - protein, 7 aa, synthetic construct
QPKPAEK

SEQ ID NO: 66495 - protein, 7 aa, synthetic construct
LVRSQTE

SEQ ID NO: 66496 - protein, 7 aa, synthetic construct
DKGGVLL

SEQ ID NO: 66497 - protein, 7 aa, synthetic construct
MRSSNGL

SEQ ID NO: 66498 - protein, 7 aa, synthetic construct
FQKWAQN

SEQ ID NO: 66499 - protein, 7 aa, synthetic construct
GKERNLQ

SEQ ID NO: 66500 - protein, 7 aa, synthetic construct
GRFHINE

SEQ ID NO: 66501 - protein, 7 aa, synthetic construct
RPVATTG

SEQ ID NO: 66502 - protein, 7 aa, synthetic construct
EYVTQKN

SEQ ID NO: 66503 - protein, 7 aa, synthetic construct
YNANEPP

SEQ ID NO: 66504 - protein, 7 aa, synthetic construct
TEKHQHN

SEQ ID NO: 66505 - protein, 7 aa, synthetic construct
MKASQGG

SEQ ID NO: 66506 - protein, 7 aa, synthetic construct
NATQPHA

SEQ ID NO: 66507 - protein, 7 aa, synthetic construct
LTYKQDI

SEQ ID NO: 66508 - protein, 7 aa, synthetic construct
MHGPNAR

SEQ ID NO: 66509 - protein, 7 aa, synthetic construct
SERVIAG

SEQ ID NO: 66510 - protein, 7 aa, synthetic construct
KAQIGIT

SEQ ID NO: 66511 - protein, 7 aa, synthetic construct
QLNKTAV

SEQ ID NO: 66512 - protein, 7 aa, synthetic construct
KDFVMGA

SEQ ID NO: 66513 - protein, 7 aa, synthetic construct
SASPSTY

SEQ ID NO: 66514 - protein, 7 aa, synthetic construct
TKVWVTD

SEQ ID NO: 66515 - protein, 7 aa, synthetic construct
VNTNSKG

SEQ ID NO: 66516 - protein, 7 aa, synthetic construct
NNTRLLT

SEQ ID NO: 66517 - protein, 7 aa, synthetic construct
IIGGGVV

SEQ ID NO: 66518 - protein, 7 aa, synthetic construct
PMAKTGN

SEQ ID NO: 66519 - protein, 7 aa, synthetic construct
GHKENKQ

SEQ ID NO: 66520 - protein, 7 aa, synthetic construct
RTSQKDP

SEQ ID NO: 66521 - protein, 7 aa, synthetic construct
IDKIPVI

SEQ ID NO: 66522 - protein, 7 aa, synthetic construct
NPYDPRA

SEQ ID NO: 66523 - protein, 7 aa, synthetic construct
FNPNNKD

SEQ ID NO: 66524 - protein, 7 aa, synthetic construct
KVLESHG

SEQ ID NO: 66525 - protein, 7 aa, synthetic construct
HTNLGIM

SEQ ID NO: 66526 - protein, 7 aa, synthetic construct
PSTPNRL

SEQ ID NO: 66527 - protein, 7 aa, synthetic construct
IEKSTVF

SEQ ID NO: 66528 - protein, 7 aa, synthetic construct
GGDRTTP

SEQ ID NO: 66529 - protein, 7 aa, synthetic construct
GNMHGAH

SEQ ID NO: 66530 - protein, 7 aa, synthetic construct
STLTIKE

SEQ ID NO: 66531 - protein, 7 aa, synthetic construct
NASDKDR

SEQ ID NO: 66532 - protein, 7 aa, synthetic construct
VGAATRN

SEQ ID NO: 66533 - protein, 7 aa, synthetic construct
VHDKAMP

SEQ ID NO: 66534 - protein, 7 aa, synthetic construct
RDQAHTF

SEQ ID NO: 66535 - protein, 7 aa, synthetic construct
QQTRTQA

SEQ ID NO: 66536 - protein, 7 aa, synthetic construct
LNPIPST

SEQ ID NO: 66537 - protein, 7 aa, synthetic construct
GPGAKFA

SEQ ID NO: 66538 - protein, 7 aa, synthetic construct
MGPPHNK

SEQ ID NO: 66539 - protein, 7 aa, synthetic construct
NIPSGHN

SEQ ID NO: 66540 - protein, 7 aa, synthetic construct
SVPNIGM

SEQ ID NO: 66541 - protein, 7 aa, synthetic construct
HTSALMH

SEQ ID NO: 66542 - protein, 7 aa, synthetic construct
RMAASAA

SEQ ID NO: 66543 - protein, 7 aa, synthetic construct
QFTQKAD

SEQ ID NO: 66544 - protein, 7 aa, synthetic construct
KNALPFD

SEQ ID NO: 66545 - protein, 7 aa, synthetic construct
PDKTPRH

SEQ ID NO: 66546 - protein, 7 aa, synthetic construct
RARDESV

SEQ ID NO: 66547 - protein, 7 aa, synthetic construct
DVYKRGF

SEQ ID NO: 66548 - protein, 7 aa, synthetic construct
NTAPQQW

SEQ ID NO: 66549 - protein, 7 aa, synthetic construct
KDAAGNR

SEQ ID NO: 66550 - protein, 7 aa, synthetic construct
GKFATTY

SEQ ID NO: 66551 - protein, 7 aa, synthetic construct
FHHSMVS

SEQ ID NO: 66552 - protein, 7 aa, synthetic construct
FMPHKHN

SEQ ID NO: 66553 - protein, 7 aa, synthetic construct
VLKMTYG

SEQ ID NO: 66554 - protein, 7 aa, synthetic construct
KDGRVPP

SEQ ID NO: 66555 - protein, 7 aa, synthetic construct
KDKGTDS

SEQ ID NO: 66556 - protein, 7 aa, synthetic construct
QKQGMDK

SEQ ID NO: 66557 - protein, 7 aa, synthetic construct
HIYSNSV

SEQ ID NO: 66558 - protein, 7 aa, synthetic construct
PWAPESR

SEQ ID NO: 66559 - protein, 7 aa, synthetic construct
HSTLNSP

SEQ ID NO: 66560 - protein, 7 aa, synthetic construct
GEQVQQR

SEQ ID NO: 66561 - protein, 7 aa, synthetic construct
LNHSMAN

SEQ ID NO: 66562 - protein, 7 aa, synthetic construct
GKSGGTV

SEQ ID NO: 66563 - protein, 7 aa, synthetic construct
PGDKGHH

SEQ ID NO: 66564 - protein, 7 aa, synthetic construct
TALTNKP

SEQ ID NO: 66565 - protein, 7 aa, synthetic construct
KHKEMGP

SEQ ID NO: 66566 - protein, 7 aa, synthetic construct
GDSSMPK

SEQ ID NO: 66567 - protein, 7 aa, synthetic construct
LKNTDAN

SEQ ID NO: 66568 - protein, 7 aa, synthetic construct
NPGKMAA

SEQ ID NO: 66569 - protein, 7 aa, synthetic construct
VRSGKEA

SEQ ID NO: 66570 - protein, 7 aa, synthetic construct
SGHARGD

SEQ ID NO: 66571 - protein, 7 aa, synthetic construct
IGSYKLV

SEQ ID NO: 66572 - protein, 7 aa, synthetic construct
LYKSYDA

SEQ ID NO: 66573 - protein, 7 aa, synthetic construct
SKNSSIG

SEQ ID NO: 66574 - protein, 7 aa, synthetic construct
MHMNKNA

SEQ ID NO: 66575 - protein, 7 aa, synthetic construct
IPKHGTM

SEQ ID NO: 66576 - protein, 7 aa, synthetic construct
LNNNQPN

SEQ ID NO: 66577 - protein, 7 aa, synthetic construct
NLTGYPP

SEQ ID NO: 66578 - protein, 7 aa, synthetic construct
HMGHANP

SEQ ID NO: 66579 - protein, 7 aa, synthetic construct
YNVTVKT

SEQ ID NO: 66580 - protein, 7 aa, synthetic construct
WGKDKDY

SEQ ID NO: 66581 - protein, 7 aa, synthetic construct
HQAGGSH

SEQ ID NO: 66582 - protein, 7 aa, synthetic construct
MHDPRRN

SEQ ID NO: 66583 - protein, 7 aa, synthetic construct
DWPPTKE

SEQ ID NO: 66584 - protein, 7 aa, synthetic construct
NASPSIK

SEQ ID NO: 66585 - protein, 7 aa, synthetic construct
PFRDGKV

SEQ ID NO: 66586 - protein, 7 aa, synthetic construct
KQDKAAM

SEQ ID NO: 66587 - protein, 7 aa, synthetic construct
ANYEGRQ

SEQ ID NO: 66588 - protein, 7 aa, synthetic construct
IRDRAQV

SEQ ID NO: 66589 - protein, 7 aa, synthetic construct
RSNEALN

SEQ ID NO: 66590 - protein, 7 aa, synthetic construct
TQKVIDS

SEQ ID NO: 66591 - protein, 7 aa, synthetic construct
HGNAWNP

SEQ ID NO: 66592 - protein, 7 aa, synthetic construct
YHQSAIT

SEQ ID NO: 66593 - protein, 7 aa, synthetic construct
KDVIRTA

SEQ ID NO: 66594 - protein, 7 aa, synthetic construct
HQRTHNA

SEQ ID NO: 66595 - protein, 7 aa, synthetic construct
SQTNPAV

SEQ ID NO: 66596 - protein, 7 aa, synthetic construct
QHTRAET

SEQ ID NO: 66597 - protein, 7 aa, synthetic construct
FTKTSQP

SEQ ID NO: 66598 - protein, 7 aa, synthetic construct
FKPQSGF

SEQ ID NO: 66599 - protein, 7 aa, synthetic construct
AYKRPGE

SEQ ID NO: 66600 - protein, 7 aa, synthetic construct
LGIAYRD

SEQ ID NO: 66601 - protein, 7 aa, synthetic construct
GVAIKSD

SEQ ID NO: 66602 - protein, 7 aa, synthetic construct
MKTNNQP

SEQ ID NO: 66603 - protein, 7 aa, synthetic construct
WSQLHGN

SEQ ID NO: 66604 - protein, 7 aa, synthetic construct
GGPVANM

SEQ ID NO: 66605 - protein, 7 aa, synthetic construct
WHKIQDA

SEQ ID NO: 66606 - protein, 7 aa, synthetic construct
HGKDSAG

SEQ ID NO: 66607 - protein, 7 aa, synthetic construct
SANTPHI

SEQ ID NO: 66608 - protein, 7 aa, synthetic construct
KQATQPN

SEQ ID NO: 66609 - protein, 7 aa, synthetic construct
IEISMRN

SEQ ID NO: 66610 - protein, 7 aa, synthetic construct
RDAMFGP

SEQ ID NO: 66611 - protein, 7 aa, synthetic construct
KPSQTMG

SEQ ID NO: 66612 - protein, 7 aa, synthetic construct
SKNPGMI

SEQ ID NO: 66613 - protein, 7 aa, synthetic construct
TPKNAGG

SEQ ID NO: 66614 - protein, 7 aa, synthetic construct
KQHGPNA

SEQ ID NO: 66615 - protein, 7 aa, synthetic construct
TIKAKEN

SEQ ID NO: 66616 - protein, 7 aa, synthetic construct
SKDIQKP

SEQ ID NO: 66617 - protein, 7 aa, synthetic construct
RNLASVA

SEQ ID NO: 66618 - protein, 7 aa, synthetic construct
SLQNHGA

SEQ ID NO: 66619 - protein, 7 aa, synthetic construct
PTQTKHF

SEQ ID NO: 66620 - protein, 7 aa, synthetic construct
TESTRSL

SEQ ID NO: 66621 - protein, 7 aa, synthetic construct
RPSPQAA

SEQ ID NO: 66622 - protein, 7 aa, synthetic construct
GPDPRSM

SEQ ID NO: 66623 - protein, 7 aa, synthetic construct
TNVKGRE

SEQ ID NO: 66624 - protein, 7 aa, synthetic construct
KMNGRFD

SEQ ID NO: 66625 - protein, 7 aa, synthetic construct
LLTPQTI

SEQ ID NO: 66626 - protein, 7 aa, synthetic construct
GSPGAVF

SEQ ID NO: 66627 - protein, 7 aa, synthetic construct
RVIIGSG

SEQ ID NO: 66628 - protein, 7 aa, synthetic construct
TAPQTWS

SEQ ID NO: 66629 - protein, 7 aa, synthetic construct
RLEMHPQ

SEQ ID NO: 66630 - protein, 7 aa, synthetic construct
DPNNKRW

SEQ ID NO: 66631 - protein, 7 aa, synthetic construct
SATIPPT

SEQ ID NO: 66632 - protein, 7 aa, synthetic construct
HAHQQNM

SEQ ID NO: 66633 - protein, 7 aa, synthetic construct
TKNAPNA

SEQ ID NO: 66634 - protein, 7 aa, synthetic construct
DFKLKTE

SEQ ID NO: 66635 - protein, 7 aa, synthetic construct
QVLGLPQ

SEQ ID NO: 66636 - protein, 7 aa, synthetic construct
KRVTYGE

SEQ ID NO: 66637 - protein, 7 aa, synthetic construct
TQQYAPA

SEQ ID NO: 66638 - protein, 7 aa, synthetic construct
SGGGNLM

SEQ ID NO: 66639 - protein, 7 aa, synthetic construct
NQGRGTE

SEQ ID NO: 66640 - protein, 7 aa, synthetic construct
PEFRNDF

SEQ ID NO: 66641 - protein, 7 aa, synthetic construct
NKQIHPD

SEQ ID NO: 66642 - protein, 7 aa, synthetic construct
QAQNYPT

SEQ ID NO: 66643 - protein, 7 aa, synthetic construct
SQHRAPE

SEQ ID NO: 66644 - protein, 7 aa, synthetic construct
MQNSVQK

SEQ ID NO: 66645 - protein, 7 aa, synthetic construct
SPRVIMA

SEQ ID NO: 66646 - protein, 7 aa, synthetic construct
AHSHTTG

SEQ ID NO: 66647 - protein, 7 aa, synthetic construct
RTTPPFG

SEQ ID NO: 66648 - protein, 7 aa, synthetic construct
LRAEEGR

SEQ ID NO: 66649 - protein, 7 aa, synthetic construct
ANVNKAN

SEQ ID NO: 66650 - protein, 7 aa, synthetic construct
TQFQQKF

SEQ ID NO: 66651 - protein, 7 aa, synthetic construct
QFKPHAN

SEQ ID NO: 66652 - protein, 7 aa, synthetic construct
IGGAHRN

SEQ ID NO: 66653 - protein, 7 aa, synthetic construct
MTNQKYA

SEQ ID NO: 66654 - protein, 7 aa, synthetic construct
TSTFNLV

SEQ ID NO: 66655 - protein, 7 aa, synthetic construct
LQKPGVV

SEQ ID NO: 66656 - protein, 7 aa, synthetic construct
GTLTPTK

SEQ ID NO: 66657 - protein, 7 aa, synthetic construct
RADNSFG

SEQ ID NO: 66658 - protein, 7 aa, synthetic construct
HIGSSRN

SEQ ID NO: 66659 - protein, 7 aa, synthetic construct
PPGNLRD

SEQ ID NO: 66660 - protein, 7 aa, synthetic construct
SPQTKSA

SEQ ID NO: 66661 - protein, 7 aa, synthetic construct
TLLKHEG

SEQ ID NO: 66662 - protein, 7 aa, synthetic construct
RGPMPDA

SEQ ID NO: 66663 - protein, 7 aa, synthetic construct
AKVMSAH

SEQ ID NO: 66664 - protein, 7 aa, synthetic construct
QRPNASV

SEQ ID NO: 66665 - protein, 7 aa, synthetic construct
QAFKATT

SEQ ID NO: 66666 - protein, 7 aa, synthetic construct
QKALQNG

SEQ ID NO: 66667 - protein, 7 aa, synthetic construct
TPKIMTQ

SEQ ID NO: 66668 - protein, 7 aa, synthetic construct
RWEQHGS

SEQ ID NO: 66669 - protein, 7 aa, synthetic construct
RMEAKDF

SEQ ID NO: 66670 - protein, 7 aa, synthetic construct
PNNLVGG

SEQ ID NO: 66671 - protein, 7 aa, synthetic construct
NHDGNLR

SEQ ID NO: 66672 - protein, 7 aa, synthetic construct
LRGEGRV

SEQ ID NO: 66673 - protein, 7 aa, synthetic construct
SEATKAA

SEQ ID NO: 66674 - protein, 7 aa, synthetic construct
QEGRANA

SEQ ID NO: 66675 - protein, 7 aa, synthetic construct
KRPNEET

SEQ ID NO: 66676 - protein, 7 aa, synthetic construct
DHTTMSG

SEQ ID NO: 66677 - protein, 7 aa, synthetic construct
GMLGRTN

SEQ ID NO: 66678 - protein, 7 aa, synthetic construct
PNANKAA

SEQ ID NO: 66679 - protein, 7 aa, synthetic construct
SEKDYKT

SEQ ID NO: 66680 - protein, 7 aa, synthetic construct
TFMTGTD

SEQ ID NO: 66681 - protein, 7 aa, synthetic construct
HKAEMGY

SEQ ID NO: 66682 - protein, 7 aa, synthetic construct
AYGAKDG

SEQ ID NO: 66683 - protein, 7 aa, synthetic construct
IKEGWKQ

SEQ ID NO: 66684 - protein, 7 aa, synthetic construct
IKPSTDI

SEQ ID NO: 66685 - protein, 7 aa, synthetic construct
RYTPAQG

SEQ ID NO: 66686 - protein, 7 aa, synthetic construct
SGGIRHP

SEQ ID NO: 66687 - protein, 7 aa, synthetic construct
MGPQMPH

SEQ ID NO: 66688 - protein, 7 aa, synthetic construct
GHPQYKY

SEQ ID NO: 66689 - protein, 7 aa, synthetic construct
LHLQRKD

SEQ ID NO: 66690 - protein, 7 aa, synthetic construct
RVFAVEA

SEQ ID NO: 66691 - protein, 7 aa, synthetic construct
HDRQNYH

SEQ ID NO: 66692 - protein, 7 aa, synthetic construct
APTAIRA

SEQ ID NO: 66693 - protein, 7 aa, synthetic construct
MGVAKSG

SEQ ID NO: 66694 - protein, 7 aa, synthetic construct
TRQVVAP

SEQ ID NO: 66695 - protein, 7 aa, synthetic construct
GFRQPNN

SEQ ID NO: 66696 - protein, 7 aa, synthetic construct
SKTSIAG

SEQ ID NO: 66697 - protein, 7 aa, synthetic construct
QDPRSLK

SEQ ID NO: 66698 - protein, 7 aa, synthetic construct
DKQSTQR

SEQ ID NO: 66699 - protein, 7 aa, synthetic construct
TKPNGNG

SEQ ID NO: 66700 - protein, 7 aa, synthetic construct
SKDRLMG

SEQ ID NO: 66701 - protein, 7 aa, synthetic construct
ANPEVRF

SEQ ID NO: 66702 - protein, 7 aa, synthetic construct
QKTAQAG

SEQ ID NO: 66703 - protein, 7 aa, synthetic construct
RATTGIM

SEQ ID NO: 66704 - protein, 7 aa, synthetic construct
IDTTTKQ

SEQ ID NO: 66705 - protein, 7 aa, synthetic construct
IVHGRDN

SEQ ID NO: 66706 - protein, 7 aa, synthetic construct
KPANQPA

SEQ ID NO: 66707 - protein, 7 aa, synthetic construct
STKPMGG

SEQ ID NO: 66708 - protein, 7 aa, synthetic construct
PVNSTGG

SEQ ID NO: 66709 - protein, 7 aa, synthetic construct
KNNQSQV

SEQ ID NO: 66710 - protein, 7 aa, synthetic construct
VKSIMPD

SEQ ID NO: 66711 - protein, 7 aa, synthetic construct
MERIAQK

SEQ ID NO: 66712 - protein, 7 aa, synthetic construct
TQQGKHV

SEQ ID NO: 66713 - protein, 7 aa, synthetic construct
KTLNSSV

SEQ ID NO: 66714 - protein, 7 aa, synthetic construct
IKGMVSV

SEQ ID NO: 66715 - protein, 7 aa, synthetic construct
DKYAHQG

SEQ ID NO: 66716 - protein, 7 aa, synthetic construct
GNLKTPH

SEQ ID NO: 66717 - protein, 7 aa, synthetic construct
TVNSARG

SEQ ID NO: 66718 - protein, 7 aa, synthetic construct
GPPKQMA

SEQ ID NO: 66719 - protein, 7 aa, synthetic construct
NGRNQVV

SEQ ID NO: 66720 - protein, 7 aa, synthetic construct
TPETKKQ

SEQ ID NO: 66721 - protein, 7 aa, synthetic construct
SQREVPA

SEQ ID NO: 66722 - protein, 7 aa, synthetic construct
TGHMAVL

SEQ ID NO: 66723 - protein, 7 aa, synthetic construct
MNNKNAH

SEQ ID NO: 66724 - protein, 7 aa, synthetic construct
HPPNIGI

SEQ ID NO: 66725 - protein, 7 aa, synthetic construct
DYVRMPP

SEQ ID NO: 66726 - protein, 7 aa, synthetic construct
SRQEMRA

SEQ ID NO: 66727 - protein, 7 aa, synthetic construct
HTPFFKD

SEQ ID NO: 66728 - protein, 7 aa, synthetic construct
FKQTGGA

SEQ ID NO: 66729 - protein, 7 aa, synthetic construct
ARDIMGA

SEQ ID NO: 66730 - protein, 7 aa, synthetic construct
QHVERRA

SEQ ID NO: 66731 - protein, 7 aa, synthetic construct
IGHNKDQ

SEQ ID NO: 66732 - protein, 7 aa, synthetic construct
SEHFIKM

SEQ ID NO: 66733 - protein, 7 aa, synthetic construct
YSNAQKG

SEQ ID NO: 66734 - protein, 7 aa, synthetic construct
FKHSFPE

SEQ ID NO: 66735 - protein, 7 aa, synthetic construct
NRTGNAP

SEQ ID NO: 66736 - protein, 7 aa, synthetic construct
YAASFKD

SEQ ID NO: 66737 - protein, 7 aa, synthetic construct
TKQTHDL

SEQ ID NO: 66738 - protein, 7 aa, synthetic construct
GGQHIAF

SEQ ID NO: 66739 - protein, 7 aa, synthetic construct
VTQEHNA

SEQ ID NO: 66740 - protein, 7 aa, synthetic construct
TRNTSLY

SEQ ID NO: 66741 - protein, 7 aa, synthetic construct
KAHAINQ

SEQ ID NO: 66742 - protein, 7 aa, synthetic construct
IIQQSRE

SEQ ID NO: 66743 - protein, 7 aa, synthetic construct
LAPSKYH

SEQ ID NO: 66744 - protein, 7 aa, synthetic construct
KALIPRP

SEQ ID NO: 66745 - protein, 7 aa, synthetic construct
YETIGKG

SEQ ID NO: 66746 - protein, 7 aa, synthetic construct
GVYDNSR

SEQ ID NO: 66747 - protein, 7 aa, synthetic construct
RQPMQHS

SEQ ID NO: 66748 - protein, 7 aa, synthetic construct
SRYVDVS

SEQ ID NO: 66749 - protein, 7 aa, synthetic construct
PSKVNQA

SEQ ID NO: 66750 - protein, 7 aa, synthetic construct
VRNNHTY

SEQ ID NO: 66751 - protein, 7 aa, synthetic construct
TWRDGVA

SEQ ID NO: 66752 - protein, 7 aa, synthetic construct
TQPNKSQ

SEQ ID NO: 66753 - protein, 7 aa, synthetic construct
MRPHYSS

SEQ ID NO: 66754 - protein, 7 aa, synthetic construct
IHNLTHA

SEQ ID NO: 66755 - protein, 7 aa, synthetic construct
DVNKMIG

SEQ ID NO: 66756 - protein, 7 aa, synthetic construct
LHEIKHN

SEQ ID NO: 66757 - protein, 7 aa, synthetic construct
YAGKTSQ

SEQ ID NO: 66758 - protein, 7 aa, synthetic construct
LNMREIQ

SEQ ID NO: 66759 - protein, 7 aa, synthetic construct
RSFQSQS

SEQ ID NO: 66760 - protein, 7 aa, synthetic construct
VGLGMAD

SEQ ID NO: 66761 - protein, 7 aa, synthetic construct
AVGMGRV

SEQ ID NO: 66762 - protein, 7 aa, synthetic construct
MPNMMHG

SEQ ID NO: 66763 - protein, 7 aa, synthetic construct
ETQNIMR

SEQ ID NO: 66764 - protein, 7 aa, synthetic construct
KRYDAPG

SEQ ID NO: 66765 - protein, 7 aa, synthetic construct
RQTSGVS

SEQ ID NO: 66766 - protein, 7 aa, synthetic construct
GVGKEDR

SEQ ID NO: 66767 - protein, 7 aa, synthetic construct
VPARKEM

SEQ ID NO: 66768 - protein, 7 aa, synthetic construct
NVGKPPV

SEQ ID NO: 66769 - protein, 7 aa, synthetic construct
YDNLSIL

SEQ ID NO: 66770 - protein, 7 aa, synthetic construct
NSKGSNP

SEQ ID NO: 66771 - protein, 7 aa, synthetic construct
VHAVSSR

SEQ ID NO: 66772 - protein, 7 aa, synthetic construct
MRHMPTV

SEQ ID NO: 66773 - protein, 7 aa, synthetic construct
RIIPVEG

SEQ ID NO: 66774 - protein, 7 aa, synthetic construct
AWDVAAK

SEQ ID NO: 66775 - protein, 7 aa, synthetic construct
KMQSTSG

SEQ ID NO: 66776 - protein, 7 aa, synthetic construct
GGKHENT

SEQ ID NO: 66777 - protein, 7 aa, synthetic construct
PSRTNGP

SEQ ID NO: 66778 - protein, 7 aa, synthetic construct
AAGGVSR

SEQ ID NO: 66779 - protein, 7 aa, synthetic construct
KSYSADT

SEQ ID NO: 66780 - protein, 7 aa, synthetic construct
IHETGAM

SEQ ID NO: 66781 - protein, 7 aa, synthetic construct
ITPARDY

SEQ ID NO: 66782 - protein, 7 aa, synthetic construct
QNQGRSD

SEQ ID NO: 66783 - protein, 7 aa, synthetic construct
TKQVVDL

SEQ ID NO: 66784 - protein, 7 aa, synthetic construct
NGATRNP

SEQ ID NO: 66785 - protein, 7 aa, synthetic construct
PSNFKPM

SEQ ID NO: 66786 - protein, 7 aa, synthetic construct
YKIDQVG

SEQ ID NO: 66787 - protein, 7 aa, synthetic construct
KVNAAKD

SEQ ID NO: 66788 - protein, 7 aa, synthetic construct
YSRNDHQ

SEQ ID NO: 66789 - protein, 7 aa, synthetic construct
ITNFNTG

SEQ ID NO: 66790 - protein, 7 aa, synthetic construct
VLHKDDF

SEQ ID NO: 66791 - protein, 7 aa, synthetic construct
NMKNNQP

SEQ ID NO: 66792 - protein, 7 aa, synthetic construct
QQKNTTA

SEQ ID NO: 66793 - protein, 7 aa, synthetic construct
DAKVKQM

SEQ ID NO: 66794 - protein, 7 aa, synthetic construct
IPGKYTI

SEQ ID NO: 66795 - protein, 7 aa, synthetic construct
GMPTVKM

SEQ ID NO: 66796 - protein, 7 aa, synthetic construct
LYRATVG

SEQ ID NO: 66797 - protein, 7 aa, synthetic construct
DNAIHKN

SEQ ID NO: 66798 - protein, 7 aa, synthetic construct
RAEWQKQ

SEQ ID NO: 66799 - protein, 7 aa, synthetic construct
QVQNQNS

SEQ ID NO: 66800 - protein, 7 aa, synthetic construct
VVGKPIA

SEQ ID NO: 66801 - protein, 7 aa, synthetic construct
QEQKTVK

SEQ ID NO: 66802 - protein, 7 aa, synthetic construct
PSPPSSM

SEQ ID NO: 66803 - protein, 7 aa, synthetic construct
GYHPLAP

SEQ ID NO: 66804 - protein, 7 aa, synthetic construct
EDMRTQR

SEQ ID NO: 66805 - protein, 7 aa, synthetic construct
TNPKASA

SEQ ID NO: 66806 - protein, 7 aa, synthetic construct
YTGKSQA

SEQ ID NO: 66807 - protein, 7 aa, synthetic construct
GTKSPIT

SEQ ID NO: 66808 - protein, 7 aa, synthetic construct
GKDKSNP

SEQ ID NO: 66809 - protein, 7 aa, synthetic construct
ASMEHRK

SEQ ID NO: 66810 - protein, 7 aa, synthetic construct
YTATIRT

SEQ ID NO: 66811 - protein, 7 aa, synthetic construct
TKMAIVD

SEQ ID NO: 66812 - protein, 7 aa, synthetic construct
IIASSTS

SEQ ID NO: 66813 - protein, 7 aa, synthetic construct
TALQIVS

SEQ ID NO: 66814 - protein, 7 aa, synthetic construct
VGKQMKE

SEQ ID NO: 66815 - protein, 7 aa, synthetic construct
VHGHIKG

SEQ ID NO: 66816 - protein, 7 aa, synthetic construct
EPYKKDF

SEQ ID NO: 66817 - protein, 7 aa, synthetic construct
TKPGWQS

SEQ ID NO: 66818 - protein, 7 aa, synthetic construct
ITPGHTG

SEQ ID NO: 66819 - protein, 7 aa, synthetic construct
HKHQEHQ

SEQ ID NO: 66820 - protein, 7 aa, synthetic construct
VNRSNNA

SEQ ID NO: 66821 - protein, 7 aa, synthetic construct
LNQAGTG

SEQ ID NO: 66822 - protein, 7 aa, synthetic construct
IAAPSHM

SEQ ID NO: 66823 - protein, 7 aa, synthetic construct
ALAPQLS

SEQ ID NO: 66824 - protein, 7 aa, synthetic construct
YAHSQSK

SEQ ID NO: 66825 - protein, 7 aa, synthetic construct
AFEGRAM

SEQ ID NO: 66826 - protein, 7 aa, synthetic construct
HTLPVNS

SEQ ID NO: 66827 - protein, 7 aa, synthetic construct
LGGGASG

SEQ ID NO: 66828 - protein, 7 aa, synthetic construct
KSNNENS

SEQ ID NO: 66829 - protein, 7 aa, synthetic construct
NRPPGQA

SEQ ID NO: 66830 - protein, 7 aa, synthetic construct
AKIQVPH

SEQ ID NO: 66831 - protein, 7 aa, synthetic construct
DHHRPHF

SEQ ID NO: 66832 - protein, 7 aa, synthetic construct
GRAVHDG

SEQ ID NO: 66833 - protein, 7 aa, synthetic construct
DKQNNSA

SEQ ID NO: 66834 - protein, 7 aa, synthetic construct
KSPNNYG

SEQ ID NO: 66835 - protein, 7 aa, synthetic construct
VERHLKE

SEQ ID NO: 66836 - protein, 7 aa, synthetic construct
PQTDTRG

SEQ ID NO: 66837 - protein, 7 aa, synthetic construct
QLVAGNA

SEQ ID NO: 66838 - protein, 7 aa, synthetic construct
HHGEGGI

SEQ ID NO: 66839 - protein, 7 aa, synthetic construct
VGTMPAS

SEQ ID NO: 66840 - protein, 7 aa, synthetic construct
TKGNSGG

SEQ ID NO: 66841 - protein, 7 aa, synthetic construct
KATGVSF

SEQ ID NO: 66842 - protein, 7 aa, synthetic construct
AQRGTVA

SEQ ID NO: 66843 - protein, 7 aa, synthetic construct
SHTAAAV

SEQ ID NO: 66844 - protein, 7 aa, synthetic construct
HIVMSQG

SEQ ID NO: 66845 - protein, 7 aa, synthetic construct
KQMGEMS

SEQ ID NO: 66846 - protein, 7 aa, synthetic construct
QQSKNMP

SEQ ID NO: 66847 - protein, 7 aa, synthetic construct
LTRQTFG

SEQ ID NO: 66848 - protein, 7 aa, synthetic construct
NNHLNLV

SEQ ID NO: 66849 - protein, 7 aa, synthetic construct
GMKTGGQ

SEQ ID NO: 66850 - protein, 7 aa, synthetic construct
GQKQSSA

SEQ ID NO: 66851 - protein, 7 aa, synthetic construct
GNPSQFV

SEQ ID NO: 66852 - protein, 7 aa, synthetic construct
IDKAHSI

SEQ ID NO: 66853 - protein, 7 aa, synthetic construct
VMTSPSG

SEQ ID NO: 66854 - protein, 7 aa, synthetic construct
YTKPNQG

SEQ ID NO: 66855 - protein, 7 aa, synthetic construct
KQSSQVG

SEQ ID NO: 66856 - protein, 7 aa, synthetic construct
RPTGAND

SEQ ID NO: 66857 - protein, 7 aa, synthetic construct
MSQKVSA

SEQ ID NO: 66858 - protein, 7 aa, synthetic construct
TDRHMAQ

SEQ ID NO: 66859 - protein, 7 aa, synthetic construct
NHPATYA

SEQ ID NO: 66860 - protein, 7 aa, synthetic construct
MIDHKYQ

SEQ ID NO: 66861 - protein, 7 aa, synthetic construct
QHYHSAA

SEQ ID NO: 66862 - protein, 7 aa, synthetic construct
DANFSRM

SEQ ID NO: 66863 - protein, 7 aa, synthetic construct
TSYDRAG

SEQ ID NO: 66864 - protein, 7 aa, synthetic construct
NKNNGEM

SEQ ID NO: 66865 - protein, 7 aa, synthetic construct
QAKSQNG

SEQ ID NO: 66866 - protein, 7 aa, synthetic construct
LANFRAP

SEQ ID NO: 66867 - protein, 7 aa, synthetic construct
DQSLKRA

SEQ ID NO: 66868 - protein, 7 aa, synthetic construct
GAKTNSA

SEQ ID NO: 66869 - protein, 7 aa, synthetic construct
STSETRF

SEQ ID NO: 66870 - protein, 7 aa, synthetic construct
VKSGNQS

SEQ ID NO: 66871 - protein, 7 aa, synthetic construct
HHKAYPQ

SEQ ID NO: 66872 - protein, 7 aa, synthetic construct
MPGKTFA

SEQ ID NO: 66873 - protein, 7 aa, synthetic construct
SNKSANS

SEQ ID NO: 66874 - protein, 7 aa, synthetic construct
THIASVG

SEQ ID NO: 66875 - protein, 7 aa, synthetic construct
NANRSDA

SEQ ID NO: 66876 - protein, 7 aa, synthetic construct
IDDGTRR

SEQ ID NO: 66877 - protein, 7 aa, synthetic construct
KNAMQAM

SEQ ID NO: 66878 - protein, 7 aa, synthetic construct
IQKSTKD

SEQ ID NO: 66879 - protein, 7 aa, synthetic construct
VYKHGGP

SEQ ID NO: 66880 - protein, 7 aa, synthetic construct
PKNQYMG

SEQ ID NO: 66881 - protein, 7 aa, synthetic construct
SKAKGDP

SEQ ID NO: 66882 - protein, 7 aa, synthetic construct
IGNNQVR

SEQ ID NO: 66883 - protein, 7 aa, synthetic construct
IREVKHH

SEQ ID NO: 66884 - protein, 7 aa, synthetic construct
KDPAKIN

SEQ ID NO: 66885 - protein, 7 aa, synthetic construct
QNREVMV

SEQ ID NO: 66886 - protein, 7 aa, synthetic construct
ATFKPPQ

SEQ ID NO: 66887 - protein, 7 aa, synthetic construct
LSQPFPA

SEQ ID NO: 66888 - protein, 7 aa, synthetic construct
KALEPTD

SEQ ID NO: 66889 - protein, 7 aa, synthetic construct
KGTPQTG

SEQ ID NO: 66890 - protein, 7 aa, synthetic construct
KEHLHYI

SEQ ID NO: 66891 - protein, 7 aa, synthetic construct
MANNTKA

SEQ ID NO: 66892 - protein, 7 aa, synthetic construct
HVQKAMG

SEQ ID NO: 66893 - protein, 7 aa, synthetic construct
NHRLTEP

SEQ ID NO: 66894 - protein, 7 aa, synthetic construct
ASASHNG

SEQ ID NO: 66895 - protein, 7 aa, synthetic construct
TAGKKTE

SEQ ID NO: 66896 - protein, 7 aa, synthetic construct
QRYNSEV

SEQ ID NO: 66897 - protein, 7 aa, synthetic construct
KTAHTLN

SEQ ID NO: 66898 - protein, 7 aa, synthetic construct
TGGNKQA

SEQ ID NO: 66899 - protein, 7 aa, synthetic construct
RPKDYDA

SEQ ID NO: 66900 - protein, 7 aa, synthetic construct
SVHMLAS

SEQ ID NO: 66901 - protein, 7 aa, synthetic construct
TGQFKTN

SEQ ID NO: 66902 - protein, 7 aa, synthetic construct
TAKIQTP

SEQ ID NO: 66903 - protein, 7 aa, synthetic construct
RSVFQEA

SEQ ID NO: 66904 - protein, 7 aa, synthetic construct
PFQGQHI

SEQ ID NO: 66905 - protein, 7 aa, synthetic construct
EARPRPQ

SEQ ID NO: 66906 - protein, 7 aa, synthetic construct
NQKTGQG

SEQ ID NO: 66907 - protein, 7 aa, synthetic construct
VVPRHGM

SEQ ID NO: 66908 - protein, 7 aa, synthetic construct
PSKMQAP

SEQ ID NO: 66909 - protein, 7 aa, synthetic construct
HATRDQG

SEQ ID NO: 66910 - protein, 7 aa, synthetic construct
MTTSAKP

SEQ ID NO: 66911 - protein, 7 aa, synthetic construct
SDKRFID

SEQ ID NO: 66912 - protein, 7 aa, synthetic construct
KTTSVKD

SEQ ID NO: 66913 - protein, 7 aa, synthetic construct
QAQQKLF

SEQ ID NO: 66914 - protein, 7 aa, synthetic construct
ELGRDIK

SEQ ID NO: 66915 - protein, 7 aa, synthetic construct
KSNPNPM

SEQ ID NO: 66916 - protein, 7 aa, synthetic construct
SRTTANP

SEQ ID NO: 66917 - protein, 7 aa, synthetic construct
EVGRQTA

SEQ ID NO: 66918 - protein, 7 aa, synthetic construct
QLDHYAA

SEQ ID NO: 66919 - protein, 7 aa, synthetic construct
KQTQDRD

SEQ ID NO: 66920 - protein, 7 aa, synthetic construct
TATTEYT

SEQ ID NO: 66921 - protein, 7 aa, synthetic construct
QQSKNIP

SEQ ID NO: 66922 - protein, 7 aa, synthetic construct
QNIGRVI

SEQ ID NO: 66923 - protein, 7 aa, synthetic construct
ERGHLAP

SEQ ID NO: 66924 - protein, 7 aa, synthetic construct
RTAHNEQ

SEQ ID NO: 66925 - protein, 7 aa, synthetic construct
YEMKVSP

SEQ ID NO: 66926 - protein, 7 aa, synthetic construct
AIMGNTG

SEQ ID NO: 66927 - protein, 7 aa, synthetic construct
YKNHAHY

SEQ ID NO: 66928 - protein, 7 aa, synthetic construct
YPARGQT

SEQ ID NO: 66929 - protein, 7 aa, synthetic construct
LTTANVK

SEQ ID NO: 66930 - protein, 7 aa, synthetic construct
ISRQNQQ

SEQ ID NO: 66931 - protein, 7 aa, synthetic construct
TINPSQG

SEQ ID NO: 66932 - protein, 7 aa, synthetic construct
WGKNQDS

SEQ ID NO: 66933 - protein, 7 aa, synthetic construct
PWPQKVG

SEQ ID NO: 66934 - protein, 7 aa, synthetic construct
AMQGSKS

SEQ ID NO: 66935 - protein, 7 aa, synthetic construct
RDNRGDF

SEQ ID NO: 66936 - protein, 7 aa, synthetic construct
QFLQVDA

SEQ ID NO: 66937 - protein, 7 aa, synthetic construct
IQKSKEL

SEQ ID NO: 66938 - protein, 7 aa, synthetic construct
DQVAHKW

SEQ ID NO: 66939 - protein, 7 aa, synthetic construct
NMQQPGG

SEQ ID NO: 66940 - protein, 7 aa, synthetic construct
TTKNAMG

SEQ ID NO: 66941 - protein, 7 aa, synthetic construct
SSMHQLS

SEQ ID NO: 66942 - protein, 7 aa, synthetic construct
TTKISMG

SEQ ID NO: 66943 - protein, 7 aa, synthetic construct
TTGTMTP

SEQ ID NO: 66944 - protein, 7 aa, synthetic construct
DAKDRQT

SEQ ID NO: 66945 - protein, 7 aa, synthetic construct
MAVGKTS

SEQ ID NO: 66946 - protein, 7 aa, synthetic construct
REGYNYV

SEQ ID NO: 66947 - protein, 7 aa, synthetic construct
YSGKSTP

SEQ ID NO: 66948 - protein, 7 aa, synthetic construct
YKPEVHN

SEQ ID NO: 66949 - protein, 7 aa, synthetic construct
WSQSLSA

SEQ ID NO: 66950 - protein, 7 aa, synthetic construct
DRSNTVQ

SEQ ID NO: 66951 - protein, 7 aa, synthetic construct
HKSGIYH

SEQ ID NO: 66952 - protein, 7 aa, synthetic construct
NTYTLKQ

SEQ ID NO: 66953 - protein, 7 aa, synthetic construct
KTNQGGA

SEQ ID NO: 66954 - protein, 7 aa, synthetic construct
DWKKRGE

SEQ ID NO: 66955 - protein, 7 aa, synthetic construct
DREPVRY

SEQ ID NO: 66956 - protein, 7 aa, synthetic construct
TDNKKQY

SEQ ID NO: 66957 - protein, 7 aa, synthetic construct
ARQKEFT

SEQ ID NO: 66958 - protein, 7 aa, synthetic construct
VEGRTEK

SEQ ID NO: 66959 - protein, 7 aa, synthetic construct
KSMTNSA

SEQ ID NO: 66960 - protein, 7 aa, synthetic construct
MNKSSTI

SEQ ID NO: 66961 - protein, 7 aa, synthetic construct
AWAATSE

SEQ ID NO: 66962 - protein, 7 aa, synthetic construct
YGNKNQV

SEQ ID NO: 66963 - protein, 7 aa, synthetic construct
FKNDGNR

SEQ ID NO: 66964 - protein, 7 aa, synthetic construct
MTPQSHF

SEQ ID NO: 66965 - protein, 7 aa, synthetic construct
NMSRPER

SEQ ID NO: 66966 - protein, 7 aa, synthetic construct
MKPSVQT

SEQ ID NO: 66967 - protein, 7 aa, synthetic construct
KKNQGDL

SEQ ID NO: 66968 - protein, 7 aa, synthetic construct
NRDKATA

SEQ ID NO: 66969 - protein, 7 aa, synthetic construct
QNVRGQV

SEQ ID NO: 66970 - protein, 7 aa, synthetic construct
ARPSVSA

SEQ ID NO: 66971 - protein, 7 aa, synthetic construct
AQTTKWD

SEQ ID NO: 66972 - protein, 7 aa, synthetic construct
SIKAHTM

SEQ ID NO: 66973 - protein, 7 aa, synthetic construct
WDKTILT

SEQ ID NO: 66974 - protein, 7 aa, synthetic construct
MDKASVY

SEQ ID NO: 66975 - protein, 7 aa, synthetic construct
EGPYIQS

SEQ ID NO: 66976 - protein, 7 aa, synthetic construct
HRLSTPD

SEQ ID NO: 66977 - protein, 7 aa, synthetic construct
IQKSYPN

SEQ ID NO: 66978 - protein, 7 aa, synthetic construct
MAHINHK

SEQ ID NO: 66979 - protein, 7 aa, synthetic construct
VKAEKEA

SEQ ID NO: 66980 - protein, 7 aa, synthetic construct
KYNQEHR

SEQ ID NO: 66981 - protein, 7 aa, synthetic construct
WTGERHT

SEQ ID NO: 66982 - protein, 7 aa, synthetic construct
QLRGSEG

SEQ ID NO: 66983 - protein, 7 aa, synthetic construct
QKSTTDV

SEQ ID NO: 66984 - protein, 7 aa, synthetic construct
KAHREPP

SEQ ID NO: 66985 - protein, 7 aa, synthetic construct
PAKHMLH

SEQ ID NO: 66986 - protein, 7 aa, synthetic construct
YKAEKSQ

SEQ ID NO: 66987 - protein, 7 aa, synthetic construct
SLSSVHE

SEQ ID NO: 66988 - protein, 7 aa, synthetic construct
QATGHNP

SEQ ID NO: 66989 - protein, 7 aa, synthetic construct
VYKLPAT

SEQ ID NO: 66990 - protein, 7 aa, synthetic construct
RQIESTN

SEQ ID NO: 66991 - protein, 7 aa, synthetic construct
HQGPVYG

SEQ ID NO: 66992 - protein, 7 aa, synthetic construct
QAMFSNG

SEQ ID NO: 66993 - protein, 7 aa, synthetic construct
YKHAYED

SEQ ID NO: 66994 - protein, 7 aa, synthetic construct
QGASLNG

SEQ ID NO: 66995 - protein, 7 aa, synthetic construct
RPQFFEG

SEQ ID NO: 66996 - protein, 7 aa, synthetic construct
IGNKIVQ

SEQ ID NO: 66997 - protein, 7 aa, synthetic construct
PFKATSY

SEQ ID NO: 66998 - protein, 7 aa, synthetic construct
GGDWGHA

SEQ ID NO: 66999 - protein, 7 aa, synthetic construct
RMDLHNN

SEQ ID NO: 67000 - protein, 7 aa, synthetic construct
IRKAFIE

SEQ ID NO: 67001 - protein, 7 aa, synthetic construct
HEARGNT

SEQ ID NO: 67002 - protein, 7 aa, synthetic construct
RAPTTSG

SEQ ID NO: 67003 - protein, 7 aa, synthetic construct
NMHFMRE

SEQ ID NO: 67004 - protein, 7 aa, synthetic construct
IGAIHQY

SEQ ID NO: 67005 - protein, 7 aa, synthetic construct
GNYMSKG

SEQ ID NO: 67006 - protein, 7 aa, synthetic construct
ASRPNND

SEQ ID NO: 67007 - protein, 7 aa, synthetic construct
HMQSSQG

SEQ ID NO: 67008 - protein, 7 aa, synthetic construct
TKANANG

SEQ ID NO: 67009 - protein, 7 aa, synthetic construct
KQMNSVG

SEQ ID NO: 67010 - protein, 7 aa, synthetic construct
SRHIISA

SEQ ID NO: 67011 - protein, 7 aa, synthetic construct
REDKLKS

SEQ ID NO: 67012 - protein, 7 aa, synthetic construct
QKAELGM

SEQ ID NO: 67013 - protein, 7 aa, synthetic construct
PNRSGLP

SEQ ID NO: 67014 - protein, 7 aa, synthetic construct
QKQTGAG

SEQ ID NO: 67015 - protein, 7 aa, synthetic construct
ARQSNQP

SEQ ID NO: 67016 - protein, 7 aa, synthetic construct
VRPSGTH

SEQ ID NO: 67017 - protein, 7 aa, synthetic construct
TANKSSG

SEQ ID NO: 67018 - protein, 7 aa, synthetic construct
MLIHSKG

SEQ ID NO: 67019 - protein, 7 aa, synthetic construct
LTHKPYP

SEQ ID NO: 67020 - protein, 7 aa, synthetic construct
VTIDTHV

SEQ ID NO: 67021 - protein, 7 aa, synthetic construct
SPTQKTG

SEQ ID NO: 67022 - protein, 7 aa, synthetic construct
ARYKMEP

SEQ ID NO: 67023 - protein, 7 aa, synthetic construct
RGIKDAL

SEQ ID NO: 67024 - protein, 7 aa, synthetic construct
INSFIST

SEQ ID NO: 67025 - protein, 7 aa, synthetic construct
EHYKLNN

SEQ ID NO: 67026 - protein, 7 aa, synthetic construct
LLHMNRN

SEQ ID NO: 67027 - protein, 7 aa, synthetic construct
VYKQGDI

SEQ ID NO: 67028 - protein, 7 aa, synthetic construct
KNDSRMF

SEQ ID NO: 67029 - protein, 7 aa, synthetic construct
SKTNQLS

SEQ ID NO: 67030 - protein, 7 aa, synthetic construct
SFKSEPY

SEQ ID NO: 67031 - protein, 7 aa, synthetic construct
PIGATKS

SEQ ID NO: 67032 - protein, 7 aa, synthetic construct
IRMKDTE

SEQ ID NO: 67033 - protein, 7 aa, synthetic construct
IYNAEQN

SEQ ID NO: 67034 - protein, 7 aa, synthetic construct
TSVKVHV

SEQ ID NO: 67035 - protein, 7 aa, synthetic construct
PRDMMHS

SEQ ID NO: 67036 - protein, 7 aa, synthetic construct
LMKNGAT

SEQ ID NO: 67037 - protein, 7 aa, synthetic construct
QTGRMVD

SEQ ID NO: 67038 - protein, 7 aa, synthetic construct
RDKQTQM

SEQ ID NO: 67039 - protein, 7 aa, synthetic construct
MSDHRER

SEQ ID NO: 67040 - protein, 7 aa, synthetic construct
NNSMFGP

SEQ ID NO: 67041 - protein, 7 aa, synthetic construct
KRESTMG

SEQ ID NO: 67042 - protein, 7 aa, synthetic construct
DQTRASR

SEQ ID NO: 67043 - protein, 7 aa, synthetic construct
FARGEHD

SEQ ID NO: 67044 - protein, 7 aa, synthetic construct
SMSTAPR

SEQ ID NO: 67045 - protein, 7 aa, synthetic construct
FDKHEQR

SEQ ID NO: 67046 - protein, 7 aa, synthetic construct
MRPSVQG

SEQ ID NO: 67047 - protein, 7 aa, synthetic construct
KNNATQP

SEQ ID NO: 67048 - protein, 7 aa, synthetic construct
VPIDRER

SEQ ID NO: 67049 - protein, 7 aa, synthetic construct
RMHHEIG

SEQ ID NO: 67050 - protein, 7 aa, synthetic construct
RFEVGQN

SEQ ID NO: 67051 - protein, 7 aa, synthetic construct
ALQVSAH

SEQ ID NO: 67052 - protein, 7 aa, synthetic construct
DQAQRGL

SEQ ID NO: 67053 - protein, 7 aa, synthetic construct
MDRQERT

SEQ ID NO: 67054 - protein, 7 aa, synthetic construct
RQSTSAI

SEQ ID NO: 67055 - protein, 7 aa, synthetic construct
APSVANT

SEQ ID NO: 67056 - protein, 7 aa, synthetic construct
LPYNQAP

SEQ ID NO: 67057 - protein, 7 aa, synthetic construct
AMHGPNS

SEQ ID NO: 67058 - protein, 7 aa, synthetic construct
WKLHDDQ

SEQ ID NO: 67059 - protein, 7 aa, synthetic construct
YPPNKNA

SEQ ID NO: 67060 - protein, 7 aa, synthetic construct
RPTAQQA

SEQ ID NO: 67061 - protein, 7 aa, synthetic construct
AAYGGKD

SEQ ID NO: 67062 - protein, 7 aa, synthetic construct
MIQHMKN

SEQ ID NO: 67063 - protein, 7 aa, synthetic construct
QYNESER

SEQ ID NO: 67064 - protein, 7 aa, synthetic construct
NMGRPGA

SEQ ID NO: 67065 - protein, 7 aa, synthetic construct
FLHHDNK

SEQ ID NO: 67066 - protein, 7 aa, synthetic construct
GNFSGVH

SEQ ID NO: 67067 - protein, 7 aa, synthetic construct
YGGTKGW

SEQ ID NO: 67068 - protein, 7 aa, synthetic construct
ASMKPHT

SEQ ID NO: 67069 - protein, 7 aa, synthetic construct
KTAPQPI

SEQ ID NO: 67070 - protein, 7 aa, synthetic construct
VRGGEAI

SEQ ID NO: 67071 - protein, 7 aa, synthetic construct
GHSMVKN

SEQ ID NO: 67072 - protein, 7 aa, synthetic construct
PAGVHVL

SEQ ID NO: 67073 - protein, 7 aa, synthetic construct
DHPKRME

SEQ ID NO: 67074 - protein, 7 aa, synthetic construct
ASSHKML

SEQ ID NO: 67075 - protein, 7 aa, synthetic construct
QGVSYLK

SEQ ID NO: 67076 - protein, 7 aa, synthetic construct
GESKNYG

SEQ ID NO: 67077 - protein, 7 aa, synthetic construct
QQGSMSI

SEQ ID NO: 67078 - protein, 7 aa, synthetic construct
TMLRRDE

SEQ ID NO: 67079 - protein, 7 aa, synthetic construct
KGVANNV

SEQ ID NO: 67080 - protein, 7 aa, synthetic construct
VFARDHM

SEQ ID NO: 67081 - protein, 7 aa, synthetic construct
LNSIQPA

SEQ ID NO: 67082 - protein, 7 aa, synthetic construct
PYAGMGK

SEQ ID NO: 67083 - protein, 7 aa, synthetic construct
QENSQKG

SEQ ID NO: 67084 - protein, 7 aa, synthetic construct
SRTFVQG

SEQ ID NO: 67085 - protein, 7 aa, synthetic construct
TGKGNNG

SEQ ID NO: 67086 - protein, 7 aa, synthetic construct
PHGQQRD

SEQ ID NO: 67087 - protein, 7 aa, synthetic construct
SPNPPPV

SEQ ID NO: 67088 - protein, 7 aa, synthetic construct
VAAKPTY

SEQ ID NO: 67089 - protein, 7 aa, synthetic construct
DIKRSDD

SEQ ID NO: 67090 - protein, 7 aa, synthetic construct
VMGQQSF

SEQ ID NO: 67091 - protein, 7 aa, synthetic construct
KSMSVMP

SEQ ID NO: 67092 - protein, 7 aa, synthetic construct
YAIEQKH

SEQ ID NO: 67093 - protein, 7 aa, synthetic construct
TKNPVQG

SEQ ID NO: 67094 - protein, 7 aa, synthetic construct
MRAPRQE

SEQ ID NO: 67095 - protein, 7 aa, synthetic construct
VTPSGAH

SEQ ID NO: 67096 - protein, 7 aa, synthetic construct
ISQIGPQ

SEQ ID NO: 67097 - protein, 7 aa, synthetic construct
KDFRHND

SEQ ID NO: 67098 - protein, 7 aa, synthetic construct
MGFGPQA

SEQ ID NO: 67099 - protein, 7 aa, synthetic construct
TYMHPQA

SEQ ID NO: 67100 - protein, 7 aa, synthetic construct
GRMNLIA

SEQ ID NO: 67101 - protein, 7 aa, synthetic construct
KTTQANP

SEQ ID NO: 67102 - protein, 7 aa, synthetic construct
NVYRNDA

SEQ ID NO: 67103 - protein, 7 aa, synthetic construct
MDKTKTG

SEQ ID NO: 67104 - protein, 7 aa, synthetic construct
AQRNVTH

SEQ ID NO: 67105 - protein, 7 aa, synthetic construct
KKTDVRE

SEQ ID NO: 67106 - protein, 7 aa, synthetic construct
NNLKQAH

SEQ ID NO: 67107 - protein, 7 aa, synthetic construct
QDMNGRR

SEQ ID NO: 67108 - protein, 7 aa, synthetic construct
VKDRNQA

SEQ ID NO: 67109 - protein, 7 aa, synthetic construct
PHPNTFG

SEQ ID NO: 67110 - protein, 7 aa, synthetic construct
AYKISTN

SEQ ID NO: 67111 - protein, 7 aa, synthetic construct
GNSRTNV

SEQ ID NO: 67112 - protein, 7 aa, synthetic construct
YKGDKDN

SEQ ID NO: 67113 - protein, 7 aa, synthetic construct
QGRMKDD

SEQ ID NO: 67114 - protein, 7 aa, synthetic construct
TVRKSED

SEQ ID NO: 67115 - protein, 7 aa, synthetic construct
AGPSQSA

SEQ ID NO: 67116 - protein, 7 aa, synthetic construct
VTVKHLP

SEQ ID NO: 67117 - protein, 7 aa, synthetic construct
RTATGKD

SEQ ID NO: 67118 - protein, 7 aa, synthetic construct
GKAHTGG

SEQ ID NO: 67119 - protein, 7 aa, synthetic construct
LTMGEKS

SEQ ID NO: 67120 - protein, 7 aa, synthetic construct
YWGAEDG

SEQ ID NO: 67121 - protein, 7 aa, synthetic construct
NYERRTE

SEQ ID NO: 67122 - protein, 7 aa, synthetic construct
KSGFNTY

SEQ ID NO: 67123 - protein, 7 aa, synthetic construct
VKQVGIM

SEQ ID NO: 67124 - protein, 7 aa, synthetic construct
SFKATME

SEQ ID NO: 67125 - protein, 7 aa, synthetic construct
GMKQTGG

SEQ ID NO: 67126 - protein, 7 aa, synthetic construct
FHGQGNQ

SEQ ID NO: 67127 - protein, 7 aa, synthetic construct
EDKKVFR

SEQ ID NO: 67128 - protein, 7 aa, synthetic construct
QETRPIL

SEQ ID NO: 67129 - protein, 7 aa, synthetic construct
KSNEGIT

SEQ ID NO: 67130 - protein, 7 aa, synthetic construct
KTFGLSE

SEQ ID NO: 67131 - protein, 7 aa, synthetic construct
WDKLSDM

SEQ ID NO: 67132 - protein, 7 aa, synthetic construct
QHPSNPR

SEQ ID NO: 67133 - protein, 7 aa, synthetic construct
TITKMDE

SEQ ID NO: 67134 - protein, 7 aa, synthetic construct
RFTEQVA

SEQ ID NO: 67135 - protein, 7 aa, synthetic construct
KFREIPN

SEQ ID NO: 67136 - protein, 7 aa, synthetic construct
KNTANMD

SEQ ID NO: 67137 - protein, 7 aa, synthetic construct
SNKGQTA

SEQ ID NO: 67138 - protein, 7 aa, synthetic construct
KDQYGLI

SEQ ID NO: 67139 - protein, 7 aa, synthetic construct
IKVNANY

SEQ ID NO: 67140 - protein, 7 aa, synthetic construct
ADISRNI

SEQ ID NO: 67141 - protein, 7 aa, synthetic construct
SEKTPKP

SEQ ID NO: 67142 - protein, 7 aa, synthetic construct
NAGKSFQ

SEQ ID NO: 67143 - protein, 7 aa, synthetic construct
YVVGRTD

SEQ ID NO: 67144 - protein, 7 aa, synthetic construct
RHAVAPS

SEQ ID NO: 67145 - protein, 7 aa, synthetic construct
QDDFKKQ

SEQ ID NO: 67146 - protein, 7 aa, synthetic construct
ILKVGGY

SEQ ID NO: 67147 - protein, 7 aa, synthetic construct
TKAGNMG

SEQ ID NO: 67148 - protein, 7 aa, synthetic construct
FGANTTM

SEQ ID NO: 67149 - protein, 7 aa, synthetic construct
RTEQGSG

SEQ ID NO: 67150 - protein, 7 aa, synthetic construct
ASFGSSL

SEQ ID NO: 67151 - protein, 7 aa, synthetic construct
DPRRMVT

SEQ ID NO: 67152 - protein, 7 aa, synthetic construct
NAQNSPI

SEQ ID NO: 67153 - protein, 7 aa, synthetic construct
NENNTKK

SEQ ID NO: 67154 - protein, 7 aa, synthetic construct
NVFQANP

SEQ ID NO: 67155 - protein, 7 aa, synthetic construct
NKPSAGM

SEQ ID NO: 67156 - protein, 7 aa, synthetic construct
VPSKQSV

SEQ ID NO: 67157 - protein, 7 aa, synthetic construct
SGNTKSA

SEQ ID NO: 67158 - protein, 7 aa, synthetic construct
HIKTLTS

SEQ ID NO: 67159 - protein, 7 aa, synthetic construct
FQQKSMP

SEQ ID NO: 67160 - protein, 7 aa, synthetic construct
GYANAGY

SEQ ID NO: 67161 - protein, 7 aa, synthetic construct
FPPNLTS

SEQ ID NO: 67162 - protein, 7 aa, synthetic construct
FKRDLGN

SEQ ID NO: 67163 - protein, 7 aa, synthetic construct
PVTSKGG

SEQ ID NO: 67164 - protein, 7 aa, synthetic construct
DKQNTRG

SEQ ID NO: 67165 - protein, 7 aa, synthetic construct
YTGAREP

SEQ ID NO: 67166 - protein, 7 aa, synthetic construct
HQTNMSR

SEQ ID NO: 67167 - protein, 7 aa, synthetic construct
YTPELKS

SEQ ID NO: 67168 - protein, 7 aa, synthetic construct
QPQPLAG

SEQ ID NO: 67169 - protein, 7 aa, synthetic construct
KQSITNG

SEQ ID NO: 67170 - protein, 7 aa, synthetic construct
HNDVFKS

SEQ ID NO: 67171 - protein, 7 aa, synthetic construct
RQEWSSD

SEQ ID NO: 67172 - protein, 7 aa, synthetic construct
GGGKKEP

SEQ ID NO: 67173 - protein, 7 aa, synthetic construct
GLRFTTP

SEQ ID NO: 67174 - protein, 7 aa, synthetic construct
TKNGQTS

SEQ ID NO: 67175 - protein, 7 aa, synthetic construct
ATLRHSI

SEQ ID NO: 67176 - protein, 7 aa, synthetic construct
QGTKNSG

SEQ ID NO: 67177 - protein, 7 aa, synthetic construct
SAYINEG

SEQ ID NO: 67178 - protein, 7 aa, synthetic construct
KAPMLHE

SEQ ID NO: 67179 - protein, 7 aa, synthetic construct
GTNNKQP

SEQ ID NO: 67180 - protein, 7 aa, synthetic construct
QEKYADG

SEQ ID NO: 67181 - protein, 7 aa, synthetic construct
VMKFAQD

SEQ ID NO: 67182 - protein, 7 aa, synthetic construct
PGKTNMA

SEQ ID NO: 67183 - protein, 7 aa, synthetic construct
NTPPHVV

SEQ ID NO: 67184 - protein, 7 aa, synthetic construct
KLPGIST

SEQ ID NO: 67185 - protein, 7 aa, synthetic construct
IAHHMSS

SEQ ID NO: 67186 - protein, 7 aa, synthetic construct
TPHMAMS

SEQ ID NO: 67187 - protein, 7 aa, synthetic construct
NHYKVEV

SEQ ID NO: 67188 - protein, 7 aa, synthetic construct
KYDGRGQ

SEQ ID NO: 67189 - protein, 7 aa, synthetic construct
FGSTKQA

SEQ ID NO: 67190 - protein, 7 aa, synthetic construct
VRQPTEQ

SEQ ID NO: 67191 - protein, 7 aa, synthetic construct
GVPRNMD

SEQ ID NO: 67192 - protein, 7 aa, synthetic construct
GRTEGFM

SEQ ID NO: 67193 - protein, 7 aa, synthetic construct
KHMEMGS

SEQ ID NO: 67194 - protein, 7 aa, synthetic construct
NFPSAQM

SEQ ID NO: 67195 - protein, 7 aa, synthetic construct
FQNPRHS

SEQ ID NO: 67196 - protein, 7 aa, synthetic construct
PFNLPNE

SEQ ID NO: 67197 - protein, 7 aa, synthetic construct
NIAHGNE

SEQ ID NO: 67198 - protein, 7 aa, synthetic construct
AERINHT

SEQ ID NO: 67199 - protein, 7 aa, synthetic construct
WNGTRNV

SEQ ID NO: 67200 - protein, 7 aa, synthetic construct
SQRAKVD

SEQ ID NO: 67201 - protein, 7 aa, synthetic construct
GYTKGVE

SEQ ID NO: 67202 - protein, 7 aa, synthetic construct
IGNVIAL

SEQ ID NO: 67203 - protein, 7 aa, synthetic construct
SDQIKYP

SEQ ID NO: 67204 - protein, 7 aa, synthetic construct
NKQGSTM

SEQ ID NO: 67205 - protein, 7 aa, synthetic construct
KQGVDPQ

SEQ ID NO: 67206 - protein, 7 aa, synthetic construct
QTTARRD

SEQ ID NO: 67207 - protein, 7 aa, synthetic construct
SAKHSPE

SEQ ID NO: 67208 - protein, 7 aa, synthetic construct
GKTQAQG

SEQ ID NO: 67209 - protein, 7 aa, synthetic construct
GQKGSTA

SEQ ID NO: 67210 - protein, 7 aa, synthetic construct
APHMNQM

SEQ ID NO: 67211 - protein, 7 aa, synthetic construct
VSQIQTK

SEQ ID NO: 67212 - protein, 7 aa, synthetic construct
SLSNQRL

SEQ ID NO: 67213 - protein, 7 aa, synthetic construct
PHGATTG

SEQ ID NO: 67214 - protein, 7 aa, synthetic construct
GMNNSKA

SEQ ID NO: 67215 - protein, 7 aa, synthetic construct
SVPGSAL

SEQ ID NO: 67216 - protein, 7 aa, synthetic construct
MERIMQA

SEQ ID NO: 67217 - protein, 7 aa, synthetic construct
VHNKGFP

SEQ ID NO: 67218 - protein, 7 aa, synthetic construct
FIEKQQN

SEQ ID NO: 67219 - protein, 7 aa, synthetic construct
WEKWHNA

SEQ ID NO: 67220 - protein, 7 aa, synthetic construct
MPSPRLT

SEQ ID NO: 67221 - protein, 7 aa, synthetic construct
LFGGIHD

SEQ ID NO: 67222 - protein, 7 aa, synthetic construct
GRSTTAV

SEQ ID NO: 67223 - protein, 7 aa, synthetic construct
QPVTGRG

SEQ ID NO: 67224 - protein, 7 aa, synthetic construct
SSSVQVV

SEQ ID NO: 67225 - protein, 7 aa, synthetic construct
RPDKTSP

SEQ ID NO: 67226 - protein, 7 aa, synthetic construct
HSKLNSS

SEQ ID NO: 67227 - protein, 7 aa, synthetic construct
KTNAAMA

SEQ ID NO: 67228 - protein, 7 aa, synthetic construct
PKHANIT

SEQ ID NO: 67229 - protein, 7 aa, synthetic construct
IKFSPSN

SEQ ID NO: 67230 - protein, 7 aa, synthetic construct
GTLLKAP

SEQ ID NO: 67231 - protein, 7 aa, synthetic construct
EAHLHHG

SEQ ID NO: 67232 - protein, 7 aa, synthetic construct
YAKPSTS

SEQ ID NO: 67233 - protein, 7 aa, synthetic construct
GEWTTTG

SEQ ID NO: 67234 - protein, 7 aa, synthetic construct
KESQNMW

SEQ ID NO: 67235 - protein, 7 aa, synthetic construct
TSKVTQH

SEQ ID NO: 67236 - protein, 7 aa, synthetic construct
TNAKSTN

SEQ ID NO: 67237 - protein, 7 aa, synthetic construct
PNNSPHM

SEQ ID NO: 67238 - protein, 7 aa, synthetic construct
YHNDKGY

SEQ ID NO: 67239 - protein, 7 aa, synthetic construct
NMKGQQS

SEQ ID NO: 67240 - protein, 7 aa, synthetic construct
KLQLGAP

SEQ ID NO: 67241 - protein, 7 aa, synthetic construct
LPDRDRV

SEQ ID NO: 67242 - protein, 7 aa, synthetic construct
YKSGTGA

SEQ ID NO: 67243 - protein, 7 aa, synthetic construct
TKSTMAM

SEQ ID NO: 67244 - protein, 7 aa, synthetic construct
NSGKATA

SEQ ID NO: 67245 - protein, 7 aa, synthetic construct
VEKFAVP

SEQ ID NO: 67246 - protein, 7 aa, synthetic construct
AFTNQGH

SEQ ID NO: 67247 - protein, 7 aa, synthetic construct
KTSSSVN

SEQ ID NO: 67248 - protein, 7 aa, synthetic construct
TKGFLDN

SEQ ID NO: 67249 - protein, 7 aa, synthetic construct
GYGKQFT

SEQ ID NO: 67250 - protein, 7 aa, synthetic construct
AFSAQVH

SEQ ID NO: 67251 - protein, 7 aa, synthetic construct
ARVGIIN

SEQ ID NO: 67252 - protein, 7 aa, synthetic construct
YEAWASG

SEQ ID NO: 67253 - protein, 7 aa, synthetic construct
NGMLSMG

SEQ ID NO: 67254 - protein, 7 aa, synthetic construct
PRPQAGN

SEQ ID NO: 67255 - protein, 7 aa, synthetic construct
RSGPVQP

SEQ ID NO: 67256 - protein, 7 aa, synthetic construct
MPGLRIG

SEQ ID NO: 67257 - protein, 7 aa, synthetic construct
LKHVDNA

SEQ ID NO: 67258 - protein, 7 aa, synthetic construct
MGISSHS

SEQ ID NO: 67259 - protein, 7 aa, synthetic construct
MKNVSTG

SEQ ID NO: 67260 - protein, 7 aa, synthetic construct
MKNGVHM

SEQ ID NO: 67261 - protein, 7 aa, synthetic construct
LEKLNGT

SEQ ID NO: 67262 - protein, 7 aa, synthetic construct
SKLGLSV

SEQ ID NO: 67263 - protein, 7 aa, synthetic construct
QMKDFQM

SEQ ID NO: 67264 - protein, 7 aa, synthetic construct
NFDKTRY

SEQ ID NO: 67265 - protein, 7 aa, synthetic construct
NKSTGNA

SEQ ID NO: 67266 - protein, 7 aa, synthetic construct
FRNSDAI

SEQ ID NO: 67267 - protein, 7 aa, synthetic construct
MVTRNLG

SEQ ID NO: 67268 - protein, 7 aa, synthetic construct
PMREVLS

SEQ ID NO: 67269 - protein, 7 aa, synthetic construct
HIKNQDS

SEQ ID NO: 67270 - protein, 7 aa, synthetic construct
AILRSPP

SEQ ID NO: 67271 - protein, 7 aa, synthetic construct
GKTGGFG

SEQ ID NO: 67272 - protein, 7 aa, synthetic construct
RYVSKDD

SEQ ID NO: 67273 - protein, 7 aa, synthetic construct
GLQITAG

SEQ ID NO: 67274 - protein, 7 aa, synthetic construct
DNHFRVG

SEQ ID NO: 67275 - protein, 7 aa, synthetic construct
SVTKYPM

SEQ ID NO: 67276 - protein, 7 aa, synthetic construct
NLLHGDR

SEQ ID NO: 67277 - protein, 7 aa, synthetic construct
WARHETA

SEQ ID NO: 67278 - protein, 7 aa, synthetic construct
YGSMQPN

SEQ ID NO: 67279 - protein, 7 aa, synthetic construct
QSTPGIR

SEQ ID NO: 67280 - protein, 7 aa, synthetic construct
AYKSSDN

SEQ ID NO: 67281 - protein, 7 aa, synthetic construct
MDKKGGT

SEQ ID NO: 67282 - protein, 7 aa, synthetic construct
KYLGEER

SEQ ID NO: 67283 - protein, 7 aa, synthetic construct
ALGVALN

SEQ ID NO: 67284 - protein, 7 aa, synthetic construct
AKGSPIE

SEQ ID NO: 67285 - protein, 7 aa, synthetic construct
NRVSSNS

SEQ ID NO: 67286 - protein, 7 aa, synthetic construct
QMKQPGS

SEQ ID NO: 67287 - protein, 7 aa, synthetic construct
NNAMARL

SEQ ID NO: 67288 - protein, 7 aa, synthetic construct
DVFNHKM

SEQ ID NO: 67289 - protein, 7 aa, synthetic construct
PWKIQEN

SEQ ID NO: 67290 - protein, 7 aa, synthetic construct
SRNVNSQ

SEQ ID NO: 67291 - protein, 7 aa, synthetic construct
FHLKMSA

SEQ ID NO: 67292 - protein, 7 aa, synthetic construct
KGSNIGW

SEQ ID NO: 67293 - protein, 7 aa, synthetic construct
YNANPVI

SEQ ID NO: 67294 - protein, 7 aa, synthetic construct
QFGHNEK

SEQ ID NO: 67295 - protein, 7 aa, synthetic construct
YIKDTYT

SEQ ID NO: 67296 - protein, 7 aa, synthetic construct
MNNSKQT

SEQ ID NO: 67297 - protein, 7 aa, synthetic construct
MDKFGER

SEQ ID NO: 67298 - protein, 7 aa, synthetic construct
GPQGRMV

SEQ ID NO: 67299 - protein, 7 aa, synthetic construct
MDRLKDI

SEQ ID NO: 67300 - protein, 7 aa, synthetic construct
SHHVSPA

SEQ ID NO: 67301 - protein, 7 aa, synthetic construct
IDTTYRH

SEQ ID NO: 67302 - protein, 7 aa, synthetic construct
FKDFTRH

SEQ ID NO: 67303 - protein, 7 aa, synthetic construct
MYERPPA

SEQ ID NO: 67304 - protein, 7 aa, synthetic construct
SNQRGTP

SEQ ID NO: 67305 - protein, 7 aa, synthetic construct
QNIKKES

SEQ ID NO: 67306 - protein, 7 aa, synthetic construct
QPGGGGM

SEQ ID NO: 67307 - protein, 7 aa, synthetic construct
LKNSGTA

SEQ ID NO: 67308 - protein, 7 aa, synthetic construct
KNATPIM

SEQ ID NO: 67309 - protein, 7 aa, synthetic construct
GLTHAVS

SEQ ID NO: 67310 - protein, 7 aa, synthetic construct
WRGTDRS

SEQ ID NO: 67311 - protein, 7 aa, synthetic construct
YKDSGKN

SEQ ID NO: 67312 - protein, 7 aa, synthetic construct
RSTGDEI

SEQ ID NO: 67313 - protein, 7 aa, synthetic construct
RKEISQA

SEQ ID NO: 67314 - protein, 7 aa, synthetic construct
TDLKTLN

SEQ ID NO: 67315 - protein, 7 aa, synthetic construct
KPQFATG

SEQ ID NO: 67316 - protein, 7 aa, synthetic construct
HFNQNTK

SEQ ID NO: 67317 - protein, 7 aa, synthetic construct
SPRVDSR

SEQ ID NO: 67318 - protein, 7 aa, synthetic construct
KLMDNGP

SEQ ID NO: 67319 - protein, 7 aa, synthetic construct
IHHKMPN

SEQ ID NO: 67320 - protein, 7 aa, synthetic construct
HGAVQQI

SEQ ID NO: 67321 - protein, 7 aa, synthetic construct
MGVHNEA

SEQ ID NO: 67322 - protein, 7 aa, synthetic construct
REGGVVL

SEQ ID NO: 67323 - protein, 7 aa, synthetic construct
PSTTNTH

SEQ ID NO: 67324 - protein, 7 aa, synthetic construct
NGSFIKH

SEQ ID NO: 67325 - protein, 7 aa, synthetic construct
WGQLQQP

SEQ ID NO: 67326 - protein, 7 aa, synthetic construct
NVLSGLQ

SEQ ID NO: 67327 - protein, 7 aa, synthetic construct
RSATAGA

SEQ ID NO: 67328 - protein, 7 aa, synthetic construct
NPHHDQY

SEQ ID NO: 67329 - protein, 7 aa, synthetic construct
PGKRETP

SEQ ID NO: 67330 - protein, 7 aa, synthetic construct
AAPPQKM

SEQ ID NO: 67331 - protein, 7 aa, synthetic construct
QHQLNRT

SEQ ID NO: 67332 - protein, 7 aa, synthetic construct
YDGNRVM

SEQ ID NO: 67333 - protein, 7 aa, synthetic construct
ALTALKG

SEQ ID NO: 67334 - protein, 7 aa, synthetic construct
KLAAEAY

SEQ ID NO: 67335 - protein, 7 aa, synthetic construct
VARMNPG

SEQ ID NO: 67336 - protein, 7 aa, synthetic construct
APTATTS

SEQ ID NO: 67337 - protein, 7 aa, synthetic construct
KKAESQP

SEQ ID NO: 67338 - protein, 7 aa, synthetic construct
HRDLVAA

SEQ ID NO: 67339 - protein, 7 aa, synthetic construct
GRMDHDH

SEQ ID NO: 67340 - protein, 7 aa, synthetic construct
KAGAFSD

SEQ ID NO: 67341 - protein, 7 aa, synthetic construct
YTTFTHE

SEQ ID NO: 67342 - protein, 7 aa, synthetic construct
LKLSVQE

SEQ ID NO: 67343 - protein, 7 aa, synthetic construct
NKSNQKE

SEQ ID NO: 67344 - protein, 7 aa, synthetic construct
SQRGAVA

SEQ ID NO: 67345 - protein, 7 aa, synthetic construct
NYEKQYI

SEQ ID NO: 67346 - protein, 7 aa, synthetic construct
LERQGTS

SEQ ID NO: 67347 - protein, 7 aa, synthetic construct
ETAARNP

SEQ ID NO: 67348 - protein, 7 aa, synthetic construct
MMKPEYN

SEQ ID NO: 67349 - protein, 7 aa, synthetic construct
RDTKASA

SEQ ID NO: 67350 - protein, 7 aa, synthetic construct
PDMDLTK

SEQ ID NO: 67351 - protein, 7 aa, synthetic construct
RNEQRMQ

SEQ ID NO: 67352 - protein, 7 aa, synthetic construct
LTRPNAP

SEQ ID NO: 67353 - protein, 7 aa, synthetic construct
LSKATDQ

SEQ ID NO: 67354 - protein, 7 aa, synthetic construct
QVRSDDH

SEQ ID NO: 67355 - protein, 7 aa, synthetic construct
NNYAHGG

SEQ ID NO: 67356 - protein, 7 aa, synthetic construct
FLDVHIP

SEQ ID NO: 67357 - protein, 7 aa, synthetic construct
LSQGNVR

SEQ ID NO: 67358 - protein, 7 aa, synthetic construct
DRKQNMG

SEQ ID NO: 67359 - protein, 7 aa, synthetic construct
IESYQRG

SEQ ID NO: 67360 - protein, 7 aa, synthetic construct
KTTHTQA

SEQ ID NO: 67361 - protein, 7 aa, synthetic construct
FFPREAE

SEQ ID NO: 67362 - protein, 7 aa, synthetic construct
KKSGVDE

SEQ ID NO: 67363 - protein, 7 aa, synthetic construct
LAPSNVN

SEQ ID NO: 67364 - protein, 7 aa, synthetic construct
KHYDGSV

SEQ ID NO: 67365 - protein, 7 aa, synthetic construct
MGSMGAL

SEQ ID NO: 67366 - protein, 7 aa, synthetic construct
KQHYPLG

SEQ ID NO: 67367 - protein, 7 aa, synthetic construct
IRNNVFA

SEQ ID NO: 67368 - protein, 7 aa, synthetic construct
YRLQQEP

SEQ ID NO: 67369 - protein, 7 aa, synthetic construct
TENAYKK

SEQ ID NO: 67370 - protein, 7 aa, synthetic construct
RNHLETH

SEQ ID NO: 67371 - protein, 7 aa, synthetic construct
RAVAGLT

SEQ ID NO: 67372 - protein, 7 aa, synthetic construct
KNIHPIG

SEQ ID NO: 67373 - protein, 7 aa, synthetic construct
PFKFDSG

SEQ ID NO: 67374 - protein, 7 aa, synthetic construct
FRGDTRD

SEQ ID NO: 67375 - protein, 7 aa, synthetic construct
NQHTMNV

SEQ ID NO: 67376 - protein, 7 aa, synthetic construct
KVRTAEA

SEQ ID NO: 67377 - protein, 7 aa, synthetic construct
YSKFADG

SEQ ID NO: 67378 - protein, 7 aa, synthetic construct
RNSQASG

SEQ ID NO: 67379 - protein, 7 aa, synthetic construct
RGRDDSA

SEQ ID NO: 67380 - protein, 7 aa, synthetic construct
DKTQMNW

SEQ ID NO: 67381 - protein, 7 aa, synthetic construct
MKQNMQG

SEQ ID NO: 67382 - protein, 7 aa, synthetic construct
VAKHAGP

SEQ ID NO: 67383 - protein, 7 aa, synthetic construct
SFKDQRP

SEQ ID NO: 67384 - protein, 7 aa, synthetic construct
MMGGPNA

SEQ ID NO: 67385 - protein, 7 aa, synthetic construct
KQQAQAN

SEQ ID NO: 67386 - protein, 7 aa, synthetic construct
NSNVKGG

SEQ ID NO: 67387 - protein, 7 aa, synthetic construct
THLAVVP

SEQ ID NO: 67388 - protein, 7 aa, synthetic construct
YTGSQGS

SEQ ID NO: 67389 - protein, 7 aa, synthetic construct
RPKTPDV

SEQ ID NO: 67390 - protein, 7 aa, synthetic construct
VDQFTSK

SEQ ID NO: 67391 - protein, 7 aa, synthetic construct
ITSSSLA

SEQ ID NO: 67392 - protein, 7 aa, synthetic construct
GVSRNVG

SEQ ID NO: 67393 - protein, 7 aa, synthetic construct
RMQSSPV

SEQ ID NO: 67394 - protein, 7 aa, synthetic construct
ETRQASH

SEQ ID NO: 67395 - protein, 7 aa, synthetic construct
NMGFTGV

SEQ ID NO: 67396 - protein, 7 aa, synthetic construct
SQKASQY

SEQ ID NO: 67397 - protein, 7 aa, synthetic construct
MELAKTH

SEQ ID NO: 67398 - protein, 7 aa, synthetic construct
PVQRQDS

SEQ ID NO: 67399 - protein, 7 aa, synthetic construct
LLKEQGR

SEQ ID NO: 67400 - protein, 7 aa, synthetic construct
SPGRSIY

SEQ ID NO: 67401 - protein, 7 aa, synthetic construct
PQNHGES

SEQ ID NO: 67402 - protein, 7 aa, synthetic construct
VIERKLP

SEQ ID NO: 67403 - protein, 7 aa, synthetic construct
EPQRERP

SEQ ID NO: 67404 - protein, 7 aa, synthetic construct
GQPKKDG

SEQ ID NO: 67405 - protein, 7 aa, synthetic construct
PAMKALI

SEQ ID NO: 67406 - protein, 7 aa, synthetic construct
TKPGAVG

SEQ ID NO: 67407 - protein, 7 aa, synthetic construct
AREYGVA

SEQ ID NO: 67408 - protein, 7 aa, synthetic construct
LLNHAKN

SEQ ID NO: 67409 - protein, 7 aa, synthetic construct
TEIAKPA

SEQ ID NO: 67410 - protein, 7 aa, synthetic construct
KVAGASG

SEQ ID NO: 67411 - protein, 7 aa, synthetic construct
EIKPLVS

SEQ ID NO: 67412 - protein, 7 aa, synthetic construct
YTNHVFA

SEQ ID NO: 67413 - protein, 7 aa, synthetic construct
NRQSVQG

SEQ ID NO: 67414 - protein, 7 aa, synthetic construct
KFGYHAD

SEQ ID NO: 67415 - protein, 7 aa, synthetic construct
QYNGQIL

SEQ ID NO: 67416 - protein, 7 aa, synthetic construct
PEPRMMP

SEQ ID NO: 67417 - protein, 7 aa, synthetic construct
GHHEKTG

SEQ ID NO: 67418 - protein, 7 aa, synthetic construct
QTKPQTG

SEQ ID NO: 67419 - protein, 7 aa, synthetic construct
RADQRNG

SEQ ID NO: 67420 - protein, 7 aa, synthetic construct
PYAGVQI

SEQ ID NO: 67421 - protein, 7 aa, synthetic construct
SQHDRYG

SEQ ID NO: 67422 - protein, 7 aa, synthetic construct
EIKARDR

SEQ ID NO: 67423 - protein, 7 aa, synthetic construct
KMKHNEN

SEQ ID NO: 67424 - protein, 7 aa, synthetic construct
RIHGSDW

SEQ ID NO: 67425 - protein, 7 aa, synthetic construct
DPFMKNH

SEQ ID NO: 67426 - protein, 7 aa, synthetic construct
KPNNTNP

SEQ ID NO: 67427 - protein, 7 aa, synthetic construct
NSGLSSH

SEQ ID NO: 67428 - protein, 7 aa, synthetic construct
GSKTTSG

SEQ ID NO: 67429 - protein, 7 aa, synthetic construct
FINAKSQ

SEQ ID NO: 67430 - protein, 7 aa, synthetic construct
ASLKING

SEQ ID NO: 67431 - protein, 7 aa, synthetic construct
QIKAPGL

SEQ ID NO: 67432 - protein, 7 aa, synthetic construct
TKKDASI

SEQ ID NO: 67433 - protein, 7 aa, synthetic construct
MNPKGTP

SEQ ID NO: 67434 - protein, 7 aa, synthetic construct
IASNSAT

SEQ ID NO: 67435 - protein, 7 aa, synthetic construct
FKKVDTP

SEQ ID NO: 67436 - protein, 7 aa, synthetic construct
MIRIESE

SEQ ID NO: 67437 - protein, 7 aa, synthetic construct
KRFEGGV

SEQ ID NO: 67438 - protein, 7 aa, synthetic construct
WAAPSEQ

SEQ ID NO: 67439 - protein, 7 aa, synthetic construct
KGNTGLS

SEQ ID NO: 67440 - protein, 7 aa, synthetic construct
VATASGR

SEQ ID NO: 67441 - protein, 7 aa, synthetic construct
PENSYQK

SEQ ID NO: 67442 - protein, 7 aa, synthetic construct
TSQGKFA

SEQ ID NO: 67443 - protein, 7 aa, synthetic construct
VTYGTEG

SEQ ID NO: 67444 - protein, 7 aa, synthetic construct
RYGPSEI

SEQ ID NO: 67445 - protein, 7 aa, synthetic construct
PRDVPGW

SEQ ID NO: 67446 - protein, 7 aa, synthetic construct
IPGMTVD

SEQ ID NO: 67447 - protein, 7 aa, synthetic construct
LQRSSFQ

SEQ ID NO: 67448 - protein, 7 aa, synthetic construct
YQRGGHE

SEQ ID NO: 67449 - protein, 7 aa, synthetic construct
RAVTGAA

SEQ ID NO: 67450 - protein, 7 aa, synthetic construct
RRDNVDA

SEQ ID NO: 67451 - protein, 7 aa, synthetic construct
YPRNTET

SEQ ID NO: 67452 - protein, 7 aa, synthetic construct
TKMGVPA

SEQ ID NO: 67453 - protein, 7 aa, synthetic construct
ITQMRTS

SEQ ID NO: 67454 - protein, 7 aa, synthetic construct
FHANVLG

SEQ ID NO: 67455 - protein, 7 aa, synthetic construct
KDFRTGN

SEQ ID NO: 67456 - protein, 7 aa, synthetic construct
ISMKTHV

SEQ ID NO: 67457 - protein, 7 aa, synthetic construct
NFSIVAG

SEQ ID NO: 67458 - protein, 7 aa, synthetic construct
FREQGPT

SEQ ID NO: 67459 - protein, 7 aa, synthetic construct
MVRQNPN

SEQ ID NO: 67460 - protein, 7 aa, synthetic construct
SPTNNNK

SEQ ID NO: 67461 - protein, 7 aa, synthetic construct
QNSSTFG

SEQ ID NO: 67462 - protein, 7 aa, synthetic construct
KMKIAEM

SEQ ID NO: 67463 - protein, 7 aa, synthetic construct
NPPRADD

SEQ ID NO: 67464 - protein, 7 aa, synthetic construct
KRDPSQS

SEQ ID NO: 67465 - protein, 7 aa, synthetic construct
RAHDEPW

SEQ ID NO: 67466 - protein, 7 aa, synthetic construct
RTVASSH

SEQ ID NO: 67467 - protein, 7 aa, synthetic construct
KKMGQDA

SEQ ID NO: 67468 - protein, 7 aa, synthetic construct
GSGIANQ

SEQ ID NO: 67469 - protein, 7 aa, synthetic construct
YQKGTYA

SEQ ID NO: 67470 - protein, 7 aa, synthetic construct
NAEKGRV

SEQ ID NO: 67471 - protein, 7 aa, synthetic construct
NERTQQF

SEQ ID NO: 67472 - protein, 7 aa, synthetic construct
TNPNGKG

SEQ ID NO: 67473 - protein, 7 aa, synthetic construct
LKIGDNH

SEQ ID NO: 67474 - protein, 7 aa, synthetic construct
KGMQQDN

SEQ ID NO: 67475 - protein, 7 aa, synthetic construct
GKLPTPS

SEQ ID NO: 67476 - protein, 7 aa, synthetic construct
SHVKVEI

SEQ ID NO: 67477 - protein, 7 aa, synthetic construct
DMRKGYL

SEQ ID NO: 67478 - protein, 7 aa, synthetic construct
QPRGTFH

SEQ ID NO: 67479 - protein, 7 aa, synthetic construct
TATMHVI

SEQ ID NO: 67480 - protein, 7 aa, synthetic construct
KRDGAVG

SEQ ID NO: 67481 - protein, 7 aa, synthetic construct
RVMNTPM

SEQ ID NO: 67482 - protein, 7 aa, synthetic construct
MSKHPFV

SEQ ID NO: 67483 - protein, 7 aa, synthetic construct
AKSNMYD

SEQ ID NO: 67484 - protein, 7 aa, synthetic construct
SQPQRLL

SEQ ID NO: 67485 - protein, 7 aa, synthetic construct
RTPSDKA

SEQ ID NO: 67486 - protein, 7 aa, synthetic construct
NSTLKMV

SEQ ID NO: 67487 - protein, 7 aa, synthetic construct
VYNAAGM

SEQ ID NO: 67488 - protein, 7 aa, synthetic construct
DINRPAL

SEQ ID NO: 67489 - protein, 7 aa, synthetic construct
LQKKVYD

SEQ ID NO: 67490 - protein, 7 aa, synthetic construct
LKGFDGG

SEQ ID NO: 67491 - protein, 7 aa, synthetic construct
RGNLSMN

SEQ ID NO: 67492 - protein, 7 aa, synthetic construct
TIPHWPD

SEQ ID NO: 67493 - protein, 7 aa, synthetic construct
LKNEDIR

SEQ ID NO: 67494 - protein, 7 aa, synthetic construct
YDGGPKL

SEQ ID NO: 67495 - protein, 7 aa, synthetic construct
PVRQTAE

SEQ ID NO: 67496 - protein, 7 aa, synthetic construct
AAPHKYS

SEQ ID NO: 67497 - protein, 7 aa, synthetic construct
MYAHGRT

SEQ ID NO: 67498 - protein, 7 aa, synthetic construct
YVNHPLV

SEQ ID NO: 67499 - protein, 7 aa, synthetic construct
WKDRTLA

SEQ ID NO: 67500 - protein, 7 aa, synthetic construct
DRIRTQS

SEQ ID NO: 67501 - protein, 7 aa, synthetic construct
DGDRAVK

SEQ ID NO: 67502 - protein, 7 aa, synthetic construct
KQRTNDA

SEQ ID NO: 67503 - protein, 7 aa, synthetic construct
NNRTAQA

SEQ ID NO: 67504 - protein, 7 aa, synthetic construct
VPNNERR

SEQ ID NO: 67505 - protein, 7 aa, synthetic construct
DRQKYQD

SEQ ID NO: 67506 - protein, 7 aa, synthetic construct
KAQSIPF

SEQ ID NO: 67507 - protein, 7 aa, synthetic construct
GARPEMA

SEQ ID NO: 67508 - protein, 7 aa, synthetic construct
QHWGKGD

SEQ ID NO: 67509 - protein, 7 aa, synthetic construct
SWGVKNN

SEQ ID NO: 67510 - protein, 7 aa, synthetic construct
LDQKKSI

SEQ ID NO: 67511 - protein, 7 aa, synthetic construct
TGYSPTG

SEQ ID NO: 67512 - protein, 7 aa, synthetic construct
DSGFPRG

SEQ ID NO: 67513 - protein, 7 aa, synthetic construct
VRGQEAM

SEQ ID NO: 67514 - protein, 7 aa, synthetic construct
QPPAMGH

SEQ ID NO: 67515 - protein, 7 aa, synthetic construct
ETKYIKQ

SEQ ID NO: 67516 - protein, 7 aa, synthetic construct
KPSNIPS

SEQ ID NO: 67517 - protein, 7 aa, synthetic construct
GPGRIPT

SEQ ID NO: 67518 - protein, 7 aa, synthetic construct
QRTGVSA

SEQ ID NO: 67519 - protein, 7 aa, synthetic construct
PMFPKND

SEQ ID NO: 67520 - protein, 7 aa, synthetic construct
THTTDRR

SEQ ID NO: 67521 - protein, 7 aa, synthetic construct
NTPQRDI

SEQ ID NO: 67522 - protein, 7 aa, synthetic construct
THQATSY

SEQ ID NO: 67523 - protein, 7 aa, synthetic construct
KQGNTPA

SEQ ID NO: 67524 - protein, 7 aa, synthetic construct
QPRPMGA

SEQ ID NO: 67525 - protein, 7 aa, synthetic construct
KTNMGRE

SEQ ID NO: 67526 - protein, 7 aa, synthetic construct
NRTPAGA

SEQ ID NO: 67527 - protein, 7 aa, synthetic construct
GKQTWEV

SEQ ID NO: 67528 - protein, 7 aa, synthetic construct
QGYVMSD

SEQ ID NO: 67529 - protein, 7 aa, synthetic construct
KHQDLGL

SEQ ID NO: 67530 - protein, 7 aa, synthetic construct
MSTISGP

SEQ ID NO: 67531 - protein, 7 aa, synthetic construct
MDYGEKT

SEQ ID NO: 67532 - protein, 7 aa, synthetic construct
RVTPNHE

SEQ ID NO: 67533 - protein, 7 aa, synthetic construct
GVQYENL

SEQ ID NO: 67534 - protein, 7 aa, synthetic construct
FHPPFKD

SEQ ID NO: 67535 - protein, 7 aa, synthetic construct
SRKNDMD

SEQ ID NO: 67536 - protein, 7 aa, synthetic construct
FSSSGKG

SEQ ID NO: 67537 - protein, 7 aa, synthetic construct
YAPQDRQ

SEQ ID NO: 67538 - protein, 7 aa, synthetic construct
AHAKMNA

SEQ ID NO: 67539 - protein, 7 aa, synthetic construct
RPNQGFG

SEQ ID NO: 67540 - protein, 7 aa, synthetic construct
HIHEHHV

SEQ ID NO: 67541 - protein, 7 aa, synthetic construct
NGITNLG

SEQ ID NO: 67542 - protein, 7 aa, synthetic construct
VRMKQPE

SEQ ID NO: 67543 - protein, 7 aa, synthetic construct
SWVGKAP

SEQ ID NO: 67544 - protein, 7 aa, synthetic construct
EIKTPFA

SEQ ID NO: 67545 - protein, 7 aa, synthetic construct
KDGKNSA

SEQ ID NO: 67546 - protein, 7 aa, synthetic construct
TPPQGQF

SEQ ID NO: 67547 - protein, 7 aa, synthetic construct
WDQAQRG

SEQ ID NO: 67548 - protein, 7 aa, synthetic construct
DNPPTRV

SEQ ID NO: 67549 - protein, 7 aa, synthetic construct
VYQGLPQ

SEQ ID NO: 67550 - protein, 7 aa, synthetic construct
LVKEARS

SEQ ID NO: 67551 - protein, 7 aa, synthetic construct
KFTPHVP

SEQ ID NO: 67552 - protein, 7 aa, synthetic construct
GNAYRLE

SEQ ID NO: 67553 - protein, 7 aa, synthetic construct
RASVQQP

SEQ ID NO: 67554 - protein, 7 aa, synthetic construct
GFPTVEK

SEQ ID NO: 67555 - protein, 7 aa, synthetic construct
VPRIADP

SEQ ID NO: 67556 - protein, 7 aa, synthetic construct
SKPQSMA

SEQ ID NO: 67557 - protein, 7 aa, synthetic construct
FQKGAQA

SEQ ID NO: 67558 - protein, 7 aa, synthetic construct
QHRTPDA

SEQ ID NO: 67559 - protein, 7 aa, synthetic construct
MPKGIQL

SEQ ID NO: 67560 - protein, 7 aa, synthetic construct
IQNGGNK

SEQ ID NO: 67561 - protein, 7 aa, synthetic construct
KGMPIHS

SEQ ID NO: 67562 - protein, 7 aa, synthetic construct
SKHNEQA

SEQ ID NO: 67563 - protein, 7 aa, synthetic construct
PNNSKDA

SEQ ID NO: 67564 - protein, 7 aa, synthetic construct
SNKTGAG

SEQ ID NO: 67565 - protein, 7 aa, synthetic construct
YNTKTTM

SEQ ID NO: 67566 - protein, 7 aa, synthetic construct
GFQADKP

SEQ ID NO: 67567 - protein, 7 aa, synthetic construct
NGPGQTR

SEQ ID NO: 67568 - protein, 7 aa, synthetic construct
NSKAQNA

SEQ ID NO: 67569 - protein, 7 aa, synthetic construct
RMYQISE

SEQ ID NO: 67570 - protein, 7 aa, synthetic construct
GQFVTFE

SEQ ID NO: 67571 - protein, 7 aa, synthetic construct
FTRGLDQ

SEQ ID NO: 67572 - protein, 7 aa, synthetic construct
YDKGMVG

SEQ ID NO: 67573 - protein, 7 aa, synthetic construct
VKKSDSQ

SEQ ID NO: 67574 - protein, 7 aa, synthetic construct
DPGPKMG

SEQ ID NO: 67575 - protein, 7 aa, synthetic construct
SGMSPYG

SEQ ID NO: 67576 - protein, 7 aa, synthetic construct
FHSATDV

SEQ ID NO: 67577 - protein, 7 aa, synthetic construct
EGGRWKD

SEQ ID NO: 67578 - protein, 7 aa, synthetic construct
SKSSGQF

SEQ ID NO: 67579 - protein, 7 aa, synthetic construct
QFHPAVM

SEQ ID NO: 67580 - protein, 7 aa, synthetic construct
WIHSNHA

SEQ ID NO: 67581 - protein, 7 aa, synthetic construct
YGTASTY

SEQ ID NO: 67582 - protein, 7 aa, synthetic construct
FTRGIPD

SEQ ID NO: 67583 - protein, 7 aa, synthetic construct
PHTSLPK

SEQ ID NO: 67584 - protein, 7 aa, synthetic construct
KQPGVGA

SEQ ID NO: 67585 - protein, 7 aa, synthetic construct
KTANTQP

SEQ ID NO: 67586 - protein, 7 aa, synthetic construct
TKRNLEP

SEQ ID NO: 67587 - protein, 7 aa, synthetic construct
RPNSHET

SEQ ID NO: 67588 - protein, 7 aa, synthetic construct
WMPTTAG

SEQ ID NO: 67589 - protein, 7 aa, synthetic construct
VTEKFGT

SEQ ID NO: 67590 - protein, 7 aa, synthetic construct
HVPSKVA

SEQ ID NO: 67591 - protein, 7 aa, synthetic construct
ISLSSQF

SEQ ID NO: 67592 - protein, 7 aa, synthetic construct
GKQVIHE

SEQ ID NO: 67593 - protein, 7 aa, synthetic construct
SLIGLGT

SEQ ID NO: 67594 - protein, 7 aa, synthetic construct
TMKGAVG

SEQ ID NO: 67595 - protein, 7 aa, synthetic construct
EVKRLSS

SEQ ID NO: 67596 - protein, 7 aa, synthetic construct
NYNKSLD

SEQ ID NO: 67597 - protein, 7 aa, synthetic construct
VQKTNQG

SEQ ID NO: 67598 - protein, 7 aa, synthetic construct
GVPQQKV

SEQ ID NO: 67599 - protein, 7 aa, synthetic construct
KGMNSTA

SEQ ID NO: 67600 - protein, 7 aa, synthetic construct
FSAKANP

SEQ ID NO: 67601 - protein, 7 aa, synthetic construct
VFNGHPD

SEQ ID NO: 67602 - protein, 7 aa, synthetic construct
QSRVNAP

SEQ ID NO: 67603 - protein, 7 aa, synthetic construct
QYLTEGV

SEQ ID NO: 67604 - protein, 7 aa, synthetic construct
SNAPRQV

SEQ ID NO: 67605 - protein, 7 aa, synthetic construct
KMANSTG

SEQ ID NO: 67606 - protein, 7 aa, synthetic construct
SSKSTAA

SEQ ID NO: 67607 - protein, 7 aa, synthetic construct
DKGRSVL

SEQ ID NO: 67608 - protein, 7 aa, synthetic construct
QIKSESW

SEQ ID NO: 67609 - protein, 7 aa, synthetic construct
TKGALQD

SEQ ID NO: 67610 - protein, 7 aa, synthetic construct
KKSPSGD

SEQ ID NO: 67611 - protein, 7 aa, synthetic construct
KQGFDEN

SEQ ID NO: 67612 - protein, 7 aa, synthetic construct
NAQNARS

SEQ ID NO: 67613 - protein, 7 aa, synthetic construct
YNRQMPV

SEQ ID NO: 67614 - protein, 7 aa, synthetic construct
PSTNKGA

SEQ ID NO: 67615 - protein, 7 aa, synthetic construct
MDNFYKA

SEQ ID NO: 67616 - protein, 7 aa, synthetic construct
TRNEHKI

SEQ ID NO: 67617 - protein, 7 aa, synthetic construct
LANKLKP

SEQ ID NO: 67618 - protein, 7 aa, synthetic construct
LSSNRNP

SEQ ID NO: 67619 - protein, 7 aa, synthetic construct
DMRNTSQ

SEQ ID NO: 67620 - protein, 7 aa, synthetic construct
APIMMKE

SEQ ID NO: 67621 - protein, 7 aa, synthetic construct
NAQVNTY

SEQ ID NO: 67622 - protein, 7 aa, synthetic construct
KAGLMNH

SEQ ID NO: 67623 - protein, 7 aa, synthetic construct
NINPRDY

SEQ ID NO: 67624 - protein, 7 aa, synthetic construct
FQRDQFM

SEQ ID NO: 67625 - protein, 7 aa, synthetic construct
NKEWEMQ

SEQ ID NO: 67626 - protein, 7 aa, synthetic construct
FSETIRD

SEQ ID NO: 67627 - protein, 7 aa, synthetic construct
KSSSGVA

SEQ ID NO: 67628 - protein, 7 aa, synthetic construct
NNKTPNA

SEQ ID NO: 67629 - protein, 7 aa, synthetic construct
LYPISND

SEQ ID NO: 67630 - protein, 7 aa, synthetic construct
VVPSHAV

SEQ ID NO: 67631 - protein, 7 aa, synthetic construct
YSQHIIS

SEQ ID NO: 67632 - protein, 7 aa, synthetic construct
LESTRFS

SEQ ID NO: 67633 - protein, 7 aa, synthetic construct
KVPTNVI

SEQ ID NO: 67634 - protein, 7 aa, synthetic construct
GLQNQTL

SEQ ID NO: 67635 - protein, 7 aa, synthetic construct
ISHIQKF

SEQ ID NO: 67636 - protein, 7 aa, synthetic construct
RREVDQH

SEQ ID NO: 67637 - protein, 7 aa, synthetic construct
IKHHGPT

SEQ ID NO: 67638 - protein, 7 aa, synthetic construct
KNIKADM

SEQ ID NO: 67639 - protein, 7 aa, synthetic construct
YKSNAQN

SEQ ID NO: 67640 - protein, 7 aa, synthetic construct
NKFERQT

SEQ ID NO: 67641 - protein, 7 aa, synthetic construct
AGSHRQQ

SEQ ID NO: 67642 - protein, 7 aa, synthetic construct
MSQVMRD

SEQ ID NO: 67643 - protein, 7 aa, synthetic construct
ITARTNP

SEQ ID NO: 67644 - protein, 7 aa, synthetic construct
GKITSAV

SEQ ID NO: 67645 - protein, 7 aa, synthetic construct
MRPAGNA

SEQ ID NO: 67646 - protein, 7 aa, synthetic construct
DRFKMME

SEQ ID NO: 67647 - protein, 7 aa, synthetic construct
NERTRFV

SEQ ID NO: 67648 - protein, 7 aa, synthetic construct
LNTTILA

SEQ ID NO: 67649 - protein, 7 aa, synthetic construct
KHGAPPV

SEQ ID NO: 67650 - protein, 7 aa, synthetic construct
TTKAPSA

SEQ ID NO: 67651 - protein, 7 aa, synthetic construct
QDRFANS

SEQ ID NO: 67652 - protein, 7 aa, synthetic construct
KAQSNAG

SEQ ID NO: 67653 - protein, 7 aa, synthetic construct
ANGLIAA

SEQ ID NO: 67654 - protein, 7 aa, synthetic construct
MLMPHLD

SEQ ID NO: 67655 - protein, 7 aa, synthetic construct
GKSQQTM

SEQ ID NO: 67656 - protein, 7 aa, synthetic construct
GSTPLAK

SEQ ID NO: 67657 - protein, 7 aa, synthetic construct
EYPQAMR

SEQ ID NO: 67658 - protein, 7 aa, synthetic construct
VATSRQL

SEQ ID NO: 67659 - protein, 7 aa, synthetic construct
QATQTEL

SEQ ID NO: 67660 - protein, 7 aa, synthetic construct
KPGNVAN

SEQ ID NO: 67661 - protein, 7 aa, synthetic construct
KTTNSTS

SEQ ID NO: 67662 - protein, 7 aa, synthetic construct
TKNENTM

SEQ ID NO: 67663 - protein, 7 aa, synthetic construct
NIAVKGY

SEQ ID NO: 67664 - protein, 7 aa, synthetic construct
MMTNSQR

SEQ ID NO: 67665 - protein, 7 aa, synthetic construct
EGRSSGI

SEQ ID NO: 67666 - protein, 7 aa, synthetic construct
NTRIPYP

SEQ ID NO: 67667 - protein, 7 aa, synthetic construct
KTPPSGS

SEQ ID NO: 67668 - protein, 7 aa, synthetic construct
RQQSQTA

SEQ ID NO: 67669 - protein, 7 aa, synthetic construct
IVKNAKD

SEQ ID NO: 67670 - protein, 7 aa, synthetic construct
VQGAIHG

SEQ ID NO: 67671 - protein, 7 aa, synthetic construct
HKIDGHS

SEQ ID NO: 67672 - protein, 7 aa, synthetic construct
AKIQTDL

SEQ ID NO: 67673 - protein, 7 aa, synthetic construct
YRPEQRD

SEQ ID NO: 67674 - protein, 7 aa, synthetic construct
PNKSLQH

SEQ ID NO: 67675 - protein, 7 aa, synthetic construct
NRDSSIM

SEQ ID NO: 67676 - protein, 7 aa, synthetic construct
MVNHPHG

SEQ ID NO: 67677 - protein, 7 aa, synthetic construct
HDSGANA

SEQ ID NO: 67678 - protein, 7 aa, synthetic construct
NKHGMFA

SEQ ID NO: 67679 - protein, 7 aa, synthetic construct
SANHHGG

SEQ ID NO: 67680 - protein, 7 aa, synthetic construct
MKTSSGP

SEQ ID NO: 67681 - protein, 7 aa, synthetic construct
VLKMQSL

SEQ ID NO: 67682 - protein, 7 aa, synthetic construct
NYKSEVA

SEQ ID NO: 67683 - protein, 7 aa, synthetic construct
DRGGMGG

SEQ ID NO: 67684 - protein, 7 aa, synthetic construct
QQSGVNP

SEQ ID NO: 67685 - protein, 7 aa, synthetic construct
FPMDKSR

SEQ ID NO: 67686 - protein, 7 aa, synthetic construct
SRDHPVY

SEQ ID NO: 67687 - protein, 7 aa, synthetic construct
SHFQLSP

SEQ ID NO: 67688 - protein, 7 aa, synthetic construct
MIGGGKH

SEQ ID NO: 67689 - protein, 7 aa, synthetic construct
FSNTHET

SEQ ID NO: 67690 - protein, 7 aa, synthetic construct
NKMQKMP

SEQ ID NO: 67691 - protein, 7 aa, synthetic construct
AMRNDAY

SEQ ID NO: 67692 - protein, 7 aa, synthetic construct
PLKDKSY

SEQ ID NO: 67693 - protein, 7 aa, synthetic construct
LPQWTAD

SEQ ID NO: 67694 - protein, 7 aa, synthetic construct
DMLHGTK

SEQ ID NO: 67695 - protein, 7 aa, synthetic construct
TATVGKT

SEQ ID NO: 67696 - protein, 7 aa, synthetic construct
TPIKAHH

SEQ ID NO: 67697 - protein, 7 aa, synthetic construct
SPPPTDR

SEQ ID NO: 67698 - protein, 7 aa, synthetic construct
DNKLRPI

SEQ ID NO: 67699 - protein, 7 aa, synthetic construct
MLGGGGF

SEQ ID NO: 67700 - protein, 7 aa, synthetic construct
RMDNSIA

SEQ ID NO: 67701 - protein, 7 aa, synthetic construct
IGHVQYT

SEQ ID NO: 67702 - protein, 7 aa, synthetic construct
VTAAMSP

SEQ ID NO: 67703 - protein, 7 aa, synthetic construct
MHHPQFD

SEQ ID NO: 67704 - protein, 7 aa, synthetic construct
SILPKEG

SEQ ID NO: 67705 - protein, 7 aa, synthetic construct
VRSSVSP

SEQ ID NO: 67706 - protein, 7 aa, synthetic construct
VTGKTQA

SEQ ID NO: 67707 - protein, 7 aa, synthetic construct
KKQIEAT

SEQ ID NO: 67708 - protein, 7 aa, synthetic construct
VQIGKHV

SEQ ID NO: 67709 - protein, 7 aa, synthetic construct
NQTRAQA

SEQ ID NO: 67710 - protein, 7 aa, synthetic construct
FQKAKLE

SEQ ID NO: 67711 - protein, 7 aa, synthetic construct
KQLANNW

SEQ ID NO: 67712 - protein, 7 aa, synthetic construct
EAQYGKG

SEQ ID NO: 67713 - protein, 7 aa, synthetic construct
KTTAANP

SEQ ID NO: 67714 - protein, 7 aa, synthetic construct
KNPQWGS

SEQ ID NO: 67715 - protein, 7 aa, synthetic construct
IKGQVVF

SEQ ID NO: 67716 - protein, 7 aa, synthetic construct
RYNKETM

SEQ ID NO: 67717 - protein, 7 aa, synthetic construct
QVPQGAK

SEQ ID NO: 67718 - protein, 7 aa, synthetic construct
IEKNVIH

SEQ ID NO: 67719 - protein, 7 aa, synthetic construct
EKIGMPA

SEQ ID NO: 67720 - protein, 7 aa, synthetic construct
ETYSGRT

SEQ ID NO: 67721 - protein, 7 aa, synthetic construct
VTQNRDI

SEQ ID NO: 67722 - protein, 7 aa, synthetic construct
RNASTLY

SEQ ID NO: 67723 - protein, 7 aa, synthetic construct
KFRYENE

SEQ ID NO: 67724 - protein, 7 aa, synthetic construct
TKSLGQN

SEQ ID NO: 67725 - protein, 7 aa, synthetic construct
KNGGVNA

SEQ ID NO: 67726 - protein, 7 aa, synthetic construct
GNIVPQH

SEQ ID NO: 67727 - protein, 7 aa, synthetic construct
KSDQGSG

SEQ ID NO: 67728 - protein, 7 aa, synthetic construct
SPHNRLQ

SEQ ID NO: 67729 - protein, 7 aa, synthetic construct
VFDWETP

SEQ ID NO: 67730 - protein, 7 aa, synthetic construct
RPAVMDQ

SEQ ID NO: 67731 - protein, 7 aa, synthetic construct
GKWGQNS

SEQ ID NO: 67732 - protein, 7 aa, synthetic construct
QQIPHTM

SEQ ID NO: 67733 - protein, 7 aa, synthetic construct
MTSKAVT

SEQ ID NO: 67734 - protein, 7 aa, synthetic construct
KQPDRPD

SEQ ID NO: 67735 - protein, 7 aa, synthetic construct
TQIGQIR

SEQ ID NO: 67736 - protein, 7 aa, synthetic construct
FRTGNQG

SEQ ID NO: 67737 - protein, 7 aa, synthetic construct
SAGTIIR

SEQ ID NO: 67738 - protein, 7 aa, synthetic construct
LRENLNT

SEQ ID NO: 67739 - protein, 7 aa, synthetic construct
NRGDGPV

SEQ ID NO: 67740 - protein, 7 aa, synthetic construct
GGPSIRS

SEQ ID NO: 67741 - protein, 7 aa, synthetic construct
KKLHADE

SEQ ID NO: 67742 - protein, 7 aa, synthetic construct
MNGSKST

SEQ ID NO: 67743 - protein, 7 aa, synthetic construct
MNREPTH

SEQ ID NO: 67744 - protein, 7 aa, synthetic construct
KNPQGSG

SEQ ID NO: 67745 - protein, 7 aa, synthetic construct
DVKYTRT

SEQ ID NO: 67746 - protein, 7 aa, synthetic construct
RRDSGIP

SEQ ID NO: 67747 - protein, 7 aa, synthetic construct
MKHLQDR

SEQ ID NO: 67748 - protein, 7 aa, synthetic construct
RYSTGTV

SEQ ID NO: 67749 - protein, 7 aa, synthetic construct
RNVASGG

SEQ ID NO: 67750 - protein, 7 aa, synthetic construct
TTAMTVV

SEQ ID NO: 67751 - protein, 7 aa, synthetic construct
GDKQRTM

SEQ ID NO: 67752 - protein, 7 aa, synthetic construct
AIVGLTA

SEQ ID NO: 67753 - protein, 7 aa, synthetic construct
IHKHVDM

SEQ ID NO: 67754 - protein, 7 aa, synthetic construct
DFQTNKK

SEQ ID NO: 67755 - protein, 7 aa, synthetic construct
AKRDSQY

SEQ ID NO: 67756 - protein, 7 aa, synthetic construct
DSIEKRN

SEQ ID NO: 67757 - protein, 7 aa, synthetic construct
VVAIKHE

SEQ ID NO: 67758 - protein, 7 aa, synthetic construct
SNGSQRS

SEQ ID NO: 67759 - protein, 7 aa, synthetic construct
ETPHANA

SEQ ID NO: 67760 - protein, 7 aa, synthetic construct
QNSAMVG

SEQ ID NO: 67761 - protein, 7 aa, synthetic construct
RTAAGTD

SEQ ID NO: 67762 - protein, 7 aa, synthetic construct
WPTVSME

SEQ ID NO: 67763 - protein, 7 aa, synthetic construct
WQSMISS

SEQ ID NO: 67764 - protein, 7 aa, synthetic construct
GQRGHIL

SEQ ID NO: 67765 - protein, 7 aa, synthetic construct
QKALPGG

SEQ ID NO: 67766 - protein, 7 aa, synthetic construct
HAGAHTL

SEQ ID NO: 67767 - protein, 7 aa, synthetic construct
STRPNDV

SEQ ID NO: 67768 - protein, 7 aa, synthetic construct
KRDMVAN

SEQ ID NO: 67769 - protein, 7 aa, synthetic construct
FKHQHSS

SEQ ID NO: 67770 - protein, 7 aa, synthetic construct
IQIPRSG

SEQ ID NO: 67771 - protein, 7 aa, synthetic construct
KYLKNQD

SEQ ID NO: 67772 - protein, 7 aa, synthetic construct
APYQIHE

SEQ ID NO: 67773 - protein, 7 aa, synthetic construct
HLNAIME

SEQ ID NO: 67774 - protein, 7 aa, synthetic construct
KDALAHL

SEQ ID NO: 67775 - protein, 7 aa, synthetic construct
PMTHPGH

SEQ ID NO: 67776 - protein, 7 aa, synthetic construct
KTSSGNP

SEQ ID NO: 67777 - protein, 7 aa, synthetic construct
QNIKNPA

SEQ ID NO: 67778 - protein, 7 aa, synthetic construct
LGKDITN

SEQ ID NO: 67779 - protein, 7 aa, synthetic construct
MNHAALS

SEQ ID NO: 67780 - protein, 7 aa, synthetic construct
NPPKSQA

SEQ ID NO: 67781 - protein, 7 aa, synthetic construct
KQNGTAL

SEQ ID NO: 67782 - protein, 7 aa, synthetic construct
RNEMNVV

SEQ ID NO: 67783 - protein, 7 aa, synthetic construct
QVRQNVA

SEQ ID NO: 67784 - protein, 7 aa, synthetic construct
FHPEKYS

SEQ ID NO: 67785 - protein, 7 aa, synthetic construct
ERKTTQA

SEQ ID NO: 67786 - protein, 7 aa, synthetic construct
RDRRMED

SEQ ID NO: 67787 - protein, 7 aa, synthetic construct
QYRTTQE

SEQ ID NO: 67788 - protein, 7 aa, synthetic construct
DPKKPMN

SEQ ID NO: 67789 - protein, 7 aa, synthetic construct
SIHQAKM

SEQ ID NO: 67790 - protein, 7 aa, synthetic construct
QPHMPSF

SEQ ID NO: 67791 - protein, 7 aa, synthetic construct
GQTRQPD

SEQ ID NO: 67792 - protein, 7 aa, synthetic construct
HVQLDKN

SEQ ID NO: 67793 - protein, 7 aa, synthetic construct
KKQDSMI

SEQ ID NO: 67794 - protein, 7 aa, synthetic construct
HRESIGD

SEQ ID NO: 67795 - protein, 7 aa, synthetic construct
KFSDIIN

SEQ ID NO: 67796 - protein, 7 aa, synthetic construct
GGSKSTP

SEQ ID NO: 67797 - protein, 7 aa, synthetic construct
YNRSPTT

SEQ ID NO: 67798 - protein, 7 aa, synthetic construct
WGGTAKD

SEQ ID NO: 67799 - protein, 7 aa, synthetic construct
ERKVAGY

SEQ ID NO: 67800 - protein, 7 aa, synthetic construct
TSTRSQE

SEQ ID NO: 67801 - protein, 7 aa, synthetic construct
WRHPHDE

SEQ ID NO: 67802 - protein, 7 aa, synthetic construct
TFNVVVN

SEQ ID NO: 67803 - protein, 7 aa, synthetic construct
QYLNSVP

SEQ ID NO: 67804 - protein, 7 aa, synthetic construct
GTKTSME

SEQ ID NO: 67805 - protein, 7 aa, synthetic construct
SGNQQIR

SEQ ID NO: 67806 - protein, 7 aa, synthetic construct
GTPGSQG

SEQ ID NO: 67807 - protein, 7 aa, synthetic construct
KSGHHAL

SEQ ID NO: 67808 - protein, 7 aa, synthetic construct
FPTSSRV

SEQ ID NO: 67809 - protein, 7 aa, synthetic construct
TPKNAAP

SEQ ID NO: 67810 - protein, 7 aa, synthetic construct
KFIAETA

SEQ ID NO: 67811 - protein, 7 aa, synthetic construct
NRVYLKD

SEQ ID NO: 67812 - protein, 7 aa, synthetic construct
MKIQVSH

SEQ ID NO: 67813 - protein, 7 aa, synthetic construct
ASINKQM

SEQ ID NO: 67814 - protein, 7 aa, synthetic construct
GQHSTVS

SEQ ID NO: 67815 - protein, 7 aa, synthetic construct
AVRDSNS

SEQ ID NO: 67816 - protein, 7 aa, synthetic construct
YGSHTSN

SEQ ID NO: 67817 - protein, 7 aa, synthetic construct
GKEVTAR

SEQ ID NO: 67818 - protein, 7 aa, synthetic construct
IQAGKED

SEQ ID NO: 67819 - protein, 7 aa, synthetic construct
TWDGGQT

SEQ ID NO: 67820 - protein, 7 aa, synthetic construct
WIDKPTP

SEQ ID NO: 67821 - protein, 7 aa, synthetic construct
LSGIMIS

SEQ ID NO: 67822 - protein, 7 aa, synthetic construct
GNWENKQ

SEQ ID NO: 67823 - protein, 7 aa, synthetic construct
KDYSKWD

SEQ ID NO: 67824 - protein, 7 aa, synthetic construct
KANNNQV

SEQ ID NO: 67825 - protein, 7 aa, synthetic construct
KPTNAAS

SEQ ID NO: 67826 - protein, 7 aa, synthetic construct
MMGNVAA

SEQ ID NO: 67827 - protein, 7 aa, synthetic construct
QNQAHQS

SEQ ID NO: 67828 - protein, 7 aa, synthetic construct
TGKGQTG

SEQ ID NO: 67829 - protein, 7 aa, synthetic construct
LDVANKY

SEQ ID NO: 67830 - protein, 7 aa, synthetic construct
VGMHTHT

SEQ ID NO: 67831 - protein, 7 aa, synthetic construct
KRDTGAP

SEQ ID NO: 67832 - protein, 7 aa, synthetic construct
SSNLAVK

SEQ ID NO: 67833 - protein, 7 aa, synthetic construct
PRAQQQP

SEQ ID NO: 67834 - protein, 7 aa, synthetic construct
WNLKGHQ

SEQ ID NO: 67835 - protein, 7 aa, synthetic construct
KEGVTTW

SEQ ID NO: 67836 - protein, 7 aa, synthetic construct
GMPRHVV

SEQ ID NO: 67837 - protein, 7 aa, synthetic construct
IGRTMEV

SEQ ID NO: 67838 - protein, 7 aa, synthetic construct
SPLAMRA

SEQ ID NO: 67839 - protein, 7 aa, synthetic construct
SNKEYQF

SEQ ID NO: 67840 - protein, 7 aa, synthetic construct
AFGKAMV

SEQ ID NO: 67841 - protein, 7 aa, synthetic construct
HMSFVEG

SEQ ID NO: 67842 - protein, 7 aa, synthetic construct
HYQPNEI

SEQ ID NO: 67843 - protein, 7 aa, synthetic construct
PMGRQSH

SEQ ID NO: 67844 - protein, 7 aa, synthetic construct
VGAEYQQ

SEQ ID NO: 67845 - protein, 7 aa, synthetic construct
IPRRNDD

SEQ ID NO: 67846 - protein, 7 aa, synthetic construct
GSYSSGY

SEQ ID NO: 67847 - protein, 7 aa, synthetic construct
FERMMTG

SEQ ID NO: 67848 - protein, 7 aa, synthetic construct
NHVKNQD

SEQ ID NO: 67849 - protein, 7 aa, synthetic construct
QMKNGNA

SEQ ID NO: 67850 - protein, 7 aa, synthetic construct
NAQQGHV

SEQ ID NO: 67851 - protein, 7 aa, synthetic construct
KSNKQDP

SEQ ID NO: 67852 - protein, 7 aa, synthetic construct
SVNSEKN

SEQ ID NO: 67853 - protein, 7 aa, synthetic construct
KLSHAQD

SEQ ID NO: 67854 - protein, 7 aa, synthetic construct
PKNNNTG

SEQ ID NO: 67855 - protein, 7 aa, synthetic construct
IGMRGNA

SEQ ID NO: 67856 - protein, 7 aa, synthetic construct
AIHTRTY

SEQ ID NO: 67857 - protein, 7 aa, synthetic construct
LKNKQTE

SEQ ID NO: 67858 - protein, 7 aa, synthetic construct
ILLKGYV

SEQ ID NO: 67859 - protein, 7 aa, synthetic construct
LVKGKEP

SEQ ID NO: 67860 - protein, 7 aa, synthetic construct
PHKPPSN

SEQ ID NO: 67861 - protein, 7 aa, synthetic construct
NQEWQRN

SEQ ID NO: 67862 - protein, 7 aa, synthetic construct
TAQIQNN

SEQ ID NO: 67863 - protein, 7 aa, synthetic construct
EYHKVLE

SEQ ID NO: 67864 - protein, 7 aa, synthetic construct
RLGGHIA

SEQ ID NO: 67865 - protein, 7 aa, synthetic construct
MAQRLEY

SEQ ID NO: 67866 - protein, 7 aa, synthetic construct
AGLNSPK

SEQ ID NO: 67867 - protein, 7 aa, synthetic construct
MSPHHKT

SEQ ID NO: 67868 - protein, 7 aa, synthetic construct
KDHLEQF

SEQ ID NO: 67869 - protein, 7 aa, synthetic construct
YFVGEKS

SEQ ID NO: 67870 - protein, 7 aa, synthetic construct
TSPAYIP

SEQ ID NO: 67871 - protein, 7 aa, synthetic construct
NKFQVSA

SEQ ID NO: 67872 - protein, 7 aa, synthetic construct
SSKNNTG

SEQ ID NO: 67873 - protein, 7 aa, synthetic construct
RDIGNKM

SEQ ID NO: 67874 - protein, 7 aa, synthetic construct
LHQIHDQ

SEQ ID NO: 67875 - protein, 7 aa, synthetic construct
QKPSGSM

SEQ ID NO: 67876 - protein, 7 aa, synthetic construct
GRTLIIE

SEQ ID NO: 67877 - protein, 7 aa, synthetic construct
AQRSTPS

SEQ ID NO: 67878 - protein, 7 aa, synthetic construct
GVKTSAV

SEQ ID NO: 67879 - protein, 7 aa, synthetic construct
KYLAVDT

SEQ ID NO: 67880 - protein, 7 aa, synthetic construct
FAVSGHD

SEQ ID NO: 67881 - protein, 7 aa, synthetic construct
YSVHHLK

SEQ ID NO: 67882 - protein, 7 aa, synthetic construct
ENKHKFA

SEQ ID NO: 67883 - protein, 7 aa, synthetic construct
GHNATSG

SEQ ID NO: 67884 - protein, 7 aa, synthetic construct
QLLGARN

SEQ ID NO: 67885 - protein, 7 aa, synthetic construct
GKSVVAG

SEQ ID NO: 67886 - protein, 7 aa, synthetic construct
PMKGNDN

SEQ ID NO: 67887 - protein, 7 aa, synthetic construct
PGHDNGR

SEQ ID NO: 67888 - protein, 7 aa, synthetic construct
KNLSSQA

SEQ ID NO: 67889 - protein, 7 aa, synthetic construct
TPKIHSF

SEQ ID NO: 67890 - protein, 7 aa, synthetic construct
YPITAIE

SEQ ID NO: 67891 - protein, 7 aa, synthetic construct
NKGLLDG

SEQ ID NO: 67892 - protein, 7 aa, synthetic construct
PKPDSGS

SEQ ID NO: 67893 - protein, 7 aa, synthetic construct
YVKKDIL

SEQ ID NO: 67894 - protein, 7 aa, synthetic construct
KNSNTSQ

SEQ ID NO: 67895 - protein, 7 aa, synthetic construct
FERQQKI

SEQ ID NO: 67896 - protein, 7 aa, synthetic construct
KNQEIHQ

SEQ ID NO: 67897 - protein, 7 aa, synthetic construct
NYAVSAP

SEQ ID NO: 67898 - protein, 7 aa, synthetic construct
NMRQNEG

SEQ ID NO: 67899 - protein, 7 aa, synthetic construct
MTKPVKD

SEQ ID NO: 67900 - protein, 7 aa, synthetic construct
IPAPSKT

SEQ ID NO: 67901 - protein, 7 aa, synthetic construct
KNVTHTQ

SEQ ID NO: 67902 - protein, 7 aa, synthetic construct
VRVDSAN

SEQ ID NO: 67903 - protein, 7 aa, synthetic construct
VINGMAS

SEQ ID NO: 67904 - protein, 7 aa, synthetic construct
GNNYQAE

SEQ ID NO: 67905 - protein, 7 aa, synthetic construct
DLKKSTQ

SEQ ID NO: 67906 - protein, 7 aa, synthetic construct
PRAQASP

SEQ ID NO: 67907 - protein, 7 aa, synthetic construct
SKSTNQV

SEQ ID NO: 67908 - protein, 7 aa, synthetic construct
GYTTKSG

SEQ ID NO: 67909 - protein, 7 aa, synthetic construct
AQQERGA

SEQ ID NO: 67910 - protein, 7 aa, synthetic construct
TQFGAPL

SEQ ID NO: 67911 - protein, 7 aa, synthetic construct
AGSQNKH

SEQ ID NO: 67912 - protein, 7 aa, synthetic construct
VISHNTR

SEQ ID NO: 67913 - protein, 7 aa, synthetic construct
IHGLEVK

SEQ ID NO: 67914 - protein, 7 aa, synthetic construct
NAAVPGN

SEQ ID NO: 67915 - protein, 7 aa, synthetic construct
TNLAKQE

SEQ ID NO: 67916 - protein, 7 aa, synthetic construct
KQQSDRY

SEQ ID NO: 67917 - protein, 7 aa, synthetic construct
GQPSKLA

SEQ ID NO: 67918 - protein, 7 aa, synthetic construct
PRTLDKN

SEQ ID NO: 67919 - protein, 7 aa, synthetic construct
YRANEMV

SEQ ID NO: 67920 - protein, 7 aa, synthetic construct
IYTKVVD

SEQ ID NO: 67921 - protein, 7 aa, synthetic construct
MPPNGKS

SEQ ID NO: 67922 - protein, 7 aa, synthetic construct
IGFNHDG

SEQ ID NO: 67923 - protein, 7 aa, synthetic construct
WLDKNAH

SEQ ID NO: 67924 - protein, 7 aa, synthetic construct
YGIKQSI

SEQ ID NO: 67925 - protein, 7 aa, synthetic construct
WQTNQGT

SEQ ID NO: 67926 - protein, 7 aa, synthetic construct
SSSYAKQ

SEQ ID NO: 67927 - protein, 7 aa, synthetic construct
LKKNVFE

SEQ ID NO: 67928 - protein, 7 aa, synthetic construct
NMHHFVE

SEQ ID NO: 67929 - protein, 7 aa, synthetic construct
AVNHREH

SEQ ID NO: 67930 - protein, 7 aa, synthetic construct
HHQNLAD

SEQ ID NO: 67931 - protein, 7 aa, synthetic construct
GHSAGAL

SEQ ID NO: 67932 - protein, 7 aa, synthetic construct
MGKISLI

SEQ ID NO: 67933 - protein, 7 aa, synthetic construct
GQPRQPP

SEQ ID NO: 67934 - protein, 7 aa, synthetic construct
HSIKHPM

SEQ ID NO: 67935 - protein, 7 aa, synthetic construct
KPEWSEH

SEQ ID NO: 67936 - protein, 7 aa, synthetic construct
VAQFTIE

SEQ ID NO: 67937 - protein, 7 aa, synthetic construct
YHNSPKH

SEQ ID NO: 67938 - protein, 7 aa, synthetic construct
KTPLDKN

SEQ ID NO: 67939 - protein, 7 aa, synthetic construct
EKNQSTP

SEQ ID NO: 67940 - protein, 7 aa, synthetic construct
SHVNRDR

SEQ ID NO: 67941 - protein, 7 aa, synthetic construct
RRPTEET

SEQ ID NO: 67942 - protein, 7 aa, synthetic construct
RTAKDPF

SEQ ID NO: 67943 - protein, 7 aa, synthetic construct
TYNQGTH

SEQ ID NO: 67944 - protein, 7 aa, synthetic construct
YARNQEY

SEQ ID NO: 67945 - protein, 7 aa, synthetic construct
TPRTTVF

SEQ ID NO: 67946 - protein, 7 aa, synthetic construct
PRGSEAS

SEQ ID NO: 67947 - protein, 7 aa, synthetic construct
ISSDYRG

SEQ ID NO: 67948 - protein, 7 aa, synthetic construct
AYRTPTT

SEQ ID NO: 67949 - protein, 7 aa, synthetic construct
WTGGRKE

SEQ ID NO: 67950 - protein, 7 aa, synthetic construct
KDHTSQN

SEQ ID NO: 67951 - protein, 7 aa, synthetic construct
IQQPNAS

SEQ ID NO: 67952 - protein, 7 aa, synthetic construct
GAPIHNT

SEQ ID NO: 67953 - protein, 7 aa, synthetic construct
GQVMSTK

SEQ ID NO: 67954 - protein, 7 aa, synthetic construct
HHNNPTL

SEQ ID NO: 67955 - protein, 7 aa, synthetic construct
TNRSLTE

SEQ ID NO: 67956 - protein, 7 aa, synthetic construct
FTAKDLS

SEQ ID NO: 67957 - protein, 7 aa, synthetic construct
KNSSNQV

SEQ ID NO: 67958 - protein, 7 aa, synthetic construct
GRNTGQG

SEQ ID NO: 67959 - protein, 7 aa, synthetic construct
ASKPQAT

SEQ ID NO: 67960 - protein, 7 aa, synthetic construct
FKFETKS

SEQ ID NO: 67961 - protein, 7 aa, synthetic construct
RYGENTT

SEQ ID NO: 67962 - protein, 7 aa, synthetic construct
NKFVANH

SEQ ID NO: 67963 - protein, 7 aa, synthetic construct
QGSSAAS

SEQ ID NO: 67964 - protein, 7 aa, synthetic construct
SRHIREP

SEQ ID NO: 67965 - protein, 7 aa, synthetic construct
QKQSGMA

SEQ ID NO: 67966 - protein, 7 aa, synthetic construct
DTFRAAD

SEQ ID NO: 67967 - protein, 7 aa, synthetic construct
FSIDNTV

SEQ ID NO: 67968 - protein, 7 aa, synthetic construct
HQRQSHG

SEQ ID NO: 67969 - protein, 7 aa, synthetic construct
KQAIPGN

SEQ ID NO: 67970 - protein, 7 aa, synthetic construct
NKAGEFP

SEQ ID NO: 67971 - protein, 7 aa, synthetic construct
KMQGTNA

SEQ ID NO: 67972 - protein, 7 aa, synthetic construct
NYYGTAP

SEQ ID NO: 67973 - protein, 7 aa, synthetic construct
LSNSIPI

SEQ ID NO: 67974 - protein, 7 aa, synthetic construct
RSPSQVV

SEQ ID NO: 67975 - protein, 7 aa, synthetic construct
YHMGGDS

SEQ ID NO: 67976 - protein, 7 aa, synthetic construct
ENGGHRH

SEQ ID NO: 67977 - protein, 7 aa, synthetic construct
RPGQQDP

SEQ ID NO: 67978 - protein, 7 aa, synthetic construct
VVEYGNK

SEQ ID NO: 67979 - protein, 7 aa, synthetic construct
HGPGSRN

SEQ ID NO: 67980 - protein, 7 aa, synthetic construct
WFDKGNI

SEQ ID NO: 67981 - protein, 7 aa, synthetic construct
FTQDSQR

SEQ ID NO: 67982 - protein, 7 aa, synthetic construct
NAPLLKD

SEQ ID NO: 67983 - protein, 7 aa, synthetic construct
RNGPSMG

SEQ ID NO: 67984 - protein, 7 aa, synthetic construct
PILIGKP

SEQ ID NO: 67985 - protein, 7 aa, synthetic construct
AQSNTVH

SEQ ID NO: 67986 - protein, 7 aa, synthetic construct
KRSETTS

SEQ ID NO: 67987 - protein, 7 aa, synthetic construct
NKSAGNN

SEQ ID NO: 67988 - protein, 7 aa, synthetic construct
RRESEGS

SEQ ID NO: 67989 - protein, 7 aa, synthetic construct
PPLHPVN

SEQ ID NO: 67990 - protein, 7 aa, synthetic construct
WQQIQNS

SEQ ID NO: 67991 - protein, 7 aa, synthetic construct
IANLTGE

SEQ ID NO: 67992 - protein, 7 aa, synthetic construct
SNRQMDH

SEQ ID NO: 67993 - protein, 7 aa, synthetic construct
MQLKIGD

SEQ ID NO: 67994 - protein, 7 aa, synthetic construct
NNAGLMG

SEQ ID NO: 67995 - protein, 7 aa, synthetic construct
TGDKLLI

SEQ ID NO: 67996 - protein, 7 aa, synthetic construct
MTLGRGS

SEQ ID NO: 67997 - protein, 7 aa, synthetic construct
LGRSEMY

SEQ ID NO: 67998 - protein, 7 aa, synthetic construct
PVGPERT

SEQ ID NO: 67999 - protein, 7 aa, synthetic construct
PKIQSGP

SEQ ID NO: 68000 - protein, 7 aa, synthetic construct
EMPSKGM

SEQ ID NO: 68001 - protein, 7 aa, synthetic construct
RDNQMVH

SEQ ID NO: 68002 - protein, 7 aa, synthetic construct
DKNTPVI

SEQ ID NO: 68003 - protein, 7 aa, synthetic construct
TDKSGHT

SEQ ID NO: 68004 - protein, 7 aa, synthetic construct
YLSSKAQ

SEQ ID NO: 68005 - protein, 7 aa, synthetic construct
YQPQSKQ

SEQ ID NO: 68006 - protein, 7 aa, synthetic construct
KPFNDGL

SEQ ID NO: 68007 - protein, 7 aa, synthetic construct
ASFIGPD

SEQ ID NO: 68008 - protein, 7 aa, synthetic construct
SMKLEWV

SEQ ID NO: 68009 - protein, 7 aa, synthetic construct
NKQGVVM

SEQ ID NO: 68010 - protein, 7 aa, synthetic construct
NSKLETP

SEQ ID NO: 68011 - protein, 7 aa, synthetic construct
YNKMVSQ

SEQ ID NO: 68012 - protein, 7 aa, synthetic construct
NQNGSFL

SEQ ID NO: 68013 - protein, 7 aa, synthetic construct
RPSNDSW

SEQ ID NO: 68014 - protein, 7 aa, synthetic construct
YQNFKHV

SEQ ID NO: 68015 - protein, 7 aa, synthetic construct
FTNQNTK

SEQ ID NO: 68016 - protein, 7 aa, synthetic construct
SKPQNLS

SEQ ID NO: 68017 - protein, 7 aa, synthetic construct
NRSAVAG

SEQ ID NO: 68018 - protein, 7 aa, synthetic construct
QPGNYPP

SEQ ID NO: 68019 - protein, 7 aa, synthetic construct
SAGVHTR

SEQ ID NO: 68020 - protein, 7 aa, synthetic construct
EGLMQKK

SEQ ID NO: 68021 - protein, 7 aa, synthetic construct
NKSSVQQ

SEQ ID NO: 68022 - protein, 7 aa, synthetic construct
CSNKQTP

SEQ ID NO: 68023 - protein, 7 aa, synthetic construct
TKAKHID

SEQ ID NO: 68024 - protein, 7 aa, synthetic construct
AGSGAIG

SEQ ID NO: 68025 - protein, 7 aa, synthetic construct
WDRAKSP

SEQ ID NO: 68026 - protein, 7 aa, synthetic construct
NRGSTTA

SEQ ID NO: 68027 - protein, 7 aa, synthetic construct
FDMQKKF

SEQ ID NO: 68028 - protein, 7 aa, synthetic construct
GIRGQIT

SEQ ID NO: 68029 - protein, 7 aa, synthetic construct
EPKFVRG

SEQ ID NO: 68030 - protein, 7 aa, synthetic construct
QRPNSGS

SEQ ID NO: 68031 - protein, 7 aa, synthetic construct
DMFHTIP

SEQ ID NO: 68032 - protein, 7 aa, synthetic construct
RNSFGHE

SEQ ID NO: 68033 - protein, 7 aa, synthetic construct
TRPDNNK

SEQ ID NO: 68034 - protein, 7 aa, synthetic construct
KFKEANP

SEQ ID NO: 68035 - protein, 7 aa, synthetic construct
KDSRPGT

SEQ ID NO: 68036 - protein, 7 aa, synthetic construct
MGPPNGG

SEQ ID NO: 68037 - protein, 7 aa, synthetic construct
NNHSHDI

SEQ ID NO: 68038 - protein, 7 aa, synthetic construct
QKAMGAV

SEQ ID NO: 68039 - protein, 7 aa, synthetic construct
VYAKGEK

SEQ ID NO: 68040 - protein, 7 aa, synthetic construct
EKMGVVV

SEQ ID NO: 68041 - protein, 7 aa, synthetic construct
WNKNSQT

SEQ ID NO: 68042 - protein, 7 aa, synthetic construct
SEFPSHG

SEQ ID NO: 68043 - protein, 7 aa, synthetic construct
KDVAVIP

SEQ ID NO: 68044 - protein, 7 aa, synthetic construct
NSARVGA

SEQ ID NO: 68045 - protein, 7 aa, synthetic construct
HREGMTV

SEQ ID NO: 68046 - protein, 7 aa, synthetic construct
IDVRNRE

SEQ ID NO: 68047 - protein, 7 aa, synthetic construct
SVLKPME

SEQ ID NO: 68048 - protein, 7 aa, synthetic construct
IKSTMVA

SEQ ID NO: 68049 - protein, 7 aa, synthetic construct
IDAFHKM

SEQ ID NO: 68050 - protein, 7 aa, synthetic construct
GDVRFSV

SEQ ID NO: 68051 - protein, 7 aa, synthetic construct
GKATDSS

SEQ ID NO: 68052 - protein, 7 aa, synthetic construct
TNNKFAE

SEQ ID NO: 68053 - protein, 7 aa, synthetic construct
TRSMTQP

SEQ ID NO: 68054 - protein, 7 aa, synthetic construct
PAEARGL

SEQ ID NO: 68055 - protein, 7 aa, synthetic construct
HSTTTSN

SEQ ID NO: 68056 - protein, 7 aa, synthetic construct
KIMHPLN

SEQ ID NO: 68057 - protein, 7 aa, synthetic construct
DLKKVQW

SEQ ID NO: 68058 - protein, 7 aa, synthetic construct
THSKPHG

SEQ ID NO: 68059 - protein, 7 aa, synthetic construct
YSHNHKQ

SEQ ID NO: 68060 - protein, 7 aa, synthetic construct
AMKSFSD

SEQ ID NO: 68061 - protein, 7 aa, synthetic construct
FLPHRQA

SEQ ID NO: 68062 - protein, 7 aa, synthetic construct
LPIHGEG

SEQ ID NO: 68063 - protein, 7 aa, synthetic construct
SNRFDGP

SEQ ID NO: 68064 - protein, 7 aa, synthetic construct
MKQKFYD

SEQ ID NO: 68065 - protein, 7 aa, synthetic construct
IGHFHSP

SEQ ID NO: 68066 - protein, 7 aa, synthetic construct
LVTAQKT

SEQ ID NO: 68067 - protein, 7 aa, synthetic construct
DGVTNKV

SEQ ID NO: 68068 - protein, 7 aa, synthetic construct
TIMATQN

SEQ ID NO: 68069 - protein, 7 aa, synthetic construct
ANSYRNE

SEQ ID NO: 68070 - protein, 7 aa, synthetic construct
PFGPTSH

SEQ ID NO: 68071 - protein, 7 aa, synthetic construct
PREKGGG

SEQ ID NO: 68072 - protein, 7 aa, synthetic construct
SKQAFKD

SEQ ID NO: 68073 - protein, 7 aa, synthetic construct
SKGSLSG

SEQ ID NO: 68074 - protein, 7 aa, synthetic construct
TMPGGAM

SEQ ID NO: 68075 - protein, 7 aa, synthetic construct
HIQRPHM

SEQ ID NO: 68076 - protein, 7 aa, synthetic construct
KTVSGGA

SEQ ID NO: 68077 - protein, 7 aa, synthetic construct
MTAQIHN

SEQ ID NO: 68078 - protein, 7 aa, synthetic construct
NGIAYRP

SEQ ID NO: 68079 - protein, 7 aa, synthetic construct
YGKPAVD

SEQ ID NO: 68080 - protein, 7 aa, synthetic construct
PNMGRIS

SEQ ID NO: 68081 - protein, 7 aa, synthetic construct
LPRQSAM

SEQ ID NO: 68082 - protein, 7 aa, synthetic construct
ASFNGYA

SEQ ID NO: 68083 - protein, 7 aa, synthetic construct
EQHTYKN

SEQ ID NO: 68084 - protein, 7 aa, synthetic construct
WPQTKTS

SEQ ID NO: 68085 - protein, 7 aa, synthetic construct
NKTTNTS

SEQ ID NO: 68086 - protein, 7 aa, synthetic construct
KVMVAVS

SEQ ID NO: 68087 - protein, 7 aa, synthetic construct
KYSEPLP

SEQ ID NO: 68088 - protein, 7 aa, synthetic construct
EASRLPH

SEQ ID NO: 68089 - protein, 7 aa, synthetic construct
YAGLHHN

SEQ ID NO: 68090 - protein, 7 aa, synthetic construct
GTMNQAV

SEQ ID NO: 68091 - protein, 7 aa, synthetic construct
HSKSMQN

SEQ ID NO: 68092 - protein, 7 aa, synthetic construct
VLAHDIQ

SEQ ID NO: 68093 - protein, 7 aa, synthetic construct
GVIQKAI

SEQ ID NO: 68094 - protein, 7 aa, synthetic construct
FTNAVGR

SEQ ID NO: 68095 - protein, 7 aa, synthetic construct
QKLKGPP

SEQ ID NO: 68096 - protein, 7 aa, synthetic construct
SIRFAHE

SEQ ID NO: 68097 - protein, 7 aa, synthetic construct
YLMATRE

SEQ ID NO: 68098 - protein, 7 aa, synthetic construct
ERSMVYS

SEQ ID NO: 68099 - protein, 7 aa, synthetic construct
APQRTSS

SEQ ID NO: 68100 - protein, 7 aa, synthetic construct
NKMVGQG

SEQ ID NO: 68101 - protein, 7 aa, synthetic construct
NVSGSKP

SEQ ID NO: 68102 - protein, 7 aa, synthetic construct
NGSQKGG

SEQ ID NO: 68103 - protein, 7 aa, synthetic construct
NSKGNGA

SEQ ID NO: 68104 - protein, 7 aa, synthetic construct
TMARVDG

SEQ ID NO: 68105 - protein, 7 aa, synthetic construct
AKRPPDS

SEQ ID NO: 68106 - protein, 7 aa, synthetic construct
YKHEWAA

SEQ ID NO: 68107 - protein, 7 aa, synthetic construct
NRSGMNA

SEQ ID NO: 68108 - protein, 7 aa, synthetic construct
PQVEPAK

SEQ ID NO: 68109 - protein, 7 aa, synthetic construct
QGIGGTF

SEQ ID NO: 68110 - protein, 7 aa, synthetic construct
KNQTNMS

SEQ ID NO: 68111 - protein, 7 aa, synthetic construct
LARGIPG

SEQ ID NO: 68112 - protein, 7 aa, synthetic construct
VPHTQAY

SEQ ID NO: 68113 - protein, 7 aa, synthetic construct
NFQVPVA

SEQ ID NO: 68114 - protein, 7 aa, synthetic construct
MNGPQNR

SEQ ID NO: 68115 - protein, 7 aa, synthetic construct
GSGFISE

SEQ ID NO: 68116 - protein, 7 aa, synthetic construct
LMRDTGP

SEQ ID NO: 68117 - protein, 7 aa, synthetic construct
WRTPMVD

SEQ ID NO: 68118 - protein, 7 aa, synthetic construct
SNGFYGA

SEQ ID NO: 68119 - protein, 7 aa, synthetic construct
NGAKTQG

SEQ ID NO: 68120 - protein, 7 aa, synthetic construct
QKNEKYD

SEQ ID NO: 68121 - protein, 7 aa, synthetic construct
YKSHYPT

SEQ ID NO: 68122 - protein, 7 aa, synthetic construct
KAIGWAD

SEQ ID NO: 68123 - protein, 7 aa, synthetic construct
KPPENKW

SEQ ID NO: 68124 - protein, 7 aa, synthetic construct
ARVRPDH

SEQ ID NO: 68125 - protein, 7 aa, synthetic construct
AGAGKFS

SEQ ID NO: 68126 - protein, 7 aa, synthetic construct
KPSGHGM

SEQ ID NO: 68127 - protein, 7 aa, synthetic construct
GKQNMAG

SEQ ID NO: 68128 - protein, 7 aa, synthetic construct
IQGGPNM

SEQ ID NO: 68129 - protein, 7 aa, synthetic construct
GMHAKDP

SEQ ID NO: 68130 - protein, 7 aa, synthetic construct
QRNGGIT

SEQ ID NO: 68131 - protein, 7 aa, synthetic construct
NGKAPTG

SEQ ID NO: 68132 - protein, 7 aa, synthetic construct
VSMNGPK

SEQ ID NO: 68133 - protein, 7 aa, synthetic construct
HPNKGAL

SEQ ID NO: 68134 - protein, 7 aa, synthetic construct
SDQVFAG

SEQ ID NO: 68135 - protein, 7 aa, synthetic construct
RNQNDSR

SEQ ID NO: 68136 - protein, 7 aa, synthetic construct
NTTAPAK

SEQ ID NO: 68137 - protein, 7 aa, synthetic construct
DKSRNIS

SEQ ID NO: 68138 - protein, 7 aa, synthetic construct
EGIKYLS

SEQ ID NO: 68139 - protein, 7 aa, synthetic construct
VSQHSNR

SEQ ID NO: 68140 - protein, 7 aa, synthetic construct
HNYAGQS

SEQ ID NO: 68141 - protein, 7 aa, synthetic construct
RDRELLT

SEQ ID NO: 68142 - protein, 7 aa, synthetic construct
GSERFKY

SEQ ID NO: 68143 - protein, 7 aa, synthetic construct
VVPGGIV

SEQ ID NO: 68144 - protein, 7 aa, synthetic construct
SEVFKVA

SEQ ID NO: 68145 - protein, 7 aa, synthetic construct
LGPERKQ

SEQ ID NO: 68146 - protein, 7 aa, synthetic construct
VKGSHDI

SEQ ID NO: 68147 - protein, 7 aa, synthetic construct
RPQGGQS

SEQ ID NO: 68148 - protein, 7 aa, synthetic construct
LSIAQRE

SEQ ID NO: 68149 - protein, 7 aa, synthetic construct
SFGPDLS

SEQ ID NO: 68150 - protein, 7 aa, synthetic construct
VEPHKLN

SEQ ID NO: 68151 - protein, 7 aa, synthetic construct
HGEWKYQ

SEQ ID NO: 68152 - protein, 7 aa, synthetic construct
SFDNSRG

SEQ ID NO: 68153 - protein, 7 aa, synthetic construct
ENRAVPR

SEQ ID NO: 68154 - protein, 7 aa, synthetic construct
YMRPTLE

SEQ ID NO: 68155 - protein, 7 aa, synthetic construct
WGGMKHS

SEQ ID NO: 68156 - protein, 7 aa, synthetic construct
KRDTINE

SEQ ID NO: 68157 - protein, 7 aa, synthetic construct
VDNYPRI

SEQ ID NO: 68158 - protein, 7 aa, synthetic construct
DERRVDA

SEQ ID NO: 68159 - protein, 7 aa, synthetic construct
KTNGVGP

SEQ ID NO: 68160 - protein, 7 aa, synthetic construct
GTHLDSV

SEQ ID NO: 68161 - protein, 7 aa, synthetic construct
ASKNFNH

SEQ ID NO: 68162 - protein, 7 aa, synthetic construct
SMTTGGM

SEQ ID NO: 68163 - protein, 7 aa, synthetic construct
QRPINSF

SEQ ID NO: 68164 - protein, 7 aa, synthetic construct
DMRHKHA

SEQ ID NO: 68165 - protein, 7 aa, synthetic construct
NGALNNH

SEQ ID NO: 68166 - protein, 7 aa, synthetic construct
RFQRIES

SEQ ID NO: 68167 - protein, 7 aa, synthetic construct
ATSFSQV

SEQ ID NO: 68168 - protein, 7 aa, synthetic construct
ATTVHDK

SEQ ID NO: 68169 - protein, 7 aa, synthetic construct
NKLSASE

SEQ ID NO: 68170 - protein, 7 aa, synthetic construct
LRGDLDQ

SEQ ID NO: 68171 - protein, 7 aa, synthetic construct
YKNEMRS

SEQ ID NO: 68172 - protein, 7 aa, synthetic construct
KMETYAG

SEQ ID NO: 68173 - protein, 7 aa, synthetic construct
LHDTTRE

SEQ ID NO: 68174 - protein, 7 aa, synthetic construct
SHHLQAV

SEQ ID NO: 68175 - protein, 7 aa, synthetic construct
YMNSRDH

SEQ ID NO: 68176 - protein, 7 aa, synthetic construct
DGHSGGK

SEQ ID NO: 68177 - protein, 7 aa, synthetic construct
IIKKFEP

SEQ ID NO: 68178 - protein, 7 aa, synthetic construct
LHAAQKI

SEQ ID NO: 68179 - protein, 7 aa, synthetic construct
KGTQNNP

SEQ ID NO: 68180 - protein, 7 aa, synthetic construct
MLHLKAN

SEQ ID NO: 68181 - protein, 7 aa, synthetic construct
SVSRGDY

SEQ ID NO: 68182 - protein, 7 aa, synthetic construct
YKFKSDD

SEQ ID NO: 68183 - protein, 7 aa, synthetic construct
VPYMKFE

SEQ ID NO: 68184 - protein, 7 aa, synthetic construct
TQHKPYG

SEQ ID NO: 68185 - protein, 7 aa, synthetic construct
LPMITKP

SEQ ID NO: 68186 - protein, 7 aa, synthetic construct
IHMKYSG

SEQ ID NO: 68187 - protein, 7 aa, synthetic construct
NPKMIRE

SEQ ID NO: 68188 - protein, 7 aa, synthetic construct
ERTLNRT

SEQ ID NO: 68189 - protein, 7 aa, synthetic construct
FKLNGIG

SEQ ID NO: 68190 - protein, 7 aa, synthetic construct
VGARSEV

SEQ ID NO: 68191 - protein, 7 aa, synthetic construct
SNGPRSE

SEQ ID NO: 68192 - protein, 7 aa, synthetic construct
KREQSDV

SEQ ID NO: 68193 - protein, 7 aa, synthetic construct
KNAPTRD

SEQ ID NO: 68194 - protein, 7 aa, synthetic construct
PYAAKIE

SEQ ID NO: 68195 - protein, 7 aa, synthetic construct
HNIRGIV

SEQ ID NO: 68196 - protein, 7 aa, synthetic construct
KMHTLNM

SEQ ID NO: 68197 - protein, 7 aa, synthetic construct
LGGDSQR

SEQ ID NO: 68198 - protein, 7 aa, synthetic construct
LWEMAKD

SEQ ID NO: 68199 - protein, 7 aa, synthetic construct
KAYAHMD

SEQ ID NO: 68200 - protein, 7 aa, synthetic construct
EPNKTKM

SEQ ID NO: 68201 - protein, 7 aa, synthetic construct
QMRVDPS

SEQ ID NO: 68202 - protein, 7 aa, synthetic construct
IKTHPHQ

SEQ ID NO: 68203 - protein, 7 aa, synthetic construct
QLLPQKE

SEQ ID NO: 68204 - protein, 7 aa, synthetic construct
YGDRGSP

SEQ ID NO: 68205 - protein, 7 aa, synthetic construct
MGSGQTI

SEQ ID NO: 68206 - protein, 7 aa, synthetic construct
ISRNYSM

SEQ ID NO: 68207 - protein, 7 aa, synthetic construct
YDHKDAR

SEQ ID NO: 68208 - protein, 7 aa, synthetic construct
RPSSTAM

SEQ ID NO: 68209 - protein, 7 aa, synthetic construct
MGGRHEL

SEQ ID NO: 68210 - protein, 7 aa, synthetic construct
DKQSSSY

SEQ ID NO: 68211 - protein, 7 aa, synthetic construct
KRPNEMN

SEQ ID NO: 68212 - protein, 7 aa, synthetic construct
QNTINYS

SEQ ID NO: 68213 - protein, 7 aa, synthetic construct
HAHTITM

SEQ ID NO: 68214 - protein, 7 aa, synthetic construct
VSYKGGI

SEQ ID NO: 68215 - protein, 7 aa, synthetic construct
ILDWQPN

SEQ ID NO: 68216 - protein, 7 aa, synthetic construct
LPAHANF

SEQ ID NO: 68217 - protein, 7 aa, synthetic construct
NVVVNGA

SEQ ID NO: 68218 - protein, 7 aa, synthetic construct
GTKVTAT

SEQ ID NO: 68219 - protein, 7 aa, synthetic construct
EYKFQGL

SEQ ID NO: 68220 - protein, 7 aa, synthetic construct
YFQHSLA

SEQ ID NO: 68221 - protein, 7 aa, synthetic construct
ILSPKHN

SEQ ID NO: 68222 - protein, 7 aa, synthetic construct
AKTDRPD

SEQ ID NO: 68223 - protein, 7 aa, synthetic construct
HAATTDK

SEQ ID NO: 68224 - protein, 7 aa, synthetic construct
HHNHVKA

SEQ ID NO: 68225 - protein, 7 aa, synthetic construct
TTRFNED

SEQ ID NO: 68226 - protein, 7 aa, synthetic construct
NMSQKSG

SEQ ID NO: 68227 - protein, 7 aa, synthetic construct
PEAGPRN

SEQ ID NO: 68228 - protein, 7 aa, synthetic construct
SQKMKME

SEQ ID NO: 68229 - protein, 7 aa, synthetic construct
KTPGIQG

SEQ ID NO: 68230 - protein, 7 aa, synthetic construct
SKNSGYI

SEQ ID NO: 68231 - protein, 7 aa, synthetic construct
NPARMGA

SEQ ID NO: 68232 - protein, 7 aa, synthetic construct
VGSGKMA

SEQ ID NO: 68233 - protein, 7 aa, synthetic construct
STYAPAQ

SEQ ID NO: 68234 - protein, 7 aa, synthetic construct
RNKPGDM

SEQ ID NO: 68235 - protein, 7 aa, synthetic construct
YIVQHRD

SEQ ID NO: 68236 - protein, 7 aa, synthetic construct
NGNNNRD

SEQ ID NO: 68237 - protein, 7 aa, synthetic construct
QSSTIRI

SEQ ID NO: 68238 - protein, 7 aa, synthetic construct
LPTAQHQ

SEQ ID NO: 68239 - protein, 7 aa, synthetic construct
GAVREQK

SEQ ID NO: 68240 - protein, 7 aa, synthetic construct
KRDTMSG

SEQ ID NO: 68241 - protein, 7 aa, synthetic construct
ISGSHVT

SEQ ID NO: 68242 - protein, 7 aa, synthetic construct
KWETAPP

SEQ ID NO: 68243 - protein, 7 aa, synthetic construct
GANRMHM

SEQ ID NO: 68244 - protein, 7 aa, synthetic construct
IGVVTMA

SEQ ID NO: 68245 - protein, 7 aa, synthetic construct
NIHQTVM

SEQ ID NO: 68246 - protein, 7 aa, synthetic construct
LDFQPNG

SEQ ID NO: 68247 - protein, 7 aa, synthetic construct
APLKWHE

SEQ ID NO: 68248 - protein, 7 aa, synthetic construct
YRTLPET

SEQ ID NO: 68249 - protein, 7 aa, synthetic construct
QAHLKHV

SEQ ID NO: 68250 - protein, 7 aa, synthetic construct
EMKKQML

SEQ ID NO: 68251 - protein, 7 aa, synthetic construct
VETHGRS

SEQ ID NO: 68252 - protein, 7 aa, synthetic construct
QTEMKVI

SEQ ID NO: 68253 - protein, 7 aa, synthetic construct
KQKTQED

SEQ ID NO: 68254 - protein, 7 aa, synthetic construct
RNGFFEA

SEQ ID NO: 68255 - protein, 7 aa, synthetic construct
DIYPTPA

SEQ ID NO: 68256 - protein, 7 aa, synthetic construct
NPPWDPE

SEQ ID NO: 68257 - protein, 7 aa, synthetic construct
VNTTAQP

SEQ ID NO: 68258 - protein, 7 aa, synthetic construct
QSHIANI

SEQ ID NO: 68259 - protein, 7 aa, synthetic construct
GKGPYDK

SEQ ID NO: 68260 - protein, 7 aa, synthetic construct
YKSAPKE

SEQ ID NO: 68261 - protein, 7 aa, synthetic construct
VSPLQKG

SEQ ID NO: 68262 - protein, 7 aa, synthetic construct
MRQMTQS

SEQ ID NO: 68263 - protein, 7 aa, synthetic construct
MGGGGGR

SEQ ID NO: 68264 - protein, 7 aa, synthetic construct
AVTLVKE

SEQ ID NO: 68265 - protein, 7 aa, synthetic construct
VVRHNMN

SEQ ID NO: 68266 - protein, 7 aa, synthetic construct
KNPSNQN

SEQ ID NO: 68267 - protein, 7 aa, synthetic construct
KQDRRDL

SEQ ID NO: 68268 - protein, 7 aa, synthetic construct
KYSHMRE

SEQ ID NO: 68269 - protein, 7 aa, synthetic construct
DKHQGMV

SEQ ID NO: 68270 - protein, 7 aa, synthetic construct
NTATPFA

SEQ ID NO: 68271 - protein, 7 aa, synthetic construct
FHTRGLS

SEQ ID NO: 68272 - protein, 7 aa, synthetic construct
RHGLAVQ

SEQ ID NO: 68273 - protein, 7 aa, synthetic construct
TSPDREK

SEQ ID NO: 68274 - protein, 7 aa, synthetic construct
FGARHES

SEQ ID NO: 68275 - protein, 7 aa, synthetic construct
YSNVVKD

SEQ ID NO: 68276 - protein, 7 aa, synthetic construct
EAQHAKM

SEQ ID NO: 68277 - protein, 7 aa, synthetic construct
QTFSGEG

SEQ ID NO: 68278 - protein, 7 aa, synthetic construct
PTPNQLK

SEQ ID NO: 68279 - protein, 7 aa, synthetic construct
FHDRTPS

SEQ ID NO: 68280 - protein, 7 aa, synthetic construct
YAAHGIV

SEQ ID NO: 68281 - protein, 7 aa, synthetic construct
HQKIVAD

SEQ ID NO: 68282 - protein, 7 aa, synthetic construct
GQRSMAS

SEQ ID NO: 68283 - protein, 7 aa, synthetic construct
VSHPQRM

SEQ ID NO: 68284 - protein, 7 aa, synthetic construct
HTNAWPG

SEQ ID NO: 68285 - protein, 7 aa, synthetic construct
YDQQSHA

SEQ ID NO: 68286 - protein, 7 aa, synthetic construct
YLPHEPK

SEQ ID NO: 68287 - protein, 7 aa, synthetic construct
MMLGNMG

SEQ ID NO: 68288 - protein, 7 aa, synthetic construct
TYQSNKS

SEQ ID NO: 68289 - protein, 7 aa, synthetic construct
RNPVSVH

SEQ ID NO: 68290 - protein, 7 aa, synthetic construct
GDFQRTM

SEQ ID NO: 68291 - protein, 7 aa, synthetic construct
LRQNELL

SEQ ID NO: 68292 - protein, 7 aa, synthetic construct
AKMTGTM

SEQ ID NO: 68293 - protein, 7 aa, synthetic construct
IHASNNL

SEQ ID NO: 68294 - protein, 7 aa, synthetic construct
SVRHSSE

SEQ ID NO: 68295 - protein, 7 aa, synthetic construct
SHTTQRT

SEQ ID NO: 68296 - protein, 7 aa, synthetic construct
QKATRGD

SEQ ID NO: 68297 - protein, 7 aa, synthetic construct
MNQDPQG

SEQ ID NO: 68298 - protein, 7 aa, synthetic construct
IVKMHDV

SEQ ID NO: 68299 - protein, 7 aa, synthetic construct
VKNKSHE

SEQ ID NO: 68300 - protein, 7 aa, synthetic construct
YAKVIPG

SEQ ID NO: 68301 - protein, 7 aa, synthetic construct
HHKGAEQ

SEQ ID NO: 68302 - protein, 7 aa, synthetic construct
PKGSGMA

SEQ ID NO: 68303 - protein, 7 aa, synthetic construct
DKVHPIM

SEQ ID NO: 68304 - protein, 7 aa, synthetic construct
NYTANMP

SEQ ID NO: 68305 - protein, 7 aa, synthetic construct
ANSSSVF

SEQ ID NO: 68306 - protein, 7 aa, synthetic construct
NNTNNKA

SEQ ID NO: 68307 - protein, 7 aa, synthetic construct
TKQHFAH

SEQ ID NO: 68308 - protein, 7 aa, synthetic construct
GSQKTQP

SEQ ID NO: 68309 - protein, 7 aa, synthetic construct
HMAHVHE

SEQ ID NO: 68310 - protein, 7 aa, synthetic construct
GKTNGSL

SEQ ID NO: 68311 - protein, 7 aa, synthetic construct
LEKKSGI

SEQ ID NO: 68312 - protein, 7 aa, synthetic construct
GATRWGE

SEQ ID NO: 68313 - protein, 7 aa, synthetic construct
YKGNTQS

SEQ ID NO: 68314 - protein, 7 aa, synthetic construct
QIQHSHT

SEQ ID NO: 68315 - protein, 7 aa, synthetic construct
NARLVDH

SEQ ID NO: 68316 - protein, 7 aa, synthetic construct
SHSSSEA

SEQ ID NO: 68317 - protein, 7 aa, synthetic construct
YKPPTMG

SEQ ID NO: 68318 - protein, 7 aa, synthetic construct
QYPNNPR

SEQ ID NO: 68319 - protein, 7 aa, synthetic construct
HDANRGG

SEQ ID NO: 68320 - protein, 7 aa, synthetic construct
PLRADPE

SEQ ID NO: 68321 - protein, 7 aa, synthetic construct
DKQFRTH

SEQ ID NO: 68322 - protein, 7 aa, synthetic construct
KSNAMQG

SEQ ID NO: 68323 - protein, 7 aa, synthetic construct
TKNVEVH

SEQ ID NO: 68324 - protein, 7 aa, synthetic construct
GPRTNDF

SEQ ID NO: 68325 - protein, 7 aa, synthetic construct
GQKPSGA

SEQ ID NO: 68326 - protein, 7 aa, synthetic construct
NQRARDP

SEQ ID NO: 68327 - protein, 7 aa, synthetic construct
PKVHEVA

SEQ ID NO: 68328 - protein, 7 aa, synthetic construct
PMPKSQI

SEQ ID NO: 68329 - protein, 7 aa, synthetic construct
KSGVGSN

SEQ ID NO: 68330 - protein, 7 aa, synthetic construct
NRQFQAP

SEQ ID NO: 68331 - protein, 7 aa, synthetic construct
ADTRNAT

SEQ ID NO: 68332 - protein, 7 aa, synthetic construct
NTQQNLN

SEQ ID NO: 68333 - protein, 7 aa, synthetic construct
GRIDGMF

SEQ ID NO: 68334 - protein, 7 aa, synthetic construct
SHAAGKD

SEQ ID NO: 68335 - protein, 7 aa, synthetic construct
KNISTGF

SEQ ID NO: 68336 - protein, 7 aa, synthetic construct
AESSQAR

SEQ ID NO: 68337 - protein, 7 aa, synthetic construct
HRANVSA

SEQ ID NO: 68338 - protein, 7 aa, synthetic construct
VKTPPTG

SEQ ID NO: 68339 - protein, 7 aa, synthetic construct
RNQPNVA

SEQ ID NO: 68340 - protein, 7 aa, synthetic construct
FAGGYKE

SEQ ID NO: 68341 - protein, 7 aa, synthetic construct
NYGKTAQ

SEQ ID NO: 68342 - protein, 7 aa, synthetic construct
RQNSNGD

SEQ ID NO: 68343 - protein, 7 aa, synthetic construct
KEVSWTG

SEQ ID NO: 68344 - protein, 7 aa, synthetic construct
GKDRSNP

SEQ ID NO: 68345 - protein, 7 aa, synthetic construct
IDNARSG

SEQ ID NO: 68346 - protein, 7 aa, synthetic construct
HKSHHSD

SEQ ID NO: 68347 - protein, 7 aa, synthetic construct
SVIKQHM

SEQ ID NO: 68348 - protein, 7 aa, synthetic construct
YKYSEIV

SEQ ID NO: 68349 - protein, 7 aa, synthetic construct
DFRASNV

SEQ ID NO: 68350 - protein, 7 aa, synthetic construct
HLVKHDL

SEQ ID NO: 68351 - protein, 7 aa, synthetic construct
KQTMTNA

SEQ ID NO: 68352 - protein, 7 aa, synthetic construct
MPRTTAP

SEQ ID NO: 68353 - protein, 7 aa, synthetic construct
PVKGKLP

SEQ ID NO: 68354 - protein, 7 aa, synthetic construct
SPKPNYD

SEQ ID NO: 68355 - protein, 7 aa, synthetic construct
YNNTKQG

SEQ ID NO: 68356 - protein, 7 aa, synthetic construct
EDQGKVA

SEQ ID NO: 68357 - protein, 7 aa, synthetic construct
NIREYPR

SEQ ID NO: 68358 - protein, 7 aa, synthetic construct
HRHQLAE

SEQ ID NO: 68359 - protein, 7 aa, synthetic construct
GFPQNPQ

SEQ ID NO: 68360 - protein, 7 aa, synthetic construct
RPKETSI

SEQ ID NO: 68361 - protein, 7 aa, synthetic construct
QQALKPA

SEQ ID NO: 68362 - protein, 7 aa, synthetic construct
NTRTLEM

SEQ ID NO: 68363 - protein, 7 aa, synthetic construct
HDIMRVG

SEQ ID NO: 68364 - protein, 7 aa, synthetic construct
TVKSLAH

SEQ ID NO: 68365 - protein, 7 aa, synthetic construct
HAAYKHV

SEQ ID NO: 68366 - protein, 7 aa, synthetic construct
QHGVNRD

SEQ ID NO: 68367 - protein, 7 aa, synthetic construct
MARVDDK

SEQ ID NO: 68368 - protein, 7 aa, synthetic construct
FHNVGNE

SEQ ID NO: 68369 - protein, 7 aa, synthetic construct
EFSVQRG

SEQ ID NO: 68370 - protein, 7 aa, synthetic construct
KPSNSPG

SEQ ID NO: 68371 - protein, 7 aa, synthetic construct
GALHTGE

SEQ ID NO: 68372 - protein, 7 aa, synthetic construct
PKRETGH

SEQ ID NO: 68373 - protein, 7 aa, synthetic construct
NSHYGKA

SEQ ID NO: 68374 - protein, 7 aa, synthetic construct
RAAEAQG

SEQ ID NO: 68375 - protein, 7 aa, synthetic construct
EMRDTKK

SEQ ID NO: 68376 - protein, 7 aa, synthetic construct
WPSNKGV

SEQ ID NO: 68377 - protein, 7 aa, synthetic construct
VSNKEQF

SEQ ID NO: 68378 - protein, 7 aa, synthetic construct
VAFKTNI

SEQ ID NO: 68379 - protein, 7 aa, synthetic construct
LNRGVMD

SEQ ID NO: 68380 - protein, 7 aa, synthetic construct
RNISAPT

SEQ ID NO: 68381 - protein, 7 aa, synthetic construct
MDSIHTS

SEQ ID NO: 68382 - protein, 7 aa, synthetic construct
LGNTNSS

SEQ ID NO: 68383 - protein, 7 aa, synthetic construct
SLRVQIP

SEQ ID NO: 68384 - protein, 7 aa, synthetic construct
SKEKPYN

SEQ ID NO: 68385 - protein, 7 aa, synthetic construct
EFAFGKN

SEQ ID NO: 68386 - protein, 7 aa, synthetic construct
LSQQVAY

SEQ ID NO: 68387 - protein, 7 aa, synthetic construct
MASKNTG

SEQ ID NO: 68388 - protein, 7 aa, synthetic construct
ERPPPPM

SEQ ID NO: 68389 - protein, 7 aa, synthetic construct
HFLAGQP

SEQ ID NO: 68390 - protein, 7 aa, synthetic construct
FLVQKPP

SEQ ID NO: 68391 - protein, 7 aa, synthetic construct
GDRMAQA

SEQ ID NO: 68392 - protein, 7 aa, synthetic construct
IKTYDNK

SEQ ID NO: 68393 - protein, 7 aa, synthetic construct
TSVSPLI

SEQ ID NO: 68394 - protein, 7 aa, synthetic construct
EVGGAKG

SEQ ID NO: 68395 - protein, 7 aa, synthetic construct
RPGSTTS

SEQ ID NO: 68396 - protein, 7 aa, synthetic construct
YKNQSQS

SEQ ID NO: 68397 - protein, 7 aa, synthetic construct
TMNRGGG

SEQ ID NO: 68398 - protein, 7 aa, synthetic construct
HPQYNVQ

SEQ ID NO: 68399 - protein, 7 aa, synthetic construct
EMGSKNS

SEQ ID NO: 68400 - protein, 7 aa, synthetic construct
FHNGGVM

SEQ ID NO: 68401 - protein, 7 aa, synthetic construct
SPKFEFV

SEQ ID NO: 68402 - protein, 7 aa, synthetic construct
IKIKLGD

SEQ ID NO: 68403 - protein, 7 aa, synthetic construct
YDHMARQ

SEQ ID NO: 68404 - protein, 7 aa, synthetic construct
DPEHTEF

SEQ ID NO: 68405 - protein, 7 aa, synthetic construct
GAKEKAT

SEQ ID NO: 68406 - protein, 7 aa, synthetic construct
VSKRLMD

SEQ ID NO: 68407 - protein, 7 aa, synthetic construct
NKSGAQS

SEQ ID NO: 68408 - protein, 7 aa, synthetic construct
RSSFMSE

SEQ ID NO: 68409 - protein, 7 aa, synthetic construct
PKPALNG

SEQ ID NO: 68410 - protein, 7 aa, synthetic construct
TYPETRT

SEQ ID NO: 68411 - protein, 7 aa, synthetic construct
MFRSQSQ

SEQ ID NO: 68412 - protein, 7 aa, synthetic construct
WHSQTGE

SEQ ID NO: 68413 - protein, 7 aa, synthetic construct
NNTSNKG

SEQ ID NO: 68414 - protein, 7 aa, synthetic construct
HPIVSGV

SEQ ID NO: 68415 - protein, 7 aa, synthetic construct
NPKSVGP

SEQ ID NO: 68416 - protein, 7 aa, synthetic construct
PVSKQND

SEQ ID NO: 68417 - protein, 7 aa, synthetic construct
RSPRDPT

SEQ ID NO: 68418 - protein, 7 aa, synthetic construct
LMNNAIH

SEQ ID NO: 68419 - protein, 7 aa, synthetic construct
DSRVKKE

SEQ ID NO: 68420 - protein, 7 aa, synthetic construct
AMVSNKD

SEQ ID NO: 68421 - protein, 7 aa, synthetic construct
VFPIHKE

SEQ ID NO: 68422 - protein, 7 aa, synthetic construct
DRWHGKD

SEQ ID NO: 68423 - protein, 7 aa, synthetic construct
PVMANMG

SEQ ID NO: 68424 - protein, 7 aa, synthetic construct
FKDKDGH

SEQ ID NO: 68425 - protein, 7 aa, synthetic construct
DFAAKDT

SEQ ID NO: 68426 - protein, 7 aa, synthetic construct
QDRSHGV

SEQ ID NO: 68427 - protein, 7 aa, synthetic construct
NQRGREH

SEQ ID NO: 68428 - protein, 7 aa, synthetic construct
MQTAMPH

SEQ ID NO: 68429 - protein, 7 aa, synthetic construct
VGKAQNL

SEQ ID NO: 68430 - protein, 7 aa, synthetic construct
VGGIMIR

SEQ ID NO: 68431 - protein, 7 aa, synthetic construct
FRSGYNE

SEQ ID NO: 68432 - protein, 7 aa, synthetic construct
PPTNQKQ

SEQ ID NO: 68433 - protein, 7 aa, synthetic construct
PAFHAHE

SEQ ID NO: 68434 - protein, 7 aa, synthetic construct
HTGSQTE

SEQ ID NO: 68435 - protein, 7 aa, synthetic construct
GLPLFTE

SEQ ID NO: 68436 - protein, 7 aa, synthetic construct
RTNDAHS

SEQ ID NO: 68437 - protein, 7 aa, synthetic construct
AGSMPTQ

SEQ ID NO: 68438 - protein, 7 aa, synthetic construct
TPPGRGL

SEQ ID NO: 68439 - protein, 7 aa, synthetic construct
MTNAGRG

SEQ ID NO: 68440 - protein, 7 aa, synthetic construct
YDPHSQL

SEQ ID NO: 68441 - protein, 7 aa, synthetic construct
GPQALRQ

SEQ ID NO: 68442 - protein, 7 aa, synthetic construct
DDWRNPK

SEQ ID NO: 68443 - protein, 7 aa, synthetic construct
HQNEVRM

SEQ ID NO: 68444 - protein, 7 aa, synthetic construct
WQVDRDG

SEQ ID NO: 68445 - protein, 7 aa, synthetic construct
IHTKAFM

SEQ ID NO: 68446 - protein, 7 aa, synthetic construct
RTVDFAG

SEQ ID NO: 68447 - protein, 7 aa, synthetic construct
SGPGTYK

SEQ ID NO: 68448 - protein, 7 aa, synthetic construct
SQKMQNA

SEQ ID NO: 68449 - protein, 7 aa, synthetic construct
DKRIHSM

SEQ ID NO: 68450 - protein, 7 aa, synthetic construct
FSGKAEH

SEQ ID NO: 68451 - protein, 7 aa, synthetic construct
KPNKDGG

SEQ ID NO: 68452 - protein, 7 aa, synthetic construct
IQIAVGA

SEQ ID NO: 68453 - protein, 7 aa, synthetic construct
DVKERQK

SEQ ID NO: 68454 - protein, 7 aa, synthetic construct
LKIPAAH

SEQ ID NO: 68455 - protein, 7 aa, synthetic construct
AARGYNV

SEQ ID NO: 68456 - protein, 7 aa, synthetic construct
QKSVPER

SEQ ID NO: 68457 - protein, 7 aa, synthetic construct
ALSEKKP

SEQ ID NO: 68458 - protein, 7 aa, synthetic construct
MSLMKID

SEQ ID NO: 68459 - protein, 7 aa, synthetic construct
RPANTQG

SEQ ID NO: 68460 - protein, 7 aa, synthetic construct
NTHIRSS

SEQ ID NO: 68461 - protein, 7 aa, synthetic construct
KPAYSGP

SEQ ID NO: 68462 - protein, 7 aa, synthetic construct
TVAGRAY

SEQ ID NO: 68463 - protein, 7 aa, synthetic construct
DGKRAGP

SEQ ID NO: 68464 - protein, 7 aa, synthetic construct
FKATGQS

SEQ ID NO: 68465 - protein, 7 aa, synthetic construct
KLTQAGT

SEQ ID NO: 68466 - protein, 7 aa, synthetic construct
RNGAAEA

SEQ ID NO: 68467 - protein, 7 aa, synthetic construct
ESVPRSP

SEQ ID NO: 68468 - protein, 7 aa, synthetic construct
KAGAEMH

SEQ ID NO: 68469 - protein, 7 aa, synthetic construct
KGVIQHI

SEQ ID NO: 68470 - protein, 7 aa, synthetic construct
FAANGTI

SEQ ID NO: 68471 - protein, 7 aa, synthetic construct
RYEKPLN

SEQ ID NO: 68472 - protein, 7 aa, synthetic construct
TRNNGSV

SEQ ID NO: 68473 - protein, 7 aa, synthetic construct
SPRDMSR

SEQ ID NO: 68474 - protein, 7 aa, synthetic construct
TNGRTNP

SEQ ID NO: 68475 - protein, 7 aa, synthetic construct
MPTKFIE

SEQ ID NO: 68476 - protein, 7 aa, synthetic construct
EVRTTAG

SEQ ID NO: 68477 - protein, 7 aa, synthetic construct
VKPKNEN

SEQ ID NO: 68478 - protein, 7 aa, synthetic construct
FNASVKN

SEQ ID NO: 68479 - protein, 7 aa, synthetic construct
AKSHAIL

SEQ ID NO: 68480 - protein, 7 aa, synthetic construct
MTHAMQN

SEQ ID NO: 68481 - protein, 7 aa, synthetic construct
GNVRGSP

SEQ ID NO: 68482 - protein, 7 aa, synthetic construct
KSAVSNS

SEQ ID NO: 68483 - protein, 7 aa, synthetic construct
NDQMQRP

SEQ ID NO: 68484 - protein, 7 aa, synthetic construct
REHAVGN

SEQ ID NO: 68485 - protein, 7 aa, synthetic construct
EYRIRDS

SEQ ID NO: 68486 - protein, 7 aa, synthetic construct
TAQKDIG

SEQ ID NO: 68487 - protein, 7 aa, synthetic construct
YKPTTSP

SEQ ID NO: 68488 - protein, 7 aa, synthetic construct
MNQNRFP

SEQ ID NO: 68489 - protein, 7 aa, synthetic construct
HQNSTSG

SEQ ID NO: 68490 - protein, 7 aa, synthetic construct
PRSMHEI

SEQ ID NO: 68491 - protein, 7 aa, synthetic construct
HNGIRDS

SEQ ID NO: 68492 - protein, 7 aa, synthetic construct
KNENMFL

SEQ ID NO: 68493 - protein, 7 aa, synthetic construct
ASGNSVG

SEQ ID NO: 68494 - protein, 7 aa, synthetic construct
SEVKVGR

SEQ ID NO: 68495 - protein, 7 aa, synthetic construct
RPGQVTA

SEQ ID NO: 68496 - protein, 7 aa, synthetic construct
NERDYVK

SEQ ID NO: 68497 - protein, 7 aa, synthetic construct
IKLGRSD

SEQ ID NO: 68498 - protein, 7 aa, synthetic construct
WQNKSTN

SEQ ID NO: 68499 - protein, 7 aa, synthetic construct
SGTNGVP

SEQ ID NO: 68500 - protein, 7 aa, synthetic construct
AMSKGGF

SEQ ID NO: 68501 - protein, 7 aa, synthetic construct
GGGRYAE

SEQ ID NO: 68502 - protein, 7 aa, synthetic construct
SKFNNQG

SEQ ID NO: 68503 - protein, 7 aa, synthetic construct
MVRDAHN

SEQ ID NO: 68504 - protein, 7 aa, synthetic construct
NQKMQGN

SEQ ID NO: 68505 - protein, 7 aa, synthetic construct
GVHLGKI

SEQ ID NO: 68506 - protein, 7 aa, synthetic construct
NSASRPD

SEQ ID NO: 68507 - protein, 7 aa, synthetic construct
RHTAFSE

SEQ ID NO: 68508 - protein, 7 aa, synthetic construct
HPHTAHG

SEQ ID NO: 68509 - protein, 7 aa, synthetic construct
MAAHPMA

SEQ ID NO: 68510 - protein, 7 aa, synthetic construct
AIDGNKS

SEQ ID NO: 68511 - protein, 7 aa, synthetic construct
MRKDLVP

SEQ ID NO: 68512 - protein, 7 aa, synthetic construct
LNKDAIF

SEQ ID NO: 68513 - protein, 7 aa, synthetic construct
CKGEVCY

SEQ ID NO: 68514 - protein, 7 aa, synthetic construct
IPYQEKA

SEQ ID NO: 68515 - protein, 7 aa, synthetic construct
RHQHAID

SEQ ID NO: 68516 - protein, 7 aa, synthetic construct
EKEMWRG

SEQ ID NO: 68517 - protein, 7 aa, synthetic construct
LGREYSS

SEQ ID NO: 68518 - protein, 7 aa, synthetic construct
VHKMNMP

SEQ ID NO: 68519 - protein, 7 aa, synthetic construct
TGQSVKG

SEQ ID NO: 68520 - protein, 7 aa, synthetic construct
PEHKGIP

SEQ ID NO: 68521 - protein, 7 aa, synthetic construct
KLGGEFA

SEQ ID NO: 68522 - protein, 7 aa, synthetic construct
RHGPQSA

SEQ ID NO: 68523 - protein, 7 aa, synthetic construct
NMRNQQD

SEQ ID NO: 68524 - protein, 7 aa, synthetic construct
PNTHAPL

SEQ ID NO: 68525 - protein, 7 aa, synthetic construct
VVNSMQG

SEQ ID NO: 68526 - protein, 7 aa, synthetic construct
KNNSGPN

SEQ ID NO: 68527 - protein, 7 aa, synthetic construct
TDRTNTK

SEQ ID NO: 68528 - protein, 7 aa, synthetic construct
YNLNLAA

SEQ ID NO: 68529 - protein, 7 aa, synthetic construct
RPTFSED

SEQ ID NO: 68530 - protein, 7 aa, synthetic construct
KVNGDQF

SEQ ID NO: 68531 - protein, 7 aa, synthetic construct
DPVHKAE

SEQ ID NO: 68532 - protein, 7 aa, synthetic construct
LNHSMQN

SEQ ID NO: 68533 - protein, 7 aa, synthetic construct
KIKAEPY

SEQ ID NO: 68534 - protein, 7 aa, synthetic construct
EKYQVEH

SEQ ID NO: 68535 - protein, 7 aa, synthetic construct
LSPSVRI

SEQ ID NO: 68536 - protein, 7 aa, synthetic construct
KNSMGSP

SEQ ID NO: 68537 - protein, 7 aa, synthetic construct
YGARDQL

SEQ ID NO: 68538 - protein, 7 aa, synthetic construct
SRYMNME

SEQ ID NO: 68539 - protein, 7 aa, synthetic construct
FPHDKSI

SEQ ID NO: 68540 - protein, 7 aa, synthetic construct
TTVNTYP

SEQ ID NO: 68541 - protein, 7 aa, synthetic construct
RYMEGAK

SEQ ID NO: 68542 - protein, 7 aa, synthetic construct
VKTSAHD

SEQ ID NO: 68543 - protein, 7 aa, synthetic construct
GMHMKQA

SEQ ID NO: 68544 - protein, 7 aa, synthetic construct
PQKNSQS

SEQ ID NO: 68545 - protein, 7 aa, synthetic construct
NPNQAGR

SEQ ID NO: 68546 - protein, 7 aa, synthetic construct
TGSNMRH

SEQ ID NO: 68547 - protein, 7 aa, synthetic construct
MSRTNWE

SEQ ID NO: 68548 - protein, 7 aa, synthetic construct
QEYSPHA

SEQ ID NO: 68549 - protein, 7 aa, synthetic construct
RITARAD

SEQ ID NO: 68550 - protein, 7 aa, synthetic construct
GTMNIAS

SEQ ID NO: 68551 - protein, 7 aa, synthetic construct
KQPSAKD

SEQ ID NO: 68552 - protein, 7 aa, synthetic construct
LGGTDPK

SEQ ID NO: 68553 - protein, 7 aa, synthetic construct
KGSQNAG

SEQ ID NO: 68554 - protein, 7 aa, synthetic construct
KQQTPGA

SEQ ID NO: 68555 - protein, 7 aa, synthetic construct
AVNAKIP

SEQ ID NO: 68556 - protein, 7 aa, synthetic construct
LIKTVDI

SEQ ID NO: 68557 - protein, 7 aa, synthetic construct
EVSIRLA

SEQ ID NO: 68558 - protein, 7 aa, synthetic construct
ERNIVAH

SEQ ID NO: 68559 - protein, 7 aa, synthetic construct
NKTTGQM

SEQ ID NO: 68560 - protein, 7 aa, synthetic construct
RVGFDAQ

SEQ ID NO: 68561 - protein, 7 aa, synthetic construct
MIMDHRE

SEQ ID NO: 68562 - protein, 7 aa, synthetic construct
MAQSYKE

SEQ ID NO: 68563 - protein, 7 aa, synthetic construct
YYSSNQP

SEQ ID NO: 68564 - protein, 7 aa, synthetic construct
NKAPGTS

SEQ ID NO: 68565 - protein, 7 aa, synthetic construct
RTTNMLA

SEQ ID NO: 68566 - protein, 7 aa, synthetic construct
FNERGHI

SEQ ID NO: 68567 - protein, 7 aa, synthetic construct
NNGQNKA

SEQ ID NO: 68568 - protein, 7 aa, synthetic construct
NNKIHQI

SEQ ID NO: 68569 - protein, 7 aa, synthetic construct
YRSVEKI

SEQ ID NO: 68570 - protein, 7 aa, synthetic construct
MSVASMA

SEQ ID NO: 68571 - protein, 7 aa, synthetic construct
TYKSITH

SEQ ID NO: 68572 - protein, 7 aa, synthetic construct
GHVPQQR

SEQ ID NO: 68573 - protein, 7 aa, synthetic construct
GRFDRVT

SEQ ID NO: 68574 - protein, 7 aa, synthetic construct
SDRVGAA

SEQ ID NO: 68575 - protein, 7 aa, synthetic construct
GRNDMQS

SEQ ID NO: 68576 - protein, 7 aa, synthetic construct
LFDSLNK

SEQ ID NO: 68577 - protein, 7 aa, synthetic construct
IPQMNNR

SEQ ID NO: 68578 - protein, 7 aa, synthetic construct
LDSHYAR

SEQ ID NO: 68579 - protein, 7 aa, synthetic construct
GEQTKNP

SEQ ID NO: 68580 - protein, 7 aa, synthetic construct
NQGKTIN

SEQ ID NO: 68581 - protein, 7 aa, synthetic construct
QNQFHSA

SEQ ID NO: 68582 - protein, 7 aa, synthetic construct
HENVKNN

SEQ ID NO: 68583 - protein, 7 aa, synthetic construct
SPKNTSG

SEQ ID NO: 68584 - protein, 7 aa, synthetic construct
NTASWKP

SEQ ID NO: 68585 - protein, 7 aa, synthetic construct
FYETTKP

SEQ ID NO: 68586 - protein, 7 aa, synthetic construct
RQMAKVD

SEQ ID NO: 68587 - protein, 7 aa, synthetic construct
DMPHAKL

SEQ ID NO: 68588 - protein, 7 aa, synthetic construct
KNSMINS

SEQ ID NO: 68589 - protein, 7 aa, synthetic construct
AGKMNGA

SEQ ID NO: 68590 - protein, 7 aa, synthetic construct
SSKQQQI

SEQ ID NO: 68591 - protein, 7 aa, synthetic construct
DATRSPG

SEQ ID NO: 68592 - protein, 7 aa, synthetic construct
AEAYTVA

SEQ ID NO: 68593 - protein, 7 aa, synthetic construct
QFRKELN

SEQ ID NO: 68594 - protein, 7 aa, synthetic construct
DQRGKPY

SEQ ID NO: 68595 - protein, 7 aa, synthetic construct
KRFDQVD

SEQ ID NO: 68596 - protein, 7 aa, synthetic construct
KIQGIGA

SEQ ID NO: 68597 - protein, 7 aa, synthetic construct
NWHKQTS

SEQ ID NO: 68598 - protein, 7 aa, synthetic construct
MMKFEQH

SEQ ID NO: 68599 - protein, 7 aa, synthetic construct
NGKNDKP

SEQ ID NO: 68600 - protein, 7 aa, synthetic construct
GQSIKGG

SEQ ID NO: 68601 - protein, 7 aa, synthetic construct
DKKPTQG

SEQ ID NO: 68602 - protein, 7 aa, synthetic construct
KSTSERQ

SEQ ID NO: 68603 - protein, 7 aa, synthetic construct
NKPSFKE

SEQ ID NO: 68604 - protein, 7 aa, synthetic construct
VYGHKGT

SEQ ID NO: 68605 - protein, 7 aa, synthetic construct
QKATSQS

SEQ ID NO: 68606 - protein, 7 aa, synthetic construct
MYPKNAA

SEQ ID NO: 68607 - protein, 7 aa, synthetic construct
VGVVTMV

SEQ ID NO: 68608 - protein, 7 aa, synthetic construct
MKGVNQA

SEQ ID NO: 68609 - protein, 7 aa, synthetic construct
LKNPNLY

SEQ ID NO: 68610 - protein, 7 aa, synthetic construct
ADRAKDW

SEQ ID NO: 68611 - protein, 7 aa, synthetic construct
QHNIHQE

SEQ ID NO: 68612 - protein, 7 aa, synthetic construct
DTPKLRD

SEQ ID NO: 68613 - protein, 7 aa, synthetic construct
TPSLLKP

SEQ ID NO: 68614 - protein, 7 aa, synthetic construct
TATQQIG

SEQ ID NO: 68615 - protein, 7 aa, synthetic construct
DLLRTEA

SEQ ID NO: 68616 - protein, 7 aa, synthetic construct
VRPGSYV

SEQ ID NO: 68617 - protein, 7 aa, synthetic construct
NKQGTKD

SEQ ID NO: 68618 - protein, 7 aa, synthetic construct
TKNATSQ

SEQ ID NO: 68619 - protein, 7 aa, synthetic construct
IMARFKE

SEQ ID NO: 68620 - protein, 7 aa, synthetic construct
YGGRIIP

SEQ ID NO: 68621 - protein, 7 aa, synthetic construct
QMYNGQL

SEQ ID NO: 68622 - protein, 7 aa, synthetic construct
KTGGNAP

SEQ ID NO: 68623 - protein, 7 aa, synthetic construct
KVYPTIE

SEQ ID NO: 68624 - protein, 7 aa, synthetic construct
KTTKYQD

SEQ ID NO: 68625 - protein, 7 aa, synthetic construct
DFVTTRI

SEQ ID NO: 68626 - protein, 7 aa, synthetic construct
GTQQNRH

SEQ ID NO: 68627 - protein, 7 aa, synthetic construct
QFMGGAH

SEQ ID NO: 68628 - protein, 7 aa, synthetic construct
KISATAA

SEQ ID NO: 68629 - protein, 7 aa, synthetic construct
NGEKQWG

SEQ ID NO: 68630 - protein, 7 aa, synthetic construct
RSIHGAT

SEQ ID NO: 68631 - protein, 7 aa, synthetic construct
IPKYVQD

SEQ ID NO: 68632 - protein, 7 aa, synthetic construct
GDRIVHS

SEQ ID NO: 68633 - protein, 7 aa, synthetic construct
KDGTKNA

SEQ ID NO: 68634 - protein, 7 aa, synthetic construct
DRNKPTQ

SEQ ID NO: 68635 - protein, 7 aa, synthetic construct
NWDGTKS

SEQ ID NO: 68636 - protein, 7 aa, synthetic construct
MKGTTNG

SEQ ID NO: 68637 - protein, 7 aa, synthetic construct
GWLASQG

SEQ ID NO: 68638 - protein, 7 aa, synthetic construct
SAQRVQS

SEQ ID NO: 68639 - protein, 7 aa, synthetic construct
AHKATEA

SEQ ID NO: 68640 - protein, 7 aa, synthetic construct
RDQKLSH

SEQ ID NO: 68641 - protein, 7 aa, synthetic construct
GQRQDLI

SEQ ID NO: 68642 - protein, 7 aa, synthetic construct
DFMPKMG

SEQ ID NO: 68643 - protein, 7 aa, synthetic construct
PNAMPGF

SEQ ID NO: 68644 - protein, 7 aa, synthetic construct
KFEEQKN

SEQ ID NO: 68645 - protein, 7 aa, synthetic construct
TPAYGNV

SEQ ID NO: 68646 - protein, 7 aa, synthetic construct
ETAQRPR

SEQ ID NO: 68647 - protein, 7 aa, synthetic construct
MTRSASI

SEQ ID NO: 68648 - protein, 7 aa, synthetic construct
TAKFEAT

SEQ ID NO: 68649 - protein, 7 aa, synthetic construct
KTQGLQA

SEQ ID NO: 68650 - protein, 7 aa, synthetic construct
QNMKYAH

SEQ ID NO: 68651 - protein, 7 aa, synthetic construct
NGKESVF

SEQ ID NO: 68652 - protein, 7 aa, synthetic construct
YHPMGHD

SEQ ID NO: 68653 - protein, 7 aa, synthetic construct
ENRMKSG

SEQ ID NO: 68654 - protein, 7 aa, synthetic construct
HAREWGD

SEQ ID NO: 68655 - protein, 7 aa, synthetic construct
EGDNKQI

SEQ ID NO: 68656 - protein, 7 aa, synthetic construct
QKWNNND

SEQ ID NO: 68657 - protein, 7 aa, synthetic construct
KPITHAQ

SEQ ID NO: 68658 - protein, 7 aa, synthetic construct
MMVKAHP

SEQ ID NO: 68659 - protein, 7 aa, synthetic construct
SGKQQNG

SEQ ID NO: 68660 - protein, 7 aa, synthetic construct
RDQTPRV

SEQ ID NO: 68661 - protein, 7 aa, synthetic construct
SEQAVKV

SEQ ID NO: 68662 - protein, 7 aa, synthetic construct
NINVGRV

SEQ ID NO: 68663 - protein, 7 aa, synthetic construct
GQNQPHG

SEQ ID NO: 68664 - protein, 7 aa, synthetic construct
SWKMDDI

SEQ ID NO: 68665 - protein, 7 aa, synthetic construct
LVRNQMA

SEQ ID NO: 68666 - protein, 7 aa, synthetic construct
NKPFQTE

SEQ ID NO: 68667 - protein, 7 aa, synthetic construct
GKMVGDA

SEQ ID NO: 68668 - protein, 7 aa, synthetic construct
ISIGKGE

SEQ ID NO: 68669 - protein, 7 aa, synthetic construct
DYRNTTA

SEQ ID NO: 68670 - protein, 7 aa, synthetic construct
LDVRAIR

SEQ ID NO: 68671 - protein, 7 aa, synthetic construct
KQDQNWG

SEQ ID NO: 68672 - protein, 7 aa, synthetic construct
HMGAPVA

SEQ ID NO: 68673 - protein, 7 aa, synthetic construct
MNRGMQA

SEQ ID NO: 68674 - protein, 7 aa, synthetic construct
QQSHHAI

SEQ ID NO: 68675 - protein, 7 aa, synthetic construct
GTKPAVI

SEQ ID NO: 68676 - protein, 7 aa, synthetic construct
PSAHANL

SEQ ID NO: 68677 - protein, 7 aa, synthetic construct
QMPIQKH

SEQ ID NO: 68678 - protein, 7 aa, synthetic construct
RMPNTAA

SEQ ID NO: 68679 - protein, 7 aa, synthetic construct
HAGRNEV

SEQ ID NO: 68680 - protein, 7 aa, synthetic construct
TAMAPHP

SEQ ID NO: 68681 - protein, 7 aa, synthetic construct
GNSAQGG

SEQ ID NO: 68682 - protein, 7 aa, synthetic construct
FKHTDFE

SEQ ID NO: 68683 - protein, 7 aa, synthetic construct
SNQHKTM

SEQ ID NO: 68684 - protein, 7 aa, synthetic construct
SLYPKQI

SEQ ID NO: 68685 - protein, 7 aa, synthetic construct
RNQPAGA

SEQ ID NO: 68686 - protein, 7 aa, synthetic construct
GNDPHRA

SEQ ID NO: 68687 - protein, 7 aa, synthetic construct
TGPHGVD

SEQ ID NO: 68688 - protein, 7 aa, synthetic construct
TRGDSLW

SEQ ID NO: 68689 - protein, 7 aa, synthetic construct
NIVESKI

SEQ ID NO: 68690 - protein, 7 aa, synthetic construct
QRGNNNA

SEQ ID NO: 68691 - protein, 7 aa, synthetic construct
SVKQSQY

SEQ ID NO: 68692 - protein, 7 aa, synthetic construct
NVNKGTG

SEQ ID NO: 68693 - protein, 7 aa, synthetic construct
HTPHYEG

SEQ ID NO: 68694 - protein, 7 aa, synthetic construct
NVGNHAH

SEQ ID NO: 68695 - protein, 7 aa, synthetic construct
RADIYSS

SEQ ID NO: 68696 - protein, 7 aa, synthetic construct
SGKQIVV

SEQ ID NO: 68697 - protein, 7 aa, synthetic construct
GNHSKIQ

SEQ ID NO: 68698 - protein, 7 aa, synthetic construct
AGPPTTV

SEQ ID NO: 68699 - protein, 7 aa, synthetic construct
LVGHMMN

SEQ ID NO: 68700 - protein, 7 aa, synthetic construct
VKIAQEG

SEQ ID NO: 68701 - protein, 7 aa, synthetic construct
NISSQVH

SEQ ID NO: 68702 - protein, 7 aa, synthetic construct
NGKFKDH

SEQ ID NO: 68703 - protein, 7 aa, synthetic construct
LTRDVAM

SEQ ID NO: 68704 - protein, 7 aa, synthetic construct
YRLESKT

SEQ ID NO: 68705 - protein, 7 aa, synthetic construct
IKDTKVG

SEQ ID NO: 68706 - protein, 7 aa, synthetic construct
PGNKMTP

SEQ ID NO: 68707 - protein, 7 aa, synthetic construct
SPFPAKP

SEQ ID NO: 68708 - protein, 7 aa, synthetic construct
SPQRSGP

SEQ ID NO: 68709 - protein, 7 aa, synthetic construct
QAGWSHS

SEQ ID NO: 68710 - protein, 7 aa, synthetic construct
HPKHTGH

SEQ ID NO: 68711 - protein, 7 aa, synthetic construct
NHERGSL

SEQ ID NO: 68712 - protein, 7 aa, synthetic construct
NTASPFR

SEQ ID NO: 68713 - protein, 7 aa, synthetic construct
VREAHRV

SEQ ID NO: 68714 - protein, 7 aa, synthetic construct
MKRVAEV

SEQ ID NO: 68715 - protein, 7 aa, synthetic construct
NKNINSG

SEQ ID NO: 68716 - protein, 7 aa, synthetic construct
NNGHLTT

SEQ ID NO: 68717 - protein, 7 aa, synthetic construct
TMKEQNI

SEQ ID NO: 68718 - protein, 7 aa, synthetic construct
STSNGKG

SEQ ID NO: 68719 - protein, 7 aa, synthetic construct
RSTGPPN

SEQ ID NO: 68720 - protein, 7 aa, synthetic construct
KLGASAI

SEQ ID NO: 68721 - protein, 7 aa, synthetic construct
VGSTPKQ

SEQ ID NO: 68722 - protein, 7 aa, synthetic construct
KLTILAG

SEQ ID NO: 68723 - protein, 7 aa, synthetic construct
SERQQLS

SEQ ID NO: 68724 - protein, 7 aa, synthetic construct
WMRDKEV

SEQ ID NO: 68725 - protein, 7 aa, synthetic construct
GLISSTI

SEQ ID NO: 68726 - protein, 7 aa, synthetic construct
LSPMTVV

SEQ ID NO: 68727 - protein, 7 aa, synthetic construct
KMPGNSA

SEQ ID NO: 68728 - protein, 7 aa, synthetic construct
QMNRTIN

SEQ ID NO: 68729 - protein, 7 aa, synthetic construct
LSGNRHV

SEQ ID NO: 68730 - protein, 7 aa, synthetic construct
KQSNQSP

SEQ ID NO: 68731 - protein, 7 aa, synthetic construct
VTGDSLK

SEQ ID NO: 68732 - protein, 7 aa, synthetic construct
NKSPTNA

SEQ ID NO: 68733 - protein, 7 aa, synthetic construct
NQSGRNV

SEQ ID NO: 68734 - protein, 7 aa, synthetic construct
VSSADRA

SEQ ID NO: 68735 - protein, 7 aa, synthetic construct
GKPQWSQ

SEQ ID NO: 68736 - protein, 7 aa, synthetic construct
PMINAGI

SEQ ID NO: 68737 - protein, 7 aa, synthetic construct
FKSSEHS

SEQ ID NO: 68738 - protein, 7 aa, synthetic construct
PHKADIS

SEQ ID NO: 68739 - protein, 7 aa, synthetic construct
QSQQGQP

SEQ ID NO: 68740 - protein, 7 aa, synthetic construct
RKDAGSS

SEQ ID NO: 68741 - protein, 7 aa, synthetic construct
FKTGHDF

SEQ ID NO: 68742 - protein, 7 aa, synthetic construct
ISLQMKQ

SEQ ID NO: 68743 - protein, 7 aa, synthetic construct
FKEQKNQ

SEQ ID NO: 68744 - protein, 7 aa, synthetic construct
APRLMHA

SEQ ID NO: 68745 - protein, 7 aa, synthetic construct
VTQHPEP

SEQ ID NO: 68746 - protein, 7 aa, synthetic construct
NVRSAQG

SEQ ID NO: 68747 - protein, 7 aa, synthetic construct
AFMKTHP

SEQ ID NO: 68748 - protein, 7 aa, synthetic construct
QHVSMAS

SEQ ID NO: 68749 - protein, 7 aa, synthetic construct
GKATLNG

SEQ ID NO: 68750 - protein, 7 aa, synthetic construct
VKAQKQD

SEQ ID NO: 68751 - protein, 7 aa, synthetic construct
ERGKFPF

SEQ ID NO: 68752 - protein, 7 aa, synthetic construct
RGVLLVE

SEQ ID NO: 68753 - protein, 7 aa, synthetic construct
QANPGHD

SEQ ID NO: 68754 - protein, 7 aa, synthetic construct
TIATAKD

SEQ ID NO: 68755 - protein, 7 aa, synthetic construct
RDNVGVT

SEQ ID NO: 68756 - protein, 7 aa, synthetic construct
AVAPKSN

SEQ ID NO: 68757 - protein, 7 aa, synthetic construct
QGATAKP

SEQ ID NO: 68758 - protein, 7 aa, synthetic construct
SHAPNQH

SEQ ID NO: 68759 - protein, 7 aa, synthetic construct
RMIGGNN

SEQ ID NO: 68760 - protein, 7 aa, synthetic construct
YKAPTAG

SEQ ID NO: 68761 - protein, 7 aa, synthetic construct
HDRSPNK

SEQ ID NO: 68762 - protein, 7 aa, synthetic construct
VTGRIAP

SEQ ID NO: 68763 - protein, 7 aa, synthetic construct
HVPETRL

SEQ ID NO: 68764 - protein, 7 aa, synthetic construct
IDNLARA

SEQ ID NO: 68765 - protein, 7 aa, synthetic construct
DNMIRKV

SEQ ID NO: 68766 - protein, 7 aa, synthetic construct
TQKSSQM

SEQ ID NO: 68767 - protein, 7 aa, synthetic construct
KQPMAHM

SEQ ID NO: 68768 - protein, 7 aa, synthetic construct
KPGSSTP

SEQ ID NO: 68769 - protein, 7 aa, synthetic construct
NRTASQP

SEQ ID NO: 68770 - protein, 7 aa, synthetic construct
APDKNQR

SEQ ID NO: 68771 - protein, 7 aa, synthetic construct
RSKTDDQ

SEQ ID NO: 68772 - protein, 7 aa, synthetic construct
RFQKDDY

SEQ ID NO: 68773 - protein, 7 aa, synthetic construct
KGDKGSG

SEQ ID NO: 68774 - protein, 7 aa, synthetic construct
WAVQKNP

SEQ ID NO: 68775 - protein, 7 aa, synthetic construct
THKTANS

SEQ ID NO: 68776 - protein, 7 aa, synthetic construct
STEYRLG

SEQ ID NO: 68777 - protein, 7 aa, synthetic construct
VPHQAPM

SEQ ID NO: 68778 - protein, 7 aa, synthetic construct
HHRVEDY

SEQ ID NO: 68779 - protein, 7 aa, synthetic construct
SMPSPLR

SEQ ID NO: 68780 - protein, 7 aa, synthetic construct
SSEKSGG

SEQ ID NO: 68781 - protein, 7 aa, synthetic construct
SKQSNAF

SEQ ID NO: 68782 - protein, 7 aa, synthetic construct
VDTINLR

SEQ ID NO: 68783 - protein, 7 aa, synthetic construct
WLHTGSD

SEQ ID NO: 68784 - protein, 7 aa, synthetic construct
KTSTFTP

SEQ ID NO: 68785 - protein, 7 aa, synthetic construct
DVLRKST

SEQ ID NO: 68786 - protein, 7 aa, synthetic construct
NRRDTDP

SEQ ID NO: 68787 - protein, 7 aa, synthetic construct
DKHKTYA

SEQ ID NO: 68788 - protein, 7 aa, synthetic construct
WSLGNDS

SEQ ID NO: 68789 - protein, 7 aa, synthetic construct
RAPHLAQ

SEQ ID NO: 68790 - protein, 7 aa, synthetic construct
QLTNAVP

SEQ ID NO: 68791 - protein, 7 aa, synthetic construct
LYNMTDK

SEQ ID NO: 68792 - protein, 7 aa, synthetic construct
LTNPTQE

SEQ ID NO: 68793 - protein, 7 aa, synthetic construct
AVKNGAL

SEQ ID NO: 68794 - protein, 7 aa, synthetic construct
IIKREAH

SEQ ID NO: 68795 - protein, 7 aa, synthetic construct
ISAMHHE

SEQ ID NO: 68796 - protein, 7 aa, synthetic construct
DPAKDKI

SEQ ID NO: 68797 - protein, 7 aa, synthetic construct
VHSKHIG

SEQ ID NO: 68798 - protein, 7 aa, synthetic construct
SRAGVDE

SEQ ID NO: 68799 - protein, 7 aa, synthetic construct
VKAKEPS

SEQ ID NO: 68800 - protein, 7 aa, synthetic construct
GGSTPIT

SEQ ID NO: 68801 - protein, 7 aa, synthetic construct
NPYNMPI

SEQ ID NO: 68802 - protein, 7 aa, synthetic construct
GKKEIAA

SEQ ID NO: 68803 - protein, 7 aa, synthetic construct
RDGVMRE

SEQ ID NO: 68804 - protein, 7 aa, synthetic construct
GHNKTPD

SEQ ID NO: 68805 - protein, 7 aa, synthetic construct
PLRVTEA

SEQ ID NO: 68806 - protein, 7 aa, synthetic construct
AHSKHGS

SEQ ID NO: 68807 - protein, 7 aa, synthetic construct
TRNGGNG

SEQ ID NO: 68808 - protein, 7 aa, synthetic construct
FNAHHPE

SEQ ID NO: 68809 - protein, 7 aa, synthetic construct
TPNKVTQ

SEQ ID NO: 68810 - protein, 7 aa, synthetic construct
IQTMVHG

SEQ ID NO: 68811 - protein, 7 aa, synthetic construct
KATSPAA

SEQ ID NO: 68812 - protein, 7 aa, synthetic construct
DQHYAVG

SEQ ID NO: 68813 - protein, 7 aa, synthetic construct
KVKGDAA

SEQ ID NO: 68814 - protein, 7 aa, synthetic construct
NNQGAGT

SEQ ID NO: 68815 - protein, 7 aa, synthetic construct
AMNRAES

SEQ ID NO: 68816 - protein, 7 aa, synthetic construct
SQKVSQG

SEQ ID NO: 68817 - protein, 7 aa, synthetic construct
KPFSEMA

SEQ ID NO: 68818 - protein, 7 aa, synthetic construct
WRTDGGN

SEQ ID NO: 68819 - protein, 7 aa, synthetic construct
SMVPAYG

SEQ ID NO: 68820 - protein, 7 aa, synthetic construct
LLRQNSV

SEQ ID NO: 68821 - protein, 7 aa, synthetic construct
IMKPHYA

SEQ ID NO: 68822 - protein, 7 aa, synthetic construct
TKDERRV

SEQ ID NO: 68823 - protein, 7 aa, synthetic construct
IAKARAE

SEQ ID NO: 68824 - protein, 7 aa, synthetic construct
NSPNVIV

SEQ ID NO: 68825 - protein, 7 aa, synthetic construct
LSPLRNL

SEQ ID NO: 68826 - protein, 7 aa, synthetic construct
VTSPSGR

SEQ ID NO: 68827 - protein, 7 aa, synthetic construct
PRLGQKD

SEQ ID NO: 68828 - protein, 7 aa, synthetic construct
SSKGAGE

SEQ ID NO: 68829 - protein, 7 aa, synthetic construct
ISTVQAS

SEQ ID NO: 68830 - protein, 7 aa, synthetic construct
HGGEMPT

SEQ ID NO: 68831 - protein, 7 aa, synthetic construct
NQKMLVH

SEQ ID NO: 68832 - protein, 7 aa, synthetic construct
FSKNSTA

SEQ ID NO: 68833 - protein, 7 aa, synthetic construct
THQYDHP

SEQ ID NO: 68834 - protein, 7 aa, synthetic construct
QLSKNHH

SEQ ID NO: 68835 - protein, 7 aa, synthetic construct
HQAGRAD

SEQ ID NO: 68836 - protein, 7 aa, synthetic construct
GLKAGSM

SEQ ID NO: 68837 - protein, 7 aa, synthetic construct
AQFGVHP

SEQ ID NO: 68838 - protein, 7 aa, synthetic construct
PTYGTSV

SEQ ID NO: 68839 - protein, 7 aa, synthetic construct
SKTAGNS

SEQ ID NO: 68840 - protein, 7 aa, synthetic construct
TVHKGGI

SEQ ID NO: 68841 - protein, 7 aa, synthetic construct
MWQDGSR

SEQ ID NO: 68842 - protein, 7 aa, synthetic construct
QHGAVMQ

SEQ ID NO: 68843 - protein, 7 aa, synthetic construct
GQGQASN

SEQ ID NO: 68844 - protein, 7 aa, synthetic construct
RGSEGKF

SEQ ID NO: 68845 - protein, 7 aa, synthetic construct
KKQFGEE

SEQ ID NO: 68846 - protein, 7 aa, synthetic construct
KRNEMEQ

SEQ ID NO: 68847 - protein, 7 aa, synthetic construct
WDKQQTG

SEQ ID NO: 68848 - protein, 7 aa, synthetic construct
GKQITNN

SEQ ID NO: 68849 - protein, 7 aa, synthetic construct
TAWNVET

SEQ ID NO: 68850 - protein, 7 aa, synthetic construct
HKVHNES

SEQ ID NO: 68851 - protein, 7 aa, synthetic construct
SKTSVTG

SEQ ID NO: 68852 - protein, 7 aa, synthetic construct
GHGQAGY

SEQ ID NO: 68853 - protein, 7 aa, synthetic construct
AVRGHAH

SEQ ID NO: 68854 - protein, 7 aa, synthetic construct
YGDRGTY

SEQ ID NO: 68855 - protein, 7 aa, synthetic construct
IKAGGQL

SEQ ID NO: 68856 - protein, 7 aa, synthetic construct
QKGHMYQ

SEQ ID NO: 68857 - protein, 7 aa, synthetic construct
REDRRTF

SEQ ID NO: 68858 - protein, 7 aa, synthetic construct
HKFMDGV

SEQ ID NO: 68859 - protein, 7 aa, synthetic construct
KIGHDAV

SEQ ID NO: 68860 - protein, 7 aa, synthetic construct
TKGPTSA

SEQ ID NO: 68861 - protein, 7 aa, synthetic construct
IRTIHHE

SEQ ID NO: 68862 - protein, 7 aa, synthetic construct
AEALGGR

SEQ ID NO: 68863 - protein, 7 aa, synthetic construct
FNQLTHG

SEQ ID NO: 68864 - protein, 7 aa, synthetic construct
NPRSQGV

SEQ ID NO: 68865 - protein, 7 aa, synthetic construct
TDTVHAH

SEQ ID NO: 68866 - protein, 7 aa, synthetic construct
MLHNNPR

SEQ ID NO: 68867 - protein, 7 aa, synthetic construct
HLHAKVA

SEQ ID NO: 68868 - protein, 7 aa, synthetic construct
GERASEP

SEQ ID NO: 68869 - protein, 7 aa, synthetic construct
LMRTEGI

SEQ ID NO: 68870 - protein, 7 aa, synthetic construct
YVPGSGV

SEQ ID NO: 68871 - protein, 7 aa, synthetic construct
LSSRVNE

SEQ ID NO: 68872 - protein, 7 aa, synthetic construct
TMGVPFD

SEQ ID NO: 68873 - protein, 7 aa, synthetic construct
QPHLNLD

SEQ ID NO: 68874 - protein, 7 aa, synthetic construct
TQNVKGG

SEQ ID NO: 68875 - protein, 7 aa, synthetic construct
KVREGKE

SEQ ID NO: 68876 - protein, 7 aa, synthetic construct
KKDIGPH

SEQ ID NO: 68877 - protein, 7 aa, synthetic construct
DVYGQHP

SEQ ID NO: 68878 - protein, 7 aa, synthetic construct
LLTAAGP

SEQ ID NO: 68879 - protein, 7 aa, synthetic construct
LQSNRPS

SEQ ID NO: 68880 - protein, 7 aa, synthetic construct
KSIGVGV

SEQ ID NO: 68881 - protein, 7 aa, synthetic construct
NRGANAD

SEQ ID NO: 68882 - protein, 7 aa, synthetic construct
KTTGAPN

SEQ ID NO: 68883 - protein, 7 aa, synthetic construct
KPTSAIA

SEQ ID NO: 68884 - protein, 7 aa, synthetic construct
NGKGLIN

SEQ ID NO: 68885 - protein, 7 aa, synthetic construct
LAGRSYQ

SEQ ID NO: 68886 - protein, 7 aa, synthetic construct
FKNPSNA

SEQ ID NO: 68887 - protein, 7 aa, synthetic construct
TSDISRM

SEQ ID NO: 68888 - protein, 7 aa, synthetic construct
TNRSDWI

SEQ ID NO: 68889 - protein, 7 aa, synthetic construct
AEFIVKG

SEQ ID NO: 68890 - protein, 7 aa, synthetic construct
FVKNYHE

SEQ ID NO: 68891 - protein, 7 aa, synthetic construct
GAKGNGW

SEQ ID NO: 68892 - protein, 7 aa, synthetic construct
MDPGRKQ

SEQ ID NO: 68893 - protein, 7 aa, synthetic construct
GMGIPLQ

SEQ ID NO: 68894 - protein, 7 aa, synthetic construct
MDLRLDG

SEQ ID NO: 68895 - protein, 7 aa, synthetic construct
NHVAIPM

SEQ ID NO: 68896 - protein, 7 aa, synthetic construct
HRQAQYE

SEQ ID NO: 68897 - protein, 7 aa, synthetic construct
APNATYA

SEQ ID NO: 68898 - protein, 7 aa, synthetic construct
MLSPGQR

SEQ ID NO: 68899 - protein, 7 aa, synthetic construct
AEGLRSF

SEQ ID NO: 68900 - protein, 7 aa, synthetic construct
MANISPS

SEQ ID NO: 68901 - protein, 7 aa, synthetic construct
DGTNVRP

SEQ ID NO: 68902 - protein, 7 aa, synthetic construct
YTLQQTK

SEQ ID NO: 68903 - protein, 7 aa, synthetic construct
FKNQASM

SEQ ID NO: 68904 - protein, 7 aa, synthetic construct
PRQAQNG

SEQ ID NO: 68905 - protein, 7 aa, synthetic construct
RLHTDGS

SEQ ID NO: 68906 - protein, 7 aa, synthetic construct
IGPGDRL

SEQ ID NO: 68907 - protein, 7 aa, synthetic construct
DFHSHQS

SEQ ID NO: 68908 - protein, 7 aa, synthetic construct
YTLSKIP

SEQ ID NO: 68909 - protein, 7 aa, synthetic construct
KSGGDWK

SEQ ID NO: 68910 - protein, 7 aa, synthetic construct
WGHANVV

SEQ ID NO: 68911 - protein, 7 aa, synthetic construct
NMQNSMH

SEQ ID NO: 68912 - protein, 7 aa, synthetic construct
LTDRANK

SEQ ID NO: 68913 - protein, 7 aa, synthetic construct
RNQSNSG

SEQ ID NO: 68914 - protein, 7 aa, synthetic construct
VYNSSPQ

SEQ ID NO: 68915 - protein, 7 aa, synthetic construct
GNNKSGA

SEQ ID NO: 68916 - protein, 7 aa, synthetic construct
NTNIKVA

SEQ ID NO: 68917 - protein, 7 aa, synthetic construct
TTAPATE

SEQ ID NO: 68918 - protein, 7 aa, synthetic construct
HVVELGG

SEQ ID NO: 68919 - protein, 7 aa, synthetic construct
KPTSPQS

SEQ ID NO: 68920 - protein, 7 aa, synthetic construct
GKKEFNS

SEQ ID NO: 68921 - protein, 7 aa, synthetic construct
RPDTQYI

SEQ ID NO: 68922 - protein, 7 aa, synthetic construct
DLRLGPV

SEQ ID NO: 68923 - protein, 7 aa, synthetic construct
NYTANTV

SEQ ID NO: 68924 - protein, 7 aa, synthetic construct
TTSKFTE

SEQ ID NO: 68925 - protein, 7 aa, synthetic construct
VNGLWKQ

SEQ ID NO: 68926 - protein, 7 aa, synthetic construct
SRSGVTA

SEQ ID NO: 68927 - protein, 7 aa, synthetic construct
EVKNPGA

SEQ ID NO: 68928 - protein, 7 aa, synthetic construct
ERGGAIF

SEQ ID NO: 68929 - protein, 7 aa, synthetic construct
IMIHTAD

SEQ ID NO: 68930 - protein, 7 aa, synthetic construct
LTTKNMA

SEQ ID NO: 68931 - protein, 7 aa, synthetic construct
QKTGVKE

SEQ ID NO: 68932 - protein, 7 aa, synthetic construct
PNIAFNG

SEQ ID NO: 68933 - protein, 7 aa, synthetic construct
KDQRRDI

SEQ ID NO: 68934 - protein, 7 aa, synthetic construct
YGTSARE

SEQ ID NO: 68935 - protein, 7 aa, synthetic construct
SEFKSRQ

SEQ ID NO: 68936 - protein, 7 aa, synthetic construct
LASHKWN

SEQ ID NO: 68937 - protein, 7 aa, synthetic construct
GGDKSEV

SEQ ID NO: 68938 - protein, 7 aa, synthetic construct
NYSGKHI

SEQ ID NO: 68939 - protein, 7 aa, synthetic construct
MQAFGPG

SEQ ID NO: 68940 - protein, 7 aa, synthetic construct
KADALPL

SEQ ID NO: 68941 - protein, 7 aa, synthetic construct
RSYAMME

SEQ ID NO: 68942 - protein, 7 aa, synthetic construct
FGHLHHQ

SEQ ID NO: 68943 - protein, 7 aa, synthetic construct
SKTNQTG

SEQ ID NO: 68944 - protein, 7 aa, synthetic construct
SPGARTH

SEQ ID NO: 68945 - protein, 7 aa, synthetic construct
PSSARFN

SEQ ID NO: 68946 - protein, 7 aa, synthetic construct
ANTTKIE

SEQ ID NO: 68947 - protein, 7 aa, synthetic construct
MHYPQNN

SEQ ID NO: 68948 - protein, 7 aa, synthetic construct
NSQGKMD

SEQ ID NO: 68949 - protein, 7 aa, synthetic construct
VNKGQNG

SEQ ID NO: 68950 - protein, 7 aa, synthetic construct
KIKAEGV

SEQ ID NO: 68951 - protein, 7 aa, synthetic construct
RKDQNTA

SEQ ID NO: 68952 - protein, 7 aa, synthetic construct
QKSMAQS

SEQ ID NO: 68953 - protein, 7 aa, synthetic construct
QLPFQID

SEQ ID NO: 68954 - protein, 7 aa, synthetic construct
YRYNIEQ

SEQ ID NO: 68955 - protein, 7 aa, synthetic construct
QSSKVSS

SEQ ID NO: 68956 - protein, 7 aa, synthetic construct
NSVRSEG

SEQ ID NO: 68957 - protein, 7 aa, synthetic construct
EPMRRGA

SEQ ID NO: 68958 - protein, 7 aa, synthetic construct
KPGPVFQ

SEQ ID NO: 68959 - protein, 7 aa, synthetic construct
PRGTTVE

SEQ ID NO: 68960 - protein, 7 aa, synthetic construct
PMSQVRE

SEQ ID NO: 68961 - protein, 7 aa, synthetic construct
QSGSTKM

SEQ ID NO: 68962 - protein, 7 aa, synthetic construct
IHKTDYE

SEQ ID NO: 68963 - protein, 7 aa, synthetic construct
KDNQMAK

SEQ ID NO: 68964 - protein, 7 aa, synthetic construct
LAAGQSR

SEQ ID NO: 68965 - protein, 7 aa, synthetic construct
QAMLAAE

SEQ ID NO: 68966 - protein, 7 aa, synthetic construct
YKNAGKE

SEQ ID NO: 68967 - protein, 7 aa, synthetic construct
VKVVGQD

SEQ ID NO: 68968 - protein, 7 aa, synthetic construct
PQHPVHI

SEQ ID NO: 68969 - protein, 7 aa, synthetic construct
RPMDRAM

SEQ ID NO: 68970 - protein, 7 aa, synthetic construct
FDGNFQK

SEQ ID NO: 68971 - protein, 7 aa, synthetic construct
WGAQSTN

SEQ ID NO: 68972 - protein, 7 aa, synthetic construct
DKYHALG

SEQ ID NO: 68973 - protein, 7 aa, synthetic construct
ARPLPSS

SEQ ID NO: 68974 - protein, 7 aa, synthetic construct
PKASMAA

SEQ ID NO: 68975 - protein, 7 aa, synthetic construct
RTKPEIG

SEQ ID NO: 68976 - protein, 7 aa, synthetic construct
NYKLDSL

SEQ ID NO: 68977 - protein, 7 aa, synthetic construct
SAVTKTQ

SEQ ID NO: 68978 - protein, 7 aa, synthetic construct
WQAPGNS

SEQ ID NO: 68979 - protein, 7 aa, synthetic construct
VNMEVRP

SEQ ID NO: 68980 - protein, 7 aa, synthetic construct
FTPGARS

SEQ ID NO: 68981 - protein, 7 aa, synthetic construct
WEKSRPM

SEQ ID NO: 68982 - protein, 7 aa, synthetic construct
SYTDHVP

SEQ ID NO: 68983 - protein, 7 aa, synthetic construct
YNSSRSL

SEQ ID NO: 68984 - protein, 7 aa, synthetic construct
QTKQTQS

SEQ ID NO: 68985 - protein, 7 aa, synthetic construct
QQTHGGH

SEQ ID NO: 68986 - protein, 7 aa, synthetic construct
MPKFEAG

SEQ ID NO: 68987 - protein, 7 aa, synthetic construct
YSVWAKD

SEQ ID NO: 68988 - protein, 7 aa, synthetic construct
VGVFDKH

SEQ ID NO: 68989 - protein, 7 aa, synthetic construct
RSRDIND

SEQ ID NO: 68990 - protein, 7 aa, synthetic construct
SFAHKSA

SEQ ID NO: 68991 - protein, 7 aa, synthetic construct
HEMTPKI

SEQ ID NO: 68992 - protein, 7 aa, synthetic construct
KSGPMPT

SEQ ID NO: 68993 - protein, 7 aa, synthetic construct
DKPRPTS

SEQ ID NO: 68994 - protein, 7 aa, synthetic construct
LGRLQIN

SEQ ID NO: 68995 - protein, 7 aa, synthetic construct
YFGTGTS

SEQ ID NO: 68996 - protein, 7 aa, synthetic construct
KVPGKVA

SEQ ID NO: 68997 - protein, 7 aa, synthetic construct
SKDPRLN

SEQ ID NO: 68998 - protein, 7 aa, synthetic construct
RATQKDH

SEQ ID NO: 68999 - protein, 7 aa, synthetic construct
HKQPATT

SEQ ID NO: 69000 - protein, 7 aa, synthetic construct
YHLASLA

SEQ ID NO: 69001 - protein, 7 aa, synthetic construct
DEKFIRT

SEQ ID NO: 69002 - protein, 7 aa, synthetic construct
NKGNNGP

SEQ ID NO: 69003 - protein, 7 aa, synthetic construct
EPGVKYA

SEQ ID NO: 69004 - protein, 7 aa, synthetic construct
GSHVSPD

SEQ ID NO: 69005 - protein, 7 aa, synthetic construct
SPTINIA

SEQ ID NO: 69006 - protein, 7 aa, synthetic construct
YDTKFKA

SEQ ID NO: 69007 - protein, 7 aa, synthetic construct
PHSGMGH

SEQ ID NO: 69008 - protein, 7 aa, synthetic construct
TMRPDAG

SEQ ID NO: 69009 - protein, 7 aa, synthetic construct
NHRGPTY

SEQ ID NO: 69010 - protein, 7 aa, synthetic construct
WPKSEIA

SEQ ID NO: 69011 - protein, 7 aa, synthetic construct
YKVSTSG

SEQ ID NO: 69012 - protein, 7 aa, synthetic construct
GVNKMNA

SEQ ID NO: 69013 - protein, 7 aa, synthetic construct
VPYGGKE

SEQ ID NO: 69014 - protein, 7 aa, synthetic construct
MYNATHH

SEQ ID NO: 69015 - protein, 7 aa, synthetic construct
DKERAQS

SEQ ID NO: 69016 - protein, 7 aa, synthetic construct
LNVGRFT

SEQ ID NO: 69017 - protein, 7 aa, synthetic construct
VGRAAVD

SEQ ID NO: 69018 - protein, 7 aa, synthetic construct
GMTQRSP

SEQ ID NO: 69019 - protein, 7 aa, synthetic construct
KRNEIVM

SEQ ID NO: 69020 - protein, 7 aa, synthetic construct
KGYELHG

SEQ ID NO: 69021 - protein, 7 aa, synthetic construct
KANYGDR

SEQ ID NO: 69022 - protein, 7 aa, synthetic construct
ERPIMQN

SEQ ID NO: 69023 - protein, 7 aa, synthetic construct
QNSKVNP

SEQ ID NO: 69024 - protein, 7 aa, synthetic construct
NMKKQEP

SEQ ID NO: 69025 - protein, 7 aa, synthetic construct
NRDLSSV

SEQ ID NO: 69026 - protein, 7 aa, synthetic construct
QNSQRVP

SEQ ID NO: 69027 - protein, 7 aa, synthetic construct
YNGKSNN

SEQ ID NO: 69028 - protein, 7 aa, synthetic construct
GQSFQVA

SEQ ID NO: 69029 - protein, 7 aa, synthetic construct
APTAKVG

SEQ ID NO: 69030 - protein, 7 aa, synthetic construct
HGVKDIR

SEQ ID NO: 69031 - protein, 7 aa, synthetic construct
QVIRVGS

SEQ ID NO: 69032 - protein, 7 aa, synthetic construct
TSQRGVM

SEQ ID NO: 69033 - protein, 7 aa, synthetic construct
LNNTHTA

SEQ ID NO: 69034 - protein, 7 aa, synthetic construct
NSGHLKH

SEQ ID NO: 69035 - protein, 7 aa, synthetic construct
LAAVQQF

SEQ ID NO: 69036 - protein, 7 aa, synthetic construct
MPKSSNG

SEQ ID NO: 69037 - protein, 7 aa, synthetic construct
FHPSSLG

SEQ ID NO: 69038 - protein, 7 aa, synthetic construct
LTSSKMG

SEQ ID NO: 69039 - protein, 7 aa, synthetic construct
VTPFEQI

SEQ ID NO: 69040 - protein, 7 aa, synthetic construct
QHHSITV

SEQ ID NO: 69041 - protein, 7 aa, synthetic construct
TAKPNTL

SEQ ID NO: 69042 - protein, 7 aa, synthetic construct
RPPGNGF

SEQ ID NO: 69043 - protein, 7 aa, synthetic construct
YKDRNDF

SEQ ID NO: 69044 - protein, 7 aa, synthetic construct
TQKSNSP

SEQ ID NO: 69045 - protein, 7 aa, synthetic construct
LINGTIS

SEQ ID NO: 69046 - protein, 7 aa, synthetic construct
HTRDDNH

SEQ ID NO: 69047 - protein, 7 aa, synthetic construct
GTKNFTH

SEQ ID NO: 69048 - protein, 7 aa, synthetic construct
PQPKAMN

SEQ ID NO: 69049 - protein, 7 aa, synthetic construct
DKHWGSE

SEQ ID NO: 69050 - protein, 7 aa, synthetic construct
HSGILKN

SEQ ID NO: 69051 - protein, 7 aa, synthetic construct
RGDILQN

SEQ ID NO: 69052 - protein, 7 aa, synthetic construct
NLHGDFK

SEQ ID NO: 69053 - protein, 7 aa, synthetic construct
HPGRTTD

SEQ ID NO: 69054 - protein, 7 aa, synthetic construct
QQSKSTG

SEQ ID NO: 69055 - protein, 7 aa, synthetic construct
PGLKAPL

SEQ ID NO: 69056 - protein, 7 aa, synthetic construct
NKASSYA

SEQ ID NO: 69057 - protein, 7 aa, synthetic construct
TVHKAGG

SEQ ID NO: 69058 - protein, 7 aa, synthetic construct
GRHDTSE

SEQ ID NO: 69059 - protein, 7 aa, synthetic construct
DRPKLNM

SEQ ID NO: 69060 - protein, 7 aa, synthetic construct
FKFGRME

SEQ ID NO: 69061 - protein, 7 aa, synthetic construct
TSHVVGS

SEQ ID NO: 69062 - protein, 7 aa, synthetic construct
TSGGGRF

SEQ ID NO: 69063 - protein, 7 aa, synthetic construct
GGLGGSY

SEQ ID NO: 69064 - protein, 7 aa, synthetic construct
KWKDENS

SEQ ID NO: 69065 - protein, 7 aa, synthetic construct
GQHGLHI

SEQ ID NO: 69066 - protein, 7 aa, synthetic construct
WNKEARH

SEQ ID NO: 69067 - protein, 7 aa, synthetic construct
GKPHGMG

SEQ ID NO: 69068 - protein, 7 aa, synthetic construct
TDKISTL

SEQ ID NO: 69069 - protein, 7 aa, synthetic construct
HINNHDS

SEQ ID NO: 69070 - protein, 7 aa, synthetic construct
VRGPTSG

SEQ ID NO: 69071 - protein, 7 aa, synthetic construct
KQTNQKD

SEQ ID NO: 69072 - protein, 7 aa, synthetic construct
FAQSKTP

SEQ ID NO: 69073 - protein, 7 aa, synthetic construct
EKWPEMR

SEQ ID NO: 69074 - protein, 7 aa, synthetic construct
RDRRQEE

SEQ ID NO: 69075 - protein, 7 aa, synthetic construct
PNGSFER

SEQ ID NO: 69076 - protein, 7 aa, synthetic construct
KPNVSSA

SEQ ID NO: 69077 - protein, 7 aa, synthetic construct
HVEQRVT

SEQ ID NO: 69078 - protein, 7 aa, synthetic construct
GSATHAH

SEQ ID NO: 69079 - protein, 7 aa, synthetic construct
KGNSIAA

SEQ ID NO: 69080 - protein, 7 aa, synthetic construct
ARSDTHY

SEQ ID NO: 69081 - protein, 7 aa, synthetic construct
TSNPASG

SEQ ID NO: 69082 - protein, 7 aa, synthetic construct
WPRDVRA

SEQ ID NO: 69083 - protein, 7 aa, synthetic construct
NQSLGQT

SEQ ID NO: 69084 - protein, 7 aa, synthetic construct
GDKSAGM

SEQ ID NO: 69085 - protein, 7 aa, synthetic construct
RPTQGKE

SEQ ID NO: 69086 - protein, 7 aa, synthetic construct
SRDTRAP

SEQ ID NO: 69087 - protein, 7 aa, synthetic construct
DHKIGVP

SEQ ID NO: 69088 - protein, 7 aa, synthetic construct
FMHGYRE

SEQ ID NO: 69089 - protein, 7 aa, synthetic construct
VRVTNVL

SEQ ID NO: 69090 - protein, 7 aa, synthetic construct
KQKGSVE

SEQ ID NO: 69091 - protein, 7 aa, synthetic construct
IGYVVQD

SEQ ID NO: 69092 - protein, 7 aa, synthetic construct
RNTAATA

SEQ ID NO: 69093 - protein, 7 aa, synthetic construct
HTKMTLN

SEQ ID NO: 69094 - protein, 7 aa, synthetic construct
LPHFIND

SEQ ID NO: 69095 - protein, 7 aa, synthetic construct
SANATQS

SEQ ID NO: 69096 - protein, 7 aa, synthetic construct
FKSSNVT

SEQ ID NO: 69097 - protein, 7 aa, synthetic construct
NEVARSY

SEQ ID NO: 69098 - protein, 7 aa, synthetic construct
PSRNGVL

SEQ ID NO: 69099 - protein, 7 aa, synthetic construct
AFMKHEN

SEQ ID NO: 69100 - protein, 7 aa, synthetic construct
MQQTRPQ

SEQ ID NO: 69101 - protein, 7 aa, synthetic construct
RRTQEEE

SEQ ID NO: 69102 - protein, 7 aa, synthetic construct
PGASNYH

SEQ ID NO: 69103 - protein, 7 aa, synthetic construct
RADGHPN

SEQ ID NO: 69104 - protein, 7 aa, synthetic construct
AIQSRMA

SEQ ID NO: 69105 - protein, 7 aa, synthetic construct
TKMEHGM

SEQ ID NO: 69106 - protein, 7 aa, synthetic construct
VYSSQQP

SEQ ID NO: 69107 - protein, 7 aa, synthetic construct
MGSQATN

SEQ ID NO: 69108 - protein, 7 aa, synthetic construct
KTVAGEM

SEQ ID NO: 69109 - protein, 7 aa, synthetic construct
SPVPVYG

SEQ ID NO: 69110 - protein, 7 aa, synthetic construct
TMHLKDG

SEQ ID NO: 69111 - protein, 7 aa, synthetic construct
FSKQSTP

SEQ ID NO: 69112 - protein, 7 aa, synthetic construct
GRPFQNA

SEQ ID NO: 69113 - protein, 7 aa, synthetic construct
IEFKKVA

SEQ ID NO: 69114 - protein, 7 aa, synthetic construct
WMQNNSD

SEQ ID NO: 69115 - protein, 7 aa, synthetic construct
KPTSQVA

SEQ ID NO: 69116 - protein, 7 aa, synthetic construct
EHGRMPF

SEQ ID NO: 69117 - protein, 7 aa, synthetic construct
NKMMAGG

SEQ ID NO: 69118 - protein, 7 aa, synthetic construct
FMPNNIN

SEQ ID NO: 69119 - protein, 7 aa, synthetic construct
TQKSMQW

SEQ ID NO: 69120 - protein, 7 aa, synthetic construct
NHLATVG

SEQ ID NO: 69121 - protein, 7 aa, synthetic construct
PTQANKP

SEQ ID NO: 69122 - protein, 7 aa, synthetic construct
AYIKSHV

SEQ ID NO: 69123 - protein, 7 aa, synthetic construct
KNPDMDR

SEQ ID NO: 69124 - protein, 7 aa, synthetic construct
YTSNGMI

SEQ ID NO: 69125 - protein, 7 aa, synthetic construct
GGHRNDL

SEQ ID NO: 69126 - protein, 7 aa, synthetic construct
TYNIKYN

SEQ ID NO: 69127 - protein, 7 aa, synthetic construct
TKFGPVG

SEQ ID NO: 69128 - protein, 7 aa, synthetic construct
NDSSKQM

SEQ ID NO: 69129 - protein, 7 aa, synthetic construct
NAIGHKY

SEQ ID NO: 69130 - protein, 7 aa, synthetic construct
QEQHAMR

SEQ ID NO: 69131 - protein, 7 aa, synthetic construct
TQKNIAN

SEQ ID NO: 69132 - protein, 7 aa, synthetic construct
WTTQNQT

SEQ ID NO: 69133 - protein, 7 aa, synthetic construct
VTVGAKG

SEQ ID NO: 69134 - protein, 7 aa, synthetic construct
VKYSRPD

SEQ ID NO: 69135 - protein, 7 aa, synthetic construct
HMSLIDG

SEQ ID NO: 69136 - protein, 7 aa, synthetic construct
REIHFEG

SEQ ID NO: 69137 - protein, 7 aa, synthetic construct
IAKELRQ

SEQ ID NO: 69138 - protein, 7 aa, synthetic construct
RPTSSLG

SEQ ID NO: 69139 - protein, 7 aa, synthetic construct
YPVPPTP

SEQ ID NO: 69140 - protein, 7 aa, synthetic construct
NAYTGLD

SEQ ID NO: 69141 - protein, 7 aa, synthetic construct
HNKINPY

SEQ ID NO: 69142 - protein, 7 aa, synthetic construct
SGKSHDE

SEQ ID NO: 69143 - protein, 7 aa, synthetic construct
MNGSKIP

SEQ ID NO: 69144 - protein, 7 aa, synthetic construct
RDMGEDR

SEQ ID NO: 69145 - protein, 7 aa, synthetic construct
AKHAMDM

SEQ ID NO: 69146 - protein, 7 aa, synthetic construct
PPNNGRD

SEQ ID NO: 69147 - protein, 7 aa, synthetic construct
PKSQNDV

SEQ ID NO: 69148 - protein, 7 aa, synthetic construct
NRQDDHH

SEQ ID NO: 69149 - protein, 7 aa, synthetic construct
PPSKQPI

SEQ ID NO: 69150 - protein, 7 aa, synthetic construct
VMKGTVP

SEQ ID NO: 69151 - protein, 7 aa, synthetic construct
VHQRGVP

SEQ ID NO: 69152 - protein, 7 aa, synthetic construct
GERIMPQ

SEQ ID NO: 69153 - protein, 7 aa, synthetic construct
SGTFLTE

SEQ ID NO: 69154 - protein, 7 aa, synthetic construct
KQMASLT

SEQ ID NO: 69155 - protein, 7 aa, synthetic construct
GMTVGPG

SEQ ID NO: 69156 - protein, 7 aa, synthetic construct
WSGMKNV

SEQ ID NO: 69157 - protein, 7 aa, synthetic construct
RNQGDSH

SEQ ID NO: 69158 - protein, 7 aa, synthetic construct
KTSTVTA

SEQ ID NO: 69159 - protein, 7 aa, synthetic construct
QTGKAAG

SEQ ID NO: 69160 - protein, 7 aa, synthetic construct
TVNNRGT

SEQ ID NO: 69161 - protein, 7 aa, synthetic construct
DNHGKGA

SEQ ID NO: 69162 - protein, 7 aa, synthetic construct
SNSSSTK

SEQ ID NO: 69163 - protein, 7 aa, synthetic construct
DVRQVTP

SEQ ID NO: 69164 - protein, 7 aa, synthetic construct
SIQQRIG

SEQ ID NO: 69165 - protein, 7 aa, synthetic construct
VGHYMSQ

SEQ ID NO: 69166 - protein, 7 aa, synthetic construct
NTNKLPG

SEQ ID NO: 69167 - protein, 7 aa, synthetic construct
DVHLHKP

SEQ ID NO: 69168 - protein, 7 aa, synthetic construct
VLIPNHT

SEQ ID NO: 69169 - protein, 7 aa, synthetic construct
RQTQESR

SEQ ID NO: 69170 - protein, 7 aa, synthetic construct
YLAGGTI

SEQ ID NO: 69171 - protein, 7 aa, synthetic construct
SNSMKSI

SEQ ID NO: 69172 - protein, 7 aa, synthetic construct
VPKTGTL

SEQ ID NO: 69173 - protein, 7 aa, synthetic construct
SAYRGSP

SEQ ID NO: 69174 - protein, 7 aa, synthetic construct
KAYTQTG

SEQ ID NO: 69175 - protein, 7 aa, synthetic construct
ASKWPNA

SEQ ID NO: 69176 - protein, 7 aa, synthetic construct
GKPGVGT

SEQ ID NO: 69177 - protein, 7 aa, synthetic construct
TLKSEHF

SEQ ID NO: 69178 - protein, 7 aa, synthetic construct
RGVDNNY

SEQ ID NO: 69179 - protein, 7 aa, synthetic construct
NQKKEVY

SEQ ID NO: 69180 - protein, 7 aa, synthetic construct
SPRYHEQ

SEQ ID NO: 69181 - protein, 7 aa, synthetic construct
ERREAIR

SEQ ID NO: 69182 - protein, 7 aa, synthetic construct
LAPIKMV

SEQ ID NO: 69183 - protein, 7 aa, synthetic construct
MPMVRHG

SEQ ID NO: 69184 - protein, 7 aa, synthetic construct
LERSRAD

SEQ ID NO: 69185 - protein, 7 aa, synthetic construct
LDHFTTQ

SEQ ID NO: 69186 - protein, 7 aa, synthetic construct
FAPSSIQ

SEQ ID NO: 69187 - protein, 7 aa, synthetic construct
VHKDNQS

SEQ ID NO: 69188 - protein, 7 aa, synthetic construct
MAVGMTG

SEQ ID NO: 69189 - protein, 7 aa, synthetic construct
QQFKNNN

SEQ ID NO: 69190 - protein, 7 aa, synthetic construct
VWAAGLP

SEQ ID NO: 69191 - protein, 7 aa, synthetic construct
SRSKNDD

SEQ ID NO: 69192 - protein, 7 aa, synthetic construct
HPNMVHL

SEQ ID NO: 69193 - protein, 7 aa, synthetic construct
GLKSNPS

SEQ ID NO: 69194 - protein, 7 aa, synthetic construct
MNLNKSP

SEQ ID NO: 69195 - protein, 7 aa, synthetic construct
EHGSLRM

SEQ ID NO: 69196 - protein, 7 aa, synthetic construct
WSKQWSE

SEQ ID NO: 69197 - protein, 7 aa, synthetic construct
RPDRSDG

SEQ ID NO: 69198 - protein, 7 aa, synthetic construct
KVNMSGF

SEQ ID NO: 69199 - protein, 7 aa, synthetic construct
ELREEHG

SEQ ID NO: 69200 - protein, 7 aa, synthetic construct
RIGINDS

SEQ ID NO: 69201 - protein, 7 aa, synthetic construct
KKDWEEI

SEQ ID NO: 69202 - protein, 7 aa, synthetic construct
IQQASRI

SEQ ID NO: 69203 - protein, 7 aa, synthetic construct
RTPIAGT

SEQ ID NO: 69204 - protein, 7 aa, synthetic construct
YQAATTA

SEQ ID NO: 69205 - protein, 7 aa, synthetic construct
HAHGFEP

SEQ ID NO: 69206 - protein, 7 aa, synthetic construct
HVRNETG

SEQ ID NO: 69207 - protein, 7 aa, synthetic construct
QGIHMHA

SEQ ID NO: 69208 - protein, 7 aa, synthetic construct
WVHKNVN

SEQ ID NO: 69209 - protein, 7 aa, synthetic construct
QNMTMQL

SEQ ID NO: 69210 - protein, 7 aa, synthetic construct
VGMKNVD

SEQ ID NO: 69211 - protein, 7 aa, synthetic construct
DGNRYQI

SEQ ID NO: 69212 - protein, 7 aa, synthetic construct
GYARPEP

SEQ ID NO: 69213 - protein, 7 aa, synthetic construct
LHNTQQH

SEQ ID NO: 69214 - protein, 7 aa, synthetic construct
AHRMNEV

SEQ ID NO: 69215 - protein, 7 aa, synthetic construct
KPASGGA

SEQ ID NO: 69216 - protein, 7 aa, synthetic construct
AHQAHGL

SEQ ID NO: 69217 - protein, 7 aa, synthetic construct
SAVAKEG

SEQ ID NO: 69218 - protein, 7 aa, synthetic construct
TGPKNTG

SEQ ID NO: 69219 - protein, 7 aa, synthetic construct
VGFSHRE

SEQ ID NO: 69220 - protein, 7 aa, synthetic construct
DRDRNTG

SEQ ID NO: 69221 - protein, 7 aa, synthetic construct
LQPRTSL

SEQ ID NO: 69222 - protein, 7 aa, synthetic construct
RDRAPAN

SEQ ID NO: 69223 - protein, 7 aa, synthetic construct
SSKNGNA

SEQ ID NO: 69224 - protein, 7 aa, synthetic construct
RENSPKY

SEQ ID NO: 69225 - protein, 7 aa, synthetic construct
YRGDHVG

SEQ ID NO: 69226 - protein, 7 aa, synthetic construct
VSETRVG

SEQ ID NO: 69227 - protein, 7 aa, synthetic construct
TAIAPRD

SEQ ID NO: 69228 - protein, 7 aa, synthetic construct
KGPQTMG

SEQ ID NO: 69229 - protein, 7 aa, synthetic construct
KERMVMG

SEQ ID NO: 69230 - protein, 7 aa, synthetic construct
KHYGMEE

SEQ ID NO: 69231 - protein, 7 aa, synthetic construct
FSQRPSM

SEQ ID NO: 69232 - protein, 7 aa, synthetic construct
LKGPKTD

SEQ ID NO: 69233 - protein, 7 aa, synthetic construct
QAKHIAH

SEQ ID NO: 69234 - protein, 7 aa, synthetic construct
QGKSAAA

SEQ ID NO: 69235 - protein, 7 aa, synthetic construct
SEPMKLS

SEQ ID NO: 69236 - protein, 7 aa, synthetic construct
YVMPKVG

SEQ ID NO: 69237 - protein, 7 aa, synthetic construct
MVGGSSG

SEQ ID NO: 69238 - protein, 7 aa, synthetic construct
ISTRQEN

SEQ ID NO: 69239 - protein, 7 aa, synthetic construct
RPNPVSG

SEQ ID NO: 69240 - protein, 7 aa, synthetic construct
QMALQGA

SEQ ID NO: 69241 - protein, 7 aa, synthetic construct
RLSQETN

SEQ ID NO: 69242 - protein, 7 aa, synthetic construct
TRPVSTG

SEQ ID NO: 69243 - protein, 7 aa, synthetic construct
GPIKHDT

SEQ ID NO: 69244 - protein, 7 aa, synthetic construct
AHQNFQE

SEQ ID NO: 69245 - protein, 7 aa, synthetic construct
TPQSNKG

SEQ ID NO: 69246 - protein, 7 aa, synthetic construct
RLQEHGD

SEQ ID NO: 69247 - protein, 7 aa, synthetic construct
MMKIQDT

SEQ ID NO: 69248 - protein, 7 aa, synthetic construct
YNTVSGY

SEQ ID NO: 69249 - protein, 7 aa, synthetic construct
YFGHDTR

SEQ ID NO: 69250 - protein, 7 aa, synthetic construct
KKDNSKD

SEQ ID NO: 69251 - protein, 7 aa, synthetic construct
IQKTNPQ

SEQ ID NO: 69252 - protein, 7 aa, synthetic construct
QQRAGVA

SEQ ID NO: 69253 - protein, 7 aa, synthetic construct
TLINRRE

SEQ ID NO: 69254 - protein, 7 aa, synthetic construct
GNMKLHY

SEQ ID NO: 69255 - protein, 7 aa, synthetic construct
PRRIGQE

SEQ ID NO: 69256 - protein, 7 aa, synthetic construct
IGQLNVH

SEQ ID NO: 69257 - protein, 7 aa, synthetic construct
KPTSPSS

SEQ ID NO: 69258 - protein, 7 aa, synthetic construct
KGQPTSM

SEQ ID NO: 69259 - protein, 7 aa, synthetic construct
PWSDIKS

SEQ ID NO: 69260 - protein, 7 aa, synthetic construct
WGAQERA

SEQ ID NO: 69261 - protein, 7 aa, synthetic construct
PKADKNF

SEQ ID NO: 69262 - protein, 7 aa, synthetic construct
SMTTQNH

SEQ ID NO: 69263 - protein, 7 aa, synthetic construct
PRNYAEG

SEQ ID NO: 69264 - protein, 7 aa, synthetic construct
IKKSLLD

SEQ ID NO: 69265 - protein, 7 aa, synthetic construct
PKTNAGN

SEQ ID NO: 69266 - protein, 7 aa, synthetic construct
QKNGHSY

SEQ ID NO: 69267 - protein, 7 aa, synthetic construct
QGNKNTA

SEQ ID NO: 69268 - protein, 7 aa, synthetic construct
YAGTIMP

SEQ ID NO: 69269 - protein, 7 aa, synthetic construct
ARSNMQG

SEQ ID NO: 69270 - protein, 7 aa, synthetic construct
AANFYKD

SEQ ID NO: 69271 - protein, 7 aa, synthetic construct
HDVSKPH

SEQ ID NO: 69272 - protein, 7 aa, synthetic construct
YPHQTQV

SEQ ID NO: 69273 - protein, 7 aa, synthetic construct
QSLGQIG

SEQ ID NO: 69274 - protein, 7 aa, synthetic construct
DSTKNPK

SEQ ID NO: 69275 - protein, 7 aa, synthetic construct
THGSSRM

SEQ ID NO: 69276 - protein, 7 aa, synthetic construct
KYKEPGY

SEQ ID NO: 69277 - protein, 7 aa, synthetic construct
SGGQHLT

SEQ ID NO: 69278 - protein, 7 aa, synthetic construct
LHIKGPH

SEQ ID NO: 69279 - protein, 7 aa, synthetic construct
SHFQQVA

SEQ ID NO: 69280 - protein, 7 aa, synthetic construct
KTLVDPM

SEQ ID NO: 69281 - protein, 7 aa, synthetic construct
QVSNFNM

SEQ ID NO: 69282 - protein, 7 aa, synthetic construct
VKAGITA

SEQ ID NO: 69283 - protein, 7 aa, synthetic construct
GMKHGSQ

SEQ ID NO: 69284 - protein, 7 aa, synthetic construct
WSRDIPP

SEQ ID NO: 69285 - protein, 7 aa, synthetic construct
GKQTNNA

SEQ ID NO: 69286 - protein, 7 aa, synthetic construct
VDKKMGE

SEQ ID NO: 69287 - protein, 7 aa, synthetic construct
KFPEHDT

SEQ ID NO: 69288 - protein, 7 aa, synthetic construct
YMTPRSE

SEQ ID NO: 69289 - protein, 7 aa, synthetic construct
RNESMTA

SEQ ID NO: 69290 - protein, 7 aa, synthetic construct
SRVSPYN

SEQ ID NO: 69291 - protein, 7 aa, synthetic construct
QKVANQQ

SEQ ID NO: 69292 - protein, 7 aa, synthetic construct
WNRTDVK

SEQ ID NO: 69293 - protein, 7 aa, synthetic construct
SSLAPGS

SEQ ID NO: 69294 - protein, 7 aa, synthetic construct
RMHDVVA

SEQ ID NO: 69295 - protein, 7 aa, synthetic construct
YPTKMDR

SEQ ID NO: 69296 - protein, 7 aa, synthetic construct
HYYKGES

SEQ ID NO: 69297 - protein, 7 aa, synthetic construct
RDQVRPI

SEQ ID NO: 69298 - protein, 7 aa, synthetic construct
QIAAKEI

SEQ ID NO: 69299 - protein, 7 aa, synthetic construct
YAGHTDA

SEQ ID NO: 69300 - protein, 7 aa, synthetic construct
IKHMANF

SEQ ID NO: 69301 - protein, 7 aa, synthetic construct
NRKEPST

SEQ ID NO: 69302 - protein, 7 aa, synthetic construct
LKIEQGS

SEQ ID NO: 69303 - protein, 7 aa, synthetic construct
KQFTQNS

SEQ ID NO: 69304 - protein, 7 aa, synthetic construct
DFRENQH

SEQ ID NO: 69305 - protein, 7 aa, synthetic construct
MHNYKED

SEQ ID NO: 69306 - protein, 7 aa, synthetic construct
VKDMHKF

SEQ ID NO: 69307 - protein, 7 aa, synthetic construct
DHSPKPA

SEQ ID NO: 69308 - protein, 7 aa, synthetic construct
DVNRQMQ

SEQ ID NO: 69309 - protein, 7 aa, synthetic construct
TQKQSGF

SEQ ID NO: 69310 - protein, 7 aa, synthetic construct
RNQSGAT

SEQ ID NO: 69311 - protein, 7 aa, synthetic construct
IYTKEGH

SEQ ID NO: 69312 - protein, 7 aa, synthetic construct
TGGSDTR

SEQ ID NO: 69313 - protein, 7 aa, synthetic construct
GGGLAKV

SEQ ID NO: 69314 - protein, 7 aa, synthetic construct
ITQKMLA

SEQ ID NO: 69315 - protein, 7 aa, synthetic construct
TPHGKQP

SEQ ID NO: 69316 - protein, 7 aa, synthetic construct
MGHQTAH

SEQ ID NO: 69317 - protein, 7 aa, synthetic construct
HFEKVRP

SEQ ID NO: 69318 - protein, 7 aa, synthetic construct
KTHSDPP

SEQ ID NO: 69319 - protein, 7 aa, synthetic construct
VGGNKNA

SEQ ID NO: 69320 - protein, 7 aa, synthetic construct
IPGNSPP

SEQ ID NO: 69321 - protein, 7 aa, synthetic construct
GNIPTIS

SEQ ID NO: 69322 - protein, 7 aa, synthetic construct
DGHGMQK

SEQ ID NO: 69323 - protein, 7 aa, synthetic construct
TGSILEM

SEQ ID NO: 69324 - protein, 7 aa, synthetic construct
YGLHGGS

SEQ ID NO: 69325 - protein, 7 aa, synthetic construct
RNVTGNQ

SEQ ID NO: 69326 - protein, 7 aa, synthetic construct
WNMKDIP

SEQ ID NO: 69327 - protein, 7 aa, synthetic construct
LAQHRDN

SEQ ID NO: 69328 - protein, 7 aa, synthetic construct
NTASRNA

SEQ ID NO: 69329 - protein, 7 aa, synthetic construct
RVQTDPH

SEQ ID NO: 69330 - protein, 7 aa, synthetic construct
YLGHTGQ

SEQ ID NO: 69331 - protein, 7 aa, synthetic construct
STPLPVS

SEQ ID NO: 69332 - protein, 7 aa, synthetic construct
NVAGISH

SEQ ID NO: 69333 - protein, 7 aa, synthetic construct
KPYNSQP

SEQ ID NO: 69334 - protein, 7 aa, synthetic construct
FTRDGSM

SEQ ID NO: 69335 - protein, 7 aa, synthetic construct
HLNKPYH

SEQ ID NO: 69336 - protein, 7 aa, synthetic construct
QYAPNHH

SEQ ID NO: 69337 - protein, 7 aa, synthetic construct
RYEVQGS

SEQ ID NO: 69338 - protein, 7 aa, synthetic construct
TAYASQF

SEQ ID NO: 69339 - protein, 7 aa, synthetic construct
SPDKRDS

SEQ ID NO: 69340 - protein, 7 aa, synthetic construct
VHNGIGN

SEQ ID NO: 69341 - protein, 7 aa, synthetic construct
DMKFSNE

SEQ ID NO: 69342 - protein, 7 aa, synthetic construct
NSRVPPY

SEQ ID NO: 69343 - protein, 7 aa, synthetic construct
YPSNSKP

SEQ ID NO: 69344 - protein, 7 aa, synthetic construct
RSGEGIR

SEQ ID NO: 69345 - protein, 7 aa, synthetic construct
LTQTKEH

SEQ ID NO: 69346 - protein, 7 aa, synthetic construct
HPSMRYE

SEQ ID NO: 69347 - protein, 7 aa, synthetic construct
AYKEQPH

SEQ ID NO: 69348 - protein, 7 aa, synthetic construct
MTGFMPN

SEQ ID NO: 69349 - protein, 7 aa, synthetic construct
KVYDGSL

SEQ ID NO: 69350 - protein, 7 aa, synthetic construct
FHEPRDI

SEQ ID NO: 69351 - protein, 7 aa, synthetic construct
MKSPPYP

SEQ ID NO: 69352 - protein, 7 aa, synthetic construct
KRDGGHD

SEQ ID NO: 69353 - protein, 7 aa, synthetic construct
GIIYEKP

SEQ ID NO: 69354 - protein, 7 aa, synthetic construct
GQNQKGI

SEQ ID NO: 69355 - protein, 7 aa, synthetic construct
KYAAVQI

SEQ ID NO: 69356 - protein, 7 aa, synthetic construct
GALTTGI

SEQ ID NO: 69357 - protein, 7 aa, synthetic construct
QAKTVSP

SEQ ID NO: 69358 - protein, 7 aa, synthetic construct
PRAPMVM

SEQ ID NO: 69359 - protein, 7 aa, synthetic construct
GAISQTS

SEQ ID NO: 69360 - protein, 7 aa, synthetic construct
TGRAGIP

SEQ ID NO: 69361 - protein, 7 aa, synthetic construct
GRTSATT

SEQ ID NO: 69362 - protein, 7 aa, synthetic construct
KTSGYDK

SEQ ID NO: 69363 - protein, 7 aa, synthetic construct
DAYSARQ

SEQ ID NO: 69364 - protein, 7 aa, synthetic construct
HFPAQQA

SEQ ID NO: 69365 - protein, 7 aa, synthetic construct
PTSPGQV

SEQ ID NO: 69366 - protein, 7 aa, synthetic construct
YGTKIDM

SEQ ID NO: 69367 - protein, 7 aa, synthetic construct
QTSSKTM

SEQ ID NO: 69368 - protein, 7 aa, synthetic construct
YTHVDGK

SEQ ID NO: 69369 - protein, 7 aa, synthetic construct
LSHHFEH

SEQ ID NO: 69370 - protein, 7 aa, synthetic construct
LAYGPNE

SEQ ID NO: 69371 - protein, 7 aa, synthetic construct
KTYSNGP

SEQ ID NO: 69372 - protein, 7 aa, synthetic construct
QNNHQAA

SEQ ID NO: 69373 - protein, 7 aa, synthetic construct
ATDVPRQ

SEQ ID NO: 69374 - protein, 7 aa, synthetic construct
IANGHQW

SEQ ID NO: 69375 - protein, 7 aa, synthetic construct
QWKTENE

SEQ ID NO: 69376 - protein, 7 aa, synthetic construct
TDMHLQK

SEQ ID NO: 69377 - protein, 7 aa, synthetic construct
IGPMQQY

SEQ ID NO: 69378 - protein, 7 aa, synthetic construct
NVNKGSA

SEQ ID NO: 69379 - protein, 7 aa, synthetic construct
AMNNRDT

SEQ ID NO: 69380 - protein, 7 aa, synthetic construct
NFDSIKV

SEQ ID NO: 69381 - protein, 7 aa, synthetic construct
YKPATFG

SEQ ID NO: 69382 - protein, 7 aa, synthetic construct
QQVGKFS

SEQ ID NO: 69383 - protein, 7 aa, synthetic construct
DPAHGHQ

SEQ ID NO: 69384 - protein, 7 aa, synthetic construct
SKTVTTS

SEQ ID NO: 69385 - protein, 7 aa, synthetic construct
GRNAIET

SEQ ID NO: 69386 - protein, 7 aa, synthetic construct
YEPRANP

SEQ ID NO: 69387 - protein, 7 aa, synthetic construct
AYRTEGS

SEQ ID NO: 69388 - protein, 7 aa, synthetic construct
SVFNAGN

SEQ ID NO: 69389 - protein, 7 aa, synthetic construct
NLDTMGR

SEQ ID NO: 69390 - protein, 7 aa, synthetic construct
HGKLEPW

SEQ ID NO: 69391 - protein, 7 aa, synthetic construct
KINVREQ

SEQ ID NO: 69392 - protein, 7 aa, synthetic construct
WGSKDVV

SEQ ID NO: 69393 - protein, 7 aa, synthetic construct
VAASSSR

SEQ ID NO: 69394 - protein, 7 aa, synthetic construct
MMGYQTS

SEQ ID NO: 69395 - protein, 7 aa, synthetic construct
GGMTLNS

SEQ ID NO: 69396 - protein, 7 aa, synthetic construct
RPATGTA

SEQ ID NO: 69397 - protein, 7 aa, synthetic construct
LTGTNYV

SEQ ID NO: 69398 - protein, 7 aa, synthetic construct
QRGHDLP

SEQ ID NO: 69399 - protein, 7 aa, synthetic construct
HEKYQTQ

SEQ ID NO: 69400 - protein, 7 aa, synthetic construct
GNGKVAN

SEQ ID NO: 69401 - protein, 7 aa, synthetic construct
YPEHLSS

SEQ ID NO: 69402 - protein, 7 aa, synthetic construct
QAGSMTV

SEQ ID NO: 69403 - protein, 7 aa, synthetic construct
QGKQSNP

SEQ ID NO: 69404 - protein, 7 aa, synthetic construct
KNGSNQG

SEQ ID NO: 69405 - protein, 7 aa, synthetic construct
TEAGRPT

SEQ ID NO: 69406 - protein, 7 aa, synthetic construct
SFNQPHK

SEQ ID NO: 69407 - protein, 7 aa, synthetic construct
NVASARP

SEQ ID NO: 69408 - protein, 7 aa, synthetic construct
HSTGRER

SEQ ID NO: 69409 - protein, 7 aa, synthetic construct
TPMTLPN

SEQ ID NO: 69410 - protein, 7 aa, synthetic construct
VWTGSQS

SEQ ID NO: 69411 - protein, 7 aa, synthetic construct
FQYKNSQ

SEQ ID NO: 69412 - protein, 7 aa, synthetic construct
KTGTNSP

SEQ ID NO: 69413 - protein, 7 aa, synthetic construct
VMERDHP

SEQ ID NO: 69414 - protein, 7 aa, synthetic construct
HYLVAED

SEQ ID NO: 69415 - protein, 7 aa, synthetic construct
SIDRRTA

SEQ ID NO: 69416 - protein, 7 aa, synthetic construct
PDKRNLM

SEQ ID NO: 69417 - protein, 7 aa, synthetic construct
VNPKTAF

SEQ ID NO: 69418 - protein, 7 aa, synthetic construct
YARYNTP

SEQ ID NO: 69419 - protein, 7 aa, synthetic construct
YPLAPTN

SEQ ID NO: 69420 - protein, 7 aa, synthetic construct
TPKASNQ

SEQ ID NO: 69421 - protein, 7 aa, synthetic construct
RTSNSGV

SEQ ID NO: 69422 - protein, 7 aa, synthetic construct
YTQYKAN

SEQ ID NO: 69423 - protein, 7 aa, synthetic construct
FRSSLGQ

SEQ ID NO: 69424 - protein, 7 aa, synthetic construct
AKDHRME

SEQ ID NO: 69425 - protein, 7 aa, synthetic construct
RPSANVS

SEQ ID NO: 69426 - protein, 7 aa, synthetic construct
DGHKQES

SEQ ID NO: 69427 - protein, 7 aa, synthetic construct
HHHLGSA

SEQ ID NO: 69428 - protein, 7 aa, synthetic construct
LKAIQAP

SEQ ID NO: 69429 - protein, 7 aa, synthetic construct
RVGAMLP

SEQ ID NO: 69430 - protein, 7 aa, synthetic construct
RVEQMNI

SEQ ID NO: 69431 - protein, 7 aa, synthetic construct
WPTGNGS

SEQ ID NO: 69432 - protein, 7 aa, synthetic construct
NKTGVMN

SEQ ID NO: 69433 - protein, 7 aa, synthetic construct
MAIKGPT

SEQ ID NO: 69434 - protein, 7 aa, synthetic construct
RTNNQME

SEQ ID NO: 69435 - protein, 7 aa, synthetic construct
NMHHANT

SEQ ID NO: 69436 - protein, 7 aa, synthetic construct
VLMEVKG

SEQ ID NO: 69437 - protein, 7 aa, synthetic construct
NGSTKQP

SEQ ID NO: 69438 - protein, 7 aa, synthetic construct
TTKSAPG

SEQ ID NO: 69439 - protein, 7 aa, synthetic construct
QNSTMHP

SEQ ID NO: 69440 - protein, 7 aa, synthetic construct
NRGTMSE

SEQ ID NO: 69441 - protein, 7 aa, synthetic construct
IRTLIPN

SEQ ID NO: 69442 - protein, 7 aa, synthetic construct
IAQHTMG

SEQ ID NO: 69443 - protein, 7 aa, synthetic construct
RSQQQGW

SEQ ID NO: 69444 - protein, 7 aa, synthetic construct
IAGKNMD

SEQ ID NO: 69445 - protein, 7 aa, synthetic construct
STRSEQQ

SEQ ID NO: 69446 - protein, 7 aa, synthetic construct
HEKYPPS

SEQ ID NO: 69447 - protein, 7 aa, synthetic construct
SKQTEYK

SEQ ID NO: 69448 - protein, 7 aa, synthetic construct
CKELVCS

SEQ ID NO: 69449 - protein, 7 aa, synthetic construct
KFDGKSA

SEQ ID NO: 69450 - protein, 7 aa, synthetic construct
FMNETHS

SEQ ID NO: 69451 - protein, 7 aa, synthetic construct
HETPTRI

SEQ ID NO: 69452 - protein, 7 aa, synthetic construct
RGMNAEK

SEQ ID NO: 69453 - protein, 7 aa, synthetic construct
KGTNSAG

SEQ ID NO: 69454 - protein, 7 aa, synthetic construct
SAFMKEE

SEQ ID NO: 69455 - protein, 7 aa, synthetic construct
KPQPMAG

SEQ ID NO: 69456 - protein, 7 aa, synthetic construct
SQQTSTM

SEQ ID NO: 69457 - protein, 7 aa, synthetic construct
ARHNNQI

SEQ ID NO: 69458 - protein, 7 aa, synthetic construct
IGNSGVS

SEQ ID NO: 69459 - protein, 7 aa, synthetic construct
DKGYPAL

SEQ ID NO: 69460 - protein, 7 aa, synthetic construct
TFRVEHH

SEQ ID NO: 69461 - protein, 7 aa, synthetic construct
NKMSQMG

SEQ ID NO: 69462 - protein, 7 aa, synthetic construct
VTHRDFD

SEQ ID NO: 69463 - protein, 7 aa, synthetic construct
KFPTNQA

SEQ ID NO: 69464 - protein, 7 aa, synthetic construct
LGTSPLM

SEQ ID NO: 69465 - protein, 7 aa, synthetic construct
DRSGLHT

SEQ ID NO: 69466 - protein, 7 aa, synthetic construct
YNKSSTN

SEQ ID NO: 69467 - protein, 7 aa, synthetic construct
KNQGLDQ

SEQ ID NO: 69468 - protein, 7 aa, synthetic construct
QLHRAVE

SEQ ID NO: 69469 - protein, 7 aa, synthetic construct
ASTHQDK

SEQ ID NO: 69470 - protein, 7 aa, synthetic construct
MARATEY

SEQ ID NO: 69471 - protein, 7 aa, synthetic construct
QTKPDIW

SEQ ID NO: 69472 - protein, 7 aa, synthetic construct
ENRSEDR

SEQ ID NO: 69473 - protein, 7 aa, synthetic construct
VFTQSHA

SEQ ID NO: 69474 - protein, 7 aa, synthetic construct
KTKGTTE

SEQ ID NO: 69475 - protein, 7 aa, synthetic construct
NMRNSAM

SEQ ID NO: 69476 - protein, 7 aa, synthetic construct
TNPVNMR

SEQ ID NO: 69477 - protein, 7 aa, synthetic construct
KNHDTKW

SEQ ID NO: 69478 - protein, 7 aa, synthetic construct
AQRGDMK

SEQ ID NO: 69479 - protein, 7 aa, synthetic construct
EFGRDLM

SEQ ID NO: 69480 - protein, 7 aa, synthetic construct
NSKPNVA

SEQ ID NO: 69481 - protein, 7 aa, synthetic construct
KFQTTQQ

SEQ ID NO: 69482 - protein, 7 aa, synthetic construct
PDETQKR

SEQ ID NO: 69483 - protein, 7 aa, synthetic construct
TVKSTKD

SEQ ID NO: 69484 - protein, 7 aa, synthetic construct
LPYKFVE

SEQ ID NO: 69485 - protein, 7 aa, synthetic construct
SHGRQLM

SEQ ID NO: 69486 - protein, 7 aa, synthetic construct
GEAYQPV

SEQ ID NO: 69487 - protein, 7 aa, synthetic construct
NAKEKLS

SEQ ID NO: 69488 - protein, 7 aa, synthetic construct
FVGMQIG

SEQ ID NO: 69489 - protein, 7 aa, synthetic construct
QFVRSEP

SEQ ID NO: 69490 - protein, 7 aa, synthetic construct
KSTAQKE

SEQ ID NO: 69491 - protein, 7 aa, synthetic construct
KPEMAKL

SEQ ID NO: 69492 - protein, 7 aa, synthetic construct
AATLGPL

SEQ ID NO: 69493 - protein, 7 aa, synthetic construct
TAPTPRG

SEQ ID NO: 69494 - protein, 7 aa, synthetic construct
GRSSTGV

SEQ ID NO: 69495 - protein, 7 aa, synthetic construct
TKTTGQE

SEQ ID NO: 69496 - protein, 7 aa, synthetic construct
ERQGIVY

SEQ ID NO: 69497 - protein, 7 aa, synthetic construct
FRPRMEN

SEQ ID NO: 69498 - protein, 7 aa, synthetic construct
TLGQTIR

SEQ ID NO: 69499 - protein, 7 aa, synthetic construct
VERHHAA

SEQ ID NO: 69500 - protein, 7 aa, synthetic construct
AAWNSHP

SEQ ID NO: 69501 - protein, 7 aa, synthetic construct
YQGIRAE

SEQ ID NO: 69502 - protein, 7 aa, synthetic construct
SRNGHHI

SEQ ID NO: 69503 - protein, 7 aa, synthetic construct
RRIEAAE

SEQ ID NO: 69504 - protein, 7 aa, synthetic construct
PQSKPMA

SEQ ID NO: 69505 - protein, 7 aa, synthetic construct
SPKNSMD

SEQ ID NO: 69506 - protein, 7 aa, synthetic construct
SIQQKHN

SEQ ID NO: 69507 - protein, 7 aa, synthetic construct
KMQTTQG

SEQ ID NO: 69508 - protein, 7 aa, synthetic construct
TYYSPNA

SEQ ID NO: 69509 - protein, 7 aa, synthetic construct
PQRQANA

SEQ ID NO: 69510 - protein, 7 aa, synthetic construct
NKGAIGG

SEQ ID NO: 69511 - protein, 7 aa, synthetic construct
TAETKKS

SEQ ID NO: 69512 - protein, 7 aa, synthetic construct
MPVTKME

SEQ ID NO: 69513 - protein, 7 aa, synthetic construct
YHVRHIE

SEQ ID NO: 69514 - protein, 7 aa, synthetic construct
RNPTMID

SEQ ID NO: 69515 - protein, 7 aa, synthetic construct
GSGTILQ

SEQ ID NO: 69516 - protein, 7 aa, synthetic construct
QHRNTDM

SEQ ID NO: 69517 - protein, 7 aa, synthetic construct
SVRDLLM

SEQ ID NO: 69518 - protein, 7 aa, synthetic construct
FDPRRIG

SEQ ID NO: 69519 - protein, 7 aa, synthetic construct
QFGTPMG

SEQ ID NO: 69520 - protein, 7 aa, synthetic construct
NKWGDDY

SEQ ID NO: 69521 - protein, 7 aa, synthetic construct
GIARIQD

SEQ ID NO: 69522 - protein, 7 aa, synthetic construct
REQNGTM

SEQ ID NO: 69523 - protein, 7 aa, synthetic construct
NKTTMRE

SEQ ID NO: 69524 - protein, 7 aa, synthetic construct
EQVPRKE

SEQ ID NO: 69525 - protein, 7 aa, synthetic construct
RQSSNIG

SEQ ID NO: 69526 - protein, 7 aa, synthetic construct
IMLRAET

SEQ ID NO: 69527 - protein, 7 aa, synthetic construct
GNVKGTG

SEQ ID NO: 69528 - protein, 7 aa, synthetic construct
QFHDIKN

SEQ ID NO: 69529 - protein, 7 aa, synthetic construct
SMYSRPD

SEQ ID NO: 69530 - protein, 7 aa, synthetic construct
KGNVDFF

SEQ ID NO: 69531 - protein, 7 aa, synthetic construct
VHGGWSG

SEQ ID NO: 69532 - protein, 7 aa, synthetic construct
LPPNSTV

SEQ ID NO: 69533 - protein, 7 aa, synthetic construct
KYNRETI

SEQ ID NO: 69534 - protein, 7 aa, synthetic construct
TKKDMRE

SEQ ID NO: 69535 - protein, 7 aa, synthetic construct
EKTSNNG

SEQ ID NO: 69536 - protein, 7 aa, synthetic construct
LTPSQQY

SEQ ID NO: 69537 - protein, 7 aa, synthetic construct
KDIGRDS

SEQ ID NO: 69538 - protein, 7 aa, synthetic construct
YLHGAMG

SEQ ID NO: 69539 - protein, 7 aa, synthetic construct
DEGKQPP

SEQ ID NO: 69540 - protein, 7 aa, synthetic construct
GVNTRTW

SEQ ID NO: 69541 - protein, 7 aa, synthetic construct
QIYKAEL

SEQ ID NO: 69542 - protein, 7 aa, synthetic construct
GTQSHQS

SEQ ID NO: 69543 - protein, 7 aa, synthetic construct
THGEKSG

SEQ ID NO: 69544 - protein, 7 aa, synthetic construct
EKDSQYK

SEQ ID NO: 69545 - protein, 7 aa, synthetic construct
HNHPRQA

SEQ ID NO: 69546 - protein, 7 aa, synthetic construct
NQSNNKE

SEQ ID NO: 69547 - protein, 7 aa, synthetic construct
SEFKSMH

SEQ ID NO: 69548 - protein, 7 aa, synthetic construct
WNPGPSA

SEQ ID NO: 69549 - protein, 7 aa, synthetic construct
SQHHTKE

SEQ ID NO: 69550 - protein, 7 aa, synthetic construct
AHGVAFS

SEQ ID NO: 69551 - protein, 7 aa, synthetic construct
DENFKIG

SEQ ID NO: 69552 - protein, 7 aa, synthetic construct
IPASKNI

SEQ ID NO: 69553 - protein, 7 aa, synthetic construct
TSRNQLN

SEQ ID NO: 69554 - protein, 7 aa, synthetic construct
GKPTVVG

SEQ ID NO: 69555 - protein, 7 aa, synthetic construct
GRQIDEF

SEQ ID NO: 69556 - protein, 7 aa, synthetic construct
LDWGKID

SEQ ID NO: 69557 - protein, 7 aa, synthetic construct
NSPKMGG

SEQ ID NO: 69558 - protein, 7 aa, synthetic construct
LERTQLG

SEQ ID NO: 69559 - protein, 7 aa, synthetic construct
SKTNLMG

SEQ ID NO: 69560 - protein, 7 aa, synthetic construct
TPQLTRA

SEQ ID NO: 69561 - protein, 7 aa, synthetic construct
AGSGDKV

SEQ ID NO: 69562 - protein, 7 aa, synthetic construct
NKAVYKD

SEQ ID NO: 69563 - protein, 7 aa, synthetic construct
KQQNSMG

SEQ ID NO: 69564 - protein, 7 aa, synthetic construct
KIGDTVP

SEQ ID NO: 69565 - protein, 7 aa, synthetic construct
QMGEHKN

SEQ ID NO: 69566 - protein, 7 aa, synthetic construct
SYAKMLD

SEQ ID NO: 69567 - protein, 7 aa, synthetic construct
NARLHGI

SEQ ID NO: 69568 - protein, 7 aa, synthetic construct
FPPKVIN

SEQ ID NO: 69569 - protein, 7 aa, synthetic construct
QGKSNSP

SEQ ID NO: 69570 - protein, 7 aa, synthetic construct
GFAQHGA

SEQ ID NO: 69571 - protein, 7 aa, synthetic construct
SGQRTQS

SEQ ID NO: 69572 - protein, 7 aa, synthetic construct
GSQVKNS

SEQ ID NO: 69573 - protein, 7 aa, synthetic construct
PRATAQP

SEQ ID NO: 69574 - protein, 7 aa, synthetic construct
RPQGNIG

SEQ ID NO: 69575 - protein, 7 aa, synthetic construct
TNEFAMK

SEQ ID NO: 69576 - protein, 7 aa, synthetic construct
FDQVNRN

SEQ ID NO: 69577 - protein, 7 aa, synthetic construct
WPPHAAP

SEQ ID NO: 69578 - protein, 7 aa, synthetic construct
MPKTNSA

SEQ ID NO: 69579 - protein, 7 aa, synthetic construct
IQTQKRE

SEQ ID NO: 69580 - protein, 7 aa, synthetic construct
TQYKHHE

SEQ ID NO: 69581 - protein, 7 aa, synthetic construct
SYAQPMK

SEQ ID NO: 69582 - protein, 7 aa, synthetic construct
HGNMIIP

SEQ ID NO: 69583 - protein, 7 aa, synthetic construct
FHGANAA

SEQ ID NO: 69584 - protein, 7 aa, synthetic construct
RTKDMKE

SEQ ID NO: 69585 - protein, 7 aa, synthetic construct
YADKPHM

SEQ ID NO: 69586 - protein, 7 aa, synthetic construct
EQPRHHE

SEQ ID NO: 69587 - protein, 7 aa, synthetic construct
YGSKLAH

SEQ ID NO: 69588 - protein, 7 aa, synthetic construct
KPNLVTL

SEQ ID NO: 69589 - protein, 7 aa, synthetic construct
VWKPNTN

SEQ ID NO: 69590 - protein, 7 aa, synthetic construct
RNSSTMG

SEQ ID NO: 69591 - protein, 7 aa, synthetic construct
IKAINEV

SEQ ID NO: 69592 - protein, 7 aa, synthetic construct
KSFSKDP

SEQ ID NO: 69593 - protein, 7 aa, synthetic construct
KDTRLVL

SEQ ID NO: 69594 - protein, 7 aa, synthetic construct
TAAAGQH

SEQ ID NO: 69595 - protein, 7 aa, synthetic construct
KNGNPTG

SEQ ID NO: 69596 - protein, 7 aa, synthetic construct
KNGGPPA

SEQ ID NO: 69597 - protein, 7 aa, synthetic construct
PRNVNAP

SEQ ID NO: 69598 - protein, 7 aa, synthetic construct
TMRESEW

SEQ ID NO: 69599 - protein, 7 aa, synthetic construct
KYPSPQA

SEQ ID NO: 69600 - protein, 7 aa, synthetic construct
QLVIKQS

SEQ ID NO: 69601 - protein, 7 aa, synthetic construct
RDNHPQK

SEQ ID NO: 69602 - protein, 7 aa, synthetic construct
FEARQNP

SEQ ID NO: 69603 - protein, 7 aa, synthetic construct
IPKHDDS

SEQ ID NO: 69604 - protein, 7 aa, synthetic construct
RQAAMDF

SEQ ID NO: 69605 - protein, 7 aa, synthetic construct
TKAKLEP

SEQ ID NO: 69606 - protein, 7 aa, synthetic construct
GPQVQHG

SEQ ID NO: 69607 - protein, 7 aa, synthetic construct
LSKAMEF

SEQ ID NO: 69608 - protein, 7 aa, synthetic construct
KLVPLHD

SEQ ID NO: 69609 - protein, 7 aa, synthetic construct
QPPNQMT

SEQ ID NO: 69610 - protein, 7 aa, synthetic construct
GPVTFPV

SEQ ID NO: 69611 - protein, 7 aa, synthetic construct
RAGNEFS

SEQ ID NO: 69612 - protein, 7 aa, synthetic construct
NAANHKP

SEQ ID NO: 69613 - protein, 7 aa, synthetic construct
GVLGRNY

SEQ ID NO: 69614 - protein, 7 aa, synthetic construct
AQVGNKI

SEQ ID NO: 69615 - protein, 7 aa, synthetic construct
LNQVTRP

SEQ ID NO: 69616 - protein, 7 aa, synthetic construct
TRLPMMP

SEQ ID NO: 69617 - protein, 7 aa, synthetic construct
KSIRVDG

SEQ ID NO: 69618 - protein, 7 aa, synthetic construct
SHAKGVG

SEQ ID NO: 69619 - protein, 7 aa, synthetic construct
DMYPRPP

SEQ ID NO: 69620 - protein, 7 aa, synthetic construct
TTQREII

SEQ ID NO: 69621 - protein, 7 aa, synthetic construct
YKPTGNS

SEQ ID NO: 69622 - protein, 7 aa, synthetic construct
MAASNKG

SEQ ID NO: 69623 - protein, 7 aa, synthetic construct
RFTTNTD

SEQ ID NO: 69624 - protein, 7 aa, synthetic construct
RVRIQDG

SEQ ID NO: 69625 - protein, 7 aa, synthetic construct
LKLMVQP

SEQ ID NO: 69626 - protein, 7 aa, synthetic construct
MLHSDFA

SEQ ID NO: 69627 - protein, 7 aa, synthetic construct
LGRPLVA

SEQ ID NO: 69628 - protein, 7 aa, synthetic construct
PVRSGGE

SEQ ID NO: 69629 - protein, 7 aa, synthetic construct
PHRHESH

SEQ ID NO: 69630 - protein, 7 aa, synthetic construct
NKTSMGS

SEQ ID NO: 69631 - protein, 7 aa, synthetic construct
FATKANA

SEQ ID NO: 69632 - protein, 7 aa, synthetic construct
HGQTPNM

SEQ ID NO: 69633 - protein, 7 aa, synthetic construct
GKAGSQP

SEQ ID NO: 69634 - protein, 7 aa, synthetic construct
WQVGYNA

SEQ ID NO: 69635 - protein, 7 aa, synthetic construct
YFIGTTE

SEQ ID NO: 69636 - protein, 7 aa, synthetic construct
YSRQHLE

SEQ ID NO: 69637 - protein, 7 aa, synthetic construct
EKFSAGA

SEQ ID NO: 69638 - protein, 7 aa, synthetic construct
KNTSGHT

SEQ ID NO: 69639 - protein, 7 aa, synthetic construct
GGGHKDY

SEQ ID NO: 69640 - protein, 7 aa, synthetic construct
TFRGMTA

SEQ ID NO: 69641 - protein, 7 aa, synthetic construct
RQTIEAG

SEQ ID NO: 69642 - protein, 7 aa, synthetic construct
GKSRELD

SEQ ID NO: 69643 - protein, 7 aa, synthetic construct
KTGTSGF

SEQ ID NO: 69644 - protein, 7 aa, synthetic construct
DYPGRNM

SEQ ID NO: 69645 - protein, 7 aa, synthetic construct
QKIHLEH

SEQ ID NO: 69646 - protein, 7 aa, synthetic construct
SQKGQMP

SEQ ID NO: 69647 - protein, 7 aa, synthetic construct
QTHASPV

SEQ ID NO: 69648 - protein, 7 aa, synthetic construct
ENTFNRG

SEQ ID NO: 69649 - protein, 7 aa, synthetic construct
IWQNGID

SEQ ID NO: 69650 - protein, 7 aa, synthetic construct
HDEKGRA

SEQ ID NO: 69651 - protein, 7 aa, synthetic construct
PKSSHFE

SEQ ID NO: 69652 - protein, 7 aa, synthetic construct
NVAMRDS

SEQ ID NO: 69653 - protein, 7 aa, synthetic construct
HQPFTMA

SEQ ID NO: 69654 - protein, 7 aa, synthetic construct
MPSAGRD

SEQ ID NO: 69655 - protein, 7 aa, synthetic construct
GISTMYA

SEQ ID NO: 69656 - protein, 7 aa, synthetic construct
TNFPSVE

SEQ ID NO: 69657 - protein, 7 aa, synthetic construct
DFGQPMD

SEQ ID NO: 69658 - protein, 7 aa, synthetic construct
RSEFLHE

SEQ ID NO: 69659 - protein, 7 aa, synthetic construct
NKTEHAG

SEQ ID NO: 69660 - protein, 7 aa, synthetic construct
SGPMLAK

SEQ ID NO: 69661 - protein, 7 aa, synthetic construct
SNKMNQA

SEQ ID NO: 69662 - protein, 7 aa, synthetic construct
NSGGFSI

SEQ ID NO: 69663 - protein, 7 aa, synthetic construct
VKHDMTN

SEQ ID NO: 69664 - protein, 7 aa, synthetic construct
MRAGENI

SEQ ID NO: 69665 - protein, 7 aa, synthetic construct
GMDWQVK

SEQ ID NO: 69666 - protein, 7 aa, synthetic construct
KNDNYGS

SEQ ID NO: 69667 - protein, 7 aa, synthetic construct
KIETRPN

SEQ ID NO: 69668 - protein, 7 aa, synthetic construct
NKLKGDP

SEQ ID NO: 69669 - protein, 7 aa, synthetic construct
WNEFKAA

SEQ ID NO: 69670 - protein, 7 aa, synthetic construct
RPHQRIE

SEQ ID NO: 69671 - protein, 7 aa, synthetic construct
SQYGQPE

SEQ ID NO: 69672 - protein, 7 aa, synthetic construct
EPQMKTP

SEQ ID NO: 69673 - protein, 7 aa, synthetic construct
ISGVLHT

SEQ ID NO: 69674 - protein, 7 aa, synthetic construct
AGDRLGH

SEQ ID NO: 69675 - protein, 7 aa, synthetic construct
PKTGTAP

SEQ ID NO: 69676 - protein, 7 aa, synthetic construct
PHSLTGH

SEQ ID NO: 69677 - protein, 7 aa, synthetic construct
MPHGAVM

SEQ ID NO: 69678 - protein, 7 aa, synthetic construct
AIGHNLS

SEQ ID NO: 69679 - protein, 7 aa, synthetic construct
TTGKMPI

SEQ ID NO: 69680 - protein, 7 aa, synthetic construct
RGGMDSI

SEQ ID NO: 69681 - protein, 7 aa, synthetic construct
NVPKSQY

SEQ ID NO: 69682 - protein, 7 aa, synthetic construct
SVNGGAS

SEQ ID NO: 69683 - protein, 7 aa, synthetic construct
GEFYKLE

SEQ ID NO: 69684 - protein, 7 aa, synthetic construct
RPGNSEM

SEQ ID NO: 69685 - protein, 7 aa, synthetic construct
HGSMHPP

SEQ ID NO: 69686 - protein, 7 aa, synthetic construct
RQQIPTP

SEQ ID NO: 69687 - protein, 7 aa, synthetic construct
VHGSNLG

SEQ ID NO: 69688 - protein, 7 aa, synthetic construct
EPHKTAP

SEQ ID NO: 69689 - protein, 7 aa, synthetic construct
WKAPRTE

SEQ ID NO: 69690 - protein, 7 aa, synthetic construct
AQAMHGR

SEQ ID NO: 69691 - protein, 7 aa, synthetic construct
LKHEVQE

SEQ ID NO: 69692 - protein, 7 aa, synthetic construct
VHHQMVA

SEQ ID NO: 69693 - protein, 7 aa, synthetic construct
KSKESGG

SEQ ID NO: 69694 - protein, 7 aa, synthetic construct
AQGENRS

SEQ ID NO: 69695 - protein, 7 aa, synthetic construct
RNSVTLT

SEQ ID NO: 69696 - protein, 7 aa, synthetic construct
KDTGMQT

SEQ ID NO: 69697 - protein, 7 aa, synthetic construct
TKTNQPA

SEQ ID NO: 69698 - protein, 7 aa, synthetic construct
AKQSTSG

SEQ ID NO: 69699 - protein, 7 aa, synthetic construct
LVLEKAS

SEQ ID NO: 69700 - protein, 7 aa, synthetic construct
MSPNAPG

SEQ ID NO: 69701 - protein, 7 aa, synthetic construct
MSKSSIM

SEQ ID NO: 69702 - protein, 7 aa, synthetic construct
HQPGKTH

SEQ ID NO: 69703 - protein, 7 aa, synthetic construct
KKENKMD

SEQ ID NO: 69704 - protein, 7 aa, synthetic construct
RSSQVPV

SEQ ID NO: 69705 - protein, 7 aa, synthetic construct
ADRSKET

SEQ ID NO: 69706 - protein, 7 aa, synthetic construct
KTAERNV

SEQ ID NO: 69707 - protein, 7 aa, synthetic construct
SRPQMPH

SEQ ID NO: 69708 - protein, 7 aa, synthetic construct
RDSVIPA

SEQ ID NO: 69709 - protein, 7 aa, synthetic construct
REMLTTP

SEQ ID NO: 69710 - protein, 7 aa, synthetic construct
HTGMVAD

SEQ ID NO: 69711 - protein, 7 aa, synthetic construct
NRTQQGP

SEQ ID NO: 69712 - protein, 7 aa, synthetic construct
QRDSKQA

SEQ ID NO: 69713 - protein, 7 aa, synthetic construct
PFDDRNR

SEQ ID NO: 69714 - protein, 7 aa, synthetic construct
PKFSESM

SEQ ID NO: 69715 - protein, 7 aa, synthetic construct
GKGLNSD

SEQ ID NO: 69716 - protein, 7 aa, synthetic construct
TNNVKSG

SEQ ID NO: 69717 - protein, 7 aa, synthetic construct
PKGQIPA

SEQ ID NO: 69718 - protein, 7 aa, synthetic construct
NNQRQNP

SEQ ID NO: 69719 - protein, 7 aa, synthetic construct
LKDGRSG

SEQ ID NO: 69720 - protein, 7 aa, synthetic construct
PTQNKMI

SEQ ID NO: 69721 - protein, 7 aa, synthetic construct
PPIKNTE

SEQ ID NO: 69722 - protein, 7 aa, synthetic construct
AYGKKID

SEQ ID NO: 69723 - protein, 7 aa, synthetic construct
VKNTAQS

SEQ ID NO: 69724 - protein, 7 aa, synthetic construct
KPTSNFA

SEQ ID NO: 69725 - protein, 7 aa, synthetic construct
PKSTNGP

SEQ ID NO: 69726 - protein, 7 aa, synthetic construct
QKGVLNT

SEQ ID NO: 69727 - protein, 7 aa, synthetic construct
QNGVNPR

SEQ ID NO: 69728 - protein, 7 aa, synthetic construct
PQQSSKL

SEQ ID NO: 69729 - protein, 7 aa, synthetic construct
SNNKSNP

SEQ ID NO: 69730 - protein, 7 aa, synthetic construct
QPWKDVP

SEQ ID NO: 69731 - protein, 7 aa, synthetic construct
LQGTLLA

SEQ ID NO: 69732 - protein, 7 aa, synthetic construct
NMKQASF

SEQ ID NO: 69733 - protein, 7 aa, synthetic construct
KPTPAMA

SEQ ID NO: 69734 - protein, 7 aa, synthetic construct
SIHMNQH

SEQ ID NO: 69735 - protein, 7 aa, synthetic construct
NVRYHVE

SEQ ID NO: 69736 - protein, 7 aa, synthetic construct
LGQTPFV

SEQ ID NO: 69737 - protein, 7 aa, synthetic construct
VAGPYQG

SEQ ID NO: 69738 - protein, 7 aa, synthetic construct
KSSKMVE

SEQ ID NO: 69739 - protein, 7 aa, synthetic construct
RTGLHVV

SEQ ID NO: 69740 - protein, 7 aa, synthetic construct
VLKKPEA

SEQ ID NO: 69741 - protein, 7 aa, synthetic construct
IRGLEMH

SEQ ID NO: 69742 - protein, 7 aa, synthetic construct
RLANMPT

SEQ ID NO: 69743 - protein, 7 aa, synthetic construct
NMKGSPP

SEQ ID NO: 69744 - protein, 7 aa, synthetic construct
RAALIGE

SEQ ID NO: 69745 - protein, 7 aa, synthetic construct
SNRVAEG

SEQ ID NO: 69746 - protein, 7 aa, synthetic construct
PRSEKGF

SEQ ID NO: 69747 - protein, 7 aa, synthetic construct
PPMASVI

SEQ ID NO: 69748 - protein, 7 aa, synthetic construct
YATNTMG

SEQ ID NO: 69749 - protein, 7 aa, synthetic construct
PKNVGNA

SEQ ID NO: 69750 - protein, 7 aa, synthetic construct
IPKAFED

SEQ ID NO: 69751 - protein, 7 aa, synthetic construct
LRNGTNP

SEQ ID NO: 69752 - protein, 7 aa, synthetic construct
PFGEFRA

SEQ ID NO: 69753 - protein, 7 aa, synthetic construct
GQPKIGM

SEQ ID NO: 69754 - protein, 7 aa, synthetic construct
TFVTGAA

SEQ ID NO: 69755 - protein, 7 aa, synthetic construct
HKQQPMA

SEQ ID NO: 69756 - protein, 7 aa, synthetic construct
STEGRTV

SEQ ID NO: 69757 - protein, 7 aa, synthetic construct
IYQQEGR

SEQ ID NO: 69758 - protein, 7 aa, synthetic construct
KVGLYKD

SEQ ID NO: 69759 - protein, 7 aa, synthetic construct
QGKAGFS

SEQ ID NO: 69760 - protein, 7 aa, synthetic construct
AHKTTNE

SEQ ID NO: 69761 - protein, 7 aa, synthetic construct
KVGKPDP

SEQ ID NO: 69762 - protein, 7 aa, synthetic construct
EMTGTRE

SEQ ID NO: 69763 - protein, 7 aa, synthetic construct
TSGESKW

SEQ ID NO: 69764 - protein, 7 aa, synthetic construct
GRIAMNE

SEQ ID NO: 69765 - protein, 7 aa, synthetic construct
NTKKLAE

SEQ ID NO: 69766 - protein, 7 aa, synthetic construct
RTQGLDM

SEQ ID NO: 69767 - protein, 7 aa, synthetic construct
SPLTDTS

SEQ ID NO: 69768 - protein, 7 aa, synthetic construct
GNMKSLG

SEQ ID NO: 69769 - protein, 7 aa, synthetic construct
RPTMTHI

SEQ ID NO: 69770 - protein, 7 aa, synthetic construct
VTLVPSG

SEQ ID NO: 69771 - protein, 7 aa, synthetic construct
FQMQTRG

SEQ ID NO: 69772 - protein, 7 aa, synthetic construct
TRTATSG

SEQ ID NO: 69773 - protein, 7 aa, synthetic construct
FGTTPLS

SEQ ID NO: 69774 - protein, 7 aa, synthetic construct
MEVERFG

SEQ ID NO: 69775 - protein, 7 aa, synthetic construct
KNLAYGA

SEQ ID NO: 69776 - protein, 7 aa, synthetic construct
MERWPRE

SEQ ID NO: 69777 - protein, 7 aa, synthetic construct
SKDFDQK

SEQ ID NO: 69778 - protein, 7 aa, synthetic construct
DNAHRSP

SEQ ID NO: 69779 - protein, 7 aa, synthetic construct
SVHSGPN

SEQ ID NO: 69780 - protein, 7 aa, synthetic construct
RETMTTA

SEQ ID NO: 69781 - protein, 7 aa, synthetic construct
DQPSQPS

SEQ ID NO: 69782 - protein, 7 aa, synthetic construct
PIGKFGS

SEQ ID NO: 69783 - protein, 7 aa, synthetic construct
WRDLHKD

SEQ ID NO: 69784 - protein, 7 aa, synthetic construct
HAQMDKN

SEQ ID NO: 69785 - protein, 7 aa, synthetic construct
TMNKSNA

SEQ ID NO: 69786 - protein, 7 aa, synthetic construct
TRGHLMM

SEQ ID NO: 69787 - protein, 7 aa, synthetic construct
PWEGGAG

SEQ ID NO: 69788 - protein, 7 aa, synthetic construct
KVPEKSG

SEQ ID NO: 69789 - protein, 7 aa, synthetic construct
NFQSTAS

SEQ ID NO: 69790 - protein, 7 aa, synthetic construct
RDADKNM

SEQ ID NO: 69791 - protein, 7 aa, synthetic construct
SRSTTPA

SEQ ID NO: 69792 - protein, 7 aa, synthetic construct
VGGPGKG

SEQ ID NO: 69793 - protein, 7 aa, synthetic construct
SVHTNQG

SEQ ID NO: 69794 - protein, 7 aa, synthetic construct
GKSLNNI

SEQ ID NO: 69795 - protein, 7 aa, synthetic construct
VSTSGNL

SEQ ID NO: 69796 - protein, 7 aa, synthetic construct
GLNGNVK

SEQ ID NO: 69797 - protein, 7 aa, synthetic construct
WPPNMQA

SEQ ID NO: 69798 - protein, 7 aa, synthetic construct
ASVKRID

SEQ ID NO: 69799 - protein, 7 aa, synthetic construct
IRTNFAQ

SEQ ID NO: 69800 - protein, 7 aa, synthetic construct
GMVDRNG

SEQ ID NO: 69801 - protein, 7 aa, synthetic construct
TMSMIGG

SEQ ID NO: 69802 - protein, 7 aa, synthetic construct
YRGMLTA

SEQ ID NO: 69803 - protein, 7 aa, synthetic construct
FSRFSEA

SEQ ID NO: 69804 - protein, 7 aa, synthetic construct
KKDASKS

SEQ ID NO: 69805 - protein, 7 aa, synthetic construct
MVQTHMG

SEQ ID NO: 69806 - protein, 7 aa, synthetic construct
NTNARQA

SEQ ID NO: 69807 - protein, 7 aa, synthetic construct
MMGTQKY

SEQ ID NO: 69808 - protein, 7 aa, synthetic construct
RPTHQEE

SEQ ID NO: 69809 - protein, 7 aa, synthetic construct
GLIVTTA

SEQ ID NO: 69810 - protein, 7 aa, synthetic construct
NGVSKNP

SEQ ID NO: 69811 - protein, 7 aa, synthetic construct
KQQNGYD

SEQ ID NO: 69812 - protein, 7 aa, synthetic construct
RTIIPDH

SEQ ID NO: 69813 - protein, 7 aa, synthetic construct
TRGPAQP

SEQ ID NO: 69814 - protein, 7 aa, synthetic construct
MFESRPG

SEQ ID NO: 69815 - protein, 7 aa, synthetic construct
RYQDNPS

SEQ ID NO: 69816 - protein, 7 aa, synthetic construct
MMEKFPP

SEQ ID NO: 69817 - protein, 7 aa, synthetic construct
QSKNMAS

SEQ ID NO: 69818 - protein, 7 aa, synthetic construct
QKDGARS

SEQ ID NO: 69819 - protein, 7 aa, synthetic construct
HHTDPSM

SEQ ID NO: 69820 - protein, 7 aa, synthetic construct
NNAMPLH

SEQ ID NO: 69821 - protein, 7 aa, synthetic construct
PRDGQIP

SEQ ID NO: 69822 - protein, 7 aa, synthetic construct
HGMQPGV

SEQ ID NO: 69823 - protein, 7 aa, synthetic construct
MQYSKSE

SEQ ID NO: 69824 - protein, 7 aa, synthetic construct
WETQLKG

SEQ ID NO: 69825 - protein, 7 aa, synthetic construct
NKEQKSS

SEQ ID NO: 69826 - protein, 7 aa, synthetic construct
VMKVESA

SEQ ID NO: 69827 - protein, 7 aa, synthetic construct
MNIHNRN

SEQ ID NO: 69828 - protein, 7 aa, synthetic construct
QEKTKQS

SEQ ID NO: 69829 - protein, 7 aa, synthetic construct
AMSKTQS

SEQ ID NO: 69830 - protein, 7 aa, synthetic construct
QLNSTGS

SEQ ID NO: 69831 - protein, 7 aa, synthetic construct
EMRIEIG

SEQ ID NO: 69832 - protein, 7 aa, synthetic construct
GTAGMGK

SEQ ID NO: 69833 - protein, 7 aa, synthetic construct
QGPHFAL

SEQ ID NO: 69834 - protein, 7 aa, synthetic construct
SSYAKTY

SEQ ID NO: 69835 - protein, 7 aa, synthetic construct
WPTGQHK

SEQ ID NO: 69836 - protein, 7 aa, synthetic construct
NQRGDSG

SEQ ID NO: 69837 - protein, 7 aa, synthetic construct
RITGDAR

SEQ ID NO: 69838 - protein, 7 aa, synthetic construct
HAHSHNI

SEQ ID NO: 69839 - protein, 7 aa, synthetic construct
GEPVKRD

SEQ ID NO: 69840 - protein, 7 aa, synthetic construct
LPDKLFV

SEQ ID NO: 69841 - protein, 7 aa, synthetic construct
PHKITAE

SEQ ID NO: 69842 - protein, 7 aa, synthetic construct
AQNTVRE

SEQ ID NO: 69843 - protein, 7 aa, synthetic construct
MKNQMGY

SEQ ID NO: 69844 - protein, 7 aa, synthetic construct
LKIAAYG

SEQ ID NO: 69845 - protein, 7 aa, synthetic construct
DHPKRIV

SEQ ID NO: 69846 - protein, 7 aa, synthetic construct
IVPFSTA

SEQ ID NO: 69847 - protein, 7 aa, synthetic construct
GSSPTFA

SEQ ID NO: 69848 - protein, 7 aa, synthetic construct
HQKVEMR

SEQ ID NO: 69849 - protein, 7 aa, synthetic construct
QGQRHGM

SEQ ID NO: 69850 - protein, 7 aa, synthetic construct
STYKQVQ

SEQ ID NO: 69851 - protein, 7 aa, synthetic construct
AKVTVTH

SEQ ID NO: 69852 - protein, 7 aa, synthetic construct
IGVNGKG

SEQ ID NO: 69853 - protein, 7 aa, synthetic construct
IAGFVTK

SEQ ID NO: 69854 - protein, 7 aa, synthetic construct
PDPRQGG

SEQ ID NO: 69855 - protein, 7 aa, synthetic construct
PTSKVGM

SEQ ID NO: 69856 - protein, 7 aa, synthetic construct
KNTPNQS

SEQ ID NO: 69857 - protein, 7 aa, synthetic construct
VQRLGVH

SEQ ID NO: 69858 - protein, 7 aa, synthetic construct
IHVLTRD

SEQ ID NO: 69859 - protein, 7 aa, synthetic construct
GTGQNKG

SEQ ID NO: 69860 - protein, 7 aa, synthetic construct
ERERGNG

SEQ ID NO: 69861 - protein, 7 aa, synthetic construct
HRPNEIM

SEQ ID NO: 69862 - protein, 7 aa, synthetic construct
QGSSKQH

SEQ ID NO: 69863 - protein, 7 aa, synthetic construct
EVPLSNG

SEQ ID NO: 69864 - protein, 7 aa, synthetic construct
QNKTPNA

SEQ ID NO: 69865 - protein, 7 aa, synthetic construct
NKQAMNG

SEQ ID NO: 69866 - protein, 7 aa, synthetic construct
NYKHNDN

SEQ ID NO: 69867 - protein, 7 aa, synthetic construct
NVEWITA

SEQ ID NO: 69868 - protein, 7 aa, synthetic construct
QTKNNSA

SEQ ID NO: 69869 - protein, 7 aa, synthetic construct
FRALNRD

SEQ ID NO: 69870 - protein, 7 aa, synthetic construct
MMEKGQN

SEQ ID NO: 69871 - protein, 7 aa, synthetic construct
RGHAERQ

SEQ ID NO: 69872 - protein, 7 aa, synthetic construct
RGITSAD

SEQ ID NO: 69873 - protein, 7 aa, synthetic construct
AERTVMA

SEQ ID NO: 69874 - protein, 7 aa, synthetic construct
GRNEPQG

SEQ ID NO: 69875 - protein, 7 aa, synthetic construct
NAPFVKI

SEQ ID NO: 69876 - protein, 7 aa, synthetic construct
SRHPTHT

SEQ ID NO: 69877 - protein, 7 aa, synthetic construct
GSKGSTA

SEQ ID NO: 69878 - protein, 7 aa, synthetic construct
MPSGAPP

SEQ ID NO: 69879 - protein, 7 aa, synthetic construct
YASPGFA

SEQ ID NO: 69880 - protein, 7 aa, synthetic construct
GHKIHNS

SEQ ID NO: 69881 - protein, 7 aa, synthetic construct
NNTNANG

SEQ ID NO: 69882 - protein, 7 aa, synthetic construct
VKVLDAM

SEQ ID NO: 69883 - protein, 7 aa, synthetic construct
KNAVMRD

SEQ ID NO: 69884 - protein, 7 aa, synthetic construct
RGINQTE

SEQ ID NO: 69885 - protein, 7 aa, synthetic construct
ENRTQTA

SEQ ID NO: 69886 - protein, 7 aa, synthetic construct
APMAPSA

SEQ ID NO: 69887 - protein, 7 aa, synthetic construct
GPTSVGH

SEQ ID NO: 69888 - protein, 7 aa, synthetic construct
AKKDVNA

SEQ ID NO: 69889 - protein, 7 aa, synthetic construct
GVSGFQY

SEQ ID NO: 69890 - protein, 7 aa, synthetic construct
QKQEAGW

SEQ ID NO: 69891 - protein, 7 aa, synthetic construct
VWAGEQP

SEQ ID NO: 69892 - protein, 7 aa, synthetic construct
FQHTTQD

SEQ ID NO: 69893 - protein, 7 aa, synthetic construct
NRADWDR

SEQ ID NO: 69894 - protein, 7 aa, synthetic construct
HKTEPMR

SEQ ID NO: 69895 - protein, 7 aa, synthetic construct
GLGVHAA

SEQ ID NO: 69896 - protein, 7 aa, synthetic construct
AMDMHKD

SEQ ID NO: 69897 - protein, 7 aa, synthetic construct
GGPSQHV

SEQ ID NO: 69898 - protein, 7 aa, synthetic construct
TKSSPAG

SEQ ID NO: 69899 - protein, 7 aa, synthetic construct
NAKKTMD

SEQ ID NO: 69900 - protein, 7 aa, synthetic construct
HELKYPQ

SEQ ID NO: 69901 - protein, 7 aa, synthetic construct
RVDRSHD

SEQ ID NO: 69902 - protein, 7 aa, synthetic construct
KQEKHWG

SEQ ID NO: 69903 - protein, 7 aa, synthetic construct
CIGSGCP

SEQ ID NO: 69904 - protein, 7 aa, synthetic construct
EQPKTRN

SEQ ID NO: 69905 - protein, 7 aa, synthetic construct
GNPMVTE

SEQ ID NO: 69906 - protein, 7 aa, synthetic construct
FPRQGSG

SEQ ID NO: 69907 - protein, 7 aa, synthetic construct
NVMANKP

SEQ ID NO: 69908 - protein, 7 aa, synthetic construct
NHAAIPV

SEQ ID NO: 69909 - protein, 7 aa, synthetic construct
VTSTKTG

SEQ ID NO: 69910 - protein, 7 aa, synthetic construct
YVVTAPA

SEQ ID NO: 69911 - protein, 7 aa, synthetic construct
SVKAMPF

SEQ ID NO: 69912 - protein, 7 aa, synthetic construct
YKQGVTG

SEQ ID NO: 69913 - protein, 7 aa, synthetic construct
KTMSIPT

SEQ ID NO: 69914 - protein, 7 aa, synthetic construct
NQAKNSG

SEQ ID NO: 69915 - protein, 7 aa, synthetic construct
TKSQASN

SEQ ID NO: 69916 - protein, 7 aa, synthetic construct
PLQYKSM

SEQ ID NO: 69917 - protein, 7 aa, synthetic construct
YPHNNST

SEQ ID NO: 69918 - protein, 7 aa, synthetic construct
IEGWMSN

SEQ ID NO: 69919 - protein, 7 aa, synthetic construct
EQKMMTL

SEQ ID NO: 69920 - protein, 7 aa, synthetic construct
MFNQANK

SEQ ID NO: 69921 - protein, 7 aa, synthetic construct
EIMRLPK

SEQ ID NO: 69922 - protein, 7 aa, synthetic construct
ASQSHQG

SEQ ID NO: 69923 - protein, 7 aa, synthetic construct
IASERKF

SEQ ID NO: 69924 - protein, 7 aa, synthetic construct
AHDVGAP

SEQ ID NO: 69925 - protein, 7 aa, synthetic construct
WVGQNQN

SEQ ID NO: 69926 - protein, 7 aa, synthetic construct
LPTDMKP

SEQ ID NO: 69927 - protein, 7 aa, synthetic construct
ALRQVER

SEQ ID NO: 69928 - protein, 7 aa, synthetic construct
HNAMNKP

SEQ ID NO: 69929 - protein, 7 aa, synthetic construct
FLHMTEE

SEQ ID NO: 69930 - protein, 7 aa, synthetic construct
VIATRPD

SEQ ID NO: 69931 - protein, 7 aa, synthetic construct
VIPREGH

SEQ ID NO: 69932 - protein, 7 aa, synthetic construct
LKNILDA

SEQ ID NO: 69933 - protein, 7 aa, synthetic construct
QHPAQSV

SEQ ID NO: 69934 - protein, 7 aa, synthetic construct
QAAVMSH

SEQ ID NO: 69935 - protein, 7 aa, synthetic construct
HNKMPNF

SEQ ID NO: 69936 - protein, 7 aa, synthetic construct
MKSTTDH

SEQ ID NO: 69937 - protein, 7 aa, synthetic construct
HGSRMMD

SEQ ID NO: 69938 - protein, 7 aa, synthetic construct
IMLKDMP

SEQ ID NO: 69939 - protein, 7 aa, synthetic construct
NKSFNGA

SEQ ID NO: 69940 - protein, 7 aa, synthetic construct
YRNEGYQ

SEQ ID NO: 69941 - protein, 7 aa, synthetic construct
ERSTQPT

SEQ ID NO: 69942 - protein, 7 aa, synthetic construct
LNSQWMG

SEQ ID NO: 69943 - protein, 7 aa, synthetic construct
QGNKSTG

SEQ ID NO: 69944 - protein, 7 aa, synthetic construct
YRPGDNG

SEQ ID NO: 69945 - protein, 7 aa, synthetic construct
KSGSNMA

SEQ ID NO: 69946 - protein, 7 aa, synthetic construct
HTNIADP

SEQ ID NO: 69947 - protein, 7 aa, synthetic construct
AFDASRI

SEQ ID NO: 69948 - protein, 7 aa, synthetic construct
KNPSNGA

SEQ ID NO: 69949 - protein, 7 aa, synthetic construct
DMGRNST

SEQ ID NO: 69950 - protein, 7 aa, synthetic construct
IFSNEQK

SEQ ID NO: 69951 - protein, 7 aa, synthetic construct
MNTGSVH

SEQ ID NO: 69952 - protein, 7 aa, synthetic construct
ERIYKEP

SEQ ID NO: 69953 - protein, 7 aa, synthetic construct
LNGSRGF

SEQ ID NO: 69954 - protein, 7 aa, synthetic construct
KQQITQA

SEQ ID NO: 69955 - protein, 7 aa, synthetic construct
AHPHQSH

SEQ ID NO: 69956 - protein, 7 aa, synthetic construct
HNNHRGL

SEQ ID NO: 69957 - protein, 7 aa, synthetic construct
HKNVLVD

SEQ ID NO: 69958 - protein, 7 aa, synthetic construct
QGHTKIA

SEQ ID NO: 69959 - protein, 7 aa, synthetic construct
DGQGTAK

SEQ ID NO: 69960 - protein, 7 aa, synthetic construct
NHMRPTG

SEQ ID NO: 69961 - protein, 7 aa, synthetic construct
TEKKTLN

SEQ ID NO: 69962 - protein, 7 aa, synthetic construct
TKTREFD

SEQ ID NO: 69963 - protein, 7 aa, synthetic construct
HKIATDN

SEQ ID NO: 69964 - protein, 7 aa, synthetic construct
LIIQKDQ

SEQ ID NO: 69965 - protein, 7 aa, synthetic construct
DQKTGVF

SEQ ID NO: 69966 - protein, 7 aa, synthetic construct
NKGVVGV

SEQ ID NO: 69967 - protein, 7 aa, synthetic construct
VGNPPIH

SEQ ID NO: 69968 - protein, 7 aa, synthetic construct
NGDKHAI

SEQ ID NO: 69969 - protein, 7 aa, synthetic construct
WPVELKG

SEQ ID NO: 69970 - protein, 7 aa, synthetic construct
WTPNDVK

SEQ ID NO: 69971 - protein, 7 aa, synthetic construct
QKGIQAA

SEQ ID NO: 69972 - protein, 7 aa, synthetic construct
FLPNSPP

SEQ ID NO: 69973 - protein, 7 aa, synthetic construct
DNMHSKF

SEQ ID NO: 69974 - protein, 7 aa, synthetic construct
KTNGQTG

SEQ ID NO: 69975 - protein, 7 aa, synthetic construct
GGESRKV

SEQ ID NO: 69976 - protein, 7 aa, synthetic construct
SNNQGVK

SEQ ID NO: 69977 - protein, 7 aa, synthetic construct
TMRDHFA

SEQ ID NO: 69978 - protein, 7 aa, synthetic construct
AGEMLKR

SEQ ID NO: 69979 - protein, 7 aa, synthetic construct
AVTFRSD

SEQ ID NO: 69980 - protein, 7 aa, synthetic construct
LQRHHDN

SEQ ID NO: 69981 - protein, 7 aa, synthetic construct
GNYRHQA

SEQ ID NO: 69982 - protein, 7 aa, synthetic construct
PFKNSGT

SEQ ID NO: 69983 - protein, 7 aa, synthetic construct
PPHMRDL

SEQ ID NO: 69984 - protein, 7 aa, synthetic construct
VTGSANA

SEQ ID NO: 69985 - protein, 7 aa, synthetic construct
KSNSYND

SEQ ID NO: 69986 - protein, 7 aa, synthetic construct
PHQKYSP

SEQ ID NO: 69987 - protein, 7 aa, synthetic construct
LMGKHMT

SEQ ID NO: 69988 - protein, 7 aa, synthetic construct
GQHMEKM

SEQ ID NO: 69989 - protein, 7 aa, synthetic construct
MKNTMQA

SEQ ID NO: 69990 - protein, 7 aa, synthetic construct
DNKQTAR

SEQ ID NO: 69991 - protein, 7 aa, synthetic construct
HSNHPQS

SEQ ID NO: 69992 - protein, 7 aa, synthetic construct
DHKQGDY

SEQ ID NO: 69993 - protein, 7 aa, synthetic construct
SKILMGE

SEQ ID NO: 69994 - protein, 7 aa, synthetic construct
SASINTN

SEQ ID NO: 69995 - protein, 7 aa, synthetic construct
HAETKRA

SEQ ID NO: 69996 - protein, 7 aa, synthetic construct
QSGKNNG

SEQ ID NO: 69997 - protein, 7 aa, synthetic construct
WQNQGGV

SEQ ID NO: 69998 - protein, 7 aa, synthetic construct
GRPSGDR

SEQ ID NO: 69999 - protein, 7 aa, synthetic construct
QQTALKE

SEQ ID NO: 70000 - protein, 7 aa, synthetic construct
KKYDKME

SEQ ID NO: 70001 - protein, 7 aa, synthetic construct
GSANWKT

SEQ ID NO: 70002 - protein, 7 aa, synthetic construct
MAGQQTW

SEQ ID NO: 70003 - protein, 7 aa, synthetic construct
KHEKSGP

SEQ ID NO: 70004 - protein, 7 aa, synthetic construct
TLPHTVP

SEQ ID NO: 70005 - protein, 7 aa, synthetic construct
RGNQVFM

SEQ ID NO: 70006 - protein, 7 aa, synthetic construct
NTGRKDQ

SEQ ID NO: 70007 - protein, 7 aa, synthetic construct
HNAGNPI

SEQ ID NO: 70008 - protein, 7 aa, synthetic construct
NGSRNEI

SEQ ID NO: 70009 - protein, 7 aa, synthetic construct
GDANMGK

SEQ ID NO: 70010 - protein, 7 aa, synthetic construct
LSSPIYP

SEQ ID NO: 70011 - protein, 7 aa, synthetic construct
NTVPHKM

SEQ ID NO: 70012 - protein, 7 aa, synthetic construct
KYNHHAP

SEQ ID NO: 70013 - protein, 7 aa, synthetic construct
TREVRLQ

SEQ ID NO: 70014 - protein, 7 aa, synthetic construct
KSMMGRE

SEQ ID NO: 70015 - protein, 7 aa, synthetic construct
GTKNMAA

SEQ ID NO: 70016 - protein, 7 aa, synthetic construct
AEQKTFT

SEQ ID NO: 70017 - protein, 7 aa, synthetic construct
VMSNTAD

SEQ ID NO: 70018 - protein, 7 aa, synthetic construct
GGSISKS

SEQ ID NO: 70019 - protein, 7 aa, synthetic construct
KYSGTAA

SEQ ID NO: 70020 - protein, 7 aa, synthetic construct
IHPGIIT

SEQ ID NO: 70021 - protein, 7 aa, synthetic construct
MRSGTQS

SEQ ID NO: 70022 - protein, 7 aa, synthetic construct
PVKQSGA

SEQ ID NO: 70023 - protein, 7 aa, synthetic construct
GNHNGTH

SEQ ID NO: 70024 - protein, 7 aa, synthetic construct
DMTAKSH

SEQ ID NO: 70025 - protein, 7 aa, synthetic construct
MRPHASH

SEQ ID NO: 70026 - protein, 7 aa, synthetic construct
TMREPQA

SEQ ID NO: 70027 - protein, 7 aa, synthetic construct
PTKTGTA

SEQ ID NO: 70028 - protein, 7 aa, synthetic construct
DMYNSKA

SEQ ID NO: 70029 - protein, 7 aa, synthetic construct
KSTQREG

SEQ ID NO: 70030 - protein, 7 aa, synthetic construct
KTTANTH

SEQ ID NO: 70031 - protein, 7 aa, synthetic construct
LERGYMS

SEQ ID NO: 70032 - protein, 7 aa, synthetic construct
GRDTPGS

SEQ ID NO: 70033 - protein, 7 aa, synthetic construct
SLRDQQY

SEQ ID NO: 70034 - protein, 7 aa, synthetic construct
VIADRSL

SEQ ID NO: 70035 - protein, 7 aa, synthetic construct
QIATERN

SEQ ID NO: 70036 - protein, 7 aa, synthetic construct
WSKDAKA

SEQ ID NO: 70037 - protein, 7 aa, synthetic construct
QPKIAVL

SEQ ID NO: 70038 - protein, 7 aa, synthetic construct
HLAIHMG

SEQ ID NO: 70039 - protein, 7 aa, synthetic construct
THKPMGE

SEQ ID NO: 70040 - protein, 7 aa, synthetic construct
QHRAVTT

SEQ ID NO: 70041 - protein, 7 aa, synthetic construct
SLQNKVV

SEQ ID NO: 70042 - protein, 7 aa, synthetic construct
DIRASIV

SEQ ID NO: 70043 - protein, 7 aa, synthetic construct
KEHAPES

SEQ ID NO: 70044 - protein, 7 aa, synthetic construct
RNSVINQ

SEQ ID NO: 70045 - protein, 7 aa, synthetic construct
NRTAGNV

SEQ ID NO: 70046 - protein, 7 aa, synthetic construct
RQNQMVA

SEQ ID NO: 70047 - protein, 7 aa, synthetic construct
INTKTIV

SEQ ID NO: 70048 - protein, 7 aa, synthetic construct
MMSGRAL

SEQ ID NO: 70049 - protein, 7 aa, synthetic construct
ASHAKVT

SEQ ID NO: 70050 - protein, 7 aa, synthetic construct
RPHSEQL

SEQ ID NO: 70051 - protein, 7 aa, synthetic construct
EGLRANL

SEQ ID NO: 70052 - protein, 7 aa, synthetic construct
QFKPDQY

SEQ ID NO: 70053 - protein, 7 aa, synthetic construct
YHHTKTG

SEQ ID NO: 70054 - protein, 7 aa, synthetic construct
LQSQTMQ

SEQ ID NO: 70055 - protein, 7 aa, synthetic construct
PIHSKDE

SEQ ID NO: 70056 - protein, 7 aa, synthetic construct
KPAHHAT

SEQ ID NO: 70057 - protein, 7 aa, synthetic construct
RQTAGVG

SEQ ID NO: 70058 - protein, 7 aa, synthetic construct
GLQERKD

SEQ ID NO: 70059 - protein, 7 aa, synthetic construct
TERELHP

SEQ ID NO: 70060 - protein, 7 aa, synthetic construct
NSAAQPE

SEQ ID NO: 70061 - protein, 7 aa, synthetic construct
IPHNDVG

SEQ ID NO: 70062 - protein, 7 aa, synthetic construct
GNATGMK

SEQ ID NO: 70063 - protein, 7 aa, synthetic construct
SHYHSVG

SEQ ID NO: 70064 - protein, 7 aa, synthetic construct
YAKMQVM

SEQ ID NO: 70065 - protein, 7 aa, synthetic construct
VLRSTGI

SEQ ID NO: 70066 - protein, 7 aa, synthetic construct
KLQHGFS

SEQ ID NO: 70067 - protein, 7 aa, synthetic construct
TNGIRNC

SEQ ID NO: 70068 - protein, 7 aa, synthetic construct
RDTGDKM

SEQ ID NO: 70069 - protein, 7 aa, synthetic construct
MQQGQTN

SEQ ID NO: 70070 - protein, 7 aa, synthetic construct
MRHGLMV

SEQ ID NO: 70071 - protein, 7 aa, synthetic construct
ERYSTPA

SEQ ID NO: 70072 - protein, 7 aa, synthetic construct
VRPTDMF

SEQ ID NO: 70073 - protein, 7 aa, synthetic construct
TQRFTVG

SEQ ID NO: 70074 - protein, 7 aa, synthetic construct
QGQKFPA

SEQ ID NO: 70075 - protein, 7 aa, synthetic construct
KQNASGF

SEQ ID NO: 70076 - protein, 7 aa, synthetic construct
DTRSQMV

SEQ ID NO: 70077 - protein, 7 aa, synthetic construct
TQKTGQG

SEQ ID NO: 70078 - protein, 7 aa, synthetic construct
TKNDNMA

SEQ ID NO: 70079 - protein, 7 aa, synthetic construct
SLYHTVE

SEQ ID NO: 70080 - protein, 7 aa, synthetic construct
FNHSLSE

SEQ ID NO: 70081 - protein, 7 aa, synthetic construct
GFKADVM

SEQ ID NO: 70082 - protein, 7 aa, synthetic construct
LMGINGA

SEQ ID NO: 70083 - protein, 7 aa, synthetic construct
DYARHGL

SEQ ID NO: 70084 - protein, 7 aa, synthetic construct
VDPFHPG

SEQ ID NO: 70085 - protein, 7 aa, synthetic construct
GFQRHDT

SEQ ID NO: 70086 - protein, 7 aa, synthetic construct
RGNTAGA

SEQ ID NO: 70087 - protein, 7 aa, synthetic construct
IRGPFPG

SEQ ID NO: 70088 - protein, 7 aa, synthetic construct
QHYGSHV

SEQ ID NO: 70089 - protein, 7 aa, synthetic construct
TNKSQMG

SEQ ID NO: 70090 - protein, 7 aa, synthetic construct
GMEAHRM

SEQ ID NO: 70091 - protein, 7 aa, synthetic construct
DIKWNKT

SEQ ID NO: 70092 - protein, 7 aa, synthetic construct
WIAGNPA

SEQ ID NO: 70093 - protein, 7 aa, synthetic construct
STPGQMA

SEQ ID NO: 70094 - protein, 7 aa, synthetic construct
SKPSHPD

SEQ ID NO: 70095 - protein, 7 aa, synthetic construct
NQAQLSR

SEQ ID NO: 70096 - protein, 7 aa, synthetic construct
QKTNNSG

SEQ ID NO: 70097 - protein, 7 aa, synthetic construct
TALMLTG

SEQ ID NO: 70098 - protein, 7 aa, synthetic construct
SMFKGHE

SEQ ID NO: 70099 - protein, 7 aa, synthetic construct
CAGRSCI

SEQ ID NO: 70100 - protein, 7 aa, synthetic construct
SVMPPTM

SEQ ID NO: 70101 - protein, 7 aa, synthetic construct
QDTANWK

SEQ ID NO: 70102 - protein, 7 aa, synthetic construct
LLRGLDD

SEQ ID NO: 70103 - protein, 7 aa, synthetic construct
GHNNRNY

SEQ ID NO: 70104 - protein, 7 aa, synthetic construct
KSQQQSH

SEQ ID NO: 70105 - protein, 7 aa, synthetic construct
LYQKMES

SEQ ID NO: 70106 - protein, 7 aa, synthetic construct
GNSALHL

SEQ ID NO: 70107 - protein, 7 aa, synthetic construct
NIKGERI

SEQ ID NO: 70108 - protein, 7 aa, synthetic construct
GSPVKRD

SEQ ID NO: 70109 - protein, 7 aa, synthetic construct
SVQHNNI

SEQ ID NO: 70110 - protein, 7 aa, synthetic construct
ITESKQY

SEQ ID NO: 70111 - protein, 7 aa, synthetic construct
IEAGHGQ

SEQ ID NO: 70112 - protein, 7 aa, synthetic construct
NGNKADG

SEQ ID NO: 70113 - protein, 7 aa, synthetic construct
PRDPSQS

SEQ ID NO: 70114 - protein, 7 aa, synthetic construct
MQKAVTA

SEQ ID NO: 70115 - protein, 7 aa, synthetic construct
PLAGVQV

SEQ ID NO: 70116 - protein, 7 aa, synthetic construct
RTGQGFD

SEQ ID NO: 70117 - protein, 7 aa, synthetic construct
HTTTLNF

SEQ ID NO: 70118 - protein, 7 aa, synthetic construct
KISEVKA

SEQ ID NO: 70119 - protein, 7 aa, synthetic construct
GNKMTYD

SEQ ID NO: 70120 - protein, 7 aa, synthetic construct
HKLGVDW

SEQ ID NO: 70121 - protein, 7 aa, synthetic construct
KQLKLEF

SEQ ID NO: 70122 - protein, 7 aa, synthetic construct
FMDREQV

SEQ ID NO: 70123 - protein, 7 aa, synthetic construct
IGMQRHM

SEQ ID NO: 70124 - protein, 7 aa, synthetic construct
LDNGNQK

SEQ ID NO: 70125 - protein, 7 aa, synthetic construct
LKVHFRE

SEQ ID NO: 70126 - protein, 7 aa, synthetic construct
LNMRGNA

SEQ ID NO: 70127 - protein, 7 aa, synthetic construct
LNAPFEF

SEQ ID NO: 70128 - protein, 7 aa, synthetic construct
YVSIGTN

SEQ ID NO: 70129 - protein, 7 aa, synthetic construct
GRTSMNA

SEQ ID NO: 70130 - protein, 7 aa, synthetic construct
RTEHGVQ

SEQ ID NO: 70131 - protein, 7 aa, synthetic construct
WSDAYKV

SEQ ID NO: 70132 - protein, 7 aa, synthetic construct
KMQNTTG

SEQ ID NO: 70133 - protein, 7 aa, synthetic construct
YNKNAQA

SEQ ID NO: 70134 - protein, 7 aa, synthetic construct
GQGGKFG

SEQ ID NO: 70135 - protein, 7 aa, synthetic construct
QQKSWMD

SEQ ID NO: 70136 - protein, 7 aa, synthetic construct
KVGQVNS

SEQ ID NO: 70137 - protein, 7 aa, synthetic construct
SILHSSP

SEQ ID NO: 70138 - protein, 7 aa, synthetic construct
SASRVGM

SEQ ID NO: 70139 - protein, 7 aa, synthetic construct
DHRGGLG

SEQ ID NO: 70140 - protein, 7 aa, synthetic construct
FKTHNLV

SEQ ID NO: 70141 - protein, 7 aa, synthetic construct
RPMTAMS

SEQ ID NO: 70142 - protein, 7 aa, synthetic construct
VRHNSEP

SEQ ID NO: 70143 - protein, 7 aa, synthetic construct
GPKVNAA

SEQ ID NO: 70144 - protein, 7 aa, synthetic construct
SIRNQQN

SEQ ID NO: 70145 - protein, 7 aa, synthetic construct
FAQDPKW

SEQ ID NO: 70146 - protein, 7 aa, synthetic construct
VMKDGRQ

SEQ ID NO: 70147 - protein, 7 aa, synthetic construct
QTPQNYI

SEQ ID NO: 70148 - protein, 7 aa, synthetic construct
MMRPNHQ

SEQ ID NO: 70149 - protein, 7 aa, synthetic construct
ISKFQEG

SEQ ID NO: 70150 - protein, 7 aa, synthetic construct
RMPSQQG

SEQ ID NO: 70151 - protein, 7 aa, synthetic construct
PYGGRTD

SEQ ID NO: 70152 - protein, 7 aa, synthetic construct
STHNNKE

SEQ ID NO: 70153 - protein, 7 aa, synthetic construct
HMDRSKL

SEQ ID NO: 70154 - protein, 7 aa, synthetic construct
NYTEKNR

SEQ ID NO: 70155 - protein, 7 aa, synthetic construct
NSSGSVI

SEQ ID NO: 70156 - protein, 7 aa, synthetic construct
PYSTERN

SEQ ID NO: 70157 - protein, 7 aa, synthetic construct
VLRGREG

SEQ ID NO: 70158 - protein, 7 aa, synthetic construct
FGPPGLR

SEQ ID NO: 70159 - protein, 7 aa, synthetic construct
NTSHHKD

SEQ ID NO: 70160 - protein, 7 aa, synthetic construct
FKTTNAA

SEQ ID NO: 70161 - protein, 7 aa, synthetic construct
NKTVSSG

SEQ ID NO: 70162 - protein, 7 aa, synthetic construct
MLSKMDK

SEQ ID NO: 70163 - protein, 7 aa, synthetic construct
GLNQSAT

SEQ ID NO: 70164 - protein, 7 aa, synthetic construct
RNTQHDR

SEQ ID NO: 70165 - protein, 7 aa, synthetic construct
SPPKQMS

SEQ ID NO: 70166 - protein, 7 aa, synthetic construct
KKESYGG

SEQ ID NO: 70167 - protein, 7 aa, synthetic construct
VAPVQPQ

SEQ ID NO: 70168 - protein, 7 aa, synthetic construct
NTFRANN

SEQ ID NO: 70169 - protein, 7 aa, synthetic construct
RPVTYAG

SEQ ID NO: 70170 - protein, 7 aa, synthetic construct
GPNKQSV

SEQ ID NO: 70171 - protein, 7 aa, synthetic construct
NNVIAHV

SEQ ID NO: 70172 - protein, 7 aa, synthetic construct
QFPTKHT

SEQ ID NO: 70173 - protein, 7 aa, synthetic construct
GRGIANA

SEQ ID NO: 70174 - protein, 7 aa, synthetic construct
EKHSNND

SEQ ID NO: 70175 - protein, 7 aa, synthetic construct
QNEHMIM

SEQ ID NO: 70176 - protein, 7 aa, synthetic construct
HRAETNI

SEQ ID NO: 70177 - protein, 7 aa, synthetic construct
PTRQDRT

SEQ ID NO: 70178 - protein, 7 aa, synthetic construct
HKTNPPS

SEQ ID NO: 70179 - protein, 7 aa, synthetic construct
PRAPGFA

SEQ ID NO: 70180 - protein, 7 aa, synthetic construct
NNFGTMQ

SEQ ID NO: 70181 - protein, 7 aa, synthetic construct
KPLSYEP

SEQ ID NO: 70182 - protein, 7 aa, synthetic construct
YTTNAKA

SEQ ID NO: 70183 - protein, 7 aa, synthetic construct
KSTADQF

SEQ ID NO: 70184 - protein, 7 aa, synthetic construct
EVHARAS

SEQ ID NO: 70185 - protein, 7 aa, synthetic construct
PFREGAW

SEQ ID NO: 70186 - protein, 7 aa, synthetic construct
TSQINRN

SEQ ID NO: 70187 - protein, 7 aa, synthetic construct
KPGPMHE

SEQ ID NO: 70188 - protein, 7 aa, synthetic construct
YTKAGTG

SEQ ID NO: 70189 - protein, 7 aa, synthetic construct
QIHNTSR

SEQ ID NO: 70190 - protein, 7 aa, synthetic construct
QRSAADQ

SEQ ID NO: 70191 - protein, 7 aa, synthetic construct
IGKMHQL

SEQ ID NO: 70192 - protein, 7 aa, synthetic construct
YQRMLTE

SEQ ID NO: 70193 - protein, 7 aa, synthetic construct
EKNQQGA

SEQ ID NO: 70194 - protein, 7 aa, synthetic construct
YEKGKGN

SEQ ID NO: 70195 - protein, 7 aa, synthetic construct
NHHSVQS

SEQ ID NO: 70196 - protein, 7 aa, synthetic construct
MHNIIQD

SEQ ID NO: 70197 - protein, 7 aa, synthetic construct
GHQSIKQ

SEQ ID NO: 70198 - protein, 7 aa, synthetic construct
ISKDTQR

SEQ ID NO: 70199 - protein, 7 aa, synthetic construct
GPTQKGG

SEQ ID NO: 70200 - protein, 7 aa, synthetic construct
TARQSDP

SEQ ID NO: 70201 - protein, 7 aa, synthetic construct
AHTANRI

SEQ ID NO: 70202 - protein, 7 aa, synthetic construct
QEGGGGR

SEQ ID NO: 70203 - protein, 7 aa, synthetic construct
SASTKDN

SEQ ID NO: 70204 - protein, 7 aa, synthetic construct
QPIREAM

SEQ ID NO: 70205 - protein, 7 aa, synthetic construct
AFRDADD

SEQ ID NO: 70206 - protein, 7 aa, synthetic construct
RLSKFTD

SEQ ID NO: 70207 - protein, 7 aa, synthetic construct
HKPSTSA

SEQ ID NO: 70208 - protein, 7 aa, synthetic construct
LAKSNGI

SEQ ID NO: 70209 - protein, 7 aa, synthetic construct
VITRLQN

SEQ ID NO: 70210 - protein, 7 aa, synthetic construct
FATSQQK

SEQ ID NO: 70211 - protein, 7 aa, synthetic construct
RETRERD

SEQ ID NO: 70212 - protein, 7 aa, synthetic construct
LQSAKSF

SEQ ID NO: 70213 - protein, 7 aa, synthetic construct
TVSMANP

SEQ ID NO: 70214 - protein, 7 aa, synthetic construct
GKSGGQA

SEQ ID NO: 70215 - protein, 7 aa, synthetic construct
TVHDKYW

SEQ ID NO: 70216 - protein, 7 aa, synthetic construct
LGGTAIL

SEQ ID NO: 70217 - protein, 7 aa, synthetic construct
YPVAGLV

SEQ ID NO: 70218 - protein, 7 aa, synthetic construct
VARGVQI

SEQ ID NO: 70219 - protein, 7 aa, synthetic construct
MGNTTTY

SEQ ID NO: 70220 - protein, 7 aa, synthetic construct
KHEAHGY

SEQ ID NO: 70221 - protein, 7 aa, synthetic construct
GKTQNWS

SEQ ID NO: 70222 - protein, 7 aa, synthetic construct
TAQTRGA

SEQ ID NO: 70223 - protein, 7 aa, synthetic construct
AHKMRDT

SEQ ID NO: 70224 - protein, 7 aa, synthetic construct
QNATNYL

SEQ ID NO: 70225 - protein, 7 aa, synthetic construct
GTGEQKY

SEQ ID NO: 70226 - protein, 7 aa, synthetic construct
GFQGVKP

SEQ ID NO: 70227 - protein, 7 aa, synthetic construct
RMETYTE

SEQ ID NO: 70228 - protein, 7 aa, synthetic construct
VSGWNEA

SEQ ID NO: 70229 - protein, 7 aa, synthetic construct
QFQVNSK

SEQ ID NO: 70230 - protein, 7 aa, synthetic construct
KPAHLEI

SEQ ID NO: 70231 - protein, 7 aa, synthetic construct
MATQVSV

SEQ ID NO: 70232 - protein, 7 aa, synthetic construct
NLNGHID

SEQ ID NO: 70233 - protein, 7 aa, synthetic construct
QERSSVG

SEQ ID NO: 70234 - protein, 7 aa, synthetic construct
NKVTGNI

SEQ ID NO: 70235 - protein, 7 aa, synthetic construct
TGKQKDG

SEQ ID NO: 70236 - protein, 7 aa, synthetic construct
YPSHMQK

SEQ ID NO: 70237 - protein, 7 aa, synthetic construct
YKHLQGS

SEQ ID NO: 70238 - protein, 7 aa, synthetic construct
TTSGRTG

SEQ ID NO: 70239 - protein, 7 aa, synthetic construct
FQNKMSA

SEQ ID NO: 70240 - protein, 7 aa, synthetic construct
NASRPVY

SEQ ID NO: 70241 - protein, 7 aa, synthetic construct
AKPANSQ

SEQ ID NO: 70242 - protein, 7 aa, synthetic construct
YQNSLRS

SEQ ID NO: 70243 - protein, 7 aa, synthetic construct
HSSAGHI

SEQ ID NO: 70244 - protein, 7 aa, synthetic construct
TPRSENM

SEQ ID NO: 70245 - protein, 7 aa, synthetic construct
RYKSGDA

SEQ ID NO: 70246 - protein, 7 aa, synthetic construct
KPGTNVS

SEQ ID NO: 70247 - protein, 7 aa, synthetic construct
LPPPNQP

SEQ ID NO: 70248 - protein, 7 aa, synthetic construct
PKTPMSI

SEQ ID NO: 70249 - protein, 7 aa, synthetic construct
TKTSPNG

SEQ ID NO: 70250 - protein, 7 aa, synthetic construct
FPKMPAT

SEQ ID NO: 70251 - protein, 7 aa, synthetic construct
NSGKMQQ

SEQ ID NO: 70252 - protein, 7 aa, synthetic construct
SKGGLTN

SEQ ID NO: 70253 - protein, 7 aa, synthetic construct
LPQAQNR

SEQ ID NO: 70254 - protein, 7 aa, synthetic construct
RTQASMA

SEQ ID NO: 70255 - protein, 7 aa, synthetic construct
TSHTHRV

SEQ ID NO: 70256 - protein, 7 aa, synthetic construct
LGQYHQN

SEQ ID NO: 70257 - protein, 7 aa, synthetic construct
DFTIKHK

SEQ ID NO: 70258 - protein, 7 aa, synthetic construct
EHKINKS

SEQ ID NO: 70259 - protein, 7 aa, synthetic construct
MNKFSGG

SEQ ID NO: 70260 - protein, 7 aa, synthetic construct
SNKASQV

SEQ ID NO: 70261 - protein, 7 aa, synthetic construct
MGGSTFP

SEQ ID NO: 70262 - protein, 7 aa, synthetic construct
FNQQKQS

SEQ ID NO: 70263 - protein, 7 aa, synthetic construct
INYNGIH

SEQ ID NO: 70264 - protein, 7 aa, synthetic construct
RGATGIN

SEQ ID NO: 70265 - protein, 7 aa, synthetic construct
AKTPGQT

SEQ ID NO: 70266 - protein, 7 aa, synthetic construct
MGERAYG

SEQ ID NO: 70267 - protein, 7 aa, synthetic construct
NRQIYNA

SEQ ID NO: 70268 - protein, 7 aa, synthetic construct
VGKAASP

SEQ ID NO: 70269 - protein, 7 aa, synthetic construct
LGKFFRE

SEQ ID NO: 70270 - protein, 7 aa, synthetic construct
ARPSVIE

SEQ ID NO: 70271 - protein, 7 aa, synthetic construct
LRNTVQE

SEQ ID NO: 70272 - protein, 7 aa, synthetic construct
WGANGTA

SEQ ID NO: 70273 - protein, 7 aa, synthetic construct
GMNTKPA

SEQ ID NO: 70274 - protein, 7 aa, synthetic construct
SDKQRTE

SEQ ID NO: 70275 - protein, 7 aa, synthetic construct
VNPAQIN

SEQ ID NO: 70276 - protein, 7 aa, synthetic construct
LSSFKQP

SEQ ID NO: 70277 - protein, 7 aa, synthetic construct
NYMDRKP

SEQ ID NO: 70278 - protein, 7 aa, synthetic construct
GVRKPED

SEQ ID NO: 70279 - protein, 7 aa, synthetic construct
EYQQSRP

SEQ ID NO: 70280 - protein, 7 aa, synthetic construct
LTIGQGK

SEQ ID NO: 70281 - protein, 7 aa, synthetic construct
HGGYPSV

SEQ ID NO: 70282 - protein, 7 aa, synthetic construct
PPPPAIA

SEQ ID NO: 70283 - protein, 7 aa, synthetic construct
TPRTSSM

SEQ ID NO: 70284 - protein, 7 aa, synthetic construct
RHKENSM

SEQ ID NO: 70285 - protein, 7 aa, synthetic construct
LTGPFNA

SEQ ID NO: 70286 - protein, 7 aa, synthetic construct
MNTGMMR

SEQ ID NO: 70287 - protein, 7 aa, synthetic construct
QILYDKG

SEQ ID NO: 70288 - protein, 7 aa, synthetic construct
IRQQGGH

SEQ ID NO: 70289 - protein, 7 aa, synthetic construct
NGAYQRI

SEQ ID NO: 70290 - protein, 7 aa, synthetic construct
MQKQSGA

SEQ ID NO: 70291 - protein, 7 aa, synthetic construct
VQPGIHY

SEQ ID NO: 70292 - protein, 7 aa, synthetic construct
NVRSGQG

SEQ ID NO: 70293 - protein, 7 aa, synthetic construct
KVLKEVP

SEQ ID NO: 70294 - protein, 7 aa, synthetic construct
HRTMSSN

SEQ ID NO: 70295 - protein, 7 aa, synthetic construct
QVQKDYH

SEQ ID NO: 70296 - protein, 7 aa, synthetic construct
KPPHKDD

SEQ ID NO: 70297 - protein, 7 aa, synthetic construct
INSMMKG

SEQ ID NO: 70298 - protein, 7 aa, synthetic construct
IKSDMES

SEQ ID NO: 70299 - protein, 7 aa, synthetic construct
YKVRPDP

SEQ ID NO: 70300 - protein, 7 aa, synthetic construct
SKPGING

SEQ ID NO: 70301 - protein, 7 aa, synthetic construct
DTSLKHE

SEQ ID NO: 70302 - protein, 7 aa, synthetic construct
GPRSSND

SEQ ID NO: 70303 - protein, 7 aa, synthetic construct
YPQKASP

SEQ ID NO: 70304 - protein, 7 aa, synthetic construct
MSPTLLP

SEQ ID NO: 70305 - protein, 7 aa, synthetic construct
NGTNSKG

SEQ ID NO: 70306 - protein, 7 aa, synthetic construct
NSHIHLA

SEQ ID NO: 70307 - protein, 7 aa, synthetic construct
GNANRMA

SEQ ID NO: 70308 - protein, 7 aa, synthetic construct
FQGESTV

SEQ ID NO: 70309 - protein, 7 aa, synthetic construct
NESKNQH

SEQ ID NO: 70310 - protein, 7 aa, synthetic construct
THQGYNV

SEQ ID NO: 70311 - protein, 7 aa, synthetic construct
YPTRPMP

SEQ ID NO: 70312 - protein, 7 aa, synthetic construct
NLTAGAI

SEQ ID NO: 70313 - protein, 7 aa, synthetic construct
VGNTRVA

SEQ ID NO: 70314 - protein, 7 aa, synthetic construct
KLNREDL

SEQ ID NO: 70315 - protein, 7 aa, synthetic construct
SFSGNAR

SEQ ID NO: 70316 - protein, 7 aa, synthetic construct
QNGNTTR

SEQ ID NO: 70317 - protein, 7 aa, synthetic construct
AYPIKFE

SEQ ID NO: 70318 - protein, 7 aa, synthetic construct
HLPEIRF

SEQ ID NO: 70319 - protein, 7 aa, synthetic construct
HHVTKDT

SEQ ID NO: 70320 - protein, 7 aa, synthetic construct
AWEHAVP

SEQ ID NO: 70321 - protein, 7 aa, synthetic construct
YKHEAKP

SEQ ID NO: 70322 - protein, 7 aa, synthetic construct
GYFDKPQ

SEQ ID NO: 70323 - protein, 7 aa, synthetic construct
LAKHGQQ

SEQ ID NO: 70324 - protein, 7 aa, synthetic construct
RNRMEDP

SEQ ID NO: 70325 - protein, 7 aa, synthetic construct
ALPKSEA

SEQ ID NO: 70326 - protein, 7 aa, synthetic construct
AHDYKKG

SEQ ID NO: 70327 - protein, 7 aa, synthetic construct
LREAFRE

SEQ ID NO: 70328 - protein, 7 aa, synthetic construct
QRAAIVT

SEQ ID NO: 70329 - protein, 7 aa, synthetic construct
KGLIAEY

SEQ ID NO: 70330 - protein, 7 aa, synthetic construct
QTVSDKN

SEQ ID NO: 70331 - protein, 7 aa, synthetic construct
HRPSNFD

SEQ ID NO: 70332 - protein, 7 aa, synthetic construct
SESTWHK

SEQ ID NO: 70333 - protein, 7 aa, synthetic construct
EPPSNKL

SEQ ID NO: 70334 - protein, 7 aa, synthetic construct
IIGSMNR

SEQ ID NO: 70335 - protein, 7 aa, synthetic construct
AYGHPND

SEQ ID NO: 70336 - protein, 7 aa, synthetic construct
KIDRQIV

SEQ ID NO: 70337 - protein, 7 aa, synthetic construct
SKEYGTA

SEQ ID NO: 70338 - protein, 7 aa, synthetic construct
FREQGAG

SEQ ID NO: 70339 - protein, 7 aa, synthetic construct
DAYRPMQ

SEQ ID NO: 70340 - protein, 7 aa, synthetic construct
YKQPSNN

SEQ ID NO: 70341 - protein, 7 aa, synthetic construct
DRNHITL

SEQ ID NO: 70342 - protein, 7 aa, synthetic construct
SEKVRGN

SEQ ID NO: 70343 - protein, 7 aa, synthetic construct
QGKPASA

SEQ ID NO: 70344 - protein, 7 aa, synthetic construct
VGRAFGA

SEQ ID NO: 70345 - protein, 7 aa, synthetic construct
PMMKHQF

SEQ ID NO: 70346 - protein, 7 aa, synthetic construct
QKTYSIH

SEQ ID NO: 70347 - protein, 7 aa, synthetic construct
PKNSQGA

SEQ ID NO: 70348 - protein, 7 aa, synthetic construct
MISKHVN

SEQ ID NO: 70349 - protein, 7 aa, synthetic construct
LNHRVNN

SEQ ID NO: 70350 - protein, 7 aa, synthetic construct
FTTATKD

SEQ ID NO: 70351 - protein, 7 aa, synthetic construct
SLRTQHQ

SEQ ID NO: 70352 - protein, 7 aa, synthetic construct
GAWNADK

SEQ ID NO: 70353 - protein, 7 aa, synthetic construct
SGASQNH

SEQ ID NO: 70354 - protein, 7 aa, synthetic construct
TGHINKL

SEQ ID NO: 70355 - protein, 7 aa, synthetic construct
IRFEGIS

SEQ ID NO: 70356 - protein, 7 aa, synthetic construct
LFHTPEA

SEQ ID NO: 70357 - protein, 7 aa, synthetic construct
MNGSIKD

SEQ ID NO: 70358 - protein, 7 aa, synthetic construct
VMQQHSA

SEQ ID NO: 70359 - protein, 7 aa, synthetic construct
SSAFQKI

SEQ ID NO: 70360 - protein, 7 aa, synthetic construct
LPNVVAE

SEQ ID NO: 70361 - protein, 7 aa, synthetic construct
QRPQTVS

SEQ ID NO: 70362 - protein, 7 aa, synthetic construct
IINASHT

SEQ ID NO: 70363 - protein, 7 aa, synthetic construct
VVSQKWD

SEQ ID NO: 70364 - protein, 7 aa, synthetic construct
HHSVSHP

SEQ ID NO: 70365 - protein, 7 aa, synthetic construct
FHGHREE

SEQ ID NO: 70366 - protein, 7 aa, synthetic construct
RKNDGDS

SEQ ID NO: 70367 - protein, 7 aa, synthetic construct
LKGQNPS

SEQ ID NO: 70368 - protein, 7 aa, synthetic construct
AKIDNSL

SEQ ID NO: 70369 - protein, 7 aa, synthetic construct
LAHVSMN

SEQ ID NO: 70370 - protein, 7 aa, synthetic construct
MSMSTTA

SEQ ID NO: 70371 - protein, 7 aa, synthetic construct
VNHVNLT

SEQ ID NO: 70372 - protein, 7 aa, synthetic construct
NVSHAVR

SEQ ID NO: 70373 - protein, 7 aa, synthetic construct
DMHKNQI

SEQ ID NO: 70374 - protein, 7 aa, synthetic construct
NMPAMFA

SEQ ID NO: 70375 - protein, 7 aa, synthetic construct
GWLPKGG

SEQ ID NO: 70376 - protein, 7 aa, synthetic construct
SVYKATT

SEQ ID NO: 70377 - protein, 7 aa, synthetic construct
VAALPTK

SEQ ID NO: 70378 - protein, 7 aa, synthetic construct
QVPHMHH

SEQ ID NO: 70379 - protein, 7 aa, synthetic construct
MKGTIPT

SEQ ID NO: 70380 - protein, 7 aa, synthetic construct
SQTHIMA

SEQ ID NO: 70381 - protein, 7 aa, synthetic construct
NAHHQET

SEQ ID NO: 70382 - protein, 7 aa, synthetic construct
LSQQNNF

SEQ ID NO: 70383 - protein, 7 aa, synthetic construct
KSSTMRE

SEQ ID NO: 70384 - protein, 7 aa, synthetic construct
YFKMIPN

SEQ ID NO: 70385 - protein, 7 aa, synthetic construct
ERPQVKN

SEQ ID NO: 70386 - protein, 7 aa, synthetic construct
TRIEFSH

SEQ ID NO: 70387 - protein, 7 aa, synthetic construct
NERYNQQ

SEQ ID NO: 70388 - protein, 7 aa, synthetic construct
NHSGNVG

SEQ ID NO: 70389 - protein, 7 aa, synthetic construct
NKSAGVL

SEQ ID NO: 70390 - protein, 7 aa, synthetic construct
WGDHRNF

SEQ ID NO: 70391 - protein, 7 aa, synthetic construct
SRNFDER

SEQ ID NO: 70392 - protein, 7 aa, synthetic construct
KIDKIYN

SEQ ID NO: 70393 - protein, 7 aa, synthetic construct
RVNNGNH

SEQ ID NO: 70394 - protein, 7 aa, synthetic construct
VTPKSAP

SEQ ID NO: 70395 - protein, 7 aa, synthetic construct
HQPGIMM

SEQ ID NO: 70396 - protein, 7 aa, synthetic construct
PGSTWPG

SEQ ID NO: 70397 - protein, 7 aa, synthetic construct
YLQTASG

SEQ ID NO: 70398 - protein, 7 aa, synthetic construct
DKTKPNL

SEQ ID NO: 70399 - protein, 7 aa, synthetic construct
MIGYNMA

SEQ ID NO: 70400 - protein, 7 aa, synthetic construct
YQLGGKE

SEQ ID NO: 70401 - protein, 7 aa, synthetic construct
YYAKRVD

SEQ ID NO: 70402 - protein, 7 aa, synthetic construct
KAALGDA

SEQ ID NO: 70403 - protein, 7 aa, synthetic construct
ATANTYK

SEQ ID NO: 70404 - protein, 7 aa, synthetic construct
ISGFMQE

SEQ ID NO: 70405 - protein, 7 aa, synthetic construct
SQGQAQS

SEQ ID NO: 70406 - protein, 7 aa, synthetic construct
MSSRSSF

SEQ ID NO: 70407 - protein, 7 aa, synthetic construct
IHLTSIP

SEQ ID NO: 70408 - protein, 7 aa, synthetic construct
QTKNQKE

SEQ ID NO: 70409 - protein, 7 aa, synthetic construct
LLQNPRL

SEQ ID NO: 70410 - protein, 7 aa, synthetic construct
PENSVYR

SEQ ID NO: 70411 - protein, 7 aa, synthetic construct
HIDRTPN

SEQ ID NO: 70412 - protein, 7 aa, synthetic construct
KYGHSQV

SEQ ID NO: 70413 - protein, 7 aa, synthetic construct
NSMPGNV

SEQ ID NO: 70414 - protein, 7 aa, synthetic construct
KVYTDHG

SEQ ID NO: 70415 - protein, 7 aa, synthetic construct
QNGKAQT

SEQ ID NO: 70416 - protein, 7 aa, synthetic construct
TRDVIKQ

SEQ ID NO: 70417 - protein, 7 aa, synthetic construct
SSGHLPM

SEQ ID NO: 70418 - protein, 7 aa, synthetic construct
STPYAGE

SEQ ID NO: 70419 - protein, 7 aa, synthetic construct
RTHLEKG

SEQ ID NO: 70420 - protein, 7 aa, synthetic construct
KNDLRNE

SEQ ID NO: 70421 - protein, 7 aa, synthetic construct
HYALDRP

SEQ ID NO: 70422 - protein, 7 aa, synthetic construct
SPAAMVH

SEQ ID NO: 70423 - protein, 7 aa, synthetic construct
GRTGIAH

SEQ ID NO: 70424 - protein, 7 aa, synthetic construct
DIPLNRI

SEQ ID NO: 70425 - protein, 7 aa, synthetic construct
KQQVMSP

SEQ ID NO: 70426 - protein, 7 aa, synthetic construct
SENQRPM

SEQ ID NO: 70427 - protein, 7 aa, synthetic construct
QGTAVTK

SEQ ID NO: 70428 - protein, 7 aa, synthetic construct
DHAPGKN

SEQ ID NO: 70429 - protein, 7 aa, synthetic construct
WTMHPDG

SEQ ID NO: 70430 - protein, 7 aa, synthetic construct
YAGRPHL

SEQ ID NO: 70431 - protein, 7 aa, synthetic construct
RTYNTSN

SEQ ID NO: 70432 - protein, 7 aa, synthetic construct
QQTRSQA

SEQ ID NO: 70433 - protein, 7 aa, synthetic construct
RDATRHP

SEQ ID NO: 70434 - protein, 7 aa, synthetic construct
NPTESGK

SEQ ID NO: 70435 - protein, 7 aa, synthetic construct
DISQSHM

SEQ ID NO: 70436 - protein, 7 aa, synthetic construct
AQSGRDA

SEQ ID NO: 70437 - protein, 7 aa, synthetic construct
EQRGHHT

SEQ ID NO: 70438 - protein, 7 aa, synthetic construct
GQTSTST

SEQ ID NO: 70439 - protein, 7 aa, synthetic construct
TMQTRDV

SEQ ID NO: 70440 - protein, 7 aa, synthetic construct
PKERSQE

SEQ ID NO: 70441 - protein, 7 aa, synthetic construct
GAAHGMS

SEQ ID NO: 70442 - protein, 7 aa, synthetic construct
KAYAAEF

SEQ ID NO: 70443 - protein, 7 aa, synthetic construct
LQLGHET

SEQ ID NO: 70444 - protein, 7 aa, synthetic construct
RAAHDLN

SEQ ID NO: 70445 - protein, 7 aa, synthetic construct
MNQIQAK

SEQ ID NO: 70446 - protein, 7 aa, synthetic construct
GRMNEGT

SEQ ID NO: 70447 - protein, 7 aa, synthetic construct
WGKDHNI

SEQ ID NO: 70448 - protein, 7 aa, synthetic construct
WQFKDDP

SEQ ID NO: 70449 - protein, 7 aa, synthetic construct
NLYTKFG

SEQ ID NO: 70450 - protein, 7 aa, synthetic construct
KGAKDET

SEQ ID NO: 70451 - protein, 7 aa, synthetic construct
KPAHADW

SEQ ID NO: 70452 - protein, 7 aa, synthetic construct
TMGKQID

SEQ ID NO: 70453 - protein, 7 aa, synthetic construct
HNHRPVG

SEQ ID NO: 70454 - protein, 7 aa, synthetic construct
QKLRLDE

SEQ ID NO: 70455 - protein, 7 aa, synthetic construct
YQHNVVP

SEQ ID NO: 70456 - protein, 7 aa, synthetic construct
VTSVRSL

SEQ ID NO: 70457 - protein, 7 aa, synthetic construct
MPVAKME

SEQ ID NO: 70458 - protein, 7 aa, synthetic construct
TKVAGSG

SEQ ID NO: 70459 - protein, 7 aa, synthetic construct
DTGKHGG

SEQ ID NO: 70460 - protein, 7 aa, synthetic construct
QGSSIKS

SEQ ID NO: 70461 - protein, 7 aa, synthetic construct
KLNKPYE

SEQ ID NO: 70462 - protein, 7 aa, synthetic construct
GGTPHMG

SEQ ID NO: 70463 - protein, 7 aa, synthetic construct
KQQKIIG

SEQ ID NO: 70464 - protein, 7 aa, synthetic construct
NRDGKAG

SEQ ID NO: 70465 - protein, 7 aa, synthetic construct
VKNGVGA

SEQ ID NO: 70466 - protein, 7 aa, synthetic construct
WVEKERK

SEQ ID NO: 70467 - protein, 7 aa, synthetic construct
VANGNTQ

SEQ ID NO: 70468 - protein, 7 aa, synthetic construct
QSTKYQY

SEQ ID NO: 70469 - protein, 7 aa, synthetic construct
NRDTDKV

SEQ ID NO: 70470 - protein, 7 aa, synthetic construct
RKVGEFI

SEQ ID NO: 70471 - protein, 7 aa, synthetic construct
KMTPATP

SEQ ID NO: 70472 - protein, 7 aa, synthetic construct
HFKEMTH

SEQ ID NO: 70473 - protein, 7 aa, synthetic construct
HMSSGTM

SEQ ID NO: 70474 - protein, 7 aa, synthetic construct
SKTNVSM

SEQ ID NO: 70475 - protein, 7 aa, synthetic construct
IPHSRIE

SEQ ID NO: 70476 - protein, 7 aa, synthetic construct
RQSGPPT

SEQ ID NO: 70477 - protein, 7 aa, synthetic construct
SARTTMG

SEQ ID NO: 70478 - protein, 7 aa, synthetic construct
VSSHMNH

SEQ ID NO: 70479 - protein, 7 aa, synthetic construct
LHFNNER

SEQ ID NO: 70480 - protein, 7 aa, synthetic construct
WSPHQQK

SEQ ID NO: 70481 - protein, 7 aa, synthetic construct
DQKVAKN

SEQ ID NO: 70482 - protein, 7 aa, synthetic construct
GNNATKT

SEQ ID NO: 70483 - protein, 7 aa, synthetic construct
PKELKGS

SEQ ID NO: 70484 - protein, 7 aa, synthetic construct
TKTGVVL

SEQ ID NO: 70485 - protein, 7 aa, synthetic construct
IGVLQMN

SEQ ID NO: 70486 - protein, 7 aa, synthetic construct
QKHPQVA

SEQ ID NO: 70487 - protein, 7 aa, synthetic construct
VQHSTRT

SEQ ID NO: 70488 - protein, 7 aa, synthetic construct
YNVVTGI

SEQ ID NO: 70489 - protein, 7 aa, synthetic construct
GQRNSQG

SEQ ID NO: 70490 - protein, 7 aa, synthetic construct
IEHFSRP

SEQ ID NO: 70491 - protein, 7 aa, synthetic construct
NPLKKET

SEQ ID NO: 70492 - protein, 7 aa, synthetic construct
PAAVPTK

SEQ ID NO: 70493 - protein, 7 aa, synthetic construct
SYNGKAV

SEQ ID NO: 70494 - protein, 7 aa, synthetic construct
NGKQNNS

SEQ ID NO: 70495 - protein, 7 aa, synthetic construct
LKATPVA

SEQ ID NO: 70496 - protein, 7 aa, synthetic construct
QKSASKE

SEQ ID NO: 70497 - protein, 7 aa, synthetic construct
VKQASNV

SEQ ID NO: 70498 - protein, 7 aa, synthetic construct
NSAKASG

SEQ ID NO: 70499 - protein, 7 aa, synthetic construct
YPNTNHF

SEQ ID NO: 70500 - protein, 7 aa, synthetic construct
EASTMRQ

SEQ ID NO: 70501 - protein, 7 aa, synthetic construct
ISEWRPN

SEQ ID NO: 70502 - protein, 7 aa, synthetic construct
AKYGKHE

SEQ ID NO: 70503 - protein, 7 aa, synthetic construct
NFRVAHG

SEQ ID NO: 70504 - protein, 7 aa, synthetic construct
NFHRANG

SEQ ID NO: 70505 - protein, 7 aa, synthetic construct
RLMLGNE

SEQ ID NO: 70506 - protein, 7 aa, synthetic construct
NTQYTND

SEQ ID NO: 70507 - protein, 7 aa, synthetic construct
NVPVTKF

SEQ ID NO: 70508 - protein, 7 aa, synthetic construct
YNAITAP

SEQ ID NO: 70509 - protein, 7 aa, synthetic construct
GGMHIQH

SEQ ID NO: 70510 - protein, 7 aa, synthetic construct
GMQKSSG

SEQ ID NO: 70511 - protein, 7 aa, synthetic construct
KLVMEGG

SEQ ID NO: 70512 - protein, 7 aa, synthetic construct
AIRSTEA

SEQ ID NO: 70513 - protein, 7 aa, synthetic construct
QRKNESD

SEQ ID NO: 70514 - protein, 7 aa, synthetic construct
VPKSAIG

SEQ ID NO: 70515 - protein, 7 aa, synthetic construct
WPQGHVN

SEQ ID NO: 70516 - protein, 7 aa, synthetic construct
YRQGMHS

SEQ ID NO: 70517 - protein, 7 aa, synthetic construct
EKSRTPD

SEQ ID NO: 70518 - protein, 7 aa, synthetic construct
HARNEVI

SEQ ID NO: 70519 - protein, 7 aa, synthetic construct
NSSTRAA

SEQ ID NO: 70520 - protein, 7 aa, synthetic construct
DKNTSQN

SEQ ID NO: 70521 - protein, 7 aa, synthetic construct
SFKDNQG

SEQ ID NO: 70522 - protein, 7 aa, synthetic construct
TSMAPND

SEQ ID NO: 70523 - protein, 7 aa, synthetic construct
TAKQYTV

SEQ ID NO: 70524 - protein, 7 aa, synthetic construct
PASSSAD

SEQ ID NO: 70525 - protein, 7 aa, synthetic construct
IGKSIGQ

SEQ ID NO: 70526 - protein, 7 aa, synthetic construct
VGSRYGV

SEQ ID NO: 70527 - protein, 7 aa, synthetic construct
SIHPKER

SEQ ID NO: 70528 - protein, 7 aa, synthetic construct
HYNNSVD

SEQ ID NO: 70529 - protein, 7 aa, synthetic construct
ISIKVQQ

SEQ ID NO: 70530 - protein, 7 aa, synthetic construct
SPLRTSY

SEQ ID NO: 70531 - protein, 7 aa, synthetic construct
KQHVNHM

SEQ ID NO: 70532 - protein, 7 aa, synthetic construct
LFKENQV

SEQ ID NO: 70533 - protein, 7 aa, synthetic construct
QRNINTS

SEQ ID NO: 70534 - protein, 7 aa, synthetic construct
HHHKMGG

SEQ ID NO: 70535 - protein, 7 aa, synthetic construct
AWQHGTP

SEQ ID NO: 70536 - protein, 7 aa, synthetic construct
PTTRYQA

SEQ ID NO: 70537 - protein, 7 aa, synthetic construct
IPNNERT

SEQ ID NO: 70538 - protein, 7 aa, synthetic construct
WNSAVQA

SEQ ID NO: 70539 - protein, 7 aa, synthetic construct
MRDRDKY

SEQ ID NO: 70540 - protein, 7 aa, synthetic construct
GSGKYTE

SEQ ID NO: 70541 - protein, 7 aa, synthetic construct
MAGSSNS

SEQ ID NO: 70542 - protein, 7 aa, synthetic construct
KIQLSST

SEQ ID NO: 70543 - protein, 7 aa, synthetic construct
QHLEHNH

SEQ ID NO: 70544 - protein, 7 aa, synthetic construct
EGHMGAH

SEQ ID NO: 70545 - protein, 7 aa, synthetic construct
APHLERT

SEQ ID NO: 70546 - protein, 7 aa, synthetic construct
DNKKTFN

SEQ ID NO: 70547 - protein, 7 aa, synthetic construct
MMSMPRG

SEQ ID NO: 70548 - protein, 7 aa, synthetic construct
VSSTKSA

SEQ ID NO: 70549 - protein, 7 aa, synthetic construct
REGKQTD

SEQ ID NO: 70550 - protein, 7 aa, synthetic construct
MVHTRGE

SEQ ID NO: 70551 - protein, 7 aa, synthetic construct
YAVKPFN

SEQ ID NO: 70552 - protein, 7 aa, synthetic construct
READRYP

SEQ ID NO: 70553 - protein, 7 aa, synthetic construct
TYNVGKN

SEQ ID NO: 70554 - protein, 7 aa, synthetic construct
EKFRVLE

SEQ ID NO: 70555 - protein, 7 aa, synthetic construct
PSKSGVG

SEQ ID NO: 70556 - protein, 7 aa, synthetic construct
GGQFREA

SEQ ID NO: 70557 - protein, 7 aa, synthetic construct
HRDGLPS

SEQ ID NO: 70558 - protein, 7 aa, synthetic construct
DALRSAY

SEQ ID NO: 70559 - protein, 7 aa, synthetic construct
QKEFVQP

SEQ ID NO: 70560 - protein, 7 aa, synthetic construct
PQFTAMN

SEQ ID NO: 70561 - protein, 7 aa, synthetic construct
LITGSHQ

SEQ ID NO: 70562 - protein, 7 aa, synthetic construct
NKGPLES

SEQ ID NO: 70563 - protein, 7 aa, synthetic construct
KQPTQIM

SEQ ID NO: 70564 - protein, 7 aa, synthetic construct
MFPAGTQ

SEQ ID NO: 70565 - protein, 7 aa, synthetic construct
SPVSTFS

SEQ ID NO: 70566 - protein, 7 aa, synthetic construct
HPGTGHG

SEQ ID NO: 70567 - protein, 7 aa, synthetic construct
MVKLTQE

SEQ ID NO: 70568 - protein, 7 aa, synthetic construct
TVMQLGE

SEQ ID NO: 70569 - protein, 7 aa, synthetic construct
SAKISQM

SEQ ID NO: 70570 - protein, 7 aa, synthetic construct
MLIANKN

SEQ ID NO: 70571 - protein, 7 aa, synthetic construct
HSPSNAM

SEQ ID NO: 70572 - protein, 7 aa, synthetic construct
HQGKSLP

SEQ ID NO: 70573 - protein, 7 aa, synthetic construct
GLVNERM

SEQ ID NO: 70574 - protein, 7 aa, synthetic construct
LSPGKGH

SEQ ID NO: 70575 - protein, 7 aa, synthetic construct
KENGVKP

SEQ ID NO: 70576 - protein, 7 aa, synthetic construct
RQNSQTG

SEQ ID NO: 70577 - protein, 7 aa, synthetic construct
LVKSNQG

SEQ ID NO: 70578 - protein, 7 aa, synthetic construct
KSNASAT

SEQ ID NO: 70579 - protein, 7 aa, synthetic construct
TFLVKSG

SEQ ID NO: 70580 - protein, 7 aa, synthetic construct
KPAREDD

SEQ ID NO: 70581 - protein, 7 aa, synthetic construct
KGTVSFD

SEQ ID NO: 70582 - protein, 7 aa, synthetic construct
TKQTMSF

SEQ ID NO: 70583 - protein, 7 aa, synthetic construct
VKSSNGV

SEQ ID NO: 70584 - protein, 7 aa, synthetic construct
KNMGTTE

SEQ ID NO: 70585 - protein, 7 aa, synthetic construct
RSSDKGF

SEQ ID NO: 70586 - protein, 7 aa, synthetic construct
YQNETTK

SEQ ID NO: 70587 - protein, 7 aa, synthetic construct
SNQKPAG

SEQ ID NO: 70588 - protein, 7 aa, synthetic construct
SSKSNNV

SEQ ID NO: 70589 - protein, 7 aa, synthetic construct
MEYNSKQ

SEQ ID NO: 70590 - protein, 7 aa, synthetic construct
WPVRTEA

SEQ ID NO: 70591 - protein, 7 aa, synthetic construct
STAMNKI

SEQ ID NO: 70592 - protein, 7 aa, synthetic construct
EKIVAHE

SEQ ID NO: 70593 - protein, 7 aa, synthetic construct
KFNVTQE

SEQ ID NO: 70594 - protein, 7 aa, synthetic construct
ELQPTRM

SEQ ID NO: 70595 - protein, 7 aa, synthetic construct
IPQSRVP

SEQ ID NO: 70596 - protein, 7 aa, synthetic construct
NSGGQKG

SEQ ID NO: 70597 - protein, 7 aa, synthetic construct
KPGVIEF

SEQ ID NO: 70598 - protein, 7 aa, synthetic construct
FQPKEKW

SEQ ID NO: 70599 - protein, 7 aa, synthetic construct
RAASGGT

SEQ ID NO: 70600 - protein, 7 aa, synthetic construct
FFIKGEG

SEQ ID NO: 70601 - protein, 7 aa, synthetic construct
IVGKQNS

SEQ ID NO: 70602 - protein, 7 aa, synthetic construct
WKETRTG

SEQ ID NO: 70603 - protein, 7 aa, synthetic construct
LKSHPLA

SEQ ID NO: 70604 - protein, 7 aa, synthetic construct
NRQQAMG

SEQ ID NO: 70605 - protein, 7 aa, synthetic construct
MYPNSQK

SEQ ID NO: 70606 - protein, 7 aa, synthetic construct
PHKHAME

SEQ ID NO: 70607 - protein, 7 aa, synthetic construct
IGYQATH

SEQ ID NO: 70608 - protein, 7 aa, synthetic construct
KNPPNAG

SEQ ID NO: 70609 - protein, 7 aa, synthetic construct
KVLVAEE

SEQ ID NO: 70610 - protein, 7 aa, synthetic construct
GVNGRAG

SEQ ID NO: 70611 - protein, 7 aa, synthetic construct
NMKDRGA

SEQ ID NO: 70612 - protein, 7 aa, synthetic construct
APRTAAP

SEQ ID NO: 70613 - protein, 7 aa, synthetic construct
HALRNDA

SEQ ID NO: 70614 - protein, 7 aa, synthetic construct
QASATGW

SEQ ID NO: 70615 - protein, 7 aa, synthetic construct
TAGIKGN

SEQ ID NO: 70616 - protein, 7 aa, synthetic construct
KTGASVV

SEQ ID NO: 70617 - protein, 7 aa, synthetic construct
QATHQVS

SEQ ID NO: 70618 - protein, 7 aa, synthetic construct
TPSHSAQ

SEQ ID NO: 70619 - protein, 7 aa, synthetic construct
SKGKDQG

SEQ ID NO: 70620 - protein, 7 aa, synthetic construct
RKSDDPV

SEQ ID NO: 70621 - protein, 7 aa, synthetic construct
RHFTADG

SEQ ID NO: 70622 - protein, 7 aa, synthetic construct
KGTIHDG

SEQ ID NO: 70623 - protein, 7 aa, synthetic construct
GKWEDTN

SEQ ID NO: 70624 - protein, 7 aa, synthetic construct
NNARGMG

SEQ ID NO: 70625 - protein, 7 aa, synthetic construct
STSARQA

SEQ ID NO: 70626 - protein, 7 aa, synthetic construct
RDGSRVM

SEQ ID NO: 70627 - protein, 7 aa, synthetic construct
NGSHVLD

SEQ ID NO: 70628 - protein, 7 aa, synthetic construct
ELMKGKL

SEQ ID NO: 70629 - protein, 7 aa, synthetic construct
FRGHESP

SEQ ID NO: 70630 - protein, 7 aa, synthetic construct
QQRNMTP

SEQ ID NO: 70631 - protein, 7 aa, synthetic construct
TKHVHDM

SEQ ID NO: 70632 - protein, 7 aa, synthetic construct
THNNGHF

SEQ ID NO: 70633 - protein, 7 aa, synthetic construct
NDSKARP

SEQ ID NO: 70634 - protein, 7 aa, synthetic construct
ITHLDKG

SEQ ID NO: 70635 - protein, 7 aa, synthetic construct
VAYNNRP

SEQ ID NO: 70636 - protein, 7 aa, synthetic construct
YPSREHL

SEQ ID NO: 70637 - protein, 7 aa, synthetic construct
KELKERW

SEQ ID NO: 70638 - protein, 7 aa, synthetic construct
SQRENKI

SEQ ID NO: 70639 - protein, 7 aa, synthetic construct
TLGHMTH

SEQ ID NO: 70640 - protein, 7 aa, synthetic construct
ELNSKWG

SEQ ID NO: 70641 - protein, 7 aa, synthetic construct
GSAHGNV

SEQ ID NO: 70642 - protein, 7 aa, synthetic construct
GHSFSHG

SEQ ID NO: 70643 - protein, 7 aa, synthetic construct
THNPSIY

SEQ ID NO: 70644 - protein, 7 aa, synthetic construct
ANYRGAD

SEQ ID NO: 70645 - protein, 7 aa, synthetic construct
DRIKHEI

SEQ ID NO: 70646 - protein, 7 aa, synthetic construct
FKGPNQG

SEQ ID NO: 70647 - protein, 7 aa, synthetic construct
LPSSSKG

SEQ ID NO: 70648 - protein, 7 aa, synthetic construct
YTSRAEP

SEQ ID NO: 70649 - protein, 7 aa, synthetic construct
MERSTVV

SEQ ID NO: 70650 - protein, 7 aa, synthetic construct
KTSFQSD

SEQ ID NO: 70651 - protein, 7 aa, synthetic construct
FKVGLGD

SEQ ID NO: 70652 - protein, 7 aa, synthetic construct
HPKNAVA

SEQ ID NO: 70653 - protein, 7 aa, synthetic construct
VDTFGKG

SEQ ID NO: 70654 - protein, 7 aa, synthetic construct
GKSMMQG

SEQ ID NO: 70655 - protein, 7 aa, synthetic construct
GPAALIG

SEQ ID NO: 70656 - protein, 7 aa, synthetic construct
TFQQQVP

SEQ ID NO: 70657 - protein, 7 aa, synthetic construct
YHAAVME

SEQ ID NO: 70658 - protein, 7 aa, synthetic construct
DLRKQMG

SEQ ID NO: 70659 - protein, 7 aa, synthetic construct
YYGKQVT

SEQ ID NO: 70660 - protein, 7 aa, synthetic construct
SVKASGG

SEQ ID NO: 70661 - protein, 7 aa, synthetic construct
HKSTESK

SEQ ID NO: 70662 - protein, 7 aa, synthetic construct
NRAVSHI

SEQ ID NO: 70663 - protein, 7 aa, synthetic construct
THHIPTQ

SEQ ID NO: 70664 - protein, 7 aa, synthetic construct
HRTWAQE

SEQ ID NO: 70665 - protein, 7 aa, synthetic construct
PVIAKHE

SEQ ID NO: 70666 - protein, 7 aa, synthetic construct
LKVGTHQ

SEQ ID NO: 70667 - protein, 7 aa, synthetic construct
IRAEEKR

SEQ ID NO: 70668 - protein, 7 aa, synthetic construct
VQNERQS

SEQ ID NO: 70669 - protein, 7 aa, synthetic construct
RPPYGDT

SEQ ID NO: 70670 - protein, 7 aa, synthetic construct
DDRHMRT

SEQ ID NO: 70671 - protein, 7 aa, synthetic construct
SAKKSDN

SEQ ID NO: 70672 - protein, 7 aa, synthetic construct
GNHQTPM

SEQ ID NO: 70673 - protein, 7 aa, synthetic construct
KYNDGHE

SEQ ID NO: 70674 - protein, 7 aa, synthetic construct
HVQAHVD

SEQ ID NO: 70675 - protein, 7 aa, synthetic construct
YRNWVNE

SEQ ID NO: 70676 - protein, 7 aa, synthetic construct
LVHHGDT

SEQ ID NO: 70677 - protein, 7 aa, synthetic construct
GKANNVM

SEQ ID NO: 70678 - protein, 7 aa, synthetic construct
TRKDIWE

SEQ ID NO: 70679 - protein, 7 aa, synthetic construct
REQPGKQ

SEQ ID NO: 70680 - protein, 7 aa, synthetic construct
RSFKEEK

SEQ ID NO: 70681 - protein, 7 aa, synthetic construct
LFPAKSV

SEQ ID NO: 70682 - protein, 7 aa, synthetic construct
QQYGHGA

SEQ ID NO: 70683 - protein, 7 aa, synthetic construct
AKAQQVL

SEQ ID NO: 70684 - protein, 7 aa, synthetic construct
GLSYKLD

SEQ ID NO: 70685 - protein, 7 aa, synthetic construct
YSMAMPH

SEQ ID NO: 70686 - protein, 7 aa, synthetic construct
QGKFQGA

SEQ ID NO: 70687 - protein, 7 aa, synthetic construct
NATTKVD

SEQ ID NO: 70688 - protein, 7 aa, synthetic construct
FTPMREE

SEQ ID NO: 70689 - protein, 7 aa, synthetic construct
RNYENQT

SEQ ID NO: 70690 - protein, 7 aa, synthetic construct
REPIPVV

SEQ ID NO: 70691 - protein, 7 aa, synthetic construct
QNPTFMP

SEQ ID NO: 70692 - protein, 7 aa, synthetic construct
KAGPISN

SEQ ID NO: 70693 - protein, 7 aa, synthetic construct
TRISQSH

SEQ ID NO: 70694 - protein, 7 aa, synthetic construct
PGQSTSN

SEQ ID NO: 70695 - protein, 7 aa, synthetic construct
DYLNAPK

SEQ ID NO: 70696 - protein, 7 aa, synthetic construct
GLKSPNW

SEQ ID NO: 70697 - protein, 7 aa, synthetic construct
GLSIMRE

SEQ ID NO: 70698 - protein, 7 aa, synthetic construct
KWDTNLE

SEQ ID NO: 70699 - protein, 7 aa, synthetic construct
AIYKGHV

SEQ ID NO: 70700 - protein, 7 aa, synthetic construct
KDRTIAH

SEQ ID NO: 70701 - protein, 7 aa, synthetic construct
MNHPLNT

SEQ ID NO: 70702 - protein, 7 aa, synthetic construct
GTSTAPW

SEQ ID NO: 70703 - protein, 7 aa, synthetic construct
TQKDYFL

SEQ ID NO: 70704 - protein, 7 aa, synthetic construct
NHLRGNQ

SEQ ID NO: 70705 - protein, 7 aa, synthetic construct
SMNSKNG

SEQ ID NO: 70706 - protein, 7 aa, synthetic construct
GAGLQMH

SEQ ID NO: 70707 - protein, 7 aa, synthetic construct
KNQNHSV

SEQ ID NO: 70708 - protein, 7 aa, synthetic construct
MSKQTPL

SEQ ID NO: 70709 - protein, 7 aa, synthetic construct
DIGRMAF

SEQ ID NO: 70710 - protein, 7 aa, synthetic construct
WADQKYA

SEQ ID NO: 70711 - protein, 7 aa, synthetic construct
IREPGSA

SEQ ID NO: 70712 - protein, 7 aa, synthetic construct
GKNIDGF

SEQ ID NO: 70713 - protein, 7 aa, synthetic construct
TMGNAQK

SEQ ID NO: 70714 - protein, 7 aa, synthetic construct
DRTNNQS

SEQ ID NO: 70715 - protein, 7 aa, synthetic construct
HFNRAHD

SEQ ID NO: 70716 - protein, 7 aa, synthetic construct
YPKYIPD

SEQ ID NO: 70717 - protein, 7 aa, synthetic construct
NHRYVTE

SEQ ID NO: 70718 - protein, 7 aa, synthetic construct
NQKDGRT

SEQ ID NO: 70719 - protein, 7 aa, synthetic construct
IEMSKKN

SEQ ID NO: 70720 - protein, 7 aa, synthetic construct
MPNYQVV

SEQ ID NO: 70721 - protein, 7 aa, synthetic construct
PNAALLP

SEQ ID NO: 70722 - protein, 7 aa, synthetic construct
HPPNSRD

SEQ ID NO: 70723 - protein, 7 aa, synthetic construct
KDPHTGG

SEQ ID NO: 70724 - protein, 7 aa, synthetic construct
TMDDKMG

SEQ ID NO: 70725 - protein, 7 aa, synthetic construct
IMPGFVE

SEQ ID NO: 70726 - protein, 7 aa, synthetic construct
KLFSTED

SEQ ID NO: 70727 - protein, 7 aa, synthetic construct
TTYGAEM

SEQ ID NO: 70728 - protein, 7 aa, synthetic construct
KTNAAYT

SEQ ID NO: 70729 - protein, 7 aa, synthetic construct
MLDLVNP

SEQ ID NO: 70730 - protein, 7 aa, synthetic construct
MMDHVKR

SEQ ID NO: 70731 - protein, 7 aa, synthetic construct
LQSAPHE

SEQ ID NO: 70732 - protein, 7 aa, synthetic construct
TKAYEQI

SEQ ID NO: 70733 - protein, 7 aa, synthetic construct
EYNGLAL

SEQ ID NO: 70734 - protein, 7 aa, synthetic construct
SGTAQGD

SEQ ID NO: 70735 - protein, 7 aa, synthetic construct
AQTGYGA

SEQ ID NO: 70736 - protein, 7 aa, synthetic construct
YKQEKMT

SEQ ID NO: 70737 - protein, 7 aa, synthetic construct
EVIARGK

SEQ ID NO: 70738 - protein, 7 aa, synthetic construct
GSRPFTQ

SEQ ID NO: 70739 - protein, 7 aa, synthetic construct
KMQATGP

SEQ ID NO: 70740 - protein, 7 aa, synthetic construct
GTKSAAG

SEQ ID NO: 70741 - protein, 7 aa, synthetic construct
KPDRDNS

SEQ ID NO: 70742 - protein, 7 aa, synthetic construct
MPRASGG

SEQ ID NO: 70743 - protein, 7 aa, synthetic construct
PPEKGPY

SEQ ID NO: 70744 - protein, 7 aa, synthetic construct
GGPTPKP

SEQ ID NO: 70745 - protein, 7 aa, synthetic construct
MERTASR

SEQ ID NO: 70746 - protein, 7 aa, synthetic construct
NNPARAW

SEQ ID NO: 70747 - protein, 7 aa, synthetic construct
QYTNIKD

SEQ ID NO: 70748 - protein, 7 aa, synthetic construct
TAPFGVS

SEQ ID NO: 70749 - protein, 7 aa, synthetic construct
GPGHKTI

SEQ ID NO: 70750 - protein, 7 aa, synthetic construct
LSQHGLV

SEQ ID NO: 70751 - protein, 7 aa, synthetic construct
NKNAPGA

SEQ ID NO: 70752 - protein, 7 aa, synthetic construct
GGFSAVP

SEQ ID NO: 70753 - protein, 7 aa, synthetic construct
QSIRSND

SEQ ID NO: 70754 - protein, 7 aa, synthetic construct
VLMGSHI

SEQ ID NO: 70755 - protein, 7 aa, synthetic construct
TNSIQEP

SEQ ID NO: 70756 - protein, 7 aa, synthetic construct
YADARSP

SEQ ID NO: 70757 - protein, 7 aa, synthetic construct
ADGLKRA

SEQ ID NO: 70758 - protein, 7 aa, synthetic construct
SMGKNTD

SEQ ID NO: 70759 - protein, 7 aa, synthetic construct
GKHPVIM

SEQ ID NO: 70760 - protein, 7 aa, synthetic construct
NEARKAD

SEQ ID NO: 70761 - protein, 7 aa, synthetic construct
DKTRTAW

SEQ ID NO: 70762 - protein, 7 aa, synthetic construct
GNKGPPP

SEQ ID NO: 70763 - protein, 7 aa, synthetic construct
GGPGTGG

SEQ ID NO: 70764 - protein, 7 aa, synthetic construct
MYNAKEG

SEQ ID NO: 70765 - protein, 7 aa, synthetic construct
WKHSGVH

SEQ ID NO: 70766 - protein, 7 aa, synthetic construct
PGKPVLY

SEQ ID NO: 70767 - protein, 7 aa, synthetic construct
ADKTTRQ

SEQ ID NO: 70768 - protein, 7 aa, synthetic construct
DKMPSRQ

SEQ ID NO: 70769 - protein, 7 aa, synthetic construct
HNTVAGP

SEQ ID NO: 70770 - protein, 7 aa, synthetic construct
LRHEFGA

SEQ ID NO: 70771 - protein, 7 aa, synthetic construct
EKPRLIT

SEQ ID NO: 70772 - protein, 7 aa, synthetic construct
TISTKSL

SEQ ID NO: 70773 - protein, 7 aa, synthetic construct
NRQEKLD

SEQ ID NO: 70774 - protein, 7 aa, synthetic construct
NYQASKG

SEQ ID NO: 70775 - protein, 7 aa, synthetic construct
NQKGIVL

SEQ ID NO: 70776 - protein, 7 aa, synthetic construct
VDHKFPV

SEQ ID NO: 70777 - protein, 7 aa, synthetic construct
YKDVTGL

SEQ ID NO: 70778 - protein, 7 aa, synthetic construct
FKGNQNQ

SEQ ID NO: 70779 - protein, 7 aa, synthetic construct
MDRGSHD

SEQ ID NO: 70780 - protein, 7 aa, synthetic construct
ENRVVVL

SEQ ID NO: 70781 - protein, 7 aa, synthetic construct
VQRDDHS

SEQ ID NO: 70782 - protein, 7 aa, synthetic construct
ANRTGYA

SEQ ID NO: 70783 - protein, 7 aa, synthetic construct
GNAKIGI

SEQ ID NO: 70784 - protein, 7 aa, synthetic construct
AQMSNQV

SEQ ID NO: 70785 - protein, 7 aa, synthetic construct
KDGTARQ

SEQ ID NO: 70786 - protein, 7 aa, synthetic construct
NHKNNGS

SEQ ID NO: 70787 - protein, 7 aa, synthetic construct
AMNPSMN

SEQ ID NO: 70788 - protein, 7 aa, synthetic construct
IPGVRVI

SEQ ID NO: 70789 - protein, 7 aa, synthetic construct
NAPNMVG

SEQ ID NO: 70790 - protein, 7 aa, synthetic construct
NRMLHGE

SEQ ID NO: 70791 - protein, 7 aa, synthetic construct
KNENSFY

SEQ ID NO: 70792 - protein, 7 aa, synthetic construct
DKPFVEQ

SEQ ID NO: 70793 - protein, 7 aa, synthetic construct
ESNLGKV

SEQ ID NO: 70794 - protein, 7 aa, synthetic construct
TGHVSMI

SEQ ID NO: 70795 - protein, 7 aa, synthetic construct
KQTTTMT

SEQ ID NO: 70796 - protein, 7 aa, synthetic construct
ALSRVHP

SEQ ID NO: 70797 - protein, 7 aa, synthetic construct
QKVNNMF

SEQ ID NO: 70798 - protein, 7 aa, synthetic construct
IRSETNV

SEQ ID NO: 70799 - protein, 7 aa, synthetic construct
EKRGAEN

SEQ ID NO: 70800 - protein, 7 aa, synthetic construct
QKTSVAA

SEQ ID NO: 70801 - protein, 7 aa, synthetic construct
KRGNEQD

SEQ ID NO: 70802 - protein, 7 aa, synthetic construct
SKAEHHS

SEQ ID NO: 70803 - protein, 7 aa, synthetic construct
YAPAAPP

SEQ ID NO: 70804 - protein, 7 aa, synthetic construct
PQAHRLA

SEQ ID NO: 70805 - protein, 7 aa, synthetic construct
LKYNHAQ

SEQ ID NO: 70806 - protein, 7 aa, synthetic construct
IKSMIQN

SEQ ID NO: 70807 - protein, 7 aa, synthetic construct
YGHNETH

SEQ ID NO: 70808 - protein, 7 aa, synthetic construct
FHKQPQM

SEQ ID NO: 70809 - protein, 7 aa, synthetic construct
LPKFEVT

SEQ ID NO: 70810 - protein, 7 aa, synthetic construct
TVKTSSP

SEQ ID NO: 70811 - protein, 7 aa, synthetic construct
IPGNVFA

SEQ ID NO: 70812 - protein, 7 aa, synthetic construct
MAKVTSG

SEQ ID NO: 70813 - protein, 7 aa, synthetic construct
KQQDHRV

SEQ ID NO: 70814 - protein, 7 aa, synthetic construct
RGGSEQM

SEQ ID NO: 70815 - protein, 7 aa, synthetic construct
GGTHLRM

SEQ ID NO: 70816 - protein, 7 aa, synthetic construct
TQTKQHT

SEQ ID NO: 70817 - protein, 7 aa, synthetic construct
VSPASVL

SEQ ID NO: 70818 - protein, 7 aa, synthetic construct
WGTVIQN

SEQ ID NO: 70819 - protein, 7 aa, synthetic construct
AMHKQDG

SEQ ID NO: 70820 - protein, 7 aa, synthetic construct
LPAQPME

SEQ ID NO: 70821 - protein, 7 aa, synthetic construct
IQASMLK

SEQ ID NO: 70822 - protein, 7 aa, synthetic construct
SMQGSPA

SEQ ID NO: 70823 - protein, 7 aa, synthetic construct
AFKGSEP

SEQ ID NO: 70824 - protein, 7 aa, synthetic construct
KPAATPS

SEQ ID NO: 70825 - protein, 7 aa, synthetic construct
NQSEKGS

SEQ ID NO: 70826 - protein, 7 aa, synthetic construct
KPHATPI

SEQ ID NO: 70827 - protein, 7 aa, synthetic construct
KTFAAKD

SEQ ID NO: 70828 - protein, 7 aa, synthetic construct
KFSPGTG

SEQ ID NO: 70829 - protein, 7 aa, synthetic construct
PSKTQVA

SEQ ID NO: 70830 - protein, 7 aa, synthetic construct
VTEKDRR

SEQ ID NO: 70831 - protein, 7 aa, synthetic construct
AMEKQQV

SEQ ID NO: 70832 - protein, 7 aa, synthetic construct
DNGEWRV

SEQ ID NO: 70833 - protein, 7 aa, synthetic construct
QAQKNND

SEQ ID NO: 70834 - protein, 7 aa, synthetic construct
DSKDRGM

SEQ ID NO: 70835 - protein, 7 aa, synthetic construct
WVSNIQG

SEQ ID NO: 70836 - protein, 7 aa, synthetic construct
KVIDRKE

SEQ ID NO: 70837 - protein, 7 aa, synthetic construct
PAGQGWS

SEQ ID NO: 70838 - protein, 7 aa, synthetic construct
SPKGVGM

SEQ ID NO: 70839 - protein, 7 aa, synthetic construct
KTYTPIT

SEQ ID NO: 70840 - protein, 7 aa, synthetic construct
TYNTGLK

SEQ ID NO: 70841 - protein, 7 aa, synthetic construct
TLNFDHA

SEQ ID NO: 70842 - protein, 7 aa, synthetic construct
WPITETH

SEQ ID NO: 70843 - protein, 7 aa, synthetic construct
AKFESGG

SEQ ID NO: 70844 - protein, 7 aa, synthetic construct
NRAPPNP

SEQ ID NO: 70845 - protein, 7 aa, synthetic construct
RNQSTGN

SEQ ID NO: 70846 - protein, 7 aa, synthetic construct
DGKNSAN

SEQ ID NO: 70847 - protein, 7 aa, synthetic construct
FIGGTTG

SEQ ID NO: 70848 - protein, 7 aa, synthetic construct
WHISSQA

SEQ ID NO: 70849 - protein, 7 aa, synthetic construct
EVAIQAA

SEQ ID NO: 70850 - protein, 7 aa, synthetic construct
TNQRDIL

SEQ ID NO: 70851 - protein, 7 aa, synthetic construct
PERVAER

SEQ ID NO: 70852 - protein, 7 aa, synthetic construct
NSKSSVA

SEQ ID NO: 70853 - protein, 7 aa, synthetic construct
IAKPSQN

SEQ ID NO: 70854 - protein, 7 aa, synthetic construct
MRGEPSM

SEQ ID NO: 70855 - protein, 7 aa, synthetic construct
VGAVSAF

SEQ ID NO: 70856 - protein, 7 aa, synthetic construct
NDGHSNM

SEQ ID NO: 70857 - protein, 7 aa, synthetic construct
VSPGKIF

SEQ ID NO: 70858 - protein, 7 aa, synthetic construct
RHNVNQF

SEQ ID NO: 70859 - protein, 7 aa, synthetic construct
PNVQMPA

SEQ ID NO: 70860 - protein, 7 aa, synthetic construct
FKNGEEH

SEQ ID NO: 70861 - protein, 7 aa, synthetic construct
RGTPTPL

SEQ ID NO: 70862 - protein, 7 aa, synthetic construct
HMERTMM

SEQ ID NO: 70863 - protein, 7 aa, synthetic construct
GEWTRAA

SEQ ID NO: 70864 - protein, 7 aa, synthetic construct
ASTQRGI

SEQ ID NO: 70865 - protein, 7 aa, synthetic construct
KMSGPNA

SEQ ID NO: 70866 - protein, 7 aa, synthetic construct
TKSQNTA

SEQ ID NO: 70867 - protein, 7 aa, synthetic construct
NSMPTHS

SEQ ID NO: 70868 - protein, 7 aa, synthetic construct
VYSFKQE

SEQ ID NO: 70869 - protein, 7 aa, synthetic construct
YRTHENV

SEQ ID NO: 70870 - protein, 7 aa, synthetic construct
VNHNGQT

SEQ ID NO: 70871 - protein, 7 aa, synthetic construct
IQYHKNA

SEQ ID NO: 70872 - protein, 7 aa, synthetic construct
NGVGKTG

SEQ ID NO: 70873 - protein, 7 aa, synthetic construct
QHVVSIP

SEQ ID NO: 70874 - protein, 7 aa, synthetic construct
PSRQIGV

SEQ ID NO: 70875 - protein, 7 aa, synthetic construct
TFATRTA

SEQ ID NO: 70876 - protein, 7 aa, synthetic construct
RTASVNL

SEQ ID NO: 70877 - protein, 7 aa, synthetic construct
VRDQAAG

SEQ ID NO: 70878 - protein, 7 aa, synthetic construct
PRPTQVG

SEQ ID NO: 70879 - protein, 7 aa, synthetic construct
VHLVGKT

SEQ ID NO: 70880 - protein, 7 aa, synthetic construct
HTIKHHD

SEQ ID NO: 70881 - protein, 7 aa, synthetic construct
GMKNVVP

SEQ ID NO: 70882 - protein, 7 aa, synthetic construct
QTTEIKP

SEQ ID NO: 70883 - protein, 7 aa, synthetic construct
SKWDNQP

SEQ ID NO: 70884 - protein, 7 aa, synthetic construct
TGNPSPQ

SEQ ID NO: 70885 - protein, 7 aa, synthetic construct
NKSNQMT

SEQ ID NO: 70886 - protein, 7 aa, synthetic construct
TKNLEYA

SEQ ID NO: 70887 - protein, 7 aa, synthetic construct
YLKPNHQ

SEQ ID NO: 70888 - protein, 7 aa, synthetic construct
TKNSAVN

SEQ ID NO: 70889 - protein, 7 aa, synthetic construct
IRGGAQM

SEQ ID NO: 70890 - protein, 7 aa, synthetic construct
TNSKQGS

SEQ ID NO: 70891 - protein, 7 aa, synthetic construct
NGANRVA

SEQ ID NO: 70892 - protein, 7 aa, synthetic construct
NSQVMIG

SEQ ID NO: 70893 - protein, 7 aa, synthetic construct
KEPHVPM

SEQ ID NO: 70894 - protein, 7 aa, synthetic construct
SGASQLR

SEQ ID NO: 70895 - protein, 7 aa, synthetic construct
FRQSTSA

SEQ ID NO: 70896 - protein, 7 aa, synthetic construct
QNPSYAK

SEQ ID NO: 70897 - protein, 7 aa, synthetic construct
TKPSPNA

SEQ ID NO: 70898 - protein, 7 aa, synthetic construct
YGKTSGS

SEQ ID NO: 70899 - protein, 7 aa, synthetic construct
TVKEPKL

SEQ ID NO: 70900 - protein, 7 aa, synthetic construct
PSHHTAP

SEQ ID NO: 70901 - protein, 7 aa, synthetic construct
QTNSVKG

SEQ ID NO: 70902 - protein, 7 aa, synthetic construct
KTSTAIG

SEQ ID NO: 70903 - protein, 7 aa, synthetic construct
TNDYVRI

SEQ ID NO: 70904 - protein, 7 aa, synthetic construct
AMKPDPF

SEQ ID NO: 70905 - protein, 7 aa, synthetic construct
TVTKSQM

SEQ ID NO: 70906 - protein, 7 aa, synthetic construct
DRMNPPK

SEQ ID NO: 70907 - protein, 7 aa, synthetic construct
GLSVGAS

SEQ ID NO: 70908 - protein, 7 aa, synthetic construct
GKQDVKY

SEQ ID NO: 70909 - protein, 7 aa, synthetic construct
YVGFYKD

SEQ ID NO: 70910 - protein, 7 aa, synthetic construct
PFANTLK

SEQ ID NO: 70911 - protein, 7 aa, synthetic construct
INYQGQA

SEQ ID NO: 70912 - protein, 7 aa, synthetic construct
QYLGVSP

SEQ ID NO: 70913 - protein, 7 aa, synthetic construct
MNNTAQK

SEQ ID NO: 70914 - protein, 7 aa, synthetic construct
VTSNTMH

SEQ ID NO: 70915 - protein, 7 aa, synthetic construct
WSSSKLP

SEQ ID NO: 70916 - protein, 7 aa, synthetic construct
QMTHVAA

SEQ ID NO: 70917 - protein, 7 aa, synthetic construct
FAPQRKD

SEQ ID NO: 70918 - protein, 7 aa, synthetic construct
TILRGNT

SEQ ID NO: 70919 - protein, 7 aa, synthetic construct
KTKDASN

SEQ ID NO: 70920 - protein, 7 aa, synthetic construct
SKGQVLA

SEQ ID NO: 70921 - protein, 7 aa, synthetic construct
EMGRVLA

SEQ ID NO: 70922 - protein, 7 aa, synthetic construct
TQEFRGT

SEQ ID NO: 70923 - protein, 7 aa, synthetic construct
KSTVQGG

SEQ ID NO: 70924 - protein, 7 aa, synthetic construct
WYANKSD

SEQ ID NO: 70925 - protein, 7 aa, synthetic construct
LEKVSGM

SEQ ID NO: 70926 - protein, 7 aa, synthetic construct
THLIMKE

SEQ ID NO: 70927 - protein, 7 aa, synthetic construct
MPSQHNV

SEQ ID NO: 70928 - protein, 7 aa, synthetic construct
YKGKVDE

SEQ ID NO: 70929 - protein, 7 aa, synthetic construct
TNRSMQG

SEQ ID NO: 70930 - protein, 7 aa, synthetic construct
VILNHDR

SEQ ID NO: 70931 - protein, 7 aa, synthetic construct
KVTANGM

SEQ ID NO: 70932 - protein, 7 aa, synthetic construct
RNDGQAN

SEQ ID NO: 70933 - protein, 7 aa, synthetic construct
VGGMRLD

SEQ ID NO: 70934 - protein, 7 aa, synthetic construct
IATRVHA

SEQ ID NO: 70935 - protein, 7 aa, synthetic construct
WAAHMRE

SEQ ID NO: 70936 - protein, 7 aa, synthetic construct
APHKEMM

SEQ ID NO: 70937 - protein, 7 aa, synthetic construct
NKRDVQG

SEQ ID NO: 70938 - protein, 7 aa, synthetic construct
MIAKNHT

SEQ ID NO: 70939 - protein, 7 aa, synthetic construct
KQQSIQI

SEQ ID NO: 70940 - protein, 7 aa, synthetic construct
PHLAQPV

SEQ ID NO: 70941 - protein, 7 aa, synthetic construct
DKERSIK

SEQ ID NO: 70942 - protein, 7 aa, synthetic construct
FHRIPDA

SEQ ID NO: 70943 - protein, 7 aa, synthetic construct
KMATQKD

SEQ ID NO: 70944 - protein, 7 aa, synthetic construct
KSTKDTA

SEQ ID NO: 70945 - protein, 7 aa, synthetic construct
WPPENKT

SEQ ID NO: 70946 - protein, 7 aa, synthetic construct
HTKPLHV

SEQ ID NO: 70947 - protein, 7 aa, synthetic construct
GRQANYD

SEQ ID NO: 70948 - protein, 7 aa, synthetic construct
KEIKQPV

SEQ ID NO: 70949 - protein, 7 aa, synthetic construct
RTVKESS

SEQ ID NO: 70950 - protein, 7 aa, synthetic construct
MGITKTY

SEQ ID NO: 70951 - protein, 7 aa, synthetic construct
NGGSLIT

SEQ ID NO: 70952 - protein, 7 aa, synthetic construct
KSSGMQA

SEQ ID NO: 70953 - protein, 7 aa, synthetic construct
LNNHEPA

SEQ ID NO: 70954 - protein, 7 aa, synthetic construct
GNKDMYY

SEQ ID NO: 70955 - protein, 7 aa, synthetic construct
FPKMAHS

SEQ ID NO: 70956 - protein, 7 aa, synthetic construct
KGIGYTS

SEQ ID NO: 70957 - protein, 7 aa, synthetic construct
IMQKMMA

SEQ ID NO: 70958 - protein, 7 aa, synthetic construct
YKGTHYD

SEQ ID NO: 70959 - protein, 7 aa, synthetic construct
IKAPQSL

SEQ ID NO: 70960 - protein, 7 aa, synthetic construct
YGRAMMS

SEQ ID NO: 70961 - protein, 7 aa, synthetic construct
LHGAWQG

SEQ ID NO: 70962 - protein, 7 aa, synthetic construct
RTVHTSA

SEQ ID NO: 70963 - protein, 7 aa, synthetic construct
TYHAGLA

SEQ ID NO: 70964 - protein, 7 aa, synthetic construct
MKTTSAS

SEQ ID NO: 70965 - protein, 7 aa, synthetic construct
PTGILKS

SEQ ID NO: 70966 - protein, 7 aa, synthetic construct
GHKDWQT

SEQ ID NO: 70967 - protein, 7 aa, synthetic construct
FKLNAIA

SEQ ID NO: 70968 - protein, 7 aa, synthetic construct
DTLKREM

SEQ ID NO: 70969 - protein, 7 aa, synthetic construct
PMLPKMS

SEQ ID NO: 70970 - protein, 7 aa, synthetic construct
LKQQIKP

SEQ ID NO: 70971 - protein, 7 aa, synthetic construct
QGSWTPE

SEQ ID NO: 70972 - protein, 7 aa, synthetic construct
ENKGKDS

SEQ ID NO: 70973 - protein, 7 aa, synthetic construct
FQDKTQT

SEQ ID NO: 70974 - protein, 7 aa, synthetic construct
VIKHVSE

SEQ ID NO: 70975 - protein, 7 aa, synthetic construct
GPIDPMK

SEQ ID NO: 70976 - protein, 7 aa, synthetic construct
RGDKTMM

SEQ ID NO: 70977 - protein, 7 aa, synthetic construct
GPFNQLN

SEQ ID NO: 70978 - protein, 7 aa, synthetic construct
PKVTTSG

SEQ ID NO: 70979 - protein, 7 aa, synthetic construct
KMGHHPY

SEQ ID NO: 70980 - protein, 7 aa, synthetic construct
KKGDMGG

SEQ ID NO: 70981 - protein, 7 aa, synthetic construct
HFIDGNS

SEQ ID NO: 70982 - protein, 7 aa, synthetic construct
HGQRQTF

SEQ ID NO: 70983 - protein, 7 aa, synthetic construct
SQMIPHG

SEQ ID NO: 70984 - protein, 7 aa, synthetic construct
QPKNAGN

SEQ ID NO: 70985 - protein, 7 aa, synthetic construct
IPTKLPL

SEQ ID NO: 70986 - protein, 7 aa, synthetic construct
TITMQNV

SEQ ID NO: 70987 - protein, 7 aa, synthetic construct
SDFRTVS

SEQ ID NO: 70988 - protein, 7 aa, synthetic construct
RDHTKDS

SEQ ID NO: 70989 - protein, 7 aa, synthetic construct
NTNKNNA

SEQ ID NO: 70990 - protein, 7 aa, synthetic construct
VGDNRHY

SEQ ID NO: 70991 - protein, 7 aa, synthetic construct
NIARDVM

SEQ ID NO: 70992 - protein, 7 aa, synthetic construct
IPPRDQR

SEQ ID NO: 70993 - protein, 7 aa, synthetic construct
MPQRSAI

SEQ ID NO: 70994 - protein, 7 aa, synthetic construct
HQRFQSG

SEQ ID NO: 70995 - protein, 7 aa, synthetic construct
WMPSGHS

SEQ ID NO: 70996 - protein, 7 aa, synthetic construct
FSKPTSA

SEQ ID NO: 70997 - protein, 7 aa, synthetic construct
KQLPFPG

SEQ ID NO: 70998 - protein, 7 aa, synthetic construct
EFQNKQR

SEQ ID NO: 70999 - protein, 7 aa, synthetic construct
LTPATAF

SEQ ID NO: 71000 - protein, 7 aa, synthetic construct
KPKDFHG

SEQ ID NO: 71001 - protein, 7 aa, synthetic construct
NFAPSHK

SEQ ID NO: 71002 - protein, 7 aa, synthetic construct
MQIREQN

SEQ ID NO: 71003 - protein, 7 aa, synthetic construct
TVNHDDR

SEQ ID NO: 71004 - protein, 7 aa, synthetic construct
VASKAPP

SEQ ID NO: 71005 - protein, 7 aa, synthetic construct
HISPQGV

SEQ ID NO: 71006 - protein, 7 aa, synthetic construct
NLKQVDG

SEQ ID NO: 71007 - protein, 7 aa, synthetic construct
TSSQPYK

SEQ ID NO: 71008 - protein, 7 aa, synthetic construct
FASPEPF

SEQ ID NO: 71009 - protein, 7 aa, synthetic construct
LWPHEDG

SEQ ID NO: 71010 - protein, 7 aa, synthetic construct
EHRVHAH

SEQ ID NO: 71011 - protein, 7 aa, synthetic construct
HEHKQPS

SEQ ID NO: 71012 - protein, 7 aa, synthetic construct
TPFAAAG

SEQ ID NO: 71013 - protein, 7 aa, synthetic construct
MMPARDF

SEQ ID NO: 71014 - protein, 7 aa, synthetic construct
RPMPNNG

SEQ ID NO: 71015 - protein, 7 aa, synthetic construct
FLKEGKN

SEQ ID NO: 71016 - protein, 7 aa, synthetic construct
YIKMDVA

SEQ ID NO: 71017 - protein, 7 aa, synthetic construct
HYTHMNP

SEQ ID NO: 71018 - protein, 7 aa, synthetic construct
AFNGPPF

SEQ ID NO: 71019 - protein, 7 aa, synthetic construct
WIGTTNP

SEQ ID NO: 71020 - protein, 7 aa, synthetic construct
PRTNQTP

SEQ ID NO: 71021 - protein, 7 aa, synthetic construct
VQANNRI

SEQ ID NO: 71022 - protein, 7 aa, synthetic construct
VQFPGSN

SEQ ID NO: 71023 - protein, 7 aa, synthetic construct
RNFTLSE

SEQ ID NO: 71024 - protein, 7 aa, synthetic construct
FEKVQKG

SEQ ID NO: 71025 - protein, 7 aa, synthetic construct
LDGTKGI

SEQ ID NO: 71026 - protein, 7 aa, synthetic construct
TNEVQRI

SEQ ID NO: 71027 - protein, 7 aa, synthetic construct
MKTQEER

SEQ ID NO: 71028 - protein, 7 aa, synthetic construct
DFPQASR

SEQ ID NO: 71029 - protein, 7 aa, synthetic construct
IPNKYGD

SEQ ID NO: 71030 - protein, 7 aa, synthetic construct
WPPNYGS

SEQ ID NO: 71031 - protein, 7 aa, synthetic construct
VYDRKAE

SEQ ID NO: 71032 - protein, 7 aa, synthetic construct
QPSSIRD

SEQ ID NO: 71033 - protein, 7 aa, synthetic construct
TLGMKYQ

SEQ ID NO: 71034 - protein, 7 aa, synthetic construct
VASQAYH

SEQ ID NO: 71035 - protein, 7 aa, synthetic construct
KQPSVQA

SEQ ID NO: 71036 - protein, 7 aa, synthetic construct
FATKTMT

SEQ ID NO: 71037 - protein, 7 aa, synthetic construct
HAEAHNA

SEQ ID NO: 71038 - protein, 7 aa, synthetic construct
MPDLKSF

SEQ ID NO: 71039 - protein, 7 aa, synthetic construct
YTTIQRG

SEQ ID NO: 71040 - protein, 7 aa, synthetic construct
RMDLGEH

SEQ ID NO: 71041 - protein, 7 aa, synthetic construct
RYNEDHG

SEQ ID NO: 71042 - protein, 7 aa, synthetic construct
HKQLTDL

SEQ ID NO: 71043 - protein, 7 aa, synthetic construct
TRADMVA

SEQ ID NO: 71044 - protein, 7 aa, synthetic construct
LEFKFTG

SEQ ID NO: 71045 - protein, 7 aa, synthetic construct
HWNKANP

SEQ ID NO: 71046 - protein, 7 aa, synthetic construct
TTVPKWG

SEQ ID NO: 71047 - protein, 7 aa, synthetic construct
KPQTKAD

SEQ ID NO: 71048 - protein, 7 aa, synthetic construct
LPGSNTV

SEQ ID NO: 71049 - protein, 7 aa, synthetic construct
MQHDRAI

SEQ ID NO: 71050 - protein, 7 aa, synthetic construct
MGNGAAN

SEQ ID NO: 71051 - protein, 7 aa, synthetic construct
QDTGHRY

SEQ ID NO: 71052 - protein, 7 aa, synthetic construct
KTQSTRD

SEQ ID NO: 71053 - protein, 7 aa, synthetic construct
MLVGNMP

SEQ ID NO: 71054 - protein, 7 aa, synthetic construct
YVLNSNT

SEQ ID NO: 71055 - protein, 7 aa, synthetic construct
QQPTIAN

SEQ ID NO: 71056 - protein, 7 aa, synthetic construct
SRINTTD

SEQ ID NO: 71057 - protein, 7 aa, synthetic construct
NNWDKTT

SEQ ID NO: 71058 - protein, 7 aa, synthetic construct
IMKAHSY

SEQ ID NO: 71059 - protein, 7 aa, synthetic construct
GMADPRG

SEQ ID NO: 71060 - protein, 7 aa, synthetic construct
GSAQMKN

SEQ ID NO: 71061 - protein, 7 aa, synthetic construct
GLSKGNV

SEQ ID NO: 71062 - protein, 7 aa, synthetic construct
VPRQASG

SEQ ID NO: 71063 - protein, 7 aa, synthetic construct
GRNTKED

SEQ ID NO: 71064 - protein, 7 aa, synthetic construct
RAYGEMP

SEQ ID NO: 71065 - protein, 7 aa, synthetic construct
KALSGIA

SEQ ID NO: 71066 - protein, 7 aa, synthetic construct
LAAKEQP

SEQ ID NO: 71067 - protein, 7 aa, synthetic construct
GFGNPPQ

SEQ ID NO: 71068 - protein, 7 aa, synthetic construct
LSALQSP

SEQ ID NO: 71069 - protein, 7 aa, synthetic construct
FQSRIST

SEQ ID NO: 71070 - protein, 7 aa, synthetic construct
TRQTIAS

SEQ ID NO: 71071 - protein, 7 aa, synthetic construct
NKLNVVE

SEQ ID NO: 71072 - protein, 7 aa, synthetic construct
SSERQNA

SEQ ID NO: 71073 - protein, 7 aa, synthetic construct
IKQSINV

SEQ ID NO: 71074 - protein, 7 aa, synthetic construct
AQMAGKD

SEQ ID NO: 71075 - protein, 7 aa, synthetic construct
EGEWRRV

SEQ ID NO: 71076 - protein, 7 aa, synthetic construct
QKYKGED

SEQ ID NO: 71077 - protein, 7 aa, synthetic construct
YPRQQTH

SEQ ID NO: 71078 - protein, 7 aa, synthetic construct
MDKMREA

SEQ ID NO: 71079 - protein, 7 aa, synthetic construct
KPVSSGV

SEQ ID NO: 71080 - protein, 7 aa, synthetic construct
SKVQSNA

SEQ ID NO: 71081 - protein, 7 aa, synthetic construct
ILQIKAE

SEQ ID NO: 71082 - protein, 7 aa, synthetic construct
NIKSYTP

SEQ ID NO: 71083 - protein, 7 aa, synthetic construct
RPHHSQD

SEQ ID NO: 71084 - protein, 7 aa, synthetic construct
IAGFIAK

SEQ ID NO: 71085 - protein, 7 aa, synthetic construct
LLTVSHM

SEQ ID NO: 71086 - protein, 7 aa, synthetic construct
FHPSKDM

SEQ ID NO: 71087 - protein, 7 aa, synthetic construct
GNKPNNS

SEQ ID NO: 71088 - protein, 7 aa, synthetic construct
LRATVKD

SEQ ID NO: 71089 - protein, 7 aa, synthetic construct
RNDETRI

SEQ ID NO: 71090 - protein, 7 aa, synthetic construct
QYPDASR

SEQ ID NO: 71091 - protein, 7 aa, synthetic construct
SRPPTDK

SEQ ID NO: 71092 - protein, 7 aa, synthetic construct
HHDIKKY

SEQ ID NO: 71093 - protein, 7 aa, synthetic construct
MLKVSGS

SEQ ID NO: 71094 - protein, 7 aa, synthetic construct
KQTMARE

SEQ ID NO: 71095 - protein, 7 aa, synthetic construct
KTTASAM

SEQ ID NO: 71096 - protein, 7 aa, synthetic construct
SHTMRGE

SEQ ID NO: 71097 - protein, 7 aa, synthetic construct
QMNTEGK

SEQ ID NO: 71098 - protein, 7 aa, synthetic construct
IKKLDDP

SEQ ID NO: 71099 - protein, 7 aa, synthetic construct
TAVRITT

SEQ ID NO: 71100 - protein, 7 aa, synthetic construct
TMKNLQD

SEQ ID NO: 71101 - protein, 7 aa, synthetic construct
KNNTPQA

SEQ ID NO: 71102 - protein, 7 aa, synthetic construct
AVASLTG

SEQ ID NO: 71103 - protein, 7 aa, synthetic construct
RQPNNND

SEQ ID NO: 71104 - protein, 7 aa, synthetic construct
AIGDHRM

SEQ ID NO: 71105 - protein, 7 aa, synthetic construct
MGTEKRG

SEQ ID NO: 71106 - protein, 7 aa, synthetic construct
DNGTKTF

SEQ ID NO: 71107 - protein, 7 aa, synthetic construct
QKTSMNA

SEQ ID NO: 71108 - protein, 7 aa, synthetic construct
FKVHASL

SEQ ID NO: 71109 - protein, 7 aa, synthetic construct
ETKMKQI

SEQ ID NO: 71110 - protein, 7 aa, synthetic construct
AKNPNSA

SEQ ID NO: 71111 - protein, 7 aa, synthetic construct
EKQSNTI

SEQ ID NO: 71112 - protein, 7 aa, synthetic construct
NPNNQKA

SEQ ID NO: 71113 - protein, 7 aa, synthetic construct
LHTRPHP

SEQ ID NO: 71114 - protein, 7 aa, synthetic construct
HASSLSA

SEQ ID NO: 71115 - protein, 7 aa, synthetic construct
GAQHGIN

SEQ ID NO: 71116 - protein, 7 aa, synthetic construct
NARQQGG

SEQ ID NO: 71117 - protein, 7 aa, synthetic construct
PKNDQHW

SEQ ID NO: 71118 - protein, 7 aa, synthetic construct
LHAKQPT

SEQ ID NO: 71119 - protein, 7 aa, synthetic construct
QIKALSD

SEQ ID NO: 71120 - protein, 7 aa, synthetic construct
KKTDSYG

SEQ ID NO: 71121 - protein, 7 aa, synthetic construct
DRPNWIA

SEQ ID NO: 71122 - protein, 7 aa, synthetic construct
KNYPEQA

SEQ ID NO: 71123 - protein, 7 aa, synthetic construct
VDRVSLK

SEQ ID NO: 71124 - protein, 7 aa, synthetic construct
SKNGNTP

SEQ ID NO: 71125 - protein, 7 aa, synthetic construct
SPHEPKG

SEQ ID NO: 71126 - protein, 7 aa, synthetic construct
QYNVAHN

SEQ ID NO: 71127 - protein, 7 aa, synthetic construct
QMAHRSI

SEQ ID NO: 71128 - protein, 7 aa, synthetic construct
FTGGQVQ

SEQ ID NO: 71129 - protein, 7 aa, synthetic construct
TRNPTQA

SEQ ID NO: 71130 - protein, 7 aa, synthetic construct
KLMQAKE

SEQ ID NO: 71131 - protein, 7 aa, synthetic construct
QKDRSNT

SEQ ID NO: 71132 - protein, 7 aa, synthetic construct
DGNGRMN

SEQ ID NO: 71133 - protein, 7 aa, synthetic construct
YPATAGG

SEQ ID NO: 71134 - protein, 7 aa, synthetic construct
SDPRPPA

SEQ ID NO: 71135 - protein, 7 aa, synthetic construct
PRGQGEF

SEQ ID NO: 71136 - protein, 7 aa, synthetic construct
RISGFEA

SEQ ID NO: 71137 - protein, 7 aa, synthetic construct
PTLKNTG

SEQ ID NO: 71138 - protein, 7 aa, synthetic construct
SQQMKSG

SEQ ID NO: 71139 - protein, 7 aa, synthetic construct
TYKHMAV

SEQ ID NO: 71140 - protein, 7 aa, synthetic construct
LSAKAST

SEQ ID NO: 71141 - protein, 7 aa, synthetic construct
AMVPHKA

SEQ ID NO: 71142 - protein, 7 aa, synthetic construct
TYNIPDS

SEQ ID NO: 71143 - protein, 7 aa, synthetic construct
QTHGLLE

SEQ ID NO: 71144 - protein, 7 aa, synthetic construct
GKQMTVI

SEQ ID NO: 71145 - protein, 7 aa, synthetic construct
GRQSNMA

SEQ ID NO: 71146 - protein, 7 aa, synthetic construct
PRSNPGG

SEQ ID NO: 71147 - protein, 7 aa, synthetic construct
RQKDYSG

SEQ ID NO: 71148 - protein, 7 aa, synthetic construct
DTRANVG

SEQ ID NO: 71149 - protein, 7 aa, synthetic construct
PKSTNTA

SEQ ID NO: 71150 - protein, 7 aa, synthetic construct
IVKLANN

SEQ ID NO: 71151 - protein, 7 aa, synthetic construct
VKAQSRD

SEQ ID NO: 71152 - protein, 7 aa, synthetic construct
QQPKKND

SEQ ID NO: 71153 - protein, 7 aa, synthetic construct
LNMQQLN

SEQ ID NO: 71154 - protein, 7 aa, synthetic construct
WRRDGDD

SEQ ID NO: 71155 - protein, 7 aa, synthetic construct
TQSKGAV

SEQ ID NO: 71156 - protein, 7 aa, synthetic construct
QKKGDFV

SEQ ID NO: 71157 - protein, 7 aa, synthetic construct
NKDLFPQ

SEQ ID NO: 71158 - protein, 7 aa, synthetic construct
SSKPNTA

SEQ ID NO: 71159 - protein, 7 aa, synthetic construct
NKGNMPG

SEQ ID NO: 71160 - protein, 7 aa, synthetic construct
MSTGTMI

SEQ ID NO: 71161 - protein, 7 aa, synthetic construct
QPVKMDW

SEQ ID NO: 71162 - protein, 7 aa, synthetic construct
HPIKKAD

SEQ ID NO: 71163 - protein, 7 aa, synthetic construct
TKQQPFN

SEQ ID NO: 71164 - protein, 7 aa, synthetic construct
PKPGGNA

SEQ ID NO: 71165 - protein, 7 aa, synthetic construct
KLIKNEL

SEQ ID NO: 71166 - protein, 7 aa, synthetic construct
DRISGQQ

SEQ ID NO: 71167 - protein, 7 aa, synthetic construct
QSNHKSY

SEQ ID NO: 71168 - protein, 7 aa, synthetic construct
STTAKQG

SEQ ID NO: 71169 - protein, 7 aa, synthetic construct
GNSGNRY

SEQ ID NO: 71170 - protein, 7 aa, synthetic construct
KSPGYDQ

SEQ ID NO: 71171 - protein, 7 aa, synthetic construct
MAYPSGM

SEQ ID NO: 71172 - protein, 7 aa, synthetic construct
TMTKNGA

SEQ ID NO: 71173 - protein, 7 aa, synthetic construct
VMNTGRM

SEQ ID NO: 71174 - protein, 7 aa, synthetic construct
SGHRHMP

SEQ ID NO: 71175 - protein, 7 aa, synthetic construct
FSLAAKN

SEQ ID NO: 71176 - protein, 7 aa, synthetic construct
NQKPANN

SEQ ID NO: 71177 - protein, 7 aa, synthetic construct
IDGYGKT

SEQ ID NO: 71178 - protein, 7 aa, synthetic construct
AIFPEKQ

SEQ ID NO: 71179 - protein, 7 aa, synthetic construct
GKQNVGA

SEQ ID NO: 71180 - protein, 7 aa, synthetic construct
DATYKYG

SEQ ID NO: 71181 - protein, 7 aa, synthetic construct
IGMKSGV

SEQ ID NO: 71182 - protein, 7 aa, synthetic construct
NMPSSRY

SEQ ID NO: 71183 - protein, 7 aa, synthetic construct
AVNIIPS

SEQ ID NO: 71184 - protein, 7 aa, synthetic construct
TKMSGQT

SEQ ID NO: 71185 - protein, 7 aa, synthetic construct
SNPVVQS

SEQ ID NO: 71186 - protein, 7 aa, synthetic construct
KLHNPAM

SEQ ID NO: 71187 - protein, 7 aa, synthetic construct
VGRTTSP

SEQ ID NO: 71188 - protein, 7 aa, synthetic construct
HADFQGG

SEQ ID NO: 71189 - protein, 7 aa, synthetic construct
MKNTTVA

SEQ ID NO: 71190 - protein, 7 aa, synthetic construct
HEKSPGP

SEQ ID NO: 71191 - protein, 7 aa, synthetic construct
KTTVTVT

SEQ ID NO: 71192 - protein, 7 aa, synthetic construct
LMIGHVG

SEQ ID NO: 71193 - protein, 7 aa, synthetic construct
HAGAELK

SEQ ID NO: 71194 - protein, 7 aa, synthetic construct
AKEMLRG

SEQ ID NO: 71195 - protein, 7 aa, synthetic construct
RTNSNSP

SEQ ID NO: 71196 - protein, 7 aa, synthetic construct
GGSGRSD

SEQ ID NO: 71197 - protein, 7 aa, synthetic construct
KPSSTQP

SEQ ID NO: 71198 - protein, 7 aa, synthetic construct
HFQMEGA

SEQ ID NO: 71199 - protein, 7 aa, synthetic construct
NQSNQQM

SEQ ID NO: 71200 - protein, 7 aa, synthetic construct
QHSSGVH

SEQ ID NO: 71201 - protein, 7 aa, synthetic construct
LKAQAND

SEQ ID NO: 71202 - protein, 7 aa, synthetic construct
IELNKVS

SEQ ID NO: 71203 - protein, 7 aa, synthetic construct
HIYATNG

SEQ ID NO: 71204 - protein, 7 aa, synthetic construct
APQQTYP

SEQ ID NO: 71205 - protein, 7 aa, synthetic construct
KNPNVDQ

SEQ ID NO: 71206 - protein, 7 aa, synthetic construct
AITNAGK

SEQ ID NO: 71207 - protein, 7 aa, synthetic construct
TAPETKG

SEQ ID NO: 71208 - protein, 7 aa, synthetic construct
QGAFQAD

SEQ ID NO: 71209 - protein, 7 aa, synthetic construct
VEKMKPY

SEQ ID NO: 71210 - protein, 7 aa, synthetic construct
IKEHSDS

SEQ ID NO: 71211 - protein, 7 aa, synthetic construct
VRTSKME

SEQ ID NO: 71212 - protein, 7 aa, synthetic construct
GMAHDKP

SEQ ID NO: 71213 - protein, 7 aa, synthetic construct
SGFQMLP

SEQ ID NO: 71214 - protein, 7 aa, synthetic construct
QAERKHQ

SEQ ID NO: 71215 - protein, 7 aa, synthetic construct
IPAKELT

SEQ ID NO: 71216 - protein, 7 aa, synthetic construct
TKMQHID

SEQ ID NO: 71217 - protein, 7 aa, synthetic construct
RGVNPNI

SEQ ID NO: 71218 - protein, 7 aa, synthetic construct
DGNQKLK

SEQ ID NO: 71219 - protein, 7 aa, synthetic construct
VYQGHTP

SEQ ID NO: 71220 - protein, 7 aa, synthetic construct
KLDVHVH

SEQ ID NO: 71221 - protein, 7 aa, synthetic construct
AQPHNQM

SEQ ID NO: 71222 - protein, 7 aa, synthetic construct
NKGSGIG

SEQ ID NO: 71223 - protein, 7 aa, synthetic construct
GKPRLDE

SEQ ID NO: 71224 - protein, 7 aa, synthetic construct
RMGTKDN

SEQ ID NO: 71225 - protein, 7 aa, synthetic construct
ALKATTA

SEQ ID NO: 71226 - protein, 7 aa, synthetic construct
AKINAQY

SEQ ID NO: 71227 - protein, 7 aa, synthetic construct
SFHSASA

SEQ ID NO: 71228 - protein, 7 aa, synthetic construct
SADMKPS

SEQ ID NO: 71229 - protein, 7 aa, synthetic construct
ARFVPGG

SEQ ID NO: 71230 - protein, 7 aa, synthetic construct
RATQPLT

SEQ ID NO: 71231 - protein, 7 aa, synthetic construct
TPHKHPV

SEQ ID NO: 71232 - protein, 7 aa, synthetic construct
WSARRPE

SEQ ID NO: 71233 - protein, 7 aa, synthetic construct
TRSGEKW

SEQ ID NO: 71234 - protein, 7 aa, synthetic construct
GTMHIRQ

SEQ ID NO: 71235 - protein, 7 aa, synthetic construct
SDRTITT

SEQ ID NO: 71236 - protein, 7 aa, synthetic construct
HAMRGDA

SEQ ID NO: 71237 - protein, 7 aa, synthetic construct
ARNASNV

SEQ ID NO: 71238 - protein, 7 aa, synthetic construct
DFKTPPN

SEQ ID NO: 71239 - protein, 7 aa, synthetic construct
LMDRPLM

SEQ ID NO: 71240 - protein, 7 aa, synthetic construct
LHAIVKP

SEQ ID NO: 71241 - protein, 7 aa, synthetic construct
VRHMQLP

SEQ ID NO: 71242 - protein, 7 aa, synthetic construct
SHNMEPV

SEQ ID NO: 71243 - protein, 7 aa, synthetic construct
VMRDATH

SEQ ID NO: 71244 - protein, 7 aa, synthetic construct
YSYAPKD

SEQ ID NO: 71245 - protein, 7 aa, synthetic construct
KQPPDER

SEQ ID NO: 71246 - protein, 7 aa, synthetic construct
TLHSKDY

SEQ ID NO: 71247 - protein, 7 aa, synthetic construct
QKGISPS

SEQ ID NO: 71248 - protein, 7 aa, synthetic construct
HMALKVQ

SEQ ID NO: 71249 - protein, 7 aa, synthetic construct
YLPNHGV

SEQ ID NO: 71250 - protein, 7 aa, synthetic construct
GLIHPRN

SEQ ID NO: 71251 - protein, 7 aa, synthetic construct
PKVSNPA

SEQ ID NO: 71252 - protein, 7 aa, synthetic construct
CHLKSCP

SEQ ID NO: 71253 - protein, 7 aa, synthetic construct
GPKPQPA

SEQ ID NO: 71254 - protein, 7 aa, synthetic construct
KAEMQAG

SEQ ID NO: 71255 - protein, 7 aa, synthetic construct
TKGNAFG

SEQ ID NO: 71256 - protein, 7 aa, synthetic construct
EKMGSAY

SEQ ID NO: 71257 - protein, 7 aa, synthetic construct
TKPHMLQ

SEQ ID NO: 71258 - protein, 7 aa, synthetic construct
PVKATHG

SEQ ID NO: 71259 - protein, 7 aa, synthetic construct
IAVKGFT

SEQ ID NO: 71260 - protein, 7 aa, synthetic construct
RLKEHPI

SEQ ID NO: 71261 - protein, 7 aa, synthetic construct
HMRQGDR

SEQ ID NO: 71262 - protein, 7 aa, synthetic construct
LGYPPGP

SEQ ID NO: 71263 - protein, 7 aa, synthetic construct
SKQQTPQ

SEQ ID NO: 71264 - protein, 7 aa, synthetic construct
KTAVNTA

SEQ ID NO: 71265 - protein, 7 aa, synthetic construct
HANANHS

SEQ ID NO: 71266 - protein, 7 aa, synthetic construct
FPVQRRD

SEQ ID NO: 71267 - protein, 7 aa, synthetic construct
QSLNIKG

SEQ ID NO: 71268 - protein, 7 aa, synthetic construct
SGNYRTD

SEQ ID NO: 71269 - protein, 7 aa, synthetic construct
VRDQVPM

SEQ ID NO: 71270 - protein, 7 aa, synthetic construct
VGPLMRV

SEQ ID NO: 71271 - protein, 7 aa, synthetic construct
RNMQTVP

SEQ ID NO: 71272 - protein, 7 aa, synthetic construct
EGERPSG

SEQ ID NO: 71273 - protein, 7 aa, synthetic construct
GRVIGVT

SEQ ID NO: 71274 - protein, 7 aa, synthetic construct
ETKKDVG

SEQ ID NO: 71275 - protein, 7 aa, synthetic construct
RGQLNLI

SEQ ID NO: 71276 - protein, 7 aa, synthetic construct
WGSPRTD

SEQ ID NO: 71277 - protein, 7 aa, synthetic construct
MIASRLD

SEQ ID NO: 71278 - protein, 7 aa, synthetic construct
TGLNQGR

SEQ ID NO: 71279 - protein, 7 aa, synthetic construct
PVGSLKT

SEQ ID NO: 71280 - protein, 7 aa, synthetic construct
GQSSILL

SEQ ID NO: 71281 - protein, 7 aa, synthetic construct
VNHQKFE

SEQ ID NO: 71282 - protein, 7 aa, synthetic construct
NYATNQP

SEQ ID NO: 71283 - protein, 7 aa, synthetic construct
SNPAANM

SEQ ID NO: 71284 - protein, 7 aa, synthetic construct
SFSNPGS

SEQ ID NO: 71285 - protein, 7 aa, synthetic construct
VPGERKF

SEQ ID NO: 71286 - protein, 7 aa, synthetic construct
HASNPIS

SEQ ID NO: 71287 - protein, 7 aa, synthetic construct
THQTVTN

SEQ ID NO: 71288 - protein, 7 aa, synthetic construct
SSARNNA

SEQ ID NO: 71289 - protein, 7 aa, synthetic construct
VSKTANN

SEQ ID NO: 71290 - protein, 7 aa, synthetic construct
PRNAEAP

SEQ ID NO: 71291 - protein, 7 aa, synthetic construct
IKPKLVS

SEQ ID NO: 71292 - protein, 7 aa, synthetic construct
MLQQKWN

SEQ ID NO: 71293 - protein, 7 aa, synthetic construct
HAMSKYT

SEQ ID NO: 71294 - protein, 7 aa, synthetic construct
LAAGATM

SEQ ID NO: 71295 - protein, 7 aa, synthetic construct
PGVNTRM

SEQ ID NO: 71296 - protein, 7 aa, synthetic construct
FSGSLAK

SEQ ID NO: 71297 - protein, 7 aa, synthetic construct
YSTTNST

SEQ ID NO: 71298 - protein, 7 aa, synthetic construct
QHRGSMV

SEQ ID NO: 71299 - protein, 7 aa, synthetic construct
YGAKTSP

SEQ ID NO: 71300 - protein, 7 aa, synthetic construct
WPSDSTT

SEQ ID NO: 71301 - protein, 7 aa, synthetic construct
ITMRTPS

SEQ ID NO: 71302 - protein, 7 aa, synthetic construct
MKTSIGP

SEQ ID NO: 71303 - protein, 7 aa, synthetic construct
QRATNVI

SEQ ID NO: 71304 - protein, 7 aa, synthetic construct
YHGQSLK

SEQ ID NO: 71305 - protein, 7 aa, synthetic construct
WGASKEM

SEQ ID NO: 71306 - protein, 7 aa, synthetic construct
TTPITNR

SEQ ID NO: 71307 - protein, 7 aa, synthetic construct
MTKQGAW

SEQ ID NO: 71308 - protein, 7 aa, synthetic construct
PGNPQHL

SEQ ID NO: 71309 - protein, 7 aa, synthetic construct
AHAKAVS

SEQ ID NO: 71310 - protein, 7 aa, synthetic construct
IGISDVR

SEQ ID NO: 71311 - protein, 7 aa, synthetic construct
ATKPVGA

SEQ ID NO: 71312 - protein, 7 aa, synthetic construct
QEAISGR

SEQ ID NO: 71313 - protein, 7 aa, synthetic construct
DRAAGKT

SEQ ID NO: 71314 - protein, 7 aa, synthetic construct
SSHIQYG

SEQ ID NO: 71315 - protein, 7 aa, synthetic construct
KSLGHGD

SEQ ID NO: 71316 - protein, 7 aa, synthetic construct
GGRPTPT

SEQ ID NO: 71317 - protein, 7 aa, synthetic construct
LWGDNNP

SEQ ID NO: 71318 - protein, 7 aa, synthetic construct
EQKFEGM

SEQ ID NO: 71319 - protein, 7 aa, synthetic construct
VYERENF

SEQ ID NO: 71320 - protein, 7 aa, synthetic construct
AESTRHH

SEQ ID NO: 71321 - protein, 7 aa, synthetic construct
NQQHAGA

SEQ ID NO: 71322 - protein, 7 aa, synthetic construct
YPRGSSD

SEQ ID NO: 71323 - protein, 7 aa, synthetic construct
ALKKLAP

SEQ ID NO: 71324 - protein, 7 aa, synthetic construct
QNTSRNP

SEQ ID NO: 71325 - protein, 7 aa, synthetic construct
TAVLIKS

SEQ ID NO: 71326 - protein, 7 aa, synthetic construct
ADRIDAR

SEQ ID NO: 71327 - protein, 7 aa, synthetic construct
LHGPTPQ

SEQ ID NO: 71328 - protein, 7 aa, synthetic construct
QYPSRAN

SEQ ID NO: 71329 - protein, 7 aa, synthetic construct
WSNSFKS

SEQ ID NO: 71330 - protein, 7 aa, synthetic construct
EFAARTN

SEQ ID NO: 71331 - protein, 7 aa, synthetic construct
TNNGSKI

SEQ ID NO: 71332 - protein, 7 aa, synthetic construct
TATKAMS

SEQ ID NO: 71333 - protein, 7 aa, synthetic construct
EREQLRN

SEQ ID NO: 71334 - protein, 7 aa, synthetic construct
GTYANMA

SEQ ID NO: 71335 - protein, 7 aa, synthetic construct
AVWKDMS

SEQ ID NO: 71336 - protein, 7 aa, synthetic construct
ITTSMQK

SEQ ID NO: 71337 - protein, 7 aa, synthetic construct
FFAKKLD

SEQ ID NO: 71338 - protein, 7 aa, synthetic construct
EKNMKSG

SEQ ID NO: 71339 - protein, 7 aa, synthetic construct
QKSASVS

SEQ ID NO: 71340 - protein, 7 aa, synthetic construct
QSHSAAQ

SEQ ID NO: 71341 - protein, 7 aa, synthetic construct
KMADKNI

SEQ ID NO: 71342 - protein, 7 aa, synthetic construct
RNDYNKG

SEQ ID NO: 71343 - protein, 7 aa, synthetic construct
VKNAMKE

SEQ ID NO: 71344 - protein, 7 aa, synthetic construct
VSTMRHS

SEQ ID NO: 71345 - protein, 7 aa, synthetic construct
GHHGFTN

SEQ ID NO: 71346 - protein, 7 aa, synthetic construct
QMMNTSP

SEQ ID NO: 71347 - protein, 7 aa, synthetic construct
FTVANRE

SEQ ID NO: 71348 - protein, 7 aa, synthetic construct
YKTQKGE

SEQ ID NO: 71349 - protein, 7 aa, synthetic construct
VLNGHHK

SEQ ID NO: 71350 - protein, 7 aa, synthetic construct
LKALAVN

SEQ ID NO: 71351 - protein, 7 aa, synthetic construct
LKATTSG

SEQ ID NO: 71352 - protein, 7 aa, synthetic construct
KHEHMVA

SEQ ID NO: 71353 - protein, 7 aa, synthetic construct
GISNQGS

SEQ ID NO: 71354 - protein, 7 aa, synthetic construct
EFRNTET

SEQ ID NO: 71355 - protein, 7 aa, synthetic construct
CKPLHCE

SEQ ID NO: 71356 - protein, 7 aa, synthetic construct
VPQIHKT

SEQ ID NO: 71357 - protein, 7 aa, synthetic construct
KTQQQRE

SEQ ID NO: 71358 - protein, 7 aa, synthetic construct
WIERNKD

SEQ ID NO: 71359 - protein, 7 aa, synthetic construct
TETHYKQ

SEQ ID NO: 71360 - protein, 7 aa, synthetic construct
IMGVNDK

SEQ ID NO: 71361 - protein, 7 aa, synthetic construct
KRDSYEV

SEQ ID NO: 71362 - protein, 7 aa, synthetic construct
QINIMTP

SEQ ID NO: 71363 - protein, 7 aa, synthetic construct
VVQGGLS

SEQ ID NO: 71364 - protein, 7 aa, synthetic construct
VGANRIA

SEQ ID NO: 71365 - protein, 7 aa, synthetic construct
QTAKGAM

SEQ ID NO: 71366 - protein, 7 aa, synthetic construct
QAPHRLT

SEQ ID NO: 71367 - protein, 7 aa, synthetic construct
VLKNAPP

SEQ ID NO: 71368 - protein, 7 aa, synthetic construct
QTPAKAP

SEQ ID NO: 71369 - protein, 7 aa, synthetic construct
LARQGTS

SEQ ID NO: 71370 - protein, 7 aa, synthetic construct
TQRLPTA

SEQ ID NO: 71371 - protein, 7 aa, synthetic construct
NTATKAD

SEQ ID NO: 71372 - protein, 7 aa, synthetic construct
MSPDVMR

SEQ ID NO: 71373 - protein, 7 aa, synthetic construct
VSNAGTN

SEQ ID NO: 71374 - protein, 7 aa, synthetic construct
VAMVDRA

SEQ ID NO: 71375 - protein, 7 aa, synthetic construct
SRSNVTV

SEQ ID NO: 71376 - protein, 7 aa, synthetic construct
RSPTGSV

SEQ ID NO: 71377 - protein, 7 aa, synthetic construct
HQGSPGS

SEQ ID NO: 71378 - protein, 7 aa, synthetic construct
KDHIINK

SEQ ID NO: 71379 - protein, 7 aa, synthetic construct
NTTKEKD

SEQ ID NO: 71380 - protein, 7 aa, synthetic construct
HGSNMST

SEQ ID NO: 71381 - protein, 7 aa, synthetic construct
TEMRQLN

SEQ ID NO: 71382 - protein, 7 aa, synthetic construct
QKTSGPG

SEQ ID NO: 71383 - protein, 7 aa, synthetic construct
LATQSFP

SEQ ID NO: 71384 - protein, 7 aa, synthetic construct
YQNPVQG

SEQ ID NO: 71385 - protein, 7 aa, synthetic construct
HMNAQLP

SEQ ID NO: 71386 - protein, 7 aa, synthetic construct
YKNGSEP

SEQ ID NO: 71387 - protein, 7 aa, synthetic construct
QTGGSDK

SEQ ID NO: 71388 - protein, 7 aa, synthetic construct
DNRGNTV

SEQ ID NO: 71389 - protein, 7 aa, synthetic construct
KYMESRS

SEQ ID NO: 71390 - protein, 7 aa, synthetic construct
SQRTGSA

SEQ ID NO: 71391 - protein, 7 aa, synthetic construct
QYRDVIS

SEQ ID NO: 71392 - protein, 7 aa, synthetic construct
QSSNREV

SEQ ID NO: 71393 - protein, 7 aa, synthetic construct
EAHIKVS

SEQ ID NO: 71394 - protein, 7 aa, synthetic construct
IYPKQVA

SEQ ID NO: 71395 - protein, 7 aa, synthetic construct
QVMGHGV

SEQ ID NO: 71396 - protein, 7 aa, synthetic construct
MQAMARE

SEQ ID NO: 71397 - protein, 7 aa, synthetic construct
LLPNNRI

SEQ ID NO: 71398 - protein, 7 aa, synthetic construct
IKFQTHN

SEQ ID NO: 71399 - protein, 7 aa, synthetic construct
EPGIRSH

SEQ ID NO: 71400 - protein, 7 aa, synthetic construct
ETGRTMP

SEQ ID NO: 71401 - protein, 7 aa, synthetic construct
NRNVNEP

SEQ ID NO: 71402 - protein, 7 aa, synthetic construct
PKQMSSG

SEQ ID NO: 71403 - protein, 7 aa, synthetic construct
HVMKHNP

SEQ ID NO: 71404 - protein, 7 aa, synthetic construct
SGSQYVL

SEQ ID NO: 71405 - protein, 7 aa, synthetic construct
LGPRNHI

SEQ ID NO: 71406 - protein, 7 aa, synthetic construct
PGNRSGL

SEQ ID NO: 71407 - protein, 7 aa, synthetic construct
MHQNMDK

SEQ ID NO: 71408 - protein, 7 aa, synthetic construct
ADKIKKE

SEQ ID NO: 71409 - protein, 7 aa, synthetic construct
SRVPGSA

SEQ ID NO: 71410 - protein, 7 aa, synthetic construct
TAHTTKE

SEQ ID NO: 71411 - protein, 7 aa, synthetic construct
NGKNGNG

SEQ ID NO: 71412 - protein, 7 aa, synthetic construct
KWTTEEM

SEQ ID NO: 71413 - protein, 7 aa, synthetic construct
SHQDKTS

SEQ ID NO: 71414 - protein, 7 aa, synthetic construct
IGVQLMQ

SEQ ID NO: 71415 - protein, 7 aa, synthetic construct
LSRLSHT

SEQ ID NO: 71416 - protein, 7 aa, synthetic construct
KNQTQTG

SEQ ID NO: 71417 - protein, 7 aa, synthetic construct
KDYSHPH

SEQ ID NO: 71418 - protein, 7 aa, synthetic construct
HIAGIAR

SEQ ID NO: 71419 - protein, 7 aa, synthetic construct
QERDAWR

SEQ ID NO: 71420 - protein, 7 aa, synthetic construct
SPNWASE

SEQ ID NO: 71421 - protein, 7 aa, synthetic construct
TFTNVLP

SEQ ID NO: 71422 - protein, 7 aa, synthetic construct
VHKNMNL

SEQ ID NO: 71423 - protein, 7 aa, synthetic construct
ATHGSKV

SEQ ID NO: 71424 - protein, 7 aa, synthetic construct
FTNQIVA

SEQ ID NO: 71425 - protein, 7 aa, synthetic construct
HNTRVQL

SEQ ID NO: 71426 - protein, 7 aa, synthetic construct
PQGQQVI

SEQ ID NO: 71427 - protein, 7 aa, synthetic construct
SMDFKHA

SEQ ID NO: 71428 - protein, 7 aa, synthetic construct
HTTNTMM

SEQ ID NO: 71429 - protein, 7 aa, synthetic construct
SKAMASG

SEQ ID NO: 71430 - protein, 7 aa, synthetic construct
MIRDAYP

SEQ ID NO: 71431 - protein, 7 aa, synthetic construct
AGIVANS

SEQ ID NO: 71432 - protein, 7 aa, synthetic construct
VKEKSAD

SEQ ID NO: 71433 - protein, 7 aa, synthetic construct
KNPGNGI

SEQ ID NO: 71434 - protein, 7 aa, synthetic construct
KPPIFKP

SEQ ID NO: 71435 - protein, 7 aa, synthetic construct
QVNKASG

SEQ ID NO: 71436 - protein, 7 aa, synthetic construct
RNRVVYE

SEQ ID NO: 71437 - protein, 7 aa, synthetic construct
GAAYNQT

SEQ ID NO: 71438 - protein, 7 aa, synthetic construct
WQVTDKH

SEQ ID NO: 71439 - protein, 7 aa, synthetic construct
QARGMGS

SEQ ID NO: 71440 - protein, 7 aa, synthetic construct
NQGRTNP

SEQ ID NO: 71441 - protein, 7 aa, synthetic construct
AATSTVG

SEQ ID NO: 71442 - protein, 7 aa, synthetic construct
KQAGARD

SEQ ID NO: 71443 - protein, 7 aa, synthetic construct
AGIRQAN

SEQ ID NO: 71444 - protein, 7 aa, synthetic construct
HIKNMVP

SEQ ID NO: 71445 - protein, 7 aa, synthetic construct
MPKPTAG

SEQ ID NO: 71446 - protein, 7 aa, synthetic construct
TINQRNS

SEQ ID NO: 71447 - protein, 7 aa, synthetic construct
KWDTTQI

SEQ ID NO: 71448 - protein, 7 aa, synthetic construct
IKEKSHE

SEQ ID NO: 71449 - protein, 7 aa, synthetic construct
AEQFKLM

SEQ ID NO: 71450 - protein, 7 aa, synthetic construct
SRDTHLA

SEQ ID NO: 71451 - protein, 7 aa, synthetic construct
SKTGLRE

SEQ ID NO: 71452 - protein, 7 aa, synthetic construct
NKSGKDG

SEQ ID NO: 71453 - protein, 7 aa, synthetic construct
NPRPQIG

SEQ ID NO: 71454 - protein, 7 aa, synthetic construct
KTEFAPK

SEQ ID NO: 71455 - protein, 7 aa, synthetic construct
YKGQVQG

SEQ ID NO: 71456 - protein, 7 aa, synthetic construct
MMPESRQ

SEQ ID NO: 71457 - protein, 7 aa, synthetic construct
NASSTLP

SEQ ID NO: 71458 - protein, 7 aa, synthetic construct
VKAANRE

SEQ ID NO: 71459 - protein, 7 aa, synthetic construct
WSRPHDG

SEQ ID NO: 71460 - protein, 7 aa, synthetic construct
EFGAGKG

SEQ ID NO: 71461 - protein, 7 aa, synthetic construct
HHNLKRE

SEQ ID NO: 71462 - protein, 7 aa, synthetic construct
RNSGENH

SEQ ID NO: 71463 - protein, 7 aa, synthetic construct
MGKGNSP

SEQ ID NO: 71464 - protein, 7 aa, synthetic construct
MQYNGVG

SEQ ID NO: 71465 - protein, 7 aa, synthetic construct
KTNTASP

SEQ ID NO: 71466 - protein, 7 aa, synthetic construct
VDRVSPV

SEQ ID NO: 71467 - protein, 7 aa, synthetic construct
VGYQTNM

SEQ ID NO: 71468 - protein, 7 aa, synthetic construct
DARFLQN

SEQ ID NO: 71469 - protein, 7 aa, synthetic construct
YGFQGEA

SEQ ID NO: 71470 - protein, 7 aa, synthetic construct
NKTQIQG

SEQ ID NO: 71471 - protein, 7 aa, synthetic construct
YQQQHPP

SEQ ID NO: 71472 - protein, 7 aa, synthetic construct
FFNEGHA

SEQ ID NO: 71473 - protein, 7 aa, synthetic construct
GSPRVNA

SEQ ID NO: 71474 - protein, 7 aa, synthetic construct
QHFKHGS

SEQ ID NO: 71475 - protein, 7 aa, synthetic construct
DGGRLPD

SEQ ID NO: 71476 - protein, 7 aa, synthetic construct
AHAATRE

SEQ ID NO: 71477 - protein, 7 aa, synthetic construct
NGGKHYL

SEQ ID NO: 71478 - protein, 7 aa, synthetic construct
KTDTRVP

SEQ ID NO: 71479 - protein, 7 aa, synthetic construct
NNNFNEK

SEQ ID NO: 71480 - protein, 7 aa, synthetic construct
PERPIDR

SEQ ID NO: 71481 - protein, 7 aa, synthetic construct
SHGSFSG

SEQ ID NO: 71482 - protein, 7 aa, synthetic construct
PGHQREF

SEQ ID NO: 71483 - protein, 7 aa, synthetic construct
GFKSNNA

SEQ ID NO: 71484 - protein, 7 aa, synthetic construct
SSRTTAG

SEQ ID NO: 71485 - protein, 7 aa, synthetic construct
KANQVDF

SEQ ID NO: 71486 - protein, 7 aa, synthetic construct
RLIITEN

SEQ ID NO: 71487 - protein, 7 aa, synthetic construct
MNSSSRD

SEQ ID NO: 71488 - protein, 7 aa, synthetic construct
KPGGVAG

SEQ ID NO: 71489 - protein, 7 aa, synthetic construct
HIETRRI

SEQ ID NO: 71490 - protein, 7 aa, synthetic construct
YGPMAEK

SEQ ID NO: 71491 - protein, 7 aa, synthetic construct
QKYMKEY

SEQ ID NO: 71492 - protein, 7 aa, synthetic construct
IDGPKGT

SEQ ID NO: 71493 - protein, 7 aa, synthetic construct
ITSMQSP

SEQ ID NO: 71494 - protein, 7 aa, synthetic construct
SIAQPIK

SEQ ID NO: 71495 - protein, 7 aa, synthetic construct
YGYERRD

SEQ ID NO: 71496 - protein, 7 aa, synthetic construct
MNSGLTR

SEQ ID NO: 71497 - protein, 7 aa, synthetic construct
EWRGHTA

SEQ ID NO: 71498 - protein, 7 aa, synthetic construct
FNRQHEM

SEQ ID NO: 71499 - protein, 7 aa, synthetic construct
AATFGSE

SEQ ID NO: 71500 - protein, 7 aa, synthetic construct
KPQSIHI

SEQ ID NO: 71501 - protein, 7 aa, synthetic construct
QMLQTGY

SEQ ID NO: 71502 - protein, 7 aa, synthetic construct
EFSGIKP

SEQ ID NO: 71503 - protein, 7 aa, synthetic construct
KKSDQSI

SEQ ID NO: 71504 - protein, 7 aa, synthetic construct
RDGSRTA

SEQ ID NO: 71505 - protein, 7 aa, synthetic construct
PPKSSMA

SEQ ID NO: 71506 - protein, 7 aa, synthetic construct
GDWHNQV

SEQ ID NO: 71507 - protein, 7 aa, synthetic construct
QTRLLRE

SEQ ID NO: 71508 - protein, 7 aa, synthetic construct
YEGRFRE

SEQ ID NO: 71509 - protein, 7 aa, synthetic construct
YEFKASA

SEQ ID NO: 71510 - protein, 7 aa, synthetic construct
PHGIKQH

SEQ ID NO: 71511 - protein, 7 aa, synthetic construct
HGFPQAA

SEQ ID NO: 71512 - protein, 7 aa, synthetic construct
MAVRPIA

SEQ ID NO: 71513 - protein, 7 aa, synthetic construct
DIRGSQL

SEQ ID NO: 71514 - protein, 7 aa, synthetic construct
QPPIYAT

SEQ ID NO: 71515 - protein, 7 aa, synthetic construct
YLRFNGE

SEQ ID NO: 71516 - protein, 7 aa, synthetic construct
PAITKGM

SEQ ID NO: 71517 - protein, 7 aa, synthetic construct
HQAAGPV

SEQ ID NO: 71518 - protein, 7 aa, synthetic construct
PPHSAQS

SEQ ID NO: 71519 - protein, 7 aa, synthetic construct
MITKGKD

SEQ ID NO: 71520 - protein, 7 aa, synthetic construct
MGFPMKS

SEQ ID NO: 71521 - protein, 7 aa, synthetic construct
EYVGATR

SEQ ID NO: 71522 - protein, 7 aa, synthetic construct
LAYLSEP

SEQ ID NO: 71523 - protein, 7 aa, synthetic construct
GPMRGAP

SEQ ID NO: 71524 - protein, 7 aa, synthetic construct
GKSSMTS

SEQ ID NO: 71525 - protein, 7 aa, synthetic construct
NATARLQ

SEQ ID NO: 71526 - protein, 7 aa, synthetic construct
MPKIQDK

SEQ ID NO: 71527 - protein, 7 aa, synthetic construct
GINRPIH

SEQ ID NO: 71528 - protein, 7 aa, synthetic construct
FGNNAKG

SEQ ID NO: 71529 - protein, 7 aa, synthetic construct
NMKTFEE

SEQ ID NO: 71530 - protein, 7 aa, synthetic construct
FHEKPYG

SEQ ID NO: 71531 - protein, 7 aa, synthetic construct
NKITILA

SEQ ID NO: 71532 - protein, 7 aa, synthetic construct
MVPMNKA

SEQ ID NO: 71533 - protein, 7 aa, synthetic construct
NEKYVVM

SEQ ID NO: 71534 - protein, 7 aa, synthetic construct
PKDYSAG

SEQ ID NO: 71535 - protein, 7 aa, synthetic construct
EPQVMRK

SEQ ID NO: 71536 - protein, 7 aa, synthetic construct
GAGKYEA

SEQ ID NO: 71537 - protein, 7 aa, synthetic construct
TRTQGEY

SEQ ID NO: 71538 - protein, 7 aa, synthetic construct
KKDSVPF

SEQ ID NO: 71539 - protein, 7 aa, synthetic construct
IWSQDKD

SEQ ID NO: 71540 - protein, 7 aa, synthetic construct
TDMMGQK

SEQ ID NO: 71541 - protein, 7 aa, synthetic construct
AATHMAG

SEQ ID NO: 71542 - protein, 7 aa, synthetic construct
SNVNRLV

SEQ ID NO: 71543 - protein, 7 aa, synthetic construct
QKGAVSG

SEQ ID NO: 71544 - protein, 7 aa, synthetic construct
YGKKEDL

SEQ ID NO: 71545 - protein, 7 aa, synthetic construct
YIAHVNE

SEQ ID NO: 71546 - protein, 7 aa, synthetic construct
EKPFGAE

SEQ ID NO: 71547 - protein, 7 aa, synthetic construct
AQQNQEK

SEQ ID NO: 71548 - protein, 7 aa, synthetic construct
DRRVIVP

SEQ ID NO: 71549 - protein, 7 aa, synthetic construct
KFHPAQP

SEQ ID NO: 71550 - protein, 7 aa, synthetic construct
ASRGHNM

SEQ ID NO: 71551 - protein, 7 aa, synthetic construct
LKETNIS

SEQ ID NO: 71552 - protein, 7 aa, synthetic construct
RSPTVLE

SEQ ID NO: 71553 - protein, 7 aa, synthetic construct
KPKDMNS

SEQ ID NO: 71554 - protein, 7 aa, synthetic construct
WHREVPS

SEQ ID NO: 71555 - protein, 7 aa, synthetic construct
IHGLIGV

SEQ ID NO: 71556 - protein, 7 aa, synthetic construct
IRLETNA

SEQ ID NO: 71557 - protein, 7 aa, synthetic construct
FSQHMHA

SEQ ID NO: 71558 - protein, 7 aa, synthetic construct
EKNLMGK

SEQ ID NO: 71559 - protein, 7 aa, synthetic construct
SKIGDVK

SEQ ID NO: 71560 - protein, 7 aa, synthetic construct
TRQDHEL

SEQ ID NO: 71561 - protein, 7 aa, synthetic construct
TSTSISV

SEQ ID NO: 71562 - protein, 7 aa, synthetic construct
YGKNTTV

SEQ ID NO: 71563 - protein, 7 aa, synthetic construct
ATFQSID

SEQ ID NO: 71564 - protein, 7 aa, synthetic construct
SAHRLSV

SEQ ID NO: 71565 - protein, 7 aa, synthetic construct
SDAREST

SEQ ID NO: 71566 - protein, 7 aa, synthetic construct
GHHTNND

SEQ ID NO: 71567 - protein, 7 aa, synthetic construct
FHGKQDR

SEQ ID NO: 71568 - protein, 7 aa, synthetic construct
KHFDSNN

SEQ ID NO: 71569 - protein, 7 aa, synthetic construct
GKSNIAY

SEQ ID NO: 71570 - protein, 7 aa, synthetic construct
MGPKSNS

SEQ ID NO: 71571 - protein, 7 aa, synthetic construct
PDYGSTR

SEQ ID NO: 71572 - protein, 7 aa, synthetic construct
MHKFQKD

SEQ ID NO: 71573 - protein, 7 aa, synthetic construct
INRAETV

SEQ ID NO: 71574 - protein, 7 aa, synthetic construct
QSPMNGA

SEQ ID NO: 71575 - protein, 7 aa, synthetic construct
RGGNMAW

SEQ ID NO: 71576 - protein, 7 aa, synthetic construct
TVGRINN

SEQ ID NO: 71577 - protein, 7 aa, synthetic construct
GKTQNQG

SEQ ID NO: 71578 - protein, 7 aa, synthetic construct
NHTSRFG

SEQ ID NO: 71579 - protein, 7 aa, synthetic construct
MRHLGSQ

SEQ ID NO: 71580 - protein, 7 aa, synthetic construct
NPVNPRM

SEQ ID NO: 71581 - protein, 7 aa, synthetic construct
FSAPNAK

SEQ ID NO: 71582 - protein, 7 aa, synthetic construct
LNKQDYA

SEQ ID NO: 71583 - protein, 7 aa, synthetic construct
NVYGRME

SEQ ID NO: 71584 - protein, 7 aa, synthetic construct
VTRSGTV

SEQ ID NO: 71585 - protein, 7 aa, synthetic construct
RMIRENN

SEQ ID NO: 71586 - protein, 7 aa, synthetic construct
HRNNQAH

SEQ ID NO: 71587 - protein, 7 aa, synthetic construct
PRGQQTP

SEQ ID NO: 71588 - protein, 7 aa, synthetic construct
KSQPGVS

SEQ ID NO: 71589 - protein, 7 aa, synthetic construct
KQQTASG

SEQ ID NO: 71590 - protein, 7 aa, synthetic construct
TQGMMIA

SEQ ID NO: 71591 - protein, 7 aa, synthetic construct
HLINPGR

SEQ ID NO: 71592 - protein, 7 aa, synthetic construct
FHAEGAP

SEQ ID NO: 71593 - protein, 7 aa, synthetic construct
PFQGKWE

SEQ ID NO: 71594 - protein, 7 aa, synthetic construct
PLRANGP

SEQ ID NO: 71595 - protein, 7 aa, synthetic construct
GKVKAEE

SEQ ID NO: 71596 - protein, 7 aa, synthetic construct
NMKSFPP

SEQ ID NO: 71597 - protein, 7 aa, synthetic construct
VVIRQET

SEQ ID NO: 71598 - protein, 7 aa, synthetic construct
SKKQNDI

SEQ ID NO: 71599 - protein, 7 aa, synthetic construct
IGNINYD

SEQ ID NO: 71600 - protein, 7 aa, synthetic construct
QDTLHRT

SEQ ID NO: 71601 - protein, 7 aa, synthetic construct
IRERHPA

SEQ ID NO: 71602 - protein, 7 aa, synthetic construct
QPHQAAK

SEQ ID NO: 71603 - protein, 7 aa, synthetic construct
ILYKSEA

SEQ ID NO: 71604 - protein, 7 aa, synthetic construct
AVPIMPE

SEQ ID NO: 71605 - protein, 7 aa, synthetic construct
GKSSVSI

SEQ ID NO: 71606 - protein, 7 aa, synthetic construct
VRSHYNE

SEQ ID NO: 71607 - protein, 7 aa, synthetic construct
VQFKGMV

SEQ ID NO: 71608 - protein, 7 aa, synthetic construct
ASTLSKS

SEQ ID NO: 71609 - protein, 7 aa, synthetic construct
QDQLYKH

SEQ ID NO: 71610 - protein, 7 aa, synthetic construct
HDREVFG

SEQ ID NO: 71611 - protein, 7 aa, synthetic construct
EHPARQA

SEQ ID NO: 71612 - protein, 7 aa, synthetic construct
SKNNTNP

SEQ ID NO: 71613 - protein, 7 aa, synthetic construct
ISQLAQQ

SEQ ID NO: 71614 - protein, 7 aa, synthetic construct
GKFGVDT

SEQ ID NO: 71615 - protein, 7 aa, synthetic construct
YYKQQGD

SEQ ID NO: 71616 - protein, 7 aa, synthetic construct
TLSNVRA

SEQ ID NO: 71617 - protein, 7 aa, synthetic construct
LGHQMLS

SEQ ID NO: 71618 - protein, 7 aa, synthetic construct
FKSQNQN

SEQ ID NO: 71619 - protein, 7 aa, synthetic construct
ITYIKEN

SEQ ID NO: 71620 - protein, 7 aa, synthetic construct
VTGERKG

SEQ ID NO: 71621 - protein, 7 aa, synthetic construct
MSVGNKA

SEQ ID NO: 71622 - protein, 7 aa, synthetic construct
LKVAAMG

SEQ ID NO: 71623 - protein, 7 aa, synthetic construct
PGQYKAG

SEQ ID NO: 71624 - protein, 7 aa, synthetic construct
NRATGNA

SEQ ID NO: 71625 - protein, 7 aa, synthetic construct
PTTLNYK

SEQ ID NO: 71626 - protein, 7 aa, synthetic construct
VARVNPL

SEQ ID NO: 71627 - protein, 7 aa, synthetic construct
VHDYPKT

SEQ ID NO: 71628 - protein, 7 aa, synthetic construct
NKPMHVE

SEQ ID NO: 71629 - protein, 7 aa, synthetic construct
DNTWKGV

SEQ ID NO: 71630 - protein, 7 aa, synthetic construct
YTGNYTM

SEQ ID NO: 71631 - protein, 7 aa, synthetic construct
MVPILQG

SEQ ID NO: 71632 - protein, 7 aa, synthetic construct
LIGPHVS

SEQ ID NO: 71633 - protein, 7 aa, synthetic construct
MSGGGSS

SEQ ID NO: 71634 - protein, 7 aa, synthetic construct
HIIQQKA

SEQ ID NO: 71635 - protein, 7 aa, synthetic construct
SGRPPYE

SEQ ID NO: 71636 - protein, 7 aa, synthetic construct
DPSRTNA

SEQ ID NO: 71637 - protein, 7 aa, synthetic construct
KPYNDAY

SEQ ID NO: 71638 - protein, 7 aa, synthetic construct
PKHLANS

SEQ ID NO: 71639 - protein, 7 aa, synthetic construct
PLNYDKA

SEQ ID NO: 71640 - protein, 7 aa, synthetic construct
HRTNDAR

SEQ ID NO: 71641 - protein, 7 aa, synthetic construct
LSAYKPD

SEQ ID NO: 71642 - protein, 7 aa, synthetic construct
STIVQSG

SEQ ID NO: 71643 - protein, 7 aa, synthetic construct
VRQEGDN

SEQ ID NO: 71644 - protein, 7 aa, synthetic construct
SQTVNSL

SEQ ID NO: 71645 - protein, 7 aa, synthetic construct
RKDHYDS

SEQ ID NO: 71646 - protein, 7 aa, synthetic construct
AVNNAKP

SEQ ID NO: 71647 - protein, 7 aa, synthetic construct
IKTAQDY

SEQ ID NO: 71648 - protein, 7 aa, synthetic construct
NANHYRE

SEQ ID NO: 71649 - protein, 7 aa, synthetic construct
NIATPLN

SEQ ID NO: 71650 - protein, 7 aa, synthetic construct
GDRTEKW

SEQ ID NO: 71651 - protein, 7 aa, synthetic construct
YTMVIGE

SEQ ID NO: 71652 - protein, 7 aa, synthetic construct
GKNNSGP

SEQ ID NO: 71653 - protein, 7 aa, synthetic construct
VQKNTQS

SEQ ID NO: 71654 - protein, 7 aa, synthetic construct
WNQTGYG

SEQ ID NO: 71655 - protein, 7 aa, synthetic construct
TADKKVQ

SEQ ID NO: 71656 - protein, 7 aa, synthetic construct
GDKRAQQ

SEQ ID NO: 71657 - protein, 7 aa, synthetic construct
HVMGQHP

SEQ ID NO: 71658 - protein, 7 aa, synthetic construct
HDKFAFK

SEQ ID NO: 71659 - protein, 7 aa, synthetic construct
SFTGYAP

SEQ ID NO: 71660 - protein, 7 aa, synthetic construct
VREVAKI

SEQ ID NO: 71661 - protein, 7 aa, synthetic construct
RHTTNMG

SEQ ID NO: 71662 - protein, 7 aa, synthetic construct
MQPKDRY

SEQ ID NO: 71663 - protein, 7 aa, synthetic construct
IALHQTA

SEQ ID NO: 71664 - protein, 7 aa, synthetic construct
TKAMKPD

SEQ ID NO: 71665 - protein, 7 aa, synthetic construct
SKQMSTS

SEQ ID NO: 71666 - protein, 7 aa, synthetic construct
GIRTLDA

SEQ ID NO: 71667 - protein, 7 aa, synthetic construct
VKVGKPE

SEQ ID NO: 71668 - protein, 7 aa, synthetic construct
VSKTMAV

SEQ ID NO: 71669 - protein, 7 aa, synthetic construct
KKEVKLL

SEQ ID NO: 71670 - protein, 7 aa, synthetic construct
PRGNMAV

SEQ ID NO: 71671 - protein, 7 aa, synthetic construct
RQRAELQ

SEQ ID NO: 71672 - protein, 7 aa, synthetic construct
NGAHQQS

SEQ ID NO: 71673 - protein, 7 aa, synthetic construct
NAKPNNG

SEQ ID NO: 71674 - protein, 7 aa, synthetic construct
KPSPNAN

SEQ ID NO: 71675 - protein, 7 aa, synthetic construct
YKTTPGI

SEQ ID NO: 71676 - protein, 7 aa, synthetic construct
WTLKDPG

SEQ ID NO: 71677 - protein, 7 aa, synthetic construct
QLSSRAI

SEQ ID NO: 71678 - protein, 7 aa, synthetic construct
TYSMKPT

SEQ ID NO: 71679 - protein, 7 aa, synthetic construct
KDKASKE

SEQ ID NO: 71680 - protein, 7 aa, synthetic construct
IQKTSMA

SEQ ID NO: 71681 - protein, 7 aa, synthetic construct
PLNAMLK

SEQ ID NO: 71682 - protein, 7 aa, synthetic construct
ALDRYGS

SEQ ID NO: 71683 - protein, 7 aa, synthetic construct
GVLSYGS

SEQ ID NO: 71684 - protein, 7 aa, synthetic construct
GAVTKTP

SEQ ID NO: 71685 - protein, 7 aa, synthetic construct
YHMSQTK

SEQ ID NO: 71686 - protein, 7 aa, synthetic construct
KNQTDTA

SEQ ID NO: 71687 - protein, 7 aa, synthetic construct
GKAHEQD

SEQ ID NO: 71688 - protein, 7 aa, synthetic construct
MSSKSAA

SEQ ID NO: 71689 - protein, 7 aa, synthetic construct
TMTHMGL

SEQ ID NO: 71690 - protein, 7 aa, synthetic construct
TKSNTQN

SEQ ID NO: 71691 - protein, 7 aa, synthetic construct
FNQSKQM

SEQ ID NO: 71692 - protein, 7 aa, synthetic construct
ATNSHVD

SEQ ID NO: 71693 - protein, 7 aa, synthetic construct
SMKNALT

SEQ ID NO: 71694 - protein, 7 aa, synthetic construct
MMSNQGV

SEQ ID NO: 71695 - protein, 7 aa, synthetic construct
LVFKQDT

SEQ ID NO: 71696 - protein, 7 aa, synthetic construct
GYTGINV

SEQ ID NO: 71697 - protein, 7 aa, synthetic construct
TVDFQRH

SEQ ID NO: 71698 - protein, 7 aa, synthetic construct
NKAAIVG

SEQ ID NO: 71699 - protein, 7 aa, synthetic construct
NMFSQKE

SEQ ID NO: 71700 - protein, 7 aa, synthetic construct
WKSKGEH

SEQ ID NO: 71701 - protein, 7 aa, synthetic construct
HKTVGHS

SEQ ID NO: 71702 - protein, 7 aa, synthetic construct
WIAKSAG

SEQ ID NO: 71703 - protein, 7 aa, synthetic construct
DMKSSHI

SEQ ID NO: 71704 - protein, 7 aa, synthetic construct
QAYNRDP

SEQ ID NO: 71705 - protein, 7 aa, synthetic construct
VSRSGFA

SEQ ID NO: 71706 - protein, 7 aa, synthetic construct
KVQGKDW

SEQ ID NO: 71707 - protein, 7 aa, synthetic construct
NVHNHML

SEQ ID NO: 71708 - protein, 7 aa, synthetic construct
DHQLRRA

SEQ ID NO: 71709 - protein, 7 aa, synthetic construct
PDTQGKM

SEQ ID NO: 71710 - protein, 7 aa, synthetic construct
LQDRKVM

SEQ ID NO: 71711 - protein, 7 aa, synthetic construct
KNQIGTN

SEQ ID NO: 71712 - protein, 7 aa, synthetic construct
GHLSNQH

SEQ ID NO: 71713 - protein, 7 aa, synthetic construct
FNRPPMS

SEQ ID NO: 71714 - protein, 7 aa, synthetic construct
YREVSPS

SEQ ID NO: 71715 - protein, 7 aa, synthetic construct
FAANTIV

SEQ ID NO: 71716 - protein, 7 aa, synthetic construct
ANNAGFH

SEQ ID NO: 71717 - protein, 7 aa, synthetic construct
AEERTRG

SEQ ID NO: 71718 - protein, 7 aa, synthetic construct
RDQMPHG

SEQ ID NO: 71719 - protein, 7 aa, synthetic construct
SRTPNTA

SEQ ID NO: 71720 - protein, 7 aa, synthetic construct
NVSIRTA

SEQ ID NO: 71721 - protein, 7 aa, synthetic construct
QDAKRHE

SEQ ID NO: 71722 - protein, 7 aa, synthetic construct
RNNLSYE

SEQ ID NO: 71723 - protein, 7 aa, synthetic construct
TRPAYNN

SEQ ID NO: 71724 - protein, 7 aa, synthetic construct
PQKIKEG

SEQ ID NO: 71725 - protein, 7 aa, synthetic construct
TMNGSQR

SEQ ID NO: 71726 - protein, 7 aa, synthetic construct
GKQVLLA

SEQ ID NO: 71727 - protein, 7 aa, synthetic construct
HQPPQVH

SEQ ID NO: 71728 - protein, 7 aa, synthetic construct
KQSHGEA

SEQ ID NO: 71729 - protein, 7 aa, synthetic construct
GNSLTTD

SEQ ID NO: 71730 - protein, 7 aa, synthetic construct
SKGSAYD

SEQ ID NO: 71731 - protein, 7 aa, synthetic construct
GREAPKE

SEQ ID NO: 71732 - protein, 7 aa, synthetic construct
GMKNHVM

SEQ ID NO: 71733 - protein, 7 aa, synthetic construct
CALQKCA

SEQ ID NO: 71734 - protein, 7 aa, synthetic construct
SSKNEGR

SEQ ID NO: 71735 - protein, 7 aa, synthetic construct
HIKGSTW

SEQ ID NO: 71736 - protein, 7 aa, synthetic construct
ILQHAAV

SEQ ID NO: 71737 - protein, 7 aa, synthetic construct
KVPAEQA

SEQ ID NO: 71738 - protein, 7 aa, synthetic construct
VKQPYEM

SEQ ID NO: 71739 - protein, 7 aa, synthetic construct
HAHLAPT

SEQ ID NO: 71740 - protein, 7 aa, synthetic construct
GQFTVHS

SEQ ID NO: 71741 - protein, 7 aa, synthetic construct
KGNPTAG

SEQ ID NO: 71742 - protein, 7 aa, synthetic construct
MLDTDSK

SEQ ID NO: 71743 - protein, 7 aa, synthetic construct
KTTQGAT

SEQ ID NO: 71744 - protein, 7 aa, synthetic construct
SKMMSQG

SEQ ID NO: 71745 - protein, 7 aa, synthetic construct
KNLKSEY

SEQ ID NO: 71746 - protein, 7 aa, synthetic construct
GKLKVVP

SEQ ID NO: 71747 - protein, 7 aa, synthetic construct
GRSATMA

SEQ ID NO: 71748 - protein, 7 aa, synthetic construct
QLQNHQW

SEQ ID NO: 71749 - protein, 7 aa, synthetic construct
AHQKMNV

SEQ ID NO: 71750 - protein, 7 aa, synthetic construct
HSNTTFT

SEQ ID NO: 71751 - protein, 7 aa, synthetic construct
GKTQAYD

SEQ ID NO: 71752 - protein, 7 aa, synthetic construct
DSLHKAI

SEQ ID NO: 71753 - protein, 7 aa, synthetic construct
AHPQGYL

SEQ ID NO: 71754 - protein, 7 aa, synthetic construct
FRHSPSG

SEQ ID NO: 71755 - protein, 7 aa, synthetic construct
GKLNAGA

SEQ ID NO: 71756 - protein, 7 aa, synthetic construct
QTGMLGS

SEQ ID NO: 71757 - protein, 7 aa, synthetic construct
QSQLMVG

SEQ ID NO: 71758 - protein, 7 aa, synthetic construct
KGAFAEF

SEQ ID NO: 71759 - protein, 7 aa, synthetic construct
MHARAVI

SEQ ID NO: 71760 - protein, 7 aa, synthetic construct
KGQTNQP

SEQ ID NO: 71761 - protein, 7 aa, synthetic construct
YGQWSSQ

SEQ ID NO: 71762 - protein, 7 aa, synthetic construct
LNTMWEG

SEQ ID NO: 71763 - protein, 7 aa, synthetic construct
MQPSGSA

SEQ ID NO: 71764 - protein, 7 aa, synthetic construct
PFHNLDR

SEQ ID NO: 71765 - protein, 7 aa, synthetic construct
HEVRNGT

SEQ ID NO: 71766 - protein, 7 aa, synthetic construct
PNKTGVA

SEQ ID NO: 71767 - protein, 7 aa, synthetic construct
YRMGTQT

SEQ ID NO: 71768 - protein, 7 aa, synthetic construct
DRQYLTP

SEQ ID NO: 71769 - protein, 7 aa, synthetic construct
QPTLKHM

SEQ ID NO: 71770 - protein, 7 aa, synthetic construct
YNHSAPI

SEQ ID NO: 71771 - protein, 7 aa, synthetic construct
QARDPDA

SEQ ID NO: 71772 - protein, 7 aa, synthetic construct
PNLNQTM

SEQ ID NO: 71773 - protein, 7 aa, synthetic construct
ITGNQYI

SEQ ID NO: 71774 - protein, 7 aa, synthetic construct
FPVHNMS

SEQ ID NO: 71775 - protein, 7 aa, synthetic construct
NHVRPAQ

SEQ ID NO: 71776 - protein, 7 aa, synthetic construct
LQNRMDT

SEQ ID NO: 71777 - protein, 7 aa, synthetic construct
RVERNNE

SEQ ID NO: 71778 - protein, 7 aa, synthetic construct
VGNSKHF

SEQ ID NO: 71779 - protein, 7 aa, synthetic construct
KNEIMTV

SEQ ID NO: 71780 - protein, 7 aa, synthetic construct
NGMHYAA

SEQ ID NO: 71781 - protein, 7 aa, synthetic construct
RSGETYG

SEQ ID NO: 71782 - protein, 7 aa, synthetic construct
RSEKQVA

SEQ ID NO: 71783 - protein, 7 aa, synthetic construct
VIQNGLS

SEQ ID NO: 71784 - protein, 7 aa, synthetic construct
ARGNAAF

SEQ ID NO: 71785 - protein, 7 aa, synthetic construct
KNHLTDW

SEQ ID NO: 71786 - protein, 7 aa, synthetic construct
GFPQGMK

SEQ ID NO: 71787 - protein, 7 aa, synthetic construct
DRKHGDM

SEQ ID NO: 71788 - protein, 7 aa, synthetic construct
MNHSGSP

SEQ ID NO: 71789 - protein, 7 aa, synthetic construct
NTKTNVG

SEQ ID NO: 71790 - protein, 7 aa, synthetic construct
TFQTPKE

SEQ ID NO: 71791 - protein, 7 aa, synthetic construct
SRTSGSP

SEQ ID NO: 71792 - protein, 7 aa, synthetic construct
QMSMQPP

SEQ ID NO: 71793 - protein, 7 aa, synthetic construct
NQFQGMS

SEQ ID NO: 71794 - protein, 7 aa, synthetic construct
TAHVAKE

SEQ ID NO: 71795 - protein, 7 aa, synthetic construct
NNKANVD

SEQ ID NO: 71796 - protein, 7 aa, synthetic construct
TRAGYPQ

SEQ ID NO: 71797 - protein, 7 aa, synthetic construct
KANQMSG

SEQ ID NO: 71798 - protein, 7 aa, synthetic construct
YHLNIKN

SEQ ID NO: 71799 - protein, 7 aa, synthetic construct
KGVQGSN

SEQ ID NO: 71800 - protein, 7 aa, synthetic construct
PYQPNGA

SEQ ID NO: 71801 - protein, 7 aa, synthetic construct
HGPHSSP

SEQ ID NO: 71802 - protein, 7 aa, synthetic construct
VIDKIKS

SEQ ID NO: 71803 - protein, 7 aa, synthetic construct
GTQHELS

SEQ ID NO: 71804 - protein, 7 aa, synthetic construct
RHDQNLY

SEQ ID NO: 71805 - protein, 7 aa, synthetic construct
RMPQLER

SEQ ID NO: 71806 - protein, 7 aa, synthetic construct
RNGQVVP

SEQ ID NO: 71807 - protein, 7 aa, synthetic construct
PLGKIGP

SEQ ID NO: 71808 - protein, 7 aa, synthetic construct
NAANPNA

SEQ ID NO: 71809 - protein, 7 aa, synthetic construct
SSKMQAV

SEQ ID NO: 71810 - protein, 7 aa, synthetic construct
MQHRQVA

SEQ ID NO: 71811 - protein, 7 aa, synthetic construct
TSTKHNA

SEQ ID NO: 71812 - protein, 7 aa, synthetic construct
IGKTSTH

SEQ ID NO: 71813 - protein, 7 aa, synthetic construct
QHTALAP

SEQ ID NO: 71814 - protein, 7 aa, synthetic construct
NKQSQAS

SEQ ID NO: 71815 - protein, 7 aa, synthetic construct
VLTGGGY

SEQ ID NO: 71816 - protein, 7 aa, synthetic construct
RETSKTG

SEQ ID NO: 71817 - protein, 7 aa, synthetic construct
FSKTSPS

SEQ ID NO: 71818 - protein, 7 aa, synthetic construct
SIRDTTE

SEQ ID NO: 71819 - protein, 7 aa, synthetic construct
NVAQIVP

SEQ ID NO: 71820 - protein, 7 aa, synthetic construct
VNHLSAQ

SEQ ID NO: 71821 - protein, 7 aa, synthetic construct
VTIKHSD

SEQ ID NO: 71822 - protein, 7 aa, synthetic construct
KPQNNAP

SEQ ID NO: 71823 - protein, 7 aa, synthetic construct
FKINVKD

SEQ ID NO: 71824 - protein, 7 aa, synthetic construct
GVAGVGQ

SEQ ID NO: 71825 - protein, 7 aa, synthetic construct
RIVNMSA

SEQ ID NO: 71826 - protein, 7 aa, synthetic construct
SSPTIKY

SEQ ID NO: 71827 - protein, 7 aa, synthetic construct
KKDYKLD

SEQ ID NO: 71828 - protein, 7 aa, synthetic construct
KVESKDY

SEQ ID NO: 71829 - protein, 7 aa, synthetic construct
VGSKHAW

SEQ ID NO: 71830 - protein, 7 aa, synthetic construct
YFRVTSD

SEQ ID NO: 71831 - protein, 7 aa, synthetic construct
IPAQAKN

SEQ ID NO: 71832 - protein, 7 aa, synthetic construct
LDVVHHT

SEQ ID NO: 71833 - protein, 7 aa, synthetic construct
KNAGEPL

SEQ ID NO: 71834 - protein, 7 aa, synthetic construct
AGSINGW

SEQ ID NO: 71835 - protein, 7 aa, synthetic construct
GPNVARV

SEQ ID NO: 71836 - protein, 7 aa, synthetic construct
KNVLSQQ

SEQ ID NO: 71837 - protein, 7 aa, synthetic construct
TIKSHQN

SEQ ID NO: 71838 - protein, 7 aa, synthetic construct
RTRDQDW

SEQ ID NO: 71839 - protein, 7 aa, synthetic construct
NIPKPNQ

SEQ ID NO: 71840 - protein, 7 aa, synthetic construct
MQKSTSS

SEQ ID NO: 71841 - protein, 7 aa, synthetic construct
PVGQMSY

SEQ ID NO: 71842 - protein, 7 aa, synthetic construct
PQRLETS

SEQ ID NO: 71843 - protein, 7 aa, synthetic construct
MHVDTRN

SEQ ID NO: 71844 - protein, 7 aa, synthetic construct
KDMDHRG

SEQ ID NO: 71845 - protein, 7 aa, synthetic construct
YKNMSQV

SEQ ID NO: 71846 - protein, 7 aa, synthetic construct
QHDHNIA

SEQ ID NO: 71847 - protein, 7 aa, synthetic construct
TSRIDIE

SEQ ID NO: 71848 - protein, 7 aa, synthetic construct
FKSTNMS

SEQ ID NO: 71849 - protein, 7 aa, synthetic construct
SKENKLM

SEQ ID NO: 71850 - protein, 7 aa, synthetic construct
HMNSGNI

SEQ ID NO: 71851 - protein, 7 aa, synthetic construct
QQGTHQC

SEQ ID NO: 71852 - protein, 7 aa, synthetic construct
VQYLQTA

SEQ ID NO: 71853 - protein, 7 aa, synthetic construct
NNGRVSA

SEQ ID NO: 71854 - protein, 7 aa, synthetic construct
FSEKKNF

SEQ ID NO: 71855 - protein, 7 aa, synthetic construct
HDFANRT

SEQ ID NO: 71856 - protein, 7 aa, synthetic construct
HLIHTHE

SEQ ID NO: 71857 - protein, 7 aa, synthetic construct
YGRNSEN

SEQ ID NO: 71858 - protein, 7 aa, synthetic construct
LLPHNAA

SEQ ID NO: 71859 - protein, 7 aa, synthetic construct
GKTNGQA

SEQ ID NO: 71860 - protein, 7 aa, synthetic construct
KPQNSDL

SEQ ID NO: 71861 - protein, 7 aa, synthetic construct
EWSGHRE

SEQ ID NO: 71862 - protein, 7 aa, synthetic construct
AKMHNSN

SEQ ID NO: 71863 - protein, 7 aa, synthetic construct
DLMVKHD

SEQ ID NO: 71864 - protein, 7 aa, synthetic construct
RIPTISQ

SEQ ID NO: 71865 - protein, 7 aa, synthetic construct
YSSKRDQ

SEQ ID NO: 71866 - protein, 7 aa, synthetic construct
HKMMVSE

SEQ ID NO: 71867 - protein, 7 aa, synthetic construct
SGKVPNG

SEQ ID NO: 71868 - protein, 7 aa, synthetic construct
GQARTAI

SEQ ID NO: 71869 - protein, 7 aa, synthetic construct
LRPQVSE

SEQ ID NO: 71870 - protein, 7 aa, synthetic construct
QHSHVST

SEQ ID NO: 71871 - protein, 7 aa, synthetic construct
TARATPP

SEQ ID NO: 71872 - protein, 7 aa, synthetic construct
NQQKLIN

SEQ ID NO: 71873 - protein, 7 aa, synthetic construct
LEHREMD

SEQ ID NO: 71874 - protein, 7 aa, synthetic construct
YVVKSGL

SEQ ID NO: 71875 - protein, 7 aa, synthetic construct
PFGKQEW

SEQ ID NO: 71876 - protein, 7 aa, synthetic construct
GSNGNGY

SEQ ID NO: 71877 - protein, 7 aa, synthetic construct
TAYNKLG

SEQ ID NO: 71878 - protein, 7 aa, synthetic construct
KHNYSKE

SEQ ID NO: 71879 - protein, 7 aa, synthetic construct
TVDGFKQ

SEQ ID NO: 71880 - protein, 7 aa, synthetic construct
FPQPKAV

SEQ ID NO: 71881 - protein, 7 aa, synthetic construct
QMTQHQP

SEQ ID NO: 71882 - protein, 7 aa, synthetic construct
TTSLMTP

SEQ ID NO: 71883 - protein, 7 aa, synthetic construct
PARPAQF

SEQ ID NO: 71884 - protein, 7 aa, synthetic construct
NSRGVVL

SEQ ID NO: 71885 - protein, 7 aa, synthetic construct
YMNTKQA

SEQ ID NO: 71886 - protein, 7 aa, synthetic construct
WNMQANP

SEQ ID NO: 71887 - protein, 7 aa, synthetic construct
FPKAGMH

SEQ ID NO: 71888 - protein, 7 aa, synthetic construct
VNAKMSG

SEQ ID NO: 71889 - protein, 7 aa, synthetic construct
KAGAYPH

SEQ ID NO: 71890 - protein, 7 aa, synthetic construct
SSPNATK

SEQ ID NO: 71891 - protein, 7 aa, synthetic construct
HASMNRI

SEQ ID NO: 71892 - protein, 7 aa, synthetic construct
TQDHIKA

SEQ ID NO: 71893 - protein, 7 aa, synthetic construct
DDPRKQK

SEQ ID NO: 71894 - protein, 7 aa, synthetic construct
FHHGAQS

SEQ ID NO: 71895 - protein, 7 aa, synthetic construct
QQRSDQM

SEQ ID NO: 71896 - protein, 7 aa, synthetic construct
VVQVANP

SEQ ID NO: 71897 - protein, 7 aa, synthetic construct
RPSLNNP

SEQ ID NO: 71898 - protein, 7 aa, synthetic construct
IGANSFK

SEQ ID NO: 71899 - protein, 7 aa, synthetic construct
HTKVGVD

SEQ ID NO: 71900 - protein, 7 aa, synthetic construct
VGKAAQF

SEQ ID NO: 71901 - protein, 7 aa, synthetic construct
TGQRHEY

SEQ ID NO: 71902 - protein, 7 aa, synthetic construct
FEQGSKT

SEQ ID NO: 71903 - protein, 7 aa, synthetic construct
VVKYGGN

SEQ ID NO: 71904 - protein, 7 aa, synthetic construct
WVPKSSS

SEQ ID NO: 71905 - protein, 7 aa, synthetic construct
IGGHRDS

SEQ ID NO: 71906 - protein, 7 aa, synthetic construct
TSGMKTA

SEQ ID NO: 71907 - protein, 7 aa, synthetic construct
WNVGRAQ

SEQ ID NO: 71908 - protein, 7 aa, synthetic construct
MNPTLSG

SEQ ID NO: 71909 - protein, 7 aa, synthetic construct
STRPEPS

SEQ ID NO: 71910 - protein, 7 aa, synthetic construct
DGKKVMF

SEQ ID NO: 71911 - protein, 7 aa, synthetic construct
LYAPNQN

SEQ ID NO: 71912 - protein, 7 aa, synthetic construct
QRENVLS

SEQ ID NO: 71913 - protein, 7 aa, synthetic construct
NGNTKPL

SEQ ID NO: 71914 - protein, 7 aa, synthetic construct
PNQHSQP

SEQ ID NO: 71915 - protein, 7 aa, synthetic construct
HKVTYKE

SEQ ID NO: 71916 - protein, 7 aa, synthetic construct
RPDSQRQ

SEQ ID NO: 71917 - protein, 7 aa, synthetic construct
IHDFRSP

SEQ ID NO: 71918 - protein, 7 aa, synthetic construct
KGRYDNE

SEQ ID NO: 71919 - protein, 7 aa, synthetic construct
RLNNNLT

SEQ ID NO: 71920 - protein, 7 aa, synthetic construct
KTSYVEM

SEQ ID NO: 71921 - protein, 7 aa, synthetic construct
NKHADSP

SEQ ID NO: 71922 - protein, 7 aa, synthetic construct
QTELHKG

SEQ ID NO: 71923 - protein, 7 aa, synthetic construct
IGKKYEH

SEQ ID NO: 71924 - protein, 7 aa, synthetic construct
FKATGAA

SEQ ID NO: 71925 - protein, 7 aa, synthetic construct
GRGVLSE

SEQ ID NO: 71926 - protein, 7 aa, synthetic construct
IRNSNET

SEQ ID NO: 71927 - protein, 7 aa, synthetic construct
GQNKHMF

SEQ ID NO: 71928 - protein, 7 aa, synthetic construct
LKEKQHN

SEQ ID NO: 71929 - protein, 7 aa, synthetic construct
SAQRSGV

SEQ ID NO: 71930 - protein, 7 aa, synthetic construct
IRAMANP

SEQ ID NO: 71931 - protein, 7 aa, synthetic construct
IAATRNT

SEQ ID NO: 71932 - protein, 7 aa, synthetic construct
TTVKMNE

SEQ ID NO: 71933 - protein, 7 aa, synthetic construct
VHGRGYE

SEQ ID NO: 71934 - protein, 7 aa, synthetic construct
QGKSAVG

SEQ ID NO: 71935 - protein, 7 aa, synthetic construct
PFDGKPK

SEQ ID NO: 71936 - protein, 7 aa, synthetic construct
QYAQRDR

SEQ ID NO: 71937 - protein, 7 aa, synthetic construct
VMSANQG

SEQ ID NO: 71938 - protein, 7 aa, synthetic construct
DMQTRLG

SEQ ID NO: 71939 - protein, 7 aa, synthetic construct
KMNSQTS

SEQ ID NO: 71940 - protein, 7 aa, synthetic construct
VMKNMKD

SEQ ID NO: 71941 - protein, 7 aa, synthetic construct
STVKPAY

SEQ ID NO: 71942 - protein, 7 aa, synthetic construct
SPMEKQG

SEQ ID NO: 71943 - protein, 7 aa, synthetic construct
IKGTAFF

SEQ ID NO: 71944 - protein, 7 aa, synthetic construct
LFKDYER

SEQ ID NO: 71945 - protein, 7 aa, synthetic construct
TQRQEAG

SEQ ID NO: 71946 - protein, 7 aa, synthetic construct
KQNPSVG

SEQ ID NO: 71947 - protein, 7 aa, synthetic construct
VSAHKES

SEQ ID NO: 71948 - protein, 7 aa, synthetic construct
ADHGKTL

SEQ ID NO: 71949 - protein, 7 aa, synthetic construct
IRDRRDA

SEQ ID NO: 71950 - protein, 7 aa, synthetic construct
GNPKLTA

SEQ ID NO: 71951 - protein, 7 aa, synthetic construct
PDTPVQR

SEQ ID NO: 71952 - protein, 7 aa, synthetic construct
DKGNRAY

SEQ ID NO: 71953 - protein, 7 aa, synthetic construct
EWAPFKE

SEQ ID NO: 71954 - protein, 7 aa, synthetic construct
NIVHAQK

SEQ ID NO: 71955 - protein, 7 aa, synthetic construct
MSAEVRG

SEQ ID NO: 71956 - protein, 7 aa, synthetic construct
TYLNKVS

SEQ ID NO: 71957 - protein, 7 aa, synthetic construct
NTANKVI

SEQ ID NO: 71958 - protein, 7 aa, synthetic construct
YTDGKSP

SEQ ID NO: 71959 - protein, 7 aa, synthetic construct
TSSPLYK

SEQ ID NO: 71960 - protein, 7 aa, synthetic construct
NQWTTMP

SEQ ID NO: 71961 - protein, 7 aa, synthetic construct
ASKYQNE

SEQ ID NO: 71962 - protein, 7 aa, synthetic construct
TPGKQAT

SEQ ID NO: 71963 - protein, 7 aa, synthetic construct
MRMPDLD

SEQ ID NO: 71964 - protein, 7 aa, synthetic construct
NNQPNNQ

SEQ ID NO: 71965 - protein, 7 aa, synthetic construct
HYPPMRE

SEQ ID NO: 71966 - protein, 7 aa, synthetic construct
GFLTNIP

SEQ ID NO: 71967 - protein, 7 aa, synthetic construct
EHKERWG

SEQ ID NO: 71968 - protein, 7 aa, synthetic construct
KNNPEQK

SEQ ID NO: 71969 - protein, 7 aa, synthetic construct
YPAQKSA

SEQ ID NO: 71970 - protein, 7 aa, synthetic construct
STHTGQI

SEQ ID NO: 71971 - protein, 7 aa, synthetic construct
GQANRKD

SEQ ID NO: 71972 - protein, 7 aa, synthetic construct
GDTKLVY

SEQ ID NO: 71973 - protein, 7 aa, synthetic construct
NKQLDVN

SEQ ID NO: 71974 - protein, 7 aa, synthetic construct
VHHPQSK

SEQ ID NO: 71975 - protein, 7 aa, synthetic construct
AQPSAKF

SEQ ID NO: 71976 - protein, 7 aa, synthetic construct
HQPVMKM

SEQ ID NO: 71977 - protein, 7 aa, synthetic construct
VAGHPHR

SEQ ID NO: 71978 - protein, 7 aa, synthetic construct
QKQLATM

SEQ ID NO: 71979 - protein, 7 aa, synthetic construct
AWKGVPN

SEQ ID NO: 71980 - protein, 7 aa, synthetic construct
QMKIMDS

SEQ ID NO: 71981 - protein, 7 aa, synthetic construct
MKGKMID

SEQ ID NO: 71982 - protein, 7 aa, synthetic construct
MGKSMNS

SEQ ID NO: 71983 - protein, 7 aa, synthetic construct
MGKVELF

SEQ ID NO: 71984 - protein, 7 aa, synthetic construct
PRNATNG

SEQ ID NO: 71985 - protein, 7 aa, synthetic construct
EMRQTRM

SEQ ID NO: 71986 - protein, 7 aa, synthetic construct
HAMTIGA

SEQ ID NO: 71987 - protein, 7 aa, synthetic construct
TTMNLLA

SEQ ID NO: 71988 - protein, 7 aa, synthetic construct
KITHNDT

SEQ ID NO: 71989 - protein, 7 aa, synthetic construct
RAHFAEE

SEQ ID NO: 71990 - protein, 7 aa, synthetic construct
QNVIGQH

SEQ ID NO: 71991 - protein, 7 aa, synthetic construct
PTKRNLE

SEQ ID NO: 71992 - protein, 7 aa, synthetic construct
GAGPKAY

SEQ ID NO: 71993 - protein, 7 aa, synthetic construct
FGNYPHA

SEQ ID NO: 71994 - protein, 7 aa, synthetic construct
PTGFNKS

SEQ ID NO: 71995 - protein, 7 aa, synthetic construct
MAMRNSQ

SEQ ID NO: 71996 - protein, 7 aa, synthetic construct
KKDMTTS

SEQ ID NO: 71997 - protein, 7 aa, synthetic construct
LVQGRDG

SEQ ID NO: 71998 - protein, 7 aa, synthetic construct
GFLARVE

SEQ ID NO: 71999 - protein, 7 aa, synthetic construct
EAPMLRG

SEQ ID NO: 72000 - protein, 7 aa, synthetic construct
SINHTHH

SEQ ID NO: 72001 - protein, 7 aa, synthetic construct
LAPKYSL

SEQ ID NO: 72002 - protein, 7 aa, synthetic construct
SGHYAAP

SEQ ID NO: 72003 - protein, 7 aa, synthetic construct
VTHNNMM

SEQ ID NO: 72004 - protein, 7 aa, synthetic construct
KLSLSTS

SEQ ID NO: 72005 - protein, 7 aa, synthetic construct
MYPQGIN

SEQ ID NO: 72006 - protein, 7 aa, synthetic construct
RNPGTYD

SEQ ID NO: 72007 - protein, 7 aa, synthetic construct
AKHEAHR

SEQ ID NO: 72008 - protein, 7 aa, synthetic construct
FKTTDYP

SEQ ID NO: 72009 - protein, 7 aa, synthetic construct
WRNITNP

SEQ ID NO: 72010 - protein, 7 aa, synthetic construct
THREGDI

SEQ ID NO: 72011 - protein, 7 aa, synthetic construct
QERSTRD

SEQ ID NO: 72012 - protein, 7 aa, synthetic construct
AAPLLVS

SEQ ID NO: 72013 - protein, 7 aa, synthetic construct
ADTHKNI

SEQ ID NO: 72014 - protein, 7 aa, synthetic construct
DNKHREG

SEQ ID NO: 72015 - protein, 7 aa, synthetic construct
DKRSATD

SEQ ID NO: 72016 - protein, 7 aa, synthetic construct
RDKNVIS

SEQ ID NO: 72017 - protein, 7 aa, synthetic construct
KQSSTEH

SEQ ID NO: 72018 - protein, 7 aa, synthetic construct
GTKPTHL

SEQ ID NO: 72019 - protein, 7 aa, synthetic construct
KPDKGIT

SEQ ID NO: 72020 - protein, 7 aa, synthetic construct
KSQPNDL

SEQ ID NO: 72021 - protein, 7 aa, synthetic construct
ISPTVTP

SEQ ID NO: 72022 - protein, 7 aa, synthetic construct
GINSGSN

SEQ ID NO: 72023 - protein, 7 aa, synthetic construct
KIFQAKD

SEQ ID NO: 72024 - protein, 7 aa, synthetic construct
VVNGPMH

SEQ ID NO: 72025 - protein, 7 aa, synthetic construct
ANSKPVS

SEQ ID NO: 72026 - protein, 7 aa, synthetic construct
TQNDRMS

SEQ ID NO: 72027 - protein, 7 aa, synthetic construct
SPIKVEF

SEQ ID NO: 72028 - protein, 7 aa, synthetic construct
NKMNEFR

SEQ ID NO: 72029 - protein, 7 aa, synthetic construct
KEKDSNA

SEQ ID NO: 72030 - protein, 7 aa, synthetic construct
NHRDTDG

SEQ ID NO: 72031 - protein, 7 aa, synthetic construct
LSPVAPS

SEQ ID NO: 72032 - protein, 7 aa, synthetic construct
GKNSAYV

SEQ ID NO: 72033 - protein, 7 aa, synthetic construct
LKAAQEN

SEQ ID NO: 72034 - protein, 7 aa, synthetic construct
SQRTPSA

SEQ ID NO: 72035 - protein, 7 aa, synthetic construct
HFVEING

SEQ ID NO: 72036 - protein, 7 aa, synthetic construct
KQDNRPV

SEQ ID NO: 72037 - protein, 7 aa, synthetic construct
NKNSSTT

SEQ ID NO: 72038 - protein, 7 aa, synthetic construct
KFADSVS

SEQ ID NO: 72039 - protein, 7 aa, synthetic construct
TGTSRGM

SEQ ID NO: 72040 - protein, 7 aa, synthetic construct
QTPKGDK

SEQ ID NO: 72041 - protein, 7 aa, synthetic construct
GPPAHSV

SEQ ID NO: 72042 - protein, 7 aa, synthetic construct
GVQKTVL

SEQ ID NO: 72043 - protein, 7 aa, synthetic construct
MHTVQQS

SEQ ID NO: 72044 - protein, 7 aa, synthetic construct
QPPTQAG

SEQ ID NO: 72045 - protein, 7 aa, synthetic construct
KPDWQPD

SEQ ID NO: 72046 - protein, 7 aa, synthetic construct
PAYNKNP

SEQ ID NO: 72047 - protein, 7 aa, synthetic construct
IRHGTFA

SEQ ID NO: 72048 - protein, 7 aa, synthetic construct
MGGKQNP

SEQ ID NO: 72049 - protein, 7 aa, synthetic construct
YKTTAQS

SEQ ID NO: 72050 - protein, 7 aa, synthetic construct
NAKSQQG

SEQ ID NO: 72051 - protein, 7 aa, synthetic construct
GQGRQGL

SEQ ID NO: 72052 - protein, 7 aa, synthetic construct
HLHIPER

SEQ ID NO: 72053 - protein, 7 aa, synthetic construct
NTKDLQM

SEQ ID NO: 72054 - protein, 7 aa, synthetic construct
KASQSHE

SEQ ID NO: 72055 - protein, 7 aa, synthetic construct
SDRFPRT

SEQ ID NO: 72056 - protein, 7 aa, synthetic construct
DRRVPTV

SEQ ID NO: 72057 - protein, 7 aa, synthetic construct
GKEVHRN

SEQ ID NO: 72058 - protein, 7 aa, synthetic construct
TKITQEE

SEQ ID NO: 72059 - protein, 7 aa, synthetic construct
MKEQINL

SEQ ID NO: 72060 - protein, 7 aa, synthetic construct
KTTIHHE

SEQ ID NO: 72061 - protein, 7 aa, synthetic construct
STKPSNP

SEQ ID NO: 72062 - protein, 7 aa, synthetic construct
QQRLTNQ

SEQ ID NO: 72063 - protein, 7 aa, synthetic construct
KPSVTGA

SEQ ID NO: 72064 - protein, 7 aa, synthetic construct
ESVGKQA

SEQ ID NO: 72065 - protein, 7 aa, synthetic construct
KQNSATP

SEQ ID NO: 72066 - protein, 7 aa, synthetic construct
RTGNSDF

SEQ ID NO: 72067 - protein, 7 aa, synthetic construct
NSGKQFN

SEQ ID NO: 72068 - protein, 7 aa, synthetic construct
QYNERPA

SEQ ID NO: 72069 - protein, 7 aa, synthetic construct
YNTSKMG

SEQ ID NO: 72070 - protein, 7 aa, synthetic construct
FYRTASD

SEQ ID NO: 72071 - protein, 7 aa, synthetic construct
FPDKYGK

SEQ ID NO: 72072 - protein, 7 aa, synthetic construct
NPPFMPE

SEQ ID NO: 72073 - protein, 7 aa, synthetic construct
RLNITQT

SEQ ID NO: 72074 - protein, 7 aa, synthetic construct
EKRIGAM

SEQ ID NO: 72075 - protein, 7 aa, synthetic construct
KMEDRKE

SEQ ID NO: 72076 - protein, 7 aa, synthetic construct
DHRQKYV

SEQ ID NO: 72077 - protein, 7 aa, synthetic construct
TKSVSQA

SEQ ID NO: 72078 - protein, 7 aa, synthetic construct
STLRFKE

SEQ ID NO: 72079 - protein, 7 aa, synthetic construct
GFKKDQF

SEQ ID NO: 72080 - protein, 7 aa, synthetic construct
VAKLQTS

SEQ ID NO: 72081 - protein, 7 aa, synthetic construct
RNAQEKV

SEQ ID NO: 72082 - protein, 7 aa, synthetic construct
RPAREMF

SEQ ID NO: 72083 - protein, 7 aa, synthetic construct
EFDVKRP

SEQ ID NO: 72084 - protein, 7 aa, synthetic construct
HQNKFEM

SEQ ID NO: 72085 - protein, 7 aa, synthetic construct
NSQGKFG

SEQ ID NO: 72086 - protein, 7 aa, synthetic construct
KDHKDWA

SEQ ID NO: 72087 - protein, 7 aa, synthetic construct
SNFVMAE

SEQ ID NO: 72088 - protein, 7 aa, synthetic construct
LSMGMQD

SEQ ID NO: 72089 - protein, 7 aa, synthetic construct
DTTKIVY

SEQ ID NO: 72090 - protein, 7 aa, synthetic construct
IELTGRA

SEQ ID NO: 72091 - protein, 7 aa, synthetic construct
KKDAPGN

SEQ ID NO: 72092 - protein, 7 aa, synthetic construct
VKSNASP

SEQ ID NO: 72093 - protein, 7 aa, synthetic construct
YYLAKSE

SEQ ID NO: 72094 - protein, 7 aa, synthetic construct
LAASDKN

SEQ ID NO: 72095 - protein, 7 aa, synthetic construct
WTKGIPL

SEQ ID NO: 72096 - protein, 7 aa, synthetic construct
MLTPIQN

SEQ ID NO: 72097 - protein, 7 aa, synthetic construct
QSKHGQF

SEQ ID NO: 72098 - protein, 7 aa, synthetic construct
LSKGDNN

SEQ ID NO: 72099 - protein, 7 aa, synthetic construct
NVTAPKA

SEQ ID NO: 72100 - protein, 7 aa, synthetic construct
DRANGNT

SEQ ID NO: 72101 - protein, 7 aa, synthetic construct
PTIHAKE

SEQ ID NO: 72102 - protein, 7 aa, synthetic construct
VTAGVKP

SEQ ID NO: 72103 - protein, 7 aa, synthetic construct
HSNGMVR

SEQ ID NO: 72104 - protein, 7 aa, synthetic construct
TMQSKPV

SEQ ID NO: 72105 - protein, 7 aa, synthetic construct
LKEKNIM

SEQ ID NO: 72106 - protein, 7 aa, synthetic construct
DKGYVVS

SEQ ID NO: 72107 - protein, 7 aa, synthetic construct
IEGVIPR

SEQ ID NO: 72108 - protein, 7 aa, synthetic construct
DPPSVHL

SEQ ID NO: 72109 - protein, 7 aa, synthetic construct
QLTHMGP

SEQ ID NO: 72110 - protein, 7 aa, synthetic construct
LIETHLK

SEQ ID NO: 72111 - protein, 7 aa, synthetic construct
TPNSANT

SEQ ID NO: 72112 - protein, 7 aa, synthetic construct
KQPMVSI

SEQ ID NO: 72113 - protein, 7 aa, synthetic construct
KPEKSAG

SEQ ID NO: 72114 - protein, 7 aa, synthetic construct
KTGGNGI

SEQ ID NO: 72115 - protein, 7 aa, synthetic construct
KLVTADP

SEQ ID NO: 72116 - protein, 7 aa, synthetic construct
LGGNAQT

SEQ ID NO: 72117 - protein, 7 aa, synthetic construct
AFNSKSG

SEQ ID NO: 72118 - protein, 7 aa, synthetic construct
YKGNVAS

SEQ ID NO: 72119 - protein, 7 aa, synthetic construct
NKPGSGA

SEQ ID NO: 72120 - protein, 7 aa, synthetic construct
KEPRIFN

SEQ ID NO: 72121 - protein, 7 aa, synthetic construct
MGMQLIS

SEQ ID NO: 72122 - protein, 7 aa, synthetic construct
YNVNRSQ

SEQ ID NO: 72123 - protein, 7 aa, synthetic construct
MPKAQVD

SEQ ID NO: 72124 - protein, 7 aa, synthetic construct
RRNGESA

SEQ ID NO: 72125 - protein, 7 aa, synthetic construct
VMNGQKD

SEQ ID NO: 72126 - protein, 7 aa, synthetic construct
IFKQSAV

SEQ ID NO: 72127 - protein, 7 aa, synthetic construct
GMQPQSK

SEQ ID NO: 72128 - protein, 7 aa, synthetic construct
LTKFYPQ

SEQ ID NO: 72129 - protein, 7 aa, synthetic construct
AADFKHQ

SEQ ID NO: 72130 - protein, 7 aa, synthetic construct
YVKGWQE

SEQ ID NO: 72131 - protein, 7 aa, synthetic construct
VQKTTSA

SEQ ID NO: 72132 - protein, 7 aa, synthetic construct
VHRDEKN

SEQ ID NO: 72133 - protein, 7 aa, synthetic construct
NGFIVAG

SEQ ID NO: 72134 - protein, 7 aa, synthetic construct
QLRQNDM

SEQ ID NO: 72135 - protein, 7 aa, synthetic construct
ISARLHN

SEQ ID NO: 72136 - protein, 7 aa, synthetic construct
ERKDMQT

SEQ ID NO: 72137 - protein, 7 aa, synthetic construct
YNTQKNP

SEQ ID NO: 72138 - protein, 7 aa, synthetic construct
SKSNVNP

SEQ ID NO: 72139 - protein, 7 aa, synthetic construct
VGSGQGP

SEQ ID NO: 72140 - protein, 7 aa, synthetic construct
TPKINAG

SEQ ID NO: 72141 - protein, 7 aa, synthetic construct
TGRQNDY

SEQ ID NO: 72142 - protein, 7 aa, synthetic construct
KYPPTNS

SEQ ID NO: 72143 - protein, 7 aa, synthetic construct
GQPADGK

SEQ ID NO: 72144 - protein, 7 aa, synthetic construct
SSYTHQD

SEQ ID NO: 72145 - protein, 7 aa, synthetic construct
NYNGIDG

SEQ ID NO: 72146 - protein, 7 aa, synthetic construct
SYEKSGP

SEQ ID NO: 72147 - protein, 7 aa, synthetic construct
RSFLNAE

SEQ ID NO: 72148 - protein, 7 aa, synthetic construct
QQYHTST

SEQ ID NO: 72149 - protein, 7 aa, synthetic construct
KKDMVIH

SEQ ID NO: 72150 - protein, 7 aa, synthetic construct
RNHQQEF

SEQ ID NO: 72151 - protein, 7 aa, synthetic construct
LPHVRGI

SEQ ID NO: 72152 - protein, 7 aa, synthetic construct
EKQIKVV

SEQ ID NO: 72153 - protein, 7 aa, synthetic construct
GPNRIMG

SEQ ID NO: 72154 - protein, 7 aa, synthetic construct
GNSTWNS

SEQ ID NO: 72155 - protein, 7 aa, synthetic construct
DNSIAAG

SEQ ID NO: 72156 - protein, 7 aa, synthetic construct
DKFPRQS

SEQ ID NO: 72157 - protein, 7 aa, synthetic construct
MTFTHEK

SEQ ID NO: 72158 - protein, 7 aa, synthetic construct
PKSTAPQ

SEQ ID NO: 72159 - protein, 7 aa, synthetic construct
KEALVPH

SEQ ID NO: 72160 - protein, 7 aa, synthetic construct
FDPKGLR

SEQ ID NO: 72161 - protein, 7 aa, synthetic construct
TQPRGQT

SEQ ID NO: 72162 - protein, 7 aa, synthetic construct
EQKQWKQ

SEQ ID NO: 72163 - protein, 7 aa, synthetic construct
SSKNTTS

SEQ ID NO: 72164 - protein, 7 aa, synthetic construct
KTKNHED

SEQ ID NO: 72165 - protein, 7 aa, synthetic construct
QINGNLG

SEQ ID NO: 72166 - protein, 7 aa, synthetic construct
FNLQPGS

SEQ ID NO: 72167 - protein, 7 aa, synthetic construct
YHDGMTK

SEQ ID NO: 72168 - protein, 7 aa, synthetic construct
GAYKEGA

SEQ ID NO: 72169 - protein, 7 aa, synthetic construct
AANGRQD

SEQ ID NO: 72170 - protein, 7 aa, synthetic construct
YSERYPH

SEQ ID NO: 72171 - protein, 7 aa, synthetic construct
LPQFPNG

SEQ ID NO: 72172 - protein, 7 aa, synthetic construct
NSGLQKH

SEQ ID NO: 72173 - protein, 7 aa, synthetic construct
VKKESYL

SEQ ID NO: 72174 - protein, 7 aa, synthetic construct
SFQEGGH

SEQ ID NO: 72175 - protein, 7 aa, synthetic construct
QAVNKID

SEQ ID NO: 72176 - protein, 7 aa, synthetic construct
NGRQNNA

SEQ ID NO: 72177 - protein, 7 aa, synthetic construct
YHGNNFG

SEQ ID NO: 72178 - protein, 7 aa, synthetic construct
LNAVYTK

SEQ ID NO: 72179 - protein, 7 aa, synthetic construct
NRAHSEG

SEQ ID NO: 72180 - protein, 7 aa, synthetic construct
HNSILPQ

SEQ ID NO: 72181 - protein, 7 aa, synthetic construct
TSVAHMP

SEQ ID NO: 72182 - protein, 7 aa, synthetic construct
TAMNTQK

SEQ ID NO: 72183 - protein, 7 aa, synthetic construct
PSKTQSA

SEQ ID NO: 72184 - protein, 7 aa, synthetic construct
DGQHRMV

SEQ ID NO: 72185 - protein, 7 aa, synthetic construct
QPANVIS

SEQ ID NO: 72186 - protein, 7 aa, synthetic construct
EKYSKVL

SEQ ID NO: 72187 - protein, 7 aa, synthetic construct
NPYKDEQ

SEQ ID NO: 72188 - protein, 7 aa, synthetic construct
NKGVTLH

SEQ ID NO: 72189 - protein, 7 aa, synthetic construct
FHTGKSM

SEQ ID NO: 72190 - protein, 7 aa, synthetic construct
TYNHKGH

SEQ ID NO: 72191 - protein, 7 aa, synthetic construct
ITKPWND

SEQ ID NO: 72192 - protein, 7 aa, synthetic construct
RATSGAQ

SEQ ID NO: 72193 - protein, 7 aa, synthetic construct
LESHMQS

SEQ ID NO: 72194 - protein, 7 aa, synthetic construct
AWAKNGD

SEQ ID NO: 72195 - protein, 7 aa, synthetic construct
PEPFKQA

SEQ ID NO: 72196 - protein, 7 aa, synthetic construct
RQSIAYN

SEQ ID NO: 72197 - protein, 7 aa, synthetic construct
PPKSVAS

SEQ ID NO: 72198 - protein, 7 aa, synthetic construct
LSMQRSS

SEQ ID NO: 72199 - protein, 7 aa, synthetic construct
TAARVEG

SEQ ID NO: 72200 - protein, 7 aa, synthetic construct
KMASSAP

SEQ ID NO: 72201 - protein, 7 aa, synthetic construct
RDHVHQP

SEQ ID NO: 72202 - protein, 7 aa, synthetic construct
KEDQRGL

SEQ ID NO: 72203 - protein, 7 aa, synthetic construct
DRGKITY

SEQ ID NO: 72204 - protein, 7 aa, synthetic construct
YYNEKKI

SEQ ID NO: 72205 - protein, 7 aa, synthetic construct
PTANTSL

SEQ ID NO: 72206 - protein, 7 aa, synthetic construct
GTVKQAI

SEQ ID NO: 72207 - protein, 7 aa, synthetic construct
GQAKIVA

SEQ ID NO: 72208 - protein, 7 aa, synthetic construct
NKNAGGN

SEQ ID NO: 72209 - protein, 7 aa, synthetic construct
MREVVNH

SEQ ID NO: 72210 - protein, 7 aa, synthetic construct
WVNKSDK

SEQ ID NO: 72211 - protein, 7 aa, synthetic construct
TGRTANG

SEQ ID NO: 72212 - protein, 7 aa, synthetic construct
RTLAGLA

SEQ ID NO: 72213 - protein, 7 aa, synthetic construct
VRSTVNG

SEQ ID NO: 72214 - protein, 7 aa, synthetic construct
RSVDNLM

SEQ ID NO: 72215 - protein, 7 aa, synthetic construct
ERTMAHG

SEQ ID NO: 72216 - protein, 7 aa, synthetic construct
RYKAESN

SEQ ID NO: 72217 - protein, 7 aa, synthetic construct
HGSMMVV

SEQ ID NO: 72218 - protein, 7 aa, synthetic construct
TTHDHHA

SEQ ID NO: 72219 - protein, 7 aa, synthetic construct
WNNKIPQ

SEQ ID NO: 72220 - protein, 7 aa, synthetic construct
MGKITMG

SEQ ID NO: 72221 - protein, 7 aa, synthetic construct
QTQHLGA

SEQ ID NO: 72222 - protein, 7 aa, synthetic construct
NHLPMVA

SEQ ID NO: 72223 - protein, 7 aa, synthetic construct
DGHGVRT

SEQ ID NO: 72224 - protein, 7 aa, synthetic construct
SLRGVHD

SEQ ID NO: 72225 - protein, 7 aa, synthetic construct
HHSGLKF

SEQ ID NO: 72226 - protein, 7 aa, synthetic construct
QSSTTYI

SEQ ID NO: 72227 - protein, 7 aa, synthetic construct
TGQKWQT

SEQ ID NO: 72228 - protein, 7 aa, synthetic construct
NKMTNGA

SEQ ID NO: 72229 - protein, 7 aa, synthetic construct
WAAETKP

SEQ ID NO: 72230 - protein, 7 aa, synthetic construct
ILIKSAT

SEQ ID NO: 72231 - protein, 7 aa, synthetic construct
GVNKLGV

SEQ ID NO: 72232 - protein, 7 aa, synthetic construct
NDNAGKF

SEQ ID NO: 72233 - protein, 7 aa, synthetic construct
WGVMFKE

SEQ ID NO: 72234 - protein, 7 aa, synthetic construct
TTLAKGE

SEQ ID NO: 72235 - protein, 7 aa, synthetic construct
EFKVTGL

SEQ ID NO: 72236 - protein, 7 aa, synthetic construct
QKLMPTP

SEQ ID NO: 72237 - protein, 7 aa, synthetic construct
TMSKYQL

SEQ ID NO: 72238 - protein, 7 aa, synthetic construct
KFLDTNI

SEQ ID NO: 72239 - protein, 7 aa, synthetic construct
PTQMKPV

SEQ ID NO: 72240 - protein, 7 aa, synthetic construct
TKIEKTP

SEQ ID NO: 72241 - protein, 7 aa, synthetic construct
PPVQHAL

SEQ ID NO: 72242 - protein, 7 aa, synthetic construct
GGGRENG

SEQ ID NO: 72243 - protein, 7 aa, synthetic construct
QVYGQES

SEQ ID NO: 72244 - protein, 7 aa, synthetic construct
KLFTDSM

SEQ ID NO: 72245 - protein, 7 aa, synthetic construct
GAANKGS

SEQ ID NO: 72246 - protein, 7 aa, synthetic construct
KAAIVPE

SEQ ID NO: 72247 - protein, 7 aa, synthetic construct
NKGNTVA

SEQ ID NO: 72248 - protein, 7 aa, synthetic construct
TNDMDLS

SEQ ID NO: 72249 - protein, 7 aa, synthetic construct
GMVSSNV

SEQ ID NO: 72250 - protein, 7 aa, synthetic construct
YNKTSNS

SEQ ID NO: 72251 - protein, 7 aa, synthetic construct
RDAHNYK

SEQ ID NO: 72252 - protein, 7 aa, synthetic construct
NMYLKEG

SEQ ID NO: 72253 - protein, 7 aa, synthetic construct
KVNSMLM

SEQ ID NO: 72254 - protein, 7 aa, synthetic construct
KNYNVAV

SEQ ID NO: 72255 - protein, 7 aa, synthetic construct
VLGTTEK

SEQ ID NO: 72256 - protein, 7 aa, synthetic construct
INKHHSL

SEQ ID NO: 72257 - protein, 7 aa, synthetic construct
LKLRMPD

SEQ ID NO: 72258 - protein, 7 aa, synthetic construct
GMPSLRS

SEQ ID NO: 72259 - protein, 7 aa, synthetic construct
QTGVMKV

SEQ ID NO: 72260 - protein, 7 aa, synthetic construct
HTNTAAV

SEQ ID NO: 72261 - protein, 7 aa, synthetic construct
KPTIHSN

SEQ ID NO: 72262 - protein, 7 aa, synthetic construct
QNSKSGP

SEQ ID NO: 72263 - protein, 7 aa, synthetic construct
AITQTVA

SEQ ID NO: 72264 - protein, 7 aa, synthetic construct
LGKGVPT

SEQ ID NO: 72265 - protein, 7 aa, synthetic construct
VHTKNGD

SEQ ID NO: 72266 - protein, 7 aa, synthetic construct
VIGSNNQ

SEQ ID NO: 72267 - protein, 7 aa, synthetic construct
FKSNDGG

SEQ ID NO: 72268 - protein, 7 aa, synthetic construct
IYNAHKD

SEQ ID NO: 72269 - protein, 7 aa, synthetic construct
SHRVANA

SEQ ID NO: 72270 - protein, 7 aa, synthetic construct
LQMRQHQ

SEQ ID NO: 72271 - protein, 7 aa, synthetic construct
KTSTQSA

SEQ ID NO: 72272 - protein, 7 aa, synthetic construct
KVAVLSG

SEQ ID NO: 72273 - protein, 7 aa, synthetic construct
FKNGGNS

SEQ ID NO: 72274 - protein, 7 aa, synthetic construct
TLYITDK

SEQ ID NO: 72275 - protein, 7 aa, synthetic construct
EEGKKFS

SEQ ID NO: 72276 - protein, 7 aa, synthetic construct
LQKVDAP

SEQ ID NO: 72277 - protein, 7 aa, synthetic construct
RAVSNTD

SEQ ID NO: 72278 - protein, 7 aa, synthetic construct
VYNKETS

SEQ ID NO: 72279 - protein, 7 aa, synthetic construct
PQAAVLG

SEQ ID NO: 72280 - protein, 7 aa, synthetic construct
VTKSQSW

SEQ ID NO: 72281 - protein, 7 aa, synthetic construct
TVQMKVV

SEQ ID NO: 72282 - protein, 7 aa, synthetic construct
TNTNRAA

SEQ ID NO: 72283 - protein, 7 aa, synthetic construct
PPEKAAH

SEQ ID NO: 72284 - protein, 7 aa, synthetic construct
ELIKTNL

SEQ ID NO: 72285 - protein, 7 aa, synthetic construct
KVSNTQA

SEQ ID NO: 72286 - protein, 7 aa, synthetic construct
PNAPHGW

SEQ ID NO: 72287 - protein, 7 aa, synthetic construct
GGRQLHV

SEQ ID NO: 72288 - protein, 7 aa, synthetic construct
GFLHASG

SEQ ID NO: 72289 - protein, 7 aa, synthetic construct
KGQVQGP

SEQ ID NO: 72290 - protein, 7 aa, synthetic construct
RVVALDQ

SEQ ID NO: 72291 - protein, 7 aa, synthetic construct
APAYNKS

SEQ ID NO: 72292 - protein, 7 aa, synthetic construct
VTVNKFS

SEQ ID NO: 72293 - protein, 7 aa, synthetic construct
QGNGSNT

SEQ ID NO: 72294 - protein, 7 aa, synthetic construct
IIRNDRE

SEQ ID NO: 72295 - protein, 7 aa, synthetic construct
EPGTRQS

SEQ ID NO: 72296 - protein, 7 aa, synthetic construct
AFKEYPG

SEQ ID NO: 72297 - protein, 7 aa, synthetic construct
LKIGIGT

SEQ ID NO: 72298 - protein, 7 aa, synthetic construct
IQSIHTG

SEQ ID NO: 72299 - protein, 7 aa, synthetic construct
LEKKAAW

SEQ ID NO: 72300 - protein, 7 aa, synthetic construct
KQDPHFV

SEQ ID NO: 72301 - protein, 7 aa, synthetic construct
LGAHRTN

SEQ ID NO: 72302 - protein, 7 aa, synthetic construct
ATRAPQV

SEQ ID NO: 72303 - protein, 7 aa, synthetic construct
RSAVNPE

SEQ ID NO: 72304 - protein, 7 aa, synthetic construct
VQSTSFI

SEQ ID NO: 72305 - protein, 7 aa, synthetic construct
GKDSNVG

SEQ ID NO: 72306 - protein, 7 aa, synthetic construct
VGRTPMM

SEQ ID NO: 72307 - protein, 7 aa, synthetic construct
VNNATHP

SEQ ID NO: 72308 - protein, 7 aa, synthetic construct
KDKSSNT

SEQ ID NO: 72309 - protein, 7 aa, synthetic construct
FGKTQQA

SEQ ID NO: 72310 - protein, 7 aa, synthetic construct
LMTAEVS

SEQ ID NO: 72311 - protein, 7 aa, synthetic construct
GRSAGTT

SEQ ID NO: 72312 - protein, 7 aa, synthetic construct
LGEFGKF

SEQ ID NO: 72313 - protein, 7 aa, synthetic construct
GAHMVAV

SEQ ID NO: 72314 - protein, 7 aa, synthetic construct
KFPNENP

SEQ ID NO: 72315 - protein, 7 aa, synthetic construct
SNSVSIK

SEQ ID NO: 72316 - protein, 7 aa, synthetic construct
NLNNGLP

SEQ ID NO: 72317 - protein, 7 aa, synthetic construct
YNGAKGI

SEQ ID NO: 72318 - protein, 7 aa, synthetic construct
KPTNNVH

SEQ ID NO: 72319 - protein, 7 aa, synthetic construct
YRKYEEH

SEQ ID NO: 72320 - protein, 7 aa, synthetic construct
KSTGTFA

SEQ ID NO: 72321 - protein, 7 aa, synthetic construct
KTAAARD

SEQ ID NO: 72322 - protein, 7 aa, synthetic construct
SNQKSQA

SEQ ID NO: 72323 - protein, 7 aa, synthetic construct
IERDTRM

SEQ ID NO: 72324 - protein, 7 aa, synthetic construct
RADKGQF

SEQ ID NO: 72325 - protein, 7 aa, synthetic construct
YPRYDKG

SEQ ID NO: 72326 - protein, 7 aa, synthetic construct
RIARTEF

SEQ ID NO: 72327 - protein, 7 aa, synthetic construct
IALHNQV

SEQ ID NO: 72328 - protein, 7 aa, synthetic construct
EYRRQDV

SEQ ID NO: 72329 - protein, 7 aa, synthetic construct
NMPVWNE

SEQ ID NO: 72330 - protein, 7 aa, synthetic construct
DMKGHLR

SEQ ID NO: 72331 - protein, 7 aa, synthetic construct
NTYYQEK

SEQ ID NO: 72332 - protein, 7 aa, synthetic construct
MAYSQDK

SEQ ID NO: 72333 - protein, 7 aa, synthetic construct
PMHRVHE

SEQ ID NO: 72334 - protein, 7 aa, synthetic construct
KADKIGS

SEQ ID NO: 72335 - protein, 7 aa, synthetic construct
KPSSNYD

SEQ ID NO: 72336 - protein, 7 aa, synthetic construct
TQAKPMM

SEQ ID NO: 72337 - protein, 7 aa, synthetic construct
SPRAMAG

SEQ ID NO: 72338 - protein, 7 aa, synthetic construct
QHAGRAN

SEQ ID NO: 72339 - protein, 7 aa, synthetic construct
DLAKHIA

SEQ ID NO: 72340 - protein, 7 aa, synthetic construct
NSKSMAP

SEQ ID NO: 72341 - protein, 7 aa, synthetic construct
NIPGEIW

SEQ ID NO: 72342 - protein, 7 aa, synthetic construct
KTSKPGG

SEQ ID NO: 72343 - protein, 7 aa, synthetic construct
RFTMVSE

SEQ ID NO: 72344 - protein, 7 aa, synthetic construct
KEGKNFN

SEQ ID NO: 72345 - protein, 7 aa, synthetic construct
RSQTTGV

SEQ ID NO: 72346 - protein, 7 aa, synthetic construct
KYESYQG

SEQ ID NO: 72347 - protein, 7 aa, synthetic construct
KLQKDTL

SEQ ID NO: 72348 - protein, 7 aa, synthetic construct
NHFNPNK

SEQ ID NO: 72349 - protein, 7 aa, synthetic construct
NWGEQQM

SEQ ID NO: 72350 - protein, 7 aa, synthetic construct
WHVKKES

SEQ ID NO: 72351 - protein, 7 aa, synthetic construct
GIRENFE

SEQ ID NO: 72352 - protein, 7 aa, synthetic construct
KPNTGPA

SEQ ID NO: 72353 - protein, 7 aa, synthetic construct
HKYNDHH

SEQ ID NO: 72354 - protein, 7 aa, synthetic construct
GHVKSMP

SEQ ID NO: 72355 - protein, 7 aa, synthetic construct
KYPNGMA

SEQ ID NO: 72356 - protein, 7 aa, synthetic construct
HSFIVKD

SEQ ID NO: 72357 - protein, 7 aa, synthetic construct
IGRSFNN

SEQ ID NO: 72358 - protein, 7 aa, synthetic construct
QRSQMDT

SEQ ID NO: 72359 - protein, 7 aa, synthetic construct
RVRMQDI

SEQ ID NO: 72360 - protein, 7 aa, synthetic construct
NARPVNP

SEQ ID NO: 72361 - protein, 7 aa, synthetic construct
SNSHTAE

SEQ ID NO: 72362 - protein, 7 aa, synthetic construct
GATPSVF

SEQ ID NO: 72363 - protein, 7 aa, synthetic construct
VANKQFM

SEQ ID NO: 72364 - protein, 7 aa, synthetic construct
HHNGKYG

SEQ ID NO: 72365 - protein, 7 aa, synthetic construct
MGSTFPL

SEQ ID NO: 72366 - protein, 7 aa, synthetic construct
NRQTQAG

SEQ ID NO: 72367 - protein, 7 aa, synthetic construct
VRNMPAH

SEQ ID NO: 72368 - protein, 7 aa, synthetic construct
SDHANKA

SEQ ID NO: 72369 - protein, 7 aa, synthetic construct
NMMSPMT

SEQ ID NO: 72370 - protein, 7 aa, synthetic construct
KGQTMTA

SEQ ID NO: 72371 - protein, 7 aa, synthetic construct
VTVPMSQ

SEQ ID NO: 72372 - protein, 7 aa, synthetic construct
IFEQRQP

SEQ ID NO: 72373 - protein, 7 aa, synthetic construct
GHMSSLS

SEQ ID NO: 72374 - protein, 7 aa, synthetic construct
HVHYVTD

SEQ ID NO: 72375 - protein, 7 aa, synthetic construct
EGRQNPS

SEQ ID NO: 72376 - protein, 7 aa, synthetic construct
LKPMMGP

SEQ ID NO: 72377 - protein, 7 aa, synthetic construct
NNHGVMR

SEQ ID NO: 72378 - protein, 7 aa, synthetic construct
SKTAADQ

SEQ ID NO: 72379 - protein, 7 aa, synthetic construct
VKSGHLY

SEQ ID NO: 72380 - protein, 7 aa, synthetic construct
TGVVVHH

SEQ ID NO: 72381 - protein, 7 aa, synthetic construct
GRADMIR

SEQ ID NO: 72382 - protein, 7 aa, synthetic construct
FKPPSMG

SEQ ID NO: 72383 - protein, 7 aa, synthetic construct
SFSDPYK

SEQ ID NO: 72384 - protein, 7 aa, synthetic construct
QHSSAKE

SEQ ID NO: 72385 - protein, 7 aa, synthetic construct
EKLHYAK

SEQ ID NO: 72386 - protein, 7 aa, synthetic construct
LDGRQVN

SEQ ID NO: 72387 - protein, 7 aa, synthetic construct
PTPHRFE

SEQ ID NO: 72388 - protein, 7 aa, synthetic construct
KAFTVES

SEQ ID NO: 72389 - protein, 7 aa, synthetic construct
FGNDGTG

SEQ ID NO: 72390 - protein, 7 aa, synthetic construct
GKGQMGI

SEQ ID NO: 72391 - protein, 7 aa, synthetic construct
EKDKITH

SEQ ID NO: 72392 - protein, 7 aa, synthetic construct
AKAESAY

SEQ ID NO: 72393 - protein, 7 aa, synthetic construct
QMYLKHE

SEQ ID NO: 72394 - protein, 7 aa, synthetic construct
NQQQLAS

SEQ ID NO: 72395 - protein, 7 aa, synthetic construct
MGGHSTH

SEQ ID NO: 72396 - protein, 7 aa, synthetic construct
RTPDTKI

SEQ ID NO: 72397 - protein, 7 aa, synthetic construct
GTGMNRY

SEQ ID NO: 72398 - protein, 7 aa, synthetic construct
FHNSPPR

SEQ ID NO: 72399 - protein, 7 aa, synthetic construct
GHAVSYT

SEQ ID NO: 72400 - protein, 7 aa, synthetic construct
YRSKDGL

SEQ ID NO: 72401 - protein, 7 aa, synthetic construct
PEKVARH

SEQ ID NO: 72402 - protein, 7 aa, synthetic construct
RDRIADN

SEQ ID NO: 72403 - protein, 7 aa, synthetic construct
KLGSLMV

SEQ ID NO: 72404 - protein, 7 aa, synthetic construct
SQHTGFV

SEQ ID NO: 72405 - protein, 7 aa, synthetic construct
GISKAGA

SEQ ID NO: 72406 - protein, 7 aa, synthetic construct
PLRTTLD

SEQ ID NO: 72407 - protein, 7 aa, synthetic construct
PQGQKQG

SEQ ID NO: 72408 - protein, 7 aa, synthetic construct
AALRNSA

SEQ ID NO: 72409 - protein, 7 aa, synthetic construct
LHPGMHK

SEQ ID NO: 72410 - protein, 7 aa, synthetic construct
RVSANTP

SEQ ID NO: 72411 - protein, 7 aa, synthetic construct
MNNPRQG

SEQ ID NO: 72412 - protein, 7 aa, synthetic construct
GKSTAGN

SEQ ID NO: 72413 - protein, 7 aa, synthetic construct
LQTHVEQ

SEQ ID NO: 72414 - protein, 7 aa, synthetic construct
QHGSPRF

SEQ ID NO: 72415 - protein, 7 aa, synthetic construct
PTRMAGT

SEQ ID NO: 72416 - protein, 7 aa, synthetic construct
NKSQNPA

SEQ ID NO: 72417 - protein, 7 aa, synthetic construct
KNSPQSP

SEQ ID NO: 72418 - protein, 7 aa, synthetic construct
SGVYKTM

SEQ ID NO: 72419 - protein, 7 aa, synthetic construct
VKGPDMH

SEQ ID NO: 72420 - protein, 7 aa, synthetic construct
IYQMETK

SEQ ID NO: 72421 - protein, 7 aa, synthetic construct
TIANILP

SEQ ID NO: 72422 - protein, 7 aa, synthetic construct
SPGVKPS

SEQ ID NO: 72423 - protein, 7 aa, synthetic construct
LRGPHTH

SEQ ID NO: 72424 - protein, 7 aa, synthetic construct
KSSMTNS

SEQ ID NO: 72425 - protein, 7 aa, synthetic construct
VFPPTAM

SEQ ID NO: 72426 - protein, 7 aa, synthetic construct
QKEHVTQ

SEQ ID NO: 72427 - protein, 7 aa, synthetic construct
KWIEKDT

SEQ ID NO: 72428 - protein, 7 aa, synthetic construct
NMNARVG

SEQ ID NO: 72429 - protein, 7 aa, synthetic construct
QAMFAER

SEQ ID NO: 72430 - protein, 7 aa, synthetic construct
YVNKELP

SEQ ID NO: 72431 - protein, 7 aa, synthetic construct
QYPTVKN

SEQ ID NO: 72432 - protein, 7 aa, synthetic construct
MPTKWQG

SEQ ID NO: 72433 - protein, 7 aa, synthetic construct
YTARKEY

SEQ ID NO: 72434 - protein, 7 aa, synthetic construct
SRGQMMV

SEQ ID NO: 72435 - protein, 7 aa, synthetic construct
VPKDGKA

SEQ ID NO: 72436 - protein, 7 aa, synthetic construct
LPTIPLN

SEQ ID NO: 72437 - protein, 7 aa, synthetic construct
PNTKSDG

SEQ ID NO: 72438 - protein, 7 aa, synthetic construct
NGPIMLS

SEQ ID NO: 72439 - protein, 7 aa, synthetic construct
NIVVRLD

SEQ ID NO: 72440 - protein, 7 aa, synthetic construct
DKQVNGI

SEQ ID NO: 72441 - protein, 7 aa, synthetic construct
MKVGYQH

SEQ ID NO: 72442 - protein, 7 aa, synthetic construct
PAHPVKA

SEQ ID NO: 72443 - protein, 7 aa, synthetic construct
GNGTQGA

SEQ ID NO: 72444 - protein, 7 aa, synthetic construct
PPSVNYA

SEQ ID NO: 72445 - protein, 7 aa, synthetic construct
DKMIQQG

SEQ ID NO: 72446 - protein, 7 aa, synthetic construct
DGGSKAP

SEQ ID NO: 72447 - protein, 7 aa, synthetic construct
NKNPATG

SEQ ID NO: 72448 - protein, 7 aa, synthetic construct
FPARSAY

SEQ ID NO: 72449 - protein, 7 aa, synthetic construct
HRTVEQQ

SEQ ID NO: 72450 - protein, 7 aa, synthetic construct
AMSHTPI

SEQ ID NO: 72451 - protein, 7 aa, synthetic construct
THVGLKV

SEQ ID NO: 72452 - protein, 7 aa, synthetic construct
RDKTFQD

SEQ ID NO: 72453 - protein, 7 aa, synthetic construct
FGNQKQT

SEQ ID NO: 72454 - protein, 7 aa, synthetic construct
HPTMTFG

SEQ ID NO: 72455 - protein, 7 aa, synthetic construct
HDSRIHL

SEQ ID NO: 72456 - protein, 7 aa, synthetic construct
HEKHRNA

SEQ ID NO: 72457 - protein, 7 aa, synthetic construct
FGSQRQA

SEQ ID NO: 72458 - protein, 7 aa, synthetic construct
EGAKGMA

SEQ ID NO: 72459 - protein, 7 aa, synthetic construct
KGNNMGG

SEQ ID NO: 72460 - protein, 7 aa, synthetic construct
WVNGRSD

SEQ ID NO: 72461 - protein, 7 aa, synthetic construct
QEAGYKI

SEQ ID NO: 72462 - protein, 7 aa, synthetic construct
RATTNIP

SEQ ID NO: 72463 - protein, 7 aa, synthetic construct
HELKKTD

SEQ ID NO: 72464 - protein, 7 aa, synthetic construct
AAMHFPG

SEQ ID NO: 72465 - protein, 7 aa, synthetic construct
AGPVKSP

SEQ ID NO: 72466 - protein, 7 aa, synthetic construct
QKPNGAS

SEQ ID NO: 72467 - protein, 7 aa, synthetic construct
PQGIKPN

SEQ ID NO: 72468 - protein, 7 aa, synthetic construct
PYKGNNP

SEQ ID NO: 72469 - protein, 7 aa, synthetic construct
SNKANPF

SEQ ID NO: 72470 - protein, 7 aa, synthetic construct
MKAGERA

SEQ ID NO: 72471 - protein, 7 aa, synthetic construct
KVDVVKV

SEQ ID NO: 72472 - protein, 7 aa, synthetic construct
RSVNMER

SEQ ID NO: 72473 - protein, 7 aa, synthetic construct
DNHIKVC

SEQ ID NO: 72474 - protein, 7 aa, synthetic construct
KTANAPQ

SEQ ID NO: 72475 - protein, 7 aa, synthetic construct
NDVTRRP

SEQ ID NO: 72476 - protein, 7 aa, synthetic construct
HLMAIPS

SEQ ID NO: 72477 - protein, 7 aa, synthetic construct
VNKYQEM

SEQ ID NO: 72478 - protein, 7 aa, synthetic construct
SPPMSTP

SEQ ID NO: 72479 - protein, 7 aa, synthetic construct
KHGNAEG

SEQ ID NO: 72480 - protein, 7 aa, synthetic construct
WDHIHMS

SEQ ID NO: 72481 - protein, 7 aa, synthetic construct
SMSKVQE

SEQ ID NO: 72482 - protein, 7 aa, synthetic construct
GRGSGQF

SEQ ID NO: 72483 - protein, 7 aa, synthetic construct
HKTEYGP

SEQ ID NO: 72484 - protein, 7 aa, synthetic construct
IPHFQTH

SEQ ID NO: 72485 - protein, 7 aa, synthetic construct
YKPSLSS

SEQ ID NO: 72486 - protein, 7 aa, synthetic construct
FRSHDAA

SEQ ID NO: 72487 - protein, 7 aa, synthetic construct
FASRREL

SEQ ID NO: 72488 - protein, 7 aa, synthetic construct
MTYVSTG

SEQ ID NO: 72489 - protein, 7 aa, synthetic construct
QKSSTNQ

SEQ ID NO: 72490 - protein, 7 aa, synthetic construct
SGQKSNG

SEQ ID NO: 72491 - protein, 7 aa, synthetic construct
YNGEAKR

SEQ ID NO: 72492 - protein, 7 aa, synthetic construct
VGKAMTG

SEQ ID NO: 72493 - protein, 7 aa, synthetic construct
DYKAGHI

SEQ ID NO: 72494 - protein, 7 aa, synthetic construct
SNGVLKD

SEQ ID NO: 72495 - protein, 7 aa, synthetic construct
ARNTSTS

SEQ ID NO: 72496 - protein, 7 aa, synthetic construct
KQTPSMP

SEQ ID NO: 72497 - protein, 7 aa, synthetic construct
SPNNGKD

SEQ ID NO: 72498 - protein, 7 aa, synthetic construct
TNYTVTA

SEQ ID NO: 72499 - protein, 7 aa, synthetic construct
RNSEPTM

SEQ ID NO: 72500 - protein, 7 aa, synthetic construct
VSTTKRE

SEQ ID NO: 72501 - protein, 7 aa, synthetic construct
MPKNNVG

SEQ ID NO: 72502 - protein, 7 aa, synthetic construct
GSQSKQM

SEQ ID NO: 72503 - protein, 7 aa, synthetic construct
ENHGRMN

SEQ ID NO: 72504 - protein, 7 aa, synthetic construct
SYGRADS

SEQ ID NO: 72505 - protein, 7 aa, synthetic construct
INRITIA

SEQ ID NO: 72506 - protein, 7 aa, synthetic construct
TLPQNDM

SEQ ID NO: 72507 - protein, 7 aa, synthetic construct
WKEQGNT

SEQ ID NO: 72508 - protein, 7 aa, synthetic construct
LHVDRNQ

SEQ ID NO: 72509 - protein, 7 aa, synthetic construct
NLPVSKE

SEQ ID NO: 72510 - protein, 7 aa, synthetic construct
KEGQYLA

SEQ ID NO: 72511 - protein, 7 aa, synthetic construct
QAGSNGI

SEQ ID NO: 72512 - protein, 7 aa, synthetic construct
ITPHTFH

SEQ ID NO: 72513 - protein, 7 aa, synthetic construct
RPTSSAA

SEQ ID NO: 72514 - protein, 7 aa, synthetic construct
TEPAHSR

SEQ ID NO: 72515 - protein, 7 aa, synthetic construct
QYRDNMA

SEQ ID NO: 72516 - protein, 7 aa, synthetic construct
LTREMQV

SEQ ID NO: 72517 - protein, 7 aa, synthetic construct
SFKNVTA

SEQ ID NO: 72518 - protein, 7 aa, synthetic construct
TVGPNRL

SEQ ID NO: 72519 - protein, 7 aa, synthetic construct
INKQELT

SEQ ID NO: 72520 - protein, 7 aa, synthetic construct
GKGMNQG

SEQ ID NO: 72521 - protein, 7 aa, synthetic construct
SKNVSVN

SEQ ID NO: 72522 - protein, 7 aa, synthetic construct
PRSIVES

SEQ ID NO: 72523 - protein, 7 aa, synthetic construct
AKNHPNF

SEQ ID NO: 72524 - protein, 7 aa, synthetic construct
ITVISGT

SEQ ID NO: 72525 - protein, 7 aa, synthetic construct
YTGKDQY

SEQ ID NO: 72526 - protein, 7 aa, synthetic construct
DKSNPSY

SEQ ID NO: 72527 - protein, 7 aa, synthetic construct
KNLNGAT

SEQ ID NO: 72528 - protein, 7 aa, synthetic construct
MGRDDVK

SEQ ID NO: 72529 - protein, 7 aa, synthetic construct
LVRSHDD

SEQ ID NO: 72530 - protein, 7 aa, synthetic construct
KKDNKDP

SEQ ID NO: 72531 - protein, 7 aa, synthetic construct
RTPGHLS

SEQ ID NO: 72532 - protein, 7 aa, synthetic construct
NKNNGMP

SEQ ID NO: 72533 - protein, 7 aa, synthetic construct
VSNGPNI

SEQ ID NO: 72534 - protein, 7 aa, synthetic construct
TGHKVVA

SEQ ID NO: 72535 - protein, 7 aa, synthetic construct
SHAATHG

SEQ ID NO: 72536 - protein, 7 aa, synthetic construct
RMLEGTQ

SEQ ID NO: 72537 - protein, 7 aa, synthetic construct
KYSQTSV

SEQ ID NO: 72538 - protein, 7 aa, synthetic construct
RYPTPDV

SEQ ID NO: 72539 - protein, 7 aa, synthetic construct
GDRGVQT

SEQ ID NO: 72540 - protein, 7 aa, synthetic construct
GIHPDID

SEQ ID NO: 72541 - protein, 7 aa, synthetic construct
RYENKIP

SEQ ID NO: 72542 - protein, 7 aa, synthetic construct
LTQQTQG

SEQ ID NO: 72543 - protein, 7 aa, synthetic construct
QAKVDFI

SEQ ID NO: 72544 - protein, 7 aa, synthetic construct
EQRFERG

SEQ ID NO: 72545 - protein, 7 aa, synthetic construct
AYDRTGP

SEQ ID NO: 72546 - protein, 7 aa, synthetic construct
GSRLREM

SEQ ID NO: 72547 - protein, 7 aa, synthetic construct
FRRDNNF

SEQ ID NO: 72548 - protein, 7 aa, synthetic construct
AKQMLST

SEQ ID NO: 72549 - protein, 7 aa, synthetic construct
YNGPRMQ

SEQ ID NO: 72550 - protein, 7 aa, synthetic construct
QREKGVG

SEQ ID NO: 72551 - protein, 7 aa, synthetic construct
RQSSTAM

SEQ ID NO: 72552 - protein, 7 aa, synthetic construct
QMYEKGY

SEQ ID NO: 72553 - protein, 7 aa, synthetic construct
DHRSGMS

SEQ ID NO: 72554 - protein, 7 aa, synthetic construct
ISSEAGR

SEQ ID NO: 72555 - protein, 7 aa, synthetic construct
HGQIMTL

SEQ ID NO: 72556 - protein, 7 aa, synthetic construct
VTVRQAI

SEQ ID NO: 72557 - protein, 7 aa, synthetic construct
HDRAGDH

SEQ ID NO: 72558 - protein, 7 aa, synthetic construct
MKDKAMP

SEQ ID NO: 72559 - protein, 7 aa, synthetic construct
FGSKSTM

SEQ ID NO: 72560 - protein, 7 aa, synthetic construct
FGSDKKF

SEQ ID NO: 72561 - protein, 7 aa, synthetic construct
RISTDPQ

SEQ ID NO: 72562 - protein, 7 aa, synthetic construct
VTMGGTN

SEQ ID NO: 72563 - protein, 7 aa, synthetic construct
PSTRTGG

SEQ ID NO: 72564 - protein, 7 aa, synthetic construct
NKHHAQM

SEQ ID NO: 72565 - protein, 7 aa, synthetic construct
TPGNALM

SEQ ID NO: 72566 - protein, 7 aa, synthetic construct
ISNFKDV

SEQ ID NO: 72567 - protein, 7 aa, synthetic construct
SDKGVGW

SEQ ID NO: 72568 - protein, 7 aa, synthetic construct
GIFGVAA

SEQ ID NO: 72569 - protein, 7 aa, synthetic construct
IREQGFI

SEQ ID NO: 72570 - protein, 7 aa, synthetic construct
IPHRVDM

SEQ ID NO: 72571 - protein, 7 aa, synthetic construct
QRHTPAE

SEQ ID NO: 72572 - protein, 7 aa, synthetic construct
LNVQLKM

SEQ ID NO: 72573 - protein, 7 aa, synthetic construct
TIPNINN

SEQ ID NO: 72574 - protein, 7 aa, synthetic construct
SPSNIMA

SEQ ID NO: 72575 - protein, 7 aa, synthetic construct
ISGLIRN

SEQ ID NO: 72576 - protein, 7 aa, synthetic construct
QSQAGAT

SEQ ID NO: 72577 - protein, 7 aa, synthetic construct
VPSMDAR

SEQ ID NO: 72578 - protein, 7 aa, synthetic construct
VPKAPLD

SEQ ID NO: 72579 - protein, 7 aa, synthetic construct
PQQMSRD

SEQ ID NO: 72580 - protein, 7 aa, synthetic construct
NKYVNVT

SEQ ID NO: 72581 - protein, 7 aa, synthetic construct
MNKTNNG

SEQ ID NO: 72582 - protein, 7 aa, synthetic construct
PPLMPGS

SEQ ID NO: 72583 - protein, 7 aa, synthetic construct
PFTNSTG

SEQ ID NO: 72584 - protein, 7 aa, synthetic construct
HLSIPKT

SEQ ID NO: 72585 - protein, 7 aa, synthetic construct
DQPHKQT

SEQ ID NO: 72586 - protein, 7 aa, synthetic construct
TMQKSSG

SEQ ID NO: 72587 - protein, 7 aa, synthetic construct
IRASVNP

SEQ ID NO: 72588 - protein, 7 aa, synthetic construct
SGQSQTS

SEQ ID NO: 72589 - protein, 7 aa, synthetic construct
QSGKAQP

SEQ ID NO: 72590 - protein, 7 aa, synthetic construct
DYRAQGS

SEQ ID NO: 72591 - protein, 7 aa, synthetic construct
SKSAMSA

SEQ ID NO: 72592 - protein, 7 aa, synthetic construct
KQKDEAK

SEQ ID NO: 72593 - protein, 7 aa, synthetic construct
FRAPQPN

SEQ ID NO: 72594 - protein, 7 aa, synthetic construct
HMRKENY

SEQ ID NO: 72595 - protein, 7 aa, synthetic construct
SMYGRTP

SEQ ID NO: 72596 - protein, 7 aa, synthetic construct
RGLEDKN

SEQ ID NO: 72597 - protein, 7 aa, synthetic construct
FDHKPFV

SEQ ID NO: 72598 - protein, 7 aa, synthetic construct
TMKSTKD

SEQ ID NO: 72599 - protein, 7 aa, synthetic construct
NVTTRMA

SEQ ID NO: 72600 - protein, 7 aa, synthetic construct
GKDRLAG

SEQ ID NO: 72601 - protein, 7 aa, synthetic construct
RGKVDTT

SEQ ID NO: 72602 - protein, 7 aa, synthetic construct
NRAGGIP

SEQ ID NO: 72603 - protein, 7 aa, synthetic construct
YQSQNAT

SEQ ID NO: 72604 - protein, 7 aa, synthetic construct
EALKFKP

SEQ ID NO: 72605 - protein, 7 aa, synthetic construct
FHTYEKE

SEQ ID NO: 72606 - protein, 7 aa, synthetic construct
ADFKRTM

SEQ ID NO: 72607 - protein, 7 aa, synthetic construct
GRPFDGV

SEQ ID NO: 72608 - protein, 7 aa, synthetic construct
EQQNKKV

SEQ ID NO: 72609 - protein, 7 aa, synthetic construct
NISSTQR

SEQ ID NO: 72610 - protein, 7 aa, synthetic construct
ARPNGTT

SEQ ID NO: 72611 - protein, 7 aa, synthetic construct
TQLTQQM

SEQ ID NO: 72612 - protein, 7 aa, synthetic construct
VFTHHAD

SEQ ID NO: 72613 - protein, 7 aa, synthetic construct
RGGGHTM

SEQ ID NO: 72614 - protein, 7 aa, synthetic construct
KEEHRGQ

SEQ ID NO: 72615 - protein, 7 aa, synthetic construct
TVHKAQP

SEQ ID NO: 72616 - protein, 7 aa, synthetic construct
PRPGNQP

SEQ ID NO: 72617 - protein, 7 aa, synthetic construct
PNFTSQN

SEQ ID NO: 72618 - protein, 7 aa, synthetic construct
PTATSHP

SEQ ID NO: 72619 - protein, 7 aa, synthetic construct
VQGSRQE

SEQ ID NO: 72620 - protein, 7 aa, synthetic construct
FPPFPNP

SEQ ID NO: 72621 - protein, 7 aa, synthetic construct
NDAHRKA

SEQ ID NO: 72622 - protein, 7 aa, synthetic construct
RIGVNFD

SEQ ID NO: 72623 - protein, 7 aa, synthetic construct
KLHNVDE

SEQ ID NO: 72624 - protein, 7 aa, synthetic construct
MRPVFKD

SEQ ID NO: 72625 - protein, 7 aa, synthetic construct
KPAVSAA

SEQ ID NO: 72626 - protein, 7 aa, synthetic construct
RIANIEK

SEQ ID NO: 72627 - protein, 7 aa, synthetic construct
MQMGSKI

SEQ ID NO: 72628 - protein, 7 aa, synthetic construct
TLQLNKG

SEQ ID NO: 72629 - protein, 7 aa, synthetic construct
GKQRTDD

SEQ ID NO: 72630 - protein, 7 aa, synthetic construct
FADKDSH

SEQ ID NO: 72631 - protein, 7 aa, synthetic construct
TIASKVF

SEQ ID NO: 72632 - protein, 7 aa, synthetic construct
DNPIIDR

SEQ ID NO: 72633 - protein, 7 aa, synthetic construct
DFAANGK

SEQ ID NO: 72634 - protein, 7 aa, synthetic construct
YPNMIAG

SEQ ID NO: 72635 - protein, 7 aa, synthetic construct
LQRAPNL

SEQ ID NO: 72636 - protein, 7 aa, synthetic construct
TARPRGE

SEQ ID NO: 72637 - protein, 7 aa, synthetic construct
LMGKGIM

SEQ ID NO: 72638 - protein, 7 aa, synthetic construct
PKNGTEL

SEQ ID NO: 72639 - protein, 7 aa, synthetic construct
QGSKPKE

SEQ ID NO: 72640 - protein, 7 aa, synthetic construct
SGKSMVT

SEQ ID NO: 72641 - protein, 7 aa, synthetic construct
KATSTRE

SEQ ID NO: 72642 - protein, 7 aa, synthetic construct
VRTSSSP

SEQ ID NO: 72643 - protein, 7 aa, synthetic construct
VKNGVNA

SEQ ID NO: 72644 - protein, 7 aa, synthetic construct
WSKQVTF

SEQ ID NO: 72645 - protein, 7 aa, synthetic construct
KQTQFPA

SEQ ID NO: 72646 - protein, 7 aa, synthetic construct
TAYTKAP

SEQ ID NO: 72647 - protein, 7 aa, synthetic construct
PQAGQKL

SEQ ID NO: 72648 - protein, 7 aa, synthetic construct
HALTHVV

SEQ ID NO: 72649 - protein, 7 aa, synthetic construct
TAMRQDV

SEQ ID NO: 72650 - protein, 7 aa, synthetic construct
TLNSKTP

SEQ ID NO: 72651 - protein, 7 aa, synthetic construct
VKPALIM

SEQ ID NO: 72652 - protein, 7 aa, synthetic construct
FSNKQPG

SEQ ID NO: 72653 - protein, 7 aa, synthetic construct
FEGLKAG

SEQ ID NO: 72654 - protein, 7 aa, synthetic construct
LDTYRMQ

SEQ ID NO: 72655 - protein, 7 aa, synthetic construct
RPSQNHL

SEQ ID NO: 72656 - protein, 7 aa, synthetic construct
QVNKLGN

SEQ ID NO: 72657 - protein, 7 aa, synthetic construct
TIGTWHE

SEQ ID NO: 72658 - protein, 7 aa, synthetic construct
FAETLAG

SEQ ID NO: 72659 - protein, 7 aa, synthetic construct
KPSQSTM

SEQ ID NO: 72660 - protein, 7 aa, synthetic construct
LQAGPQD

SEQ ID NO: 72661 - protein, 7 aa, synthetic construct
KSGPSVG

SEQ ID NO: 72662 - protein, 7 aa, synthetic construct
LSHDLVH

SEQ ID NO: 72663 - protein, 7 aa, synthetic construct
KSMSTSP

SEQ ID NO: 72664 - protein, 7 aa, synthetic construct
VTGVYPT

SEQ ID NO: 72665 - protein, 7 aa, synthetic construct
KTPGHGI

SEQ ID NO: 72666 - protein, 7 aa, synthetic construct
LFPKGEQ

SEQ ID NO: 72667 - protein, 7 aa, synthetic construct
SKGAHMF

SEQ ID NO: 72668 - protein, 7 aa, synthetic construct
DKPYLGF

SEQ ID NO: 72669 - protein, 7 aa, synthetic construct
KDGSKYP

SEQ ID NO: 72670 - protein, 7 aa, synthetic construct
PAQHDRS

SEQ ID NO: 72671 - protein, 7 aa, synthetic construct
YQDKRLM

SEQ ID NO: 72672 - protein, 7 aa, synthetic construct
NEINFQR

SEQ ID NO: 72673 - protein, 7 aa, synthetic construct
PREGMTY

SEQ ID NO: 72674 - protein, 7 aa, synthetic construct
MMKETAY

SEQ ID NO: 72675 - protein, 7 aa, synthetic construct
AVIGLKD

SEQ ID NO: 72676 - protein, 7 aa, synthetic construct
PKNTPGF

SEQ ID NO: 72677 - protein, 7 aa, synthetic construct
MTQVAQM

SEQ ID NO: 72678 - protein, 7 aa, synthetic construct
KTNQATN

SEQ ID NO: 72679 - protein, 7 aa, synthetic construct
VEASKHM

SEQ ID NO: 72680 - protein, 7 aa, synthetic construct
TTWKDQM

SEQ ID NO: 72681 - protein, 7 aa, synthetic construct
KGGVQSF

SEQ ID NO: 72682 - protein, 7 aa, synthetic construct
ARSIDLR

SEQ ID NO: 72683 - protein, 7 aa, synthetic construct
RDHGRSD

SEQ ID NO: 72684 - protein, 7 aa, synthetic construct
SALTLAT

SEQ ID NO: 72685 - protein, 7 aa, synthetic construct
KWKEWPE

SEQ ID NO: 72686 - protein, 7 aa, synthetic construct
VLNQSYD

SEQ ID NO: 72687 - protein, 7 aa, synthetic construct
AFLDKPS

SEQ ID NO: 72688 - protein, 7 aa, synthetic construct
WPEMHRA

SEQ ID NO: 72689 - protein, 7 aa, synthetic construct
RRSSDAD

SEQ ID NO: 72690 - protein, 7 aa, synthetic construct
AVGHPFP

SEQ ID NO: 72691 - protein, 7 aa, synthetic construct
HPKNQIH

SEQ ID NO: 72692 - protein, 7 aa, synthetic construct
EHPKYQM

SEQ ID NO: 72693 - protein, 7 aa, synthetic construct
SIGGQHE

SEQ ID NO: 72694 - protein, 7 aa, synthetic construct
INHRVIQ

SEQ ID NO: 72695 - protein, 7 aa, synthetic construct
NHKGSEG

SEQ ID NO: 72696 - protein, 7 aa, synthetic construct
SMRSVVS

SEQ ID NO: 72697 - protein, 7 aa, synthetic construct
QQFLQRE

SEQ ID NO: 72698 - protein, 7 aa, synthetic construct
KVLKDNW

SEQ ID NO: 72699 - protein, 7 aa, synthetic construct
TQRTENH

SEQ ID NO: 72700 - protein, 7 aa, synthetic construct
RKSDSAF

SEQ ID NO: 72701 - protein, 7 aa, synthetic construct
ANSNAVN

SEQ ID NO: 72702 - protein, 7 aa, synthetic construct
MKDHEMQ

SEQ ID NO: 72703 - protein, 7 aa, synthetic construct
MQKSQTS

SEQ ID NO: 72704 - protein, 7 aa, synthetic construct
KQNGSAA

SEQ ID NO: 72705 - protein, 7 aa, synthetic construct
KDAQWQY

SEQ ID NO: 72706 - protein, 7 aa, synthetic construct
MKENVPV

SEQ ID NO: 72707 - protein, 7 aa, synthetic construct
SITFKEV

SEQ ID NO: 72708 - protein, 7 aa, synthetic construct
SYRPNQT

SEQ ID NO: 72709 - protein, 7 aa, synthetic construct
RGTIPET

SEQ ID NO: 72710 - protein, 7 aa, synthetic construct
FEERGKN

SEQ ID NO: 72711 - protein, 7 aa, synthetic construct
TNGKNGG

SEQ ID NO: 72712 - protein, 7 aa, synthetic construct
GMRSPTQ

SEQ ID NO: 72713 - protein, 7 aa, synthetic construct
WNDKRQV

SEQ ID NO: 72714 - protein, 7 aa, synthetic construct
TIPPPQN

SEQ ID NO: 72715 - protein, 7 aa, synthetic construct
KTNQSNA

SEQ ID NO: 72716 - protein, 7 aa, synthetic construct
RNQTAQP

SEQ ID NO: 72717 - protein, 7 aa, synthetic construct
QSAMRAE

SEQ ID NO: 72718 - protein, 7 aa, synthetic construct
VPGGIGN

SEQ ID NO: 72719 - protein, 7 aa, synthetic construct
NQPRAVA

SEQ ID NO: 72720 - protein, 7 aa, synthetic construct
SRSGAHD

SEQ ID NO: 72721 - protein, 7 aa, synthetic construct
SNISVPS

SEQ ID NO: 72722 - protein, 7 aa, synthetic construct
THGKFSG

SEQ ID NO: 72723 - protein, 7 aa, synthetic construct
HDRNPVM

SEQ ID NO: 72724 - protein, 7 aa, synthetic construct
GQKYTKE

SEQ ID NO: 72725 - protein, 7 aa, synthetic construct
TKPIQFQ

SEQ ID NO: 72726 - protein, 7 aa, synthetic construct
YGQNKTQ

SEQ ID NO: 72727 - protein, 7 aa, synthetic construct
GAHPVAH

SEQ ID NO: 72728 - protein, 7 aa, synthetic construct
YKPNQNP

SEQ ID NO: 72729 - protein, 7 aa, synthetic construct
MRDGKEV

SEQ ID NO: 72730 - protein, 7 aa, synthetic construct
HKESSLT

SEQ ID NO: 72731 - protein, 7 aa, synthetic construct
QPPTREF

SEQ ID NO: 72732 - protein, 7 aa, synthetic construct
RTGHQEM

SEQ ID NO: 72733 - protein, 7 aa, synthetic construct
ATKNGMG

SEQ ID NO: 72734 - protein, 7 aa, synthetic construct
QNSHPPY

SEQ ID NO: 72735 - protein, 7 aa, synthetic construct
PAQDRQV

SEQ ID NO: 72736 - protein, 7 aa, synthetic construct
GYQKSTG

SEQ ID NO: 72737 - protein, 7 aa, synthetic construct
MEQRSMG

SEQ ID NO: 72738 - protein, 7 aa, synthetic construct
TNTKQNV

SEQ ID NO: 72739 - protein, 7 aa, synthetic construct
WKRANAD

SEQ ID NO: 72740 - protein, 7 aa, synthetic construct
RESMVNV

SEQ ID NO: 72741 - protein, 7 aa, synthetic construct
KTSPSIG

SEQ ID NO: 72742 - protein, 7 aa, synthetic construct
TNARASA

SEQ ID NO: 72743 - protein, 7 aa, synthetic construct
KSSGPLT

SEQ ID NO: 72744 - protein, 7 aa, synthetic construct
QTMKNSS

SEQ ID NO: 72745 - protein, 7 aa, synthetic construct
PGYHPHG

SEQ ID NO: 72746 - protein, 7 aa, synthetic construct
GNASIPR

SEQ ID NO: 72747 - protein, 7 aa, synthetic construct
YEQRMAP

SEQ ID NO: 72748 - protein, 7 aa, synthetic construct
TYDMHKV

SEQ ID NO: 72749 - protein, 7 aa, synthetic construct
NEITARG

SEQ ID NO: 72750 - protein, 7 aa, synthetic construct
QSMTSTI

SEQ ID NO: 72751 - protein, 7 aa, synthetic construct
GRQGAVM

SEQ ID NO: 72752 - protein, 7 aa, synthetic construct
NLPQHRV

SEQ ID NO: 72753 - protein, 7 aa, synthetic construct
IGTLKQY

SEQ ID NO: 72754 - protein, 7 aa, synthetic construct
AGSGPRQ

SEQ ID NO: 72755 - protein, 7 aa, synthetic construct
MGKDAAT

SEQ ID NO: 72756 - protein, 7 aa, synthetic construct
LPRFKDE

SEQ ID NO: 72757 - protein, 7 aa, synthetic construct
GFKQVHV

SEQ ID NO: 72758 - protein, 7 aa, synthetic construct
AIGINQR

SEQ ID NO: 72759 - protein, 7 aa, synthetic construct
GHFAQAA

SEQ ID NO: 72760 - protein, 7 aa, synthetic construct
WGRTVED

SEQ ID NO: 72761 - protein, 7 aa, synthetic construct
LSSGMFP

SEQ ID NO: 72762 - protein, 7 aa, synthetic construct
MLNGGAN

SEQ ID NO: 72763 - protein, 7 aa, synthetic construct
ANRNHDS

SEQ ID NO: 72764 - protein, 7 aa, synthetic construct
GQQKGSE

SEQ ID NO: 72765 - protein, 7 aa, synthetic construct
QQNHSKG

SEQ ID NO: 72766 - protein, 7 aa, synthetic construct
AIPRFDS

SEQ ID NO: 72767 - protein, 7 aa, synthetic construct
YTPNKNT

SEQ ID NO: 72768 - protein, 7 aa, synthetic construct
AVRSNNP

SEQ ID NO: 72769 - protein, 7 aa, synthetic construct
GSQAKPD

SEQ ID NO: 72770 - protein, 7 aa, synthetic construct
MINHHGL

SEQ ID NO: 72771 - protein, 7 aa, synthetic construct
IPTHGKL

SEQ ID NO: 72772 - protein, 7 aa, synthetic construct
DRENNSR

SEQ ID NO: 72773 - protein, 7 aa, synthetic construct
GALISAE

SEQ ID NO: 72774 - protein, 7 aa, synthetic construct
TIKYKYD

SEQ ID NO: 72775 - protein, 7 aa, synthetic construct
KMHVEDF

SEQ ID NO: 72776 - protein, 7 aa, synthetic construct
PGHALPQ

SEQ ID NO: 72777 - protein, 7 aa, synthetic construct
GMKEVER

SEQ ID NO: 72778 - protein, 7 aa, synthetic construct
PRNNGVA

SEQ ID NO: 72779 - protein, 7 aa, synthetic construct
IQHVEKE

SEQ ID NO: 72780 - protein, 7 aa, synthetic construct
MEKKIWE

SEQ ID NO: 72781 - protein, 7 aa, synthetic construct
YMDNVRV

SEQ ID NO: 72782 - protein, 7 aa, synthetic construct
SQRSNHE

SEQ ID NO: 72783 - protein, 7 aa, synthetic construct
GNIAAVS

SEQ ID NO: 72784 - protein, 7 aa, synthetic construct
AMPYAKT

SEQ ID NO: 72785 - protein, 7 aa, synthetic construct
FKDKMKD

SEQ ID NO: 72786 - protein, 7 aa, synthetic construct
MYAKKDF

SEQ ID NO: 72787 - protein, 7 aa, synthetic construct
MRGTQVG

SEQ ID NO: 72788 - protein, 7 aa, synthetic construct
HVPVQMS

SEQ ID NO: 72789 - protein, 7 aa, synthetic construct
LSPHDNR

SEQ ID NO: 72790 - protein, 7 aa, synthetic construct
NYTALQE

SEQ ID NO: 72791 - protein, 7 aa, synthetic construct
TKSVTWE

SEQ ID NO: 72792 - protein, 7 aa, synthetic construct
DIPTTSK

SEQ ID NO: 72793 - protein, 7 aa, synthetic construct
ISANSKF

SEQ ID NO: 72794 - protein, 7 aa, synthetic construct
LTRFMPA

SEQ ID NO: 72795 - protein, 7 aa, synthetic construct
VPHHAAE

SEQ ID NO: 72796 - protein, 7 aa, synthetic construct
LNKDSKS

SEQ ID NO: 72797 - protein, 7 aa, synthetic construct
TSYNHVA

SEQ ID NO: 72798 - protein, 7 aa, synthetic construct
PNSMQRS

SEQ ID NO: 72799 - protein, 7 aa, synthetic construct
EPKAMNA

SEQ ID NO: 72800 - protein, 7 aa, synthetic construct
LKIKAND

SEQ ID NO: 72801 - protein, 7 aa, synthetic construct
MKMANHP

SEQ ID NO: 72802 - protein, 7 aa, synthetic construct
HKADKMI

SEQ ID NO: 72803 - protein, 7 aa, synthetic construct
NKVQAVP

SEQ ID NO: 72804 - protein, 7 aa, synthetic construct
TRYGTAL

SEQ ID NO: 72805 - protein, 7 aa, synthetic construct
HHTDPQR

SEQ ID NO: 72806 - protein, 7 aa, synthetic construct
FTELPRR

SEQ ID NO: 72807 - protein, 7 aa, synthetic construct
WRPHESE

SEQ ID NO: 72808 - protein, 7 aa, synthetic construct
ELKFNDK

SEQ ID NO: 72809 - protein, 7 aa, synthetic construct
KPSGSGA

SEQ ID NO: 72810 - protein, 7 aa, synthetic construct
GLLKHTT

SEQ ID NO: 72811 - protein, 7 aa, synthetic construct
HASILTK

SEQ ID NO: 72812 - protein, 7 aa, synthetic construct
KYFNGDK

SEQ ID NO: 72813 - protein, 7 aa, synthetic construct
EPHMVSN

SEQ ID NO: 72814 - protein, 7 aa, synthetic construct
MPTTKGD

SEQ ID NO: 72815 - protein, 7 aa, synthetic construct
NKHSEST

SEQ ID NO: 72816 - protein, 7 aa, synthetic construct
QARTITV

SEQ ID NO: 72817 - protein, 7 aa, synthetic construct
GHDNHRN

SEQ ID NO: 72818 - protein, 7 aa, synthetic construct
RPGPSGA

SEQ ID NO: 72819 - protein, 7 aa, synthetic construct
TEHNHVG

SEQ ID NO: 72820 - protein, 7 aa, synthetic construct
FGILQQA

SEQ ID NO: 72821 - protein, 7 aa, synthetic construct
MLNHQYG

SEQ ID NO: 72822 - protein, 7 aa, synthetic construct
GRTNGTA

SEQ ID NO: 72823 - protein, 7 aa, synthetic construct
DKSHGMD

SEQ ID NO: 72824 - protein, 7 aa, synthetic construct
RMLDSTV

SEQ ID NO: 72825 - protein, 7 aa, synthetic construct
WEGAAKG

SEQ ID NO: 72826 - protein, 7 aa, synthetic construct
QVERRLE

SEQ ID NO: 72827 - protein, 7 aa, synthetic construct
ELYHKQS

SEQ ID NO: 72828 - protein, 7 aa, synthetic construct
FKPNVQG

SEQ ID NO: 72829 - protein, 7 aa, synthetic construct
APHFSEL

SEQ ID NO: 72830 - protein, 7 aa, synthetic construct
NQKQPNG

SEQ ID NO: 72831 - protein, 7 aa, synthetic construct
IYTGGSM

SEQ ID NO: 72832 - protein, 7 aa, synthetic construct
THGVQHK

SEQ ID NO: 72833 - protein, 7 aa, synthetic construct
VTPMNMS

SEQ ID NO: 72834 - protein, 7 aa, synthetic construct
VDKQGYV

SEQ ID NO: 72835 - protein, 7 aa, synthetic construct
PANQKQF

SEQ ID NO: 72836 - protein, 7 aa, synthetic construct
GSQMKSM

SEQ ID NO: 72837 - protein, 7 aa, synthetic construct
IERISSS

SEQ ID NO: 72838 - protein, 7 aa, synthetic construct
TQPTRQA

SEQ ID NO: 72839 - protein, 7 aa, synthetic construct
NNNHILM

SEQ ID NO: 72840 - protein, 7 aa, synthetic construct
MVMHSEA

SEQ ID NO: 72841 - protein, 7 aa, synthetic construct
MTHKLAS

SEQ ID NO: 72842 - protein, 7 aa, synthetic construct
FKSKDSP

SEQ ID NO: 72843 - protein, 7 aa, synthetic construct
HAKMPST

SEQ ID NO: 72844 - protein, 7 aa, synthetic construct
SSGASGA

SEQ ID NO: 72845 - protein, 7 aa, synthetic construct
SMRSFGD

SEQ ID NO: 72846 - protein, 7 aa, synthetic construct
RPTSGSM

SEQ ID NO: 72847 - protein, 7 aa, synthetic construct
TTYPALT

SEQ ID NO: 72848 - protein, 7 aa, synthetic construct
RPTGAPE

SEQ ID NO: 72849 - protein, 7 aa, synthetic construct
KDAKWEV

SEQ ID NO: 72850 - protein, 7 aa, synthetic construct
QHRHQEQ

SEQ ID NO: 72851 - protein, 7 aa, synthetic construct
HLPKHYG

SEQ ID NO: 72852 - protein, 7 aa, synthetic construct
GDIQHKH

SEQ ID NO: 72853 - protein, 7 aa, synthetic construct
MSVSGHA

SEQ ID NO: 72854 - protein, 7 aa, synthetic construct
RDNSLRQ

SEQ ID NO: 72855 - protein, 7 aa, synthetic construct
KTQTNRE

SEQ ID NO: 72856 - protein, 7 aa, synthetic construct
EMKNPLV

SEQ ID NO: 72857 - protein, 7 aa, synthetic construct
ADYGRFS

SEQ ID NO: 72858 - protein, 7 aa, synthetic construct
TQFVGAA

SEQ ID NO: 72859 - protein, 7 aa, synthetic construct
HVLRTND

SEQ ID NO: 72860 - protein, 7 aa, synthetic construct
LFTHMTG

SEQ ID NO: 72861 - protein, 7 aa, synthetic construct
KMQDPVS

SEQ ID NO: 72862 - protein, 7 aa, synthetic construct
LPGSPAI

SEQ ID NO: 72863 - protein, 7 aa, synthetic construct
FNRYQAA

SEQ ID NO: 72864 - protein, 7 aa, synthetic construct
MKQQGYA

SEQ ID NO: 72865 - protein, 7 aa, synthetic construct
KFPAREV

SEQ ID NO: 72866 - protein, 7 aa, synthetic construct
TPQKGAG

SEQ ID NO: 72867 - protein, 7 aa, synthetic construct
RTDYVLE

SEQ ID NO: 72868 - protein, 7 aa, synthetic construct
RTTSNQA

SEQ ID NO: 72869 - protein, 7 aa, synthetic construct
DGKITVN

SEQ ID NO: 72870 - protein, 7 aa, synthetic construct
GKINNSP

SEQ ID NO: 72871 - protein, 7 aa, synthetic construct
QNDRSSG

SEQ ID NO: 72872 - protein, 7 aa, synthetic construct
HVHIEKE

SEQ ID NO: 72873 - protein, 7 aa, synthetic construct
LTPSYNK

SEQ ID NO: 72874 - protein, 7 aa, synthetic construct
FAKNPVH

SEQ ID NO: 72875 - protein, 7 aa, synthetic construct
MKGNNNP

SEQ ID NO: 72876 - protein, 7 aa, synthetic construct
RHNHPNT

SEQ ID NO: 72877 - protein, 7 aa, synthetic construct
ANQREDS

SEQ ID NO: 72878 - protein, 7 aa, synthetic construct
KGVGLNM

SEQ ID NO: 72879 - protein, 7 aa, synthetic construct
SYNQHNE

SEQ ID NO: 72880 - protein, 7 aa, synthetic construct
SHAVTNS

SEQ ID NO: 72881 - protein, 7 aa, synthetic construct
RIPQNSG

SEQ ID NO: 72882 - protein, 7 aa, synthetic construct
LGNGQLI

SEQ ID NO: 72883 - protein, 7 aa, synthetic construct
NYVYKAE

SEQ ID NO: 72884 - protein, 7 aa, synthetic construct
RIQEETH

SEQ ID NO: 72885 - protein, 7 aa, synthetic construct
DKMDGHR

SEQ ID NO: 72886 - protein, 7 aa, synthetic construct
SRAAVSY

SEQ ID NO: 72887 - protein, 7 aa, synthetic construct
IGQQILR

SEQ ID NO: 72888 - protein, 7 aa, synthetic construct
KPSAMDH

SEQ ID NO: 72889 - protein, 7 aa, synthetic construct
QKADGRW

SEQ ID NO: 72890 - protein, 7 aa, synthetic construct
GGKQGNA

SEQ ID NO: 72891 - protein, 7 aa, synthetic construct
LALKDSH

SEQ ID NO: 72892 - protein, 7 aa, synthetic construct
YNEMKPV

SEQ ID NO: 72893 - protein, 7 aa, synthetic construct
AGLKFVA

SEQ ID NO: 72894 - protein, 7 aa, synthetic construct
YKPTSNQ

SEQ ID NO: 72895 - protein, 7 aa, synthetic construct
PPTQNGR

SEQ ID NO: 72896 - protein, 7 aa, synthetic construct
TTPKKWE

SEQ ID NO: 72897 - protein, 7 aa, synthetic construct
RGMHIGA

SEQ ID NO: 72898 - protein, 7 aa, synthetic construct
QRTIDYP

SEQ ID NO: 72899 - protein, 7 aa, synthetic construct
NKAAGKE

SEQ ID NO: 72900 - protein, 7 aa, synthetic construct
PPGGTVL

SEQ ID NO: 72901 - protein, 7 aa, synthetic construct
IEVARMP

SEQ ID NO: 72902 - protein, 7 aa, synthetic construct
KAENAER

SEQ ID NO: 72903 - protein, 7 aa, synthetic construct
EMAGVKN

SEQ ID NO: 72904 - protein, 7 aa, synthetic construct
AVVGKMP

SEQ ID NO: 72905 - protein, 7 aa, synthetic construct
DTHKGKQ

SEQ ID NO: 72906 - protein, 7 aa, synthetic construct
LQQSHII

SEQ ID NO: 72907 - protein, 7 aa, synthetic construct
SMNQVIM

SEQ ID NO: 72908 - protein, 7 aa, synthetic construct
GRAEPSR

SEQ ID NO: 72909 - protein, 7 aa, synthetic construct
NQHMSVR

SEQ ID NO: 72910 - protein, 7 aa, synthetic construct
PVKAQQV

SEQ ID NO: 72911 - protein, 7 aa, synthetic construct
SITHNAL

SEQ ID NO: 72912 - protein, 7 aa, synthetic construct
LYQRHSP

SEQ ID NO: 72913 - protein, 7 aa, synthetic construct
YAGYRAN

SEQ ID NO: 72914 - protein, 7 aa, synthetic construct
DKDYDKS

SEQ ID NO: 72915 - protein, 7 aa, synthetic construct
TNNHVFN

SEQ ID NO: 72916 - protein, 7 aa, synthetic construct
FMRVNDK

SEQ ID NO: 72917 - protein, 7 aa, synthetic construct
TQRSGSA

SEQ ID NO: 72918 - protein, 7 aa, synthetic construct
NLAIREM

SEQ ID NO: 72919 - protein, 7 aa, synthetic construct
FQLNKAV

SEQ ID NO: 72920 - protein, 7 aa, synthetic construct
LIGYEKK

SEQ ID NO: 72921 - protein, 7 aa, synthetic construct
KVPDQYV

SEQ ID NO: 72922 - protein, 7 aa, synthetic construct
NKVGDLP

SEQ ID NO: 72923 - protein, 7 aa, synthetic construct
LQARANL

SEQ ID NO: 72924 - protein, 7 aa, synthetic construct
YHQSAGT

SEQ ID NO: 72925 - protein, 7 aa, synthetic construct
AFQKDPV

SEQ ID NO: 72926 - protein, 7 aa, synthetic construct
NAMPHAH

SEQ ID NO: 72927 - protein, 7 aa, synthetic construct
GSVTMRD

SEQ ID NO: 72928 - protein, 7 aa, synthetic construct
EARLGFI

SEQ ID NO: 72929 - protein, 7 aa, synthetic construct
HTASPKS

SEQ ID NO: 72930 - protein, 7 aa, synthetic construct
QHGLSGP

SEQ ID NO: 72931 - protein, 7 aa, synthetic construct
PLHTQAG

SEQ ID NO: 72932 - protein, 7 aa, synthetic construct
HTNSGIF

SEQ ID NO: 72933 - protein, 7 aa, synthetic construct
MDLKRLE

SEQ ID NO: 72934 - protein, 7 aa, synthetic construct
LHFKPDV

SEQ ID NO: 72935 - protein, 7 aa, synthetic construct
RDYQNAS

SEQ ID NO: 72936 - protein, 7 aa, synthetic construct
KKYNDNE

SEQ ID NO: 72937 - protein, 7 aa, synthetic construct
HTSHRMP

SEQ ID NO: 72938 - protein, 7 aa, synthetic construct
GNGETKI

SEQ ID NO: 72939 - protein, 7 aa, synthetic construct
NSNKINT

SEQ ID NO: 72940 - protein, 7 aa, synthetic construct
KDPGSFT

SEQ ID NO: 72941 - protein, 7 aa, synthetic construct
SAEMMKS

SEQ ID NO: 72942 - protein, 7 aa, synthetic construct
TFRAMGN

SEQ ID NO: 72943 - protein, 7 aa, synthetic construct
LANWVTD

SEQ ID NO: 72944 - protein, 7 aa, synthetic construct
GNYSGLN

SEQ ID NO: 72945 - protein, 7 aa, synthetic construct
LHSPSVP

SEQ ID NO: 72946 - protein, 7 aa, synthetic construct
TRDENGK

SEQ ID NO: 72947 - protein, 7 aa, synthetic construct
PHGAMTT

SEQ ID NO: 72948 - protein, 7 aa, synthetic construct
HSGIYPT

SEQ ID NO: 72949 - protein, 7 aa, synthetic construct
IRYGGDT

SEQ ID NO: 72950 - protein, 7 aa, synthetic construct
WANVVTS

SEQ ID NO: 72951 - protein, 7 aa, synthetic construct
LQGQSKE

SEQ ID NO: 72952 - protein, 7 aa, synthetic construct
KKDINGL

SEQ ID NO: 72953 - protein, 7 aa, synthetic construct
QGKRNDD

SEQ ID NO: 72954 - protein, 7 aa, synthetic construct
QAKPHIN

SEQ ID NO: 72955 - protein, 7 aa, synthetic construct
ANGINSV

SEQ ID NO: 72956 - protein, 7 aa, synthetic construct
QHKGQIL

SEQ ID NO: 72957 - protein, 7 aa, synthetic construct
RSSQSAA

SEQ ID NO: 72958 - protein, 7 aa, synthetic construct
GYKTSYD

SEQ ID NO: 72959 - protein, 7 aa, synthetic construct
VHKGDYH

SEQ ID NO: 72960 - protein, 7 aa, synthetic construct
NEFRQNM

SEQ ID NO: 72961 - protein, 7 aa, synthetic construct
HKAEMVQ

SEQ ID NO: 72962 - protein, 7 aa, synthetic construct
AKTKNED

SEQ ID NO: 72963 - protein, 7 aa, synthetic construct
VGLVQFE

SEQ ID NO: 72964 - protein, 7 aa, synthetic construct
VKYQERP

SEQ ID NO: 72965 - protein, 7 aa, synthetic construct
NKSTTTL

SEQ ID NO: 72966 - protein, 7 aa, synthetic construct
FVAPFNG

SEQ ID NO: 72967 - protein, 7 aa, synthetic construct
RPVAGVG

SEQ ID NO: 72968 - protein, 7 aa, synthetic construct
RDRPANH

SEQ ID NO: 72969 - protein, 7 aa, synthetic construct
DRNSSNG

SEQ ID NO: 72970 - protein, 7 aa, synthetic construct
KAYEGSF

SEQ ID NO: 72971 - protein, 7 aa, synthetic construct
KSNYMPV

SEQ ID NO: 72972 - protein, 7 aa, synthetic construct
FGIAFPS

SEQ ID NO: 72973 - protein, 7 aa, synthetic construct
KQPQTPG

SEQ ID NO: 72974 - protein, 7 aa, synthetic construct
FLSHMQA

SEQ ID NO: 72975 - protein, 7 aa, synthetic construct
PTSAHTL

SEQ ID NO: 72976 - protein, 7 aa, synthetic construct
HQRSNTV

SEQ ID NO: 72977 - protein, 7 aa, synthetic construct
THGQTDT

SEQ ID NO: 72978 - protein, 7 aa, synthetic construct
EVGSFNA

SEQ ID NO: 72979 - protein, 7 aa, synthetic construct
TANRGPI

SEQ ID NO: 72980 - protein, 7 aa, synthetic construct
MERQSMS

SEQ ID NO: 72981 - protein, 7 aa, synthetic construct
PRIQHDP

SEQ ID NO: 72982 - protein, 7 aa, synthetic construct
ARPENAM

SEQ ID NO: 72983 - protein, 7 aa, synthetic construct
HRPAFIE

SEQ ID NO: 72984 - protein, 7 aa, synthetic construct
YEGVRVG

SEQ ID NO: 72985 - protein, 7 aa, synthetic construct
KPHNNEF

SEQ ID NO: 72986 - protein, 7 aa, synthetic construct
GKNNSVP

SEQ ID NO: 72987 - protein, 7 aa, synthetic construct
FHGMRIE

SEQ ID NO: 72988 - protein, 7 aa, synthetic construct
GFNKNIA

SEQ ID NO: 72989 - protein, 7 aa, synthetic construct
TKMDLSG

SEQ ID NO: 72990 - protein, 7 aa, synthetic construct
NVQRTQG

SEQ ID NO: 72991 - protein, 7 aa, synthetic construct
TNKFKLP

SEQ ID NO: 72992 - protein, 7 aa, synthetic construct
WEKIERS

SEQ ID NO: 72993 - protein, 7 aa, synthetic construct
TKHSLNW

SEQ ID NO: 72994 - protein, 7 aa, synthetic construct
YHNAPGR

SEQ ID NO: 72995 - protein, 7 aa, synthetic construct
TPTNAKA

SEQ ID NO: 72996 - protein, 7 aa, synthetic construct
NKGTNMS

SEQ ID NO: 72997 - protein, 7 aa, synthetic construct
NIQTVER

SEQ ID NO: 72998 - protein, 7 aa, synthetic construct
DKYNHQP

SEQ ID NO: 72999 - protein, 7 aa, synthetic construct
KSPPTSS

SEQ ID NO: 73000 - protein, 7 aa, synthetic construct
EMHLREA

SEQ ID NO: 73001 - protein, 7 aa, synthetic construct
GYKNAQD

SEQ ID NO: 73002 - protein, 7 aa, synthetic construct
LGLPTPQ

SEQ ID NO: 73003 - protein, 7 aa, synthetic construct
MPTARNA

SEQ ID NO: 73004 - protein, 7 aa, synthetic construct
GTTAREQ

SEQ ID NO: 73005 - protein, 7 aa, synthetic construct
AMRPDVA

SEQ ID NO: 73006 - protein, 7 aa, synthetic construct
IMSNHQD

SEQ ID NO: 73007 - protein, 7 aa, synthetic construct
KGTTSQA

SEQ ID NO: 73008 - protein, 7 aa, synthetic construct
SARSVDR

SEQ ID NO: 73009 - protein, 7 aa, synthetic construct
PKTNPGY

SEQ ID NO: 73010 - protein, 7 aa, synthetic construct
KATNTGM

SEQ ID NO: 73011 - protein, 7 aa, synthetic construct
VFTKSID

SEQ ID NO: 73012 - protein, 7 aa, synthetic construct
FKHPEGP

SEQ ID NO: 73013 - protein, 7 aa, synthetic construct
YGESFSG

SEQ ID NO: 73014 - protein, 7 aa, synthetic construct
SEKSVIL

SEQ ID NO: 73015 - protein, 7 aa, synthetic construct
MVVPGRN

SEQ ID NO: 73016 - protein, 7 aa, synthetic construct
PWKANDD

SEQ ID NO: 73017 - protein, 7 aa, synthetic construct
FAAHMDG

SEQ ID NO: 73018 - protein, 7 aa, synthetic construct
PSRQSGV

SEQ ID NO: 73019 - protein, 7 aa, synthetic construct
ITGQNTQ

SEQ ID NO: 73020 - protein, 7 aa, synthetic construct
FKGASAP

SEQ ID NO: 73021 - protein, 7 aa, synthetic construct
HPPMRDN

SEQ ID NO: 73022 - protein, 7 aa, synthetic construct
NFMDTRP

SEQ ID NO: 73023 - protein, 7 aa, synthetic construct
RNLAHQD

SEQ ID NO: 73024 - protein, 7 aa, synthetic construct
NHGNRIY

SEQ ID NO: 73025 - protein, 7 aa, synthetic construct
SFGPNHT

SEQ ID NO: 73026 - protein, 7 aa, synthetic construct
GKHVLVQ

SEQ ID NO: 73027 - protein, 7 aa, synthetic construct
GHLQLNP

SEQ ID NO: 73028 - protein, 7 aa, synthetic construct
WMDHKGE

SEQ ID NO: 73029 - protein, 7 aa, synthetic construct
DQRTTHL

SEQ ID NO: 73030 - protein, 7 aa, synthetic construct
SMKSNIP

SEQ ID NO: 73031 - protein, 7 aa, synthetic construct
RANMYGA

SEQ ID NO: 73032 - protein, 7 aa, synthetic construct
FHTSKES

SEQ ID NO: 73033 - protein, 7 aa, synthetic construct
LMEKYAH

SEQ ID NO: 73034 - protein, 7 aa, synthetic construct
VGHAPVI

SEQ ID NO: 73035 - protein, 7 aa, synthetic construct
IHNQIKG

SEQ ID NO: 73036 - protein, 7 aa, synthetic construct
GLRQESS

SEQ ID NO: 73037 - protein, 7 aa, synthetic construct
QHEVKQQ

SEQ ID NO: 73038 - protein, 7 aa, synthetic construct
KGPSSAP

SEQ ID NO: 73039 - protein, 7 aa, synthetic construct
LDGSRMI

SEQ ID NO: 73040 - protein, 7 aa, synthetic construct
AQHKNTP

SEQ ID NO: 73041 - protein, 7 aa, synthetic construct
LTSGSLM

SEQ ID NO: 73042 - protein, 7 aa, synthetic construct
TNRSTVL

SEQ ID NO: 73043 - protein, 7 aa, synthetic construct
PPPYSST

SEQ ID NO: 73044 - protein, 7 aa, synthetic construct
VRNGNID

SEQ ID NO: 73045 - protein, 7 aa, synthetic construct
ELQKKIP

SEQ ID NO: 73046 - protein, 7 aa, synthetic construct
MGQSPRF

SEQ ID NO: 73047 - protein, 7 aa, synthetic construct
FHVSGPD

SEQ ID NO: 73048 - protein, 7 aa, synthetic construct
PQNANAY

SEQ ID NO: 73049 - protein, 7 aa, synthetic construct
MRFTPNP

SEQ ID NO: 73050 - protein, 7 aa, synthetic construct
QDKRHFV

SEQ ID NO: 73051 - protein, 7 aa, synthetic construct
SPRKFHE

SEQ ID NO: 73052 - protein, 7 aa, synthetic construct
QKDHSPG

SEQ ID NO: 73053 - protein, 7 aa, synthetic construct
MNMQRTE

SEQ ID NO: 73054 - protein, 7 aa, synthetic construct
SASHWEK

SEQ ID NO: 73055 - protein, 7 aa, synthetic construct
YPKGVSA

SEQ ID NO: 73056 - protein, 7 aa, synthetic construct
GGHRTFN

SEQ ID NO: 73057 - protein, 7 aa, synthetic construct
AQTRQTI

SEQ ID NO: 73058 - protein, 7 aa, synthetic construct
PQPNSVG

SEQ ID NO: 73059 - protein, 7 aa, synthetic construct
PKHAQKE

SEQ ID NO: 73060 - protein, 7 aa, synthetic construct
HIKHVGI

SEQ ID NO: 73061 - protein, 7 aa, synthetic construct
HQKYNRE

SEQ ID NO: 73062 - protein, 7 aa, synthetic construct
NRGSLID

SEQ ID NO: 73063 - protein, 7 aa, synthetic construct
GSHHGFT

SEQ ID NO: 73064 - protein, 7 aa, synthetic construct
YEMHPKI

SEQ ID NO: 73065 - protein, 7 aa, synthetic construct
QVKGTAG

SEQ ID NO: 73066 - protein, 7 aa, synthetic construct
KVVSMME

SEQ ID NO: 73067 - protein, 7 aa, synthetic construct
IGIDSKP

SEQ ID NO: 73068 - protein, 7 aa, synthetic construct
HFNSLTD

SEQ ID NO: 73069 - protein, 7 aa, synthetic construct
KQPHMWE

SEQ ID NO: 73070 - protein, 7 aa, synthetic construct
KMGYEFP

SEQ ID NO: 73071 - protein, 7 aa, synthetic construct
KSHLMLA

SEQ ID NO: 73072 - protein, 7 aa, synthetic construct
KKEDSNM

SEQ ID NO: 73073 - protein, 7 aa, synthetic construct
NVKFYPA

SEQ ID NO: 73074 - protein, 7 aa, synthetic construct
KYVQSEK

SEQ ID NO: 73075 - protein, 7 aa, synthetic construct
NVKTSNG

SEQ ID NO: 73076 - protein, 7 aa, synthetic construct
WNNKQSD

SEQ ID NO: 73077 - protein, 7 aa, synthetic construct
NKEMPQP

SEQ ID NO: 73078 - protein, 7 aa, synthetic construct
DNPQINR

SEQ ID NO: 73079 - protein, 7 aa, synthetic construct
TVGSNKA

SEQ ID NO: 73080 - protein, 7 aa, synthetic construct
NRSGQES

SEQ ID NO: 73081 - protein, 7 aa, synthetic construct
QARVHHV

SEQ ID NO: 73082 - protein, 7 aa, synthetic construct
GRQSPAE

SEQ ID NO: 73083 - protein, 7 aa, synthetic construct
ATSPKAM

SEQ ID NO: 73084 - protein, 7 aa, synthetic construct
LPQSNRL

SEQ ID NO: 73085 - protein, 7 aa, synthetic construct
FTSNPMK

SEQ ID NO: 73086 - protein, 7 aa, synthetic construct
CSKFAAC

SEQ ID NO: 73087 - protein, 7 aa, synthetic construct
LMEGISK

SEQ ID NO: 73088 - protein, 7 aa, synthetic construct
KITTEWS

SEQ ID NO: 73089 - protein, 7 aa, synthetic construct
GSKTPLW

SEQ ID NO: 73090 - protein, 7 aa, synthetic construct
QSHNSQK

SEQ ID NO: 73091 - protein, 7 aa, synthetic construct
ARSGSMT

SEQ ID NO: 73092 - protein, 7 aa, synthetic construct
VKPSSQM

SEQ ID NO: 73093 - protein, 7 aa, synthetic construct
YEYHAGV

SEQ ID NO: 73094 - protein, 7 aa, synthetic construct
RMDTMHT

SEQ ID NO: 73095 - protein, 7 aa, synthetic construct
APKVETT

SEQ ID NO: 73096 - protein, 7 aa, synthetic construct
LIRHPQD

SEQ ID NO: 73097 - protein, 7 aa, synthetic construct
LPNSMNV

SEQ ID NO: 73098 - protein, 7 aa, synthetic construct
KSNQSPG

SEQ ID NO: 73099 - protein, 7 aa, synthetic construct
LNQHSPN

SEQ ID NO: 73100 - protein, 7 aa, synthetic construct
TEAQGFG

SEQ ID NO: 73101 - protein, 7 aa, synthetic construct
TAGKVPT

SEQ ID NO: 73102 - protein, 7 aa, synthetic construct
IFDKSEG

SEQ ID NO: 73103 - protein, 7 aa, synthetic construct
RSTAPDM

SEQ ID NO: 73104 - protein, 7 aa, synthetic construct
GSPKLVD

SEQ ID NO: 73105 - protein, 7 aa, synthetic construct
FVTMQKE

SEQ ID NO: 73106 - protein, 7 aa, synthetic construct
TMKGGQA

SEQ ID NO: 73107 - protein, 7 aa, synthetic construct
HHMKGMD

SEQ ID NO: 73108 - protein, 7 aa, synthetic construct
FARESVA

SEQ ID NO: 73109 - protein, 7 aa, synthetic construct
NREEHGV

SEQ ID NO: 73110 - protein, 7 aa, synthetic construct
NINFQRG

SEQ ID NO: 73111 - protein, 7 aa, synthetic construct
NGAQKYS

SEQ ID NO: 73112 - protein, 7 aa, synthetic construct
RDKSPGG

SEQ ID NO: 73113 - protein, 7 aa, synthetic construct
TNVMGHG

SEQ ID NO: 73114 - protein, 7 aa, synthetic construct
DTRVSKS

SEQ ID NO: 73115 - protein, 7 aa, synthetic construct
NKYGSSA

SEQ ID NO: 73116 - protein, 7 aa, synthetic construct
TSANHTA

SEQ ID NO: 73117 - protein, 7 aa, synthetic construct
NEFMKHA

SEQ ID NO: 73118 - protein, 7 aa, synthetic construct
LANNLKL

SEQ ID NO: 73119 - protein, 7 aa, synthetic construct
NILQSKP

SEQ ID NO: 73120 - protein, 7 aa, synthetic construct
QGPIVLP

SEQ ID NO: 73121 - protein, 7 aa, synthetic construct
THAQSEL

SEQ ID NO: 73122 - protein, 7 aa, synthetic construct
QMPKPHL

SEQ ID NO: 73123 - protein, 7 aa, synthetic construct
TVEVTGR

SEQ ID NO: 73124 - protein, 7 aa, synthetic construct
SMGKTQA

SEQ ID NO: 73125 - protein, 7 aa, synthetic construct
VMVDRIG

SEQ ID NO: 73126 - protein, 7 aa, synthetic construct
GPTGSQD

SEQ ID NO: 73127 - protein, 7 aa, synthetic construct
LVGTKFG

SEQ ID NO: 73128 - protein, 7 aa, synthetic construct
QRNNVSG

SEQ ID NO: 73129 - protein, 7 aa, synthetic construct
YNGMQSR

SEQ ID NO: 73130 - protein, 7 aa, synthetic construct
WPNSDQF

SEQ ID NO: 73131 - protein, 7 aa, synthetic construct
FGQQHGR

SEQ ID NO: 73132 - protein, 7 aa, synthetic construct
QQMGPKL

SEQ ID NO: 73133 - protein, 7 aa, synthetic construct
GSKSNMP

SEQ ID NO: 73134 - protein, 7 aa, synthetic construct
GIGNNRA

SEQ ID NO: 73135 - protein, 7 aa, synthetic construct
KVIGVVQ

SEQ ID NO: 73136 - protein, 7 aa, synthetic construct
PSPNKPN

SEQ ID NO: 73137 - protein, 7 aa, synthetic construct
HVKGMVT

SEQ ID NO: 73138 - protein, 7 aa, synthetic construct
GPKNHVV

SEQ ID NO: 73139 - protein, 7 aa, synthetic construct
LEPRHRM

SEQ ID NO: 73140 - protein, 7 aa, synthetic construct
YYKNQSY

SEQ ID NO: 73141 - protein, 7 aa, synthetic construct
MSAEWKD

SEQ ID NO: 73142 - protein, 7 aa, synthetic construct
GKFETST

SEQ ID NO: 73143 - protein, 7 aa, synthetic construct
NLERYKE

SEQ ID NO: 73144 - protein, 7 aa, synthetic construct
NTVSGRP

SEQ ID NO: 73145 - protein, 7 aa, synthetic construct
VGLTHGT

SEQ ID NO: 73146 - protein, 7 aa, synthetic construct
SAHHNLP

SEQ ID NO: 73147 - protein, 7 aa, synthetic construct
EWKPNLI

SEQ ID NO: 73148 - protein, 7 aa, synthetic construct
SQGTGFK

SEQ ID NO: 73149 - protein, 7 aa, synthetic construct
SQQIQLR

SEQ ID NO: 73150 - protein, 7 aa, synthetic construct
FIGNHVL

SEQ ID NO: 73151 - protein, 7 aa, synthetic construct
NEGVRVA

SEQ ID NO: 73152 - protein, 7 aa, synthetic construct
HHSQPKV

SEQ ID NO: 73153 - protein, 7 aa, synthetic construct
RKDTTQS

SEQ ID NO: 73154 - protein, 7 aa, synthetic construct
RQPHKDT

SEQ ID NO: 73155 - protein, 7 aa, synthetic construct
MTPVFKN

SEQ ID NO: 73156 - protein, 7 aa, synthetic construct
SLVNQTG

SEQ ID NO: 73157 - protein, 7 aa, synthetic construct
ATRLPVD

SEQ ID NO: 73158 - protein, 7 aa, synthetic construct
AFSPKPV

SEQ ID NO: 73159 - protein, 7 aa, synthetic construct
VAKDAFS

SEQ ID NO: 73160 - protein, 7 aa, synthetic construct
VPQLMTE

SEQ ID NO: 73161 - protein, 7 aa, synthetic construct
STLRSQM

SEQ ID NO: 73162 - protein, 7 aa, synthetic construct
NGRTPPH

SEQ ID NO: 73163 - protein, 7 aa, synthetic construct
INGKTDG

SEQ ID NO: 73164 - protein, 7 aa, synthetic construct
VQMSTQK

SEQ ID NO: 73165 - protein, 7 aa, synthetic construct
HEFKPVM

SEQ ID NO: 73166 - protein, 7 aa, synthetic construct
VMRVTID

SEQ ID NO: 73167 - protein, 7 aa, synthetic construct
GMRVSGL

SEQ ID NO: 73168 - protein, 7 aa, synthetic construct
HRQADEL

SEQ ID NO: 73169 - protein, 7 aa, synthetic construct
QPWQGHP

SEQ ID NO: 73170 - protein, 7 aa, synthetic construct
YLKQTIQ

SEQ ID NO: 73171 - protein, 7 aa, synthetic construct
QKTEYGG

SEQ ID NO: 73172 - protein, 7 aa, synthetic construct
QPTKIIQ

SEQ ID NO: 73173 - protein, 7 aa, synthetic construct
SMIKNIA

SEQ ID NO: 73174 - protein, 7 aa, synthetic construct
LYQQEPK

SEQ ID NO: 73175 - protein, 7 aa, synthetic construct
NRHPSQY

SEQ ID NO: 73176 - protein, 7 aa, synthetic construct
TINFQGG

SEQ ID NO: 73177 - protein, 7 aa, synthetic construct
HSPKELG

SEQ ID NO: 73178 - protein, 7 aa, synthetic construct
TSNTRQT

SEQ ID NO: 73179 - protein, 7 aa, synthetic construct
QEVPRKE

SEQ ID NO: 73180 - protein, 7 aa, synthetic construct
LDIKLGA

SEQ ID NO: 73181 - protein, 7 aa, synthetic construct
RKETSGA

SEQ ID NO: 73182 - protein, 7 aa, synthetic construct
HEHRGTQ

SEQ ID NO: 73183 - protein, 7 aa, synthetic construct
KKEQSFG

SEQ ID NO: 73184 - protein, 7 aa, synthetic construct
NYNPHIA

SEQ ID NO: 73185 - protein, 7 aa, synthetic construct
FDKMVQA

SEQ ID NO: 73186 - protein, 7 aa, synthetic construct
GFRDTAS

SEQ ID NO: 73187 - protein, 7 aa, synthetic construct
SVPHSAL

SEQ ID NO: 73188 - protein, 7 aa, synthetic construct
GLMHNHE

SEQ ID NO: 73189 - protein, 7 aa, synthetic construct
FNERPYA

SEQ ID NO: 73190 - protein, 7 aa, synthetic construct
HYGQSAI

SEQ ID NO: 73191 - protein, 7 aa, synthetic construct
GPERYRV

SEQ ID NO: 73192 - protein, 7 aa, synthetic construct
QAKGASM

SEQ ID NO: 73193 - protein, 7 aa, synthetic construct
IRMSQQH

SEQ ID NO: 73194 - protein, 7 aa, synthetic construct
IIERQPG

SEQ ID NO: 73195 - protein, 7 aa, synthetic construct
ILHDQSH

SEQ ID NO: 73196 - protein, 7 aa, synthetic construct
AKNNGMH

SEQ ID NO: 73197 - protein, 7 aa, synthetic construct
HHLNHAP

SEQ ID NO: 73198 - protein, 7 aa, synthetic construct
RPNNANP

SEQ ID NO: 73199 - protein, 7 aa, synthetic construct
TTSMPEK

SEQ ID NO: 73200 - protein, 7 aa, synthetic construct
PRGSNAD

SEQ ID NO: 73201 - protein, 7 aa, synthetic construct
PVRSGNA

SEQ ID NO: 73202 - protein, 7 aa, synthetic construct
WHSAREQ

SEQ ID NO: 73203 - protein, 7 aa, synthetic construct
DARIRER

SEQ ID NO: 73204 - protein, 7 aa, synthetic construct
RINAERQ

SEQ ID NO: 73205 - protein, 7 aa, synthetic construct
INSVQNN

SEQ ID NO: 73206 - protein, 7 aa, synthetic construct
MHPMPKN

SEQ ID NO: 73207 - protein, 7 aa, synthetic construct
EFARMEK

SEQ ID NO: 73208 - protein, 7 aa, synthetic construct
RAPGTPS

SEQ ID NO: 73209 - protein, 7 aa, synthetic construct
CAKDTCL

SEQ ID NO: 73210 - protein, 7 aa, synthetic construct
SMMHALG

SEQ ID NO: 73211 - protein, 7 aa, synthetic construct
PRQAAQG

SEQ ID NO: 73212 - protein, 7 aa, synthetic construct
HQIYSES

SEQ ID NO: 73213 - protein, 7 aa, synthetic construct
VASSGFY

SEQ ID NO: 73214 - protein, 7 aa, synthetic construct
QPARYMD

SEQ ID NO: 73215 - protein, 7 aa, synthetic construct
ESGKTAG

SEQ ID NO: 73216 - protein, 7 aa, synthetic construct
PRKDIIV

SEQ ID NO: 73217 - protein, 7 aa, synthetic construct
WEPKYGS

SEQ ID NO: 73218 - protein, 7 aa, synthetic construct
VTTVSRI

SEQ ID NO: 73219 - protein, 7 aa, synthetic construct
NDYAQFP

SEQ ID NO: 73220 - protein, 7 aa, synthetic construct
ENHTVKA

SEQ ID NO: 73221 - protein, 7 aa, synthetic construct
KTAMAKE

SEQ ID NO: 73222 - protein, 7 aa, synthetic construct
SKSGIQM

SEQ ID NO: 73223 - protein, 7 aa, synthetic construct
ITYAPQG

SEQ ID NO: 73224 - protein, 7 aa, synthetic construct
NRMGATG

SEQ ID NO: 73225 - protein, 7 aa, synthetic construct
RHYTATD

SEQ ID NO: 73226 - protein, 7 aa, synthetic construct
KTSNGGP

SEQ ID NO: 73227 - protein, 7 aa, synthetic construct
SNKYVSA

SEQ ID NO: 73228 - protein, 7 aa, synthetic construct
GMRTGSE

SEQ ID NO: 73229 - protein, 7 aa, synthetic construct
SRQIDVK

SEQ ID NO: 73230 - protein, 7 aa, synthetic construct
MKANSSP

SEQ ID NO: 73231 - protein, 7 aa, synthetic construct
IKDSHRM

SEQ ID NO: 73232 - protein, 7 aa, synthetic construct
FGPMQME

SEQ ID NO: 73233 - protein, 7 aa, synthetic construct
RKLEDMK

SEQ ID NO: 73234 - protein, 7 aa, synthetic construct
QIIPRNT

SEQ ID NO: 73235 - protein, 7 aa, synthetic construct
QIRPQTD

SEQ ID NO: 73236 - protein, 7 aa, synthetic construct
CGQACKP

SEQ ID NO: 73237 - protein, 7 aa, synthetic construct
INSDKPT

SEQ ID NO: 73238 - protein, 7 aa, synthetic construct
TITDRNL

SEQ ID NO: 73239 - protein, 7 aa, synthetic construct
YPSQFGG

SEQ ID NO: 73240 - protein, 7 aa, synthetic construct
WMSGTPQ

SEQ ID NO: 73241 - protein, 7 aa, synthetic construct
VYVSGGM

SEQ ID NO: 73242 - protein, 7 aa, synthetic construct
RPHINGV

SEQ ID NO: 73243 - protein, 7 aa, synthetic construct
AHEITRG

SEQ ID NO: 73244 - protein, 7 aa, synthetic construct
VKEVRLE

SEQ ID NO: 73245 - protein, 7 aa, synthetic construct
MNHTPKE

SEQ ID NO: 73246 - protein, 7 aa, synthetic construct
NQQPHRD

SEQ ID NO: 73247 - protein, 7 aa, synthetic construct
ANKFDPA

SEQ ID NO: 73248 - protein, 7 aa, synthetic construct
DLRHGPV

SEQ ID NO: 73249 - protein, 7 aa, synthetic construct
IHEGKIV

SEQ ID NO: 73250 - protein, 7 aa, synthetic construct
FMAQKSP

SEQ ID NO: 73251 - protein, 7 aa, synthetic construct
MKEGGGP

SEQ ID NO: 73252 - protein, 7 aa, synthetic construct
GAKMGAG

SEQ ID NO: 73253 - protein, 7 aa, synthetic construct
KNKLADM

SEQ ID NO: 73254 - protein, 7 aa, synthetic construct
GNYNLKE

SEQ ID NO: 73255 - protein, 7 aa, synthetic construct
RESVVQH

SEQ ID NO: 73256 - protein, 7 aa, synthetic construct
NNASTAY

SEQ ID NO: 73257 - protein, 7 aa, synthetic construct
RTTPPNM

SEQ ID NO: 73258 - protein, 7 aa, synthetic construct
GNGKSTP

SEQ ID NO: 73259 - protein, 7 aa, synthetic construct
ASQKEYP

SEQ ID NO: 73260 - protein, 7 aa, synthetic construct
FKKETYN

SEQ ID NO: 73261 - protein, 7 aa, synthetic construct
TTSYGQT

SEQ ID NO: 73262 - protein, 7 aa, synthetic construct
TAQQINN

SEQ ID NO: 73263 - protein, 7 aa, synthetic construct
PMRYQEE

SEQ ID NO: 73264 - protein, 7 aa, synthetic construct
YNSASGK

SEQ ID NO: 73265 - protein, 7 aa, synthetic construct
KINAKDY

SEQ ID NO: 73266 - protein, 7 aa, synthetic construct
WKDHQLR

SEQ ID NO: 73267 - protein, 7 aa, synthetic construct
ATSTSAR

SEQ ID NO: 73268 - protein, 7 aa, synthetic construct
YVGHDMG

SEQ ID NO: 73269 - protein, 7 aa, synthetic construct
ALPKSNG

SEQ ID NO: 73270 - protein, 7 aa, synthetic construct
NMQITQK

SEQ ID NO: 73271 - protein, 7 aa, synthetic construct
THAIGEV

SEQ ID NO: 73272 - protein, 7 aa, synthetic construct
FGAHAAD

SEQ ID NO: 73273 - protein, 7 aa, synthetic construct
SGQFTGG

SEQ ID NO: 73274 - protein, 7 aa, synthetic construct
VVHVSVA

SEQ ID NO: 73275 - protein, 7 aa, synthetic construct
IQSLGTH

SEQ ID NO: 73276 - protein, 7 aa, synthetic construct
EEPKGRG

SEQ ID NO: 73277 - protein, 7 aa, synthetic construct
YPGQMVK

SEQ ID NO: 73278 - protein, 7 aa, synthetic construct
AQFKTSV

SEQ ID NO: 73279 - protein, 7 aa, synthetic construct
GGRESHS

SEQ ID NO: 73280 - protein, 7 aa, synthetic construct
NTLHLQG

SEQ ID NO: 73281 - protein, 7 aa, synthetic construct
LTQGNNQ

SEQ ID NO: 73282 - protein, 7 aa, synthetic construct
FSKNYIH

SEQ ID NO: 73283 - protein, 7 aa, synthetic construct
YKTQMQS

SEQ ID NO: 73284 - protein, 7 aa, synthetic construct
VRDARDP

SEQ ID NO: 73285 - protein, 7 aa, synthetic construct
RPPNAGA

SEQ ID NO: 73286 - protein, 7 aa, synthetic construct
TEKKTFA

SEQ ID NO: 73287 - protein, 7 aa, synthetic construct
VEIKKTA

SEQ ID NO: 73288 - protein, 7 aa, synthetic construct
FNIRSDH

SEQ ID NO: 73289 - protein, 7 aa, synthetic construct
QKNMSNP

SEQ ID NO: 73290 - protein, 7 aa, synthetic construct
FNKPAQG

SEQ ID NO: 73291 - protein, 7 aa, synthetic construct
ITEHNKK

SEQ ID NO: 73292 - protein, 7 aa, synthetic construct
DAKIREK

SEQ ID NO: 73293 - protein, 7 aa, synthetic construct
RNNPEEW

SEQ ID NO: 73294 - protein, 7 aa, synthetic construct
MRNGTPI

SEQ ID NO: 73295 - protein, 7 aa, synthetic construct
YKAQPIH

SEQ ID NO: 73296 - protein, 7 aa, synthetic construct
TNKTAAA

SEQ ID NO: 73297 - protein, 7 aa, synthetic construct
HPYRQVE

SEQ ID NO: 73298 - protein, 7 aa, synthetic construct
TGTSNQT

SEQ ID NO: 73299 - protein, 7 aa, synthetic construct
RAGTKWD

SEQ ID NO: 73300 - protein, 7 aa, synthetic construct
AEPRWQG

SEQ ID NO: 73301 - protein, 7 aa, synthetic construct
KPQATNA

SEQ ID NO: 73302 - protein, 7 aa, synthetic construct
NHKSTGE

SEQ ID NO: 73303 - protein, 7 aa, synthetic construct
LPNNPSR

SEQ ID NO: 73304 - protein, 7 aa, synthetic construct
VAGFSQA

SEQ ID NO: 73305 - protein, 7 aa, synthetic construct
QRNGSQA

SEQ ID NO: 73306 - protein, 7 aa, synthetic construct
FHSIGPQ

SEQ ID NO: 73307 - protein, 7 aa, synthetic construct
RYPDVKQ

SEQ ID NO: 73308 - protein, 7 aa, synthetic construct
KLITLED

SEQ ID NO: 73309 - protein, 7 aa, synthetic construct
LKNMSNP

SEQ ID NO: 73310 - protein, 7 aa, synthetic construct
MGKNQAG

SEQ ID NO: 73311 - protein, 7 aa, synthetic construct
TVKQYDG

SEQ ID NO: 73312 - protein, 7 aa, synthetic construct
TKTATTV

SEQ ID NO: 73313 - protein, 7 aa, synthetic construct
GKEPTTA

SEQ ID NO: 73314 - protein, 7 aa, synthetic construct
IDTVYKE

SEQ ID NO: 73315 - protein, 7 aa, synthetic construct
YSKDPSD

SEQ ID NO: 73316 - protein, 7 aa, synthetic construct
PTGKAVG

SEQ ID NO: 73317 - protein, 7 aa, synthetic construct
PKTPEWK

SEQ ID NO: 73318 - protein, 7 aa, synthetic construct
AHIQGGS

SEQ ID NO: 73319 - protein, 7 aa, synthetic construct
LGVNHQR

SEQ ID NO: 73320 - protein, 7 aa, synthetic construct
FTNKGNW

SEQ ID NO: 73321 - protein, 7 aa, synthetic construct
TVRSNSP

SEQ ID NO: 73322 - protein, 7 aa, synthetic construct
GVMGFTA

SEQ ID NO: 73323 - protein, 7 aa, synthetic construct
MSAGPNS

SEQ ID NO: 73324 - protein, 7 aa, synthetic construct
DTHKRVE

SEQ ID NO: 73325 - protein, 7 aa, synthetic construct
NEKGKAS

SEQ ID NO: 73326 - protein, 7 aa, synthetic construct
QAKNFEG

SEQ ID NO: 73327 - protein, 7 aa, synthetic construct
TMPPSKI

SEQ ID NO: 73328 - protein, 7 aa, synthetic construct
DYPAMMG

SEQ ID NO: 73329 - protein, 7 aa, synthetic construct
WMKKEAV

SEQ ID NO: 73330 - protein, 7 aa, synthetic construct
EASKMKH

SEQ ID NO: 73331 - protein, 7 aa, synthetic construct
KEHKMAG

SEQ ID NO: 73332 - protein, 7 aa, synthetic construct
SSKDANV

SEQ ID NO: 73333 - protein, 7 aa, synthetic construct
VHLNGIS

SEQ ID NO: 73334 - protein, 7 aa, synthetic construct
DRESIRS

SEQ ID NO: 73335 - protein, 7 aa, synthetic construct
PASSSGV

SEQ ID NO: 73336 - protein, 7 aa, synthetic construct
VIKQSQM

SEQ ID NO: 73337 - protein, 7 aa, synthetic construct
HIVRAGE

SEQ ID NO: 73338 - protein, 7 aa, synthetic construct
LGQFQAR

SEQ ID NO: 73339 - protein, 7 aa, synthetic construct
TYNGGII

SEQ ID NO: 73340 - protein, 7 aa, synthetic construct
HPGTARH

SEQ ID NO: 73341 - protein, 7 aa, synthetic construct
WGEVRNP

SEQ ID NO: 73342 - protein, 7 aa, synthetic construct
SSMSQIG

SEQ ID NO: 73343 - protein, 7 aa, synthetic construct
SADKGVA

SEQ ID NO: 73344 - protein, 7 aa, synthetic construct
RDKQQAD

SEQ ID NO: 73345 - protein, 7 aa, synthetic construct
NMHATPQ

SEQ ID NO: 73346 - protein, 7 aa, synthetic construct
EVSTGRM

SEQ ID NO: 73347 - protein, 7 aa, synthetic construct
KQSYSDG

SEQ ID NO: 73348 - protein, 7 aa, synthetic construct
KNSQTRE

SEQ ID NO: 73349 - protein, 7 aa, synthetic construct
RPAHPYS

SEQ ID NO: 73350 - protein, 7 aa, synthetic construct
FLKTALG

SEQ ID NO: 73351 - protein, 7 aa, synthetic construct
WNKSSFA

SEQ ID NO: 73352 - protein, 7 aa, synthetic construct
EGSWKMD

SEQ ID NO: 73353 - protein, 7 aa, synthetic construct
DISNRDK

SEQ ID NO: 73354 - protein, 7 aa, synthetic construct
NIRERDM

SEQ ID NO: 73355 - protein, 7 aa, synthetic construct
GVTNNQG

SEQ ID NO: 73356 - protein, 7 aa, synthetic construct
MKSFEHH

SEQ ID NO: 73357 - protein, 7 aa, synthetic construct
ARMLKEV

SEQ ID NO: 73358 - protein, 7 aa, synthetic construct
QMHTQHK

SEQ ID NO: 73359 - protein, 7 aa, synthetic construct
KKMQAEA

SEQ ID NO: 73360 - protein, 7 aa, synthetic construct
WGIKGID

SEQ ID NO: 73361 - protein, 7 aa, synthetic construct
NGSTRSF

SEQ ID NO: 73362 - protein, 7 aa, synthetic construct
NEAQYTA

SEQ ID NO: 73363 - protein, 7 aa, synthetic construct
TEPRRIA

SEQ ID NO: 73364 - protein, 7 aa, synthetic construct
SAVNKDH

SEQ ID NO: 73365 - protein, 7 aa, synthetic construct
KLMVHSP

SEQ ID NO: 73366 - protein, 7 aa, synthetic construct
TVRGMFD

SEQ ID NO: 73367 - protein, 7 aa, synthetic construct
TKAQAMG

SEQ ID NO: 73368 - protein, 7 aa, synthetic construct
YDQQTRT

SEQ ID NO: 73369 - protein, 7 aa, synthetic construct
TKSGYPA

SEQ ID NO: 73370 - protein, 7 aa, synthetic construct
KATGMGA

SEQ ID NO: 73371 - protein, 7 aa, synthetic construct
MNSALSG

SEQ ID NO: 73372 - protein, 7 aa, synthetic construct
NYEQMNK

SEQ ID NO: 73373 - protein, 7 aa, synthetic construct
FMTMKLD

SEQ ID NO: 73374 - protein, 7 aa, synthetic construct
ATHAAHE

SEQ ID NO: 73375 - protein, 7 aa, synthetic construct
MPRDQPI

SEQ ID NO: 73376 - protein, 7 aa, synthetic construct
YHESMPH

SEQ ID NO: 73377 - protein, 7 aa, synthetic construct
DPYHNMG

SEQ ID NO: 73378 - protein, 7 aa, synthetic construct
GPKSNLG

SEQ ID NO: 73379 - protein, 7 aa, synthetic construct
HSHRDAD

SEQ ID NO: 73380 - protein, 7 aa, synthetic construct
THYAHHA

SEQ ID NO: 73381 - protein, 7 aa, synthetic construct
YDRDRSV

SEQ ID NO: 73382 - protein, 7 aa, synthetic construct
VGHSLLE

SEQ ID NO: 73383 - protein, 7 aa, synthetic construct
GFPHRLE

SEQ ID NO: 73384 - protein, 7 aa, synthetic construct
LGSAGYR

SEQ ID NO: 73385 - protein, 7 aa, synthetic construct
VMGAFNS

SEQ ID NO: 73386 - protein, 7 aa, synthetic construct
QARMSIT

SEQ ID NO: 73387 - protein, 7 aa, synthetic construct
GGMRTKE

SEQ ID NO: 73388 - protein, 7 aa, synthetic construct
RAPTSNS

SEQ ID NO: 73389 - protein, 7 aa, synthetic construct
VGVQQLS

SEQ ID NO: 73390 - protein, 7 aa, synthetic construct
SFVRETH

SEQ ID NO: 73391 - protein, 7 aa, synthetic construct
TIANSHA

SEQ ID NO: 73392 - protein, 7 aa, synthetic construct
RTNHPHL

SEQ ID NO: 73393 - protein, 7 aa, synthetic construct
QQGTAMV

SEQ ID NO: 73394 - protein, 7 aa, synthetic construct
VHPNSTP

SEQ ID NO: 73395 - protein, 7 aa, synthetic construct
NVETGRT

SEQ ID NO: 73396 - protein, 7 aa, synthetic construct
THYLHHP

SEQ ID NO: 73397 - protein, 7 aa, synthetic construct
ADMVMRG

SEQ ID NO: 73398 - protein, 7 aa, synthetic construct
HMTTTEV

SEQ ID NO: 73399 - protein, 7 aa, synthetic construct
VKADKIH

SEQ ID NO: 73400 - protein, 7 aa, synthetic construct
SSKNSAL

SEQ ID NO: 73401 - protein, 7 aa, synthetic construct
YDKRMDG

SEQ ID NO: 73402 - protein, 7 aa, synthetic construct
DKAARDM

SEQ ID NO: 73403 - protein, 7 aa, synthetic construct
DIGRTRV

SEQ ID NO: 73404 - protein, 7 aa, synthetic construct
GWNKAEY

SEQ ID NO: 73405 - protein, 7 aa, synthetic construct
MPAERNS

SEQ ID NO: 73406 - protein, 7 aa, synthetic construct
PQHNHMA

SEQ ID NO: 73407 - protein, 7 aa, synthetic construct
KVHNNDR

SEQ ID NO: 73408 - protein, 7 aa, synthetic construct
GWERALA

SEQ ID NO: 73409 - protein, 7 aa, synthetic construct
QFDVRDT

SEQ ID NO: 73410 - protein, 7 aa, synthetic construct
PHAGNKY

SEQ ID NO: 73411 - protein, 7 aa, synthetic construct
HNKQVTD

SEQ ID NO: 73412 - protein, 7 aa, synthetic construct
GAHDKRV

SEQ ID NO: 73413 - protein, 7 aa, synthetic construct
PDAHTAR

SEQ ID NO: 73414 - protein, 7 aa, synthetic construct
NKVRHEP

SEQ ID NO: 73415 - protein, 7 aa, synthetic construct
YKSSQQA

SEQ ID NO: 73416 - protein, 7 aa, synthetic construct
MMNKLQP

SEQ ID NO: 73417 - protein, 7 aa, synthetic construct
CKGQVCE

SEQ ID NO: 73418 - protein, 7 aa, synthetic construct
QSAYPAM

SEQ ID NO: 73419 - protein, 7 aa, synthetic construct
IWSGTSS

SEQ ID NO: 73420 - protein, 7 aa, synthetic construct
LRPNSYD

SEQ ID NO: 73421 - protein, 7 aa, synthetic construct
SISRHGS

SEQ ID NO: 73422 - protein, 7 aa, synthetic construct
NPTKTGA

SEQ ID NO: 73423 - protein, 7 aa, synthetic construct
LSEMTKM

SEQ ID NO: 73424 - protein, 7 aa, synthetic construct
KQQMGRD

SEQ ID NO: 73425 - protein, 7 aa, synthetic construct
VTNSRVD

SEQ ID NO: 73426 - protein, 7 aa, synthetic construct
FKPGKAE

SEQ ID NO: 73427 - protein, 7 aa, synthetic construct
DAHHRMQ

SEQ ID NO: 73428 - protein, 7 aa, synthetic construct
KNTGNTV

SEQ ID NO: 73429 - protein, 7 aa, synthetic construct
YRHEHSP

SEQ ID NO: 73430 - protein, 7 aa, synthetic construct
VNIKADA

SEQ ID NO: 73431 - protein, 7 aa, synthetic construct
GQVALNS

SEQ ID NO: 73432 - protein, 7 aa, synthetic construct
SKSSNTV

SEQ ID NO: 73433 - protein, 7 aa, synthetic construct
RPSASNS

SEQ ID NO: 73434 - protein, 7 aa, synthetic construct
FNNSEGP

SEQ ID NO: 73435 - protein, 7 aa, synthetic construct
EGGSINK

SEQ ID NO: 73436 - protein, 7 aa, synthetic construct
EVFHTSG

SEQ ID NO: 73437 - protein, 7 aa, synthetic construct
DYLFKEG

SEQ ID NO: 73438 - protein, 7 aa, synthetic construct
NSKRDDW

SEQ ID NO: 73439 - protein, 7 aa, synthetic construct
EFYKEDA

SEQ ID NO: 73440 - protein, 7 aa, synthetic construct
KSKDGMS

SEQ ID NO: 73441 - protein, 7 aa, synthetic construct
HMGIGPV

SEQ ID NO: 73442 - protein, 7 aa, synthetic construct
EASKTKP

SEQ ID NO: 73443 - protein, 7 aa, synthetic construct
FKVANYI

SEQ ID NO: 73444 - protein, 7 aa, synthetic construct
LPHFTLG

SEQ ID NO: 73445 - protein, 7 aa, synthetic construct
ANGKSFN

SEQ ID NO: 73446 - protein, 7 aa, synthetic construct
KSNNPNA

SEQ ID NO: 73447 - protein, 7 aa, synthetic construct
KPTVPAS

SEQ ID NO: 73448 - protein, 7 aa, synthetic construct
IQKTASS

SEQ ID NO: 73449 - protein, 7 aa, synthetic construct
YRVGMLN

SEQ ID NO: 73450 - protein, 7 aa, synthetic construct
APLHHEF

SEQ ID NO: 73451 - protein, 7 aa, synthetic construct
HAPGTNF

SEQ ID NO: 73452 - protein, 7 aa, synthetic construct
RQTPGAA

SEQ ID NO: 73453 - protein, 7 aa, synthetic construct
HATQIPE

SEQ ID NO: 73454 - protein, 7 aa, synthetic construct
TPHRPVH

SEQ ID NO: 73455 - protein, 7 aa, synthetic construct
LGNTKSG

SEQ ID NO: 73456 - protein, 7 aa, synthetic construct
NTRTPVE

SEQ ID NO: 73457 - protein, 7 aa, synthetic construct
EGKAHLS

SEQ ID NO: 73458 - protein, 7 aa, synthetic construct
TLHHYTE

SEQ ID NO: 73459 - protein, 7 aa, synthetic construct
NIHGTHV

SEQ ID NO: 73460 - protein, 7 aa, synthetic construct
GKQAINN

SEQ ID NO: 73461 - protein, 7 aa, synthetic construct
LVPAHRM

SEQ ID NO: 73462 - protein, 7 aa, synthetic construct
SFSTSPH

SEQ ID NO: 73463 - protein, 7 aa, synthetic construct
HRGEQKS

SEQ ID NO: 73464 - protein, 7 aa, synthetic construct
PPMNPGF

SEQ ID NO: 73465 - protein, 7 aa, synthetic construct
LQYNGAL

SEQ ID NO: 73466 - protein, 7 aa, synthetic construct
SPRSGVS

SEQ ID NO: 73467 - protein, 7 aa, synthetic construct
QGVTRST

SEQ ID NO: 73468 - protein, 7 aa, synthetic construct
EGYRQEM

SEQ ID NO: 73469 - protein, 7 aa, synthetic construct
AGVHLNR

SEQ ID NO: 73470 - protein, 7 aa, synthetic construct
MGPNLAH

SEQ ID NO: 73471 - protein, 7 aa, synthetic construct
TNKNVGD

SEQ ID NO: 73472 - protein, 7 aa, synthetic construct
NTRQFQA

SEQ ID NO: 73473 - protein, 7 aa, synthetic construct
MANTQYA

SEQ ID NO: 73474 - protein, 7 aa, synthetic construct
TQGKPPI

SEQ ID NO: 73475 - protein, 7 aa, synthetic construct
GAPGKMS

SEQ ID NO: 73476 - protein, 7 aa, synthetic construct
KVLNHLS

SEQ ID NO: 73477 - protein, 7 aa, synthetic construct
LEKHPRT

SEQ ID NO: 73478 - protein, 7 aa, synthetic construct
TKHPGTP

SEQ ID NO: 73479 - protein, 7 aa, synthetic construct
TNFLHSD

SEQ ID NO: 73480 - protein, 7 aa, synthetic construct
TRDTSKA

SEQ ID NO: 73481 - protein, 7 aa, synthetic construct
SNRGHDP

SEQ ID NO: 73482 - protein, 7 aa, synthetic construct
KTKDSSI

SEQ ID NO: 73483 - protein, 7 aa, synthetic construct
IFTQTEG

SEQ ID NO: 73484 - protein, 7 aa, synthetic construct
HQKKLDQ

SEQ ID NO: 73485 - protein, 7 aa, synthetic construct
NAKSQAG

SEQ ID NO: 73486 - protein, 7 aa, synthetic construct
KQFVMTE

SEQ ID NO: 73487 - protein, 7 aa, synthetic construct
NRLTKSD

SEQ ID NO: 73488 - protein, 7 aa, synthetic construct
KGSREGW

SEQ ID NO: 73489 - protein, 7 aa, synthetic construct
GGVVNPH

SEQ ID NO: 73490 - protein, 7 aa, synthetic construct
PQQPVPL

SEQ ID NO: 73491 - protein, 7 aa, synthetic construct
QASGVKV

SEQ ID NO: 73492 - protein, 7 aa, synthetic construct
TPKSGSS

SEQ ID NO: 73493 - protein, 7 aa, synthetic construct
ERRDPMA

SEQ ID NO: 73494 - protein, 7 aa, synthetic construct
QKGSMQG

SEQ ID NO: 73495 - protein, 7 aa, synthetic construct
GPQSRLV

SEQ ID NO: 73496 - protein, 7 aa, synthetic construct
RSSTHET

SEQ ID NO: 73497 - protein, 7 aa, synthetic construct
GFKVQYQ

SEQ ID NO: 73498 - protein, 7 aa, synthetic construct
SIKLGIE

SEQ ID NO: 73499 - protein, 7 aa, synthetic construct
TKDTKFS

SEQ ID NO: 73500 - protein, 7 aa, synthetic construct
WENHQGG

SEQ ID NO: 73501 - protein, 7 aa, synthetic construct
NKTGPTN

SEQ ID NO: 73502 - protein, 7 aa, synthetic construct
EGMGPSK

SEQ ID NO: 73503 - protein, 7 aa, synthetic construct
MYAAGPS

SEQ ID NO: 73504 - protein, 7 aa, synthetic construct
QNYAPRE

SEQ ID NO: 73505 - protein, 7 aa, synthetic construct
SKQNSVG

SEQ ID NO: 73506 - protein, 7 aa, synthetic construct
RHAVGVD

SEQ ID NO: 73507 - protein, 7 aa, synthetic construct
GPKQNTG

SEQ ID NO: 73508 - protein, 7 aa, synthetic construct
ADPRISV

SEQ ID NO: 73509 - protein, 7 aa, synthetic construct
IAPTQRQ

SEQ ID NO: 73510 - protein, 7 aa, synthetic construct
NNAPGHQ

SEQ ID NO: 73511 - protein, 7 aa, synthetic construct
MKTVSQA

SEQ ID NO: 73512 - protein, 7 aa, synthetic construct
YLNMHSG

SEQ ID NO: 73513 - protein, 7 aa, synthetic construct
KSYNSTD

SEQ ID NO: 73514 - protein, 7 aa, synthetic construct
RESLFPG

SEQ ID NO: 73515 - protein, 7 aa, synthetic construct
GPYPSAH

SEQ ID NO: 73516 - protein, 7 aa, synthetic construct
KTNNGAV

SEQ ID NO: 73517 - protein, 7 aa, synthetic construct
AAEMRKA

SEQ ID NO: 73518 - protein, 7 aa, synthetic construct
SQFPFQE

SEQ ID NO: 73519 - protein, 7 aa, synthetic construct
WHPTNMP

SEQ ID NO: 73520 - protein, 7 aa, synthetic construct
SAVLKES

SEQ ID NO: 73521 - protein, 7 aa, synthetic construct
TQGPRQA

SEQ ID NO: 73522 - protein, 7 aa, synthetic construct
DRRVTMN

SEQ ID NO: 73523 - protein, 7 aa, synthetic construct
QVHARNL

SEQ ID NO: 73524 - protein, 7 aa, synthetic construct
VLMNKIE

SEQ ID NO: 73525 - protein, 7 aa, synthetic construct
VISTNKY

SEQ ID NO: 73526 - protein, 7 aa, synthetic construct
EAKYTRD

SEQ ID NO: 73527 - protein, 7 aa, synthetic construct
VVSGKAF

SEQ ID NO: 73528 - protein, 7 aa, synthetic construct
NKFNLGA

SEQ ID NO: 73529 - protein, 7 aa, synthetic construct
HDGYHVV

SEQ ID NO: 73530 - protein, 7 aa, synthetic construct
DSQARAL

SEQ ID NO: 73531 - protein, 7 aa, synthetic construct
DRDRKHD

SEQ ID NO: 73532 - protein, 7 aa, synthetic construct
HRISIAG

SEQ ID NO: 73533 - protein, 7 aa, synthetic construct
NKYPQQA

SEQ ID NO: 73534 - protein, 7 aa, synthetic construct
LPKYNAP

SEQ ID NO: 73535 - protein, 7 aa, synthetic construct
KSTVDLE

SEQ ID NO: 73536 - protein, 7 aa, synthetic construct
EGHRYIG

SEQ ID NO: 73537 - protein, 7 aa, synthetic construct
AKLQHQM

SEQ ID NO: 73538 - protein, 7 aa, synthetic construct
KAAITNP

SEQ ID NO: 73539 - protein, 7 aa, synthetic construct
AKSNVAA

SEQ ID NO: 73540 - protein, 7 aa, synthetic construct
VRQTQVP

SEQ ID NO: 73541 - protein, 7 aa, synthetic construct
YANAWPA

SEQ ID NO: 73542 - protein, 7 aa, synthetic construct
HEQAVKS

SEQ ID NO: 73543 - protein, 7 aa, synthetic construct
RYADKNE

SEQ ID NO: 73544 - protein, 7 aa, synthetic construct
RVMSSQA

SEQ ID NO: 73545 - protein, 7 aa, synthetic construct
NEKRSED

SEQ ID NO: 73546 - protein, 7 aa, synthetic construct
LSQHASM

SEQ ID NO: 73547 - protein, 7 aa, synthetic construct
QKSERGH

SEQ ID NO: 73548 - protein, 7 aa, synthetic construct
CDRGSEC

SEQ ID NO: 73549 - protein, 7 aa, synthetic construct
LHPHEGV

SEQ ID NO: 73550 - protein, 7 aa, synthetic construct
VQGMKDH

SEQ ID NO: 73551 - protein, 7 aa, synthetic construct
WKFEGQD

SEQ ID NO: 73552 - protein, 7 aa, synthetic construct
KINADAT

SEQ ID NO: 73553 - protein, 7 aa, synthetic construct
ISRTDKI

SEQ ID NO: 73554 - protein, 7 aa, synthetic construct
TGKGGIA

SEQ ID NO: 73555 - protein, 7 aa, synthetic construct
HVVANKV

SEQ ID NO: 73556 - protein, 7 aa, synthetic construct
FHGNKMH

SEQ ID NO: 73557 - protein, 7 aa, synthetic construct
FPSSSNP

SEQ ID NO: 73558 - protein, 7 aa, synthetic construct
DQKFRTF

SEQ ID NO: 73559 - protein, 7 aa, synthetic construct
VPHKFVD

SEQ ID NO: 73560 - protein, 7 aa, synthetic construct
IISHKDM

SEQ ID NO: 73561 - protein, 7 aa, synthetic construct
GGPFPNM

SEQ ID NO: 73562 - protein, 7 aa, synthetic construct
ENGSRAH

SEQ ID NO: 73563 - protein, 7 aa, synthetic construct
HHAATNR

SEQ ID NO: 73564 - protein, 7 aa, synthetic construct
EPLMVKG

SEQ ID NO: 73565 - protein, 7 aa, synthetic construct
HAPMTAM

SEQ ID NO: 73566 - protein, 7 aa, synthetic construct
TGPISGV

SEQ ID NO: 73567 - protein, 7 aa, synthetic construct
SVYNNQN

SEQ ID NO: 73568 - protein, 7 aa, synthetic construct
RTAPTAV

SEQ ID NO: 73569 - protein, 7 aa, synthetic construct
DGPRSVE

SEQ ID NO: 73570 - protein, 7 aa, synthetic construct
TRSQDHA

SEQ ID NO: 73571 - protein, 7 aa, synthetic construct
THTHVID

SEQ ID NO: 73572 - protein, 7 aa, synthetic construct
LLHTAQE

SEQ ID NO: 73573 - protein, 7 aa, synthetic construct
MDHNMHI

SEQ ID NO: 73574 - protein, 7 aa, synthetic construct
PFRGDKM

SEQ ID NO: 73575 - protein, 7 aa, synthetic construct
TNAPKKE

SEQ ID NO: 73576 - protein, 7 aa, synthetic construct
PRQIGGA

SEQ ID NO: 73577 - protein, 7 aa, synthetic construct
DFRGIAV

SEQ ID NO: 73578 - protein, 7 aa, synthetic construct
AGQNLKL

SEQ ID NO: 73579 - protein, 7 aa, synthetic construct
QNGGPQS

SEQ ID NO: 73580 - protein, 7 aa, synthetic construct
MRPHDRV

SEQ ID NO: 73581 - protein, 7 aa, synthetic construct
NKTSGTM

SEQ ID NO: 73582 - protein, 7 aa, synthetic construct
KKQSYED

SEQ ID NO: 73583 - protein, 7 aa, synthetic construct
KTGTASA

SEQ ID NO: 73584 - protein, 7 aa, synthetic construct
LRQFEKT

SEQ ID NO: 73585 - protein, 7 aa, synthetic construct
TIGDYRS

SEQ ID NO: 73586 - protein, 7 aa, synthetic construct
RPQDHKD

SEQ ID NO: 73587 - protein, 7 aa, synthetic construct
WSRRTDD

SEQ ID NO: 73588 - protein, 7 aa, synthetic construct
SLYNGSN

SEQ ID NO: 73589 - protein, 7 aa, synthetic construct
RQNGTSG

SEQ ID NO: 73590 - protein, 7 aa, synthetic construct
MNMTRAA

SEQ ID NO: 73591 - protein, 7 aa, synthetic construct
FGGAAQH

SEQ ID NO: 73592 - protein, 7 aa, synthetic construct
MSNNNPS

SEQ ID NO: 73593 - protein, 7 aa, synthetic construct
YKREQYD

SEQ ID NO: 73594 - protein, 7 aa, synthetic construct
ITHQLQE

SEQ ID NO: 73595 - protein, 7 aa, synthetic construct
INRAVPS

SEQ ID NO: 73596 - protein, 7 aa, synthetic construct
SKPQATG

SEQ ID NO: 73597 - protein, 7 aa, synthetic construct
RNAPALH

SEQ ID NO: 73598 - protein, 7 aa, synthetic construct
THQVKGQ

SEQ ID NO: 73599 - protein, 7 aa, synthetic construct
DFPPLKS

SEQ ID NO: 73600 - protein, 7 aa, synthetic construct
MNGPGKG

SEQ ID NO: 73601 - protein, 7 aa, synthetic construct
VHPQEHS

SEQ ID NO: 73602 - protein, 7 aa, synthetic construct
KYNTSDP

SEQ ID NO: 73603 - protein, 7 aa, synthetic construct
QLGGNGF

SEQ ID NO: 73604 - protein, 7 aa, synthetic construct
NVAFPNR

SEQ ID NO: 73605 - protein, 7 aa, synthetic construct
TSVYGES

SEQ ID NO: 73606 - protein, 7 aa, synthetic construct
QHSKVAT

SEQ ID NO: 73607 - protein, 7 aa, synthetic construct
AHVQMQG

SEQ ID NO: 73608 - protein, 7 aa, synthetic construct
KFKPNDA

SEQ ID NO: 73609 - protein, 7 aa, synthetic construct
WNGEFQK

SEQ ID NO: 73610 - protein, 7 aa, synthetic construct
VTDKLYF

SEQ ID NO: 73611 - protein, 7 aa, synthetic construct
QDRASMW

SEQ ID NO: 73612 - protein, 7 aa, synthetic construct
RTYESTA

SEQ ID NO: 73613 - protein, 7 aa, synthetic construct
TDRVRGP

SEQ ID NO: 73614 - protein, 7 aa, synthetic construct
QPSNMRE

SEQ ID NO: 73615 - protein, 7 aa, synthetic construct
FGGHNTN

SEQ ID NO: 73616 - protein, 7 aa, synthetic construct
KDQNHNR

SEQ ID NO: 73617 - protein, 7 aa, synthetic construct
TLPVSLA

SEQ ID NO: 73618 - protein, 7 aa, synthetic construct
RDNKMGG

SEQ ID NO: 73619 - protein, 7 aa, synthetic construct
RMAGTGF

SEQ ID NO: 73620 - protein, 7 aa, synthetic construct
GHFFKNE

SEQ ID NO: 73621 - protein, 7 aa, synthetic construct
YINKHQV

SEQ ID NO: 73622 - protein, 7 aa, synthetic construct
YPIGDVS

SEQ ID NO: 73623 - protein, 7 aa, synthetic construct
KNTGSTA

SEQ ID NO: 73624 - protein, 7 aa, synthetic construct
HTLRSTD

SEQ ID NO: 73625 - protein, 7 aa, synthetic construct
VQPFTYE

SEQ ID NO: 73626 - protein, 7 aa, synthetic construct
LQTFARE

SEQ ID NO: 73627 - protein, 7 aa, synthetic construct
AMDLREG

SEQ ID NO: 73628 - protein, 7 aa, synthetic construct
SNSNPNV

SEQ ID NO: 73629 - protein, 7 aa, synthetic construct
LPQRQLH

SEQ ID NO: 73630 - protein, 7 aa, synthetic construct
GQTRTAP

SEQ ID NO: 73631 - protein, 7 aa, synthetic construct
KNVGLPT

SEQ ID NO: 73632 - protein, 7 aa, synthetic construct
MDHPRTA

SEQ ID NO: 73633 - protein, 7 aa, synthetic construct
HHSTGSG

SEQ ID NO: 73634 - protein, 7 aa, synthetic construct
VMQLNLA

SEQ ID NO: 73635 - protein, 7 aa, synthetic construct
PGQRPNE

SEQ ID NO: 73636 - protein, 7 aa, synthetic construct
TTPHQNI

SEQ ID NO: 73637 - protein, 7 aa, synthetic construct
STRGNEL

SEQ ID NO: 73638 - protein, 7 aa, synthetic construct
ATHGSSH

SEQ ID NO: 73639 - protein, 7 aa, synthetic construct
NQHGSMP

SEQ ID NO: 73640 - protein, 7 aa, synthetic construct
AKPTGWS

SEQ ID NO: 73641 - protein, 7 aa, synthetic construct
IYHGSIT

SEQ ID NO: 73642 - protein, 7 aa, synthetic construct
QTSSKGN

SEQ ID NO: 73643 - protein, 7 aa, synthetic construct
HQHSSQI

SEQ ID NO: 73644 - protein, 7 aa, synthetic construct
YIQKVTD

SEQ ID NO: 73645 - protein, 7 aa, synthetic construct
KNMPAQG

SEQ ID NO: 73646 - protein, 7 aa, synthetic construct
NAEVKMP

SEQ ID NO: 73647 - protein, 7 aa, synthetic construct
KKGPDMV

SEQ ID NO: 73648 - protein, 7 aa, synthetic construct
ITNRPEN

SEQ ID NO: 73649 - protein, 7 aa, synthetic construct
LDMLKGA

SEQ ID NO: 73650 - protein, 7 aa, synthetic construct
EVKSQKP

SEQ ID NO: 73651 - protein, 7 aa, synthetic construct
HEAIRRV

SEQ ID NO: 73652 - protein, 7 aa, synthetic construct
VYTGEHS

SEQ ID NO: 73653 - protein, 7 aa, synthetic construct
SDRSKIT

SEQ ID NO: 73654 - protein, 7 aa, synthetic construct
LSSRHSF

SEQ ID NO: 73655 - protein, 7 aa, synthetic construct
LSQGVQG

SEQ ID NO: 73656 - protein, 7 aa, synthetic construct
ETIRQQK

SEQ ID NO: 73657 - protein, 7 aa, synthetic construct
PLKAMHN

SEQ ID NO: 73658 - protein, 7 aa, synthetic construct
SHSRLEE

SEQ ID NO: 73659 - protein, 7 aa, synthetic construct
KNVQGLV

SEQ ID NO: 73660 - protein, 7 aa, synthetic construct
KIMAGPQ

SEQ ID NO: 73661 - protein, 7 aa, synthetic construct
KKTDIQE

SEQ ID NO: 73662 - protein, 7 aa, synthetic construct
HGSEGPS

SEQ ID NO: 73663 - protein, 7 aa, synthetic construct
SVHRDVT

SEQ ID NO: 73664 - protein, 7 aa, synthetic construct
WNRQHVS

SEQ ID NO: 73665 - protein, 7 aa, synthetic construct
KIGHQDL

SEQ ID NO: 73666 - protein, 7 aa, synthetic construct
VGFQKDG

SEQ ID NO: 73667 - protein, 7 aa, synthetic construct
YPGQLTD

SEQ ID NO: 73668 - protein, 7 aa, synthetic construct
GQTRATP

SEQ ID NO: 73669 - protein, 7 aa, synthetic construct
KSPSGFS

SEQ ID NO: 73670 - protein, 7 aa, synthetic construct
FTYKSRE

SEQ ID NO: 73671 - protein, 7 aa, synthetic construct
TLTLSKS

SEQ ID NO: 73672 - protein, 7 aa, synthetic construct
EGHHMTK

SEQ ID NO: 73673 - protein, 7 aa, synthetic construct
YGHRMAE

SEQ ID NO: 73674 - protein, 7 aa, synthetic construct
YVSKWNE

SEQ ID NO: 73675 - protein, 7 aa, synthetic construct
QAYHGQG

SEQ ID NO: 73676 - protein, 7 aa, synthetic construct
QMNGRQS

SEQ ID NO: 73677 - protein, 7 aa, synthetic construct
EKKTERN

SEQ ID NO: 73678 - protein, 7 aa, synthetic construct
TVFLKDE

SEQ ID NO: 73679 - protein, 7 aa, synthetic construct
HVHTMSP

SEQ ID NO: 73680 - protein, 7 aa, synthetic construct
IGIKVDY

SEQ ID NO: 73681 - protein, 7 aa, synthetic construct
SRSTVTS

SEQ ID NO: 73682 - protein, 7 aa, synthetic construct
LKQMSMA

SEQ ID NO: 73683 - protein, 7 aa, synthetic construct
SMNLNVI

SEQ ID NO: 73684 - protein, 7 aa, synthetic construct
VHSMMHE

SEQ ID NO: 73685 - protein, 7 aa, synthetic construct
RGPNNNP

SEQ ID NO: 73686 - protein, 7 aa, synthetic construct
VLHQAIE

SEQ ID NO: 73687 - protein, 7 aa, synthetic construct
VQHGAKF

SEQ ID NO: 73688 - protein, 7 aa, synthetic construct
HIRNGHS

SEQ ID NO: 73689 - protein, 7 aa, synthetic construct
RPIPNQQ

SEQ ID NO: 73690 - protein, 7 aa, synthetic construct
NREHSSN

SEQ ID NO: 73691 - protein, 7 aa, synthetic construct
KKTENPG

SEQ ID NO: 73692 - protein, 7 aa, synthetic construct
QQSLRDD

SEQ ID NO: 73693 - protein, 7 aa, synthetic construct
KDSIRIH

SEQ ID NO: 73694 - protein, 7 aa, synthetic construct
RPHSNDF

SEQ ID NO: 73695 - protein, 7 aa, synthetic construct
YSHITPG

SEQ ID NO: 73696 - protein, 7 aa, synthetic construct
RFANQAV

SEQ ID NO: 73697 - protein, 7 aa, synthetic construct
RNVKMDE

SEQ ID NO: 73698 - protein, 7 aa, synthetic construct
MIQAKAA

SEQ ID NO: 73699 - protein, 7 aa, synthetic construct
RYETSQP

SEQ ID NO: 73700 - protein, 7 aa, synthetic construct
GQKKHID

SEQ ID NO: 73701 - protein, 7 aa, synthetic construct
YLTLGEN

SEQ ID NO: 73702 - protein, 7 aa, synthetic construct
SKDPIKI

SEQ ID NO: 73703 - protein, 7 aa, synthetic construct
RPNGTMP

SEQ ID NO: 73704 - protein, 7 aa, synthetic construct
PQHMKTG

SEQ ID NO: 73705 - protein, 7 aa, synthetic construct
HGFGNPT

SEQ ID NO: 73706 - protein, 7 aa, synthetic construct
NPSRVVI

SEQ ID NO: 73707 - protein, 7 aa, synthetic construct
KNSPYPH

SEQ ID NO: 73708 - protein, 7 aa, synthetic construct
RKESNYV

SEQ ID NO: 73709 - protein, 7 aa, synthetic construct
TVGTRAD

SEQ ID NO: 73710 - protein, 7 aa, synthetic construct
THYQIVP

SEQ ID NO: 73711 - protein, 7 aa, synthetic construct
ITTHVPQ

SEQ ID NO: 73712 - protein, 7 aa, synthetic construct
LTSSRSS

SEQ ID NO: 73713 - protein, 7 aa, synthetic construct
MNSANQK

SEQ ID NO: 73714 - protein, 7 aa, synthetic construct
VPTARPE

SEQ ID NO: 73715 - protein, 7 aa, synthetic construct
NTSKTNY

SEQ ID NO: 73716 - protein, 7 aa, synthetic construct
TIVEKIP

SEQ ID NO: 73717 - protein, 7 aa, synthetic construct
DQFGHKS

SEQ ID NO: 73718 - protein, 7 aa, synthetic construct
KVAHVGV

SEQ ID NO: 73719 - protein, 7 aa, synthetic construct
KTATMSA

SEQ ID NO: 73720 - protein, 7 aa, synthetic construct
KPASSAP

SEQ ID NO: 73721 - protein, 7 aa, synthetic construct
PRSNNTG

SEQ ID NO: 73722 - protein, 7 aa, synthetic construct
LVGRSMM

SEQ ID NO: 73723 - protein, 7 aa, synthetic construct
KNHQVGA

SEQ ID NO: 73724 - protein, 7 aa, synthetic construct
DFPKFPR

SEQ ID NO: 73725 - protein, 7 aa, synthetic construct
SGIGDQL

SEQ ID NO: 73726 - protein, 7 aa, synthetic construct
LDPGRVK

SEQ ID NO: 73727 - protein, 7 aa, synthetic construct
LVKQMTD

SEQ ID NO: 73728 - protein, 7 aa, synthetic construct
KPGNQGA

SEQ ID NO: 73729 - protein, 7 aa, synthetic construct
PKERMNW

SEQ ID NO: 73730 - protein, 7 aa, synthetic construct
MSTNFRP

SEQ ID NO: 73731 - protein, 7 aa, synthetic construct
RQANNQG

SEQ ID NO: 73732 - protein, 7 aa, synthetic construct
MNIGKTF

SEQ ID NO: 73733 - protein, 7 aa, synthetic construct
NVSKIKE

SEQ ID NO: 73734 - protein, 7 aa, synthetic construct
RVMNQDV

SEQ ID NO: 73735 - protein, 7 aa, synthetic construct
AMTARHI

SEQ ID NO: 73736 - protein, 7 aa, synthetic construct
NAKFVGY

SEQ ID NO: 73737 - protein, 7 aa, synthetic construct
APGQPYL

SEQ ID NO: 73738 - protein, 7 aa, synthetic construct
IRPGERT

SEQ ID NO: 73739 - protein, 7 aa, synthetic construct
YTPAIVK

SEQ ID NO: 73740 - protein, 7 aa, synthetic construct
QANAPKI

SEQ ID NO: 73741 - protein, 7 aa, synthetic construct
SKTQAQA

SEQ ID NO: 73742 - protein, 7 aa, synthetic construct
QPVNNHY

SEQ ID NO: 73743 - protein, 7 aa, synthetic construct
FHVPSTQ

SEQ ID NO: 73744 - protein, 7 aa, synthetic construct
APVKREP

SEQ ID NO: 73745 - protein, 7 aa, synthetic construct
GRHSPEP

SEQ ID NO: 73746 - protein, 7 aa, synthetic construct
SMPRGAV

SEQ ID NO: 73747 - protein, 7 aa, synthetic construct
DQIKGHP

SEQ ID NO: 73748 - protein, 7 aa, synthetic construct
RTNSPVV

SEQ ID NO: 73749 - protein, 7 aa, synthetic construct
ESHAGRM

SEQ ID NO: 73750 - protein, 7 aa, synthetic construct
WDGHMVP

SEQ ID NO: 73751 - protein, 7 aa, synthetic construct
RGTHTNY

SEQ ID NO: 73752 - protein, 7 aa, synthetic construct
DNGVRGY

SEQ ID NO: 73753 - protein, 7 aa, synthetic construct
IGQAHLP

SEQ ID NO: 73754 - protein, 7 aa, synthetic construct
NLKGVGF

SEQ ID NO: 73755 - protein, 7 aa, synthetic construct
YHTKTAD

SEQ ID NO: 73756 - protein, 7 aa, synthetic construct
RQTVATS

SEQ ID NO: 73757 - protein, 7 aa, synthetic construct
EFRAPRD

SEQ ID NO: 73758 - protein, 7 aa, synthetic construct
FHSRTGE

SEQ ID NO: 73759 - protein, 7 aa, synthetic construct
TKKDNNT

SEQ ID NO: 73760 - protein, 7 aa, synthetic construct
KPSNAEE

SEQ ID NO: 73761 - protein, 7 aa, synthetic construct
GMGPIAP

SEQ ID NO: 73762 - protein, 7 aa, synthetic construct
NPGNHGI

SEQ ID NO: 73763 - protein, 7 aa, synthetic construct
LHHNFPT

SEQ ID NO: 73764 - protein, 7 aa, synthetic construct
AYAVSPE

SEQ ID NO: 73765 - protein, 7 aa, synthetic construct
INRSMPG

SEQ ID NO: 73766 - protein, 7 aa, synthetic construct
GAVQTLG

SEQ ID NO: 73767 - protein, 7 aa, synthetic construct
KKHFSDV

SEQ ID NO: 73768 - protein, 7 aa, synthetic construct
PLSGSPS

SEQ ID NO: 73769 - protein, 7 aa, synthetic construct
SMPNSQY

SEQ ID NO: 73770 - protein, 7 aa, synthetic construct
GGGVSGY

SEQ ID NO: 73771 - protein, 7 aa, synthetic construct
PHGLEPR

SEQ ID NO: 73772 - protein, 7 aa, synthetic construct
QDPGQKK

SEQ ID NO: 73773 - protein, 7 aa, synthetic construct
YGVDYTR

SEQ ID NO: 73774 - protein, 7 aa, synthetic construct
KNGSDHG

SEQ ID NO: 73775 - protein, 7 aa, synthetic construct
ALNLPRG

SEQ ID NO: 73776 - protein, 7 aa, synthetic construct
DEQNLRP

SEQ ID NO: 73777 - protein, 7 aa, synthetic construct
QNDLRKH

SEQ ID NO: 73778 - protein, 7 aa, synthetic construct
LDKHLQA

SEQ ID NO: 73779 - protein, 7 aa, synthetic construct
DATRNKI

SEQ ID NO: 73780 - protein, 7 aa, synthetic construct
QQRKLID

SEQ ID NO: 73781 - protein, 7 aa, synthetic construct
LTAKVYN

SEQ ID NO: 73782 - protein, 7 aa, synthetic construct
PRDDPQY

SEQ ID NO: 73783 - protein, 7 aa, synthetic construct
SHKNGVQ

SEQ ID NO: 73784 - protein, 7 aa, synthetic construct
VGDGKHW

SEQ ID NO: 73785 - protein, 7 aa, synthetic construct
NKKDALT

SEQ ID NO: 73786 - protein, 7 aa, synthetic construct
SQQHAAR

SEQ ID NO: 73787 - protein, 7 aa, synthetic construct
YHGFNHS

SEQ ID NO: 73788 - protein, 7 aa, synthetic construct
IDIQKKC

SEQ ID NO: 73789 - protein, 7 aa, synthetic construct
TTKGSAG

SEQ ID NO: 73790 - protein, 7 aa, synthetic construct
GKKDSSG

SEQ ID NO: 73791 - protein, 7 aa, synthetic construct
TVTDFRQ

SEQ ID NO: 73792 - protein, 7 aa, synthetic construct
GPHRAAL

SEQ ID NO: 73793 - protein, 7 aa, synthetic construct
YVRDRPV

SEQ ID NO: 73794 - protein, 7 aa, synthetic construct
AKNNPHA

SEQ ID NO: 73795 - protein, 7 aa, synthetic construct
LHSQIEL

SEQ ID NO: 73796 - protein, 7 aa, synthetic construct
KMKQSEM

SEQ ID NO: 73797 - protein, 7 aa, synthetic construct
KSQPGAA

SEQ ID NO: 73798 - protein, 7 aa, synthetic construct
YAAYHTS

SEQ ID NO: 73799 - protein, 7 aa, synthetic construct
DMTHKHG

SEQ ID NO: 73800 - protein, 7 aa, synthetic construct
ISNYAIM

SEQ ID NO: 73801 - protein, 7 aa, synthetic construct
YKPGQSA

SEQ ID NO: 73802 - protein, 7 aa, synthetic construct
RPDVAHP

SEQ ID NO: 73803 - protein, 7 aa, synthetic construct
GKTVSVG

SEQ ID NO: 73804 - protein, 7 aa, synthetic construct
ARRDMNS

SEQ ID NO: 73805 - protein, 7 aa, synthetic construct
VNKSPQS

SEQ ID NO: 73806 - protein, 7 aa, synthetic construct
LADAIRK

SEQ ID NO: 73807 - protein, 7 aa, synthetic construct
PLKAAFI

SEQ ID NO: 73808 - protein, 7 aa, synthetic construct
YTGQFHS

SEQ ID NO: 73809 - protein, 7 aa, synthetic construct
DFAQVNG

SEQ ID NO: 73810 - protein, 7 aa, synthetic construct
AEVFKDP

SEQ ID NO: 73811 - protein, 7 aa, synthetic construct
NHYKHEH

SEQ ID NO: 73812 - protein, 7 aa, synthetic construct
RTDVFID

SEQ ID NO: 73813 - protein, 7 aa, synthetic construct
HQIMKAS

SEQ ID NO: 73814 - protein, 7 aa, synthetic construct
SNDQQRD

SEQ ID NO: 73815 - protein, 7 aa, synthetic construct
RERLEFL

SEQ ID NO: 73816 - protein, 7 aa, synthetic construct
MASSSSA

SEQ ID NO: 73817 - protein, 7 aa, synthetic construct
YALNDRS

SEQ ID NO: 73818 - protein, 7 aa, synthetic construct
QNHQPAS

SEQ ID NO: 73819 - protein, 7 aa, synthetic construct
PRDAMSS

SEQ ID NO: 73820 - protein, 7 aa, synthetic construct
PDHIHIG

SEQ ID NO: 73821 - protein, 7 aa, synthetic construct
LNRGHAA

SEQ ID NO: 73822 - protein, 7 aa, synthetic construct
QGYAAHD

SEQ ID NO: 73823 - protein, 7 aa, synthetic construct
VQMDRTV

SEQ ID NO: 73824 - protein, 7 aa, synthetic construct
VSGEGSR

SEQ ID NO: 73825 - protein, 7 aa, synthetic construct
FNATKLQ

SEQ ID NO: 73826 - protein, 7 aa, synthetic construct
WTKPSVN

SEQ ID NO: 73827 - protein, 7 aa, synthetic construct
NHKHNQS

SEQ ID NO: 73828 - protein, 7 aa, synthetic construct
RLNMPGT

SEQ ID NO: 73829 - protein, 7 aa, synthetic construct
NMKSASV

SEQ ID NO: 73830 - protein, 7 aa, synthetic construct
YQDQHLV

SEQ ID NO: 73831 - protein, 7 aa, synthetic construct
HVVNGGA

SEQ ID NO: 73832 - protein, 7 aa, synthetic construct
YMHVTRS

SEQ ID NO: 73833 - protein, 7 aa, synthetic construct
KTQSMQS

SEQ ID NO: 73834 - protein, 7 aa, synthetic construct
RMADHMA

SEQ ID NO: 73835 - protein, 7 aa, synthetic construct
ASQTHAG

SEQ ID NO: 73836 - protein, 7 aa, synthetic construct
GTNNQQV

SEQ ID NO: 73837 - protein, 7 aa, synthetic construct
SGLVKIS

SEQ ID NO: 73838 - protein, 7 aa, synthetic construct
NKGGQVP

SEQ ID NO: 73839 - protein, 7 aa, synthetic construct
EGIHHRS

SEQ ID NO: 73840 - protein, 7 aa, synthetic construct
KFAVENM

SEQ ID NO: 73841 - protein, 7 aa, synthetic construct
ENAISHF

SEQ ID NO: 73842 - protein, 7 aa, synthetic construct
GGHGNTP

SEQ ID NO: 73843 - protein, 7 aa, synthetic construct
RAHLDHE

SEQ ID NO: 73844 - protein, 7 aa, synthetic construct
QKYTIVE

SEQ ID NO: 73845 - protein, 7 aa, synthetic construct
VVLSSTA

SEQ ID NO: 73846 - protein, 7 aa, synthetic construct
GVGGKIQ

SEQ ID NO: 73847 - protein, 7 aa, synthetic construct
LWAGAEH

SEQ ID NO: 73848 - protein, 7 aa, synthetic construct
QGDFHPM

SEQ ID NO: 73849 - protein, 7 aa, synthetic construct
KPIPNGI

SEQ ID NO: 73850 - protein, 7 aa, synthetic construct
QRASGGG

SEQ ID NO: 73851 - protein, 7 aa, synthetic construct
STAKGGG

SEQ ID NO: 73852 - protein, 7 aa, synthetic construct
NSKSYTE

SEQ ID NO: 73853 - protein, 7 aa, synthetic construct
KQDKSAV

SEQ ID NO: 73854 - protein, 7 aa, synthetic construct
HGLATRD

SEQ ID NO: 73855 - protein, 7 aa, synthetic construct
PLSTSVN

SEQ ID NO: 73856 - protein, 7 aa, synthetic construct
KQDSSHF

SEQ ID NO: 73857 - protein, 7 aa, synthetic construct
SKMDKTM

SEQ ID NO: 73858 - protein, 7 aa, synthetic construct
RLSDAPT

SEQ ID NO: 73859 - protein, 7 aa, synthetic construct
HRRIPED

SEQ ID NO: 73860 - protein, 7 aa, synthetic construct
SESVMNH

SEQ ID NO: 73861 - protein, 7 aa, synthetic construct
TMQSRSG

SEQ ID NO: 73862 - protein, 7 aa, synthetic construct
KFNPMKD

SEQ ID NO: 73863 - protein, 7 aa, synthetic construct
QLSGVHH

SEQ ID NO: 73864 - protein, 7 aa, synthetic construct
TGQAITK

SEQ ID NO: 73865 - protein, 7 aa, synthetic construct
RQKDSVA

SEQ ID NO: 73866 - protein, 7 aa, synthetic construct
LKDPMRN

SEQ ID NO: 73867 - protein, 7 aa, synthetic construct
VNQNKAG

SEQ ID NO: 73868 - protein, 7 aa, synthetic construct
QMSDPKH

SEQ ID NO: 73869 - protein, 7 aa, synthetic construct
DLRIERN

SEQ ID NO: 73870 - protein, 7 aa, synthetic construct
YHKLPNN

SEQ ID NO: 73871 - protein, 7 aa, synthetic construct
HVIMKVE

SEQ ID NO: 73872 - protein, 7 aa, synthetic construct
GQVQIHP

SEQ ID NO: 73873 - protein, 7 aa, synthetic construct
VTPNMNG

SEQ ID NO: 73874 - protein, 7 aa, synthetic construct
HMYATVP

SEQ ID NO: 73875 - protein, 7 aa, synthetic construct
GKEEGRG

SEQ ID NO: 73876 - protein, 7 aa, synthetic construct
IPHKSYA

SEQ ID NO: 73877 - protein, 7 aa, synthetic construct
GYLQNGI

SEQ ID NO: 73878 - protein, 7 aa, synthetic construct
KGPGTHV

SEQ ID NO: 73879 - protein, 7 aa, synthetic construct
TTTHLMP

SEQ ID NO: 73880 - protein, 7 aa, synthetic construct
SHSSFNE

SEQ ID NO: 73881 - protein, 7 aa, synthetic construct
WNGNRAA

SEQ ID NO: 73882 - protein, 7 aa, synthetic construct
GNSNYKF

SEQ ID NO: 73883 - protein, 7 aa, synthetic construct
TNSQSVH

SEQ ID NO: 73884 - protein, 7 aa, synthetic construct
YLPKRDP

SEQ ID NO: 73885 - protein, 7 aa, synthetic construct
NNSGRVA

SEQ ID NO: 73886 - protein, 7 aa, synthetic construct
HMRELIS

SEQ ID NO: 73887 - protein, 7 aa, synthetic construct
NYHLKSA

SEQ ID NO: 73888 - protein, 7 aa, synthetic construct
ALSNRNP

SEQ ID NO: 73889 - protein, 7 aa, synthetic construct
YYRNLKE

SEQ ID NO: 73890 - protein, 7 aa, synthetic construct
WQMAKDT

SEQ ID NO: 73891 - protein, 7 aa, synthetic construct
DPNYGKK

SEQ ID NO: 73892 - protein, 7 aa, synthetic construct
AVPYAVA

SEQ ID NO: 73893 - protein, 7 aa, synthetic construct
LLHSMGP

SEQ ID NO: 73894 - protein, 7 aa, synthetic construct
AHHAFPQ

SEQ ID NO: 73895 - protein, 7 aa, synthetic construct
PSKNAAA

SEQ ID NO: 73896 - protein, 7 aa, synthetic construct
MRQIDGT

SEQ ID NO: 73897 - protein, 7 aa, synthetic construct
QEHMSAR

SEQ ID NO: 73898 - protein, 7 aa, synthetic construct
RPPSADM

SEQ ID NO: 73899 - protein, 7 aa, synthetic construct
IPPYQNT

SEQ ID NO: 73900 - protein, 7 aa, synthetic construct
QYPMQQP

SEQ ID NO: 73901 - protein, 7 aa, synthetic construct
GGFHFVE

SEQ ID NO: 73902 - protein, 7 aa, synthetic construct
PMHHHEH

SEQ ID NO: 73903 - protein, 7 aa, synthetic construct
GRGTHDG

SEQ ID NO: 73904 - protein, 7 aa, synthetic construct
MPGTAHM

SEQ ID NO: 73905 - protein, 7 aa, synthetic construct
EASTKRI

SEQ ID NO: 73906 - protein, 7 aa, synthetic construct
AKSTQMG

SEQ ID NO: 73907 - protein, 7 aa, synthetic construct
ERREEDK

SEQ ID NO: 73908 - protein, 7 aa, synthetic construct
QNASQKY

SEQ ID NO: 73909 - protein, 7 aa, synthetic construct
RATQKDF

SEQ ID NO: 73910 - protein, 7 aa, synthetic construct
EHGFHPA

SEQ ID NO: 73911 - protein, 7 aa, synthetic construct
SQNVLPA

SEQ ID NO: 73912 - protein, 7 aa, synthetic construct
TMGIFHA

SEQ ID NO: 73913 - protein, 7 aa, synthetic construct
KMHPTNS

SEQ ID NO: 73914 - protein, 7 aa, synthetic construct
TSTKAEG

SEQ ID NO: 73915 - protein, 7 aa, synthetic construct
MRVTEKY

SEQ ID NO: 73916 - protein, 7 aa, synthetic construct
TVTPREA

SEQ ID NO: 73917 - protein, 7 aa, synthetic construct
KKEQNRD

SEQ ID NO: 73918 - protein, 7 aa, synthetic construct
TFKEQDG

SEQ ID NO: 73919 - protein, 7 aa, synthetic construct
VRVGMMS

SEQ ID NO: 73920 - protein, 7 aa, synthetic construct
RSSPNSG

SEQ ID NO: 73921 - protein, 7 aa, synthetic construct
GHVNNEP

SEQ ID NO: 73922 - protein, 7 aa, synthetic construct
SPKGGQG

SEQ ID NO: 73923 - protein, 7 aa, synthetic construct
FNGGKSA

SEQ ID NO: 73924 - protein, 7 aa, synthetic construct
DAHYTLG

SEQ ID NO: 73925 - protein, 7 aa, synthetic construct
DHLQKKS

SEQ ID NO: 73926 - protein, 7 aa, synthetic construct
NSGTVTP

SEQ ID NO: 73927 - protein, 7 aa, synthetic construct
NRDKMSG

SEQ ID NO: 73928 - protein, 7 aa, synthetic construct
ALKSVPF

SEQ ID NO: 73929 - protein, 7 aa, synthetic construct
GRVTTVV

SEQ ID NO: 73930 - protein, 7 aa, synthetic construct
QWDKMQK

SEQ ID NO: 73931 - protein, 7 aa, synthetic construct
YKFGGPL

SEQ ID NO: 73932 - protein, 7 aa, synthetic construct
EHPKQMQ

SEQ ID NO: 73933 - protein, 7 aa, synthetic construct
VHQGKQN

SEQ ID NO: 73934 - protein, 7 aa, synthetic construct
RSSPGMA

SEQ ID NO: 73935 - protein, 7 aa, synthetic construct
RHPDNII

SEQ ID NO: 73936 - protein, 7 aa, synthetic construct
GDFSGSN

SEQ ID NO: 73937 - protein, 7 aa, synthetic construct
SKTQQEN

SEQ ID NO: 73938 - protein, 7 aa, synthetic construct
GQRMQQL

SEQ ID NO: 73939 - protein, 7 aa, synthetic construct
GIMPISG

SEQ ID NO: 73940 - protein, 7 aa, synthetic construct
NEGGRMT

SEQ ID NO: 73941 - protein, 7 aa, synthetic construct
QRNTGQA

SEQ ID NO: 73942 - protein, 7 aa, synthetic construct
NKSSENL

SEQ ID NO: 73943 - protein, 7 aa, synthetic construct
KVQSTHA

SEQ ID NO: 73944 - protein, 7 aa, synthetic construct
NQKNYIA

SEQ ID NO: 73945 - protein, 7 aa, synthetic construct
YRETPAP

SEQ ID NO: 73946 - protein, 7 aa, synthetic construct
SVSAGFV

SEQ ID NO: 73947 - protein, 7 aa, synthetic construct
REVNIAM

SEQ ID NO: 73948 - protein, 7 aa, synthetic construct
PQSSNGK

SEQ ID NO: 73949 - protein, 7 aa, synthetic construct
NKPTTGM

SEQ ID NO: 73950 - protein, 7 aa, synthetic construct
PHRGEMP

SEQ ID NO: 73951 - protein, 7 aa, synthetic construct
VDRMIQN

SEQ ID NO: 73952 - protein, 7 aa, synthetic construct
TTQKGQN

SEQ ID NO: 73953 - protein, 7 aa, synthetic construct
GRGMPHQ

SEQ ID NO: 73954 - protein, 7 aa, synthetic construct
VVMPKGS

SEQ ID NO: 73955 - protein, 7 aa, synthetic construct
KPSNAVP

SEQ ID NO: 73956 - protein, 7 aa, synthetic construct
EKFPHSH

SEQ ID NO: 73957 - protein, 7 aa, synthetic construct
KTPTKAE

SEQ ID NO: 73958 - protein, 7 aa, synthetic construct
GPMRDLH

SEQ ID NO: 73959 - protein, 7 aa, synthetic construct
AHDRNSI

SEQ ID NO: 73960 - protein, 7 aa, synthetic construct
NNAPGNN

SEQ ID NO: 73961 - protein, 7 aa, synthetic construct
NHRGHPE

SEQ ID NO: 73962 - protein, 7 aa, synthetic construct
SGDRFKF

SEQ ID NO: 73963 - protein, 7 aa, synthetic construct
TAKVEAK

SEQ ID NO: 73964 - protein, 7 aa, synthetic construct
YNVKAFT

SEQ ID NO: 73965 - protein, 7 aa, synthetic construct
HVAHKEM

SEQ ID NO: 73966 - protein, 7 aa, synthetic construct
QSKPGNG

SEQ ID NO: 73967 - protein, 7 aa, synthetic construct
GQPSGPA

SEQ ID NO: 73968 - protein, 7 aa, synthetic construct
SGSGNHG

SEQ ID NO: 73969 - protein, 7 aa, synthetic construct
MPTSNID

SEQ ID NO: 73970 - protein, 7 aa, synthetic construct
GMYAHAD

SEQ ID NO: 73971 - protein, 7 aa, synthetic construct
VKKHQED

SEQ ID NO: 73972 - protein, 7 aa, synthetic construct
IQSSRGS

SEQ ID NO: 73973 - protein, 7 aa, synthetic construct
KNSNNMS

SEQ ID NO: 73974 - protein, 7 aa, synthetic construct
LMQLRKE

SEQ ID NO: 73975 - protein, 7 aa, synthetic construct
SFQRVTE

SEQ ID NO: 73976 - protein, 7 aa, synthetic construct
HPKALMQ

SEQ ID NO: 73977 - protein, 7 aa, synthetic construct
QFNGGPL

SEQ ID NO: 73978 - protein, 7 aa, synthetic construct
LSVRPVP

SEQ ID NO: 73979 - protein, 7 aa, synthetic construct
GGGSASI

SEQ ID NO: 73980 - protein, 7 aa, synthetic construct
NKINAHT

SEQ ID NO: 73981 - protein, 7 aa, synthetic construct
IGSTHYV

SEQ ID NO: 73982 - protein, 7 aa, synthetic construct
GDIKAQH

SEQ ID NO: 73983 - protein, 7 aa, synthetic construct
QNNSKIH

SEQ ID NO: 73984 - protein, 7 aa, synthetic construct
REQGAHA

SEQ ID NO: 73985 - protein, 7 aa, synthetic construct
VSSQMAK

SEQ ID NO: 73986 - protein, 7 aa, synthetic construct
IDSSKIP

SEQ ID NO: 73987 - protein, 7 aa, synthetic construct
NLYSKDE

SEQ ID NO: 73988 - protein, 7 aa, synthetic construct
VKHTPNL

SEQ ID NO: 73989 - protein, 7 aa, synthetic construct
SSTGKQP

SEQ ID NO: 73990 - protein, 7 aa, synthetic construct
QGNVAYA

SEQ ID NO: 73991 - protein, 7 aa, synthetic construct
TQNNLKF

SEQ ID NO: 73992 - protein, 7 aa, synthetic construct
MKYVADK

SEQ ID NO: 73993 - protein, 7 aa, synthetic construct
MGPQNYK

SEQ ID NO: 73994 - protein, 7 aa, synthetic construct
THTPHAS

SEQ ID NO: 73995 - protein, 7 aa, synthetic construct
PRFAQNE

SEQ ID NO: 73996 - protein, 7 aa, synthetic construct
FGGSHHE

SEQ ID NO: 73997 - protein, 7 aa, synthetic construct
PAINHQA

SEQ ID NO: 73998 - protein, 7 aa, synthetic construct
RLAHHGA

SEQ ID NO: 73999 - protein, 7 aa, synthetic construct
YREKTMP

SEQ ID NO: 74000 - protein, 7 aa, synthetic construct
MSKVGSN

SEQ ID NO: 74001 - protein, 7 aa, synthetic construct
QRREGNG

SEQ ID NO: 74002 - protein, 7 aa, synthetic construct
SQLAGEG

SEQ ID NO: 74003 - protein, 7 aa, synthetic construct
RESTLRE

SEQ ID NO: 74004 - protein, 7 aa, synthetic construct
MHPSIAQ

SEQ ID NO: 74005 - protein, 7 aa, synthetic construct
RLDSDEN

SEQ ID NO: 74006 - protein, 7 aa, synthetic construct
PYTQHNG

SEQ ID NO: 74007 - protein, 7 aa, synthetic construct
HDRDRKF

SEQ ID NO: 74008 - protein, 7 aa, synthetic construct
IAKSDAI

SEQ ID NO: 74009 - protein, 7 aa, synthetic construct
HKNPEGW

SEQ ID NO: 74010 - protein, 7 aa, synthetic construct
GRREDHA

SEQ ID NO: 74011 - protein, 7 aa, synthetic construct
KATEINI

SEQ ID NO: 74012 - protein, 7 aa, synthetic construct
VSSRTTQ

SEQ ID NO: 74013 - protein, 7 aa, synthetic construct
QQGHMSK

SEQ ID NO: 74014 - protein, 7 aa, synthetic construct
TDKKEYF

SEQ ID NO: 74015 - protein, 7 aa, synthetic construct
EGGKAQP

SEQ ID NO: 74016 - protein, 7 aa, synthetic construct
DHTKPQE

SEQ ID NO: 74017 - protein, 7 aa, synthetic construct
SAMVTGP

SEQ ID NO: 74018 - protein, 7 aa, synthetic construct
KDGMHAP

SEQ ID NO: 74019 - protein, 7 aa, synthetic construct
RMKNSEI

SEQ ID NO: 74020 - protein, 7 aa, synthetic construct
RESGSSQ

SEQ ID NO: 74021 - protein, 7 aa, synthetic construct
RMEHSNK

SEQ ID NO: 74022 - protein, 7 aa, synthetic construct
KQMNSNA

SEQ ID NO: 74023 - protein, 7 aa, synthetic construct
QSQIKQP

SEQ ID NO: 74024 - protein, 7 aa, synthetic construct
SAEVLRS

SEQ ID NO: 74025 - protein, 7 aa, synthetic construct
TTSVNAW

SEQ ID NO: 74026 - protein, 7 aa, synthetic construct
FDTPTKS

SEQ ID NO: 74027 - protein, 7 aa, synthetic construct
ENRNISA

SEQ ID NO: 74028 - protein, 7 aa, synthetic construct
KIVHQLQ

SEQ ID NO: 74029 - protein, 7 aa, synthetic construct
INAGRGG

SEQ ID NO: 74030 - protein, 7 aa, synthetic construct
PRNSAQD

SEQ ID NO: 74031 - protein, 7 aa, synthetic construct
VRTHPDA

SEQ ID NO: 74032 - protein, 7 aa, synthetic construct
DVHKLAL

SEQ ID NO: 74033 - protein, 7 aa, synthetic construct
MRATTQA

SEQ ID NO: 74034 - protein, 7 aa, synthetic construct
PKGPSVA

SEQ ID NO: 74035 - protein, 7 aa, synthetic construct
SVRTPDW

SEQ ID NO: 74036 - protein, 7 aa, synthetic construct
IPHMNVQ

SEQ ID NO: 74037 - protein, 7 aa, synthetic construct
NPIPSKT

SEQ ID NO: 74038 - protein, 7 aa, synthetic construct
FEHATHP

SEQ ID NO: 74039 - protein, 7 aa, synthetic construct
NKFHSSI

SEQ ID NO: 74040 - protein, 7 aa, synthetic construct
LSKSGDL

SEQ ID NO: 74041 - protein, 7 aa, synthetic construct
YVNGPAM

SEQ ID NO: 74042 - protein, 7 aa, synthetic construct
KKTDNTF

SEQ ID NO: 74043 - protein, 7 aa, synthetic construct
RAAQIVA

SEQ ID NO: 74044 - protein, 7 aa, synthetic construct
QSINKTA

SEQ ID NO: 74045 - protein, 7 aa, synthetic construct
RTSERQQ

SEQ ID NO: 74046 - protein, 7 aa, synthetic construct
GKNSMMG

SEQ ID NO: 74047 - protein, 7 aa, synthetic construct
RQNQSAP

SEQ ID NO: 74048 - protein, 7 aa, synthetic construct
NKWASIS

SEQ ID NO: 74049 - protein, 7 aa, synthetic construct
KTADPMS

SEQ ID NO: 74050 - protein, 7 aa, synthetic construct
MRHDKLE

SEQ ID NO: 74051 - protein, 7 aa, synthetic construct
SYGKPMA

SEQ ID NO: 74052 - protein, 7 aa, synthetic construct
RDFKAEV

SEQ ID NO: 74053 - protein, 7 aa, synthetic construct
TFATAPG

SEQ ID NO: 74054 - protein, 7 aa, synthetic construct
QSHMGSI

SEQ ID NO: 74055 - protein, 7 aa, synthetic construct
NLNMHRA

SEQ ID NO: 74056 - protein, 7 aa, synthetic construct
TLTGSMG

SEQ ID NO: 74057 - protein, 7 aa, synthetic construct
NLPGITT

SEQ ID NO: 74058 - protein, 7 aa, synthetic construct
MGKTSDR

SEQ ID NO: 74059 - protein, 7 aa, synthetic construct
NPPLNIG

SEQ ID NO: 74060 - protein, 7 aa, synthetic construct
KTGSHHF

SEQ ID NO: 74061 - protein, 7 aa, synthetic construct
RDLSHGN

SEQ ID NO: 74062 - protein, 7 aa, synthetic construct
QMDMRLG

SEQ ID NO: 74063 - protein, 7 aa, synthetic construct
TNVSNDF

SEQ ID NO: 74064 - protein, 7 aa, synthetic construct
PKNSSNW

SEQ ID NO: 74065 - protein, 7 aa, synthetic construct
VQKSSTI

SEQ ID NO: 74066 - protein, 7 aa, synthetic construct
FGPGGYM

SEQ ID NO: 74067 - protein, 7 aa, synthetic construct
ETQMSKM

SEQ ID NO: 74068 - protein, 7 aa, synthetic construct
LKTQSQG

SEQ ID NO: 74069 - protein, 7 aa, synthetic construct
IWNNTNV

SEQ ID NO: 74070 - protein, 7 aa, synthetic construct
MQSVTTS

SEQ ID NO: 74071 - protein, 7 aa, synthetic construct
HSTQPPY

SEQ ID NO: 74072 - protein, 7 aa, synthetic construct
HKENSFL

SEQ ID NO: 74073 - protein, 7 aa, synthetic construct
SHQPKAE

SEQ ID NO: 74074 - protein, 7 aa, synthetic construct
RFKEPNM

SEQ ID NO: 74075 - protein, 7 aa, synthetic construct
FSSTAVN

SEQ ID NO: 74076 - protein, 7 aa, synthetic construct
KWDQKHP

SEQ ID NO: 74077 - protein, 7 aa, synthetic construct
PWRESNS

SEQ ID NO: 74078 - protein, 7 aa, synthetic construct
NIRHQGQ

SEQ ID NO: 74079 - protein, 7 aa, synthetic construct
YPMSTNE

SEQ ID NO: 74080 - protein, 7 aa, synthetic construct
RKLAGTE

SEQ ID NO: 74081 - protein, 7 aa, synthetic construct
MTGAHHE

SEQ ID NO: 74082 - protein, 7 aa, synthetic construct
DQDKFRK

SEQ ID NO: 74083 - protein, 7 aa, synthetic construct
RHQEIPQ

SEQ ID NO: 74084 - protein, 7 aa, synthetic construct
VHGTYGI

SEQ ID NO: 74085 - protein, 7 aa, synthetic construct
AKYMRDG

SEQ ID NO: 74086 - protein, 7 aa, synthetic construct
KEKVAMA

SEQ ID NO: 74087 - protein, 7 aa, synthetic construct
LLSMTAV

SEQ ID NO: 74088 - protein, 7 aa, synthetic construct
KNPYYIE

SEQ ID NO: 74089 - protein, 7 aa, synthetic construct
QTNEFKV

SEQ ID NO: 74090 - protein, 7 aa, synthetic construct
NLTAQIG

SEQ ID NO: 74091 - protein, 7 aa, synthetic construct
GHLARYD

SEQ ID NO: 74092 - protein, 7 aa, synthetic construct
TGANMNL

SEQ ID NO: 74093 - protein, 7 aa, synthetic construct
GNQGWAP

SEQ ID NO: 74094 - protein, 7 aa, synthetic construct
ENKQNEM

SEQ ID NO: 74095 - protein, 7 aa, synthetic construct
NASSNHH

SEQ ID NO: 74096 - protein, 7 aa, synthetic construct
DLKHLST

SEQ ID NO: 74097 - protein, 7 aa, synthetic construct
PIKPGTS

SEQ ID NO: 74098 - protein, 7 aa, synthetic construct
KTMNGTG

SEQ ID NO: 74099 - protein, 7 aa, synthetic construct
SELQRVM

SEQ ID NO: 74100 - protein, 7 aa, synthetic construct
SRASNNG

SEQ ID NO: 74101 - protein, 7 aa, synthetic construct
EHRQGSY

SEQ ID NO: 74102 - protein, 7 aa, synthetic construct
VETKYRE

SEQ ID NO: 74103 - protein, 7 aa, synthetic construct
QPIKNLD

SEQ ID NO: 74104 - protein, 7 aa, synthetic construct
GHFVAGA

SEQ ID NO: 74105 - protein, 7 aa, synthetic construct
FMQRRDD

SEQ ID NO: 74106 - protein, 7 aa, synthetic construct
VERTTKG

SEQ ID NO: 74107 - protein, 7 aa, synthetic construct
LKAKVGE

SEQ ID NO: 74108 - protein, 7 aa, synthetic construct
VKWAGSD

SEQ ID NO: 74109 - protein, 7 aa, synthetic construct
KSLEVNS

SEQ ID NO: 74110 - protein, 7 aa, synthetic construct
AQYKMRD

SEQ ID NO: 74111 - protein, 7 aa, synthetic construct
KLFKEHS

SEQ ID NO: 74112 - protein, 7 aa, synthetic construct
MRNPESP

SEQ ID NO: 74113 - protein, 7 aa, synthetic construct
HVGTKMD

SEQ ID NO: 74114 - protein, 7 aa, synthetic construct
NGGRDTQ

SEQ ID NO: 74115 - protein, 7 aa, synthetic construct
IGKENGY

SEQ ID NO: 74116 - protein, 7 aa, synthetic construct
TDMTKIY

SEQ ID NO: 74117 - protein, 7 aa, synthetic construct
NPDDQRM

SEQ ID NO: 74118 - protein, 7 aa, synthetic construct
QMSHAVE

SEQ ID NO: 74119 - protein, 7 aa, synthetic construct
GRSAGDW

SEQ ID NO: 74120 - protein, 7 aa, synthetic construct
LGSSQGN

SEQ ID NO: 74121 - protein, 7 aa, synthetic construct
EHNANRE

SEQ ID NO: 74122 - protein, 7 aa, synthetic construct
EPSSRHP

SEQ ID NO: 74123 - protein, 7 aa, synthetic construct
VFPLGQP

SEQ ID NO: 74124 - protein, 7 aa, synthetic construct
YAKSSQS

SEQ ID NO: 74125 - protein, 7 aa, synthetic construct
ELQYTAG

SEQ ID NO: 74126 - protein, 7 aa, synthetic construct
TISYGQP

SEQ ID NO: 74127 - protein, 7 aa, synthetic construct
TKNMGAE

SEQ ID NO: 74128 - protein, 7 aa, synthetic construct
GDYQTRV

SEQ ID NO: 74129 - protein, 7 aa, synthetic construct
QEVKRNW

SEQ ID NO: 74130 - protein, 7 aa, synthetic construct
MHNAHQE

SEQ ID NO: 74131 - protein, 7 aa, synthetic construct
YDTHFKT

SEQ ID NO: 74132 - protein, 7 aa, synthetic construct
GPTHMPF

SEQ ID NO: 74133 - protein, 7 aa, synthetic construct
EGKNYGA

SEQ ID NO: 74134 - protein, 7 aa, synthetic construct
RDWGGTG

SEQ ID NO: 74135 - protein, 7 aa, synthetic construct
KQNGAST

SEQ ID NO: 74136 - protein, 7 aa, synthetic construct
TVWKKET

SEQ ID NO: 74137 - protein, 7 aa, synthetic construct
YPQESKY

SEQ ID NO: 74138 - protein, 7 aa, synthetic construct
RQPNNAL

SEQ ID NO: 74139 - protein, 7 aa, synthetic construct
HQKIREV

SEQ ID NO: 74140 - protein, 7 aa, synthetic construct
ARQSEIG

SEQ ID NO: 74141 - protein, 7 aa, synthetic construct
HVGGANI

SEQ ID NO: 74142 - protein, 7 aa, synthetic construct
PLRASSN

SEQ ID NO: 74143 - protein, 7 aa, synthetic construct
SHGHMVK

SEQ ID NO: 74144 - protein, 7 aa, synthetic construct
RPPPFTG

SEQ ID NO: 74145 - protein, 7 aa, synthetic construct
NKIQSGG

SEQ ID NO: 74146 - protein, 7 aa, synthetic construct
SISNVPI

SEQ ID NO: 74147 - protein, 7 aa, synthetic construct
EQKTNQN

SEQ ID NO: 74148 - protein, 7 aa, synthetic construct
WKMANAD

SEQ ID NO: 74149 - protein, 7 aa, synthetic construct
EKINVDG

SEQ ID NO: 74150 - protein, 7 aa, synthetic construct
IGVHAKI

SEQ ID NO: 74151 - protein, 7 aa, synthetic construct
LSSYATL

SEQ ID NO: 74152 - protein, 7 aa, synthetic construct
RGGPDRT

SEQ ID NO: 74153 - protein, 7 aa, synthetic construct
KPQQMAS

SEQ ID NO: 74154 - protein, 7 aa, synthetic construct
PYGAHKT

SEQ ID NO: 74155 - protein, 7 aa, synthetic construct
PQTQSQM

SEQ ID NO: 74156 - protein, 7 aa, synthetic construct
NTNRIYP

SEQ ID NO: 74157 - protein, 7 aa, synthetic construct
MLHHGAI

SEQ ID NO: 74158 - protein, 7 aa, synthetic construct
RVGMPEM

SEQ ID NO: 74159 - protein, 7 aa, synthetic construct
SRTPSGA

SEQ ID NO: 74160 - protein, 7 aa, synthetic construct
NRDWETK

SEQ ID NO: 74161 - protein, 7 aa, synthetic construct
AKSYKLE

SEQ ID NO: 74162 - protein, 7 aa, synthetic construct
KQGPPGM

SEQ ID NO: 74163 - protein, 7 aa, synthetic construct
DRTTSHS

SEQ ID NO: 74164 - protein, 7 aa, synthetic construct
ANRNFSE

SEQ ID NO: 74165 - protein, 7 aa, synthetic construct
ERQQSLV

SEQ ID NO: 74166 - protein, 7 aa, synthetic construct
LTYKEIS

SEQ ID NO: 74167 - protein, 7 aa, synthetic construct
RQDNLKA

SEQ ID NO: 74168 - protein, 7 aa, synthetic construct
PQDHHKT

SEQ ID NO: 74169 - protein, 7 aa, synthetic construct
KVPQDLS

SEQ ID NO: 74170 - protein, 7 aa, synthetic construct
PNMSHKF

SEQ ID NO: 74171 - protein, 7 aa, synthetic construct
RLADQLS

SEQ ID NO: 74172 - protein, 7 aa, synthetic construct
YMGASPH

SEQ ID NO: 74173 - protein, 7 aa, synthetic construct
GYLKNTD

SEQ ID NO: 74174 - protein, 7 aa, synthetic construct
KWTIEEI

SEQ ID NO: 74175 - protein, 7 aa, synthetic construct
VARAERQ

SEQ ID NO: 74176 - protein, 7 aa, synthetic construct
EAKTATS

SEQ ID NO: 74177 - protein, 7 aa, synthetic construct
IFKDRPP

SEQ ID NO: 74178 - protein, 7 aa, synthetic construct
SKNDRLL

SEQ ID NO: 74179 - protein, 7 aa, synthetic construct
EMPASKF

SEQ ID NO: 74180 - protein, 7 aa, synthetic construct
MERIIPG

SEQ ID NO: 74181 - protein, 7 aa, synthetic construct
GPPILRD

SEQ ID NO: 74182 - protein, 7 aa, synthetic construct
ILVHNKS

SEQ ID NO: 74183 - protein, 7 aa, synthetic construct
ISTANKI

SEQ ID NO: 74184 - protein, 7 aa, synthetic construct
NKSNATA

SEQ ID NO: 74185 - protein, 7 aa, synthetic construct
HTAHDSG

SEQ ID NO: 74186 - protein, 7 aa, synthetic construct
RFEDQRQ

SEQ ID NO: 74187 - protein, 7 aa, synthetic construct
TQRHQLP

SEQ ID NO: 74188 - protein, 7 aa, synthetic construct
VPSDKYK

SEQ ID NO: 74189 - protein, 7 aa, synthetic construct
VHKIPSG

SEQ ID NO: 74190 - protein, 7 aa, synthetic construct
KSAPGRE

SEQ ID NO: 74191 - protein, 7 aa, synthetic construct
GNARAYT

SEQ ID NO: 74192 - protein, 7 aa, synthetic construct
FNSGLGI

SEQ ID NO: 74193 - protein, 7 aa, synthetic construct
LQGAALN

SEQ ID NO: 74194 - protein, 7 aa, synthetic construct
QKERLTS

SEQ ID NO: 74195 - protein, 7 aa, synthetic construct
GYNSNRE

SEQ ID NO: 74196 - protein, 7 aa, synthetic construct
RKTDMND

SEQ ID NO: 74197 - protein, 7 aa, synthetic construct
ASVTTRT

SEQ ID NO: 74198 - protein, 7 aa, synthetic construct
FGKQEEK

SEQ ID NO: 74199 - protein, 7 aa, synthetic construct
QEPMRSK

SEQ ID NO: 74200 - protein, 7 aa, synthetic construct
TTRNTNM

SEQ ID NO: 74201 - protein, 7 aa, synthetic construct
YNKSENN

SEQ ID NO: 74202 - protein, 7 aa, synthetic construct
MSRQQNA

SEQ ID NO: 74203 - protein, 7 aa, synthetic construct
PGGAANI

SEQ ID NO: 74204 - protein, 7 aa, synthetic construct
DKRKFEI

SEQ ID NO: 74205 - protein, 7 aa, synthetic construct
DRPSRAM

SEQ ID NO: 74206 - protein, 7 aa, synthetic construct
IGHNGMA

SEQ ID NO: 74207 - protein, 7 aa, synthetic construct
KDAYHQT

SEQ ID NO: 74208 - protein, 7 aa, synthetic construct
RMVNAQH

SEQ ID NO: 74209 - protein, 7 aa, synthetic construct
VSAKQAM

SEQ ID NO: 74210 - protein, 7 aa, synthetic construct
SPMNHST

SEQ ID NO: 74211 - protein, 7 aa, synthetic construct
AKAHVMH

SEQ ID NO: 74212 - protein, 7 aa, synthetic construct
VIKSYNE

SEQ ID NO: 74213 - protein, 7 aa, synthetic construct
QQQMRTH

SEQ ID NO: 74214 - protein, 7 aa, synthetic construct
ARIQGHA

SEQ ID NO: 74215 - protein, 7 aa, synthetic construct
AVTKVMA

SEQ ID NO: 74216 - protein, 7 aa, synthetic construct
AEVLRTG

SEQ ID NO: 74217 - protein, 7 aa, synthetic construct
SKQSATS

SEQ ID NO: 74218 - protein, 7 aa, synthetic construct
STRDVFS

SEQ ID NO: 74219 - protein, 7 aa, synthetic construct
MGPKGTG

SEQ ID NO: 74220 - protein, 7 aa, synthetic construct
YGPRMGD

SEQ ID NO: 74221 - protein, 7 aa, synthetic construct
AKGGPIN

SEQ ID NO: 74222 - protein, 7 aa, synthetic construct
NKTNFHE

SEQ ID NO: 74223 - protein, 7 aa, synthetic construct
NYQTSQA

SEQ ID NO: 74224 - protein, 7 aa, synthetic construct
HHRSEAL

SEQ ID NO: 74225 - protein, 7 aa, synthetic construct
SLKYMTD

SEQ ID NO: 74226 - protein, 7 aa, synthetic construct
SAGKTNF

SEQ ID NO: 74227 - protein, 7 aa, synthetic construct
NKVATQA

SEQ ID NO: 74228 - protein, 7 aa, synthetic construct
HYKQDLT

SEQ ID NO: 74229 - protein, 7 aa, synthetic construct
TAQYPRI

SEQ ID NO: 74230 - protein, 7 aa, synthetic construct
SPTFHAH

SEQ ID NO: 74231 - protein, 7 aa, synthetic construct
SPLRSET

SEQ ID NO: 74232 - protein, 7 aa, synthetic construct
LGNKLFI

SEQ ID NO: 74233 - protein, 7 aa, synthetic construct
WAQGKVD

SEQ ID NO: 74234 - protein, 7 aa, synthetic construct
QMPKGFG

SEQ ID NO: 74235 - protein, 7 aa, synthetic construct
RKNTEAQ

SEQ ID NO: 74236 - protein, 7 aa, synthetic construct
HTTKAYT

SEQ ID NO: 74237 - protein, 7 aa, synthetic construct
FKTVPKE

SEQ ID NO: 74238 - protein, 7 aa, synthetic construct
HFPREAD

SEQ ID NO: 74239 - protein, 7 aa, synthetic construct
DFIAVRG

SEQ ID NO: 74240 - protein, 7 aa, synthetic construct
GMKISAP

SEQ ID NO: 74241 - protein, 7 aa, synthetic construct
QHANQLQ

SEQ ID NO: 74242 - protein, 7 aa, synthetic construct
NVYKNEM

SEQ ID NO: 74243 - protein, 7 aa, synthetic construct
QKMANGG

SEQ ID NO: 74244 - protein, 7 aa, synthetic construct
KTKDAQN

SEQ ID NO: 74245 - protein, 7 aa, synthetic construct
EGRTPNL

SEQ ID NO: 74246 - protein, 7 aa, synthetic construct
KPFKDYL

SEQ ID NO: 74247 - protein, 7 aa, synthetic construct
HQMKAVQ

SEQ ID NO: 74248 - protein, 7 aa, synthetic construct
TFFSNEP

SEQ ID NO: 74249 - protein, 7 aa, synthetic construct
SPIGKPY

SEQ ID NO: 74250 - protein, 7 aa, synthetic construct
TIQGHNG

SEQ ID NO: 74251 - protein, 7 aa, synthetic construct
GIKTHHE

SEQ ID NO: 74252 - protein, 7 aa, synthetic construct
NTRFAIG

SEQ ID NO: 74253 - protein, 7 aa, synthetic construct
PLLHLQG

SEQ ID NO: 74254 - protein, 7 aa, synthetic construct
DVMERKA

SEQ ID NO: 74255 - protein, 7 aa, synthetic construct
EEKVVKR

SEQ ID NO: 74256 - protein, 7 aa, synthetic construct
QLALSGP

SEQ ID NO: 74257 - protein, 7 aa, synthetic construct
GFTKMSD

SEQ ID NO: 74258 - protein, 7 aa, synthetic construct
RQVTDRV

SEQ ID NO: 74259 - protein, 7 aa, synthetic construct
SKETWPS

SEQ ID NO: 74260 - protein, 7 aa, synthetic construct
TSALNVE

SEQ ID NO: 74261 - protein, 7 aa, synthetic construct
YKEFGHN

SEQ ID NO: 74262 - protein, 7 aa, synthetic construct
KSDQTNK

SEQ ID NO: 74263 - protein, 7 aa, synthetic construct
FGQAKAN

SEQ ID NO: 74264 - protein, 7 aa, synthetic construct
PRFNMDV

SEQ ID NO: 74265 - protein, 7 aa, synthetic construct
YPIANNP

SEQ ID NO: 74266 - protein, 7 aa, synthetic construct
RDQTKAY

SEQ ID NO: 74267 - protein, 7 aa, synthetic construct
QLHFGDA

SEQ ID NO: 74268 - protein, 7 aa, synthetic construct
EQSRPLL

SEQ ID NO: 74269 - protein, 7 aa, synthetic construct
GPSGFNQ

SEQ ID NO: 74270 - protein, 7 aa, synthetic construct
TQKSQTP

SEQ ID NO: 74271 - protein, 7 aa, synthetic construct
QVHHGMG

SEQ ID NO: 74272 - protein, 7 aa, synthetic construct
RQQGFEN

SEQ ID NO: 74273 - protein, 7 aa, synthetic construct
NTGIAAH

SEQ ID NO: 74274 - protein, 7 aa, synthetic construct
GKGTSLG

SEQ ID NO: 74275 - protein, 7 aa, synthetic construct
RNSQGVA

SEQ ID NO: 74276 - protein, 7 aa, synthetic construct
NHKQNNW

SEQ ID NO: 74277 - protein, 7 aa, synthetic construct
HGIQQAY

SEQ ID NO: 74278 - protein, 7 aa, synthetic construct
HLGALGV

SEQ ID NO: 74279 - protein, 7 aa, synthetic construct
KQQGSDW

SEQ ID NO: 74280 - protein, 7 aa, synthetic construct
DVNNGGR

SEQ ID NO: 74281 - protein, 7 aa, synthetic construct
KASAYGL

SEQ ID NO: 74282 - protein, 7 aa, synthetic construct
FDKSTQT

SEQ ID NO: 74283 - protein, 7 aa, synthetic construct
NPQIRKE

SEQ ID NO: 74284 - protein, 7 aa, synthetic construct
NEKVIKF

SEQ ID NO: 74285 - protein, 7 aa, synthetic construct
MRAVDKL

SEQ ID NO: 74286 - protein, 7 aa, synthetic construct
RSTHESN

SEQ ID NO: 74287 - protein, 7 aa, synthetic construct
MNYKINA

SEQ ID NO: 74288 - protein, 7 aa, synthetic construct
HVRAGPI

SEQ ID NO: 74289 - protein, 7 aa, synthetic construct
SQQQRSG

SEQ ID NO: 74290 - protein, 7 aa, synthetic construct
SNSVAKI

SEQ ID NO: 74291 - protein, 7 aa, synthetic construct
FMPGEKK

SEQ ID NO: 74292 - protein, 7 aa, synthetic construct
FGTRHAA

SEQ ID NO: 74293 - protein, 7 aa, synthetic construct
KTSPGQA

SEQ ID NO: 74294 - protein, 7 aa, synthetic construct
ITSKTYT

SEQ ID NO: 74295 - protein, 7 aa, synthetic construct
PTAHGQD

SEQ ID NO: 74296 - protein, 7 aa, synthetic construct
YMTSTPA

SEQ ID NO: 74297 - protein, 7 aa, synthetic construct
RYDQLSE

SEQ ID NO: 74298 - protein, 7 aa, synthetic construct
IEHQRTY

SEQ ID NO: 74299 - protein, 7 aa, synthetic construct
GVYVRNA

SEQ ID NO: 74300 - protein, 7 aa, synthetic construct
KTPGTVS

SEQ ID NO: 74301 - protein, 7 aa, synthetic construct
RHTTSNF

SEQ ID NO: 74302 - protein, 7 aa, synthetic construct
ASSGKGN

SEQ ID NO: 74303 - protein, 7 aa, synthetic construct
EARSGTY

SEQ ID NO: 74304 - protein, 7 aa, synthetic construct
NPAHIGS

SEQ ID NO: 74305 - protein, 7 aa, synthetic construct
QKEPPWK

SEQ ID NO: 74306 - protein, 7 aa, synthetic construct
VFDQGHH

SEQ ID NO: 74307 - protein, 7 aa, synthetic construct
ANTANKN

SEQ ID NO: 74308 - protein, 7 aa, synthetic construct
SSKGFVM

SEQ ID NO: 74309 - protein, 7 aa, synthetic construct
RNPNVEW

SEQ ID NO: 74310 - protein, 7 aa, synthetic construct
EKKDASR

SEQ ID NO: 74311 - protein, 7 aa, synthetic construct
AQQGPFS

SEQ ID NO: 74312 - protein, 7 aa, synthetic construct
IRAAYMG

SEQ ID NO: 74313 - protein, 7 aa, synthetic construct
FKIGDAD

SEQ ID NO: 74314 - protein, 7 aa, synthetic construct
SGKLMYD

SEQ ID NO: 74315 - protein, 7 aa, synthetic construct
ILGHRDP

SEQ ID NO: 74316 - protein, 7 aa, synthetic construct
YSHKTDI

SEQ ID NO: 74317 - protein, 7 aa, synthetic construct
VWQSDAG

SEQ ID NO: 74318 - protein, 7 aa, synthetic construct
NHSNHDR

SEQ ID NO: 74319 - protein, 7 aa, synthetic construct
SAHIQLY

SEQ ID NO: 74320 - protein, 7 aa, synthetic construct
MLPNEPK

SEQ ID NO: 74321 - protein, 7 aa, synthetic construct
FHDRLDK

SEQ ID NO: 74322 - protein, 7 aa, synthetic construct
REKDATM

SEQ ID NO: 74323 - protein, 7 aa, synthetic construct
MGMFRDP

SEQ ID NO: 74324 - protein, 7 aa, synthetic construct
QEGKFRD

SEQ ID NO: 74325 - protein, 7 aa, synthetic construct
AFMNRVE

SEQ ID NO: 74326 - protein, 7 aa, synthetic construct
VKDKYQA

SEQ ID NO: 74327 - protein, 7 aa, synthetic construct
LQKGNAA

SEQ ID NO: 74328 - protein, 7 aa, synthetic construct
NKDFMAN

SEQ ID NO: 74329 - protein, 7 aa, synthetic construct
AINARPV

SEQ ID NO: 74330 - protein, 7 aa, synthetic construct
YSVLVQS

SEQ ID NO: 74331 - protein, 7 aa, synthetic construct
TNFHSSQ

SEQ ID NO: 74332 - protein, 7 aa, synthetic construct
ILTPNKT

SEQ ID NO: 74333 - protein, 7 aa, synthetic construct
YFDHGGA

SEQ ID NO: 74334 - protein, 7 aa, synthetic construct
HMKVPKE

SEQ ID NO: 74335 - protein, 7 aa, synthetic construct
WKQTTPT

SEQ ID NO: 74336 - protein, 7 aa, synthetic construct
CKGADCN

SEQ ID NO: 74337 - protein, 7 aa, synthetic construct
YSASPMV

SEQ ID NO: 74338 - protein, 7 aa, synthetic construct
AKPHIEE

SEQ ID NO: 74339 - protein, 7 aa, synthetic construct
YHHAQNM

SEQ ID NO: 74340 - protein, 7 aa, synthetic construct
HQKTSPI

SEQ ID NO: 74341 - protein, 7 aa, synthetic construct
YVGPKDG

SEQ ID NO: 74342 - protein, 7 aa, synthetic construct
YIGNMVA

SEQ ID NO: 74343 - protein, 7 aa, synthetic construct
ELVATSH

SEQ ID NO: 74344 - protein, 7 aa, synthetic construct
ARMPQEK

SEQ ID NO: 74345 - protein, 7 aa, synthetic construct
DRWKENS

SEQ ID NO: 74346 - protein, 7 aa, synthetic construct
RETSNMA

SEQ ID NO: 74347 - protein, 7 aa, synthetic construct
KRIMDMM

SEQ ID NO: 74348 - protein, 7 aa, synthetic construct
RQTHAAI

SEQ ID NO: 74349 - protein, 7 aa, synthetic construct
TQMNRPA

SEQ ID NO: 74350 - protein, 7 aa, synthetic construct
MYATHSG

SEQ ID NO: 74351 - protein, 7 aa, synthetic construct
MQHLVSD

SEQ ID NO: 74352 - protein, 7 aa, synthetic construct
PHGESRP

SEQ ID NO: 74353 - protein, 7 aa, synthetic construct
HNAQGII

SEQ ID NO: 74354 - protein, 7 aa, synthetic construct
KDSFVDR

SEQ ID NO: 74355 - protein, 7 aa, synthetic construct
KPALNQY

SEQ ID NO: 74356 - protein, 7 aa, synthetic construct
NPRSVNA

SEQ ID NO: 74357 - protein, 7 aa, synthetic construct
KHQAAVV

SEQ ID NO: 74358 - protein, 7 aa, synthetic construct
SKSQGFA

SEQ ID NO: 74359 - protein, 7 aa, synthetic construct
HNRVKAE

SEQ ID NO: 74360 - protein, 7 aa, synthetic construct
IRISSDT

SEQ ID NO: 74361 - protein, 7 aa, synthetic construct
TSVHAAS

SEQ ID NO: 74362 - protein, 7 aa, synthetic construct
TKAEGFI

SEQ ID NO: 74363 - protein, 7 aa, synthetic construct
TNMEKPS

SEQ ID NO: 74364 - protein, 7 aa, synthetic construct
METRSTP

SEQ ID NO: 74365 - protein, 7 aa, synthetic construct
KQFHKGD

SEQ ID NO: 74366 - protein, 7 aa, synthetic construct
KDQKEKS

SEQ ID NO: 74367 - protein, 7 aa, synthetic construct
GPQISSY

SEQ ID NO: 74368 - protein, 7 aa, synthetic construct
HAGGAGF

SEQ ID NO: 74369 - protein, 7 aa, synthetic construct
INANFSA

SEQ ID NO: 74370 - protein, 7 aa, synthetic construct
TGGAKSG

SEQ ID NO: 74371 - protein, 7 aa, synthetic construct
ARVGTVF

SEQ ID NO: 74372 - protein, 7 aa, synthetic construct
HSRSMMV

SEQ ID NO: 74373 - protein, 7 aa, synthetic construct
QTHSVGN

SEQ ID NO: 74374 - protein, 7 aa, synthetic construct
VRQKIEL

SEQ ID NO: 74375 - protein, 7 aa, synthetic construct
SYNAGQS

SEQ ID NO: 74376 - protein, 7 aa, synthetic construct
YGHSSVP

SEQ ID NO: 74377 - protein, 7 aa, synthetic construct
HKYNMEQ

SEQ ID NO: 74378 - protein, 7 aa, synthetic construct
YRPDTKM

SEQ ID NO: 74379 - protein, 7 aa, synthetic construct
GPYEART

SEQ ID NO: 74380 - protein, 7 aa, synthetic construct
LLPNITA

SEQ ID NO: 74381 - protein, 7 aa, synthetic construct
ASRSSDM

SEQ ID NO: 74382 - protein, 7 aa, synthetic construct
FSKGSAA

SEQ ID NO: 74383 - protein, 7 aa, synthetic construct
QLAAHSE

SEQ ID NO: 74384 - protein, 7 aa, synthetic construct
YAAIKGM

SEQ ID NO: 74385 - protein, 7 aa, synthetic construct
FIPTDQG

SEQ ID NO: 74386 - protein, 7 aa, synthetic construct
NTWKDNI

SEQ ID NO: 74387 - protein, 7 aa, synthetic construct
EPWKDQK

SEQ ID NO: 74388 - protein, 7 aa, synthetic construct
KNQSQDR

SEQ ID NO: 74389 - protein, 7 aa, synthetic construct
HGTETRN

SEQ ID NO: 74390 - protein, 7 aa, synthetic construct
GTKSTVP

SEQ ID NO: 74391 - protein, 7 aa, synthetic construct
NAFDRHV

SEQ ID NO: 74392 - protein, 7 aa, synthetic construct
FAGLQST

SEQ ID NO: 74393 - protein, 7 aa, synthetic construct
MPGQFHA

SEQ ID NO: 74394 - protein, 7 aa, synthetic construct
YGSMKTP

SEQ ID NO: 74395 - protein, 7 aa, synthetic construct
MQHIQKQ

SEQ ID NO: 74396 - protein, 7 aa, synthetic construct
GQHDVTP

SEQ ID NO: 74397 - protein, 7 aa, synthetic construct
TQSLSYK

SEQ ID NO: 74398 - protein, 7 aa, synthetic construct
SKGHNQF

SEQ ID NO: 74399 - protein, 7 aa, synthetic construct
WPHLQNG

SEQ ID NO: 74400 - protein, 7 aa, synthetic construct
MHGASSS

SEQ ID NO: 74401 - protein, 7 aa, synthetic construct
QPPITRD

SEQ ID NO: 74402 - protein, 7 aa, synthetic construct
NIPQMDR

SEQ ID NO: 74403 - protein, 7 aa, synthetic construct
QYMKNHG

SEQ ID NO: 74404 - protein, 7 aa, synthetic construct
SMATNRT

SEQ ID NO: 74405 - protein, 7 aa, synthetic construct
PRPAGGS

SEQ ID NO: 74406 - protein, 7 aa, synthetic construct
GITRMIG

SEQ ID NO: 74407 - protein, 7 aa, synthetic construct
KVDRMDA

SEQ ID NO: 74408 - protein, 7 aa, synthetic construct
GGWKAEE

SEQ ID NO: 74409 - protein, 7 aa, synthetic construct
MTGGAKD

SEQ ID NO: 74410 - protein, 7 aa, synthetic construct
HKPGMAE

SEQ ID NO: 74411 - protein, 7 aa, synthetic construct
RMGRDQI

SEQ ID NO: 74412 - protein, 7 aa, synthetic construct
STNNYSL

SEQ ID NO: 74413 - protein, 7 aa, synthetic construct
HPSGDGN

SEQ ID NO: 74414 - protein, 7 aa, synthetic construct
SHTNTRA

SEQ ID NO: 74415 - protein, 7 aa, synthetic construct
HTTKIYA

SEQ ID NO: 74416 - protein, 7 aa, synthetic construct
EPRLIAD

SEQ ID NO: 74417 - protein, 7 aa, synthetic construct
TALPQSQ

SEQ ID NO: 74418 - protein, 7 aa, synthetic construct
VHNYHDP

SEQ ID NO: 74419 - protein, 7 aa, synthetic construct
MNPRSTI

SEQ ID NO: 74420 - protein, 7 aa, synthetic construct
DVKGHSV

SEQ ID NO: 74421 - protein, 7 aa, synthetic construct
INNNGNS

SEQ ID NO: 74422 - protein, 7 aa, synthetic construct
EGNHNIP

SEQ ID NO: 74423 - protein, 7 aa, synthetic construct
KNSPGVM

SEQ ID NO: 74424 - protein, 7 aa, synthetic construct
FAISANG

SEQ ID NO: 74425 - protein, 7 aa, synthetic construct
VDTRMVG

SEQ ID NO: 74426 - protein, 7 aa, synthetic construct
YVGHGKQ

SEQ ID NO: 74427 - protein, 7 aa, synthetic construct
HTSAPPG

SEQ ID NO: 74428 - protein, 7 aa, synthetic construct
SHVMRVA

SEQ ID NO: 74429 - protein, 7 aa, synthetic construct
RKIDMVD

SEQ ID NO: 74430 - protein, 7 aa, synthetic construct
KPFAGSS

SEQ ID NO: 74431 - protein, 7 aa, synthetic construct
HPGTDHN

SEQ ID NO: 74432 - protein, 7 aa, synthetic construct
YQKRMFD

SEQ ID NO: 74433 - protein, 7 aa, synthetic construct
QTDHRRP

SEQ ID NO: 74434 - protein, 7 aa, synthetic construct
NKQNNNI

SEQ ID NO: 74435 - protein, 7 aa, synthetic construct
YPAHQPV

SEQ ID NO: 74436 - protein, 7 aa, synthetic construct
QFKSNAS

SEQ ID NO: 74437 - protein, 7 aa, synthetic construct
AFSTTNM

SEQ ID NO: 74438 - protein, 7 aa, synthetic construct
KERQIDP

SEQ ID NO: 74439 - protein, 7 aa, synthetic construct
YGKVDLH

SEQ ID NO: 74440 - protein, 7 aa, synthetic construct
VSVHKES

SEQ ID NO: 74441 - protein, 7 aa, synthetic construct
IKDTNKS

SEQ ID NO: 74442 - protein, 7 aa, synthetic construct
VNQSVQA

SEQ ID NO: 74443 - protein, 7 aa, synthetic construct
VKQMNNS

SEQ ID NO: 74444 - protein, 7 aa, synthetic construct
TMVDKNV

SEQ ID NO: 74445 - protein, 7 aa, synthetic construct
RKHFEEL

SEQ ID NO: 74446 - protein, 7 aa, synthetic construct
PKSTHTP

SEQ ID NO: 74447 - protein, 7 aa, synthetic construct
RPMGQIA

SEQ ID NO: 74448 - protein, 7 aa, synthetic construct
NPMTKVH

SEQ ID NO: 74449 - protein, 7 aa, synthetic construct
DLLRDRK

SEQ ID NO: 74450 - protein, 7 aa, synthetic construct
FKSSHTG

SEQ ID NO: 74451 - protein, 7 aa, synthetic construct
NAGQYHV

SEQ ID NO: 74452 - protein, 7 aa, synthetic construct
LHPAHMS

SEQ ID NO: 74453 - protein, 7 aa, synthetic construct
MQGAANG

SEQ ID NO: 74454 - protein, 7 aa, synthetic construct
HNARQQH

SEQ ID NO: 74455 - protein, 7 aa, synthetic construct
MFQSVSP

SEQ ID NO: 74456 - protein, 7 aa, synthetic construct
QKTGPIS

SEQ ID NO: 74457 - protein, 7 aa, synthetic construct
RMTKESY

SEQ ID NO: 74458 - protein, 7 aa, synthetic construct
IVKDMKD

SEQ ID NO: 74459 - protein, 7 aa, synthetic construct
SPRRSDD

SEQ ID NO: 74460 - protein, 7 aa, synthetic construct
FPNRQMD

SEQ ID NO: 74461 - protein, 7 aa, synthetic construct
QKSQMSS

SEQ ID NO: 74462 - protein, 7 aa, synthetic construct
QVQHSRQ

SEQ ID NO: 74463 - protein, 7 aa, synthetic construct
IKELTQQ

SEQ ID NO: 74464 - protein, 7 aa, synthetic construct
ADFQNGK

SEQ ID NO: 74465 - protein, 7 aa, synthetic construct
VNSQYSK

SEQ ID NO: 74466 - protein, 7 aa, synthetic construct
WSSVGPN

SEQ ID NO: 74467 - protein, 7 aa, synthetic construct
VAPGPQI

SEQ ID NO: 74468 - protein, 7 aa, synthetic construct
GPHKIHS

SEQ ID NO: 74469 - protein, 7 aa, synthetic construct
QSDYSRD

SEQ ID NO: 74470 - protein, 7 aa, synthetic construct
TQSVIGG

SEQ ID NO: 74471 - protein, 7 aa, synthetic construct
VVARDHV

SEQ ID NO: 74472 - protein, 7 aa, synthetic construct
ALYSGNG

SEQ ID NO: 74473 - protein, 7 aa, synthetic construct
KEANHLV

SEQ ID NO: 74474 - protein, 7 aa, synthetic construct
FVTDTHK

SEQ ID NO: 74475 - protein, 7 aa, synthetic construct
KPLMRMD

SEQ ID NO: 74476 - protein, 7 aa, synthetic construct
EQTASIS

SEQ ID NO: 74477 - protein, 7 aa, synthetic construct
REWNKDG

SEQ ID NO: 74478 - protein, 7 aa, synthetic construct
RGGYTEM

SEQ ID NO: 74479 - protein, 7 aa, synthetic construct
SHGDKMQ

SEQ ID NO: 74480 - protein, 7 aa, synthetic construct
FPHAIQA

SEQ ID NO: 74481 - protein, 7 aa, synthetic construct
MAVQDHV

SEQ ID NO: 74482 - protein, 7 aa, synthetic construct
NGMSKAG

SEQ ID NO: 74483 - protein, 7 aa, synthetic construct
KPNNGAP

SEQ ID NO: 74484 - protein, 7 aa, synthetic construct
NHSAVTP

SEQ ID NO: 74485 - protein, 7 aa, synthetic construct
AERGLTN

SEQ ID NO: 74486 - protein, 7 aa, synthetic construct
SDGRHGY

SEQ ID NO: 74487 - protein, 7 aa, synthetic construct
FQAKVHH

SEQ ID NO: 74488 - protein, 7 aa, synthetic construct
LQPPHYE

SEQ ID NO: 74489 - protein, 7 aa, synthetic construct
NPINNAG

SEQ ID NO: 74490 - protein, 7 aa, synthetic construct
YYGKEDK

SEQ ID NO: 74491 - protein, 7 aa, synthetic construct
RTNNTVA

SEQ ID NO: 74492 - protein, 7 aa, synthetic construct
YARYIDA

SEQ ID NO: 74493 - protein, 7 aa, synthetic construct
KMSASEL

SEQ ID NO: 74494 - protein, 7 aa, synthetic construct
TNMGRAD

SEQ ID NO: 74495 - protein, 7 aa, synthetic construct
RVPTNAY

SEQ ID NO: 74496 - protein, 7 aa, synthetic construct
QYMSDQK

SEQ ID NO: 74497 - protein, 7 aa, synthetic construct
GAPMLHP

SEQ ID NO: 74498 - protein, 7 aa, synthetic construct
IKKEWVA

SEQ ID NO: 74499 - protein, 7 aa, synthetic construct
HLDIILG

SEQ ID NO: 74500 - protein, 7 aa, synthetic construct
ILSAMTS

SEQ ID NO: 74501 - protein, 7 aa, synthetic construct
AGGLVAH

SEQ ID NO: 74502 - protein, 7 aa, synthetic construct
NKDRHDV

SEQ ID NO: 74503 - protein, 7 aa, synthetic construct
VQESRQG

SEQ ID NO: 74504 - protein, 7 aa, synthetic construct
KVNGNVT

SEQ ID NO: 74505 - protein, 7 aa, synthetic construct
VVHPGGM

SEQ ID NO: 74506 - protein, 7 aa, synthetic construct
GSRDILH

SEQ ID NO: 74507 - protein, 7 aa, synthetic construct
VPMHKMG

SEQ ID NO: 74508 - protein, 7 aa, synthetic construct
VKTMVTQ

SEQ ID NO: 74509 - protein, 7 aa, synthetic construct
KSEFVPR

SEQ ID NO: 74510 - protein, 7 aa, synthetic construct
RHLSAVT

SEQ ID NO: 74511 - protein, 7 aa, synthetic construct
STLPSMS

SEQ ID NO: 74512 - protein, 7 aa, synthetic construct
DGQFKGD

SEQ ID NO: 74513 - protein, 7 aa, synthetic construct
KIVSQAP

SEQ ID NO: 74514 - protein, 7 aa, synthetic construct
QNVTTRP

SEQ ID NO: 74515 - protein, 7 aa, synthetic construct
VKDANPK

SEQ ID NO: 74516 - protein, 7 aa, synthetic construct
RDEKKET

SEQ ID NO: 74517 - protein, 7 aa, synthetic construct
NLMGKRE

SEQ ID NO: 74518 - protein, 7 aa, synthetic construct
HYQQPAK

SEQ ID NO: 74519 - protein, 7 aa, synthetic construct
ITGTMPK

SEQ ID NO: 74520 - protein, 7 aa, synthetic construct
TKSVGNA

SEQ ID NO: 74521 - protein, 7 aa, synthetic construct
KQKETSG

SEQ ID NO: 74522 - protein, 7 aa, synthetic construct
MTNHGQS

SEQ ID NO: 74523 - protein, 7 aa, synthetic construct
SPKITAS

SEQ ID NO: 74524 - protein, 7 aa, synthetic construct
HQGEKTH

SEQ ID NO: 74525 - protein, 7 aa, synthetic construct
YDSHLYQ

SEQ ID NO: 74526 - protein, 7 aa, synthetic construct
GRELVVN

SEQ ID NO: 74527 - protein, 7 aa, synthetic construct
KVSHEIE

SEQ ID NO: 74528 - protein, 7 aa, synthetic construct
NASGKFL

SEQ ID NO: 74529 - protein, 7 aa, synthetic construct
KPNAGTS

SEQ ID NO: 74530 - protein, 7 aa, synthetic construct
NKTHTDH

SEQ ID NO: 74531 - protein, 7 aa, synthetic construct
NKQLPFN

SEQ ID NO: 74532 - protein, 7 aa, synthetic construct
GLNQLRG

SEQ ID NO: 74533 - protein, 7 aa, synthetic construct
NGPHAYK

SEQ ID NO: 74534 - protein, 7 aa, synthetic construct
SIVPGKI

SEQ ID NO: 74535 - protein, 7 aa, synthetic construct
LVSTPNH

SEQ ID NO: 74536 - protein, 7 aa, synthetic construct
IMSTQGN

SEQ ID NO: 74537 - protein, 7 aa, synthetic construct
YPRVMSE

SEQ ID NO: 74538 - protein, 7 aa, synthetic construct
ESPAFKA

SEQ ID NO: 74539 - protein, 7 aa, synthetic construct
EGSVKRM

SEQ ID NO: 74540 - protein, 7 aa, synthetic construct
PFSHGKD

SEQ ID NO: 74541 - protein, 7 aa, synthetic construct
SPSSTKI

SEQ ID NO: 74542 - protein, 7 aa, synthetic construct
AVSTQMI

SEQ ID NO: 74543 - protein, 7 aa, synthetic construct
LMNPGHK

SEQ ID NO: 74544 - protein, 7 aa, synthetic construct
RTSNTQP

SEQ ID NO: 74545 - protein, 7 aa, synthetic construct
ASHRTQE

SEQ ID NO: 74546 - protein, 7 aa, synthetic construct
NRNDGME

SEQ ID NO: 74547 - protein, 7 aa, synthetic construct
RPQSTVD

SEQ ID NO: 74548 - protein, 7 aa, synthetic construct
RPGMHVH

SEQ ID NO: 74549 - protein, 7 aa, synthetic construct
IYRVEQE

SEQ ID NO: 74550 - protein, 7 aa, synthetic construct
YPPALGS

SEQ ID NO: 74551 - protein, 7 aa, synthetic construct
LSAIERM

SEQ ID NO: 74552 - protein, 7 aa, synthetic construct
WPKKEQA

SEQ ID NO: 74553 - protein, 7 aa, synthetic construct
DVSQKMQ

SEQ ID NO: 74554 - protein, 7 aa, synthetic construct
SGARPTH

SEQ ID NO: 74555 - protein, 7 aa, synthetic construct
YKPETAS

SEQ ID NO: 74556 - protein, 7 aa, synthetic construct
TWNGIPP

SEQ ID NO: 74557 - protein, 7 aa, synthetic construct
SAVSRTP

SEQ ID NO: 74558 - protein, 7 aa, synthetic construct
MDHLGTP

SEQ ID NO: 74559 - protein, 7 aa, synthetic construct
DIRKEKF

SEQ ID NO: 74560 - protein, 7 aa, synthetic construct
YTNPTTK

SEQ ID NO: 74561 - protein, 7 aa, synthetic construct
AHEGKGM

SEQ ID NO: 74562 - protein, 7 aa, synthetic construct
KGSMINL

SEQ ID NO: 74563 - protein, 7 aa, synthetic construct
MYDFEKP

SEQ ID NO: 74564 - protein, 7 aa, synthetic construct
FASNYES

SEQ ID NO: 74565 - protein, 7 aa, synthetic construct
IMVAAAP

SEQ ID NO: 74566 - protein, 7 aa, synthetic construct
QVTHLDF

SEQ ID NO: 74567 - protein, 7 aa, synthetic construct
ISRGVLA

SEQ ID NO: 74568 - protein, 7 aa, synthetic construct
TSFRSEQ

SEQ ID NO: 74569 - protein, 7 aa, synthetic construct
EKKTQSP

SEQ ID NO: 74570 - protein, 7 aa, synthetic construct
SKSSTTP

SEQ ID NO: 74571 - protein, 7 aa, synthetic construct
SSGGRGP

SEQ ID NO: 74572 - protein, 7 aa, synthetic construct
QSSAIHL

SEQ ID NO: 74573 - protein, 7 aa, synthetic construct
FAGDADR

SEQ ID NO: 74574 - protein, 7 aa, synthetic construct
GNHVGQR

SEQ ID NO: 74575 - protein, 7 aa, synthetic construct
ATNKGHW

SEQ ID NO: 74576 - protein, 7 aa, synthetic construct
HRASSIL

SEQ ID NO: 74577 - protein, 7 aa, synthetic construct
TKIGGIA

SEQ ID NO: 74578 - protein, 7 aa, synthetic construct
QDKKAFP

SEQ ID NO: 74579 - protein, 7 aa, synthetic construct
KSMQGQG

SEQ ID NO: 74580 - protein, 7 aa, synthetic construct
FFQDSHG

SEQ ID NO: 74581 - protein, 7 aa, synthetic construct
NNPIAVA

SEQ ID NO: 74582 - protein, 7 aa, synthetic construct
PLGQVKV

SEQ ID NO: 74583 - protein, 7 aa, synthetic construct
KLEHWNS

SEQ ID NO: 74584 - protein, 7 aa, synthetic construct
FSSAHAR

SEQ ID NO: 74585 - protein, 7 aa, synthetic construct
ALTTHGV

SEQ ID NO: 74586 - protein, 7 aa, synthetic construct
QRPEVPW

SEQ ID NO: 74587 - protein, 7 aa, synthetic construct
HMNAAKV

SEQ ID NO: 74588 - protein, 7 aa, synthetic construct
RFDTRTA

SEQ ID NO: 74589 - protein, 7 aa, synthetic construct
MSTRPEM

SEQ ID NO: 74590 - protein, 7 aa, synthetic construct
MAKSNQW

SEQ ID NO: 74591 - protein, 7 aa, synthetic construct
TMNEWKA

SEQ ID NO: 74592 - protein, 7 aa, synthetic construct
KTDRTIS

SEQ ID NO: 74593 - protein, 7 aa, synthetic construct
NVYGQDS

SEQ ID NO: 74594 - protein, 7 aa, synthetic construct
RPVTNQP

SEQ ID NO: 74595 - protein, 7 aa, synthetic construct
SALNMKY

SEQ ID NO: 74596 - protein, 7 aa, synthetic construct
GSKTSAP

SEQ ID NO: 74597 - protein, 7 aa, synthetic construct
AITLRNN

SEQ ID NO: 74598 - protein, 7 aa, synthetic construct
GMAAAKP

SEQ ID NO: 74599 - protein, 7 aa, synthetic construct
SNVNRPE

SEQ ID NO: 74600 - protein, 7 aa, synthetic construct
LTVTGNM

SEQ ID NO: 74601 - protein, 7 aa, synthetic construct
GPKWDGH

SEQ ID NO: 74602 - protein, 7 aa, synthetic construct
DAAMNAR

SEQ ID NO: 74603 - protein, 7 aa, synthetic construct
TGKNTVG

SEQ ID NO: 74604 - protein, 7 aa, synthetic construct
QSRNTYT

SEQ ID NO: 74605 - protein, 7 aa, synthetic construct
SMHKQDI

SEQ ID NO: 74606 - protein, 7 aa, synthetic construct
VTDHGRQ

SEQ ID NO: 74607 - protein, 7 aa, synthetic construct
TTKMGTG

SEQ ID NO: 74608 - protein, 7 aa, synthetic construct
LYKMEMP

SEQ ID NO: 74609 - protein, 7 aa, synthetic construct
TTQHTHY

SEQ ID NO: 74610 - protein, 7 aa, synthetic construct
NQRQSSV

SEQ ID NO: 74611 - protein, 7 aa, synthetic construct
NHGREHL

SEQ ID NO: 74612 - protein, 7 aa, synthetic construct
RPISSQY

SEQ ID NO: 74613 - protein, 7 aa, synthetic construct
FQERGGF

SEQ ID NO: 74614 - protein, 7 aa, synthetic construct
FGLGGPE

SEQ ID NO: 74615 - protein, 7 aa, synthetic construct
PNKSTVP

SEQ ID NO: 74616 - protein, 7 aa, synthetic construct
SQFNIKD

SEQ ID NO: 74617 - protein, 7 aa, synthetic construct
ARQGETA

SEQ ID NO: 74618 - protein, 7 aa, synthetic construct
HLLQREE

SEQ ID NO: 74619 - protein, 7 aa, synthetic construct
DTMYMKV

SEQ ID NO: 74620 - protein, 7 aa, synthetic construct
QLPGLTG

SEQ ID NO: 74621 - protein, 7 aa, synthetic construct
PNKPTPP

SEQ ID NO: 74622 - protein, 7 aa, synthetic construct
NAAVVRP

SEQ ID NO: 74623 - protein, 7 aa, synthetic construct
YARHVIE

SEQ ID NO: 74624 - protein, 7 aa, synthetic construct
NLHKATY

SEQ ID NO: 74625 - protein, 7 aa, synthetic construct
DGGHVPK

SEQ ID NO: 74626 - protein, 7 aa, synthetic construct
PNSDRQD

SEQ ID NO: 74627 - protein, 7 aa, synthetic construct
QRSLNVQ

SEQ ID NO: 74628 - protein, 7 aa, synthetic construct
LAYPSSM

SEQ ID NO: 74629 - protein, 7 aa, synthetic construct
VANPTQK

SEQ ID NO: 74630 - protein, 7 aa, synthetic construct
LERKEVS

SEQ ID NO: 74631 - protein, 7 aa, synthetic construct
KNKDTLL

SEQ ID NO: 74632 - protein, 7 aa, synthetic construct
QKNVFKE

SEQ ID NO: 74633 - protein, 7 aa, synthetic construct
NERKLIA

SEQ ID NO: 74634 - protein, 7 aa, synthetic construct
LPAKEPK

SEQ ID NO: 74635 - protein, 7 aa, synthetic construct
WVKKDTT

SEQ ID NO: 74636 - protein, 7 aa, synthetic construct
GTQHSIN

SEQ ID NO: 74637 - protein, 7 aa, synthetic construct
ADFSGSK

SEQ ID NO: 74638 - protein, 7 aa, synthetic construct
VPNKFAV

SEQ ID NO: 74639 - protein, 7 aa, synthetic construct
FPISHEH

SEQ ID NO: 74640 - protein, 7 aa, synthetic construct
QYKPYKD

SEQ ID NO: 74641 - protein, 7 aa, synthetic construct
DKRNKVE

SEQ ID NO: 74642 - protein, 7 aa, synthetic construct
EPKRHDW

SEQ ID NO: 74643 - protein, 7 aa, synthetic construct
KIDRQGE

SEQ ID NO: 74644 - protein, 7 aa, synthetic construct
DKAHYNL

SEQ ID NO: 74645 - protein, 7 aa, synthetic construct
LHDKTYH

SEQ ID NO: 74646 - protein, 7 aa, synthetic construct
NNKSGNV

SEQ ID NO: 74647 - protein, 7 aa, synthetic construct
EEVHKVG

SEQ ID NO: 74648 - protein, 7 aa, synthetic construct
VGKQTIW

SEQ ID NO: 74649 - protein, 7 aa, synthetic construct
KYVQGVN

SEQ ID NO: 74650 - protein, 7 aa, synthetic construct
HKPQQEV

SEQ ID NO: 74651 - protein, 7 aa, synthetic construct
DEQKKTR

SEQ ID NO: 74652 - protein, 7 aa, synthetic construct
RYDKFSD

SEQ ID NO: 74653 - protein, 7 aa, synthetic construct
TRMSTTA

SEQ ID NO: 74654 - protein, 7 aa, synthetic construct
SMARAGV

SEQ ID NO: 74655 - protein, 7 aa, synthetic construct
TDLVPRQ

SEQ ID NO: 74656 - protein, 7 aa, synthetic construct
IPSNHTT

SEQ ID NO: 74657 - protein, 7 aa, synthetic construct
HRDRGTQ

SEQ ID NO: 74658 - protein, 7 aa, synthetic construct
PHAVGIT

SEQ ID NO: 74659 - protein, 7 aa, synthetic construct
PLGFRDA

SEQ ID NO: 74660 - protein, 7 aa, synthetic construct
RNMTANA

SEQ ID NO: 74661 - protein, 7 aa, synthetic construct
GSQTAKY

SEQ ID NO: 74662 - protein, 7 aa, synthetic construct
VNRSQVP

SEQ ID NO: 74663 - protein, 7 aa, synthetic construct
NKKDSDK

SEQ ID NO: 74664 - protein, 7 aa, synthetic construct
VRVANTM

SEQ ID NO: 74665 - protein, 7 aa, synthetic construct
PNMAQRM

SEQ ID NO: 74666 - protein, 7 aa, synthetic construct
HAYDKGY

SEQ ID NO: 74667 - protein, 7 aa, synthetic construct
NPRGAVA

SEQ ID NO: 74668 - protein, 7 aa, synthetic construct
EIPAFKH

SEQ ID NO: 74669 - protein, 7 aa, synthetic construct
NAQKSDN

SEQ ID NO: 74670 - protein, 7 aa, synthetic construct
VTDHKAF

SEQ ID NO: 74671 - protein, 7 aa, synthetic construct
GKTNKSE

SEQ ID NO: 74672 - protein, 7 aa, synthetic construct
PSHTLGL

SEQ ID NO: 74673 - protein, 7 aa, synthetic construct
YTKEHLG

SEQ ID NO: 74674 - protein, 7 aa, synthetic construct
QQSGMMP

SEQ ID NO: 74675 - protein, 7 aa, synthetic construct
NAGQKTW

SEQ ID NO: 74676 - protein, 7 aa, synthetic construct
QDQRILA

SEQ ID NO: 74677 - protein, 7 aa, synthetic construct
AHKHNQN

SEQ ID NO: 74678 - protein, 7 aa, synthetic construct
SVVAKYQ

SEQ ID NO: 74679 - protein, 7 aa, synthetic construct
PGPMNTL

SEQ ID NO: 74680 - protein, 7 aa, synthetic construct
NQIASIT

SEQ ID NO: 74681 - protein, 7 aa, synthetic construct
IYSQVKQ

SEQ ID NO: 74682 - protein, 7 aa, synthetic construct
LGIKVDY

SEQ ID NO: 74683 - protein, 7 aa, synthetic construct
VEGFALA

SEQ ID NO: 74684 - protein, 7 aa, synthetic construct
MPGRDMQ

SEQ ID NO: 74685 - protein, 7 aa, synthetic construct
KGSNYPY

SEQ ID NO: 74686 - protein, 7 aa, synthetic construct
MRPAKDP

SEQ ID NO: 74687 - protein, 7 aa, synthetic construct
ASMHAGS

SEQ ID NO: 74688 - protein, 7 aa, synthetic construct
SDAAYAK

SEQ ID NO: 74689 - protein, 7 aa, synthetic construct
VKGTTVI

SEQ ID NO: 74690 - protein, 7 aa, synthetic construct
SLQREYK

SEQ ID NO: 74691 - protein, 7 aa, synthetic construct
PFKMDPH

SEQ ID NO: 74692 - protein, 7 aa, synthetic construct
EKRFEVV

SEQ ID NO: 74693 - protein, 7 aa, synthetic construct
GPGAYAQ

SEQ ID NO: 74694 - protein, 7 aa, synthetic construct
AQVTHSM

SEQ ID NO: 74695 - protein, 7 aa, synthetic construct
IVYHDKN

SEQ ID NO: 74696 - protein, 7 aa, synthetic construct
NMRKEGE

SEQ ID NO: 74697 - protein, 7 aa, synthetic construct
LLSVHPQ

SEQ ID NO: 74698 - protein, 7 aa, synthetic construct
TPAQQSR

SEQ ID NO: 74699 - protein, 7 aa, synthetic construct
RGTGNNV

SEQ ID NO: 74700 - protein, 7 aa, synthetic construct
GIREQRM

SEQ ID NO: 74701 - protein, 7 aa, synthetic construct
KSNNTGV

SEQ ID NO: 74702 - protein, 7 aa, synthetic construct
PRGHDFE

SEQ ID NO: 74703 - protein, 7 aa, synthetic construct
VGLALMS

SEQ ID NO: 74704 - protein, 7 aa, synthetic construct
DMSTRTW

SEQ ID NO: 74705 - protein, 7 aa, synthetic construct
VYTQREK

SEQ ID NO: 74706 - protein, 7 aa, synthetic construct
RYESLVE

SEQ ID NO: 74707 - protein, 7 aa, synthetic construct
LYTSGIH

SEQ ID NO: 74708 - protein, 7 aa, synthetic construct
MPATHFD

SEQ ID NO: 74709 - protein, 7 aa, synthetic construct
AVTHGTM

SEQ ID NO: 74710 - protein, 7 aa, synthetic construct
NKHLSER

SEQ ID NO: 74711 - protein, 7 aa, synthetic construct
QSTMGHI

SEQ ID NO: 74712 - protein, 7 aa, synthetic construct
NQNGGKG

SEQ ID NO: 74713 - protein, 7 aa, synthetic construct
QKGNMSA

SEQ ID NO: 74714 - protein, 7 aa, synthetic construct
NKVTQRE

SEQ ID NO: 74715 - protein, 7 aa, synthetic construct
KTPLADV

SEQ ID NO: 74716 - protein, 7 aa, synthetic construct
TYPNEMK

SEQ ID NO: 74717 - protein, 7 aa, synthetic construct
WTTLSAA

SEQ ID NO: 74718 - protein, 7 aa, synthetic construct
KVGDRQQ

SEQ ID NO: 74719 - protein, 7 aa, synthetic construct
WTQGQAY

SEQ ID NO: 74720 - protein, 7 aa, synthetic construct
KLPDHPS

SEQ ID NO: 74721 - protein, 7 aa, synthetic construct
TGKVNAA

SEQ ID NO: 74722 - protein, 7 aa, synthetic construct
DFGLKYP

SEQ ID NO: 74723 - protein, 7 aa, synthetic construct
RMQEHIQ

SEQ ID NO: 74724 - protein, 7 aa, synthetic construct
TSPIKTG

SEQ ID NO: 74725 - protein, 7 aa, synthetic construct
EKRVALS

SEQ ID NO: 74726 - protein, 7 aa, synthetic construct
LSSSYVN

SEQ ID NO: 74727 - protein, 7 aa, synthetic construct
NKSFNQG

SEQ ID NO: 74728 - protein, 7 aa, synthetic construct
NNGKPPE

SEQ ID NO: 74729 - protein, 7 aa, synthetic construct
MKEMSLI

SEQ ID NO: 74730 - protein, 7 aa, synthetic construct
AGRLESI

SEQ ID NO: 74731 - protein, 7 aa, synthetic construct
KDQTRMG

SEQ ID NO: 74732 - protein, 7 aa, synthetic construct
ERGQFLK

SEQ ID NO: 74733 - protein, 7 aa, synthetic construct
KTHVIDT

SEQ ID NO: 74734 - protein, 7 aa, synthetic construct
KNGNNSP

SEQ ID NO: 74735 - protein, 7 aa, synthetic construct
QKTLEIN

SEQ ID NO: 74736 - protein, 7 aa, synthetic construct
KDNHHEI

SEQ ID NO: 74737 - protein, 7 aa, synthetic construct
QDATFHP

SEQ ID NO: 74738 - protein, 7 aa, synthetic construct
CQDFTQC

SEQ ID NO: 74739 - protein, 7 aa, synthetic construct
WLKSGGV

SEQ ID NO: 74740 - protein, 7 aa, synthetic construct
NTSHMQL

SEQ ID NO: 74741 - protein, 7 aa, synthetic construct
AQGAGGM

SEQ ID NO: 74742 - protein, 7 aa, synthetic construct
DNRGAHN

SEQ ID NO: 74743 - protein, 7 aa, synthetic construct
TKSTTSG

SEQ ID NO: 74744 - protein, 7 aa, synthetic construct
GLIVIGD

SEQ ID NO: 74745 - protein, 7 aa, synthetic construct
LYTKQTI

SEQ ID NO: 74746 - protein, 7 aa, synthetic construct
KMHEDKN

SEQ ID NO: 74747 - protein, 7 aa, synthetic construct
MKDNTLQ

SEQ ID NO: 74748 - protein, 7 aa, synthetic construct
MKSPTNG

SEQ ID NO: 74749 - protein, 7 aa, synthetic construct
MTGGTMR

SEQ ID NO: 74750 - protein, 7 aa, synthetic construct
SAVQVQS

SEQ ID NO: 74751 - protein, 7 aa, synthetic construct
LYKKETP

SEQ ID NO: 74752 - protein, 7 aa, synthetic construct
WVSHVVN

SEQ ID NO: 74753 - protein, 7 aa, synthetic construct
HKLSTPG

SEQ ID NO: 74754 - protein, 7 aa, synthetic construct
DAHSIVI

SEQ ID NO: 74755 - protein, 7 aa, synthetic construct
VVGNLQV

SEQ ID NO: 74756 - protein, 7 aa, synthetic construct
HGISTVK

SEQ ID NO: 74757 - protein, 7 aa, synthetic construct
IHNSMQN

SEQ ID NO: 74758 - protein, 7 aa, synthetic construct
SDNKVQG

SEQ ID NO: 74759 - protein, 7 aa, synthetic construct
SQFGPTE

SEQ ID NO: 74760 - protein, 7 aa, synthetic construct
PMYGNGA

SEQ ID NO: 74761 - protein, 7 aa, synthetic construct
HHKDVER

SEQ ID NO: 74762 - protein, 7 aa, synthetic construct
PSNGKVP

SEQ ID NO: 74763 - protein, 7 aa, synthetic construct
EKKSNVP

SEQ ID NO: 74764 - protein, 7 aa, synthetic construct
YSTKNMP

SEQ ID NO: 74765 - protein, 7 aa, synthetic construct
NLHAAKD

SEQ ID NO: 74766 - protein, 7 aa, synthetic construct
STRFPSD

SEQ ID NO: 74767 - protein, 7 aa, synthetic construct
YDTGRPF

SEQ ID NO: 74768 - protein, 7 aa, synthetic construct
MEHRQYI

SEQ ID NO: 74769 - protein, 7 aa, synthetic construct
NFKSHAE

SEQ ID NO: 74770 - protein, 7 aa, synthetic construct
EPRVLTT

SEQ ID NO: 74771 - protein, 7 aa, synthetic construct
GPRQTGS

SEQ ID NO: 74772 - protein, 7 aa, synthetic construct
KQYQRVE

SEQ ID NO: 74773 - protein, 7 aa, synthetic construct
DKPPGKN

SEQ ID NO: 74774 - protein, 7 aa, synthetic construct
MFAQKDI

SEQ ID NO: 74775 - protein, 7 aa, synthetic construct
GYHVTEI

SEQ ID NO: 74776 - protein, 7 aa, synthetic construct
QHAHIKF

SEQ ID NO: 74777 - protein, 7 aa, synthetic construct
TIIGAGP

SEQ ID NO: 74778 - protein, 7 aa, synthetic construct
KIPTPET

SEQ ID NO: 74779 - protein, 7 aa, synthetic construct
QSQVKNW

SEQ ID NO: 74780 - protein, 7 aa, synthetic construct
DGSHKNN

SEQ ID NO: 74781 - protein, 7 aa, synthetic construct
KSPSQIS

SEQ ID NO: 74782 - protein, 7 aa, synthetic construct
KIHPDPE

SEQ ID NO: 74783 - protein, 7 aa, synthetic construct
IGANYQL

SEQ ID NO: 74784 - protein, 7 aa, synthetic construct
RPVAGGG

SEQ ID NO: 74785 - protein, 7 aa, synthetic construct
YAAQTLV

SEQ ID NO: 74786 - protein, 7 aa, synthetic construct
EVRGSQG

SEQ ID NO: 74787 - protein, 7 aa, synthetic construct
TRSVTGM

SEQ ID NO: 74788 - protein, 7 aa, synthetic construct
MDRQHLY

SEQ ID NO: 74789 - protein, 7 aa, synthetic construct
RVNTTGA

SEQ ID NO: 74790 - protein, 7 aa, synthetic construct
THIANRI

SEQ ID NO: 74791 - protein, 7 aa, synthetic construct
CSKVVDC

SEQ ID NO: 74792 - protein, 7 aa, synthetic construct
LSLTGIS

SEQ ID NO: 74793 - protein, 7 aa, synthetic construct
RQKMEMF

SEQ ID NO: 74794 - protein, 7 aa, synthetic construct
GGMGKVG

SEQ ID NO: 74795 - protein, 7 aa, synthetic construct
WQNLYKA

SEQ ID NO: 74796 - protein, 7 aa, synthetic construct
RLDKMPH

SEQ ID NO: 74797 - protein, 7 aa, synthetic construct
RQAINDI

SEQ ID NO: 74798 - protein, 7 aa, synthetic construct
VNKQVTA

SEQ ID NO: 74799 - protein, 7 aa, synthetic construct
DKFGNRV

SEQ ID NO: 74800 - protein, 7 aa, synthetic construct
YMPATLE

SEQ ID NO: 74801 - protein, 7 aa, synthetic construct
NHHSHGI

SEQ ID NO: 74802 - protein, 7 aa, synthetic construct
GAGTQPA

SEQ ID NO: 74803 - protein, 7 aa, synthetic construct
YHEGNAG

SEQ ID NO: 74804 - protein, 7 aa, synthetic construct
GKVTNGG

SEQ ID NO: 74805 - protein, 7 aa, synthetic construct
LPAVNKI

SEQ ID NO: 74806 - protein, 7 aa, synthetic construct
MKSAVLV

SEQ ID NO: 74807 - protein, 7 aa, synthetic construct
TVKNGFI

SEQ ID NO: 74808 - protein, 7 aa, synthetic construct
MSPAIRG

SEQ ID NO: 74809 - protein, 7 aa, synthetic construct
KEFVNYE

SEQ ID NO: 74810 - protein, 7 aa, synthetic construct
KQNINLG

SEQ ID NO: 74811 - protein, 7 aa, synthetic construct
SRNLPLH

SEQ ID NO: 74812 - protein, 7 aa, synthetic construct
QMRIATT

SEQ ID NO: 74813 - protein, 7 aa, synthetic construct
KPPGNNA

SEQ ID NO: 74814 - protein, 7 aa, synthetic construct
NLYSAHV

SEQ ID NO: 74815 - protein, 7 aa, synthetic construct
GLSTREL

SEQ ID NO: 74816 - protein, 7 aa, synthetic construct
FASSNNL

SEQ ID NO: 74817 - protein, 7 aa, synthetic construct
LNNAAKY

SEQ ID NO: 74818 - protein, 7 aa, synthetic construct
ANRPDRS

SEQ ID NO: 74819 - protein, 7 aa, synthetic construct
KDRYTQS

SEQ ID NO: 74820 - protein, 7 aa, synthetic construct
QQPLAQM

SEQ ID NO: 74821 - protein, 7 aa, synthetic construct
YLKHQEF

SEQ ID NO: 74822 - protein, 7 aa, synthetic construct
QHQKNVS

SEQ ID NO: 74823 - protein, 7 aa, synthetic construct
VVGGRNP

SEQ ID NO: 74824 - protein, 7 aa, synthetic construct
DMKWKAQ

SEQ ID NO: 74825 - protein, 7 aa, synthetic construct
STKNNSG

SEQ ID NO: 74826 - protein, 7 aa, synthetic construct
DKMRSAP

SEQ ID NO: 74827 - protein, 7 aa, synthetic construct
TSLHPQP

SEQ ID NO: 74828 - protein, 7 aa, synthetic construct
IAQSSKA

SEQ ID NO: 74829 - protein, 7 aa, synthetic construct
NHRPSAY

SEQ ID NO: 74830 - protein, 7 aa, synthetic construct
QNSGRYM

SEQ ID NO: 74831 - protein, 7 aa, synthetic construct
RVVNMGE

SEQ ID NO: 74832 - protein, 7 aa, synthetic construct
SERGVVS

SEQ ID NO: 74833 - protein, 7 aa, synthetic construct
IWNNAIA

SEQ ID NO: 74834 - protein, 7 aa, synthetic construct
MFSGERI

SEQ ID NO: 74835 - protein, 7 aa, synthetic construct
GVFGRMA

SEQ ID NO: 74836 - protein, 7 aa, synthetic construct
RTQGAMF

SEQ ID NO: 74837 - protein, 7 aa, synthetic construct
YAQHQSN

SEQ ID NO: 74838 - protein, 7 aa, synthetic construct
MYTDHSV

SEQ ID NO: 74839 - protein, 7 aa, synthetic construct
KQPGTSG

SEQ ID NO: 74840 - protein, 7 aa, synthetic construct
IAKSGYA

SEQ ID NO: 74841 - protein, 7 aa, synthetic construct
RQSATPG

SEQ ID NO: 74842 - protein, 7 aa, synthetic construct
FRTHMPD

SEQ ID NO: 74843 - protein, 7 aa, synthetic construct
HMGYKSV

SEQ ID NO: 74844 - protein, 7 aa, synthetic construct
IKVKGID

SEQ ID NO: 74845 - protein, 7 aa, synthetic construct
AGRMGAY

SEQ ID NO: 74846 - protein, 7 aa, synthetic construct
DKVVGNY

SEQ ID NO: 74847 - protein, 7 aa, synthetic construct
NGVAGHQ

SEQ ID NO: 74848 - protein, 7 aa, synthetic construct
QRHHQNI

SEQ ID NO: 74849 - protein, 7 aa, synthetic construct
RIPGDPQ

SEQ ID NO: 74850 - protein, 7 aa, synthetic construct
NHLISMP

SEQ ID NO: 74851 - protein, 7 aa, synthetic construct
TVLYQEK

SEQ ID NO: 74852 - protein, 7 aa, synthetic construct
MYSTKED

SEQ ID NO: 74853 - protein, 7 aa, synthetic construct
QMGHSHI

SEQ ID NO: 74854 - protein, 7 aa, synthetic construct
KGQASVM

SEQ ID NO: 74855 - protein, 7 aa, synthetic construct
QTTSTIH

SEQ ID NO: 74856 - protein, 7 aa, synthetic construct
FKNMADG

SEQ ID NO: 74857 - protein, 7 aa, synthetic construct
HDPRARP

SEQ ID NO: 74858 - protein, 7 aa, synthetic construct
ATIKWEH

SEQ ID NO: 74859 - protein, 7 aa, synthetic construct
DPPHFSA

SEQ ID NO: 74860 - protein, 7 aa, synthetic construct
TGLDSHR

SEQ ID NO: 74861 - protein, 7 aa, synthetic construct
NIMKAVS

SEQ ID NO: 74862 - protein, 7 aa, synthetic construct
GVTNRNH

SEQ ID NO: 74863 - protein, 7 aa, synthetic construct
GNNQNHW

SEQ ID NO: 74864 - protein, 7 aa, synthetic construct
DSASSYK

SEQ ID NO: 74865 - protein, 7 aa, synthetic construct
RLGFEQD

SEQ ID NO: 74866 - protein, 7 aa, synthetic construct
VPPSKAW

SEQ ID NO: 74867 - protein, 7 aa, synthetic construct
VHQHFER

SEQ ID NO: 74868 - protein, 7 aa, synthetic construct
FHTSEKN

SEQ ID NO: 74869 - protein, 7 aa, synthetic construct
HQARNTQ

SEQ ID NO: 74870 - protein, 7 aa, synthetic construct
KDNKIGL

SEQ ID NO: 74871 - protein, 7 aa, synthetic construct
VPKMEHP

SEQ ID NO: 74872 - protein, 7 aa, synthetic construct
NDKTLAQ

SEQ ID NO: 74873 - protein, 7 aa, synthetic construct
NTSFLPH

SEQ ID NO: 74874 - protein, 7 aa, synthetic construct
QKTQHPP

SEQ ID NO: 74875 - protein, 7 aa, synthetic construct
GTKEQKQ

SEQ ID NO: 74876 - protein, 7 aa, synthetic construct
NHHSFEP

SEQ ID NO: 74877 - protein, 7 aa, synthetic construct
QKSGVSP

SEQ ID NO: 74878 - protein, 7 aa, synthetic construct
IRKAEMA

SEQ ID NO: 74879 - protein, 7 aa, synthetic construct
YVSNKPP

SEQ ID NO: 74880 - protein, 7 aa, synthetic construct
IQGMLTS

SEQ ID NO: 74881 - protein, 7 aa, synthetic construct
DLRIMKD

SEQ ID NO: 74882 - protein, 7 aa, synthetic construct
YGAGASL

SEQ ID NO: 74883 - protein, 7 aa, synthetic construct
PGHGPIM

SEQ ID NO: 74884 - protein, 7 aa, synthetic construct
MTTGKQP

SEQ ID NO: 74885 - protein, 7 aa, synthetic construct
NLANAQY

SEQ ID NO: 74886 - protein, 7 aa, synthetic construct
PQKNWNG

SEQ ID NO: 74887 - protein, 7 aa, synthetic construct
KQQTSNS

SEQ ID NO: 74888 - protein, 7 aa, synthetic construct
DRKMMDT

SEQ ID NO: 74889 - protein, 7 aa, synthetic construct
SFTSTSA

SEQ ID NO: 74890 - protein, 7 aa, synthetic construct
ELYHGRA

SEQ ID NO: 74891 - protein, 7 aa, synthetic construct
KSNHYSI

SEQ ID NO: 74892 - protein, 7 aa, synthetic construct
GRVSEVM

SEQ ID NO: 74893 - protein, 7 aa, synthetic construct
HMKTVAI

SEQ ID NO: 74894 - protein, 7 aa, synthetic construct
QDRLKFS

SEQ ID NO: 74895 - protein, 7 aa, synthetic construct
NANGGNK

SEQ ID NO: 74896 - protein, 7 aa, synthetic construct
RSQNTQA

SEQ ID NO: 74897 - protein, 7 aa, synthetic construct
RLKSTYE

SEQ ID NO: 74898 - protein, 7 aa, synthetic construct
GYGHNGG

SEQ ID NO: 74899 - protein, 7 aa, synthetic construct
SGQEGRH

SEQ ID NO: 74900 - protein, 7 aa, synthetic construct
QRATYMD

SEQ ID NO: 74901 - protein, 7 aa, synthetic construct
HQIPGNT

SEQ ID NO: 74902 - protein, 7 aa, synthetic construct
SSVSNYK

SEQ ID NO: 74903 - protein, 7 aa, synthetic construct
QSKMAGA

SEQ ID NO: 74904 - protein, 7 aa, synthetic construct
PKTMQHA

SEQ ID NO: 74905 - protein, 7 aa, synthetic construct
VRMMSQP

SEQ ID NO: 74906 - protein, 7 aa, synthetic construct
QGTFSAD

SEQ ID NO: 74907 - protein, 7 aa, synthetic construct
PYDKGSH

SEQ ID NO: 74908 - protein, 7 aa, synthetic construct
KGTNGTA

SEQ ID NO: 74909 - protein, 7 aa, synthetic construct
ERIHHSE

SEQ ID NO: 74910 - protein, 7 aa, synthetic construct
HHNASQI

SEQ ID NO: 74911 - protein, 7 aa, synthetic construct
RMIDTPQ

SEQ ID NO: 74912 - protein, 7 aa, synthetic construct
DNTPRPQ

SEQ ID NO: 74913 - protein, 7 aa, synthetic construct
LPKQVDR

SEQ ID NO: 74914 - protein, 7 aa, synthetic construct
PTTQTLT

SEQ ID NO: 74915 - protein, 7 aa, synthetic construct
KNVRDVE

SEQ ID NO: 74916 - protein, 7 aa, synthetic construct
PYNDMSM

SEQ ID NO: 74917 - protein, 7 aa, synthetic construct
PGDMGRV

SEQ ID NO: 74918 - protein, 7 aa, synthetic construct
RKPIPEF

SEQ ID NO: 74919 - protein, 7 aa, synthetic construct
DPHQQRS

SEQ ID NO: 74920 - protein, 7 aa, synthetic construct
YEKGIIG

SEQ ID NO: 74921 - protein, 7 aa, synthetic construct
KHQTMHT

SEQ ID NO: 74922 - protein, 7 aa, synthetic construct
RIQAGFA

SEQ ID NO: 74923 - protein, 7 aa, synthetic construct
VSRDQTG

SEQ ID NO: 74924 - protein, 7 aa, synthetic construct
RSVANTI

SEQ ID NO: 74925 - protein, 7 aa, synthetic construct
VDHMGPP

SEQ ID NO: 74926 - protein, 7 aa, synthetic construct
FSNPTVI

SEQ ID NO: 74927 - protein, 7 aa, synthetic construct
NGAHYRA

SEQ ID NO: 74928 - protein, 7 aa, synthetic construct
SKQHDTA

SEQ ID NO: 74929 - protein, 7 aa, synthetic construct
WRPKEHE

SEQ ID NO: 74930 - protein, 7 aa, synthetic construct
VLSKSVN

SEQ ID NO: 74931 - protein, 7 aa, synthetic construct
TSDAKYA

SEQ ID NO: 74932 - protein, 7 aa, synthetic construct
ATNPVAS

SEQ ID NO: 74933 - protein, 7 aa, synthetic construct
SDKRGQD

SEQ ID NO: 74934 - protein, 7 aa, synthetic construct
SQRSNMI

SEQ ID NO: 74935 - protein, 7 aa, synthetic construct
RNVEREN

SEQ ID NO: 74936 - protein, 7 aa, synthetic construct
GARASEN

SEQ ID NO: 74937 - protein, 7 aa, synthetic construct
RTTDGFH

SEQ ID NO: 74938 - protein, 7 aa, synthetic construct
QKSNSVE

SEQ ID NO: 74939 - protein, 7 aa, synthetic construct
NYGNNAK

SEQ ID NO: 74940 - protein, 7 aa, synthetic construct
TSRLVAT

SEQ ID NO: 74941 - protein, 7 aa, synthetic construct
NQVAKAI

SEQ ID NO: 74942 - protein, 7 aa, synthetic construct
WGGTKES

SEQ ID NO: 74943 - protein, 7 aa, synthetic construct
TNNKSQP

SEQ ID NO: 74944 - protein, 7 aa, synthetic construct
EKGSVRF

SEQ ID NO: 74945 - protein, 7 aa, synthetic construct
NTKQQQG

SEQ ID NO: 74946 - protein, 7 aa, synthetic construct
YKEADAQ

SEQ ID NO: 74947 - protein, 7 aa, synthetic construct
FSPTYRG

SEQ ID NO: 74948 - protein, 7 aa, synthetic construct
NSKGIHP

SEQ ID NO: 74949 - protein, 7 aa, synthetic construct
NASPLTG

SEQ ID NO: 74950 - protein, 7 aa, synthetic construct
HIGLDQK

SEQ ID NO: 74951 - protein, 7 aa, synthetic construct
LDGWSQQ

SEQ ID NO: 74952 - protein, 7 aa, synthetic construct
FIMASQG

SEQ ID NO: 74953 - protein, 7 aa, synthetic construct
LKDSHFR

SEQ ID NO: 74954 - protein, 7 aa, synthetic construct
EQRHEMV

SEQ ID NO: 74955 - protein, 7 aa, synthetic construct
QGAKMHY

SEQ ID NO: 74956 - protein, 7 aa, synthetic construct
TVRSANP

SEQ ID NO: 74957 - protein, 7 aa, synthetic construct
APSKHMY

SEQ ID NO: 74958 - protein, 7 aa, synthetic construct
IAKMQET

SEQ ID NO: 74959 - protein, 7 aa, synthetic construct
FKSAPTG

SEQ ID NO: 74960 - protein, 7 aa, synthetic construct
FPMHPHA

SEQ ID NO: 74961 - protein, 7 aa, synthetic construct
ILNTGAI

SEQ ID NO: 74962 - protein, 7 aa, synthetic construct
MGREGAN

SEQ ID NO: 74963 - protein, 7 aa, synthetic construct
GNKGNTS

SEQ ID NO: 74964 - protein, 7 aa, synthetic construct
RSYNGVP

SEQ ID NO: 74965 - protein, 7 aa, synthetic construct
PFRKEIM

SEQ ID NO: 74966 - protein, 7 aa, synthetic construct
SVEARPK

SEQ ID NO: 74967 - protein, 7 aa, synthetic construct
IHTQVRN

SEQ ID NO: 74968 - protein, 7 aa, synthetic construct
RRLEYAG

SEQ ID NO: 74969 - protein, 7 aa, synthetic construct
YRDNSPM

SEQ ID NO: 74970 - protein, 7 aa, synthetic construct
YSSLART

SEQ ID NO: 74971 - protein, 7 aa, synthetic construct
KTTDKTG

SEQ ID NO: 74972 - protein, 7 aa, synthetic construct
STIRQGV

SEQ ID NO: 74973 - protein, 7 aa, synthetic construct
NKMQDKT

SEQ ID NO: 74974 - protein, 7 aa, synthetic construct
RGPSADW

SEQ ID NO: 74975 - protein, 7 aa, synthetic construct
STRNPQW

SEQ ID NO: 74976 - protein, 7 aa, synthetic construct
NIVKRDF

SEQ ID NO: 74977 - protein, 7 aa, synthetic construct
PKSSQIT

SEQ ID NO: 74978 - protein, 7 aa, synthetic construct
YIQFNAE

SEQ ID NO: 74979 - protein, 7 aa, synthetic construct
AGPKGQG

SEQ ID NO: 74980 - protein, 7 aa, synthetic construct
GKFNQME

SEQ ID NO: 74981 - protein, 7 aa, synthetic construct
FPNHTPR

SEQ ID NO: 74982 - protein, 7 aa, synthetic construct
VKPHNNH

SEQ ID NO: 74983 - protein, 7 aa, synthetic construct
QSSRKDD

SEQ ID NO: 74984 - protein, 7 aa, synthetic construct
MTGVQSS

SEQ ID NO: 74985 - protein, 7 aa, synthetic construct
MTDHMKG

SEQ ID NO: 74986 - protein, 7 aa, synthetic construct
SFQGRER

SEQ ID NO: 74987 - protein, 7 aa, synthetic construct
KHDMGNH

SEQ ID NO: 74988 - protein, 7 aa, synthetic construct
NIENNRS

SEQ ID NO: 74989 - protein, 7 aa, synthetic construct
QKFSQIH

SEQ ID NO: 74990 - protein, 7 aa, synthetic construct
QYREGTS

SEQ ID NO: 74991 - protein, 7 aa, synthetic construct
YKQAPKE

SEQ ID NO: 74992 - protein, 7 aa, synthetic construct
LNQIIQG

SEQ ID NO: 74993 - protein, 7 aa, synthetic construct
GIKHNML

SEQ ID NO: 74994 - protein, 7 aa, synthetic construct
MMVDRGA

SEQ ID NO: 74995 - protein, 7 aa, synthetic construct
QAWDKSG

SEQ ID NO: 74996 - protein, 7 aa, synthetic construct
GQYVREA

SEQ ID NO: 74997 - protein, 7 aa, synthetic construct
TRSEMID

SEQ ID NO: 74998 - protein, 7 aa, synthetic construct
YYPSMTQ

SEQ ID NO: 74999 - protein, 7 aa, synthetic construct
DVFNHGS

SEQ ID NO: 75000 - protein, 7 aa, synthetic construct
SIHGHFG

SEQ ID NO: 75001 - protein, 7 aa, synthetic construct
ETPAQQA

SEQ ID NO: 75002 - protein, 7 aa, synthetic construct
QRSAINM

SEQ ID NO: 75003 - protein, 7 aa, synthetic construct
YNQQKYS

SEQ ID NO: 75004 - protein, 7 aa, synthetic construct
NASKKPP

SEQ ID NO: 75005 - protein, 7 aa, synthetic construct
RDRVEYR

SEQ ID NO: 75006 - protein, 7 aa, synthetic construct
FNHDGVA

SEQ ID NO: 75007 - protein, 7 aa, synthetic construct
SFLRTEV

SEQ ID NO: 75008 - protein, 7 aa, synthetic construct
GNNLAVP

SEQ ID NO: 75009 - protein, 7 aa, synthetic construct
LKHHLST

SEQ ID NO: 75010 - protein, 7 aa, synthetic construct
IKTAHLS

SEQ ID NO: 75011 - protein, 7 aa, synthetic construct
GSFTASA

SEQ ID NO: 75012 - protein, 7 aa, synthetic construct
YGVRQGH

SEQ ID NO: 75013 - protein, 7 aa, synthetic construct
VHDTTRA

SEQ ID NO: 75014 - protein, 7 aa, synthetic construct
AQQPVGT

SEQ ID NO: 75015 - protein, 7 aa, synthetic construct
TNHPTWP

SEQ ID NO: 75016 - protein, 7 aa, synthetic construct
WNNSRDV

SEQ ID NO: 75017 - protein, 7 aa, synthetic construct
HTDSRFD

SEQ ID NO: 75018 - protein, 7 aa, synthetic construct
STGNSGF

SEQ ID NO: 75019 - protein, 7 aa, synthetic construct
TPKFIGS

SEQ ID NO: 75020 - protein, 7 aa, synthetic construct
FRDPIDS

SEQ ID NO: 75021 - protein, 7 aa, synthetic construct
AASRAYE

SEQ ID NO: 75022 - protein, 7 aa, synthetic construct
MTAAIRQ

SEQ ID NO: 75023 - protein, 7 aa, synthetic construct
MTQPKGY

SEQ ID NO: 75024 - protein, 7 aa, synthetic construct
SYDGGAR

SEQ ID NO: 75025 - protein, 7 aa, synthetic construct
GKSGIQG

SEQ ID NO: 75026 - protein, 7 aa, synthetic construct
NGKMHQS

SEQ ID NO: 75027 - protein, 7 aa, synthetic construct
LDHKKEY

SEQ ID NO: 75028 - protein, 7 aa, synthetic construct
SKASPGV

SEQ ID NO: 75029 - protein, 7 aa, synthetic construct
ENKARQA

SEQ ID NO: 75030 - protein, 7 aa, synthetic construct
AQATTKG

SEQ ID NO: 75031 - protein, 7 aa, synthetic construct
QFKHPMT

SEQ ID NO: 75032 - protein, 7 aa, synthetic construct
YGQGNKG

SEQ ID NO: 75033 - protein, 7 aa, synthetic construct
KPQGNER

SEQ ID NO: 75034 - protein, 7 aa, synthetic construct
IRSHEKD

SEQ ID NO: 75035 - protein, 7 aa, synthetic construct
HLVQRIS

SEQ ID NO: 75036 - protein, 7 aa, synthetic construct
FERAPTR

SEQ ID NO: 75037 - protein, 7 aa, synthetic construct
SKYVDQQ

SEQ ID NO: 75038 - protein, 7 aa, synthetic construct
MMQGAAV

SEQ ID NO: 75039 - protein, 7 aa, synthetic construct
ERGPDHR

SEQ ID NO: 75040 - protein, 7 aa, synthetic construct
VEYHNGA

SEQ ID NO: 75041 - protein, 7 aa, synthetic construct
SPKPIPY

SEQ ID NO: 75042 - protein, 7 aa, synthetic construct
SAYNTEH

SEQ ID NO: 75043 - protein, 7 aa, synthetic construct
IPNSHTT

SEQ ID NO: 75044 - protein, 7 aa, synthetic construct
SKNPSGT

SEQ ID NO: 75045 - protein, 7 aa, synthetic construct
NITTASG

SEQ ID NO: 75046 - protein, 7 aa, synthetic construct
GTINGNK

SEQ ID NO: 75047 - protein, 7 aa, synthetic construct
PTEPRPG

SEQ ID NO: 75048 - protein, 7 aa, synthetic construct
GDRQKAE

SEQ ID NO: 75049 - protein, 7 aa, synthetic construct
SPHGFSE

SEQ ID NO: 75050 - protein, 7 aa, synthetic construct
TAVAGGR

SEQ ID NO: 75051 - protein, 7 aa, synthetic construct
GQRPTVT

SEQ ID NO: 75052 - protein, 7 aa, synthetic construct
GKDTVNK

SEQ ID NO: 75053 - protein, 7 aa, synthetic construct
EDKQAGH

SEQ ID NO: 75054 - protein, 7 aa, synthetic construct
FHKEGTW

SEQ ID NO: 75055 - protein, 7 aa, synthetic construct
GAGRLAL

SEQ ID NO: 75056 - protein, 7 aa, synthetic construct
QHPAYAI

SEQ ID NO: 75057 - protein, 7 aa, synthetic construct
IYNHIKG

SEQ ID NO: 75058 - protein, 7 aa, synthetic construct
GFTKDRN

SEQ ID NO: 75059 - protein, 7 aa, synthetic construct
LFGRETQ

SEQ ID NO: 75060 - protein, 7 aa, synthetic construct
RYPDRTV

SEQ ID NO: 75061 - protein, 7 aa, synthetic construct
ISQGTVK

SEQ ID NO: 75062 - protein, 7 aa, synthetic construct
MSYGSTV

SEQ ID NO: 75063 - protein, 7 aa, synthetic construct
QIGYSTP

SEQ ID NO: 75064 - protein, 7 aa, synthetic construct
QIKLAMD

SEQ ID NO: 75065 - protein, 7 aa, synthetic construct
QLTSQMS

SEQ ID NO: 75066 - protein, 7 aa, synthetic construct
SQVTHFD

SEQ ID NO: 75067 - protein, 7 aa, synthetic construct
MYPHGSM

SEQ ID NO: 75068 - protein, 7 aa, synthetic construct
PHASGSV

SEQ ID NO: 75069 - protein, 7 aa, synthetic construct
NDFKMSY

SEQ ID NO: 75070 - protein, 7 aa, synthetic construct
EHIKSEF

SEQ ID NO: 75071 - protein, 7 aa, synthetic construct
KPNREHN

SEQ ID NO: 75072 - protein, 7 aa, synthetic construct
FGQPQQK

SEQ ID NO: 75073 - protein, 7 aa, synthetic construct
QMRHNVQ

SEQ ID NO: 75074 - protein, 7 aa, synthetic construct
MLHNIPR

SEQ ID NO: 75075 - protein, 7 aa, synthetic construct
NGHPVGI

SEQ ID NO: 75076 - protein, 7 aa, synthetic construct
QSHGQFK

SEQ ID NO: 75077 - protein, 7 aa, synthetic construct
TEYVGRI

SEQ ID NO: 75078 - protein, 7 aa, synthetic construct
QAQSDMS

SEQ ID NO: 75079 - protein, 7 aa, synthetic construct
RREDASP

SEQ ID NO: 75080 - protein, 7 aa, synthetic construct
EKRDFAR

SEQ ID NO: 75081 - protein, 7 aa, synthetic construct
YNNQPAQ

SEQ ID NO: 75082 - protein, 7 aa, synthetic construct
IYKSDFT

SEQ ID NO: 75083 - protein, 7 aa, synthetic construct
SGAATNG

SEQ ID NO: 75084 - protein, 7 aa, synthetic construct
PPYVKGD

SEQ ID NO: 75085 - protein, 7 aa, synthetic construct
NNFLQER

SEQ ID NO: 75086 - protein, 7 aa, synthetic construct
GKRFESI

SEQ ID NO: 75087 - protein, 7 aa, synthetic construct
HMRPQEG

SEQ ID NO: 75088 - protein, 7 aa, synthetic construct
MPPNGKA

SEQ ID NO: 75089 - protein, 7 aa, synthetic construct
NKHDVVA

SEQ ID NO: 75090 - protein, 7 aa, synthetic construct
WIQKPQS

SEQ ID NO: 75091 - protein, 7 aa, synthetic construct
VFDKGIG

SEQ ID NO: 75092 - protein, 7 aa, synthetic construct
HAEGLKQ

SEQ ID NO: 75093 - protein, 7 aa, synthetic construct
FAHTYEK

SEQ ID NO: 75094 - protein, 7 aa, synthetic construct
FTANTYG

SEQ ID NO: 75095 - protein, 7 aa, synthetic construct
TNNNATK

SEQ ID NO: 75096 - protein, 7 aa, synthetic construct
SKLPNGM

SEQ ID NO: 75097 - protein, 7 aa, synthetic construct
KQNFMDD

SEQ ID NO: 75098 - protein, 7 aa, synthetic construct
HYIRSEG

SEQ ID NO: 75099 - protein, 7 aa, synthetic construct
QLVGKLV

SEQ ID NO: 75100 - protein, 7 aa, synthetic construct
KNSTSPN

SEQ ID NO: 75101 - protein, 7 aa, synthetic construct
VGGKVKD

SEQ ID NO: 75102 - protein, 7 aa, synthetic construct
FEVSFKH

SEQ ID NO: 75103 - protein, 7 aa, synthetic construct
KPTTGGV

SEQ ID NO: 75104 - protein, 7 aa, synthetic construct
TKTQESS

SEQ ID NO: 75105 - protein, 7 aa, synthetic construct
NNSKGSA

SEQ ID NO: 75106 - protein, 7 aa, synthetic construct
ENERHGV

SEQ ID NO: 75107 - protein, 7 aa, synthetic construct
QKHPQYT

SEQ ID NO: 75108 - protein, 7 aa, synthetic construct
AIEKVGS

SEQ ID NO: 75109 - protein, 7 aa, synthetic construct
DFTSNKV

SEQ ID NO: 75110 - protein, 7 aa, synthetic construct
QEKGMPG

SEQ ID NO: 75111 - protein, 7 aa, synthetic construct
ISYNSQL

SEQ ID NO: 75112 - protein, 7 aa, synthetic construct
ANQGKYF

SEQ ID NO: 75113 - protein, 7 aa, synthetic construct
ISHHAHT

SEQ ID NO: 75114 - protein, 7 aa, synthetic construct
LNIKPDS

SEQ ID NO: 75115 - protein, 7 aa, synthetic construct
NDISKQY

SEQ ID NO: 75116 - protein, 7 aa, synthetic construct
LYHGTAQ

SEQ ID NO: 75117 - protein, 7 aa, synthetic construct
MRMPATG

SEQ ID NO: 75118 - protein, 7 aa, synthetic construct
GFMKAPE

SEQ ID NO: 75119 - protein, 7 aa, synthetic construct
PQGQKVN

SEQ ID NO: 75120 - protein, 7 aa, synthetic construct
GFHENNG

SEQ ID NO: 75121 - protein, 7 aa, synthetic construct
TSITPNV

SEQ ID NO: 75122 - protein, 7 aa, synthetic construct
HKDGNHI

SEQ ID NO: 75123 - protein, 7 aa, synthetic construct
VAVNQKF

SEQ ID NO: 75124 - protein, 7 aa, synthetic construct
DTINRVA

SEQ ID NO: 75125 - protein, 7 aa, synthetic construct
FSKIYRE

SEQ ID NO: 75126 - protein, 7 aa, synthetic construct
QHAGVNV

SEQ ID NO: 75127 - protein, 7 aa, synthetic construct
CHRTQCE

SEQ ID NO: 75128 - protein, 7 aa, synthetic construct
HIYGNTG

SEQ ID NO: 75129 - protein, 7 aa, synthetic construct
INQHGID

SEQ ID NO: 75130 - protein, 7 aa, synthetic construct
EYRVKDG

SEQ ID NO: 75131 - protein, 7 aa, synthetic construct
PFPNPNN

SEQ ID NO: 75132 - protein, 7 aa, synthetic construct
LLVTKKP

SEQ ID NO: 75133 - protein, 7 aa, synthetic construct
TKANGME

SEQ ID NO: 75134 - protein, 7 aa, synthetic construct
GNGQSMG

SEQ ID NO: 75135 - protein, 7 aa, synthetic construct
QSKGTFV

SEQ ID NO: 75136 - protein, 7 aa, synthetic construct
TEKDRYP

SEQ ID NO: 75137 - protein, 7 aa, synthetic construct
DSVKPIA

SEQ ID NO: 75138 - protein, 7 aa, synthetic construct
NMMKDDL

SEQ ID NO: 75139 - protein, 7 aa, synthetic construct
TPMYMPD

SEQ ID NO: 75140 - protein, 7 aa, synthetic construct
RVVSTDF

SEQ ID NO: 75141 - protein, 7 aa, synthetic construct
KTGSNGN

SEQ ID NO: 75142 - protein, 7 aa, synthetic construct
TRKENAV

SEQ ID NO: 75143 - protein, 7 aa, synthetic construct
AGRAIDA

SEQ ID NO: 75144 - protein, 7 aa, synthetic construct
IMSGKWE

SEQ ID NO: 75145 - protein, 7 aa, synthetic construct
STSHNIY

SEQ ID NO: 75146 - protein, 7 aa, synthetic construct
NPARLSG

SEQ ID NO: 75147 - protein, 7 aa, synthetic construct
PNKSPGA

SEQ ID NO: 75148 - protein, 7 aa, synthetic construct
HTPHKDA

SEQ ID NO: 75149 - protein, 7 aa, synthetic construct
NFDGTHT

SEQ ID NO: 75150 - protein, 7 aa, synthetic construct
KPGTIAG

SEQ ID NO: 75151 - protein, 7 aa, synthetic construct
SQGTRAA

SEQ ID NO: 75152 - protein, 7 aa, synthetic construct
GFNSTAN

SEQ ID NO: 75153 - protein, 7 aa, synthetic construct
ENFGPKK

SEQ ID NO: 75154 - protein, 7 aa, synthetic construct
RNTFQGD

SEQ ID NO: 75155 - protein, 7 aa, synthetic construct
NGPMHAH

SEQ ID NO: 75156 - protein, 7 aa, synthetic construct
WGPIPSQ

SEQ ID NO: 75157 - protein, 7 aa, synthetic construct
KSNDRSM

SEQ ID NO: 75158 - protein, 7 aa, synthetic construct
GHRPEPW

SEQ ID NO: 75159 - protein, 7 aa, synthetic construct
QYMAGKI

SEQ ID NO: 75160 - protein, 7 aa, synthetic construct
IEMRRLD

SEQ ID NO: 75161 - protein, 7 aa, synthetic construct
KMPEHLG

SEQ ID NO: 75162 - protein, 7 aa, synthetic construct
GILRKEY

SEQ ID NO: 75163 - protein, 7 aa, synthetic construct
QKALSKD

SEQ ID NO: 75164 - protein, 7 aa, synthetic construct
NKSLMQA

SEQ ID NO: 75165 - protein, 7 aa, synthetic construct
ITHNLKN

SEQ ID NO: 75166 - protein, 7 aa, synthetic construct
YKPSAGL

SEQ ID NO: 75167 - protein, 7 aa, synthetic construct
FVTHVHG

SEQ ID NO: 75168 - protein, 7 aa, synthetic construct
DHKYVHS

SEQ ID NO: 75169 - protein, 7 aa, synthetic construct
DSQKAAV

SEQ ID NO: 75170 - protein, 7 aa, synthetic construct
GPPAFFD

SEQ ID NO: 75171 - protein, 7 aa, synthetic construct
QKTAQNG

SEQ ID NO: 75172 - protein, 7 aa, synthetic construct
ARPPNQM

SEQ ID NO: 75173 - protein, 7 aa, synthetic construct
MADPQVK

SEQ ID NO: 75174 - protein, 7 aa, synthetic construct
FNINLKD

SEQ ID NO: 75175 - protein, 7 aa, synthetic construct
LVHVERQ

SEQ ID NO: 75176 - protein, 7 aa, synthetic construct
EQPGIRA

SEQ ID NO: 75177 - protein, 7 aa, synthetic construct
ARFAGTN

SEQ ID NO: 75178 - protein, 7 aa, synthetic construct
NKYNMEI

SEQ ID NO: 75179 - protein, 7 aa, synthetic construct
RMMDKDV

SEQ ID NO: 75180 - protein, 7 aa, synthetic construct
MQQGVMA

SEQ ID NO: 75181 - protein, 7 aa, synthetic construct
DNRSLSE

SEQ ID NO: 75182 - protein, 7 aa, synthetic construct
SKQMAAG

SEQ ID NO: 75183 - protein, 7 aa, synthetic construct
AYKSTDD

SEQ ID NO: 75184 - protein, 7 aa, synthetic construct
DPEVRNG

SEQ ID NO: 75185 - protein, 7 aa, synthetic construct
RNMQSMP

SEQ ID NO: 75186 - protein, 7 aa, synthetic construct
NRPEMNM

SEQ ID NO: 75187 - protein, 7 aa, synthetic construct
KFDQRNH

SEQ ID NO: 75188 - protein, 7 aa, synthetic construct
KNTNFEG

SEQ ID NO: 75189 - protein, 7 aa, synthetic construct
QLKDNHV

SEQ ID NO: 75190 - protein, 7 aa, synthetic construct
DQTHKMK

SEQ ID NO: 75191 - protein, 7 aa, synthetic construct
TGKKEHE

SEQ ID NO: 75192 - protein, 7 aa, synthetic construct
DSHNVTR

SEQ ID NO: 75193 - protein, 7 aa, synthetic construct
HFYKSGE

SEQ ID NO: 75194 - protein, 7 aa, synthetic construct
PQPGAAG

SEQ ID NO: 75195 - protein, 7 aa, synthetic construct
STTVKMN

SEQ ID NO: 75196 - protein, 7 aa, synthetic construct
VANKDFY

SEQ ID NO: 75197 - protein, 7 aa, synthetic construct
MKVPSDT

SEQ ID NO: 75198 - protein, 7 aa, synthetic construct
FGKTSPT

SEQ ID NO: 75199 - protein, 7 aa, synthetic construct
TLKDQFY

SEQ ID NO: 75200 - protein, 7 aa, synthetic construct
KKTNTWD

SEQ ID NO: 75201 - protein, 7 aa, synthetic construct
YKAVNKD

SEQ ID NO: 75202 - protein, 7 aa, synthetic construct
TVNHVTA

SEQ ID NO: 75203 - protein, 7 aa, synthetic construct
RHRHVEE

SEQ ID NO: 75204 - protein, 7 aa, synthetic construct
RFKEAQS

SEQ ID NO: 75205 - protein, 7 aa, synthetic construct
YGKKVDL

SEQ ID NO: 75206 - protein, 7 aa, synthetic construct
HVMHVMD

SEQ ID NO: 75207 - protein, 7 aa, synthetic construct
HTQESHG

SEQ ID NO: 75208 - protein, 7 aa, synthetic construct
QDQTKVY

SEQ ID NO: 75209 - protein, 7 aa, synthetic construct
GLHSPLQ

SEQ ID NO: 75210 - protein, 7 aa, synthetic construct
NGNKQTS

SEQ ID NO: 75211 - protein, 7 aa, synthetic construct
MTKTSSA

SEQ ID NO: 75212 - protein, 7 aa, synthetic construct
NLVAWKD

SEQ ID NO: 75213 - protein, 7 aa, synthetic construct
KMGYDRD

SEQ ID NO: 75214 - protein, 7 aa, synthetic construct
KFSGKDF

SEQ ID NO: 75215 - protein, 7 aa, synthetic construct
FIKKNLD

SEQ ID NO: 75216 - protein, 7 aa, synthetic construct
RRDSYGS

SEQ ID NO: 75217 - protein, 7 aa, synthetic construct
KGDSHFM

SEQ ID NO: 75218 - protein, 7 aa, synthetic construct
TVVQSST

SEQ ID NO: 75219 - protein, 7 aa, synthetic construct
NGKQIAG

SEQ ID NO: 75220 - protein, 7 aa, synthetic construct
KAIHERD

SEQ ID NO: 75221 - protein, 7 aa, synthetic construct
EYKRNAD

SEQ ID NO: 75222 - protein, 7 aa, synthetic construct
VVPNGVY

SEQ ID NO: 75223 - protein, 7 aa, synthetic construct
KQTNTPA

SEQ ID NO: 75224 - protein, 7 aa, synthetic construct
IKHNEKY

SEQ ID NO: 75225 - protein, 7 aa, synthetic construct
THNGQGH

SEQ ID NO: 75226 - protein, 7 aa, synthetic construct
KAEVTGN

SEQ ID NO: 75227 - protein, 7 aa, synthetic construct
TLIKAGI

SEQ ID NO: 75228 - protein, 7 aa, synthetic construct
ESKLVMP

SEQ ID NO: 75229 - protein, 7 aa, synthetic construct
HLDKVQN

SEQ ID NO: 75230 - protein, 7 aa, synthetic construct
TTSRNIA

SEQ ID NO: 75231 - protein, 7 aa, synthetic construct
FARDKNH

SEQ ID NO: 75232 - protein, 7 aa, synthetic construct
VPVGYKS

SEQ ID NO: 75233 - protein, 7 aa, synthetic construct
PVIGRGL

SEQ ID NO: 75234 - protein, 7 aa, synthetic construct
ISMAKEL

SEQ ID NO: 75235 - protein, 7 aa, synthetic construct
SSQQHLY

SEQ ID NO: 75236 - protein, 7 aa, synthetic construct
FKTHDVR

SEQ ID NO: 75237 - protein, 7 aa, synthetic construct
SGVIVPA

SEQ ID NO: 75238 - protein, 7 aa, synthetic construct
GAVKERA

SEQ ID NO: 75239 - protein, 7 aa, synthetic construct
KADPHYM

SEQ ID NO: 75240 - protein, 7 aa, synthetic construct
IQTPSRF

SEQ ID NO: 75241 - protein, 7 aa, synthetic construct
KSQTGMT

SEQ ID NO: 75242 - protein, 7 aa, synthetic construct
KMMMNGP

SEQ ID NO: 75243 - protein, 7 aa, synthetic construct
RPQGDVQ

SEQ ID NO: 75244 - protein, 7 aa, synthetic construct
KQGGSNP

SEQ ID NO: 75245 - protein, 7 aa, synthetic construct
TVTNNNA

SEQ ID NO: 75246 - protein, 7 aa, synthetic construct
VPTYSAH

SEQ ID NO: 75247 - protein, 7 aa, synthetic construct
QKSEPTW

SEQ ID NO: 75248 - protein, 7 aa, synthetic construct
KSDKNVP

SEQ ID NO: 75249 - protein, 7 aa, synthetic construct
LNLTDRA

SEQ ID NO: 75250 - protein, 7 aa, synthetic construct
FAKPMIE

SEQ ID NO: 75251 - protein, 7 aa, synthetic construct
AYLEHRT

SEQ ID NO: 75252 - protein, 7 aa, synthetic construct
TPGAPMR

SEQ ID NO: 75253 - protein, 7 aa, synthetic construct
YGKTYDS

SEQ ID NO: 75254 - protein, 7 aa, synthetic construct
HQARLPI

SEQ ID NO: 75255 - protein, 7 aa, synthetic construct
FGQFVGE

SEQ ID NO: 75256 - protein, 7 aa, synthetic construct
RSQTTGS

SEQ ID NO: 75257 - protein, 7 aa, synthetic construct
SKGPLRE

SEQ ID NO: 75258 - protein, 7 aa, synthetic construct
ALHQQTS

SEQ ID NO: 75259 - protein, 7 aa, synthetic construct
GSAKLNA

SEQ ID NO: 75260 - protein, 7 aa, synthetic construct
NAQMGGK

SEQ ID NO: 75261 - protein, 7 aa, synthetic construct
VTRQMFD

SEQ ID NO: 75262 - protein, 7 aa, synthetic construct
YISGVTM

SEQ ID NO: 75263 - protein, 7 aa, synthetic construct
MAPQPAP

SEQ ID NO: 75264 - protein, 7 aa, synthetic construct
PSVGRIM

SEQ ID NO: 75265 - protein, 7 aa, synthetic construct
QEGVVRS

SEQ ID NO: 75266 - protein, 7 aa, synthetic construct
GRHKDFD

SEQ ID NO: 75267 - protein, 7 aa, synthetic construct
PHQVKTV

SEQ ID NO: 75268 - protein, 7 aa, synthetic construct
QYATHNA

SEQ ID NO: 75269 - protein, 7 aa, synthetic construct
TKGNGSS

SEQ ID NO: 75270 - protein, 7 aa, synthetic construct
HIKVQSL

SEQ ID NO: 75271 - protein, 7 aa, synthetic construct
KPSPQTA

SEQ ID NO: 75272 - protein, 7 aa, synthetic construct
KPPQQDI

SEQ ID NO: 75273 - protein, 7 aa, synthetic construct
ITLYGKD

SEQ ID NO: 75274 - protein, 7 aa, synthetic construct
NHPNSTA

SEQ ID NO: 75275 - protein, 7 aa, synthetic construct
HSPTSTW

SEQ ID NO: 75276 - protein, 7 aa, synthetic construct
KIGLVYD

SEQ ID NO: 75277 - protein, 7 aa, synthetic construct
KLEFTQA

SEQ ID NO: 75278 - protein, 7 aa, synthetic construct
TFQKVSS

SEQ ID NO: 75279 - protein, 7 aa, synthetic construct
INKLDMK

SEQ ID NO: 75280 - protein, 7 aa, synthetic construct
LNSHQNQ

SEQ ID NO: 75281 - protein, 7 aa, synthetic construct
KTERGPV

SEQ ID NO: 75282 - protein, 7 aa, synthetic construct
ILQIGNK

SEQ ID NO: 75283 - protein, 7 aa, synthetic construct
HSDRAPI

SEQ ID NO: 75284 - protein, 7 aa, synthetic construct
SKMHGFV

SEQ ID NO: 75285 - protein, 7 aa, synthetic construct
LSSTMTH

SEQ ID NO: 75286 - protein, 7 aa, synthetic construct
ESKIMER

SEQ ID NO: 75287 - protein, 7 aa, synthetic construct
VARGFVA

SEQ ID NO: 75288 - protein, 7 aa, synthetic construct
DNGWAKE

SEQ ID NO: 75289 - protein, 7 aa, synthetic construct
SRHEKSM

SEQ ID NO: 75290 - protein, 7 aa, synthetic construct
TLKSMEH

SEQ ID NO: 75291 - protein, 7 aa, synthetic construct
TTPMSEG

SEQ ID NO: 75292 - protein, 7 aa, synthetic construct
GRIMTST

SEQ ID NO: 75293 - protein, 7 aa, synthetic construct
PIGQSPG

SEQ ID NO: 75294 - protein, 7 aa, synthetic construct
GPPPNKA

SEQ ID NO: 75295 - protein, 7 aa, synthetic construct
ANMKYAA

SEQ ID NO: 75296 - protein, 7 aa, synthetic construct
QKQNHIT

SEQ ID NO: 75297 - protein, 7 aa, synthetic construct
TNTWGDK

SEQ ID NO: 75298 - protein, 7 aa, synthetic construct
SMAKFTD

SEQ ID NO: 75299 - protein, 7 aa, synthetic construct
QQDVQKT

SEQ ID NO: 75300 - protein, 7 aa, synthetic construct
QQLKGAD

SEQ ID NO: 75301 - protein, 7 aa, synthetic construct
KVGGNQA

SEQ ID NO: 75302 - protein, 7 aa, synthetic construct
NGKINIE

SEQ ID NO: 75303 - protein, 7 aa, synthetic construct
KKGQDMM

SEQ ID NO: 75304 - protein, 7 aa, synthetic construct
SQSHTYI

SEQ ID NO: 75305 - protein, 7 aa, synthetic construct
NTYLNHA

SEQ ID NO: 75306 - protein, 7 aa, synthetic construct
VSYVGGA

SEQ ID NO: 75307 - protein, 7 aa, synthetic construct
YNIKDAP

SEQ ID NO: 75308 - protein, 7 aa, synthetic construct
NDYLGAA

SEQ ID NO: 75309 - protein, 7 aa, synthetic construct
RTDKTQG

SEQ ID NO: 75310 - protein, 7 aa, synthetic construct
PNAGGVF

SEQ ID NO: 75311 - protein, 7 aa, synthetic construct
QMGGSGI

SEQ ID NO: 75312 - protein, 7 aa, synthetic construct
HRDYERG

SEQ ID NO: 75313 - protein, 7 aa, synthetic construct
RVNSSDV

SEQ ID NO: 75314 - protein, 7 aa, synthetic construct
RRGDLTM

SEQ ID NO: 75315 - protein, 7 aa, synthetic construct
LAHRYPQ

SEQ ID NO: 75316 - protein, 7 aa, synthetic construct
VYTTQDR

SEQ ID NO: 75317 - protein, 7 aa, synthetic construct
KSMKEPL

SEQ ID NO: 75318 - protein, 7 aa, synthetic construct
RQPTNMG

SEQ ID NO: 75319 - protein, 7 aa, synthetic construct
MVNPHVP

SEQ ID NO: 75320 - protein, 7 aa, synthetic construct
SAKMMPE

SEQ ID NO: 75321 - protein, 7 aa, synthetic construct
GVHLEVM

SEQ ID NO: 75322 - protein, 7 aa, synthetic construct
KQHHESD

SEQ ID NO: 75323 - protein, 7 aa, synthetic construct
FVGMGPK

SEQ ID NO: 75324 - protein, 7 aa, synthetic construct
HKASHNH

SEQ ID NO: 75325 - protein, 7 aa, synthetic construct
TRVVNEE

SEQ ID NO: 75326 - protein, 7 aa, synthetic construct
LWNNQPQ

SEQ ID NO: 75327 - protein, 7 aa, synthetic construct
PARRESD

SEQ ID NO: 75328 - protein, 7 aa, synthetic construct
VYAKAPA

SEQ ID NO: 75329 - protein, 7 aa, synthetic construct
ADILHTP

SEQ ID NO: 75330 - protein, 7 aa, synthetic construct
QNRVEEN

SEQ ID NO: 75331 - protein, 7 aa, synthetic construct
AAISKPA

SEQ ID NO: 75332 - protein, 7 aa, synthetic construct
FNNLNVM

SEQ ID NO: 75333 - protein, 7 aa, synthetic construct
ITEAMGK

SEQ ID NO: 75334 - protein, 7 aa, synthetic construct
DQKFGNG

SEQ ID NO: 75335 - protein, 7 aa, synthetic construct
GIRQIQP

SEQ ID NO: 75336 - protein, 7 aa, synthetic construct
SPIQKLA

SEQ ID NO: 75337 - protein, 7 aa, synthetic construct
LQHGKHI

SEQ ID NO: 75338 - protein, 7 aa, synthetic construct
ESWNPKG

SEQ ID NO: 75339 - protein, 7 aa, synthetic construct
EMMRDGK

SEQ ID NO: 75340 - protein, 7 aa, synthetic construct
PRTIDHP

SEQ ID NO: 75341 - protein, 7 aa, synthetic construct
GKQDNQM

SEQ ID NO: 75342 - protein, 7 aa, synthetic construct
QQLKLTM

SEQ ID NO: 75343 - protein, 7 aa, synthetic construct
VYTGTIE

SEQ ID NO: 75344 - protein, 7 aa, synthetic construct
NIRTRFD

SEQ ID NO: 75345 - protein, 7 aa, synthetic construct
DNSNKAS

SEQ ID NO: 75346 - protein, 7 aa, synthetic construct
KIEHYKE

SEQ ID NO: 75347 - protein, 7 aa, synthetic construct
LLAKVAE

SEQ ID NO: 75348 - protein, 7 aa, synthetic construct
PLAHNIS

SEQ ID NO: 75349 - protein, 7 aa, synthetic construct
HRATGDN

SEQ ID NO: 75350 - protein, 7 aa, synthetic construct
RSGLPHA

SEQ ID NO: 75351 - protein, 7 aa, synthetic construct
YEHGRSH

SEQ ID NO: 75352 - protein, 7 aa, synthetic construct
YEFSSKQ

SEQ ID NO: 75353 - protein, 7 aa, synthetic construct
RDMGIQL

SEQ ID NO: 75354 - protein, 7 aa, synthetic construct
NLTQKIP

SEQ ID NO: 75355 - protein, 7 aa, synthetic construct
GVSTQVM

SEQ ID NO: 75356 - protein, 7 aa, synthetic construct
NHFKAHN

SEQ ID NO: 75357 - protein, 7 aa, synthetic construct
KEPLKYH

SEQ ID NO: 75358 - protein, 7 aa, synthetic construct
IPPGRSM

SEQ ID NO: 75359 - protein, 7 aa, synthetic construct
GHQLKQA

SEQ ID NO: 75360 - protein, 7 aa, synthetic construct
HVKEGGE

SEQ ID NO: 75361 - protein, 7 aa, synthetic construct
HLPRPHN

SEQ ID NO: 75362 - protein, 7 aa, synthetic construct
KSADVKG

SEQ ID NO: 75363 - protein, 7 aa, synthetic construct
ERSANTN

SEQ ID NO: 75364 - protein, 7 aa, synthetic construct
TAHEKRI

SEQ ID NO: 75365 - protein, 7 aa, synthetic construct
IPAQPVS

SEQ ID NO: 75366 - protein, 7 aa, synthetic construct
STWKHEN

SEQ ID NO: 75367 - protein, 7 aa, synthetic construct
FGNSEYY

SEQ ID NO: 75368 - protein, 7 aa, synthetic construct
IQPSSRL

SEQ ID NO: 75369 - protein, 7 aa, synthetic construct
STAAKAD

SEQ ID NO: 75370 - protein, 7 aa, synthetic construct
SSKQMTA

SEQ ID NO: 75371 - protein, 7 aa, synthetic construct
NHGRVTD

SEQ ID NO: 75372 - protein, 7 aa, synthetic construct
GEKVLSA

SEQ ID NO: 75373 - protein, 7 aa, synthetic construct
RKDTSQA

SEQ ID NO: 75374 - protein, 7 aa, synthetic construct
MLGTTSL

SEQ ID NO: 75375 - protein, 7 aa, synthetic construct
SKPQYDA

SEQ ID NO: 75376 - protein, 7 aa, synthetic construct
KSTSRVE

SEQ ID NO: 75377 - protein, 7 aa, synthetic construct
QPPLSGL

SEQ ID NO: 75378 - protein, 7 aa, synthetic construct
MTKIFPE

SEQ ID NO: 75379 - protein, 7 aa, synthetic construct
GKTGQQP

SEQ ID NO: 75380 - protein, 7 aa, synthetic construct
SQQKASN

SEQ ID NO: 75381 - protein, 7 aa, synthetic construct
LSRMHGE

SEQ ID NO: 75382 - protein, 7 aa, synthetic construct
KAKTGLE

SEQ ID NO: 75383 - protein, 7 aa, synthetic construct
QPRSAGA

SEQ ID NO: 75384 - protein, 7 aa, synthetic construct
GGHGTSI

SEQ ID NO: 75385 - protein, 7 aa, synthetic construct
AGQMGIP

SEQ ID NO: 75386 - protein, 7 aa, synthetic construct
REKSVSG

SEQ ID NO: 75387 - protein, 7 aa, synthetic construct
VMTQTVP

SEQ ID NO: 75388 - protein, 7 aa, synthetic construct
AKPEMFG

SEQ ID NO: 75389 - protein, 7 aa, synthetic construct
TEKMAGR

SEQ ID NO: 75390 - protein, 7 aa, synthetic construct
VAKSEII

SEQ ID NO: 75391 - protein, 7 aa, synthetic construct
KAKDHAS

SEQ ID NO: 75392 - protein, 7 aa, synthetic construct
DHRGNAL

SEQ ID NO: 75393 - protein, 7 aa, synthetic construct
NTHYVET

SEQ ID NO: 75394 - protein, 7 aa, synthetic construct
TKPQSGF

SEQ ID NO: 75395 - protein, 7 aa, synthetic construct
KIKWPDE

SEQ ID NO: 75396 - protein, 7 aa, synthetic construct
KEPLAQA

SEQ ID NO: 75397 - protein, 7 aa, synthetic construct
RVTPHYD

SEQ ID NO: 75398 - protein, 7 aa, synthetic construct
PIMGKPM

SEQ ID NO: 75399 - protein, 7 aa, synthetic construct
SREGTIV

SEQ ID NO: 75400 - protein, 7 aa, synthetic construct
SSPEWKF

SEQ ID NO: 75401 - protein, 7 aa, synthetic construct
YATNHIA

SEQ ID NO: 75402 - protein, 7 aa, synthetic construct
CRPQMTP

SEQ ID NO: 75403 - protein, 7 aa, synthetic construct
LPKETRF

SEQ ID NO: 75404 - protein, 7 aa, synthetic construct
VSRPLAL

SEQ ID NO: 75405 - protein, 7 aa, synthetic construct
NTRGGSA

SEQ ID NO: 75406 - protein, 7 aa, synthetic construct
HRGTPEH

SEQ ID NO: 75407 - protein, 7 aa, synthetic construct
KGTLNHQ

SEQ ID NO: 75408 - protein, 7 aa, synthetic construct
TYKDFHP

SEQ ID NO: 75409 - protein, 7 aa, synthetic construct
EVQKKQF

SEQ ID NO: 75410 - protein, 7 aa, synthetic construct
ETRSQQY

SEQ ID NO: 75411 - protein, 7 aa, synthetic construct
PHKVMAA

SEQ ID NO: 75412 - protein, 7 aa, synthetic construct
QTRQNQP

SEQ ID NO: 75413 - protein, 7 aa, synthetic construct
NPKNQQG

SEQ ID NO: 75414 - protein, 7 aa, synthetic construct
VQNKVVG

SEQ ID NO: 75415 - protein, 7 aa, synthetic construct
KEAFTGH

SEQ ID NO: 75416 - protein, 7 aa, synthetic construct
LPVAQRE

SEQ ID NO: 75417 - protein, 7 aa, synthetic construct
NSNGSDH

SEQ ID NO: 75418 - protein, 7 aa, synthetic construct
RPNSSFS

SEQ ID NO: 75419 - protein, 7 aa, synthetic construct
RQGTDGA

SEQ ID NO: 75420 - protein, 7 aa, synthetic construct
SKRDQIT

SEQ ID NO: 75421 - protein, 7 aa, synthetic construct
KNRSEQD

SEQ ID NO: 75422 - protein, 7 aa, synthetic construct
RSPPEHR

SEQ ID NO: 75423 - protein, 7 aa, synthetic construct
MHDRKLS

SEQ ID NO: 75424 - protein, 7 aa, synthetic construct
NLTIGRV

SEQ ID NO: 75425 - protein, 7 aa, synthetic construct
TKSTVHA

SEQ ID NO: 75426 - protein, 7 aa, synthetic construct
ADKAVYR

SEQ ID NO: 75427 - protein, 7 aa, synthetic construct
AKYSTQA

SEQ ID NO: 75428 - protein, 7 aa, synthetic construct
ISMQNKD

SEQ ID NO: 75429 - protein, 7 aa, synthetic construct
SPRTMGG

SEQ ID NO: 75430 - protein, 7 aa, synthetic construct
TGRVGNV

SEQ ID NO: 75431 - protein, 7 aa, synthetic construct
RQIGDDF

SEQ ID NO: 75432 - protein, 7 aa, synthetic construct
SHQVRDS

SEQ ID NO: 75433 - protein, 7 aa, synthetic construct
KENHHVI

SEQ ID NO: 75434 - protein, 7 aa, synthetic construct
MVTIVKA

SEQ ID NO: 75435 - protein, 7 aa, synthetic construct
SMKPNNA

SEQ ID NO: 75436 - protein, 7 aa, synthetic construct
TGDQAKR

SEQ ID NO: 75437 - protein, 7 aa, synthetic construct
QRKIDIT

SEQ ID NO: 75438 - protein, 7 aa, synthetic construct
HGTSGKE

SEQ ID NO: 75439 - protein, 7 aa, synthetic construct
MVGFVPA

SEQ ID NO: 75440 - protein, 7 aa, synthetic construct
MYQMQPA

SEQ ID NO: 75441 - protein, 7 aa, synthetic construct
RHGVVND

SEQ ID NO: 75442 - protein, 7 aa, synthetic construct
SMAAHNV

SEQ ID NO: 75443 - protein, 7 aa, synthetic construct
AKTSVGA

SEQ ID NO: 75444 - protein, 7 aa, synthetic construct
FKAQIDM

SEQ ID NO: 75445 - protein, 7 aa, synthetic construct
TAKSNVG

SEQ ID NO: 75446 - protein, 7 aa, synthetic construct
IQLGSHN

SEQ ID NO: 75447 - protein, 7 aa, synthetic construct
AIRHANP

SEQ ID NO: 75448 - protein, 7 aa, synthetic construct
QDTFSQV

SEQ ID NO: 75449 - protein, 7 aa, synthetic construct
SHSVVGL

SEQ ID NO: 75450 - protein, 7 aa, synthetic construct
TKAVNRD

SEQ ID NO: 75451 - protein, 7 aa, synthetic construct
TGNPTMV

SEQ ID NO: 75452 - protein, 7 aa, synthetic construct
GRPPSEW

SEQ ID NO: 75453 - protein, 7 aa, synthetic construct
AGLESHP

SEQ ID NO: 75454 - protein, 7 aa, synthetic construct
VGSLRTS

SEQ ID NO: 75455 - protein, 7 aa, synthetic construct
GDLRASK

SEQ ID NO: 75456 - protein, 7 aa, synthetic construct
SGNQHPH

SEQ ID NO: 75457 - protein, 7 aa, synthetic construct
NVPYTVN

SEQ ID NO: 75458 - protein, 7 aa, synthetic construct
KQEFISP

SEQ ID NO: 75459 - protein, 7 aa, synthetic construct
SAQMRQN

SEQ ID NO: 75460 - protein, 7 aa, synthetic construct
MPQYTPS

SEQ ID NO: 75461 - protein, 7 aa, synthetic construct
GRTQYEK

SEQ ID NO: 75462 - protein, 7 aa, synthetic construct
MPDFREP

SEQ ID NO: 75463 - protein, 7 aa, synthetic construct
SQVQAHG

SEQ ID NO: 75464 - protein, 7 aa, synthetic construct
EARVRFA

SEQ ID NO: 75465 - protein, 7 aa, synthetic construct
MSPLNMV

SEQ ID NO: 75466 - protein, 7 aa, synthetic construct
QIESHSP

SEQ ID NO: 75467 - protein, 7 aa, synthetic construct
RKTSNED

SEQ ID NO: 75468 - protein, 7 aa, synthetic construct
VKTATWS

SEQ ID NO: 75469 - protein, 7 aa, synthetic construct
QHPTSPL

SEQ ID NO: 75470 - protein, 7 aa, synthetic construct
RHHMEEI

SEQ ID NO: 75471 - protein, 7 aa, synthetic construct
RKSEESM

SEQ ID NO: 75472 - protein, 7 aa, synthetic construct
KDIKYQQ

SEQ ID NO: 75473 - protein, 7 aa, synthetic construct
RVPPSPD

SEQ ID NO: 75474 - protein, 7 aa, synthetic construct
TAKSGTP

SEQ ID NO: 75475 - protein, 7 aa, synthetic construct
WNHAIKQ

SEQ ID NO: 75476 - protein, 7 aa, synthetic construct
KKNVQES

SEQ ID NO: 75477 - protein, 7 aa, synthetic construct
QRHDSPW

SEQ ID NO: 75478 - protein, 7 aa, synthetic construct
PNHGGRN

SEQ ID NO: 75479 - protein, 7 aa, synthetic construct
KDFLDGK

SEQ ID NO: 75480 - protein, 7 aa, synthetic construct
FGSNKSP

SEQ ID NO: 75481 - protein, 7 aa, synthetic construct
MKGTPRE

SEQ ID NO: 75482 - protein, 7 aa, synthetic construct
RPDMEMF

SEQ ID NO: 75483 - protein, 7 aa, synthetic construct
VIRASNM

SEQ ID NO: 75484 - protein, 7 aa, synthetic construct
WPPSHVA

SEQ ID NO: 75485 - protein, 7 aa, synthetic construct
AKPGDSD

SEQ ID NO: 75486 - protein, 7 aa, synthetic construct
PGHDKQV

SEQ ID NO: 75487 - protein, 7 aa, synthetic construct
KVGPSNI

SEQ ID NO: 75488 - protein, 7 aa, synthetic construct
PRANQQG

SEQ ID NO: 75489 - protein, 7 aa, synthetic construct
RTAAIYG

SEQ ID NO: 75490 - protein, 7 aa, synthetic construct
RGAQDIQ

SEQ ID NO: 75491 - protein, 7 aa, synthetic construct
RAIGTPT

SEQ ID NO: 75492 - protein, 7 aa, synthetic construct
QQDNIKR

SEQ ID NO: 75493 - protein, 7 aa, synthetic construct
KVGSVTG

SEQ ID NO: 75494 - protein, 7 aa, synthetic construct
IRKNGED

SEQ ID NO: 75495 - protein, 7 aa, synthetic construct
DIFKQPR

SEQ ID NO: 75496 - protein, 7 aa, synthetic construct
IDRGIVA

SEQ ID NO: 75497 - protein, 7 aa, synthetic construct
RGGGSFS

SEQ ID NO: 75498 - protein, 7 aa, synthetic construct
QNPPTHM

SEQ ID NO: 75499 - protein, 7 aa, synthetic construct
GNHFEIG

SEQ ID NO: 75500 - protein, 7 aa, synthetic construct
QGPTHNP

SEQ ID NO: 75501 - protein, 7 aa, synthetic construct
HRMNGNH

SEQ ID NO: 75502 - protein, 7 aa, synthetic construct
SPFQVNG

SEQ ID NO: 75503 - protein, 7 aa, synthetic construct
WPNTSNM

SEQ ID NO: 75504 - protein, 7 aa, synthetic construct
KSTSAMT

SEQ ID NO: 75505 - protein, 7 aa, synthetic construct
VHPHMSE

SEQ ID NO: 75506 - protein, 7 aa, synthetic construct
DRLRGLN

SEQ ID NO: 75507 - protein, 7 aa, synthetic construct
ANNRPGM

SEQ ID NO: 75508 - protein, 7 aa, synthetic construct
DSRIMKQ

SEQ ID NO: 75509 - protein, 7 aa, synthetic construct
KVPTTGA

SEQ ID NO: 75510 - protein, 7 aa, synthetic construct
FQAHAQM

SEQ ID NO: 75511 - protein, 7 aa, synthetic construct
GENVHSK

SEQ ID NO: 75512 - protein, 7 aa, synthetic construct
ALNNHLA

SEQ ID NO: 75513 - protein, 7 aa, synthetic construct
MDKSSRG

SEQ ID NO: 75514 - protein, 7 aa, synthetic construct
ESQNFTH

SEQ ID NO: 75515 - protein, 7 aa, synthetic construct
SNMGPAV

SEQ ID NO: 75516 - protein, 7 aa, synthetic construct
TKNTDHH

SEQ ID NO: 75517 - protein, 7 aa, synthetic construct
QKPNNNS

SEQ ID NO: 75518 - protein, 7 aa, synthetic construct
YDEVNRS

SEQ ID NO: 75519 - protein, 7 aa, synthetic construct
VGVSQMK

SEQ ID NO: 75520 - protein, 7 aa, synthetic construct
QKSIQAH

SEQ ID NO: 75521 - protein, 7 aa, synthetic construct
KQEVMGY

SEQ ID NO: 75522 - protein, 7 aa, synthetic construct
KYPNTTV

SEQ ID NO: 75523 - protein, 7 aa, synthetic construct
SRVATFP

SEQ ID NO: 75524 - protein, 7 aa, synthetic construct
KIDKQAP

SEQ ID NO: 75525 - protein, 7 aa, synthetic construct
VRPGVTG

SEQ ID NO: 75526 - protein, 7 aa, synthetic construct
QRAMQLQ

SEQ ID NO: 75527 - protein, 7 aa, synthetic construct
PYKPNVN

SEQ ID NO: 75528 - protein, 7 aa, synthetic construct
SHELGSR

SEQ ID NO: 75529 - protein, 7 aa, synthetic construct
NAKPGLM

SEQ ID NO: 75530 - protein, 7 aa, synthetic construct
EQKRNND

SEQ ID NO: 75531 - protein, 7 aa, synthetic construct
YGTGGAI

SEQ ID NO: 75532 - protein, 7 aa, synthetic construct
KKTESQG

SEQ ID NO: 75533 - protein, 7 aa, synthetic construct
QYKTEQK

SEQ ID NO: 75534 - protein, 7 aa, synthetic construct
ENGRVQA

SEQ ID NO: 75535 - protein, 7 aa, synthetic construct
REGFREH

SEQ ID NO: 75536 - protein, 7 aa, synthetic construct
GPPNAQK

SEQ ID NO: 75537 - protein, 7 aa, synthetic construct
KDMQKQG

SEQ ID NO: 75538 - protein, 7 aa, synthetic construct
TGVTKQN

SEQ ID NO: 75539 - protein, 7 aa, synthetic construct
KEGVNGM

SEQ ID NO: 75540 - protein, 7 aa, synthetic construct
NTDDPTR

SEQ ID NO: 75541 - protein, 7 aa, synthetic construct
GAHMRVQ

SEQ ID NO: 75542 - protein, 7 aa, synthetic construct
RTDRNGV

SEQ ID NO: 75543 - protein, 7 aa, synthetic construct
PPKAGSM

SEQ ID NO: 75544 - protein, 7 aa, synthetic construct
YYGDHAK

SEQ ID NO: 75545 - protein, 7 aa, synthetic construct
GEKLRFT

SEQ ID NO: 75546 - protein, 7 aa, synthetic construct
LRAGLEN

SEQ ID NO: 75547 - protein, 7 aa, synthetic construct
VRADADN

SEQ ID NO: 75548 - protein, 7 aa, synthetic construct
SQLVIKA

SEQ ID NO: 75549 - protein, 7 aa, synthetic construct
RYKNDEQ

SEQ ID NO: 75550 - protein, 7 aa, synthetic construct
KATKDQI

SEQ ID NO: 75551 - protein, 7 aa, synthetic construct
KHGNSAI

SEQ ID NO: 75552 - protein, 7 aa, synthetic construct
LGKLIDQ

SEQ ID NO: 75553 - protein, 7 aa, synthetic construct
GKSPTTA

SEQ ID NO: 75554 - protein, 7 aa, synthetic construct
NKYSNTG

SEQ ID NO: 75555 - protein, 7 aa, synthetic construct
SSVGGNG

SEQ ID NO: 75556 - protein, 7 aa, synthetic construct
IAKTNTE

SEQ ID NO: 75557 - protein, 7 aa, synthetic construct
RSAEAGI

SEQ ID NO: 75558 - protein, 7 aa, synthetic construct
DAKIQHQ

SEQ ID NO: 75559 - protein, 7 aa, synthetic construct
HHRGHDY

SEQ ID NO: 75560 - protein, 7 aa, synthetic construct
SPPKIEP

SEQ ID NO: 75561 - protein, 7 aa, synthetic construct
KGVSTSP

SEQ ID NO: 75562 - protein, 7 aa, synthetic construct
TVEHPVQ

SEQ ID NO: 75563 - protein, 7 aa, synthetic construct
PANGMPL

SEQ ID NO: 75564 - protein, 7 aa, synthetic construct
QRHKEFV

SEQ ID NO: 75565 - protein, 7 aa, synthetic construct
PVAHGNI

SEQ ID NO: 75566 - protein, 7 aa, synthetic construct
SPSQKTA

SEQ ID NO: 75567 - protein, 7 aa, synthetic construct
GKNAATG

SEQ ID NO: 75568 - protein, 7 aa, synthetic construct
REVHPIK

SEQ ID NO: 75569 - protein, 7 aa, synthetic construct
FHTQTNH

SEQ ID NO: 75570 - protein, 7 aa, synthetic construct
ASAPVQI

SEQ ID NO: 75571 - protein, 7 aa, synthetic construct
RIKDSET

SEQ ID NO: 75572 - protein, 7 aa, synthetic construct
KGEHQYM

SEQ ID NO: 75573 - protein, 7 aa, synthetic construct
NKITAFN

SEQ ID NO: 75574 - protein, 7 aa, synthetic construct
DTNAMSR

SEQ ID NO: 75575 - protein, 7 aa, synthetic construct
YSHLNSP

SEQ ID NO: 75576 - protein, 7 aa, synthetic construct
HTHQPVG

SEQ ID NO: 75577 - protein, 7 aa, synthetic construct
LDGFMSS

SEQ ID NO: 75578 - protein, 7 aa, synthetic construct
KQPSAFG

SEQ ID NO: 75579 - protein, 7 aa, synthetic construct
SKAGITN

SEQ ID NO: 75580 - protein, 7 aa, synthetic construct
KMHHHDP

SEQ ID NO: 75581 - protein, 7 aa, synthetic construct
RQDEPAH

SEQ ID NO: 75582 - protein, 7 aa, synthetic construct
VVQGTVR

SEQ ID NO: 75583 - protein, 7 aa, synthetic construct
LRTHEEY

SEQ ID NO: 75584 - protein, 7 aa, synthetic construct
NRESAYR

SEQ ID NO: 75585 - protein, 7 aa, synthetic construct
VNASNHT

SEQ ID NO: 75586 - protein, 7 aa, synthetic construct
IGTLKNM

SEQ ID NO: 75587 - protein, 7 aa, synthetic construct
ESQGQRH

SEQ ID NO: 75588 - protein, 7 aa, synthetic construct
FEKQHHN

SEQ ID NO: 75589 - protein, 7 aa, synthetic construct
VKTKEML

SEQ ID NO: 75590 - protein, 7 aa, synthetic construct
KTSGAQN

SEQ ID NO: 75591 - protein, 7 aa, synthetic construct
SGNLKYQ

SEQ ID NO: 75592 - protein, 7 aa, synthetic construct
AQLYQEP

SEQ ID NO: 75593 - protein, 7 aa, synthetic construct
KMQSSAS

SEQ ID NO: 75594 - protein, 7 aa, synthetic construct
PHAGSAV

SEQ ID NO: 75595 - protein, 7 aa, synthetic construct
SAARHTY

SEQ ID NO: 75596 - protein, 7 aa, synthetic construct
IREGADN

SEQ ID NO: 75597 - protein, 7 aa, synthetic construct
RHGPISP

SEQ ID NO: 75598 - protein, 7 aa, synthetic construct
KGNFMIQ

SEQ ID NO: 75599 - protein, 7 aa, synthetic construct
QRQISLS

SEQ ID NO: 75600 - protein, 7 aa, synthetic construct
RAHKFDG

SEQ ID NO: 75601 - protein, 7 aa, synthetic construct
TNDYSRF

SEQ ID NO: 75602 - protein, 7 aa, synthetic construct
GRVTFEA

SEQ ID NO: 75603 - protein, 7 aa, synthetic construct
VGLYVRE

SEQ ID NO: 75604 - protein, 7 aa, synthetic construct
KQQMVHP

SEQ ID NO: 75605 - protein, 7 aa, synthetic construct
SNQNAAR

SEQ ID NO: 75606 - protein, 7 aa, synthetic construct
ATSKTAI

SEQ ID NO: 75607 - protein, 7 aa, synthetic construct
TNGHGDT

SEQ ID NO: 75608 - protein, 7 aa, synthetic construct
IHPVTQD

SEQ ID NO: 75609 - protein, 7 aa, synthetic construct
NPLPMHT

SEQ ID NO: 75610 - protein, 7 aa, synthetic construct
SRQGGNA

SEQ ID NO: 75611 - protein, 7 aa, synthetic construct
MGSQFPM

SEQ ID NO: 75612 - protein, 7 aa, synthetic construct
KTGNATN

SEQ ID NO: 75613 - protein, 7 aa, synthetic construct
STPMHEK

SEQ ID NO: 75614 - protein, 7 aa, synthetic construct
QMPERYP

SEQ ID NO: 75615 - protein, 7 aa, synthetic construct
KSSAVLV

SEQ ID NO: 75616 - protein, 7 aa, synthetic construct
QHNKMYG

SEQ ID NO: 75617 - protein, 7 aa, synthetic construct
TSGKFNG

SEQ ID NO: 75618 - protein, 7 aa, synthetic construct
GMKNMSG

SEQ ID NO: 75619 - protein, 7 aa, synthetic construct
VINKIYE

SEQ ID NO: 75620 - protein, 7 aa, synthetic construct
VNSQQMW

SEQ ID NO: 75621 - protein, 7 aa, synthetic construct
ATKYDEY

SEQ ID NO: 75622 - protein, 7 aa, synthetic construct
KSFTHEY

SEQ ID NO: 75623 - protein, 7 aa, synthetic construct
QGMQHIG

SEQ ID NO: 75624 - protein, 7 aa, synthetic construct
GKMRSDD

SEQ ID NO: 75625 - protein, 7 aa, synthetic construct
LRGDFKT

SEQ ID NO: 75626 - protein, 7 aa, synthetic construct
SQPVPYS

SEQ ID NO: 75627 - protein, 7 aa, synthetic construct
KISEQDR

SEQ ID NO: 75628 - protein, 7 aa, synthetic construct
KQMNGMG

SEQ ID NO: 75629 - protein, 7 aa, synthetic construct
RLNDYNG

SEQ ID NO: 75630 - protein, 7 aa, synthetic construct
QPKMQQG

SEQ ID NO: 75631 - protein, 7 aa, synthetic construct
TYVSPLP

SEQ ID NO: 75632 - protein, 7 aa, synthetic construct
GPSDRPL

SEQ ID NO: 75633 - protein, 7 aa, synthetic construct
RLANMGQ

SEQ ID NO: 75634 - protein, 7 aa, synthetic construct
TQQREFR

SEQ ID NO: 75635 - protein, 7 aa, synthetic construct
LVGTHLH

SEQ ID NO: 75636 - protein, 7 aa, synthetic construct
IKIGMER

SEQ ID NO: 75637 - protein, 7 aa, synthetic construct
LREPEQK

SEQ ID NO: 75638 - protein, 7 aa, synthetic construct
SQPKNAG

SEQ ID NO: 75639 - protein, 7 aa, synthetic construct
SHHGTNQ

SEQ ID NO: 75640 - protein, 7 aa, synthetic construct
FQDSYRN

SEQ ID NO: 75641 - protein, 7 aa, synthetic construct
LLQHAPK

SEQ ID NO: 75642 - protein, 7 aa, synthetic construct
GHGKVDL

SEQ ID NO: 75643 - protein, 7 aa, synthetic construct
KTNGNQA

SEQ ID NO: 75644 - protein, 7 aa, synthetic construct
YSAKMNS

SEQ ID NO: 75645 - protein, 7 aa, synthetic construct
LINAKTF

SEQ ID NO: 75646 - protein, 7 aa, synthetic construct
PHASLAT

SEQ ID NO: 75647 - protein, 7 aa, synthetic construct
MKGMVHN

SEQ ID NO: 75648 - protein, 7 aa, synthetic construct
FQAFKEQ

SEQ ID NO: 75649 - protein, 7 aa, synthetic construct
AETSNKM

SEQ ID NO: 75650 - protein, 7 aa, synthetic construct
DTVGNQK

SEQ ID NO: 75651 - protein, 7 aa, synthetic construct
SPAATTD

SEQ ID NO: 75652 - protein, 7 aa, synthetic construct
TRKEDMV

SEQ ID NO: 75653 - protein, 7 aa, synthetic construct
DPPKTFM

SEQ ID NO: 75654 - protein, 7 aa, synthetic construct
EQKVTMV

SEQ ID NO: 75655 - protein, 7 aa, synthetic construct
YGGHTQP

SEQ ID NO: 75656 - protein, 7 aa, synthetic construct
PTSGKTA

SEQ ID NO: 75657 - protein, 7 aa, synthetic construct
RGKMTFE

SEQ ID NO: 75658 - protein, 7 aa, synthetic construct
NPHPKHD

SEQ ID NO: 75659 - protein, 7 aa, synthetic construct
KYPDSTH

SEQ ID NO: 75660 - protein, 7 aa, synthetic construct
PEQRMQA

SEQ ID NO: 75661 - protein, 7 aa, synthetic construct
QTQGPMH

SEQ ID NO: 75662 - protein, 7 aa, synthetic construct
TAFTSEG

SEQ ID NO: 75663 - protein, 7 aa, synthetic construct
NKTTQGA

SEQ ID NO: 75664 - protein, 7 aa, synthetic construct
EKYNDTM

SEQ ID NO: 75665 - protein, 7 aa, synthetic construct
LHAYERE

SEQ ID NO: 75666 - protein, 7 aa, synthetic construct
YADVNTI

SEQ ID NO: 75667 - protein, 7 aa, synthetic construct
YVVGTLP

SEQ ID NO: 75668 - protein, 7 aa, synthetic construct
TVQVAFA

SEQ ID NO: 75669 - protein, 7 aa, synthetic construct
YQMRELG

SEQ ID NO: 75670 - protein, 7 aa, synthetic construct
MGGMHVR

SEQ ID NO: 75671 - protein, 7 aa, synthetic construct
ERVKVHE

SEQ ID NO: 75672 - protein, 7 aa, synthetic construct
KEPQRKD

SEQ ID NO: 75673 - protein, 7 aa, synthetic construct
KSNANPE

SEQ ID NO: 75674 - protein, 7 aa, synthetic construct
KGTANYD

SEQ ID NO: 75675 - protein, 7 aa, synthetic construct
KQTTSNG

SEQ ID NO: 75676 - protein, 7 aa, synthetic construct
GSNNQVG

SEQ ID NO: 75677 - protein, 7 aa, synthetic construct
IRADKHM

SEQ ID NO: 75678 - protein, 7 aa, synthetic construct
FPKASTG

SEQ ID NO: 75679 - protein, 7 aa, synthetic construct
MLKNNPV

SEQ ID NO: 75680 - protein, 7 aa, synthetic construct
STAVMTY

SEQ ID NO: 75681 - protein, 7 aa, synthetic construct
DKQDMNF

SEQ ID NO: 75682 - protein, 7 aa, synthetic construct
MRQHERA

SEQ ID NO: 75683 - protein, 7 aa, synthetic construct
EKPRLQL

SEQ ID NO: 75684 - protein, 7 aa, synthetic construct
KPAMPPE

SEQ ID NO: 75685 - protein, 7 aa, synthetic construct
VNRSMLS

SEQ ID NO: 75686 - protein, 7 aa, synthetic construct
AVGRITM

SEQ ID NO: 75687 - protein, 7 aa, synthetic construct
LPSNDYR

SEQ ID NO: 75688 - protein, 7 aa, synthetic construct
SRHLPNH

SEQ ID NO: 75689 - protein, 7 aa, synthetic construct
ILTPDAR

SEQ ID NO: 75690 - protein, 7 aa, synthetic construct
TIMLSQA

SEQ ID NO: 75691 - protein, 7 aa, synthetic construct
KGGGPNF

SEQ ID NO: 75692 - protein, 7 aa, synthetic construct
ARQSQND

SEQ ID NO: 75693 - protein, 7 aa, synthetic construct
YNHGSRN

SEQ ID NO: 75694 - protein, 7 aa, synthetic construct
NSRQATP

SEQ ID NO: 75695 - protein, 7 aa, synthetic construct
LGHTTPT

SEQ ID NO: 75696 - protein, 7 aa, synthetic construct
KIAITQF

SEQ ID NO: 75697 - protein, 7 aa, synthetic construct
QPVMPSG

SEQ ID NO: 75698 - protein, 7 aa, synthetic construct
QMESRHS

SEQ ID NO: 75699 - protein, 7 aa, synthetic construct
KNMQQQS

SEQ ID NO: 75700 - protein, 7 aa, synthetic construct
HQPVFQA

SEQ ID NO: 75701 - protein, 7 aa, synthetic construct
APYVQAT

SEQ ID NO: 75702 - protein, 7 aa, synthetic construct
FSPVVRA

SEQ ID NO: 75703 - protein, 7 aa, synthetic construct
RELIGRA

SEQ ID NO: 75704 - protein, 7 aa, synthetic construct
IKTNPPV

SEQ ID NO: 75705 - protein, 7 aa, synthetic construct
SNGTPNS

SEQ ID NO: 75706 - protein, 7 aa, synthetic construct
KATSIME

SEQ ID NO: 75707 - protein, 7 aa, synthetic construct
KASEHLT

SEQ ID NO: 75708 - protein, 7 aa, synthetic construct
KNDLAVS

SEQ ID NO: 75709 - protein, 7 aa, synthetic construct
MKPVGMH

SEQ ID NO: 75710 - protein, 7 aa, synthetic construct
GNGKALV

SEQ ID NO: 75711 - protein, 7 aa, synthetic construct
PLHSQMH

SEQ ID NO: 75712 - protein, 7 aa, synthetic construct
PTNAQKN

SEQ ID NO: 75713 - protein, 7 aa, synthetic construct
LNIGMTA

SEQ ID NO: 75714 - protein, 7 aa, synthetic construct
NLRVGGT

SEQ ID NO: 75715 - protein, 7 aa, synthetic construct
RQFSPEI

SEQ ID NO: 75716 - protein, 7 aa, synthetic construct
NKILSRE

SEQ ID NO: 75717 - protein, 7 aa, synthetic construct
RAQHGQG

SEQ ID NO: 75718 - protein, 7 aa, synthetic construct
MKPSTNY

SEQ ID NO: 75719 - protein, 7 aa, synthetic construct
YDVAHAA

SEQ ID NO: 75720 - protein, 7 aa, synthetic construct
HLDPPRT

SEQ ID NO: 75721 - protein, 7 aa, synthetic construct
GYQIIHG

SEQ ID NO: 75722 - protein, 7 aa, synthetic construct
FNTPGNR

SEQ ID NO: 75723 - protein, 7 aa, synthetic construct
HYDNRMA

SEQ ID NO: 75724 - protein, 7 aa, synthetic construct
KSGSPMS

SEQ ID NO: 75725 - protein, 7 aa, synthetic construct
LRSDANQ

SEQ ID NO: 75726 - protein, 7 aa, synthetic construct
MKTKDDS

SEQ ID NO: 75727 - protein, 7 aa, synthetic construct
GNSKQAM

SEQ ID NO: 75728 - protein, 7 aa, synthetic construct
ASIHKQL

SEQ ID NO: 75729 - protein, 7 aa, synthetic construct
YKRDDVI

SEQ ID NO: 75730 - protein, 7 aa, synthetic construct
TSSQMTY

SEQ ID NO: 75731 - protein, 7 aa, synthetic construct
TPDLRRT

SEQ ID NO: 75732 - protein, 7 aa, synthetic construct
TGAIPLI

SEQ ID NO: 75733 - protein, 7 aa, synthetic construct
SLRETMH

SEQ ID NO: 75734 - protein, 7 aa, synthetic construct
MGPQHEK

SEQ ID NO: 75735 - protein, 7 aa, synthetic construct
APSIPKY

SEQ ID NO: 75736 - protein, 7 aa, synthetic construct
SQMGGYI

SEQ ID NO: 75737 - protein, 7 aa, synthetic construct
RDKSNMA

SEQ ID NO: 75738 - protein, 7 aa, synthetic construct
MKDYLNH

SEQ ID NO: 75739 - protein, 7 aa, synthetic construct
WPDRGQV

SEQ ID NO: 75740 - protein, 7 aa, synthetic construct
EGHPIMR

SEQ ID NO: 75741 - protein, 7 aa, synthetic construct
QMGKVEA

SEQ ID NO: 75742 - protein, 7 aa, synthetic construct
KERQLLD

SEQ ID NO: 75743 - protein, 7 aa, synthetic construct
AKQDGWH

SEQ ID NO: 75744 - protein, 7 aa, synthetic construct
RTQYNTT

SEQ ID NO: 75745 - protein, 7 aa, synthetic construct
TISIHNA

SEQ ID NO: 75746 - protein, 7 aa, synthetic construct
SKSHVYG

SEQ ID NO: 75747 - protein, 7 aa, synthetic construct
NKAPSTS

SEQ ID NO: 75748 - protein, 7 aa, synthetic construct
MTLSKPI

SEQ ID NO: 75749 - protein, 7 aa, synthetic construct
IIVATHS

SEQ ID NO: 75750 - protein, 7 aa, synthetic construct
PGKHFDT

SEQ ID NO: 75751 - protein, 7 aa, synthetic construct
KHPSEAG

SEQ ID NO: 75752 - protein, 7 aa, synthetic construct
NKTSGMM

SEQ ID NO: 75753 - protein, 7 aa, synthetic construct
GGMNAKT

SEQ ID NO: 75754 - protein, 7 aa, synthetic construct
KAGFKES

SEQ ID NO: 75755 - protein, 7 aa, synthetic construct
QWKAADM

SEQ ID NO: 75756 - protein, 7 aa, synthetic construct
RIQPGNP

SEQ ID NO: 75757 - protein, 7 aa, synthetic construct
ISKSDGP

SEQ ID NO: 75758 - protein, 7 aa, synthetic construct
MKDVDNM

SEQ ID NO: 75759 - protein, 7 aa, synthetic construct
TEGKYRS

SEQ ID NO: 75760 - protein, 7 aa, synthetic construct
PFSGNAV

SEQ ID NO: 75761 - protein, 7 aa, synthetic construct
VQHQVAS

SEQ ID NO: 75762 - protein, 7 aa, synthetic construct
HNLDQNL

SEQ ID NO: 75763 - protein, 7 aa, synthetic construct
QIERDPF

SEQ ID NO: 75764 - protein, 7 aa, synthetic construct
KIENRLD

SEQ ID NO: 75765 - protein, 7 aa, synthetic construct
SRHARED

SEQ ID NO: 75766 - protein, 7 aa, synthetic construct
SVKQLGV

SEQ ID NO: 75767 - protein, 7 aa, synthetic construct
NLQMPQQ

SEQ ID NO: 75768 - protein, 7 aa, synthetic construct
WSQLDSA

SEQ ID NO: 75769 - protein, 7 aa, synthetic construct
RAAQTET

SEQ ID NO: 75770 - protein, 7 aa, synthetic construct
KQWGSQD

SEQ ID NO: 75771 - protein, 7 aa, synthetic construct
FRREMGS

SEQ ID NO: 75772 - protein, 7 aa, synthetic construct
IKEQFKD

SEQ ID NO: 75773 - protein, 7 aa, synthetic construct
EKIVHRV

SEQ ID NO: 75774 - protein, 7 aa, synthetic construct
FNKGTHE

SEQ ID NO: 75775 - protein, 7 aa, synthetic construct
NALQTEK

SEQ ID NO: 75776 - protein, 7 aa, synthetic construct
GPRQAGG

SEQ ID NO: 75777 - protein, 7 aa, synthetic construct
RNNESMY

SEQ ID NO: 75778 - protein, 7 aa, synthetic construct
THKEAST

SEQ ID NO: 75779 - protein, 7 aa, synthetic construct
THHMSMV

SEQ ID NO: 75780 - protein, 7 aa, synthetic construct
NNQKTNP

SEQ ID NO: 75781 - protein, 7 aa, synthetic construct
NRNHLGH

SEQ ID NO: 75782 - protein, 7 aa, synthetic construct
IATKDHW

SEQ ID NO: 75783 - protein, 7 aa, synthetic construct
EHNHKRE

SEQ ID NO: 75784 - protein, 7 aa, synthetic construct
YSEKGTH

SEQ ID NO: 75785 - protein, 7 aa, synthetic construct
EVLRSHH

SEQ ID NO: 75786 - protein, 7 aa, synthetic construct
KRVAGID

SEQ ID NO: 75787 - protein, 7 aa, synthetic construct
NRMDHSP

SEQ ID NO: 75788 - protein, 7 aa, synthetic construct
EKWGGIV

SEQ ID NO: 75789 - protein, 7 aa, synthetic construct
PERKQIL

SEQ ID NO: 75790 - protein, 7 aa, synthetic construct
KKGQAYE

SEQ ID NO: 75791 - protein, 7 aa, synthetic construct
NKMNVAA

SEQ ID NO: 75792 - protein, 7 aa, synthetic construct
SPIQQKA

SEQ ID NO: 75793 - protein, 7 aa, synthetic construct
AHFTGVT

SEQ ID NO: 75794 - protein, 7 aa, synthetic construct
EHKFGAP

SEQ ID NO: 75795 - protein, 7 aa, synthetic construct
PVSGMRN

SEQ ID NO: 75796 - protein, 7 aa, synthetic construct
GIKKNPD

SEQ ID NO: 75797 - protein, 7 aa, synthetic construct
HVMDVTK

SEQ ID NO: 75798 - protein, 7 aa, synthetic construct
GNHTIIR

SEQ ID NO: 75799 - protein, 7 aa, synthetic construct
GSHVFKA

SEQ ID NO: 75800 - protein, 7 aa, synthetic construct
NIHSPNS

SEQ ID NO: 75801 - protein, 7 aa, synthetic construct
QQTSENN

SEQ ID NO: 75802 - protein, 7 aa, synthetic construct
VRVDWHA

SEQ ID NO: 75803 - protein, 7 aa, synthetic construct
THNNKTG

SEQ ID NO: 75804 - protein, 7 aa, synthetic construct
KQDKSWE

SEQ ID NO: 75805 - protein, 7 aa, synthetic construct
QRERNLS

SEQ ID NO: 75806 - protein, 7 aa, synthetic construct
IMQKAQV

SEQ ID NO: 75807 - protein, 7 aa, synthetic construct
MMKQALD

SEQ ID NO: 75808 - protein, 7 aa, synthetic construct
DMEFKNT

SEQ ID NO: 75809 - protein, 7 aa, synthetic construct
WAVQDKD

SEQ ID NO: 75810 - protein, 7 aa, synthetic construct
QANIKDM

SEQ ID NO: 75811 - protein, 7 aa, synthetic construct
RATVKTE

SEQ ID NO: 75812 - protein, 7 aa, synthetic construct
QERSRNE

SEQ ID NO: 75813 - protein, 7 aa, synthetic construct
RNHLSGA

SEQ ID NO: 75814 - protein, 7 aa, synthetic construct
TVKHDSA

SEQ ID NO: 75815 - protein, 7 aa, synthetic construct
IFHSGKM

SEQ ID NO: 75816 - protein, 7 aa, synthetic construct
RDRSGAI

SEQ ID NO: 75817 - protein, 7 aa, synthetic construct
PGTTGHT

SEQ ID NO: 75818 - protein, 7 aa, synthetic construct
AFSTERR

SEQ ID NO: 75819 - protein, 7 aa, synthetic construct
KMMGVHG

SEQ ID NO: 75820 - protein, 7 aa, synthetic construct
DTRTKVA

SEQ ID NO: 75821 - protein, 7 aa, synthetic construct
YGGKTLD

SEQ ID NO: 75822 - protein, 7 aa, synthetic construct
ATFNKPD

SEQ ID NO: 75823 - protein, 7 aa, synthetic construct
KMGNGGP

SEQ ID NO: 75824 - protein, 7 aa, synthetic construct
KMGSGQG

SEQ ID NO: 75825 - protein, 7 aa, synthetic construct
SQGGAAF

SEQ ID NO: 75826 - protein, 7 aa, synthetic construct
PRPQDGM

SEQ ID NO: 75827 - protein, 7 aa, synthetic construct
LDVHHPA

SEQ ID NO: 75828 - protein, 7 aa, synthetic construct
MKDGIVV

SEQ ID NO: 75829 - protein, 7 aa, synthetic construct
NNSKNSI

SEQ ID NO: 75830 - protein, 7 aa, synthetic construct
PLIPRIE

SEQ ID NO: 75831 - protein, 7 aa, synthetic construct
SMKVGMG

SEQ ID NO: 75832 - protein, 7 aa, synthetic construct
QKSSSKD

SEQ ID NO: 75833 - protein, 7 aa, synthetic construct
TYGGPHT

SEQ ID NO: 75834 - protein, 7 aa, synthetic construct
MTHMPRE

SEQ ID NO: 75835 - protein, 7 aa, synthetic construct
NIPGTTK

SEQ ID NO: 75836 - protein, 7 aa, synthetic construct
AIKAIKP

SEQ ID NO: 75837 - protein, 7 aa, synthetic construct
LQRSKEV

SEQ ID NO: 75838 - protein, 7 aa, synthetic construct
GMTRPHQ

SEQ ID NO: 75839 - protein, 7 aa, synthetic construct
QNPSMKQ

SEQ ID NO: 75840 - protein, 7 aa, synthetic construct
AETRYHH

SEQ ID NO: 75841 - protein, 7 aa, synthetic construct
SNRLSAH

SEQ ID NO: 75842 - protein, 7 aa, synthetic construct
QGPLPFE

SEQ ID NO: 75843 - protein, 7 aa, synthetic construct
SEFNGKA

SEQ ID NO: 75844 - protein, 7 aa, synthetic construct
LGTYQVV

SEQ ID NO: 75845 - protein, 7 aa, synthetic construct
KARDTGG

SEQ ID NO: 75846 - protein, 7 aa, synthetic construct
GFDKQRS

SEQ ID NO: 75847 - protein, 7 aa, synthetic construct
TQPRINA

SEQ ID NO: 75848 - protein, 7 aa, synthetic construct
KSVLASA

SEQ ID NO: 75849 - protein, 7 aa, synthetic construct
LLSSEHV

SEQ ID NO: 75850 - protein, 7 aa, synthetic construct
MNANIKG

SEQ ID NO: 75851 - protein, 7 aa, synthetic construct
IQMKNNA

SEQ ID NO: 75852 - protein, 7 aa, synthetic construct
VSAFLQP

SEQ ID NO: 75853 - protein, 7 aa, synthetic construct
FPLRQQV

SEQ ID NO: 75854 - protein, 7 aa, synthetic construct
MTYKPIS

SEQ ID NO: 75855 - protein, 7 aa, synthetic construct
QRSTMAP

SEQ ID NO: 75856 - protein, 7 aa, synthetic construct
QGDVFRN

SEQ ID NO: 75857 - protein, 7 aa, synthetic construct
QNKNSAM

SEQ ID NO: 75858 - protein, 7 aa, synthetic construct
KTQPMRD

SEQ ID NO: 75859 - protein, 7 aa, synthetic construct
SKPNAFA

SEQ ID NO: 75860 - protein, 7 aa, synthetic construct
KERLGNE

SEQ ID NO: 75861 - protein, 7 aa, synthetic construct
KTGPGFA

SEQ ID NO: 75862 - protein, 7 aa, synthetic construct
QHASYKE

SEQ ID NO: 75863 - protein, 7 aa, synthetic construct
NVVGAQT

SEQ ID NO: 75864 - protein, 7 aa, synthetic construct
NNVSHTF

SEQ ID NO: 75865 - protein, 7 aa, synthetic construct
GHNYQAG

SEQ ID NO: 75866 - protein, 7 aa, synthetic construct
PLASRNV

SEQ ID NO: 75867 - protein, 7 aa, synthetic construct
HKDAANA

SEQ ID NO: 75868 - protein, 7 aa, synthetic construct
LLEQMKG

SEQ ID NO: 75869 - protein, 7 aa, synthetic construct
KHMGQFG

SEQ ID NO: 75870 - protein, 7 aa, synthetic construct
KPTPMRD

SEQ ID NO: 75871 - protein, 7 aa, synthetic construct
FAVLKTN

SEQ ID NO: 75872 - protein, 7 aa, synthetic construct
HLNRPGI

SEQ ID NO: 75873 - protein, 7 aa, synthetic construct
SDDSRKQ

SEQ ID NO: 75874 - protein, 7 aa, synthetic construct
LGTKIMG

SEQ ID NO: 75875 - protein, 7 aa, synthetic construct
WRAAEHN

SEQ ID NO: 75876 - protein, 7 aa, synthetic construct
RGLHALA

SEQ ID NO: 75877 - protein, 7 aa, synthetic construct
QFNSKAP

SEQ ID NO: 75878 - protein, 7 aa, synthetic construct
NFINTEI

SEQ ID NO: 75879 - protein, 7 aa, synthetic construct
YGGEKRF

SEQ ID NO: 75880 - protein, 7 aa, synthetic construct
RHNMEGD

SEQ ID NO: 75881 - protein, 7 aa, synthetic construct
QVQQRDF

SEQ ID NO: 75882 - protein, 7 aa, synthetic construct
VNKSMQL

SEQ ID NO: 75883 - protein, 7 aa, synthetic construct
KSMASAA

SEQ ID NO: 75884 - protein, 7 aa, synthetic construct
RNQAQEI

SEQ ID NO: 75885 - protein, 7 aa, synthetic construct
VDLHKKM

SEQ ID NO: 75886 - protein, 7 aa, synthetic construct
NSFDVRT

SEQ ID NO: 75887 - protein, 7 aa, synthetic construct
RVNSEFY

SEQ ID NO: 75888 - protein, 7 aa, synthetic construct
NPHGTNP

SEQ ID NO: 75889 - protein, 7 aa, synthetic construct
NVFRDGL

SEQ ID NO: 75890 - protein, 7 aa, synthetic construct
KMDKPAN

SEQ ID NO: 75891 - protein, 7 aa, synthetic construct
KQNHREE

SEQ ID NO: 75892 - protein, 7 aa, synthetic construct
SEIHVHA

SEQ ID NO: 75893 - protein, 7 aa, synthetic construct
IYRNDEP

SEQ ID NO: 75894 - protein, 7 aa, synthetic construct
AGFEGTK

SEQ ID NO: 75895 - protein, 7 aa, synthetic construct
LEIGRSH

SEQ ID NO: 75896 - protein, 7 aa, synthetic construct
GKEKNPP

SEQ ID NO: 75897 - protein, 7 aa, synthetic construct
KLGNVNA

SEQ ID NO: 75898 - protein, 7 aa, synthetic construct
VAKTTAL

SEQ ID NO: 75899 - protein, 7 aa, synthetic construct
KASVDWE

SEQ ID NO: 75900 - protein, 7 aa, synthetic construct
YLSFAPD

SEQ ID NO: 75901 - protein, 7 aa, synthetic construct
NHQFSHG

SEQ ID NO: 75902 - protein, 7 aa, synthetic construct
GMQRHTY

SEQ ID NO: 75903 - protein, 7 aa, synthetic construct
PVVANKQ

SEQ ID NO: 75904 - protein, 7 aa, synthetic construct
EYSKPAS

SEQ ID NO: 75905 - protein, 7 aa, synthetic construct
VRAIDPP

SEQ ID NO: 75906 - protein, 7 aa, synthetic construct
DQRQPHH

SEQ ID NO: 75907 - protein, 7 aa, synthetic construct
YPHRKQE

SEQ ID NO: 75908 - protein, 7 aa, synthetic construct
GPISVRA

SEQ ID NO: 75909 - protein, 7 aa, synthetic construct
RMQSNNS

SEQ ID NO: 75910 - protein, 7 aa, synthetic construct
RSQMANV

SEQ ID NO: 75911 - protein, 7 aa, synthetic construct
GKKDPSG

SEQ ID NO: 75912 - protein, 7 aa, synthetic construct
MLSEQIA

SEQ ID NO: 75913 - protein, 7 aa, synthetic construct
LQATKSS

SEQ ID NO: 75914 - protein, 7 aa, synthetic construct
AVPFLKE

SEQ ID NO: 75915 - protein, 7 aa, synthetic construct
KVYHVSE

SEQ ID NO: 75916 - protein, 7 aa, synthetic construct
QRTADRP

SEQ ID NO: 75917 - protein, 7 aa, synthetic construct
SQAKSTI

SEQ ID NO: 75918 - protein, 7 aa, synthetic construct
PKKEWSE

SEQ ID NO: 75919 - protein, 7 aa, synthetic construct
SKAGPAQ

SEQ ID NO: 75920 - protein, 7 aa, synthetic construct
GVRSGAA

SEQ ID NO: 75921 - protein, 7 aa, synthetic construct
QALQQYP

SEQ ID NO: 75922 - protein, 7 aa, synthetic construct
QAQAARG

SEQ ID NO: 75923 - protein, 7 aa, synthetic construct
TRQESHV

SEQ ID NO: 75924 - protein, 7 aa, synthetic construct
NRGMAHS

SEQ ID NO: 75925 - protein, 7 aa, synthetic construct
GANIRYE

SEQ ID NO: 75926 - protein, 7 aa, synthetic construct
PVGRMTS

SEQ ID NO: 75927 - protein, 7 aa, synthetic construct
VLTQLHE

SEQ ID NO: 75928 - protein, 7 aa, synthetic construct
QIDRRVV

SEQ ID NO: 75929 - protein, 7 aa, synthetic construct
LQHEGLA

SEQ ID NO: 75930 - protein, 7 aa, synthetic construct
TGNSLAL

SEQ ID NO: 75931 - protein, 7 aa, synthetic construct
DIKKIVH

SEQ ID NO: 75932 - protein, 7 aa, synthetic construct
NFKQQYM

SEQ ID NO: 75933 - protein, 7 aa, synthetic construct
TREVMTI

SEQ ID NO: 75934 - protein, 7 aa, synthetic construct
HQVNLNS

SEQ ID NO: 75935 - protein, 7 aa, synthetic construct
YDKEKAP

SEQ ID NO: 75936 - protein, 7 aa, synthetic construct
SPNAQVV

SEQ ID NO: 75937 - protein, 7 aa, synthetic construct
YVNTVGK

SEQ ID NO: 75938 - protein, 7 aa, synthetic construct
KMSTGTA

SEQ ID NO: 75939 - protein, 7 aa, synthetic construct
TNSQNNK

SEQ ID NO: 75940 - protein, 7 aa, synthetic construct
AFRPSMS

SEQ ID NO: 75941 - protein, 7 aa, synthetic construct
NATPTMK

SEQ ID NO: 75942 - protein, 7 aa, synthetic construct
GGERAKA

SEQ ID NO: 75943 - protein, 7 aa, synthetic construct
KGDRTIQ

SEQ ID NO: 75944 - protein, 7 aa, synthetic construct
FQKRQDT

SEQ ID NO: 75945 - protein, 7 aa, synthetic construct
SKGNSNW

SEQ ID NO: 75946 - protein, 7 aa, synthetic construct
SVISLGH

SEQ ID NO: 75947 - protein, 7 aa, synthetic construct
PVHQAAI

SEQ ID NO: 75948 - protein, 7 aa, synthetic construct
NIKETIS

SEQ ID NO: 75949 - protein, 7 aa, synthetic construct
KPKTSDP

SEQ ID NO: 75950 - protein, 7 aa, synthetic construct
ATFGQKP

SEQ ID NO: 75951 - protein, 7 aa, synthetic construct
VPNTIKD

SEQ ID NO: 75952 - protein, 7 aa, synthetic construct
RGFPFEG

SEQ ID NO: 75953 - protein, 7 aa, synthetic construct
VVKGIIP

SEQ ID NO: 75954 - protein, 7 aa, synthetic construct
LRGAHID

SEQ ID NO: 75955 - protein, 7 aa, synthetic construct
KNTNKDP

SEQ ID NO: 75956 - protein, 7 aa, synthetic construct
VKNQHSA

SEQ ID NO: 75957 - protein, 7 aa, synthetic construct
GQSGLHH

SEQ ID NO: 75958 - protein, 7 aa, synthetic construct
WGSHYTQ

SEQ ID NO: 75959 - protein, 7 aa, synthetic construct
ILNKADL

SEQ ID NO: 75960 - protein, 7 aa, synthetic construct
SPQRIDP

SEQ ID NO: 75961 - protein, 7 aa, synthetic construct
GNQNKNA

SEQ ID NO: 75962 - protein, 7 aa, synthetic construct
QSIGAPF

SEQ ID NO: 75963 - protein, 7 aa, synthetic construct
ISGTGTM

SEQ ID NO: 75964 - protein, 7 aa, synthetic construct
FKQVNMN

SEQ ID NO: 75965 - protein, 7 aa, synthetic construct
SNFKKDP

SEQ ID NO: 75966 - protein, 7 aa, synthetic construct
PNLGRAP

SEQ ID NO: 75967 - protein, 7 aa, synthetic construct
MRTQNAH

SEQ ID NO: 75968 - protein, 7 aa, synthetic construct
YARIAVA

SEQ ID NO: 75969 - protein, 7 aa, synthetic construct
PNGLGSR

SEQ ID NO: 75970 - protein, 7 aa, synthetic construct
RKSPTTE

SEQ ID NO: 75971 - protein, 7 aa, synthetic construct
ITNMAQS

SEQ ID NO: 75972 - protein, 7 aa, synthetic construct
NAHGHLG

SEQ ID NO: 75973 - protein, 7 aa, synthetic construct
GKEYMHV

SEQ ID NO: 75974 - protein, 7 aa, synthetic construct
HFNENGK

SEQ ID NO: 75975 - protein, 7 aa, synthetic construct
SYQRNTM

SEQ ID NO: 75976 - protein, 7 aa, synthetic construct
RMNDQGF

SEQ ID NO: 75977 - protein, 7 aa, synthetic construct
KFPTSHQ

SEQ ID NO: 75978 - protein, 7 aa, synthetic construct
SDKIYKF

SEQ ID NO: 75979 - protein, 7 aa, synthetic construct
SDVTGPV

SEQ ID NO: 75980 - protein, 7 aa, synthetic construct
EMANIRG

SEQ ID NO: 75981 - protein, 7 aa, synthetic construct
VQRKEYH

SEQ ID NO: 75982 - protein, 7 aa, synthetic construct
IMEQHKR

SEQ ID NO: 75983 - protein, 7 aa, synthetic construct
SSTHSAR

SEQ ID NO: 75984 - protein, 7 aa, synthetic construct
NGRNMPS

SEQ ID NO: 75985 - protein, 7 aa, synthetic construct
NEAPGKR

SEQ ID NO: 75986 - protein, 7 aa, synthetic construct
GKVQNSG

SEQ ID NO: 75987 - protein, 7 aa, synthetic construct
TSKDFGS

SEQ ID NO: 75988 - protein, 7 aa, synthetic construct
MHQNIAI

SEQ ID NO: 75989 - protein, 7 aa, synthetic construct
QSQNMSK

SEQ ID NO: 75990 - protein, 7 aa, synthetic construct
QHRLNLG

SEQ ID NO: 75991 - protein, 7 aa, synthetic construct
GPPHIET

SEQ ID NO: 75992 - protein, 7 aa, synthetic construct
APPHQLL

SEQ ID NO: 75993 - protein, 7 aa, synthetic construct
SQENFPQ

SEQ ID NO: 75994 - protein, 7 aa, synthetic construct
YIKGPEL

SEQ ID NO: 75995 - protein, 7 aa, synthetic construct
AEKAIAS

SEQ ID NO: 75996 - protein, 7 aa, synthetic construct
PTERSQF

SEQ ID NO: 75997 - protein, 7 aa, synthetic construct
GSTNQIF

SEQ ID NO: 75998 - protein, 7 aa, synthetic construct
KQGTVSA

SEQ ID NO: 75999 - protein, 7 aa, synthetic construct
QTPRRDE

SEQ ID NO: 76000 - protein, 7 aa, synthetic construct
FTYLKED

SEQ ID NO: 76001 - protein, 7 aa, synthetic construct
THQIDAK

SEQ ID NO: 76002 - protein, 7 aa, synthetic construct
MQLFKDA

SEQ ID NO: 76003 - protein, 7 aa, synthetic construct
KLTDTLA

SEQ ID NO: 76004 - protein, 7 aa, synthetic construct
SYMGSEK

SEQ ID NO: 76005 - protein, 7 aa, synthetic construct
KSNMNTP

SEQ ID NO: 76006 - protein, 7 aa, synthetic construct
VMPKYMA

SEQ ID NO: 76007 - protein, 7 aa, synthetic construct
NKNGVQG

SEQ ID NO: 76008 - protein, 7 aa, synthetic construct
KQTFAQE

SEQ ID NO: 76009 - protein, 7 aa, synthetic construct
TETLHPR

SEQ ID NO: 76010 - protein, 7 aa, synthetic construct
HDPRRGV

SEQ ID NO: 76011 - protein, 7 aa, synthetic construct
FHAPQTM

SEQ ID NO: 76012 - protein, 7 aa, synthetic construct
MTGHPAP

SEQ ID NO: 76013 - protein, 7 aa, synthetic construct
KPTAMPP

SEQ ID NO: 76014 - protein, 7 aa, synthetic construct
HVKPLVN

SEQ ID NO: 76015 - protein, 7 aa, synthetic construct
GFGEPRA

SEQ ID NO: 76016 - protein, 7 aa, synthetic construct
QMQNVAI

SEQ ID NO: 76017 - protein, 7 aa, synthetic construct
NGNRIGE

SEQ ID NO: 76018 - protein, 7 aa, synthetic construct
NGANAGP

SEQ ID NO: 76019 - protein, 7 aa, synthetic construct
FHAKIGN

SEQ ID NO: 76020 - protein, 7 aa, synthetic construct
YHEMTKL

SEQ ID NO: 76021 - protein, 7 aa, synthetic construct
ISTTMPY

SEQ ID NO: 76022 - protein, 7 aa, synthetic construct
GKQGPVQ

SEQ ID NO: 76023 - protein, 7 aa, synthetic construct
EVPPVMG

SEQ ID NO: 76024 - protein, 7 aa, synthetic construct
ITSHQQH

SEQ ID NO: 76025 - protein, 7 aa, synthetic construct
TNFQRLP

SEQ ID NO: 76026 - protein, 7 aa, synthetic construct
MGQFPHP

SEQ ID NO: 76027 - protein, 7 aa, synthetic construct
NKQSNQM

SEQ ID NO: 76028 - protein, 7 aa, synthetic construct
VQMKTQG

SEQ ID NO: 76029 - protein, 7 aa, synthetic construct
RFAMMGE

SEQ ID NO: 76030 - protein, 7 aa, synthetic construct
PKHVNLG

SEQ ID NO: 76031 - protein, 7 aa, synthetic construct
YKIGHAH

SEQ ID NO: 76032 - protein, 7 aa, synthetic construct
GNGHNKA

SEQ ID NO: 76033 - protein, 7 aa, synthetic construct
TNSNKNH

SEQ ID NO: 76034 - protein, 7 aa, synthetic construct
ANQVMKV

SEQ ID NO: 76035 - protein, 7 aa, synthetic construct
GIEMPKV

SEQ ID NO: 76036 - protein, 7 aa, synthetic construct
TPGRENM

SEQ ID NO: 76037 - protein, 7 aa, synthetic construct
QHAERDR

SEQ ID NO: 76038 - protein, 7 aa, synthetic construct
IFDISQK

SEQ ID NO: 76039 - protein, 7 aa, synthetic construct
KNGTTSD

SEQ ID NO: 76040 - protein, 7 aa, synthetic construct
AKYSLME

SEQ ID NO: 76041 - protein, 7 aa, synthetic construct
LGEQTRF

SEQ ID NO: 76042 - protein, 7 aa, synthetic construct
HKTHNID

SEQ ID NO: 76043 - protein, 7 aa, synthetic construct
LTPSQIG

SEQ ID NO: 76044 - protein, 7 aa, synthetic construct
KMQHIEF

SEQ ID NO: 76045 - protein, 7 aa, synthetic construct
GHTNVAG

SEQ ID NO: 76046 - protein, 7 aa, synthetic construct
AGNTNIR

SEQ ID NO: 76047 - protein, 7 aa, synthetic construct
GYMLGSG

SEQ ID NO: 76048 - protein, 7 aa, synthetic construct
NNKSTEP

SEQ ID NO: 76049 - protein, 7 aa, synthetic construct
APVGKPA

SEQ ID NO: 76050 - protein, 7 aa, synthetic construct
CSDVRKM

SEQ ID NO: 76051 - protein, 7 aa, synthetic construct
GHIIGEP

SEQ ID NO: 76052 - protein, 7 aa, synthetic construct
TDMKQEK

SEQ ID NO: 76053 - protein, 7 aa, synthetic construct
WHPDARM

SEQ ID NO: 76054 - protein, 7 aa, synthetic construct
KPSAAKE

SEQ ID NO: 76055 - protein, 7 aa, synthetic construct
ELSGRHG

SEQ ID NO: 76056 - protein, 7 aa, synthetic construct
VMTQGNV

SEQ ID NO: 76057 - protein, 7 aa, synthetic construct
MRKLPED

SEQ ID NO: 76058 - protein, 7 aa, synthetic construct
GTGNLYS

SEQ ID NO: 76059 - protein, 7 aa, synthetic construct
VFTTAPI

SEQ ID NO: 76060 - protein, 7 aa, synthetic construct
SVKANMN

SEQ ID NO: 76061 - protein, 7 aa, synthetic construct
HHNKANH

SEQ ID NO: 76062 - protein, 7 aa, synthetic construct
MKNEIDA

SEQ ID NO: 76063 - protein, 7 aa, synthetic construct
VSNRTMI

SEQ ID NO: 76064 - protein, 7 aa, synthetic construct
APGIVHA

SEQ ID NO: 76065 - protein, 7 aa, synthetic construct
APNNRYI

SEQ ID NO: 76066 - protein, 7 aa, synthetic construct
DRMTSSL

SEQ ID NO: 76067 - protein, 7 aa, synthetic construct
FPSGARH

SEQ ID NO: 76068 - protein, 7 aa, synthetic construct
QPTTATV

SEQ ID NO: 76069 - protein, 7 aa, synthetic construct
IAQWQQN

SEQ ID NO: 76070 - protein, 7 aa, synthetic construct
FRSQDGN

SEQ ID NO: 76071 - protein, 7 aa, synthetic construct
EAPGRNW

SEQ ID NO: 76072 - protein, 7 aa, synthetic construct
VPNFPHT

SEQ ID NO: 76073 - protein, 7 aa, synthetic construct
GATSQHA

SEQ ID NO: 76074 - protein, 7 aa, synthetic construct
NQQFTNI

SEQ ID NO: 76075 - protein, 7 aa, synthetic construct
IDFLEKV

SEQ ID NO: 76076 - protein, 7 aa, synthetic construct
LRDKPGS

SEQ ID NO: 76077 - protein, 7 aa, synthetic construct
YVVDRPG

SEQ ID NO: 76078 - protein, 7 aa, synthetic construct
NNSDKYR

SEQ ID NO: 76079 - protein, 7 aa, synthetic construct
AKTSGKD

SEQ ID NO: 76080 - protein, 7 aa, synthetic construct
WDKTKSG

SEQ ID NO: 76081 - protein, 7 aa, synthetic construct
YPSKSTS

SEQ ID NO: 76082 - protein, 7 aa, synthetic construct
RLGVMSS

SEQ ID NO: 76083 - protein, 7 aa, synthetic construct
PMPGPTH

SEQ ID NO: 76084 - protein, 7 aa, synthetic construct
FSSAKDF

SEQ ID NO: 76085 - protein, 7 aa, synthetic construct
ISANYMS

SEQ ID NO: 76086 - protein, 7 aa, synthetic construct
IISASLA

SEQ ID NO: 76087 - protein, 7 aa, synthetic construct
DGQKSVL

SEQ ID NO: 76088 - protein, 7 aa, synthetic construct
VGPMYRG

SEQ ID NO: 76089 - protein, 7 aa, synthetic construct
QSPHEQV

SEQ ID NO: 76090 - protein, 7 aa, synthetic construct
DVANTHR

SEQ ID NO: 76091 - protein, 7 aa, synthetic construct
DIYHLKG

SEQ ID NO: 76092 - protein, 7 aa, synthetic construct
QTMKPQH

SEQ ID NO: 76093 - protein, 7 aa, synthetic construct
RPDLTLQ

SEQ ID NO: 76094 - protein, 7 aa, synthetic construct
GKPNMGG

SEQ ID NO: 76095 - protein, 7 aa, synthetic construct
TGKSTFG

SEQ ID NO: 76096 - protein, 7 aa, synthetic construct
PQHAQLR

SEQ ID NO: 76097 - protein, 7 aa, synthetic construct
KMVVMSD

SEQ ID NO: 76098 - protein, 7 aa, synthetic construct
NFAKDSY

SEQ ID NO: 76099 - protein, 7 aa, synthetic construct
FVGAEPR

SEQ ID NO: 76100 - protein, 7 aa, synthetic construct
QHQNIGY

SEQ ID NO: 76101 - protein, 7 aa, synthetic construct
DYPKAQP

SEQ ID NO: 76102 - protein, 7 aa, synthetic construct
KNSVNNP

SEQ ID NO: 76103 - protein, 7 aa, synthetic construct
IEQWRSE

SEQ ID NO: 76104 - protein, 7 aa, synthetic construct
MIASHMT

SEQ ID NO: 76105 - protein, 7 aa, synthetic construct
GHATHAE

SEQ ID NO: 76106 - protein, 7 aa, synthetic construct
HGNRYVE

SEQ ID NO: 76107 - protein, 7 aa, synthetic construct
KNNGNSV

SEQ ID NO: 76108 - protein, 7 aa, synthetic construct
NTKTNTV

SEQ ID NO: 76109 - protein, 7 aa, synthetic construct
MTSNGKA

SEQ ID NO: 76110 - protein, 7 aa, synthetic construct
VTRLSMT

SEQ ID NO: 76111 - protein, 7 aa, synthetic construct
FNLKVSN

SEQ ID NO: 76112 - protein, 7 aa, synthetic construct
AVRNPRD

SEQ ID NO: 76113 - protein, 7 aa, synthetic construct
NTRQDFM

SEQ ID NO: 76114 - protein, 7 aa, synthetic construct
SVSIKGN

SEQ ID NO: 76115 - protein, 7 aa, synthetic construct
VTRDHAK

SEQ ID NO: 76116 - protein, 7 aa, synthetic construct
AMPVHNP

SEQ ID NO: 76117 - protein, 7 aa, synthetic construct
AKVSYTT

SEQ ID NO: 76118 - protein, 7 aa, synthetic construct
AARGQAP

SEQ ID NO: 76119 - protein, 7 aa, synthetic construct
GKDNPYT

SEQ ID NO: 76120 - protein, 7 aa, synthetic construct
TPNWKIE

SEQ ID NO: 76121 - protein, 7 aa, synthetic construct
PQTGKQA

SEQ ID NO: 76122 - protein, 7 aa, synthetic construct
QGQKLNN

SEQ ID NO: 76123 - protein, 7 aa, synthetic construct
VYTDKNT

SEQ ID NO: 76124 - protein, 7 aa, synthetic construct
LPDYPST

SEQ ID NO: 76125 - protein, 7 aa, synthetic construct
VAQNQAP

SEQ ID NO: 76126 - protein, 7 aa, synthetic construct
NGQSAGS

SEQ ID NO: 76127 - protein, 7 aa, synthetic construct
MMRHMGS

SEQ ID NO: 76128 - protein, 7 aa, synthetic construct
IKDDNGR

SEQ ID NO: 76129 - protein, 7 aa, synthetic construct
LEGRTMF

SEQ ID NO: 76130 - protein, 7 aa, synthetic construct
WGTSHSV

SEQ ID NO: 76131 - protein, 7 aa, synthetic construct
GGKTAEN

SEQ ID NO: 76132 - protein, 7 aa, synthetic construct
VPGSQGF

SEQ ID NO: 76133 - protein, 7 aa, synthetic construct
FTGTTGA

SEQ ID NO: 76134 - protein, 7 aa, synthetic construct
YKENPQG

SEQ ID NO: 76135 - protein, 7 aa, synthetic construct
LPSYPAS

SEQ ID NO: 76136 - protein, 7 aa, synthetic construct
CETIRCP

SEQ ID NO: 76137 - protein, 7 aa, synthetic construct
FDNLRIP

SEQ ID NO: 76138 - protein, 7 aa, synthetic construct
VQVKGAI

SEQ ID NO: 76139 - protein, 7 aa, synthetic construct
KSHGSDL

SEQ ID NO: 76140 - protein, 7 aa, synthetic construct
HQAHHGA

SEQ ID NO: 76141 - protein, 7 aa, synthetic construct
LKVMMVD

SEQ ID NO: 76142 - protein, 7 aa, synthetic construct
QPLREKE

SEQ ID NO: 76143 - protein, 7 aa, synthetic construct
SVRDAHY

SEQ ID NO: 76144 - protein, 7 aa, synthetic construct
PARAVSH

SEQ ID NO: 76145 - protein, 7 aa, synthetic construct
QKDRIFV

SEQ ID NO: 76146 - protein, 7 aa, synthetic construct
KSTDDMP

SEQ ID NO: 76147 - protein, 7 aa, synthetic construct
KTTHLNL

SEQ ID NO: 76148 - protein, 7 aa, synthetic construct
ALTVRPQ

SEQ ID NO: 76149 - protein, 7 aa, synthetic construct
SLQSKDL

SEQ ID NO: 76150 - protein, 7 aa, synthetic construct
NKSNSAP

SEQ ID NO: 76151 - protein, 7 aa, synthetic construct
GQAMAHS

SEQ ID NO: 76152 - protein, 7 aa, synthetic construct
EDKIRLS

SEQ ID NO: 76153 - protein, 7 aa, synthetic construct
HTKFHPQ

SEQ ID NO: 76154 - protein, 7 aa, synthetic construct
MHLQQQK

SEQ ID NO: 76155 - protein, 7 aa, synthetic construct
LGVSHQG

SEQ ID NO: 76156 - protein, 7 aa, synthetic construct
PRPVAGA

SEQ ID NO: 76157 - protein, 7 aa, synthetic construct
GYSTPGT

SEQ ID NO: 76158 - protein, 7 aa, synthetic construct
QPRIPNL

SEQ ID NO: 76159 - protein, 7 aa, synthetic construct
PKHDRST

SEQ ID NO: 76160 - protein, 7 aa, synthetic construct
IHRDTGV

SEQ ID NO: 76161 - protein, 7 aa, synthetic construct
DTKLAHR

SEQ ID NO: 76162 - protein, 7 aa, synthetic construct
GATNNKH

SEQ ID NO: 76163 - protein, 7 aa, synthetic construct
GFQQIAH

SEQ ID NO: 76164 - protein, 7 aa, synthetic construct
HNNRSAD

SEQ ID NO: 76165 - protein, 7 aa, synthetic construct
HDVRSMV

SEQ ID NO: 76166 - protein, 7 aa, synthetic construct
MPSPGNK

SEQ ID NO: 76167 - protein, 7 aa, synthetic construct
MVKVPLK

SEQ ID NO: 76168 - protein, 7 aa, synthetic construct
TTTKDVF

SEQ ID NO: 76169 - protein, 7 aa, synthetic construct
GAMGTQH

SEQ ID NO: 76170 - protein, 7 aa, synthetic construct
VTKLHPY

SEQ ID NO: 76171 - protein, 7 aa, synthetic construct
DKDPQHR

SEQ ID NO: 76172 - protein, 7 aa, synthetic construct
YSVAVRG

SEQ ID NO: 76173 - protein, 7 aa, synthetic construct
MHERYQA

SEQ ID NO: 76174 - protein, 7 aa, synthetic construct
GMSKKDP

SEQ ID NO: 76175 - protein, 7 aa, synthetic construct
HQNEKNS

SEQ ID NO: 76176 - protein, 7 aa, synthetic construct
TFRSGQD

SEQ ID NO: 76177 - protein, 7 aa, synthetic construct
ESEYIKL

SEQ ID NO: 76178 - protein, 7 aa, synthetic construct
GKESVRD

SEQ ID NO: 76179 - protein, 7 aa, synthetic construct
HGNKNWE

SEQ ID NO: 76180 - protein, 7 aa, synthetic construct
SMQIKGN

SEQ ID NO: 76181 - protein, 7 aa, synthetic construct
MLPKISS

SEQ ID NO: 76182 - protein, 7 aa, synthetic construct
THMKYET

SEQ ID NO: 76183 - protein, 7 aa, synthetic construct
GQFQKTI

SEQ ID NO: 76184 - protein, 7 aa, synthetic construct
APSVGKP

SEQ ID NO: 76185 - protein, 7 aa, synthetic construct
FAVGIAK

SEQ ID NO: 76186 - protein, 7 aa, synthetic construct
GKKEAPA

SEQ ID NO: 76187 - protein, 7 aa, synthetic construct
GKYKEAM

SEQ ID NO: 76188 - protein, 7 aa, synthetic construct
KGHGGEI

SEQ ID NO: 76189 - protein, 7 aa, synthetic construct
NLRSENM

SEQ ID NO: 76190 - protein, 7 aa, synthetic construct
YKNPSQM

SEQ ID NO: 76191 - protein, 7 aa, synthetic construct
KNVSVAA

SEQ ID NO: 76192 - protein, 7 aa, synthetic construct
KDNDHRF

SEQ ID NO: 76193 - protein, 7 aa, synthetic construct
IHASNEK

SEQ ID NO: 76194 - protein, 7 aa, synthetic construct
NAFKPET

SEQ ID NO: 76195 - protein, 7 aa, synthetic construct
QPMKVNM

SEQ ID NO: 76196 - protein, 7 aa, synthetic construct
QIAKQSV

SEQ ID NO: 76197 - protein, 7 aa, synthetic construct
RNNPTNP

SEQ ID NO: 76198 - protein, 7 aa, synthetic construct
LGHSSNP

SEQ ID NO: 76199 - protein, 7 aa, synthetic construct
DNLHLLA

SEQ ID NO: 76200 - protein, 7 aa, synthetic construct
VHSTINM

SEQ ID NO: 76201 - protein, 7 aa, synthetic construct
GANSFHD

SEQ ID NO: 76202 - protein, 7 aa, synthetic construct
QDAKKIY

SEQ ID NO: 76203 - protein, 7 aa, synthetic construct
ADNRHSP

SEQ ID NO: 76204 - protein, 7 aa, synthetic construct
MREPLQT

SEQ ID NO: 76205 - protein, 7 aa, synthetic construct
GNAPLHR

SEQ ID NO: 76206 - protein, 7 aa, synthetic construct
QVHLAPL

SEQ ID NO: 76207 - protein, 7 aa, synthetic construct
KPYPEDM

SEQ ID NO: 76208 - protein, 7 aa, synthetic construct
SNPNKQS

SEQ ID NO: 76209 - protein, 7 aa, synthetic construct
NGTATNM

SEQ ID NO: 76210 - protein, 7 aa, synthetic construct
RLEIYQD

SEQ ID NO: 76211 - protein, 7 aa, synthetic construct
SASDYRA

SEQ ID NO: 76212 - protein, 7 aa, synthetic construct
VTNMKKE

SEQ ID NO: 76213 - protein, 7 aa, synthetic construct
AMSSENR

SEQ ID NO: 76214 - protein, 7 aa, synthetic construct
KIAKTIE

SEQ ID NO: 76215 - protein, 7 aa, synthetic construct
VNRNNNP

SEQ ID NO: 76216 - protein, 7 aa, synthetic construct
IDRAAMQ

SEQ ID NO: 76217 - protein, 7 aa, synthetic construct
EGPRMKD

SEQ ID NO: 76218 - protein, 7 aa, synthetic construct
TKEQATP

SEQ ID NO: 76219 - protein, 7 aa, synthetic construct
MSREKTY

SEQ ID NO: 76220 - protein, 7 aa, synthetic construct
RWSQDGD

SEQ ID NO: 76221 - protein, 7 aa, synthetic construct
HDNHHPA

SEQ ID NO: 76222 - protein, 7 aa, synthetic construct
DQVKPRD

SEQ ID NO: 76223 - protein, 7 aa, synthetic construct
IAAAATI

SEQ ID NO: 76224 - protein, 7 aa, synthetic construct
AGVKDNH

SEQ ID NO: 76225 - protein, 7 aa, synthetic construct
HNERMQY

SEQ ID NO: 76226 - protein, 7 aa, synthetic construct
YLKNQLM

SEQ ID NO: 76227 - protein, 7 aa, synthetic construct
IRQASSE

SEQ ID NO: 76228 - protein, 7 aa, synthetic construct
KTNSSNI

SEQ ID NO: 76229 - protein, 7 aa, synthetic construct
HGPHPAD

SEQ ID NO: 76230 - protein, 7 aa, synthetic construct
RTPELIG

SEQ ID NO: 76231 - protein, 7 aa, synthetic construct
YAVHTQT

SEQ ID NO: 76232 - protein, 7 aa, synthetic construct
MQEGRYM

SEQ ID NO: 76233 - protein, 7 aa, synthetic construct
QKSQTDR

SEQ ID NO: 76234 - protein, 7 aa, synthetic construct
KVLAMPT

SEQ ID NO: 76235 - protein, 7 aa, synthetic construct
NKGTTTS

SEQ ID NO: 76236 - protein, 7 aa, synthetic construct
DGTRSYV

SEQ ID NO: 76237 - protein, 7 aa, synthetic construct
IKVAASP

SEQ ID NO: 76238 - protein, 7 aa, synthetic construct
KQMETMF

SEQ ID NO: 76239 - protein, 7 aa, synthetic construct
KKTDSNV

SEQ ID NO: 76240 - protein, 7 aa, synthetic construct
AAISKLN

SEQ ID NO: 76241 - protein, 7 aa, synthetic construct
HPAGSQN

SEQ ID NO: 76242 - protein, 7 aa, synthetic construct
SGPMNHV

SEQ ID NO: 76243 - protein, 7 aa, synthetic construct
AGQNPNR

SEQ ID NO: 76244 - protein, 7 aa, synthetic construct
KMTNANG

SEQ ID NO: 76245 - protein, 7 aa, synthetic construct
PLGSGNS

SEQ ID NO: 76246 - protein, 7 aa, synthetic construct
VSKAIMT

SEQ ID NO: 76247 - protein, 7 aa, synthetic construct
TLLTSVP

SEQ ID NO: 76248 - protein, 7 aa, synthetic construct
MYQETKA

SEQ ID NO: 76249 - protein, 7 aa, synthetic construct
YFSSVAV

SEQ ID NO: 76250 - protein, 7 aa, synthetic construct
VGPHSAP

SEQ ID NO: 76251 - protein, 7 aa, synthetic construct
TLQQRFD

SEQ ID NO: 76252 - protein, 7 aa, synthetic construct
RAIQLAS

SEQ ID NO: 76253 - protein, 7 aa, synthetic construct
NNASMIQ

SEQ ID NO: 76254 - protein, 7 aa, synthetic construct
KFDNHIY

SEQ ID NO: 76255 - protein, 7 aa, synthetic construct
PDGMATR

SEQ ID NO: 76256 - protein, 7 aa, synthetic construct
KAWNNGE

SEQ ID NO: 76257 - protein, 7 aa, synthetic construct
HIKSSIT

SEQ ID NO: 76258 - protein, 7 aa, synthetic construct
GIDPLGK

SEQ ID NO: 76259 - protein, 7 aa, synthetic construct
NMKNGTI

SEQ ID NO: 76260 - protein, 7 aa, synthetic construct
NRKGDND

SEQ ID NO: 76261 - protein, 7 aa, synthetic construct
EPYVSAH

SEQ ID NO: 76262 - protein, 7 aa, synthetic construct
SALSGNI

SEQ ID NO: 76263 - protein, 7 aa, synthetic construct
MPLQVAA

SEQ ID NO: 76264 - protein, 7 aa, synthetic construct
SKNAAVV

SEQ ID NO: 76265 - protein, 7 aa, synthetic construct
ADGMSTR

SEQ ID NO: 76266 - protein, 7 aa, synthetic construct
KNGTSVV

SEQ ID NO: 76267 - protein, 7 aa, synthetic construct
SMPIANM

SEQ ID NO: 76268 - protein, 7 aa, synthetic construct
EGRGRDI

SEQ ID NO: 76269 - protein, 7 aa, synthetic construct
GGINNNR

SEQ ID NO: 76270 - protein, 7 aa, synthetic construct
NYKILDK

SEQ ID NO: 76271 - protein, 7 aa, synthetic construct
GDSYHGA

SEQ ID NO: 76272 - protein, 7 aa, synthetic construct
MKAESIT

SEQ ID NO: 76273 - protein, 7 aa, synthetic construct
HYMGSSA

SEQ ID NO: 76274 - protein, 7 aa, synthetic construct
NHTHIID

SEQ ID NO: 76275 - protein, 7 aa, synthetic construct
HFGTAHN

SEQ ID NO: 76276 - protein, 7 aa, synthetic construct
TPKNSNM

SEQ ID NO: 76277 - protein, 7 aa, synthetic construct
PPTEKVP

SEQ ID NO: 76278 - protein, 7 aa, synthetic construct
PNPPNRP

SEQ ID NO: 76279 - protein, 7 aa, synthetic construct
RVQDGAG

SEQ ID NO: 76280 - protein, 7 aa, synthetic construct
KQPHDVF

SEQ ID NO: 76281 - protein, 7 aa, synthetic construct
SVFGMQA

SEQ ID NO: 76282 - protein, 7 aa, synthetic construct
EVRNTHH

SEQ ID NO: 76283 - protein, 7 aa, synthetic construct
GYPVERA

SEQ ID NO: 76284 - protein, 7 aa, synthetic construct
PKYQNPQ

SEQ ID NO: 76285 - protein, 7 aa, synthetic construct
FPDPNKM

SEQ ID NO: 76286 - protein, 7 aa, synthetic construct
YMENPRN

SEQ ID NO: 76287 - protein, 7 aa, synthetic construct
PNTLKAT

SEQ ID NO: 76288 - protein, 7 aa, synthetic construct
HEPHGMT

SEQ ID NO: 76289 - protein, 7 aa, synthetic construct
TKHMTWE

SEQ ID NO: 76290 - protein, 7 aa, synthetic construct
KAEPFHG

SEQ ID NO: 76291 - protein, 7 aa, synthetic construct
MVKNSNA

SEQ ID NO: 76292 - protein, 7 aa, synthetic construct
MATNAYS

SEQ ID NO: 76293 - protein, 7 aa, synthetic construct
YSKQLNA

SEQ ID NO: 76294 - protein, 7 aa, synthetic construct
FNNHKHT

SEQ ID NO: 76295 - protein, 7 aa, synthetic construct
VNSLRIG

SEQ ID NO: 76296 - protein, 7 aa, synthetic construct
NSSQRRE

SEQ ID NO: 76297 - protein, 7 aa, synthetic construct
HAIKLDN

SEQ ID NO: 76298 - protein, 7 aa, synthetic construct
MLKIVSP

SEQ ID NO: 76299 - protein, 7 aa, synthetic construct
MKNGSNG

SEQ ID NO: 76300 - protein, 7 aa, synthetic construct
ASSNTQF

SEQ ID NO: 76301 - protein, 7 aa, synthetic construct
SKAPASM

SEQ ID NO: 76302 - protein, 7 aa, synthetic construct
PATWDER

SEQ ID NO: 76303 - protein, 7 aa, synthetic construct
SPVRASG

SEQ ID NO: 76304 - protein, 7 aa, synthetic construct
QVKGPGT

SEQ ID NO: 76305 - protein, 7 aa, synthetic construct
MKPSKDA

SEQ ID NO: 76306 - protein, 7 aa, synthetic construct
WNGKSEQ

SEQ ID NO: 76307 - protein, 7 aa, synthetic construct
MQQAKQF

SEQ ID NO: 76308 - protein, 7 aa, synthetic construct
YPMKNIS

SEQ ID NO: 76309 - protein, 7 aa, synthetic construct
DETMKKA

SEQ ID NO: 76310 - protein, 7 aa, synthetic construct
GNNGAKG

SEQ ID NO: 76311 - protein, 7 aa, synthetic construct
MYSGKST

SEQ ID NO: 76312 - protein, 7 aa, synthetic construct
SGQTRNP

SEQ ID NO: 76313 - protein, 7 aa, synthetic construct
DSHRMSF

SEQ ID NO: 76314 - protein, 7 aa, synthetic construct
IARDAEN

SEQ ID NO: 76315 - protein, 7 aa, synthetic construct
IYDYMKS

SEQ ID NO: 76316 - protein, 7 aa, synthetic construct
FNSKVAA

SEQ ID NO: 76317 - protein, 7 aa, synthetic construct
FGNSGEG

SEQ ID NO: 76318 - protein, 7 aa, synthetic construct
HVVNERI

SEQ ID NO: 76319 - protein, 7 aa, synthetic construct
TEQWLRE

SEQ ID NO: 76320 - protein, 7 aa, synthetic construct
TQSVSVQ

SEQ ID NO: 76321 - protein, 7 aa, synthetic construct
KYPPTGN

SEQ ID NO: 76322 - protein, 7 aa, synthetic construct
SKNSPTG

SEQ ID NO: 76323 - protein, 7 aa, synthetic construct
VNTLMER

SEQ ID NO: 76324 - protein, 7 aa, synthetic construct
KNVIPPY

SEQ ID NO: 76325 - protein, 7 aa, synthetic construct
GGKTQSG

SEQ ID NO: 76326 - protein, 7 aa, synthetic construct
TPAGIMN

SEQ ID NO: 76327 - protein, 7 aa, synthetic construct
QTKFTNV

SEQ ID NO: 76328 - protein, 7 aa, synthetic construct
KTSGTSV

SEQ ID NO: 76329 - protein, 7 aa, synthetic construct
KMSPTNG

SEQ ID NO: 76330 - protein, 7 aa, synthetic construct
RDMMVPS

SEQ ID NO: 76331 - protein, 7 aa, synthetic construct
GTKVNTA

SEQ ID NO: 76332 - protein, 7 aa, synthetic construct
KPATSGA

SEQ ID NO: 76333 - protein, 7 aa, synthetic construct
KNIGSAI

SEQ ID NO: 76334 - protein, 7 aa, synthetic construct
IRPEMYN

SEQ ID NO: 76335 - protein, 7 aa, synthetic construct
KFSASGA

SEQ ID NO: 76336 - protein, 7 aa, synthetic construct
LHHSVKS

SEQ ID NO: 76337 - protein, 7 aa, synthetic construct
PFHGSGM

SEQ ID NO: 76338 - protein, 7 aa, synthetic construct
TFSANMH

SEQ ID NO: 76339 - protein, 7 aa, synthetic construct
ERNHWPG

SEQ ID NO: 76340 - protein, 7 aa, synthetic construct
AQKKFNE

SEQ ID NO: 76341 - protein, 7 aa, synthetic construct
CAKSNVG

SEQ ID NO: 76342 - protein, 7 aa, synthetic construct
HASYISQ

SEQ ID NO: 76343 - protein, 7 aa, synthetic construct
DHVGPHD

SEQ ID NO: 76344 - protein, 7 aa, synthetic construct
IKDIVSA

SEQ ID NO: 76345 - protein, 7 aa, synthetic construct
VVKMSAI

SEQ ID NO: 76346 - protein, 7 aa, synthetic construct
GVTVLVA

SEQ ID NO: 76347 - protein, 7 aa, synthetic construct
VYDTKMG

SEQ ID NO: 76348 - protein, 7 aa, synthetic construct
GAYSQVG

SEQ ID NO: 76349 - protein, 7 aa, synthetic construct
RDPANLG

SEQ ID NO: 76350 - protein, 7 aa, synthetic construct
PATSSQE

SEQ ID NO: 76351 - protein, 7 aa, synthetic construct
TLAPSSQ

SEQ ID NO: 76352 - protein, 7 aa, synthetic construct
SNQHIVP

SEQ ID NO: 76353 - protein, 7 aa, synthetic construct
SNDKRPL

SEQ ID NO: 76354 - protein, 7 aa, synthetic construct
RASEHQF

SEQ ID NO: 76355 - protein, 7 aa, synthetic construct
MTHNKPG

SEQ ID NO: 76356 - protein, 7 aa, synthetic construct
AAHRLDH

SEQ ID NO: 76357 - protein, 7 aa, synthetic construct
NQQSVQI

SEQ ID NO: 76358 - protein, 7 aa, synthetic construct
FMHVVDG

SEQ ID NO: 76359 - protein, 7 aa, synthetic construct
AFRELMG

SEQ ID NO: 76360 - protein, 7 aa, synthetic construct
ARERVHV

SEQ ID NO: 76361 - protein, 7 aa, synthetic construct
PVYDKNP

SEQ ID NO: 76362 - protein, 7 aa, synthetic construct
TKQVADI

SEQ ID NO: 76363 - protein, 7 aa, synthetic construct
YSPGKEM

SEQ ID NO: 76364 - protein, 7 aa, synthetic construct
KPGSVGN

SEQ ID NO: 76365 - protein, 7 aa, synthetic construct
TSNQGAG

SEQ ID NO: 76366 - protein, 7 aa, synthetic construct
GKPYTTG

SEQ ID NO: 76367 - protein, 7 aa, synthetic construct
QKNQGHE

SEQ ID NO: 76368 - protein, 7 aa, synthetic construct
NMTSAKG

SEQ ID NO: 76369 - protein, 7 aa, synthetic construct
HAHIGEL

SEQ ID NO: 76370 - protein, 7 aa, synthetic construct
ERGAHAA

SEQ ID NO: 76371 - protein, 7 aa, synthetic construct
GAKHVYI

SEQ ID NO: 76372 - protein, 7 aa, synthetic construct
YRGTAYD

SEQ ID NO: 76373 - protein, 7 aa, synthetic construct
MGYHGEM

SEQ ID NO: 76374 - protein, 7 aa, synthetic construct
QMGTVNK

SEQ ID NO: 76375 - protein, 7 aa, synthetic construct
RPQFAPN

SEQ ID NO: 76376 - protein, 7 aa, synthetic construct
HQREHYD

SEQ ID NO: 76377 - protein, 7 aa, synthetic construct
NERELRR

SEQ ID NO: 76378 - protein, 7 aa, synthetic construct
KMTVLEY

SEQ ID NO: 76379 - protein, 7 aa, synthetic construct
KTYNEPM

SEQ ID NO: 76380 - protein, 7 aa, synthetic construct
KFPEGNM

SEQ ID NO: 76381 - protein, 7 aa, synthetic construct
IVSHKFE

SEQ ID NO: 76382 - protein, 7 aa, synthetic construct
KTEAYYG

SEQ ID NO: 76383 - protein, 7 aa, synthetic construct
GKWDPHA

SEQ ID NO: 76384 - protein, 7 aa, synthetic construct
VHVNHEM

SEQ ID NO: 76385 - protein, 7 aa, synthetic construct
PSPHPIM

SEQ ID NO: 76386 - protein, 7 aa, synthetic construct
PPSQRGN

SEQ ID NO: 76387 - protein, 7 aa, synthetic construct
NGKEHTP

SEQ ID NO: 76388 - protein, 7 aa, synthetic construct
HQYPTDM

SEQ ID NO: 76389 - protein, 7 aa, synthetic construct
KVANHFN

SEQ ID NO: 76390 - protein, 7 aa, synthetic construct
NKHAFHG

SEQ ID NO: 76391 - protein, 7 aa, synthetic construct
FGKQETQ

SEQ ID NO: 76392 - protein, 7 aa, synthetic construct
LAHLQNS

SEQ ID NO: 76393 - protein, 7 aa, synthetic construct
LSKEVKT

SEQ ID NO: 76394 - protein, 7 aa, synthetic construct
NGVHMDK

SEQ ID NO: 76395 - protein, 7 aa, synthetic construct
QGPSRNI

SEQ ID NO: 76396 - protein, 7 aa, synthetic construct
ANKGTNA

SEQ ID NO: 76397 - protein, 7 aa, synthetic construct
RPEFHVD

SEQ ID NO: 76398 - protein, 7 aa, synthetic construct
GKQERNS

SEQ ID NO: 76399 - protein, 7 aa, synthetic construct
NAHNFPI

SEQ ID NO: 76400 - protein, 7 aa, synthetic construct
TFPMTEG

SEQ ID NO: 76401 - protein, 7 aa, synthetic construct
MRDTSRN

SEQ ID NO: 76402 - protein, 7 aa, synthetic construct
SADRNFK

SEQ ID NO: 76403 - protein, 7 aa, synthetic construct
NNGKTNP

SEQ ID NO: 76404 - protein, 7 aa, synthetic construct
MSTNRPA

SEQ ID NO: 76405 - protein, 7 aa, synthetic construct
FEKGWTN

SEQ ID NO: 76406 - protein, 7 aa, synthetic construct
TPSERNY

SEQ ID NO: 76407 - protein, 7 aa, synthetic construct
GRGSNYD

SEQ ID NO: 76408 - protein, 7 aa, synthetic construct
SDRPPFR

SEQ ID NO: 76409 - protein, 7 aa, synthetic construct
YGQQDTA

SEQ ID NO: 76410 - protein, 7 aa, synthetic construct
TAPIPNS

SEQ ID NO: 76411 - protein, 7 aa, synthetic construct
FMKDQHD

SEQ ID NO: 76412 - protein, 7 aa, synthetic construct
SHEKHAF

SEQ ID NO: 76413 - protein, 7 aa, synthetic construct
RINYVDG

SEQ ID NO: 76414 - protein, 7 aa, synthetic construct
KHSNFQI

SEQ ID NO: 76415 - protein, 7 aa, synthetic construct
FPQNHDS

SEQ ID NO: 76416 - protein, 7 aa, synthetic construct
NKPQELN

SEQ ID NO: 76417 - protein, 7 aa, synthetic construct
YGVHHND

SEQ ID NO: 76418 - protein, 7 aa, synthetic construct
STSKTGA

SEQ ID NO: 76419 - protein, 7 aa, synthetic construct
IKYDSIG

SEQ ID NO: 76420 - protein, 7 aa, synthetic construct
LHDTLRT

SEQ ID NO: 76421 - protein, 7 aa, synthetic construct
NFQGAKE

SEQ ID NO: 76422 - protein, 7 aa, synthetic construct
KTPQMNS

SEQ ID NO: 76423 - protein, 7 aa, synthetic construct
GNMKLQA

SEQ ID NO: 76424 - protein, 7 aa, synthetic construct
KVNNEAM

SEQ ID NO: 76425 - protein, 7 aa, synthetic construct
PSQASLH

SEQ ID NO: 76426 - protein, 7 aa, synthetic construct
TQMRTAD

SEQ ID NO: 76427 - protein, 7 aa, synthetic construct
SNTATVY

SEQ ID NO: 76428 - protein, 7 aa, synthetic construct
ILNNVGN

SEQ ID NO: 76429 - protein, 7 aa, synthetic construct
SPSKGTS

SEQ ID NO: 76430 - protein, 7 aa, synthetic construct
LPSQMVH

SEQ ID NO: 76431 - protein, 7 aa, synthetic construct
IHISGTM

SEQ ID NO: 76432 - protein, 7 aa, synthetic construct
NNDYQNR

SEQ ID NO: 76433 - protein, 7 aa, synthetic construct
INDKMVN

SEQ ID NO: 76434 - protein, 7 aa, synthetic construct
LDNLRAA

SEQ ID NO: 76435 - protein, 7 aa, synthetic construct
SLGRGQS

SEQ ID NO: 76436 - protein, 7 aa, synthetic construct
HLDMKPG

SEQ ID NO: 76437 - protein, 7 aa, synthetic construct
SDPKRPS

SEQ ID NO: 76438 - protein, 7 aa, synthetic construct
KPSSDSL

SEQ ID NO: 76439 - protein, 7 aa, synthetic construct
DRQKGYV

SEQ ID NO: 76440 - protein, 7 aa, synthetic construct
YKSSNYG

SEQ ID NO: 76441 - protein, 7 aa, synthetic construct
STSIIPK

SEQ ID NO: 76442 - protein, 7 aa, synthetic construct
NKDIFAG

SEQ ID NO: 76443 - protein, 7 aa, synthetic construct
GTVIRSN

SEQ ID NO: 76444 - protein, 7 aa, synthetic construct
SNTGVNP

SEQ ID NO: 76445 - protein, 7 aa, synthetic construct
KWDSAVA

SEQ ID NO: 76446 - protein, 7 aa, synthetic construct
FTGETKH

SEQ ID NO: 76447 - protein, 7 aa, synthetic construct
NLPFEHT

SEQ ID NO: 76448 - protein, 7 aa, synthetic construct
PMKDMVL

SEQ ID NO: 76449 - protein, 7 aa, synthetic construct
ALPPQAR

SEQ ID NO: 76450 - protein, 7 aa, synthetic construct
KQPNPHV

SEQ ID NO: 76451 - protein, 7 aa, synthetic construct
GRDRNGV

SEQ ID NO: 76452 - protein, 7 aa, synthetic construct
GHTQVNR

SEQ ID NO: 76453 - protein, 7 aa, synthetic construct
MRNEAII

SEQ ID NO: 76454 - protein, 7 aa, synthetic construct
MATGRQG

SEQ ID NO: 76455 - protein, 7 aa, synthetic construct
NYAKDKA

SEQ ID NO: 76456 - protein, 7 aa, synthetic construct
VKEITNK

SEQ ID NO: 76457 - protein, 7 aa, synthetic construct
KDREGGH

SEQ ID NO: 76458 - protein, 7 aa, synthetic construct
IKPLGTV

SEQ ID NO: 76459 - protein, 7 aa, synthetic construct
PMKGMYG

SEQ ID NO: 76460 - protein, 7 aa, synthetic construct
TGMHESV

SEQ ID NO: 76461 - protein, 7 aa, synthetic construct
KDGHAMI

SEQ ID NO: 76462 - protein, 7 aa, synthetic construct
RTKNEDN

SEQ ID NO: 76463 - protein, 7 aa, synthetic construct
VEMRMHP

SEQ ID NO: 76464 - protein, 7 aa, synthetic construct
RFVMGET

SEQ ID NO: 76465 - protein, 7 aa, synthetic construct
IKAHALV

SEQ ID NO: 76466 - protein, 7 aa, synthetic construct
WRATSDT

SEQ ID NO: 76467 - protein, 7 aa, synthetic construct
PYKRLDG

SEQ ID NO: 76468 - protein, 7 aa, synthetic construct
KQTVGVA

SEQ ID NO: 76469 - protein, 7 aa, synthetic construct
AREFQEP

SEQ ID NO: 76470 - protein, 7 aa, synthetic construct
FKDMDRM

SEQ ID NO: 76471 - protein, 7 aa, synthetic construct
WAPKQQS

SEQ ID NO: 76472 - protein, 7 aa, synthetic construct
HGFNTDK

SEQ ID NO: 76473 - protein, 7 aa, synthetic construct
SAKTTAG

SEQ ID NO: 76474 - protein, 7 aa, synthetic construct
VKYDHHD

SEQ ID NO: 76475 - protein, 7 aa, synthetic construct
MAPGKFP

SEQ ID NO: 76476 - protein, 7 aa, synthetic construct
QLSRNAF

SEQ ID NO: 76477 - protein, 7 aa, synthetic construct
EQRQNSK

SEQ ID NO: 76478 - protein, 7 aa, synthetic construct
ESHPGKR

SEQ ID NO: 76479 - protein, 7 aa, synthetic construct
SWGITKE

SEQ ID NO: 76480 - protein, 7 aa, synthetic construct
IKQQTKD

SEQ ID NO: 76481 - protein, 7 aa, synthetic construct
KLYNETQ

SEQ ID NO: 76482 - protein, 7 aa, synthetic construct
NNSRTAP

SEQ ID NO: 76483 - protein, 7 aa, synthetic construct
ATHGQRA

SEQ ID NO: 76484 - protein, 7 aa, synthetic construct
TDVTLRP

SEQ ID NO: 76485 - protein, 7 aa, synthetic construct
PPVRPGH

SEQ ID NO: 76486 - protein, 7 aa, synthetic construct
TLTTGKS

SEQ ID NO: 76487 - protein, 7 aa, synthetic construct
TINANSG

SEQ ID NO: 76488 - protein, 7 aa, synthetic construct
SSMADHR

SEQ ID NO: 76489 - protein, 7 aa, synthetic construct
FQAGIMH

SEQ ID NO: 76490 - protein, 7 aa, synthetic construct
YGLSRSV

SEQ ID NO: 76491 - protein, 7 aa, synthetic construct
TKAMSAP

SEQ ID NO: 76492 - protein, 7 aa, synthetic construct
PQPRNGA

SEQ ID NO: 76493 - protein, 7 aa, synthetic construct
VHIKGDA

SEQ ID NO: 76494 - protein, 7 aa, synthetic construct
TLQTQGV

SEQ ID NO: 76495 - protein, 7 aa, synthetic construct
GDPMTKH

SEQ ID NO: 76496 - protein, 7 aa, synthetic construct
MNKTGGG

SEQ ID NO: 76497 - protein, 7 aa, synthetic construct
QFQISGE

SEQ ID NO: 76498 - protein, 7 aa, synthetic construct
KGNDKFF

SEQ ID NO: 76499 - protein, 7 aa, synthetic construct
YIPASVA

SEQ ID NO: 76500 - protein, 7 aa, synthetic construct
ATGTERK

SEQ ID NO: 76501 - protein, 7 aa, synthetic construct
RITATRE

SEQ ID NO: 76502 - protein, 7 aa, synthetic construct
IDKSAMP

SEQ ID NO: 76503 - protein, 7 aa, synthetic construct
SKPPSNA

SEQ ID NO: 76504 - protein, 7 aa, synthetic construct
MLHQKMD

SEQ ID NO: 76505 - protein, 7 aa, synthetic construct
IVFKVGE

SEQ ID NO: 76506 - protein, 7 aa, synthetic construct
HAMGATG

SEQ ID NO: 76507 - protein, 7 aa, synthetic construct
KITGSGT

SEQ ID NO: 76508 - protein, 7 aa, synthetic construct
WSTPSRG

SEQ ID NO: 76509 - protein, 7 aa, synthetic construct
RTQLHEN

SEQ ID NO: 76510 - protein, 7 aa, synthetic construct
TKIERQN

SEQ ID NO: 76511 - protein, 7 aa, synthetic construct
TTQLEKH

SEQ ID NO: 76512 - protein, 7 aa, synthetic construct
VGKSRDE

SEQ ID NO: 76513 - protein, 7 aa, synthetic construct
FGVSQMH

SEQ ID NO: 76514 - protein, 7 aa, synthetic construct
MRHQSNE

SEQ ID NO: 76515 - protein, 7 aa, synthetic construct
ILEKSLI

SEQ ID NO: 76516 - protein, 7 aa, synthetic construct
VETAKRH

SEQ ID NO: 76517 - protein, 7 aa, synthetic construct
PMKGTQT

SEQ ID NO: 76518 - protein, 7 aa, synthetic construct
RNYAGEL

SEQ ID NO: 76519 - protein, 7 aa, synthetic construct
RAVSWPE

SEQ ID NO: 76520 - protein, 7 aa, synthetic construct
PKGGSMV

SEQ ID NO: 76521 - protein, 7 aa, synthetic construct
NEKIGMR

SEQ ID NO: 76522 - protein, 7 aa, synthetic construct
PLPRTHV

SEQ ID NO: 76523 - protein, 7 aa, synthetic construct
GHNGQQA

SEQ ID NO: 76524 - protein, 7 aa, synthetic construct
RTQVGDG

SEQ ID NO: 76525 - protein, 7 aa, synthetic construct
VWPPNTE

SEQ ID NO: 76526 - protein, 7 aa, synthetic construct
PHGNNPP

SEQ ID NO: 76527 - protein, 7 aa, synthetic construct
VVPSKAT

SEQ ID NO: 76528 - protein, 7 aa, synthetic construct
RSPGGDI

SEQ ID NO: 76529 - protein, 7 aa, synthetic construct
FIENRLE

SEQ ID NO: 76530 - protein, 7 aa, synthetic construct
AQNKFLA

SEQ ID NO: 76531 - protein, 7 aa, synthetic construct
SVFTGPG

SEQ ID NO: 76532 - protein, 7 aa, synthetic construct
VNHFNMD

SEQ ID NO: 76533 - protein, 7 aa, synthetic construct
WKHSVGP

SEQ ID NO: 76534 - protein, 7 aa, synthetic construct
NKQVSAA

SEQ ID NO: 76535 - protein, 7 aa, synthetic construct
GTRQYAG

SEQ ID NO: 76536 - protein, 7 aa, synthetic construct
VWKDMGM

SEQ ID NO: 76537 - protein, 7 aa, synthetic construct
FVAHVGT

SEQ ID NO: 76538 - protein, 7 aa, synthetic construct
NFDGRDR

SEQ ID NO: 76539 - protein, 7 aa, synthetic construct
KSHQLES

SEQ ID NO: 76540 - protein, 7 aa, synthetic construct
AIKLKID

SEQ ID NO: 76541 - protein, 7 aa, synthetic construct
LLRVAHT

SEQ ID NO: 76542 - protein, 7 aa, synthetic construct
GPYRVPG

SEQ ID NO: 76543 - protein, 7 aa, synthetic construct
KPAPSWE

SEQ ID NO: 76544 - protein, 7 aa, synthetic construct
VKNATNF

SEQ ID NO: 76545 - protein, 7 aa, synthetic construct
AHPSSHS

SEQ ID NO: 76546 - protein, 7 aa, synthetic construct
NHHNQAK

SEQ ID NO: 76547 - protein, 7 aa, synthetic construct
KTSSNNA

SEQ ID NO: 76548 - protein, 7 aa, synthetic construct
TYYNAAG

SEQ ID NO: 76549 - protein, 7 aa, synthetic construct
PFKETIQ

SEQ ID NO: 76550 - protein, 7 aa, synthetic construct
KQDYAVV

SEQ ID NO: 76551 - protein, 7 aa, synthetic construct
TKQSYNG

SEQ ID NO: 76552 - protein, 7 aa, synthetic construct
KMTGGSP

SEQ ID NO: 76553 - protein, 7 aa, synthetic construct
LPDSHKV

SEQ ID NO: 76554 - protein, 7 aa, synthetic construct
RNSYGVE

SEQ ID NO: 76555 - protein, 7 aa, synthetic construct
LASLKQL

SEQ ID NO: 76556 - protein, 7 aa, synthetic construct
KFDVLIS

SEQ ID NO: 76557 - protein, 7 aa, synthetic construct
TFKLRDM

SEQ ID NO: 76558 - protein, 7 aa, synthetic construct
CKMSNMC

SEQ ID NO: 76559 - protein, 7 aa, synthetic construct
PKSPSSA

SEQ ID NO: 76560 - protein, 7 aa, synthetic construct
IDKQAPG

SEQ ID NO: 76561 - protein, 7 aa, synthetic construct
DFSGQKN

SEQ ID NO: 76562 - protein, 7 aa, synthetic construct
KNEKAVG

SEQ ID NO: 76563 - protein, 7 aa, synthetic construct
GKKEVGV

SEQ ID NO: 76564 - protein, 7 aa, synthetic construct
HLQHDMA

SEQ ID NO: 76565 - protein, 7 aa, synthetic construct
DTLRSKP

SEQ ID NO: 76566 - protein, 7 aa, synthetic construct
KRQQDYD

SEQ ID NO: 76567 - protein, 7 aa, synthetic construct
HKIVHTD

SEQ ID NO: 76568 - protein, 7 aa, synthetic construct
SGQRQLI

SEQ ID NO: 76569 - protein, 7 aa, synthetic construct
LRPSDTP

SEQ ID NO: 76570 - protein, 7 aa, synthetic construct
QQVNKDD

SEQ ID NO: 76571 - protein, 7 aa, synthetic construct
TYAPSHE

SEQ ID NO: 76572 - protein, 7 aa, synthetic construct
TMQLRAG

SEQ ID NO: 76573 - protein, 7 aa, synthetic construct
NRPNSSV

SEQ ID NO: 76574 - protein, 7 aa, synthetic construct
GVGINKT

SEQ ID NO: 76575 - protein, 7 aa, synthetic construct
VKASTNG

SEQ ID NO: 76576 - protein, 7 aa, synthetic construct
RNMNVIS

SEQ ID NO: 76577 - protein, 7 aa, synthetic construct
SVKNNND

SEQ ID NO: 76578 - protein, 7 aa, synthetic construct
DTHGKTM

SEQ ID NO: 76579 - protein, 7 aa, synthetic construct
SHALGAL

SEQ ID NO: 76580 - protein, 7 aa, synthetic construct
MEPMHPQ

SEQ ID NO: 76581 - protein, 7 aa, synthetic construct
GFKTKES

SEQ ID NO: 76582 - protein, 7 aa, synthetic construct
ASVANGG

SEQ ID NO: 76583 - protein, 7 aa, synthetic construct
AHGIYKQ

SEQ ID NO: 76584 - protein, 7 aa, synthetic construct
FYSRDVE

SEQ ID NO: 76585 - protein, 7 aa, synthetic construct
SRMNIAD

SEQ ID NO: 76586 - protein, 7 aa, synthetic construct
PKHATYI

SEQ ID NO: 76587 - protein, 7 aa, synthetic construct
AFQNINA

SEQ ID NO: 76588 - protein, 7 aa, synthetic construct
MVTRGSM

SEQ ID NO: 76589 - protein, 7 aa, synthetic construct
SNGRTPH

SEQ ID NO: 76590 - protein, 7 aa, synthetic construct
MLKIHSN

SEQ ID NO: 76591 - protein, 7 aa, synthetic construct
EDKRFMQ

SEQ ID NO: 76592 - protein, 7 aa, synthetic construct
IENKTAT

SEQ ID NO: 76593 - protein, 7 aa, synthetic construct
MHGQDRR

SEQ ID NO: 76594 - protein, 7 aa, synthetic construct
ESHGFSV

SEQ ID NO: 76595 - protein, 7 aa, synthetic construct
SGPKSQA

SEQ ID NO: 76596 - protein, 7 aa, synthetic construct
ANEMKMS

SEQ ID NO: 76597 - protein, 7 aa, synthetic construct
HMNHEGL

SEQ ID NO: 76598 - protein, 7 aa, synthetic construct
VGKMGGG

SEQ ID NO: 76599 - protein, 7 aa, synthetic construct
KNNTSPA

SEQ ID NO: 76600 - protein, 7 aa, synthetic construct
SAMIVKG

SEQ ID NO: 76601 - protein, 7 aa, synthetic construct
MPKHIIE

SEQ ID NO: 76602 - protein, 7 aa, synthetic construct
IHNTNQG

SEQ ID NO: 76603 - protein, 7 aa, synthetic construct
AGGNKIG

SEQ ID NO: 76604 - protein, 7 aa, synthetic construct
FNKPTSA

SEQ ID NO: 76605 - protein, 7 aa, synthetic construct
QTSNTKP

SEQ ID NO: 76606 - protein, 7 aa, synthetic construct
SMKLVNS

SEQ ID NO: 76607 - protein, 7 aa, synthetic construct
PFNQQNT

SEQ ID NO: 76608 - protein, 7 aa, synthetic construct
AAHPTGF

SEQ ID NO: 76609 - protein, 7 aa, synthetic construct
AGLKFVE

SEQ ID NO: 76610 - protein, 7 aa, synthetic construct
TDTWTRE

SEQ ID NO: 76611 - protein, 7 aa, synthetic construct
SKITQAI

SEQ ID NO: 76612 - protein, 7 aa, synthetic construct
EEHKRDF

SEQ ID NO: 76613 - protein, 7 aa, synthetic construct
VPNSRPE

SEQ ID NO: 76614 - protein, 7 aa, synthetic construct
TPPAPLP

SEQ ID NO: 76615 - protein, 7 aa, synthetic construct
YYQKTRD

SEQ ID NO: 76616 - protein, 7 aa, synthetic construct
IHPNHPQ

SEQ ID NO: 76617 - protein, 7 aa, synthetic construct
RFSNEAS

SEQ ID NO: 76618 - protein, 7 aa, synthetic construct
SRQAVSG

SEQ ID NO: 76619 - protein, 7 aa, synthetic construct
RQSSQQP

SEQ ID NO: 76620 - protein, 7 aa, synthetic construct
LQGQAMG

SEQ ID NO: 76621 - protein, 7 aa, synthetic construct
RTHAAQF

SEQ ID NO: 76622 - protein, 7 aa, synthetic construct
HKRITED

SEQ ID NO: 76623 - protein, 7 aa, synthetic construct
YGRQWQE

SEQ ID NO: 76624 - protein, 7 aa, synthetic construct
NVKHEKY

SEQ ID NO: 76625 - protein, 7 aa, synthetic construct
QNRYRDE

SEQ ID NO: 76626 - protein, 7 aa, synthetic construct
YVKKEPA

SEQ ID NO: 76627 - protein, 7 aa, synthetic construct
EPTGKYP

SEQ ID NO: 76628 - protein, 7 aa, synthetic construct
HNDPIKN

SEQ ID NO: 76629 - protein, 7 aa, synthetic construct
QKNNGAP

SEQ ID NO: 76630 - protein, 7 aa, synthetic construct
TKLINSP

SEQ ID NO: 76631 - protein, 7 aa, synthetic construct
GHSPNNR

SEQ ID NO: 76632 - protein, 7 aa, synthetic construct
DRPSTYA

SEQ ID NO: 76633 - protein, 7 aa, synthetic construct
YDRGLGK

SEQ ID NO: 76634 - protein, 7 aa, synthetic construct
GKPGLGD

SEQ ID NO: 76635 - protein, 7 aa, synthetic construct
GYGPDFR

SEQ ID NO: 76636 - protein, 7 aa, synthetic construct
NKTNLGP

SEQ ID NO: 76637 - protein, 7 aa, synthetic construct
YKQKDWI

SEQ ID NO: 76638 - protein, 7 aa, synthetic construct
NSRNTSP

SEQ ID NO: 76639 - protein, 7 aa, synthetic construct
IKVVENS

SEQ ID NO: 76640 - protein, 7 aa, synthetic construct
KLSGNQA

SEQ ID NO: 76641 - protein, 7 aa, synthetic construct
FENFKSR

SEQ ID NO: 76642 - protein, 7 aa, synthetic construct
TTDVNPG

SEQ ID NO: 76643 - protein, 7 aa, synthetic construct
MAATLLP

SEQ ID NO: 76644 - protein, 7 aa, synthetic construct
KHEIISA

SEQ ID NO: 76645 - protein, 7 aa, synthetic construct
TQLKDKY

SEQ ID NO: 76646 - protein, 7 aa, synthetic construct
EPKLSFR

SEQ ID NO: 76647 - protein, 7 aa, synthetic construct
VIGKINP

SEQ ID NO: 76648 - protein, 7 aa, synthetic construct
LQIKNEG

SEQ ID NO: 76649 - protein, 7 aa, synthetic construct
HPPGQTM

SEQ ID NO: 76650 - protein, 7 aa, synthetic construct
QNQIHHS

SEQ ID NO: 76651 - protein, 7 aa, synthetic construct
VKIAEAS

SEQ ID NO: 76652 - protein, 7 aa, synthetic construct
VPSPSAH

SEQ ID NO: 76653 - protein, 7 aa, synthetic construct
VAVIRKD

SEQ ID NO: 76654 - protein, 7 aa, synthetic construct
SASKQMG

SEQ ID NO: 76655 - protein, 7 aa, synthetic construct
LVMDKSG

SEQ ID NO: 76656 - protein, 7 aa, synthetic construct
RTSAISA

SEQ ID NO: 76657 - protein, 7 aa, synthetic construct
DAEVRHT

SEQ ID NO: 76658 - protein, 7 aa, synthetic construct
MISPEGI

SEQ ID NO: 76659 - protein, 7 aa, synthetic construct
IDRAEQN

SEQ ID NO: 76660 - protein, 7 aa, synthetic construct
GQSQGFH

SEQ ID NO: 76661 - protein, 7 aa, synthetic construct
FPKDMMA

SEQ ID NO: 76662 - protein, 7 aa, synthetic construct
KPENGTQ

SEQ ID NO: 76663 - protein, 7 aa, synthetic construct
VDLLQKG

SEQ ID NO: 76664 - protein, 7 aa, synthetic construct
YLGITRA

SEQ ID NO: 76665 - protein, 7 aa, synthetic construct
GHVHLKP

SEQ ID NO: 76666 - protein, 7 aa, synthetic construct
DQIMPKQ

SEQ ID NO: 76667 - protein, 7 aa, synthetic construct
KWVDSEN

SEQ ID NO: 76668 - protein, 7 aa, synthetic construct
PQHKQQG

SEQ ID NO: 76669 - protein, 7 aa, synthetic construct
SNIQIAT

SEQ ID NO: 76670 - protein, 7 aa, synthetic construct
RDRDHPS

SEQ ID NO: 76671 - protein, 7 aa, synthetic construct
AQLGHNT

SEQ ID NO: 76672 - protein, 7 aa, synthetic construct
TQREGMW

SEQ ID NO: 76673 - protein, 7 aa, synthetic construct
QNRHSVE

SEQ ID NO: 76674 - protein, 7 aa, synthetic construct
TDSKISR

SEQ ID NO: 76675 - protein, 7 aa, synthetic construct
KVFTGTS

SEQ ID NO: 76676 - protein, 7 aa, synthetic construct
YRNVDFT

SEQ ID NO: 76677 - protein, 7 aa, synthetic construct
TVPYRQD

SEQ ID NO: 76678 - protein, 7 aa, synthetic construct
HQKLHAY

SEQ ID NO: 76679 - protein, 7 aa, synthetic construct
TEKPAPF

SEQ ID NO: 76680 - protein, 7 aa, synthetic construct
KDRMIYS

SEQ ID NO: 76681 - protein, 7 aa, synthetic construct
KEVHGMI

SEQ ID NO: 76682 - protein, 7 aa, synthetic construct
LMGKASS

SEQ ID NO: 76683 - protein, 7 aa, synthetic construct
ATTGNSV

SEQ ID NO: 76684 - protein, 7 aa, synthetic construct
GDKQKNI

SEQ ID NO: 76685 - protein, 7 aa, synthetic construct
RNIHVNV

SEQ ID NO: 76686 - protein, 7 aa, synthetic construct
PSSGKQV

SEQ ID NO: 76687 - protein, 7 aa, synthetic construct
IVPREMN

SEQ ID NO: 76688 - protein, 7 aa, synthetic construct
VYPNHGE

SEQ ID NO: 76689 - protein, 7 aa, synthetic construct
NHARHTA

SEQ ID NO: 76690 - protein, 7 aa, synthetic construct
MRINSNI

SEQ ID NO: 76691 - protein, 7 aa, synthetic construct
NWSKEPQ

SEQ ID NO: 76692 - protein, 7 aa, synthetic construct
KDSFMVH

SEQ ID NO: 76693 - protein, 7 aa, synthetic construct
GYSHTQP

SEQ ID NO: 76694 - protein, 7 aa, synthetic construct
TTKTSQS

SEQ ID NO: 76695 - protein, 7 aa, synthetic construct
WKTLVTN

SEQ ID NO: 76696 - protein, 7 aa, synthetic construct
AQVHPGA

SEQ ID NO: 76697 - protein, 7 aa, synthetic construct
FKKDQFY

SEQ ID NO: 76698 - protein, 7 aa, synthetic construct
LIDAMGN

SEQ ID NO: 76699 - protein, 7 aa, synthetic construct
STTHPTP

SEQ ID NO: 76700 - protein, 7 aa, synthetic construct
YRVDHMA

SEQ ID NO: 76701 - protein, 7 aa, synthetic construct
PVKTGSA

SEQ ID NO: 76702 - protein, 7 aa, synthetic construct
SKEPKLN

SEQ ID NO: 76703 - protein, 7 aa, synthetic construct
NVKSTTA

SEQ ID NO: 76704 - protein, 7 aa, synthetic construct
MKTVSTP

SEQ ID NO: 76705 - protein, 7 aa, synthetic construct
IFQKDHH

SEQ ID NO: 76706 - protein, 7 aa, synthetic construct
TTKNVDH

SEQ ID NO: 76707 - protein, 7 aa, synthetic construct
QPTAMVG

SEQ ID NO: 76708 - protein, 7 aa, synthetic construct
RFPERAN

SEQ ID NO: 76709 - protein, 7 aa, synthetic construct
IIIKTTD

SEQ ID NO: 76710 - protein, 7 aa, synthetic construct
AGERGFT

SEQ ID NO: 76711 - protein, 7 aa, synthetic construct
IAPYHQT

SEQ ID NO: 76712 - protein, 7 aa, synthetic construct
TKGMSDF

SEQ ID NO: 76713 - protein, 7 aa, synthetic construct
HRDQYEH

SEQ ID NO: 76714 - protein, 7 aa, synthetic construct
KTSMTIM

SEQ ID NO: 76715 - protein, 7 aa, synthetic construct
MHPSPPY

SEQ ID NO: 76716 - protein, 7 aa, synthetic construct
KPGTATA

SEQ ID NO: 76717 - protein, 7 aa, synthetic construct
NRPAIKD

SEQ ID NO: 76718 - protein, 7 aa, synthetic construct
RGSANPP

SEQ ID NO: 76719 - protein, 7 aa, synthetic construct
WPNDSSR

SEQ ID NO: 76720 - protein, 7 aa, synthetic construct
SAYIGHG

SEQ ID NO: 76721 - protein, 7 aa, synthetic construct
SPTVNTQ

SEQ ID NO: 76722 - protein, 7 aa, synthetic construct
GAKHAAH

SEQ ID NO: 76723 - protein, 7 aa, synthetic construct
KPHAPEW

SEQ ID NO: 76724 - protein, 7 aa, synthetic construct
EKYPKDT

SEQ ID NO: 76725 - protein, 7 aa, synthetic construct
QVSGKNH

SEQ ID NO: 76726 - protein, 7 aa, synthetic construct
MGQHHQV

SEQ ID NO: 76727 - protein, 7 aa, synthetic construct
PLRGPIG

SEQ ID NO: 76728 - protein, 7 aa, synthetic construct
AYTQIEL

SEQ ID NO: 76729 - protein, 7 aa, synthetic construct
NRMEIMG

SEQ ID NO: 76730 - protein, 7 aa, synthetic construct
WSTKTTP

SEQ ID NO: 76731 - protein, 7 aa, synthetic construct
DAQKIKE

SEQ ID NO: 76732 - protein, 7 aa, synthetic construct
DQPFKTK

SEQ ID NO: 76733 - protein, 7 aa, synthetic construct
MTEIRAM

SEQ ID NO: 76734 - protein, 7 aa, synthetic construct
QVTKTIS

SEQ ID NO: 76735 - protein, 7 aa, synthetic construct
PTQKVSD

SEQ ID NO: 76736 - protein, 7 aa, synthetic construct
HQGTAMP

SEQ ID NO: 76737 - protein, 7 aa, synthetic construct
KKENSSS

SEQ ID NO: 76738 - protein, 7 aa, synthetic construct
IQSQSFG

SEQ ID NO: 76739 - protein, 7 aa, synthetic construct
ARPYDQV

SEQ ID NO: 76740 - protein, 7 aa, synthetic construct
GRNGMDM

SEQ ID NO: 76741 - protein, 7 aa, synthetic construct
FYSNGRP

SEQ ID NO: 76742 - protein, 7 aa, synthetic construct
GSKLATL

SEQ ID NO: 76743 - protein, 7 aa, synthetic construct
KKQDVTS

SEQ ID NO: 76744 - protein, 7 aa, synthetic construct
QRNSGNI

SEQ ID NO: 76745 - protein, 7 aa, synthetic construct
YGAYAHA

SEQ ID NO: 76746 - protein, 7 aa, synthetic construct
PLVKTTM

SEQ ID NO: 76747 - protein, 7 aa, synthetic construct
IDHYNMP

SEQ ID NO: 76748 - protein, 7 aa, synthetic construct
RQERQPA

SEQ ID NO: 76749 - protein, 7 aa, synthetic construct
YTKQGQS

SEQ ID NO: 76750 - protein, 7 aa, synthetic construct
PKTSAAN

SEQ ID NO: 76751 - protein, 7 aa, synthetic construct
NGFTMHA

SEQ ID NO: 76752 - protein, 7 aa, synthetic construct
FHSALRD

SEQ ID NO: 76753 - protein, 7 aa, synthetic construct
TEMNHRY

SEQ ID NO: 76754 - protein, 7 aa, synthetic construct
TKYVTDT

SEQ ID NO: 76755 - protein, 7 aa, synthetic construct
DIKKQFI

SEQ ID NO: 76756 - protein, 7 aa, synthetic construct
SKSISSV

SEQ ID NO: 76757 - protein, 7 aa, synthetic construct
LYMGGEG

SEQ ID NO: 76758 - protein, 7 aa, synthetic construct
QHANPTK

SEQ ID NO: 76759 - protein, 7 aa, synthetic construct
GSFLVEK

SEQ ID NO: 76760 - protein, 7 aa, synthetic construct
HKADYNN

SEQ ID NO: 76761 - protein, 7 aa, synthetic construct
KSAQPNG

SEQ ID NO: 76762 - protein, 7 aa, synthetic construct
SQGPALT

SEQ ID NO: 76763 - protein, 7 aa, synthetic construct
TITSPNH

SEQ ID NO: 76764 - protein, 7 aa, synthetic construct
SLGAHTE

SEQ ID NO: 76765 - protein, 7 aa, synthetic construct
KNDVYDG

SEQ ID NO: 76766 - protein, 7 aa, synthetic construct
NKNIDER

SEQ ID NO: 76767 - protein, 7 aa, synthetic construct
RQPHTPQ

SEQ ID NO: 76768 - protein, 7 aa, synthetic construct
PVNNTYP

SEQ ID NO: 76769 - protein, 7 aa, synthetic construct
IMPTYAA

SEQ ID NO: 76770 - protein, 7 aa, synthetic construct
RVATPVL

SEQ ID NO: 76771 - protein, 7 aa, synthetic construct
REQFHSL

SEQ ID NO: 76772 - protein, 7 aa, synthetic construct
MKNTPSW

SEQ ID NO: 76773 - protein, 7 aa, synthetic construct
GKTTSAN

SEQ ID NO: 76774 - protein, 7 aa, synthetic construct
AASKLTT

SEQ ID NO: 76775 - protein, 7 aa, synthetic construct
NMLSGLT

SEQ ID NO: 76776 - protein, 7 aa, synthetic construct
MITYNAG

SEQ ID NO: 76777 - protein, 7 aa, synthetic construct
INHAGHS

SEQ ID NO: 76778 - protein, 7 aa, synthetic construct
IGGHGHS

SEQ ID NO: 76779 - protein, 7 aa, synthetic construct
TLSLTEA

SEQ ID NO: 76780 - protein, 7 aa, synthetic construct
CNKLCTP

SEQ ID NO: 76781 - protein, 7 aa, synthetic construct
TRQANQS

SEQ ID NO: 76782 - protein, 7 aa, synthetic construct
VQDFQHG

SEQ ID NO: 76783 - protein, 7 aa, synthetic construct
LPHKGPF

SEQ ID NO: 76784 - protein, 7 aa, synthetic construct
YELKSQP

SEQ ID NO: 76785 - protein, 7 aa, synthetic construct
RVPQAGV

SEQ ID NO: 76786 - protein, 7 aa, synthetic construct
PTLHPAK

SEQ ID NO: 76787 - protein, 7 aa, synthetic construct
HVSGNVI

SEQ ID NO: 76788 - protein, 7 aa, synthetic construct
NTNNVNK

SEQ ID NO: 76789 - protein, 7 aa, synthetic construct
VRNMPAE

SEQ ID NO: 76790 - protein, 7 aa, synthetic construct
PFKLMDN

SEQ ID NO: 76791 - protein, 7 aa, synthetic construct
REGGALH

SEQ ID NO: 76792 - protein, 7 aa, synthetic construct
NRASESY

SEQ ID NO: 76793 - protein, 7 aa, synthetic construct
MQNHGSP

SEQ ID NO: 76794 - protein, 7 aa, synthetic construct
AVHVQDL

SEQ ID NO: 76795 - protein, 7 aa, synthetic construct
YTSSKSA

SEQ ID NO: 76796 - protein, 7 aa, synthetic construct
NTMVQKQ

SEQ ID NO: 76797 - protein, 7 aa, synthetic construct
PGMKEVK

SEQ ID NO: 76798 - protein, 7 aa, synthetic construct
LNSGRPA

SEQ ID NO: 76799 - protein, 7 aa, synthetic construct
RLTMVPD

SEQ ID NO: 76800 - protein, 7 aa, synthetic construct
IKDMKFG

SEQ ID NO: 76801 - protein, 7 aa, synthetic construct
PRTNGAP

SEQ ID NO: 76802 - protein, 7 aa, synthetic construct
QFTGVGY

SEQ ID NO: 76803 - protein, 7 aa, synthetic construct
RPMEGST

SEQ ID NO: 76804 - protein, 7 aa, synthetic construct
VFTAPEM

SEQ ID NO: 76805 - protein, 7 aa, synthetic construct
STHNIQY

SEQ ID NO: 76806 - protein, 7 aa, synthetic construct
SKPYIHQ

SEQ ID NO: 76807 - protein, 7 aa, synthetic construct
AYSQNHR

SEQ ID NO: 76808 - protein, 7 aa, synthetic construct
KDGMVHV

SEQ ID NO: 76809 - protein, 7 aa, synthetic construct
PFIKSAH

SEQ ID NO: 76810 - protein, 7 aa, synthetic construct
LIPGGIT

SEQ ID NO: 76811 - protein, 7 aa, synthetic construct
TYATIKP

SEQ ID NO: 76812 - protein, 7 aa, synthetic construct
QMRVYAE

SEQ ID NO: 76813 - protein, 7 aa, synthetic construct
EKTTLSF

SEQ ID NO: 76814 - protein, 7 aa, synthetic construct
SPVINVI

SEQ ID NO: 76815 - protein, 7 aa, synthetic construct
AARWAEA

SEQ ID NO: 76816 - protein, 7 aa, synthetic construct
TNMSAPS

SEQ ID NO: 76817 - protein, 7 aa, synthetic construct
AIGIPAH

SEQ ID NO: 76818 - protein, 7 aa, synthetic construct
HFNNVRT

SEQ ID NO: 76819 - protein, 7 aa, synthetic construct
AMSSYPA

SEQ ID NO: 76820 - protein, 7 aa, synthetic construct
VNRIKYD

SEQ ID NO: 76821 - protein, 7 aa, synthetic construct
VKSFPME

SEQ ID NO: 76822 - protein, 7 aa, synthetic construct
SSKHNDP

SEQ ID NO: 76823 - protein, 7 aa, synthetic construct
TMPLLKM

SEQ ID NO: 76824 - protein, 7 aa, synthetic construct
KVHFETH

SEQ ID NO: 76825 - protein, 7 aa, synthetic construct
PTAKESS

SEQ ID NO: 76826 - protein, 7 aa, synthetic construct
FIMNKMG

SEQ ID NO: 76827 - protein, 7 aa, synthetic construct
KSNGVSS

SEQ ID NO: 76828 - protein, 7 aa, synthetic construct
LGGWQPD

SEQ ID NO: 76829 - protein, 7 aa, synthetic construct
WRNQQTH

SEQ ID NO: 76830 - protein, 7 aa, synthetic construct
TMKKVDV

SEQ ID NO: 76831 - protein, 7 aa, synthetic construct
RTKHEPP

SEQ ID NO: 76832 - protein, 7 aa, synthetic construct
GSQHVMD

SEQ ID NO: 76833 - protein, 7 aa, synthetic construct
IKNTSSI

SEQ ID NO: 76834 - protein, 7 aa, synthetic construct
PYGDVVH

SEQ ID NO: 76835 - protein, 7 aa, synthetic construct
HSFQKIV

SEQ ID NO: 76836 - protein, 7 aa, synthetic construct
LGPGAYV

SEQ ID NO: 76837 - protein, 7 aa, synthetic construct
PSIEKIV

SEQ ID NO: 76838 - protein, 7 aa, synthetic construct
RDRGADG

SEQ ID NO: 76839 - protein, 7 aa, synthetic construct
RQIVEIG

SEQ ID NO: 76840 - protein, 7 aa, synthetic construct
KVTGLTS

SEQ ID NO: 76841 - protein, 7 aa, synthetic construct
KPSTGTT

SEQ ID NO: 76842 - protein, 7 aa, synthetic construct
INLKHMH

SEQ ID NO: 76843 - protein, 7 aa, synthetic construct
SGPKAMD

SEQ ID NO: 76844 - protein, 7 aa, synthetic construct
PKDMPQG

SEQ ID NO: 76845 - protein, 7 aa, synthetic construct
VNSRVSA

SEQ ID NO: 76846 - protein, 7 aa, synthetic construct
TMPGLNA

SEQ ID NO: 76847 - protein, 7 aa, synthetic construct
AKMMEGM

SEQ ID NO: 76848 - protein, 7 aa, synthetic construct
SSMFQQG

SEQ ID NO: 76849 - protein, 7 aa, synthetic construct
AAGMRPA

SEQ ID NO: 76850 - protein, 7 aa, synthetic construct
GLLPQMH

SEQ ID NO: 76851 - protein, 7 aa, synthetic construct
AMYPSQA

SEQ ID NO: 76852 - protein, 7 aa, synthetic construct
YIAEKRG

SEQ ID NO: 76853 - protein, 7 aa, synthetic construct
RYPQNLP

SEQ ID NO: 76854 - protein, 7 aa, synthetic construct
GKGSTQY

SEQ ID NO: 76855 - protein, 7 aa, synthetic construct
WRAGITS

SEQ ID NO: 76856 - protein, 7 aa, synthetic construct
EAHTFTG

SEQ ID NO: 76857 - protein, 7 aa, synthetic construct
GPNGDSY

SEQ ID NO: 76858 - protein, 7 aa, synthetic construct
SSGLNTL

SEQ ID NO: 76859 - protein, 7 aa, synthetic construct
PMKYERT

SEQ ID NO: 76860 - protein, 7 aa, synthetic construct
RDTSHNR

SEQ ID NO: 76861 - protein, 7 aa, synthetic construct
NTHRDDW

SEQ ID NO: 76862 - protein, 7 aa, synthetic construct
QNKSGNG

SEQ ID NO: 76863 - protein, 7 aa, synthetic construct
IEDYRGK

SEQ ID NO: 76864 - protein, 7 aa, synthetic construct
EDKYIMS

SEQ ID NO: 76865 - protein, 7 aa, synthetic construct
NSPKQTG

SEQ ID NO: 76866 - protein, 7 aa, synthetic construct
HMGFGNN

SEQ ID NO: 76867 - protein, 7 aa, synthetic construct
EQTHAVR

SEQ ID NO: 76868 - protein, 7 aa, synthetic construct
QQMQSIH

SEQ ID NO: 76869 - protein, 7 aa, synthetic construct
QRHQEVI

SEQ ID NO: 76870 - protein, 7 aa, synthetic construct
HKILNAS

SEQ ID NO: 76871 - protein, 7 aa, synthetic construct
EIKMTHV

SEQ ID NO: 76872 - protein, 7 aa, synthetic construct
LGIRRQD

SEQ ID NO: 76873 - protein, 7 aa, synthetic construct
KMNGINA

SEQ ID NO: 76874 - protein, 7 aa, synthetic construct
YHRTGDV

SEQ ID NO: 76875 - protein, 7 aa, synthetic construct
FNLINKE

SEQ ID NO: 76876 - protein, 7 aa, synthetic construct
QFVGVRT

SEQ ID NO: 76877 - protein, 7 aa, synthetic construct
LKTASVN

SEQ ID NO: 76878 - protein, 7 aa, synthetic construct
GPAPTKI

SEQ ID NO: 76879 - protein, 7 aa, synthetic construct
SPQLRVE

SEQ ID NO: 76880 - protein, 7 aa, synthetic construct
MAKGTGY

SEQ ID NO: 76881 - protein, 7 aa, synthetic construct
TSKQPGV

SEQ ID NO: 76882 - protein, 7 aa, synthetic construct
PRQAMGP

SEQ ID NO: 76883 - protein, 7 aa, synthetic construct
QREHTDG

SEQ ID NO: 76884 - protein, 7 aa, synthetic construct
TYPLKVN

SEQ ID NO: 76885 - protein, 7 aa, synthetic construct
GKTANQP

SEQ ID NO: 76886 - protein, 7 aa, synthetic construct
DSTGHYK

SEQ ID NO: 76887 - protein, 7 aa, synthetic construct
ISAYPNR

SEQ ID NO: 76888 - protein, 7 aa, synthetic construct
GIRLTVP

SEQ ID NO: 76889 - protein, 7 aa, synthetic construct
SPKTTGS

SEQ ID NO: 76890 - protein, 7 aa, synthetic construct
MKQGQYL

SEQ ID NO: 76891 - protein, 7 aa, synthetic construct
KEKGAGS

SEQ ID NO: 76892 - protein, 7 aa, synthetic construct
MNKLHDE

SEQ ID NO: 76893 - protein, 7 aa, synthetic construct
KQGSTTP

SEQ ID NO: 76894 - protein, 7 aa, synthetic construct
SPTMKSP

SEQ ID NO: 76895 - protein, 7 aa, synthetic construct
VKLSMLD

SEQ ID NO: 76896 - protein, 7 aa, synthetic construct
TYRKDMT

SEQ ID NO: 76897 - protein, 7 aa, synthetic construct
GYHGRDQ

SEQ ID NO: 76898 - protein, 7 aa, synthetic construct
VTMVKGH

SEQ ID NO: 76899 - protein, 7 aa, synthetic construct
VAQGKNV

SEQ ID NO: 76900 - protein, 7 aa, synthetic construct
ISAPQQS

SEQ ID NO: 76901 - protein, 7 aa, synthetic construct
AMMKPHG

SEQ ID NO: 76902 - protein, 7 aa, synthetic construct
HKLHHDS

SEQ ID NO: 76903 - protein, 7 aa, synthetic construct
ESGGGVW

SEQ ID NO: 76904 - protein, 7 aa, synthetic construct
MFQKNSG

SEQ ID NO: 76905 - protein, 7 aa, synthetic construct
RPSASSE

SEQ ID NO: 76906 - protein, 7 aa, synthetic construct
DHPMDLT

SEQ ID NO: 76907 - protein, 7 aa, synthetic construct
GKQASYP

SEQ ID NO: 76908 - protein, 7 aa, synthetic construct
PAINAHM

SEQ ID NO: 76909 - protein, 7 aa, synthetic construct
GPYNMSQ

SEQ ID NO: 76910 - protein, 7 aa, synthetic construct
DNMHNTP

SEQ ID NO: 76911 - protein, 7 aa, synthetic construct
IENYNHG

SEQ ID NO: 76912 - protein, 7 aa, synthetic construct
GPIAGHA

SEQ ID NO: 76913 - protein, 7 aa, synthetic construct
NSPPGSE

SEQ ID NO: 76914 - protein, 7 aa, synthetic construct
HQFDTKS

SEQ ID NO: 76915 - protein, 7 aa, synthetic construct
QPNYSIV

SEQ ID NO: 76916 - protein, 7 aa, synthetic construct
TSGTAHK

SEQ ID NO: 76917 - protein, 7 aa, synthetic construct
HQTRYGP

SEQ ID NO: 76918 - protein, 7 aa, synthetic construct
MASVRGM

SEQ ID NO: 76919 - protein, 7 aa, synthetic construct
RSEKVAW

SEQ ID NO: 76920 - protein, 7 aa, synthetic construct
NHQGHGV

SEQ ID NO: 76921 - protein, 7 aa, synthetic construct
MSKHPPP

SEQ ID NO: 76922 - protein, 7 aa, synthetic construct
EKRDKLI

SEQ ID NO: 76923 - protein, 7 aa, synthetic construct
KQPVLPL

SEQ ID NO: 76924 - protein, 7 aa, synthetic construct
KPSASLD

SEQ ID NO: 76925 - protein, 7 aa, synthetic construct
FTPKVMS

SEQ ID NO: 76926 - protein, 7 aa, synthetic construct
QTVKVDV

SEQ ID NO: 76927 - protein, 7 aa, synthetic construct
TSTHTYY

SEQ ID NO: 76928 - protein, 7 aa, synthetic construct
RNIGEVA

SEQ ID NO: 76929 - protein, 7 aa, synthetic construct
STSNKSP

SEQ ID NO: 76930 - protein, 7 aa, synthetic construct
IHLVNHA

SEQ ID NO: 76931 - protein, 7 aa, synthetic construct
ERNTSQA

SEQ ID NO: 76932 - protein, 7 aa, synthetic construct
HQGQSPL

SEQ ID NO: 76933 - protein, 7 aa, synthetic construct
HTNSNIH

SEQ ID NO: 76934 - protein, 7 aa, synthetic construct
AQDRSLT

SEQ ID NO: 76935 - protein, 7 aa, synthetic construct
HTTKGMY

SEQ ID NO: 76936 - protein, 7 aa, synthetic construct
SIGLRQG

SEQ ID NO: 76937 - protein, 7 aa, synthetic construct
HPNVNMV

SEQ ID NO: 76938 - protein, 7 aa, synthetic construct
VAANQSS

SEQ ID NO: 76939 - protein, 7 aa, synthetic construct
WMDAKGN

SEQ ID NO: 76940 - protein, 7 aa, synthetic construct
TRPQQYS

SEQ ID NO: 76941 - protein, 7 aa, synthetic construct
PNNHMRG

SEQ ID NO: 76942 - protein, 7 aa, synthetic construct
DERSKLQ

SEQ ID NO: 76943 - protein, 7 aa, synthetic construct
MIQMNNA

SEQ ID NO: 76944 - protein, 7 aa, synthetic construct
RATHGPE

SEQ ID NO: 76945 - protein, 7 aa, synthetic construct
NANVFIG

SEQ ID NO: 76946 - protein, 7 aa, synthetic construct
SVHVTYD

SEQ ID NO: 76947 - protein, 7 aa, synthetic construct
KNGANAG

SEQ ID NO: 76948 - protein, 7 aa, synthetic construct
VDHRVLQ

SEQ ID NO: 76949 - protein, 7 aa, synthetic construct
RHPIMHP

SEQ ID NO: 76950 - protein, 7 aa, synthetic construct
LATLNKT

SEQ ID NO: 76951 - protein, 7 aa, synthetic construct
RRQEFEQ

SEQ ID NO: 76952 - protein, 7 aa, synthetic construct
KADVRAM

SEQ ID NO: 76953 - protein, 7 aa, synthetic construct
TRQGNQP

SEQ ID NO: 76954 - protein, 7 aa, synthetic construct
MKMMSTN

SEQ ID NO: 76955 - protein, 7 aa, synthetic construct
TKHMIHV

SEQ ID NO: 76956 - protein, 7 aa, synthetic construct
WNHSNDP

SEQ ID NO: 76957 - protein, 7 aa, synthetic construct
QQNAMKG

SEQ ID NO: 76958 - protein, 7 aa, synthetic construct
KAETVHT

SEQ ID NO: 76959 - protein, 7 aa, synthetic construct
QTTYPMG

SEQ ID NO: 76960 - protein, 7 aa, synthetic construct
KNSSPIH

SEQ ID NO: 76961 - protein, 7 aa, synthetic construct
HHTPSMT

SEQ ID NO: 76962 - protein, 7 aa, synthetic construct
RNGHNQG

SEQ ID NO: 76963 - protein, 7 aa, synthetic construct
YIGHMLN

SEQ ID NO: 76964 - protein, 7 aa, synthetic construct
FANRHGT

SEQ ID NO: 76965 - protein, 7 aa, synthetic construct
IRIGEYG

SEQ ID NO: 76966 - protein, 7 aa, synthetic construct
SVVHASR

SEQ ID NO: 76967 - protein, 7 aa, synthetic construct
YKPVTQP

SEQ ID NO: 76968 - protein, 7 aa, synthetic construct
GTTHFKD

SEQ ID NO: 76969 - protein, 7 aa, synthetic construct
FPQDNRS

SEQ ID NO: 76970 - protein, 7 aa, synthetic construct
EHNNVGR

SEQ ID NO: 76971 - protein, 7 aa, synthetic construct
NKEMHKM

SEQ ID NO: 76972 - protein, 7 aa, synthetic construct
DKDRAQR

SEQ ID NO: 76973 - protein, 7 aa, synthetic construct
KYENAPY

SEQ ID NO: 76974 - protein, 7 aa, synthetic construct
TSHAAGF

SEQ ID NO: 76975 - protein, 7 aa, synthetic construct
SLLHHNE

SEQ ID NO: 76976 - protein, 7 aa, synthetic construct
ETRFVNS

SEQ ID NO: 76977 - protein, 7 aa, synthetic construct
MHGSPYG

SEQ ID NO: 76978 - protein, 7 aa, synthetic construct
STNTRIE

SEQ ID NO: 76979 - protein, 7 aa, synthetic construct
VVRYDKE

SEQ ID NO: 76980 - protein, 7 aa, synthetic construct
REYMNQP

SEQ ID NO: 76981 - protein, 7 aa, synthetic construct
NYGGKLS

SEQ ID NO: 76982 - protein, 7 aa, synthetic construct
YVINQDP

SEQ ID NO: 76983 - protein, 7 aa, synthetic construct
VGAPQGD

SEQ ID NO: 76984 - protein, 7 aa, synthetic construct
MSASAFS

SEQ ID NO: 76985 - protein, 7 aa, synthetic construct
TQQANDI

SEQ ID NO: 76986 - protein, 7 aa, synthetic construct
VKNNHSP

SEQ ID NO: 76987 - protein, 7 aa, synthetic construct
FPGKYSV

SEQ ID NO: 76988 - protein, 7 aa, synthetic construct
EKPNGHS

SEQ ID NO: 76989 - protein, 7 aa, synthetic construct
EVGKSSW

SEQ ID NO: 76990 - protein, 7 aa, synthetic construct
LGTKYAA

SEQ ID NO: 76991 - protein, 7 aa, synthetic construct
FSHIETK

SEQ ID NO: 76992 - protein, 7 aa, synthetic construct
GPSLPTT

SEQ ID NO: 76993 - protein, 7 aa, synthetic construct
EYQKPIQ

SEQ ID NO: 76994 - protein, 7 aa, synthetic construct
VRADIKD

SEQ ID NO: 76995 - protein, 7 aa, synthetic construct
QHHSVSA

SEQ ID NO: 76996 - protein, 7 aa, synthetic construct
QKNMQLH

SEQ ID NO: 76997 - protein, 7 aa, synthetic construct
RTMDMTK

SEQ ID NO: 76998 - protein, 7 aa, synthetic construct
VTDSLRA

SEQ ID NO: 76999 - protein, 7 aa, synthetic construct
KINMVAT

SEQ ID NO: 77000 - protein, 7 aa, synthetic construct
VESAKIF

SEQ ID NO: 77001 - protein, 7 aa, synthetic construct
VHSQPRF

SEQ ID NO: 77002 - protein, 7 aa, synthetic construct
NGTYQFA

SEQ ID NO: 77003 - protein, 7 aa, synthetic construct
RKTLDQA

SEQ ID NO: 77004 - protein, 7 aa, synthetic construct
MHANQIR

SEQ ID NO: 77005 - protein, 7 aa, synthetic construct
PEVARQG

SEQ ID NO: 77006 - protein, 7 aa, synthetic construct
HHPGGTF

SEQ ID NO: 77007 - protein, 7 aa, synthetic construct
FKQSVQS

SEQ ID NO: 77008 - protein, 7 aa, synthetic construct
PDRRILA

SEQ ID NO: 77009 - protein, 7 aa, synthetic construct
DTWVKHP

SEQ ID NO: 77010 - protein, 7 aa, synthetic construct
ATQWQNA

SEQ ID NO: 77011 - protein, 7 aa, synthetic construct
LMGDRNG

SEQ ID NO: 77012 - protein, 7 aa, synthetic construct
NKQEQPT

SEQ ID NO: 77013 - protein, 7 aa, synthetic construct
FMKMNDN

SEQ ID NO: 77014 - protein, 7 aa, synthetic construct
HRTNSYA

SEQ ID NO: 77015 - protein, 7 aa, synthetic construct
TKPTAQA

SEQ ID NO: 77016 - protein, 7 aa, synthetic construct
SVPTQQQ

SEQ ID NO: 77017 - protein, 7 aa, synthetic construct
KKHDNVS

SEQ ID NO: 77018 - protein, 7 aa, synthetic construct
RSTEAGV

SEQ ID NO: 77019 - protein, 7 aa, synthetic construct
PDPRQDF

SEQ ID NO: 77020 - protein, 7 aa, synthetic construct
PLPDHQS

SEQ ID NO: 77021 - protein, 7 aa, synthetic construct
RVEASHD

SEQ ID NO: 77022 - protein, 7 aa, synthetic construct
MKKFGMD

SEQ ID NO: 77023 - protein, 7 aa, synthetic construct
QVQNFRP

SEQ ID NO: 77024 - protein, 7 aa, synthetic construct
MAHEKQD

SEQ ID NO: 77025 - protein, 7 aa, synthetic construct
RTEHMKI

SEQ ID NO: 77026 - protein, 7 aa, synthetic construct
DHRTNAK

SEQ ID NO: 77027 - protein, 7 aa, synthetic construct
IGGSMSA

SEQ ID NO: 77028 - protein, 7 aa, synthetic construct
IASYTQE

SEQ ID NO: 77029 - protein, 7 aa, synthetic construct
VVKSWEG

SEQ ID NO: 77030 - protein, 7 aa, synthetic construct
QPSPGNP

SEQ ID NO: 77031 - protein, 7 aa, synthetic construct
RPVMGAQ

SEQ ID NO: 77032 - protein, 7 aa, synthetic construct
WNNVIGH

SEQ ID NO: 77033 - protein, 7 aa, synthetic construct
QQRLELL

SEQ ID NO: 77034 - protein, 7 aa, synthetic construct
IGAVTEK

SEQ ID NO: 77035 - protein, 7 aa, synthetic construct
SWMKQAD

SEQ ID NO: 77036 - protein, 7 aa, synthetic construct
WPDRNQF

SEQ ID NO: 77037 - protein, 7 aa, synthetic construct
LATLNSK

SEQ ID NO: 77038 - protein, 7 aa, synthetic construct
VGQKTVP

SEQ ID NO: 77039 - protein, 7 aa, synthetic construct
NMKTIQD

SEQ ID NO: 77040 - protein, 7 aa, synthetic construct
KAGHTHP

SEQ ID NO: 77041 - protein, 7 aa, synthetic construct
LIMGGRI

SEQ ID NO: 77042 - protein, 7 aa, synthetic construct
KAIEFSN

SEQ ID NO: 77043 - protein, 7 aa, synthetic construct
YQRHLSS

SEQ ID NO: 77044 - protein, 7 aa, synthetic construct
ALNGNML

SEQ ID NO: 77045 - protein, 7 aa, synthetic construct
RTNAANG

SEQ ID NO: 77046 - protein, 7 aa, synthetic construct
DSKWKET

SEQ ID NO: 77047 - protein, 7 aa, synthetic construct
RQSAATS

SEQ ID NO: 77048 - protein, 7 aa, synthetic construct
SAHHNHY

SEQ ID NO: 77049 - protein, 7 aa, synthetic construct
PLSMKFD

SEQ ID NO: 77050 - protein, 7 aa, synthetic construct
HRSQTQP

SEQ ID NO: 77051 - protein, 7 aa, synthetic construct
SNKHEPS

SEQ ID NO: 77052 - protein, 7 aa, synthetic construct
VLAKDAA

SEQ ID NO: 77053 - protein, 7 aa, synthetic construct
KDAIQVN

SEQ ID NO: 77054 - protein, 7 aa, synthetic construct
AKYSGNP

SEQ ID NO: 77055 - protein, 7 aa, synthetic construct
ASKQEAA

SEQ ID NO: 77056 - protein, 7 aa, synthetic construct
DYKMSRI

SEQ ID NO: 77057 - protein, 7 aa, synthetic construct
NKMMATH

SEQ ID NO: 77058 - protein, 7 aa, synthetic construct
MKEIPLT

SEQ ID NO: 77059 - protein, 7 aa, synthetic construct
KTAGHFD

SEQ ID NO: 77060 - protein, 7 aa, synthetic construct
SGYSEKI

SEQ ID NO: 77061 - protein, 7 aa, synthetic construct
IQVQKPL

SEQ ID NO: 77062 - protein, 7 aa, synthetic construct
HKHTNHN

SEQ ID NO: 77063 - protein, 7 aa, synthetic construct
NPFQDPK

SEQ ID NO: 77064 - protein, 7 aa, synthetic construct
GMKGQNQ

SEQ ID NO: 77065 - protein, 7 aa, synthetic construct
MPQITHN

SEQ ID NO: 77066 - protein, 7 aa, synthetic construct
PRNNSTP

SEQ ID NO: 77067 - protein, 7 aa, synthetic construct
STIHMKD

SEQ ID NO: 77068 - protein, 7 aa, synthetic construct
DGPILQG

SEQ ID NO: 77069 - protein, 7 aa, synthetic construct
IGEIMFG

SEQ ID NO: 77070 - protein, 7 aa, synthetic construct
QQYRPPE

SEQ ID NO: 77071 - protein, 7 aa, synthetic construct
FRNNKDD

SEQ ID NO: 77072 - protein, 7 aa, synthetic construct
SAKNMQG

SEQ ID NO: 77073 - protein, 7 aa, synthetic construct
AFSKNNY

SEQ ID NO: 77074 - protein, 7 aa, synthetic construct
IAHAVSY

SEQ ID NO: 77075 - protein, 7 aa, synthetic construct
VNDYHMA

SEQ ID NO: 77076 - protein, 7 aa, synthetic construct
MKTNAPY

SEQ ID NO: 77077 - protein, 7 aa, synthetic construct
RINLNYD

SEQ ID NO: 77078 - protein, 7 aa, synthetic construct
TGQGKMG

SEQ ID NO: 77079 - protein, 7 aa, synthetic construct
QHTTNAH

SEQ ID NO: 77080 - protein, 7 aa, synthetic construct
FMNEMLG

SEQ ID NO: 77081 - protein, 7 aa, synthetic construct
QFSKEKT

SEQ ID NO: 77082 - protein, 7 aa, synthetic construct
DGSGHPF

SEQ ID NO: 77083 - protein, 7 aa, synthetic construct
KSSGISG

SEQ ID NO: 77084 - protein, 7 aa, synthetic construct
GAWGTHA

SEQ ID NO: 77085 - protein, 7 aa, synthetic construct
MMNRSQI

SEQ ID NO: 77086 - protein, 7 aa, synthetic construct
ATHGEFM

SEQ ID NO: 77087 - protein, 7 aa, synthetic construct
AETRQNA

SEQ ID NO: 77088 - protein, 7 aa, synthetic construct
KAAMSKD

SEQ ID NO: 77089 - protein, 7 aa, synthetic construct
FHDEANR

SEQ ID NO: 77090 - protein, 7 aa, synthetic construct
RASTEFM

SEQ ID NO: 77091 - protein, 7 aa, synthetic construct
VGVTLKN

SEQ ID NO: 77092 - protein, 7 aa, synthetic construct
RDPGSIG

SEQ ID NO: 77093 - protein, 7 aa, synthetic construct
DPPWIEM

SEQ ID NO: 77094 - protein, 7 aa, synthetic construct
KNDPREA

SEQ ID NO: 77095 - protein, 7 aa, synthetic construct
IRDKDRY

SEQ ID NO: 77096 - protein, 7 aa, synthetic construct
LQKISSH

SEQ ID NO: 77097 - protein, 7 aa, synthetic construct
ITKTPNA

SEQ ID NO: 77098 - protein, 7 aa, synthetic construct
QMRYGDT

SEQ ID NO: 77099 - protein, 7 aa, synthetic construct
QAREPTI

SEQ ID NO: 77100 - protein, 7 aa, synthetic construct
EDNTRAA

SEQ ID NO: 77101 - protein, 7 aa, synthetic construct
FQKNVQH

SEQ ID NO: 77102 - protein, 7 aa, synthetic construct
IQHTLAK

SEQ ID NO: 77103 - protein, 7 aa, synthetic construct
VGGGKTA

SEQ ID NO: 77104 - protein, 7 aa, synthetic construct
PTADWKK

SEQ ID NO: 77105 - protein, 7 aa, synthetic construct
TKSPQNS

SEQ ID NO: 77106 - protein, 7 aa, synthetic construct
LPNPGQH

SEQ ID NO: 77107 - protein, 7 aa, synthetic construct
GRMMEAI

SEQ ID NO: 77108 - protein, 7 aa, synthetic construct
LLGNRDV

SEQ ID NO: 77109 - protein, 7 aa, synthetic construct
HGPTQGE

SEQ ID NO: 77110 - protein, 7 aa, synthetic construct
NGMKAMG

SEQ ID NO: 77111 - protein, 7 aa, synthetic construct
KNTMYEK

SEQ ID NO: 77112 - protein, 7 aa, synthetic construct
HEFKVKF

SEQ ID NO: 77113 - protein, 7 aa, synthetic construct
QQKGPDM

SEQ ID NO: 77114 - protein, 7 aa, synthetic construct
RENRMPQ

SEQ ID NO: 77115 - protein, 7 aa, synthetic construct
TGIINLG

SEQ ID NO: 77116 - protein, 7 aa, synthetic construct
NQNKPDA

SEQ ID NO: 77117 - protein, 7 aa, synthetic construct
TNLDNKY

SEQ ID NO: 77118 - protein, 7 aa, synthetic construct
KILVMAE

SEQ ID NO: 77119 - protein, 7 aa, synthetic construct
GGMDTRY

SEQ ID NO: 77120 - protein, 7 aa, synthetic construct
TAINHLN

SEQ ID NO: 77121 - protein, 7 aa, synthetic construct
MIRDTAT

SEQ ID NO: 77122 - protein, 7 aa, synthetic construct
GSVGPIY

SEQ ID NO: 77123 - protein, 7 aa, synthetic construct
KIGYADT

SEQ ID NO: 77124 - protein, 7 aa, synthetic construct
QTNRAQP

SEQ ID NO: 77125 - protein, 7 aa, synthetic construct
QMTARMS

SEQ ID NO: 77126 - protein, 7 aa, synthetic construct
VSKSLWE

SEQ ID NO: 77127 - protein, 7 aa, synthetic construct
GYQTQAA

SEQ ID NO: 77128 - protein, 7 aa, synthetic construct
RNALDMP

SEQ ID NO: 77129 - protein, 7 aa, synthetic construct
AYNVAHD

SEQ ID NO: 77130 - protein, 7 aa, synthetic construct
RDAVIGM

SEQ ID NO: 77131 - protein, 7 aa, synthetic construct
PWAGVEV

SEQ ID NO: 77132 - protein, 7 aa, synthetic construct
MTTPERN

SEQ ID NO: 77133 - protein, 7 aa, synthetic construct
MNPVNKI

SEQ ID NO: 77134 - protein, 7 aa, synthetic construct
ITSGANR

SEQ ID NO: 77135 - protein, 7 aa, synthetic construct
SNQMSHT

SEQ ID NO: 77136 - protein, 7 aa, synthetic construct
DYAKNYH

SEQ ID NO: 77137 - protein, 7 aa, synthetic construct
GKPNGIM

SEQ ID NO: 77138 - protein, 7 aa, synthetic construct
RNNAATA

SEQ ID NO: 77139 - protein, 7 aa, synthetic construct
TRQIAGL

SEQ ID NO: 77140 - protein, 7 aa, synthetic construct
RADTNHS

SEQ ID NO: 77141 - protein, 7 aa, synthetic construct
WQTQPEK

SEQ ID NO: 77142 - protein, 7 aa, synthetic construct
KPYTELH

SEQ ID NO: 77143 - protein, 7 aa, synthetic construct
KTMSGTA

SEQ ID NO: 77144 - protein, 7 aa, synthetic construct
NWNDRAT

SEQ ID NO: 77145 - protein, 7 aa, synthetic construct
INDQKYH

SEQ ID NO: 77146 - protein, 7 aa, synthetic construct
DLGHKYA

SEQ ID NO: 77147 - protein, 7 aa, synthetic construct
MVGVHYP

SEQ ID NO: 77148 - protein, 7 aa, synthetic construct
DIPTRQI

SEQ ID NO: 77149 - protein, 7 aa, synthetic construct
PRAPVQP

SEQ ID NO: 77150 - protein, 7 aa, synthetic construct
RFTASTM

SEQ ID NO: 77151 - protein, 7 aa, synthetic construct
ILKQQPE

SEQ ID NO: 77152 - protein, 7 aa, synthetic construct
GMKVQGV

SEQ ID NO: 77153 - protein, 7 aa, synthetic construct
LLNMNKN

SEQ ID NO: 77154 - protein, 7 aa, synthetic construct
KDSAEHP

SEQ ID NO: 77155 - protein, 7 aa, synthetic construct
FYNNTQD

SEQ ID NO: 77156 - protein, 7 aa, synthetic construct
MMGTKTI

SEQ ID NO: 77157 - protein, 7 aa, synthetic construct
DIKQQSQ

SEQ ID NO: 77158 - protein, 7 aa, synthetic construct
LTDQGHN

SEQ ID NO: 77159 - protein, 7 aa, synthetic construct
ANVNAPA

SEQ ID NO: 77160 - protein, 7 aa, synthetic construct
ALISAQK

SEQ ID NO: 77161 - protein, 7 aa, synthetic construct
RTDVTIT

SEQ ID NO: 77162 - protein, 7 aa, synthetic construct
QVNQEKW

SEQ ID NO: 77163 - protein, 7 aa, synthetic construct
NDRAQSI

SEQ ID NO: 77164 - protein, 7 aa, synthetic construct
FNSPMAG

SEQ ID NO: 77165 - protein, 7 aa, synthetic construct
AGFQQMD

SEQ ID NO: 77166 - protein, 7 aa, synthetic construct
MRDQHPH

SEQ ID NO: 77167 - protein, 7 aa, synthetic construct
IMNVSHQ

SEQ ID NO: 77168 - protein, 7 aa, synthetic construct
GQSREAG

SEQ ID NO: 77169 - protein, 7 aa, synthetic construct
ASPRANL

SEQ ID NO: 77170 - protein, 7 aa, synthetic construct
DMAWHEK

SEQ ID NO: 77171 - protein, 7 aa, synthetic construct
YKGSEQQ

SEQ ID NO: 77172 - protein, 7 aa, synthetic construct
PMNTRSL

SEQ ID NO: 77173 - protein, 7 aa, synthetic construct
TNPNWQQ

SEQ ID NO: 77174 - protein, 7 aa, synthetic construct
GFPHLDT

SEQ ID NO: 77175 - protein, 7 aa, synthetic construct
YVNIAGA

SEQ ID NO: 77176 - protein, 7 aa, synthetic construct
TILGMST

SEQ ID NO: 77177 - protein, 7 aa, synthetic construct
VNKIEST

SEQ ID NO: 77178 - protein, 7 aa, synthetic construct
LPMNMNM

SEQ ID NO: 77179 - protein, 7 aa, synthetic construct
MQKGSAA

SEQ ID NO: 77180 - protein, 7 aa, synthetic construct
DQRMEHA

SEQ ID NO: 77181 - protein, 7 aa, synthetic construct
NTNMKYT

SEQ ID NO: 77182 - protein, 7 aa, synthetic construct
VGTGWAA

SEQ ID NO: 77183 - protein, 7 aa, synthetic construct
QINGNVI

SEQ ID NO: 77184 - protein, 7 aa, synthetic construct
GGRNSSE

SEQ ID NO: 77185 - protein, 7 aa, synthetic construct
TNVGIKT

SEQ ID NO: 77186 - protein, 7 aa, synthetic construct
LPGLVTN

SEQ ID NO: 77187 - protein, 7 aa, synthetic construct
VNTQAVP

SEQ ID NO: 77188 - protein, 7 aa, synthetic construct
SRLPEIT

SEQ ID NO: 77189 - protein, 7 aa, synthetic construct
TIEKRMD

SEQ ID NO: 77190 - protein, 7 aa, synthetic construct
QDKGRVD

SEQ ID NO: 77191 - protein, 7 aa, synthetic construct
VEQVQKP

SEQ ID NO: 77192 - protein, 7 aa, synthetic construct
YNPKFLD

SEQ ID NO: 77193 - protein, 7 aa, synthetic construct
KMPGYGM

SEQ ID NO: 77194 - protein, 7 aa, synthetic construct
WPKSVMP

SEQ ID NO: 77195 - protein, 7 aa, synthetic construct
MLNSPNT

SEQ ID NO: 77196 - protein, 7 aa, synthetic construct
LESRSST

SEQ ID NO: 77197 - protein, 7 aa, synthetic construct
AKTEMFA

SEQ ID NO: 77198 - protein, 7 aa, synthetic construct
NGSVQMT

SEQ ID NO: 77199 - protein, 7 aa, synthetic construct
PYTNRNV

SEQ ID NO: 77200 - protein, 7 aa, synthetic construct
PNAQTQS

SEQ ID NO: 77201 - protein, 7 aa, synthetic construct
STANLHI

SEQ ID NO: 77202 - protein, 7 aa, synthetic construct
QHGADAH

SEQ ID NO: 77203 - protein, 7 aa, synthetic construct
YSAFQVE

SEQ ID NO: 77204 - protein, 7 aa, synthetic construct
KNTAQIL

SEQ ID NO: 77205 - protein, 7 aa, synthetic construct
GNNKSTF

SEQ ID NO: 77206 - protein, 7 aa, synthetic construct
GTMAVTV

SEQ ID NO: 77207 - protein, 7 aa, synthetic construct
SHREDVY

SEQ ID NO: 77208 - protein, 7 aa, synthetic construct
AFQPQNK

SEQ ID NO: 77209 - protein, 7 aa, synthetic construct
RKDGTTG

SEQ ID NO: 77210 - protein, 7 aa, synthetic construct
WLPTEPA

SEQ ID NO: 77211 - protein, 7 aa, synthetic construct
ISGAAKE

SEQ ID NO: 77212 - protein, 7 aa, synthetic construct
QKGKLSD

SEQ ID NO: 77213 - protein, 7 aa, synthetic construct
QWPADRS

SEQ ID NO: 77214 - protein, 7 aa, synthetic construct
WKNVSNE

SEQ ID NO: 77215 - protein, 7 aa, synthetic construct
VFSPERV

SEQ ID NO: 77216 - protein, 7 aa, synthetic construct
KAVSMYD

SEQ ID NO: 77217 - protein, 7 aa, synthetic construct
RFANADQ

SEQ ID NO: 77218 - protein, 7 aa, synthetic construct
KWAPKED

SEQ ID NO: 77219 - protein, 7 aa, synthetic construct
RDNTYSS

SEQ ID NO: 77220 - protein, 7 aa, synthetic construct
HMYMTDG

SEQ ID NO: 77221 - protein, 7 aa, synthetic construct
ITKLIPN

SEQ ID NO: 77222 - protein, 7 aa, synthetic construct
TEHRMHL

SEQ ID NO: 77223 - protein, 7 aa, synthetic construct
KQGPHTD

SEQ ID NO: 77224 - protein, 7 aa, synthetic construct
QKKALEH

SEQ ID NO: 77225 - protein, 7 aa, synthetic construct
MERKKVE

SEQ ID NO: 77226 - protein, 7 aa, synthetic construct
HNQANRM

SEQ ID NO: 77227 - protein, 7 aa, synthetic construct
SITTNIK

SEQ ID NO: 77228 - protein, 7 aa, synthetic construct
NVAIASE

SEQ ID NO: 77229 - protein, 7 aa, synthetic construct
KIEGRPL

SEQ ID NO: 77230 - protein, 7 aa, synthetic construct
IMDRRQD

SEQ ID NO: 77231 - protein, 7 aa, synthetic construct
RSSGPDY

SEQ ID NO: 77232 - protein, 7 aa, synthetic construct
ARAPSEN

SEQ ID NO: 77233 - protein, 7 aa, synthetic construct
LGFQMGE

SEQ ID NO: 77234 - protein, 7 aa, synthetic construct
HKKELHA

SEQ ID NO: 77235 - protein, 7 aa, synthetic construct
HPRSVSL

SEQ ID NO: 77236 - protein, 7 aa, synthetic construct
YKNPEVA

SEQ ID NO: 77237 - protein, 7 aa, synthetic construct
KNVASQP

SEQ ID NO: 77238 - protein, 7 aa, synthetic construct
ELTLKNQ

SEQ ID NO: 77239 - protein, 7 aa, synthetic construct
TSRHTEA

SEQ ID NO: 77240 - protein, 7 aa, synthetic construct
SPNRVLQ

SEQ ID NO: 77241 - protein, 7 aa, synthetic construct
MFQGGVL

SEQ ID NO: 77242 - protein, 7 aa, synthetic construct
NSGNIAH

SEQ ID NO: 77243 - protein, 7 aa, synthetic construct
RVVELSG

SEQ ID NO: 77244 - protein, 7 aa, synthetic construct
SVASNVV

SEQ ID NO: 77245 - protein, 7 aa, synthetic construct
NTHAMHN

SEQ ID NO: 77246 - protein, 7 aa, synthetic construct
DPYPKNI

SEQ ID NO: 77247 - protein, 7 aa, synthetic construct
QHKMAQP

SEQ ID NO: 77248 - protein, 7 aa, synthetic construct
KYRESLT

SEQ ID NO: 77249 - protein, 7 aa, synthetic construct
KSGQAMG

SEQ ID NO: 77250 - protein, 7 aa, synthetic construct
YDSGMQR

SEQ ID NO: 77251 - protein, 7 aa, synthetic construct
AQWKLHE

SEQ ID NO: 77252 - protein, 7 aa, synthetic construct
NINSQRF

SEQ ID NO: 77253 - protein, 7 aa, synthetic construct
AYPDKVS

SEQ ID NO: 77254 - protein, 7 aa, synthetic construct
WKDIQMS

SEQ ID NO: 77255 - protein, 7 aa, synthetic construct
RPLAMKD

SEQ ID NO: 77256 - protein, 7 aa, synthetic construct
TMTHNGV

SEQ ID NO: 77257 - protein, 7 aa, synthetic construct
HGKDWDH

SEQ ID NO: 77258 - protein, 7 aa, synthetic construct
DKDVYMH

SEQ ID NO: 77259 - protein, 7 aa, synthetic construct
GVPTVMT

SEQ ID NO: 77260 - protein, 7 aa, synthetic construct
GHKGVNL

SEQ ID NO: 77261 - protein, 7 aa, synthetic construct
IRATIIE

SEQ ID NO: 77262 - protein, 7 aa, synthetic construct
HIVTANE

SEQ ID NO: 77263 - protein, 7 aa, synthetic construct
SNPMNPK

SEQ ID NO: 77264 - protein, 7 aa, synthetic construct
LGPAKGW

SEQ ID NO: 77265 - protein, 7 aa, synthetic construct
HNNNKTW

SEQ ID NO: 77266 - protein, 7 aa, synthetic construct
RNRQEFN

SEQ ID NO: 77267 - protein, 7 aa, synthetic construct
PGMGHSG

SEQ ID NO: 77268 - protein, 7 aa, synthetic construct
HVMFKES

SEQ ID NO: 77269 - protein, 7 aa, synthetic construct
PTKPQVL

SEQ ID NO: 77270 - protein, 7 aa, synthetic construct
VGGASIA

SEQ ID NO: 77271 - protein, 7 aa, synthetic construct
SGQGQVP

SEQ ID NO: 77272 - protein, 7 aa, synthetic construct
NKSVSVM

SEQ ID NO: 77273 - protein, 7 aa, synthetic construct
KNSDKND

SEQ ID NO: 77274 - protein, 7 aa, synthetic construct
HTHGLVP

SEQ ID NO: 77275 - protein, 7 aa, synthetic construct
HKPLENS

SEQ ID NO: 77276 - protein, 7 aa, synthetic construct
KPVNPTS

SEQ ID NO: 77277 - protein, 7 aa, synthetic construct
VSAAINS

SEQ ID NO: 77278 - protein, 7 aa, synthetic construct
SRNQIVT

SEQ ID NO: 77279 - protein, 7 aa, synthetic construct
RKEPTGS

SEQ ID NO: 77280 - protein, 7 aa, synthetic construct
DIPAQHY

SEQ ID NO: 77281 - protein, 7 aa, synthetic construct
KNSQVVG

SEQ ID NO: 77282 - protein, 7 aa, synthetic construct
HGHLFHD

SEQ ID NO: 77283 - protein, 7 aa, synthetic construct
KRHADND

SEQ ID NO: 77284 - protein, 7 aa, synthetic construct
GVGADKL

SEQ ID NO: 77285 - protein, 7 aa, synthetic construct
GPGAAQQ

SEQ ID NO: 77286 - protein, 7 aa, synthetic construct
MNSVHEV

SEQ ID NO: 77287 - protein, 7 aa, synthetic construct
PDKFLVP

SEQ ID NO: 77288 - protein, 7 aa, synthetic construct
ATGNRDI

SEQ ID NO: 77289 - protein, 7 aa, synthetic construct
LSTLNGR

SEQ ID NO: 77290 - protein, 7 aa, synthetic construct
GHSTQQD

SEQ ID NO: 77291 - protein, 7 aa, synthetic construct
STRSNTA

SEQ ID NO: 77292 - protein, 7 aa, synthetic construct
RNTPAMD

SEQ ID NO: 77293 - protein, 7 aa, synthetic construct
FKTEWGK

SEQ ID NO: 77294 - protein, 7 aa, synthetic construct
MHTMSKP

SEQ ID NO: 77295 - protein, 7 aa, synthetic construct
QHTNPMH

SEQ ID NO: 77296 - protein, 7 aa, synthetic construct
NNKPGMG

SEQ ID NO: 77297 - protein, 7 aa, synthetic construct
TMNTNKP

SEQ ID NO: 77298 - protein, 7 aa, synthetic construct
VGNKVQA

SEQ ID NO: 77299 - protein, 7 aa, synthetic construct
STKGMVV

SEQ ID NO: 77300 - protein, 7 aa, synthetic construct
WKGPAYN

SEQ ID NO: 77301 - protein, 7 aa, synthetic construct
SFHTREE

SEQ ID NO: 77302 - protein, 7 aa, synthetic construct
TEKDKPA

SEQ ID NO: 77303 - protein, 7 aa, synthetic construct
NKPSIPH

SEQ ID NO: 77304 - protein, 7 aa, synthetic construct
PQMGHAL

SEQ ID NO: 77305 - protein, 7 aa, synthetic construct
KKEIWRD

SEQ ID NO: 77306 - protein, 7 aa, synthetic construct
QGDRHRF

SEQ ID NO: 77307 - protein, 7 aa, synthetic construct
IRGPDYL

SEQ ID NO: 77308 - protein, 7 aa, synthetic construct
MRQEKDA

SEQ ID NO: 77309 - protein, 7 aa, synthetic construct
QARTAVQ

SEQ ID NO: 77310 - protein, 7 aa, synthetic construct
VHHAAAT

SEQ ID NO: 77311 - protein, 7 aa, synthetic construct
SARANVL

SEQ ID NO: 77312 - protein, 7 aa, synthetic construct
NSKNTNP

SEQ ID NO: 77313 - protein, 7 aa, synthetic construct
NYQGKMH

SEQ ID NO: 77314 - protein, 7 aa, synthetic construct
NLHSTQN

SEQ ID NO: 77315 - protein, 7 aa, synthetic construct
NEYDKAG

SEQ ID NO: 77316 - protein, 7 aa, synthetic construct
LPSHDHG

SEQ ID NO: 77317 - protein, 7 aa, synthetic construct
FHDNITP

SEQ ID NO: 77318 - protein, 7 aa, synthetic construct
VERYNQP

SEQ ID NO: 77319 - protein, 7 aa, synthetic construct
EKKFVSM

SEQ ID NO: 77320 - protein, 7 aa, synthetic construct
SSLHKHG

SEQ ID NO: 77321 - protein, 7 aa, synthetic construct
TAKAHMM

SEQ ID NO: 77322 - protein, 7 aa, synthetic construct
AAKNEGY

SEQ ID NO: 77323 - protein, 7 aa, synthetic construct
VTAKPQM

SEQ ID NO: 77324 - protein, 7 aa, synthetic construct
LQLGGGF

SEQ ID NO: 77325 - protein, 7 aa, synthetic construct
MFAGRDD

SEQ ID NO: 77326 - protein, 7 aa, synthetic construct
NGMSKDT

SEQ ID NO: 77327 - protein, 7 aa, synthetic construct
GRPSHSL

SEQ ID NO: 77328 - protein, 7 aa, synthetic construct
SKNSTSM

SEQ ID NO: 77329 - protein, 7 aa, synthetic construct
QYNARMD

SEQ ID NO: 77330 - protein, 7 aa, synthetic construct
GGLSTTY

SEQ ID NO: 77331 - protein, 7 aa, synthetic construct
DHHTGKM

SEQ ID NO: 77332 - protein, 7 aa, synthetic construct
QVANHQS

SEQ ID NO: 77333 - protein, 7 aa, synthetic construct
FTREPRF

SEQ ID NO: 77334 - protein, 7 aa, synthetic construct
HINNGFS

SEQ ID NO: 77335 - protein, 7 aa, synthetic construct
QKSVINS

SEQ ID NO: 77336 - protein, 7 aa, synthetic construct
RPKEIEL

SEQ ID NO: 77337 - protein, 7 aa, synthetic construct
SQSREEM

SEQ ID NO: 77338 - protein, 7 aa, synthetic construct
NSGMDKI

SEQ ID NO: 77339 - protein, 7 aa, synthetic construct
QEGGTRF

SEQ ID NO: 77340 - protein, 7 aa, synthetic construct
NQYNGDK

SEQ ID NO: 77341 - protein, 7 aa, synthetic construct
DHKNGFA

SEQ ID NO: 77342 - protein, 7 aa, synthetic construct
LAAGFSV

SEQ ID NO: 77343 - protein, 7 aa, synthetic construct
DQKRFTT

SEQ ID NO: 77344 - protein, 7 aa, synthetic construct
AGVKNTP

SEQ ID NO: 77345 - protein, 7 aa, synthetic construct
VIPHQTG

SEQ ID NO: 77346 - protein, 7 aa, synthetic construct
GFIKVTE

SEQ ID NO: 77347 - protein, 7 aa, synthetic construct
PMRMQSD

SEQ ID NO: 77348 - protein, 7 aa, synthetic construct
PETQMIR

SEQ ID NO: 77349 - protein, 7 aa, synthetic construct
QRPVAMI

SEQ ID NO: 77350 - protein, 7 aa, synthetic construct
TNRGTER

SEQ ID NO: 77351 - protein, 7 aa, synthetic construct
GQPGKSA

SEQ ID NO: 77352 - protein, 7 aa, synthetic construct
KTAQTFS

SEQ ID NO: 77353 - protein, 7 aa, synthetic construct
NGNVNKW

SEQ ID NO: 77354 - protein, 7 aa, synthetic construct
LNQGHHG

SEQ ID NO: 77355 - protein, 7 aa, synthetic construct
FDMSNGR

SEQ ID NO: 77356 - protein, 7 aa, synthetic construct
LFTKSMA

SEQ ID NO: 77357 - protein, 7 aa, synthetic construct
YQLQEHP

SEQ ID NO: 77358 - protein, 7 aa, synthetic construct
RDPHAVY

SEQ ID NO: 77359 - protein, 7 aa, synthetic construct
GQSSTYM

SEQ ID NO: 77360 - protein, 7 aa, synthetic construct
RDRNPQL

SEQ ID NO: 77361 - protein, 7 aa, synthetic construct
PRNAGQE

SEQ ID NO: 77362 - protein, 7 aa, synthetic construct
KNNNTGP

SEQ ID NO: 77363 - protein, 7 aa, synthetic construct
KGFNHAE

SEQ ID NO: 77364 - protein, 7 aa, synthetic construct
MSTSAIK

SEQ ID NO: 77365 - protein, 7 aa, synthetic construct
HRSNFTA

SEQ ID NO: 77366 - protein, 7 aa, synthetic construct
LNFPFKE

SEQ ID NO: 77367 - protein, 7 aa, synthetic construct
TTMLPQP

SEQ ID NO: 77368 - protein, 7 aa, synthetic construct
QMEIRVP

SEQ ID NO: 77369 - protein, 7 aa, synthetic construct
QVNRHDI

SEQ ID NO: 77370 - protein, 7 aa, synthetic construct
HDKKVQW

SEQ ID NO: 77371 - protein, 7 aa, synthetic construct
EAKVSMN

SEQ ID NO: 77372 - protein, 7 aa, synthetic construct
QDKQYHF

SEQ ID NO: 77373 - protein, 7 aa, synthetic construct
FKVSNQI

SEQ ID NO: 77374 - protein, 7 aa, synthetic construct
ILPGGKT

SEQ ID NO: 77375 - protein, 7 aa, synthetic construct
GRPVQMM

SEQ ID NO: 77376 - protein, 7 aa, synthetic construct
QTFGSQM

SEQ ID NO: 77377 - protein, 7 aa, synthetic construct
PREQNAT

SEQ ID NO: 77378 - protein, 7 aa, synthetic construct
QKTSNMG

SEQ ID NO: 77379 - protein, 7 aa, synthetic construct
FGGGERN

SEQ ID NO: 77380 - protein, 7 aa, synthetic construct
SNYGKDI

SEQ ID NO: 77381 - protein, 7 aa, synthetic construct
AYENGKH

SEQ ID NO: 77382 - protein, 7 aa, synthetic construct
AHRSGQF

SEQ ID NO: 77383 - protein, 7 aa, synthetic construct
PARNGMI

SEQ ID NO: 77384 - protein, 7 aa, synthetic construct
PYGLPTG

SEQ ID NO: 77385 - protein, 7 aa, synthetic construct
TGMSAVK

SEQ ID NO: 77386 - protein, 7 aa, synthetic construct
WPTKGAE

SEQ ID NO: 77387 - protein, 7 aa, synthetic construct
NMQRSTG

SEQ ID NO: 77388 - protein, 7 aa, synthetic construct
NKEKILN

SEQ ID NO: 77389 - protein, 7 aa, synthetic construct
SFGPHRS

SEQ ID NO: 77390 - protein, 7 aa, synthetic construct
IDRQQLM

SEQ ID NO: 77391 - protein, 7 aa, synthetic construct
DRFSDME

SEQ ID NO: 77392 - protein, 7 aa, synthetic construct
KAQGIVS

SEQ ID NO: 77393 - protein, 7 aa, synthetic construct
SKNNQSP

SEQ ID NO: 77394 - protein, 7 aa, synthetic construct
YGKIPTG

SEQ ID NO: 77395 - protein, 7 aa, synthetic construct
HGGQWMG

SEQ ID NO: 77396 - protein, 7 aa, synthetic construct
KSQPNTG

SEQ ID NO: 77397 - protein, 7 aa, synthetic construct
YDQTIRL

SEQ ID NO: 77398 - protein, 7 aa, synthetic construct
HPPMNQS

SEQ ID NO: 77399 - protein, 7 aa, synthetic construct
TKPQTYG

SEQ ID NO: 77400 - protein, 7 aa, synthetic construct
YQFSSVV

SEQ ID NO: 77401 - protein, 7 aa, synthetic construct
DKQEMRR

SEQ ID NO: 77402 - protein, 7 aa, synthetic construct
EIKGAMK

SEQ ID NO: 77403 - protein, 7 aa, synthetic construct
DHRINDA

SEQ ID NO: 77404 - protein, 7 aa, synthetic construct
GPFQREE

SEQ ID NO: 77405 - protein, 7 aa, synthetic construct
RKINENE

SEQ ID NO: 77406 - protein, 7 aa, synthetic construct
NRTVDDH

SEQ ID NO: 77407 - protein, 7 aa, synthetic construct
SQSTIPS

SEQ ID NO: 77408 - protein, 7 aa, synthetic construct
QHRIEMP

SEQ ID NO: 77409 - protein, 7 aa, synthetic construct
MGANQKT

SEQ ID NO: 77410 - protein, 7 aa, synthetic construct
VQARQPV

SEQ ID NO: 77411 - protein, 7 aa, synthetic construct
VSKFGNN

SEQ ID NO: 77412 - protein, 7 aa, synthetic construct
STKGVAG

SEQ ID NO: 77413 - protein, 7 aa, synthetic construct
DLFNVQH

SEQ ID NO: 77414 - protein, 7 aa, synthetic construct
GSKNQMG

SEQ ID NO: 77415 - protein, 7 aa, synthetic construct
YHKEAWK

SEQ ID NO: 77416 - protein, 7 aa, synthetic construct
QGKDSRP

SEQ ID NO: 77417 - protein, 7 aa, synthetic construct
SKMQPDK

SEQ ID NO: 77418 - protein, 7 aa, synthetic construct
SVPIQKD

SEQ ID NO: 77419 - protein, 7 aa, synthetic construct
YNQHGHL

SEQ ID NO: 77420 - protein, 7 aa, synthetic construct
KLASTSG

SEQ ID NO: 77421 - protein, 7 aa, synthetic construct
WHLKQVD

SEQ ID NO: 77422 - protein, 7 aa, synthetic construct
YSVRRET

SEQ ID NO: 77423 - protein, 7 aa, synthetic construct
YYNQPAK

SEQ ID NO: 77424 - protein, 7 aa, synthetic construct
NKSPSVS

SEQ ID NO: 77425 - protein, 7 aa, synthetic construct
TNPNNMP

SEQ ID NO: 77426 - protein, 7 aa, synthetic construct
HLKYDGL

SEQ ID NO: 77427 - protein, 7 aa, synthetic construct
HRAQSDE

SEQ ID NO: 77428 - protein, 7 aa, synthetic construct
KRDGAGT

SEQ ID NO: 77429 - protein, 7 aa, synthetic construct
QQKHQIL

SEQ ID NO: 77430 - protein, 7 aa, synthetic construct
IRSFKDT

SEQ ID NO: 77431 - protein, 7 aa, synthetic construct
GYHQLAA

SEQ ID NO: 77432 - protein, 7 aa, synthetic construct
EAKTMNY

SEQ ID NO: 77433 - protein, 7 aa, synthetic construct
VGGKQQI

SEQ ID NO: 77434 - protein, 7 aa, synthetic construct
ERTEVIG

SEQ ID NO: 77435 - protein, 7 aa, synthetic construct
STVKKEV

SEQ ID NO: 77436 - protein, 7 aa, synthetic construct
SMSLERT

SEQ ID NO: 77437 - protein, 7 aa, synthetic construct
IENRMRD

SEQ ID NO: 77438 - protein, 7 aa, synthetic construct
KMPQGNI

SEQ ID NO: 77439 - protein, 7 aa, synthetic construct
ASQPHEK

SEQ ID NO: 77440 - protein, 7 aa, synthetic construct
RTADSFL

SEQ ID NO: 77441 - protein, 7 aa, synthetic construct
ISSTMHI

SEQ ID NO: 77442 - protein, 7 aa, synthetic construct
IAEKMPH

SEQ ID NO: 77443 - protein, 7 aa, synthetic construct
RTLEQNK

SEQ ID NO: 77444 - protein, 7 aa, synthetic construct
FNAVMPQ

SEQ ID NO: 77445 - protein, 7 aa, synthetic construct
NKIETAI

SEQ ID NO: 77446 - protein, 7 aa, synthetic construct
GLNNKNT

SEQ ID NO: 77447 - protein, 7 aa, synthetic construct
PPPATSA

SEQ ID NO: 77448 - protein, 7 aa, synthetic construct
TRGIVSI

SEQ ID NO: 77449 - protein, 7 aa, synthetic construct
EANGPVR

SEQ ID NO: 77450 - protein, 7 aa, synthetic construct
KHLVVND

SEQ ID NO: 77451 - protein, 7 aa, synthetic construct
IFLKDFD

SEQ ID NO: 77452 - protein, 7 aa, synthetic construct
VKPVNQA

SEQ ID NO: 77453 - protein, 7 aa, synthetic construct
NKHGMFE

SEQ ID NO: 77454 - protein, 7 aa, synthetic construct
AHGEKHP

SEQ ID NO: 77455 - protein, 7 aa, synthetic construct
WENKAKE

SEQ ID NO: 77456 - protein, 7 aa, synthetic construct
GGWQYKE

SEQ ID NO: 77457 - protein, 7 aa, synthetic construct
VYRTNSI

SEQ ID NO: 77458 - protein, 7 aa, synthetic construct
FGNEIHM

SEQ ID NO: 77459 - protein, 7 aa, synthetic construct
KSRDTSA

SEQ ID NO: 77460 - protein, 7 aa, synthetic construct
QASDKMV

SEQ ID NO: 77461 - protein, 7 aa, synthetic construct
WDPLRHP

SEQ ID NO: 77462 - protein, 7 aa, synthetic construct
EQPKVYR

SEQ ID NO: 77463 - protein, 7 aa, synthetic construct
PFDGKAG

SEQ ID NO: 77464 - protein, 7 aa, synthetic construct
RSSTISV

SEQ ID NO: 77465 - protein, 7 aa, synthetic construct
VAKDFKG

SEQ ID NO: 77466 - protein, 7 aa, synthetic construct
SQPPGKV

SEQ ID NO: 77467 - protein, 7 aa, synthetic construct
KNKLQEV

SEQ ID NO: 77468 - protein, 7 aa, synthetic construct
NTHSVNF

SEQ ID NO: 77469 - protein, 7 aa, synthetic construct
NNNRGDG

SEQ ID NO: 77470 - protein, 7 aa, synthetic construct
SGDAASN

SEQ ID NO: 77471 - protein, 7 aa, synthetic construct
WSNLMSG

SEQ ID NO: 77472 - protein, 7 aa, synthetic construct
FPKSMVE

SEQ ID NO: 77473 - protein, 7 aa, synthetic construct
LLATHQE

SEQ ID NO: 77474 - protein, 7 aa, synthetic construct
AALRLPE

SEQ ID NO: 77475 - protein, 7 aa, synthetic construct
YKHAQAS

SEQ ID NO: 77476 - protein, 7 aa, synthetic construct
FKMGEPK

SEQ ID NO: 77477 - protein, 7 aa, synthetic construct
SKHTIGG

SEQ ID NO: 77478 - protein, 7 aa, synthetic construct
DRRPMIE

SEQ ID NO: 77479 - protein, 7 aa, synthetic construct
LANSGQQ

SEQ ID NO: 77480 - protein, 7 aa, synthetic construct
STLKDTT

SEQ ID NO: 77481 - protein, 7 aa, synthetic construct
VTKDHEY

SEQ ID NO: 77482 - protein, 7 aa, synthetic construct
TMKLVED

SEQ ID NO: 77483 - protein, 7 aa, synthetic construct
DKSSLTK

SEQ ID NO: 77484 - protein, 7 aa, synthetic construct
RNMKLED

SEQ ID NO: 77485 - protein, 7 aa, synthetic construct
LADKTYS

SEQ ID NO: 77486 - protein, 7 aa, synthetic construct
GGGVRHV

SEQ ID NO: 77487 - protein, 7 aa, synthetic construct
MPKLELN

SEQ ID NO: 77488 - protein, 7 aa, synthetic construct
DQYVKTF

SEQ ID NO: 77489 - protein, 7 aa, synthetic construct
AMINLGS

SEQ ID NO: 77490 - protein, 7 aa, synthetic construct
PSGTRQL

SEQ ID NO: 77491 - protein, 7 aa, synthetic construct
SLNKQAV

SEQ ID NO: 77492 - protein, 7 aa, synthetic construct
KKNGMEE

SEQ ID NO: 77493 - protein, 7 aa, synthetic construct
LTASNAA

SEQ ID NO: 77494 - protein, 7 aa, synthetic construct
QTTARES

SEQ ID NO: 77495 - protein, 7 aa, synthetic construct
HRMDTQV

SEQ ID NO: 77496 - protein, 7 aa, synthetic construct
GKPSGGA

SEQ ID NO: 77497 - protein, 7 aa, synthetic construct
YGLVDNK

SEQ ID NO: 77498 - protein, 7 aa, synthetic construct
RPMHTVH

SEQ ID NO: 77499 - protein, 7 aa, synthetic construct
WGGMKAM

SEQ ID NO: 77500 - protein, 7 aa, synthetic construct
ERSIKAY

SEQ ID NO: 77501 - protein, 7 aa, synthetic construct
KSMQSEE

SEQ ID NO: 77502 - protein, 7 aa, synthetic construct
SSDTIRG

SEQ ID NO: 77503 - protein, 7 aa, synthetic construct
PGERWGV

SEQ ID NO: 77504 - protein, 7 aa, synthetic construct
HEGKPKP

SEQ ID NO: 77505 - protein, 7 aa, synthetic construct
WSAGVNR

SEQ ID NO: 77506 - protein, 7 aa, synthetic construct
FERGHPI

SEQ ID NO: 77507 - protein, 7 aa, synthetic construct
TNSATER

SEQ ID NO: 77508 - protein, 7 aa, synthetic construct
DAISHHV

SEQ ID NO: 77509 - protein, 7 aa, synthetic construct
AGTQKFQ

SEQ ID NO: 77510 - protein, 7 aa, synthetic construct
MVLNISG

SEQ ID NO: 77511 - protein, 7 aa, synthetic construct
NSVNILP

SEQ ID NO: 77512 - protein, 7 aa, synthetic construct
NSGKPQV

SEQ ID NO: 77513 - protein, 7 aa, synthetic construct
LVPLTQG

SEQ ID NO: 77514 - protein, 7 aa, synthetic construct
VSQSHLG

SEQ ID NO: 77515 - protein, 7 aa, synthetic construct
KANPIID

SEQ ID NO: 77516 - protein, 7 aa, synthetic construct
KPNHNER

SEQ ID NO: 77517 - protein, 7 aa, synthetic construct
DGVKAAS

SEQ ID NO: 77518 - protein, 7 aa, synthetic construct
FYQDRSS

SEQ ID NO: 77519 - protein, 7 aa, synthetic construct
DAMALNG

SEQ ID NO: 77520 - protein, 7 aa, synthetic construct
IKAVEHQ

SEQ ID NO: 77521 - protein, 7 aa, synthetic construct
GNLQNNH

SEQ ID NO: 77522 - protein, 7 aa, synthetic construct
PIKDNSN

SEQ ID NO: 77523 - protein, 7 aa, synthetic construct
AERKPNE

SEQ ID NO: 77524 - protein, 7 aa, synthetic construct
KNSNTNS

SEQ ID NO: 77525 - protein, 7 aa, synthetic construct
VAQNKVI

SEQ ID NO: 77526 - protein, 7 aa, synthetic construct
KRDDQAN

SEQ ID NO: 77527 - protein, 7 aa, synthetic construct
ATGLKAW

SEQ ID NO: 77528 - protein, 7 aa, synthetic construct
HSEFLRE

SEQ ID NO: 77529 - protein, 7 aa, synthetic construct
WRSVMME

SEQ ID NO: 77530 - protein, 7 aa, synthetic construct
ASFVLDK

SEQ ID NO: 77531 - protein, 7 aa, synthetic construct
TAGSNNS

SEQ ID NO: 77532 - protein, 7 aa, synthetic construct
VYNTKPA

SEQ ID NO: 77533 - protein, 7 aa, synthetic construct
GQATRIM

SEQ ID NO: 77534 - protein, 7 aa, synthetic construct
INSGQSF

SEQ ID NO: 77535 - protein, 7 aa, synthetic construct
GRNGSYS

SEQ ID NO: 77536 - protein, 7 aa, synthetic construct
YKTRPPE

SEQ ID NO: 77537 - protein, 7 aa, synthetic construct
TKPQFKE

SEQ ID NO: 77538 - protein, 7 aa, synthetic construct
SVHFHGS

SEQ ID NO: 77539 - protein, 7 aa, synthetic construct
KYPGATA

SEQ ID NO: 77540 - protein, 7 aa, synthetic construct
IYQNEAR

SEQ ID NO: 77541 - protein, 7 aa, synthetic construct
IHTMQKV

SEQ ID NO: 77542 - protein, 7 aa, synthetic construct
YATYSRG

SEQ ID NO: 77543 - protein, 7 aa, synthetic construct
MERHINQ

SEQ ID NO: 77544 - protein, 7 aa, synthetic construct
RNKFSPD

SEQ ID NO: 77545 - protein, 7 aa, synthetic construct
WSKMLDG

SEQ ID NO: 77546 - protein, 7 aa, synthetic construct
KFNTPQM

SEQ ID NO: 77547 - protein, 7 aa, synthetic construct
FFAKTTS

SEQ ID NO: 77548 - protein, 7 aa, synthetic construct
QVQKAGF

SEQ ID NO: 77549 - protein, 7 aa, synthetic construct
LGRVTAY

SEQ ID NO: 77550 - protein, 7 aa, synthetic construct
AFSGIPT

SEQ ID NO: 77551 - protein, 7 aa, synthetic construct
GRHDGHV

SEQ ID NO: 77552 - protein, 7 aa, synthetic construct
MKVPESV

SEQ ID NO: 77553 - protein, 7 aa, synthetic construct
GQSKNET

SEQ ID NO: 77554 - protein, 7 aa, synthetic construct
MGMPIPP

SEQ ID NO: 77555 - protein, 7 aa, synthetic construct
MKIPQSL

SEQ ID NO: 77556 - protein, 7 aa, synthetic construct
HGNNAEF

SEQ ID NO: 77557 - protein, 7 aa, synthetic construct
RSVNWSD

SEQ ID NO: 77558 - protein, 7 aa, synthetic construct
SNAYTQP

SEQ ID NO: 77559 - protein, 7 aa, synthetic construct
DKEGWRA

SEQ ID NO: 77560 - protein, 7 aa, synthetic construct
SFAPSRE

SEQ ID NO: 77561 - protein, 7 aa, synthetic construct
QTDARQV

SEQ ID NO: 77562 - protein, 7 aa, synthetic construct
RWQDEAT

SEQ ID NO: 77563 - protein, 7 aa, synthetic construct
ALLRVDP

SEQ ID NO: 77564 - protein, 7 aa, synthetic construct
MQKQAGF

SEQ ID NO: 77565 - protein, 7 aa, synthetic construct
TPRNNPQ

SEQ ID NO: 77566 - protein, 7 aa, synthetic construct
PKSISDH

SEQ ID NO: 77567 - protein, 7 aa, synthetic construct
NMNKAMP

SEQ ID NO: 77568 - protein, 7 aa, synthetic construct
IHEPSTL

SEQ ID NO: 77569 - protein, 7 aa, synthetic construct
LTSETML

SEQ ID NO: 77570 - protein, 7 aa, synthetic construct
SINSFQG

SEQ ID NO: 77571 - protein, 7 aa, synthetic construct
SSTVWQE

SEQ ID NO: 77572 - protein, 7 aa, synthetic construct
HTTAHKE

SEQ ID NO: 77573 - protein, 7 aa, synthetic construct
MLGYVDG

SEQ ID NO: 77574 - protein, 7 aa, synthetic construct
HGHSAEG

SEQ ID NO: 77575 - protein, 7 aa, synthetic construct
KGQILAA

SEQ ID NO: 77576 - protein, 7 aa, synthetic construct
KENPSRV

SEQ ID NO: 77577 - protein, 7 aa, synthetic construct
LWDMKNA

SEQ ID NO: 77578 - protein, 7 aa, synthetic construct
LSKMHPL

SEQ ID NO: 77579 - protein, 7 aa, synthetic construct
MHAGIQN

SEQ ID NO: 77580 - protein, 7 aa, synthetic construct
VNKSVTM

SEQ ID NO: 77581 - protein, 7 aa, synthetic construct
KDKTSTP

SEQ ID NO: 77582 - protein, 7 aa, synthetic construct
AHMSQSE

SEQ ID NO: 77583 - protein, 7 aa, synthetic construct
GTRTPMV

SEQ ID NO: 77584 - protein, 7 aa, synthetic construct
EKDRQGY

SEQ ID NO: 77585 - protein, 7 aa, synthetic construct
FRYPTNE

SEQ ID NO: 77586 - protein, 7 aa, synthetic construct
SKLAEQG

SEQ ID NO: 77587 - protein, 7 aa, synthetic construct
QSNQGAG

SEQ ID NO: 77588 - protein, 7 aa, synthetic construct
ASSVQIR

SEQ ID NO: 77589 - protein, 7 aa, synthetic construct
QSAKGAD

SEQ ID NO: 77590 - protein, 7 aa, synthetic construct
GSHKNPM

SEQ ID NO: 77591 - protein, 7 aa, synthetic construct
FKDDPMF

SEQ ID NO: 77592 - protein, 7 aa, synthetic construct
QMRREIP

SEQ ID NO: 77593 - protein, 7 aa, synthetic construct
GEVLKHR

SEQ ID NO: 77594 - protein, 7 aa, synthetic construct
MAHQVGE

SEQ ID NO: 77595 - protein, 7 aa, synthetic construct
PVGRTLM

SEQ ID NO: 77596 - protein, 7 aa, synthetic construct
FHPNRAA

SEQ ID NO: 77597 - protein, 7 aa, synthetic construct
KKFEQII

SEQ ID NO: 77598 - protein, 7 aa, synthetic construct
IFAIDSS

SEQ ID NO: 77599 - protein, 7 aa, synthetic construct
KSPTISA

SEQ ID NO: 77600 - protein, 7 aa, synthetic construct
NAIPGHP

SEQ ID NO: 77601 - protein, 7 aa, synthetic construct
VDAGQRT

SEQ ID NO: 77602 - protein, 7 aa, synthetic construct
YSHRDDR

SEQ ID NO: 77603 - protein, 7 aa, synthetic construct
IEGIKKD

SEQ ID NO: 77604 - protein, 7 aa, synthetic construct
NERLTNW

SEQ ID NO: 77605 - protein, 7 aa, synthetic construct
EWKKDNS

SEQ ID NO: 77606 - protein, 7 aa, synthetic construct
SKTNPQA

SEQ ID NO: 77607 - protein, 7 aa, synthetic construct
HHAIPKG

SEQ ID NO: 77608 - protein, 7 aa, synthetic construct
TKTNNMA

SEQ ID NO: 77609 - protein, 7 aa, synthetic construct
NRTDHDA

SEQ ID NO: 77610 - protein, 7 aa, synthetic construct
SDINMRH

SEQ ID NO: 77611 - protein, 7 aa, synthetic construct
RVMGQAV

SEQ ID NO: 77612 - protein, 7 aa, synthetic construct
DEKHSLK

SEQ ID NO: 77613 - protein, 7 aa, synthetic construct
ISIGVHQ

SEQ ID NO: 77614 - protein, 7 aa, synthetic construct
VKILAHN

SEQ ID NO: 77615 - protein, 7 aa, synthetic construct
LHQARST

SEQ ID NO: 77616 - protein, 7 aa, synthetic construct
PLNHASA

SEQ ID NO: 77617 - protein, 7 aa, synthetic construct
QRPNSDD

SEQ ID NO: 77618 - protein, 7 aa, synthetic construct
TKLGPQH

SEQ ID NO: 77619 - protein, 7 aa, synthetic construct
ARTYPTQ

SEQ ID NO: 77620 - protein, 7 aa, synthetic construct
QKQNDAY

SEQ ID NO: 77621 - protein, 7 aa, synthetic construct
QHTAYHE

SEQ ID NO: 77622 - protein, 7 aa, synthetic construct
NERKMDP

SEQ ID NO: 77623 - protein, 7 aa, synthetic construct
WDKYNVA

SEQ ID NO: 77624 - protein, 7 aa, synthetic construct
YMHVLRD

SEQ ID NO: 77625 - protein, 7 aa, synthetic construct
QRGSAGI

SEQ ID NO: 77626 - protein, 7 aa, synthetic construct
TYSKVMV

SEQ ID NO: 77627 - protein, 7 aa, synthetic construct
PDRSIGG

SEQ ID NO: 77628 - protein, 7 aa, synthetic construct
GMTSIAI

SEQ ID NO: 77629 - protein, 7 aa, synthetic construct
GAFVGTP

SEQ ID NO: 77630 - protein, 7 aa, synthetic construct
NQYHNQL

SEQ ID NO: 77631 - protein, 7 aa, synthetic construct
KNPQGEI

SEQ ID NO: 77632 - protein, 7 aa, synthetic construct
HDGAVRV

SEQ ID NO: 77633 - protein, 7 aa, synthetic construct
MHPPIHA

SEQ ID NO: 77634 - protein, 7 aa, synthetic construct
LFKSQGV

SEQ ID NO: 77635 - protein, 7 aa, synthetic construct
SREARTP

SEQ ID NO: 77636 - protein, 7 aa, synthetic construct
TSIKYAV

SEQ ID NO: 77637 - protein, 7 aa, synthetic construct
NKPAGSM

SEQ ID NO: 77638 - protein, 7 aa, synthetic construct
ELRKNME

SEQ ID NO: 77639 - protein, 7 aa, synthetic construct
DQQRSTH

SEQ ID NO: 77640 - protein, 7 aa, synthetic construct
ILNSTYS

SEQ ID NO: 77641 - protein, 7 aa, synthetic construct
FAMSKPG

SEQ ID NO: 77642 - protein, 7 aa, synthetic construct
VTDHHIA

SEQ ID NO: 77643 - protein, 7 aa, synthetic construct
KDRSGMA

SEQ ID NO: 77644 - protein, 7 aa, synthetic construct
AISQNMI

SEQ ID NO: 77645 - protein, 7 aa, synthetic construct
MPPVHMA

SEQ ID NO: 77646 - protein, 7 aa, synthetic construct
NSNQARV

SEQ ID NO: 77647 - protein, 7 aa, synthetic construct
NKSASGL

SEQ ID NO: 77648 - protein, 7 aa, synthetic construct
ASNVGSY

SEQ ID NO: 77649 - protein, 7 aa, synthetic construct
RITKEEN

SEQ ID NO: 77650 - protein, 7 aa, synthetic construct
NGTRQGA

SEQ ID NO: 77651 - protein, 7 aa, synthetic construct
RQGNTTS

SEQ ID NO: 77652 - protein, 7 aa, synthetic construct
MASGRTG

SEQ ID NO: 77653 - protein, 7 aa, synthetic construct
DDRRIPT

SEQ ID NO: 77654 - protein, 7 aa, synthetic construct
MYASVGA

SEQ ID NO: 77655 - protein, 7 aa, synthetic construct
ANPTLKT

SEQ ID NO: 77656 - protein, 7 aa, synthetic construct
FDDRFQG

SEQ ID NO: 77657 - protein, 7 aa, synthetic construct
RMGTTGA

SEQ ID NO: 77658 - protein, 7 aa, synthetic construct
SPKSGIV

SEQ ID NO: 77659 - protein, 7 aa, synthetic construct
NQQRMTG

SEQ ID NO: 77660 - protein, 7 aa, synthetic construct
TAKMGRD

SEQ ID NO: 77661 - protein, 7 aa, synthetic construct
HIPRQNE

SEQ ID NO: 77662 - protein, 7 aa, synthetic construct
KYMEHAD

SEQ ID NO: 77663 - protein, 7 aa, synthetic construct
LGHPTGR

SEQ ID NO: 77664 - protein, 7 aa, synthetic construct
QSRSLAV

SEQ ID NO: 77665 - protein, 7 aa, synthetic construct
NIGLDKF

SEQ ID NO: 77666 - protein, 7 aa, synthetic construct
KTTQTQV

SEQ ID NO: 77667 - protein, 7 aa, synthetic construct
HNAPGTQ

SEQ ID NO: 77668 - protein, 7 aa, synthetic construct
EKEGSPR

SEQ ID NO: 77669 - protein, 7 aa, synthetic construct
SNYKEFP

SEQ ID NO: 77670 - protein, 7 aa, synthetic construct
QYTKAQY

SEQ ID NO: 77671 - protein, 7 aa, synthetic construct
SPGRSLY

SEQ ID NO: 77672 - protein, 7 aa, synthetic construct
MRANASG

SEQ ID NO: 77673 - protein, 7 aa, synthetic construct
SMEFRDS

SEQ ID NO: 77674 - protein, 7 aa, synthetic construct
TNRSTNV

SEQ ID NO: 77675 - protein, 7 aa, synthetic construct
ATKQGWE

SEQ ID NO: 77676 - protein, 7 aa, synthetic construct
NNQSTMA

SEQ ID NO: 77677 - protein, 7 aa, synthetic construct
NPTKNGP

SEQ ID NO: 77678 - protein, 7 aa, synthetic construct
AKYHMPE

SEQ ID NO: 77679 - protein, 7 aa, synthetic construct
VISKKPD

SEQ ID NO: 77680 - protein, 7 aa, synthetic construct
QIASNVA

SEQ ID NO: 77681 - protein, 7 aa, synthetic construct
MDMVRSS

SEQ ID NO: 77682 - protein, 7 aa, synthetic construct
WSHMVGS

SEQ ID NO: 77683 - protein, 7 aa, synthetic construct
DRGQNHY

SEQ ID NO: 77684 - protein, 7 aa, synthetic construct
WKTFVPA

SEQ ID NO: 77685 - protein, 7 aa, synthetic construct
GYHSAPS

SEQ ID NO: 77686 - protein, 7 aa, synthetic construct
KPASGSP

SEQ ID NO: 77687 - protein, 7 aa, synthetic construct
PVKNAAG

SEQ ID NO: 77688 - protein, 7 aa, synthetic construct
WRRDVPV

SEQ ID NO: 77689 - protein, 7 aa, synthetic construct
YSHGQRA

SEQ ID NO: 77690 - protein, 7 aa, synthetic construct
LGLSGAL

SEQ ID NO: 77691 - protein, 7 aa, synthetic construct
GMHDKKA

SEQ ID NO: 77692 - protein, 7 aa, synthetic construct
NIGSQKG

SEQ ID NO: 77693 - protein, 7 aa, synthetic construct
TTSSTKL

SEQ ID NO: 77694 - protein, 7 aa, synthetic construct
YGVAPRA

SEQ ID NO: 77695 - protein, 7 aa, synthetic construct
FKVNSKD

SEQ ID NO: 77696 - protein, 7 aa, synthetic construct
SSQSHRG

SEQ ID NO: 77697 - protein, 7 aa, synthetic construct
EHLRPVH

SEQ ID NO: 77698 - protein, 7 aa, synthetic construct
QNPERFD

SEQ ID NO: 77699 - protein, 7 aa, synthetic construct
VGGQMKG

SEQ ID NO: 77700 - protein, 7 aa, synthetic construct
FDHNSKN

SEQ ID NO: 77701 - protein, 7 aa, synthetic construct
GKWSEIT

SEQ ID NO: 77702 - protein, 7 aa, synthetic construct
EEGTRRQ

SEQ ID NO: 77703 - protein, 7 aa, synthetic construct
PRTKEAY

SEQ ID NO: 77704 - protein, 7 aa, synthetic construct
VYSRISD

SEQ ID NO: 77705 - protein, 7 aa, synthetic construct
ENSHKGH

SEQ ID NO: 77706 - protein, 7 aa, synthetic construct
QSGKAMA

SEQ ID NO: 77707 - protein, 7 aa, synthetic construct
NHRVTKD

SEQ ID NO: 77708 - protein, 7 aa, synthetic construct
DWANKHA

SEQ ID NO: 77709 - protein, 7 aa, synthetic construct
GSYLPQN

SEQ ID NO: 77710 - protein, 7 aa, synthetic construct
KIGSGPY

SEQ ID NO: 77711 - protein, 7 aa, synthetic construct
AYTMTGG

SEQ ID NO: 77712 - protein, 7 aa, synthetic construct
GGRPDQA

SEQ ID NO: 77713 - protein, 7 aa, synthetic construct
RLQQMPV

SEQ ID NO: 77714 - protein, 7 aa, synthetic construct
MGHKVDR

SEQ ID NO: 77715 - protein, 7 aa, synthetic construct
TSSKGFG

SEQ ID NO: 77716 - protein, 7 aa, synthetic construct
QGKNMFI

SEQ ID NO: 77717 - protein, 7 aa, synthetic construct
LERLKFS

SEQ ID NO: 77718 - protein, 7 aa, synthetic construct
STQQYKA

SEQ ID NO: 77719 - protein, 7 aa, synthetic construct
PKAPNNG

SEQ ID NO: 77720 - protein, 7 aa, synthetic construct
RSREQSS

SEQ ID NO: 77721 - protein, 7 aa, synthetic construct
RDDYRSP

SEQ ID NO: 77722 - protein, 7 aa, synthetic construct
THTKPSY

SEQ ID NO: 77723 - protein, 7 aa, synthetic construct
NGTVTMS

SEQ ID NO: 77724 - protein, 7 aa, synthetic construct
LFEGHHP

SEQ ID NO: 77725 - protein, 7 aa, synthetic construct
GEKKMPS

SEQ ID NO: 77726 - protein, 7 aa, synthetic construct
NRNHDGK

SEQ ID NO: 77727 - protein, 7 aa, synthetic construct
YKDASRS

SEQ ID NO: 77728 - protein, 7 aa, synthetic construct
RFSEGAD

SEQ ID NO: 77729 - protein, 7 aa, synthetic construct
YDKFQFE

SEQ ID NO: 77730 - protein, 7 aa, synthetic construct
NARNANI

SEQ ID NO: 77731 - protein, 7 aa, synthetic construct
RLTNSQE

SEQ ID NO: 77732 - protein, 7 aa, synthetic construct
NSTVGDK

SEQ ID NO: 77733 - protein, 7 aa, synthetic construct
RVDLLNG

SEQ ID NO: 77734 - protein, 7 aa, synthetic construct
ADKNRIN

SEQ ID NO: 77735 - protein, 7 aa, synthetic construct
YYKDKAT

SEQ ID NO: 77736 - protein, 7 aa, synthetic construct
FNMKKEG

SEQ ID NO: 77737 - protein, 7 aa, synthetic construct
NQALTAM

SEQ ID NO: 77738 - protein, 7 aa, synthetic construct
NVRYVTG

SEQ ID NO: 77739 - protein, 7 aa, synthetic construct
SERNRYV

SEQ ID NO: 77740 - protein, 7 aa, synthetic construct
MTNQRTV

SEQ ID NO: 77741 - protein, 7 aa, synthetic construct
SVPQIGI

SEQ ID NO: 77742 - protein, 7 aa, synthetic construct
KQPLPPT

SEQ ID NO: 77743 - protein, 7 aa, synthetic construct
HAMWKDD

SEQ ID NO: 77744 - protein, 7 aa, synthetic construct
GLYRVPD

SEQ ID NO: 77745 - protein, 7 aa, synthetic construct
ESAKTMA

SEQ ID NO: 77746 - protein, 7 aa, synthetic construct
KGKDAVG

SEQ ID NO: 77747 - protein, 7 aa, synthetic construct
ADKKPHL

SEQ ID NO: 77748 - protein, 7 aa, synthetic construct
SKGATWV

SEQ ID NO: 77749 - protein, 7 aa, synthetic construct
SAHNGGR

SEQ ID NO: 77750 - protein, 7 aa, synthetic construct
GTSMTPI

SEQ ID NO: 77751 - protein, 7 aa, synthetic construct
KVNKFET

SEQ ID NO: 77752 - protein, 7 aa, synthetic construct
GPKTVAA

SEQ ID NO: 77753 - protein, 7 aa, synthetic construct
QAQALGM

SEQ ID NO: 77754 - protein, 7 aa, synthetic construct
AQKSHHL

SEQ ID NO: 77755 - protein, 7 aa, synthetic construct
TYHQPTR

SEQ ID NO: 77756 - protein, 7 aa, synthetic construct
FLLKMPE

SEQ ID NO: 77757 - protein, 7 aa, synthetic construct
KELKNSH

SEQ ID NO: 77758 - protein, 7 aa, synthetic construct
VHKPSLN

SEQ ID NO: 77759 - protein, 7 aa, synthetic construct
PGNRGGP

SEQ ID NO: 77760 - protein, 7 aa, synthetic construct
TPVTPVM

SEQ ID NO: 77761 - protein, 7 aa, synthetic construct
RDNQVVA

SEQ ID NO: 77762 - protein, 7 aa, synthetic construct
PMSTSKT

SEQ ID NO: 77763 - protein, 7 aa, synthetic construct
KMQGTTG

SEQ ID NO: 77764 - protein, 7 aa, synthetic construct
LLHKVDR

SEQ ID NO: 77765 - protein, 7 aa, synthetic construct
KVPLYLD

SEQ ID NO: 77766 - protein, 7 aa, synthetic construct
LSMFNES

SEQ ID NO: 77767 - protein, 7 aa, synthetic construct
FVSQKQP

SEQ ID NO: 77768 - protein, 7 aa, synthetic construct
KINNDER

SEQ ID NO: 77769 - protein, 7 aa, synthetic construct
SNRSVAL

SEQ ID NO: 77770 - protein, 7 aa, synthetic construct
SKPYQGV

SEQ ID NO: 77771 - protein, 7 aa, synthetic construct
GAQYSGL

SEQ ID NO: 77772 - protein, 7 aa, synthetic construct
YIPRYGD

SEQ ID NO: 77773 - protein, 7 aa, synthetic construct
QPPRQMQ

SEQ ID NO: 77774 - protein, 7 aa, synthetic construct
PTQTHDM

SEQ ID NO: 77775 - protein, 7 aa, synthetic construct
LMSGTKT

SEQ ID NO: 77776 - protein, 7 aa, synthetic construct
QNDQRRN

SEQ ID NO: 77777 - protein, 7 aa, synthetic construct
SQSGKQD

SEQ ID NO: 77778 - protein, 7 aa, synthetic construct
MREQVHD

SEQ ID NO: 77779 - protein, 7 aa, synthetic construct
WGKDQMG

SEQ ID NO: 77780 - protein, 7 aa, synthetic construct
WFKTHDA

SEQ ID NO: 77781 - protein, 7 aa, synthetic construct
REGQWAG

SEQ ID NO: 77782 - protein, 7 aa, synthetic construct
MLVGGSK

SEQ ID NO: 77783 - protein, 7 aa, synthetic construct
AQHIGAH

SEQ ID NO: 77784 - protein, 7 aa, synthetic construct
AAVRNTE

SEQ ID NO: 77785 - protein, 7 aa, synthetic construct
PTVKTHY

SEQ ID NO: 77786 - protein, 7 aa, synthetic construct
KPVMHVG

SEQ ID NO: 77787 - protein, 7 aa, synthetic construct
AERTMAV

SEQ ID NO: 77788 - protein, 7 aa, synthetic construct
TPRGLQV

SEQ ID NO: 77789 - protein, 7 aa, synthetic construct
VGVEYRG

SEQ ID NO: 77790 - protein, 7 aa, synthetic construct
TMQDQSG

SEQ ID NO: 77791 - protein, 7 aa, synthetic construct
MREIKWD

SEQ ID NO: 77792 - protein, 7 aa, synthetic construct
QGLARFD

SEQ ID NO: 77793 - protein, 7 aa, synthetic construct
KEMKSGS

SEQ ID NO: 77794 - protein, 7 aa, synthetic construct
NEYSKPM

SEQ ID NO: 77795 - protein, 7 aa, synthetic construct
TKDVHFH

SEQ ID NO: 77796 - protein, 7 aa, synthetic construct
PVANRGN

SEQ ID NO: 77797 - protein, 7 aa, synthetic construct
RPNSNVG

SEQ ID NO: 77798 - protein, 7 aa, synthetic construct
QETQIYR

SEQ ID NO: 77799 - protein, 7 aa, synthetic construct
VYHGSLH

SEQ ID NO: 77800 - protein, 7 aa, synthetic construct
KFHQGTL

SEQ ID NO: 77801 - protein, 7 aa, synthetic construct
AAPTFSG

SEQ ID NO: 77802 - protein, 7 aa, synthetic construct
PNNMRTV

SEQ ID NO: 77803 - protein, 7 aa, synthetic construct
TKVSIEA

SEQ ID NO: 77804 - protein, 7 aa, synthetic construct
SLHDRAP

SEQ ID NO: 77805 - protein, 7 aa, synthetic construct
GENKSPS

SEQ ID NO: 77806 - protein, 7 aa, synthetic construct
RVGERYA

SEQ ID NO: 77807 - protein, 7 aa, synthetic construct
GNVHVAY

SEQ ID NO: 77808 - protein, 7 aa, synthetic construct
DQPVTRR

SEQ ID NO: 77809 - protein, 7 aa, synthetic construct
YNNHAKA

SEQ ID NO: 77810 - protein, 7 aa, synthetic construct
IKTTTKD

SEQ ID NO: 77811 - protein, 7 aa, synthetic construct
KVENAKY

SEQ ID NO: 77812 - protein, 7 aa, synthetic construct
GNVNESR

SEQ ID NO: 77813 - protein, 7 aa, synthetic construct
YRLHEGS

SEQ ID NO: 77814 - protein, 7 aa, synthetic construct
HTVYPNS

SEQ ID NO: 77815 - protein, 7 aa, synthetic construct
SIQGIAM

SEQ ID NO: 77816 - protein, 7 aa, synthetic construct
TIHHNQH

SEQ ID NO: 77817 - protein, 7 aa, synthetic construct
KSENVNL

SEQ ID NO: 77818 - protein, 7 aa, synthetic construct
VDFKSNF

SEQ ID NO: 77819 - protein, 7 aa, synthetic construct
KVADPTN

SEQ ID NO: 77820 - protein, 7 aa, synthetic construct
TSSGPQY

SEQ ID NO: 77821 - protein, 7 aa, synthetic construct
KGVSMHS

SEQ ID NO: 77822 - protein, 7 aa, synthetic construct
STKLEDS

SEQ ID NO: 77823 - protein, 7 aa, synthetic construct
TVHTVAA

SEQ ID NO: 77824 - protein, 7 aa, synthetic construct
GKNNKDP

SEQ ID NO: 77825 - protein, 7 aa, synthetic construct
RKTIDSL

SEQ ID NO: 77826 - protein, 7 aa, synthetic construct
TTHYKMQ

SEQ ID NO: 77827 - protein, 7 aa, synthetic construct
VHQNQIR

SEQ ID NO: 77828 - protein, 7 aa, synthetic construct
IRAPNVH

SEQ ID NO: 77829 - protein, 7 aa, synthetic construct
GVAIHNN

SEQ ID NO: 77830 - protein, 7 aa, synthetic construct
VWKTNYD

SEQ ID NO: 77831 - protein, 7 aa, synthetic construct
VSQVQNV

SEQ ID NO: 77832 - protein, 7 aa, synthetic construct
QKSELTK

SEQ ID NO: 77833 - protein, 7 aa, synthetic construct
GIILREQ

SEQ ID NO: 77834 - protein, 7 aa, synthetic construct
SKNPMQS

SEQ ID NO: 77835 - protein, 7 aa, synthetic construct
NKQQAKE

SEQ ID NO: 77836 - protein, 7 aa, synthetic construct
PNQAGHN

SEQ ID NO: 77837 - protein, 7 aa, synthetic construct
QNHGNNM

SEQ ID NO: 77838 - protein, 7 aa, synthetic construct
NTQSRQP

SEQ ID NO: 77839 - protein, 7 aa, synthetic construct
NAGAVQQ

SEQ ID NO: 77840 - protein, 7 aa, synthetic construct
SFMPARP

SEQ ID NO: 77841 - protein, 7 aa, synthetic construct
GSSRDAF

SEQ ID NO: 77842 - protein, 7 aa, synthetic construct
RKAEGGN

SEQ ID NO: 77843 - protein, 7 aa, synthetic construct
PNPSGNP

SEQ ID NO: 77844 - protein, 7 aa, synthetic construct
EKRPSVS

SEQ ID NO: 77845 - protein, 7 aa, synthetic construct
PPNSRAF

SEQ ID NO: 77846 - protein, 7 aa, synthetic construct
WTTQQDM

SEQ ID NO: 77847 - protein, 7 aa, synthetic construct
YPSQHIT

SEQ ID NO: 77848 - protein, 7 aa, synthetic construct
WKGLKET

SEQ ID NO: 77849 - protein, 7 aa, synthetic construct
NFKGHTD

SEQ ID NO: 77850 - protein, 7 aa, synthetic construct
IKQIPDE

SEQ ID NO: 77851 - protein, 7 aa, synthetic construct
TRMNGDQ

SEQ ID NO: 77852 - protein, 7 aa, synthetic construct
RPAGDKP

SEQ ID NO: 77853 - protein, 7 aa, synthetic construct
REKVGGF

SEQ ID NO: 77854 - protein, 7 aa, synthetic construct
VAQPYSA

SEQ ID NO: 77855 - protein, 7 aa, synthetic construct
QYHPKPG

SEQ ID NO: 77856 - protein, 7 aa, synthetic construct
GGVSNQS

SEQ ID NO: 77857 - protein, 7 aa, synthetic construct
KLTPPQI

SEQ ID NO: 77858 - protein, 7 aa, synthetic construct
WTNVISA

SEQ ID NO: 77859 - protein, 7 aa, synthetic construct
KFPHIVE

SEQ ID NO: 77860 - protein, 7 aa, synthetic construct
SNLGQHY

SEQ ID NO: 77861 - protein, 7 aa, synthetic construct
TTNHQVS

SEQ ID NO: 77862 - protein, 7 aa, synthetic construct
PRHRTDP

SEQ ID NO: 77863 - protein, 7 aa, synthetic construct
TNHGQQD

SEQ ID NO: 77864 - protein, 7 aa, synthetic construct
STKMGNA

SEQ ID NO: 77865 - protein, 7 aa, synthetic construct
FAHNVGQ

SEQ ID NO: 77866 - protein, 7 aa, synthetic construct
NSASVDS

SEQ ID NO: 77867 - protein, 7 aa, synthetic construct
VKGNGTG

SEQ ID NO: 77868 - protein, 7 aa, synthetic construct
ARSAVIS

SEQ ID NO: 77869 - protein, 7 aa, synthetic construct
SNKIMAV

SEQ ID NO: 77870 - protein, 7 aa, synthetic construct
GHSTPKE

SEQ ID NO: 77871 - protein, 7 aa, synthetic construct
EMKHSEW

SEQ ID NO: 77872 - protein, 7 aa, synthetic construct
VYDHAPV

SEQ ID NO: 77873 - protein, 7 aa, synthetic construct
FPTKEVM

SEQ ID NO: 77874 - protein, 7 aa, synthetic construct
SGRFASS

SEQ ID NO: 77875 - protein, 7 aa, synthetic construct
VGTPATP

SEQ ID NO: 77876 - protein, 7 aa, synthetic construct
NRNSAVV

SEQ ID NO: 77877 - protein, 7 aa, synthetic construct
TISQNTR

SEQ ID NO: 77878 - protein, 7 aa, synthetic construct
NPDGMFR

SEQ ID NO: 77879 - protein, 7 aa, synthetic construct
HKSMQTP

SEQ ID NO: 77880 - protein, 7 aa, synthetic construct
VRPNHHV

SEQ ID NO: 77881 - protein, 7 aa, synthetic construct
PATTAAW

SEQ ID NO: 77882 - protein, 7 aa, synthetic construct
QDGLTSK

SEQ ID NO: 77883 - protein, 7 aa, synthetic construct
GMPGSIL

SEQ ID NO: 77884 - protein, 7 aa, synthetic construct
FEPNTRS

SEQ ID NO: 77885 - protein, 7 aa, synthetic construct
VQGHKGD

SEQ ID NO: 77886 - protein, 7 aa, synthetic construct
YVTMSVD

SEQ ID NO: 77887 - protein, 7 aa, synthetic construct
SLVTNKV

SEQ ID NO: 77888 - protein, 7 aa, synthetic construct
GDIRHTI

SEQ ID NO: 77889 - protein, 7 aa, synthetic construct
KTQPQNP

SEQ ID NO: 77890 - protein, 7 aa, synthetic construct
RNKETYG

SEQ ID NO: 77891 - protein, 7 aa, synthetic construct
TPNRVEK

SEQ ID NO: 77892 - protein, 7 aa, synthetic construct
EKMMVGA

SEQ ID NO: 77893 - protein, 7 aa, synthetic construct
HQVNINN

SEQ ID NO: 77894 - protein, 7 aa, synthetic construct
YRQAPIP

SEQ ID NO: 77895 - protein, 7 aa, synthetic construct
QFVSSKE

SEQ ID NO: 77896 - protein, 7 aa, synthetic construct
NKQPSQA

SEQ ID NO: 77897 - protein, 7 aa, synthetic construct
GLKEAIE

SEQ ID NO: 77898 - protein, 7 aa, synthetic construct
EKDKGPA

SEQ ID NO: 77899 - protein, 7 aa, synthetic construct
VQNVNER

SEQ ID NO: 77900 - protein, 7 aa, synthetic construct
GDSTHHA

SEQ ID NO: 77901 - protein, 7 aa, synthetic construct
HGSQPPD

SEQ ID NO: 77902 - protein, 7 aa, synthetic construct
EKNVQGG

SEQ ID NO: 77903 - protein, 7 aa, synthetic construct
EKAANYP

SEQ ID NO: 77904 - protein, 7 aa, synthetic construct
AHPYNKV

SEQ ID NO: 77905 - protein, 7 aa, synthetic construct
WLRQGLE

SEQ ID NO: 77906 - protein, 7 aa, synthetic construct
MKSDRFE

SEQ ID NO: 77907 - protein, 7 aa, synthetic construct
KHIGETP

SEQ ID NO: 77908 - protein, 7 aa, synthetic construct
HVKHNTE

SEQ ID NO: 77909 - protein, 7 aa, synthetic construct
HASWAQA

SEQ ID NO: 77910 - protein, 7 aa, synthetic construct
TKKEELL

SEQ ID NO: 77911 - protein, 7 aa, synthetic construct
EEMHHHV

SEQ ID NO: 77912 - protein, 7 aa, synthetic construct
RNPSFTS

SEQ ID NO: 77913 - protein, 7 aa, synthetic construct
DSRHSVI

SEQ ID NO: 77914 - protein, 7 aa, synthetic construct
KQGAPVT

SEQ ID NO: 77915 - protein, 7 aa, synthetic construct
LGVKEHT

SEQ ID NO: 77916 - protein, 7 aa, synthetic construct
FLPLMRD

SEQ ID NO: 77917 - protein, 7 aa, synthetic construct
NDFPKLQ

SEQ ID NO: 77918 - protein, 7 aa, synthetic construct
NTGKQAG

SEQ ID NO: 77919 - protein, 7 aa, synthetic construct
SSHSGTT

SEQ ID NO: 77920 - protein, 7 aa, synthetic construct
PDMNKRP

SEQ ID NO: 77921 - protein, 7 aa, synthetic construct
VGGHQQR

SEQ ID NO: 77922 - protein, 7 aa, synthetic construct
QKMGTQN

SEQ ID NO: 77923 - protein, 7 aa, synthetic construct
ANRQIAG

SEQ ID NO: 77924 - protein, 7 aa, synthetic construct
QPERYTM

SEQ ID NO: 77925 - protein, 7 aa, synthetic construct
QNPRTQA

SEQ ID NO: 77926 - protein, 7 aa, synthetic construct
KPTNSTN

SEQ ID NO: 77927 - protein, 7 aa, synthetic construct
IQMISNG

SEQ ID NO: 77928 - protein, 7 aa, synthetic construct
GMRAQFQ

SEQ ID NO: 77929 - protein, 7 aa, synthetic construct
SPTSPMY

SEQ ID NO: 77930 - protein, 7 aa, synthetic construct
EQAGGSG

SEQ ID NO: 77931 - protein, 7 aa, synthetic construct
GGVYRPD

SEQ ID NO: 77932 - protein, 7 aa, synthetic construct
TKLALHH

SEQ ID NO: 77933 - protein, 7 aa, synthetic construct
HVGAAYA

SEQ ID NO: 77934 - protein, 7 aa, synthetic construct
MGVTVMM

SEQ ID NO: 77935 - protein, 7 aa, synthetic construct
DNNSRYT

SEQ ID NO: 77936 - protein, 7 aa, synthetic construct
FNQQAAH

SEQ ID NO: 77937 - protein, 7 aa, synthetic construct
TLEEKRA

SEQ ID NO: 77938 - protein, 7 aa, synthetic construct
LNPASVQ

SEQ ID NO: 77939 - protein, 7 aa, synthetic construct
GKTGGMA

SEQ ID NO: 77940 - protein, 7 aa, synthetic construct
MEKESRV

SEQ ID NO: 77941 - protein, 7 aa, synthetic construct
ATEQPRG

SEQ ID NO: 77942 - protein, 7 aa, synthetic construct
KSASANT

SEQ ID NO: 77943 - protein, 7 aa, synthetic construct
NQPPYIA

SEQ ID NO: 77944 - protein, 7 aa, synthetic construct
FLLSTEG

SEQ ID NO: 77945 - protein, 7 aa, synthetic construct
HPNASGE

SEQ ID NO: 77946 - protein, 7 aa, synthetic construct
ESMAKAV

SEQ ID NO: 77947 - protein, 7 aa, synthetic construct
HKTDAWA

SEQ ID NO: 77948 - protein, 7 aa, synthetic construct
TMKRDQP

SEQ ID NO: 77949 - protein, 7 aa, synthetic construct
ASSKITM

SEQ ID NO: 77950 - protein, 7 aa, synthetic construct
IPRAGQT

SEQ ID NO: 77951 - protein, 7 aa, synthetic construct
RITAEFE

SEQ ID NO: 77952 - protein, 7 aa, synthetic construct
KHDTMAK

SEQ ID NO: 77953 - protein, 7 aa, synthetic construct
GKIHGHT

SEQ ID NO: 77954 - protein, 7 aa, synthetic construct
MKQDPHD

SEQ ID NO: 77955 - protein, 7 aa, synthetic construct
GHHETGF

SEQ ID NO: 77956 - protein, 7 aa, synthetic construct
IHTHARV

SEQ ID NO: 77957 - protein, 7 aa, synthetic construct
HHSVAYD

SEQ ID NO: 77958 - protein, 7 aa, synthetic construct
MNDVQKY

SEQ ID NO: 77959 - protein, 7 aa, synthetic construct
VKVLKDS

SEQ ID NO: 77960 - protein, 7 aa, synthetic construct
MNRTRSE

SEQ ID NO: 77961 - protein, 7 aa, synthetic construct
AQREHSF

SEQ ID NO: 77962 - protein, 7 aa, synthetic construct
VKSMINM

SEQ ID NO: 77963 - protein, 7 aa, synthetic construct
RNFPTTN

SEQ ID NO: 77964 - protein, 7 aa, synthetic construct
NMQPAVN

SEQ ID NO: 77965 - protein, 7 aa, synthetic construct
RTTPESP

SEQ ID NO: 77966 - protein, 7 aa, synthetic construct
PYSDVNK

SEQ ID NO: 77967 - protein, 7 aa, synthetic construct
WADKGLH

SEQ ID NO: 77968 - protein, 7 aa, synthetic construct
VGKTNQP

SEQ ID NO: 77969 - protein, 7 aa, synthetic construct
TYAQTRA

SEQ ID NO: 77970 - protein, 7 aa, synthetic construct
MSGLTTP

SEQ ID NO: 77971 - protein, 7 aa, synthetic construct
YNPNSTR

SEQ ID NO: 77972 - protein, 7 aa, synthetic construct
DQTRVNF

SEQ ID NO: 77973 - protein, 7 aa, synthetic construct
RMGPLDD

SEQ ID NO: 77974 - protein, 7 aa, synthetic construct
ALPTAAH

SEQ ID NO: 77975 - protein, 7 aa, synthetic construct
QIPEYRE

SEQ ID NO: 77976 - protein, 7 aa, synthetic construct
PYPHDRA

SEQ ID NO: 77977 - protein, 7 aa, synthetic construct
PKNTGNP

SEQ ID NO: 77978 - protein, 7 aa, synthetic construct
LKMSEQN

SEQ ID NO: 77979 - protein, 7 aa, synthetic construct
NAPNRFM

SEQ ID NO: 77980 - protein, 7 aa, synthetic construct
NPKFLES

SEQ ID NO: 77981 - protein, 7 aa, synthetic construct
NPHYNIT

SEQ ID NO: 77982 - protein, 7 aa, synthetic construct
GKEAYHG

SEQ ID NO: 77983 - protein, 7 aa, synthetic construct
GQPYPIE

SEQ ID NO: 77984 - protein, 7 aa, synthetic construct
PSSTSTL

SEQ ID NO: 77985 - protein, 7 aa, synthetic construct
SMGKEDF

SEQ ID NO: 77986 - protein, 7 aa, synthetic construct
GPRSHDY

SEQ ID NO: 77987 - protein, 7 aa, synthetic construct
KVNGDVH

SEQ ID NO: 77988 - protein, 7 aa, synthetic construct
AQSASHA

SEQ ID NO: 77989 - protein, 7 aa, synthetic construct
LENTKYF

SEQ ID NO: 77990 - protein, 7 aa, synthetic construct
QEKVMHV

SEQ ID NO: 77991 - protein, 7 aa, synthetic construct
YYSGSSL

SEQ ID NO: 77992 - protein, 7 aa, synthetic construct
LANIKDM

SEQ ID NO: 77993 - protein, 7 aa, synthetic construct
YNSQHPM

SEQ ID NO: 77994 - protein, 7 aa, synthetic construct
ISKDKDL

SEQ ID NO: 77995 - protein, 7 aa, synthetic construct
LRDRVYS

SEQ ID NO: 77996 - protein, 7 aa, synthetic construct
RAQLSHE

SEQ ID NO: 77997 - protein, 7 aa, synthetic construct
YPPKHLH

SEQ ID NO: 77998 - protein, 7 aa, synthetic construct
FVQGKYE

SEQ ID NO: 77999 - protein, 7 aa, synthetic construct
NSKSMGI

SEQ ID NO: 78000 - protein, 7 aa, synthetic construct
MIVKPLD

SEQ ID NO: 78001 - protein, 7 aa, synthetic construct
MKENNKQ

SEQ ID NO: 78002 - protein, 7 aa, synthetic construct
RKETTGM

SEQ ID NO: 78003 - protein, 7 aa, synthetic construct
FPHTSRT

SEQ ID NO: 78004 - protein, 7 aa, synthetic construct
YQPINRV

SEQ ID NO: 78005 - protein, 7 aa, synthetic construct
EPTKSSK

SEQ ID NO: 78006 - protein, 7 aa, synthetic construct
GATVHQI

SEQ ID NO: 78007 - protein, 7 aa, synthetic construct
ERTTLGA

SEQ ID NO: 78008 - protein, 7 aa, synthetic construct
LMAVDRI

SEQ ID NO: 78009 - protein, 7 aa, synthetic construct
ITNRSVL

SEQ ID NO: 78010 - protein, 7 aa, synthetic construct
KGIVTMG

SEQ ID NO: 78011 - protein, 7 aa, synthetic construct
KTATQGG

SEQ ID NO: 78012 - protein, 7 aa, synthetic construct
KPNNGAM

SEQ ID NO: 78013 - protein, 7 aa, synthetic construct
SSSQAMG

SEQ ID NO: 78014 - protein, 7 aa, synthetic construct
GELRPPA

SEQ ID NO: 78015 - protein, 7 aa, synthetic construct
SPVSKHW

SEQ ID NO: 78016 - protein, 7 aa, synthetic construct
VIKEQRY

SEQ ID NO: 78017 - protein, 7 aa, synthetic construct
GQSPSNF

SEQ ID NO: 78018 - protein, 7 aa, synthetic construct
REHMQIE

SEQ ID NO: 78019 - protein, 7 aa, synthetic construct
KPSGLAA

SEQ ID NO: 78020 - protein, 7 aa, synthetic construct
DIHSRAA

SEQ ID NO: 78021 - protein, 7 aa, synthetic construct
ADRNTKA

SEQ ID NO: 78022 - protein, 7 aa, synthetic construct
TRSGEQK

SEQ ID NO: 78023 - protein, 7 aa, synthetic construct
LNTQPVG

SEQ ID NO: 78024 - protein, 7 aa, synthetic construct
IPVVAVA

SEQ ID NO: 78025 - protein, 7 aa, synthetic construct
NKIYGHV

SEQ ID NO: 78026 - protein, 7 aa, synthetic construct
QPNGIQR

SEQ ID NO: 78027 - protein, 7 aa, synthetic construct
YKPPTTA

SEQ ID NO: 78028 - protein, 7 aa, synthetic construct
KVSNSTS

SEQ ID NO: 78029 - protein, 7 aa, synthetic construct
LASKHMF

SEQ ID NO: 78030 - protein, 7 aa, synthetic construct
QSSLSGV

SEQ ID NO: 78031 - protein, 7 aa, synthetic construct
GMNAHSV

SEQ ID NO: 78032 - protein, 7 aa, synthetic construct
VAARNHI

SEQ ID NO: 78033 - protein, 7 aa, synthetic construct
YWSENSS

SEQ ID NO: 78034 - protein, 7 aa, synthetic construct
VASHDKQ

SEQ ID NO: 78035 - protein, 7 aa, synthetic construct
PDKVGSF

SEQ ID NO: 78036 - protein, 7 aa, synthetic construct
EKNIHVL

SEQ ID NO: 78037 - protein, 7 aa, synthetic construct
WKHMETT

SEQ ID NO: 78038 - protein, 7 aa, synthetic construct
MFITGRE

SEQ ID NO: 78039 - protein, 7 aa, synthetic construct
SKKEESG

SEQ ID NO: 78040 - protein, 7 aa, synthetic construct
HQKTVAQ

SEQ ID NO: 78041 - protein, 7 aa, synthetic construct
RPEIFRG

SEQ ID NO: 78042 - protein, 7 aa, synthetic construct
NLHNVKH

SEQ ID NO: 78043 - protein, 7 aa, synthetic construct
QYRQVPE

SEQ ID NO: 78044 - protein, 7 aa, synthetic construct
AERMGAE

SEQ ID NO: 78045 - protein, 7 aa, synthetic construct
SVRSEYS

SEQ ID NO: 78046 - protein, 7 aa, synthetic construct
NLVREPP

SEQ ID NO: 78047 - protein, 7 aa, synthetic construct
THATRSF

SEQ ID NO: 78048 - protein, 7 aa, synthetic construct
VPGYSAI

SEQ ID NO: 78049 - protein, 7 aa, synthetic construct
NMEHRQM

SEQ ID NO: 78050 - protein, 7 aa, synthetic construct
MSRAPDM

SEQ ID NO: 78051 - protein, 7 aa, synthetic construct
PGKLIAQ

SEQ ID NO: 78052 - protein, 7 aa, synthetic construct
NQIVAKI

SEQ ID NO: 78053 - protein, 7 aa, synthetic construct
IAYAKPE

SEQ ID NO: 78054 - protein, 7 aa, synthetic construct
VLGTTRL

SEQ ID NO: 78055 - protein, 7 aa, synthetic construct
PGNKPGI

SEQ ID NO: 78056 - protein, 7 aa, synthetic construct
HMKLGTI

SEQ ID NO: 78057 - protein, 7 aa, synthetic construct
LNAMRPL

SEQ ID NO: 78058 - protein, 7 aa, synthetic construct
GVVSHVV

SEQ ID NO: 78059 - protein, 7 aa, synthetic construct
SIGQHKA

SEQ ID NO: 78060 - protein, 7 aa, synthetic construct
RKDTMKE

SEQ ID NO: 78061 - protein, 7 aa, synthetic construct
HLTLSPS

SEQ ID NO: 78062 - protein, 7 aa, synthetic construct
SPNQTPQ

SEQ ID NO: 78063 - protein, 7 aa, synthetic construct
KQDSRLD

SEQ ID NO: 78064 - protein, 7 aa, synthetic construct
KNQVSEP

SEQ ID NO: 78065 - protein, 7 aa, synthetic construct
NTKVNAT

SEQ ID NO: 78066 - protein, 7 aa, synthetic construct
LKDPAQT

SEQ ID NO: 78067 - protein, 7 aa, synthetic construct
QRILAID

SEQ ID NO: 78068 - protein, 7 aa, synthetic construct
NRTQTAM

SEQ ID NO: 78069 - protein, 7 aa, synthetic construct
TASLSPM

SEQ ID NO: 78070 - protein, 7 aa, synthetic construct
RYAGRGD

SEQ ID NO: 78071 - protein, 7 aa, synthetic construct
GAKLSQW

SEQ ID NO: 78072 - protein, 7 aa, synthetic construct
VNPSPTK

SEQ ID NO: 78073 - protein, 7 aa, synthetic construct
YNDNRAL

SEQ ID NO: 78074 - protein, 7 aa, synthetic construct
TGPTKTA

SEQ ID NO: 78075 - protein, 7 aa, synthetic construct
FSGQSGM

SEQ ID NO: 78076 - protein, 7 aa, synthetic construct
HPMWSTE

SEQ ID NO: 78077 - protein, 7 aa, synthetic construct
IWKGAMP

SEQ ID NO: 78078 - protein, 7 aa, synthetic construct
RNDSLKF

SEQ ID NO: 78079 - protein, 7 aa, synthetic construct
VRHLATD

SEQ ID NO: 78080 - protein, 7 aa, synthetic construct
SSSLRVE

SEQ ID NO: 78081 - protein, 7 aa, synthetic construct
NSKPDVQ

SEQ ID NO: 78082 - protein, 7 aa, synthetic construct
DYRSTQI

SEQ ID NO: 78083 - protein, 7 aa, synthetic construct
RPATMTG

SEQ ID NO: 78084 - protein, 7 aa, synthetic construct
QPQKIIQ

SEQ ID NO: 78085 - protein, 7 aa, synthetic construct
SVMLKSE

SEQ ID NO: 78086 - protein, 7 aa, synthetic construct
TDALMKH

SEQ ID NO: 78087 - protein, 7 aa, synthetic construct
MTKRNEV

SEQ ID NO: 78088 - protein, 7 aa, synthetic construct
VPPTQRA

SEQ ID NO: 78089 - protein, 7 aa, synthetic construct
RVGPDVS

SEQ ID NO: 78090 - protein, 7 aa, synthetic construct
YANGNHD

SEQ ID NO: 78091 - protein, 7 aa, synthetic construct
KPYDTGD

SEQ ID NO: 78092 - protein, 7 aa, synthetic construct
SLNHTQP

SEQ ID NO: 78093 - protein, 7 aa, synthetic construct
TAKMQAA

SEQ ID NO: 78094 - protein, 7 aa, synthetic construct
LMTRPGA

SEQ ID NO: 78095 - protein, 7 aa, synthetic construct
PYGGAKE

SEQ ID NO: 78096 - protein, 7 aa, synthetic construct
APQSVSA

SEQ ID NO: 78097 - protein, 7 aa, synthetic construct
PKNQMNP

SEQ ID NO: 78098 - protein, 7 aa, synthetic construct
CNETRCI

SEQ ID NO: 78099 - protein, 7 aa, synthetic construct
VFEHNSG

SEQ ID NO: 78100 - protein, 7 aa, synthetic construct
GQGSYPM

SEQ ID NO: 78101 - protein, 7 aa, synthetic construct
QSASRGP

SEQ ID NO: 78102 - protein, 7 aa, synthetic construct
GRYVEIP

SEQ ID NO: 78103 - protein, 7 aa, synthetic construct
TAHGSAH

SEQ ID NO: 78104 - protein, 7 aa, synthetic construct
KTLLGQM

SEQ ID NO: 78105 - protein, 7 aa, synthetic construct
LTKGEFR

SEQ ID NO: 78106 - protein, 7 aa, synthetic construct
EHSWKQE

SEQ ID NO: 78107 - protein, 7 aa, synthetic construct
RTHEGNA

SEQ ID NO: 78108 - protein, 7 aa, synthetic construct
DEHFRKH

SEQ ID NO: 78109 - protein, 7 aa, synthetic construct
PHSKSAT

SEQ ID NO: 78110 - protein, 7 aa, synthetic construct
ARGGTAP

SEQ ID NO: 78111 - protein, 7 aa, synthetic construct
VMAVSHA

SEQ ID NO: 78112 - protein, 7 aa, synthetic construct
TINFHNS

SEQ ID NO: 78113 - protein, 7 aa, synthetic construct
HAQKDQG

SEQ ID NO: 78114 - protein, 7 aa, synthetic construct
KLDLHYG

SEQ ID NO: 78115 - protein, 7 aa, synthetic construct
TQVGRQH

SEQ ID NO: 78116 - protein, 7 aa, synthetic construct
GGNREGR

SEQ ID NO: 78117 - protein, 7 aa, synthetic construct
NLKQPFE

SEQ ID NO: 78118 - protein, 7 aa, synthetic construct
STSRIIV

SEQ ID NO: 78119 - protein, 7 aa, synthetic construct
MMKPGHH

SEQ ID NO: 78120 - protein, 7 aa, synthetic construct
TLALIQS

SEQ ID NO: 78121 - protein, 7 aa, synthetic construct
QSPPIAD

SEQ ID NO: 78122 - protein, 7 aa, synthetic construct
KNMMTNG

SEQ ID NO: 78123 - protein, 7 aa, synthetic construct
KKHENVG

SEQ ID NO: 78124 - protein, 7 aa, synthetic construct
RGNEQTV

SEQ ID NO: 78125 - protein, 7 aa, synthetic construct
SQIDVPR

SEQ ID NO: 78126 - protein, 7 aa, synthetic construct
PHPVDVA

SEQ ID NO: 78127 - protein, 7 aa, synthetic construct
QIKTGNQ

SEQ ID NO: 78128 - protein, 7 aa, synthetic construct
RAKHDQL

SEQ ID NO: 78129 - protein, 7 aa, synthetic construct
FNTIALA

SEQ ID NO: 78130 - protein, 7 aa, synthetic construct
LAHNKGA

SEQ ID NO: 78131 - protein, 7 aa, synthetic construct
ILRDGPR

SEQ ID NO: 78132 - protein, 7 aa, synthetic construct
NGKMVQI

SEQ ID NO: 78133 - protein, 7 aa, synthetic construct
WNIKYEG

SEQ ID NO: 78134 - protein, 7 aa, synthetic construct
SKPAIIV

SEQ ID NO: 78135 - protein, 7 aa, synthetic construct
TEGMTTR

SEQ ID NO: 78136 - protein, 7 aa, synthetic construct
RGDFERL

SEQ ID NO: 78137 - protein, 7 aa, synthetic construct
EANNVKK

SEQ ID NO: 78138 - protein, 7 aa, synthetic construct
IMARINS

SEQ ID NO: 78139 - protein, 7 aa, synthetic construct
TSVRPAM

SEQ ID NO: 78140 - protein, 7 aa, synthetic construct
SEQKLHK

SEQ ID NO: 78141 - protein, 7 aa, synthetic construct
LVPQGKY

SEQ ID NO: 78142 - protein, 7 aa, synthetic construct
YAQGLRS

SEQ ID NO: 78143 - protein, 7 aa, synthetic construct
TREPNWP

SEQ ID NO: 78144 - protein, 7 aa, synthetic construct
LVHRTGY

SEQ ID NO: 78145 - protein, 7 aa, synthetic construct
SHPGAQM

SEQ ID NO: 78146 - protein, 7 aa, synthetic construct
NQKPNHS

SEQ ID NO: 78147 - protein, 7 aa, synthetic construct
SAHSDTL

SEQ ID NO: 78148 - protein, 7 aa, synthetic construct
GINHKED

SEQ ID NO: 78149 - protein, 7 aa, synthetic construct
FFRDQKV

SEQ ID NO: 78150 - protein, 7 aa, synthetic construct
NPIKDQV

SEQ ID NO: 78151 - protein, 7 aa, synthetic construct
SLAGKEV

SEQ ID NO: 78152 - protein, 7 aa, synthetic construct
DGVGKNF

SEQ ID NO: 78153 - protein, 7 aa, synthetic construct
TANMQPK

SEQ ID NO: 78154 - protein, 7 aa, synthetic construct
KFETKAG

SEQ ID NO: 78155 - protein, 7 aa, synthetic construct
AIGLNEN

SEQ ID NO: 78156 - protein, 7 aa, synthetic construct
EHHYNEV

SEQ ID NO: 78157 - protein, 7 aa, synthetic construct
KTNDMMV

SEQ ID NO: 78158 - protein, 7 aa, synthetic construct
ASPTITF

SEQ ID NO: 78159 - protein, 7 aa, synthetic construct
ENRSLIT

SEQ ID NO: 78160 - protein, 7 aa, synthetic construct
YNHMSMS

SEQ ID NO: 78161 - protein, 7 aa, synthetic construct
GAVWVNG

SEQ ID NO: 78162 - protein, 7 aa, synthetic construct
IMVGPAD

SEQ ID NO: 78163 - protein, 7 aa, synthetic construct
KGPSNEM

SEQ ID NO: 78164 - protein, 7 aa, synthetic construct
FHQNHDS

SEQ ID NO: 78165 - protein, 7 aa, synthetic construct
TEYTHFA

SEQ ID NO: 78166 - protein, 7 aa, synthetic construct
GSRYTNE

SEQ ID NO: 78167 - protein, 7 aa, synthetic construct
DMFNRQT

SEQ ID NO: 78168 - protein, 7 aa, synthetic construct
LNKEGWR

SEQ ID NO: 78169 - protein, 7 aa, synthetic construct
NRKSDTD

SEQ ID NO: 78170 - protein, 7 aa, synthetic construct
PSNKAMG

SEQ ID NO: 78171 - protein, 7 aa, synthetic construct
QVQLKFS

SEQ ID NO: 78172 - protein, 7 aa, synthetic construct
HANQKLF

SEQ ID NO: 78173 - protein, 7 aa, synthetic construct
QTRAEIA

SEQ ID NO: 78174 - protein, 7 aa, synthetic construct
VTQRENF

SEQ ID NO: 78175 - protein, 7 aa, synthetic construct
VPHQGDH

SEQ ID NO: 78176 - protein, 7 aa, synthetic construct
YNTEKVI

SEQ ID NO: 78177 - protein, 7 aa, synthetic construct
NAIKRDN

SEQ ID NO: 78178 - protein, 7 aa, synthetic construct
VNEKWLR

SEQ ID NO: 78179 - protein, 7 aa, synthetic construct
IGMVNTM

SEQ ID NO: 78180 - protein, 7 aa, synthetic construct
MGYQQKL

SEQ ID NO: 78181 - protein, 7 aa, synthetic construct
HWQDMGK

SEQ ID NO: 78182 - protein, 7 aa, synthetic construct
TQREYQV

SEQ ID NO: 78183 - protein, 7 aa, synthetic construct
KSYSIGP

SEQ ID NO: 78184 - protein, 7 aa, synthetic construct
VRPTSGS

SEQ ID NO: 78185 - protein, 7 aa, synthetic construct
TFHGSNN

SEQ ID NO: 78186 - protein, 7 aa, synthetic construct
NGTGMMG

SEQ ID NO: 78187 - protein, 7 aa, synthetic construct
YGGILAG

SEQ ID NO: 78188 - protein, 7 aa, synthetic construct
NGTKWGT

SEQ ID NO: 78189 - protein, 7 aa, synthetic construct
INVARAP

SEQ ID NO: 78190 - protein, 7 aa, synthetic construct
MFSPLEP

SEQ ID NO: 78191 - protein, 7 aa, synthetic construct
LPTGMLT

SEQ ID NO: 78192 - protein, 7 aa, synthetic construct
GRAKTDE

SEQ ID NO: 78193 - protein, 7 aa, synthetic construct
PNRVHVI

SEQ ID NO: 78194 - protein, 7 aa, synthetic construct
SYSNAHE

SEQ ID NO: 78195 - protein, 7 aa, synthetic construct
LDRNMEK

SEQ ID NO: 78196 - protein, 7 aa, synthetic construct
YAAVHNA

SEQ ID NO: 78197 - protein, 7 aa, synthetic construct
EMNVHNK

SEQ ID NO: 78198 - protein, 7 aa, synthetic construct
RPDGIAM

SEQ ID NO: 78199 - protein, 7 aa, synthetic construct
KQERGQD

SEQ ID NO: 78200 - protein, 7 aa, synthetic construct
TTRQMNY

SEQ ID NO: 78201 - protein, 7 aa, synthetic construct
LEHYAQD

SEQ ID NO: 78202 - protein, 7 aa, synthetic construct
NLNSGVN

SEQ ID NO: 78203 - protein, 7 aa, synthetic construct
NQKSVGS

SEQ ID NO: 78204 - protein, 7 aa, synthetic construct
YLREGAI

SEQ ID NO: 78205 - protein, 7 aa, synthetic construct
AFKNALD

SEQ ID NO: 78206 - protein, 7 aa, synthetic construct
NSGHRAF

SEQ ID NO: 78207 - protein, 7 aa, synthetic construct
FHSSPHG

SEQ ID NO: 78208 - protein, 7 aa, synthetic construct
SIKGDSA

SEQ ID NO: 78209 - protein, 7 aa, synthetic construct
HMAGMNA

SEQ ID NO: 78210 - protein, 7 aa, synthetic construct
NAHVNHG

SEQ ID NO: 78211 - protein, 7 aa, synthetic construct
DKPSRMA

SEQ ID NO: 78212 - protein, 7 aa, synthetic construct
TTWSGQG

SEQ ID NO: 78213 - protein, 7 aa, synthetic construct
YLKGSEA

SEQ ID NO: 78214 - protein, 7 aa, synthetic construct
SNTANKY

SEQ ID NO: 78215 - protein, 7 aa, synthetic construct
HLEPKMV

SEQ ID NO: 78216 - protein, 7 aa, synthetic construct
PPKVPGT

SEQ ID NO: 78217 - protein, 7 aa, synthetic construct
NANQVNY

SEQ ID NO: 78218 - protein, 7 aa, synthetic construct
HSEFKQM

SEQ ID NO: 78219 - protein, 7 aa, synthetic construct
VKNNQST

SEQ ID NO: 78220 - protein, 7 aa, synthetic construct
AAASTKG

SEQ ID NO: 78221 - protein, 7 aa, synthetic construct
RDSSISQ

SEQ ID NO: 78222 - protein, 7 aa, synthetic construct
LSHHVNQ

SEQ ID NO: 78223 - protein, 7 aa, synthetic construct
LNHQSIV

SEQ ID NO: 78224 - protein, 7 aa, synthetic construct
AALKMND

SEQ ID NO: 78225 - protein, 7 aa, synthetic construct
PWEKSGK

SEQ ID NO: 78226 - protein, 7 aa, synthetic construct
AQKFSDV

SEQ ID NO: 78227 - protein, 7 aa, synthetic construct
MPTNQTR

SEQ ID NO: 78228 - protein, 7 aa, synthetic construct
QHTGNHG

SEQ ID NO: 78229 - protein, 7 aa, synthetic construct
GQREWQA

SEQ ID NO: 78230 - protein, 7 aa, synthetic construct
KKDHKSD

SEQ ID NO: 78231 - protein, 7 aa, synthetic construct
EGKERQW

SEQ ID NO: 78232 - protein, 7 aa, synthetic construct
KMGGDLM

SEQ ID NO: 78233 - protein, 7 aa, synthetic construct
GSSKYGE

SEQ ID NO: 78234 - protein, 7 aa, synthetic construct
TTGLLAK

SEQ ID NO: 78235 - protein, 7 aa, synthetic construct
GTSSLGF

SEQ ID NO: 78236 - protein, 7 aa, synthetic construct
DSGLKKP

SEQ ID NO: 78237 - protein, 7 aa, synthetic construct
HQKFNPM

SEQ ID NO: 78238 - protein, 7 aa, synthetic construct
ILNGHIA

SEQ ID NO: 78239 - protein, 7 aa, synthetic construct
YTSAQHH

SEQ ID NO: 78240 - protein, 7 aa, synthetic construct
MGKADNY

SEQ ID NO: 78241 - protein, 7 aa, synthetic construct
FSPSAKT

SEQ ID NO: 78242 - protein, 7 aa, synthetic construct
SQKSDNG

SEQ ID NO: 78243 - protein, 7 aa, synthetic construct
SLDKQAY

SEQ ID NO: 78244 - protein, 7 aa, synthetic construct
HNQGQGK

SEQ ID NO: 78245 - protein, 7 aa, synthetic construct
DNGRGIL

SEQ ID NO: 78246 - protein, 7 aa, synthetic construct
KKDGNKD

SEQ ID NO: 78247 - protein, 7 aa, synthetic construct
GMTRTGV

SEQ ID NO: 78248 - protein, 7 aa, synthetic construct
TKSYISP

SEQ ID NO: 78249 - protein, 7 aa, synthetic construct
AMTKELP

SEQ ID NO: 78250 - protein, 7 aa, synthetic construct
IISNLTR

SEQ ID NO: 78251 - protein, 7 aa, synthetic construct
DPHPSIM

SEQ ID NO: 78252 - protein, 7 aa, synthetic construct
KVSSTVP

SEQ ID NO: 78253 - protein, 7 aa, synthetic construct
GSSKAGD

SEQ ID NO: 78254 - protein, 7 aa, synthetic construct
PGGYSVE

SEQ ID NO: 78255 - protein, 7 aa, synthetic construct
HVASDAH

SEQ ID NO: 78256 - protein, 7 aa, synthetic construct
IQKVMIE

SEQ ID NO: 78257 - protein, 7 aa, synthetic construct
FERLSKV

SEQ ID NO: 78258 - protein, 7 aa, synthetic construct
RWAVTEE

SEQ ID NO: 78259 - protein, 7 aa, synthetic construct
YNVVRGA

SEQ ID NO: 78260 - protein, 7 aa, synthetic construct
GERMGVE

SEQ ID NO: 78261 - protein, 7 aa, synthetic construct
LKSEGYQ

SEQ ID NO: 78262 - protein, 7 aa, synthetic construct
SANFPIA

SEQ ID NO: 78263 - protein, 7 aa, synthetic construct
TEYHHKQ

SEQ ID NO: 78264 - protein, 7 aa, synthetic construct
IQAPKDH

SEQ ID NO: 78265 - protein, 7 aa, synthetic construct
QISDTKQ

SEQ ID NO: 78266 - protein, 7 aa, synthetic construct
NSLAGKQ

SEQ ID NO: 78267 - protein, 7 aa, synthetic construct
ERFKSVS

SEQ ID NO: 78268 - protein, 7 aa, synthetic construct
EPMQQHA

SEQ ID NO: 78269 - protein, 7 aa, synthetic construct
KNPGATA

SEQ ID NO: 78270 - protein, 7 aa, synthetic construct
QPGGAFK

SEQ ID NO: 78271 - protein, 7 aa, synthetic construct
TITPKNN

SEQ ID NO: 78272 - protein, 7 aa, synthetic construct
LQKGAQL

SEQ ID NO: 78273 - protein, 7 aa, synthetic construct
KTNMMQA

SEQ ID NO: 78274 - protein, 7 aa, synthetic construct
MPKVLSH

SEQ ID NO: 78275 - protein, 7 aa, synthetic construct
KPASSVA

SEQ ID NO: 78276 - protein, 7 aa, synthetic construct
LKQSTST

SEQ ID NO: 78277 - protein, 7 aa, synthetic construct
MPKGYDG

SEQ ID NO: 78278 - protein, 7 aa, synthetic construct
HIVRTPE

SEQ ID NO: 78279 - protein, 7 aa, synthetic construct
AVTSNIH

SEQ ID NO: 78280 - protein, 7 aa, synthetic construct
TKKVQEE

SEQ ID NO: 78281 - protein, 7 aa, synthetic construct
EIKAKIL

SEQ ID NO: 78282 - protein, 7 aa, synthetic construct
PAAHNVP

SEQ ID NO: 78283 - protein, 7 aa, synthetic construct
SHDINDR

SEQ ID NO: 78284 - protein, 7 aa, synthetic construct
RDNNNAA

SEQ ID NO: 78285 - protein, 7 aa, synthetic construct
AWNGSDR

SEQ ID NO: 78286 - protein, 7 aa, synthetic construct
YHINVAP

SEQ ID NO: 78287 - protein, 7 aa, synthetic construct
MGKIVFG

SEQ ID NO: 78288 - protein, 7 aa, synthetic construct
AHAISVH

SEQ ID NO: 78289 - protein, 7 aa, synthetic construct
LSNQNPF

SEQ ID NO: 78290 - protein, 7 aa, synthetic construct
NHLRNKD

SEQ ID NO: 78291 - protein, 7 aa, synthetic construct
NHRQMIT

SEQ ID NO: 78292 - protein, 7 aa, synthetic construct
HTHAKTP

SEQ ID NO: 78293 - protein, 7 aa, synthetic construct
GRDKMQA

SEQ ID NO: 78294 - protein, 7 aa, synthetic construct
WNNQHTE

SEQ ID NO: 78295 - protein, 7 aa, synthetic construct
RIGEADR

SEQ ID NO: 78296 - protein, 7 aa, synthetic construct
IAKDLIM

SEQ ID NO: 78297 - protein, 7 aa, synthetic construct
LPGADGL

SEQ ID NO: 78298 - protein, 7 aa, synthetic construct
DPMVKGH

SEQ ID NO: 78299 - protein, 7 aa, synthetic construct
NSTRTPN

SEQ ID NO: 78300 - protein, 7 aa, synthetic construct
QPNKDHR

SEQ ID NO: 78301 - protein, 7 aa, synthetic construct
VNGTSLM

SEQ ID NO: 78302 - protein, 7 aa, synthetic construct
AFVGGFA

SEQ ID NO: 78303 - protein, 7 aa, synthetic construct
EARYPKV

SEQ ID NO: 78304 - protein, 7 aa, synthetic construct
NSQHNAG

SEQ ID NO: 78305 - protein, 7 aa, synthetic construct
GVTGKYS

SEQ ID NO: 78306 - protein, 7 aa, synthetic construct
KSQDRAP

SEQ ID NO: 78307 - protein, 7 aa, synthetic construct
NTDVKFQ

SEQ ID NO: 78308 - protein, 7 aa, synthetic construct
IFQQIKN

SEQ ID NO: 78309 - protein, 7 aa, synthetic construct
KPENPFI

SEQ ID NO: 78310 - protein, 7 aa, synthetic construct
SVNMRNI

SEQ ID NO: 78311 - protein, 7 aa, synthetic construct
PPKNITG

SEQ ID NO: 78312 - protein, 7 aa, synthetic construct
YGTVQIA

SEQ ID NO: 78313 - protein, 7 aa, synthetic construct
LASAERR

SEQ ID NO: 78314 - protein, 7 aa, synthetic construct
CALKNCP

SEQ ID NO: 78315 - protein, 7 aa, synthetic construct
QRQNEAK

SEQ ID NO: 78316 - protein, 7 aa, synthetic construct
MKGTTQH

SEQ ID NO: 78317 - protein, 7 aa, synthetic construct
AMTPAGP

SEQ ID NO: 78318 - protein, 7 aa, synthetic construct
AQVQKSG

SEQ ID NO: 78319 - protein, 7 aa, synthetic construct
NQRQDYR

SEQ ID NO: 78320 - protein, 7 aa, synthetic construct
EARREYM

SEQ ID NO: 78321 - protein, 7 aa, synthetic construct
TKMTGSA

SEQ ID NO: 78322 - protein, 7 aa, synthetic construct
HHLGGGE

SEQ ID NO: 78323 - protein, 7 aa, synthetic construct
PHNMRSE

SEQ ID NO: 78324 - protein, 7 aa, synthetic construct
YAIGHMD

SEQ ID NO: 78325 - protein, 7 aa, synthetic construct
ISPKQPL

SEQ ID NO: 78326 - protein, 7 aa, synthetic construct
MVTVKRE

SEQ ID NO: 78327 - protein, 7 aa, synthetic construct
APFPTQQ

SEQ ID NO: 78328 - protein, 7 aa, synthetic construct
RETVLTS

SEQ ID NO: 78329 - protein, 7 aa, synthetic construct
QWVKGAV

SEQ ID NO: 78330 - protein, 7 aa, synthetic construct
ERMKTMN

SEQ ID NO: 78331 - protein, 7 aa, synthetic construct
LPIERST

SEQ ID NO: 78332 - protein, 7 aa, synthetic construct
SILGHVS

SEQ ID NO: 78333 - protein, 7 aa, synthetic construct
NQTKTMS

SEQ ID NO: 78334 - protein, 7 aa, synthetic construct
KSQERDP

SEQ ID NO: 78335 - protein, 7 aa, synthetic construct
YNQSGSF

SEQ ID NO: 78336 - protein, 7 aa, synthetic construct
SKTNSAS

SEQ ID NO: 78337 - protein, 7 aa, synthetic construct
VANPGQP

SEQ ID NO: 78338 - protein, 7 aa, synthetic construct
TPVLAPG

SEQ ID NO: 78339 - protein, 7 aa, synthetic construct
QSPTSKP

SEQ ID NO: 78340 - protein, 7 aa, synthetic construct
MNQGVNH

SEQ ID NO: 78341 - protein, 7 aa, synthetic construct
HGNEITR

SEQ ID NO: 78342 - protein, 7 aa, synthetic construct
ANVHNHM

SEQ ID NO: 78343 - protein, 7 aa, synthetic construct
AIKTVSM

SEQ ID NO: 78344 - protein, 7 aa, synthetic construct
TKSSAYA

SEQ ID NO: 78345 - protein, 7 aa, synthetic construct
GNPMATT

SEQ ID NO: 78346 - protein, 7 aa, synthetic construct
VREYLTP

SEQ ID NO: 78347 - protein, 7 aa, synthetic construct
KFDPSPM

SEQ ID NO: 78348 - protein, 7 aa, synthetic construct
PFRVQSE

SEQ ID NO: 78349 - protein, 7 aa, synthetic construct
TPVVQVS

SEQ ID NO: 78350 - protein, 7 aa, synthetic construct
MQAHTKD

SEQ ID NO: 78351 - protein, 7 aa, synthetic construct
ANGTNRI

SEQ ID NO: 78352 - protein, 7 aa, synthetic construct
DRLHGLN

SEQ ID NO: 78353 - protein, 7 aa, synthetic construct
SVKTGAA

SEQ ID NO: 78354 - protein, 7 aa, synthetic construct
VKAQLYA

SEQ ID NO: 78355 - protein, 7 aa, synthetic construct
IGTPVVM

SEQ ID NO: 78356 - protein, 7 aa, synthetic construct
NYPGRAM

SEQ ID NO: 78357 - protein, 7 aa, synthetic construct
LMKAVKD

SEQ ID NO: 78358 - protein, 7 aa, synthetic construct
YNGSYRT

SEQ ID NO: 78359 - protein, 7 aa, synthetic construct
AIIMKRD

SEQ ID NO: 78360 - protein, 7 aa, synthetic construct
IQGIRDV

SEQ ID NO: 78361 - protein, 7 aa, synthetic construct
KARVSMD

SEQ ID NO: 78362 - protein, 7 aa, synthetic construct
GKDKTDA

SEQ ID NO: 78363 - protein, 7 aa, synthetic construct
FHSHASA

SEQ ID NO: 78364 - protein, 7 aa, synthetic construct
KHPVTDM

SEQ ID NO: 78365 - protein, 7 aa, synthetic construct
QRHGHAE

SEQ ID NO: 78366 - protein, 7 aa, synthetic construct
YVGVASM

SEQ ID NO: 78367 - protein, 7 aa, synthetic construct
DGSHIRF

SEQ ID NO: 78368 - protein, 7 aa, synthetic construct
LINHPVH

SEQ ID NO: 78369 - protein, 7 aa, synthetic construct
HTVSVEA

SEQ ID NO: 78370 - protein, 7 aa, synthetic construct
GPKSQAF

SEQ ID NO: 78371 - protein, 7 aa, synthetic construct
PKNSTGA

SEQ ID NO: 78372 - protein, 7 aa, synthetic construct
QVHKTIL

SEQ ID NO: 78373 - protein, 7 aa, synthetic construct
SKPMQHY

SEQ ID NO: 78374 - protein, 7 aa, synthetic construct
TRAGNSI

SEQ ID NO: 78375 - protein, 7 aa, synthetic construct
AMMNRET

SEQ ID NO: 78376 - protein, 7 aa, synthetic construct
MPEHRQQ

SEQ ID NO: 78377 - protein, 7 aa, synthetic construct
NAPQLNR

SEQ ID NO: 78378 - protein, 7 aa, synthetic construct
YIHSRVD

SEQ ID NO: 78379 - protein, 7 aa, synthetic construct
PGSYRAE

SEQ ID NO: 78380 - protein, 7 aa, synthetic construct
AFMHPDP

SEQ ID NO: 78381 - protein, 7 aa, synthetic construct
QLMSAGP

SEQ ID NO: 78382 - protein, 7 aa, synthetic construct
NPIPSTH

SEQ ID NO: 78383 - protein, 7 aa, synthetic construct
GHGNPIQ

SEQ ID NO: 78384 - protein, 7 aa, synthetic construct
AQGGRNY

SEQ ID NO: 78385 - protein, 7 aa, synthetic construct
RDKVFTQ

SEQ ID NO: 78386 - protein, 7 aa, synthetic construct
NVSKTTI

SEQ ID NO: 78387 - protein, 7 aa, synthetic construct
LIAFSAE

SEQ ID NO: 78388 - protein, 7 aa, synthetic construct
SQEKGYT

SEQ ID NO: 78389 - protein, 7 aa, synthetic construct
QNFAKLS

SEQ ID NO: 78390 - protein, 7 aa, synthetic construct
SRLDSKM

SEQ ID NO: 78391 - protein, 7 aa, synthetic construct
LGMANEN

SEQ ID NO: 78392 - protein, 7 aa, synthetic construct
KMPDFNN

SEQ ID NO: 78393 - protein, 7 aa, synthetic construct
NMSSKFP

SEQ ID NO: 78394 - protein, 7 aa, synthetic construct
QTRMNEG

SEQ ID NO: 78395 - protein, 7 aa, synthetic construct
DPHSVTR

SEQ ID NO: 78396 - protein, 7 aa, synthetic construct
RQNASTS

SEQ ID NO: 78397 - protein, 7 aa, synthetic construct
KVKTNAE

SEQ ID NO: 78398 - protein, 7 aa, synthetic construct
DVFSSKP

SEQ ID NO: 78399 - protein, 7 aa, synthetic construct
KKSDTGN

SEQ ID NO: 78400 - protein, 7 aa, synthetic construct
LPFGRPT

SEQ ID NO: 78401 - protein, 7 aa, synthetic construct
QHSRGVL

SEQ ID NO: 78402 - protein, 7 aa, synthetic construct
EFPMRQE

SEQ ID NO: 78403 - protein, 7 aa, synthetic construct
PFGNGLN

SEQ ID NO: 78404 - protein, 7 aa, synthetic construct
KAASGSE

SEQ ID NO: 78405 - protein, 7 aa, synthetic construct
VISQTQS

SEQ ID NO: 78406 - protein, 7 aa, synthetic construct
SRAMAEH

SEQ ID NO: 78407 - protein, 7 aa, synthetic construct
RNSPATS

SEQ ID NO: 78408 - protein, 7 aa, synthetic construct
DKHIRSP

SEQ ID NO: 78409 - protein, 7 aa, synthetic construct
YAQAGER

SEQ ID NO: 78410 - protein, 7 aa, synthetic construct
EERRNVA

SEQ ID NO: 78411 - protein, 7 aa, synthetic construct
GMQTLIE

SEQ ID NO: 78412 - protein, 7 aa, synthetic construct
PKTPNGA

SEQ ID NO: 78413 - protein, 7 aa, synthetic construct
TRYKLES

SEQ ID NO: 78414 - protein, 7 aa, synthetic construct
KTEHILL

SEQ ID NO: 78415 - protein, 7 aa, synthetic construct
PPKSQGG

SEQ ID NO: 78416 - protein, 7 aa, synthetic construct
RTRDSNE

SEQ ID NO: 78417 - protein, 7 aa, synthetic construct
NQSKSNG

SEQ ID NO: 78418 - protein, 7 aa, synthetic construct
HRETMSA

SEQ ID NO: 78419 - protein, 7 aa, synthetic construct
PNHPSSF

SEQ ID NO: 78420 - protein, 7 aa, synthetic construct
LKYDQYK

SEQ ID NO: 78421 - protein, 7 aa, synthetic construct
HPINHEE

SEQ ID NO: 78422 - protein, 7 aa, synthetic construct
GPHPRGM

SEQ ID NO: 78423 - protein, 7 aa, synthetic construct
TKNGQAI

SEQ ID NO: 78424 - protein, 7 aa, synthetic construct
MVGVAMQ

SEQ ID NO: 78425 - protein, 7 aa, synthetic construct
HQYSKTH

SEQ ID NO: 78426 - protein, 7 aa, synthetic construct
TLQVKGS

SEQ ID NO: 78427 - protein, 7 aa, synthetic construct
MHGPKTA

SEQ ID NO: 78428 - protein, 7 aa, synthetic construct
AGMTFEK

SEQ ID NO: 78429 - protein, 7 aa, synthetic construct
NGHSVDP

SEQ ID NO: 78430 - protein, 7 aa, synthetic construct
YPKTTQS

SEQ ID NO: 78431 - protein, 7 aa, synthetic construct
QPPGTLY

SEQ ID NO: 78432 - protein, 7 aa, synthetic construct
IKANQPG

SEQ ID NO: 78433 - protein, 7 aa, synthetic construct
FGKQEHT

SEQ ID NO: 78434 - protein, 7 aa, synthetic construct
TGLKNMQ

SEQ ID NO: 78435 - protein, 7 aa, synthetic construct
RWQAKEP

SEQ ID NO: 78436 - protein, 7 aa, synthetic construct
QRHLQNM

SEQ ID NO: 78437 - protein, 7 aa, synthetic construct
TVNNAGH

SEQ ID NO: 78438 - protein, 7 aa, synthetic construct
KDKGYNQ

SEQ ID NO: 78439 - protein, 7 aa, synthetic construct
MGRDGNN

SEQ ID NO: 78440 - protein, 7 aa, synthetic construct
DESNVKR

SEQ ID NO: 78441 - protein, 7 aa, synthetic construct
IHDPSKA

SEQ ID NO: 78442 - protein, 7 aa, synthetic construct
DARLSVD

SEQ ID NO: 78443 - protein, 7 aa, synthetic construct
HKIEDGE

SEQ ID NO: 78444 - protein, 7 aa, synthetic construct
GGNTIIG

SEQ ID NO: 78445 - protein, 7 aa, synthetic construct
KTQNAAS

SEQ ID NO: 78446 - protein, 7 aa, synthetic construct
SPHTANQ

SEQ ID NO: 78447 - protein, 7 aa, synthetic construct
MRTGPVA

SEQ ID NO: 78448 - protein, 7 aa, synthetic construct
LNGVQTI

SEQ ID NO: 78449 - protein, 7 aa, synthetic construct
HPGSHAV

SEQ ID NO: 78450 - protein, 7 aa, synthetic construct
NASLTQP

SEQ ID NO: 78451 - protein, 7 aa, synthetic construct
SLTPRTP

SEQ ID NO: 78452 - protein, 7 aa, synthetic construct
IWADHGN

SEQ ID NO: 78453 - protein, 7 aa, synthetic construct
SPGAVYS

SEQ ID NO: 78454 - protein, 7 aa, synthetic construct
WGKSNVY

SEQ ID NO: 78455 - protein, 7 aa, synthetic construct
ITGEHKA

SEQ ID NO: 78456 - protein, 7 aa, synthetic construct
TTTLNRD

SEQ ID NO: 78457 - protein, 7 aa, synthetic construct
ERTTIPA

SEQ ID NO: 78458 - protein, 7 aa, synthetic construct
LNHGEVY

SEQ ID NO: 78459 - protein, 7 aa, synthetic construct
KNANKDP

SEQ ID NO: 78460 - protein, 7 aa, synthetic construct
REAGVSN

SEQ ID NO: 78461 - protein, 7 aa, synthetic construct
NPRHPYT

SEQ ID NO: 78462 - protein, 7 aa, synthetic construct
DYDSVKP

SEQ ID NO: 78463 - protein, 7 aa, synthetic construct
HVNSTKT

SEQ ID NO: 78464 - protein, 7 aa, synthetic construct
NLGAKVN

SEQ ID NO: 78465 - protein, 7 aa, synthetic construct
RDRNWTD

SEQ ID NO: 78466 - protein, 7 aa, synthetic construct
YKPTLND

SEQ ID NO: 78467 - protein, 7 aa, synthetic construct
YHSQVGI

SEQ ID NO: 78468 - protein, 7 aa, synthetic construct
AVTVKGD

SEQ ID NO: 78469 - protein, 7 aa, synthetic construct
PKMVSVN

SEQ ID NO: 78470 - protein, 7 aa, synthetic construct
QEVRSIL

SEQ ID NO: 78471 - protein, 7 aa, synthetic construct
KHFTEQP

SEQ ID NO: 78472 - protein, 7 aa, synthetic construct
IFGNDSP

SEQ ID NO: 78473 - protein, 7 aa, synthetic construct
YVVNKNE

SEQ ID NO: 78474 - protein, 7 aa, synthetic construct
RPENAGN

SEQ ID NO: 78475 - protein, 7 aa, synthetic construct
LSGHQFG

SEQ ID NO: 78476 - protein, 7 aa, synthetic construct
KSTHNQW

SEQ ID NO: 78477 - protein, 7 aa, synthetic construct
MVHGEYI

SEQ ID NO: 78478 - protein, 7 aa, synthetic construct
WDHRAPA

SEQ ID NO: 78479 - protein, 7 aa, synthetic construct
QNRGQPP

SEQ ID NO: 78480 - protein, 7 aa, synthetic construct
DRQARDA

SEQ ID NO: 78481 - protein, 7 aa, synthetic construct
MVVNAQK

SEQ ID NO: 78482 - protein, 7 aa, synthetic construct
QQLNANS

SEQ ID NO: 78483 - protein, 7 aa, synthetic construct
LGMANHD

SEQ ID NO: 78484 - protein, 7 aa, synthetic construct
TEPIFRT

SEQ ID NO: 78485 - protein, 7 aa, synthetic construct
LHNDVVK

SEQ ID NO: 78486 - protein, 7 aa, synthetic construct
PWGDAEK

SEQ ID NO: 78487 - protein, 7 aa, synthetic construct
IRKEMNL

SEQ ID NO: 78488 - protein, 7 aa, synthetic construct
GIFINSA

SEQ ID NO: 78489 - protein, 7 aa, synthetic construct
TLVRTDK

SEQ ID NO: 78490 - protein, 7 aa, synthetic construct
EHFRQHP

SEQ ID NO: 78491 - protein, 7 aa, synthetic construct
WKDAHQR

SEQ ID NO: 78492 - protein, 7 aa, synthetic construct
SSFAKAV

SEQ ID NO: 78493 - protein, 7 aa, synthetic construct
MYTKQSE

SEQ ID NO: 78494 - protein, 7 aa, synthetic construct
KPSSLAY

SEQ ID NO: 78495 - protein, 7 aa, synthetic construct
DQNFRNP

SEQ ID NO: 78496 - protein, 7 aa, synthetic construct
YSGSQGA

SEQ ID NO: 78497 - protein, 7 aa, synthetic construct
VKPTYMP

SEQ ID NO: 78498 - protein, 7 aa, synthetic construct
TVWTESG

SEQ ID NO: 78499 - protein, 7 aa, synthetic construct
FHKNAVG

SEQ ID NO: 78500 - protein, 7 aa, synthetic construct
NAERQFK

SEQ ID NO: 78501 - protein, 7 aa, synthetic construct
SGITMMP

SEQ ID NO: 78502 - protein, 7 aa, synthetic construct
HEAKYPM

SEQ ID NO: 78503 - protein, 7 aa, synthetic construct
SAKDPKD

SEQ ID NO: 78504 - protein, 7 aa, synthetic construct
RDDHLRN

SEQ ID NO: 78505 - protein, 7 aa, synthetic construct
IPQFNEP

SEQ ID NO: 78506 - protein, 7 aa, synthetic construct
HVGNMPA

SEQ ID NO: 78507 - protein, 7 aa, synthetic construct
QDFSNRI

SEQ ID NO: 78508 - protein, 7 aa, synthetic construct
WNIKTVN

SEQ ID NO: 78509 - protein, 7 aa, synthetic construct
LPQLTPT

SEQ ID NO: 78510 - protein, 7 aa, synthetic construct
MRPNTMQ

SEQ ID NO: 78511 - protein, 7 aa, synthetic construct
IGYQNDK

SEQ ID NO: 78512 - protein, 7 aa, synthetic construct
SHNVAPA

SEQ ID NO: 78513 - protein, 7 aa, synthetic construct
EIKKMGT

SEQ ID NO: 78514 - protein, 7 aa, synthetic construct
RIGERHM

SEQ ID NO: 78515 - protein, 7 aa, synthetic construct
SQSMGQM

SEQ ID NO: 78516 - protein, 7 aa, synthetic construct
FTMHKNH

SEQ ID NO: 78517 - protein, 7 aa, synthetic construct
NAAKMTM

SEQ ID NO: 78518 - protein, 7 aa, synthetic construct
DLGHNMR

SEQ ID NO: 78519 - protein, 7 aa, synthetic construct
TDLKMSS

SEQ ID NO: 78520 - protein, 7 aa, synthetic construct
FPLQSEF

SEQ ID NO: 78521 - protein, 7 aa, synthetic construct
FVNGRMP

SEQ ID NO: 78522 - protein, 7 aa, synthetic construct
NNKHMED

SEQ ID NO: 78523 - protein, 7 aa, synthetic construct
KAGEAMA

SEQ ID NO: 78524 - protein, 7 aa, synthetic construct
DYNQNPK

SEQ ID NO: 78525 - protein, 7 aa, synthetic construct
IQTPGGT

SEQ ID NO: 78526 - protein, 7 aa, synthetic construct
KANNTGP

SEQ ID NO: 78527 - protein, 7 aa, synthetic construct
PLRHSPI

SEQ ID NO: 78528 - protein, 7 aa, synthetic construct
PDQTKRL

SEQ ID NO: 78529 - protein, 7 aa, synthetic construct
KAYMGGI

SEQ ID NO: 78530 - protein, 7 aa, synthetic construct
EPHHMGV

SEQ ID NO: 78531 - protein, 7 aa, synthetic construct
NVFGGGN

SEQ ID NO: 78532 - protein, 7 aa, synthetic construct
HPPKQDK

SEQ ID NO: 78533 - protein, 7 aa, synthetic construct
SKSENSW

SEQ ID NO: 78534 - protein, 7 aa, synthetic construct
NPKYSAD

SEQ ID NO: 78535 - protein, 7 aa, synthetic construct
RGSHSAV

SEQ ID NO: 78536 - protein, 7 aa, synthetic construct
HTAIAMT

SEQ ID NO: 78537 - protein, 7 aa, synthetic construct
RSSNTTG

SEQ ID NO: 78538 - protein, 7 aa, synthetic construct
ATKPAGI

SEQ ID NO: 78539 - protein, 7 aa, synthetic construct
SANQRGG

SEQ ID NO: 78540 - protein, 7 aa, synthetic construct
KTQITLG

SEQ ID NO: 78541 - protein, 7 aa, synthetic construct
LFKDEKP

SEQ ID NO: 78542 - protein, 7 aa, synthetic construct
MQTKSSA

SEQ ID NO: 78543 - protein, 7 aa, synthetic construct
GHQMYTV

SEQ ID NO: 78544 - protein, 7 aa, synthetic construct
SDYKPSF

SEQ ID NO: 78545 - protein, 7 aa, synthetic construct
IVAQHDN

SEQ ID NO: 78546 - protein, 7 aa, synthetic construct
NVNTMGS

SEQ ID NO: 78547 - protein, 7 aa, synthetic construct
LKEFRLN

SEQ ID NO: 78548 - protein, 7 aa, synthetic construct
TKGNVQS

SEQ ID NO: 78549 - protein, 7 aa, synthetic construct
QSNFPKQ

SEQ ID NO: 78550 - protein, 7 aa, synthetic construct
ISVPTTE

SEQ ID NO: 78551 - protein, 7 aa, synthetic construct
NIKHTHG

SEQ ID NO: 78552 - protein, 7 aa, synthetic construct
LAKQTGS

SEQ ID NO: 78553 - protein, 7 aa, synthetic construct
THDQKKE

SEQ ID NO: 78554 - protein, 7 aa, synthetic construct
QHKITES

SEQ ID NO: 78555 - protein, 7 aa, synthetic construct
DFGKHGI

SEQ ID NO: 78556 - protein, 7 aa, synthetic construct
DKKGMMA

SEQ ID NO: 78557 - protein, 7 aa, synthetic construct
MHGEYRI

SEQ ID NO: 78558 - protein, 7 aa, synthetic construct
EGTLVRS

SEQ ID NO: 78559 - protein, 7 aa, synthetic construct
RGISARE

SEQ ID NO: 78560 - protein, 7 aa, synthetic construct
ASHVMRG

SEQ ID NO: 78561 - protein, 7 aa, synthetic construct
WILHENG

SEQ ID NO: 78562 - protein, 7 aa, synthetic construct
QKQIDIT

SEQ ID NO: 78563 - protein, 7 aa, synthetic construct
RPHMEDW

SEQ ID NO: 78564 - protein, 7 aa, synthetic construct
NVGTRNA

SEQ ID NO: 78565 - protein, 7 aa, synthetic construct
FQNGSKG

SEQ ID NO: 78566 - protein, 7 aa, synthetic construct
KNSAGPG

SEQ ID NO: 78567 - protein, 7 aa, synthetic construct
YNTTAKG

SEQ ID NO: 78568 - protein, 7 aa, synthetic construct
NVISTHE

SEQ ID NO: 78569 - protein, 7 aa, synthetic construct
MPSLHPD

SEQ ID NO: 78570 - protein, 7 aa, synthetic construct
GGNGYNS

SEQ ID NO: 78571 - protein, 7 aa, synthetic construct
RPAPDGG

SEQ ID NO: 78572 - protein, 7 aa, synthetic construct
SPYIVKD

SEQ ID NO: 78573 - protein, 7 aa, synthetic construct
GQPLFDG

SEQ ID NO: 78574 - protein, 7 aa, synthetic construct
RGTVRTE

SEQ ID NO: 78575 - protein, 7 aa, synthetic construct
TSSYGDP

SEQ ID NO: 78576 - protein, 7 aa, synthetic construct
FRNPEFG

SEQ ID NO: 78577 - protein, 7 aa, synthetic construct
PKNSTGF

SEQ ID NO: 78578 - protein, 7 aa, synthetic construct
GDHRELL

SEQ ID NO: 78579 - protein, 7 aa, synthetic construct
GIHIEPV

SEQ ID NO: 78580 - protein, 7 aa, synthetic construct
PIKPHLG

SEQ ID NO: 78581 - protein, 7 aa, synthetic construct
ITNLNQR

SEQ ID NO: 78582 - protein, 7 aa, synthetic construct
NQSQGIM

SEQ ID NO: 78583 - protein, 7 aa, synthetic construct
DVRSSPK

SEQ ID NO: 78584 - protein, 7 aa, synthetic construct
ISQVNPV

SEQ ID NO: 78585 - protein, 7 aa, synthetic construct
VQQGPPW

SEQ ID NO: 78586 - protein, 7 aa, synthetic construct
HTQTDAY

SEQ ID NO: 78587 - protein, 7 aa, synthetic construct
RRDDDKG

SEQ ID NO: 78588 - protein, 7 aa, synthetic construct
DWAAKLG

SEQ ID NO: 78589 - protein, 7 aa, synthetic construct
KNVGMSG

SEQ ID NO: 78590 - protein, 7 aa, synthetic construct
YNMTMVP

SEQ ID NO: 78591 - protein, 7 aa, synthetic construct
KTRQDEA

SEQ ID NO: 78592 - protein, 7 aa, synthetic construct
RGTANTG

SEQ ID NO: 78593 - protein, 7 aa, synthetic construct
MHPAKNP

SEQ ID NO: 78594 - protein, 7 aa, synthetic construct
GKTHVSV

SEQ ID NO: 78595 - protein, 7 aa, synthetic construct
SVSKGDI

SEQ ID NO: 78596 - protein, 7 aa, synthetic construct
GKPQSID

SEQ ID NO: 78597 - protein, 7 aa, synthetic construct
MMQKHDS

SEQ ID NO: 78598 - protein, 7 aa, synthetic construct
DLNSHFK

SEQ ID NO: 78599 - protein, 7 aa, synthetic construct
LKPSDQH

SEQ ID NO: 78600 - protein, 7 aa, synthetic construct
RPPVKLE

SEQ ID NO: 78601 - protein, 7 aa, synthetic construct
HSPTYMG

SEQ ID NO: 78602 - protein, 7 aa, synthetic construct
GRQPGHA

SEQ ID NO: 78603 - protein, 7 aa, synthetic construct
PSGVIKG

SEQ ID NO: 78604 - protein, 7 aa, synthetic construct
NQAVGKN

SEQ ID NO: 78605 - protein, 7 aa, synthetic construct
PEKLMTK

SEQ ID NO: 78606 - protein, 7 aa, synthetic construct
PPFDRKG

SEQ ID NO: 78607 - protein, 7 aa, synthetic construct
KNVHASQ

SEQ ID NO: 78608 - protein, 7 aa, synthetic construct
GPTNMAL

SEQ ID NO: 78609 - protein, 7 aa, synthetic construct
HPRNMVA

SEQ ID NO: 78610 - protein, 7 aa, synthetic construct
IKAVAWD

SEQ ID NO: 78611 - protein, 7 aa, synthetic construct
NVTRQFT

SEQ ID NO: 78612 - protein, 7 aa, synthetic construct
RHLIAEQ

SEQ ID NO: 78613 - protein, 7 aa, synthetic construct
LTPLGND

SEQ ID NO: 78614 - protein, 7 aa, synthetic construct
HDTSTAK

SEQ ID NO: 78615 - protein, 7 aa, synthetic construct
SIRFDAE

SEQ ID NO: 78616 - protein, 7 aa, synthetic construct
MPFTSNH

SEQ ID NO: 78617 - protein, 7 aa, synthetic construct
GQVMSVP

SEQ ID NO: 78618 - protein, 7 aa, synthetic construct
AQNRTYT

SEQ ID NO: 78619 - protein, 7 aa, synthetic construct
LRKEDMG

SEQ ID NO: 78620 - protein, 7 aa, synthetic construct
HFRDSEG

SEQ ID NO: 78621 - protein, 7 aa, synthetic construct
PSKSNQI

SEQ ID NO: 78622 - protein, 7 aa, synthetic construct
VNPLFGS

SEQ ID NO: 78623 - protein, 7 aa, synthetic construct
FRAQNSM

SEQ ID NO: 78624 - protein, 7 aa, synthetic construct
YKDTHVQ

SEQ ID NO: 78625 - protein, 7 aa, synthetic construct
PSKAGYG

SEQ ID NO: 78626 - protein, 7 aa, synthetic construct
LPDFRHT

SEQ ID NO: 78627 - protein, 7 aa, synthetic construct
PRINSGA

SEQ ID NO: 78628 - protein, 7 aa, synthetic construct
RTQASNS

SEQ ID NO: 78629 - protein, 7 aa, synthetic construct
SLHQTGI

SEQ ID NO: 78630 - protein, 7 aa, synthetic construct
MAFSQTP

SEQ ID NO: 78631 - protein, 7 aa, synthetic construct
GYKGTNV

SEQ ID NO: 78632 - protein, 7 aa, synthetic construct
ETKSIFA

SEQ ID NO: 78633 - protein, 7 aa, synthetic construct
THPDNRY

SEQ ID NO: 78634 - protein, 7 aa, synthetic construct
NTIRLPE

SEQ ID NO: 78635 - protein, 7 aa, synthetic construct
TRIQDVI

SEQ ID NO: 78636 - protein, 7 aa, synthetic construct
IGMQRDK

SEQ ID NO: 78637 - protein, 7 aa, synthetic construct
NTLSIKE

SEQ ID NO: 78638 - protein, 7 aa, synthetic construct
TMSGSKP

SEQ ID NO: 78639 - protein, 7 aa, synthetic construct
QTHLQSG

SEQ ID NO: 78640 - protein, 7 aa, synthetic construct
LRLKDTM

SEQ ID NO: 78641 - protein, 7 aa, synthetic construct
NNVTGNR

SEQ ID NO: 78642 - protein, 7 aa, synthetic construct
SNMVTEG

SEQ ID NO: 78643 - protein, 7 aa, synthetic construct
MNPYKMA

SEQ ID NO: 78644 - protein, 7 aa, synthetic construct
RSASQNS

SEQ ID NO: 78645 - protein, 7 aa, synthetic construct
QAQGAQL

SEQ ID NO: 78646 - protein, 7 aa, synthetic construct
AQVQATA

SEQ ID NO: 78647 - protein, 7 aa, synthetic construct
QHNNITA

SEQ ID NO: 78648 - protein, 7 aa, synthetic construct
RLDTYNH

SEQ ID NO: 78649 - protein, 7 aa, synthetic construct
RMKDVDK

SEQ ID NO: 78650 - protein, 7 aa, synthetic construct
ANHQVMA

SEQ ID NO: 78651 - protein, 7 aa, synthetic construct
NSRAMHV

SEQ ID NO: 78652 - protein, 7 aa, synthetic construct
QPTGGHT

SEQ ID NO: 78653 - protein, 7 aa, synthetic construct
TTGPTKA

SEQ ID NO: 78654 - protein, 7 aa, synthetic construct
MLHMAPD

SEQ ID NO: 78655 - protein, 7 aa, synthetic construct
DMQQQSK

SEQ ID NO: 78656 - protein, 7 aa, synthetic construct
NKGGASG

SEQ ID NO: 78657 - protein, 7 aa, synthetic construct
ELKSFKM

SEQ ID NO: 78658 - protein, 7 aa, synthetic construct
KTSVMST

SEQ ID NO: 78659 - protein, 7 aa, synthetic construct
LQHEGSP

SEQ ID NO: 78660 - protein, 7 aa, synthetic construct
DFQYKKT

SEQ ID NO: 78661 - protein, 7 aa, synthetic construct
RETDGRV

SEQ ID NO: 78662 - protein, 7 aa, synthetic construct
IGEHMKQ

SEQ ID NO: 78663 - protein, 7 aa, synthetic construct
MPARIAP

SEQ ID NO: 78664 - protein, 7 aa, synthetic construct
KSSIGNS

SEQ ID NO: 78665 - protein, 7 aa, synthetic construct
KNKESAG

SEQ ID NO: 78666 - protein, 7 aa, synthetic construct
THNSRPE

SEQ ID NO: 78667 - protein, 7 aa, synthetic construct
YLDTEKH

SEQ ID NO: 78668 - protein, 7 aa, synthetic construct
GYSANAL

SEQ ID NO: 78669 - protein, 7 aa, synthetic construct
FTRQNHP

SEQ ID NO: 78670 - protein, 7 aa, synthetic construct
FNSVHYG

SEQ ID NO: 78671 - protein, 7 aa, synthetic construct
NMAGVQV

SEQ ID NO: 78672 - protein, 7 aa, synthetic construct
GQSSSGR

SEQ ID NO: 78673 - protein, 7 aa, synthetic construct
KTMDSQR

SEQ ID NO: 78674 - protein, 7 aa, synthetic construct
RSLHHVE

SEQ ID NO: 78675 - protein, 7 aa, synthetic construct
YRGNQFV

SEQ ID NO: 78676 - protein, 7 aa, synthetic construct
NRISGDR

SEQ ID NO: 78677 - protein, 7 aa, synthetic construct
TRAAMEM

SEQ ID NO: 78678 - protein, 7 aa, synthetic construct
KSDDPGK

SEQ ID NO: 78679 - protein, 7 aa, synthetic construct
FFSSQLP

SEQ ID NO: 78680 - protein, 7 aa, synthetic construct
GIGVGSD

SEQ ID NO: 78681 - protein, 7 aa, synthetic construct
SPTAFTG

SEQ ID NO: 78682 - protein, 7 aa, synthetic construct
QHVPVGA

SEQ ID NO: 78683 - protein, 7 aa, synthetic construct
KKNNPDD

SEQ ID NO: 78684 - protein, 7 aa, synthetic construct
DTKPFGA

SEQ ID NO: 78685 - protein, 7 aa, synthetic construct
VARGHIN

SEQ ID NO: 78686 - protein, 7 aa, synthetic construct
MPQYVGD

SEQ ID NO: 78687 - protein, 7 aa, synthetic construct
AAIKIMN

SEQ ID NO: 78688 - protein, 7 aa, synthetic construct
TIHAVKP

SEQ ID NO: 78689 - protein, 7 aa, synthetic construct
NDGHRPM

SEQ ID NO: 78690 - protein, 7 aa, synthetic construct
NKTFSHM

SEQ ID NO: 78691 - protein, 7 aa, synthetic construct
YLDKALL

SEQ ID NO: 78692 - protein, 7 aa, synthetic construct
KNSDRVF

SEQ ID NO: 78693 - protein, 7 aa, synthetic construct
IRDTWKN

SEQ ID NO: 78694 - protein, 7 aa, synthetic construct
TKAIRFA

SEQ ID NO: 78695 - protein, 7 aa, synthetic construct
HTSMHGH

SEQ ID NO: 78696 - protein, 7 aa, synthetic construct
DNSMRLM

SEQ ID NO: 78697 - protein, 7 aa, synthetic construct
LSFGQGV

SEQ ID NO: 78698 - protein, 7 aa, synthetic construct
VHHATAH

SEQ ID NO: 78699 - protein, 7 aa, synthetic construct
FNKDIKD

SEQ ID NO: 78700 - protein, 7 aa, synthetic construct
WSKAPSH

SEQ ID NO: 78701 - protein, 7 aa, synthetic construct
GHKHTHI

SEQ ID NO: 78702 - protein, 7 aa, synthetic construct
NSMNAQS

SEQ ID NO: 78703 - protein, 7 aa, synthetic construct
IPKEMGV

SEQ ID NO: 78704 - protein, 7 aa, synthetic construct
YSQTKAS

SEQ ID NO: 78705 - protein, 7 aa, synthetic construct
MSQVAFA

SEQ ID NO: 78706 - protein, 7 aa, synthetic construct
RTEHTKI

SEQ ID NO: 78707 - protein, 7 aa, synthetic construct
AKNEGKM

SEQ ID NO: 78708 - protein, 7 aa, synthetic construct
IVEARSN

SEQ ID NO: 78709 - protein, 7 aa, synthetic construct
RMDTSTG

SEQ ID NO: 78710 - protein, 7 aa, synthetic construct
HGNRDNF

SEQ ID NO: 78711 - protein, 7 aa, synthetic construct
SGSQMYQ

SEQ ID NO: 78712 - protein, 7 aa, synthetic construct
KLMLHEH

SEQ ID NO: 78713 - protein, 7 aa, synthetic construct
YRTEKIY

SEQ ID NO: 78714 - protein, 7 aa, synthetic construct
SDMQIRK

SEQ ID NO: 78715 - protein, 7 aa, synthetic construct
REVGMTR

SEQ ID NO: 78716 - protein, 7 aa, synthetic construct
FGVMGVD

SEQ ID NO: 78717 - protein, 7 aa, synthetic construct
RAPVGDY

SEQ ID NO: 78718 - protein, 7 aa, synthetic construct
GNGVRTD

SEQ ID NO: 78719 - protein, 7 aa, synthetic construct
KGQKNEN

SEQ ID NO: 78720 - protein, 7 aa, synthetic construct
HRDFNLV

SEQ ID NO: 78721 - protein, 7 aa, synthetic construct
LANQATT

SEQ ID NO: 78722 - protein, 7 aa, synthetic construct
TIEARAT

SEQ ID NO: 78723 - protein, 7 aa, synthetic construct
QNRGMHQ

SEQ ID NO: 78724 - protein, 7 aa, synthetic construct
IQARSSE

SEQ ID NO: 78725 - protein, 7 aa, synthetic construct
ASRQDSL

SEQ ID NO: 78726 - protein, 7 aa, synthetic construct
FTSHPIS

SEQ ID NO: 78727 - protein, 7 aa, synthetic construct
KFNDFQM

SEQ ID NO: 78728 - protein, 7 aa, synthetic construct
LLPGSLQ

SEQ ID NO: 78729 - protein, 7 aa, synthetic construct
SERKHML

SEQ ID NO: 78730 - protein, 7 aa, synthetic construct
LQNMSDA

SEQ ID NO: 78731 - protein, 7 aa, synthetic construct
GKQTGQG

SEQ ID NO: 78732 - protein, 7 aa, synthetic construct
FHPHQGQ

SEQ ID NO: 78733 - protein, 7 aa, synthetic construct
TRTNTGP

SEQ ID NO: 78734 - protein, 7 aa, synthetic construct
QTKSMTI

SEQ ID NO: 78735 - protein, 7 aa, synthetic construct
PYGGQKT

SEQ ID NO: 78736 - protein, 7 aa, synthetic construct
QPPYFEG

SEQ ID NO: 78737 - protein, 7 aa, synthetic construct
FTPSPSR

SEQ ID NO: 78738 - protein, 7 aa, synthetic construct
SRIETRM

SEQ ID NO: 78739 - protein, 7 aa, synthetic construct
GGKNLQS

SEQ ID NO: 78740 - protein, 7 aa, synthetic construct
GKAMLMQ

SEQ ID NO: 78741 - protein, 7 aa, synthetic construct
NTSKVVP

SEQ ID NO: 78742 - protein, 7 aa, synthetic construct
TKTSQIL

SEQ ID NO: 78743 - protein, 7 aa, synthetic construct
TRHPGQQ

SEQ ID NO: 78744 - protein, 7 aa, synthetic construct
VSHTAYP

SEQ ID NO: 78745 - protein, 7 aa, synthetic construct
TGKEKWN

SEQ ID NO: 78746 - protein, 7 aa, synthetic construct
HVNLAIN

SEQ ID NO: 78747 - protein, 7 aa, synthetic construct
ATRGSES

SEQ ID NO: 78748 - protein, 7 aa, synthetic construct
AERAAGM

SEQ ID NO: 78749 - protein, 7 aa, synthetic construct
FRQKFDD

SEQ ID NO: 78750 - protein, 7 aa, synthetic construct
WKQHWPD

SEQ ID NO: 78751 - protein, 7 aa, synthetic construct
IKLPSEH

SEQ ID NO: 78752 - protein, 7 aa, synthetic construct
PKSNGQM

SEQ ID NO: 78753 - protein, 7 aa, synthetic construct
NPRTNAP

SEQ ID NO: 78754 - protein, 7 aa, synthetic construct
QHSQISI

SEQ ID NO: 78755 - protein, 7 aa, synthetic construct
ADRKLNP

SEQ ID NO: 78756 - protein, 7 aa, synthetic construct
MRANNQN

SEQ ID NO: 78757 - protein, 7 aa, synthetic construct
IYKNTNQ

SEQ ID NO: 78758 - protein, 7 aa, synthetic construct
PRSSSDA

SEQ ID NO: 78759 - protein, 7 aa, synthetic construct
RQDHTAW

SEQ ID NO: 78760 - protein, 7 aa, synthetic construct
MEKTEWS

SEQ ID NO: 78761 - protein, 7 aa, synthetic construct
WMMKEQA

SEQ ID NO: 78762 - protein, 7 aa, synthetic construct
TADGRNW

SEQ ID NO: 78763 - protein, 7 aa, synthetic construct
QQLQGGK

SEQ ID NO: 78764 - protein, 7 aa, synthetic construct
DVLNQKK

SEQ ID NO: 78765 - protein, 7 aa, synthetic construct
AGHNQRS

SEQ ID NO: 78766 - protein, 7 aa, synthetic construct
THQKDRM

SEQ ID NO: 78767 - protein, 7 aa, synthetic construct
SGKHHVS

SEQ ID NO: 78768 - protein, 7 aa, synthetic construct
QTSILER

SEQ ID NO: 78769 - protein, 7 aa, synthetic construct
ATNEQKI

SEQ ID NO: 78770 - protein, 7 aa, synthetic construct
QTENKIG

SEQ ID NO: 78771 - protein, 7 aa, synthetic construct
NYAGTEH

SEQ ID NO: 78772 - protein, 7 aa, synthetic construct
ERQGVAG

SEQ ID NO: 78773 - protein, 7 aa, synthetic construct
VKDMKSG

SEQ ID NO: 78774 - protein, 7 aa, synthetic construct
MISTDMK

SEQ ID NO: 78775 - protein, 7 aa, synthetic construct
DKMRVPT

SEQ ID NO: 78776 - protein, 7 aa, synthetic construct
GSLQSHT

SEQ ID NO: 78777 - protein, 7 aa, synthetic construct
VMKQWGE

SEQ ID NO: 78778 - protein, 7 aa, synthetic construct
REGHHTI

SEQ ID NO: 78779 - protein, 7 aa, synthetic construct
FHTGHMP

SEQ ID NO: 78780 - protein, 7 aa, synthetic construct
GNRGVGV

SEQ ID NO: 78781 - protein, 7 aa, synthetic construct
MNDAIKN

SEQ ID NO: 78782 - protein, 7 aa, synthetic construct
HQRPEIT

SEQ ID NO: 78783 - protein, 7 aa, synthetic construct
QPFGPHA

SEQ ID NO: 78784 - protein, 7 aa, synthetic construct
HEGPIKN

SEQ ID NO: 78785 - protein, 7 aa, synthetic construct
VDDKVRT

SEQ ID NO: 78786 - protein, 7 aa, synthetic construct
SAQHSLA

SEQ ID NO: 78787 - protein, 7 aa, synthetic construct
QHGTNAL

SEQ ID NO: 78788 - protein, 7 aa, synthetic construct
WDSVTST

SEQ ID NO: 78789 - protein, 7 aa, synthetic construct
NAGNVQQ

SEQ ID NO: 78790 - protein, 7 aa, synthetic construct
MGGSTVP

SEQ ID NO: 78791 - protein, 7 aa, synthetic construct
WANRHNN

SEQ ID NO: 78792 - protein, 7 aa, synthetic construct
TIFNSTD

SEQ ID NO: 78793 - protein, 7 aa, synthetic construct
MRSQSNI

SEQ ID NO: 78794 - protein, 7 aa, synthetic construct
AVPNKAI

SEQ ID NO: 78795 - protein, 7 aa, synthetic construct
PYKMTGD

SEQ ID NO: 78796 - protein, 7 aa, synthetic construct
TEQSRTT

SEQ ID NO: 78797 - protein, 7 aa, synthetic construct
IARDHPI

SEQ ID NO: 78798 - protein, 7 aa, synthetic construct
SSKSANA

SEQ ID NO: 78799 - protein, 7 aa, synthetic construct
IISMQKT

SEQ ID NO: 78800 - protein, 7 aa, synthetic construct
KKPEQKS

SEQ ID NO: 78801 - protein, 7 aa, synthetic construct
GPGHQIR

SEQ ID NO: 78802 - protein, 7 aa, synthetic construct
RIDPARL

SEQ ID NO: 78803 - protein, 7 aa, synthetic construct
TFSVPQG

SEQ ID NO: 78804 - protein, 7 aa, synthetic construct
VWDHIKG

SEQ ID NO: 78805 - protein, 7 aa, synthetic construct
SNAHSRI

SEQ ID NO: 78806 - protein, 7 aa, synthetic construct
MMNVVRT

SEQ ID NO: 78807 - protein, 7 aa, synthetic construct
IRDIYGA

SEQ ID NO: 78808 - protein, 7 aa, synthetic construct
SKTYGQG

SEQ ID NO: 78809 - protein, 7 aa, synthetic construct
AAGTAQK

SEQ ID NO: 78810 - protein, 7 aa, synthetic construct
PHHQTGI

SEQ ID NO: 78811 - protein, 7 aa, synthetic construct
MVQKLGM

SEQ ID NO: 78812 - protein, 7 aa, synthetic construct
LYNGREA

SEQ ID NO: 78813 - protein, 7 aa, synthetic construct
PPFGYTE

SEQ ID NO: 78814 - protein, 7 aa, synthetic construct
YNSKGGS

SEQ ID NO: 78815 - protein, 7 aa, synthetic construct
LDSRHLI

SEQ ID NO: 78816 - protein, 7 aa, synthetic construct
LVPIMSD

SEQ ID NO: 78817 - protein, 7 aa, synthetic construct
KNQDPFP

SEQ ID NO: 78818 - protein, 7 aa, synthetic construct
DIPHTYK

SEQ ID NO: 78819 - protein, 7 aa, synthetic construct
HSTDKHI

SEQ ID NO: 78820 - protein, 7 aa, synthetic construct
YRQLMEE

SEQ ID NO: 78821 - protein, 7 aa, synthetic construct
GVHGFAM

SEQ ID NO: 78822 - protein, 7 aa, synthetic construct
KLVDMDR

SEQ ID NO: 78823 - protein, 7 aa, synthetic construct
TIYENKR

SEQ ID NO: 78824 - protein, 7 aa, synthetic construct
QPKGANT

SEQ ID NO: 78825 - protein, 7 aa, synthetic construct
ATSKGTA

SEQ ID NO: 78826 - protein, 7 aa, synthetic construct
FGQLPAK

SEQ ID NO: 78827 - protein, 7 aa, synthetic construct
EGYPRMG

SEQ ID NO: 78828 - protein, 7 aa, synthetic construct
KFGNINP

SEQ ID NO: 78829 - protein, 7 aa, synthetic construct
QKWNEGT

SEQ ID NO: 78830 - protein, 7 aa, synthetic construct
FSSKSSS

SEQ ID NO: 78831 - protein, 7 aa, synthetic construct
VHAGTYA

SEQ ID NO: 78832 - protein, 7 aa, synthetic construct
GSKHENN

SEQ ID NO: 78833 - protein, 7 aa, synthetic construct
DRNKNQP

SEQ ID NO: 78834 - protein, 7 aa, synthetic construct
MKTTQSM

SEQ ID NO: 78835 - protein, 7 aa, synthetic construct
MARGTNP

SEQ ID NO: 78836 - protein, 7 aa, synthetic construct
PQRQSKD

SEQ ID NO: 78837 - protein, 7 aa, synthetic construct
KYQSSVA

SEQ ID NO: 78838 - protein, 7 aa, synthetic construct
RDMDGNK

SEQ ID NO: 78839 - protein, 7 aa, synthetic construct
EAHVAAE

SEQ ID NO: 78840 - protein, 7 aa, synthetic construct
TDFNRDH

SEQ ID NO: 78841 - protein, 7 aa, synthetic construct
NEKRMGT

SEQ ID NO: 78842 - protein, 7 aa, synthetic construct
VHVHMRE

SEQ ID NO: 78843 - protein, 7 aa, synthetic construct
YGSDKAS

SEQ ID NO: 78844 - protein, 7 aa, synthetic construct
IQFPGHD

SEQ ID NO: 78845 - protein, 7 aa, synthetic construct
LHYGSQK

SEQ ID NO: 78846 - protein, 7 aa, synthetic construct
THHPSVF

SEQ ID NO: 78847 - protein, 7 aa, synthetic construct
QLTSMGS

SEQ ID NO: 78848 - protein, 7 aa, synthetic construct
LFGGSDR

SEQ ID NO: 78849 - protein, 7 aa, synthetic construct
WQLSGIA

SEQ ID NO: 78850 - protein, 7 aa, synthetic construct
RQHIAGT

SEQ ID NO: 78851 - protein, 7 aa, synthetic construct
QSLTGAG

SEQ ID NO: 78852 - protein, 7 aa, synthetic construct
HMRDAYD

SEQ ID NO: 78853 - protein, 7 aa, synthetic construct
QEREHPY

SEQ ID NO: 78854 - protein, 7 aa, synthetic construct
YTHSKGY

SEQ ID NO: 78855 - protein, 7 aa, synthetic construct
TGNHNQS

SEQ ID NO: 78856 - protein, 7 aa, synthetic construct
DPVPPPN

SEQ ID NO: 78857 - protein, 7 aa, synthetic construct
FPIHGMN

SEQ ID NO: 78858 - protein, 7 aa, synthetic construct
DDRGGAN

SEQ ID NO: 78859 - protein, 7 aa, synthetic construct
HTVNKTD

SEQ ID NO: 78860 - protein, 7 aa, synthetic construct
MQGHILN

SEQ ID NO: 78861 - protein, 7 aa, synthetic construct
QNPHEQR

SEQ ID NO: 78862 - protein, 7 aa, synthetic construct
HATTKLD

SEQ ID NO: 78863 - protein, 7 aa, synthetic construct
RYPLTDH

SEQ ID NO: 78864 - protein, 7 aa, synthetic construct
GHVERIL

SEQ ID NO: 78865 - protein, 7 aa, synthetic construct
NNFGSAK

SEQ ID NO: 78866 - protein, 7 aa, synthetic construct
MSINVKV

SEQ ID NO: 78867 - protein, 7 aa, synthetic construct
IAQKKYE

SEQ ID NO: 78868 - protein, 7 aa, synthetic construct
KIPQKDP

SEQ ID NO: 78869 - protein, 7 aa, synthetic construct
RAKHMNE

SEQ ID NO: 78870 - protein, 7 aa, synthetic construct
SPKPQNS

SEQ ID NO: 78871 - protein, 7 aa, synthetic construct
RSTPVNA

SEQ ID NO: 78872 - protein, 7 aa, synthetic construct
QGKQGSL

SEQ ID NO: 78873 - protein, 7 aa, synthetic construct
APQIGER

SEQ ID NO: 78874 - protein, 7 aa, synthetic construct
TERQDRP

SEQ ID NO: 78875 - protein, 7 aa, synthetic construct
YHMTPAS

SEQ ID NO: 78876 - protein, 7 aa, synthetic construct
KPEDMAR

SEQ ID NO: 78877 - protein, 7 aa, synthetic construct
HLHSDLL

SEQ ID NO: 78878 - protein, 7 aa, synthetic construct
GMHKTQI

SEQ ID NO: 78879 - protein, 7 aa, synthetic construct
GNQKTAA

SEQ ID NO: 78880 - protein, 7 aa, synthetic construct
VQNDRQW

SEQ ID NO: 78881 - protein, 7 aa, synthetic construct
TWKIEAT

SEQ ID NO: 78882 - protein, 7 aa, synthetic construct
LSDPHGT

SEQ ID NO: 78883 - protein, 7 aa, synthetic construct
AMLGHSV

SEQ ID NO: 78884 - protein, 7 aa, synthetic construct
RAVQSER

SEQ ID NO: 78885 - protein, 7 aa, synthetic construct
TNTGKEY

SEQ ID NO: 78886 - protein, 7 aa, synthetic construct
SKEMHGK

SEQ ID NO: 78887 - protein, 7 aa, synthetic construct
KTQSSPV

SEQ ID NO: 78888 - protein, 7 aa, synthetic construct
MKDHVER

SEQ ID NO: 78889 - protein, 7 aa, synthetic construct
HHTNFSA

SEQ ID NO: 78890 - protein, 7 aa, synthetic construct
MHIGMHS

SEQ ID NO: 78891 - protein, 7 aa, synthetic construct
QEPVTMG

SEQ ID NO: 78892 - protein, 7 aa, synthetic construct
WHVQANP

SEQ ID NO: 78893 - protein, 7 aa, synthetic construct
WTPNMQG

SEQ ID NO: 78894 - protein, 7 aa, synthetic construct
RQANQTP

SEQ ID NO: 78895 - protein, 7 aa, synthetic construct
PKGLNML

SEQ ID NO: 78896 - protein, 7 aa, synthetic construct
MSLRTSM

SEQ ID NO: 78897 - protein, 7 aa, synthetic construct
TRPQEFR

SEQ ID NO: 78898 - protein, 7 aa, synthetic construct
SQQYGEV

SEQ ID NO: 78899 - protein, 7 aa, synthetic construct
SQKTTNP

SEQ ID NO: 78900 - protein, 7 aa, synthetic construct
SAGYDHV

SEQ ID NO: 78901 - protein, 7 aa, synthetic construct
FEKRGHD

SEQ ID NO: 78902 - protein, 7 aa, synthetic construct
KYGNTTG

SEQ ID NO: 78903 - protein, 7 aa, synthetic construct
VEFHNGP

SEQ ID NO: 78904 - protein, 7 aa, synthetic construct
NSTTRHN

SEQ ID NO: 78905 - protein, 7 aa, synthetic construct
HDGMKHF

SEQ ID NO: 78906 - protein, 7 aa, synthetic construct
VINKGVG

SEQ ID NO: 78907 - protein, 7 aa, synthetic construct
EKGGRYT

SEQ ID NO: 78908 - protein, 7 aa, synthetic construct
LRPPNTN

SEQ ID NO: 78909 - protein, 7 aa, synthetic construct
NDMSKHS

SEQ ID NO: 78910 - protein, 7 aa, synthetic construct
PTTKTAS

SEQ ID NO: 78911 - protein, 7 aa, synthetic construct
VDINNRL

SEQ ID NO: 78912 - protein, 7 aa, synthetic construct
QQHVPHL

SEQ ID NO: 78913 - protein, 7 aa, synthetic construct
RPTGPGI

SEQ ID NO: 78914 - protein, 7 aa, synthetic construct
GDSKATV

SEQ ID NO: 78915 - protein, 7 aa, synthetic construct
HLQMKPQ

SEQ ID NO: 78916 - protein, 7 aa, synthetic construct
QVDRGMG

SEQ ID NO: 78917 - protein, 7 aa, synthetic construct
LKDITIM

SEQ ID NO: 78918 - protein, 7 aa, synthetic construct
TKQSIGG

SEQ ID NO: 78919 - protein, 7 aa, synthetic construct
KMINLQH

SEQ ID NO: 78920 - protein, 7 aa, synthetic construct
NRNGNTG

SEQ ID NO: 78921 - protein, 7 aa, synthetic construct
RSYQEQV

SEQ ID NO: 78922 - protein, 7 aa, synthetic construct
GEPNLQR

SEQ ID NO: 78923 - protein, 7 aa, synthetic construct
PRSSNVS

SEQ ID NO: 78924 - protein, 7 aa, synthetic construct
GAVQNHD

SEQ ID NO: 78925 - protein, 7 aa, synthetic construct
KAQPAYA

SEQ ID NO: 78926 - protein, 7 aa, synthetic construct
HLMVKGA

SEQ ID NO: 78927 - protein, 7 aa, synthetic construct
RVHNQAM

SEQ ID NO: 78928 - protein, 7 aa, synthetic construct
VASKVAT

SEQ ID NO: 78929 - protein, 7 aa, synthetic construct
GVNPHQI

SEQ ID NO: 78930 - protein, 7 aa, synthetic construct
YHTRGQM

SEQ ID NO: 78931 - protein, 7 aa, synthetic construct
ASAISIV

SEQ ID NO: 78932 - protein, 7 aa, synthetic construct
RDPPNIR

SEQ ID NO: 78933 - protein, 7 aa, synthetic construct
GVNSNGA

SEQ ID NO: 78934 - protein, 7 aa, synthetic construct
TKEHPTW

SEQ ID NO: 78935 - protein, 7 aa, synthetic construct
YMKSVDI

SEQ ID NO: 78936 - protein, 7 aa, synthetic construct
LVNHTAD

SEQ ID NO: 78937 - protein, 7 aa, synthetic construct
RTLPQRD

SEQ ID NO: 78938 - protein, 7 aa, synthetic construct
FSDGVYK

SEQ ID NO: 78939 - protein, 7 aa, synthetic construct
RSGASPL

SEQ ID NO: 78940 - protein, 7 aa, synthetic construct
QKQFMNG

SEQ ID NO: 78941 - protein, 7 aa, synthetic construct
AVAGQSI

SEQ ID NO: 78942 - protein, 7 aa, synthetic construct
KAYGTDA

SEQ ID NO: 78943 - protein, 7 aa, synthetic construct
VGSIVDR

SEQ ID NO: 78944 - protein, 7 aa, synthetic construct
FQGLMKP

SEQ ID NO: 78945 - protein, 7 aa, synthetic construct
YRPQSPT

SEQ ID NO: 78946 - protein, 7 aa, synthetic construct
YRSTSDV

SEQ ID NO: 78947 - protein, 7 aa, synthetic construct
KQGGAMG

SEQ ID NO: 78948 - protein, 7 aa, synthetic construct
THVLNDR

SEQ ID NO: 78949 - protein, 7 aa, synthetic construct
RKHETLD

SEQ ID NO: 78950 - protein, 7 aa, synthetic construct
MGLGNAS

SEQ ID NO: 78951 - protein, 7 aa, synthetic construct
PYAAESR

SEQ ID NO: 78952 - protein, 7 aa, synthetic construct
LTYHGEP

SEQ ID NO: 78953 - protein, 7 aa, synthetic construct
GQAWLSE

SEQ ID NO: 78954 - protein, 7 aa, synthetic construct
LDPRYEL

SEQ ID NO: 78955 - protein, 7 aa, synthetic construct
KGENSTT

SEQ ID NO: 78956 - protein, 7 aa, synthetic construct
FQLRGIA

SEQ ID NO: 78957 - protein, 7 aa, synthetic construct
RTSSYPG

SEQ ID NO: 78958 - protein, 7 aa, synthetic construct
QHSSKNG

SEQ ID NO: 78959 - protein, 7 aa, synthetic construct
MDKIFIE

SEQ ID NO: 78960 - protein, 7 aa, synthetic construct
KLHKTPE

SEQ ID NO: 78961 - protein, 7 aa, synthetic construct
LGTASPN

SEQ ID NO: 78962 - protein, 7 aa, synthetic construct
YHHQETI

SEQ ID NO: 78963 - protein, 7 aa, synthetic construct
TGASLPP

SEQ ID NO: 78964 - protein, 7 aa, synthetic construct
KNTFEAE

SEQ ID NO: 78965 - protein, 7 aa, synthetic construct
DQTLPAD

SEQ ID NO: 78966 - protein, 7 aa, synthetic construct
PIRAHDV

SEQ ID NO: 78967 - protein, 7 aa, synthetic construct
APNGSAH

SEQ ID NO: 78968 - protein, 7 aa, synthetic construct
LINGTQI

SEQ ID NO: 78969 - protein, 7 aa, synthetic construct
GDNHKMR

SEQ ID NO: 78970 - protein, 7 aa, synthetic construct
PQNPQTA

SEQ ID NO: 78971 - protein, 7 aa, synthetic construct
TKYQQTE

SEQ ID NO: 78972 - protein, 7 aa, synthetic construct
KTNDWPM

SEQ ID NO: 78973 - protein, 7 aa, synthetic construct
KYEGQRD

SEQ ID NO: 78974 - protein, 7 aa, synthetic construct
TNPSKQS

SEQ ID NO: 78975 - protein, 7 aa, synthetic construct
KLTANNQ

SEQ ID NO: 78976 - protein, 7 aa, synthetic construct
SMTQGEM

SEQ ID NO: 78977 - protein, 7 aa, synthetic construct
QPQQTNS

SEQ ID NO: 78978 - protein, 7 aa, synthetic construct
TYDRKTE

SEQ ID NO: 78979 - protein, 7 aa, synthetic construct
STARSNP

SEQ ID NO: 78980 - protein, 7 aa, synthetic construct
INTEWQG

SEQ ID NO: 78981 - protein, 7 aa, synthetic construct
THNEIHG

SEQ ID NO: 78982 - protein, 7 aa, synthetic construct
IHNMHGG

SEQ ID NO: 78983 - protein, 7 aa, synthetic construct
FQPTNAP

SEQ ID NO: 78984 - protein, 7 aa, synthetic construct
ERYNKPV

SEQ ID NO: 78985 - protein, 7 aa, synthetic construct
FTKSAQN

SEQ ID NO: 78986 - protein, 7 aa, synthetic construct
ADFYGKS

SEQ ID NO: 78987 - protein, 7 aa, synthetic construct
RSQTPLE

SEQ ID NO: 78988 - protein, 7 aa, synthetic construct
YSRDMLG

SEQ ID NO: 78989 - protein, 7 aa, synthetic construct
ARMYEDA

SEQ ID NO: 78990 - protein, 7 aa, synthetic construct
TRNALGQ

SEQ ID NO: 78991 - protein, 7 aa, synthetic construct
MREGAST

SEQ ID NO: 78992 - protein, 7 aa, synthetic construct
HRTATSS

SEQ ID NO: 78993 - protein, 7 aa, synthetic construct
LEAYMPS

SEQ ID NO: 78994 - protein, 7 aa, synthetic construct
KNKQPGD

SEQ ID NO: 78995 - protein, 7 aa, synthetic construct
QYNHELI

SEQ ID NO: 78996 - protein, 7 aa, synthetic construct
GDWALQA

SEQ ID NO: 78997 - protein, 7 aa, synthetic construct
PGNIQAG

SEQ ID NO: 78998 - protein, 7 aa, synthetic construct
KLYMEDR

SEQ ID NO: 78999 - protein, 7 aa, synthetic construct
PDSKGGR

SEQ ID NO: 79000 - protein, 7 aa, synthetic construct
PSALRSD

SEQ ID NO: 79001 - protein, 7 aa, synthetic construct
GTNTKSP

SEQ ID NO: 79002 - protein, 7 aa, synthetic construct
VGTKAIH

SEQ ID NO: 79003 - protein, 7 aa, synthetic construct
WPIPKTS

SEQ ID NO: 79004 - protein, 7 aa, synthetic construct
RTYEQQN

SEQ ID NO: 79005 - protein, 7 aa, synthetic construct
YKPPVSN

SEQ ID NO: 79006 - protein, 7 aa, synthetic construct
TQLSHRV

SEQ ID NO: 79007 - protein, 7 aa, synthetic construct
TSLHPLA

SEQ ID NO: 79008 - protein, 7 aa, synthetic construct
VMTKNSL

SEQ ID NO: 79009 - protein, 7 aa, synthetic construct
FTGSGGM

SEQ ID NO: 79010 - protein, 7 aa, synthetic construct
PLNKINA

SEQ ID NO: 79011 - protein, 7 aa, synthetic construct
IPKGNEM

SEQ ID NO: 79012 - protein, 7 aa, synthetic construct
MLIKGME

SEQ ID NO: 79013 - protein, 7 aa, synthetic construct
EMPAKLA

SEQ ID NO: 79014 - protein, 7 aa, synthetic construct
FHARIEK

SEQ ID NO: 79015 - protein, 7 aa, synthetic construct
LPHMPSD

SEQ ID NO: 79016 - protein, 7 aa, synthetic construct
GMPKSPS

SEQ ID NO: 79017 - protein, 7 aa, synthetic construct
AWQKGSP

SEQ ID NO: 79018 - protein, 7 aa, synthetic construct
YGMEPRR

SEQ ID NO: 79019 - protein, 7 aa, synthetic construct
SRQTNSP

SEQ ID NO: 79020 - protein, 7 aa, synthetic construct
SSQSPIT

SEQ ID NO: 79021 - protein, 7 aa, synthetic construct
QRDTHGT

SEQ ID NO: 79022 - protein, 7 aa, synthetic construct
SAMANNG

SEQ ID NO: 79023 - protein, 7 aa, synthetic construct
QSKLHTT

SEQ ID NO: 79024 - protein, 7 aa, synthetic construct
KSPSGTH

SEQ ID NO: 79025 - protein, 7 aa, synthetic construct
ILSVNQK

SEQ ID NO: 79026 - protein, 7 aa, synthetic construct
HDAQKGV

SEQ ID NO: 79027 - protein, 7 aa, synthetic construct
VNFKYEL

SEQ ID NO: 79028 - protein, 7 aa, synthetic construct
LAPVGIQ

SEQ ID NO: 79029 - protein, 7 aa, synthetic construct
SFPLKTM

SEQ ID NO: 79030 - protein, 7 aa, synthetic construct
YIHKSPA

SEQ ID NO: 79031 - protein, 7 aa, synthetic construct
LEHLKLS

SEQ ID NO: 79032 - protein, 7 aa, synthetic construct
YGGNPLH

SEQ ID NO: 79033 - protein, 7 aa, synthetic construct
QSNKYSP

SEQ ID NO: 79034 - protein, 7 aa, synthetic construct
RGHAGPQ

SEQ ID NO: 79035 - protein, 7 aa, synthetic construct
STKTIHS

SEQ ID NO: 79036 - protein, 7 aa, synthetic construct
TNKMSAG

SEQ ID NO: 79037 - protein, 7 aa, synthetic construct
TRGEGPL

SEQ ID NO: 79038 - protein, 7 aa, synthetic construct
NVRLAYE

SEQ ID NO: 79039 - protein, 7 aa, synthetic construct
LPPGMQM

SEQ ID NO: 79040 - protein, 7 aa, synthetic construct
KQPHDLG

SEQ ID NO: 79041 - protein, 7 aa, synthetic construct
YRNVPHQ

SEQ ID NO: 79042 - protein, 7 aa, synthetic construct
SPVRLVS

SEQ ID NO: 79043 - protein, 7 aa, synthetic construct
HMLPPDQ

SEQ ID NO: 79044 - protein, 7 aa, synthetic construct
RGDYETI

SEQ ID NO: 79045 - protein, 7 aa, synthetic construct
LSATVRA

SEQ ID NO: 79046 - protein, 7 aa, synthetic construct
NKNPAQA

SEQ ID NO: 79047 - protein, 7 aa, synthetic construct
QLGKLDR

SEQ ID NO: 79048 - protein, 7 aa, synthetic construct
MKWENEH

SEQ ID NO: 79049 - protein, 7 aa, synthetic construct
LPNISQV

SEQ ID NO: 79050 - protein, 7 aa, synthetic construct
TNKPNNP

SEQ ID NO: 79051 - protein, 7 aa, synthetic construct
DFAQPDR

SEQ ID NO: 79052 - protein, 7 aa, synthetic construct
GPVVNIA

SEQ ID NO: 79053 - protein, 7 aa, synthetic construct
ARTGAQV

SEQ ID NO: 79054 - protein, 7 aa, synthetic construct
YGMEASK

SEQ ID NO: 79055 - protein, 7 aa, synthetic construct
PDKLKNM

SEQ ID NO: 79056 - protein, 7 aa, synthetic construct
RVDSTTM

SEQ ID NO: 79057 - protein, 7 aa, synthetic construct
NMMRANE

SEQ ID NO: 79058 - protein, 7 aa, synthetic construct
RMDHEVA

SEQ ID NO: 79059 - protein, 7 aa, synthetic construct
YQKHMDV

SEQ ID NO: 79060 - protein, 7 aa, synthetic construct
KPTGVAN

SEQ ID NO: 79061 - protein, 7 aa, synthetic construct
MPAIPKD

SEQ ID NO: 79062 - protein, 7 aa, synthetic construct
TIPGMHS

SEQ ID NO: 79063 - protein, 7 aa, synthetic construct
KPDIVGF

SEQ ID NO: 79064 - protein, 7 aa, synthetic construct
GPKFEQF

SEQ ID NO: 79065 - protein, 7 aa, synthetic construct
KVMKDYI

SEQ ID NO: 79066 - protein, 7 aa, synthetic construct
RTIDKNG

SEQ ID NO: 79067 - protein, 7 aa, synthetic construct
GSNRPTV

SEQ ID NO: 79068 - protein, 7 aa, synthetic construct
ITAKLTQ

SEQ ID NO: 79069 - protein, 7 aa, synthetic construct
VPDKSIA

SEQ ID NO: 79070 - protein, 7 aa, synthetic construct
SFQNTEH

SEQ ID NO: 79071 - protein, 7 aa, synthetic construct
QRVHTLQ

SEQ ID NO: 79072 - protein, 7 aa, synthetic construct
MQSLTPG

SEQ ID NO: 79073 - protein, 7 aa, synthetic construct
LNEATGS

SEQ ID NO: 79074 - protein, 7 aa, synthetic construct
KSTPNTG

SEQ ID NO: 79075 - protein, 7 aa, synthetic construct
PIHTKHG

SEQ ID NO: 79076 - protein, 7 aa, synthetic construct
ETYTKMD

SEQ ID NO: 79077 - protein, 7 aa, synthetic construct
SSSGKHE

SEQ ID NO: 79078 - protein, 7 aa, synthetic construct
VPATSSH

SEQ ID NO: 79079 - protein, 7 aa, synthetic construct
VLMRNAA

SEQ ID NO: 79080 - protein, 7 aa, synthetic construct
RDKRTDI

SEQ ID NO: 79081 - protein, 7 aa, synthetic construct
FTGTHMT

SEQ ID NO: 79082 - protein, 7 aa, synthetic construct
QTVPNGH

SEQ ID NO: 79083 - protein, 7 aa, synthetic construct
VWHPSKE

SEQ ID NO: 79084 - protein, 7 aa, synthetic construct
VFPGYEA

SEQ ID NO: 79085 - protein, 7 aa, synthetic construct
FKNMSNA

SEQ ID NO: 79086 - protein, 7 aa, synthetic construct
VKPPDKH

SEQ ID NO: 79087 - protein, 7 aa, synthetic construct
GHHATKP

SEQ ID NO: 79088 - protein, 7 aa, synthetic construct
NRQGRAE

SEQ ID NO: 79089 - protein, 7 aa, synthetic construct
HGKAEHM

SEQ ID NO: 79090 - protein, 7 aa, synthetic construct
FPNMPPQ

SEQ ID NO: 79091 - protein, 7 aa, synthetic construct
GHLKYQQ

SEQ ID NO: 79092 - protein, 7 aa, synthetic construct
KTAGSTP

SEQ ID NO: 79093 - protein, 7 aa, synthetic construct
VQMTLTH

SEQ ID NO: 79094 - protein, 7 aa, synthetic construct
YLYNPVE

SEQ ID NO: 79095 - protein, 7 aa, synthetic construct
DWQSKSP

SEQ ID NO: 79096 - protein, 7 aa, synthetic construct
KLESGNP

SEQ ID NO: 79097 - protein, 7 aa, synthetic construct
GVYSALE

SEQ ID NO: 79098 - protein, 7 aa, synthetic construct
HPPNMPF

SEQ ID NO: 79099 - protein, 7 aa, synthetic construct
LWDKAPG

SEQ ID NO: 79100 - protein, 7 aa, synthetic construct
MSTARPD

SEQ ID NO: 79101 - protein, 7 aa, synthetic construct
DVKWHET

SEQ ID NO: 79102 - protein, 7 aa, synthetic construct
MIMRGQT

SEQ ID NO: 79103 - protein, 7 aa, synthetic construct
MKSTDNH

SEQ ID NO: 79104 - protein, 7 aa, synthetic construct
IDKVGHR

SEQ ID NO: 79105 - protein, 7 aa, synthetic construct
SLRGFEK

SEQ ID NO: 79106 - protein, 7 aa, synthetic construct
VRQNIMH

SEQ ID NO: 79107 - protein, 7 aa, synthetic construct
KVRADDH

SEQ ID NO: 79108 - protein, 7 aa, synthetic construct
DMKWSPA

SEQ ID NO: 79109 - protein, 7 aa, synthetic construct
KMSGQMA

SEQ ID NO: 79110 - protein, 7 aa, synthetic construct
DKMYSKV

SEQ ID NO: 79111 - protein, 7 aa, synthetic construct
TRMPIPS

SEQ ID NO: 79112 - protein, 7 aa, synthetic construct
LSVRNDL

SEQ ID NO: 79113 - protein, 7 aa, synthetic construct
NMPGKQF

SEQ ID NO: 79114 - protein, 7 aa, synthetic construct
PIKNVTA

SEQ ID NO: 79115 - protein, 7 aa, synthetic construct
PHPSFAG

SEQ ID NO: 79116 - protein, 7 aa, synthetic construct
VSGAKSM

SEQ ID NO: 79117 - protein, 7 aa, synthetic construct
INHLVQA

SEQ ID NO: 79118 - protein, 7 aa, synthetic construct
WLTGVMA

SEQ ID NO: 79119 - protein, 7 aa, synthetic construct
GNRSTQP

SEQ ID NO: 79120 - protein, 7 aa, synthetic construct
GPHWGPS

SEQ ID NO: 79121 - protein, 7 aa, synthetic construct
GKSSMNG

SEQ ID NO: 79122 - protein, 7 aa, synthetic construct
NNDQFKY

SEQ ID NO: 79123 - protein, 7 aa, synthetic construct
TKPYDQS

SEQ ID NO: 79124 - protein, 7 aa, synthetic construct
MQKNDHP

SEQ ID NO: 79125 - protein, 7 aa, synthetic construct
HAREPET

SEQ ID NO: 79126 - protein, 7 aa, synthetic construct
YSAHWTA

SEQ ID NO: 79127 - protein, 7 aa, synthetic construct
PERVHAL

SEQ ID NO: 79128 - protein, 7 aa, synthetic construct
GHPTPGI

SEQ ID NO: 79129 - protein, 7 aa, synthetic construct
DDHMKSR

SEQ ID NO: 79130 - protein, 7 aa, synthetic construct
MNPVEQR

SEQ ID NO: 79131 - protein, 7 aa, synthetic construct
ERSGSVP

SEQ ID NO: 79132 - protein, 7 aa, synthetic construct
RGHSSLM

SEQ ID NO: 79133 - protein, 7 aa, synthetic construct
IRDLAVV

SEQ ID NO: 79134 - protein, 7 aa, synthetic construct
TAMQPTM

SEQ ID NO: 79135 - protein, 7 aa, synthetic construct
RSNPGPA

SEQ ID NO: 79136 - protein, 7 aa, synthetic construct
NVKSTGA

SEQ ID NO: 79137 - protein, 7 aa, synthetic construct
PEQGHGK

SEQ ID NO: 79138 - protein, 7 aa, synthetic construct
KVTASGM

SEQ ID NO: 79139 - protein, 7 aa, synthetic construct
TEPHHVF

SEQ ID NO: 79140 - protein, 7 aa, synthetic construct
VKPGGGV

SEQ ID NO: 79141 - protein, 7 aa, synthetic construct
QTGPSKG

SEQ ID NO: 79142 - protein, 7 aa, synthetic construct
VRGTEVY

SEQ ID NO: 79143 - protein, 7 aa, synthetic construct
KPNNMSN

SEQ ID NO: 79144 - protein, 7 aa, synthetic construct
QKGWISD

SEQ ID NO: 79145 - protein, 7 aa, synthetic construct
GQTGIMA

SEQ ID NO: 79146 - protein, 7 aa, synthetic construct
FQMNTQK

SEQ ID NO: 79147 - protein, 7 aa, synthetic construct
NGSSKAI

SEQ ID NO: 79148 - protein, 7 aa, synthetic construct
MTRGGIE

SEQ ID NO: 79149 - protein, 7 aa, synthetic construct
ERHSITP

SEQ ID NO: 79150 - protein, 7 aa, synthetic construct
MTAKHDQ

SEQ ID NO: 79151 - protein, 7 aa, synthetic construct
NTQSKNA

SEQ ID NO: 79152 - protein, 7 aa, synthetic construct
FTQLKES

SEQ ID NO: 79153 - protein, 7 aa, synthetic construct
YSQNKST

SEQ ID NO: 79154 - protein, 7 aa, synthetic construct
LKMDSNS

SEQ ID NO: 79155 - protein, 7 aa, synthetic construct
RGDMHDH

SEQ ID NO: 79156 - protein, 7 aa, synthetic construct
VKKDVQG

SEQ ID NO: 79157 - protein, 7 aa, synthetic construct
VRQGTFG

SEQ ID NO: 79158 - protein, 7 aa, synthetic construct
ATGIKGI

SEQ ID NO: 79159 - protein, 7 aa, synthetic construct
DKVKQTL

SEQ ID NO: 79160 - protein, 7 aa, synthetic construct
RNGLQGD

SEQ ID NO: 79161 - protein, 7 aa, synthetic construct
VTGGSLH

SEQ ID NO: 79162 - protein, 7 aa, synthetic construct
PTTQLSP

SEQ ID NO: 79163 - protein, 7 aa, synthetic construct
NKVQNKD

SEQ ID NO: 79164 - protein, 7 aa, synthetic construct
TSSKHAN

SEQ ID NO: 79165 - protein, 7 aa, synthetic construct
QYAVSTS

SEQ ID NO: 79166 - protein, 7 aa, synthetic construct
SGREHTS

SEQ ID NO: 79167 - protein, 7 aa, synthetic construct
QYKPPQP

SEQ ID NO: 79168 - protein, 7 aa, synthetic construct
AGYGFQP

SEQ ID NO: 79169 - protein, 7 aa, synthetic construct
YSNYTQR

SEQ ID NO: 79170 - protein, 7 aa, synthetic construct
SQKQAGF

SEQ ID NO: 79171 - protein, 7 aa, synthetic construct
NYKNTYG

SEQ ID NO: 79172 - protein, 7 aa, synthetic construct
TSPHQTQ

SEQ ID NO: 79173 - protein, 7 aa, synthetic construct
APGFPGS

SEQ ID NO: 79174 - protein, 7 aa, synthetic construct
WGESGKQ

SEQ ID NO: 79175 - protein, 7 aa, synthetic construct
IQNNTAA

SEQ ID NO: 79176 - protein, 7 aa, synthetic construct
RTDGMAN

SEQ ID NO: 79177 - protein, 7 aa, synthetic construct
TVNFDKH

SEQ ID NO: 79178 - protein, 7 aa, synthetic construct
TMNGVGE

SEQ ID NO: 79179 - protein, 7 aa, synthetic construct
LEYGSKD

SEQ ID NO: 79180 - protein, 7 aa, synthetic construct
VPEVDNY

SEQ ID NO: 79181 - protein, 7 aa, synthetic construct
ILKSEVG

SEQ ID NO: 79182 - protein, 7 aa, synthetic construct
GVHNYSA

SEQ ID NO: 79183 - protein, 7 aa, synthetic construct
NAVIPLA

SEQ ID NO: 79184 - protein, 7 aa, synthetic construct
LKGYGPH

SEQ ID NO: 79185 - protein, 7 aa, synthetic construct
DGAVKPH

SEQ ID NO: 79186 - protein, 7 aa, synthetic construct
YRDINPQ

SEQ ID NO: 79187 - protein, 7 aa, synthetic construct
INHTYEH

SEQ ID NO: 79188 - protein, 7 aa, synthetic construct
DRQSNSI

SEQ ID NO: 79189 - protein, 7 aa, synthetic construct
KYEATPK

SEQ ID NO: 79190 - protein, 7 aa, synthetic construct
GPRAAAE

SEQ ID NO: 79191 - protein, 7 aa, synthetic construct
IEYGAAS

SEQ ID NO: 79192 - protein, 7 aa, synthetic construct
GVRQALA

SEQ ID NO: 79193 - protein, 7 aa, synthetic construct
IDKQNIH

SEQ ID NO: 79194 - protein, 7 aa, synthetic construct
TFRTTDP

SEQ ID NO: 79195 - protein, 7 aa, synthetic construct
PSTKEDR

SEQ ID NO: 79196 - protein, 7 aa, synthetic construct
LSVSKVS

SEQ ID NO: 79197 - protein, 7 aa, synthetic construct
ARQPGIA

SEQ ID NO: 79198 - protein, 7 aa, synthetic construct
PQPTGQM

SEQ ID NO: 79199 - protein, 7 aa, synthetic construct
FYKVERS

SEQ ID NO: 79200 - protein, 7 aa, synthetic construct
THTQLMV

SEQ ID NO: 79201 - protein, 7 aa, synthetic construct
YRAGSAP

SEQ ID NO: 79202 - protein, 7 aa, synthetic construct
QYRGNGS

SEQ ID NO: 79203 - protein, 7 aa, synthetic construct
LSSEWAK

SEQ ID NO: 79204 - protein, 7 aa, synthetic construct
IMHAQVE

SEQ ID NO: 79205 - protein, 7 aa, synthetic construct
YHHGNPA

SEQ ID NO: 79206 - protein, 7 aa, synthetic construct
MGQYKSI

SEQ ID NO: 79207 - protein, 7 aa, synthetic construct
FKAPNGY

SEQ ID NO: 79208 - protein, 7 aa, synthetic construct
KTPGLTN

SEQ ID NO: 79209 - protein, 7 aa, synthetic construct
PRPIDQV

SEQ ID NO: 79210 - protein, 7 aa, synthetic construct
VTNHKTF

SEQ ID NO: 79211 - protein, 7 aa, synthetic construct
YMPVGRA

SEQ ID NO: 79212 - protein, 7 aa, synthetic construct
EMPRNYE

SEQ ID NO: 79213 - protein, 7 aa, synthetic construct
IPKASHL

SEQ ID NO: 79214 - protein, 7 aa, synthetic construct
PKAGNQY

SEQ ID NO: 79215 - protein, 7 aa, synthetic construct
QNQGDKH

SEQ ID NO: 79216 - protein, 7 aa, synthetic construct
KHLTLHG

SEQ ID NO: 79217 - protein, 7 aa, synthetic construct
DRGNWER

SEQ ID NO: 79218 - protein, 7 aa, synthetic construct
PGHLPRA

SEQ ID NO: 79219 - protein, 7 aa, synthetic construct
QMNHKYS

SEQ ID NO: 79220 - protein, 7 aa, synthetic construct
MVNIGAA

SEQ ID NO: 79221 - protein, 7 aa, synthetic construct
STNATNA

SEQ ID NO: 79222 - protein, 7 aa, synthetic construct
WADKGMG

SEQ ID NO: 79223 - protein, 7 aa, synthetic construct
TTSMREV

SEQ ID NO: 79224 - protein, 7 aa, synthetic construct
NGVNSKG

SEQ ID NO: 79225 - protein, 7 aa, synthetic construct
KPTNGPT

SEQ ID NO: 79226 - protein, 7 aa, synthetic construct
PMNNKAA

SEQ ID NO: 79227 - protein, 7 aa, synthetic construct
NPFGGQL

SEQ ID NO: 79228 - protein, 7 aa, synthetic construct
SDHIPRN

SEQ ID NO: 79229 - protein, 7 aa, synthetic construct
LIGRTGP

SEQ ID NO: 79230 - protein, 7 aa, synthetic construct
RLIKDNS

SEQ ID NO: 79231 - protein, 7 aa, synthetic construct
MFNEKKA

SEQ ID NO: 79232 - protein, 7 aa, synthetic construct
PVPQAGR

SEQ ID NO: 79233 - protein, 7 aa, synthetic construct
LGSTRIN

SEQ ID NO: 79234 - protein, 7 aa, synthetic construct
FNNTPQF

SEQ ID NO: 79235 - protein, 7 aa, synthetic construct
HGRLSDY

SEQ ID NO: 79236 - protein, 7 aa, synthetic construct
PAHSSVL

SEQ ID NO: 79237 - protein, 7 aa, synthetic construct
NTNRIQV

SEQ ID NO: 79238 - protein, 7 aa, synthetic construct
YRYGTQA

SEQ ID NO: 79239 - protein, 7 aa, synthetic construct
ETHIKSG

SEQ ID NO: 79240 - protein, 7 aa, synthetic construct
TGNNASF

SEQ ID NO: 79241 - protein, 7 aa, synthetic construct
KPNMNVG

SEQ ID NO: 79242 - protein, 7 aa, synthetic construct
KASKEQM

SEQ ID NO: 79243 - protein, 7 aa, synthetic construct
RHDLHME

SEQ ID NO: 79244 - protein, 7 aa, synthetic construct
VRQNTAV

SEQ ID NO: 79245 - protein, 7 aa, synthetic construct
VPNAWEK

SEQ ID NO: 79246 - protein, 7 aa, synthetic construct
YERLVGM

SEQ ID NO: 79247 - protein, 7 aa, synthetic construct
MERPGVE

SEQ ID NO: 79248 - protein, 7 aa, synthetic construct
TAAQLSP

SEQ ID NO: 79249 - protein, 7 aa, synthetic construct
IPSAHGH

SEQ ID NO: 79250 - protein, 7 aa, synthetic construct
QKVNGGA

SEQ ID NO: 79251 - protein, 7 aa, synthetic construct
ATNLLKE

SEQ ID NO: 79252 - protein, 7 aa, synthetic construct
NSIRTSL

SEQ ID NO: 79253 - protein, 7 aa, synthetic construct
HQIKHVE

SEQ ID NO: 79254 - protein, 7 aa, synthetic construct
ATPHHSF

SEQ ID NO: 79255 - protein, 7 aa, synthetic construct
GNQRYME

SEQ ID NO: 79256 - protein, 7 aa, synthetic construct
RESAGTG

SEQ ID NO: 79257 - protein, 7 aa, synthetic construct
FKDPTTS

SEQ ID NO: 79258 - protein, 7 aa, synthetic construct
HNYTNSV

SEQ ID NO: 79259 - protein, 7 aa, synthetic construct
HHKETNK

SEQ ID NO: 79260 - protein, 7 aa, synthetic construct
YHGKIES

SEQ ID NO: 79261 - protein, 7 aa, synthetic construct
TENRASS

SEQ ID NO: 79262 - protein, 7 aa, synthetic construct
MQSRVGH

SEQ ID NO: 79263 - protein, 7 aa, synthetic construct
FTIKLPA

SEQ ID NO: 79264 - protein, 7 aa, synthetic construct
AQDKPQA

SEQ ID NO: 79265 - protein, 7 aa, synthetic construct
AGFVKQN

SEQ ID NO: 79266 - protein, 7 aa, synthetic construct
PHARDDN

SEQ ID NO: 79267 - protein, 7 aa, synthetic construct
SKTPNWL

SEQ ID NO: 79268 - protein, 7 aa, synthetic construct
DIKPKNG

SEQ ID NO: 79269 - protein, 7 aa, synthetic construct
TFEGKWV

SEQ ID NO: 79270 - protein, 7 aa, synthetic construct
DGISTKQ

SEQ ID NO: 79271 - protein, 7 aa, synthetic construct
SRSAAGW

SEQ ID NO: 79272 - protein, 7 aa, synthetic construct
MHFNDKY

SEQ ID NO: 79273 - protein, 7 aa, synthetic construct
MRGDHNH

SEQ ID NO: 79274 - protein, 7 aa, synthetic construct
YEKGIKG

SEQ ID NO: 79275 - protein, 7 aa, synthetic construct
GNKANQP

SEQ ID NO: 79276 - protein, 7 aa, synthetic construct
QSAMVGE

SEQ ID NO: 79277 - protein, 7 aa, synthetic construct
SKMVSSY

SEQ ID NO: 79278 - protein, 7 aa, synthetic construct
GTRQGMA

SEQ ID NO: 79279 - protein, 7 aa, synthetic construct
HAPSDSK

SEQ ID NO: 79280 - protein, 7 aa, synthetic construct
HMPRAQS

SEQ ID NO: 79281 - protein, 7 aa, synthetic construct
SHQHLKD

SEQ ID NO: 79282 - protein, 7 aa, synthetic construct
SETRIQT

SEQ ID NO: 79283 - protein, 7 aa, synthetic construct
YQHQPQR

SEQ ID NO: 79284 - protein, 7 aa, synthetic construct
DEKGNKI

SEQ ID NO: 79285 - protein, 7 aa, synthetic construct
VTPSAKW

SEQ ID NO: 79286 - protein, 7 aa, synthetic construct
NPKRQEE

SEQ ID NO: 79287 - protein, 7 aa, synthetic construct
PQKQLGP

SEQ ID NO: 79288 - protein, 7 aa, synthetic construct
RKSETGN

SEQ ID NO: 79289 - protein, 7 aa, synthetic construct
MDDSRRS

SEQ ID NO: 79290 - protein, 7 aa, synthetic construct
IVRNHGG

SEQ ID NO: 79291 - protein, 7 aa, synthetic construct
HHSTMHS

SEQ ID NO: 79292 - protein, 7 aa, synthetic construct
THGNHTY

SEQ ID NO: 79293 - protein, 7 aa, synthetic construct
EYGDHSK

SEQ ID NO: 79294 - protein, 7 aa, synthetic construct
NRQTSNP

SEQ ID NO: 79295 - protein, 7 aa, synthetic construct
RGHGTDM

SEQ ID NO: 79296 - protein, 7 aa, synthetic construct
MKSTISI

SEQ ID NO: 79297 - protein, 7 aa, synthetic construct
QAGPAGR

SEQ ID NO: 79298 - protein, 7 aa, synthetic construct
MELNSTR

SEQ ID NO: 79299 - protein, 7 aa, synthetic construct
PTTQMPH

SEQ ID NO: 79300 - protein, 7 aa, synthetic construct
HIGGVTV

SEQ ID NO: 79301 - protein, 7 aa, synthetic construct
IVHPPNA

SEQ ID NO: 79302 - protein, 7 aa, synthetic construct
QFPPHEH

SEQ ID NO: 79303 - protein, 7 aa, synthetic construct
GITYAQG

SEQ ID NO: 79304 - protein, 7 aa, synthetic construct
GHEMGHG

SEQ ID NO: 79305 - protein, 7 aa, synthetic construct
RFVGVAN

SEQ ID NO: 79306 - protein, 7 aa, synthetic construct
SAIYKDE

SEQ ID NO: 79307 - protein, 7 aa, synthetic construct
TRMKDAY

SEQ ID NO: 79308 - protein, 7 aa, synthetic construct
TTLSIAK

SEQ ID NO: 79309 - protein, 7 aa, synthetic construct
QPNYQRE

SEQ ID NO: 79310 - protein, 7 aa, synthetic construct
VEMQQAP

SEQ ID NO: 79311 - protein, 7 aa, synthetic construct
HRMAPER

SEQ ID NO: 79312 - protein, 7 aa, synthetic construct
HMKGTSV

SEQ ID NO: 79313 - protein, 7 aa, synthetic construct
DERNQMV

SEQ ID NO: 79314 - protein, 7 aa, synthetic construct
VTVGLVH

SEQ ID NO: 79315 - protein, 7 aa, synthetic construct
PPRTLNT

SEQ ID NO: 79316 - protein, 7 aa, synthetic construct
QGKQNTN

SEQ ID NO: 79317 - protein, 7 aa, synthetic construct
FGNVNNI

SEQ ID NO: 79318 - protein, 7 aa, synthetic construct
LVQKGHD

SEQ ID NO: 79319 - protein, 7 aa, synthetic construct
GNSLQQK

SEQ ID NO: 79320 - protein, 7 aa, synthetic construct
ERPAGSH

SEQ ID NO: 79321 - protein, 7 aa, synthetic construct
GLRSLVS

SEQ ID NO: 79322 - protein, 7 aa, synthetic construct
GMNSKQG

SEQ ID NO: 79323 - protein, 7 aa, synthetic construct
EAAWISE

SEQ ID NO: 79324 - protein, 7 aa, synthetic construct
PIRLNGA

SEQ ID NO: 79325 - protein, 7 aa, synthetic construct
FENPKRP

SEQ ID NO: 79326 - protein, 7 aa, synthetic construct
TASRSTV

SEQ ID NO: 79327 - protein, 7 aa, synthetic construct
TPGVYPA

SEQ ID NO: 79328 - protein, 7 aa, synthetic construct
MPEWSKQ

SEQ ID NO: 79329 - protein, 7 aa, synthetic construct
PHGANFG

SEQ ID NO: 79330 - protein, 7 aa, synthetic construct
QKHITFQ

SEQ ID NO: 79331 - protein, 7 aa, synthetic construct
KNHAGFV

SEQ ID NO: 79332 - protein, 7 aa, synthetic construct
SYAGFTG

SEQ ID NO: 79333 - protein, 7 aa, synthetic construct
WGMDNKK

SEQ ID NO: 79334 - protein, 7 aa, synthetic construct
MDQKLKA

SEQ ID NO: 79335 - protein, 7 aa, synthetic construct
DRQATGT

SEQ ID NO: 79336 - protein, 7 aa, synthetic construct
NQFGLNG

SEQ ID NO: 79337 - protein, 7 aa, synthetic construct
EKGYYIA

SEQ ID NO: 79338 - protein, 7 aa, synthetic construct
HLLKGAM

SEQ ID NO: 79339 - protein, 7 aa, synthetic construct
SSTHAHI

SEQ ID NO: 79340 - protein, 7 aa, synthetic construct
YQSTVKY

SEQ ID NO: 79341 - protein, 7 aa, synthetic construct
SSMNTNL

SEQ ID NO: 79342 - protein, 7 aa, synthetic construct
GPYQKIL

SEQ ID NO: 79343 - protein, 7 aa, synthetic construct
SKYQEVH

SEQ ID NO: 79344 - protein, 7 aa, synthetic construct
GTLLDRP

SEQ ID NO: 79345 - protein, 7 aa, synthetic construct
YAGIVSG

SEQ ID NO: 79346 - protein, 7 aa, synthetic construct
RPTGAMG

SEQ ID NO: 79347 - protein, 7 aa, synthetic construct
KHIEQNF

SEQ ID NO: 79348 - protein, 7 aa, synthetic construct
YHVRGIQ

SEQ ID NO: 79349 - protein, 7 aa, synthetic construct
SGLGTPM

SEQ ID NO: 79350 - protein, 7 aa, synthetic construct
QPKPTAM

SEQ ID NO: 79351 - protein, 7 aa, synthetic construct
VANNKQN

SEQ ID NO: 79352 - protein, 7 aa, synthetic construct
PVDHTAH

SEQ ID NO: 79353 - protein, 7 aa, synthetic construct
GKMAHPA

SEQ ID NO: 79354 - protein, 7 aa, synthetic construct
LPRNNLN

SEQ ID NO: 79355 - protein, 7 aa, synthetic construct
KREEFTD

SEQ ID NO: 79356 - protein, 7 aa, synthetic construct
PRHGNSD

SEQ ID NO: 79357 - protein, 7 aa, synthetic construct
VRGLNEL

SEQ ID NO: 79358 - protein, 7 aa, synthetic construct
SQPHKAD

SEQ ID NO: 79359 - protein, 7 aa, synthetic construct
VNAGHPA

SEQ ID NO: 79360 - protein, 7 aa, synthetic construct
RSPANQA

SEQ ID NO: 79361 - protein, 7 aa, synthetic construct
YHDNSGK

SEQ ID NO: 79362 - protein, 7 aa, synthetic construct
FMANLRN

SEQ ID NO: 79363 - protein, 7 aa, synthetic construct
AHYTSVI

SEQ ID NO: 79364 - protein, 7 aa, synthetic construct
KMLPSTS

SEQ ID NO: 79365 - protein, 7 aa, synthetic construct
QLPFDAD

SEQ ID NO: 79366 - protein, 7 aa, synthetic construct
FGTSGKM

SEQ ID NO: 79367 - protein, 7 aa, synthetic construct
QKQTIST

SEQ ID NO: 79368 - protein, 7 aa, synthetic construct
EGGVLRF

SEQ ID NO: 79369 - protein, 7 aa, synthetic construct
QQIQSSH

SEQ ID NO: 79370 - protein, 7 aa, synthetic construct
KYGSNTG

SEQ ID NO: 79371 - protein, 7 aa, synthetic construct
AVQKHFD

SEQ ID NO: 79372 - protein, 7 aa, synthetic construct
HTQTPIP

SEQ ID NO: 79373 - protein, 7 aa, synthetic construct
VKMSNNP

SEQ ID NO: 79374 - protein, 7 aa, synthetic construct
WSRKDMA

SEQ ID NO: 79375 - protein, 7 aa, synthetic construct
THQIWKE

SEQ ID NO: 79376 - protein, 7 aa, synthetic construct
GKKANEE

SEQ ID NO: 79377 - protein, 7 aa, synthetic construct
VVSTKVM

SEQ ID NO: 79378 - protein, 7 aa, synthetic construct
MSSGRNP

SEQ ID NO: 79379 - protein, 7 aa, synthetic construct
NQKPQNI

SEQ ID NO: 79380 - protein, 7 aa, synthetic construct
TSAKMDA

SEQ ID NO: 79381 - protein, 7 aa, synthetic construct
GTTFNRN

SEQ ID NO: 79382 - protein, 7 aa, synthetic construct
ANLVKTT

SEQ ID NO: 79383 - protein, 7 aa, synthetic construct
HLSKSAM

SEQ ID NO: 79384 - protein, 7 aa, synthetic construct
RLDRQDL

SEQ ID NO: 79385 - protein, 7 aa, synthetic construct
LYPVGQE

SEQ ID NO: 79386 - protein, 7 aa, synthetic construct
KTKDPGS

SEQ ID NO: 79387 - protein, 7 aa, synthetic construct
MANFKHT

SEQ ID NO: 79388 - protein, 7 aa, synthetic construct
WKGHEAA

SEQ ID NO: 79389 - protein, 7 aa, synthetic construct
YMTMKDM

SEQ ID NO: 79390 - protein, 7 aa, synthetic construct
TWAHAHP

SEQ ID NO: 79391 - protein, 7 aa, synthetic construct
LRIVQSE

SEQ ID NO: 79392 - protein, 7 aa, synthetic construct
DNRLFEG

SEQ ID NO: 79393 - protein, 7 aa, synthetic construct
KVGTEPN

SEQ ID NO: 79394 - protein, 7 aa, synthetic construct
GAFSQST

SEQ ID NO: 79395 - protein, 7 aa, synthetic construct
EKKASTA

SEQ ID NO: 79396 - protein, 7 aa, synthetic construct
FGNLKNF

SEQ ID NO: 79397 - protein, 7 aa, synthetic construct
WNSRTSI

SEQ ID NO: 79398 - protein, 7 aa, synthetic construct
MKGSTQY

SEQ ID NO: 79399 - protein, 7 aa, synthetic construct
VNEQRYV

SEQ ID NO: 79400 - protein, 7 aa, synthetic construct
RPNNQMP

SEQ ID NO: 79401 - protein, 7 aa, synthetic construct
RAYKEMT

SEQ ID NO: 79402 - protein, 7 aa, synthetic construct
DRVVPYT

SEQ ID NO: 79403 - protein, 7 aa, synthetic construct
GVELKFS

SEQ ID NO: 79404 - protein, 7 aa, synthetic construct
VTTQTKM

SEQ ID NO: 79405 - protein, 7 aa, synthetic construct
SGKVTSG

SEQ ID NO: 79406 - protein, 7 aa, synthetic construct
GTHVTPI

SEQ ID NO: 79407 - protein, 7 aa, synthetic construct
YTINGVP

SEQ ID NO: 79408 - protein, 7 aa, synthetic construct
VSSKEAV

SEQ ID NO: 79409 - protein, 7 aa, synthetic construct
HGFTSID

SEQ ID NO: 79410 - protein, 7 aa, synthetic construct
PKMRIEH

SEQ ID NO: 79411 - protein, 7 aa, synthetic construct
GLMMKME

SEQ ID NO: 79412 - protein, 7 aa, synthetic construct
TYGVPTP

SEQ ID NO: 79413 - protein, 7 aa, synthetic construct
KEGIPQH

SEQ ID NO: 79414 - protein, 7 aa, synthetic construct
PWENTNR

SEQ ID NO: 79415 - protein, 7 aa, synthetic construct
WLKENRP

SEQ ID NO: 79416 - protein, 7 aa, synthetic construct
YNVIREQ

SEQ ID NO: 79417 - protein, 7 aa, synthetic construct
TFGAMTG

SEQ ID NO: 79418 - protein, 7 aa, synthetic construct
GAIDRPV

SEQ ID NO: 79419 - protein, 7 aa, synthetic construct
VASSQPG

SEQ ID NO: 79420 - protein, 7 aa, synthetic construct
KLPAEVD

SEQ ID NO: 79421 - protein, 7 aa, synthetic construct
ATNQTSR

SEQ ID NO: 79422 - protein, 7 aa, synthetic construct
EHNIHRA

SEQ ID NO: 79423 - protein, 7 aa, synthetic construct
NPKDYQA

SEQ ID NO: 79424 - protein, 7 aa, synthetic construct
DQNISQR

SEQ ID NO: 79425 - protein, 7 aa, synthetic construct
PNGQRAD

SEQ ID NO: 79426 - protein, 7 aa, synthetic construct
RNQNQSP

SEQ ID NO: 79427 - protein, 7 aa, synthetic construct
AARHGQT

SEQ ID NO: 79428 - protein, 7 aa, synthetic construct
NQSKQNG

SEQ ID NO: 79429 - protein, 7 aa, synthetic construct
RAEGRWD

SEQ ID NO: 79430 - protein, 7 aa, synthetic construct
TKTIQKD

SEQ ID NO: 79431 - protein, 7 aa, synthetic construct
VNIIGET

SEQ ID NO: 79432 - protein, 7 aa, synthetic construct
PPKDRGN

SEQ ID NO: 79433 - protein, 7 aa, synthetic construct
TGSFREH

SEQ ID NO: 79434 - protein, 7 aa, synthetic construct
LARKFEN

SEQ ID NO: 79435 - protein, 7 aa, synthetic construct
DKNGANK

SEQ ID NO: 79436 - protein, 7 aa, synthetic construct
DMQKERT

SEQ ID NO: 79437 - protein, 7 aa, synthetic construct
SVMGAGS

SEQ ID NO: 79438 - protein, 7 aa, synthetic construct
FRDMIAD

SEQ ID NO: 79439 - protein, 7 aa, synthetic construct
KYDRAHD

SEQ ID NO: 79440 - protein, 7 aa, synthetic construct
AKAHNDL

SEQ ID NO: 79441 - protein, 7 aa, synthetic construct
QKPLDMH

SEQ ID NO: 79442 - protein, 7 aa, synthetic construct
WRDHPDE

SEQ ID NO: 79443 - protein, 7 aa, synthetic construct
IMQYGSV

SEQ ID NO: 79444 - protein, 7 aa, synthetic construct
VDYPQKM

SEQ ID NO: 79445 - protein, 7 aa, synthetic construct
MNMRGAN

SEQ ID NO: 79446 - protein, 7 aa, synthetic construct
NIPGNTY

SEQ ID NO: 79447 - protein, 7 aa, synthetic construct
PSAKSQA

SEQ ID NO: 79448 - protein, 7 aa, synthetic construct
WDKPLRD

SEQ ID NO: 79449 - protein, 7 aa, synthetic construct
EIVKSKH

SEQ ID NO: 79450 - protein, 7 aa, synthetic construct
DKEGHMK

SEQ ID NO: 79451 - protein, 7 aa, synthetic construct
YHFQTGS

SEQ ID NO: 79452 - protein, 7 aa, synthetic construct
KEPGIAP

SEQ ID NO: 79453 - protein, 7 aa, synthetic construct
LKEHYTM

SEQ ID NO: 79454 - protein, 7 aa, synthetic construct
SILLGRE

SEQ ID NO: 79455 - protein, 7 aa, synthetic construct
QQLAAEK

SEQ ID NO: 79456 - protein, 7 aa, synthetic construct
KVTSLLA

SEQ ID NO: 79457 - protein, 7 aa, synthetic construct
RPTHEFP

SEQ ID NO: 79458 - protein, 7 aa, synthetic construct
TNYKKPD

SEQ ID NO: 79459 - protein, 7 aa, synthetic construct
NFIEPHR

SEQ ID NO: 79460 - protein, 7 aa, synthetic construct
GNASTMG

SEQ ID NO: 79461 - protein, 7 aa, synthetic construct
DQFQGKS

SEQ ID NO: 79462 - protein, 7 aa, synthetic construct
TKMSTQA

SEQ ID NO: 79463 - protein, 7 aa, synthetic construct
VTMHKPQ

SEQ ID NO: 79464 - protein, 7 aa, synthetic construct
RNSRNDE

SEQ ID NO: 79465 - protein, 7 aa, synthetic construct
SLNAVNV

SEQ ID NO: 79466 - protein, 7 aa, synthetic construct
ENTHFPK

SEQ ID NO: 79467 - protein, 7 aa, synthetic construct
ESVPTRL

SEQ ID NO: 79468 - protein, 7 aa, synthetic construct
NKQTVGN

SEQ ID NO: 79469 - protein, 7 aa, synthetic construct
IAEFANK

SEQ ID NO: 79470 - protein, 7 aa, synthetic construct
HFQNNRI

SEQ ID NO: 79471 - protein, 7 aa, synthetic construct
RVDWEGN

SEQ ID NO: 79472 - protein, 7 aa, synthetic construct
RVQPHII

SEQ ID NO: 79473 - protein, 7 aa, synthetic construct
YNAWHAD

SEQ ID NO: 79474 - protein, 7 aa, synthetic construct
VHKAEGS

SEQ ID NO: 79475 - protein, 7 aa, synthetic construct
YLTTVKM

SEQ ID NO: 79476 - protein, 7 aa, synthetic construct
FNSKNGG

SEQ ID NO: 79477 - protein, 7 aa, synthetic construct
ATKQLKD

SEQ ID NO: 79478 - protein, 7 aa, synthetic construct
RHALSSG

SEQ ID NO: 79479 - protein, 7 aa, synthetic construct
MSSQIDV

SEQ ID NO: 79480 - protein, 7 aa, synthetic construct
QGPLGPQ

SEQ ID NO: 79481 - protein, 7 aa, synthetic construct
QNNSQYI

SEQ ID NO: 79482 - protein, 7 aa, synthetic construct
HGHHTVH

SEQ ID NO: 79483 - protein, 7 aa, synthetic construct
RQSGASA

SEQ ID NO: 79484 - protein, 7 aa, synthetic construct
ETGAWKG

SEQ ID NO: 79485 - protein, 7 aa, synthetic construct
MAHGGPH

SEQ ID NO: 79486 - protein, 7 aa, synthetic construct
FKQHFGG

SEQ ID NO: 79487 - protein, 7 aa, synthetic construct
EDSRKGM

SEQ ID NO: 79488 - protein, 7 aa, synthetic construct
RRADVQN

SEQ ID NO: 79489 - protein, 7 aa, synthetic construct
RDHFNEV

SEQ ID NO: 79490 - protein, 7 aa, synthetic construct
FKPIWDE

SEQ ID NO: 79491 - protein, 7 aa, synthetic construct
KQRTSQE

SEQ ID NO: 79492 - protein, 7 aa, synthetic construct
EAKYMKF

SEQ ID NO: 79493 - protein, 7 aa, synthetic construct
GIGHEKD

SEQ ID NO: 79494 - protein, 7 aa, synthetic construct
PKSAQFT

SEQ ID NO: 79495 - protein, 7 aa, synthetic construct
QIHRSTL

SEQ ID NO: 79496 - protein, 7 aa, synthetic construct
RPPTGGT

SEQ ID NO: 79497 - protein, 7 aa, synthetic construct
HNSNAHP

SEQ ID NO: 79498 - protein, 7 aa, synthetic construct
RAGMSGV

SEQ ID NO: 79499 - protein, 7 aa, synthetic construct
KETKAAT

SEQ ID NO: 79500 - protein, 7 aa, synthetic construct
HAKHHGE

SEQ ID NO: 79501 - protein, 7 aa, synthetic construct
QSMKDTV

SEQ ID NO: 79502 - protein, 7 aa, synthetic construct
KPVLQGT

SEQ ID NO: 79503 - protein, 7 aa, synthetic construct
DKPFQDA

SEQ ID NO: 79504 - protein, 7 aa, synthetic construct
GKQQRVD

SEQ ID NO: 79505 - protein, 7 aa, synthetic construct
MRLQGGY

SEQ ID NO: 79506 - protein, 7 aa, synthetic construct
QSNNQQD

SEQ ID NO: 79507 - protein, 7 aa, synthetic construct
TTDFTRA

SEQ ID NO: 79508 - protein, 7 aa, synthetic construct
KTTSGCC

SEQ ID NO: 79509 - protein, 7 aa, synthetic construct
YPGEKDQ

SEQ ID NO: 79510 - protein, 7 aa, synthetic construct
MSPHAGS

SEQ ID NO: 79511 - protein, 7 aa, synthetic construct
RDGKNET

SEQ ID NO: 79512 - protein, 7 aa, synthetic construct
NANIKVY

SEQ ID NO: 79513 - protein, 7 aa, synthetic construct
LRDQVKV

SEQ ID NO: 79514 - protein, 7 aa, synthetic construct
LGTNGAG

SEQ ID NO: 79515 - protein, 7 aa, synthetic construct
TFHQQDE

SEQ ID NO: 79516 - protein, 7 aa, synthetic construct
WVRTSSA

SEQ ID NO: 79517 - protein, 7 aa, synthetic construct
KHLHMEF

SEQ ID NO: 79518 - protein, 7 aa, synthetic construct
NYMDMGG

SEQ ID NO: 79519 - protein, 7 aa, synthetic construct
FKNAQSS

SEQ ID NO: 79520 - protein, 7 aa, synthetic construct
NKNSSSM

SEQ ID NO: 79521 - protein, 7 aa, synthetic construct
VKNGGHA

SEQ ID NO: 79522 - protein, 7 aa, synthetic construct
RQTTAQG

SEQ ID NO: 79523 - protein, 7 aa, synthetic construct
VAEQQKN

SEQ ID NO: 79524 - protein, 7 aa, synthetic construct
TQPSKVA

SEQ ID NO: 79525 - protein, 7 aa, synthetic construct
AFTDRVK

SEQ ID NO: 79526 - protein, 7 aa, synthetic construct
QRIQHDP

SEQ ID NO: 79527 - protein, 7 aa, synthetic construct
SAFYAGE

SEQ ID NO: 79528 - protein, 7 aa, synthetic construct
NPKITSG

SEQ ID NO: 79529 - protein, 7 aa, synthetic construct
NMGKSNP

SEQ ID NO: 79530 - protein, 7 aa, synthetic construct
YGSYKEN

SEQ ID NO: 79531 - protein, 7 aa, synthetic construct
GILPAIT

SEQ ID NO: 79532 - protein, 7 aa, synthetic construct
KPPNSFG

SEQ ID NO: 79533 - protein, 7 aa, synthetic construct
PQYGSKD

SEQ ID NO: 79534 - protein, 7 aa, synthetic construct
KDDRHKE

SEQ ID NO: 79535 - protein, 7 aa, synthetic construct
TYMKGGY

SEQ ID NO: 79536 - protein, 7 aa, synthetic construct
IGFTQRD

SEQ ID NO: 79537 - protein, 7 aa, synthetic construct
NTNTLQG

SEQ ID NO: 79538 - protein, 7 aa, synthetic construct
NDKRFEH

SEQ ID NO: 79539 - protein, 7 aa, synthetic construct
VAGLRDR

SEQ ID NO: 79540 - protein, 7 aa, synthetic construct
TKAYTDR

SEQ ID NO: 79541 - protein, 7 aa, synthetic construct
QKHNDRF

SEQ ID NO: 79542 - protein, 7 aa, synthetic construct
PEISGAR

SEQ ID NO: 79543 - protein, 7 aa, synthetic construct
YEILKNA

SEQ ID NO: 79544 - protein, 7 aa, synthetic construct
THSRNEW

SEQ ID NO: 79545 - protein, 7 aa, synthetic construct
KYNIHAA

SEQ ID NO: 79546 - protein, 7 aa, synthetic construct
MDKGHNW

SEQ ID NO: 79547 - protein, 7 aa, synthetic construct
SKLVDFA

SEQ ID NO: 79548 - protein, 7 aa, synthetic construct
QITKNSF

SEQ ID NO: 79549 - protein, 7 aa, synthetic construct
IQQDLGI

SEQ ID NO: 79550 - protein, 7 aa, synthetic construct
WQHSARA

SEQ ID NO: 79551 - protein, 7 aa, synthetic construct
RNTIDQK

SEQ ID NO: 79552 - protein, 7 aa, synthetic construct
WTESNRT

SEQ ID NO: 79553 - protein, 7 aa, synthetic construct
NKINNQF

SEQ ID NO: 79554 - protein, 7 aa, synthetic construct
PMPPHHA

SEQ ID NO: 79555 - protein, 7 aa, synthetic construct
KDWRNIE

SEQ ID NO: 79556 - protein, 7 aa, synthetic construct
LPGTYQG

SEQ ID NO: 79557 - protein, 7 aa, synthetic construct
ISAGTLK

SEQ ID NO: 79558 - protein, 7 aa, synthetic construct
GIQGGRH

SEQ ID NO: 79559 - protein, 7 aa, synthetic construct
QGYTAGG

SEQ ID NO: 79560 - protein, 7 aa, synthetic construct
NSKITIM

SEQ ID NO: 79561 - protein, 7 aa, synthetic construct
LTAGGKD

SEQ ID NO: 79562 - protein, 7 aa, synthetic construct
QFIAPDK

SEQ ID NO: 79563 - protein, 7 aa, synthetic construct
RVFTSGE

SEQ ID NO: 79564 - protein, 7 aa, synthetic construct
FYNNGTV

SEQ ID NO: 79565 - protein, 7 aa, synthetic construct
HNRADRD

SEQ ID NO: 79566 - protein, 7 aa, synthetic construct
RGNFMVQ

SEQ ID NO: 79567 - protein, 7 aa, synthetic construct
KAMGNNA

SEQ ID NO: 79568 - protein, 7 aa, synthetic construct
RNQENMM

SEQ ID NO: 79569 - protein, 7 aa, synthetic construct
GNVSNFM

SEQ ID NO: 79570 - protein, 7 aa, synthetic construct
NLLNTHA

SEQ ID NO: 79571 - protein, 7 aa, synthetic construct
KPNAAMF

SEQ ID NO: 79572 - protein, 7 aa, synthetic construct
VMQSNGK

SEQ ID NO: 79573 - protein, 7 aa, synthetic construct
GTGTPRD

SEQ ID NO: 79574 - protein, 7 aa, synthetic construct
PPGKNIE

SEQ ID NO: 79575 - protein, 7 aa, synthetic construct
HIDSRHV

SEQ ID NO: 79576 - protein, 7 aa, synthetic construct
EQSGGHK

SEQ ID NO: 79577 - protein, 7 aa, synthetic construct
GHGTLIA

SEQ ID NO: 79578 - protein, 7 aa, synthetic construct
MMMANKE

SEQ ID NO: 79579 - protein, 7 aa, synthetic construct
GGNGRVP

SEQ ID NO: 79580 - protein, 7 aa, synthetic construct
NPTRPTD

SEQ ID NO: 79581 - protein, 7 aa, synthetic construct
MMMHGQD

SEQ ID NO: 79582 - protein, 7 aa, synthetic construct
TKRQTGE

SEQ ID NO: 79583 - protein, 7 aa, synthetic construct
NTHRQRE

SEQ ID NO: 79584 - protein, 7 aa, synthetic construct
SQPHTFE

SEQ ID NO: 79585 - protein, 7 aa, synthetic construct
QILSSGY

SEQ ID NO: 79586 - protein, 7 aa, synthetic construct
KKDNMAG

SEQ ID NO: 79587 - protein, 7 aa, synthetic construct
SGHHAVN

SEQ ID NO: 79588 - protein, 7 aa, synthetic construct
IKSVERN

SEQ ID NO: 79589 - protein, 7 aa, synthetic construct
ARDILQV

SEQ ID NO: 79590 - protein, 7 aa, synthetic construct
VGYQQDR

SEQ ID NO: 79591 - protein, 7 aa, synthetic construct
IGRDIYP

SEQ ID NO: 79592 - protein, 7 aa, synthetic construct
THENHHS

SEQ ID NO: 79593 - protein, 7 aa, synthetic construct
NNVMKHT

SEQ ID NO: 79594 - protein, 7 aa, synthetic construct
LPWKEQQ

SEQ ID NO: 79595 - protein, 7 aa, synthetic construct
NGASKGA

SEQ ID NO: 79596 - protein, 7 aa, synthetic construct
YSRAEIH

SEQ ID NO: 79597 - protein, 7 aa, synthetic construct
TGRDTAP

SEQ ID NO: 79598 - protein, 7 aa, synthetic construct
AMPRYVS

SEQ ID NO: 79599 - protein, 7 aa, synthetic construct
RVVDRRD

SEQ ID NO: 79600 - protein, 7 aa, synthetic construct
DKPQKYG

SEQ ID NO: 79601 - protein, 7 aa, synthetic construct
VNSNPVY

SEQ ID NO: 79602 - protein, 7 aa, synthetic construct
HAFKVAN

SEQ ID NO: 79603 - protein, 7 aa, synthetic construct
MDMPRHP

SEQ ID NO: 79604 - protein, 7 aa, synthetic construct
HQQHAAS

SEQ ID NO: 79605 - protein, 7 aa, synthetic construct
FPINGNV

SEQ ID NO: 79606 - protein, 7 aa, synthetic construct
NGGVQKM

SEQ ID NO: 79607 - protein, 7 aa, synthetic construct
VKYDQEG

SEQ ID NO: 79608 - protein, 7 aa, synthetic construct
PVRIEPT

SEQ ID NO: 79609 - protein, 7 aa, synthetic construct
RLMGPRE

SEQ ID NO: 79610 - protein, 7 aa, synthetic construct
KSYSGMT

SEQ ID NO: 79611 - protein, 7 aa, synthetic construct
HQHSSYD

SEQ ID NO: 79612 - protein, 7 aa, synthetic construct
IRELQSN

SEQ ID NO: 79613 - protein, 7 aa, synthetic construct
LLTSHGT

SEQ ID NO: 79614 - protein, 7 aa, synthetic construct
KAEGLQR

SEQ ID NO: 79615 - protein, 7 aa, synthetic construct
LFEGKSL

SEQ ID NO: 79616 - protein, 7 aa, synthetic construct
SLSYNEP

SEQ ID NO: 79617 - protein, 7 aa, synthetic construct
YAMREQE

SEQ ID NO: 79618 - protein, 7 aa, synthetic construct
LGQRENQ

SEQ ID NO: 79619 - protein, 7 aa, synthetic construct
YLPFEHP

SEQ ID NO: 79620 - protein, 7 aa, synthetic construct
SVQNSSK

SEQ ID NO: 79621 - protein, 7 aa, synthetic construct
EREFSNS

SEQ ID NO: 79622 - protein, 7 aa, synthetic construct
MRPPSSA

SEQ ID NO: 79623 - protein, 7 aa, synthetic construct
GKMSTGP

SEQ ID NO: 79624 - protein, 7 aa, synthetic construct
KFGGTDG

SEQ ID NO: 79625 - protein, 7 aa, synthetic construct
YYKNTMH

SEQ ID NO: 79626 - protein, 7 aa, synthetic construct
EYKNPEA

SEQ ID NO: 79627 - protein, 7 aa, synthetic construct
RPKDSQA

SEQ ID NO: 79628 - protein, 7 aa, synthetic construct
IFGEVRQ

SEQ ID NO: 79629 - protein, 7 aa, synthetic construct
PERPVNP

SEQ ID NO: 79630 - protein, 7 aa, synthetic construct
ANTPMAY

SEQ ID NO: 79631 - protein, 7 aa, synthetic construct
KAQHNAV

SEQ ID NO: 79632 - protein, 7 aa, synthetic construct
TKPQDKA

SEQ ID NO: 79633 - protein, 7 aa, synthetic construct
DRKNNYN

SEQ ID NO: 79634 - protein, 7 aa, synthetic construct
LLQDTAV

SEQ ID NO: 79635 - protein, 7 aa, synthetic construct
QQLIVGG

SEQ ID NO: 79636 - protein, 7 aa, synthetic construct
FLQIGEA

SEQ ID NO: 79637 - protein, 7 aa, synthetic construct
EMNKPHM

SEQ ID NO: 79638 - protein, 7 aa, synthetic construct
PWQKSQP

SEQ ID NO: 79639 - protein, 7 aa, synthetic construct
YGSMDHI

SEQ ID NO: 79640 - protein, 7 aa, synthetic construct
YPRVANP

SEQ ID NO: 79641 - protein, 7 aa, synthetic construct
SSRSEHH

SEQ ID NO: 79642 - protein, 7 aa, synthetic construct
VGPEYQR

SEQ ID NO: 79643 - protein, 7 aa, synthetic construct
FPVKNGE

SEQ ID NO: 79644 - protein, 7 aa, synthetic construct
KSFNMPD

SEQ ID NO: 79645 - protein, 7 aa, synthetic construct
SDRLNNG

SEQ ID NO: 79646 - protein, 7 aa, synthetic construct
NTHNVHK

SEQ ID NO: 79647 - protein, 7 aa, synthetic construct
FGPGPHQ

SEQ ID NO: 79648 - protein, 7 aa, synthetic construct
ARGELAP

SEQ ID NO: 79649 - protein, 7 aa, synthetic construct
KNATPQI

SEQ ID NO: 79650 - protein, 7 aa, synthetic construct
HYSMPVS

SEQ ID NO: 79651 - protein, 7 aa, synthetic construct
VNAKSTG

SEQ ID NO: 79652 - protein, 7 aa, synthetic construct
RDKNSVA

SEQ ID NO: 79653 - protein, 7 aa, synthetic construct
IAPNNGN

SEQ ID NO: 79654 - protein, 7 aa, synthetic construct
QVLATTV

SEQ ID NO: 79655 - protein, 7 aa, synthetic construct
KGGVFFE

SEQ ID NO: 79656 - protein, 7 aa, synthetic construct
PKATVLK

SEQ ID NO: 79657 - protein, 7 aa, synthetic construct
QDRIALK

SEQ ID NO: 79658 - protein, 7 aa, synthetic construct
GDPIQHR

SEQ ID NO: 79659 - protein, 7 aa, synthetic construct
HVMTKND

SEQ ID NO: 79660 - protein, 7 aa, synthetic construct
RAPYPNN

SEQ ID NO: 79661 - protein, 7 aa, synthetic construct
TLLKQPD

SEQ ID NO: 79662 - protein, 7 aa, synthetic construct
SIRQQES

SEQ ID NO: 79663 - protein, 7 aa, synthetic construct
YMVGLPV

SEQ ID NO: 79664 - protein, 7 aa, synthetic construct
SVNRGHE

SEQ ID NO: 79665 - protein, 7 aa, synthetic construct
SHNRESV

SEQ ID NO: 79666 - protein, 7 aa, synthetic construct
LESRAKP

SEQ ID NO: 79667 - protein, 7 aa, synthetic construct
MDKTQSG

SEQ ID NO: 79668 - protein, 7 aa, synthetic construct
GSRFTAD

SEQ ID NO: 79669 - protein, 7 aa, synthetic construct
REYKLGN

SEQ ID NO: 79670 - protein, 7 aa, synthetic construct
STQVKAM

SEQ ID NO: 79671 - protein, 7 aa, synthetic construct
TLYNNRS

SEQ ID NO: 79672 - protein, 7 aa, synthetic construct
TLHATVS

SEQ ID NO: 79673 - protein, 7 aa, synthetic construct
PHTPTPP

SEQ ID NO: 79674 - protein, 7 aa, synthetic construct
SYPKSVG

SEQ ID NO: 79675 - protein, 7 aa, synthetic construct
RPDVNGG

SEQ ID NO: 79676 - protein, 7 aa, synthetic construct
KQFEAVG

SEQ ID NO: 79677 - protein, 7 aa, synthetic construct
HFHDVTA

SEQ ID NO: 79678 - protein, 7 aa, synthetic construct
KWKEPLM

SEQ ID NO: 79679 - protein, 7 aa, synthetic construct
PRNAEPH

SEQ ID NO: 79680 - protein, 7 aa, synthetic construct
LMKSSDD

SEQ ID NO: 79681 - protein, 7 aa, synthetic construct
THTINGM

SEQ ID NO: 79682 - protein, 7 aa, synthetic construct
LERLNAQ

SEQ ID NO: 79683 - protein, 7 aa, synthetic construct
KNYTGNG

SEQ ID NO: 79684 - protein, 7 aa, synthetic construct
YQKVNVH

SEQ ID NO: 79685 - protein, 7 aa, synthetic construct
KPFVQGE

SEQ ID NO: 79686 - protein, 7 aa, synthetic construct
DITRNNG

SEQ ID NO: 79687 - protein, 7 aa, synthetic construct
DLPGKNK

SEQ ID NO: 79688 - protein, 7 aa, synthetic construct
DKMYPLR

SEQ ID NO: 79689 - protein, 7 aa, synthetic construct
ENARDNV

SEQ ID NO: 79690 - protein, 7 aa, synthetic construct
ISKTSIG

SEQ ID NO: 79691 - protein, 7 aa, synthetic construct
EGSSYAK

SEQ ID NO: 79692 - protein, 7 aa, synthetic construct
RVQSSAI

SEQ ID NO: 79693 - protein, 7 aa, synthetic construct
NKDKGTN

SEQ ID NO: 79694 - protein, 7 aa, synthetic construct
NPDRVPS

SEQ ID NO: 79695 - protein, 7 aa, synthetic construct
MHNKTVV

SEQ ID NO: 79696 - protein, 7 aa, synthetic construct
MSKPPEF

SEQ ID NO: 79697 - protein, 7 aa, synthetic construct
TRRVSEE

SEQ ID NO: 79698 - protein, 7 aa, synthetic construct
GKDTFKW

SEQ ID NO: 79699 - protein, 7 aa, synthetic construct
SAEMVRR

SEQ ID NO: 79700 - protein, 7 aa, synthetic construct
WQPEKES

SEQ ID NO: 79701 - protein, 7 aa, synthetic construct
SGFVTGD

SEQ ID NO: 79702 - protein, 7 aa, synthetic construct
QKQQNMS

SEQ ID NO: 79703 - protein, 7 aa, synthetic construct
IQPYQSE

SEQ ID NO: 79704 - protein, 7 aa, synthetic construct
IMNAAYA

SEQ ID NO: 79705 - protein, 7 aa, synthetic construct
VSHETKH

SEQ ID NO: 79706 - protein, 7 aa, synthetic construct
MGHSFNN

SEQ ID NO: 79707 - protein, 7 aa, synthetic construct
LATEKRA

SEQ ID NO: 79708 - protein, 7 aa, synthetic construct
HMQGTGE

SEQ ID NO: 79709 - protein, 7 aa, synthetic construct
TRPQAQN

SEQ ID NO: 79710 - protein, 7 aa, synthetic construct
SFPSNQT

SEQ ID NO: 79711 - protein, 7 aa, synthetic construct
EKRGDHM

SEQ ID NO: 79712 - protein, 7 aa, synthetic construct
LNDKHDV

SEQ ID NO: 79713 - protein, 7 aa, synthetic construct
VEKHPQN

SEQ ID NO: 79714 - protein, 7 aa, synthetic construct
IHPGFGT

SEQ ID NO: 79715 - protein, 7 aa, synthetic construct
SADFMRG

SEQ ID NO: 79716 - protein, 7 aa, synthetic construct
RDPFANA

SEQ ID NO: 79717 - protein, 7 aa, synthetic construct
PDSSRLL

SEQ ID NO: 79718 - protein, 7 aa, synthetic construct
ASSGPSQ

SEQ ID NO: 79719 - protein, 7 aa, synthetic construct
TMGEHAA

SEQ ID NO: 79720 - protein, 7 aa, synthetic construct
RNPDVAS

SEQ ID NO: 79721 - protein, 7 aa, synthetic construct
WFAQQRE

SEQ ID NO: 79722 - protein, 7 aa, synthetic construct
VRDTALH

SEQ ID NO: 79723 - protein, 7 aa, synthetic construct
TIRTREI

SEQ ID NO: 79724 - protein, 7 aa, synthetic construct
GERARVE

SEQ ID NO: 79725 - protein, 7 aa, synthetic construct
WGEASKP

SEQ ID NO: 79726 - protein, 7 aa, synthetic construct
GKNTTMA

SEQ ID NO: 79727 - protein, 7 aa, synthetic construct
SSQNYHE

SEQ ID NO: 79728 - protein, 7 aa, synthetic construct
PSINMTV

SEQ ID NO: 79729 - protein, 7 aa, synthetic construct
YHKSLAY

SEQ ID NO: 79730 - protein, 7 aa, synthetic construct
SNMTYTV

SEQ ID NO: 79731 - protein, 7 aa, synthetic construct
LHSPAVP

SEQ ID NO: 79732 - protein, 7 aa, synthetic construct
VAASSPP

SEQ ID NO: 79733 - protein, 7 aa, synthetic construct
KPKTVAD

SEQ ID NO: 79734 - protein, 7 aa, synthetic construct
YGPQKTA

SEQ ID NO: 79735 - protein, 7 aa, synthetic construct
RDGPDRF

SEQ ID NO: 79736 - protein, 7 aa, synthetic construct
QPPTHKG

SEQ ID NO: 79737 - protein, 7 aa, synthetic construct
PKLLSSG

SEQ ID NO: 79738 - protein, 7 aa, synthetic construct
SNRIMIH

SEQ ID NO: 79739 - protein, 7 aa, synthetic construct
WHTIRLE

SEQ ID NO: 79740 - protein, 7 aa, synthetic construct
QSSTIPH

SEQ ID NO: 79741 - protein, 7 aa, synthetic construct
RLPTKHD

SEQ ID NO: 79742 - protein, 7 aa, synthetic construct
GKPAYNT

SEQ ID NO: 79743 - protein, 7 aa, synthetic construct
VIARQPP

SEQ ID NO: 79744 - protein, 7 aa, synthetic construct
KPVNNAA

SEQ ID NO: 79745 - protein, 7 aa, synthetic construct
LPSSQPM

SEQ ID NO: 79746 - protein, 7 aa, synthetic construct
TVDDDTR

SEQ ID NO: 79747 - protein, 7 aa, synthetic construct
GGALVGK

SEQ ID NO: 79748 - protein, 7 aa, synthetic construct
VKQPVPD

SEQ ID NO: 79749 - protein, 7 aa, synthetic construct
QGNGLKG

SEQ ID NO: 79750 - protein, 7 aa, synthetic construct
DRQMSVH

SEQ ID NO: 79751 - protein, 7 aa, synthetic construct
KSNATGN

SEQ ID NO: 79752 - protein, 7 aa, synthetic construct
VGGQKTT

SEQ ID NO: 79753 - protein, 7 aa, synthetic construct
SALRGVD

SEQ ID NO: 79754 - protein, 7 aa, synthetic construct
LVNMDRS

SEQ ID NO: 79755 - protein, 7 aa, synthetic construct
TRPQPTS

SEQ ID NO: 79756 - protein, 7 aa, synthetic construct
QLHGNQI

SEQ ID NO: 79757 - protein, 7 aa, synthetic construct
IKMPVSL

SEQ ID NO: 79758 - protein, 7 aa, synthetic construct
VMHSGKP

SEQ ID NO: 79759 - protein, 7 aa, synthetic construct
QRIGPEY

SEQ ID NO: 79760 - protein, 7 aa, synthetic construct
DKPQNKA

SEQ ID NO: 79761 - protein, 7 aa, synthetic construct
TVEHAKT

SEQ ID NO: 79762 - protein, 7 aa, synthetic construct
YDKFPMS

SEQ ID NO: 79763 - protein, 7 aa, synthetic construct
GDKTNKD

SEQ ID NO: 79764 - protein, 7 aa, synthetic construct
RDKNNMP

SEQ ID NO: 79765 - protein, 7 aa, synthetic construct
MPHIRFD

SEQ ID NO: 79766 - protein, 7 aa, synthetic construct
FGHAVQT

SEQ ID NO: 79767 - protein, 7 aa, synthetic construct
NPPMLDK

SEQ ID NO: 79768 - protein, 7 aa, synthetic construct
ERLKMAV

SEQ ID NO: 79769 - protein, 7 aa, synthetic construct
QLVHTKE

SEQ ID NO: 79770 - protein, 7 aa, synthetic construct
LKMTREL

SEQ ID NO: 79771 - protein, 7 aa, synthetic construct
DPRNASF

SEQ ID NO: 79772 - protein, 7 aa, synthetic construct
TKGWVQQ

SEQ ID NO: 79773 - protein, 7 aa, synthetic construct
ILLGLRE

SEQ ID NO: 79774 - protein, 7 aa, synthetic construct
TTHIATR

SEQ ID NO: 79775 - protein, 7 aa, synthetic construct
TPPQTHI

SEQ ID NO: 79776 - protein, 7 aa, synthetic construct
SHNRILD

SEQ ID NO: 79777 - protein, 7 aa, synthetic construct
ITGKVDS

SEQ ID NO: 79778 - protein, 7 aa, synthetic construct
QFKIRDI

SEQ ID NO: 79779 - protein, 7 aa, synthetic construct
IRPSNYT

SEQ ID NO: 79780 - protein, 7 aa, synthetic construct
SEKAMKA

SEQ ID NO: 79781 - protein, 7 aa, synthetic construct
AKKEYND

SEQ ID NO: 79782 - protein, 7 aa, synthetic construct
EINKSPG

SEQ ID NO: 79783 - protein, 7 aa, synthetic construct
PKPHGQD

SEQ ID NO: 79784 - protein, 7 aa, synthetic construct
VNKAMDP

SEQ ID NO: 79785 - protein, 7 aa, synthetic construct
YKGTPNQ

SEQ ID NO: 79786 - protein, 7 aa, synthetic construct
RSQQSYN

SEQ ID NO: 79787 - protein, 7 aa, synthetic construct
FSQHNDP

SEQ ID NO: 79788 - protein, 7 aa, synthetic construct
TIYNKDS

SEQ ID NO: 79789 - protein, 7 aa, synthetic construct
KGVTSGA

SEQ ID NO: 79790 - protein, 7 aa, synthetic construct
GQFRNDF

SEQ ID NO: 79791 - protein, 7 aa, synthetic construct
TQPNSNT

SEQ ID NO: 79792 - protein, 7 aa, synthetic construct
AKSPQNN

SEQ ID NO: 79793 - protein, 7 aa, synthetic construct
TENRGQP

SEQ ID NO: 79794 - protein, 7 aa, synthetic construct
LDLPTKF

SEQ ID NO: 79795 - protein, 7 aa, synthetic construct
PEVSTKR

SEQ ID NO: 79796 - protein, 7 aa, synthetic construct
GTRMMDK

SEQ ID NO: 79797 - protein, 7 aa, synthetic construct
YDRNKYM

SEQ ID NO: 79798 - protein, 7 aa, synthetic construct
TTWQAQP

SEQ ID NO: 79799 - protein, 7 aa, synthetic construct
NTPNSQA

SEQ ID NO: 79800 - protein, 7 aa, synthetic construct
FAKGHPP

SEQ ID NO: 79801 - protein, 7 aa, synthetic construct
QKGVSTV

SEQ ID NO: 79802 - protein, 7 aa, synthetic construct
QMLPGDR

SEQ ID NO: 79803 - protein, 7 aa, synthetic construct
PKRDDKL

SEQ ID NO: 79804 - protein, 7 aa, synthetic construct
SSNNQIG

SEQ ID NO: 79805 - protein, 7 aa, synthetic construct
RYPGFDG

SEQ ID NO: 79806 - protein, 7 aa, synthetic construct
AKKPDGF

SEQ ID NO: 79807 - protein, 7 aa, synthetic construct
IVGIAHH

SEQ ID NO: 79808 - protein, 7 aa, synthetic construct
GKTPMAV

SEQ ID NO: 79809 - protein, 7 aa, synthetic construct
AYRDNNI

SEQ ID NO: 79810 - protein, 7 aa, synthetic construct
FHTKWED

SEQ ID NO: 79811 - protein, 7 aa, synthetic construct
PVRLSGE

SEQ ID NO: 79812 - protein, 7 aa, synthetic construct
GPRPFED

SEQ ID NO: 79813 - protein, 7 aa, synthetic construct
KTNNVKE

SEQ ID NO: 79814 - protein, 7 aa, synthetic construct
DKKNDSY

SEQ ID NO: 79815 - protein, 7 aa, synthetic construct
RNPDHSA

SEQ ID NO: 79816 - protein, 7 aa, synthetic construct
EKETKNH

SEQ ID NO: 79817 - protein, 7 aa, synthetic construct
LRDRPYG

SEQ ID NO: 79818 - protein, 7 aa, synthetic construct
PASKAVP

SEQ ID NO: 79819 - protein, 7 aa, synthetic construct
NNMNREP

SEQ ID NO: 79820 - protein, 7 aa, synthetic construct
VPQRGLD

SEQ ID NO: 79821 - protein, 7 aa, synthetic construct
AGGFQPE

SEQ ID NO: 79822 - protein, 7 aa, synthetic construct
KGSSAMP

SEQ ID NO: 79823 - protein, 7 aa, synthetic construct
MLLGSVN

SEQ ID NO: 79824 - protein, 7 aa, synthetic construct
EQNTKHG

SEQ ID NO: 79825 - protein, 7 aa, synthetic construct
QKHTIDI

SEQ ID NO: 79826 - protein, 7 aa, synthetic construct
SFGAQQR

SEQ ID NO: 79827 - protein, 7 aa, synthetic construct
ATGITGD

SEQ ID NO: 79828 - protein, 7 aa, synthetic construct
HNRMTAI

SEQ ID NO: 79829 - protein, 7 aa, synthetic construct
FKTNSVF

SEQ ID NO: 79830 - protein, 7 aa, synthetic construct
QNGGQRN

SEQ ID NO: 79831 - protein, 7 aa, synthetic construct
GPSANLQ

SEQ ID NO: 79832 - protein, 7 aa, synthetic construct
FMPVLSA

SEQ ID NO: 79833 - protein, 7 aa, synthetic construct
GVPIAKQ

SEQ ID NO: 79834 - protein, 7 aa, synthetic construct
RSNNMSA

SEQ ID NO: 79835 - protein, 7 aa, synthetic construct
RQTIPES

SEQ ID NO: 79836 - protein, 7 aa, synthetic construct
LLSSVGK

SEQ ID NO: 79837 - protein, 7 aa, synthetic construct
NNKSQPA

SEQ ID NO: 79838 - protein, 7 aa, synthetic construct
MNGKPWI

SEQ ID NO: 79839 - protein, 7 aa, synthetic construct
HPRQGYG

SEQ ID NO: 79840 - protein, 7 aa, synthetic construct
GNYQGNE

SEQ ID NO: 79841 - protein, 7 aa, synthetic construct
YGGIHQA

SEQ ID NO: 79842 - protein, 7 aa, synthetic construct
TRAMAFE

SEQ ID NO: 79843 - protein, 7 aa, synthetic construct
EPRVNSS

SEQ ID NO: 79844 - protein, 7 aa, synthetic construct
NSHNMVK

SEQ ID NO: 79845 - protein, 7 aa, synthetic construct
SMRSGSD

SEQ ID NO: 79846 - protein, 7 aa, synthetic construct
KHLGNEY

SEQ ID NO: 79847 - protein, 7 aa, synthetic construct
GGTQAFS

SEQ ID NO: 79848 - protein, 7 aa, synthetic construct
YMQQARP

SEQ ID NO: 79849 - protein, 7 aa, synthetic construct
MSDGRVM

SEQ ID NO: 79850 - protein, 7 aa, synthetic construct
LRTFVSD

SEQ ID NO: 79851 - protein, 7 aa, synthetic construct
KDQTSPY

SEQ ID NO: 79852 - protein, 7 aa, synthetic construct
FGGQSSK

SEQ ID NO: 79853 - protein, 7 aa, synthetic construct
GDTNRIQ

SEQ ID NO: 79854 - protein, 7 aa, synthetic construct
WDKLDKY

SEQ ID NO: 79855 - protein, 7 aa, synthetic construct
TASHRHA

SEQ ID NO: 79856 - protein, 7 aa, synthetic construct
DKFESTA

SEQ ID NO: 79857 - protein, 7 aa, synthetic construct
YAMGIGS

SEQ ID NO: 79858 - protein, 7 aa, synthetic construct
HDQVGHV

SEQ ID NO: 79859 - protein, 7 aa, synthetic construct
REPSAMP

SEQ ID NO: 79860 - protein, 7 aa, synthetic construct
KNSTGRD

SEQ ID NO: 79861 - protein, 7 aa, synthetic construct
RDGGPQS

SEQ ID NO: 79862 - protein, 7 aa, synthetic construct
SAQLSRN

SEQ ID NO: 79863 - protein, 7 aa, synthetic construct
AKNYGEE

SEQ ID NO: 79864 - protein, 7 aa, synthetic construct
GTAMARN

SEQ ID NO: 79865 - protein, 7 aa, synthetic construct
VKTNSNG

SEQ ID NO: 79866 - protein, 7 aa, synthetic construct
KFEHSMM

SEQ ID NO: 79867 - protein, 7 aa, synthetic construct
TRVDAAQ

SEQ ID NO: 79868 - protein, 7 aa, synthetic construct
KISMQVS

SEQ ID NO: 79869 - protein, 7 aa, synthetic construct
VGLTFQE

SEQ ID NO: 79870 - protein, 7 aa, synthetic construct
YNTQASI

SEQ ID NO: 79871 - protein, 7 aa, synthetic construct
HKSDLVP

SEQ ID NO: 79872 - protein, 7 aa, synthetic construct
GPQFAQR

SEQ ID NO: 79873 - protein, 7 aa, synthetic construct
GRKEQEI

SEQ ID NO: 79874 - protein, 7 aa, synthetic construct
TQKKQDG

SEQ ID NO: 79875 - protein, 7 aa, synthetic construct
LPGMTNR

SEQ ID NO: 79876 - protein, 7 aa, synthetic construct
DSVRGYS

SEQ ID NO: 79877 - protein, 7 aa, synthetic construct
MKHYDKP

SEQ ID NO: 79878 - protein, 7 aa, synthetic construct
MVGFRDQ

SEQ ID NO: 79879 - protein, 7 aa, synthetic construct
YKSDGLL

SEQ ID NO: 79880 - protein, 7 aa, synthetic construct
TVHKHEV

SEQ ID NO: 79881 - protein, 7 aa, synthetic construct
LMGGSHF

SEQ ID NO: 79882 - protein, 7 aa, synthetic construct
MKNGVNG

SEQ ID NO: 79883 - protein, 7 aa, synthetic construct
QSQASAK

SEQ ID NO: 79884 - protein, 7 aa, synthetic construct
NKPNNMS

SEQ ID NO: 79885 - protein, 7 aa, synthetic construct
DASQSHA

SEQ ID NO: 79886 - protein, 7 aa, synthetic construct
LRSAQEH

SEQ ID NO: 79887 - protein, 7 aa, synthetic construct
EMKTRTE

SEQ ID NO: 79888 - protein, 7 aa, synthetic construct
TKEAPLK

SEQ ID NO: 79889 - protein, 7 aa, synthetic construct
RDHQNVN

SEQ ID NO: 79890 - protein, 7 aa, synthetic construct
PVAHRAV

SEQ ID NO: 79891 - protein, 7 aa, synthetic construct
EGMHSNK

SEQ ID NO: 79892 - protein, 7 aa, synthetic construct
RMNANQG

SEQ ID NO: 79893 - protein, 7 aa, synthetic construct
KDPLWRE

SEQ ID NO: 79894 - protein, 7 aa, synthetic construct
EYLATSA

SEQ ID NO: 79895 - protein, 7 aa, synthetic construct
TKRDMNP

SEQ ID NO: 79896 - protein, 7 aa, synthetic construct
REGTNQI

SEQ ID NO: 79897 - protein, 7 aa, synthetic construct
PLMQNRP

SEQ ID NO: 79898 - protein, 7 aa, synthetic construct
EAGNMPR

SEQ ID NO: 79899 - protein, 7 aa, synthetic construct
GNYITVT

SEQ ID NO: 79900 - protein, 7 aa, synthetic construct
VREVPTP

SEQ ID NO: 79901 - protein, 7 aa, synthetic construct
SRMVLVA

SEQ ID NO: 79902 - protein, 7 aa, synthetic construct
WEGMSHA

SEQ ID NO: 79903 - protein, 7 aa, synthetic construct
TMPHMQD

SEQ ID NO: 79904 - protein, 7 aa, synthetic construct
KYSLNHI

SEQ ID NO: 79905 - protein, 7 aa, synthetic construct
YAAQEKI

SEQ ID NO: 79906 - protein, 7 aa, synthetic construct
NRDKVES

SEQ ID NO: 79907 - protein, 7 aa, synthetic construct
SRIKVGE

SEQ ID NO: 79908 - protein, 7 aa, synthetic construct
YEYQSGK

SEQ ID NO: 79909 - protein, 7 aa, synthetic construct
SNYNAII

SEQ ID NO: 79910 - protein, 7 aa, synthetic construct
QQVTGYM

SEQ ID NO: 79911 - protein, 7 aa, synthetic construct
KNRQETI

SEQ ID NO: 79912 - protein, 7 aa, synthetic construct
NKTTQVN

SEQ ID NO: 79913 - protein, 7 aa, synthetic construct
LQGPRNM

SEQ ID NO: 79914 - protein, 7 aa, synthetic construct
VTANHHS

SEQ ID NO: 79915 - protein, 7 aa, synthetic construct
EIFKKGS

SEQ ID NO: 79916 - protein, 7 aa, synthetic construct
NLNLADS

SEQ ID NO: 79917 - protein, 7 aa, synthetic construct
HAIIQGS

SEQ ID NO: 79918 - protein, 7 aa, synthetic construct
PKNQAMS

SEQ ID NO: 79919 - protein, 7 aa, synthetic construct
LDNMKRV

SEQ ID NO: 79920 - protein, 7 aa, synthetic construct
KIVPMEK

SEQ ID NO: 79921 - protein, 7 aa, synthetic construct
SDKLTMP

SEQ ID NO: 79922 - protein, 7 aa, synthetic construct
MRQSQEI

SEQ ID NO: 79923 - protein, 7 aa, synthetic construct
KHQRPGE

SEQ ID NO: 79924 - protein, 7 aa, synthetic construct
FHLASGT

SEQ ID NO: 79925 - protein, 7 aa, synthetic construct
TPARPHI

SEQ ID NO: 79926 - protein, 7 aa, synthetic construct
PLGAGES

SEQ ID NO: 79927 - protein, 7 aa, synthetic construct
FKNAHMD

SEQ ID NO: 79928 - protein, 7 aa, synthetic construct
RITLSNE

SEQ ID NO: 79929 - protein, 7 aa, synthetic construct
KKDNTTG

SEQ ID NO: 79930 - protein, 7 aa, synthetic construct
INPHIGE

SEQ ID NO: 79931 - protein, 7 aa, synthetic construct
SIHESKK

SEQ ID NO: 79932 - protein, 7 aa, synthetic construct
RMNHEYS

SEQ ID NO: 79933 - protein, 7 aa, synthetic construct
KVPYLDE

SEQ ID NO: 79934 - protein, 7 aa, synthetic construct
QHILPAK

SEQ ID NO: 79935 - protein, 7 aa, synthetic construct
KNSTMDH

SEQ ID NO: 79936 - protein, 7 aa, synthetic construct
DTQQQRV

SEQ ID NO: 79937 - protein, 7 aa, synthetic construct
KTASGHV

SEQ ID NO: 79938 - protein, 7 aa, synthetic construct
HLRLVHE

SEQ ID NO: 79939 - protein, 7 aa, synthetic construct
GTGAAAR

SEQ ID NO: 79940 - protein, 7 aa, synthetic construct
NEHVPMT

SEQ ID NO: 79941 - protein, 7 aa, synthetic construct
LHVKEHQ

SEQ ID NO: 79942 - protein, 7 aa, synthetic construct
RVQASLE

SEQ ID NO: 79943 - protein, 7 aa, synthetic construct
NALVIKE

SEQ ID NO: 79944 - protein, 7 aa, synthetic construct
FAVRQIA

SEQ ID NO: 79945 - protein, 7 aa, synthetic construct
VDFKSRG

SEQ ID NO: 79946 - protein, 7 aa, synthetic construct
KLYTDSM

SEQ ID NO: 79947 - protein, 7 aa, synthetic construct
IQQTKSV

SEQ ID NO: 79948 - protein, 7 aa, synthetic construct
AKVDGSS

SEQ ID NO: 79949 - protein, 7 aa, synthetic construct
MFGKLHD

SEQ ID NO: 79950 - protein, 7 aa, synthetic construct
PDMIHNK

SEQ ID NO: 79951 - protein, 7 aa, synthetic construct
LSEKNHP

SEQ ID NO: 79952 - protein, 7 aa, synthetic construct
INLGVPR

SEQ ID NO: 79953 - protein, 7 aa, synthetic construct
GAHTGAF

SEQ ID NO: 79954 - protein, 7 aa, synthetic construct
HRNFPDH

SEQ ID NO: 79955 - protein, 7 aa, synthetic construct
SSKNTTP

SEQ ID NO: 79956 - protein, 7 aa, synthetic construct
YYQGGAE

SEQ ID NO: 79957 - protein, 7 aa, synthetic construct
VTLGIGE

SEQ ID NO: 79958 - protein, 7 aa, synthetic construct
LKEMHSN

SEQ ID NO: 79959 - protein, 7 aa, synthetic construct
FANAPTG

SEQ ID NO: 79960 - protein, 7 aa, synthetic construct
SGQKTGW

SEQ ID NO: 79961 - protein, 7 aa, synthetic construct
RSEKFAH

SEQ ID NO: 79962 - protein, 7 aa, synthetic construct
IQQKNVD

SEQ ID NO: 79963 - protein, 7 aa, synthetic construct
GSGTNND

SEQ ID NO: 79964 - protein, 7 aa, synthetic construct
REDMHKG

SEQ ID NO: 79965 - protein, 7 aa, synthetic construct
HFPVSKD

SEQ ID NO: 79966 - protein, 7 aa, synthetic construct
LINMVTG

SEQ ID NO: 79967 - protein, 7 aa, synthetic construct
QDQLIKR

SEQ ID NO: 79968 - protein, 7 aa, synthetic construct
SKDWVES

SEQ ID NO: 79969 - protein, 7 aa, synthetic construct
EFNISAA

SEQ ID NO: 79970 - protein, 7 aa, synthetic construct
HTPTHPA

SEQ ID NO: 79971 - protein, 7 aa, synthetic construct
DERGTML

SEQ ID NO: 79972 - protein, 7 aa, synthetic construct
QVMIGGP

SEQ ID NO: 79973 - protein, 7 aa, synthetic construct
GKSMNAP

SEQ ID NO: 79974 - protein, 7 aa, synthetic construct
GVFNQNN

SEQ ID NO: 79975 - protein, 7 aa, synthetic construct
EEYMGAK

SEQ ID NO: 79976 - protein, 7 aa, synthetic construct
TAEYTQK

SEQ ID NO: 79977 - protein, 7 aa, synthetic construct
KTERSEA

SEQ ID NO: 79978 - protein, 7 aa, synthetic construct
ALQPRQA

SEQ ID NO: 79979 - protein, 7 aa, synthetic construct
GSTVSQL

SEQ ID NO: 79980 - protein, 7 aa, synthetic construct
VQQKKDW

SEQ ID NO: 79981 - protein, 7 aa, synthetic construct
QTHGSAD

SEQ ID NO: 79982 - protein, 7 aa, synthetic construct
LLSHDER

SEQ ID NO: 79983 - protein, 7 aa, synthetic construct
LIHQSAR

SEQ ID NO: 79984 - protein, 7 aa, synthetic construct
SQNQRPE

SEQ ID NO: 79985 - protein, 7 aa, synthetic construct
QKPGTQG

SEQ ID NO: 79986 - protein, 7 aa, synthetic construct
NMTQERM

SEQ ID NO: 79987 - protein, 7 aa, synthetic construct
HTAKHPT

SEQ ID NO: 79988 - protein, 7 aa, synthetic construct
PRYDTHE

SEQ ID NO: 79989 - protein, 7 aa, synthetic construct
QIHQGQM

SEQ ID NO: 79990 - protein, 7 aa, synthetic construct
YEKVGYN

SEQ ID NO: 79991 - protein, 7 aa, synthetic construct
DFSHTLP

SEQ ID NO: 79992 - protein, 7 aa, synthetic construct
KAGHDTV

SEQ ID NO: 79993 - protein, 7 aa, synthetic construct
QLTHSEH

SEQ ID NO: 79994 - protein, 7 aa, synthetic construct
PRRDNGM

SEQ ID NO: 79995 - protein, 7 aa, synthetic construct
EKSDWTR

SEQ ID NO: 79996 - protein, 7 aa, synthetic construct
GNTPSFG

SEQ ID NO: 79997 - protein, 7 aa, synthetic construct
YSVKEKE

SEQ ID NO: 79998 - protein, 7 aa, synthetic construct
GGNPEPP

SEQ ID NO: 79999 - protein, 7 aa, synthetic construct
IWENNRA

SEQ ID NO: 80000 - protein, 7 aa, synthetic construct
QRAEADV

SEQ ID NO: 80001 - protein, 7 aa, synthetic construct
VIHRHEE

SEQ ID NO: 80002 - protein, 7 aa, synthetic construct
GYADKSY

SEQ ID NO: 80003 - protein, 7 aa, synthetic construct
VLPMFQS

SEQ ID NO: 80004 - protein, 7 aa, synthetic construct
NMTTGKA

SEQ ID NO: 80005 - protein, 7 aa, synthetic construct
SSKQVNT

SEQ ID NO: 80006 - protein, 7 aa, synthetic construct
LPEFKSH

SEQ ID NO: 80007 - protein, 7 aa, synthetic construct
SIKLDQG

SEQ ID NO: 80008 - protein, 7 aa, synthetic construct
SPYITSH

SEQ ID NO: 80009 - protein, 7 aa, synthetic construct
NLIKPHM

SEQ ID NO: 80010 - protein, 7 aa, synthetic construct
MSIKWQD

SEQ ID NO: 80011 - protein, 7 aa, synthetic construct
SRGNTNN

SEQ ID NO: 80012 - protein, 7 aa, synthetic construct
WQNTSTN

SEQ ID NO: 80013 - protein, 7 aa, synthetic construct
MAGRMVP

SEQ ID NO: 80014 - protein, 7 aa, synthetic construct
TSGQSGF

SEQ ID NO: 80015 - protein, 7 aa, synthetic construct
LYHKTQL

SEQ ID NO: 80016 - protein, 7 aa, synthetic construct
ATNQMRA

SEQ ID NO: 80017 - protein, 7 aa, synthetic construct
RQPMLND

SEQ ID NO: 80018 - protein, 7 aa, synthetic construct
NQRTSQP

SEQ ID NO: 80019 - protein, 7 aa, synthetic construct
NKNPAVS

SEQ ID NO: 80020 - protein, 7 aa, synthetic construct
IIDGHTP

SEQ ID NO: 80021 - protein, 7 aa, synthetic construct
KMNQNVA

SEQ ID NO: 80022 - protein, 7 aa, synthetic construct
NPNHGGN

SEQ ID NO: 80023 - protein, 7 aa, synthetic construct
DRVVAVV

SEQ ID NO: 80024 - protein, 7 aa, synthetic construct
YKYAHQP

SEQ ID NO: 80025 - protein, 7 aa, synthetic construct
TVKNEIY

SEQ ID NO: 80026 - protein, 7 aa, synthetic construct
SKGNTPA

SEQ ID NO: 80027 - protein, 7 aa, synthetic construct
STMQIAP

SEQ ID NO: 80028 - protein, 7 aa, synthetic construct
MDQRFPY

SEQ ID NO: 80029 - protein, 7 aa, synthetic construct
WRPGAVT

SEQ ID NO: 80030 - protein, 7 aa, synthetic construct
DHGRTQM

SEQ ID NO: 80031 - protein, 7 aa, synthetic construct
WNMKIGD

SEQ ID NO: 80032 - protein, 7 aa, synthetic construct
RDGLMQP

SEQ ID NO: 80033 - protein, 7 aa, synthetic construct
RPQQITS

SEQ ID NO: 80034 - protein, 7 aa, synthetic construct
GKMPVTS

SEQ ID NO: 80035 - protein, 7 aa, synthetic construct
QSDRTVA

SEQ ID NO: 80036 - protein, 7 aa, synthetic construct
NDMLRQG

SEQ ID NO: 80037 - protein, 7 aa, synthetic construct
MGSKTYD

SEQ ID NO: 80038 - protein, 7 aa, synthetic construct
YNVHTSK

SEQ ID NO: 80039 - protein, 7 aa, synthetic construct
FKAAMKE

SEQ ID NO: 80040 - protein, 7 aa, synthetic construct
PSNGRVI

SEQ ID NO: 80041 - protein, 7 aa, synthetic construct
WGTNMNR

SEQ ID NO: 80042 - protein, 7 aa, synthetic construct
YDHTPHS

SEQ ID NO: 80043 - protein, 7 aa, synthetic construct
GHFSTQI

SEQ ID NO: 80044 - protein, 7 aa, synthetic construct
IIRKYQE

SEQ ID NO: 80045 - protein, 7 aa, synthetic construct
SMDAAKI

SEQ ID NO: 80046 - protein, 7 aa, synthetic construct
KRNVDQM

SEQ ID NO: 80047 - protein, 7 aa, synthetic construct
RSKSEMT

SEQ ID NO: 80048 - protein, 7 aa, synthetic construct
YKRPDDQ

SEQ ID NO: 80049 - protein, 7 aa, synthetic construct
NASRQQP

SEQ ID NO: 80050 - protein, 7 aa, synthetic construct
LRVGSEV

SEQ ID NO: 80051 - protein, 7 aa, synthetic construct
TQHHNQA

SEQ ID NO: 80052 - protein, 7 aa, synthetic construct
DGSVAVH

SEQ ID NO: 80053 - protein, 7 aa, synthetic construct
DRHNLGT

SEQ ID NO: 80054 - protein, 7 aa, synthetic construct
YIKTEKD

SEQ ID NO: 80055 - protein, 7 aa, synthetic construct
PGPQQHV

SEQ ID NO: 80056 - protein, 7 aa, synthetic construct
YVRANLE

SEQ ID NO: 80057 - protein, 7 aa, synthetic construct
KSGEPAH

SEQ ID NO: 80058 - protein, 7 aa, synthetic construct
STKPAFP

SEQ ID NO: 80059 - protein, 7 aa, synthetic construct
NFMNRAP

SEQ ID NO: 80060 - protein, 7 aa, synthetic construct
YDSNSVG

SEQ ID NO: 80061 - protein, 7 aa, synthetic construct
INNSKLL

SEQ ID NO: 80062 - protein, 7 aa, synthetic construct
DMKADRA

SEQ ID NO: 80063 - protein, 7 aa, synthetic construct
GKTPVSG

SEQ ID NO: 80064 - protein, 7 aa, synthetic construct
VTPPEKV

SEQ ID NO: 80065 - protein, 7 aa, synthetic construct
KQDLWRE

SEQ ID NO: 80066 - protein, 7 aa, synthetic construct
VEARFNT

SEQ ID NO: 80067 - protein, 7 aa, synthetic construct
SIHDARN

SEQ ID NO: 80068 - protein, 7 aa, synthetic construct
HMLQNGF

SEQ ID NO: 80069 - protein, 7 aa, synthetic construct
NLRMQQT

SEQ ID NO: 80070 - protein, 7 aa, synthetic construct
NMHANSF

SEQ ID NO: 80071 - protein, 7 aa, synthetic construct
MNRAETP

SEQ ID NO: 80072 - protein, 7 aa, synthetic construct
KPPADSM

SEQ ID NO: 80073 - protein, 7 aa, synthetic construct
HMTLRMG

SEQ ID NO: 80074 - protein, 7 aa, synthetic construct
DIKELAI

SEQ ID NO: 80075 - protein, 7 aa, synthetic construct
VKSSGSS

SEQ ID NO: 80076 - protein, 7 aa, synthetic construct
ANLQKIA

SEQ ID NO: 80077 - protein, 7 aa, synthetic construct
RVMLDHP

SEQ ID NO: 80078 - protein, 7 aa, synthetic construct
VLERKGH

SEQ ID NO: 80079 - protein, 7 aa, synthetic construct
YRGPGDA

SEQ ID NO: 80080 - protein, 7 aa, synthetic construct
NQQFSTT

SEQ ID NO: 80081 - protein, 7 aa, synthetic construct
GMISTHQ

SEQ ID NO: 80082 - protein, 7 aa, synthetic construct
NLQREHV

SEQ ID NO: 80083 - protein, 7 aa, synthetic construct
IIRGDQY

SEQ ID NO: 80084 - protein, 7 aa, synthetic construct
QNNRVGA

SEQ ID NO: 80085 - protein, 7 aa, synthetic construct
MKPNQQA

SEQ ID NO: 80086 - protein, 7 aa, synthetic construct
DNRLLSG

SEQ ID NO: 80087 - protein, 7 aa, synthetic construct
HHQPNQL

SEQ ID NO: 80088 - protein, 7 aa, synthetic construct
YGTHQDM

SEQ ID NO: 80089 - protein, 7 aa, synthetic construct
FVHNSQA

SEQ ID NO: 80090 - protein, 7 aa, synthetic construct
NNGKMLS

SEQ ID NO: 80091 - protein, 7 aa, synthetic construct
HNWKDDR

SEQ ID NO: 80092 - protein, 7 aa, synthetic construct
VRSHGTY

SEQ ID NO: 80093 - protein, 7 aa, synthetic construct
NVQTMKM

SEQ ID NO: 80094 - protein, 7 aa, synthetic construct
MNNGQLQ

SEQ ID NO: 80095 - protein, 7 aa, synthetic construct
LRHVEPH

SEQ ID NO: 80096 - protein, 7 aa, synthetic construct
DAKNPPQ

SEQ ID NO: 80097 - protein, 7 aa, synthetic construct
AAMNAMG

SEQ ID NO: 80098 - protein, 7 aa, synthetic construct
SGMKDNT

SEQ ID NO: 80099 - protein, 7 aa, synthetic construct
APAMNKL

SEQ ID NO: 80100 - protein, 7 aa, synthetic construct
PSGIEMK

SEQ ID NO: 80101 - protein, 7 aa, synthetic construct
DHRTQAV

SEQ ID NO: 80102 - protein, 7 aa, synthetic construct
TIHPIER

SEQ ID NO: 80103 - protein, 7 aa, synthetic construct
AMKERGF

SEQ ID NO: 80104 - protein, 7 aa, synthetic construct
VNNPGTR

SEQ ID NO: 80105 - protein, 7 aa, synthetic construct
YYKMHPE

SEQ ID NO: 80106 - protein, 7 aa, synthetic construct
RSPQHQG

SEQ ID NO: 80107 - protein, 7 aa, synthetic construct
YLHNTPS

SEQ ID NO: 80108 - protein, 7 aa, synthetic construct
QNTRQYV

SEQ ID NO: 80109 - protein, 7 aa, synthetic construct
RSSPEVY

SEQ ID NO: 80110 - protein, 7 aa, synthetic construct
GKLSIQS

SEQ ID NO: 80111 - protein, 7 aa, synthetic construct
TLVRELH

SEQ ID NO: 80112 - protein, 7 aa, synthetic construct
KGEQRGD

SEQ ID NO: 80113 - protein, 7 aa, synthetic construct
DTYAPKH

SEQ ID NO: 80114 - protein, 7 aa, synthetic construct
IISHSNQ

SEQ ID NO: 80115 - protein, 7 aa, synthetic construct
WAKTVMA

SEQ ID NO: 80116 - protein, 7 aa, synthetic construct
AKHEIHF

SEQ ID NO: 80117 - protein, 7 aa, synthetic construct
GKQAYQG

SEQ ID NO: 80118 - protein, 7 aa, synthetic construct
RDLGLTH

SEQ ID NO: 80119 - protein, 7 aa, synthetic construct
SRAHPGE

SEQ ID NO: 80120 - protein, 7 aa, synthetic construct
PNAGRSE

SEQ ID NO: 80121 - protein, 7 aa, synthetic construct
AREKHPW

SEQ ID NO: 80122 - protein, 7 aa, synthetic construct
YIDKKKE

SEQ ID NO: 80123 - protein, 7 aa, synthetic construct
PTSVMPG

SEQ ID NO: 80124 - protein, 7 aa, synthetic construct
ATDSKMP

SEQ ID NO: 80125 - protein, 7 aa, synthetic construct
KQSHPVQ

SEQ ID NO: 80126 - protein, 7 aa, synthetic construct
VTNQAGG

SEQ ID NO: 80127 - protein, 7 aa, synthetic construct
ASNHAQM

SEQ ID NO: 80128 - protein, 7 aa, synthetic construct
GKMHVYA

SEQ ID NO: 80129 - protein, 7 aa, synthetic construct
LHRNYVP

SEQ ID NO: 80130 - protein, 7 aa, synthetic construct
SGIKDAV

SEQ ID NO: 80131 - protein, 7 aa, synthetic construct
QMKSTQA

SEQ ID NO: 80132 - protein, 7 aa, synthetic construct
DRSNQHK

SEQ ID NO: 80133 - protein, 7 aa, synthetic construct
RNHGAYN

SEQ ID NO: 80134 - protein, 7 aa, synthetic construct
YMRTVDM

SEQ ID NO: 80135 - protein, 7 aa, synthetic construct
HRVDQRQ

SEQ ID NO: 80136 - protein, 7 aa, synthetic construct
LNPGPFG

SEQ ID NO: 80137 - protein, 7 aa, synthetic construct
KGLHEQF

SEQ ID NO: 80138 - protein, 7 aa, synthetic construct
QSAGSPW

SEQ ID NO: 80139 - protein, 7 aa, synthetic construct
FAGVSVR

SEQ ID NO: 80140 - protein, 7 aa, synthetic construct
GIDNARL

SEQ ID NO: 80141 - protein, 7 aa, synthetic construct
HPGKNSS

SEQ ID NO: 80142 - protein, 7 aa, synthetic construct
PSGIHRN

SEQ ID NO: 80143 - protein, 7 aa, synthetic construct
GPKFGAS

SEQ ID NO: 80144 - protein, 7 aa, synthetic construct
NSSTRNA

SEQ ID NO: 80145 - protein, 7 aa, synthetic construct
LPRPYNE

SEQ ID NO: 80146 - protein, 7 aa, synthetic construct
KNMGPEA

SEQ ID NO: 80147 - protein, 7 aa, synthetic construct
TKPGSAA

SEQ ID NO: 80148 - protein, 7 aa, synthetic construct
YSTLMQG

SEQ ID NO: 80149 - protein, 7 aa, synthetic construct
VERRPSF

SEQ ID NO: 80150 - protein, 7 aa, synthetic construct
TINNRVF

SEQ ID NO: 80151 - protein, 7 aa, synthetic construct
PSEHMKS

SEQ ID NO: 80152 - protein, 7 aa, synthetic construct
YNPKQFA

SEQ ID NO: 80153 - protein, 7 aa, synthetic construct
IEWAKSG

SEQ ID NO: 80154 - protein, 7 aa, synthetic construct
MLGPTRM

SEQ ID NO: 80155 - protein, 7 aa, synthetic construct
HHRGIYE

SEQ ID NO: 80156 - protein, 7 aa, synthetic construct
FQSYANS

SEQ ID NO: 80157 - protein, 7 aa, synthetic construct
VHNFLQG

SEQ ID NO: 80158 - protein, 7 aa, synthetic construct
ARNYDDV

SEQ ID NO: 80159 - protein, 7 aa, synthetic construct
VNARYAQ

SEQ ID NO: 80160 - protein, 7 aa, synthetic construct
ITYPKME

SEQ ID NO: 80161 - protein, 7 aa, synthetic construct
WSNGPNP

SEQ ID NO: 80162 - protein, 7 aa, synthetic construct
EGQVANR

SEQ ID NO: 80163 - protein, 7 aa, synthetic construct
GNMRTAT

SEQ ID NO: 80164 - protein, 7 aa, synthetic construct
NTGAMVM

SEQ ID NO: 80165 - protein, 7 aa, synthetic construct
VRSSANP

SEQ ID NO: 80166 - protein, 7 aa, synthetic construct
YPTSQNY

SEQ ID NO: 80167 - protein, 7 aa, synthetic construct
VPRPQHA

SEQ ID NO: 80168 - protein, 7 aa, synthetic construct
YASHPIH

SEQ ID NO: 80169 - protein, 7 aa, synthetic construct
YEKNVSP

SEQ ID NO: 80170 - protein, 7 aa, synthetic construct
SQPSKPA

SEQ ID NO: 80171 - protein, 7 aa, synthetic construct
SERFRHD

SEQ ID NO: 80172 - protein, 7 aa, synthetic construct
YGRKEDQ

SEQ ID NO: 80173 - protein, 7 aa, synthetic construct
WMDSKSV

SEQ ID NO: 80174 - protein, 7 aa, synthetic construct
GKMMERP

SEQ ID NO: 80175 - protein, 7 aa, synthetic construct
HFPGFSE

SEQ ID NO: 80176 - protein, 7 aa, synthetic construct
LYEGRHE

SEQ ID NO: 80177 - protein, 7 aa, synthetic construct
RGQGTGL

SEQ ID NO: 80178 - protein, 7 aa, synthetic construct
GTMQQKA

SEQ ID NO: 80179 - protein, 7 aa, synthetic construct
KEKMNDY

SEQ ID NO: 80180 - protein, 7 aa, synthetic construct
PGKNVTG

SEQ ID NO: 80181 - protein, 7 aa, synthetic construct
KNTGTKE

SEQ ID NO: 80182 - protein, 7 aa, synthetic construct
MYTGVAQ

SEQ ID NO: 80183 - protein, 7 aa, synthetic construct
HNAVSAK

SEQ ID NO: 80184 - protein, 7 aa, synthetic construct
HQHSTDA

SEQ ID NO: 80185 - protein, 7 aa, synthetic construct
QMRGQTE

SEQ ID NO: 80186 - protein, 7 aa, synthetic construct
QHPMEKE

SEQ ID NO: 80187 - protein, 7 aa, synthetic construct
PKYPVEE

SEQ ID NO: 80188 - protein, 7 aa, synthetic construct
IYKKIEH

SEQ ID NO: 80189 - protein, 7 aa, synthetic construct
KLSRQVE

SEQ ID NO: 80190 - protein, 7 aa, synthetic construct
ERQTGTH

SEQ ID NO: 80191 - protein, 7 aa, synthetic construct
KDHVNQS

SEQ ID NO: 80192 - protein, 7 aa, synthetic construct
VAKVTGF

SEQ ID NO: 80193 - protein, 7 aa, synthetic construct
QAHKRVE

SEQ ID NO: 80194 - protein, 7 aa, synthetic construct
WSQNALG

SEQ ID NO: 80195 - protein, 7 aa, synthetic construct
TPYMQQE

SEQ ID NO: 80196 - protein, 7 aa, synthetic construct
HKAAWVD

SEQ ID NO: 80197 - protein, 7 aa, synthetic construct
LILGSQI

SEQ ID NO: 80198 - protein, 7 aa, synthetic construct
VTHAIKT

SEQ ID NO: 80199 - protein, 7 aa, synthetic construct
RGAQAMN

SEQ ID NO: 80200 - protein, 7 aa, synthetic construct
SIATPSA

SEQ ID NO: 80201 - protein, 7 aa, synthetic construct
ARTDFHL

SEQ ID NO: 80202 - protein, 7 aa, synthetic construct
SKDHMNA

SEQ ID NO: 80203 - protein, 7 aa, synthetic construct
YNPAMIS

SEQ ID NO: 80204 - protein, 7 aa, synthetic construct
GGRPTLH

SEQ ID NO: 80205 - protein, 7 aa, synthetic construct
RTEVHSP

SEQ ID NO: 80206 - protein, 7 aa, synthetic construct
INGKSLT

SEQ ID NO: 80207 - protein, 7 aa, synthetic construct
PRQANGV

SEQ ID NO: 80208 - protein, 7 aa, synthetic construct
TFHNMKS

SEQ ID NO: 80209 - protein, 7 aa, synthetic construct
LPQLAMT

SEQ ID NO: 80210 - protein, 7 aa, synthetic construct
YDPKSIM

SEQ ID NO: 80211 - protein, 7 aa, synthetic construct
RKSQDTM

SEQ ID NO: 80212 - protein, 7 aa, synthetic construct
RHSVDRI

SEQ ID NO: 80213 - protein, 7 aa, synthetic construct
PQNHIDM

SEQ ID NO: 80214 - protein, 7 aa, synthetic construct
RMSQYTG

SEQ ID NO: 80215 - protein, 7 aa, synthetic construct
WRVNNVA

SEQ ID NO: 80216 - protein, 7 aa, synthetic construct
LLKPVPQ

SEQ ID NO: 80217 - protein, 7 aa, synthetic construct
INTKISS

SEQ ID NO: 80218 - protein, 7 aa, synthetic construct
DGRIFQG

SEQ ID NO: 80219 - protein, 7 aa, synthetic construct
KSSPTTA

SEQ ID NO: 80220 - protein, 7 aa, synthetic construct
QKGFHAH

SEQ ID NO: 80221 - protein, 7 aa, synthetic construct
TKPHWQA

SEQ ID NO: 80222 - protein, 7 aa, synthetic construct
NFGRMGG

SEQ ID NO: 80223 - protein, 7 aa, synthetic construct
GTNMQRQ

SEQ ID NO: 80224 - protein, 7 aa, synthetic construct
QEARTMS

SEQ ID NO: 80225 - protein, 7 aa, synthetic construct
TPYQTAT

SEQ ID NO: 80226 - protein, 7 aa, synthetic construct
AYAMTTP

SEQ ID NO: 80227 - protein, 7 aa, synthetic construct
NSGDGLG

SEQ ID NO: 80228 - protein, 7 aa, synthetic construct
QTPGKFG

SEQ ID NO: 80229 - protein, 7 aa, synthetic construct
QHGLQRD

SEQ ID NO: 80230 - protein, 7 aa, synthetic construct
PGTGRKD

SEQ ID NO: 80231 - protein, 7 aa, synthetic construct
MKQNVVT

SEQ ID NO: 80232 - protein, 7 aa, synthetic construct
SNSMKQG

SEQ ID NO: 80233 - protein, 7 aa, synthetic construct
ALERMTR

SEQ ID NO: 80234 - protein, 7 aa, synthetic construct
IATNGNG

SEQ ID NO: 80235 - protein, 7 aa, synthetic construct
MQNGFNH

SEQ ID NO: 80236 - protein, 7 aa, synthetic construct
ESDLKWI

SEQ ID NO: 80237 - protein, 7 aa, synthetic construct
AMKDLNW

SEQ ID NO: 80238 - protein, 7 aa, synthetic construct
LETRKND

SEQ ID NO: 80239 - protein, 7 aa, synthetic construct
CADQRCS

SEQ ID NO: 80240 - protein, 7 aa, synthetic construct
PKSNAMN

SEQ ID NO: 80241 - protein, 7 aa, synthetic construct
PAHDVHG

SEQ ID NO: 80242 - protein, 7 aa, synthetic construct
FQKGLEY

SEQ ID NO: 80243 - protein, 7 aa, synthetic construct
SIRQQAI

SEQ ID NO: 80244 - protein, 7 aa, synthetic construct
SRAAHPD

SEQ ID NO: 80245 - protein, 7 aa, synthetic construct
GTFMGNH

SEQ ID NO: 80246 - protein, 7 aa, synthetic construct
KMPDRII

SEQ ID NO: 80247 - protein, 7 aa, synthetic construct
RMPEGLH

SEQ ID NO: 80248 - protein, 7 aa, synthetic construct
TTLLKGE

SEQ ID NO: 80249 - protein, 7 aa, synthetic construct
NVQPSHS

SEQ ID NO: 80250 - protein, 7 aa, synthetic construct
WDPQNIA

SEQ ID NO: 80251 - protein, 7 aa, synthetic construct
GVNLGSN

SEQ ID NO: 80252 - protein, 7 aa, synthetic construct
FQPHSLV

SEQ ID NO: 80253 - protein, 7 aa, synthetic construct
WKAIGDN

SEQ ID NO: 80254 - protein, 7 aa, synthetic construct
MPKTNMG

SEQ ID NO: 80255 - protein, 7 aa, synthetic construct
KWKDGVL

SEQ ID NO: 80256 - protein, 7 aa, synthetic construct
YGRHDIA

SEQ ID NO: 80257 - protein, 7 aa, synthetic construct
EKGHDTA

SEQ ID NO: 80258 - protein, 7 aa, synthetic construct
AHYPAET

SEQ ID NO: 80259 - protein, 7 aa, synthetic construct
PKNQTQP

SEQ ID NO: 80260 - protein, 7 aa, synthetic construct
RQFDLHD

SEQ ID NO: 80261 - protein, 7 aa, synthetic construct
YNHPDGH

SEQ ID NO: 80262 - protein, 7 aa, synthetic construct
FYTETKE

SEQ ID NO: 80263 - protein, 7 aa, synthetic construct
IKIVDGT

SEQ ID NO: 80264 - protein, 7 aa, synthetic construct
VKAATAA

SEQ ID NO: 80265 - protein, 7 aa, synthetic construct
GRHPQAD

SEQ ID NO: 80266 - protein, 7 aa, synthetic construct
PYRNTEG

SEQ ID NO: 80267 - protein, 7 aa, synthetic construct
HNGTHMD

SEQ ID NO: 80268 - protein, 7 aa, synthetic construct
RNNDAAK

SEQ ID NO: 80269 - protein, 7 aa, synthetic construct
SYGNAHI

SEQ ID NO: 80270 - protein, 7 aa, synthetic construct
KHPDLQS

SEQ ID NO: 80271 - protein, 7 aa, synthetic construct
SATRDRL

SEQ ID NO: 80272 - protein, 7 aa, synthetic construct
PAQGQMK

SEQ ID NO: 80273 - protein, 7 aa, synthetic construct
EGLIRAS

SEQ ID NO: 80274 - protein, 7 aa, synthetic construct
PRTGQVL

SEQ ID NO: 80275 - protein, 7 aa, synthetic construct
HFNVSQG

SEQ ID NO: 80276 - protein, 7 aa, synthetic construct
KPQGNAS

SEQ ID NO: 80277 - protein, 7 aa, synthetic construct
YDKDSKT

SEQ ID NO: 80278 - protein, 7 aa, synthetic construct
ILMHANT

SEQ ID NO: 80279 - protein, 7 aa, synthetic construct
SRTVEAG

SEQ ID NO: 80280 - protein, 7 aa, synthetic construct
FARGNHP

SEQ ID NO: 80281 - protein, 7 aa, synthetic construct
NYLGKPL

SEQ ID NO: 80282 - protein, 7 aa, synthetic construct
HKSILTP

SEQ ID NO: 80283 - protein, 7 aa, synthetic construct
NIARYKE

SEQ ID NO: 80284 - protein, 7 aa, synthetic construct
SQKTWNE

SEQ ID NO: 80285 - protein, 7 aa, synthetic construct
ARDSQPK

SEQ ID NO: 80286 - protein, 7 aa, synthetic construct
KSLVMEA

SEQ ID NO: 80287 - protein, 7 aa, synthetic construct
GNNVARD

SEQ ID NO: 80288 - protein, 7 aa, synthetic construct
IGTLVRE

SEQ ID NO: 80289 - protein, 7 aa, synthetic construct
VTHNHQS

SEQ ID NO: 80290 - protein, 7 aa, synthetic construct
QQYHKTG

SEQ ID NO: 80291 - protein, 7 aa, synthetic construct
DFRMKNV

SEQ ID NO: 80292 - protein, 7 aa, synthetic construct
ISRDLGY

SEQ ID NO: 80293 - protein, 7 aa, synthetic construct
RMNSHLD

SEQ ID NO: 80294 - protein, 7 aa, synthetic construct
VWNGTKN

SEQ ID NO: 80295 - protein, 7 aa, synthetic construct
LTADKHT

SEQ ID NO: 80296 - protein, 7 aa, synthetic construct
QIMGMGE

SEQ ID NO: 80297 - protein, 7 aa, synthetic construct
GTPITQE

SEQ ID NO: 80298 - protein, 7 aa, synthetic construct
PRNSHET

SEQ ID NO: 80299 - protein, 7 aa, synthetic construct
RKDNPGS

SEQ ID NO: 80300 - protein, 7 aa, synthetic construct
EYNVTAS

SEQ ID NO: 80301 - protein, 7 aa, synthetic construct
FRVNFAE

SEQ ID NO: 80302 - protein, 7 aa, synthetic construct
TKMQSQA

SEQ ID NO: 80303 - protein, 7 aa, synthetic construct
IEGNTPR

SEQ ID NO: 80304 - protein, 7 aa, synthetic construct
RATSMKD

SEQ ID NO: 80305 - protein, 7 aa, synthetic construct
LMAHTEK

SEQ ID NO: 80306 - protein, 7 aa, synthetic construct
VNNYTEK

SEQ ID NO: 80307 - protein, 7 aa, synthetic construct
LEQRQFP

SEQ ID NO: 80308 - protein, 7 aa, synthetic construct
HQPFHID

SEQ ID NO: 80309 - protein, 7 aa, synthetic construct
QASNPNL

SEQ ID NO: 80310 - protein, 7 aa, synthetic construct
KAVNSIN

SEQ ID NO: 80311 - protein, 7 aa, synthetic construct
TKFESVT

SEQ ID NO: 80312 - protein, 7 aa, synthetic construct
TKKGEGI

SEQ ID NO: 80313 - protein, 7 aa, synthetic construct
NKAKINE

SEQ ID NO: 80314 - protein, 7 aa, synthetic construct
VPSPQGS

SEQ ID NO: 80315 - protein, 7 aa, synthetic construct
QRQANNP

SEQ ID NO: 80316 - protein, 7 aa, synthetic construct
LWHDGAV

SEQ ID NO: 80317 - protein, 7 aa, synthetic construct
LHGITQM

SEQ ID NO: 80318 - protein, 7 aa, synthetic construct
NRQELRP

SEQ ID NO: 80319 - protein, 7 aa, synthetic construct
VNAQSKG

SEQ ID NO: 80320 - protein, 7 aa, synthetic construct
LLHTPLA

SEQ ID NO: 80321 - protein, 7 aa, synthetic construct
GNSAKTA

SEQ ID NO: 80322 - protein, 7 aa, synthetic construct
GAPNLSA

SEQ ID NO: 80323 - protein, 7 aa, synthetic construct
NRFLQHD

SEQ ID NO: 80324 - protein, 7 aa, synthetic construct
VKPKVTP

SEQ ID NO: 80325 - protein, 7 aa, synthetic construct
HYPAGYN

SEQ ID NO: 80326 - protein, 7 aa, synthetic construct
NWTGQVG

SEQ ID NO: 80327 - protein, 7 aa, synthetic construct
TTKNGIY

SEQ ID NO: 80328 - protein, 7 aa, synthetic construct
GSNTKMG

SEQ ID NO: 80329 - protein, 7 aa, synthetic construct
YHGRTPD

SEQ ID NO: 80330 - protein, 7 aa, synthetic construct
PFAGNNG

SEQ ID NO: 80331 - protein, 7 aa, synthetic construct
VAVTTHV

SEQ ID NO: 80332 - protein, 7 aa, synthetic construct
HDLQKYA

SEQ ID NO: 80333 - protein, 7 aa, synthetic construct
YPQETQH

SEQ ID NO: 80334 - protein, 7 aa, synthetic construct
HPQASHK

SEQ ID NO: 80335 - protein, 7 aa, synthetic construct
AQIRDIG

SEQ ID NO: 80336 - protein, 7 aa, synthetic construct
KKNNWIE

SEQ ID NO: 80337 - protein, 7 aa, synthetic construct
APYRITA

SEQ ID NO: 80338 - protein, 7 aa, synthetic construct
MGKLMYE

SEQ ID NO: 80339 - protein, 7 aa, synthetic construct
RIFPETP

SEQ ID NO: 80340 - protein, 7 aa, synthetic construct
VSDGARA

SEQ ID NO: 80341 - protein, 7 aa, synthetic construct
RPHGMTQ

SEQ ID NO: 80342 - protein, 7 aa, synthetic construct
PSPQSVK

SEQ ID NO: 80343 - protein, 7 aa, synthetic construct
GPGPMSQ

SEQ ID NO: 80344 - protein, 7 aa, synthetic construct
FTPTEHK

SEQ ID NO: 80345 - protein, 7 aa, synthetic construct
MYKTHIN

SEQ ID NO: 80346 - protein, 7 aa, synthetic construct
KNKDNNG

SEQ ID NO: 80347 - protein, 7 aa, synthetic construct
GAWERHP

SEQ ID NO: 80348 - protein, 7 aa, synthetic construct
PNSTHGM

SEQ ID NO: 80349 - protein, 7 aa, synthetic construct
DPGKHMI

SEQ ID NO: 80350 - protein, 7 aa, synthetic construct
MKHATSM

SEQ ID NO: 80351 - protein, 7 aa, synthetic construct
YNEKHKG

SEQ ID NO: 80352 - protein, 7 aa, synthetic construct
EHDRPPG

SEQ ID NO: 80353 - protein, 7 aa, synthetic construct
PMKISLM

SEQ ID NO: 80354 - protein, 7 aa, synthetic construct
IVAHDHY

SEQ ID NO: 80355 - protein, 7 aa, synthetic construct
GTSNFGK

SEQ ID NO: 80356 - protein, 7 aa, synthetic construct
VPNGRIY

SEQ ID NO: 80357 - protein, 7 aa, synthetic construct
MSPKASV

SEQ ID NO: 80358 - protein, 7 aa, synthetic construct
KGGKHEF

SEQ ID NO: 80359 - protein, 7 aa, synthetic construct
NLVQSPE

SEQ ID NO: 80360 - protein, 7 aa, synthetic construct
HGIGGTL

SEQ ID NO: 80361 - protein, 7 aa, synthetic construct
GGLNNNL

SEQ ID NO: 80362 - protein, 7 aa, synthetic construct
APGIAPI

SEQ ID NO: 80363 - protein, 7 aa, synthetic construct
SMPPRLN

SEQ ID NO: 80364 - protein, 7 aa, synthetic construct
QHSALAH

SEQ ID NO: 80365 - protein, 7 aa, synthetic construct
RASAAVI

SEQ ID NO: 80366 - protein, 7 aa, synthetic construct
AVNLPTG

SEQ ID NO: 80367 - protein, 7 aa, synthetic construct
ISGGAYF

SEQ ID NO: 80368 - protein, 7 aa, synthetic construct
VAADANK

SEQ ID NO: 80369 - protein, 7 aa, synthetic construct
QMHNATS

SEQ ID NO: 80370 - protein, 7 aa, synthetic construct
TSYIQNA

SEQ ID NO: 80371 - protein, 7 aa, synthetic construct
DAIPTAK

SEQ ID NO: 80372 - protein, 7 aa, synthetic construct
LSKGVND

SEQ ID NO: 80373 - protein, 7 aa, synthetic construct
PEMRLIP

SEQ ID NO: 80374 - protein, 7 aa, synthetic construct
TERLKMH

SEQ ID NO: 80375 - protein, 7 aa, synthetic construct
KGIKWPD

SEQ ID NO: 80376 - protein, 7 aa, synthetic construct
AGTDGHI

SEQ ID NO: 80377 - protein, 7 aa, synthetic construct
NKVNHID

SEQ ID NO: 80378 - protein, 7 aa, synthetic construct
REGQKDG

SEQ ID NO: 80379 - protein, 7 aa, synthetic construct
NTSHATI

SEQ ID NO: 80380 - protein, 7 aa, synthetic construct
FQQGMSS

SEQ ID NO: 80381 - protein, 7 aa, synthetic construct
TKVHAGF

SEQ ID NO: 80382 - protein, 7 aa, synthetic construct
MRTREHP

SEQ ID NO: 80383 - protein, 7 aa, synthetic construct
GMSHETK

SEQ ID NO: 80384 - protein, 7 aa, synthetic construct
LRGPEER

SEQ ID NO: 80385 - protein, 7 aa, synthetic construct
NPQRQMD

SEQ ID NO: 80386 - protein, 7 aa, synthetic construct
VFQKFEK

SEQ ID NO: 80387 - protein, 7 aa, synthetic construct
NSHSEDR

SEQ ID NO: 80388 - protein, 7 aa, synthetic construct
FTKPVDV

SEQ ID NO: 80389 - protein, 7 aa, synthetic construct
GWKEKPS

SEQ ID NO: 80390 - protein, 7 aa, synthetic construct
YKHTTIN

SEQ ID NO: 80391 - protein, 7 aa, synthetic construct
PFSGNKS

SEQ ID NO: 80392 - protein, 7 aa, synthetic construct
AIRNHHV

SEQ ID NO: 80393 - protein, 7 aa, synthetic construct
THKLDPE

SEQ ID NO: 80394 - protein, 7 aa, synthetic construct
NIKHDPS

SEQ ID NO: 80395 - protein, 7 aa, synthetic construct
TTQKSVG

SEQ ID NO: 80396 - protein, 7 aa, synthetic construct
VTHGIMK

SEQ ID NO: 80397 - protein, 7 aa, synthetic construct
AQKQMMP

SEQ ID NO: 80398 - protein, 7 aa, synthetic construct
HPSRGIE

SEQ ID NO: 80399 - protein, 7 aa, synthetic construct
VHIAPGV

SEQ ID NO: 80400 - protein, 7 aa, synthetic construct
TVHEQTA

SEQ ID NO: 80401 - protein, 7 aa, synthetic construct
GQSPMQF

SEQ ID NO: 80402 - protein, 7 aa, synthetic construct
EKDNQNR

SEQ ID NO: 80403 - protein, 7 aa, synthetic construct
TMSPTFS

SEQ ID NO: 80404 - protein, 7 aa, synthetic construct
NQNTNHG

SEQ ID NO: 80405 - protein, 7 aa, synthetic construct
TPKIMYD

SEQ ID NO: 80406 - protein, 7 aa, synthetic construct
PNNRAGN

SEQ ID NO: 80407 - protein, 7 aa, synthetic construct
CHGFECA

SEQ ID NO: 80408 - protein, 7 aa, synthetic construct
AEAHNFK

SEQ ID NO: 80409 - protein, 7 aa, synthetic construct
ISSRHIL

SEQ ID NO: 80410 - protein, 7 aa, synthetic construct
KHVPAPM

SEQ ID NO: 80411 - protein, 7 aa, synthetic construct
IGKQYFG

SEQ ID NO: 80412 - protein, 7 aa, synthetic construct
GNENNRY

SEQ ID NO: 80413 - protein, 7 aa, synthetic construct
VKNRNTD

SEQ ID NO: 80414 - protein, 7 aa, synthetic construct
PAGSFQV

SEQ ID NO: 80415 - protein, 7 aa, synthetic construct
HKETFVA

SEQ ID NO: 80416 - protein, 7 aa, synthetic construct
AMAGYKF

SEQ ID NO: 80417 - protein, 7 aa, synthetic construct
SKVGEAW

SEQ ID NO: 80418 - protein, 7 aa, synthetic construct
KFQDLNK

SEQ ID NO: 80419 - protein, 7 aa, synthetic construct
SPRPGQA

SEQ ID NO: 80420 - protein, 7 aa, synthetic construct
AEKNNVR

SEQ ID NO: 80421 - protein, 7 aa, synthetic construct
HTSNNVA

SEQ ID NO: 80422 - protein, 7 aa, synthetic construct
NNRMGTG

SEQ ID NO: 80423 - protein, 7 aa, synthetic construct
TVQALTS

SEQ ID NO: 80424 - protein, 7 aa, synthetic construct
AQAYEKH

SEQ ID NO: 80425 - protein, 7 aa, synthetic construct
KNGTNQP

SEQ ID NO: 80426 - protein, 7 aa, synthetic construct
HPHGAMP

SEQ ID NO: 80427 - protein, 7 aa, synthetic construct
ELRMGQP

SEQ ID NO: 80428 - protein, 7 aa, synthetic construct
TKSSTDG

SEQ ID NO: 80429 - protein, 7 aa, synthetic construct
KSTMANG

SEQ ID NO: 80430 - protein, 7 aa, synthetic construct
CPGSTCT

SEQ ID NO: 80431 - protein, 7 aa, synthetic construct
QLTQHGV

SEQ ID NO: 80432 - protein, 7 aa, synthetic construct
FSMGEPR

SEQ ID NO: 80433 - protein, 7 aa, synthetic construct
ALANTAS

SEQ ID NO: 80434 - protein, 7 aa, synthetic construct
RTKSDMD

SEQ ID NO: 80435 - protein, 7 aa, synthetic construct
THGITTR

SEQ ID NO: 80436 - protein, 7 aa, synthetic construct
APDNRIA

SEQ ID NO: 80437 - protein, 7 aa, synthetic construct
KRNDDDK

SEQ ID NO: 80438 - protein, 7 aa, synthetic construct
KTPGTGH

SEQ ID NO: 80439 - protein, 7 aa, synthetic construct
MMHDSRR

SEQ ID NO: 80440 - protein, 7 aa, synthetic construct
YTNYQRS

SEQ ID NO: 80441 - protein, 7 aa, synthetic construct
GAVQLIS

SEQ ID NO: 80442 - protein, 7 aa, synthetic construct
AQHPNVY

SEQ ID NO: 80443 - protein, 7 aa, synthetic construct
RVRDHEF

SEQ ID NO: 80444 - protein, 7 aa, synthetic construct
VKNAQDL

SEQ ID NO: 80445 - protein, 7 aa, synthetic construct
IPAEKVQ

SEQ ID NO: 80446 - protein, 7 aa, synthetic construct
PDKQHTT

SEQ ID NO: 80447 - protein, 7 aa, synthetic construct
ARATIQQ

SEQ ID NO: 80448 - protein, 7 aa, synthetic construct
WNNNDPV

SEQ ID NO: 80449 - protein, 7 aa, synthetic construct
LKSGNMG

SEQ ID NO: 80450 - protein, 7 aa, synthetic construct
GAMLKNT

SEQ ID NO: 80451 - protein, 7 aa, synthetic construct
VWSPNAE

SEQ ID NO: 80452 - protein, 7 aa, synthetic construct
APKESHD

SEQ ID NO: 80453 - protein, 7 aa, synthetic construct
MARESSN

SEQ ID NO: 80454 - protein, 7 aa, synthetic construct
WGLFKGE

SEQ ID NO: 80455 - protein, 7 aa, synthetic construct
EPKLAGA

SEQ ID NO: 80456 - protein, 7 aa, synthetic construct
HPMNKVN

SEQ ID NO: 80457 - protein, 7 aa, synthetic construct
KTQSLQT

SEQ ID NO: 80458 - protein, 7 aa, synthetic construct
RLTPMGE

SEQ ID NO: 80459 - protein, 7 aa, synthetic construct
SPNPTFR

SEQ ID NO: 80460 - protein, 7 aa, synthetic construct
PAPRPND

SEQ ID NO: 80461 - protein, 7 aa, synthetic construct
QLSRQIQ

SEQ ID NO: 80462 - protein, 7 aa, synthetic construct
KVNRDVD

SEQ ID NO: 80463 - protein, 7 aa, synthetic construct
QTRNTGA

SEQ ID NO: 80464 - protein, 7 aa, synthetic construct
AAKSQPS

SEQ ID NO: 80465 - protein, 7 aa, synthetic construct
DAAQKYD

SEQ ID NO: 80466 - protein, 7 aa, synthetic construct
SNNSKAG

SEQ ID NO: 80467 - protein, 7 aa, synthetic construct
NPGDKWI

SEQ ID NO: 80468 - protein, 7 aa, synthetic construct
MSHLQPI

SEQ ID NO: 80469 - protein, 7 aa, synthetic construct
SYRIEKN

SEQ ID NO: 80470 - protein, 7 aa, synthetic construct
NVFQAGP

SEQ ID NO: 80471 - protein, 7 aa, synthetic construct
PASKPTE

SEQ ID NO: 80472 - protein, 7 aa, synthetic construct
HHFPGMA

SEQ ID NO: 80473 - protein, 7 aa, synthetic construct
NHSAPTT

SEQ ID NO: 80474 - protein, 7 aa, synthetic construct
STNQAGG

SEQ ID NO: 80475 - protein, 7 aa, synthetic construct
TVNGFLD

SEQ ID NO: 80476 - protein, 7 aa, synthetic construct
GSKQQGG

SEQ ID NO: 80477 - protein, 7 aa, synthetic construct
SLGQYAE

SEQ ID NO: 80478 - protein, 7 aa, synthetic construct
PGQRNFD

SEQ ID NO: 80479 - protein, 7 aa, synthetic construct
GMRVTEE

SEQ ID NO: 80480 - protein, 7 aa, synthetic construct
VLDIFKA

SEQ ID NO: 80481 - protein, 7 aa, synthetic construct
STSENKV

SEQ ID NO: 80482 - protein, 7 aa, synthetic construct
MTSNAHR

SEQ ID NO: 80483 - protein, 7 aa, synthetic construct
NQPIGMP

SEQ ID NO: 80484 - protein, 7 aa, synthetic construct
HTANQAT

SEQ ID NO: 80485 - protein, 7 aa, synthetic construct
SATPSKF

SEQ ID NO: 80486 - protein, 7 aa, synthetic construct
PNKQQAA

SEQ ID NO: 80487 - protein, 7 aa, synthetic construct
FNHFAQD

SEQ ID NO: 80488 - protein, 7 aa, synthetic construct
TPMGGIS

SEQ ID NO: 80489 - protein, 7 aa, synthetic construct
LSPIHQL

SEQ ID NO: 80490 - protein, 7 aa, synthetic construct
SMKQSHY

SEQ ID NO: 80491 - protein, 7 aa, synthetic construct
EIKHLSR

SEQ ID NO: 80492 - protein, 7 aa, synthetic construct
TNTKSSP

SEQ ID NO: 80493 - protein, 7 aa, synthetic construct
IGNKSNS

SEQ ID NO: 80494 - protein, 7 aa, synthetic construct
GGGSAVT

SEQ ID NO: 80495 - protein, 7 aa, synthetic construct
MFGDAAL

SEQ ID NO: 80496 - protein, 7 aa, synthetic construct
EMDRQKV

SEQ ID NO: 80497 - protein, 7 aa, synthetic construct
MKQMGHI

SEQ ID NO: 80498 - protein, 7 aa, synthetic construct
DGIGMVR

SEQ ID NO: 80499 - protein, 7 aa, synthetic construct
TDNKWPM

SEQ ID NO: 80500 - protein, 7 aa, synthetic construct
NAQEKAN

SEQ ID NO: 80501 - protein, 7 aa, synthetic construct
PGQDRRP

SEQ ID NO: 80502 - protein, 7 aa, synthetic construct
VVKHAVL

SEQ ID NO: 80503 - protein, 7 aa, synthetic construct
FKGNVNS

SEQ ID NO: 80504 - protein, 7 aa, synthetic construct
TGVNAKL

SEQ ID NO: 80505 - protein, 7 aa, synthetic construct
SSKNLNG

SEQ ID NO: 80506 - protein, 7 aa, synthetic construct
HEIRILP

SEQ ID NO: 80507 - protein, 7 aa, synthetic construct
QVSDQPR

SEQ ID NO: 80508 - protein, 7 aa, synthetic construct
HEHVRGG

SEQ ID NO: 80509 - protein, 7 aa, synthetic construct
HGTGNYL

SEQ ID NO: 80510 - protein, 7 aa, synthetic construct
DQRATQV

SEQ ID NO: 80511 - protein, 7 aa, synthetic construct
DMRNANA

SEQ ID NO: 80512 - protein, 7 aa, synthetic construct
IMAREQE

SEQ ID NO: 80513 - protein, 7 aa, synthetic construct
RAHGAIV

SEQ ID NO: 80514 - protein, 7 aa, synthetic construct
MRTGEYH

SEQ ID NO: 80515 - protein, 7 aa, synthetic construct
GEFMMKE

SEQ ID NO: 80516 - protein, 7 aa, synthetic construct
VKSWVEP

SEQ ID NO: 80517 - protein, 7 aa, synthetic construct
KRDAMSS

SEQ ID NO: 80518 - protein, 7 aa, synthetic construct
QNLGERI

SEQ ID NO: 80519 - protein, 7 aa, synthetic construct
KSPSLGA

SEQ ID NO: 80520 - protein, 7 aa, synthetic construct
WNGLANK

SEQ ID NO: 80521 - protein, 7 aa, synthetic construct
VATVNLP

SEQ ID NO: 80522 - protein, 7 aa, synthetic construct
KGSHQYE

SEQ ID NO: 80523 - protein, 7 aa, synthetic construct
QTQADRT

SEQ ID NO: 80524 - protein, 7 aa, synthetic construct
MNSNQVR

SEQ ID NO: 80525 - protein, 7 aa, synthetic construct
KTGGQMG

SEQ ID NO: 80526 - protein, 7 aa, synthetic construct
RLDQSTN

SEQ ID NO: 80527 - protein, 7 aa, synthetic construct
NSGGTKG

SEQ ID NO: 80528 - protein, 7 aa, synthetic construct
PRMQTEK

SEQ ID NO: 80529 - protein, 7 aa, synthetic construct
TTRASGD

SEQ ID NO: 80530 - protein, 7 aa, synthetic construct
GAKINNF

SEQ ID NO: 80531 - protein, 7 aa, synthetic construct
SLSASRS

SEQ ID NO: 80532 - protein, 7 aa, synthetic construct
TTNNQII

SEQ ID NO: 80533 - protein, 7 aa, synthetic construct
YGSTMFH

SEQ ID NO: 80534 - protein, 7 aa, synthetic construct
QSNYPRS

SEQ ID NO: 80535 - protein, 7 aa, synthetic construct
GAKPFGD

SEQ ID NO: 80536 - protein, 7 aa, synthetic construct
TRLATDD

SEQ ID NO: 80537 - protein, 7 aa, synthetic construct
KQAPMSA

SEQ ID NO: 80538 - protein, 7 aa, synthetic construct
YGPHATF

SEQ ID NO: 80539 - protein, 7 aa, synthetic construct
WKRMVSD

SEQ ID NO: 80540 - protein, 7 aa, synthetic construct
ERTQVAG

SEQ ID NO: 80541 - protein, 7 aa, synthetic construct
NPPRELF

SEQ ID NO: 80542 - protein, 7 aa, synthetic construct
KAQSGPY

SEQ ID NO: 80543 - protein, 7 aa, synthetic construct
TRDGKNA

SEQ ID NO: 80544 - protein, 7 aa, synthetic construct
KQVTSKD

SEQ ID NO: 80545 - protein, 7 aa, synthetic construct
FDKYNIN

SEQ ID NO: 80546 - protein, 7 aa, synthetic construct
IPEDKRH

SEQ ID NO: 80547 - protein, 7 aa, synthetic construct
LGLKPDW

SEQ ID NO: 80548 - protein, 7 aa, synthetic construct
SRVGIER

SEQ ID NO: 80549 - protein, 7 aa, synthetic construct
ERNRGAI

SEQ ID NO: 80550 - protein, 7 aa, synthetic construct
RASVTIM

SEQ ID NO: 80551 - protein, 7 aa, synthetic construct
FEGRQSI

SEQ ID NO: 80552 - protein, 7 aa, synthetic construct
NEKKTHS

SEQ ID NO: 80553 - protein, 7 aa, synthetic construct
QPAKFSH

SEQ ID NO: 80554 - protein, 7 aa, synthetic construct
YHHDPAL

SEQ ID NO: 80555 - protein, 7 aa, synthetic construct
SAITNTG

SEQ ID NO: 80556 - protein, 7 aa, synthetic construct
RNQTNEI

SEQ ID NO: 80557 - protein, 7 aa, synthetic construct
RNAGANI

SEQ ID NO: 80558 - protein, 7 aa, synthetic construct
MQVANST

SEQ ID NO: 80559 - protein, 7 aa, synthetic construct
HYSEKFG

SEQ ID NO: 80560 - protein, 7 aa, synthetic construct
SQHQLIG

SEQ ID NO: 80561 - protein, 7 aa, synthetic construct
YGLQPKH

SEQ ID NO: 80562 - protein, 7 aa, synthetic construct
QKSSATN

SEQ ID NO: 80563 - protein, 7 aa, synthetic construct
HTQQQHT

SEQ ID NO: 80564 - protein, 7 aa, synthetic construct
MGEMQNR

SEQ ID NO: 80565 - protein, 7 aa, synthetic construct
HSQHTVF

SEQ ID NO: 80566 - protein, 7 aa, synthetic construct
FDNSRIA

SEQ ID NO: 80567 - protein, 7 aa, synthetic construct
SYSSNPE

SEQ ID NO: 80568 - protein, 7 aa, synthetic construct
KENQHAL

SEQ ID NO: 80569 - protein, 7 aa, synthetic construct
PKVHQAD

SEQ ID NO: 80570 - protein, 7 aa, synthetic construct
GMDHWPA

SEQ ID NO: 80571 - protein, 7 aa, synthetic construct
KPANQNT

SEQ ID NO: 80572 - protein, 7 aa, synthetic construct
EVRGQRM

SEQ ID NO: 80573 - protein, 7 aa, synthetic construct
TNTPESM

SEQ ID NO: 80574 - protein, 7 aa, synthetic construct
TNRSVNF

SEQ ID NO: 80575 - protein, 7 aa, synthetic construct
SNAISRH

SEQ ID NO: 80576 - protein, 7 aa, synthetic construct
YMMGPSH

SEQ ID NO: 80577 - protein, 7 aa, synthetic construct
DFKMAVV

SEQ ID NO: 80578 - protein, 7 aa, synthetic construct
QNAARHH

SEQ ID NO: 80579 - protein, 7 aa, synthetic construct
HFIDRDR

SEQ ID NO: 80580 - protein, 7 aa, synthetic construct
SKVPQQG

SEQ ID NO: 80581 - protein, 7 aa, synthetic construct
QKTTSNP

SEQ ID NO: 80582 - protein, 7 aa, synthetic construct
TSNIPND

SEQ ID NO: 80583 - protein, 7 aa, synthetic construct
KLQIMQD

SEQ ID NO: 80584 - protein, 7 aa, synthetic construct
SMSGHGP

SEQ ID NO: 80585 - protein, 7 aa, synthetic construct
NQRTDID

SEQ ID NO: 80586 - protein, 7 aa, synthetic construct
AHRMPTE

SEQ ID NO: 80587 - protein, 7 aa, synthetic construct
AHDSKRM

SEQ ID NO: 80588 - protein, 7 aa, synthetic construct
DFPGNTK

SEQ ID NO: 80589 - protein, 7 aa, synthetic construct
QLYVNQE

SEQ ID NO: 80590 - protein, 7 aa, synthetic construct
IERRPIV

SEQ ID NO: 80591 - protein, 7 aa, synthetic construct
VVPLPRV

SEQ ID NO: 80592 - protein, 7 aa, synthetic construct
PYPPTHS

SEQ ID NO: 80593 - protein, 7 aa, synthetic construct
AKVVHDV

SEQ ID NO: 80594 - protein, 7 aa, synthetic construct
GSFHANH

SEQ ID NO: 80595 - protein, 7 aa, synthetic construct
DRVRPTY

SEQ ID NO: 80596 - protein, 7 aa, synthetic construct
VGHIMKA

SEQ ID NO: 80597 - protein, 7 aa, synthetic construct
AESKMMK

SEQ ID NO: 80598 - protein, 7 aa, synthetic construct
SDRKTTL

SEQ ID NO: 80599 - protein, 7 aa, synthetic construct
GFNGERH

SEQ ID NO: 80600 - protein, 7 aa, synthetic construct
SEMKTKN

SEQ ID NO: 80601 - protein, 7 aa, synthetic construct
NVVSRQG

SEQ ID NO: 80602 - protein, 7 aa, synthetic construct
SLNKDDN

SEQ ID NO: 80603 - protein, 7 aa, synthetic construct
SNSKIDN

SEQ ID NO: 80604 - protein, 7 aa, synthetic construct
MRAHDAG

SEQ ID NO: 80605 - protein, 7 aa, synthetic construct
HPKMNTI

SEQ ID NO: 80606 - protein, 7 aa, synthetic construct
YLIKGQT

SEQ ID NO: 80607 - protein, 7 aa, synthetic construct
YVGQKED

SEQ ID NO: 80608 - protein, 7 aa, synthetic construct
GHINADI

SEQ ID NO: 80609 - protein, 7 aa, synthetic construct
KQGGNAF

SEQ ID NO: 80610 - protein, 7 aa, synthetic construct
QGHSVTP

SEQ ID NO: 80611 - protein, 7 aa, synthetic construct
YRTGDFY

SEQ ID NO: 80612 - protein, 7 aa, synthetic construct
WIGHIRE

SEQ ID NO: 80613 - protein, 7 aa, synthetic construct
SNQQQSP

SEQ ID NO: 80614 - protein, 7 aa, synthetic construct
EWNERAG

SEQ ID NO: 80615 - protein, 7 aa, synthetic construct
TIPSPHN

SEQ ID NO: 80616 - protein, 7 aa, synthetic construct
KVNPPQP

SEQ ID NO: 80617 - protein, 7 aa, synthetic construct
KDDGKSY

SEQ ID NO: 80618 - protein, 7 aa, synthetic construct
KTRELLM

SEQ ID NO: 80619 - protein, 7 aa, synthetic construct
YWDQRSA

SEQ ID NO: 80620 - protein, 7 aa, synthetic construct
SWNGGRS

SEQ ID NO: 80621 - protein, 7 aa, synthetic construct
MMRNENQ

SEQ ID NO: 80622 - protein, 7 aa, synthetic construct
TVDFPTA

SEQ ID NO: 80623 - protein, 7 aa, synthetic construct
QGDKPMS

SEQ ID NO: 80624 - protein, 7 aa, synthetic construct
EFDQTKH

SEQ ID NO: 80625 - protein, 7 aa, synthetic construct
AQVRNQP

SEQ ID NO: 80626 - protein, 7 aa, synthetic construct
DRDGMRL

SEQ ID NO: 80627 - protein, 7 aa, synthetic construct
YTHTHKE

SEQ ID NO: 80628 - protein, 7 aa, synthetic construct
SLGTYPP

SEQ ID NO: 80629 - protein, 7 aa, synthetic construct
AVNNNQS

SEQ ID NO: 80630 - protein, 7 aa, synthetic construct
LLRQEKD

SEQ ID NO: 80631 - protein, 7 aa, synthetic construct
LNKSVAD

SEQ ID NO: 80632 - protein, 7 aa, synthetic construct
KMKTTDV

SEQ ID NO: 80633 - protein, 7 aa, synthetic construct
FLGHTIT

SEQ ID NO: 80634 - protein, 7 aa, synthetic construct
HQAYETG

SEQ ID NO: 80635 - protein, 7 aa, synthetic construct
MPSNNGY

SEQ ID NO: 80636 - protein, 7 aa, synthetic construct
MVPIGKT

SEQ ID NO: 80637 - protein, 7 aa, synthetic construct
LAETRTT

SEQ ID NO: 80638 - protein, 7 aa, synthetic construct
IIKSAPL

SEQ ID NO: 80639 - protein, 7 aa, synthetic construct
YPKTKEN

SEQ ID NO: 80640 - protein, 7 aa, synthetic construct
IVAMKGM

SEQ ID NO: 80641 - protein, 7 aa, synthetic construct
GQSFRNA

SEQ ID NO: 80642 - protein, 7 aa, synthetic construct
MDRRQTA

SEQ ID NO: 80643 - protein, 7 aa, synthetic construct
QIKETMY

SEQ ID NO: 80644 - protein, 7 aa, synthetic construct
SHVTNGT

SEQ ID NO: 80645 - protein, 7 aa, synthetic construct
FGKRQDD

SEQ ID NO: 80646 - protein, 7 aa, synthetic construct
QVNASLL

SEQ ID NO: 80647 - protein, 7 aa, synthetic construct
HAPTGKW

SEQ ID NO: 80648 - protein, 7 aa, synthetic construct
NVQWLPE

SEQ ID NO: 80649 - protein, 7 aa, synthetic construct
IMHREDG

SEQ ID NO: 80650 - protein, 7 aa, synthetic construct
YALFQDA

SEQ ID NO: 80651 - protein, 7 aa, synthetic construct
ILGERPM

SEQ ID NO: 80652 - protein, 7 aa, synthetic construct
HWNTSTP

SEQ ID NO: 80653 - protein, 7 aa, synthetic construct
HSDFIMK

SEQ ID NO: 80654 - protein, 7 aa, synthetic construct
IESYQAV

SEQ ID NO: 80655 - protein, 7 aa, synthetic construct
FQERQGG

SEQ ID NO: 80656 - protein, 7 aa, synthetic construct
TYPATTD

SEQ ID NO: 80657 - protein, 7 aa, synthetic construct
RGAPDHP

SEQ ID NO: 80658 - protein, 7 aa, synthetic construct
QQQHGNG

SEQ ID NO: 80659 - protein, 7 aa, synthetic construct
PTQSSHM

SEQ ID NO: 80660 - protein, 7 aa, synthetic construct
WNDTHHQ

SEQ ID NO: 80661 - protein, 7 aa, synthetic construct
KTNAGSM

SEQ ID NO: 80662 - protein, 7 aa, synthetic construct
ITKDSLY

SEQ ID NO: 80663 - protein, 7 aa, synthetic construct
PHSGANV

SEQ ID NO: 80664 - protein, 7 aa, synthetic construct
NKQQSAN

SEQ ID NO: 80665 - protein, 7 aa, synthetic construct
AQVHSKM

SEQ ID NO: 80666 - protein, 7 aa, synthetic construct
PPSPTAS

SEQ ID NO: 80667 - protein, 7 aa, synthetic construct
GFMKFEG

SEQ ID NO: 80668 - protein, 7 aa, synthetic construct
IKSSTNG

SEQ ID NO: 80669 - protein, 7 aa, synthetic construct
HLTFQQD

SEQ ID NO: 80670 - protein, 7 aa, synthetic construct
MGTGASH

SEQ ID NO: 80671 - protein, 7 aa, synthetic construct
SNAVSPA

SEQ ID NO: 80672 - protein, 7 aa, synthetic construct
NSQGIIV

SEQ ID NO: 80673 - protein, 7 aa, synthetic construct
RGHVILG

SEQ ID NO: 80674 - protein, 7 aa, synthetic construct
LAPFILE

SEQ ID NO: 80675 - protein, 7 aa, synthetic construct
FKVPTEA

SEQ ID NO: 80676 - protein, 7 aa, synthetic construct
KQVAAKD

SEQ ID NO: 80677 - protein, 7 aa, synthetic construct
KGGGAYV

SEQ ID NO: 80678 - protein, 7 aa, synthetic construct
GQAHGRA

SEQ ID NO: 80679 - protein, 7 aa, synthetic construct
NKQAEVH

SEQ ID NO: 80680 - protein, 7 aa, synthetic construct
MGEVIRQ

SEQ ID NO: 80681 - protein, 7 aa, synthetic construct
MFQGSQH

SEQ ID NO: 80682 - protein, 7 aa, synthetic construct
HPVPYKA

SEQ ID NO: 80683 - protein, 7 aa, synthetic construct
GEIKYPG

SEQ ID NO: 80684 - protein, 7 aa, synthetic construct
VMQNHGF

SEQ ID NO: 80685 - protein, 7 aa, synthetic construct
GGNFKSG

SEQ ID NO: 80686 - protein, 7 aa, synthetic construct
EGKQRVP

SEQ ID NO: 80687 - protein, 7 aa, synthetic construct
MGGPGQY

SEQ ID NO: 80688 - protein, 7 aa, synthetic construct
FKTNVTG

SEQ ID NO: 80689 - protein, 7 aa, synthetic construct
KNHGHLD

SEQ ID NO: 80690 - protein, 7 aa, synthetic construct
QTLHNMP

SEQ ID NO: 80691 - protein, 7 aa, synthetic construct
IQNHSAP

SEQ ID NO: 80692 - protein, 7 aa, synthetic construct
TQPYHNP

SEQ ID NO: 80693 - protein, 7 aa, synthetic construct
KVNSPVW

SEQ ID NO: 80694 - protein, 7 aa, synthetic construct
IDRAGRI

SEQ ID NO: 80695 - protein, 7 aa, synthetic construct
EIYHNPK

SEQ ID NO: 80696 - protein, 7 aa, synthetic construct
VLPEQKK

SEQ ID NO: 80697 - protein, 7 aa, synthetic construct
HNSAKMA

SEQ ID NO: 80698 - protein, 7 aa, synthetic construct
QSMNPSK

SEQ ID NO: 80699 - protein, 7 aa, synthetic construct
LNGNNQG

SEQ ID NO: 80700 - protein, 7 aa, synthetic construct
KHLALDA

SEQ ID NO: 80701 - protein, 7 aa, synthetic construct
NAVNNPL

SEQ ID NO: 80702 - protein, 7 aa, synthetic construct
HSQKTQN

SEQ ID NO: 80703 - protein, 7 aa, synthetic construct
RAQNQAM

SEQ ID NO: 80704 - protein, 7 aa, synthetic construct
EQKLSGP

SEQ ID NO: 80705 - protein, 7 aa, synthetic construct
QLTVHSM

SEQ ID NO: 80706 - protein, 7 aa, synthetic construct
FSRMPET

SEQ ID NO: 80707 - protein, 7 aa, synthetic construct
ALKTTTD

SEQ ID NO: 80708 - protein, 7 aa, synthetic construct
PNPHRPI

SEQ ID NO: 80709 - protein, 7 aa, synthetic construct
SKKQPFD

SEQ ID NO: 80710 - protein, 7 aa, synthetic construct
FMDHAKD

SEQ ID NO: 80711 - protein, 7 aa, synthetic construct
SSTSKQV

SEQ ID NO: 80712 - protein, 7 aa, synthetic construct
VAAVNAN

SEQ ID NO: 80713 - protein, 7 aa, synthetic construct
VYIPKNG

SEQ ID NO: 80714 - protein, 7 aa, synthetic construct
EKGTNGG

SEQ ID NO: 80715 - protein, 7 aa, synthetic construct
NGHGREV

SEQ ID NO: 80716 - protein, 7 aa, synthetic construct
LTKINPL

SEQ ID NO: 80717 - protein, 7 aa, synthetic construct
TKEKSHI

SEQ ID NO: 80718 - protein, 7 aa, synthetic construct
NVFDQVP

SEQ ID NO: 80719 - protein, 7 aa, synthetic construct
VHTARQF

SEQ ID NO: 80720 - protein, 7 aa, synthetic construct
QLYSKMT

SEQ ID NO: 80721 - protein, 7 aa, synthetic construct
PDKRIVA

SEQ ID NO: 80722 - protein, 7 aa, synthetic construct
CGSKVCN

SEQ ID NO: 80723 - protein, 7 aa, synthetic construct
THEPNPR

SEQ ID NO: 80724 - protein, 7 aa, synthetic construct
HPVREAG

SEQ ID NO: 80725 - protein, 7 aa, synthetic construct
PRHISTM

SEQ ID NO: 80726 - protein, 7 aa, synthetic construct
HKMSDIN

SEQ ID NO: 80727 - protein, 7 aa, synthetic construct
FDNTRGQ

SEQ ID NO: 80728 - protein, 7 aa, synthetic construct
IRTSEGC

SEQ ID NO: 80729 - protein, 7 aa, synthetic construct
EIANITG

SEQ ID NO: 80730 - protein, 7 aa, synthetic construct
LVSGNQA

SEQ ID NO: 80731 - protein, 7 aa, synthetic construct
IMTAERK

SEQ ID NO: 80732 - protein, 7 aa, synthetic construct
KTAGAQA

SEQ ID NO: 80733 - protein, 7 aa, synthetic construct
FNTAVKS

SEQ ID NO: 80734 - protein, 7 aa, synthetic construct
LLKPTEP

SEQ ID NO: 80735 - protein, 7 aa, synthetic construct
MPPKPTD

SEQ ID NO: 80736 - protein, 7 aa, synthetic construct
KEFDRKV

SEQ ID NO: 80737 - protein, 7 aa, synthetic construct
QPERMKE

SEQ ID NO: 80738 - protein, 7 aa, synthetic construct
VAAAAHA

SEQ ID NO: 80739 - protein, 7 aa, synthetic construct
PQINQVG

SEQ ID NO: 80740 - protein, 7 aa, synthetic construct
SKDQPTN

SEQ ID NO: 80741 - protein, 7 aa, synthetic construct
QGRHLAE

SEQ ID NO: 80742 - protein, 7 aa, synthetic construct
PNRGTGV

SEQ ID NO: 80743 - protein, 7 aa, synthetic construct
SKPSNMI

SEQ ID NO: 80744 - protein, 7 aa, synthetic construct
GRMLHTN

SEQ ID NO: 80745 - protein, 7 aa, synthetic construct
NPEGYGS

SEQ ID NO: 80746 - protein, 7 aa, synthetic construct
IEFKKSE

SEQ ID NO: 80747 - protein, 7 aa, synthetic construct
MDKYIGI

SEQ ID NO: 80748 - protein, 7 aa, synthetic construct
VHQGIRV

SEQ ID NO: 80749 - protein, 7 aa, synthetic construct
DKAPVML

SEQ ID NO: 80750 - protein, 7 aa, synthetic construct
ITPYYEK

SEQ ID NO: 80751 - protein, 7 aa, synthetic construct
GSANIEG

SEQ ID NO: 80752 - protein, 7 aa, synthetic construct
YNKGGEK

SEQ ID NO: 80753 - protein, 7 aa, synthetic construct
GNQLHPG

SEQ ID NO: 80754 - protein, 7 aa, synthetic construct
ERDRPAQ

SEQ ID NO: 80755 - protein, 7 aa, synthetic construct
IQKDAHE

SEQ ID NO: 80756 - protein, 7 aa, synthetic construct
VSVRSSE

SEQ ID NO: 80757 - protein, 7 aa, synthetic construct
NNPQIKS

SEQ ID NO: 80758 - protein, 7 aa, synthetic construct
VGNPTVL

SEQ ID NO: 80759 - protein, 7 aa, synthetic construct
IDAAHGY

SEQ ID NO: 80760 - protein, 7 aa, synthetic construct
NSPKNSE

SEQ ID NO: 80761 - protein, 7 aa, synthetic construct
PYKGAVA

SEQ ID NO: 80762 - protein, 7 aa, synthetic construct
FPHGGPD

SEQ ID NO: 80763 - protein, 7 aa, synthetic construct
SRGASEL

SEQ ID NO: 80764 - protein, 7 aa, synthetic construct
HIVRPAQ

SEQ ID NO: 80765 - protein, 7 aa, synthetic construct
FGATMLG

SEQ ID NO: 80766 - protein, 7 aa, synthetic construct
PRNTHQL

SEQ ID NO: 80767 - protein, 7 aa, synthetic construct
LEQRAAT

SEQ ID NO: 80768 - protein, 7 aa, synthetic construct
QEPGYTG

SEQ ID NO: 80769 - protein, 7 aa, synthetic construct
GGYVAGV

SEQ ID NO: 80770 - protein, 7 aa, synthetic construct
RDQLNSN

SEQ ID NO: 80771 - protein, 7 aa, synthetic construct
QSTTRGG

SEQ ID NO: 80772 - protein, 7 aa, synthetic construct
MSMGLQK

SEQ ID NO: 80773 - protein, 7 aa, synthetic construct
IKGLQFT

SEQ ID NO: 80774 - protein, 7 aa, synthetic construct
STIQAMK

SEQ ID NO: 80775 - protein, 7 aa, synthetic construct
TQMQHTP

SEQ ID NO: 80776 - protein, 7 aa, synthetic construct
VKMHGQH

SEQ ID NO: 80777 - protein, 7 aa, synthetic construct
QRPTKEH

SEQ ID NO: 80778 - protein, 7 aa, synthetic construct
SVNQRNP

SEQ ID NO: 80779 - protein, 7 aa, synthetic construct
TIRTQQA

SEQ ID NO: 80780 - protein, 7 aa, synthetic construct
KETFSSH

SEQ ID NO: 80781 - protein, 7 aa, synthetic construct
DPPSSMG

SEQ ID NO: 80782 - protein, 7 aa, synthetic construct
SNEFTTK

SEQ ID NO: 80783 - protein, 7 aa, synthetic construct
SRQYTLD

SEQ ID NO: 80784 - protein, 7 aa, synthetic construct
RLNDMGH

SEQ ID NO: 80785 - protein, 7 aa, synthetic construct
NIPHKMD

SEQ ID NO: 80786 - protein, 7 aa, synthetic construct
KENQDKA

SEQ ID NO: 80787 - protein, 7 aa, synthetic construct
GLMGVAF

SEQ ID NO: 80788 - protein, 7 aa, synthetic construct
MEQQKKM

SEQ ID NO: 80789 - protein, 7 aa, synthetic construct
MTTIINK

SEQ ID NO: 80790 - protein, 7 aa, synthetic construct
FPPAGGP

SEQ ID NO: 80791 - protein, 7 aa, synthetic construct
MDHLLKN

SEQ ID NO: 80792 - protein, 7 aa, synthetic construct
YQGYETI

SEQ ID NO: 80793 - protein, 7 aa, synthetic construct
IMNRDLM

SEQ ID NO: 80794 - protein, 7 aa, synthetic construct
TTALYTH

SEQ ID NO: 80795 - protein, 7 aa, synthetic construct
VKQSSAP

SEQ ID NO: 80796 - protein, 7 aa, synthetic construct
KPLDGMF

SEQ ID NO: 80797 - protein, 7 aa, synthetic construct
KMTPMSA

SEQ ID NO: 80798 - protein, 7 aa, synthetic construct
IRAPPEH

SEQ ID NO: 80799 - protein, 7 aa, synthetic construct
EVRGTHR

SEQ ID NO: 80800 - protein, 7 aa, synthetic construct
TGAKMFN

SEQ ID NO: 80801 - protein, 7 aa, synthetic construct
VKWDQNV

SEQ ID NO: 80802 - protein, 7 aa, synthetic construct
QMKHTGH

SEQ ID NO: 80803 - protein, 7 aa, synthetic construct
IKEHKGQ

SEQ ID NO: 80804 - protein, 7 aa, synthetic construct
VDGLGSV

SEQ ID NO: 80805 - protein, 7 aa, synthetic construct
FIQSIEK

SEQ ID NO: 80806 - protein, 7 aa, synthetic construct
MTRLGRD

SEQ ID NO: 80807 - protein, 7 aa, synthetic construct
NSLKTEV

SEQ ID NO: 80808 - protein, 7 aa, synthetic construct
RNKHMME

SEQ ID NO: 80809 - protein, 7 aa, synthetic construct
ADSSKSW

SEQ ID NO: 80810 - protein, 7 aa, synthetic construct
IPKFEDD

SEQ ID NO: 80811 - protein, 7 aa, synthetic construct
KNPAGKD

SEQ ID NO: 80812 - protein, 7 aa, synthetic construct
FVHSTAA

SEQ ID NO: 80813 - protein, 7 aa, synthetic construct
MSRDINM

SEQ ID NO: 80814 - protein, 7 aa, synthetic construct
HKLMRDP

SEQ ID NO: 80815 - protein, 7 aa, synthetic construct
GYEKRIS

SEQ ID NO: 80816 - protein, 7 aa, synthetic construct
NRQDLKH

SEQ ID NO: 80817 - protein, 7 aa, synthetic construct
KRDLQEE

SEQ ID NO: 80818 - protein, 7 aa, synthetic construct
LVKGENP

SEQ ID NO: 80819 - protein, 7 aa, synthetic construct
VNPTARG

SEQ ID NO: 80820 - protein, 7 aa, synthetic construct
ANSHKDL

SEQ ID NO: 80821 - protein, 7 aa, synthetic construct
MAFPGAS

SEQ ID NO: 80822 - protein, 7 aa, synthetic construct
FGVGPSM

SEQ ID NO: 80823 - protein, 7 aa, synthetic construct
TRGPAEP

SEQ ID NO: 80824 - protein, 7 aa, synthetic construct
LRSGDKV

SEQ ID NO: 80825 - protein, 7 aa, synthetic construct
SDNKMNH

SEQ ID NO: 80826 - protein, 7 aa, synthetic construct
DKQHPSV

SEQ ID NO: 80827 - protein, 7 aa, synthetic construct
GIRDREL

SEQ ID NO: 80828 - protein, 7 aa, synthetic construct
HPPHQNP

SEQ ID NO: 80829 - protein, 7 aa, synthetic construct
NGPTIPQ

SEQ ID NO: 80830 - protein, 7 aa, synthetic construct
MSVKDHQ

SEQ ID NO: 80831 - protein, 7 aa, synthetic construct
DMQREPV

SEQ ID NO: 80832 - protein, 7 aa, synthetic construct
EASHRQA

SEQ ID NO: 80833 - protein, 7 aa, synthetic construct
HGRVGDD

SEQ ID NO: 80834 - protein, 7 aa, synthetic construct
KGFKESA

SEQ ID NO: 80835 - protein, 7 aa, synthetic construct
SRADQLT

SEQ ID NO: 80836 - protein, 7 aa, synthetic construct
VVAGAST

SEQ ID NO: 80837 - protein, 7 aa, synthetic construct
QKSGMQG

SEQ ID NO: 80838 - protein, 7 aa, synthetic construct
EMKGLSR

SEQ ID NO: 80839 - protein, 7 aa, synthetic construct
SDIKNYG

SEQ ID NO: 80840 - protein, 7 aa, synthetic construct
DNHRNQQ

SEQ ID NO: 80841 - protein, 7 aa, synthetic construct
YKGGMSA

SEQ ID NO: 80842 - protein, 7 aa, synthetic construct
TGALTIR

SEQ ID NO: 80843 - protein, 7 aa, synthetic construct
QHPNQMR

SEQ ID NO: 80844 - protein, 7 aa, synthetic construct
HKSDNQY

SEQ ID NO: 80845 - protein, 7 aa, synthetic construct
ENKSATH

SEQ ID NO: 80846 - protein, 7 aa, synthetic construct
WHTRTDV

SEQ ID NO: 80847 - protein, 7 aa, synthetic construct
KNPNVNP

SEQ ID NO: 80848 - protein, 7 aa, synthetic construct
AHKHQLP

SEQ ID NO: 80849 - protein, 7 aa, synthetic construct
AVRQVVE

SEQ ID NO: 80850 - protein, 7 aa, synthetic construct
QKMQDMT

SEQ ID NO: 80851 - protein, 7 aa, synthetic construct
KQATAVG

SEQ ID NO: 80852 - protein, 7 aa, synthetic construct
GIFNETL

SEQ ID NO: 80853 - protein, 7 aa, synthetic construct
APAKAQW

SEQ ID NO: 80854 - protein, 7 aa, synthetic construct
QITHKLE

SEQ ID NO: 80855 - protein, 7 aa, synthetic construct
VNNLSQF

SEQ ID NO: 80856 - protein, 7 aa, synthetic construct
AKEVHYV

SEQ ID NO: 80857 - protein, 7 aa, synthetic construct
YKPPVKE

SEQ ID NO: 80858 - protein, 7 aa, synthetic construct
KGGPGQW

SEQ ID NO: 80859 - protein, 7 aa, synthetic construct
TITVPEM

SEQ ID NO: 80860 - protein, 7 aa, synthetic construct
TYQTDRS

SEQ ID NO: 80861 - protein, 7 aa, synthetic construct
VGPVAFV

SEQ ID NO: 80862 - protein, 7 aa, synthetic construct
SANQKWH

SEQ ID NO: 80863 - protein, 7 aa, synthetic construct
LLQHGPD

SEQ ID NO: 80864 - protein, 7 aa, synthetic construct
ENGPKQT

SEQ ID NO: 80865 - protein, 7 aa, synthetic construct
NQGTKHV

SEQ ID NO: 80866 - protein, 7 aa, synthetic construct
HKVRTDL

SEQ ID NO: 80867 - protein, 7 aa, synthetic construct
RREYVDG

SEQ ID NO: 80868 - protein, 7 aa, synthetic construct
YQHNSMH

SEQ ID NO: 80869 - protein, 7 aa, synthetic construct
NQTLNRI

SEQ ID NO: 80870 - protein, 7 aa, synthetic construct
TTSIKTG

SEQ ID NO: 80871 - protein, 7 aa, synthetic construct
AALTQTV

SEQ ID NO: 80872 - protein, 7 aa, synthetic construct
PMKQTGF

SEQ ID NO: 80873 - protein, 7 aa, synthetic construct
KNGSSVS

SEQ ID NO: 80874 - protein, 7 aa, synthetic construct
NTQETIK

SEQ ID NO: 80875 - protein, 7 aa, synthetic construct
PSNGKAP

SEQ ID NO: 80876 - protein, 7 aa, synthetic construct
QGQLEIA

SEQ ID NO: 80877 - protein, 7 aa, synthetic construct
HDYLVSA

SEQ ID NO: 80878 - protein, 7 aa, synthetic construct
MPKSVYT

SEQ ID NO: 80879 - protein, 7 aa, synthetic construct
VQGYMHK

SEQ ID NO: 80880 - protein, 7 aa, synthetic construct
IPRTTLH

SEQ ID NO: 80881 - protein, 7 aa, synthetic construct
QKSSVSN

SEQ ID NO: 80882 - protein, 7 aa, synthetic construct
FNASPSH

SEQ ID NO: 80883 - protein, 7 aa, synthetic construct
SNKAQNG

SEQ ID NO: 80884 - protein, 7 aa, synthetic construct
QHEAQKF

SEQ ID NO: 80885 - protein, 7 aa, synthetic construct
APSIPLA

SEQ ID NO: 80886 - protein, 7 aa, synthetic construct
RAADIQM

SEQ ID NO: 80887 - protein, 7 aa, synthetic construct
FRSNTAY

SEQ ID NO: 80888 - protein, 7 aa, synthetic construct
GNKHYEA

SEQ ID NO: 80889 - protein, 7 aa, synthetic construct
GKTGTAA

SEQ ID NO: 80890 - protein, 7 aa, synthetic construct
QQKYQAG

SEQ ID NO: 80891 - protein, 7 aa, synthetic construct
ILQGAGM

SEQ ID NO: 80892 - protein, 7 aa, synthetic construct
QTKSVHM

SEQ ID NO: 80893 - protein, 7 aa, synthetic construct
FHPQRIV

SEQ ID NO: 80894 - protein, 7 aa, synthetic construct
TTLTVKT

SEQ ID NO: 80895 - protein, 7 aa, synthetic construct
IKMGQER

SEQ ID NO: 80896 - protein, 7 aa, synthetic construct
GYGTPMA

SEQ ID NO: 80897 - protein, 7 aa, synthetic construct
LNMHHTM

SEQ ID NO: 80898 - protein, 7 aa, synthetic construct
ESRGIMV

SEQ ID NO: 80899 - protein, 7 aa, synthetic construct
EMHLTPA

SEQ ID NO: 80900 - protein, 7 aa, synthetic construct
RFSSTSQ

SEQ ID NO: 80901 - protein, 7 aa, synthetic construct
SASYVKG

SEQ ID NO: 80902 - protein, 7 aa, synthetic construct
LVGEHMH

SEQ ID NO: 80903 - protein, 7 aa, synthetic construct
MPSSYNP

SEQ ID NO: 80904 - protein, 7 aa, synthetic construct
SGDTNLR

SEQ ID NO: 80905 - protein, 7 aa, synthetic construct
KWMKEGT

SEQ ID NO: 80906 - protein, 7 aa, synthetic construct
SKIGMAA

SEQ ID NO: 80907 - protein, 7 aa, synthetic construct
KVNLVDP

SEQ ID NO: 80908 - protein, 7 aa, synthetic construct
FRMGNQN

SEQ ID NO: 80909 - protein, 7 aa, synthetic construct
GEHHKNE

SEQ ID NO: 80910 - protein, 7 aa, synthetic construct
SKQWEIG

SEQ ID NO: 80911 - protein, 7 aa, synthetic construct
HKDYGHV

SEQ ID NO: 80912 - protein, 7 aa, synthetic construct
RTQLMER

SEQ ID NO: 80913 - protein, 7 aa, synthetic construct
YMARQDD

SEQ ID NO: 80914 - protein, 7 aa, synthetic construct
VAKVGVW

SEQ ID NO: 80915 - protein, 7 aa, synthetic construct
KTSASSA

SEQ ID NO: 80916 - protein, 7 aa, synthetic construct
HRDSALA

SEQ ID NO: 80917 - protein, 7 aa, synthetic construct
LFARGNV

SEQ ID NO: 80918 - protein, 7 aa, synthetic construct
SMAAYKA

SEQ ID NO: 80919 - protein, 7 aa, synthetic construct
TGPLGHM

SEQ ID NO: 80920 - protein, 7 aa, synthetic construct
NKGESQM

SEQ ID NO: 80921 - protein, 7 aa, synthetic construct
KENKNPW

SEQ ID NO: 80922 - protein, 7 aa, synthetic construct
LHKDQLL

SEQ ID NO: 80923 - protein, 7 aa, synthetic construct
KVRQDMS

SEQ ID NO: 80924 - protein, 7 aa, synthetic construct
SITEVKG

SEQ ID NO: 80925 - protein, 7 aa, synthetic construct
KMGGFVA

SEQ ID NO: 80926 - protein, 7 aa, synthetic construct
LFADPKP

SEQ ID NO: 80927 - protein, 7 aa, synthetic construct
RPMNFDG

SEQ ID NO: 80928 - protein, 7 aa, synthetic construct
AVGTEVK

SEQ ID NO: 80929 - protein, 7 aa, synthetic construct
GQLPQTH

SEQ ID NO: 80930 - protein, 7 aa, synthetic construct
THLGQQS

SEQ ID NO: 80931 - protein, 7 aa, synthetic construct
HDPGMLS

SEQ ID NO: 80932 - protein, 7 aa, synthetic construct
GHAHYHV

SEQ ID NO: 80933 - protein, 7 aa, synthetic construct
WHHQAGQ

SEQ ID NO: 80934 - protein, 7 aa, synthetic construct
TFAREAM

SEQ ID NO: 80935 - protein, 7 aa, synthetic construct
IDKFMQG

SEQ ID NO: 80936 - protein, 7 aa, synthetic construct
YWDKPQS

SEQ ID NO: 80937 - protein, 7 aa, synthetic construct
EKFNHTH

SEQ ID NO: 80938 - protein, 7 aa, synthetic construct
NRPEYDT

SEQ ID NO: 80939 - protein, 7 aa, synthetic construct
FPGAMSV

SEQ ID NO: 80940 - protein, 7 aa, synthetic construct
PNPKVAP

SEQ ID NO: 80941 - protein, 7 aa, synthetic construct
TRELDFD

SEQ ID NO: 80942 - protein, 7 aa, synthetic construct
REFVSGL

SEQ ID NO: 80943 - protein, 7 aa, synthetic construct
RGPGTGA

SEQ ID NO: 80944 - protein, 7 aa, synthetic construct
PTKEEKR

SEQ ID NO: 80945 - protein, 7 aa, synthetic construct
MNSLLPM

SEQ ID NO: 80946 - protein, 7 aa, synthetic construct
MHHLRET

SEQ ID NO: 80947 - protein, 7 aa, synthetic construct
IGPPKYT

SEQ ID NO: 80948 - protein, 7 aa, synthetic construct
DFQGTHH

SEQ ID NO: 80949 - protein, 7 aa, synthetic construct
ADNKWPM

SEQ ID NO: 80950 - protein, 7 aa, synthetic construct
SEHSYKP

SEQ ID NO: 80951 - protein, 7 aa, synthetic construct
TKMQNAA

SEQ ID NO: 80952 - protein, 7 aa, synthetic construct
VKASMIQ

SEQ ID NO: 80953 - protein, 7 aa, synthetic construct
HIPYENT

SEQ ID NO: 80954 - protein, 7 aa, synthetic construct
GERVRAA

SEQ ID NO: 80955 - protein, 7 aa, synthetic construct
PDRLTVA

SEQ ID NO: 80956 - protein, 7 aa, synthetic construct
EKTPFAQ

SEQ ID NO: 80957 - protein, 7 aa, synthetic construct
PTSNGSG

SEQ ID NO: 80958 - protein, 7 aa, synthetic construct
KMHWSEE

SEQ ID NO: 80959 - protein, 7 aa, synthetic construct
EKTPAYL

SEQ ID NO: 80960 - protein, 7 aa, synthetic construct
AISNQRP

SEQ ID NO: 80961 - protein, 7 aa, synthetic construct
RPYGYEN

SEQ ID NO: 80962 - protein, 7 aa, synthetic construct
RNKEQNA

SEQ ID NO: 80963 - protein, 7 aa, synthetic construct
PGNSKQY

SEQ ID NO: 80964 - protein, 7 aa, synthetic construct
RNKGEGD

SEQ ID NO: 80965 - protein, 7 aa, synthetic construct
MIHRMDH

SEQ ID NO: 80966 - protein, 7 aa, synthetic construct
RRDNHPQ

SEQ ID NO: 80967 - protein, 7 aa, synthetic construct
AGHIAAT

SEQ ID NO: 80968 - protein, 7 aa, synthetic construct
KAATPAY

SEQ ID NO: 80969 - protein, 7 aa, synthetic construct
PKADITR

SEQ ID NO: 80970 - protein, 7 aa, synthetic construct
QQRDAVI

SEQ ID NO: 80971 - protein, 7 aa, synthetic construct
MYDAAVG

SEQ ID NO: 80972 - protein, 7 aa, synthetic construct
YQVHGVA

SEQ ID NO: 80973 - protein, 7 aa, synthetic construct
QDGWDGK

SEQ ID NO: 80974 - protein, 7 aa, synthetic construct
MNVRENK

SEQ ID NO: 80975 - protein, 7 aa, synthetic construct
SQIHVKE

SEQ ID NO: 80976 - protein, 7 aa, synthetic construct
TNAKSAP

SEQ ID NO: 80977 - protein, 7 aa, synthetic construct
AILYHDK

SEQ ID NO: 80978 - protein, 7 aa, synthetic construct
SISPKSL

SEQ ID NO: 80979 - protein, 7 aa, synthetic construct
NKDAIMN

SEQ ID NO: 80980 - protein, 7 aa, synthetic construct
VINKNIA

SEQ ID NO: 80981 - protein, 7 aa, synthetic construct
NPKHAHP

SEQ ID NO: 80982 - protein, 7 aa, synthetic construct
HGKVDAG

SEQ ID NO: 80983 - protein, 7 aa, synthetic construct
KNAMTSV

SEQ ID NO: 80984 - protein, 7 aa, synthetic construct
PKKDEWL

SEQ ID NO: 80985 - protein, 7 aa, synthetic construct
KSMNQTF

SEQ ID NO: 80986 - protein, 7 aa, synthetic construct
YMLNTLP

SEQ ID NO: 80987 - protein, 7 aa, synthetic construct
MASNGPY

SEQ ID NO: 80988 - protein, 7 aa, synthetic construct
MDSRFPP

SEQ ID NO: 80989 - protein, 7 aa, synthetic construct
PKFASHM

SEQ ID NO: 80990 - protein, 7 aa, synthetic construct
SQTQYAH

SEQ ID NO: 80991 - protein, 7 aa, synthetic construct
TMQRIEM

SEQ ID NO: 80992 - protein, 7 aa, synthetic construct
IAEGRQV

SEQ ID NO: 80993 - protein, 7 aa, synthetic construct
AKNERDH

SEQ ID NO: 80994 - protein, 7 aa, synthetic construct
AHQPAFQ

SEQ ID NO: 80995 - protein, 7 aa, synthetic construct
FTAMPQT

SEQ ID NO: 80996 - protein, 7 aa, synthetic construct
KKDPDVD

SEQ ID NO: 80997 - protein, 7 aa, synthetic construct
YPFDGGK

SEQ ID NO: 80998 - protein, 7 aa, synthetic construct
HEHKVPH

SEQ ID NO: 80999 - protein, 7 aa, synthetic construct
PHKSGMP

SEQ ID NO: 81000 - protein, 7 aa, synthetic construct
RDKGGSF

SEQ ID NO: 81001 - protein, 7 aa, synthetic construct
VGANTYG

SEQ ID NO: 81002 - protein, 7 aa, synthetic construct
YNHANKF

SEQ ID NO: 81003 - protein, 7 aa, synthetic construct
QTKNDSN

SEQ ID NO: 81004 - protein, 7 aa, synthetic construct
KYTDHKY

SEQ ID NO: 81005 - protein, 7 aa, synthetic construct
SDANSQM

SEQ ID NO: 81006 - protein, 7 aa, synthetic construct
HLMRNEK

SEQ ID NO: 81007 - protein, 7 aa, synthetic construct
EHKRDDN

SEQ ID NO: 81008 - protein, 7 aa, synthetic construct
NKQMIDA

SEQ ID NO: 81009 - protein, 7 aa, synthetic construct
NQHTGTG

SEQ ID NO: 81010 - protein, 7 aa, synthetic construct
DIYNIKG

SEQ ID NO: 81011 - protein, 7 aa, synthetic construct
PPMRAMI

SEQ ID NO: 81012 - protein, 7 aa, synthetic construct
PQKMQQS

SEQ ID NO: 81013 - protein, 7 aa, synthetic construct
MGTKQIG

SEQ ID NO: 81014 - protein, 7 aa, synthetic construct
MRRGGED

SEQ ID NO: 81015 - protein, 7 aa, synthetic construct
NGQKNMG

SEQ ID NO: 81016 - protein, 7 aa, synthetic construct
DKLVSRY

SEQ ID NO: 81017 - protein, 7 aa, synthetic construct
PLPQMNM

SEQ ID NO: 81018 - protein, 7 aa, synthetic construct
RSVHLPE

SEQ ID NO: 81019 - protein, 7 aa, synthetic construct
DKLKWLE

SEQ ID NO: 81020 - protein, 7 aa, synthetic construct
GPGTNFN

SEQ ID NO: 81021 - protein, 7 aa, synthetic construct
PSGSRHP

SEQ ID NO: 81022 - protein, 7 aa, synthetic construct
YTTTTRM

SEQ ID NO: 81023 - protein, 7 aa, synthetic construct
FGNLKGP

SEQ ID NO: 81024 - protein, 7 aa, synthetic construct
LGEKEHW

SEQ ID NO: 81025 - protein, 7 aa, synthetic construct
SPQLGQK

SEQ ID NO: 81026 - protein, 7 aa, synthetic construct
LSSIQYQ

SEQ ID NO: 81027 - protein, 7 aa, synthetic construct
IHAGGAP

SEQ ID NO: 81028 - protein, 7 aa, synthetic construct
SKLAQFA

SEQ ID NO: 81029 - protein, 7 aa, synthetic construct
ALRNAQA

SEQ ID NO: 81030 - protein, 7 aa, synthetic construct
DAAYVRA

SEQ ID NO: 81031 - protein, 7 aa, synthetic construct
EMQHQHM

SEQ ID NO: 81032 - protein, 7 aa, synthetic construct
KYLTPTG

SEQ ID NO: 81033 - protein, 7 aa, synthetic construct
VQFRTQE

SEQ ID NO: 81034 - protein, 7 aa, synthetic construct
PQEKTMM

SEQ ID NO: 81035 - protein, 7 aa, synthetic construct
VGIRSPL

SEQ ID NO: 81036 - protein, 7 aa, synthetic construct
AMPNPHQ

SEQ ID NO: 81037 - protein, 7 aa, synthetic construct
HKDKQWT

SEQ ID NO: 81038 - protein, 7 aa, synthetic construct
DKDSTNL

SEQ ID NO: 81039 - protein, 7 aa, synthetic construct
YPAEKYM

SEQ ID NO: 81040 - protein, 7 aa, synthetic construct
NKNPTPI

SEQ ID NO: 81041 - protein, 7 aa, synthetic construct
LGGQDYH

SEQ ID NO: 81042 - protein, 7 aa, synthetic construct
LSGTIPN

SEQ ID NO: 81043 - protein, 7 aa, synthetic construct
QHVNGIL

SEQ ID NO: 81044 - protein, 7 aa, synthetic construct
TVIDNHA

SEQ ID NO: 81045 - protein, 7 aa, synthetic construct
MYQHTVG

SEQ ID NO: 81046 - protein, 7 aa, synthetic construct
KVGNSTA

SEQ ID NO: 81047 - protein, 7 aa, synthetic construct
RLITTHE

SEQ ID NO: 81048 - protein, 7 aa, synthetic construct
HPMHSRG

SEQ ID NO: 81049 - protein, 7 aa, synthetic construct
SRTQGSP

SEQ ID NO: 81050 - protein, 7 aa, synthetic construct
PLMIAKE

SEQ ID NO: 81051 - protein, 7 aa, synthetic construct
GHDHVPG

SEQ ID NO: 81052 - protein, 7 aa, synthetic construct
PGQKNLE

SEQ ID NO: 81053 - protein, 7 aa, synthetic construct
MILGPTP

SEQ ID NO: 81054 - protein, 7 aa, synthetic construct
HSNMAGL

SEQ ID NO: 81055 - protein, 7 aa, synthetic construct
FKPTTSQ

SEQ ID NO: 81056 - protein, 7 aa, synthetic construct
VAKDKGS

SEQ ID NO: 81057 - protein, 7 aa, synthetic construct
IRNSNES

SEQ ID NO: 81058 - protein, 7 aa, synthetic construct
QSHHGNH

SEQ ID NO: 81059 - protein, 7 aa, synthetic construct
RPQAPDG

SEQ ID NO: 81060 - protein, 7 aa, synthetic construct
SPMQSPK

SEQ ID NO: 81061 - protein, 7 aa, synthetic construct
MAASATK

SEQ ID NO: 81062 - protein, 7 aa, synthetic construct
GGSQIHT

SEQ ID NO: 81063 - protein, 7 aa, synthetic construct
AFSASTP

SEQ ID NO: 81064 - protein, 7 aa, synthetic construct
IAKDQIA

SEQ ID NO: 81065 - protein, 7 aa, synthetic construct
NQTGLNN

SEQ ID NO: 81066 - protein, 7 aa, synthetic construct
WSLRSQD

SEQ ID NO: 81067 - protein, 7 aa, synthetic construct
INDGYGG

SEQ ID NO: 81068 - protein, 7 aa, synthetic construct
VNYSTNG

SEQ ID NO: 81069 - protein, 7 aa, synthetic construct
GRGMDQA

SEQ ID NO: 81070 - protein, 7 aa, synthetic construct
LKMFDAT

SEQ ID NO: 81071 - protein, 7 aa, synthetic construct
RQNDNLR

SEQ ID NO: 81072 - protein, 7 aa, synthetic construct
NLIQHQT

SEQ ID NO: 81073 - protein, 7 aa, synthetic construct
KTNGATP

SEQ ID NO: 81074 - protein, 7 aa, synthetic construct
HSPRHVE

SEQ ID NO: 81075 - protein, 7 aa, synthetic construct
QHNPMTR

SEQ ID NO: 81076 - protein, 7 aa, synthetic construct
NQATPKA

SEQ ID NO: 81077 - protein, 7 aa, synthetic construct
GITKDRV

SEQ ID NO: 81078 - protein, 7 aa, synthetic construct
IQQGMHM

SEQ ID NO: 81079 - protein, 7 aa, synthetic construct
VPKTINV

SEQ ID NO: 81080 - protein, 7 aa, synthetic construct
SDMAHAR

SEQ ID NO: 81081 - protein, 7 aa, synthetic construct
GKPYQNG

SEQ ID NO: 81082 - protein, 7 aa, synthetic construct
TNKASQG

SEQ ID NO: 81083 - protein, 7 aa, synthetic construct
GKVEATK

SEQ ID NO: 81084 - protein, 7 aa, synthetic construct
KTTNVLV

SEQ ID NO: 81085 - protein, 7 aa, synthetic construct
YGNPSPQ

SEQ ID NO: 81086 - protein, 7 aa, synthetic construct
SIPKVDR

SEQ ID NO: 81087 - protein, 7 aa, synthetic construct
GTYPNTK

SEQ ID NO: 81088 - protein, 7 aa, synthetic construct
RPRESNP

SEQ ID NO: 81089 - protein, 7 aa, synthetic construct
QAPTQNV

SEQ ID NO: 81090 - protein, 7 aa, synthetic construct
HMHQQPA

SEQ ID NO: 81091 - protein, 7 aa, synthetic construct
DYRDIVV

SEQ ID NO: 81092 - protein, 7 aa, synthetic construct
IKPLDNI

SEQ ID NO: 81093 - protein, 7 aa, synthetic construct
PTNTPYG

SEQ ID NO: 81094 - protein, 7 aa, synthetic construct
SRETPMQ

SEQ ID NO: 81095 - protein, 7 aa, synthetic construct
RRDQQES

SEQ ID NO: 81096 - protein, 7 aa, synthetic construct
LTQSISK

SEQ ID NO: 81097 - protein, 7 aa, synthetic construct
VEHPGKD

SEQ ID NO: 81098 - protein, 7 aa, synthetic construct
YELKMGV

SEQ ID NO: 81099 - protein, 7 aa, synthetic construct
QLKKENG

SEQ ID NO: 81100 - protein, 7 aa, synthetic construct
PPFTTVD

SEQ ID NO: 81101 - protein, 7 aa, synthetic construct
SKGSHSW

SEQ ID NO: 81102 - protein, 7 aa, synthetic construct
KKATADD

SEQ ID NO: 81103 - protein, 7 aa, synthetic construct
KVGSQSA

SEQ ID NO: 81104 - protein, 7 aa, synthetic construct
PKMTVND

SEQ ID NO: 81105 - protein, 7 aa, synthetic construct
TNKHEHA

SEQ ID NO: 81106 - protein, 7 aa, synthetic construct
GKLNVGF

SEQ ID NO: 81107 - protein, 7 aa, synthetic construct
QQGRAAP

SEQ ID NO: 81108 - protein, 7 aa, synthetic construct
YVKTSFD

SEQ ID NO: 81109 - protein, 7 aa, synthetic construct
FSAFKEP

SEQ ID NO: 81110 - protein, 7 aa, synthetic construct
PPSIGPL

SEQ ID NO: 81111 - protein, 7 aa, synthetic construct
INRHEDK

SEQ ID NO: 81112 - protein, 7 aa, synthetic construct
GIPAHFE

SEQ ID NO: 81113 - protein, 7 aa, synthetic construct
NGVEKTS

SEQ ID NO: 81114 - protein, 7 aa, synthetic construct
RSMQGFV

SEQ ID NO: 81115 - protein, 7 aa, synthetic construct
VEKYEID

SEQ ID NO: 81116 - protein, 7 aa, synthetic construct
PRRAQDP

SEQ ID NO: 81117 - protein, 7 aa, synthetic construct
ALTSAAS

SEQ ID NO: 81118 - protein, 7 aa, synthetic construct
GKMNEVT

SEQ ID NO: 81119 - protein, 7 aa, synthetic construct
VAKYGVH

SEQ ID NO: 81120 - protein, 7 aa, synthetic construct
ISMNVAH

SEQ ID NO: 81121 - protein, 7 aa, synthetic construct
NTPPQKS

SEQ ID NO: 81122 - protein, 7 aa, synthetic construct
RDHAKVT

SEQ ID NO: 81123 - protein, 7 aa, synthetic construct
QAQKVHA

SEQ ID NO: 81124 - protein, 7 aa, synthetic construct
SERVTVV

SEQ ID NO: 81125 - protein, 7 aa, synthetic construct
YMNSEHM

SEQ ID NO: 81126 - protein, 7 aa, synthetic construct
ITVKMPH

SEQ ID NO: 81127 - protein, 7 aa, synthetic construct
RTMTDTI

SEQ ID NO: 81128 - protein, 7 aa, synthetic construct
GQTGSVH

SEQ ID NO: 81129 - protein, 7 aa, synthetic construct
TKEQGYK

SEQ ID NO: 81130 - protein, 7 aa, synthetic construct
NVRDFTQ

SEQ ID NO: 81131 - protein, 7 aa, synthetic construct
TSAKLVH

SEQ ID NO: 81132 - protein, 7 aa, synthetic construct
KDDMRQA

SEQ ID NO: 81133 - protein, 7 aa, synthetic construct
FSKQNTG

SEQ ID NO: 81134 - protein, 7 aa, synthetic construct
NMELKGP

SEQ ID NO: 81135 - protein, 7 aa, synthetic construct
FNDVTKK

SEQ ID NO: 81136 - protein, 7 aa, synthetic construct
SMSEQKR

SEQ ID NO: 81137 - protein, 7 aa, synthetic construct
RLHVNME

SEQ ID NO: 81138 - protein, 7 aa, synthetic construct
FNGKHTW

SEQ ID NO: 81139 - protein, 7 aa, synthetic construct
DPHMKHS

SEQ ID NO: 81140 - protein, 7 aa, synthetic construct
FDTIKKF

SEQ ID NO: 81141 - protein, 7 aa, synthetic construct
HPPNSLV

SEQ ID NO: 81142 - protein, 7 aa, synthetic construct
DNRAQSN

SEQ ID NO: 81143 - protein, 7 aa, synthetic construct
YQQKDGN

SEQ ID NO: 81144 - protein, 7 aa, synthetic construct
QVLKVAA

SEQ ID NO: 81145 - protein, 7 aa, synthetic construct
SSIEFKH

SEQ ID NO: 81146 - protein, 7 aa, synthetic construct
NMLQRMS

SEQ ID NO: 81147 - protein, 7 aa, synthetic construct
TYSSSIS

SEQ ID NO: 81148 - protein, 7 aa, synthetic construct
EKGMTQM

SEQ ID NO: 81149 - protein, 7 aa, synthetic construct
MHEARFE

SEQ ID NO: 81150 - protein, 7 aa, synthetic construct
SNRIPDE

SEQ ID NO: 81151 - protein, 7 aa, synthetic construct
IHSAIPS

SEQ ID NO: 81152 - protein, 7 aa, synthetic construct
FPNVKPV

SEQ ID NO: 81153 - protein, 7 aa, synthetic construct
PHQSAVT

SEQ ID NO: 81154 - protein, 7 aa, synthetic construct
GTFGDGI

SEQ ID NO: 81155 - protein, 7 aa, synthetic construct
RGNQIFV

SEQ ID NO: 81156 - protein, 7 aa, synthetic construct
KHYNVHE

SEQ ID NO: 81157 - protein, 7 aa, synthetic construct
GQHGMQP

SEQ ID NO: 81158 - protein, 7 aa, synthetic construct
IEPRSTM

SEQ ID NO: 81159 - protein, 7 aa, synthetic construct
HYMENTR

SEQ ID NO: 81160 - protein, 7 aa, synthetic construct
VQGLSTK

SEQ ID NO: 81161 - protein, 7 aa, synthetic construct
PQKEALK

SEQ ID NO: 81162 - protein, 7 aa, synthetic construct
YHSGERQ

SEQ ID NO: 81163 - protein, 7 aa, synthetic construct
KQNQAKD

SEQ ID NO: 81164 - protein, 7 aa, synthetic construct
TMNPHLR

SEQ ID NO: 81165 - protein, 7 aa, synthetic construct
GYHRETT

SEQ ID NO: 81166 - protein, 7 aa, synthetic construct
DRKANDH

SEQ ID NO: 81167 - protein, 7 aa, synthetic construct
SMESHQF

SEQ ID NO: 81168 - protein, 7 aa, synthetic construct
NAANDRW

SEQ ID NO: 81169 - protein, 7 aa, synthetic construct
HARSIDR

SEQ ID NO: 81170 - protein, 7 aa, synthetic construct
TGTGRNQ

SEQ ID NO: 81171 - protein, 7 aa, synthetic construct
DKRHQYP

SEQ ID NO: 81172 - protein, 7 aa, synthetic construct
QARNAGI

SEQ ID NO: 81173 - protein, 7 aa, synthetic construct
SIYTDVK

SEQ ID NO: 81174 - protein, 7 aa, synthetic construct
FAQLKSV

SEQ ID NO: 81175 - protein, 7 aa, synthetic construct
VAKGIVN

SEQ ID NO: 81176 - protein, 7 aa, synthetic construct
FHKIVAT

SEQ ID NO: 81177 - protein, 7 aa, synthetic construct
IAHDIKE

SEQ ID NO: 81178 - protein, 7 aa, synthetic construct
TGHDSRD

SEQ ID NO: 81179 - protein, 7 aa, synthetic construct
HHQNSDQ

SEQ ID NO: 81180 - protein, 7 aa, synthetic construct
ASGQYIG

SEQ ID NO: 81181 - protein, 7 aa, synthetic construct
SKHRDVE

SEQ ID NO: 81182 - protein, 7 aa, synthetic construct
NIMAING

SEQ ID NO: 81183 - protein, 7 aa, synthetic construct
AGNNVNQ

SEQ ID NO: 81184 - protein, 7 aa, synthetic construct
KGSGITD

SEQ ID NO: 81185 - protein, 7 aa, synthetic construct
LDRFNQA

SEQ ID NO: 81186 - protein, 7 aa, synthetic construct
RPVTGSA

SEQ ID NO: 81187 - protein, 7 aa, synthetic construct
RGSALQF

SEQ ID NO: 81188 - protein, 7 aa, synthetic construct
MPTKGDQ

SEQ ID NO: 81189 - protein, 7 aa, synthetic construct
SGHQLGP

SEQ ID NO: 81190 - protein, 7 aa, synthetic construct
NTIDNRS

SEQ ID NO: 81191 - protein, 7 aa, synthetic construct
ARQPDKE

SEQ ID NO: 81192 - protein, 7 aa, synthetic construct
YTPASQQ

SEQ ID NO: 81193 - protein, 7 aa, synthetic construct
NMNKQDN

SEQ ID NO: 81194 - protein, 7 aa, synthetic construct
LSHRTMA

SEQ ID NO: 81195 - protein, 7 aa, synthetic construct
RDIRKTE

SEQ ID NO: 81196 - protein, 7 aa, synthetic construct
HNSGIAE

SEQ ID NO: 81197 - protein, 7 aa, synthetic construct
VRIAMDE

SEQ ID NO: 81198 - protein, 7 aa, synthetic construct
HQMKRDT

SEQ ID NO: 81199 - protein, 7 aa, synthetic construct
GSKQAMM

SEQ ID NO: 81200 - protein, 7 aa, synthetic construct
GMSQRVV

SEQ ID NO: 81201 - protein, 7 aa, synthetic construct
YQGIYVS

SEQ ID NO: 81202 - protein, 7 aa, synthetic construct
RNLNEAS

SEQ ID NO: 81203 - protein, 7 aa, synthetic construct
DRKPSHS

SEQ ID NO: 81204 - protein, 7 aa, synthetic construct
FSPKSYQ

SEQ ID NO: 81205 - protein, 7 aa, synthetic construct
PNVSTMD

SEQ ID NO: 81206 - protein, 7 aa, synthetic construct
FGVEINS

SEQ ID NO: 81207 - protein, 7 aa, synthetic construct
TGARNQS

SEQ ID NO: 81208 - protein, 7 aa, synthetic construct
WGQTRMT

SEQ ID NO: 81209 - protein, 7 aa, synthetic construct
KHTAQDK

SEQ ID NO: 81210 - protein, 7 aa, synthetic construct
FAAYTSK

SEQ ID NO: 81211 - protein, 7 aa, synthetic construct
STKGDST

SEQ ID NO: 81212 - protein, 7 aa, synthetic construct
SKQYSQA

SEQ ID NO: 81213 - protein, 7 aa, synthetic construct
IQNVAVV

SEQ ID NO: 81214 - protein, 7 aa, synthetic construct
KGNEMKV

SEQ ID NO: 81215 - protein, 7 aa, synthetic construct
DRMKEVE

SEQ ID NO: 81216 - protein, 7 aa, synthetic construct
QSRNGNP

SEQ ID NO: 81217 - protein, 7 aa, synthetic construct
LHTGLIP

SEQ ID NO: 81218 - protein, 7 aa, synthetic construct
FIQGVTS

SEQ ID NO: 81219 - protein, 7 aa, synthetic construct
FERHGID

SEQ ID NO: 81220 - protein, 7 aa, synthetic construct
SGGPNGY

SEQ ID NO: 81221 - protein, 7 aa, synthetic construct
KQASNNA

SEQ ID NO: 81222 - protein, 7 aa, synthetic construct
IVSIQMG

SEQ ID NO: 81223 - protein, 7 aa, synthetic construct
KTGWDDV

SEQ ID NO: 81224 - protein, 7 aa, synthetic construct
GVNANRA

SEQ ID NO: 81225 - protein, 7 aa, synthetic construct
LSNIASI

SEQ ID NO: 81226 - protein, 7 aa, synthetic construct
IKNDQTF

SEQ ID NO: 81227 - protein, 7 aa, synthetic construct
IPAPGDR

SEQ ID NO: 81228 - protein, 7 aa, synthetic construct
MEKGKDF

SEQ ID NO: 81229 - protein, 7 aa, synthetic construct
KNVPQSA

SEQ ID NO: 81230 - protein, 7 aa, synthetic construct
AERRIGM

SEQ ID NO: 81231 - protein, 7 aa, synthetic construct
FLETMPY

SEQ ID NO: 81232 - protein, 7 aa, synthetic construct
KVLKGTE

SEQ ID NO: 81233 - protein, 7 aa, synthetic construct
QTQKNGY

SEQ ID NO: 81234 - protein, 7 aa, synthetic construct
VQMKGQM

SEQ ID NO: 81235 - protein, 7 aa, synthetic construct
HRPAKEP

SEQ ID NO: 81236 - protein, 7 aa, synthetic construct
GMRNHTY

SEQ ID NO: 81237 - protein, 7 aa, synthetic construct
WKPIRQD

SEQ ID NO: 81238 - protein, 7 aa, synthetic construct
VHSPMIG

SEQ ID NO: 81239 - protein, 7 aa, synthetic construct
GLKPTSM

SEQ ID NO: 81240 - protein, 7 aa, synthetic construct
RTGNVVF

SEQ ID NO: 81241 - protein, 7 aa, synthetic construct
GTASGRP

SEQ ID NO: 81242 - protein, 7 aa, synthetic construct
PGTQQLI

SEQ ID NO: 81243 - protein, 7 aa, synthetic construct
WRTSQPA

SEQ ID NO: 81244 - protein, 7 aa, synthetic construct
TIAANTG

SEQ ID NO: 81245 - protein, 7 aa, synthetic construct
TGQNKAP

SEQ ID NO: 81246 - protein, 7 aa, synthetic construct
HRTPHVG

SEQ ID NO: 81247 - protein, 7 aa, synthetic construct
WIKTIDN

SEQ ID NO: 81248 - protein, 7 aa, synthetic construct
QEGQINR

SEQ ID NO: 81249 - protein, 7 aa, synthetic construct
NNKGKDG

SEQ ID NO: 81250 - protein, 7 aa, synthetic construct
VNPKASA

SEQ ID NO: 81251 - protein, 7 aa, synthetic construct
GPDYRQA

SEQ ID NO: 81252 - protein, 7 aa, synthetic construct
KQMKERD

SEQ ID NO: 81253 - protein, 7 aa, synthetic construct
REYKQDA

SEQ ID NO: 81254 - protein, 7 aa, synthetic construct
QFPQSFS

SEQ ID NO: 81255 - protein, 7 aa, synthetic construct
MLERVNR

SEQ ID NO: 81256 - protein, 7 aa, synthetic construct
ETQHTHI

SEQ ID NO: 81257 - protein, 7 aa, synthetic construct
QKPPEKH

SEQ ID NO: 81258 - protein, 7 aa, synthetic construct
LPRNEKL

SEQ ID NO: 81259 - protein, 7 aa, synthetic construct
IKPIIVA

SEQ ID NO: 81260 - protein, 7 aa, synthetic construct
NNKMVIG

SEQ ID NO: 81261 - protein, 7 aa, synthetic construct
DAGGKAF

SEQ ID NO: 81262 - protein, 7 aa, synthetic construct
VGNARNI

SEQ ID NO: 81263 - protein, 7 aa, synthetic construct
RGYAEGN

SEQ ID NO: 81264 - protein, 7 aa, synthetic construct
GGHHVVV

SEQ ID NO: 81265 - protein, 7 aa, synthetic construct
FKRVADD

SEQ ID NO: 81266 - protein, 7 aa, synthetic construct
GMKGMYS

SEQ ID NO: 81267 - protein, 7 aa, synthetic construct
PRHKEPG

SEQ ID NO: 81268 - protein, 7 aa, synthetic construct
ATQDVKN

SEQ ID NO: 81269 - protein, 7 aa, synthetic construct
TQAHMMS

SEQ ID NO: 81270 - protein, 7 aa, synthetic construct
NVMGMGG

SEQ ID NO: 81271 - protein, 7 aa, synthetic construct
NYNKPIN

SEQ ID NO: 81272 - protein, 7 aa, synthetic construct
GRWETPD

SEQ ID NO: 81273 - protein, 7 aa, synthetic construct
HTGMVRM

SEQ ID NO: 81274 - protein, 7 aa, synthetic construct
VHNVRYE

SEQ ID NO: 81275 - protein, 7 aa, synthetic construct
GNFLVVE

SEQ ID NO: 81276 - protein, 7 aa, synthetic construct
FRPGMIA

SEQ ID NO: 81277 - protein, 7 aa, synthetic construct
AMNKHAF

SEQ ID NO: 81278 - protein, 7 aa, synthetic construct
QFPPLQA

SEQ ID NO: 81279 - protein, 7 aa, synthetic construct
QQVLRIE

SEQ ID NO: 81280 - protein, 7 aa, synthetic construct
DKPHHFK

SEQ ID NO: 81281 - protein, 7 aa, synthetic construct
SEIIKYS

SEQ ID NO: 81282 - protein, 7 aa, synthetic construct
QNRLIND

SEQ ID NO: 81283 - protein, 7 aa, synthetic construct
EHQRPPF

SEQ ID NO: 81284 - protein, 7 aa, synthetic construct
NSGLQGI

SEQ ID NO: 81285 - protein, 7 aa, synthetic construct
HRVKFDA

SEQ ID NO: 81286 - protein, 7 aa, synthetic construct
PYGRKDD

SEQ ID NO: 81287 - protein, 7 aa, synthetic construct
NKTMARD

SEQ ID NO: 81288 - protein, 7 aa, synthetic construct
QKKDNEV

SEQ ID NO: 81289 - protein, 7 aa, synthetic construct
LTSGRQG

SEQ ID NO: 81290 - protein, 7 aa, synthetic construct
DGKNSQS

SEQ ID NO: 81291 - protein, 7 aa, synthetic construct
NIGLKGD

SEQ ID NO: 81292 - protein, 7 aa, synthetic construct
FAGKPMF

SEQ ID NO: 81293 - protein, 7 aa, synthetic construct
PEHPLKG

SEQ ID NO: 81294 - protein, 7 aa, synthetic construct
TPYHLNV

SEQ ID NO: 81295 - protein, 7 aa, synthetic construct
QESTLRG

SEQ ID NO: 81296 - protein, 7 aa, synthetic construct
GGGGQNG

SEQ ID NO: 81297 - protein, 7 aa, synthetic construct
RPHGMQM

SEQ ID NO: 81298 - protein, 7 aa, synthetic construct
INTRNDH

SEQ ID NO: 81299 - protein, 7 aa, synthetic construct
AEYTAKA

SEQ ID NO: 81300 - protein, 7 aa, synthetic construct
TVLQTPH

SEQ ID NO: 81301 - protein, 7 aa, synthetic construct
SRPNLQH

SEQ ID NO: 81302 - protein, 7 aa, synthetic construct
AWDGMRA

SEQ ID NO: 81303 - protein, 7 aa, synthetic construct
AEAKNPK

SEQ ID NO: 81304 - protein, 7 aa, synthetic construct
AYQKMQA

SEQ ID NO: 81305 - protein, 7 aa, synthetic construct
FSAQLLP

SEQ ID NO: 81306 - protein, 7 aa, synthetic construct
GYSKAEV

SEQ ID NO: 81307 - protein, 7 aa, synthetic construct
YANVAHE

SEQ ID NO: 81308 - protein, 7 aa, synthetic construct
SLVSTHP

SEQ ID NO: 81309 - protein, 7 aa, synthetic construct
FRKELMH

SEQ ID NO: 81310 - protein, 7 aa, synthetic construct
HNLRDVM

SEQ ID NO: 81311 - protein, 7 aa, synthetic construct
PYAPIAG

SEQ ID NO: 81312 - protein, 7 aa, synthetic construct
AYTQEVR

SEQ ID NO: 81313 - protein, 7 aa, synthetic construct
FAPGMGY

SEQ ID NO: 81314 - protein, 7 aa, synthetic construct
GKAETTS

SEQ ID NO: 81315 - protein, 7 aa, synthetic construct
MSQKFGM

SEQ ID NO: 81316 - protein, 7 aa, synthetic construct
GSVMVPG

SEQ ID NO: 81317 - protein, 7 aa, synthetic construct
ILRDHTG

SEQ ID NO: 81318 - protein, 7 aa, synthetic construct
GGEQVKP

SEQ ID NO: 81319 - protein, 7 aa, synthetic construct
VSNVRGP

SEQ ID NO: 81320 - protein, 7 aa, synthetic construct
ADHHASA

SEQ ID NO: 81321 - protein, 7 aa, synthetic construct
SFKAMKD

SEQ ID NO: 81322 - protein, 7 aa, synthetic construct
TANVHGN

SEQ ID NO: 81323 - protein, 7 aa, synthetic construct
KYNNGNP

SEQ ID NO: 81324 - protein, 7 aa, synthetic construct
MNNAGQR

SEQ ID NO: 81325 - protein, 7 aa, synthetic construct
DGGRQIP

SEQ ID NO: 81326 - protein, 7 aa, synthetic construct
KQPNQGA

SEQ ID NO: 81327 - protein, 7 aa, synthetic construct
PKSETLY

SEQ ID NO: 81328 - protein, 7 aa, synthetic construct
AGARDIA

SEQ ID NO: 81329 - protein, 7 aa, synthetic construct
GMLSKPM

SEQ ID NO: 81330 - protein, 7 aa, synthetic construct
TQPMTMV

SEQ ID NO: 81331 - protein, 7 aa, synthetic construct
RSISGFV

SEQ ID NO: 81332 - protein, 7 aa, synthetic construct
EREKPWI

SEQ ID NO: 81333 - protein, 7 aa, synthetic construct
STESHFA

SEQ ID NO: 81334 - protein, 7 aa, synthetic construct
FGLITSH

SEQ ID NO: 81335 - protein, 7 aa, synthetic construct
GNLRSVE

SEQ ID NO: 81336 - protein, 7 aa, synthetic construct
GKNTAIG

SEQ ID NO: 81337 - protein, 7 aa, synthetic construct
NWKQNGS

SEQ ID NO: 81338 - protein, 7 aa, synthetic construct
DPRTTYI

SEQ ID NO: 81339 - protein, 7 aa, synthetic construct
HQVAGLT

SEQ ID NO: 81340 - protein, 7 aa, synthetic construct
PVGGSPV

SEQ ID NO: 81341 - protein, 7 aa, synthetic construct
NLADMHR

SEQ ID NO: 81342 - protein, 7 aa, synthetic construct
YGHDAGY

SEQ ID NO: 81343 - protein, 7 aa, synthetic construct
YNSVTQI

SEQ ID NO: 81344 - protein, 7 aa, synthetic construct
RSNLQID

SEQ ID NO: 81345 - protein, 7 aa, synthetic construct
LKDLEHN

SEQ ID NO: 81346 - protein, 7 aa, synthetic construct
NVSPGLG

SEQ ID NO: 81347 - protein, 7 aa, synthetic construct
DIIKKAS

SEQ ID NO: 81348 - protein, 7 aa, synthetic construct
IGHFEEK

SEQ ID NO: 81349 - protein, 7 aa, synthetic construct
QVGQRDV

SEQ ID NO: 81350 - protein, 7 aa, synthetic construct
TNHILAH

SEQ ID NO: 81351 - protein, 7 aa, synthetic construct
IKNWDST

SEQ ID NO: 81352 - protein, 7 aa, synthetic construct
IGHYLPQ

SEQ ID NO: 81353 - protein, 7 aa, synthetic construct
HGSITTL

SEQ ID NO: 81354 - protein, 7 aa, synthetic construct
VPMVVSK

SEQ ID NO: 81355 - protein, 7 aa, synthetic construct
GKPNPQV

SEQ ID NO: 81356 - protein, 7 aa, synthetic construct
WGRDAVM

SEQ ID NO: 81357 - protein, 7 aa, synthetic construct
VRPNDRT

SEQ ID NO: 81358 - protein, 7 aa, synthetic construct
AEHWKEN

SEQ ID NO: 81359 - protein, 7 aa, synthetic construct
LASMYTA

SEQ ID NO: 81360 - protein, 7 aa, synthetic construct
MNQEKTT

SEQ ID NO: 81361 - protein, 7 aa, synthetic construct
RQQDNVS

SEQ ID NO: 81362 - protein, 7 aa, synthetic construct
NKALVGQ

SEQ ID NO: 81363 - protein, 7 aa, synthetic construct
NQGQLRY

SEQ ID NO: 81364 - protein, 7 aa, synthetic construct
WRDNVRT

SEQ ID NO: 81365 - protein, 7 aa, synthetic construct
QQVGHFV

SEQ ID NO: 81366 - protein, 7 aa, synthetic construct
KPKDNYA

SEQ ID NO: 81367 - protein, 7 aa, synthetic construct
DHQKTKT

SEQ ID NO: 81368 - protein, 7 aa, synthetic construct
GSGLHRS

SEQ ID NO: 81369 - protein, 7 aa, synthetic construct
HQSMKAY

SEQ ID NO: 81370 - protein, 7 aa, synthetic construct
KDNHKPP

SEQ ID NO: 81371 - protein, 7 aa, synthetic construct
QIHMHSP

SEQ ID NO: 81372 - protein, 7 aa, synthetic construct
YSDFRKE

SEQ ID NO: 81373 - protein, 7 aa, synthetic construct
GNSMALH

SEQ ID NO: 81374 - protein, 7 aa, synthetic construct
DVWKSKG

SEQ ID NO: 81375 - protein, 7 aa, synthetic construct
VTHVNDP

SEQ ID NO: 81376 - protein, 7 aa, synthetic construct
NLPREIS

SEQ ID NO: 81377 - protein, 7 aa, synthetic construct
MKDQAKW

SEQ ID NO: 81378 - protein, 7 aa, synthetic construct
KPTGYME

SEQ ID NO: 81379 - protein, 7 aa, synthetic construct
RVPPTAD

SEQ ID NO: 81380 - protein, 7 aa, synthetic construct
NKANGGG

SEQ ID NO: 81381 - protein, 7 aa, synthetic construct
PRTSQLD

SEQ ID NO: 81382 - protein, 7 aa, synthetic construct
KVPPMQP

SEQ ID NO: 81383 - protein, 7 aa, synthetic construct
NGSKYIY

SEQ ID NO: 81384 - protein, 7 aa, synthetic construct
GFGPAAV

SEQ ID NO: 81385 - protein, 7 aa, synthetic construct
GNVGNSI

SEQ ID NO: 81386 - protein, 7 aa, synthetic construct
REGNSSS

SEQ ID NO: 81387 - protein, 7 aa, synthetic construct
SYREGYA

SEQ ID NO: 81388 - protein, 7 aa, synthetic construct
SITSMVD

SEQ ID NO: 81389 - protein, 7 aa, synthetic construct
PETMVKF

SEQ ID NO: 81390 - protein, 7 aa, synthetic construct
TSKHAQD

SEQ ID NO: 81391 - protein, 7 aa, synthetic construct
GDHYKTG

SEQ ID NO: 81392 - protein, 7 aa, synthetic construct
NMKFPEW

SEQ ID NO: 81393 - protein, 7 aa, synthetic construct
NPKVEAG

SEQ ID NO: 81394 - protein, 7 aa, synthetic construct
DMSKADF

SEQ ID NO: 81395 - protein, 7 aa, synthetic construct
YVYDKQG

SEQ ID NO: 81396 - protein, 7 aa, synthetic construct
ALHHNDL

SEQ ID NO: 81397 - protein, 7 aa, synthetic construct
VKVNTQG

SEQ ID NO: 81398 - protein, 7 aa, synthetic construct
QKAGLNT

SEQ ID NO: 81399 - protein, 7 aa, synthetic construct
YRQRPDS

SEQ ID NO: 81400 - protein, 7 aa, synthetic construct
INGQRQA

SEQ ID NO: 81401 - protein, 7 aa, synthetic construct
DFPKRID

SEQ ID NO: 81402 - protein, 7 aa, synthetic construct
DNYRTER

SEQ ID NO: 81403 - protein, 7 aa, synthetic construct
SAAQYKY

SEQ ID NO: 81404 - protein, 7 aa, synthetic construct
ARMPGFV

SEQ ID NO: 81405 - protein, 7 aa, synthetic construct
WQHQTHT

SEQ ID NO: 81406 - protein, 7 aa, synthetic construct
QKDINLM

SEQ ID NO: 81407 - protein, 7 aa, synthetic construct
GAFGYNP

SEQ ID NO: 81408 - protein, 7 aa, synthetic construct
ITHSNPH

SEQ ID NO: 81409 - protein, 7 aa, synthetic construct
KDGGKFS

SEQ ID NO: 81410 - protein, 7 aa, synthetic construct
TARGDAY

SEQ ID NO: 81411 - protein, 7 aa, synthetic construct
TRGYNTQ

SEQ ID NO: 81412 - protein, 7 aa, synthetic construct
HTALPAL

SEQ ID NO: 81413 - protein, 7 aa, synthetic construct
QRSPIGP

SEQ ID NO: 81414 - protein, 7 aa, synthetic construct
KGEHFQM

SEQ ID NO: 81415 - protein, 7 aa, synthetic construct
VRNIHYE

SEQ ID NO: 81416 - protein, 7 aa, synthetic construct
YRDNHNT

SEQ ID NO: 81417 - protein, 7 aa, synthetic construct
GMPDMAR

SEQ ID NO: 81418 - protein, 7 aa, synthetic construct
YKPMNKE

SEQ ID NO: 81419 - protein, 7 aa, synthetic construct
MQNNVRF

SEQ ID NO: 81420 - protein, 7 aa, synthetic construct
PVSKELK

SEQ ID NO: 81421 - protein, 7 aa, synthetic construct
FSTVRNE

SEQ ID NO: 81422 - protein, 7 aa, synthetic construct
YMHTRLA

SEQ ID NO: 81423 - protein, 7 aa, synthetic construct
VNHKTDG

SEQ ID NO: 81424 - protein, 7 aa, synthetic construct
GTGMVNI

SEQ ID NO: 81425 - protein, 7 aa, synthetic construct
TVPIHGH

SEQ ID NO: 81426 - protein, 7 aa, synthetic construct
KNHATSP

SEQ ID NO: 81427 - protein, 7 aa, synthetic construct
TGHFRID

SEQ ID NO: 81428 - protein, 7 aa, synthetic construct
QKVAMFN

SEQ ID NO: 81429 - protein, 7 aa, synthetic construct
TAATTMQ

SEQ ID NO: 81430 - protein, 7 aa, synthetic construct
GKNWQAD

SEQ ID NO: 81431 - protein, 7 aa, synthetic construct
GVIGPKL

SEQ ID NO: 81432 - protein, 7 aa, synthetic construct
KMNQSYI

SEQ ID NO: 81433 - protein, 7 aa, synthetic construct
MAAGKQA

SEQ ID NO: 81434 - protein, 7 aa, synthetic construct
NTHLAMP

SEQ ID NO: 81435 - protein, 7 aa, synthetic construct
KDHKYMV

SEQ ID NO: 81436 - protein, 7 aa, synthetic construct
HMKGDTY

SEQ ID NO: 81437 - protein, 7 aa, synthetic construct
MQANATH

SEQ ID NO: 81438 - protein, 7 aa, synthetic construct
GKQMSNS

SEQ ID NO: 81439 - protein, 7 aa, synthetic construct
RGDKNTM

SEQ ID NO: 81440 - protein, 7 aa, synthetic construct
PKQLNSM

SEQ ID NO: 81441 - protein, 7 aa, synthetic construct
INKFGAN

SEQ ID NO: 81442 - protein, 7 aa, synthetic construct
ATSSPYR

SEQ ID NO: 81443 - protein, 7 aa, synthetic construct
RNGHEHS

SEQ ID NO: 81444 - protein, 7 aa, synthetic construct
MNPAAAM

SEQ ID NO: 81445 - protein, 7 aa, synthetic construct
DRQHNID

SEQ ID NO: 81446 - protein, 7 aa, synthetic construct
DHKDSKN

SEQ ID NO: 81447 - protein, 7 aa, synthetic construct
QPGTHSS

SEQ ID NO: 81448 - protein, 7 aa, synthetic construct
PATSQGW

SEQ ID NO: 81449 - protein, 7 aa, synthetic construct
RNLDMTK

SEQ ID NO: 81450 - protein, 7 aa, synthetic construct
IMWKENT

SEQ ID NO: 81451 - protein, 7 aa, synthetic construct
SHSITRV

SEQ ID NO: 81452 - protein, 7 aa, synthetic construct
LHTQANV

SEQ ID NO: 81453 - protein, 7 aa, synthetic construct
VQFKNSY

SEQ ID NO: 81454 - protein, 7 aa, synthetic construct
LPYHQSD

SEQ ID NO: 81455 - protein, 7 aa, synthetic construct
THTADQA

SEQ ID NO: 81456 - protein, 7 aa, synthetic construct
KTSPSVS

SEQ ID NO: 81457 - protein, 7 aa, synthetic construct
GKQSLSA

SEQ ID NO: 81458 - protein, 7 aa, synthetic construct
EQIPMRK

SEQ ID NO: 81459 - protein, 7 aa, synthetic construct
ITRKDDY

SEQ ID NO: 81460 - protein, 7 aa, synthetic construct
RWDSAKP

SEQ ID NO: 81461 - protein, 7 aa, synthetic construct
DGTMGKV

SEQ ID NO: 81462 - protein, 7 aa, synthetic construct
GHQQPAY

SEQ ID NO: 81463 - protein, 7 aa, synthetic construct
VHKIEKA

SEQ ID NO: 81464 - protein, 7 aa, synthetic construct
FAYSTAE

SEQ ID NO: 81465 - protein, 7 aa, synthetic construct
NVQGSAA

SEQ ID NO: 81466 - protein, 7 aa, synthetic construct
PLLKSLG

SEQ ID NO: 81467 - protein, 7 aa, synthetic construct
ILRADKQ

SEQ ID NO: 81468 - protein, 7 aa, synthetic construct
TPARDRA

SEQ ID NO: 81469 - protein, 7 aa, synthetic construct
RGDQQNK

SEQ ID NO: 81470 - protein, 7 aa, synthetic construct
AKAAQVT

SEQ ID NO: 81471 - protein, 7 aa, synthetic construct
KQVREGH

SEQ ID NO: 81472 - protein, 7 aa, synthetic construct
PNKFVEP

SEQ ID NO: 81473 - protein, 7 aa, synthetic construct
DNPHHQK

SEQ ID NO: 81474 - protein, 7 aa, synthetic construct
NGPRTGA

SEQ ID NO: 81475 - protein, 7 aa, synthetic construct
LHKGVVN

SEQ ID NO: 81476 - protein, 7 aa, synthetic construct
RDHKTQT

SEQ ID NO: 81477 - protein, 7 aa, synthetic construct
IFNGPTM

SEQ ID NO: 81478 - protein, 7 aa, synthetic construct
HRTDSLA

SEQ ID NO: 81479 - protein, 7 aa, synthetic construct
GVNNKQA

SEQ ID NO: 81480 - protein, 7 aa, synthetic construct
SQRAGTA

SEQ ID NO: 81481 - protein, 7 aa, synthetic construct
QQMGARA

SEQ ID NO: 81482 - protein, 7 aa, synthetic construct
SDRHQQF

SEQ ID NO: 81483 - protein, 7 aa, synthetic construct
YAGNVNG

SEQ ID NO: 81484 - protein, 7 aa, synthetic construct
KNNASNG

SEQ ID NO: 81485 - protein, 7 aa, synthetic construct
QKNPGAP

SEQ ID NO: 81486 - protein, 7 aa, synthetic construct
SAVKVMG

SEQ ID NO: 81487 - protein, 7 aa, synthetic construct
GGPHVND

SEQ ID NO: 81488 - protein, 7 aa, synthetic construct
SGHLLAV

SEQ ID NO: 81489 - protein, 7 aa, synthetic construct
RMGVSTL

SEQ ID NO: 81490 - protein, 7 aa, synthetic construct
QKSPSGG

SEQ ID NO: 81491 - protein, 7 aa, synthetic construct
HKGSPPH

SEQ ID NO: 81492 - protein, 7 aa, synthetic construct
KTQPMKD

SEQ ID NO: 81493 - protein, 7 aa, synthetic construct
KQEPYGM

SEQ ID NO: 81494 - protein, 7 aa, synthetic construct
VDYKSML

SEQ ID NO: 81495 - protein, 7 aa, synthetic construct
DILHMSS

SEQ ID NO: 81496 - protein, 7 aa, synthetic construct
YGGWQKD

SEQ ID NO: 81497 - protein, 7 aa, synthetic construct
WQHIGVA

SEQ ID NO: 81498 - protein, 7 aa, synthetic construct
IPTKVSP

SEQ ID NO: 81499 - protein, 7 aa, synthetic construct
GSEFRNS

SEQ ID NO: 81500 - protein, 7 aa, synthetic construct
MFEINQK

SEQ ID NO: 81501 - protein, 7 aa, synthetic construct
NTQWQEG

SEQ ID NO: 81502 - protein, 7 aa, synthetic construct
MSASVGL

SEQ ID NO: 81503 - protein, 7 aa, synthetic construct
AERRHSE

SEQ ID NO: 81504 - protein, 7 aa, synthetic construct
TQDIHVV

SEQ ID NO: 81505 - protein, 7 aa, synthetic construct
GKGNSMA

SEQ ID NO: 81506 - protein, 7 aa, synthetic construct
FVQDVVN

SEQ ID NO: 81507 - protein, 7 aa, synthetic construct
HTKAGDY

SEQ ID NO: 81508 - protein, 7 aa, synthetic construct
LHNNWPS

SEQ ID NO: 81509 - protein, 7 aa, synthetic construct
QTQQKGH

SEQ ID NO: 81510 - protein, 7 aa, synthetic construct
EQKLAGG

SEQ ID NO: 81511 - protein, 7 aa, synthetic construct
NADIGHP

SEQ ID NO: 81512 - protein, 7 aa, synthetic construct
NKTAPGM

SEQ ID NO: 81513 - protein, 7 aa, synthetic construct
HTAQTTQ

SEQ ID NO: 81514 - protein, 7 aa, synthetic construct
PPNYRPT

SEQ ID NO: 81515 - protein, 7 aa, synthetic construct
GEKNRSN

SEQ ID NO: 81516 - protein, 7 aa, synthetic construct
YQPTVVA

SEQ ID NO: 81517 - protein, 7 aa, synthetic construct
QEAVLRR

SEQ ID NO: 81518 - protein, 7 aa, synthetic construct
TDKLSQN

SEQ ID NO: 81519 - protein, 7 aa, synthetic construct
KIQQNHY

SEQ ID NO: 81520 - protein, 7 aa, synthetic construct
SNKANTV

SEQ ID NO: 81521 - protein, 7 aa, synthetic construct
ISIANLD

SEQ ID NO: 81522 - protein, 7 aa, synthetic construct
HIGQFPA

SEQ ID NO: 81523 - protein, 7 aa, synthetic construct
GYKEGAS

SEQ ID NO: 81524 - protein, 7 aa, synthetic construct
KQYQQDT

SEQ ID NO: 81525 - protein, 7 aa, synthetic construct
GDPLSLK

SEQ ID NO: 81526 - protein, 7 aa, synthetic construct
KMANASA

SEQ ID NO: 81527 - protein, 7 aa, synthetic construct
VVLQRTE

SEQ ID NO: 81528 - protein, 7 aa, synthetic construct
YVLRSDV

SEQ ID NO: 81529 - protein, 7 aa, synthetic construct
TRGKPEH

SEQ ID NO: 81530 - protein, 7 aa, synthetic construct
EVSRGHH

SEQ ID NO: 81531 - protein, 7 aa, synthetic construct
IALTAQA

SEQ ID NO: 81532 - protein, 7 aa, synthetic construct
VERIMLA

SEQ ID NO: 81533 - protein, 7 aa, synthetic construct
SYIRADK

SEQ ID NO: 81534 - protein, 7 aa, synthetic construct
NPNYGSS

SEQ ID NO: 81535 - protein, 7 aa, synthetic construct
MMKSVEG

SEQ ID NO: 81536 - protein, 7 aa, synthetic construct
GVNQYKA

SEQ ID NO: 81537 - protein, 7 aa, synthetic construct
ARISGSF

SEQ ID NO: 81538 - protein, 7 aa, synthetic construct
TQVSITG

SEQ ID NO: 81539 - protein, 7 aa, synthetic construct
NHMDKKL

SEQ ID NO: 81540 - protein, 7 aa, synthetic construct
KHGMKQD

SEQ ID NO: 81541 - protein, 7 aa, synthetic construct
ISLNLPQ

SEQ ID NO: 81542 - protein, 7 aa, synthetic construct
WKPLDTL

SEQ ID NO: 81543 - protein, 7 aa, synthetic construct
FEEKMYF

SEQ ID NO: 81544 - protein, 7 aa, synthetic construct
IDFPREG

SEQ ID NO: 81545 - protein, 7 aa, synthetic construct
QATKGVP

SEQ ID NO: 81546 - protein, 7 aa, synthetic construct
DSQRVRD

SEQ ID NO: 81547 - protein, 7 aa, synthetic construct
HMLQSKG

SEQ ID NO: 81548 - protein, 7 aa, synthetic construct
INKDYRY

SEQ ID NO: 81549 - protein, 7 aa, synthetic construct
DHMGRAA

SEQ ID NO: 81550 - protein, 7 aa, synthetic construct
SYNPTGK

SEQ ID NO: 81551 - protein, 7 aa, synthetic construct
TTGSNLI

SEQ ID NO: 81552 - protein, 7 aa, synthetic construct
VQLQNNA

SEQ ID NO: 81553 - protein, 7 aa, synthetic construct
QIVFSQE

SEQ ID NO: 81554 - protein, 7 aa, synthetic construct
YVKQAVT

SEQ ID NO: 81555 - protein, 7 aa, synthetic construct
THHKFGA

SEQ ID NO: 81556 - protein, 7 aa, synthetic construct
AKAATAN

SEQ ID NO: 81557 - protein, 7 aa, synthetic construct
ITPMKNF

SEQ ID NO: 81558 - protein, 7 aa, synthetic construct
KQYQNLP

SEQ ID NO: 81559 - protein, 7 aa, synthetic construct
ALLTVQA

SEQ ID NO: 81560 - protein, 7 aa, synthetic construct
QKYSTGG

SEQ ID NO: 81561 - protein, 7 aa, synthetic construct
ERRQVEE

SEQ ID NO: 81562 - protein, 7 aa, synthetic construct
IDHPSQR

SEQ ID NO: 81563 - protein, 7 aa, synthetic construct
ASIAGKA

SEQ ID NO: 81564 - protein, 7 aa, synthetic construct
HMNKVAY

SEQ ID NO: 81565 - protein, 7 aa, synthetic construct
PQHVKNV

SEQ ID NO: 81566 - protein, 7 aa, synthetic construct
RIIGGMN

SEQ ID NO: 81567 - protein, 7 aa, synthetic construct
MNDYKNF

SEQ ID NO: 81568 - protein, 7 aa, synthetic construct
INPTGSW

SEQ ID NO: 81569 - protein, 7 aa, synthetic construct
GFGLGSH

SEQ ID NO: 81570 - protein, 7 aa, synthetic construct
TPWTPEK

SEQ ID NO: 81571 - protein, 7 aa, synthetic construct
SGDVKVG

SEQ ID NO: 81572 - protein, 7 aa, synthetic construct
ITTNWEG

SEQ ID NO: 81573 - protein, 7 aa, synthetic construct
TTAPGFL

SEQ ID NO: 81574 - protein, 7 aa, synthetic construct
EHPHLFA

SEQ ID NO: 81575 - protein, 7 aa, synthetic construct
QMIPSQG

SEQ ID NO: 81576 - protein, 7 aa, synthetic construct
PNITMAH

SEQ ID NO: 81577 - protein, 7 aa, synthetic construct
PTYHTSE

SEQ ID NO: 81578 - protein, 7 aa, synthetic construct
HVNQSSM

SEQ ID NO: 81579 - protein, 7 aa, synthetic construct
MFKGFNP

SEQ ID NO: 81580 - protein, 7 aa, synthetic construct
TGVQQMV

SEQ ID NO: 81581 - protein, 7 aa, synthetic construct
RMNPMDA

SEQ ID NO: 81582 - protein, 7 aa, synthetic construct
QRSIHIV

SEQ ID NO: 81583 - protein, 7 aa, synthetic construct
DVSWKVS

SEQ ID NO: 81584 - protein, 7 aa, synthetic construct
VSQEKKM

SEQ ID NO: 81585 - protein, 7 aa, synthetic construct
QTPMTGL

SEQ ID NO: 81586 - protein, 7 aa, synthetic construct
GHNVTKM

SEQ ID NO: 81587 - protein, 7 aa, synthetic construct
HQETIHV

SEQ ID NO: 81588 - protein, 7 aa, synthetic construct
DRNDKAF

SEQ ID NO: 81589 - protein, 7 aa, synthetic construct
DQRRETQ

SEQ ID NO: 81590 - protein, 7 aa, synthetic construct
KIDRYQA

SEQ ID NO: 81591 - protein, 7 aa, synthetic construct
NKTAGAA

SEQ ID NO: 81592 - protein, 7 aa, synthetic construct
LPHIQQY

SEQ ID NO: 81593 - protein, 7 aa, synthetic construct
LHKDHLQ

SEQ ID NO: 81594 - protein, 7 aa, synthetic construct
FHNDLRP

SEQ ID NO: 81595 - protein, 7 aa, synthetic construct
AIPAHQI

SEQ ID NO: 81596 - protein, 7 aa, synthetic construct
PRFSSPD

SEQ ID NO: 81597 - protein, 7 aa, synthetic construct
YYSSKQT

SEQ ID NO: 81598 - protein, 7 aa, synthetic construct
ALFHGGP

SEQ ID NO: 81599 - protein, 7 aa, synthetic construct
VSEWKAM

SEQ ID NO: 81600 - protein, 7 aa, synthetic construct
LREWNPE

SEQ ID NO: 81601 - protein, 7 aa, synthetic construct
NRDMKLP

SEQ ID NO: 81602 - protein, 7 aa, synthetic construct
FTMRSQE

SEQ ID NO: 81603 - protein, 7 aa, synthetic construct
SEIAGRR

SEQ ID NO: 81604 - protein, 7 aa, synthetic construct
ISQASLH

SEQ ID NO: 81605 - protein, 7 aa, synthetic construct
QTGDTQK

SEQ ID NO: 81606 - protein, 7 aa, synthetic construct
KVQNTHD

SEQ ID NO: 81607 - protein, 7 aa, synthetic construct
MGAQAIK

SEQ ID NO: 81608 - protein, 7 aa, synthetic construct
NFNVHEK

SEQ ID NO: 81609 - protein, 7 aa, synthetic construct
HITSSEW

SEQ ID NO: 81610 - protein, 7 aa, synthetic construct
ETVHPHG

SEQ ID NO: 81611 - protein, 7 aa, synthetic construct
KDHFKHD

SEQ ID NO: 81612 - protein, 7 aa, synthetic construct
AHPQERT

SEQ ID NO: 81613 - protein, 7 aa, synthetic construct
TTSAKPF

SEQ ID NO: 81614 - protein, 7 aa, synthetic construct
YQKVDLN

SEQ ID NO: 81615 - protein, 7 aa, synthetic construct
FRPERTH

SEQ ID NO: 81616 - protein, 7 aa, synthetic construct
KWHEIEL

SEQ ID NO: 81617 - protein, 7 aa, synthetic construct
TNPQTIV

SEQ ID NO: 81618 - protein, 7 aa, synthetic construct
EAGSRGT

SEQ ID NO: 81619 - protein, 7 aa, synthetic construct
SSHPISV

SEQ ID NO: 81620 - protein, 7 aa, synthetic construct
NMDNVRP

SEQ ID NO: 81621 - protein, 7 aa, synthetic construct
LQRGSAM

SEQ ID NO: 81622 - protein, 7 aa, synthetic construct
KQSEGAP

SEQ ID NO: 81623 - protein, 7 aa, synthetic construct
SKHLDEF

SEQ ID NO: 81624 - protein, 7 aa, synthetic construct
YGFAQKT

SEQ ID NO: 81625 - protein, 7 aa, synthetic construct
GKEGAAY

SEQ ID NO: 81626 - protein, 7 aa, synthetic construct
TYKEKQN

SEQ ID NO: 81627 - protein, 7 aa, synthetic construct
FAKVQGP

SEQ ID NO: 81628 - protein, 7 aa, synthetic construct
KDPGSAW

SEQ ID NO: 81629 - protein, 7 aa, synthetic construct
YKEGQQR

SEQ ID NO: 81630 - protein, 7 aa, synthetic construct
WGSALAP

SEQ ID NO: 81631 - protein, 7 aa, synthetic construct
KPNSSNP

SEQ ID NO: 81632 - protein, 7 aa, synthetic construct
SKNPGQI

SEQ ID NO: 81633 - protein, 7 aa, synthetic construct
PRTDSNS

SEQ ID NO: 81634 - protein, 7 aa, synthetic construct
LIPLQAN

SEQ ID NO: 81635 - protein, 7 aa, synthetic construct
KPSPMQS

SEQ ID NO: 81636 - protein, 7 aa, synthetic construct
ISLGGTI

SEQ ID NO: 81637 - protein, 7 aa, synthetic construct
QHMVEKL

SEQ ID NO: 81638 - protein, 7 aa, synthetic construct
KTEKNNP

SEQ ID NO: 81639 - protein, 7 aa, synthetic construct
KAQNPVS

SEQ ID NO: 81640 - protein, 7 aa, synthetic construct
LHMNSMS

SEQ ID NO: 81641 - protein, 7 aa, synthetic construct
ELTAPNK

SEQ ID NO: 81642 - protein, 7 aa, synthetic construct
MSHGTVF

SEQ ID NO: 81643 - protein, 7 aa, synthetic construct
KDSNIKG

SEQ ID NO: 81644 - protein, 7 aa, synthetic construct
DPAKFKY

SEQ ID NO: 81645 - protein, 7 aa, synthetic construct
SSMNNTR

SEQ ID NO: 81646 - protein, 7 aa, synthetic construct
RQNADPQ

SEQ ID NO: 81647 - protein, 7 aa, synthetic construct
KKDERYS

SEQ ID NO: 81648 - protein, 7 aa, synthetic construct
AGFHHQT

SEQ ID NO: 81649 - protein, 7 aa, synthetic construct
GRESIAI

SEQ ID NO: 81650 - protein, 7 aa, synthetic construct
AMGPMQE

SEQ ID NO: 81651 - protein, 7 aa, synthetic construct
RGDILVQ

SEQ ID NO: 81652 - protein, 7 aa, synthetic construct
KNDHHPG

SEQ ID NO: 81653 - protein, 7 aa, synthetic construct
RMTIRDA

SEQ ID NO: 81654 - protein, 7 aa, synthetic construct
QNMNSRN

SEQ ID NO: 81655 - protein, 7 aa, synthetic construct
FSLEGGV

SEQ ID NO: 81656 - protein, 7 aa, synthetic construct
IRANKDD

SEQ ID NO: 81657 - protein, 7 aa, synthetic construct
TILKHEW

SEQ ID NO: 81658 - protein, 7 aa, synthetic construct
ITGSKFL

SEQ ID NO: 81659 - protein, 7 aa, synthetic construct
DDKHQRP

SEQ ID NO: 81660 - protein, 7 aa, synthetic construct
SAQHSMA

SEQ ID NO: 81661 - protein, 7 aa, synthetic construct
RKIAEAN

SEQ ID NO: 81662 - protein, 7 aa, synthetic construct
MGTYQGH

SEQ ID NO: 81663 - protein, 7 aa, synthetic construct
EPERKNV

SEQ ID NO: 81664 - protein, 7 aa, synthetic construct
EHRGYQL

SEQ ID NO: 81665 - protein, 7 aa, synthetic construct
HSKYETQ

SEQ ID NO: 81666 - protein, 7 aa, synthetic construct
GLLAGYP

SEQ ID NO: 81667 - protein, 7 aa, synthetic construct
PNTMVHA

SEQ ID NO: 81668 - protein, 7 aa, synthetic construct
VQEISVS

SEQ ID NO: 81669 - protein, 7 aa, synthetic construct
PSGPSVP

SEQ ID NO: 81670 - protein, 7 aa, synthetic construct
FSKSEHG

SEQ ID NO: 81671 - protein, 7 aa, synthetic construct
KSIQHEQ

SEQ ID NO: 81672 - protein, 7 aa, synthetic construct
NQGSMIP

SEQ ID NO: 81673 - protein, 7 aa, synthetic construct
FANPPHG

SEQ ID NO: 81674 - protein, 7 aa, synthetic construct
YGENFRS

SEQ ID NO: 81675 - protein, 7 aa, synthetic construct
PLKSSSL

SEQ ID NO: 81676 - protein, 7 aa, synthetic construct
QNHVMKQ

SEQ ID NO: 81677 - protein, 7 aa, synthetic construct
NIGKDRP

SEQ ID NO: 81678 - protein, 7 aa, synthetic construct
FITTMER

SEQ ID NO: 81679 - protein, 7 aa, synthetic construct
AIGISMH

SEQ ID NO: 81680 - protein, 7 aa, synthetic construct
EMRKDQR

SEQ ID NO: 81681 - protein, 7 aa, synthetic construct
TIDKHTF

SEQ ID NO: 81682 - protein, 7 aa, synthetic construct
LKQPSGT

SEQ ID NO: 81683 - protein, 7 aa, synthetic construct
LAGMQVM

SEQ ID NO: 81684 - protein, 7 aa, synthetic construct
GIVERER

SEQ ID NO: 81685 - protein, 7 aa, synthetic construct
NPDTKQI

SEQ ID NO: 81686 - protein, 7 aa, synthetic construct
IDRFLPS

SEQ ID NO: 81687 - protein, 7 aa, synthetic construct
IKVNKVD

SEQ ID NO: 81688 - protein, 7 aa, synthetic construct
SLPGRMT

SEQ ID NO: 81689 - protein, 7 aa, synthetic construct
YGTMTVP

SEQ ID NO: 81690 - protein, 7 aa, synthetic construct
PRQDGLS

SEQ ID NO: 81691 - protein, 7 aa, synthetic construct
HNQFMNA

SEQ ID NO: 81692 - protein, 7 aa, synthetic construct
YNSLHHV

SEQ ID NO: 81693 - protein, 7 aa, synthetic construct
PQVKQLL

SEQ ID NO: 81694 - protein, 7 aa, synthetic construct
ISTDGPR

SEQ ID NO: 81695 - protein, 7 aa, synthetic construct
KEPNSKE

SEQ ID NO: 81696 - protein, 7 aa, synthetic construct
QGQPDKV

SEQ ID NO: 81697 - protein, 7 aa, synthetic construct
RHIQGLN

SEQ ID NO: 81698 - protein, 7 aa, synthetic construct
PYRVAEP

SEQ ID NO: 81699 - protein, 7 aa, synthetic construct
FQKSPSM

SEQ ID NO: 81700 - protein, 7 aa, synthetic construct
SQTHAPP

SEQ ID NO: 81701 - protein, 7 aa, synthetic construct
YKTATKE

SEQ ID NO: 81702 - protein, 7 aa, synthetic construct
RRDHGDQ

SEQ ID NO: 81703 - protein, 7 aa, synthetic construct
WVKHPKE

SEQ ID NO: 81704 - protein, 7 aa, synthetic construct
GNQIGLV

SEQ ID NO: 81705 - protein, 7 aa, synthetic construct
RATHPAI

SEQ ID NO: 81706 - protein, 7 aa, synthetic construct
MKSASQG

SEQ ID NO: 81707 - protein, 7 aa, synthetic construct
PKGTNVM

SEQ ID NO: 81708 - protein, 7 aa, synthetic construct
YQLPRPP

SEQ ID NO: 81709 - protein, 7 aa, synthetic construct
WHKVMPE

SEQ ID NO: 81710 - protein, 7 aa, synthetic construct
ILSGGLR

SEQ ID NO: 81711 - protein, 7 aa, synthetic construct
DYVIRSG

SEQ ID NO: 81712 - protein, 7 aa, synthetic construct
SHQTAPI

SEQ ID NO: 81713 - protein, 7 aa, synthetic construct
RMVDEKF

SEQ ID NO: 81714 - protein, 7 aa, synthetic construct
SGATRVT

SEQ ID NO: 81715 - protein, 7 aa, synthetic construct
KLMSDDK

SEQ ID NO: 81716 - protein, 7 aa, synthetic construct
IHKNVDY

SEQ ID NO: 81717 - protein, 7 aa, synthetic construct
MPGQMVL

SEQ ID NO: 81718 - protein, 7 aa, synthetic construct
AGPQQER

SEQ ID NO: 81719 - protein, 7 aa, synthetic construct
YPTQNMV

SEQ ID NO: 81720 - protein, 7 aa, synthetic construct
LIANRLD

SEQ ID NO: 81721 - protein, 7 aa, synthetic construct
PFKGPSL

SEQ ID NO: 81722 - protein, 7 aa, synthetic construct
AGYRESE

SEQ ID NO: 81723 - protein, 7 aa, synthetic construct
NTHKLVE

SEQ ID NO: 81724 - protein, 7 aa, synthetic construct
RDTPKLL

SEQ ID NO: 81725 - protein, 7 aa, synthetic construct
SERSKIA

SEQ ID NO: 81726 - protein, 7 aa, synthetic construct
NLHHMDH

SEQ ID NO: 81727 - protein, 7 aa, synthetic construct
FQPSSVS

SEQ ID NO: 81728 - protein, 7 aa, synthetic construct
SPFDKHY

SEQ ID NO: 81729 - protein, 7 aa, synthetic construct
ERHSQPN

SEQ ID NO: 81730 - protein, 7 aa, synthetic construct
TMPHEMK

SEQ ID NO: 81731 - protein, 7 aa, synthetic construct
KRQEGHD

SEQ ID NO: 81732 - protein, 7 aa, synthetic construct
HNFTNGH

SEQ ID NO: 81733 - protein, 7 aa, synthetic construct
AEHSMQK

SEQ ID NO: 81734 - protein, 7 aa, synthetic construct
AKVFPVG

SEQ ID NO: 81735 - protein, 7 aa, synthetic construct
VQMVHNS

SEQ ID NO: 81736 - protein, 7 aa, synthetic construct
TKNNAIA

SEQ ID NO: 81737 - protein, 7 aa, synthetic construct
AEGSQNR

SEQ ID NO: 81738 - protein, 7 aa, synthetic construct
GSSKVTT

SEQ ID NO: 81739 - protein, 7 aa, synthetic construct
WSKGSMD

SEQ ID NO: 81740 - protein, 7 aa, synthetic construct
LFTKWPE

SEQ ID NO: 81741 - protein, 7 aa, synthetic construct
RTPQLGI

SEQ ID NO: 81742 - protein, 7 aa, synthetic construct
NGHDSDR

SEQ ID NO: 81743 - protein, 7 aa, synthetic construct
WKGETAK

SEQ ID NO: 81744 - protein, 7 aa, synthetic construct
SNPHTIF

SEQ ID NO: 81745 - protein, 7 aa, synthetic construct
FIMDVKS

SEQ ID NO: 81746 - protein, 7 aa, synthetic construct
RHQNPST

SEQ ID NO: 81747 - protein, 7 aa, synthetic construct
SRSQGPV

SEQ ID NO: 81748 - protein, 7 aa, synthetic construct
KHLGGYG

SEQ ID NO: 81749 - protein, 7 aa, synthetic construct
LSYPSPH

SEQ ID NO: 81750 - protein, 7 aa, synthetic construct
NERNQIQ

SEQ ID NO: 81751 - protein, 7 aa, synthetic construct
AAKMGHP

SEQ ID NO: 81752 - protein, 7 aa, synthetic construct
KNTSSMW

SEQ ID NO: 81753 - protein, 7 aa, synthetic construct
YPPIKLS

SEQ ID NO: 81754 - protein, 7 aa, synthetic construct
AYTKAFT

SEQ ID NO: 81755 - protein, 7 aa, synthetic construct
QGKTTNF

SEQ ID NO: 81756 - protein, 7 aa, synthetic construct
WPKIGSH

SEQ ID NO: 81757 - protein, 7 aa, synthetic construct
QKGRELS

SEQ ID NO: 81758 - protein, 7 aa, synthetic construct
HPNKAMP

SEQ ID NO: 81759 - protein, 7 aa, synthetic construct
PQGMNAY

SEQ ID NO: 81760 - protein, 7 aa, synthetic construct
QEYSQNK

SEQ ID NO: 81761 - protein, 7 aa, synthetic construct
QIHGVHI

SEQ ID NO: 81762 - protein, 7 aa, synthetic construct
PFQHAAL

SEQ ID NO: 81763 - protein, 7 aa, synthetic construct
VHAVSAL

SEQ ID NO: 81764 - protein, 7 aa, synthetic construct
YARGSAL

SEQ ID NO: 81765 - protein, 7 aa, synthetic construct
HIRGPGD

SEQ ID NO: 81766 - protein, 7 aa, synthetic construct
VMSPIGK

SEQ ID NO: 81767 - protein, 7 aa, synthetic construct
CGPACGP

SEQ ID NO: 81768 - protein, 7 aa, synthetic construct
TQASSTR

SEQ ID NO: 81769 - protein, 7 aa, synthetic construct
IDGSRGW

SEQ ID NO: 81770 - protein, 7 aa, synthetic construct
MISIGNS

SEQ ID NO: 81771 - protein, 7 aa, synthetic construct
TRTHQNH

SEQ ID NO: 81772 - protein, 7 aa, synthetic construct
FRTIPER

SEQ ID NO: 81773 - protein, 7 aa, synthetic construct
DHRQSNS

SEQ ID NO: 81774 - protein, 7 aa, synthetic construct
GYKTTGP

SEQ ID NO: 81775 - protein, 7 aa, synthetic construct
QMHIEAA

SEQ ID NO: 81776 - protein, 7 aa, synthetic construct
RKEYLAA

SEQ ID NO: 81777 - protein, 7 aa, synthetic construct
SDYRDKV

SEQ ID NO: 81778 - protein, 7 aa, synthetic construct
KNAVKGE

SEQ ID NO: 81779 - protein, 7 aa, synthetic construct
WTASAPQ

SEQ ID NO: 81780 - protein, 7 aa, synthetic construct
QMVPALK

SEQ ID NO: 81781 - protein, 7 aa, synthetic construct
HVNAVHP

SEQ ID NO: 81782 - protein, 7 aa, synthetic construct
LLAKEQR

SEQ ID NO: 81783 - protein, 7 aa, synthetic construct
LAGRDAP

SEQ ID NO: 81784 - protein, 7 aa, synthetic construct
NTYHKLD

SEQ ID NO: 81785 - protein, 7 aa, synthetic construct
DLGLSEP

SEQ ID NO: 81786 - protein, 7 aa, synthetic construct
MRGEHGG

SEQ ID NO: 81787 - protein, 7 aa, synthetic construct
QRAATVV

SEQ ID NO: 81788 - protein, 7 aa, synthetic construct
IGTSIST

SEQ ID NO: 81789 - protein, 7 aa, synthetic construct
RPANAHL

SEQ ID NO: 81790 - protein, 7 aa, synthetic construct
YNSLHTA

SEQ ID NO: 81791 - protein, 7 aa, synthetic construct
LDKVNVH

SEQ ID NO: 81792 - protein, 7 aa, synthetic construct
ESVHIKA

SEQ ID NO: 81793 - protein, 7 aa, synthetic construct
GTVKAEN

SEQ ID NO: 81794 - protein, 7 aa, synthetic construct
NHLGMEV

SEQ ID NO: 81795 - protein, 7 aa, synthetic construct
FGPDMRQ

SEQ ID NO: 81796 - protein, 7 aa, synthetic construct
YLRETSD

SEQ ID NO: 81797 - protein, 7 aa, synthetic construct
PGGRIMS

SEQ ID NO: 81798 - protein, 7 aa, synthetic construct
HGPSSSL

SEQ ID NO: 81799 - protein, 7 aa, synthetic construct
NNTYKNN

SEQ ID NO: 81800 - protein, 7 aa, synthetic construct
KEDSRGG

SEQ ID NO: 81801 - protein, 7 aa, synthetic construct
IMAPRLE

SEQ ID NO: 81802 - protein, 7 aa, synthetic construct
LGRHEPG

SEQ ID NO: 81803 - protein, 7 aa, synthetic construct
RGTVIVD

SEQ ID NO: 81804 - protein, 7 aa, synthetic construct
NRSTNGM

SEQ ID NO: 81805 - protein, 7 aa, synthetic construct
DMLTAKP

SEQ ID NO: 81806 - protein, 7 aa, synthetic construct
RVLGHDF

SEQ ID NO: 81807 - protein, 7 aa, synthetic construct
AVKSRVD

SEQ ID NO: 81808 - protein, 7 aa, synthetic construct
VVNKANQ

SEQ ID NO: 81809 - protein, 7 aa, synthetic construct
HKGDYFI

SEQ ID NO: 81810 - protein, 7 aa, synthetic construct
SQFIKSS

SEQ ID NO: 81811 - protein, 7 aa, synthetic construct
GSKQNVG

SEQ ID NO: 81812 - protein, 7 aa, synthetic construct
SRPPVNP

SEQ ID NO: 81813 - protein, 7 aa, synthetic construct
SPTGQHT

SEQ ID NO: 81814 - protein, 7 aa, synthetic construct
YDKIQLA

SEQ ID NO: 81815 - protein, 7 aa, synthetic construct
VVKAALT

SEQ ID NO: 81816 - protein, 7 aa, synthetic construct
FSSRFQE

SEQ ID NO: 81817 - protein, 7 aa, synthetic construct
RDQISVV

SEQ ID NO: 81818 - protein, 7 aa, synthetic construct
NEKYTAG

SEQ ID NO: 81819 - protein, 7 aa, synthetic construct
KHQIMDG

SEQ ID NO: 81820 - protein, 7 aa, synthetic construct
DAWKNVE

SEQ ID NO: 81821 - protein, 7 aa, synthetic construct
QHTELHG

SEQ ID NO: 81822 - protein, 7 aa, synthetic construct
KSDNSGL

SEQ ID NO: 81823 - protein, 7 aa, synthetic construct
DYHKPVQ

SEQ ID NO: 81824 - protein, 7 aa, synthetic construct
YPIKGVY

SEQ ID NO: 81825 - protein, 7 aa, synthetic construct
SGLEHRF

SEQ ID NO: 81826 - protein, 7 aa, synthetic construct
RFNRTDS

SEQ ID NO: 81827 - protein, 7 aa, synthetic construct
QLTLDNR

SEQ ID NO: 81828 - protein, 7 aa, synthetic construct
HGHQRDS

SEQ ID NO: 81829 - protein, 7 aa, synthetic construct
RSTDIRN

SEQ ID NO: 81830 - protein, 7 aa, synthetic construct
LGKHLEW

SEQ ID NO: 81831 - protein, 7 aa, synthetic construct
LKQNSAG

SEQ ID NO: 81832 - protein, 7 aa, synthetic construct
VAPQHAQ

SEQ ID NO: 81833 - protein, 7 aa, synthetic construct
TGPQKPA

SEQ ID NO: 81834 - protein, 7 aa, synthetic construct
ELEIKMS

SEQ ID NO: 81835 - protein, 7 aa, synthetic construct
RDRDAER

SEQ ID NO: 81836 - protein, 7 aa, synthetic construct
KVLHEPG

SEQ ID NO: 81837 - protein, 7 aa, synthetic construct
IGPTHTT

SEQ ID NO: 81838 - protein, 7 aa, synthetic construct
FRAQGIA

SEQ ID NO: 81839 - protein, 7 aa, synthetic construct
HEYNKKV

SEQ ID NO: 81840 - protein, 7 aa, synthetic construct
HVSGYDK

SEQ ID NO: 81841 - protein, 7 aa, synthetic construct
QKQDFNH

SEQ ID NO: 81842 - protein, 7 aa, synthetic construct
ITAGGMQ

SEQ ID NO: 81843 - protein, 7 aa, synthetic construct
MGDLGRI

SEQ ID NO: 81844 - protein, 7 aa, synthetic construct
VSNPQYA

SEQ ID NO: 81845 - protein, 7 aa, synthetic construct
GLPANKN

SEQ ID NO: 81846 - protein, 7 aa, synthetic construct
MPARNLH

SEQ ID NO: 81847 - protein, 7 aa, synthetic construct
IQQGVMS

SEQ ID NO: 81848 - protein, 7 aa, synthetic construct
NLINKGD

SEQ ID NO: 81849 - protein, 7 aa, synthetic construct
DMNHTMM

SEQ ID NO: 81850 - protein, 7 aa, synthetic construct
GAKTNTP

SEQ ID NO: 81851 - protein, 7 aa, synthetic construct
PKQTGMS

SEQ ID NO: 81852 - protein, 7 aa, synthetic construct
TDRRQVL

SEQ ID NO: 81853 - protein, 7 aa, synthetic construct
VNPEFAQ

SEQ ID NO: 81854 - protein, 7 aa, synthetic construct
GFMRQEG

SEQ ID NO: 81855 - protein, 7 aa, synthetic construct
QEPRGNL

SEQ ID NO: 81856 - protein, 7 aa, synthetic construct
HQWTSND

SEQ ID NO: 81857 - protein, 7 aa, synthetic construct
WKQDWEQ

SEQ ID NO: 81858 - protein, 7 aa, synthetic construct
SMTQKEK

SEQ ID NO: 81859 - protein, 7 aa, synthetic construct
GRNPHHV

SEQ ID NO: 81860 - protein, 7 aa, synthetic construct
LNNPLIM

SEQ ID NO: 81861 - protein, 7 aa, synthetic construct
QAHRSAQ

SEQ ID NO: 81862 - protein, 7 aa, synthetic construct
IETRQQI

SEQ ID NO: 81863 - protein, 7 aa, synthetic construct
LGYRGEH

SEQ ID NO: 81864 - protein, 7 aa, synthetic construct
IPVDNKY

SEQ ID NO: 81865 - protein, 7 aa, synthetic construct
FHNHQEI

SEQ ID NO: 81866 - protein, 7 aa, synthetic construct
HINALGI

SEQ ID NO: 81867 - protein, 7 aa, synthetic construct
GEVHGRA

SEQ ID NO: 81868 - protein, 7 aa, synthetic construct
WADFDKG

SEQ ID NO: 81869 - protein, 7 aa, synthetic construct
WRDIHDS

SEQ ID NO: 81870 - protein, 7 aa, synthetic construct
SPQAYKL

SEQ ID NO: 81871 - protein, 7 aa, synthetic construct
KEYRPAP

SEQ ID NO: 81872 - protein, 7 aa, synthetic construct
DPRIHDG

SEQ ID NO: 81873 - protein, 7 aa, synthetic construct
FQNQQFG

SEQ ID NO: 81874 - protein, 7 aa, synthetic construct
NSMGKVG

SEQ ID NO: 81875 - protein, 7 aa, synthetic construct
KAGNSID

SEQ ID NO: 81876 - protein, 7 aa, synthetic construct
QATKDAI

SEQ ID NO: 81877 - protein, 7 aa, synthetic construct
NPNSQKP

SEQ ID NO: 81878 - protein, 7 aa, synthetic construct
SKDIVNA

SEQ ID NO: 81879 - protein, 7 aa, synthetic construct
INRDMHP

SEQ ID NO: 81880 - protein, 7 aa, synthetic construct
KMGVSEE

SEQ ID NO: 81881 - protein, 7 aa, synthetic construct
PIINKVA

SEQ ID NO: 81882 - protein, 7 aa, synthetic construct
YHERNLA

SEQ ID NO: 81883 - protein, 7 aa, synthetic construct
NHTTGLM

SEQ ID NO: 81884 - protein, 7 aa, synthetic construct
YDHRMFE

SEQ ID NO: 81885 - protein, 7 aa, synthetic construct
KAELASI

SEQ ID NO: 81886 - protein, 7 aa, synthetic construct
FEILNQP

SEQ ID NO: 81887 - protein, 7 aa, synthetic construct
ATPPEWK

SEQ ID NO: 81888 - protein, 7 aa, synthetic construct
KVGADYH

SEQ ID NO: 81889 - protein, 7 aa, synthetic construct
KEIHANM

SEQ ID NO: 81890 - protein, 7 aa, synthetic construct
KIISQDG

SEQ ID NO: 81891 - protein, 7 aa, synthetic construct
WQANRVN

SEQ ID NO: 81892 - protein, 7 aa, synthetic construct
PKSSPSG

SEQ ID NO: 81893 - protein, 7 aa, synthetic construct
MSQLMPG

SEQ ID NO: 81894 - protein, 7 aa, synthetic construct
NLKEMET

SEQ ID NO: 81895 - protein, 7 aa, synthetic construct
GTFRGMA

SEQ ID NO: 81896 - protein, 7 aa, synthetic construct
YNPTKDQ

SEQ ID NO: 81897 - protein, 7 aa, synthetic construct
RDRMQFE

SEQ ID NO: 81898 - protein, 7 aa, synthetic construct
NQQKTSG

SEQ ID NO: 81899 - protein, 7 aa, synthetic construct
TKQFQPQ

SEQ ID NO: 81900 - protein, 7 aa, synthetic construct
GDHMFKS

SEQ ID NO: 81901 - protein, 7 aa, synthetic construct
QKVTHHD

SEQ ID NO: 81902 - protein, 7 aa, synthetic construct
LVTDKNT

SEQ ID NO: 81903 - protein, 7 aa, synthetic construct
NDRILSQ

SEQ ID NO: 81904 - protein, 7 aa, synthetic construct
HTSPHQH

SEQ ID NO: 81905 - protein, 7 aa, synthetic construct
YRVSSRE

SEQ ID NO: 81906 - protein, 7 aa, synthetic construct
YITSQIG

SEQ ID NO: 81907 - protein, 7 aa, synthetic construct
HEYAMAA

SEQ ID NO: 81908 - protein, 7 aa, synthetic construct
KAMPKEE

SEQ ID NO: 81909 - protein, 7 aa, synthetic construct
LSRHPAL

SEQ ID NO: 81910 - protein, 7 aa, synthetic construct
RGHAWNE

SEQ ID NO: 81911 - protein, 7 aa, synthetic construct
MFHQMPA

SEQ ID NO: 81912 - protein, 7 aa, synthetic construct
SMKSSMA

SEQ ID NO: 81913 - protein, 7 aa, synthetic construct
MKRDAQE

SEQ ID NO: 81914 - protein, 7 aa, synthetic construct
GDFSGPS

SEQ ID NO: 81915 - protein, 7 aa, synthetic construct
MKDHKEG

SEQ ID NO: 81916 - protein, 7 aa, synthetic construct
NNKPYGF

SEQ ID NO: 81917 - protein, 7 aa, synthetic construct
YKTDVLR

SEQ ID NO: 81918 - protein, 7 aa, synthetic construct
HYGHNVV

SEQ ID NO: 81919 - protein, 7 aa, synthetic construct
PKNTMQH

SEQ ID NO: 81920 - protein, 7 aa, synthetic construct
ALPTKPP

SEQ ID NO: 81921 - protein, 7 aa, synthetic construct
MPYVNRP

SEQ ID NO: 81922 - protein, 7 aa, synthetic construct
MPKPPIG

SEQ ID NO: 81923 - protein, 7 aa, synthetic construct
QAPMNLV

SEQ ID NO: 81924 - protein, 7 aa, synthetic construct
YGGLEDK

SEQ ID NO: 81925 - protein, 7 aa, synthetic construct
LVSVLKE

SEQ ID NO: 81926 - protein, 7 aa, synthetic construct
NKGSVKD

SEQ ID NO: 81927 - protein, 7 aa, synthetic construct
SRTMAKE

SEQ ID NO: 81928 - protein, 7 aa, synthetic construct
LKYGEPG

SEQ ID NO: 81929 - protein, 7 aa, synthetic construct
GNAVYNM

SEQ ID NO: 81930 - protein, 7 aa, synthetic construct
QKTTVSS

SEQ ID NO: 81931 - protein, 7 aa, synthetic construct
RALNNDK

SEQ ID NO: 81932 - protein, 7 aa, synthetic construct
MEYVAQG

SEQ ID NO: 81933 - protein, 7 aa, synthetic construct
NRISMET

SEQ ID NO: 81934 - protein, 7 aa, synthetic construct
ILKGLRD

SEQ ID NO: 81935 - protein, 7 aa, synthetic construct
MGQKTYY

SEQ ID NO: 81936 - protein, 7 aa, synthetic construct
PMASSKM

SEQ ID NO: 81937 - protein, 7 aa, synthetic construct
QQHSDKF

SEQ ID NO: 81938 - protein, 7 aa, synthetic construct
ITKFNVE

SEQ ID NO: 81939 - protein, 7 aa, synthetic construct
VHPAYHV

SEQ ID NO: 81940 - protein, 7 aa, synthetic construct
LTGSIAT

SEQ ID NO: 81941 - protein, 7 aa, synthetic construct
GATPKGI

SEQ ID NO: 81942 - protein, 7 aa, synthetic construct
FAPGYAA

SEQ ID NO: 81943 - protein, 7 aa, synthetic construct
LAGSMHS

SEQ ID NO: 81944 - protein, 7 aa, synthetic construct
SESGGRE

SEQ ID NO: 81945 - protein, 7 aa, synthetic construct
FKADMRP

SEQ ID NO: 81946 - protein, 7 aa, synthetic construct
NHVTTNS

SEQ ID NO: 81947 - protein, 7 aa, synthetic construct
RMPKTTE

SEQ ID NO: 81948 - protein, 7 aa, synthetic construct
YQGMNMA

SEQ ID NO: 81949 - protein, 7 aa, synthetic construct
GLPSVHT

SEQ ID NO: 81950 - protein, 7 aa, synthetic construct
IPVERKP

SEQ ID NO: 81951 - protein, 7 aa, synthetic construct
AKDYRPY

SEQ ID NO: 81952 - protein, 7 aa, synthetic construct
HLTIGTK

SEQ ID NO: 81953 - protein, 7 aa, synthetic construct
KGGPVPI

SEQ ID NO: 81954 - protein, 7 aa, synthetic construct
NQQNRNP

SEQ ID NO: 81955 - protein, 7 aa, synthetic construct
KRSVNED

SEQ ID NO: 81956 - protein, 7 aa, synthetic construct
IYPGVSE

SEQ ID NO: 81957 - protein, 7 aa, synthetic construct
IVTMSVK

SEQ ID NO: 81958 - protein, 7 aa, synthetic construct
LTSSNNH

SEQ ID NO: 81959 - protein, 7 aa, synthetic construct
QLSELHP

SEQ ID NO: 81960 - protein, 7 aa, synthetic construct
HLAIGRQ

SEQ ID NO: 81961 - protein, 7 aa, synthetic construct
FNQHVTS

SEQ ID NO: 81962 - protein, 7 aa, synthetic construct
VTVHASH

SEQ ID NO: 81963 - protein, 7 aa, synthetic construct
WSRKFAE

SEQ ID NO: 81964 - protein, 7 aa, synthetic construct
QLMNQTR

SEQ ID NO: 81965 - protein, 7 aa, synthetic construct
PNAHIGE

SEQ ID NO: 81966 - protein, 7 aa, synthetic construct
TAFLHHE

SEQ ID NO: 81967 - protein, 7 aa, synthetic construct
YAGQHGR

SEQ ID NO: 81968 - protein, 7 aa, synthetic construct
WQTREQG

SEQ ID NO: 81969 - protein, 7 aa, synthetic construct
KSNQASS

SEQ ID NO: 81970 - protein, 7 aa, synthetic construct
LFNTGIA

SEQ ID NO: 81971 - protein, 7 aa, synthetic construct
NHPRAMT

SEQ ID NO: 81972 - protein, 7 aa, synthetic construct
NSEPWKA

SEQ ID NO: 81973 - protein, 7 aa, synthetic construct
MKVAAEG

SEQ ID NO: 81974 - protein, 7 aa, synthetic construct
LFDIERS

SEQ ID NO: 81975 - protein, 7 aa, synthetic construct
SGRHGVE

SEQ ID NO: 81976 - protein, 7 aa, synthetic construct
THQTNPV

SEQ ID NO: 81977 - protein, 7 aa, synthetic construct
HHSTRMA

SEQ ID NO: 81978 - protein, 7 aa, synthetic construct
NKPAPMP

SEQ ID NO: 81979 - protein, 7 aa, synthetic construct
EKMNGEH

SEQ ID NO: 81980 - protein, 7 aa, synthetic construct
PYPDKLN

SEQ ID NO: 81981 - protein, 7 aa, synthetic construct
RPNNHDP

SEQ ID NO: 81982 - protein, 7 aa, synthetic construct
KGYTQMA

SEQ ID NO: 81983 - protein, 7 aa, synthetic construct
HNMEIQG

SEQ ID NO: 81984 - protein, 7 aa, synthetic construct
ALSRVAV

SEQ ID NO: 81985 - protein, 7 aa, synthetic construct
IRDGTSQ

SEQ ID NO: 81986 - protein, 7 aa, synthetic construct
QEAKDRV

SEQ ID NO: 81987 - protein, 7 aa, synthetic construct
QQESRKE

SEQ ID NO: 81988 - protein, 7 aa, synthetic construct
NPKHLEL

SEQ ID NO: 81989 - protein, 7 aa, synthetic construct
GWVEKKS

SEQ ID NO: 81990 - protein, 7 aa, synthetic construct
FPSASMG

SEQ ID NO: 81991 - protein, 7 aa, synthetic construct
TDRRDEG

SEQ ID NO: 81992 - protein, 7 aa, synthetic construct
RFDGASR

SEQ ID NO: 81993 - protein, 7 aa, synthetic construct
ISLTTGL

SEQ ID NO: 81994 - protein, 7 aa, synthetic construct
WGVREEI

SEQ ID NO: 81995 - protein, 7 aa, synthetic construct
PNIERFN

SEQ ID NO: 81996 - protein, 7 aa, synthetic construct
TTHDKEG

SEQ ID NO: 81997 - protein, 7 aa, synthetic construct
KMNSTTG

SEQ ID NO: 81998 - protein, 7 aa, synthetic construct
RRVQTDD

SEQ ID NO: 81999 - protein, 7 aa, synthetic construct
WREMGTH

SEQ ID NO: 82000 - protein, 7 aa, synthetic construct
AMASNSR

SEQ ID NO: 82001 - protein, 7 aa, synthetic construct
DHQTRYT

SEQ ID NO: 82002 - protein, 7 aa, synthetic construct
KQFPGNG

SEQ ID NO: 82003 - protein, 7 aa, synthetic construct
QTSRPNF

SEQ ID NO: 82004 - protein, 7 aa, synthetic construct
LMQKDQL

SEQ ID NO: 82005 - protein, 7 aa, synthetic construct
PHEGKFS

SEQ ID NO: 82006 - protein, 7 aa, synthetic construct
QLRQPSF

SEQ ID NO: 82007 - protein, 7 aa, synthetic construct
MMPLTPN

SEQ ID NO: 82008 - protein, 7 aa, synthetic construct
AQTKTQG

SEQ ID NO: 82009 - protein, 7 aa, synthetic construct
KTTHPAL

SEQ ID NO: 82010 - protein, 7 aa, synthetic construct
AVMVDKI

SEQ ID NO: 82011 - protein, 7 aa, synthetic construct
FDHQKQS

SEQ ID NO: 82012 - protein, 7 aa, synthetic construct
FWKENKS

SEQ ID NO: 82013 - protein, 7 aa, synthetic construct
KEGNLGG

SEQ ID NO: 82014 - protein, 7 aa, synthetic construct
SMKKNDM

SEQ ID NO: 82015 - protein, 7 aa, synthetic construct
YGGKAEH

SEQ ID NO: 82016 - protein, 7 aa, synthetic construct
ATRGMSN

SEQ ID NO: 82017 - protein, 7 aa, synthetic construct
PNTQHKI

SEQ ID NO: 82018 - protein, 7 aa, synthetic construct
TKGIDPH

SEQ ID NO: 82019 - protein, 7 aa, synthetic construct
VKENVSM

SEQ ID NO: 82020 - protein, 7 aa, synthetic construct
DHEDFPT

SEQ ID NO: 82021 - protein, 7 aa, synthetic construct
GNSVNGK

SEQ ID NO: 82022 - protein, 7 aa, synthetic construct
GQSKGGA

SEQ ID NO: 82023 - protein, 7 aa, synthetic construct
YQESPVA

SEQ ID NO: 82024 - protein, 7 aa, synthetic construct
NHQGSES

SEQ ID NO: 82025 - protein, 7 aa, synthetic construct
HENRNAF

SEQ ID NO: 82026 - protein, 7 aa, synthetic construct
SRTASGP

SEQ ID NO: 82027 - protein, 7 aa, synthetic construct
ELSWKVE

SEQ ID NO: 82028 - protein, 7 aa, synthetic construct
SYNPGRP

SEQ ID NO: 82029 - protein, 7 aa, synthetic construct
GAGHINL

SEQ ID NO: 82030 - protein, 7 aa, synthetic construct
PTKAMQS

SEQ ID NO: 82031 - protein, 7 aa, synthetic construct
HTVHKEN

SEQ ID NO: 82032 - protein, 7 aa, synthetic construct
SEHGSVP

SEQ ID NO: 82033 - protein, 7 aa, synthetic construct
FQALIHG

SEQ ID NO: 82034 - protein, 7 aa, synthetic construct
MVKESLI

SEQ ID NO: 82035 - protein, 7 aa, synthetic construct
SQINTMA

SEQ ID NO: 82036 - protein, 7 aa, synthetic construct
DCDKACI

SEQ ID NO: 82037 - protein, 7 aa, synthetic construct
TSGKLYF

SEQ ID NO: 82038 - protein, 7 aa, synthetic construct
RPNQTGS

SEQ ID NO: 82039 - protein, 7 aa, synthetic construct
YMREMPH

SEQ ID NO: 82040 - protein, 7 aa, synthetic construct
GFGEVKY

SEQ ID NO: 82041 - protein, 7 aa, synthetic construct
RQQASAP

SEQ ID NO: 82042 - protein, 7 aa, synthetic construct
QPQNRMH

SEQ ID NO: 82043 - protein, 7 aa, synthetic construct
SQHHSPH

SEQ ID NO: 82044 - protein, 7 aa, synthetic construct
PAKVPEP

SEQ ID NO: 82045 - protein, 7 aa, synthetic construct
EYKGKTH

SEQ ID NO: 82046 - protein, 7 aa, synthetic construct
PRTNTGV

SEQ ID NO: 82047 - protein, 7 aa, synthetic construct
NHPHMST

SEQ ID NO: 82048 - protein, 7 aa, synthetic construct
RIGHMDE

SEQ ID NO: 82049 - protein, 7 aa, synthetic construct
SRNTTGM

SEQ ID NO: 82050 - protein, 7 aa, synthetic construct
DTGKEAF

SEQ ID NO: 82051 - protein, 7 aa, synthetic construct
SPTRETA

SEQ ID NO: 82052 - protein, 7 aa, synthetic construct
QVPFNVE

SEQ ID NO: 82053 - protein, 7 aa, synthetic construct
MMRHELQ

SEQ ID NO: 82054 - protein, 7 aa, synthetic construct
MPIKHSS

SEQ ID NO: 82055 - protein, 7 aa, synthetic construct
HKQNGRE

SEQ ID NO: 82056 - protein, 7 aa, synthetic construct
WSHKNGD

SEQ ID NO: 82057 - protein, 7 aa, synthetic construct
SKGPHEV

SEQ ID NO: 82058 - protein, 7 aa, synthetic construct
QTKIPIM

SEQ ID NO: 82059 - protein, 7 aa, synthetic construct
KNHPLTP

SEQ ID NO: 82060 - protein, 7 aa, synthetic construct
AAKSGVA

SEQ ID NO: 82061 - protein, 7 aa, synthetic construct
LELKVRQ

SEQ ID NO: 82062 - protein, 7 aa, synthetic construct
KNGNHLA

SEQ ID NO: 82063 - protein, 7 aa, synthetic construct
MPVRPFD

SEQ ID NO: 82064 - protein, 7 aa, synthetic construct
MHSSSPF

SEQ ID NO: 82065 - protein, 7 aa, synthetic construct
MYREHGV

SEQ ID NO: 82066 - protein, 7 aa, synthetic construct
GNTSAIK

SEQ ID NO: 82067 - protein, 7 aa, synthetic construct
FVQHKYA

SEQ ID NO: 82068 - protein, 7 aa, synthetic construct
YITGPQI

SEQ ID NO: 82069 - protein, 7 aa, synthetic construct
AGSNKLY

SEQ ID NO: 82070 - protein, 7 aa, synthetic construct
YKPFVGH

SEQ ID NO: 82071 - protein, 7 aa, synthetic construct
KGSTMPG

SEQ ID NO: 82072 - protein, 7 aa, synthetic construct
QIQHNYG

SEQ ID NO: 82073 - protein, 7 aa, synthetic construct
QKIDTKQ

SEQ ID NO: 82074 - protein, 7 aa, synthetic construct
KSKHSEE

SEQ ID NO: 82075 - protein, 7 aa, synthetic construct
RGPVEGR

SEQ ID NO: 82076 - protein, 7 aa, synthetic construct
TGQMVQP

SEQ ID NO: 82077 - protein, 7 aa, synthetic construct
LMKHEVP

SEQ ID NO: 82078 - protein, 7 aa, synthetic construct
IYSPRSN

SEQ ID NO: 82079 - protein, 7 aa, synthetic construct
TFKLNSE

SEQ ID NO: 82080 - protein, 7 aa, synthetic construct
RNVERVG

SEQ ID NO: 82081 - protein, 7 aa, synthetic construct
MDSRTLA

SEQ ID NO: 82082 - protein, 7 aa, synthetic construct
SYSKKDE

SEQ ID NO: 82083 - protein, 7 aa, synthetic construct
IQNGMSP

SEQ ID NO: 82084 - protein, 7 aa, synthetic construct
ATASKPA

SEQ ID NO: 82085 - protein, 7 aa, synthetic construct
YSTQQGG

SEQ ID NO: 82086 - protein, 7 aa, synthetic construct
AGYPKDG

SEQ ID NO: 82087 - protein, 7 aa, synthetic construct
RNEDRTW

SEQ ID NO: 82088 - protein, 7 aa, synthetic construct
VYVPGRQ

SEQ ID NO: 82089 - protein, 7 aa, synthetic construct
KTTTVVY

SEQ ID NO: 82090 - protein, 7 aa, synthetic construct
ESASGMA

SEQ ID NO: 82091 - protein, 7 aa, synthetic construct
NEKSMSA

SEQ ID NO: 82092 - protein, 7 aa, synthetic construct
LFKHPDQ

SEQ ID NO: 82093 - protein, 7 aa, synthetic construct
GKQYSQP

SEQ ID NO: 82094 - protein, 7 aa, synthetic construct
GFLVLKD

SEQ ID NO: 82095 - protein, 7 aa, synthetic construct
GKDPNMH

SEQ ID NO: 82096 - protein, 7 aa, synthetic construct
AMGNTPQ

SEQ ID NO: 82097 - protein, 7 aa, synthetic construct
IDFKHQP

SEQ ID NO: 82098 - protein, 7 aa, synthetic construct
TLGVGSS

SEQ ID NO: 82099 - protein, 7 aa, synthetic construct
NSRESYR

SEQ ID NO: 82100 - protein, 7 aa, synthetic construct
TADIGRD

SEQ ID NO: 82101 - protein, 7 aa, synthetic construct
LTPYEKE

SEQ ID NO: 82102 - protein, 7 aa, synthetic construct
ALSPGTL

SEQ ID NO: 82103 - protein, 7 aa, synthetic construct
GIFHEQD

SEQ ID NO: 82104 - protein, 7 aa, synthetic construct
PADKPDA

SEQ ID NO: 82105 - protein, 7 aa, synthetic construct
EKASTYD

SEQ ID NO: 82106 - protein, 7 aa, synthetic construct
DVHRAKG

SEQ ID NO: 82107 - protein, 7 aa, synthetic construct
SKKDNKE

SEQ ID NO: 82108 - protein, 7 aa, synthetic construct
IPRKEDS

SEQ ID NO: 82109 - protein, 7 aa, synthetic construct
NYSVAHA

SEQ ID NO: 82110 - protein, 7 aa, synthetic construct
NKRETQP

SEQ ID NO: 82111 - protein, 7 aa, synthetic construct
KIMPEPT

SEQ ID NO: 82112 - protein, 7 aa, synthetic construct
PRQSQHH

SEQ ID NO: 82113 - protein, 7 aa, synthetic construct
GQVRHEQ

SEQ ID NO: 82114 - protein, 7 aa, synthetic construct
KINGLLA

SEQ ID NO: 82115 - protein, 7 aa, synthetic construct
FLDDKKQ

SEQ ID NO: 82116 - protein, 7 aa, synthetic construct
DGLNQSI

SEQ ID NO: 82117 - protein, 7 aa, synthetic construct
WNRSPEV

SEQ ID NO: 82118 - protein, 7 aa, synthetic construct
YWSGIPE

SEQ ID NO: 82119 - protein, 7 aa, synthetic construct
SAAVLSG

SEQ ID NO: 82120 - protein, 7 aa, synthetic construct
QQGYNKY

SEQ ID NO: 82121 - protein, 7 aa, synthetic construct
TNMPSFQ

SEQ ID NO: 82122 - protein, 7 aa, synthetic construct
FKPANSS

SEQ ID NO: 82123 - protein, 7 aa, synthetic construct
STGTGMA

SEQ ID NO: 82124 - protein, 7 aa, synthetic construct
MRDAQLI

SEQ ID NO: 82125 - protein, 7 aa, synthetic construct
GLRTSMD

SEQ ID NO: 82126 - protein, 7 aa, synthetic construct
GQLMTTI

SEQ ID NO: 82127 - protein, 7 aa, synthetic construct
NAMGNSV

SEQ ID NO: 82128 - protein, 7 aa, synthetic construct
IKPEMRM

SEQ ID NO: 82129 - protein, 7 aa, synthetic construct
SMFTATS

SEQ ID NO: 82130 - protein, 7 aa, synthetic construct
LKHMDMQ

SEQ ID NO: 82131 - protein, 7 aa, synthetic construct
SLQLPQR

SEQ ID NO: 82132 - protein, 7 aa, synthetic construct
WPGNDKP

SEQ ID NO: 82133 - protein, 7 aa, synthetic construct
SSVQGQM

SEQ ID NO: 82134 - protein, 7 aa, synthetic construct
NNGKGYF

SEQ ID NO: 82135 - protein, 7 aa, synthetic construct
GEPREHP

SEQ ID NO: 82136 - protein, 7 aa, synthetic construct
KATHEEF

SEQ ID NO: 82137 - protein, 7 aa, synthetic construct
FAPTRTQ

SEQ ID NO: 82138 - protein, 7 aa, synthetic construct
HVTTNPH

SEQ ID NO: 82139 - protein, 7 aa, synthetic construct
VEHQSQA

SEQ ID NO: 82140 - protein, 7 aa, synthetic construct
HVWATEA

SEQ ID NO: 82141 - protein, 7 aa, synthetic construct
ANTATLY

SEQ ID NO: 82142 - protein, 7 aa, synthetic construct
TNTSIGV

SEQ ID NO: 82143 - protein, 7 aa, synthetic construct
GGPMRQD

SEQ ID NO: 82144 - protein, 7 aa, synthetic construct
IARNKDT

SEQ ID NO: 82145 - protein, 7 aa, synthetic construct
LKDYMNR

SEQ ID NO: 82146 - protein, 7 aa, synthetic construct
QELGKGM

SEQ ID NO: 82147 - protein, 7 aa, synthetic construct
VHPVREK

SEQ ID NO: 82148 - protein, 7 aa, synthetic construct
VIQNKPD

SEQ ID NO: 82149 - protein, 7 aa, synthetic construct
SDGKYPM

SEQ ID NO: 82150 - protein, 7 aa, synthetic construct
WKHHEIH

SEQ ID NO: 82151 - protein, 7 aa, synthetic construct
ERKTAYT

SEQ ID NO: 82152 - protein, 7 aa, synthetic construct
SHTDFQL

SEQ ID NO: 82153 - protein, 7 aa, synthetic construct
QQGRASP

SEQ ID NO: 82154 - protein, 7 aa, synthetic construct
AGNGADW

SEQ ID NO: 82155 - protein, 7 aa, synthetic construct
NGGISML

SEQ ID NO: 82156 - protein, 7 aa, synthetic construct
VAHQHTH

SEQ ID NO: 82157 - protein, 7 aa, synthetic construct
SIPYNAP

SEQ ID NO: 82158 - protein, 7 aa, synthetic construct
VNTRSHN

SEQ ID NO: 82159 - protein, 7 aa, synthetic construct
NNRHSTM

SEQ ID NO: 82160 - protein, 7 aa, synthetic construct
KPADVKN

SEQ ID NO: 82161 - protein, 7 aa, synthetic construct
SKVLEQI

SEQ ID NO: 82162 - protein, 7 aa, synthetic construct
NHNTTSQ

SEQ ID NO: 82163 - protein, 7 aa, synthetic construct
PFAELGK

SEQ ID NO: 82164 - protein, 7 aa, synthetic construct
MQYDKMM

SEQ ID NO: 82165 - protein, 7 aa, synthetic construct
TREKDAI

SEQ ID NO: 82166 - protein, 7 aa, synthetic construct
VFEVKGP

SEQ ID NO: 82167 - protein, 7 aa, synthetic construct
KPSNTSA

SEQ ID NO: 82168 - protein, 7 aa, synthetic construct
TADHHVA

SEQ ID NO: 82169 - protein, 7 aa, synthetic construct
PFQKNGE

SEQ ID NO: 82170 - protein, 7 aa, synthetic construct
LTGHRLV

SEQ ID NO: 82171 - protein, 7 aa, synthetic construct
TEKMALP

SEQ ID NO: 82172 - protein, 7 aa, synthetic construct
QHAETIH

SEQ ID NO: 82173 - protein, 7 aa, synthetic construct
MFQSGSP

SEQ ID NO: 82174 - protein, 7 aa, synthetic construct
TMNQKAA

SEQ ID NO: 82175 - protein, 7 aa, synthetic construct
MKAGTDL

SEQ ID NO: 82176 - protein, 7 aa, synthetic construct
FQGLQSS

SEQ ID NO: 82177 - protein, 7 aa, synthetic construct
NTERHPP

SEQ ID NO: 82178 - protein, 7 aa, synthetic construct
RLQASST

SEQ ID NO: 82179 - protein, 7 aa, synthetic construct
MRDATLA

SEQ ID NO: 82180 - protein, 7 aa, synthetic construct
DVYTNKV

SEQ ID NO: 82181 - protein, 7 aa, synthetic construct
SPKTSSP

SEQ ID NO: 82182 - protein, 7 aa, synthetic construct
NKINSNA

SEQ ID NO: 82183 - protein, 7 aa, synthetic construct
VKLPDHN

SEQ ID NO: 82184 - protein, 7 aa, synthetic construct
EHGGILM

SEQ ID NO: 82185 - protein, 7 aa, synthetic construct
HDGKMGS

SEQ ID NO: 82186 - protein, 7 aa, synthetic construct
KHLKTDS

SEQ ID NO: 82187 - protein, 7 aa, synthetic construct
VKIGPYN

SEQ ID NO: 82188 - protein, 7 aa, synthetic construct
YQQVGYH

SEQ ID NO: 82189 - protein, 7 aa, synthetic construct
AVHSLPM

SEQ ID NO: 82190 - protein, 7 aa, synthetic construct
RFQDNRM

SEQ ID NO: 82191 - protein, 7 aa, synthetic construct
LMSEGRV

SEQ ID NO: 82192 - protein, 7 aa, synthetic construct
SRPTAYN

SEQ ID NO: 82193 - protein, 7 aa, synthetic construct
WTGQTSI

SEQ ID NO: 82194 - protein, 7 aa, synthetic construct
VVNFNHP

SEQ ID NO: 82195 - protein, 7 aa, synthetic construct
FKTNMTS

SEQ ID NO: 82196 - protein, 7 aa, synthetic construct
MGNFTMH

SEQ ID NO: 82197 - protein, 7 aa, synthetic construct
FNINAEL

SEQ ID NO: 82198 - protein, 7 aa, synthetic construct
NHKGGYY

SEQ ID NO: 82199 - protein, 7 aa, synthetic construct
KPTTVGA

SEQ ID NO: 82200 - protein, 7 aa, synthetic construct
AAQLSTA

SEQ ID NO: 82201 - protein, 7 aa, synthetic construct
PKGNAQA

SEQ ID NO: 82202 - protein, 7 aa, synthetic construct
VKADPQT

SEQ ID NO: 82203 - protein, 7 aa, synthetic construct
LNSLGIQ

SEQ ID NO: 82204 - protein, 7 aa, synthetic construct
YKASTNA

SEQ ID NO: 82205 - protein, 7 aa, synthetic construct
YHKSEEA

SEQ ID NO: 82206 - protein, 7 aa, synthetic construct
LGFIGEH

SEQ ID NO: 82207 - protein, 7 aa, synthetic construct
NKGSNIG

SEQ ID NO: 82208 - protein, 7 aa, synthetic construct
GASHYEA

SEQ ID NO: 82209 - protein, 7 aa, synthetic construct
MQIKNIH

SEQ ID NO: 82210 - protein, 7 aa, synthetic construct
YMNKNEF

SEQ ID NO: 82211 - protein, 7 aa, synthetic construct
MQSMRDH

SEQ ID NO: 82212 - protein, 7 aa, synthetic construct
NTVMTAK

SEQ ID NO: 82213 - protein, 7 aa, synthetic construct
KIDDPIK

SEQ ID NO: 82214 - protein, 7 aa, synthetic construct
PIHQNTP

SEQ ID NO: 82215 - protein, 7 aa, synthetic construct
QQQPAGK

SEQ ID NO: 82216 - protein, 7 aa, synthetic construct
MKPASSM

SEQ ID NO: 82217 - protein, 7 aa, synthetic construct
IGEFFAH

SEQ ID NO: 82218 - protein, 7 aa, synthetic construct
RPDQREI

SEQ ID NO: 82219 - protein, 7 aa, synthetic construct
GGQYKES

SEQ ID NO: 82220 - protein, 7 aa, synthetic construct
MDPPTRF

SEQ ID NO: 82221 - protein, 7 aa, synthetic construct
TRLTDDR

SEQ ID NO: 82222 - protein, 7 aa, synthetic construct
ISPAVGH

SEQ ID NO: 82223 - protein, 7 aa, synthetic construct
STMPKAY

SEQ ID NO: 82224 - protein, 7 aa, synthetic construct
YDQPKDG

SEQ ID NO: 82225 - protein, 7 aa, synthetic construct
NLATSSV

SEQ ID NO: 82226 - protein, 7 aa, synthetic construct
TYRPQTA

SEQ ID NO: 82227 - protein, 7 aa, synthetic construct
FTRDPFT

SEQ ID NO: 82228 - protein, 7 aa, synthetic construct
MGHNPPV

SEQ ID NO: 82229 - protein, 7 aa, synthetic construct
YEVGQKF

SEQ ID NO: 82230 - protein, 7 aa, synthetic construct
ESHRESH

SEQ ID NO: 82231 - protein, 7 aa, synthetic construct
INKTQYH

SEQ ID NO: 82232 - protein, 7 aa, synthetic construct
LVRPESR

SEQ ID NO: 82233 - protein, 7 aa, synthetic construct
QDAKTMQ

SEQ ID NO: 82234 - protein, 7 aa, synthetic construct
VDAYHAM

SEQ ID NO: 82235 - protein, 7 aa, synthetic construct
SNQDGSR

SEQ ID NO: 82236 - protein, 7 aa, synthetic construct
SHSGVPK

SEQ ID NO: 82237 - protein, 7 aa, synthetic construct
RPQGNTG

SEQ ID NO: 82238 - protein, 7 aa, synthetic construct
RMMGQSV

SEQ ID NO: 82239 - protein, 7 aa, synthetic construct
QPNSKVD

SEQ ID NO: 82240 - protein, 7 aa, synthetic construct
DEGWVRP

SEQ ID NO: 82241 - protein, 7 aa, synthetic construct
YVSASSP

SEQ ID NO: 82242 - protein, 7 aa, synthetic construct
GQKPVTQ

SEQ ID NO: 82243 - protein, 7 aa, synthetic construct
PRTQDHL

SEQ ID NO: 82244 - protein, 7 aa, synthetic construct
PGRHTES

SEQ ID NO: 82245 - protein, 7 aa, synthetic construct
SNIHVIS

SEQ ID NO: 82246 - protein, 7 aa, synthetic construct
PIGPNLG

SEQ ID NO: 82247 - protein, 7 aa, synthetic construct
RQKIHNE

SEQ ID NO: 82248 - protein, 7 aa, synthetic construct
QGGGVHK

SEQ ID NO: 82249 - protein, 7 aa, synthetic construct
SKQLNNW

SEQ ID NO: 82250 - protein, 7 aa, synthetic construct
KGKIELP

SEQ ID NO: 82251 - protein, 7 aa, synthetic construct
QTNGKER

SEQ ID NO: 82252 - protein, 7 aa, synthetic construct
LGMSTNY

SEQ ID NO: 82253 - protein, 7 aa, synthetic construct
TVRNATP

SEQ ID NO: 82254 - protein, 7 aa, synthetic construct
GEQRHGS

SEQ ID NO: 82255 - protein, 7 aa, synthetic construct
YMRVAPP

SEQ ID NO: 82256 - protein, 7 aa, synthetic construct
NWHTAEA

SEQ ID NO: 82257 - protein, 7 aa, synthetic construct
RHINGIQ

SEQ ID NO: 82258 - protein, 7 aa, synthetic construct
TKQMKAD

SEQ ID NO: 82259 - protein, 7 aa, synthetic construct
RAPTEQA

SEQ ID NO: 82260 - protein, 7 aa, synthetic construct
YNKVPVA

SEQ ID NO: 82261 - protein, 7 aa, synthetic construct
QVAHQYA

SEQ ID NO: 82262 - protein, 7 aa, synthetic construct
TQRDASQ

SEQ ID NO: 82263 - protein, 7 aa, synthetic construct
VSNNWNK

SEQ ID NO: 82264 - protein, 7 aa, synthetic construct
TMHHNNV

SEQ ID NO: 82265 - protein, 7 aa, synthetic construct
SETRPTY

SEQ ID NO: 82266 - protein, 7 aa, synthetic construct
KWENQLA

SEQ ID NO: 82267 - protein, 7 aa, synthetic construct
NHSMNQI

SEQ ID NO: 82268 - protein, 7 aa, synthetic construct
HPTLKMN

SEQ ID NO: 82269 - protein, 7 aa, synthetic construct
AVTHTPE

SEQ ID NO: 82270 - protein, 7 aa, synthetic construct
THAEKGR

SEQ ID NO: 82271 - protein, 7 aa, synthetic construct
ARQQNSA

SEQ ID NO: 82272 - protein, 7 aa, synthetic construct
QYQKASP

SEQ ID NO: 82273 - protein, 7 aa, synthetic construct
VRDTVMS

SEQ ID NO: 82274 - protein, 7 aa, synthetic construct
DKPNTII

SEQ ID NO: 82275 - protein, 7 aa, synthetic construct
KYMKITD

SEQ ID NO: 82276 - protein, 7 aa, synthetic construct
LGRADTQ

SEQ ID NO: 82277 - protein, 7 aa, synthetic construct
TEPHSNG

SEQ ID NO: 82278 - protein, 7 aa, synthetic construct
VFDNATK

SEQ ID NO: 82279 - protein, 7 aa, synthetic construct
NAKNGQA

SEQ ID NO: 82280 - protein, 7 aa, synthetic construct
HPRTDTG

SEQ ID NO: 82281 - protein, 7 aa, synthetic construct
RSTSNQV

SEQ ID NO: 82282 - protein, 7 aa, synthetic construct
MGPQYNK

SEQ ID NO: 82283 - protein, 7 aa, synthetic construct
YVPGLHK

SEQ ID NO: 82284 - protein, 7 aa, synthetic construct
AGQFNRS

SEQ ID NO: 82285 - protein, 7 aa, synthetic construct
HEKWGLE

SEQ ID NO: 82286 - protein, 7 aa, synthetic construct
DIVQKRP

SEQ ID NO: 82287 - protein, 7 aa, synthetic construct
KPNTSQN

SEQ ID NO: 82288 - protein, 7 aa, synthetic construct
QIHDARK

SEQ ID NO: 82289 - protein, 7 aa, synthetic construct
VYQGKEM

SEQ ID NO: 82290 - protein, 7 aa, synthetic construct
PGIQHPA

SEQ ID NO: 82291 - protein, 7 aa, synthetic construct
AQSAYPL

SEQ ID NO: 82292 - protein, 7 aa, synthetic construct
YALGYTG

SEQ ID NO: 82293 - protein, 7 aa, synthetic construct
KHAMEWD

SEQ ID NO: 82294 - protein, 7 aa, synthetic construct
DRVLSTI

SEQ ID NO: 82295 - protein, 7 aa, synthetic construct
ANSGNIF

SEQ ID NO: 82296 - protein, 7 aa, synthetic construct
SPNALSK

SEQ ID NO: 82297 - protein, 7 aa, synthetic construct
RGLQPEL

SEQ ID NO: 82298 - protein, 7 aa, synthetic construct
GKAGREY

SEQ ID NO: 82299 - protein, 7 aa, synthetic construct
TQMIQSV

SEQ ID NO: 82300 - protein, 7 aa, synthetic construct
AVRTYDV

SEQ ID NO: 82301 - protein, 7 aa, synthetic construct
SSKAGAS

SEQ ID NO: 82302 - protein, 7 aa, synthetic construct
WESFKQP

SEQ ID NO: 82303 - protein, 7 aa, synthetic construct
PVRSGMA

SEQ ID NO: 82304 - protein, 7 aa, synthetic construct
ERKGTSD

SEQ ID NO: 82305 - protein, 7 aa, synthetic construct
NERTQQY

SEQ ID NO: 82306 - protein, 7 aa, synthetic construct
HNDAARN

SEQ ID NO: 82307 - protein, 7 aa, synthetic construct
PTEQRKT

SEQ ID NO: 82308 - protein, 7 aa, synthetic construct
VLARSTT

SEQ ID NO: 82309 - protein, 7 aa, synthetic construct
LVYEKTV

SEQ ID NO: 82310 - protein, 7 aa, synthetic construct
GSKHMQN

SEQ ID NO: 82311 - protein, 7 aa, synthetic construct
RQVSSAP

SEQ ID NO: 82312 - protein, 7 aa, synthetic construct
KQTNGSG

SEQ ID NO: 82313 - protein, 7 aa, synthetic construct
PESARAR

SEQ ID NO: 82314 - protein, 7 aa, synthetic construct
IISTQHG

SEQ ID NO: 82315 - protein, 7 aa, synthetic construct
WHDIYTE

SEQ ID NO: 82316 - protein, 7 aa, synthetic construct
YPNKAEI

SEQ ID NO: 82317 - protein, 7 aa, synthetic construct
TTKDSSW

SEQ ID NO: 82318 - protein, 7 aa, synthetic construct
GIETAYA

SEQ ID NO: 82319 - protein, 7 aa, synthetic construct
GHIASHE

SEQ ID NO: 82320 - protein, 7 aa, synthetic construct
MFKPVDD

SEQ ID NO: 82321 - protein, 7 aa, synthetic construct
HAQPNEA

SEQ ID NO: 82322 - protein, 7 aa, synthetic construct
RPMNETL

SEQ ID NO: 82323 - protein, 7 aa, synthetic construct
KQPTTMA

SEQ ID NO: 82324 - protein, 7 aa, synthetic construct
HGKQPES

SEQ ID NO: 82325 - protein, 7 aa, synthetic construct
QSRQTQP

SEQ ID NO: 82326 - protein, 7 aa, synthetic construct
LVSQKNV

SEQ ID NO: 82327 - protein, 7 aa, synthetic construct
SYSANIG

SEQ ID NO: 82328 - protein, 7 aa, synthetic construct
ITGPSSY

SEQ ID NO: 82329 - protein, 7 aa, synthetic construct
AKNQFGP

SEQ ID NO: 82330 - protein, 7 aa, synthetic construct
KMVKHFE

SEQ ID NO: 82331 - protein, 7 aa, synthetic construct
AEHTANR

SEQ ID NO: 82332 - protein, 7 aa, synthetic construct
VDQQTAY

SEQ ID NO: 82333 - protein, 7 aa, synthetic construct
YKAAGDR

SEQ ID NO: 82334 - protein, 7 aa, synthetic construct
ASTTIHK

SEQ ID NO: 82335 - protein, 7 aa, synthetic construct
DPKPQMQ

SEQ ID NO: 82336 - protein, 7 aa, synthetic construct
NIVPQSN

SEQ ID NO: 82337 - protein, 7 aa, synthetic construct
MRKDESG

SEQ ID NO: 82338 - protein, 7 aa, synthetic construct
VESQRHL

SEQ ID NO: 82339 - protein, 7 aa, synthetic construct
TNSNHFP

SEQ ID NO: 82340 - protein, 7 aa, synthetic construct
KDYQKSS

SEQ ID NO: 82341 - protein, 7 aa, synthetic construct
WKRTTTE

SEQ ID NO: 82342 - protein, 7 aa, synthetic construct
MLSRIGG

SEQ ID NO: 82343 - protein, 7 aa, synthetic construct
RQSQTQA

SEQ ID NO: 82344 - protein, 7 aa, synthetic construct
PQRQSGP

SEQ ID NO: 82345 - protein, 7 aa, synthetic construct
KNIVKEA

SEQ ID NO: 82346 - protein, 7 aa, synthetic construct
KTVHEAH

SEQ ID NO: 82347 - protein, 7 aa, synthetic construct
RQANSGA

SEQ ID NO: 82348 - protein, 7 aa, synthetic construct
RKEMHSE

SEQ ID NO: 82349 - protein, 7 aa, synthetic construct
PGQQKVN

SEQ ID NO: 82350 - protein, 7 aa, synthetic construct
AFTHKDR

SEQ ID NO: 82351 - protein, 7 aa, synthetic construct
NYTQRQA

SEQ ID NO: 82352 - protein, 7 aa, synthetic construct
GKGYMSD

SEQ ID NO: 82353 - protein, 7 aa, synthetic construct
KMQFQPL

SEQ ID NO: 82354 - protein, 7 aa, synthetic construct
VNGGRQS

SEQ ID NO: 82355 - protein, 7 aa, synthetic construct
YDQGTTF

SEQ ID NO: 82356 - protein, 7 aa, synthetic construct
HPMSGTE

SEQ ID NO: 82357 - protein, 7 aa, synthetic construct
GQRPTYN

SEQ ID NO: 82358 - protein, 7 aa, synthetic construct
QVNTSNT

SEQ ID NO: 82359 - protein, 7 aa, synthetic construct
GFSFPSG

SEQ ID NO: 82360 - protein, 7 aa, synthetic construct
TESRYMA

SEQ ID NO: 82361 - protein, 7 aa, synthetic construct
HMKPNNI

SEQ ID NO: 82362 - protein, 7 aa, synthetic construct
MPPKMHP

SEQ ID NO: 82363 - protein, 7 aa, synthetic construct
HLQWQTA

SEQ ID NO: 82364 - protein, 7 aa, synthetic construct
FKPGAQA

SEQ ID NO: 82365 - protein, 7 aa, synthetic construct
SVIGPTK

SEQ ID NO: 82366 - protein, 7 aa, synthetic construct
TKGSTYG

SEQ ID NO: 82367 - protein, 7 aa, synthetic construct
GKTAAMM

SEQ ID NO: 82368 - protein, 7 aa, synthetic construct
SHGVGLP

SEQ ID NO: 82369 - protein, 7 aa, synthetic construct
IQMRNVP

SEQ ID NO: 82370 - protein, 7 aa, synthetic construct
WSQQPNR

SEQ ID NO: 82371 - protein, 7 aa, synthetic construct
NGQLGTH

SEQ ID NO: 82372 - protein, 7 aa, synthetic construct
TGSIFGP

SEQ ID NO: 82373 - protein, 7 aa, synthetic construct
YAKDHSG

SEQ ID NO: 82374 - protein, 7 aa, synthetic construct
WQVAHPG

SEQ ID NO: 82375 - protein, 7 aa, synthetic construct
KHHGHEG

SEQ ID NO: 82376 - protein, 7 aa, synthetic construct
TRYIPPE

SEQ ID NO: 82377 - protein, 7 aa, synthetic construct
EGSVSRQ

SEQ ID NO: 82378 - protein, 7 aa, synthetic construct
EIYPRSG

SEQ ID NO: 82379 - protein, 7 aa, synthetic construct
FTSSNGF

SEQ ID NO: 82380 - protein, 7 aa, synthetic construct
IAINDRH

SEQ ID NO: 82381 - protein, 7 aa, synthetic construct
HIYKPVE

SEQ ID NO: 82382 - protein, 7 aa, synthetic construct
SFKDHMQ

SEQ ID NO: 82383 - protein, 7 aa, synthetic construct
SKATSQG

SEQ ID NO: 82384 - protein, 7 aa, synthetic construct
GKTNAAS

SEQ ID NO: 82385 - protein, 7 aa, synthetic construct
NHRDFVA

SEQ ID NO: 82386 - protein, 7 aa, synthetic construct
WNNHHDA

SEQ ID NO: 82387 - protein, 7 aa, synthetic construct
KFEGLNV

SEQ ID NO: 82388 - protein, 7 aa, synthetic construct
GPPKQAT

SEQ ID NO: 82389 - protein, 7 aa, synthetic construct
MTNVIHT

SEQ ID NO: 82390 - protein, 7 aa, synthetic construct
QLVKNED

SEQ ID NO: 82391 - protein, 7 aa, synthetic construct
WHHDPHG

SEQ ID NO: 82392 - protein, 7 aa, synthetic construct
MLGSGMQ

SEQ ID NO: 82393 - protein, 7 aa, synthetic construct
KNLSSHP

SEQ ID NO: 82394 - protein, 7 aa, synthetic construct
IVDSGKH

SEQ ID NO: 82395 - protein, 7 aa, synthetic construct
QRRDPSQ

SEQ ID NO: 82396 - protein, 7 aa, synthetic construct
DKRTSAP

SEQ ID NO: 82397 - protein, 7 aa, synthetic construct
MRGNEAI

SEQ ID NO: 82398 - protein, 7 aa, synthetic construct
KHEAHKD

SEQ ID NO: 82399 - protein, 7 aa, synthetic construct
LHKIPED

SEQ ID NO: 82400 - protein, 7 aa, synthetic construct
HKADNIG

SEQ ID NO: 82401 - protein, 7 aa, synthetic construct
QKVNNTG

SEQ ID NO: 82402 - protein, 7 aa, synthetic construct
HWATGVD

SEQ ID NO: 82403 - protein, 7 aa, synthetic construct
MLKSAEQ

SEQ ID NO: 82404 - protein, 7 aa, synthetic construct
KNTGMQI

SEQ ID NO: 82405 - protein, 7 aa, synthetic construct
MSQAGTA

SEQ ID NO: 82406 - protein, 7 aa, synthetic construct
ESGTPKW

SEQ ID NO: 82407 - protein, 7 aa, synthetic construct
NTMSNRH

SEQ ID NO: 82408 - protein, 7 aa, synthetic construct
ILHKMQP

SEQ ID NO: 82409 - protein, 7 aa, synthetic construct
THQRDHI

SEQ ID NO: 82410 - protein, 7 aa, synthetic construct
VKTTNSG

SEQ ID NO: 82411 - protein, 7 aa, synthetic construct
FTPKWEQ

SEQ ID NO: 82412 - protein, 7 aa, synthetic construct
QKQMAAG

SEQ ID NO: 82413 - protein, 7 aa, synthetic construct
GWPGADK

SEQ ID NO: 82414 - protein, 7 aa, synthetic construct
HKHDKPY

SEQ ID NO: 82415 - protein, 7 aa, synthetic construct
HDMNKPR

SEQ ID NO: 82416 - protein, 7 aa, synthetic construct
YSKHMFN

SEQ ID NO: 82417 - protein, 7 aa, synthetic construct
GNFQPQS

SEQ ID NO: 82418 - protein, 7 aa, synthetic construct
TPQDINR

SEQ ID NO: 82419 - protein, 7 aa, synthetic construct
YKTDIIT

SEQ ID NO: 82420 - protein, 7 aa, synthetic construct
WSHAHPE

SEQ ID NO: 82421 - protein, 7 aa, synthetic construct
ITSRAQE

SEQ ID NO: 82422 - protein, 7 aa, synthetic construct
NTIKMIP

SEQ ID NO: 82423 - protein, 7 aa, synthetic construct
MRSEYAE

SEQ ID NO: 82424 - protein, 7 aa, synthetic construct
DIHYNRT

SEQ ID NO: 82425 - protein, 7 aa, synthetic construct
IYSSGVS

SEQ ID NO: 82426 - protein, 7 aa, synthetic construct
VKVQQAT

SEQ ID NO: 82427 - protein, 7 aa, synthetic construct
NSSNVDV

SEQ ID NO: 82428 - protein, 7 aa, synthetic construct
ISTPRMP

SEQ ID NO: 82429 - protein, 7 aa, synthetic construct
LMSDRTQ

SEQ ID NO: 82430 - protein, 7 aa, synthetic construct
KMQEQDR

SEQ ID NO: 82431 - protein, 7 aa, synthetic construct
LRMEGKW

SEQ ID NO: 82432 - protein, 7 aa, synthetic construct
RGEGGKH

SEQ ID NO: 82433 - protein, 7 aa, synthetic construct
QENLSAP

SEQ ID NO: 82434 - protein, 7 aa, synthetic construct
LGMIKRD

SEQ ID NO: 82435 - protein, 7 aa, synthetic construct
GKQKDLM

SEQ ID NO: 82436 - protein, 7 aa, synthetic construct
MPFGDHL

SEQ ID NO: 82437 - protein, 7 aa, synthetic construct
AVDYTHS

SEQ ID NO: 82438 - protein, 7 aa, synthetic construct
PPRMPIQ

SEQ ID NO: 82439 - protein, 7 aa, synthetic construct
KTQQITM

SEQ ID NO: 82440 - protein, 7 aa, synthetic construct
QSVRYPV

SEQ ID NO: 82441 - protein, 7 aa, synthetic construct
ESGGRPY

SEQ ID NO: 82442 - protein, 7 aa, synthetic construct
RMKADQD

SEQ ID NO: 82443 - protein, 7 aa, synthetic construct
FQSKHHI

SEQ ID NO: 82444 - protein, 7 aa, synthetic construct
IDHARGE

SEQ ID NO: 82445 - protein, 7 aa, synthetic construct
QPGFVGQ

SEQ ID NO: 82446 - protein, 7 aa, synthetic construct
TQALAHP

SEQ ID NO: 82447 - protein, 7 aa, synthetic construct
EDVGHPG

SEQ ID NO: 82448 - protein, 7 aa, synthetic construct
NKAMVRE

SEQ ID NO: 82449 - protein, 7 aa, synthetic construct
SQNSKMV

SEQ ID NO: 82450 - protein, 7 aa, synthetic construct
NRKEMYA

SEQ ID NO: 82451 - protein, 7 aa, synthetic construct
LSINLPQ

SEQ ID NO: 82452 - protein, 7 aa, synthetic construct
KPIAQYG

SEQ ID NO: 82453 - protein, 7 aa, synthetic construct
RPQDDNR

SEQ ID NO: 82454 - protein, 7 aa, synthetic construct
NGTPLGH

SEQ ID NO: 82455 - protein, 7 aa, synthetic construct
QAQGRNP

SEQ ID NO: 82456 - protein, 7 aa, synthetic construct
WDNNTRE

SEQ ID NO: 82457 - protein, 7 aa, synthetic construct
IFGGEAT

SEQ ID NO: 82458 - protein, 7 aa, synthetic construct
VQQSSGD

SEQ ID NO: 82459 - protein, 7 aa, synthetic construct
NPVHNTR

SEQ ID NO: 82460 - protein, 7 aa, synthetic construct
DPMRAGV

SEQ ID NO: 82461 - protein, 7 aa, synthetic construct
QSSHTGS

SEQ ID NO: 82462 - protein, 7 aa, synthetic construct
NNTGRTA

SEQ ID NO: 82463 - protein, 7 aa, synthetic construct
RPTTNEF

SEQ ID NO: 82464 - protein, 7 aa, synthetic construct
AHTQIGK

SEQ ID NO: 82465 - protein, 7 aa, synthetic construct
NQPRGQS

SEQ ID NO: 82466 - protein, 7 aa, synthetic construct
GPEMSSK

SEQ ID NO: 82467 - protein, 7 aa, synthetic construct
LGNYRNT

SEQ ID NO: 82468 - protein, 7 aa, synthetic construct
HMNDYNV

SEQ ID NO: 82469 - protein, 7 aa, synthetic construct
TTTLQQP

SEQ ID NO: 82470 - protein, 7 aa, synthetic construct
MASTMGH

SEQ ID NO: 82471 - protein, 7 aa, synthetic construct
DPRPNYP

SEQ ID NO: 82472 - protein, 7 aa, synthetic construct
LHQKDQF

SEQ ID NO: 82473 - protein, 7 aa, synthetic construct
VQVERPQ

SEQ ID NO: 82474 - protein, 7 aa, synthetic construct
FSAGKTT

SEQ ID NO: 82475 - protein, 7 aa, synthetic construct
KKETSAS

SEQ ID NO: 82476 - protein, 7 aa, synthetic construct
YRQGIQV

SEQ ID NO: 82477 - protein, 7 aa, synthetic construct
IPKDSPQ

SEQ ID NO: 82478 - protein, 7 aa, synthetic construct
NTTLRSL

SEQ ID NO: 82479 - protein, 7 aa, synthetic construct
GKTNAGD

SEQ ID NO: 82480 - protein, 7 aa, synthetic construct
LTAHMLG

SEQ ID NO: 82481 - protein, 7 aa, synthetic construct
NQARVQA

SEQ ID NO: 82482 - protein, 7 aa, synthetic construct
TQQTVQL

SEQ ID NO: 82483 - protein, 7 aa, synthetic construct
RLINPHE

SEQ ID NO: 82484 - protein, 7 aa, synthetic construct
LGKSVAA

SEQ ID NO: 82485 - protein, 7 aa, synthetic construct
NIPPKDR

SEQ ID NO: 82486 - protein, 7 aa, synthetic construct
KFVATGA

SEQ ID NO: 82487 - protein, 7 aa, synthetic construct
TAGQPSG

SEQ ID NO: 82488 - protein, 7 aa, synthetic construct
GSMKQEL

SEQ ID NO: 82489 - protein, 7 aa, synthetic construct
GVPHGSS

SEQ ID NO: 82490 - protein, 7 aa, synthetic construct
WLPEVRG

SEQ ID NO: 82491 - protein, 7 aa, synthetic construct
KSRDTQA

SEQ ID NO: 82492 - protein, 7 aa, synthetic construct
VTPQQAS

SEQ ID NO: 82493 - protein, 7 aa, synthetic construct
HSDTWKV

SEQ ID NO: 82494 - protein, 7 aa, synthetic construct
PRGMQEK

SEQ ID NO: 82495 - protein, 7 aa, synthetic construct
VRSNVHF

SEQ ID NO: 82496 - protein, 7 aa, synthetic construct
WSQNKHM

SEQ ID NO: 82497 - protein, 7 aa, synthetic construct
PSTGTGT

SEQ ID NO: 82498 - protein, 7 aa, synthetic construct
IMTGMMA

SEQ ID NO: 82499 - protein, 7 aa, synthetic construct
KLLQLSP

SEQ ID NO: 82500 - protein, 7 aa, synthetic construct
GSEYAKP

SEQ ID NO: 82501 - protein, 7 aa, synthetic construct
QTPARLP

SEQ ID NO: 82502 - protein, 7 aa, synthetic construct
RMGSQEV

SEQ ID NO: 82503 - protein, 7 aa, synthetic construct
DNIREKE

SEQ ID NO: 82504 - protein, 7 aa, synthetic construct
DLRDRGK

SEQ ID NO: 82505 - protein, 7 aa, synthetic construct
PKTMNQG

SEQ ID NO: 82506 - protein, 7 aa, synthetic construct
RTNEPAI

SEQ ID NO: 82507 - protein, 7 aa, synthetic construct
NRNEQLP

SEQ ID NO: 82508 - protein, 7 aa, synthetic construct
NGQNPLT

SEQ ID NO: 82509 - protein, 7 aa, synthetic construct
NQALHGH

SEQ ID NO: 82510 - protein, 7 aa, synthetic construct
IMNQNQK

SEQ ID NO: 82511 - protein, 7 aa, synthetic construct
VKPNNNP

SEQ ID NO: 82512 - protein, 7 aa, synthetic construct
GRQAQEG

SEQ ID NO: 82513 - protein, 7 aa, synthetic construct
SEVGWRG

SEQ ID NO: 82514 - protein, 7 aa, synthetic construct
RYNPEME

SEQ ID NO: 82515 - protein, 7 aa, synthetic construct
PLGKTDD

SEQ ID NO: 82516 - protein, 7 aa, synthetic construct
YSSIAIQ

SEQ ID NO: 82517 - protein, 7 aa, synthetic construct
NLKINLS

SEQ ID NO: 82518 - protein, 7 aa, synthetic construct
FKPTQNA

SEQ ID NO: 82519 - protein, 7 aa, synthetic construct
QAFHKEE

SEQ ID NO: 82520 - protein, 7 aa, synthetic construct
YGFRIAD

SEQ ID NO: 82521 - protein, 7 aa, synthetic construct
MKHADHM

SEQ ID NO: 82522 - protein, 7 aa, synthetic construct
DKSSQPK

SEQ ID NO: 82523 - protein, 7 aa, synthetic construct
LVERPKT

SEQ ID NO: 82524 - protein, 7 aa, synthetic construct
MNNIEMA

SEQ ID NO: 82525 - protein, 7 aa, synthetic construct
ADKMMQR

SEQ ID NO: 82526 - protein, 7 aa, synthetic construct
KKAEVKD

SEQ ID NO: 82527 - protein, 7 aa, synthetic construct
KNGSQPV

SEQ ID NO: 82528 - protein, 7 aa, synthetic construct
SMPRTMY

SEQ ID NO: 82529 - protein, 7 aa, synthetic construct
ENAGRDR

SEQ ID NO: 82530 - protein, 7 aa, synthetic construct
AGNGIPR

SEQ ID NO: 82531 - protein, 7 aa, synthetic construct
RNQMTYS

SEQ ID NO: 82532 - protein, 7 aa, synthetic construct
QRIAGPP

SEQ ID NO: 82533 - protein, 7 aa, synthetic construct
GYKKVDD

SEQ ID NO: 82534 - protein, 7 aa, synthetic construct
WSKTPEY

SEQ ID NO: 82535 - protein, 7 aa, synthetic construct
QKTAMTP

SEQ ID NO: 82536 - protein, 7 aa, synthetic construct
GGHAMIH

SEQ ID NO: 82537 - protein, 7 aa, synthetic construct
GRKIDYE

SEQ ID NO: 82538 - protein, 7 aa, synthetic construct
YDIAHHK

SEQ ID NO: 82539 - protein, 7 aa, synthetic construct
RSTEMHM

SEQ ID NO: 82540 - protein, 7 aa, synthetic construct
KKMSHME

SEQ ID NO: 82541 - protein, 7 aa, synthetic construct
PAHGYKT

SEQ ID NO: 82542 - protein, 7 aa, synthetic construct
AVDSQRP

SEQ ID NO: 82543 - protein, 7 aa, synthetic construct
HIRLVKD

SEQ ID NO: 82544 - protein, 7 aa, synthetic construct
HERNDHG

SEQ ID NO: 82545 - protein, 7 aa, synthetic construct
SKAKMAE

SEQ ID NO: 82546 - protein, 7 aa, synthetic construct
WQKQMVP

SEQ ID NO: 82547 - protein, 7 aa, synthetic construct
SQTTPIL

SEQ ID NO: 82548 - protein, 7 aa, synthetic construct
FDHFVAE

SEQ ID NO: 82549 - protein, 7 aa, synthetic construct
RPSATGV

SEQ ID NO: 82550 - protein, 7 aa, synthetic construct
SIREINS

SEQ ID NO: 82551 - protein, 7 aa, synthetic construct
IGTMHHI

SEQ ID NO: 82552 - protein, 7 aa, synthetic construct
DADNRKL

SEQ ID NO: 82553 - protein, 7 aa, synthetic construct
KENWAGT

SEQ ID NO: 82554 - protein, 7 aa, synthetic construct
ERGNLLE

SEQ ID NO: 82555 - protein, 7 aa, synthetic construct
WNRDSPA

SEQ ID NO: 82556 - protein, 7 aa, synthetic construct
PSDFMQK

SEQ ID NO: 82557 - protein, 7 aa, synthetic construct
FPEHMTQ

SEQ ID NO: 82558 - protein, 7 aa, synthetic construct
HLNRAPQ

SEQ ID NO: 82559 - protein, 7 aa, synthetic construct
VYHRTQE

SEQ ID NO: 82560 - protein, 7 aa, synthetic construct
THTHAAT

SEQ ID NO: 82561 - protein, 7 aa, synthetic construct
YSTKQQG

SEQ ID NO: 82562 - protein, 7 aa, synthetic construct
KGSTIAG

SEQ ID NO: 82563 - protein, 7 aa, synthetic construct
GKKDVSS

SEQ ID NO: 82564 - protein, 7 aa, synthetic construct
NPYHNEA

SEQ ID NO: 82565 - protein, 7 aa, synthetic construct
ILQKTVE

SEQ ID NO: 82566 - protein, 7 aa, synthetic construct
GTQRLSE

SEQ ID NO: 82567 - protein, 7 aa, synthetic construct
KGTGPGI

SEQ ID NO: 82568 - protein, 7 aa, synthetic construct
KTNRDFS

SEQ ID NO: 82569 - protein, 7 aa, synthetic construct
RFMDERP

SEQ ID NO: 82570 - protein, 7 aa, synthetic construct
WKPGLSI

SEQ ID NO: 82571 - protein, 7 aa, synthetic construct
DEYHSRS

SEQ ID NO: 82572 - protein, 7 aa, synthetic construct
KSGPTVE

SEQ ID NO: 82573 - protein, 7 aa, synthetic construct
HKMEVMS

SEQ ID NO: 82574 - protein, 7 aa, synthetic construct
QNPGNYK

SEQ ID NO: 82575 - protein, 7 aa, synthetic construct
VSMIQAA

SEQ ID NO: 82576 - protein, 7 aa, synthetic construct
QDRPMPD

SEQ ID NO: 82577 - protein, 7 aa, synthetic construct
EGNHMAR

SEQ ID NO: 82578 - protein, 7 aa, synthetic construct
DLHHQSL

SEQ ID NO: 82579 - protein, 7 aa, synthetic construct
YARMISQ

SEQ ID NO: 82580 - protein, 7 aa, synthetic construct
DRQITSQ

SEQ ID NO: 82581 - protein, 7 aa, synthetic construct
HEFHKAM

SEQ ID NO: 82582 - protein, 7 aa, synthetic construct
GQLSNQS

SEQ ID NO: 82583 - protein, 7 aa, synthetic construct
LREVSQP

SEQ ID NO: 82584 - protein, 7 aa, synthetic construct
DLKMTAY

SEQ ID NO: 82585 - protein, 7 aa, synthetic construct
VGAVQRH

SEQ ID NO: 82586 - protein, 7 aa, synthetic construct
RAEIQYP

SEQ ID NO: 82587 - protein, 7 aa, synthetic construct
ISGPVKT

SEQ ID NO: 82588 - protein, 7 aa, synthetic construct
MQQHIAN

SEQ ID NO: 82589 - protein, 7 aa, synthetic construct
QGGSKMG

SEQ ID NO: 82590 - protein, 7 aa, synthetic construct
PSLNEAK

SEQ ID NO: 82591 - protein, 7 aa, synthetic construct
FHVSQPH

SEQ ID NO: 82592 - protein, 7 aa, synthetic construct
GQVNRQA

SEQ ID NO: 82593 - protein, 7 aa, synthetic construct
RSNADDR

SEQ ID NO: 82594 - protein, 7 aa, synthetic construct
WRGMPLD

SEQ ID NO: 82595 - protein, 7 aa, synthetic construct
ARHQADN

SEQ ID NO: 82596 - protein, 7 aa, synthetic construct
ISNGANW

SEQ ID NO: 82597 - protein, 7 aa, synthetic construct
SQNGKQM

SEQ ID NO: 82598 - protein, 7 aa, synthetic construct
TWNEATV

SEQ ID NO: 82599 - protein, 7 aa, synthetic construct
NNAVMRQ

SEQ ID NO: 82600 - protein, 7 aa, synthetic construct
GPRGTEW

SEQ ID NO: 82601 - protein, 7 aa, synthetic construct
FPKNQDM

SEQ ID NO: 82602 - protein, 7 aa, synthetic construct
MQIPMET

SEQ ID NO: 82603 - protein, 7 aa, synthetic construct
QKNNGEM

SEQ ID NO: 82604 - protein, 7 aa, synthetic construct
AQLQSDP

SEQ ID NO: 82605 - protein, 7 aa, synthetic construct
QREKSFP

SEQ ID NO: 82606 - protein, 7 aa, synthetic construct
RHPKWEE

SEQ ID NO: 82607 - protein, 7 aa, synthetic construct
SQDIRNW

SEQ ID NO: 82608 - protein, 7 aa, synthetic construct
PNKSNGA

SEQ ID NO: 82609 - protein, 7 aa, synthetic construct
GKINAFG

SEQ ID NO: 82610 - protein, 7 aa, synthetic construct
GQGKTAG

SEQ ID NO: 82611 - protein, 7 aa, synthetic construct
LQRHQQM

SEQ ID NO: 82612 - protein, 7 aa, synthetic construct
PPMSPVL

SEQ ID NO: 82613 - protein, 7 aa, synthetic construct
QPRPFPA

SEQ ID NO: 82614 - protein, 7 aa, synthetic construct
HREFPEY

SEQ ID NO: 82615 - protein, 7 aa, synthetic construct
KQNELSA

SEQ ID NO: 82616 - protein, 7 aa, synthetic construct
IKDHRES

SEQ ID NO: 82617 - protein, 7 aa, synthetic construct
AWGKNHP

SEQ ID NO: 82618 - protein, 7 aa, synthetic construct
LAPAVKE

SEQ ID NO: 82619 - protein, 7 aa, synthetic construct
HHMGGGY

SEQ ID NO: 82620 - protein, 7 aa, synthetic construct
KNGSSNP

SEQ ID NO: 82621 - protein, 7 aa, synthetic construct
MMKAETM

SEQ ID NO: 82622 - protein, 7 aa, synthetic construct
NKNQPNA

SEQ ID NO: 82623 - protein, 7 aa, synthetic construct
KSSDRVF

SEQ ID NO: 82624 - protein, 7 aa, synthetic construct
EPRTTGP

SEQ ID NO: 82625 - protein, 7 aa, synthetic construct
GNKSAHM

SEQ ID NO: 82626 - protein, 7 aa, synthetic construct
NHTARYI

SEQ ID NO: 82627 - protein, 7 aa, synthetic construct
NNSMAIA

SEQ ID NO: 82628 - protein, 7 aa, synthetic construct
QATHVQI

SEQ ID NO: 82629 - protein, 7 aa, synthetic construct
FREIAAD

SEQ ID NO: 82630 - protein, 7 aa, synthetic construct
YRGADGS

SEQ ID NO: 82631 - protein, 7 aa, synthetic construct
VRSISPA

SEQ ID NO: 82632 - protein, 7 aa, synthetic construct
SAGQYSA

SEQ ID NO: 82633 - protein, 7 aa, synthetic construct
ILDAGIR

SEQ ID NO: 82634 - protein, 7 aa, synthetic construct
KNMHNAL

SEQ ID NO: 82635 - protein, 7 aa, synthetic construct
MVRFVEG

SEQ ID NO: 82636 - protein, 7 aa, synthetic construct
QRHTTVQ

SEQ ID NO: 82637 - protein, 7 aa, synthetic construct
KSTTTFP

SEQ ID NO: 82638 - protein, 7 aa, synthetic construct
HNNNAVL

SEQ ID NO: 82639 - protein, 7 aa, synthetic construct
WLGSTVP

SEQ ID NO: 82640 - protein, 7 aa, synthetic construct
TNDRPLW

SEQ ID NO: 82641 - protein, 7 aa, synthetic construct
HALHAHE

SEQ ID NO: 82642 - protein, 7 aa, synthetic construct
TKNQIVP

SEQ ID NO: 82643 - protein, 7 aa, synthetic construct
NPQHEFL

SEQ ID NO: 82644 - protein, 7 aa, synthetic construct
YARDATM

SEQ ID NO: 82645 - protein, 7 aa, synthetic construct
RETAFPT

SEQ ID NO: 82646 - protein, 7 aa, synthetic construct
WFGETKT

SEQ ID NO: 82647 - protein, 7 aa, synthetic construct
DSFGTRE

SEQ ID NO: 82648 - protein, 7 aa, synthetic construct
RTGSTSN

SEQ ID NO: 82649 - protein, 7 aa, synthetic construct
WMPNIKM

SEQ ID NO: 82650 - protein, 7 aa, synthetic construct
SYAAAEP

SEQ ID NO: 82651 - protein, 7 aa, synthetic construct
LPLQVGE

SEQ ID NO: 82652 - protein, 7 aa, synthetic construct
DYPRAEY

SEQ ID NO: 82653 - protein, 7 aa, synthetic construct
FKTSKPE

SEQ ID NO: 82654 - protein, 7 aa, synthetic construct
ETPSKNY

SEQ ID NO: 82655 - protein, 7 aa, synthetic construct
WPSNQGT

SEQ ID NO: 82656 - protein, 7 aa, synthetic construct
QEHLRKV

SEQ ID NO: 82657 - protein, 7 aa, synthetic construct
FTAGMHV

SEQ ID NO: 82658 - protein, 7 aa, synthetic construct
GMNFAPA

SEQ ID NO: 82659 - protein, 7 aa, synthetic construct
PKPVMPM

SEQ ID NO: 82660 - protein, 7 aa, synthetic construct
KGSHSQI

SEQ ID NO: 82661 - protein, 7 aa, synthetic construct
EGVKAQD

SEQ ID NO: 82662 - protein, 7 aa, synthetic construct
SVMDMPA

SEQ ID NO: 82663 - protein, 7 aa, synthetic construct
EKTAMQP

SEQ ID NO: 82664 - protein, 7 aa, synthetic construct
KNAQNAV

SEQ ID NO: 82665 - protein, 7 aa, synthetic construct
NLMHSNI

SEQ ID NO: 82666 - protein, 7 aa, synthetic construct
PAISKIV

SEQ ID NO: 82667 - protein, 7 aa, synthetic construct
KDTKPHG

SEQ ID NO: 82668 - protein, 7 aa, synthetic construct
VRQQGNW

SEQ ID NO: 82669 - protein, 7 aa, synthetic construct
KSSGFGP

SEQ ID NO: 82670 - protein, 7 aa, synthetic construct
HREFNMG

SEQ ID NO: 82671 - protein, 7 aa, synthetic construct
SRNQLIN

SEQ ID NO: 82672 - protein, 7 aa, synthetic construct
HQARDQI

SEQ ID NO: 82673 - protein, 7 aa, synthetic construct
NFHEHSV

SEQ ID NO: 82674 - protein, 7 aa, synthetic construct
IDQKVAK

SEQ ID NO: 82675 - protein, 7 aa, synthetic construct
MAIKAKD

SEQ ID NO: 82676 - protein, 7 aa, synthetic construct
RYHHQGD

SEQ ID NO: 82677 - protein, 7 aa, synthetic construct
GLEVRTQ

SEQ ID NO: 82678 - protein, 7 aa, synthetic construct
QNPNIQA

SEQ ID NO: 82679 - protein, 7 aa, synthetic construct
YNFVDSR

SEQ ID NO: 82680 - protein, 7 aa, synthetic construct
MKVQPDQ

SEQ ID NO: 82681 - protein, 7 aa, synthetic construct
GPVVNAP

SEQ ID NO: 82682 - protein, 7 aa, synthetic construct
TEGHKSV

SEQ ID NO: 82683 - protein, 7 aa, synthetic construct
YHHNQSD

SEQ ID NO: 82684 - protein, 7 aa, synthetic construct
LHNETVN

SEQ ID NO: 82685 - protein, 7 aa, synthetic construct
RKETTMD

SEQ ID NO: 82686 - protein, 7 aa, synthetic construct
TSQPRPV

SEQ ID NO: 82687 - protein, 7 aa, synthetic construct
QGHKEPQ

SEQ ID NO: 82688 - protein, 7 aa, synthetic construct
YLTSEQI

SEQ ID NO: 82689 - protein, 7 aa, synthetic construct
GKTHATW

SEQ ID NO: 82690 - protein, 7 aa, synthetic construct
AGRNTTV

SEQ ID NO: 82691 - protein, 7 aa, synthetic construct
GHTKTLV

SEQ ID NO: 82692 - protein, 7 aa, synthetic construct
QPHVQLP

SEQ ID NO: 82693 - protein, 7 aa, synthetic construct
LFTKEYT

SEQ ID NO: 82694 - protein, 7 aa, synthetic construct
KGGQQDQ

SEQ ID NO: 82695 - protein, 7 aa, synthetic construct
LKEYGIG

SEQ ID NO: 82696 - protein, 7 aa, synthetic construct
NGLKPHE

SEQ ID NO: 82697 - protein, 7 aa, synthetic construct
IQGTVYG

SEQ ID NO: 82698 - protein, 7 aa, synthetic construct
GVQKKMD

SEQ ID NO: 82699 - protein, 7 aa, synthetic construct
TIMYGKA

SEQ ID NO: 82700 - protein, 7 aa, synthetic construct
LKMTNDV

SEQ ID NO: 82701 - protein, 7 aa, synthetic construct
FSTTVAH

SEQ ID NO: 82702 - protein, 7 aa, synthetic construct
WRKYEYD

SEQ ID NO: 82703 - protein, 7 aa, synthetic construct
QLGGKIP

SEQ ID NO: 82704 - protein, 7 aa, synthetic construct
YTKDNPG

SEQ ID NO: 82705 - protein, 7 aa, synthetic construct
YVGITYD

SEQ ID NO: 82706 - protein, 7 aa, synthetic construct
RSHHDEL

SEQ ID NO: 82707 - protein, 7 aa, synthetic construct
DWSHKNV

SEQ ID NO: 82708 - protein, 7 aa, synthetic construct
VDKSMAH

SEQ ID NO: 82709 - protein, 7 aa, synthetic construct
MHTNVEK

SEQ ID NO: 82710 - protein, 7 aa, synthetic construct
HDRFVPH

SEQ ID NO: 82711 - protein, 7 aa, synthetic construct
KPANGTG

SEQ ID NO: 82712 - protein, 7 aa, synthetic construct
KMEFKFE

SEQ ID NO: 82713 - protein, 7 aa, synthetic construct
RTPIGGM

SEQ ID NO: 82714 - protein, 7 aa, synthetic construct
GIVSIRP

SEQ ID NO: 82715 - protein, 7 aa, synthetic construct
RLDWDKG

SEQ ID NO: 82716 - protein, 7 aa, synthetic construct
PNLAVPA

SEQ ID NO: 82717 - protein, 7 aa, synthetic construct
GGTNIMV

SEQ ID NO: 82718 - protein, 7 aa, synthetic construct
IHGFQNH

SEQ ID NO: 82719 - protein, 7 aa, synthetic construct
MKNNVQA

SEQ ID NO: 82720 - protein, 7 aa, synthetic construct
AGQAKVN

SEQ ID NO: 82721 - protein, 7 aa, synthetic construct
PNTTDRH

SEQ ID NO: 82722 - protein, 7 aa, synthetic construct
HAMRKDV

SEQ ID NO: 82723 - protein, 7 aa, synthetic construct
RNNADQV

SEQ ID NO: 82724 - protein, 7 aa, synthetic construct
YAKYLVD

SEQ ID NO: 82725 - protein, 7 aa, synthetic construct
YDRTENH

SEQ ID NO: 82726 - protein, 7 aa, synthetic construct
YNVNHLN

SEQ ID NO: 82727 - protein, 7 aa, synthetic construct
EKKNFDH

SEQ ID NO: 82728 - protein, 7 aa, synthetic construct
DNKPYKF

SEQ ID NO: 82729 - protein, 7 aa, synthetic construct
YPTGSGK

SEQ ID NO: 82730 - protein, 7 aa, synthetic construct
NQNSRPG

SEQ ID NO: 82731 - protein, 7 aa, synthetic construct
DQRIGLQ

SEQ ID NO: 82732 - protein, 7 aa, synthetic construct
PALHKDW

SEQ ID NO: 82733 - protein, 7 aa, synthetic construct
QSGMKMA

SEQ ID NO: 82734 - protein, 7 aa, synthetic construct
VPQEHNT

SEQ ID NO: 82735 - protein, 7 aa, synthetic construct
MLGNSSV

SEQ ID NO: 82736 - protein, 7 aa, synthetic construct
LSKPSNG

SEQ ID NO: 82737 - protein, 7 aa, synthetic construct
QHLREPI

SEQ ID NO: 82738 - protein, 7 aa, synthetic construct
PTPQAHK

SEQ ID NO: 82739 - protein, 7 aa, synthetic construct
LNLRREN

SEQ ID NO: 82740 - protein, 7 aa, synthetic construct
SIMKTNY

SEQ ID NO: 82741 - protein, 7 aa, synthetic construct
HYSPHGP

SEQ ID NO: 82742 - protein, 7 aa, synthetic construct
ITEHSMM

SEQ ID NO: 82743 - protein, 7 aa, synthetic construct
MNTRVAM

SEQ ID NO: 82744 - protein, 7 aa, synthetic construct
YAMKTTP

SEQ ID NO: 82745 - protein, 7 aa, synthetic construct
KIVGAQT

SEQ ID NO: 82746 - protein, 7 aa, synthetic construct
LPQNDQV

SEQ ID NO: 82747 - protein, 7 aa, synthetic construct
WAKGLEQ

SEQ ID NO: 82748 - protein, 7 aa, synthetic construct
QFSKSEL

SEQ ID NO: 82749 - protein, 7 aa, synthetic construct
VVAQQTR

SEQ ID NO: 82750 - protein, 7 aa, synthetic construct
SKATNSP

SEQ ID NO: 82751 - protein, 7 aa, synthetic construct
QARTQDF

SEQ ID NO: 82752 - protein, 7 aa, synthetic construct
HRAGDEG

SEQ ID NO: 82753 - protein, 7 aa, synthetic construct
QNGRSMP

SEQ ID NO: 82754 - protein, 7 aa, synthetic construct
PIKVSQG

SEQ ID NO: 82755 - protein, 7 aa, synthetic construct
RPTLMVE

SEQ ID NO: 82756 - protein, 7 aa, synthetic construct
TYNDNTA

SEQ ID NO: 82757 - protein, 7 aa, synthetic construct
VIDPRGN

SEQ ID NO: 82758 - protein, 7 aa, synthetic construct
DSMAQIK

SEQ ID NO: 82759 - protein, 7 aa, synthetic construct
MLDNRQA

SEQ ID NO: 82760 - protein, 7 aa, synthetic construct
YTMSQSK

SEQ ID NO: 82761 - protein, 7 aa, synthetic construct
ESRGGQS

SEQ ID NO: 82762 - protein, 7 aa, synthetic construct
TAMIMPA

SEQ ID NO: 82763 - protein, 7 aa, synthetic construct
IIEKNSN

SEQ ID NO: 82764 - protein, 7 aa, synthetic construct
TGMGRTP

SEQ ID NO: 82765 - protein, 7 aa, synthetic construct
HRSADVY

SEQ ID NO: 82766 - protein, 7 aa, synthetic construct
HLLDGSR

SEQ ID NO: 82767 - protein, 7 aa, synthetic construct
DQKPNLR

SEQ ID NO: 82768 - protein, 7 aa, synthetic construct
LLTKYDK

SEQ ID NO: 82769 - protein, 7 aa, synthetic construct
KVYDPTH

SEQ ID NO: 82770 - protein, 7 aa, synthetic construct
VQDFKHK

SEQ ID NO: 82771 - protein, 7 aa, synthetic construct
DLWKTSG

SEQ ID NO: 82772 - protein, 7 aa, synthetic construct
AKSTLNF

SEQ ID NO: 82773 - protein, 7 aa, synthetic construct
TNPSLPA

SEQ ID NO: 82774 - protein, 7 aa, synthetic construct
RNGELYQ

SEQ ID NO: 82775 - protein, 7 aa, synthetic construct
MVSRSER

SEQ ID NO: 82776 - protein, 7 aa, synthetic construct
VRDRMAP

SEQ ID NO: 82777 - protein, 7 aa, synthetic construct
QATNVVV

SEQ ID NO: 82778 - protein, 7 aa, synthetic construct
HFNKVHD

SEQ ID NO: 82779 - protein, 7 aa, synthetic construct
ARDIMTH

SEQ ID NO: 82780 - protein, 7 aa, synthetic construct
NRETAYG

SEQ ID NO: 82781 - protein, 7 aa, synthetic construct
GSKEHAR

SEQ ID NO: 82782 - protein, 7 aa, synthetic construct
YVKTATQ

SEQ ID NO: 82783 - protein, 7 aa, synthetic construct
SDVRFKH

SEQ ID NO: 82784 - protein, 7 aa, synthetic construct
HFKADNE

SEQ ID NO: 82785 - protein, 7 aa, synthetic construct
RDMNRDR

SEQ ID NO: 82786 - protein, 7 aa, synthetic construct
IKSQNNT

SEQ ID NO: 82787 - protein, 7 aa, synthetic construct
YRATYQQ

SEQ ID NO: 82788 - protein, 7 aa, synthetic construct
KTNVQQG

SEQ ID NO: 82789 - protein, 7 aa, synthetic construct
QTSNPGH

SEQ ID NO: 82790 - protein, 7 aa, synthetic construct
HPHRINQ

SEQ ID NO: 82791 - protein, 7 aa, synthetic construct
KVDYDQI

SEQ ID NO: 82792 - protein, 7 aa, synthetic construct
QKLSDYL

SEQ ID NO: 82793 - protein, 7 aa, synthetic construct
GVITNQI

SEQ ID NO: 82794 - protein, 7 aa, synthetic construct
RESPNNF

SEQ ID NO: 82795 - protein, 7 aa, synthetic construct
RDEMKRT

SEQ ID NO: 82796 - protein, 7 aa, synthetic construct
SAYGMKE

SEQ ID NO: 82797 - protein, 7 aa, synthetic construct
GRTSQFM

SEQ ID NO: 82798 - protein, 7 aa, synthetic construct
HIYPNKN

SEQ ID NO: 82799 - protein, 7 aa, synthetic construct
ISNIYTG

SEQ ID NO: 82800 - protein, 7 aa, synthetic construct
FMKNEAS

SEQ ID NO: 82801 - protein, 7 aa, synthetic construct
TQARGAT

SEQ ID NO: 82802 - protein, 7 aa, synthetic construct
RNSNGGN

SEQ ID NO: 82803 - protein, 7 aa, synthetic construct
AMSANAI

SEQ ID NO: 82804 - protein, 7 aa, synthetic construct
FSGIRVM

SEQ ID NO: 82805 - protein, 7 aa, synthetic construct
PIPNRQQ

SEQ ID NO: 82806 - protein, 7 aa, synthetic construct
LNHQNEI

SEQ ID NO: 82807 - protein, 7 aa, synthetic construct
MDKVKME

SEQ ID NO: 82808 - protein, 7 aa, synthetic construct
AKHEREG

SEQ ID NO: 82809 - protein, 7 aa, synthetic construct
TRKSGDE

SEQ ID NO: 82810 - protein, 7 aa, synthetic construct
VSDYKQF

SEQ ID NO: 82811 - protein, 7 aa, synthetic construct
LGRQGEN

SEQ ID NO: 82812 - protein, 7 aa, synthetic construct
MAQISAP

SEQ ID NO: 82813 - protein, 7 aa, synthetic construct
TQKIMTT

SEQ ID NO: 82814 - protein, 7 aa, synthetic construct
AKSGNGS

SEQ ID NO: 82815 - protein, 7 aa, synthetic construct
PPGIMQT

SEQ ID NO: 82816 - protein, 7 aa, synthetic construct
KHSSWSE

SEQ ID NO: 82817 - protein, 7 aa, synthetic construct
SFRDQQT

SEQ ID NO: 82818 - protein, 7 aa, synthetic construct
KADKSDL

SEQ ID NO: 82819 - protein, 7 aa, synthetic construct
VQKMHTD

SEQ ID NO: 82820 - protein, 7 aa, synthetic construct
PAHVQHP

SEQ ID NO: 82821 - protein, 7 aa, synthetic construct
YKNIMST

SEQ ID NO: 82822 - protein, 7 aa, synthetic construct
KIPYEKE

SEQ ID NO: 82823 - protein, 7 aa, synthetic construct
GSNPTMS

SEQ ID NO: 82824 - protein, 7 aa, synthetic construct
GWKMNNE

SEQ ID NO: 82825 - protein, 7 aa, synthetic construct
KNGMAAA

SEQ ID NO: 82826 - protein, 7 aa, synthetic construct
AGQEHRI

SEQ ID NO: 82827 - protein, 7 aa, synthetic construct
REKANVE

SEQ ID NO: 82828 - protein, 7 aa, synthetic construct
NAPLMQV

SEQ ID NO: 82829 - protein, 7 aa, synthetic construct
NTDKPHQ

SEQ ID NO: 82830 - protein, 7 aa, synthetic construct
KTNQNMS

SEQ ID NO: 82831 - protein, 7 aa, synthetic construct
RDFDNAT

SEQ ID NO: 82832 - protein, 7 aa, synthetic construct
INPGTLE

SEQ ID NO: 82833 - protein, 7 aa, synthetic construct
MHEKHIM

SEQ ID NO: 82834 - protein, 7 aa, synthetic construct
NKNPMNT

SEQ ID NO: 82835 - protein, 7 aa, synthetic construct
YKGANEN

SEQ ID NO: 82836 - protein, 7 aa, synthetic construct
MSKDHTN

SEQ ID NO: 82837 - protein, 7 aa, synthetic construct
YNHHAPL

SEQ ID NO: 82838 - protein, 7 aa, synthetic construct
LFSAKTH

SEQ ID NO: 82839 - protein, 7 aa, synthetic construct
PEYTKNH

SEQ ID NO: 82840 - protein, 7 aa, synthetic construct
HVTLSRS

SEQ ID NO: 82841 - protein, 7 aa, synthetic construct
LRIKEHM

SEQ ID NO: 82842 - protein, 7 aa, synthetic construct
ANRTLTH

SEQ ID NO: 82843 - protein, 7 aa, synthetic construct
KKPPNQE

SEQ ID NO: 82844 - protein, 7 aa, synthetic construct
KLTYESS

SEQ ID NO: 82845 - protein, 7 aa, synthetic construct
PKQTTTA

SEQ ID NO: 82846 - protein, 7 aa, synthetic construct
SKHFQQE

SEQ ID NO: 82847 - protein, 7 aa, synthetic construct
GTQHQSV

SEQ ID NO: 82848 - protein, 7 aa, synthetic construct
NRTDTDK

SEQ ID NO: 82849 - protein, 7 aa, synthetic construct
RDRNNLD

SEQ ID NO: 82850 - protein, 7 aa, synthetic construct
KQSGEIW

SEQ ID NO: 82851 - protein, 7 aa, synthetic construct
RFNNIQI

SEQ ID NO: 82852 - protein, 7 aa, synthetic construct
MIVKHVE

SEQ ID NO: 82853 - protein, 7 aa, synthetic construct
AAGRTAP

SEQ ID NO: 82854 - protein, 7 aa, synthetic construct
WKVDGGY

SEQ ID NO: 82855 - protein, 7 aa, synthetic construct
FETHMAP

SEQ ID NO: 82856 - protein, 7 aa, synthetic construct
AAQSHNV

SEQ ID NO: 82857 - protein, 7 aa, synthetic construct
ISGREHY

SEQ ID NO: 82858 - protein, 7 aa, synthetic construct
VNQMRNI

SEQ ID NO: 82859 - protein, 7 aa, synthetic construct
NIGQAYQ

SEQ ID NO: 82860 - protein, 7 aa, synthetic construct
ETKHYLA

SEQ ID NO: 82861 - protein, 7 aa, synthetic construct
GLNSGKY

SEQ ID NO: 82862 - protein, 7 aa, synthetic construct
KDQLTPM

SEQ ID NO: 82863 - protein, 7 aa, synthetic construct
IAHVNGM

SEQ ID NO: 82864 - protein, 7 aa, synthetic construct
MSRLATL

SEQ ID NO: 82865 - protein, 7 aa, synthetic construct
FIADSHA

SEQ ID NO: 82866 - protein, 7 aa, synthetic construct
MPPHGIE

SEQ ID NO: 82867 - protein, 7 aa, synthetic construct
GQIHDLR

SEQ ID NO: 82868 - protein, 7 aa, synthetic construct
RDIKAGV

SEQ ID NO: 82869 - protein, 7 aa, synthetic construct
DRQHTWE

SEQ ID NO: 82870 - protein, 7 aa, synthetic construct
FPDPGKG

SEQ ID NO: 82871 - protein, 7 aa, synthetic construct
PRNATTA

SEQ ID NO: 82872 - protein, 7 aa, synthetic construct
MYTKDSE

SEQ ID NO: 82873 - protein, 7 aa, synthetic construct
NAPVFRP

SEQ ID NO: 82874 - protein, 7 aa, synthetic construct
QPSLPHM

SEQ ID NO: 82875 - protein, 7 aa, synthetic construct
NVFRNDA

SEQ ID NO: 82876 - protein, 7 aa, synthetic construct
NAERLAG

SEQ ID NO: 82877 - protein, 7 aa, synthetic construct
KNGQYAN

SEQ ID NO: 82878 - protein, 7 aa, synthetic construct
SGDFRTF

SEQ ID NO: 82879 - protein, 7 aa, synthetic construct
NKRTNET

SEQ ID NO: 82880 - protein, 7 aa, synthetic construct
AMTPAQS

SEQ ID NO: 82881 - protein, 7 aa, synthetic construct
LKGETQG

SEQ ID NO: 82882 - protein, 7 aa, synthetic construct
LAPSNLR

SEQ ID NO: 82883 - protein, 7 aa, synthetic construct
HLNSIER

SEQ ID NO: 82884 - protein, 7 aa, synthetic construct
TIFGENK

SEQ ID NO: 82885 - protein, 7 aa, synthetic construct
LQHKQTH

SEQ ID NO: 82886 - protein, 7 aa, synthetic construct
FRVGGLV

SEQ ID NO: 82887 - protein, 7 aa, synthetic construct
QLKPANG

SEQ ID NO: 82888 - protein, 7 aa, synthetic construct
DLPIQKV

SEQ ID NO: 82889 - protein, 7 aa, synthetic construct
PQYIPTE

SEQ ID NO: 82890 - protein, 7 aa, synthetic construct
PKLNGNY

SEQ ID NO: 82891 - protein, 7 aa, synthetic construct
PVKGAQP

SEQ ID NO: 82892 - protein, 7 aa, synthetic construct
YPVSTPT

SEQ ID NO: 82893 - protein, 7 aa, synthetic construct
PHDRSLM

SEQ ID NO: 82894 - protein, 7 aa, synthetic construct
LSTTDLA

SEQ ID NO: 82895 - protein, 7 aa, synthetic construct
TKMSNQY

SEQ ID NO: 82896 - protein, 7 aa, synthetic construct
HYSNNTI

SEQ ID NO: 82897 - protein, 7 aa, synthetic construct
VYGVDKA

SEQ ID NO: 82898 - protein, 7 aa, synthetic construct
DRNALNF

SEQ ID NO: 82899 - protein, 7 aa, synthetic construct
VMPHNRP

SEQ ID NO: 82900 - protein, 7 aa, synthetic construct
KDLPPHG

SEQ ID NO: 82901 - protein, 7 aa, synthetic construct
EIDKKWQ

SEQ ID NO: 82902 - protein, 7 aa, synthetic construct
DKARSEW

SEQ ID NO: 82903 - protein, 7 aa, synthetic construct
NIASKPP

SEQ ID NO: 82904 - protein, 7 aa, synthetic construct
QGVGKTP

SEQ ID NO: 82905 - protein, 7 aa, synthetic construct
MFAGQGH

SEQ ID NO: 82906 - protein, 7 aa, synthetic construct
VWVGNAA

SEQ ID NO: 82907 - protein, 7 aa, synthetic construct
KGNINTM

SEQ ID NO: 82908 - protein, 7 aa, synthetic construct
MNQVRTP

SEQ ID NO: 82909 - protein, 7 aa, synthetic construct
QGIPVRN

SEQ ID NO: 82910 - protein, 7 aa, synthetic construct
KKGVEDT

SEQ ID NO: 82911 - protein, 7 aa, synthetic construct
STKIQVD

SEQ ID NO: 82912 - protein, 7 aa, synthetic construct
ETRPFQA

SEQ ID NO: 82913 - protein, 7 aa, synthetic construct
GVAKTTG

SEQ ID NO: 82914 - protein, 7 aa, synthetic construct
GKPAEEK

SEQ ID NO: 82915 - protein, 7 aa, synthetic construct
DSKGLTF

SEQ ID NO: 82916 - protein, 7 aa, synthetic construct
IATKGMQ

SEQ ID NO: 82917 - protein, 7 aa, synthetic construct
WDMRPEK

SEQ ID NO: 82918 - protein, 7 aa, synthetic construct
MNRQVLH

SEQ ID NO: 82919 - protein, 7 aa, synthetic construct
HSAVTMM

SEQ ID NO: 82920 - protein, 7 aa, synthetic construct
NDLRPVF

SEQ ID NO: 82921 - protein, 7 aa, synthetic construct
MFGITVP

SEQ ID NO: 82922 - protein, 7 aa, synthetic construct
RPKAEAV

SEQ ID NO: 82923 - protein, 7 aa, synthetic construct
VKGTTII

SEQ ID NO: 82924 - protein, 7 aa, synthetic construct
KSNPAVA

SEQ ID NO: 82925 - protein, 7 aa, synthetic construct
DHTLRAK

SEQ ID NO: 82926 - protein, 7 aa, synthetic construct
LQHTKES

SEQ ID NO: 82927 - protein, 7 aa, synthetic construct
RFPYPEE

SEQ ID NO: 82928 - protein, 7 aa, synthetic construct
KDMKGGG

SEQ ID NO: 82929 - protein, 7 aa, synthetic construct
WKEMTGI

SEQ ID NO: 82930 - protein, 7 aa, synthetic construct
HMNGAQK

SEQ ID NO: 82931 - protein, 7 aa, synthetic construct
WHNDPKI

SEQ ID NO: 82932 - protein, 7 aa, synthetic construct
KVVTKSD

SEQ ID NO: 82933 - protein, 7 aa, synthetic construct
GYDQRDK

SEQ ID NO: 82934 - protein, 7 aa, synthetic construct
KMYNAAS

SEQ ID NO: 82935 - protein, 7 aa, synthetic construct
TVGVFQS

SEQ ID NO: 82936 - protein, 7 aa, synthetic construct
VNPHASR

SEQ ID NO: 82937 - protein, 7 aa, synthetic construct
DAVKVVH

SEQ ID NO: 82938 - protein, 7 aa, synthetic construct
QVENQRI

SEQ ID NO: 82939 - protein, 7 aa, synthetic construct
NEHKIQP

SEQ ID NO: 82940 - protein, 7 aa, synthetic construct
AQKMHAL

SEQ ID NO: 82941 - protein, 7 aa, synthetic construct
PPGNHRF

SEQ ID NO: 82942 - protein, 7 aa, synthetic construct
KMPESQW

SEQ ID NO: 82943 - protein, 7 aa, synthetic construct
KKVDSSV

SEQ ID NO: 82944 - protein, 7 aa, synthetic construct
YKPPTAS

SEQ ID NO: 82945 - protein, 7 aa, synthetic construct
VNQHASI

SEQ ID NO: 82946 - protein, 7 aa, synthetic construct
LAEKVVT

SEQ ID NO: 82947 - protein, 7 aa, synthetic construct
APRHNGT

SEQ ID NO: 82948 - protein, 7 aa, synthetic construct
VQMKDQW

SEQ ID NO: 82949 - protein, 7 aa, synthetic construct
AQDSRRM

SEQ ID NO: 82950 - protein, 7 aa, synthetic construct
AHSVVPH

SEQ ID NO: 82951 - protein, 7 aa, synthetic construct
SYPEPTR

SEQ ID NO: 82952 - protein, 7 aa, synthetic construct
VTQGASP

SEQ ID NO: 82953 - protein, 7 aa, synthetic construct
MMKEAYR

SEQ ID NO: 82954 - protein, 7 aa, synthetic construct
WQEYIKE

SEQ ID NO: 82955 - protein, 7 aa, synthetic construct
HHDQSGK

SEQ ID NO: 82956 - protein, 7 aa, synthetic construct
GFAQQPH

SEQ ID NO: 82957 - protein, 7 aa, synthetic construct
PTKPSQA

SEQ ID NO: 82958 - protein, 7 aa, synthetic construct
GAQNAHK

SEQ ID NO: 82959 - protein, 7 aa, synthetic construct
IERSMHM

SEQ ID NO: 82960 - protein, 7 aa, synthetic construct
IVNKEYT

SEQ ID NO: 82961 - protein, 7 aa, synthetic construct
PWGGQTE

SEQ ID NO: 82962 - protein, 7 aa, synthetic construct
PYTASGA

SEQ ID NO: 82963 - protein, 7 aa, synthetic construct
EMHKLQI

SEQ ID NO: 82964 - protein, 7 aa, synthetic construct
YRIDRIS

SEQ ID NO: 82965 - protein, 7 aa, synthetic construct
KQPNSAG

SEQ ID NO: 82966 - protein, 7 aa, synthetic construct
MRTLDHI

SEQ ID NO: 82967 - protein, 7 aa, synthetic construct
SRQMDQE

SEQ ID NO: 82968 - protein, 7 aa, synthetic construct
GRMDVPF

SEQ ID NO: 82969 - protein, 7 aa, synthetic construct
TTRADEF

SEQ ID NO: 82970 - protein, 7 aa, synthetic construct
NIPSHET

SEQ ID NO: 82971 - protein, 7 aa, synthetic construct
TSNQQNP

SEQ ID NO: 82972 - protein, 7 aa, synthetic construct
TANNNGK

SEQ ID NO: 82973 - protein, 7 aa, synthetic construct
KLGLISS

SEQ ID NO: 82974 - protein, 7 aa, synthetic construct
TTSPSAE

SEQ ID NO: 82975 - protein, 7 aa, synthetic construct
ERSIHNT

SEQ ID NO: 82976 - protein, 7 aa, synthetic construct
SPFIDHA

SEQ ID NO: 82977 - protein, 7 aa, synthetic construct
FEFRDVE

SEQ ID NO: 82978 - protein, 7 aa, synthetic construct
MPVLKPS

SEQ ID NO: 82979 - protein, 7 aa, synthetic construct
NNQKFAP

SEQ ID NO: 82980 - protein, 7 aa, synthetic construct
QTETTKS

SEQ ID NO: 82981 - protein, 7 aa, synthetic construct
EHGYKMP

SEQ ID NO: 82982 - protein, 7 aa, synthetic construct
THKDSPQ

SEQ ID NO: 82983 - protein, 7 aa, synthetic construct
KVSYPTP

SEQ ID NO: 82984 - protein, 7 aa, synthetic construct
NPLNRTN

SEQ ID NO: 82985 - protein, 7 aa, synthetic construct
TPSKLID

SEQ ID NO: 82986 - protein, 7 aa, synthetic construct
SIQTHSI

SEQ ID NO: 82987 - protein, 7 aa, synthetic construct
MNSTQFV

SEQ ID NO: 82988 - protein, 7 aa, synthetic construct
PRPDGIV

SEQ ID NO: 82989 - protein, 7 aa, synthetic construct
DQRGVRD

SEQ ID NO: 82990 - protein, 7 aa, synthetic construct
HQTVGSI

SEQ ID NO: 82991 - protein, 7 aa, synthetic construct
GRNVALP

SEQ ID NO: 82992 - protein, 7 aa, synthetic construct
LREKSDV

SEQ ID NO: 82993 - protein, 7 aa, synthetic construct
RQSMVLG

SEQ ID NO: 82994 - protein, 7 aa, synthetic construct
HTPFHDR

SEQ ID NO: 82995 - protein, 7 aa, synthetic construct
TYGISTD

SEQ ID NO: 82996 - protein, 7 aa, synthetic construct
MMTGKDM

SEQ ID NO: 82997 - protein, 7 aa, synthetic construct
MNPRAHT

SEQ ID NO: 82998 - protein, 7 aa, synthetic construct
HSNMGIH

SEQ ID NO: 82999 - protein, 7 aa, synthetic construct
DYDGGKV

SEQ ID NO: 83000 - protein, 7 aa, synthetic construct
KGNTMTA

SEQ ID NO: 83001 - protein, 7 aa, synthetic construct
IYQDGSP

SEQ ID NO: 83002 - protein, 7 aa, synthetic construct
INLRDPG

SEQ ID NO: 83003 - protein, 7 aa, synthetic construct
STMKVLP

SEQ ID NO: 83004 - protein, 7 aa, synthetic construct
PGKNGFH

SEQ ID NO: 83005 - protein, 7 aa, synthetic construct
ILSPQKN

SEQ ID NO: 83006 - protein, 7 aa, synthetic construct
GAPNRAD

SEQ ID NO: 83007 - protein, 7 aa, synthetic construct
TQGARVG

SEQ ID NO: 83008 - protein, 7 aa, synthetic construct
VHNNEAH

SEQ ID NO: 83009 - protein, 7 aa, synthetic construct
QTGTMDK

SEQ ID NO: 83010 - protein, 7 aa, synthetic construct
NGIPGIM

SEQ ID NO: 83011 - protein, 7 aa, synthetic construct
VEPQIRN

SEQ ID NO: 83012 - protein, 7 aa, synthetic construct
QSTHTKF

SEQ ID NO: 83013 - protein, 7 aa, synthetic construct
LFTDHGG

SEQ ID NO: 83014 - protein, 7 aa, synthetic construct
AAMKSFA

SEQ ID NO: 83015 - protein, 7 aa, synthetic construct
HERSQQT

SEQ ID NO: 83016 - protein, 7 aa, synthetic construct
IPTSHLR

SEQ ID NO: 83017 - protein, 7 aa, synthetic construct
LHFGGPQ

SEQ ID NO: 83018 - protein, 7 aa, synthetic construct
MLTHDHH

SEQ ID NO: 83019 - protein, 7 aa, synthetic construct
TQIRQNE

SEQ ID NO: 83020 - protein, 7 aa, synthetic construct
EVQKFAR

SEQ ID NO: 83021 - protein, 7 aa, synthetic construct
WPDMRSV

SEQ ID NO: 83022 - protein, 7 aa, synthetic construct
HMPNARH

SEQ ID NO: 83023 - protein, 7 aa, synthetic construct
VQTNYAA

SEQ ID NO: 83024 - protein, 7 aa, synthetic construct
VLGTGLI

SEQ ID NO: 83025 - protein, 7 aa, synthetic construct
PWKADHT

SEQ ID NO: 83026 - protein, 7 aa, synthetic construct
YGTWRQD

SEQ ID NO: 83027 - protein, 7 aa, synthetic construct
GLKNYTI

SEQ ID NO: 83028 - protein, 7 aa, synthetic construct
SPTYTLA

SEQ ID NO: 83029 - protein, 7 aa, synthetic construct
YQREEGH

SEQ ID NO: 83030 - protein, 7 aa, synthetic construct
ISQPLTG

SEQ ID NO: 83031 - protein, 7 aa, synthetic construct
ELRGMMV

SEQ ID NO: 83032 - protein, 7 aa, synthetic construct
YTNAKEK

SEQ ID NO: 83033 - protein, 7 aa, synthetic construct
TSDKAKY

SEQ ID NO: 83034 - protein, 7 aa, synthetic construct
SRVVVQH

SEQ ID NO: 83035 - protein, 7 aa, synthetic construct
AKQGKME

SEQ ID NO: 83036 - protein, 7 aa, synthetic construct
HPNNPIM

SEQ ID NO: 83037 - protein, 7 aa, synthetic construct
WQQKDIV

SEQ ID NO: 83038 - protein, 7 aa, synthetic construct
SPKSPLY

SEQ ID NO: 83039 - protein, 7 aa, synthetic construct
KGAKIAE

SEQ ID NO: 83040 - protein, 7 aa, synthetic construct
VFKMTVN

SEQ ID NO: 83041 - protein, 7 aa, synthetic construct
VPRVNQL

SEQ ID NO: 83042 - protein, 7 aa, synthetic construct
LIAYNDA

SEQ ID NO: 83043 - protein, 7 aa, synthetic construct
GQMISQG

SEQ ID NO: 83044 - protein, 7 aa, synthetic construct
HDKTMHP

SEQ ID NO: 83045 - protein, 7 aa, synthetic construct
DKLKGTM

SEQ ID NO: 83046 - protein, 7 aa, synthetic construct
NPTTTLV

SEQ ID NO: 83047 - protein, 7 aa, synthetic construct
LLKNPFA

SEQ ID NO: 83048 - protein, 7 aa, synthetic construct
WKPATQF

SEQ ID NO: 83049 - protein, 7 aa, synthetic construct
KIKTMTE

SEQ ID NO: 83050 - protein, 7 aa, synthetic construct
VPNFPVG

SEQ ID NO: 83051 - protein, 7 aa, synthetic construct
KKNDEWA

SEQ ID NO: 83052 - protein, 7 aa, synthetic construct
NLIQTEK

SEQ ID NO: 83053 - protein, 7 aa, synthetic construct
GRGEEGL

SEQ ID NO: 83054 - protein, 7 aa, synthetic construct
APPTGYT

SEQ ID NO: 83055 - protein, 7 aa, synthetic construct
NNVTRPE

SEQ ID NO: 83056 - protein, 7 aa, synthetic construct
QKQYQNT

SEQ ID NO: 83057 - protein, 7 aa, synthetic construct
KDYGMRV

SEQ ID NO: 83058 - protein, 7 aa, synthetic construct
VDMRAAE

SEQ ID NO: 83059 - protein, 7 aa, synthetic construct
KQGPNTG

SEQ ID NO: 83060 - protein, 7 aa, synthetic construct
LTQTPST

SEQ ID NO: 83061 - protein, 7 aa, synthetic construct
KNPENPP

SEQ ID NO: 83062 - protein, 7 aa, synthetic construct
NKFLDAT

SEQ ID NO: 83063 - protein, 7 aa, synthetic construct
YIDNKSQ

SEQ ID NO: 83064 - protein, 7 aa, synthetic construct
TANRQDI

SEQ ID NO: 83065 - protein, 7 aa, synthetic construct
GRHQPDP

SEQ ID NO: 83066 - protein, 7 aa, synthetic construct
TYPPKHI

SEQ ID NO: 83067 - protein, 7 aa, synthetic construct
KNMVGVN

SEQ ID NO: 83068 - protein, 7 aa, synthetic construct
GDSAREM

SEQ ID NO: 83069 - protein, 7 aa, synthetic construct
LAERASY

SEQ ID NO: 83070 - protein, 7 aa, synthetic construct
PMAYDER

SEQ ID NO: 83071 - protein, 7 aa, synthetic construct
SSKDSMV

SEQ ID NO: 83072 - protein, 7 aa, synthetic construct
IMEHHRS

SEQ ID NO: 83073 - protein, 7 aa, synthetic construct
YTQSTQY

SEQ ID NO: 83074 - protein, 7 aa, synthetic construct
VYSEHVP

SEQ ID NO: 83075 - protein, 7 aa, synthetic construct
PKSTNGM

SEQ ID NO: 83076 - protein, 7 aa, synthetic construct
DYSEVKR

SEQ ID NO: 83077 - protein, 7 aa, synthetic construct
KADVLWE

SEQ ID NO: 83078 - protein, 7 aa, synthetic construct
AQPQQAK

SEQ ID NO: 83079 - protein, 7 aa, synthetic construct
LTKMEHT

SEQ ID NO: 83080 - protein, 7 aa, synthetic construct
DQFRVEG

SEQ ID NO: 83081 - protein, 7 aa, synthetic construct
RMADQRM

SEQ ID NO: 83082 - protein, 7 aa, synthetic construct
EQKGVTT

SEQ ID NO: 83083 - protein, 7 aa, synthetic construct
GNALAVM

SEQ ID NO: 83084 - protein, 7 aa, synthetic construct
WMGQPSK

SEQ ID NO: 83085 - protein, 7 aa, synthetic construct
ETSSSHH

SEQ ID NO: 83086 - protein, 7 aa, synthetic construct
QTDFVRG

SEQ ID NO: 83087 - protein, 7 aa, synthetic construct
LDHHAAL

SEQ ID NO: 83088 - protein, 7 aa, synthetic construct
SHANTVT

SEQ ID NO: 83089 - protein, 7 aa, synthetic construct
AINSAQV

SEQ ID NO: 83090 - protein, 7 aa, synthetic construct
NAWKSNV

SEQ ID NO: 83091 - protein, 7 aa, synthetic construct
NKANASP

SEQ ID NO: 83092 - protein, 7 aa, synthetic construct
LNKDKLI

SEQ ID NO: 83093 - protein, 7 aa, synthetic construct
KANNNVA

SEQ ID NO: 83094 - protein, 7 aa, synthetic construct
IAAFKQH

SEQ ID NO: 83095 - protein, 7 aa, synthetic construct
KTESGRP

SEQ ID NO: 83096 - protein, 7 aa, synthetic construct
MHIPMPT

SEQ ID NO: 83097 - protein, 7 aa, synthetic construct
WMGVIEE

SEQ ID NO: 83098 - protein, 7 aa, synthetic construct
YKQGPTG

SEQ ID NO: 83099 - protein, 7 aa, synthetic construct
QNDGRPT

SEQ ID NO: 83100 - protein, 7 aa, synthetic construct
KMSQQHY

SEQ ID NO: 83101 - protein, 7 aa, synthetic construct
AYPKMGS

SEQ ID NO: 83102 - protein, 7 aa, synthetic construct
DSTPGPH

SEQ ID NO: 83103 - protein, 7 aa, synthetic construct
ITATNTG

SEQ ID NO: 83104 - protein, 7 aa, synthetic construct
WTNKDEA

SEQ ID NO: 83105 - protein, 7 aa, synthetic construct
MGKNPTA

SEQ ID NO: 83106 - protein, 7 aa, synthetic construct
LQAHAVD

SEQ ID NO: 83107 - protein, 7 aa, synthetic construct
KVNSGIS

SEQ ID NO: 83108 - protein, 7 aa, synthetic construct
NTAKMHL

SEQ ID NO: 83109 - protein, 7 aa, synthetic construct
HVENRGR

SEQ ID NO: 83110 - protein, 7 aa, synthetic construct
VENGAKN

SEQ ID NO: 83111 - protein, 7 aa, synthetic construct
EKHASAV

SEQ ID NO: 83112 - protein, 7 aa, synthetic construct
QKDANQG

SEQ ID NO: 83113 - protein, 7 aa, synthetic construct
TGGPGPS

SEQ ID NO: 83114 - protein, 7 aa, synthetic construct
SIKMSAY

SEQ ID NO: 83115 - protein, 7 aa, synthetic construct
KKVPSSE

SEQ ID NO: 83116 - protein, 7 aa, synthetic construct
TTRDMQM

SEQ ID NO: 83117 - protein, 7 aa, synthetic construct
NNHTINT

SEQ ID NO: 83118 - protein, 7 aa, synthetic construct
RGYNSHD

SEQ ID NO: 83119 - protein, 7 aa, synthetic construct
ANFVNPE

SEQ ID NO: 83120 - protein, 7 aa, synthetic construct
KISNPGL

SEQ ID NO: 83121 - protein, 7 aa, synthetic construct
KPGPTQA

SEQ ID NO: 83122 - protein, 7 aa, synthetic construct
KERISEA

SEQ ID NO: 83123 - protein, 7 aa, synthetic construct
QPYDHSH

SEQ ID NO: 83124 - protein, 7 aa, synthetic construct
PMAVATS

SEQ ID NO: 83125 - protein, 7 aa, synthetic construct
PPVPSRQ

SEQ ID NO: 83126 - protein, 7 aa, synthetic construct
FAANSEI

SEQ ID NO: 83127 - protein, 7 aa, synthetic construct
GIQIKQS

SEQ ID NO: 83128 - protein, 7 aa, synthetic construct
TSTLPRQ

SEQ ID NO: 83129 - protein, 7 aa, synthetic construct
YQSRDDL

SEQ ID NO: 83130 - protein, 7 aa, synthetic construct
DERYGTA

SEQ ID NO: 83131 - protein, 7 aa, synthetic construct
GRIQNTM

SEQ ID NO: 83132 - protein, 7 aa, synthetic construct
KTGREDD

SEQ ID NO: 83133 - protein, 7 aa, synthetic construct
GEIGQGA

SEQ ID NO: 83134 - protein, 7 aa, synthetic construct
GRDRENG

SEQ ID NO: 83135 - protein, 7 aa, synthetic construct
SAMKPHM

SEQ ID NO: 83136 - protein, 7 aa, synthetic construct
GEYTGSA

SEQ ID NO: 83137 - protein, 7 aa, synthetic construct
PTIGQAF

SEQ ID NO: 83138 - protein, 7 aa, synthetic construct
PVPMKQD

SEQ ID NO: 83139 - protein, 7 aa, synthetic construct
QRMNEAK

SEQ ID NO: 83140 - protein, 7 aa, synthetic construct
SPGTIDR

SEQ ID NO: 83141 - protein, 7 aa, synthetic construct
NNAKGEH

SEQ ID NO: 83142 - protein, 7 aa, synthetic construct
GSNQSLI

SEQ ID NO: 83143 - protein, 7 aa, synthetic construct
SAPPTHV

SEQ ID NO: 83144 - protein, 7 aa, synthetic construct
KLYGGAM

SEQ ID NO: 83145 - protein, 7 aa, synthetic construct
RVAINHG

SEQ ID NO: 83146 - protein, 7 aa, synthetic construct
SPIHQQA

SEQ ID NO: 83147 - protein, 7 aa, synthetic construct
SFKSSPT

SEQ ID NO: 83148 - protein, 7 aa, synthetic construct
KDLMVRD

SEQ ID NO: 83149 - protein, 7 aa, synthetic construct
VMKPLNP

SEQ ID NO: 83150 - protein, 7 aa, synthetic construct
HIPTDHA

SEQ ID NO: 83151 - protein, 7 aa, synthetic construct
VPGATLV

SEQ ID NO: 83152 - protein, 7 aa, synthetic construct
KNDHWKD

SEQ ID NO: 83153 - protein, 7 aa, synthetic construct
SQKTQQS

SEQ ID NO: 83154 - protein, 7 aa, synthetic construct
EQGGARG

SEQ ID NO: 83155 - protein, 7 aa, synthetic construct
GKDSMAH

SEQ ID NO: 83156 - protein, 7 aa, synthetic construct
GPGTLMT

SEQ ID NO: 83157 - protein, 7 aa, synthetic construct
KESLGKG

SEQ ID NO: 83158 - protein, 7 aa, synthetic construct
NSVTWKG

SEQ ID NO: 83159 - protein, 7 aa, synthetic construct
KQNSNVA

SEQ ID NO: 83160 - protein, 7 aa, synthetic construct
KTDFSEY

SEQ ID NO: 83161 - protein, 7 aa, synthetic construct
MIRDGRS

SEQ ID NO: 83162 - protein, 7 aa, synthetic construct
ENMSVRV

SEQ ID NO: 83163 - protein, 7 aa, synthetic construct
SRQHENP

SEQ ID NO: 83164 - protein, 7 aa, synthetic construct
ILHNGGD

SEQ ID NO: 83165 - protein, 7 aa, synthetic construct
VVGVNMG

SEQ ID NO: 83166 - protein, 7 aa, synthetic construct
NVGTADM

SEQ ID NO: 83167 - protein, 7 aa, synthetic construct
IVKQQQD

SEQ ID NO: 83168 - protein, 7 aa, synthetic construct
RVSGQGY

SEQ ID NO: 83169 - protein, 7 aa, synthetic construct
QIPDWVG

SEQ ID NO: 83170 - protein, 7 aa, synthetic construct
GHQKEND

SEQ ID NO: 83171 - protein, 7 aa, synthetic construct
ANRIIDY

SEQ ID NO: 83172 - protein, 7 aa, synthetic construct
ASYDPMD

SEQ ID NO: 83173 - protein, 7 aa, synthetic construct
KDQTTMP

SEQ ID NO: 83174 - protein, 7 aa, synthetic construct
RELPKTS

SEQ ID NO: 83175 - protein, 7 aa, synthetic construct
EVNHIGK

SEQ ID NO: 83176 - protein, 7 aa, synthetic construct
HPPDAST

SEQ ID NO: 83177 - protein, 7 aa, synthetic construct
LTQRLDT

SEQ ID NO: 83178 - protein, 7 aa, synthetic construct
VKTVELM

SEQ ID NO: 83179 - protein, 7 aa, synthetic construct
TQLVKGS

SEQ ID NO: 83180 - protein, 7 aa, synthetic construct
QPAHAAY

SEQ ID NO: 83181 - protein, 7 aa, synthetic construct
IHHGNRM

SEQ ID NO: 83182 - protein, 7 aa, synthetic construct
TVDNKGF

SEQ ID NO: 83183 - protein, 7 aa, synthetic construct
TPEMKYP

SEQ ID NO: 83184 - protein, 7 aa, synthetic construct
ALASKDW

SEQ ID NO: 83185 - protein, 7 aa, synthetic construct
KPYPAGP

SEQ ID NO: 83186 - protein, 7 aa, synthetic construct
PKKTGVE

SEQ ID NO: 83187 - protein, 7 aa, synthetic construct
NTTVPHP

SEQ ID NO: 83188 - protein, 7 aa, synthetic construct
PRMNNQP

SEQ ID NO: 83189 - protein, 7 aa, synthetic construct
ANQKISV

SEQ ID NO: 83190 - protein, 7 aa, synthetic construct
ADGGRVG

SEQ ID NO: 83191 - protein, 7 aa, synthetic construct
IFQGSGP

SEQ ID NO: 83192 - protein, 7 aa, synthetic construct
MNAREVS

SEQ ID NO: 83193 - protein, 7 aa, synthetic construct
HLMGQPN

SEQ ID NO: 83194 - protein, 7 aa, synthetic construct
NKSGATP

SEQ ID NO: 83195 - protein, 7 aa, synthetic construct
VDYSKPN

SEQ ID NO: 83196 - protein, 7 aa, synthetic construct
SMTSMSI

SEQ ID NO: 83197 - protein, 7 aa, synthetic construct
FAKPTSH

SEQ ID NO: 83198 - protein, 7 aa, synthetic construct
SFTNGQF

SEQ ID NO: 83199 - protein, 7 aa, synthetic construct
QNRYEEM

SEQ ID NO: 83200 - protein, 7 aa, synthetic construct
NSKDTDM

SEQ ID NO: 83201 - protein, 7 aa, synthetic construct
NVGPNGP

SEQ ID NO: 83202 - protein, 7 aa, synthetic construct
YRAKMFE

SEQ ID NO: 83203 - protein, 7 aa, synthetic construct
WGGVVHH

SEQ ID NO: 83204 - protein, 7 aa, synthetic construct
KKHSLEM

SEQ ID NO: 83205 - protein, 7 aa, synthetic construct
RNEVPTH

SEQ ID NO: 83206 - protein, 7 aa, synthetic construct
THYESAT

SEQ ID NO: 83207 - protein, 7 aa, synthetic construct
SKPTAQA

SEQ ID NO: 83208 - protein, 7 aa, synthetic construct
FQQRDMD

SEQ ID NO: 83209 - protein, 7 aa, synthetic construct
MPRHLRD

SEQ ID NO: 83210 - protein, 7 aa, synthetic construct
MKLAEHQ

SEQ ID NO: 83211 - protein, 7 aa, synthetic construct
LQNTGGI

SEQ ID NO: 83212 - protein, 7 aa, synthetic construct
HNGRLPY

SEQ ID NO: 83213 - protein, 7 aa, synthetic construct
FNAHSYH

SEQ ID NO: 83214 - protein, 7 aa, synthetic construct
IKEPQAQ

SEQ ID NO: 83215 - protein, 7 aa, synthetic construct
WQVKDLP

SEQ ID NO: 83216 - protein, 7 aa, synthetic construct
TMSSKAG

SEQ ID NO: 83217 - protein, 7 aa, synthetic construct
GTYVPGP

SEQ ID NO: 83218 - protein, 7 aa, synthetic construct
PEGGHKP

SEQ ID NO: 83219 - protein, 7 aa, synthetic construct
LNIGQYH

SEQ ID NO: 83220 - protein, 7 aa, synthetic construct
WQVKTNS

SEQ ID NO: 83221 - protein, 7 aa, synthetic construct
AKSIMGP

SEQ ID NO: 83222 - protein, 7 aa, synthetic construct
NANPPIG

SEQ ID NO: 83223 - protein, 7 aa, synthetic construct
RVNSVNP

SEQ ID NO: 83224 - protein, 7 aa, synthetic construct
HIAYAKQ

SEQ ID NO: 83225 - protein, 7 aa, synthetic construct
LGKEWTT

SEQ ID NO: 83226 - protein, 7 aa, synthetic construct
RNLNEDS

SEQ ID NO: 83227 - protein, 7 aa, synthetic construct
RMQDTIV

SEQ ID NO: 83228 - protein, 7 aa, synthetic construct
APETRAS

SEQ ID NO: 83229 - protein, 7 aa, synthetic construct
KMPTETM

SEQ ID NO: 83230 - protein, 7 aa, synthetic construct
HREGRER

SEQ ID NO: 83231 - protein, 7 aa, synthetic construct
KNMTDMV

SEQ ID NO: 83232 - protein, 7 aa, synthetic construct
ETRMTIP

SEQ ID NO: 83233 - protein, 7 aa, synthetic construct
FKHGPYA

SEQ ID NO: 83234 - protein, 7 aa, synthetic construct
WLKGVGA

SEQ ID NO: 83235 - protein, 7 aa, synthetic construct
VPQNNKE

SEQ ID NO: 83236 - protein, 7 aa, synthetic construct
DRDRIMM

SEQ ID NO: 83237 - protein, 7 aa, synthetic construct
GHNPPDV

SEQ ID NO: 83238 - protein, 7 aa, synthetic construct
KSSVSSG

SEQ ID NO: 83239 - protein, 7 aa, synthetic construct
RANPTLI

SEQ ID NO: 83240 - protein, 7 aa, synthetic construct
NNPPNPA

SEQ ID NO: 83241 - protein, 7 aa, synthetic construct
QTIIGGV

SEQ ID NO: 83242 - protein, 7 aa, synthetic construct
SKVGGNG

SEQ ID NO: 83243 - protein, 7 aa, synthetic construct
RHLERIG

SEQ ID NO: 83244 - protein, 7 aa, synthetic construct
QRSNAQS

SEQ ID NO: 83245 - protein, 7 aa, synthetic construct
QAHPPKA

SEQ ID NO: 83246 - protein, 7 aa, synthetic construct
DGYNITG

SEQ ID NO: 83247 - protein, 7 aa, synthetic construct
GPRTGAG

SEQ ID NO: 83248 - protein, 7 aa, synthetic construct
RAGEVHS

SEQ ID NO: 83249 - protein, 7 aa, synthetic construct
QPKSMSG

SEQ ID NO: 83250 - protein, 7 aa, synthetic construct
GYVRGAS

SEQ ID NO: 83251 - protein, 7 aa, synthetic construct
YMSNNEI

SEQ ID NO: 83252 - protein, 7 aa, synthetic construct
YMPREEG

SEQ ID NO: 83253 - protein, 7 aa, synthetic construct
MKDFRID

SEQ ID NO: 83254 - protein, 7 aa, synthetic construct
RNFNFDA

SEQ ID NO: 83255 - protein, 7 aa, synthetic construct
HNIKLAV

SEQ ID NO: 83256 - protein, 7 aa, synthetic construct
TTSGKQF

SEQ ID NO: 83257 - protein, 7 aa, synthetic construct
QKSQTAA

SEQ ID NO: 83258 - protein, 7 aa, synthetic construct
FTTTNMA

SEQ ID NO: 83259 - protein, 7 aa, synthetic construct
KMPPHSG

SEQ ID NO: 83260 - protein, 7 aa, synthetic construct
ARHSKDM

SEQ ID NO: 83261 - protein, 7 aa, synthetic construct
IQHYTSA

SEQ ID NO: 83262 - protein, 7 aa, synthetic construct
YSNQLAN

SEQ ID NO: 83263 - protein, 7 aa, synthetic construct
MRKIDDH

SEQ ID NO: 83264 - protein, 7 aa, synthetic construct
GHRHITD

SEQ ID NO: 83265 - protein, 7 aa, synthetic construct
SDAKPTS

SEQ ID NO: 83266 - protein, 7 aa, synthetic construct
WHKELPG

SEQ ID NO: 83267 - protein, 7 aa, synthetic construct
EQIKLQT

SEQ ID NO: 83268 - protein, 7 aa, synthetic construct
QNKLDRD

SEQ ID NO: 83269 - protein, 7 aa, synthetic construct
LEVQKGS

SEQ ID NO: 83270 - protein, 7 aa, synthetic construct
AFQGSKP

SEQ ID NO: 83271 - protein, 7 aa, synthetic construct
VRLGETF

SEQ ID NO: 83272 - protein, 7 aa, synthetic construct
GSGPVFR

SEQ ID NO: 83273 - protein, 7 aa, synthetic construct
KVPTHQW

SEQ ID NO: 83274 - protein, 7 aa, synthetic construct
TSKMHPV

SEQ ID NO: 83275 - protein, 7 aa, synthetic construct
LSDGKTW

SEQ ID NO: 83276 - protein, 7 aa, synthetic construct
GRTDHQP

SEQ ID NO: 83277 - protein, 7 aa, synthetic construct
AHHVMAK

SEQ ID NO: 83278 - protein, 7 aa, synthetic construct
PSREHTS

SEQ ID NO: 83279 - protein, 7 aa, synthetic construct
RFTNNKD

SEQ ID NO: 83280 - protein, 7 aa, synthetic construct
MNQGRMP

SEQ ID NO: 83281 - protein, 7 aa, synthetic construct
KYQGPKD

SEQ ID NO: 83282 - protein, 7 aa, synthetic construct
MLTAERT

SEQ ID NO: 83283 - protein, 7 aa, synthetic construct
SMREPKQ

SEQ ID NO: 83284 - protein, 7 aa, synthetic construct
PNFERRE

SEQ ID NO: 83285 - protein, 7 aa, synthetic construct
MERERAA

SEQ ID NO: 83286 - protein, 7 aa, synthetic construct
SQTWPSE

SEQ ID NO: 83287 - protein, 7 aa, synthetic construct
QDHRNVE

SEQ ID NO: 83288 - protein, 7 aa, synthetic construct
KDPQVSK

SEQ ID NO: 83289 - protein, 7 aa, synthetic construct
VDLRQGV

SEQ ID NO: 83290 - protein, 7 aa, synthetic construct
LKDNARD

SEQ ID NO: 83291 - protein, 7 aa, synthetic construct
YFRNGAV

SEQ ID NO: 83292 - protein, 7 aa, synthetic construct
ETKQVRM

SEQ ID NO: 83293 - protein, 7 aa, synthetic construct
KKDPMSG

SEQ ID NO: 83294 - protein, 7 aa, synthetic construct
LHGHHAQ

SEQ ID NO: 83295 - protein, 7 aa, synthetic construct
WAAGQPY

SEQ ID NO: 83296 - protein, 7 aa, synthetic construct
VIERGKS

SEQ ID NO: 83297 - protein, 7 aa, synthetic construct
NPQSIPR

SEQ ID NO: 83298 - protein, 7 aa, synthetic construct
RTGDAGE

SEQ ID NO: 83299 - protein, 7 aa, synthetic construct
QAVLAIG

SEQ ID NO: 83300 - protein, 7 aa, synthetic construct
ISKLPEK

SEQ ID NO: 83301 - protein, 7 aa, synthetic construct
NVHKGPY

SEQ ID NO: 83302 - protein, 7 aa, synthetic construct
AHQQHDR

SEQ ID NO: 83303 - protein, 7 aa, synthetic construct
NYLASDK

SEQ ID NO: 83304 - protein, 7 aa, synthetic construct
LPHIGVH

SEQ ID NO: 83305 - protein, 7 aa, synthetic construct
AIRGGQS

SEQ ID NO: 83306 - protein, 7 aa, synthetic construct
KSQGSMP

SEQ ID NO: 83307 - protein, 7 aa, synthetic construct
EKHMHYA

SEQ ID NO: 83308 - protein, 7 aa, synthetic construct
GHGNQSW

SEQ ID NO: 83309 - protein, 7 aa, synthetic construct
LSSGPAV

SEQ ID NO: 83310 - protein, 7 aa, synthetic construct
VFPNKFQ

SEQ ID NO: 83311 - protein, 7 aa, synthetic construct
VTNLTHD

SEQ ID NO: 83312 - protein, 7 aa, synthetic construct
WLHQKSG

SEQ ID NO: 83313 - protein, 7 aa, synthetic construct
EHPRATS

SEQ ID NO: 83314 - protein, 7 aa, synthetic construct
TGHVNLE

SEQ ID NO: 83315 - protein, 7 aa, synthetic construct
PRSTGNP

SEQ ID NO: 83316 - protein, 7 aa, synthetic construct
KGNGHKD

SEQ ID NO: 83317 - protein, 7 aa, synthetic construct
FAEYTVE

SEQ ID NO: 83318 - protein, 7 aa, synthetic construct
LETSARI

SEQ ID NO: 83319 - protein, 7 aa, synthetic construct
MDTTKPM

SEQ ID NO: 83320 - protein, 7 aa, synthetic construct
RTHMSAE

SEQ ID NO: 83321 - protein, 7 aa, synthetic construct
TFQQHPQ

SEQ ID NO: 83322 - protein, 7 aa, synthetic construct
GHGPKNM

SEQ ID NO: 83323 - protein, 7 aa, synthetic construct
YVQKHER

SEQ ID NO: 83324 - protein, 7 aa, synthetic construct
LKKQEEV

SEQ ID NO: 83325 - protein, 7 aa, synthetic construct
SDTPRIM

SEQ ID NO: 83326 - protein, 7 aa, synthetic construct
YGRFTIA

SEQ ID NO: 83327 - protein, 7 aa, synthetic construct
AISMKEA

SEQ ID NO: 83328 - protein, 7 aa, synthetic construct
QGRQFNS

SEQ ID NO: 83329 - protein, 7 aa, synthetic construct
QADNTHS

SEQ ID NO: 83330 - protein, 7 aa, synthetic construct
RQNSDIR

SEQ ID NO: 83331 - protein, 7 aa, synthetic construct
NSSKPQD

SEQ ID NO: 83332 - protein, 7 aa, synthetic construct
EKRTNQG

SEQ ID NO: 83333 - protein, 7 aa, synthetic construct
RQHGMEE

SEQ ID NO: 83334 - protein, 7 aa, synthetic construct
VNPKSTA

SEQ ID NO: 83335 - protein, 7 aa, synthetic construct
TAGFDNR

SEQ ID NO: 83336 - protein, 7 aa, synthetic construct
LKSDTKC

SEQ ID NO: 83337 - protein, 7 aa, synthetic construct
GKQHMTA

SEQ ID NO: 83338 - protein, 7 aa, synthetic construct
REVSSQK

SEQ ID NO: 83339 - protein, 7 aa, synthetic construct
QMPTPNR

SEQ ID NO: 83340 - protein, 7 aa, synthetic construct
VKQNVFA

SEQ ID NO: 83341 - protein, 7 aa, synthetic construct
KGVKTEN

SEQ ID NO: 83342 - protein, 7 aa, synthetic construct
WSTDVKV

SEQ ID NO: 83343 - protein, 7 aa, synthetic construct
DQNNRAH

SEQ ID NO: 83344 - protein, 7 aa, synthetic construct
DVVKMMG

SEQ ID NO: 83345 - protein, 7 aa, synthetic construct
MKNMNQP

SEQ ID NO: 83346 - protein, 7 aa, synthetic construct
IVPTASP

SEQ ID NO: 83347 - protein, 7 aa, synthetic construct
KLNSPII

SEQ ID NO: 83348 - protein, 7 aa, synthetic construct
TKKDMVA

SEQ ID NO: 83349 - protein, 7 aa, synthetic construct
PPMKVIT

SEQ ID NO: 83350 - protein, 7 aa, synthetic construct
HQRSNLV

SEQ ID NO: 83351 - protein, 7 aa, synthetic construct
SNQPFPL

SEQ ID NO: 83352 - protein, 7 aa, synthetic construct
VEVPKKS

SEQ ID NO: 83353 - protein, 7 aa, synthetic construct
HYGGGNA

SEQ ID NO: 83354 - protein, 7 aa, synthetic construct
DARNTKY

SEQ ID NO: 83355 - protein, 7 aa, synthetic construct
RLSNDNA

SEQ ID NO: 83356 - protein, 7 aa, synthetic construct
FHELQKI

SEQ ID NO: 83357 - protein, 7 aa, synthetic construct
PGPTNHE

SEQ ID NO: 83358 - protein, 7 aa, synthetic construct
HQRQQMD

SEQ ID NO: 83359 - protein, 7 aa, synthetic construct
VDKLRDH

SEQ ID NO: 83360 - protein, 7 aa, synthetic construct
MKNVNGG

SEQ ID NO: 83361 - protein, 7 aa, synthetic construct
DVNSRRV

SEQ ID NO: 83362 - protein, 7 aa, synthetic construct
RNSNMNG

SEQ ID NO: 83363 - protein, 7 aa, synthetic construct
QKSGASM

SEQ ID NO: 83364 - protein, 7 aa, synthetic construct
MYRETRT

SEQ ID NO: 83365 - protein, 7 aa, synthetic construct
AWAAGDK

SEQ ID NO: 83366 - protein, 7 aa, synthetic construct
QHQLMKQ

SEQ ID NO: 83367 - protein, 7 aa, synthetic construct
EKSGYMR

SEQ ID NO: 83368 - protein, 7 aa, synthetic construct
KQATTKD

SEQ ID NO: 83369 - protein, 7 aa, synthetic construct
FGKGNLE

SEQ ID NO: 83370 - protein, 7 aa, synthetic construct
LPFADKD

SEQ ID NO: 83371 - protein, 7 aa, synthetic construct
AVYVTQE

SEQ ID NO: 83372 - protein, 7 aa, synthetic construct
SVPAMRD

SEQ ID NO: 83373 - protein, 7 aa, synthetic construct
QYPHGMM

SEQ ID NO: 83374 - protein, 7 aa, synthetic construct
TKGSDIP

SEQ ID NO: 83375 - protein, 7 aa, synthetic construct
WHGQLAA

SEQ ID NO: 83376 - protein, 7 aa, synthetic construct
YSPGQKP

SEQ ID NO: 83377 - protein, 7 aa, synthetic construct
TNSQYNI

SEQ ID NO: 83378 - protein, 7 aa, synthetic construct
RPGMMQI

SEQ ID NO: 83379 - protein, 7 aa, synthetic construct
QPTSQAY

SEQ ID NO: 83380 - protein, 7 aa, synthetic construct
NAQLKTV

SEQ ID NO: 83381 - protein, 7 aa, synthetic construct
PKADRVP

SEQ ID NO: 83382 - protein, 7 aa, synthetic construct
KHNKSEI

SEQ ID NO: 83383 - protein, 7 aa, synthetic construct
VPHGSIN

SEQ ID NO: 83384 - protein, 7 aa, synthetic construct
TVNQKNL

SEQ ID NO: 83385 - protein, 7 aa, synthetic construct
TSGTRSA

SEQ ID NO: 83386 - protein, 7 aa, synthetic construct
GAFIQAV

SEQ ID NO: 83387 - protein, 7 aa, synthetic construct
TSINWAE

SEQ ID NO: 83388 - protein, 7 aa, synthetic construct
NQAHPKL

SEQ ID NO: 83389 - protein, 7 aa, synthetic construct
PPTMANG

SEQ ID NO: 83390 - protein, 7 aa, synthetic construct
GIMSRLS

SEQ ID NO: 83391 - protein, 7 aa, synthetic construct
IKYHQEN

SEQ ID NO: 83392 - protein, 7 aa, synthetic construct
NHNTLKF

SEQ ID NO: 83393 - protein, 7 aa, synthetic construct
TRQITMG

SEQ ID NO: 83394 - protein, 7 aa, synthetic construct
TGKQYFS

SEQ ID NO: 83395 - protein, 7 aa, synthetic construct
NQTKQQA

SEQ ID NO: 83396 - protein, 7 aa, synthetic construct
WPGHHAP

SEQ ID NO: 83397 - protein, 7 aa, synthetic construct
SGDLSLR

SEQ ID NO: 83398 - protein, 7 aa, synthetic construct
FTNVKAP

SEQ ID NO: 83399 - protein, 7 aa, synthetic construct
THNDRGQ

SEQ ID NO: 83400 - protein, 7 aa, synthetic construct
TATKTST

SEQ ID NO: 83401 - protein, 7 aa, synthetic construct
YTSKNGS

SEQ ID NO: 83402 - protein, 7 aa, synthetic construct
SGQNDRT

SEQ ID NO: 83403 - protein, 7 aa, synthetic construct
ERLKAGN

SEQ ID NO: 83404 - protein, 7 aa, synthetic construct
TKVATQP

SEQ ID NO: 83405 - protein, 7 aa, synthetic construct
QFEQARQ

SEQ ID NO: 83406 - protein, 7 aa, synthetic construct
VSQTSGL

SEQ ID NO: 83407 - protein, 7 aa, synthetic construct
NPSHVSV

SEQ ID NO: 83408 - protein, 7 aa, synthetic construct
MIGIIKN

SEQ ID NO: 83409 - protein, 7 aa, synthetic construct
GKNTVAT

SEQ ID NO: 83410 - protein, 7 aa, synthetic construct
GHNMNKL

SEQ ID NO: 83411 - protein, 7 aa, synthetic construct
QKSQTSL

SEQ ID NO: 83412 - protein, 7 aa, synthetic construct
RQFPNSP

SEQ ID NO: 83413 - protein, 7 aa, synthetic construct
SGESQSN

SEQ ID NO: 83414 - protein, 7 aa, synthetic construct
IRNPQPT

SEQ ID NO: 83415 - protein, 7 aa, synthetic construct
DRQRHDP

SEQ ID NO: 83416 - protein, 7 aa, synthetic construct
EQPPRAR

SEQ ID NO: 83417 - protein, 7 aa, synthetic construct
SSGAPKA

SEQ ID NO: 83418 - protein, 7 aa, synthetic construct
GQHPKHQ

SEQ ID NO: 83419 - protein, 7 aa, synthetic construct
PKNTSAV

SEQ ID NO: 83420 - protein, 7 aa, synthetic construct
STYATQM

SEQ ID NO: 83421 - protein, 7 aa, synthetic construct
YYDLKHT

SEQ ID NO: 83422 - protein, 7 aa, synthetic construct
FARMRQE

SEQ ID NO: 83423 - protein, 7 aa, synthetic construct
NLPQQMK

SEQ ID NO: 83424 - protein, 7 aa, synthetic construct
QAPAGFN

SEQ ID NO: 83425 - protein, 7 aa, synthetic construct
QHRDVTS

SEQ ID NO: 83426 - protein, 7 aa, synthetic construct
HKTSAHI

SEQ ID NO: 83427 - protein, 7 aa, synthetic construct
TVAGPLE

SEQ ID NO: 83428 - protein, 7 aa, synthetic construct
VVSRGVS

SEQ ID NO: 83429 - protein, 7 aa, synthetic construct
KTSQIEM

SEQ ID NO: 83430 - protein, 7 aa, synthetic construct
KKDHQYS

SEQ ID NO: 83431 - protein, 7 aa, synthetic construct
PDAKHKS

SEQ ID NO: 83432 - protein, 7 aa, synthetic construct
NASKNEM

SEQ ID NO: 83433 - protein, 7 aa, synthetic construct
KERLSGM

SEQ ID NO: 83434 - protein, 7 aa, synthetic construct
GKKADDA

SEQ ID NO: 83435 - protein, 7 aa, synthetic construct
QNPGKAG

SEQ ID NO: 83436 - protein, 7 aa, synthetic construct
RHDANTG

SEQ ID NO: 83437 - protein, 7 aa, synthetic construct
PHNQNNY

SEQ ID NO: 83438 - protein, 7 aa, synthetic construct
LPSNKFI

SEQ ID NO: 83439 - protein, 7 aa, synthetic construct
NTPAFME

SEQ ID NO: 83440 - protein, 7 aa, synthetic construct
KIPADDF

SEQ ID NO: 83441 - protein, 7 aa, synthetic construct
HGAGMIM

SEQ ID NO: 83442 - protein, 7 aa, synthetic construct
DNDVKGG

SEQ ID NO: 83443 - protein, 7 aa, synthetic construct
MKPETYV

SEQ ID NO: 83444 - protein, 7 aa, synthetic construct
YMRGHNS

SEQ ID NO: 83445 - protein, 7 aa, synthetic construct
RGTPEVE

SEQ ID NO: 83446 - protein, 7 aa, synthetic construct
SKLGSME

SEQ ID NO: 83447 - protein, 7 aa, synthetic construct
EIRTIKF

SEQ ID NO: 83448 - protein, 7 aa, synthetic construct
HDIGNRK

SEQ ID NO: 83449 - protein, 7 aa, synthetic construct
YKANGSV

SEQ ID NO: 83450 - protein, 7 aa, synthetic construct
VAAFSMA

SEQ ID NO: 83451 - protein, 7 aa, synthetic construct
TKVPRGP

SEQ ID NO: 83452 - protein, 7 aa, synthetic construct
GHNKDQW

SEQ ID NO: 83453 - protein, 7 aa, synthetic construct
HWENKQF

SEQ ID NO: 83454 - protein, 7 aa, synthetic construct
LPYSQEK

SEQ ID NO: 83455 - protein, 7 aa, synthetic construct
YRGYVHD

SEQ ID NO: 83456 - protein, 7 aa, synthetic construct
AERKHLV

SEQ ID NO: 83457 - protein, 7 aa, synthetic construct
RNGQNIQ

SEQ ID NO: 83458 - protein, 7 aa, synthetic construct
QRGMGQN

SEQ ID NO: 83459 - protein, 7 aa, synthetic construct
GENQNKA

SEQ ID NO: 83460 - protein, 7 aa, synthetic construct
RGQPGLI

SEQ ID NO: 83461 - protein, 7 aa, synthetic construct
RQTIAEG

SEQ ID NO: 83462 - protein, 7 aa, synthetic construct
SKNISEI

SEQ ID NO: 83463 - protein, 7 aa, synthetic construct
GKHSDWI

SEQ ID NO: 83464 - protein, 7 aa, synthetic construct
PRPPKDN

SEQ ID NO: 83465 - protein, 7 aa, synthetic construct
NFKGTQM

SEQ ID NO: 83466 - protein, 7 aa, synthetic construct
GGPQVVS

SEQ ID NO: 83467 - protein, 7 aa, synthetic construct
WERGTED

SEQ ID NO: 83468 - protein, 7 aa, synthetic construct
HRHLSGE

SEQ ID NO: 83469 - protein, 7 aa, synthetic construct
PKSPGAS

SEQ ID NO: 83470 - protein, 7 aa, synthetic construct
PINPATF

SEQ ID NO: 83471 - protein, 7 aa, synthetic construct
MLVAGPS

SEQ ID NO: 83472 - protein, 7 aa, synthetic construct
NKTPVRE

SEQ ID NO: 83473 - protein, 7 aa, synthetic construct
QFGYKEM

SEQ ID NO: 83474 - protein, 7 aa, synthetic construct
NGPGGLL

SEQ ID NO: 83475 - protein, 7 aa, synthetic construct
HIQNPYS

SEQ ID NO: 83476 - protein, 7 aa, synthetic construct
GVPRNTG

SEQ ID NO: 83477 - protein, 7 aa, synthetic construct
SRDTQDR

SEQ ID NO: 83478 - protein, 7 aa, synthetic construct
EGNHPMR

SEQ ID NO: 83479 - protein, 7 aa, synthetic construct
GTQIHQA

SEQ ID NO: 83480 - protein, 7 aa, synthetic construct
HNRPSAD

SEQ ID NO: 83481 - protein, 7 aa, synthetic construct
ATGNRNT

SEQ ID NO: 83482 - protein, 7 aa, synthetic construct
KEMNNMP

SEQ ID NO: 83483 - protein, 7 aa, synthetic construct
AAGAFPL

SEQ ID NO: 83484 - protein, 7 aa, synthetic construct
IHALQNN

SEQ ID NO: 83485 - protein, 7 aa, synthetic construct
SGSGTAQ

SEQ ID NO: 83486 - protein, 7 aa, synthetic construct
TGQNTFH

SEQ ID NO: 83487 - protein, 7 aa, synthetic construct
GLSTMKN

SEQ ID NO: 83488 - protein, 7 aa, synthetic construct
DRVITHS

SEQ ID NO: 83489 - protein, 7 aa, synthetic construct
QSRTASG

SEQ ID NO: 83490 - protein, 7 aa, synthetic construct
HTTKLDN

SEQ ID NO: 83491 - protein, 7 aa, synthetic construct
PRSTNQA

SEQ ID NO: 83492 - protein, 7 aa, synthetic construct
LTKQDTN

SEQ ID NO: 83493 - protein, 7 aa, synthetic construct
RGFTDAM

SEQ ID NO: 83494 - protein, 7 aa, synthetic construct
LINAKLN

SEQ ID NO: 83495 - protein, 7 aa, synthetic construct
TRAMSLG

SEQ ID NO: 83496 - protein, 7 aa, synthetic construct
WGPKVSI

SEQ ID NO: 83497 - protein, 7 aa, synthetic construct
NKKNMDQ

SEQ ID NO: 83498 - protein, 7 aa, synthetic construct
RVNPSSQ

SEQ ID NO: 83499 - protein, 7 aa, synthetic construct
MFDQPVG

SEQ ID NO: 83500 - protein, 7 aa, synthetic construct
PHNERVP

SEQ ID NO: 83501 - protein, 7 aa, synthetic construct
KFQRGEP

SEQ ID NO: 83502 - protein, 7 aa, synthetic construct
QGFLHIE

SEQ ID NO: 83503 - protein, 7 aa, synthetic construct
FEAQQKR

SEQ ID NO: 83504 - protein, 7 aa, synthetic construct
VMPSVDK

SEQ ID NO: 83505 - protein, 7 aa, synthetic construct
EFRQPKE

SEQ ID NO: 83506 - protein, 7 aa, synthetic construct
YPNFNMG

SEQ ID NO: 83507 - protein, 7 aa, synthetic construct
YAPHLGN

SEQ ID NO: 83508 - protein, 7 aa, synthetic construct
NKNLAFM

SEQ ID NO: 83509 - protein, 7 aa, synthetic construct
SSLQGHS

SEQ ID NO: 83510 - protein, 7 aa, synthetic construct
AKAMPHD

SEQ ID NO: 83511 - protein, 7 aa, synthetic construct
IHVNEPF

SEQ ID NO: 83512 - protein, 7 aa, synthetic construct
ILNVMPQ

SEQ ID NO: 83513 - protein, 7 aa, synthetic construct
LRDSTTV

SEQ ID NO: 83514 - protein, 7 aa, synthetic construct
MKGDHMT

SEQ ID NO: 83515 - protein, 7 aa, synthetic construct
KGNPAFD

SEQ ID NO: 83516 - protein, 7 aa, synthetic construct
KIKEDHN

SEQ ID NO: 83517 - protein, 7 aa, synthetic construct
GVLNAGQ

SEQ ID NO: 83518 - protein, 7 aa, synthetic construct
MAGPSLV

SEQ ID NO: 83519 - protein, 7 aa, synthetic construct
LHHPTSF

SEQ ID NO: 83520 - protein, 7 aa, synthetic construct
DFVGGKD

SEQ ID NO: 83521 - protein, 7 aa, synthetic construct
VPVAKIQ

SEQ ID NO: 83522 - protein, 7 aa, synthetic construct
FPHRPNS

SEQ ID NO: 83523 - protein, 7 aa, synthetic construct
LHDSTYI

SEQ ID NO: 83524 - protein, 7 aa, synthetic construct
SPVNKVM

SEQ ID NO: 83525 - protein, 7 aa, synthetic construct
ARHLAGH

SEQ ID NO: 83526 - protein, 7 aa, synthetic construct
GIAYPSP

SEQ ID NO: 83527 - protein, 7 aa, synthetic construct
IMAMQVD

SEQ ID NO: 83528 - protein, 7 aa, synthetic construct
NSQGMMN

SEQ ID NO: 83529 - protein, 7 aa, synthetic construct
EHVRNNE

SEQ ID NO: 83530 - protein, 7 aa, synthetic construct
DRRVAQP

SEQ ID NO: 83531 - protein, 7 aa, synthetic construct
GQSVINK

SEQ ID NO: 83532 - protein, 7 aa, synthetic construct
FKTTASE

SEQ ID NO: 83533 - protein, 7 aa, synthetic construct
AFLKADN

SEQ ID NO: 83534 - protein, 7 aa, synthetic construct
KNRTLDL

SEQ ID NO: 83535 - protein, 7 aa, synthetic construct
TDIKHHE

SEQ ID NO: 83536 - protein, 7 aa, synthetic construct
AKYGSNI

SEQ ID NO: 83537 - protein, 7 aa, synthetic construct
PKQAVTF

SEQ ID NO: 83538 - protein, 7 aa, synthetic construct
VAIQFRE

SEQ ID NO: 83539 - protein, 7 aa, synthetic construct
FASFAAN

SEQ ID NO: 83540 - protein, 7 aa, synthetic construct
VNNPNDR

SEQ ID NO: 83541 - protein, 7 aa, synthetic construct
MIVAQTP

SEQ ID NO: 83542 - protein, 7 aa, synthetic construct
SKLAAPF

SEQ ID NO: 83543 - protein, 7 aa, synthetic construct
MVNAIGP

SEQ ID NO: 83544 - protein, 7 aa, synthetic construct
SLTPIAH

SEQ ID NO: 83545 - protein, 7 aa, synthetic construct
ASLQHRP

SEQ ID NO: 83546 - protein, 7 aa, synthetic construct
ATRFEKE

SEQ ID NO: 83547 - protein, 7 aa, synthetic construct
GRHLLSE

SEQ ID NO: 83548 - protein, 7 aa, synthetic construct
ESRAGTF

SEQ ID NO: 83549 - protein, 7 aa, synthetic construct
QSSQPIN

SEQ ID NO: 83550 - protein, 7 aa, synthetic construct
EVAHMQS

SEQ ID NO: 83551 - protein, 7 aa, synthetic construct
QRTDVLF

SEQ ID NO: 83552 - protein, 7 aa, synthetic construct
PARTSSD

SEQ ID NO: 83553 - protein, 7 aa, synthetic construct
VISQTNH

SEQ ID NO: 83554 - protein, 7 aa, synthetic construct
QKPQHNM

SEQ ID NO: 83555 - protein, 7 aa, synthetic construct
QMKDTRN

SEQ ID NO: 83556 - protein, 7 aa, synthetic construct
SWGAGGP

SEQ ID NO: 83557 - protein, 7 aa, synthetic construct
KAMREVS

SEQ ID NO: 83558 - protein, 7 aa, synthetic construct
RLYTANG

SEQ ID NO: 83559 - protein, 7 aa, synthetic construct
HHPAHRD

SEQ ID NO: 83560 - protein, 7 aa, synthetic construct
RLDPTRG

SEQ ID NO: 83561 - protein, 7 aa, synthetic construct
HRQDPYV

SEQ ID NO: 83562 - protein, 7 aa, synthetic construct
PKAPQTE

SEQ ID NO: 83563 - protein, 7 aa, synthetic construct
GRGNFPI

SEQ ID NO: 83564 - protein, 7 aa, synthetic construct
GERNKLE

SEQ ID NO: 83565 - protein, 7 aa, synthetic construct
PHYKDAI

SEQ ID NO: 83566 - protein, 7 aa, synthetic construct
SADHKQE

SEQ ID NO: 83567 - protein, 7 aa, synthetic construct
YHLGGES

SEQ ID NO: 83568 - protein, 7 aa, synthetic construct
FATERPH

SEQ ID NO: 83569 - protein, 7 aa, synthetic construct
MVREAHN

SEQ ID NO: 83570 - protein, 7 aa, synthetic construct
INMKENM

SEQ ID NO: 83571 - protein, 7 aa, synthetic construct
RDRLVGP

SEQ ID NO: 83572 - protein, 7 aa, synthetic construct
NMKPSQP

SEQ ID NO: 83573 - protein, 7 aa, synthetic construct
KTGGSTA

SEQ ID NO: 83574 - protein, 7 aa, synthetic construct
GMKVLKG

SEQ ID NO: 83575 - protein, 7 aa, synthetic construct
SFDRNQG

SEQ ID NO: 83576 - protein, 7 aa, synthetic construct
QQHHGPV

SEQ ID NO: 83577 - protein, 7 aa, synthetic construct
KRSYDDF

SEQ ID NO: 83578 - protein, 7 aa, synthetic construct
GWNDLQS

SEQ ID NO: 83579 - protein, 7 aa, synthetic construct
STNKESY

SEQ ID NO: 83580 - protein, 7 aa, synthetic construct
FEQHAQM

SEQ ID NO: 83581 - protein, 7 aa, synthetic construct
TKPNIQA

SEQ ID NO: 83582 - protein, 7 aa, synthetic construct
ARSHSGS

SEQ ID NO: 83583 - protein, 7 aa, synthetic construct
HNPAMNA

SEQ ID NO: 83584 - protein, 7 aa, synthetic construct
DIGGKVP

SEQ ID NO: 83585 - protein, 7 aa, synthetic construct
NPDTRWT

SEQ ID NO: 83586 - protein, 7 aa, synthetic construct
NSGLKHE

SEQ ID NO: 83587 - protein, 7 aa, synthetic construct
QPHFIPE

SEQ ID NO: 83588 - protein, 7 aa, synthetic construct
PGYTKTE

SEQ ID NO: 83589 - protein, 7 aa, synthetic construct
HSQQVKG

SEQ ID NO: 83590 - protein, 7 aa, synthetic construct
AGTSNHK

SEQ ID NO: 83591 - protein, 7 aa, synthetic construct
VTGYPSK

SEQ ID NO: 83592 - protein, 7 aa, synthetic construct
DNKMAQR

SEQ ID NO: 83593 - protein, 7 aa, synthetic construct
TAHFREN

SEQ ID NO: 83594 - protein, 7 aa, synthetic construct
MIMDKPS

SEQ ID NO: 83595 - protein, 7 aa, synthetic construct
NQKWGMA

SEQ ID NO: 83596 - protein, 7 aa, synthetic construct
GWTKYEE

SEQ ID NO: 83597 - protein, 7 aa, synthetic construct
LQHRNLS

SEQ ID NO: 83598 - protein, 7 aa, synthetic construct
NRSDKFY

SEQ ID NO: 83599 - protein, 7 aa, synthetic construct
NRTHIHS

SEQ ID NO: 83600 - protein, 7 aa, synthetic construct
IEHHHSG

SEQ ID NO: 83601 - protein, 7 aa, synthetic construct
DSVVGRR

SEQ ID NO: 83602 - protein, 7 aa, synthetic construct
TQNNPQK

SEQ ID NO: 83603 - protein, 7 aa, synthetic construct
CKIDCEF

SEQ ID NO: 83604 - protein, 7 aa, synthetic construct
PMSVLRE

SEQ ID NO: 83605 - protein, 7 aa, synthetic construct
GIYGQNN

SEQ ID NO: 83606 - protein, 7 aa, synthetic construct
VEPSMRN

SEQ ID NO: 83607 - protein, 7 aa, synthetic construct
VADRQSH

SEQ ID NO: 83608 - protein, 7 aa, synthetic construct
AIHGNGL

SEQ ID NO: 83609 - protein, 7 aa, synthetic construct
DAFEPRG

SEQ ID NO: 83610 - protein, 7 aa, synthetic construct
PSKNYRE

SEQ ID NO: 83611 - protein, 7 aa, synthetic construct
AVSQKIH

SEQ ID NO: 83612 - protein, 7 aa, synthetic construct
SPMPRGY

SEQ ID NO: 83613 - protein, 7 aa, synthetic construct
KTANNSG

SEQ ID NO: 83614 - protein, 7 aa, synthetic construct
GGTNMPQ

SEQ ID NO: 83615 - protein, 7 aa, synthetic construct
QSQKAEY

SEQ ID NO: 83616 - protein, 7 aa, synthetic construct
KTQGFKD

SEQ ID NO: 83617 - protein, 7 aa, synthetic construct
VFTTAKE

SEQ ID NO: 83618 - protein, 7 aa, synthetic construct
HKMAMMD

SEQ ID NO: 83619 - protein, 7 aa, synthetic construct
VINIKPL

SEQ ID NO: 83620 - protein, 7 aa, synthetic construct
KHTQGQS

SEQ ID NO: 83621 - protein, 7 aa, synthetic construct
NNTMRLS

SEQ ID NO: 83622 - protein, 7 aa, synthetic construct
HSGQHKQ

SEQ ID NO: 83623 - protein, 7 aa, synthetic construct
EGQQKHY

SEQ ID NO: 83624 - protein, 7 aa, synthetic construct
KGMEFAT

SEQ ID NO: 83625 - protein, 7 aa, synthetic construct
SPIRGYH

SEQ ID NO: 83626 - protein, 7 aa, synthetic construct
KLDKQYI

SEQ ID NO: 83627 - protein, 7 aa, synthetic construct
QASKNIG

SEQ ID NO: 83628 - protein, 7 aa, synthetic construct
KPTGGKP

SEQ ID NO: 83629 - protein, 7 aa, synthetic construct
TSSSSMY

SEQ ID NO: 83630 - protein, 7 aa, synthetic construct
YAGMSLS

SEQ ID NO: 83631 - protein, 7 aa, synthetic construct
KNTPLMQ

SEQ ID NO: 83632 - protein, 7 aa, synthetic construct
FHPQEIS

SEQ ID NO: 83633 - protein, 7 aa, synthetic construct
SRARTGE

SEQ ID NO: 83634 - protein, 7 aa, synthetic construct
GMHYGVP

SEQ ID NO: 83635 - protein, 7 aa, synthetic construct
TSAGHHH

SEQ ID NO: 83636 - protein, 7 aa, synthetic construct
VQWQGTV

SEQ ID NO: 83637 - protein, 7 aa, synthetic construct
WPGQRYD

SEQ ID NO: 83638 - protein, 7 aa, synthetic construct
TTMDNHR

SEQ ID NO: 83639 - protein, 7 aa, synthetic construct
RGGSAHE

SEQ ID NO: 83640 - protein, 7 aa, synthetic construct
ITGASKF

SEQ ID NO: 83641 - protein, 7 aa, synthetic construct
YGAEKTG

SEQ ID NO: 83642 - protein, 7 aa, synthetic construct
QSTNAGH

SEQ ID NO: 83643 - protein, 7 aa, synthetic construct
MQERSKE

SEQ ID NO: 83644 - protein, 7 aa, synthetic construct
YSQKTIL

SEQ ID NO: 83645 - protein, 7 aa, synthetic construct
ISPNTTT

SEQ ID NO: 83646 - protein, 7 aa, synthetic construct
NHDKDMG

SEQ ID NO: 83647 - protein, 7 aa, synthetic construct
FPESQKK

SEQ ID NO: 83648 - protein, 7 aa, synthetic construct
FPNSLMS

SEQ ID NO: 83649 - protein, 7 aa, synthetic construct
IMRSTRD

SEQ ID NO: 83650 - protein, 7 aa, synthetic construct
LFRQDEI

SEQ ID NO: 83651 - protein, 7 aa, synthetic construct
GQLPFAQ

SEQ ID NO: 83652 - protein, 7 aa, synthetic construct
PRELHAP

SEQ ID NO: 83653 - protein, 7 aa, synthetic construct
FPHIAHD

SEQ ID NO: 83654 - protein, 7 aa, synthetic construct
KVDVNKM

SEQ ID NO: 83655 - protein, 7 aa, synthetic construct
SDPRNAP

SEQ ID NO: 83656 - protein, 7 aa, synthetic construct
SSSLGGE

SEQ ID NO: 83657 - protein, 7 aa, synthetic construct
TDTLSKP

SEQ ID NO: 83658 - protein, 7 aa, synthetic construct
FIHSQVA

SEQ ID NO: 83659 - protein, 7 aa, synthetic construct
TNMQGHW

SEQ ID NO: 83660 - protein, 7 aa, synthetic construct
HIKQGDL

SEQ ID NO: 83661 - protein, 7 aa, synthetic construct
MMHAARS

SEQ ID NO: 83662 - protein, 7 aa, synthetic construct
RTPDQEH

SEQ ID NO: 83663 - protein, 7 aa, synthetic construct
MKNGGIG

SEQ ID NO: 83664 - protein, 7 aa, synthetic construct
QLKKAFE

SEQ ID NO: 83665 - protein, 7 aa, synthetic construct
DIKRHDK

SEQ ID NO: 83666 - protein, 7 aa, synthetic construct
GQLKEVP

SEQ ID NO: 83667 - protein, 7 aa, synthetic construct
KTDARSN

SEQ ID NO: 83668 - protein, 7 aa, synthetic construct
WNGVERA

SEQ ID NO: 83669 - protein, 7 aa, synthetic construct
RHGIMMG

SEQ ID NO: 83670 - protein, 7 aa, synthetic construct
NRENGLM

SEQ ID NO: 83671 - protein, 7 aa, synthetic construct
SEVRPSR

SEQ ID NO: 83672 - protein, 7 aa, synthetic construct
PHDQAGY

SEQ ID NO: 83673 - protein, 7 aa, synthetic construct
MVKSAQS

SEQ ID NO: 83674 - protein, 7 aa, synthetic construct
INPYSLE

SEQ ID NO: 83675 - protein, 7 aa, synthetic construct
NKVTMAP

SEQ ID NO: 83676 - protein, 7 aa, synthetic construct
WFASKTE

SEQ ID NO: 83677 - protein, 7 aa, synthetic construct
MGKHIEI

SEQ ID NO: 83678 - protein, 7 aa, synthetic construct
RAVPPMP

SEQ ID NO: 83679 - protein, 7 aa, synthetic construct
ARASPDK

SEQ ID NO: 83680 - protein, 7 aa, synthetic construct
VSIDRKY

SEQ ID NO: 83681 - protein, 7 aa, synthetic construct
HSQPKVE

SEQ ID NO: 83682 - protein, 7 aa, synthetic construct
HTQYGHA

SEQ ID NO: 83683 - protein, 7 aa, synthetic construct
TFPPNAQ

SEQ ID NO: 83684 - protein, 7 aa, synthetic construct
AQGSKYP

SEQ ID NO: 83685 - protein, 7 aa, synthetic construct
ERGNTNP

SEQ ID NO: 83686 - protein, 7 aa, synthetic construct
FPTALRN

SEQ ID NO: 83687 - protein, 7 aa, synthetic construct
NANKNMA

SEQ ID NO: 83688 - protein, 7 aa, synthetic construct
HQSFNPG

SEQ ID NO: 83689 - protein, 7 aa, synthetic construct
MSAISQI

SEQ ID NO: 83690 - protein, 7 aa, synthetic construct
AQNQMQM

SEQ ID NO: 83691 - protein, 7 aa, synthetic construct
LLYGSRE

SEQ ID NO: 83692 - protein, 7 aa, synthetic construct
YEVEHRQ

SEQ ID NO: 83693 - protein, 7 aa, synthetic construct
NIEAKLQ

SEQ ID NO: 83694 - protein, 7 aa, synthetic construct
HGGIPLI

SEQ ID NO: 83695 - protein, 7 aa, synthetic construct
IKAQANN

SEQ ID NO: 83696 - protein, 7 aa, synthetic construct
KPTGGAE

SEQ ID NO: 83697 - protein, 7 aa, synthetic construct
VLPQYSA

SEQ ID NO: 83698 - protein, 7 aa, synthetic construct
QKSNVAN

SEQ ID NO: 83699 - protein, 7 aa, synthetic construct
LYNVAKS

SEQ ID NO: 83700 - protein, 7 aa, synthetic construct
WGVHFQE

SEQ ID NO: 83701 - protein, 7 aa, synthetic construct
DKQTYTG

SEQ ID NO: 83702 - protein, 7 aa, synthetic construct
SAKTQGQ

SEQ ID NO: 83703 - protein, 7 aa, synthetic construct
QKTVARE

SEQ ID NO: 83704 - protein, 7 aa, synthetic construct
RKQDQGP

SEQ ID NO: 83705 - protein, 7 aa, synthetic construct
QPLPKFA

SEQ ID NO: 83706 - protein, 7 aa, synthetic construct
NYDKALV

SEQ ID NO: 83707 - protein, 7 aa, synthetic construct
TRSMNPL

SEQ ID NO: 83708 - protein, 7 aa, synthetic construct
HSGPINS

SEQ ID NO: 83709 - protein, 7 aa, synthetic construct
MKLHTEK

SEQ ID NO: 83710 - protein, 7 aa, synthetic construct
QKMKSDL

SEQ ID NO: 83711 - protein, 7 aa, synthetic construct
NPTDRYM

SEQ ID NO: 83712 - protein, 7 aa, synthetic construct
WNAAHLN

SEQ ID NO: 83713 - protein, 7 aa, synthetic construct
HLPANER

SEQ ID NO: 83714 - protein, 7 aa, synthetic construct
RAGEELI

SEQ ID NO: 83715 - protein, 7 aa, synthetic construct
NKISDIV

SEQ ID NO: 83716 - protein, 7 aa, synthetic construct
PSTHHYG

SEQ ID NO: 83717 - protein, 7 aa, synthetic construct
YQQQTGN

SEQ ID NO: 83718 - protein, 7 aa, synthetic construct
RNPNASY

SEQ ID NO: 83719 - protein, 7 aa, synthetic construct
WINGSAP

SEQ ID NO: 83720 - protein, 7 aa, synthetic construct
NTIGVVM

SEQ ID NO: 83721 - protein, 7 aa, synthetic construct
IAKNGTW

SEQ ID NO: 83722 - protein, 7 aa, synthetic construct
VIGSQNN

SEQ ID NO: 83723 - protein, 7 aa, synthetic construct
ATGRNQP

SEQ ID NO: 83724 - protein, 7 aa, synthetic construct
GVGRNDP

SEQ ID NO: 83725 - protein, 7 aa, synthetic construct
FDQGKRL

SEQ ID NO: 83726 - protein, 7 aa, synthetic construct
RLVDQPA

SEQ ID NO: 83727 - protein, 7 aa, synthetic construct
NPKMPAW

SEQ ID NO: 83728 - protein, 7 aa, synthetic construct
KPEQWPA

SEQ ID NO: 83729 - protein, 7 aa, synthetic construct
HEAAMIK

SEQ ID NO: 83730 - protein, 7 aa, synthetic construct
PGVNQTP

SEQ ID NO: 83731 - protein, 7 aa, synthetic construct
INSQVNM

SEQ ID NO: 83732 - protein, 7 aa, synthetic construct
INMGAET

SEQ ID NO: 83733 - protein, 7 aa, synthetic construct
FAQPMNA

SEQ ID NO: 83734 - protein, 7 aa, synthetic construct
ERNMMSG

SEQ ID NO: 83735 - protein, 7 aa, synthetic construct
WAPPDKN

SEQ ID NO: 83736 - protein, 7 aa, synthetic construct
VTVNAFA

SEQ ID NO: 83737 - protein, 7 aa, synthetic construct
HLKIIDE

SEQ ID NO: 83738 - protein, 7 aa, synthetic construct
SLVKLTI

SEQ ID NO: 83739 - protein, 7 aa, synthetic construct
NRPDSTS

SEQ ID NO: 83740 - protein, 7 aa, synthetic construct
AWSKDSG

SEQ ID NO: 83741 - protein, 7 aa, synthetic construct
VFKFVEP

SEQ ID NO: 83742 - protein, 7 aa, synthetic construct
RNPNDAA

SEQ ID NO: 83743 - protein, 7 aa, synthetic construct
SISGRMQ

SEQ ID NO: 83744 - protein, 7 aa, synthetic construct
YGIYHRE

SEQ ID NO: 83745 - protein, 7 aa, synthetic construct
KNPQNNG

SEQ ID NO: 83746 - protein, 7 aa, synthetic construct
SKGPMQF

SEQ ID NO: 83747 - protein, 7 aa, synthetic construct
GTNKMSG

SEQ ID NO: 83748 - protein, 7 aa, synthetic construct
HITEYQG

SEQ ID NO: 83749 - protein, 7 aa, synthetic construct
TKSTEFF

SEQ ID NO: 83750 - protein, 7 aa, synthetic construct
THISDKD

SEQ ID NO: 83751 - protein, 7 aa, synthetic construct
KTGTEPE

SEQ ID NO: 83752 - protein, 7 aa, synthetic construct
MNRAANA

SEQ ID NO: 83753 - protein, 7 aa, synthetic construct
QTKDLTI

SEQ ID NO: 83754 - protein, 7 aa, synthetic construct
EKADFHT

SEQ ID NO: 83755 - protein, 7 aa, synthetic construct
LTRHGAA

SEQ ID NO: 83756 - protein, 7 aa, synthetic construct
PHGKYNA

SEQ ID NO: 83757 - protein, 7 aa, synthetic construct
TNKAMQA

SEQ ID NO: 83758 - protein, 7 aa, synthetic construct
KSVQMKD

SEQ ID NO: 83759 - protein, 7 aa, synthetic construct
MPHLNSF

SEQ ID NO: 83760 - protein, 7 aa, synthetic construct
GPKLHTF

SEQ ID NO: 83761 - protein, 7 aa, synthetic construct
KGDRNSH

SEQ ID NO: 83762 - protein, 7 aa, synthetic construct
NGKPSPG

SEQ ID NO: 83763 - protein, 7 aa, synthetic construct
VHKLYVA

SEQ ID NO: 83764 - protein, 7 aa, synthetic construct
PKGQDIK

SEQ ID NO: 83765 - protein, 7 aa, synthetic construct
QAKWHIE

SEQ ID NO: 83766 - protein, 7 aa, synthetic construct
GHQRHDH

SEQ ID NO: 83767 - protein, 7 aa, synthetic construct
KTFDIGV

SEQ ID NO: 83768 - protein, 7 aa, synthetic construct
TFSQPKA

SEQ ID NO: 83769 - protein, 7 aa, synthetic construct
HHGKAEK

SEQ ID NO: 83770 - protein, 7 aa, synthetic construct
KMNGMLN

SEQ ID NO: 83771 - protein, 7 aa, synthetic construct
PKTTTSP

SEQ ID NO: 83772 - protein, 7 aa, synthetic construct
RYAAHKE

SEQ ID NO: 83773 - protein, 7 aa, synthetic construct
RGPILER

SEQ ID NO: 83774 - protein, 7 aa, synthetic construct
TRSNEMV

SEQ ID NO: 83775 - protein, 7 aa, synthetic construct
KSQTIKD

SEQ ID NO: 83776 - protein, 7 aa, synthetic construct
KYPESNL

SEQ ID NO: 83777 - protein, 7 aa, synthetic construct
EGHGTAI

SEQ ID NO: 83778 - protein, 7 aa, synthetic construct
YQMFGQE

SEQ ID NO: 83779 - protein, 7 aa, synthetic construct
FVNMNPE

SEQ ID NO: 83780 - protein, 7 aa, synthetic construct
PRNAANP

SEQ ID NO: 83781 - protein, 7 aa, synthetic construct
WTDHAGG

SEQ ID NO: 83782 - protein, 7 aa, synthetic construct
VAKNNFD

SEQ ID NO: 83783 - protein, 7 aa, synthetic construct
FLAQASH

SEQ ID NO: 83784 - protein, 7 aa, synthetic construct
VKGQMRE

SEQ ID NO: 83785 - protein, 7 aa, synthetic construct
TLNHSTF

SEQ ID NO: 83786 - protein, 7 aa, synthetic construct
YGVREVM

SEQ ID NO: 83787 - protein, 7 aa, synthetic construct
NGNSGMA

SEQ ID NO: 83788 - protein, 7 aa, synthetic construct
RTSNVGP

SEQ ID NO: 83789 - protein, 7 aa, synthetic construct
HIQLPSG

SEQ ID NO: 83790 - protein, 7 aa, synthetic construct
GRDPNKF

SEQ ID NO: 83791 - protein, 7 aa, synthetic construct
AIPIPEN

SEQ ID NO: 83792 - protein, 7 aa, synthetic construct
QYHSHVD

SEQ ID NO: 83793 - protein, 7 aa, synthetic construct
DSMRSIR

SEQ ID NO: 83794 - protein, 7 aa, synthetic construct
RESAGKM

SEQ ID NO: 83795 - protein, 7 aa, synthetic construct
KPTQENK

SEQ ID NO: 83796 - protein, 7 aa, synthetic construct
QITERKV

SEQ ID NO: 83797 - protein, 7 aa, synthetic construct
NDGQKGL

SEQ ID NO: 83798 - protein, 7 aa, synthetic construct
ERPPAFA

SEQ ID NO: 83799 - protein, 7 aa, synthetic construct
DVAQRGY

SEQ ID NO: 83800 - protein, 7 aa, synthetic construct
MDKFSHT

SEQ ID NO: 83801 - protein, 7 aa, synthetic construct
HTTPLPS

SEQ ID NO: 83802 - protein, 7 aa, synthetic construct
GMRGFGN

SEQ ID NO: 83803 - protein, 7 aa, synthetic construct
KMKQEYY

SEQ ID NO: 83804 - protein, 7 aa, synthetic construct
WRLSHSA

SEQ ID NO: 83805 - protein, 7 aa, synthetic construct
MVHTHLA

SEQ ID NO: 83806 - protein, 7 aa, synthetic construct
THLQPQL

SEQ ID NO: 83807 - protein, 7 aa, synthetic construct
NGLVKSY

SEQ ID NO: 83808 - protein, 7 aa, synthetic construct
TGMVQKV

SEQ ID NO: 83809 - protein, 7 aa, synthetic construct
NKPDIKH

SEQ ID NO: 83810 - protein, 7 aa, synthetic construct
VVMKAEV

SEQ ID NO: 83811 - protein, 7 aa, synthetic construct
AHAADKI

SEQ ID NO: 83812 - protein, 7 aa, synthetic construct
LYKASGI

SEQ ID NO: 83813 - protein, 7 aa, synthetic construct
TQFAGSD

SEQ ID NO: 83814 - protein, 7 aa, synthetic construct
GHENNKN

SEQ ID NO: 83815 - protein, 7 aa, synthetic construct
KQSTSEQ

SEQ ID NO: 83816 - protein, 7 aa, synthetic construct
QYTGQVA

SEQ ID NO: 83817 - protein, 7 aa, synthetic construct
QNHKEYS

SEQ ID NO: 83818 - protein, 7 aa, synthetic construct
MKSSSQT

SEQ ID NO: 83819 - protein, 7 aa, synthetic construct
ITGFNHN

SEQ ID NO: 83820 - protein, 7 aa, synthetic construct
QVKPVAG

SEQ ID NO: 83821 - protein, 7 aa, synthetic construct
NHHLNKT

SEQ ID NO: 83822 - protein, 7 aa, synthetic construct
SKNYNAS

SEQ ID NO: 83823 - protein, 7 aa, synthetic construct
SKSMNAA

SEQ ID NO: 83824 - protein, 7 aa, synthetic construct
NKTQSFS

SEQ ID NO: 83825 - protein, 7 aa, synthetic construct
SIKPGVN

SEQ ID NO: 83826 - protein, 7 aa, synthetic construct
DTEKAKW

SEQ ID NO: 83827 - protein, 7 aa, synthetic construct
RAMESTY

SEQ ID NO: 83828 - protein, 7 aa, synthetic construct
SFAPAMP

SEQ ID NO: 83829 - protein, 7 aa, synthetic construct
PVTREAK

SEQ ID NO: 83830 - protein, 7 aa, synthetic construct
MVMKISA

SEQ ID NO: 83831 - protein, 7 aa, synthetic construct
MPMFKID

SEQ ID NO: 83832 - protein, 7 aa, synthetic construct
QKGNSKE

SEQ ID NO: 83833 - protein, 7 aa, synthetic construct
PDGFVGR

SEQ ID NO: 83834 - protein, 7 aa, synthetic construct
GMYTPNG

SEQ ID NO: 83835 - protein, 7 aa, synthetic construct
SQMRERQ

SEQ ID NO: 83836 - protein, 7 aa, synthetic construct
DMSLAKI

SEQ ID NO: 83837 - protein, 7 aa, synthetic construct
MKGNIDT

SEQ ID NO: 83838 - protein, 7 aa, synthetic construct
TSDRVPK

SEQ ID NO: 83839 - protein, 7 aa, synthetic construct
YISRDNS

SEQ ID NO: 83840 - protein, 7 aa, synthetic construct
YDKVNVL

SEQ ID NO: 83841 - protein, 7 aa, synthetic construct
VFKQMQE

SEQ ID NO: 83842 - protein, 7 aa, synthetic construct
EAHKHLL

SEQ ID NO: 83843 - protein, 7 aa, synthetic construct
WSQGSVT

SEQ ID NO: 83844 - protein, 7 aa, synthetic construct
QWQNEQT

SEQ ID NO: 83845 - protein, 7 aa, synthetic construct
GKGYDYS

SEQ ID NO: 83846 - protein, 7 aa, synthetic construct
KWDGLNT

SEQ ID NO: 83847 - protein, 7 aa, synthetic construct
DAHRAYI

SEQ ID NO: 83848 - protein, 7 aa, synthetic construct
PPLQATR

SEQ ID NO: 83849 - protein, 7 aa, synthetic construct
VQNFQAM

SEQ ID NO: 83850 - protein, 7 aa, synthetic construct
NKHVATY

SEQ ID NO: 83851 - protein, 7 aa, synthetic construct
SPLRVDM

SEQ ID NO: 83852 - protein, 7 aa, synthetic construct
TKLIEKG

SEQ ID NO: 83853 - protein, 7 aa, synthetic construct
MTPLVAA

SEQ ID NO: 83854 - protein, 7 aa, synthetic construct
KQNNGGF

SEQ ID NO: 83855 - protein, 7 aa, synthetic construct
PDMRTHY

SEQ ID NO: 83856 - protein, 7 aa, synthetic construct
NKHPDAK

SEQ ID NO: 83857 - protein, 7 aa, synthetic construct
RAMPSDP

SEQ ID NO: 83858 - protein, 7 aa, synthetic construct
HLPPMHE

SEQ ID NO: 83859 - protein, 7 aa, synthetic construct
ESNRGLR

SEQ ID NO: 83860 - protein, 7 aa, synthetic construct
WHRGGVD

SEQ ID NO: 83861 - protein, 7 aa, synthetic construct
QYQHKEF

SEQ ID NO: 83862 - protein, 7 aa, synthetic construct
NSANREG

SEQ ID NO: 83863 - protein, 7 aa, synthetic construct
TMKIHNM

SEQ ID NO: 83864 - protein, 7 aa, synthetic construct
GLAPHRD

SEQ ID NO: 83865 - protein, 7 aa, synthetic construct
KIEQYMK

SEQ ID NO: 83866 - protein, 7 aa, synthetic construct
FHHDAGR

SEQ ID NO: 83867 - protein, 7 aa, synthetic construct
IQSSQRA

SEQ ID NO: 83868 - protein, 7 aa, synthetic construct
KYSTSMQ

SEQ ID NO: 83869 - protein, 7 aa, synthetic construct
KQPDNQG

SEQ ID NO: 83870 - protein, 7 aa, synthetic construct
SQIGHQT

SEQ ID NO: 83871 - protein, 7 aa, synthetic construct
FGKRYQE

SEQ ID NO: 83872 - protein, 7 aa, synthetic construct
NNKPNAI

SEQ ID NO: 83873 - protein, 7 aa, synthetic construct
LDMRMNE

SEQ ID NO: 83874 - protein, 7 aa, synthetic construct
AHLNENR

SEQ ID NO: 83875 - protein, 7 aa, synthetic construct
IPITPGS

SEQ ID NO: 83876 - protein, 7 aa, synthetic construct
VGGKPMS

SEQ ID NO: 83877 - protein, 7 aa, synthetic construct
RHVGAHV

SEQ ID NO: 83878 - protein, 7 aa, synthetic construct
SVHPAGT

SEQ ID NO: 83879 - protein, 7 aa, synthetic construct
GYGAFPE

SEQ ID NO: 83880 - protein, 7 aa, synthetic construct
IRGGPDH

SEQ ID NO: 83881 - protein, 7 aa, synthetic construct
WSQYDRE

SEQ ID NO: 83882 - protein, 7 aa, synthetic construct
AHYAGTL

SEQ ID NO: 83883 - protein, 7 aa, synthetic construct
HPRMLAT

SEQ ID NO: 83884 - protein, 7 aa, synthetic construct
VAQHLQM

SEQ ID NO: 83885 - protein, 7 aa, synthetic construct
INNSMGT

SEQ ID NO: 83886 - protein, 7 aa, synthetic construct
SHLDLKF

SEQ ID NO: 83887 - protein, 7 aa, synthetic construct
TGATTVL

SEQ ID NO: 83888 - protein, 7 aa, synthetic construct
LAPAASG

SEQ ID NO: 83889 - protein, 7 aa, synthetic construct
TGNSGLS

SEQ ID NO: 83890 - protein, 7 aa, synthetic construct
QNALPNV

SEQ ID NO: 83891 - protein, 7 aa, synthetic construct
VRGAAGE

SEQ ID NO: 83892 - protein, 7 aa, synthetic construct
SQDNPKS

SEQ ID NO: 83893 - protein, 7 aa, synthetic construct
IGKEQAS

SEQ ID NO: 83894 - protein, 7 aa, synthetic construct
NRENKVN

SEQ ID NO: 83895 - protein, 7 aa, synthetic construct
WGRQSEF

SEQ ID NO: 83896 - protein, 7 aa, synthetic construct
GELNAGR

SEQ ID NO: 83897 - protein, 7 aa, synthetic construct
SKWPNVQ

SEQ ID NO: 83898 - protein, 7 aa, synthetic construct
FQNGRTV

SEQ ID NO: 83899 - protein, 7 aa, synthetic construct
HTFGAEL

SEQ ID NO: 83900 - protein, 7 aa, synthetic construct
LKSMVGG

SEQ ID NO: 83901 - protein, 7 aa, synthetic construct
DFPYRTE

SEQ ID NO: 83902 - protein, 7 aa, synthetic construct
QNNSSVS

SEQ ID NO: 83903 - protein, 7 aa, synthetic construct
FQQTTHD

SEQ ID NO: 83904 - protein, 7 aa, synthetic construct
GTLRHDS

SEQ ID NO: 83905 - protein, 7 aa, synthetic construct
SLNANFA

SEQ ID NO: 83906 - protein, 7 aa, synthetic construct
SRDHNRF

SEQ ID NO: 83907 - protein, 7 aa, synthetic construct
MDFTKHY

SEQ ID NO: 83908 - protein, 7 aa, synthetic construct
HGSGSLT

SEQ ID NO: 83909 - protein, 7 aa, synthetic construct
LKVIAKP

SEQ ID NO: 83910 - protein, 7 aa, synthetic construct
LDAHNHI

SEQ ID NO: 83911 - protein, 7 aa, synthetic construct
LYGTLER

SEQ ID NO: 83912 - protein, 7 aa, synthetic construct
YPAYITE

SEQ ID NO: 83913 - protein, 7 aa, synthetic construct
NFHDIKN

SEQ ID NO: 83914 - protein, 7 aa, synthetic construct
TSHGLNK

SEQ ID NO: 83915 - protein, 7 aa, synthetic construct
ATVLRKD

SEQ ID NO: 83916 - protein, 7 aa, synthetic construct
NHAAIGL

SEQ ID NO: 83917 - protein, 7 aa, synthetic construct
KPTMPMN

SEQ ID NO: 83918 - protein, 7 aa, synthetic construct
GSVAKQT

SEQ ID NO: 83919 - protein, 7 aa, synthetic construct
PQRESLT

SEQ ID NO: 83920 - protein, 7 aa, synthetic construct
PKYRDGL

SEQ ID NO: 83921 - protein, 7 aa, synthetic construct
SGKATSG

SEQ ID NO: 83922 - protein, 7 aa, synthetic construct
LGNHLQL

SEQ ID NO: 83923 - protein, 7 aa, synthetic construct
NLNGQTS

SEQ ID NO: 83924 - protein, 7 aa, synthetic construct
NSIIQHG

SEQ ID NO: 83925 - protein, 7 aa, synthetic construct
KQATGYD

SEQ ID NO: 83926 - protein, 7 aa, synthetic construct
AGREIVP

SEQ ID NO: 83927 - protein, 7 aa, synthetic construct
NSKVQEM

SEQ ID NO: 83928 - protein, 7 aa, synthetic construct
NALIFKE

SEQ ID NO: 83929 - protein, 7 aa, synthetic construct
PHQGVTF

SEQ ID NO: 83930 - protein, 7 aa, synthetic construct
NQMGGAL

SEQ ID NO: 83931 - protein, 7 aa, synthetic construct
TIGFHHG

SEQ ID NO: 83932 - protein, 7 aa, synthetic construct
HMQGGDY

SEQ ID NO: 83933 - protein, 7 aa, synthetic construct
LMVKNPQ

SEQ ID NO: 83934 - protein, 7 aa, synthetic construct
GGSHIKN

SEQ ID NO: 83935 - protein, 7 aa, synthetic construct
SYSGSQR

SEQ ID NO: 83936 - protein, 7 aa, synthetic construct
QAKHQMF

SEQ ID NO: 83937 - protein, 7 aa, synthetic construct
VGIKPLA

SEQ ID NO: 83938 - protein, 7 aa, synthetic construct
TRIIQGD

SEQ ID NO: 83939 - protein, 7 aa, synthetic construct
GMQGSHN

SEQ ID NO: 83940 - protein, 7 aa, synthetic construct
QKDVGVF

SEQ ID NO: 83941 - protein, 7 aa, synthetic construct
NKDGVIM

SEQ ID NO: 83942 - protein, 7 aa, synthetic construct
PRLVLNE

SEQ ID NO: 83943 - protein, 7 aa, synthetic construct
HTQQPMA

SEQ ID NO: 83944 - protein, 7 aa, synthetic construct
RAGNGMH

SEQ ID NO: 83945 - protein, 7 aa, synthetic construct
DHIRKEP

SEQ ID NO: 83946 - protein, 7 aa, synthetic construct
FRGSHKD

SEQ ID NO: 83947 - protein, 7 aa, synthetic construct
MPRKDDA

SEQ ID NO: 83948 - protein, 7 aa, synthetic construct
QQQGPNG

SEQ ID NO: 83949 - protein, 7 aa, synthetic construct
QLQAKPI

SEQ ID NO: 83950 - protein, 7 aa, synthetic construct
PTQKTGG

SEQ ID NO: 83951 - protein, 7 aa, synthetic construct
VKSNIAP

SEQ ID NO: 83952 - protein, 7 aa, synthetic construct
ALISHTD

SEQ ID NO: 83953 - protein, 7 aa, synthetic construct
MKNTPGA

SEQ ID NO: 83954 - protein, 7 aa, synthetic construct
WGSTGHF

SEQ ID NO: 83955 - protein, 7 aa, synthetic construct
TVKTSQG

SEQ ID NO: 83956 - protein, 7 aa, synthetic construct
TGHDKMV

SEQ ID NO: 83957 - protein, 7 aa, synthetic construct
MNIGKDQ

SEQ ID NO: 83958 - protein, 7 aa, synthetic construct
TGVMGRS

SEQ ID NO: 83959 - protein, 7 aa, synthetic construct
WRASYQD

SEQ ID NO: 83960 - protein, 7 aa, synthetic construct
RQNDGPS

SEQ ID NO: 83961 - protein, 7 aa, synthetic construct
QFKRMPE

SEQ ID NO: 83962 - protein, 7 aa, synthetic construct
FRDTNTY

SEQ ID NO: 83963 - protein, 7 aa, synthetic construct
NKEIKHQ

SEQ ID NO: 83964 - protein, 7 aa, synthetic construct
HGTALGP

SEQ ID NO: 83965 - protein, 7 aa, synthetic construct
IKLDDSH

SEQ ID NO: 83966 - protein, 7 aa, synthetic construct
AQTSIRY

SEQ ID NO: 83967 - protein, 7 aa, synthetic construct
WTKGVHE

SEQ ID NO: 83968 - protein, 7 aa, synthetic construct
RPFIETK

SEQ ID NO: 83969 - protein, 7 aa, synthetic construct
QKFDITA

SEQ ID NO: 83970 - protein, 7 aa, synthetic construct
IGMTKPI

SEQ ID NO: 83971 - protein, 7 aa, synthetic construct
WPHKSLS

SEQ ID NO: 83972 - protein, 7 aa, synthetic construct
YTMQIHE

SEQ ID NO: 83973 - protein, 7 aa, synthetic construct
QEYGPSS

SEQ ID NO: 83974 - protein, 7 aa, synthetic construct
GYSTAKG

SEQ ID NO: 83975 - protein, 7 aa, synthetic construct
IIPRVEM

SEQ ID NO: 83976 - protein, 7 aa, synthetic construct
YAPKDIT

SEQ ID NO: 83977 - protein, 7 aa, synthetic construct
QSANPSK

SEQ ID NO: 83978 - protein, 7 aa, synthetic construct
PMTSAEM

SEQ ID NO: 83979 - protein, 7 aa, synthetic construct
DVAKPSQ

SEQ ID NO: 83980 - protein, 7 aa, synthetic construct
NSGAKGG

SEQ ID NO: 83981 - protein, 7 aa, synthetic construct
RITTGNE

SEQ ID NO: 83982 - protein, 7 aa, synthetic construct
TKVFHSA

SEQ ID NO: 83983 - protein, 7 aa, synthetic construct
HAHSVTT

SEQ ID NO: 83984 - protein, 7 aa, synthetic construct
KRPDGWG

SEQ ID NO: 83985 - protein, 7 aa, synthetic construct
MQNLTEV

SEQ ID NO: 83986 - protein, 7 aa, synthetic construct
RPNTNAM

SEQ ID NO: 83987 - protein, 7 aa, synthetic construct
FMGQNIS

SEQ ID NO: 83988 - protein, 7 aa, synthetic construct
LQDFLSP

SEQ ID NO: 83989 - protein, 7 aa, synthetic construct
QEHRDAS

SEQ ID NO: 83990 - protein, 7 aa, synthetic construct
NYNYPEM

SEQ ID NO: 83991 - protein, 7 aa, synthetic construct
KQQSTFG

SEQ ID NO: 83992 - protein, 7 aa, synthetic construct
HGPTTPR

SEQ ID NO: 83993 - protein, 7 aa, synthetic construct
NGIVVKE

SEQ ID NO: 83994 - protein, 7 aa, synthetic construct
VMRREAT

SEQ ID NO: 83995 - protein, 7 aa, synthetic construct
YRSEYEH

SEQ ID NO: 83996 - protein, 7 aa, synthetic construct
YMPSMGQ

SEQ ID NO: 83997 - protein, 7 aa, synthetic construct
QTKQPTA

SEQ ID NO: 83998 - protein, 7 aa, synthetic construct
MHNPNKT

SEQ ID NO: 83999 - protein, 7 aa, synthetic construct
EMERSRV

SEQ ID NO: 84000 - protein, 7 aa, synthetic construct
PKHYADK

SEQ ID NO: 84001 - protein, 7 aa, synthetic construct
MQARGID

SEQ ID NO: 84002 - protein, 7 aa, synthetic construct
QGAGLMV

SEQ ID NO: 84003 - protein, 7 aa, synthetic construct
PRENSLP

SEQ ID NO: 84004 - protein, 7 aa, synthetic construct
VSGRPSL

SEQ ID NO: 84005 - protein, 7 aa, synthetic construct
EAIKKNW

SEQ ID NO: 84006 - protein, 7 aa, synthetic construct
MYMNNRP

SEQ ID NO: 84007 - protein, 7 aa, synthetic construct
HKLTAVG

SEQ ID NO: 84008 - protein, 7 aa, synthetic construct
VRTSQNP

SEQ ID NO: 84009 - protein, 7 aa, synthetic construct
QKQGFHE

SEQ ID NO: 84010 - protein, 7 aa, synthetic construct
KNSQYVE

SEQ ID NO: 84011 - protein, 7 aa, synthetic construct
KEFPTRQ

SEQ ID NO: 84012 - protein, 7 aa, synthetic construct
ANSPHIR

SEQ ID NO: 84013 - protein, 7 aa, synthetic construct
TSMRTVI

SEQ ID NO: 84014 - protein, 7 aa, synthetic construct
QARSVNT

SEQ ID NO: 84015 - protein, 7 aa, synthetic construct
MIPDPVN

SEQ ID NO: 84016 - protein, 7 aa, synthetic construct
GIMHTQL

SEQ ID NO: 84017 - protein, 7 aa, synthetic construct
FISHNES

SEQ ID NO: 84018 - protein, 7 aa, synthetic construct
YVKLLDG

SEQ ID NO: 84019 - protein, 7 aa, synthetic construct
KRPSQEM

SEQ ID NO: 84020 - protein, 7 aa, synthetic construct
RPDAHMY

SEQ ID NO: 84021 - protein, 7 aa, synthetic construct
ISRHTMV

SEQ ID NO: 84022 - protein, 7 aa, synthetic construct
PFNRIDD

SEQ ID NO: 84023 - protein, 7 aa, synthetic construct
FAFERTG

SEQ ID NO: 84024 - protein, 7 aa, synthetic construct
RLTTDTR

SEQ ID NO: 84025 - protein, 7 aa, synthetic construct
KPTTTVN

SEQ ID NO: 84026 - protein, 7 aa, synthetic construct
LPMLPIP

SEQ ID NO: 84027 - protein, 7 aa, synthetic construct
KPPTGGS

SEQ ID NO: 84028 - protein, 7 aa, synthetic construct
DKSTLEK

SEQ ID NO: 84029 - protein, 7 aa, synthetic construct
ASRVPTQ

SEQ ID NO: 84030 - protein, 7 aa, synthetic construct
VHLRIEG

SEQ ID NO: 84031 - protein, 7 aa, synthetic construct
QVKQNMN

SEQ ID NO: 84032 - protein, 7 aa, synthetic construct
LQFSQVK

SEQ ID NO: 84033 - protein, 7 aa, synthetic construct
AKNTQAA

SEQ ID NO: 84034 - protein, 7 aa, synthetic construct
KKPDKQP

SEQ ID NO: 84035 - protein, 7 aa, synthetic construct
MKNKIDG

SEQ ID NO: 84036 - protein, 7 aa, synthetic construct
PRGEHRP

SEQ ID NO: 84037 - protein, 7 aa, synthetic construct
TAGRMTY

SEQ ID NO: 84038 - protein, 7 aa, synthetic construct
LAINHKI

SEQ ID NO: 84039 - protein, 7 aa, synthetic construct
DYEFKHA

SEQ ID NO: 84040 - protein, 7 aa, synthetic construct
IGPIAGM

SEQ ID NO: 84041 - protein, 7 aa, synthetic construct
KNEIHRY

SEQ ID NO: 84042 - protein, 7 aa, synthetic construct
QPKNQAS

SEQ ID NO: 84043 - protein, 7 aa, synthetic construct
ATGMIEK

SEQ ID NO: 84044 - protein, 7 aa, synthetic construct
IGVPHFP

SEQ ID NO: 84045 - protein, 7 aa, synthetic construct
LPIAHGV

SEQ ID NO: 84046 - protein, 7 aa, synthetic construct
DALPAAP

SEQ ID NO: 84047 - protein, 7 aa, synthetic construct
HEPSVRL

SEQ ID NO: 84048 - protein, 7 aa, synthetic construct
TSEARAV

SEQ ID NO: 84049 - protein, 7 aa, synthetic construct
SSIPKHE

SEQ ID NO: 84050 - protein, 7 aa, synthetic construct
PMMKRMD

SEQ ID NO: 84051 - protein, 7 aa, synthetic construct
FHFIKTE

SEQ ID NO: 84052 - protein, 7 aa, synthetic construct
HRESYQT

SEQ ID NO: 84053 - protein, 7 aa, synthetic construct
TLEKLYD

SEQ ID NO: 84054 - protein, 7 aa, synthetic construct
GNDVMKL

SEQ ID NO: 84055 - protein, 7 aa, synthetic construct
VVAGNHR

SEQ ID NO: 84056 - protein, 7 aa, synthetic construct
IAMNGKS

SEQ ID NO: 84057 - protein, 7 aa, synthetic construct
EARMPKY

SEQ ID NO: 84058 - protein, 7 aa, synthetic construct
GKNQYNI

SEQ ID NO: 84059 - protein, 7 aa, synthetic construct
YSMATTT

SEQ ID NO: 84060 - protein, 7 aa, synthetic construct
QGQKYDK

SEQ ID NO: 84061 - protein, 7 aa, synthetic construct
EPNIPIS

SEQ ID NO: 84062 - protein, 7 aa, synthetic construct
NTKSGIY

SEQ ID NO: 84063 - protein, 7 aa, synthetic construct
VGASRHP

SEQ ID NO: 84064 - protein, 7 aa, synthetic construct
PKRNDLA

SEQ ID NO: 84065 - protein, 7 aa, synthetic construct
PKPGMMA

SEQ ID NO: 84066 - protein, 7 aa, synthetic construct
GVKNRTE

SEQ ID NO: 84067 - protein, 7 aa, synthetic construct
VRETQGM

SEQ ID NO: 84068 - protein, 7 aa, synthetic construct
QVKMNSI

SEQ ID NO: 84069 - protein, 7 aa, synthetic construct
MLAARTN

SEQ ID NO: 84070 - protein, 7 aa, synthetic construct
RGHHLIE

SEQ ID NO: 84071 - protein, 7 aa, synthetic construct
GTQTEMR

SEQ ID NO: 84072 - protein, 7 aa, synthetic construct
KTEKISN

SEQ ID NO: 84073 - protein, 7 aa, synthetic construct
NEPTRNT

SEQ ID NO: 84074 - protein, 7 aa, synthetic construct
SMGHRNI

SEQ ID NO: 84075 - protein, 7 aa, synthetic construct
KFDHGRE

SEQ ID NO: 84076 - protein, 7 aa, synthetic construct
DKGGRVM

SEQ ID NO: 84077 - protein, 7 aa, synthetic construct
QTNHERT

SEQ ID NO: 84078 - protein, 7 aa, synthetic construct
FEKNMNH

SEQ ID NO: 84079 - protein, 7 aa, synthetic construct
DRQIPFA

SEQ ID NO: 84080 - protein, 7 aa, synthetic construct
GANASQG

SEQ ID NO: 84081 - protein, 7 aa, synthetic construct
YYHQSEE

SEQ ID NO: 84082 - protein, 7 aa, synthetic construct
ISEKHLK

SEQ ID NO: 84083 - protein, 7 aa, synthetic construct
QFLNSEV

SEQ ID NO: 84084 - protein, 7 aa, synthetic construct
DFKPGHE

SEQ ID NO: 84085 - protein, 7 aa, synthetic construct
RGERFHP

SEQ ID NO: 84086 - protein, 7 aa, synthetic construct
DNIQKNK

SEQ ID NO: 84087 - protein, 7 aa, synthetic construct
SVRKEYF

SEQ ID NO: 84088 - protein, 7 aa, synthetic construct
PEVPRMG

SEQ ID NO: 84089 - protein, 7 aa, synthetic construct
NDGKTKA

SEQ ID NO: 84090 - protein, 7 aa, synthetic construct
YFHEQRG

SEQ ID NO: 84091 - protein, 7 aa, synthetic construct
QISLIAG

SEQ ID NO: 84092 - protein, 7 aa, synthetic construct
RTTDTQI

SEQ ID NO: 84093 - protein, 7 aa, synthetic construct
LKDHARV

SEQ ID NO: 84094 - protein, 7 aa, synthetic construct
VRITNQE

SEQ ID NO: 84095 - protein, 7 aa, synthetic construct
KLTENPT

SEQ ID NO: 84096 - protein, 7 aa, synthetic construct
QMHQGDV

SEQ ID NO: 84097 - protein, 7 aa, synthetic construct
ISGVNEP

SEQ ID NO: 84098 - protein, 7 aa, synthetic construct
PTRGPQP

SEQ ID NO: 84099 - protein, 7 aa, synthetic construct
TMTVGKF

SEQ ID NO: 84100 - protein, 7 aa, synthetic construct
RPGARDD

SEQ ID NO: 84101 - protein, 7 aa, synthetic construct
EKVQFGA

SEQ ID NO: 84102 - protein, 7 aa, synthetic construct
MNTDSHK

SEQ ID NO: 84103 - protein, 7 aa, synthetic construct
GNGARMN

SEQ ID NO: 84104 - protein, 7 aa, synthetic construct
QHPSMQM

SEQ ID NO: 84105 - protein, 7 aa, synthetic construct
EPGPYAI

SEQ ID NO: 84106 - protein, 7 aa, synthetic construct
MKNFDYV

SEQ ID NO: 84107 - protein, 7 aa, synthetic construct
EGIMKES

SEQ ID NO: 84108 - protein, 7 aa, synthetic construct
LRGNNYM

SEQ ID NO: 84109 - protein, 7 aa, synthetic construct
SATKVFL

SEQ ID NO: 84110 - protein, 7 aa, synthetic construct
PILNLQG

SEQ ID NO: 84111 - protein, 7 aa, synthetic construct
RLMDNRV

SEQ ID NO: 84112 - protein, 7 aa, synthetic construct
HDLKTSS

SEQ ID NO: 84113 - protein, 7 aa, synthetic construct
KDKPNIA

SEQ ID NO: 84114 - protein, 7 aa, synthetic construct
DPKDQKV

SEQ ID NO: 84115 - protein, 7 aa, synthetic construct
DVQKAMN

SEQ ID NO: 84116 - protein, 7 aa, synthetic construct
ANQKNIM

SEQ ID NO: 84117 - protein, 7 aa, synthetic construct
IIDGKGY

SEQ ID NO: 84118 - protein, 7 aa, synthetic construct
GLAFNVG

SEQ ID NO: 84119 - protein, 7 aa, synthetic construct
MSGPERA

SEQ ID NO: 84120 - protein, 7 aa, synthetic construct
STKSANG

SEQ ID NO: 84121 - protein, 7 aa, synthetic construct
THGKDQT

SEQ ID NO: 84122 - protein, 7 aa, synthetic construct
YTTQKTG

SEQ ID NO: 84123 - protein, 7 aa, synthetic construct
QGQYIEH

SEQ ID NO: 84124 - protein, 7 aa, synthetic construct
DNVKTKP

SEQ ID NO: 84125 - protein, 7 aa, synthetic construct
HPGTGFK

SEQ ID NO: 84126 - protein, 7 aa, synthetic construct
AWKPGLD

SEQ ID NO: 84127 - protein, 7 aa, synthetic construct
VTHIGIN

SEQ ID NO: 84128 - protein, 7 aa, synthetic construct
NNDHHQL

SEQ ID NO: 84129 - protein, 7 aa, synthetic construct
GMLHVTV

SEQ ID NO: 84130 - protein, 7 aa, synthetic construct
GGIGAST

SEQ ID NO: 84131 - protein, 7 aa, synthetic construct
IQHHPFE

SEQ ID NO: 84132 - protein, 7 aa, synthetic construct
EYTGNHS

SEQ ID NO: 84133 - protein, 7 aa, synthetic construct
IYGESAV

SEQ ID NO: 84134 - protein, 7 aa, synthetic construct
PMFQDKL

SEQ ID NO: 84135 - protein, 7 aa, synthetic construct
EQHQTYA

SEQ ID NO: 84136 - protein, 7 aa, synthetic construct
FTKIAMH

SEQ ID NO: 84137 - protein, 7 aa, synthetic construct
MMHKEPE

SEQ ID NO: 84138 - protein, 7 aa, synthetic construct
PKAHHYP

SEQ ID NO: 84139 - protein, 7 aa, synthetic construct
DKGVNVT

SEQ ID NO: 84140 - protein, 7 aa, synthetic construct
EMKGQNH

SEQ ID NO: 84141 - protein, 7 aa, synthetic construct
PATGSHF

SEQ ID NO: 84142 - protein, 7 aa, synthetic construct
LRQMETM

SEQ ID NO: 84143 - protein, 7 aa, synthetic construct
KVNQIRE

SEQ ID NO: 84144 - protein, 7 aa, synthetic construct
GPLEQRH

SEQ ID NO: 84145 - protein, 7 aa, synthetic construct
MGGNRNA

SEQ ID NO: 84146 - protein, 7 aa, synthetic construct
HHGASPH

SEQ ID NO: 84147 - protein, 7 aa, synthetic construct
ADPRMSY

SEQ ID NO: 84148 - protein, 7 aa, synthetic construct
FKLPENT

SEQ ID NO: 84149 - protein, 7 aa, synthetic construct
QSGKTVG

SEQ ID NO: 84150 - protein, 7 aa, synthetic construct
NMTNPGT

SEQ ID NO: 84151 - protein, 7 aa, synthetic construct
LGTNQFD

SEQ ID NO: 84152 - protein, 7 aa, synthetic construct
VERSVLT

SEQ ID NO: 84153 - protein, 7 aa, synthetic construct
LQKYPID

SEQ ID NO: 84154 - protein, 7 aa, synthetic construct
YHFGKND

SEQ ID NO: 84155 - protein, 7 aa, synthetic construct
MITSGDS

SEQ ID NO: 84156 - protein, 7 aa, synthetic construct
PNQTLMK

SEQ ID NO: 84157 - protein, 7 aa, synthetic construct
RIAVKEM

SEQ ID NO: 84158 - protein, 7 aa, synthetic construct
NNNRMGG

SEQ ID NO: 84159 - protein, 7 aa, synthetic construct
SSQRGDK

SEQ ID NO: 84160 - protein, 7 aa, synthetic construct
RDVSGFL

SEQ ID NO: 84161 - protein, 7 aa, synthetic construct
WGEIMKA

SEQ ID NO: 84162 - protein, 7 aa, synthetic construct
YQNNYSK

SEQ ID NO: 84163 - protein, 7 aa, synthetic construct
NRNSQNN

SEQ ID NO: 84164 - protein, 7 aa, synthetic construct
KWDIKSP

SEQ ID NO: 84165 - protein, 7 aa, synthetic construct
YNKGGTY

SEQ ID NO: 84166 - protein, 7 aa, synthetic construct
TKTNHDI

SEQ ID NO: 84167 - protein, 7 aa, synthetic construct
KQSMSQP

SEQ ID NO: 84168 - protein, 7 aa, synthetic construct
SWKVANG

SEQ ID NO: 84169 - protein, 7 aa, synthetic construct
GLDVSIP

SEQ ID NO: 84170 - protein, 7 aa, synthetic construct
TMDIPRP

SEQ ID NO: 84171 - protein, 7 aa, synthetic construct
AMSVRPT

SEQ ID NO: 84172 - protein, 7 aa, synthetic construct
SLNSFVA

SEQ ID NO: 84173 - protein, 7 aa, synthetic construct
HNGRSHG

SEQ ID NO: 84174 - protein, 7 aa, synthetic construct
FEYGFKG

SEQ ID NO: 84175 - protein, 7 aa, synthetic construct
GKVLGMD

SEQ ID NO: 84176 - protein, 7 aa, synthetic construct
FIDRHTT

SEQ ID NO: 84177 - protein, 7 aa, synthetic construct
DLIGFRE

SEQ ID NO: 84178 - protein, 7 aa, synthetic construct
TGINAKI

SEQ ID NO: 84179 - protein, 7 aa, synthetic construct
KYQRADV

SEQ ID NO: 84180 - protein, 7 aa, synthetic construct
YNDTDKI

SEQ ID NO: 84181 - protein, 7 aa, synthetic construct
TSRTNAG

SEQ ID NO: 84182 - protein, 7 aa, synthetic construct
MIKFEPP

SEQ ID NO: 84183 - protein, 7 aa, synthetic construct
SKMQSQP

SEQ ID NO: 84184 - protein, 7 aa, synthetic construct
HKNKDIT

SEQ ID NO: 84185 - protein, 7 aa, synthetic construct
REEQIRT

SEQ ID NO: 84186 - protein, 7 aa, synthetic construct
KVRDNAW

SEQ ID NO: 84187 - protein, 7 aa, synthetic construct
FIHEAVP

SEQ ID NO: 84188 - protein, 7 aa, synthetic construct
MGNQHLQ

SEQ ID NO: 84189 - protein, 7 aa, synthetic construct
IRPREFP

SEQ ID NO: 84190 - protein, 7 aa, synthetic construct
GYLHVNG

SEQ ID NO: 84191 - protein, 7 aa, synthetic construct
AGGHLTK

SEQ ID NO: 84192 - protein, 7 aa, synthetic construct
VPRGTGA

SEQ ID NO: 84193 - protein, 7 aa, synthetic construct
LKKDEWL

SEQ ID NO: 84194 - protein, 7 aa, synthetic construct
SPIKTYV

SEQ ID NO: 84195 - protein, 7 aa, synthetic construct
PIDYNRV

SEQ ID NO: 84196 - protein, 7 aa, synthetic construct
KSHHSPF

SEQ ID NO: 84197 - protein, 7 aa, synthetic construct
GVFASSN

SEQ ID NO: 84198 - protein, 7 aa, synthetic construct
DIPHYVG

SEQ ID NO: 84199 - protein, 7 aa, synthetic construct
PAKYHSA

SEQ ID NO: 84200 - protein, 7 aa, synthetic construct
KVSREYA

SEQ ID NO: 84201 - protein, 7 aa, synthetic construct
ESSVYNK

SEQ ID NO: 84202 - protein, 7 aa, synthetic construct
PKSSGTF

SEQ ID NO: 84203 - protein, 7 aa, synthetic construct
GDIKVRF

SEQ ID NO: 84204 - protein, 7 aa, synthetic construct
NDKKMNY

SEQ ID NO: 84205 - protein, 7 aa, synthetic construct
MSRHLDH

SEQ ID NO: 84206 - protein, 7 aa, synthetic construct
SVRQDQD

SEQ ID NO: 84207 - protein, 7 aa, synthetic construct
NAAKHDT

SEQ ID NO: 84208 - protein, 7 aa, synthetic construct
NGRNVDL

SEQ ID NO: 84209 - protein, 7 aa, synthetic construct
HKGEWMD

SEQ ID NO: 84210 - protein, 7 aa, synthetic construct
WVTTHNS

SEQ ID NO: 84211 - protein, 7 aa, synthetic construct
RNLHASN

SEQ ID NO: 84212 - protein, 7 aa, synthetic construct
KKAAETT

SEQ ID NO: 84213 - protein, 7 aa, synthetic construct
RPRVDSP

SEQ ID NO: 84214 - protein, 7 aa, synthetic construct
ADRLKLM

SEQ ID NO: 84215 - protein, 7 aa, synthetic construct
RMTQTGP

SEQ ID NO: 84216 - protein, 7 aa, synthetic construct
YDRIRER

SEQ ID NO: 84217 - protein, 7 aa, synthetic construct
SHKNLMD

SEQ ID NO: 84218 - protein, 7 aa, synthetic construct
KSSQLNS

SEQ ID NO: 84219 - protein, 7 aa, synthetic construct
AIRAKHE

SEQ ID NO: 84220 - protein, 7 aa, synthetic construct
ETQRNQG

SEQ ID NO: 84221 - protein, 7 aa, synthetic construct
DTYGKVN

SEQ ID NO: 84222 - protein, 7 aa, synthetic construct
SENRNHD

SEQ ID NO: 84223 - protein, 7 aa, synthetic construct
TWEAIPP

SEQ ID NO: 84224 - protein, 7 aa, synthetic construct
MNHVPGH

SEQ ID NO: 84225 - protein, 7 aa, synthetic construct
EKNPNIP

SEQ ID NO: 84226 - protein, 7 aa, synthetic construct
ASEWKGK

SEQ ID NO: 84227 - protein, 7 aa, synthetic construct
HDDRKNV

SEQ ID NO: 84228 - protein, 7 aa, synthetic construct
DALTKNP

SEQ ID NO: 84229 - protein, 7 aa, synthetic construct
HPLKDMT

SEQ ID NO: 84230 - protein, 7 aa, synthetic construct
MKPEIKA

SEQ ID NO: 84231 - protein, 7 aa, synthetic construct
NAYHNKQ

SEQ ID NO: 84232 - protein, 7 aa, synthetic construct
WYDSKST

SEQ ID NO: 84233 - protein, 7 aa, synthetic construct
GTQHYQP

SEQ ID NO: 84234 - protein, 7 aa, synthetic construct
NMSVNPR

SEQ ID NO: 84235 - protein, 7 aa, synthetic construct
QAKAKMD

SEQ ID NO: 84236 - protein, 7 aa, synthetic construct
TQDLKQR

SEQ ID NO: 84237 - protein, 7 aa, synthetic construct
ILHPRDY

SEQ ID NO: 84238 - protein, 7 aa, synthetic construct
MMNRYTD

SEQ ID NO: 84239 - protein, 7 aa, synthetic construct
GRAIIEQ

SEQ ID NO: 84240 - protein, 7 aa, synthetic construct
DEGHGRK

SEQ ID NO: 84241 - protein, 7 aa, synthetic construct
SPGKPNE

SEQ ID NO: 84242 - protein, 7 aa, synthetic construct
GVRKESF

SEQ ID NO: 84243 - protein, 7 aa, synthetic construct
LFKRNEE

SEQ ID NO: 84244 - protein, 7 aa, synthetic construct
GQNRGSP

SEQ ID NO: 84245 - protein, 7 aa, synthetic construct
SWTGVSS

SEQ ID NO: 84246 - protein, 7 aa, synthetic construct
PQKQMEY

SEQ ID NO: 84247 - protein, 7 aa, synthetic construct
MGMLAVA

SEQ ID NO: 84248 - protein, 7 aa, synthetic construct
QLLRTGM

SEQ ID NO: 84249 - protein, 7 aa, synthetic construct
SYQAMRP

SEQ ID NO: 84250 - protein, 7 aa, synthetic construct
KTTGKDA

SEQ ID NO: 84251 - protein, 7 aa, synthetic construct
ERPYYQA

SEQ ID NO: 84252 - protein, 7 aa, synthetic construct
PHIVHGN

SEQ ID NO: 84253 - protein, 7 aa, synthetic construct
MSSTRSV

SEQ ID NO: 84254 - protein, 7 aa, synthetic construct
HQPNVYP

SEQ ID NO: 84255 - protein, 7 aa, synthetic construct
TIQINHQ

SEQ ID NO: 84256 - protein, 7 aa, synthetic construct
ENKQKTH

SEQ ID NO: 84257 - protein, 7 aa, synthetic construct
YIEPIKG

SEQ ID NO: 84258 - protein, 7 aa, synthetic construct
QLLDPHR

SEQ ID NO: 84259 - protein, 7 aa, synthetic construct
VKPPSTQ

SEQ ID NO: 84260 - protein, 7 aa, synthetic construct
VGKDVKA

SEQ ID NO: 84261 - protein, 7 aa, synthetic construct
WKKILVD

SEQ ID NO: 84262 - protein, 7 aa, synthetic construct
QNNGRMV

SEQ ID NO: 84263 - protein, 7 aa, synthetic construct
VLSNSMA

SEQ ID NO: 84264 - protein, 7 aa, synthetic construct
LKSAQEQ

SEQ ID NO: 84265 - protein, 7 aa, synthetic construct
HAQPGVE

SEQ ID NO: 84266 - protein, 7 aa, synthetic construct
TSHARFP

SEQ ID NO: 84267 - protein, 7 aa, synthetic construct
AKDSQGK

SEQ ID NO: 84268 - protein, 7 aa, synthetic construct
HTIKSTQ

SEQ ID NO: 84269 - protein, 7 aa, synthetic construct
IVPSATF

SEQ ID NO: 84270 - protein, 7 aa, synthetic construct
YSAENRI

SEQ ID NO: 84271 - protein, 7 aa, synthetic construct
LKTLHED

SEQ ID NO: 84272 - protein, 7 aa, synthetic construct
PQKSNAA

SEQ ID NO: 84273 - protein, 7 aa, synthetic construct
ATTIHEK

SEQ ID NO: 84274 - protein, 7 aa, synthetic construct
LIGTIGQ

SEQ ID NO: 84275 - protein, 7 aa, synthetic construct
FGSYSQK

SEQ ID NO: 84276 - protein, 7 aa, synthetic construct
GVQHSTP

SEQ ID NO: 84277 - protein, 7 aa, synthetic construct
LPKLDKV

SEQ ID NO: 84278 - protein, 7 aa, synthetic construct
KGPSTSV

SEQ ID NO: 84279 - protein, 7 aa, synthetic construct
KAVEDEK

SEQ ID NO: 84280 - protein, 7 aa, synthetic construct
ISRGTNV

SEQ ID NO: 84281 - protein, 7 aa, synthetic construct
TIGITTY

SEQ ID NO: 84282 - protein, 7 aa, synthetic construct
KYNDGHM

SEQ ID NO: 84283 - protein, 7 aa, synthetic construct
TRLHTNF

SEQ ID NO: 84284 - protein, 7 aa, synthetic construct
WPGAQSH

SEQ ID NO: 84285 - protein, 7 aa, synthetic construct
IAPQQAQ

SEQ ID NO: 84286 - protein, 7 aa, synthetic construct
EFVFKTP

SEQ ID NO: 84287 - protein, 7 aa, synthetic construct
SLGIREM

SEQ ID NO: 84288 - protein, 7 aa, synthetic construct
MMPSNSM

SEQ ID NO: 84289 - protein, 7 aa, synthetic construct
AYKEGLG

SEQ ID NO: 84290 - protein, 7 aa, synthetic construct
LSRGYDT

SEQ ID NO: 84291 - protein, 7 aa, synthetic construct
NITMPEW

SEQ ID NO: 84292 - protein, 7 aa, synthetic construct
GGNLHKL

SEQ ID NO: 84293 - protein, 7 aa, synthetic construct
WNGQKYG

SEQ ID NO: 84294 - protein, 7 aa, synthetic construct
EPGLQSG

SEQ ID NO: 84295 - protein, 7 aa, synthetic construct
DYAVKQE

SEQ ID NO: 84296 - protein, 7 aa, synthetic construct
VEARWRE

SEQ ID NO: 84297 - protein, 7 aa, synthetic construct
KKHLNDL

SEQ ID NO: 84298 - protein, 7 aa, synthetic construct
FEIKAIP

SEQ ID NO: 84299 - protein, 7 aa, synthetic construct
LDPRFGK

SEQ ID NO: 84300 - protein, 7 aa, synthetic construct
LHQIQTV

SEQ ID NO: 84301 - protein, 7 aa, synthetic construct
KKDEIKV

SEQ ID NO: 84302 - protein, 7 aa, synthetic construct
DSSLSRM

SEQ ID NO: 84303 - protein, 7 aa, synthetic construct
DNKKAHD

SEQ ID NO: 84304 - protein, 7 aa, synthetic construct
GRPVQLS

SEQ ID NO: 84305 - protein, 7 aa, synthetic construct
PDYGGPK

SEQ ID NO: 84306 - protein, 7 aa, synthetic construct
MTSVPND

SEQ ID NO: 84307 - protein, 7 aa, synthetic construct
RAVEHNN

SEQ ID NO: 84308 - protein, 7 aa, synthetic construct
VTGTHTV

SEQ ID NO: 84309 - protein, 7 aa, synthetic construct
LERYESH

SEQ ID NO: 84310 - protein, 7 aa, synthetic construct
YRQQQFD

SEQ ID NO: 84311 - protein, 7 aa, synthetic construct
KQNNGPA

SEQ ID NO: 84312 - protein, 7 aa, synthetic construct
EQTKGYK

SEQ ID NO: 84313 - protein, 7 aa, synthetic construct
IPIINTG

SEQ ID NO: 84314 - protein, 7 aa, synthetic construct
HQSDKKS

SEQ ID NO: 84315 - protein, 7 aa, synthetic construct
LHLPQRN

SEQ ID NO: 84316 - protein, 7 aa, synthetic construct
WNERLPQ

SEQ ID NO: 84317 - protein, 7 aa, synthetic construct
KYSNTTG

SEQ ID NO: 84318 - protein, 7 aa, synthetic construct
QDRGPIS

SEQ ID NO: 84319 - protein, 7 aa, synthetic construct
ASKYGMP

SEQ ID NO: 84320 - protein, 7 aa, synthetic construct
KGNDRAI

SEQ ID NO: 84321 - protein, 7 aa, synthetic construct
SQLKLQA

SEQ ID NO: 84322 - protein, 7 aa, synthetic construct
QFPDNKY

SEQ ID NO: 84323 - protein, 7 aa, synthetic construct
SPHITHN

SEQ ID NO: 84324 - protein, 7 aa, synthetic construct
TQKAVEI

SEQ ID NO: 84325 - protein, 7 aa, synthetic construct
AYEKNEL

SEQ ID NO: 84326 - protein, 7 aa, synthetic construct
PKSSAQN

SEQ ID NO: 84327 - protein, 7 aa, synthetic construct
YTNNKQT

SEQ ID NO: 84328 - protein, 7 aa, synthetic construct
TNKSVGA

SEQ ID NO: 84329 - protein, 7 aa, synthetic construct
NPGLFKP

SEQ ID NO: 84330 - protein, 7 aa, synthetic construct
GRAQNRE

SEQ ID NO: 84331 - protein, 7 aa, synthetic construct
WRTANDP

SEQ ID NO: 84332 - protein, 7 aa, synthetic construct
HAKMNEP

SEQ ID NO: 84333 - protein, 7 aa, synthetic construct
AIGATGL

SEQ ID NO: 84334 - protein, 7 aa, synthetic construct
FAHNMAP

SEQ ID NO: 84335 - protein, 7 aa, synthetic construct
VPHSASE

SEQ ID NO: 84336 - protein, 7 aa, synthetic construct
KAEFIVS

SEQ ID NO: 84337 - protein, 7 aa, synthetic construct
DWQAGAK

SEQ ID NO: 84338 - protein, 7 aa, synthetic construct
SKWEMMG

SEQ ID NO: 84339 - protein, 7 aa, synthetic construct
RQFTKDL

SEQ ID NO: 84340 - protein, 7 aa, synthetic construct
LVLNNHS

SEQ ID NO: 84341 - protein, 7 aa, synthetic construct
LRDQGVH

SEQ ID NO: 84342 - protein, 7 aa, synthetic construct
DIYHKVD

SEQ ID NO: 84343 - protein, 7 aa, synthetic construct
YKNTMPA

SEQ ID NO: 84344 - protein, 7 aa, synthetic construct
YRLNEGE

SEQ ID NO: 84345 - protein, 7 aa, synthetic construct
AYAPING

SEQ ID NO: 84346 - protein, 7 aa, synthetic construct
SAKSGTA

SEQ ID NO: 84347 - protein, 7 aa, synthetic construct
DKKFIPD

SEQ ID NO: 84348 - protein, 7 aa, synthetic construct
HISGVTE

SEQ ID NO: 84349 - protein, 7 aa, synthetic construct
MYRSATV

SEQ ID NO: 84350 - protein, 7 aa, synthetic construct
PGKTAAA

SEQ ID NO: 84351 - protein, 7 aa, synthetic construct
AHLQWEK

SEQ ID NO: 84352 - protein, 7 aa, synthetic construct
ASGPAAW

SEQ ID NO: 84353 - protein, 7 aa, synthetic construct
NRITPIN

SEQ ID NO: 84354 - protein, 7 aa, synthetic construct
PAEKLQS

SEQ ID NO: 84355 - protein, 7 aa, synthetic construct
KLTQLPP

SEQ ID NO: 84356 - protein, 7 aa, synthetic construct
KIAHMTN

SEQ ID NO: 84357 - protein, 7 aa, synthetic construct
AGFKVGQ

SEQ ID NO: 84358 - protein, 7 aa, synthetic construct
QMKMNAP

SEQ ID NO: 84359 - protein, 7 aa, synthetic construct
IRPGDPV

SEQ ID NO: 84360 - protein, 7 aa, synthetic construct
RVRPEVL

SEQ ID NO: 84361 - protein, 7 aa, synthetic construct
NRQVGGL

SEQ ID NO: 84362 - protein, 7 aa, synthetic construct
MGHTKMH

SEQ ID NO: 84363 - protein, 7 aa, synthetic construct
HTKAAHL

SEQ ID NO: 84364 - protein, 7 aa, synthetic construct
RNKTENW

SEQ ID NO: 84365 - protein, 7 aa, synthetic construct
QRETNNY

SEQ ID NO: 84366 - protein, 7 aa, synthetic construct
IHKLWPD

SEQ ID NO: 84367 - protein, 7 aa, synthetic construct
SHHATEH

SEQ ID NO: 84368 - protein, 7 aa, synthetic construct
IPKSGFT

SEQ ID NO: 84369 - protein, 7 aa, synthetic construct
QSRAPPG

SEQ ID NO: 84370 - protein, 7 aa, synthetic construct
VAQAFKE

SEQ ID NO: 84371 - protein, 7 aa, synthetic construct
DKLKTNA

SEQ ID NO: 84372 - protein, 7 aa, synthetic construct
PRQLTGS

SEQ ID NO: 84373 - protein, 7 aa, synthetic construct
GLTDTRG

SEQ ID NO: 84374 - protein, 7 aa, synthetic construct
EKAGRQE

SEQ ID NO: 84375 - protein, 7 aa, synthetic construct
SATKLAH

SEQ ID NO: 84376 - protein, 7 aa, synthetic construct
RQTQLMM

SEQ ID NO: 84377 - protein, 7 aa, synthetic construct
RPVHIGT

SEQ ID NO: 84378 - protein, 7 aa, synthetic construct
WHPMAPE

SEQ ID NO: 84379 - protein, 7 aa, synthetic construct
SKLEPYH

SEQ ID NO: 84380 - protein, 7 aa, synthetic construct
GQAVKAA

SEQ ID NO: 84381 - protein, 7 aa, synthetic construct
KINQAIN

SEQ ID NO: 84382 - protein, 7 aa, synthetic construct
FDPKVKM

SEQ ID NO: 84383 - protein, 7 aa, synthetic construct
ASPRFLD

SEQ ID NO: 84384 - protein, 7 aa, synthetic construct
DMVRAPK

SEQ ID NO: 84385 - protein, 7 aa, synthetic construct
KVANNVI

SEQ ID NO: 84386 - protein, 7 aa, synthetic construct
SHAHPRN

SEQ ID NO: 84387 - protein, 7 aa, synthetic construct
GDRVKVP

SEQ ID NO: 84388 - protein, 7 aa, synthetic construct
QIHTAEG

SEQ ID NO: 84389 - protein, 7 aa, synthetic construct
RVERPYH

SEQ ID NO: 84390 - protein, 7 aa, synthetic construct
EIKDHKN

SEQ ID NO: 84391 - protein, 7 aa, synthetic construct
KLMNDHE

SEQ ID NO: 84392 - protein, 7 aa, synthetic construct
KTASSSA

SEQ ID NO: 84393 - protein, 7 aa, synthetic construct
RMIEPKA

SEQ ID NO: 84394 - protein, 7 aa, synthetic construct
VVQEGRN

SEQ ID NO: 84395 - protein, 7 aa, synthetic construct
NKMVLDH

SEQ ID NO: 84396 - protein, 7 aa, synthetic construct
RQREDSW

SEQ ID NO: 84397 - protein, 7 aa, synthetic construct
EKDYKTR

SEQ ID NO: 84398 - protein, 7 aa, synthetic construct
GDRAGYV

SEQ ID NO: 84399 - protein, 7 aa, synthetic construct
VMPHSIR

SEQ ID NO: 84400 - protein, 7 aa, synthetic construct
WNHNSMS

SEQ ID NO: 84401 - protein, 7 aa, synthetic construct
MNSTMHR

SEQ ID NO: 84402 - protein, 7 aa, synthetic construct
QLGTKHL

SEQ ID NO: 84403 - protein, 7 aa, synthetic construct
TLTPKVQ

SEQ ID NO: 84404 - protein, 7 aa, synthetic construct
FTNLDHV

SEQ ID NO: 84405 - protein, 7 aa, synthetic construct
ADNVGPK

SEQ ID NO: 84406 - protein, 7 aa, synthetic construct
DLMPKMH

SEQ ID NO: 84407 - protein, 7 aa, synthetic construct
MQSHMGP

SEQ ID NO: 84408 - protein, 7 aa, synthetic construct
SHNITVQ

SEQ ID NO: 84409 - protein, 7 aa, synthetic construct
TIKSNHT

SEQ ID NO: 84410 - protein, 7 aa, synthetic construct
KDVIMVP

SEQ ID NO: 84411 - protein, 7 aa, synthetic construct
AKSGPAE

SEQ ID NO: 84412 - protein, 7 aa, synthetic construct
TSTHLPI

SEQ ID NO: 84413 - protein, 7 aa, synthetic construct
KVPSQPA

SEQ ID NO: 84414 - protein, 7 aa, synthetic construct
SAHAREG

SEQ ID NO: 84415 - protein, 7 aa, synthetic construct
DNPPPRR

SEQ ID NO: 84416 - protein, 7 aa, synthetic construct
YHRITDT

SEQ ID NO: 84417 - protein, 7 aa, synthetic construct
SQHKDYS

SEQ ID NO: 84418 - protein, 7 aa, synthetic construct
KNDGKLY

SEQ ID NO: 84419 - protein, 7 aa, synthetic construct
PQEVKRV

SEQ ID NO: 84420 - protein, 7 aa, synthetic construct
DYRNPDR

SEQ ID NO: 84421 - protein, 7 aa, synthetic construct
HGVNRNA

SEQ ID NO: 84422 - protein, 7 aa, synthetic construct
DMSVRPS

SEQ ID NO: 84423 - protein, 7 aa, synthetic construct
NTGILMP

SEQ ID NO: 84424 - protein, 7 aa, synthetic construct
MINKYNG

SEQ ID NO: 84425 - protein, 7 aa, synthetic construct
QGMSSSI

SEQ ID NO: 84426 - protein, 7 aa, synthetic construct
LSHHNEP

SEQ ID NO: 84427 - protein, 7 aa, synthetic construct
HNRQAHA

SEQ ID NO: 84428 - protein, 7 aa, synthetic construct
GVKTIDK

SEQ ID NO: 84429 - protein, 7 aa, synthetic construct
AHMAVVA

SEQ ID NO: 84430 - protein, 7 aa, synthetic construct
TWSPGST

SEQ ID NO: 84431 - protein, 7 aa, synthetic construct
TVAHSQS

SEQ ID NO: 84432 - protein, 7 aa, synthetic construct
GIVHTKA

SEQ ID NO: 84433 - protein, 7 aa, synthetic construct
NAGTNGN

SEQ ID NO: 84434 - protein, 7 aa, synthetic construct
LVQMANK

SEQ ID NO: 84435 - protein, 7 aa, synthetic construct
TPNGGIK

SEQ ID NO: 84436 - protein, 7 aa, synthetic construct
KPTSLIV

SEQ ID NO: 84437 - protein, 7 aa, synthetic construct
TTKFEDT

SEQ ID NO: 84438 - protein, 7 aa, synthetic construct
SPQESKF

SEQ ID NO: 84439 - protein, 7 aa, synthetic construct
AAMPARH

SEQ ID NO: 84440 - protein, 7 aa, synthetic construct
NHVGYLE

SEQ ID NO: 84441 - protein, 7 aa, synthetic construct
TYSGKSA

SEQ ID NO: 84442 - protein, 7 aa, synthetic construct
LYGHINS

SEQ ID NO: 84443 - protein, 7 aa, synthetic construct
LGPIGDG

SEQ ID NO: 84444 - protein, 7 aa, synthetic construct
SVNSKNQ

SEQ ID NO: 84445 - protein, 7 aa, synthetic construct
KHSDTAE

SEQ ID NO: 84446 - protein, 7 aa, synthetic construct
TIRPASI

SEQ ID NO: 84447 - protein, 7 aa, synthetic construct
DDRASKN

SEQ ID NO: 84448 - protein, 7 aa, synthetic construct
RTKTGED

SEQ ID NO: 84449 - protein, 7 aa, synthetic construct
KPYKNDH

SEQ ID NO: 84450 - protein, 7 aa, synthetic construct
NGQNHTP

SEQ ID NO: 84451 - protein, 7 aa, synthetic construct
IYPMNAE

SEQ ID NO: 84452 - protein, 7 aa, synthetic construct
QQGELVR

SEQ ID NO: 84453 - protein, 7 aa, synthetic construct
MKLKDSI

SEQ ID NO: 84454 - protein, 7 aa, synthetic construct
MTKTSAV

SEQ ID NO: 84455 - protein, 7 aa, synthetic construct
LEARQMP

SEQ ID NO: 84456 - protein, 7 aa, synthetic construct
GADRMNW

SEQ ID NO: 84457 - protein, 7 aa, synthetic construct
GFTPRGP

SEQ ID NO: 84458 - protein, 7 aa, synthetic construct
TEFVAHV

SEQ ID NO: 84459 - protein, 7 aa, synthetic construct
IVRPQQQ

SEQ ID NO: 84460 - protein, 7 aa, synthetic construct
ASTVGKV

SEQ ID NO: 84461 - protein, 7 aa, synthetic construct
PDQQMVK

SEQ ID NO: 84462 - protein, 7 aa, synthetic construct
KTNNPQA

SEQ ID NO: 84463 - protein, 7 aa, synthetic construct
KKTRVED

SEQ ID NO: 84464 - protein, 7 aa, synthetic construct
HHPTVKI

SEQ ID NO: 84465 - protein, 7 aa, synthetic construct
RPMDRQE

SEQ ID NO: 84466 - protein, 7 aa, synthetic construct
VEPIHKK

SEQ ID NO: 84467 - protein, 7 aa, synthetic construct
FQPEYKV

SEQ ID NO: 84468 - protein, 7 aa, synthetic construct
TIGGQNT

SEQ ID NO: 84469 - protein, 7 aa, synthetic construct
NFGGGPF

SEQ ID NO: 84470 - protein, 7 aa, synthetic construct
YNAANYG

SEQ ID NO: 84471 - protein, 7 aa, synthetic construct
FWKQGDP

SEQ ID NO: 84472 - protein, 7 aa, synthetic construct
AYSPKDA

SEQ ID NO: 84473 - protein, 7 aa, synthetic construct
HANHQNH

SEQ ID NO: 84474 - protein, 7 aa, synthetic construct
MNYGTPE

SEQ ID NO: 84475 - protein, 7 aa, synthetic construct
NTTDRKW

SEQ ID NO: 84476 - protein, 7 aa, synthetic construct
RQNGMIE

SEQ ID NO: 84477 - protein, 7 aa, synthetic construct
NQNPKNV

SEQ ID NO: 84478 - protein, 7 aa, synthetic construct
MKPSSNP

SEQ ID NO: 84479 - protein, 7 aa, synthetic construct
WMSENNH

SEQ ID NO: 84480 - protein, 7 aa, synthetic construct
RKEHNEM

SEQ ID NO: 84481 - protein, 7 aa, synthetic construct
KPNNSVP

SEQ ID NO: 84482 - protein, 7 aa, synthetic construct
TNHFEQR

SEQ ID NO: 84483 - protein, 7 aa, synthetic construct
LYDMTKN

SEQ ID NO: 84484 - protein, 7 aa, synthetic construct
KGMVNIG

SEQ ID NO: 84485 - protein, 7 aa, synthetic construct
PNGRQEL

SEQ ID NO: 84486 - protein, 7 aa, synthetic construct
TNPFPLQ

SEQ ID NO: 84487 - protein, 7 aa, synthetic construct
MRPPQVG

SEQ ID NO: 84488 - protein, 7 aa, synthetic construct
VPEHHSG

SEQ ID NO: 84489 - protein, 7 aa, synthetic construct
GFKPASD

SEQ ID NO: 84490 - protein, 7 aa, synthetic construct
PMKNEMI

SEQ ID NO: 84491 - protein, 7 aa, synthetic construct
VSQPRTH

SEQ ID NO: 84492 - protein, 7 aa, synthetic construct
NQAHPSG

SEQ ID NO: 84493 - protein, 7 aa, synthetic construct
LFETNRN

SEQ ID NO: 84494 - protein, 7 aa, synthetic construct
KQNTYAH

SEQ ID NO: 84495 - protein, 7 aa, synthetic construct
LDKHAFL

SEQ ID NO: 84496 - protein, 7 aa, synthetic construct
HSKIQTE

SEQ ID NO: 84497 - protein, 7 aa, synthetic construct
WPGHLDK

SEQ ID NO: 84498 - protein, 7 aa, synthetic construct
KEMKVVG

SEQ ID NO: 84499 - protein, 7 aa, synthetic construct
LHDRKEP

SEQ ID NO: 84500 - protein, 7 aa, synthetic construct
QPKLPTI

SEQ ID NO: 84501 - protein, 7 aa, synthetic construct
GKSMMRD

SEQ ID NO: 84502 - protein, 7 aa, synthetic construct
RKEFSTS

SEQ ID NO: 84503 - protein, 7 aa, synthetic construct
FERLTIG

SEQ ID NO: 84504 - protein, 7 aa, synthetic construct
KDPKSTP

SEQ ID NO: 84505 - protein, 7 aa, synthetic construct
IHRTDQG

SEQ ID NO: 84506 - protein, 7 aa, synthetic construct
NQTKHFM

SEQ ID NO: 84507 - protein, 7 aa, synthetic construct
NFMAPQE

SEQ ID NO: 84508 - protein, 7 aa, synthetic construct
LGKVADT

SEQ ID NO: 84509 - protein, 7 aa, synthetic construct
LSHKIQF

SEQ ID NO: 84510 - protein, 7 aa, synthetic construct
AQEYTAG

SEQ ID NO: 84511 - protein, 7 aa, synthetic construct
QKSTAGA

SEQ ID NO: 84512 - protein, 7 aa, synthetic construct
SAYQHRD

SEQ ID NO: 84513 - protein, 7 aa, synthetic construct
SHAVEYK

SEQ ID NO: 84514 - protein, 7 aa, synthetic construct
EKMGLIN

SEQ ID NO: 84515 - protein, 7 aa, synthetic construct
REGVPQG

SEQ ID NO: 84516 - protein, 7 aa, synthetic construct
QAKWEGH

SEQ ID NO: 84517 - protein, 7 aa, synthetic construct
TPQTYNM

SEQ ID NO: 84518 - protein, 7 aa, synthetic construct
YPVSKFQ

SEQ ID NO: 84519 - protein, 7 aa, synthetic construct
PWKRDAD

SEQ ID NO: 84520 - protein, 7 aa, synthetic construct
DPRTYRG

SEQ ID NO: 84521 - protein, 7 aa, synthetic construct
GEHQHHM

SEQ ID NO: 84522 - protein, 7 aa, synthetic construct
TKEGHSF

SEQ ID NO: 84523 - protein, 7 aa, synthetic construct
QYSRSHE

SEQ ID NO: 84524 - protein, 7 aa, synthetic construct
KFGAEAG

SEQ ID NO: 84525 - protein, 7 aa, synthetic construct
HTIKDVD

SEQ ID NO: 84526 - protein, 7 aa, synthetic construct
YAQQQSG

SEQ ID NO: 84527 - protein, 7 aa, synthetic construct
LLKQVHP

SEQ ID NO: 84528 - protein, 7 aa, synthetic construct
NLDMHVL

SEQ ID NO: 84529 - protein, 7 aa, synthetic construct
TTATSHL

SEQ ID NO: 84530 - protein, 7 aa, synthetic construct
HQLSPIV

SEQ ID NO: 84531 - protein, 7 aa, synthetic construct
AKPGLME

SEQ ID NO: 84532 - protein, 7 aa, synthetic construct
YALYREE

SEQ ID NO: 84533 - protein, 7 aa, synthetic construct
KHQIMEM

SEQ ID NO: 84534 - protein, 7 aa, synthetic construct
KRDTTAA

SEQ ID NO: 84535 - protein, 7 aa, synthetic construct
IKQDGKF

SEQ ID NO: 84536 - protein, 7 aa, synthetic construct
VSNAQIK

SEQ ID NO: 84537 - protein, 7 aa, synthetic construct
QKQVGAG

SEQ ID NO: 84538 - protein, 7 aa, synthetic construct
AAGDRDG

SEQ ID NO: 84539 - protein, 7 aa, synthetic construct
MSVHKDD

SEQ ID NO: 84540 - protein, 7 aa, synthetic construct
TVVSTVD

SEQ ID NO: 84541 - protein, 7 aa, synthetic construct
LTQNSTV

SEQ ID NO: 84542 - protein, 7 aa, synthetic construct
MPIQEKQ

SEQ ID NO: 84543 - protein, 7 aa, synthetic construct
HSNNAQA

SEQ ID NO: 84544 - protein, 7 aa, synthetic construct
VAADKNH

SEQ ID NO: 84545 - protein, 7 aa, synthetic construct
LVKQADW

SEQ ID NO: 84546 - protein, 7 aa, synthetic construct
EVYIGRA

SEQ ID NO: 84547 - protein, 7 aa, synthetic construct
KGNTVQA

SEQ ID NO: 84548 - protein, 7 aa, synthetic construct
RPLLNSN

SEQ ID NO: 84549 - protein, 7 aa, synthetic construct
PKATYGA

SEQ ID NO: 84550 - protein, 7 aa, synthetic construct
SWGQDHH

SEQ ID NO: 84551 - protein, 7 aa, synthetic construct
MRGEEKR

SEQ ID NO: 84552 - protein, 7 aa, synthetic construct
MFESTKS

SEQ ID NO: 84553 - protein, 7 aa, synthetic construct
YTAKYER

SEQ ID NO: 84554 - protein, 7 aa, synthetic construct
EMSIRMK

SEQ ID NO: 84555 - protein, 7 aa, synthetic construct
IVQGKVE

SEQ ID NO: 84556 - protein, 7 aa, synthetic construct
HSKTEGP

SEQ ID NO: 84557 - protein, 7 aa, synthetic construct
KNKPDVI

SEQ ID NO: 84558 - protein, 7 aa, synthetic construct
KVVAMTE

SEQ ID NO: 84559 - protein, 7 aa, synthetic construct
TQMRTAF

SEQ ID NO: 84560 - protein, 7 aa, synthetic construct
RSNFNLD

SEQ ID NO: 84561 - protein, 7 aa, synthetic construct
GLRNLMD

SEQ ID NO: 84562 - protein, 7 aa, synthetic construct
KAIHIES

SEQ ID NO: 84563 - protein, 7 aa, synthetic construct
PPPVRID

SEQ ID NO: 84564 - protein, 7 aa, synthetic construct
RADPLQS

SEQ ID NO: 84565 - protein, 7 aa, synthetic construct
ARGVEGQ

SEQ ID NO: 84566 - protein, 7 aa, synthetic construct
MRMTFPE

SEQ ID NO: 84567 - protein, 7 aa, synthetic construct
PYQNAKA

SEQ ID NO: 84568 - protein, 7 aa, synthetic construct
SMYNQKT

SEQ ID NO: 84569 - protein, 7 aa, synthetic construct
MFVKNPP

SEQ ID NO: 84570 - protein, 7 aa, synthetic construct
LTGGEPS

SEQ ID NO: 84571 - protein, 7 aa, synthetic construct
ALPQPIA

SEQ ID NO: 84572 - protein, 7 aa, synthetic construct
VPHWNTD

SEQ ID NO: 84573 - protein, 7 aa, synthetic construct
KSAGMKE

SEQ ID NO: 84574 - protein, 7 aa, synthetic construct
VNLQSAD

SEQ ID NO: 84575 - protein, 7 aa, synthetic construct
VPQMSME

SEQ ID NO: 84576 - protein, 7 aa, synthetic construct
AKVPYGS

SEQ ID NO: 84577 - protein, 7 aa, synthetic construct
HPRAQTI

SEQ ID NO: 84578 - protein, 7 aa, synthetic construct
HDRMDVI

SEQ ID NO: 84579 - protein, 7 aa, synthetic construct
LNSNQVQ

SEQ ID NO: 84580 - protein, 7 aa, synthetic construct
KQQDYSV

SEQ ID NO: 84581 - protein, 7 aa, synthetic construct
NTPPQRY

SEQ ID NO: 84582 - protein, 7 aa, synthetic construct
KHYETLP

SEQ ID NO: 84583 - protein, 7 aa, synthetic construct
GLGTRMQ

SEQ ID NO: 84584 - protein, 7 aa, synthetic construct
GHDHRFQ

SEQ ID NO: 84585 - protein, 7 aa, synthetic construct
KTGNPMG

SEQ ID NO: 84586 - protein, 7 aa, synthetic construct
LKNSFNH

SEQ ID NO: 84587 - protein, 7 aa, synthetic construct
RQVSNQA

SEQ ID NO: 84588 - protein, 7 aa, synthetic construct
SPIGYKD

SEQ ID NO: 84589 - protein, 7 aa, synthetic construct
PSNGSNW

SEQ ID NO: 84590 - protein, 7 aa, synthetic construct
HPVHVKQ

SEQ ID NO: 84591 - protein, 7 aa, synthetic construct
HSQTRQA

SEQ ID NO: 84592 - protein, 7 aa, synthetic construct
YEHKLAP

SEQ ID NO: 84593 - protein, 7 aa, synthetic construct
VKSSQHH

SEQ ID NO: 84594 - protein, 7 aa, synthetic construct
NLLHVMD

SEQ ID NO: 84595 - protein, 7 aa, synthetic construct
TSAAYQA

SEQ ID NO: 84596 - protein, 7 aa, synthetic construct
RHLKDEL

SEQ ID NO: 84597 - protein, 7 aa, synthetic construct
KGSFHPG

SEQ ID NO: 84598 - protein, 7 aa, synthetic construct
ATAGIAG

SEQ ID NO: 84599 - protein, 7 aa, synthetic construct
TPGAGRV

SEQ ID NO: 84600 - protein, 7 aa, synthetic construct
LEGSTYR

SEQ ID NO: 84601 - protein, 7 aa, synthetic construct
VMHHVNA

SEQ ID NO: 84602 - protein, 7 aa, synthetic construct
DSNTRHY

SEQ ID NO: 84603 - protein, 7 aa, synthetic construct
FNTKVTS

SEQ ID NO: 84604 - protein, 7 aa, synthetic construct
VGQYMLQ

SEQ ID NO: 84605 - protein, 7 aa, synthetic construct
VREMLPA

SEQ ID NO: 84606 - protein, 7 aa, synthetic construct
KMDASLS

SEQ ID NO: 84607 - protein, 7 aa, synthetic construct
NNFQQVH

SEQ ID NO: 84608 - protein, 7 aa, synthetic construct
KQSSQST

SEQ ID NO: 84609 - protein, 7 aa, synthetic construct
KNANATG

SEQ ID NO: 84610 - protein, 7 aa, synthetic construct
QQPAYNP

SEQ ID NO: 84611 - protein, 7 aa, synthetic construct
VTKNDDR

SEQ ID NO: 84612 - protein, 7 aa, synthetic construct
QKNTMQG

SEQ ID NO: 84613 - protein, 7 aa, synthetic construct
RPSMYAA

SEQ ID NO: 84614 - protein, 7 aa, synthetic construct
YGKYNYA

SEQ ID NO: 84615 - protein, 7 aa, synthetic construct
QVKQYTT

SEQ ID NO: 84616 - protein, 7 aa, synthetic construct
NSSTSRP

SEQ ID NO: 84617 - protein, 7 aa, synthetic construct
VGGTNMK

SEQ ID NO: 84618 - protein, 7 aa, synthetic construct
GATKTSP

SEQ ID NO: 84619 - protein, 7 aa, synthetic construct
NPSKNEA

SEQ ID NO: 84620 - protein, 7 aa, synthetic construct
KMTPLGS

SEQ ID NO: 84621 - protein, 7 aa, synthetic construct
ATHNQAG

SEQ ID NO: 84622 - protein, 7 aa, synthetic construct
GQVITER

SEQ ID NO: 84623 - protein, 7 aa, synthetic construct
KNVPPDR

SEQ ID NO: 84624 - protein, 7 aa, synthetic construct
MIPMSDG

SEQ ID NO: 84625 - protein, 7 aa, synthetic construct
QLLNGKH

SEQ ID NO: 84626 - protein, 7 aa, synthetic construct
AVKLYPA

SEQ ID NO: 84627 - protein, 7 aa, synthetic construct
FHTSPNT

SEQ ID NO: 84628 - protein, 7 aa, synthetic construct
KSSMSGA

SEQ ID NO: 84629 - protein, 7 aa, synthetic construct
VINLRLG

SEQ ID NO: 84630 - protein, 7 aa, synthetic construct
KQTQVSA

SEQ ID NO: 84631 - protein, 7 aa, synthetic construct
FNAGQFG

SEQ ID NO: 84632 - protein, 7 aa, synthetic construct
FRDKVEW

SEQ ID NO: 84633 - protein, 7 aa, synthetic construct
DRLTAIT

SEQ ID NO: 84634 - protein, 7 aa, synthetic construct
RMSNGQP

SEQ ID NO: 84635 - protein, 7 aa, synthetic construct
YHAHSGM

SEQ ID NO: 84636 - protein, 7 aa, synthetic construct
RADQNKD

SEQ ID NO: 84637 - protein, 7 aa, synthetic construct
STKVTFH

SEQ ID NO: 84638 - protein, 7 aa, synthetic construct
RSINEKI

SEQ ID NO: 84639 - protein, 7 aa, synthetic construct
TNQERGF

SEQ ID NO: 84640 - protein, 7 aa, synthetic construct
LINQMNH

SEQ ID NO: 84641 - protein, 7 aa, synthetic construct
CANKHMG

SEQ ID NO: 84642 - protein, 7 aa, synthetic construct
KENATDH

SEQ ID NO: 84643 - protein, 7 aa, synthetic construct
IHNDFNK

SEQ ID NO: 84644 - protein, 7 aa, synthetic construct
YVGHAAL

SEQ ID NO: 84645 - protein, 7 aa, synthetic construct
MKGAYDG

SEQ ID NO: 84646 - protein, 7 aa, synthetic construct
ETRLIMP

SEQ ID NO: 84647 - protein, 7 aa, synthetic construct
GAEPRYS

SEQ ID NO: 84648 - protein, 7 aa, synthetic construct
QTKNSPQ

SEQ ID NO: 84649 - protein, 7 aa, synthetic construct
FPSEHLP

SEQ ID NO: 84650 - protein, 7 aa, synthetic construct
SKFAEET

SEQ ID NO: 84651 - protein, 7 aa, synthetic construct
YQTWGAD

SEQ ID NO: 84652 - protein, 7 aa, synthetic construct
MLMKEMS

SEQ ID NO: 84653 - protein, 7 aa, synthetic construct
LTASMTK

SEQ ID NO: 84654 - protein, 7 aa, synthetic construct
QNMHYSA

SEQ ID NO: 84655 - protein, 7 aa, synthetic construct
ALNNSIM

SEQ ID NO: 84656 - protein, 7 aa, synthetic construct
DRIIGGI

SEQ ID NO: 84657 - protein, 7 aa, synthetic construct
IAQPHRM

SEQ ID NO: 84658 - protein, 7 aa, synthetic construct
MIHPEER

SEQ ID NO: 84659 - protein, 7 aa, synthetic construct
SGATSRY

SEQ ID NO: 84660 - protein, 7 aa, synthetic construct
WAIGGTI

SEQ ID NO: 84661 - protein, 7 aa, synthetic construct
QAGVTPM

SEQ ID NO: 84662 - protein, 7 aa, synthetic construct
FEEKWKG

SEQ ID NO: 84663 - protein, 7 aa, synthetic construct
HKVPGNV

SEQ ID NO: 84664 - protein, 7 aa, synthetic construct
NMMQVMG

SEQ ID NO: 84665 - protein, 7 aa, synthetic construct
MATNSGK

SEQ ID NO: 84666 - protein, 7 aa, synthetic construct
VIKMNMG

SEQ ID NO: 84667 - protein, 7 aa, synthetic construct
MLEGSRK

SEQ ID NO: 84668 - protein, 7 aa, synthetic construct
TIQITTE

SEQ ID NO: 84669 - protein, 7 aa, synthetic construct
MWKDTRA

SEQ ID NO: 84670 - protein, 7 aa, synthetic construct
YDQAAVR

SEQ ID NO: 84671 - protein, 7 aa, synthetic construct
YLESAMS

SEQ ID NO: 84672 - protein, 7 aa, synthetic construct
IHGHLGI

SEQ ID NO: 84673 - protein, 7 aa, synthetic construct
HNHVFID

SEQ ID NO: 84674 - protein, 7 aa, synthetic construct
QRMEMGM

SEQ ID NO: 84675 - protein, 7 aa, synthetic construct
NQQKSAE

SEQ ID NO: 84676 - protein, 7 aa, synthetic construct
SAQGTAQ

SEQ ID NO: 84677 - protein, 7 aa, synthetic construct
TNPERNS

SEQ ID NO: 84678 - protein, 7 aa, synthetic construct
MYKMEFG

SEQ ID NO: 84679 - protein, 7 aa, synthetic construct
AYTVPPS

SEQ ID NO: 84680 - protein, 7 aa, synthetic construct
KLHMHDG

SEQ ID NO: 84681 - protein, 7 aa, synthetic construct
DVNHRQH

SEQ ID NO: 84682 - protein, 7 aa, synthetic construct
KQSASSP

SEQ ID NO: 84683 - protein, 7 aa, synthetic construct
VSMRYQP

SEQ ID NO: 84684 - protein, 7 aa, synthetic construct
WANFRES

SEQ ID NO: 84685 - protein, 7 aa, synthetic construct
HGKYGTL

SEQ ID NO: 84686 - protein, 7 aa, synthetic construct
EPMKKAE

SEQ ID NO: 84687 - protein, 7 aa, synthetic construct
WDRSHFA

SEQ ID NO: 84688 - protein, 7 aa, synthetic construct
TIVKSPV

SEQ ID NO: 84689 - protein, 7 aa, synthetic construct
ANTTTDP

SEQ ID NO: 84690 - protein, 7 aa, synthetic construct
LWKGGEH

SEQ ID NO: 84691 - protein, 7 aa, synthetic construct
FTERVKT

SEQ ID NO: 84692 - protein, 7 aa, synthetic construct
APWTAKP

SEQ ID NO: 84693 - protein, 7 aa, synthetic construct
AASSSHL

SEQ ID NO: 84694 - protein, 7 aa, synthetic construct
KVTSIHV

SEQ ID NO: 84695 - protein, 7 aa, synthetic construct
RPTNIKD

SEQ ID NO: 84696 - protein, 7 aa, synthetic construct
HKSQNVH

SEQ ID NO: 84697 - protein, 7 aa, synthetic construct
FTPNESS

SEQ ID NO: 84698 - protein, 7 aa, synthetic construct
LGRIMEA

SEQ ID NO: 84699 - protein, 7 aa, synthetic construct
GHYDMDR

SEQ ID NO: 84700 - protein, 7 aa, synthetic construct
LTKSMEF

SEQ ID NO: 84701 - protein, 7 aa, synthetic construct
LIPSWTE

SEQ ID NO: 84702 - protein, 7 aa, synthetic construct
TVGSKVD

SEQ ID NO: 84703 - protein, 7 aa, synthetic construct
PKGLPHI

SEQ ID NO: 84704 - protein, 7 aa, synthetic construct
QPGHPKE

SEQ ID NO: 84705 - protein, 7 aa, synthetic construct
TGSKTGA

SEQ ID NO: 84706 - protein, 7 aa, synthetic construct
TATMGGP

SEQ ID NO: 84707 - protein, 7 aa, synthetic construct
RMSVGPA

SEQ ID NO: 84708 - protein, 7 aa, synthetic construct
ANQDQKY

SEQ ID NO: 84709 - protein, 7 aa, synthetic construct
APKQYGV

SEQ ID NO: 84710 - protein, 7 aa, synthetic construct
RRETEVG

SEQ ID NO: 84711 - protein, 7 aa, synthetic construct
SGAKDEI

SEQ ID NO: 84712 - protein, 7 aa, synthetic construct
AKEHGSI

SEQ ID NO: 84713 - protein, 7 aa, synthetic construct
TYAGSFG

SEQ ID NO: 84714 - protein, 7 aa, synthetic construct
VARTPHV

SEQ ID NO: 84715 - protein, 7 aa, synthetic construct
MVKARDI

SEQ ID NO: 84716 - protein, 7 aa, synthetic construct
FTEVYPG

SEQ ID NO: 84717 - protein, 7 aa, synthetic construct
RTAAMES

SEQ ID NO: 84718 - protein, 7 aa, synthetic construct
AANRFHS

SEQ ID NO: 84719 - protein, 7 aa, synthetic construct
RHGQAAI

SEQ ID NO: 84720 - protein, 7 aa, synthetic construct
ENPTKRH

SEQ ID NO: 84721 - protein, 7 aa, synthetic construct
MHNVEKH

SEQ ID NO: 84722 - protein, 7 aa, synthetic construct
YNHTQML

SEQ ID NO: 84723 - protein, 7 aa, synthetic construct
KANQSGA

SEQ ID NO: 84724 - protein, 7 aa, synthetic construct
TLTTSRL

SEQ ID NO: 84725 - protein, 7 aa, synthetic construct
SYAKPHV

SEQ ID NO: 84726 - protein, 7 aa, synthetic construct
PRQQNGT

SEQ ID NO: 84727 - protein, 7 aa, synthetic construct
TRTDMMA

SEQ ID NO: 84728 - protein, 7 aa, synthetic construct
DQSHGTK

SEQ ID NO: 84729 - protein, 7 aa, synthetic construct
SLQKFAD

SEQ ID NO: 84730 - protein, 7 aa, synthetic construct
DGGHMTI

SEQ ID NO: 84731 - protein, 7 aa, synthetic construct
EITTHQK

SEQ ID NO: 84732 - protein, 7 aa, synthetic construct
MRNEIHQ

SEQ ID NO: 84733 - protein, 7 aa, synthetic construct
ITVKDLM

SEQ ID NO: 84734 - protein, 7 aa, synthetic construct
NAHDNQA

SEQ ID NO: 84735 - protein, 7 aa, synthetic construct
VRNANQA

SEQ ID NO: 84736 - protein, 7 aa, synthetic construct
MRRDTKD

SEQ ID NO: 84737 - protein, 7 aa, synthetic construct
FRALTVN

SEQ ID NO: 84738 - protein, 7 aa, synthetic construct
FSHVMAS

SEQ ID NO: 84739 - protein, 7 aa, synthetic construct
LITQNVG

SEQ ID NO: 84740 - protein, 7 aa, synthetic construct
QFKALDM

SEQ ID NO: 84741 - protein, 7 aa, synthetic construct
WGAGSNY

SEQ ID NO: 84742 - protein, 7 aa, synthetic construct
NKLVMKD

SEQ ID NO: 84743 - protein, 7 aa, synthetic construct
QMQTPQR

SEQ ID NO: 84744 - protein, 7 aa, synthetic construct
KELTKSY

SEQ ID NO: 84745 - protein, 7 aa, synthetic construct
QQHVGSE

SEQ ID NO: 84746 - protein, 7 aa, synthetic construct
MQKDEMK

SEQ ID NO: 84747 - protein, 7 aa, synthetic construct
APSLAQN

SEQ ID NO: 84748 - protein, 7 aa, synthetic construct
NNPYNGI

SEQ ID NO: 84749 - protein, 7 aa, synthetic construct
YATGKDK

SEQ ID NO: 84750 - protein, 7 aa, synthetic construct
NQIAKLG

SEQ ID NO: 84751 - protein, 7 aa, synthetic construct
TILHVHA

SEQ ID NO: 84752 - protein, 7 aa, synthetic construct
KQWGNEI

SEQ ID NO: 84753 - protein, 7 aa, synthetic construct
LLHNHEH

SEQ ID NO: 84754 - protein, 7 aa, synthetic construct
MDENRTP

SEQ ID NO: 84755 - protein, 7 aa, synthetic construct
KLQIGSS

SEQ ID NO: 84756 - protein, 7 aa, synthetic construct
QTKIPKE

SEQ ID NO: 84757 - protein, 7 aa, synthetic construct
TIAGNQH

SEQ ID NO: 84758 - protein, 7 aa, synthetic construct
GHNGPMH

SEQ ID NO: 84759 - protein, 7 aa, synthetic construct
SDHSVHV

SEQ ID NO: 84760 - protein, 7 aa, synthetic construct
DQGKKFW

SEQ ID NO: 84761 - protein, 7 aa, synthetic construct
TMKTAFP

SEQ ID NO: 84762 - protein, 7 aa, synthetic construct
KIGINEK

SEQ ID NO: 84763 - protein, 7 aa, synthetic construct
AKGQFPI

SEQ ID NO: 84764 - protein, 7 aa, synthetic construct
GEKQTHA

SEQ ID NO: 84765 - protein, 7 aa, synthetic construct
YAEAAVR

SEQ ID NO: 84766 - protein, 7 aa, synthetic construct
YESFRLP

SEQ ID NO: 84767 - protein, 7 aa, synthetic construct
DSRVLDF

SEQ ID NO: 84768 - protein, 7 aa, synthetic construct
TPKQPNS

SEQ ID NO: 84769 - protein, 7 aa, synthetic construct
KHTYAPV

SEQ ID NO: 84770 - protein, 7 aa, synthetic construct
RAYPGND

SEQ ID NO: 84771 - protein, 7 aa, synthetic construct
EHSSTYV

SEQ ID NO: 84772 - protein, 7 aa, synthetic construct
PGRIGHS

SEQ ID NO: 84773 - protein, 7 aa, synthetic construct
IDYKRDT

SEQ ID NO: 84774 - protein, 7 aa, synthetic construct
MKDLKVI

SEQ ID NO: 84775 - protein, 7 aa, synthetic construct
NHNKPFT

SEQ ID NO: 84776 - protein, 7 aa, synthetic construct
PQTVTER

SEQ ID NO: 84777 - protein, 7 aa, synthetic construct
HVNIGTE

SEQ ID NO: 84778 - protein, 7 aa, synthetic construct
TMPPMVP

SEQ ID NO: 84779 - protein, 7 aa, synthetic construct
PMINQQH

SEQ ID NO: 84780 - protein, 7 aa, synthetic construct
QMIKHQS

SEQ ID NO: 84781 - protein, 7 aa, synthetic construct
VIGKPNS

SEQ ID NO: 84782 - protein, 7 aa, synthetic construct
GSHSTVH

SEQ ID NO: 84783 - protein, 7 aa, synthetic construct
VQVSERA

SEQ ID NO: 84784 - protein, 7 aa, synthetic construct
MRHLESM

SEQ ID NO: 84785 - protein, 7 aa, synthetic construct
GEPRNKD

SEQ ID NO: 84786 - protein, 7 aa, synthetic construct
NPSAAPK

SEQ ID NO: 84787 - protein, 7 aa, synthetic construct
FKDAKEW

SEQ ID NO: 84788 - protein, 7 aa, synthetic construct
NYKISQG

SEQ ID NO: 84789 - protein, 7 aa, synthetic construct
TVQGTQW

SEQ ID NO: 84790 - protein, 7 aa, synthetic construct
HLSKDGY

SEQ ID NO: 84791 - protein, 7 aa, synthetic construct
LQSPAHA

SEQ ID NO: 84792 - protein, 7 aa, synthetic construct
ISTETNR

SEQ ID NO: 84793 - protein, 7 aa, synthetic construct
EPWKDLA

SEQ ID NO: 84794 - protein, 7 aa, synthetic construct
ADQLKNA

SEQ ID NO: 84795 - protein, 7 aa, synthetic construct
GGALPSY

SEQ ID NO: 84796 - protein, 7 aa, synthetic construct
SNNPAKA

SEQ ID NO: 84797 - protein, 7 aa, synthetic construct
RSLDGSG

SEQ ID NO: 84798 - protein, 7 aa, synthetic construct
QQMQGAT

SEQ ID NO: 84799 - protein, 7 aa, synthetic construct
WKQSVFA

SEQ ID NO: 84800 - protein, 7 aa, synthetic construct
MHDTQRR

SEQ ID NO: 84801 - protein, 7 aa, synthetic construct
RKGPQSE

SEQ ID NO: 84802 - protein, 7 aa, synthetic construct
HAMSTQK

SEQ ID NO: 84803 - protein, 7 aa, synthetic construct
IEIKMGV

SEQ ID NO: 84804 - protein, 7 aa, synthetic construct
GSKVTQA

SEQ ID NO: 84805 - protein, 7 aa, synthetic construct
YTHEIDH

SEQ ID NO: 84806 - protein, 7 aa, synthetic construct
NVVHKIN

SEQ ID NO: 84807 - protein, 7 aa, synthetic construct
GSGFGTS

SEQ ID NO: 84808 - protein, 7 aa, synthetic construct
WTTDHNA

SEQ ID NO: 84809 - protein, 7 aa, synthetic construct
YREYTHQ

SEQ ID NO: 84810 - protein, 7 aa, synthetic construct
KMPHAML

SEQ ID NO: 84811 - protein, 7 aa, synthetic construct
ANLNAVG

SEQ ID NO: 84812 - protein, 7 aa, synthetic construct
LAFNKEI

SEQ ID NO: 84813 - protein, 7 aa, synthetic construct
MESKMHT

SEQ ID NO: 84814 - protein, 7 aa, synthetic construct
PNSSKEA

SEQ ID NO: 84815 - protein, 7 aa, synthetic construct
VQYGGIV

SEQ ID NO: 84816 - protein, 7 aa, synthetic construct
YTQGGMH

SEQ ID NO: 84817 - protein, 7 aa, synthetic construct
FGARYVG

SEQ ID NO: 84818 - protein, 7 aa, synthetic construct
KSVGPAV

SEQ ID NO: 84819 - protein, 7 aa, synthetic construct
LHPKGVD

SEQ ID NO: 84820 - protein, 7 aa, synthetic construct
KDSTRQV

SEQ ID NO: 84821 - protein, 7 aa, synthetic construct
HLAQRVE

SEQ ID NO: 84822 - protein, 7 aa, synthetic construct
TGKEKSG

SEQ ID NO: 84823 - protein, 7 aa, synthetic construct
LHKFAEN

SEQ ID NO: 84824 - protein, 7 aa, synthetic construct
KFDGAMM

SEQ ID NO: 84825 - protein, 7 aa, synthetic construct
HIMTRDD

SEQ ID NO: 84826 - protein, 7 aa, synthetic construct
FRQQHSS

SEQ ID NO: 84827 - protein, 7 aa, synthetic construct
ANSTTHE

SEQ ID NO: 84828 - protein, 7 aa, synthetic construct
HQRAEHK

SEQ ID NO: 84829 - protein, 7 aa, synthetic construct
HMAERTP

SEQ ID NO: 84830 - protein, 7 aa, synthetic construct
FHELNTG

SEQ ID NO: 84831 - protein, 7 aa, synthetic construct
LSQRING

SEQ ID NO: 84832 - protein, 7 aa, synthetic construct
RGPTDGN

SEQ ID NO: 84833 - protein, 7 aa, synthetic construct
AIVHEDH

SEQ ID NO: 84834 - protein, 7 aa, synthetic construct
KRMLDQA

SEQ ID NO: 84835 - protein, 7 aa, synthetic construct
LNKKMME

SEQ ID NO: 84836 - protein, 7 aa, synthetic construct
KTVQVKD

SEQ ID NO: 84837 - protein, 7 aa, synthetic construct
KVNSSNG

SEQ ID NO: 84838 - protein, 7 aa, synthetic construct
DSPTLKH

SEQ ID NO: 84839 - protein, 7 aa, synthetic construct
LMGGKSG

SEQ ID NO: 84840 - protein, 7 aa, synthetic construct
GFIGNAD

SEQ ID NO: 84841 - protein, 7 aa, synthetic construct
GQKMDPC

SEQ ID NO: 84842 - protein, 7 aa, synthetic construct
KISVLSS

SEQ ID NO: 84843 - protein, 7 aa, synthetic construct
NLQAKFI

SEQ ID NO: 84844 - protein, 7 aa, synthetic construct
LTGVLYA

SEQ ID NO: 84845 - protein, 7 aa, synthetic construct
FNAATHI

SEQ ID NO: 84846 - protein, 7 aa, synthetic construct
TKNGNYH

SEQ ID NO: 84847 - protein, 7 aa, synthetic construct
YMDYKHN

SEQ ID NO: 84848 - protein, 7 aa, synthetic construct
QSHQAMI

SEQ ID NO: 84849 - protein, 7 aa, synthetic construct
MNLHIRA

SEQ ID NO: 84850 - protein, 7 aa, synthetic construct
GIQPHRM

SEQ ID NO: 84851 - protein, 7 aa, synthetic construct
YKMDQKY

SEQ ID NO: 84852 - protein, 7 aa, synthetic construct
WGTTKEN

SEQ ID NO: 84853 - protein, 7 aa, synthetic construct
KDQKRDE

SEQ ID NO: 84854 - protein, 7 aa, synthetic construct
ISANYGG

SEQ ID NO: 84855 - protein, 7 aa, synthetic construct
RGEHEAA

SEQ ID NO: 84856 - protein, 7 aa, synthetic construct
LQRQMDP

SEQ ID NO: 84857 - protein, 7 aa, synthetic construct
LYNPNVH

SEQ ID NO: 84858 - protein, 7 aa, synthetic construct
IAHEMGP

SEQ ID NO: 84859 - protein, 7 aa, synthetic construct
RYKAIQD

SEQ ID NO: 84860 - protein, 7 aa, synthetic construct
TIRHNID

SEQ ID NO: 84861 - protein, 7 aa, synthetic construct
MKHHVEH

SEQ ID NO: 84862 - protein, 7 aa, synthetic construct
NVQAKAN

SEQ ID NO: 84863 - protein, 7 aa, synthetic construct
YGATGLH

SEQ ID NO: 84864 - protein, 7 aa, synthetic construct
VTKQEIF

SEQ ID NO: 84865 - protein, 7 aa, synthetic construct
MGVRAQD

SEQ ID NO: 84866 - protein, 7 aa, synthetic construct
RHTDFNI

SEQ ID NO: 84867 - protein, 7 aa, synthetic construct
PVDHSAM

SEQ ID NO: 84868 - protein, 7 aa, synthetic construct
AEKTFIQ

SEQ ID NO: 84869 - protein, 7 aa, synthetic construct
RNSMVQS

SEQ ID NO: 84870 - protein, 7 aa, synthetic construct
ASLHTHI

SEQ ID NO: 84871 - protein, 7 aa, synthetic construct
KFMQDNI

SEQ ID NO: 84872 - protein, 7 aa, synthetic construct
GSPTFVG

SEQ ID NO: 84873 - protein, 7 aa, synthetic construct
HPNLHAI

SEQ ID NO: 84874 - protein, 7 aa, synthetic construct
YDKHVTY

SEQ ID NO: 84875 - protein, 7 aa, synthetic construct
YKPYANN

SEQ ID NO: 84876 - protein, 7 aa, synthetic construct
EVLKYSP

SEQ ID NO: 84877 - protein, 7 aa, synthetic construct
AVIPRKE

SEQ ID NO: 84878 - protein, 7 aa, synthetic construct
DGIIKNE

SEQ ID NO: 84879 - protein, 7 aa, synthetic construct
MTKFIHG

SEQ ID NO: 84880 - protein, 7 aa, synthetic construct
SLNVIDS

SEQ ID NO: 84881 - protein, 7 aa, synthetic construct
AKTSSGM

SEQ ID NO: 84882 - protein, 7 aa, synthetic construct
PGTATSW

SEQ ID NO: 84883 - protein, 7 aa, synthetic construct
SLHPGFN

SEQ ID NO: 84884 - protein, 7 aa, synthetic construct
GINKVEQ

SEQ ID NO: 84885 - protein, 7 aa, synthetic construct
LKHTGTV

SEQ ID NO: 84886 - protein, 7 aa, synthetic construct
KTSNPNG

SEQ ID NO: 84887 - protein, 7 aa, synthetic construct
YGHKAVN

SEQ ID NO: 84888 - protein, 7 aa, synthetic construct
SIERNRY

SEQ ID NO: 84889 - protein, 7 aa, synthetic construct
GSPHQMM

SEQ ID NO: 84890 - protein, 7 aa, synthetic construct
STITYPP

SEQ ID NO: 84891 - protein, 7 aa, synthetic construct
MAINSRQ

SEQ ID NO: 84892 - protein, 7 aa, synthetic construct
KQPSAAT

SEQ ID NO: 84893 - protein, 7 aa, synthetic construct
VNDGRPQ

SEQ ID NO: 84894 - protein, 7 aa, synthetic construct
SVMTQKY

SEQ ID NO: 84895 - protein, 7 aa, synthetic construct
QVTQRMV

SEQ ID NO: 84896 - protein, 7 aa, synthetic construct
DGYMIKI

SEQ ID NO: 84897 - protein, 7 aa, synthetic construct
KTGSWPS

SEQ ID NO: 84898 - protein, 7 aa, synthetic construct
RPEGYKF

SEQ ID NO: 84899 - protein, 7 aa, synthetic construct
YLHINSV

SEQ ID NO: 84900 - protein, 7 aa, synthetic construct
FGQKFTP

SEQ ID NO: 84901 - protein, 7 aa, synthetic construct
KFQMPNV

SEQ ID NO: 84902 - protein, 7 aa, synthetic construct
YMAQVPS

SEQ ID NO: 84903 - protein, 7 aa, synthetic construct
KTQNPQA

SEQ ID NO: 84904 - protein, 7 aa, synthetic construct
QLYGLRE

SEQ ID NO: 84905 - protein, 7 aa, synthetic construct
NVIAQIA

SEQ ID NO: 84906 - protein, 7 aa, synthetic construct
AHPLYPE

SEQ ID NO: 84907 - protein, 7 aa, synthetic construct
NVQKATG

SEQ ID NO: 84908 - protein, 7 aa, synthetic construct
GKSNNVG

SEQ ID NO: 84909 - protein, 7 aa, synthetic construct
NPSGMHT

SEQ ID NO: 84910 - protein, 7 aa, synthetic construct
KDYAMAE

SEQ ID NO: 84911 - protein, 7 aa, synthetic construct
HHVDMHM

SEQ ID NO: 84912 - protein, 7 aa, synthetic construct
LKNTTGF

SEQ ID NO: 84913 - protein, 7 aa, synthetic construct
CPIDRAC

SEQ ID NO: 84914 - protein, 7 aa, synthetic construct
SPNPSVG

SEQ ID NO: 84915 - protein, 7 aa, synthetic construct
WKGDMST

SEQ ID NO: 84916 - protein, 7 aa, synthetic construct
YQHAKHT

SEQ ID NO: 84917 - protein, 7 aa, synthetic construct
HHIVNFE

SEQ ID NO: 84918 - protein, 7 aa, synthetic construct
KQTLTQG

SEQ ID NO: 84919 - protein, 7 aa, synthetic construct
PSKQFAE

SEQ ID NO: 84920 - protein, 7 aa, synthetic construct
NNLHKIS

SEQ ID NO: 84921 - protein, 7 aa, synthetic construct
HPMKNYV

SEQ ID NO: 84922 - protein, 7 aa, synthetic construct
KIQSENY

SEQ ID NO: 84923 - protein, 7 aa, synthetic construct
VQGDAKY

SEQ ID NO: 84924 - protein, 7 aa, synthetic construct
YIREIKT

SEQ ID NO: 84925 - protein, 7 aa, synthetic construct
GPSMRAF

SEQ ID NO: 84926 - protein, 7 aa, synthetic construct
KLSLEQR

SEQ ID NO: 84927 - protein, 7 aa, synthetic construct
MRMREQG

SEQ ID NO: 84928 - protein, 7 aa, synthetic construct
HMEHASS

SEQ ID NO: 84929 - protein, 7 aa, synthetic construct
VFSTENN

SEQ ID NO: 84930 - protein, 7 aa, synthetic construct
RNTQYES

SEQ ID NO: 84931 - protein, 7 aa, synthetic construct
NMSNPLK

SEQ ID NO: 84932 - protein, 7 aa, synthetic construct
NIEWHSA

SEQ ID NO: 84933 - protein, 7 aa, synthetic construct
RYGSSNG

SEQ ID NO: 84934 - protein, 7 aa, synthetic construct
AAVYNDS

SEQ ID NO: 84935 - protein, 7 aa, synthetic construct
YNRGNHV

SEQ ID NO: 84936 - protein, 7 aa, synthetic construct
VLQQPLP

SEQ ID NO: 84937 - protein, 7 aa, synthetic construct
VPNRAQH

SEQ ID NO: 84938 - protein, 7 aa, synthetic construct
ERGPMDR

SEQ ID NO: 84939 - protein, 7 aa, synthetic construct
AALDSNR

SEQ ID NO: 84940 - protein, 7 aa, synthetic construct
VMASTGY

SEQ ID NO: 84941 - protein, 7 aa, synthetic construct
KMVSVVS

SEQ ID NO: 84942 - protein, 7 aa, synthetic construct
RGDASFI

SEQ ID NO: 84943 - protein, 7 aa, synthetic construct
STKTTSG

SEQ ID NO: 84944 - protein, 7 aa, synthetic construct
FQHKEGH

SEQ ID NO: 84945 - protein, 7 aa, synthetic construct
GRDFPHK

SEQ ID NO: 84946 - protein, 7 aa, synthetic construct
TVAGAMS

SEQ ID NO: 84947 - protein, 7 aa, synthetic construct
FPKINAN

SEQ ID NO: 84948 - protein, 7 aa, synthetic construct
TSSNGQT

SEQ ID NO: 84949 - protein, 7 aa, synthetic construct
PMNSAKN

SEQ ID NO: 84950 - protein, 7 aa, synthetic construct
PQFTHNV

SEQ ID NO: 84951 - protein, 7 aa, synthetic construct
VQNMMHP

SEQ ID NO: 84952 - protein, 7 aa, synthetic construct
KTDMRTG

SEQ ID NO: 84953 - protein, 7 aa, synthetic construct
HNKMLHS

SEQ ID NO: 84954 - protein, 7 aa, synthetic construct
IPILESK

SEQ ID NO: 84955 - protein, 7 aa, synthetic construct
KRMDEFE

SEQ ID NO: 84956 - protein, 7 aa, synthetic construct
ILQHRFE

SEQ ID NO: 84957 - protein, 7 aa, synthetic construct
ASRSALN

SEQ ID NO: 84958 - protein, 7 aa, synthetic construct
IASFKAV

SEQ ID NO: 84959 - protein, 7 aa, synthetic construct
ATYTSEA

SEQ ID NO: 84960 - protein, 7 aa, synthetic construct
IANMKAH

SEQ ID NO: 84961 - protein, 7 aa, synthetic construct
NSGGGLY

SEQ ID NO: 84962 - protein, 7 aa, synthetic construct
GEGYQNI

SEQ ID NO: 84963 - protein, 7 aa, synthetic construct
HATTYTG

SEQ ID NO: 84964 - protein, 7 aa, synthetic construct
VTSGKSA

SEQ ID NO: 84965 - protein, 7 aa, synthetic construct
EYKQKGE

SEQ ID NO: 84966 - protein, 7 aa, synthetic construct
DSASFAG

SEQ ID NO: 84967 - protein, 7 aa, synthetic construct
RAGAMSE

SEQ ID NO: 84968 - protein, 7 aa, synthetic construct
QSGKIPT

SEQ ID NO: 84969 - protein, 7 aa, synthetic construct
NTQANVA

SEQ ID NO: 84970 - protein, 7 aa, synthetic construct
KASTPSM

SEQ ID NO: 84971 - protein, 7 aa, synthetic construct
ENKMRFN

SEQ ID NO: 84972 - protein, 7 aa, synthetic construct
NRLVANH

SEQ ID NO: 84973 - protein, 7 aa, synthetic construct
FQKTGKD

SEQ ID NO: 84974 - protein, 7 aa, synthetic construct
MSRGDQL

SEQ ID NO: 84975 - protein, 7 aa, synthetic construct
HKITAEV

SEQ ID NO: 84976 - protein, 7 aa, synthetic construct
LTTQISA

SEQ ID NO: 84977 - protein, 7 aa, synthetic construct
TARAQIY

SEQ ID NO: 84978 - protein, 7 aa, synthetic construct
KEPMYDT

SEQ ID NO: 84979 - protein, 7 aa, synthetic construct
MYTDSMR

SEQ ID NO: 84980 - protein, 7 aa, synthetic construct
PMNQHAT

SEQ ID NO: 84981 - protein, 7 aa, synthetic construct
HAPAQME

SEQ ID NO: 84982 - protein, 7 aa, synthetic construct
VERQWNE

SEQ ID NO: 84983 - protein, 7 aa, synthetic construct
SVQFTGA

SEQ ID NO: 84984 - protein, 7 aa, synthetic construct
FTIHMKQ

SEQ ID NO: 84985 - protein, 7 aa, synthetic construct
PAHNGRG

SEQ ID NO: 84986 - protein, 7 aa, synthetic construct
DKSAAIM

SEQ ID NO: 84987 - protein, 7 aa, synthetic construct
AKDAQFE

SEQ ID NO: 84988 - protein, 7 aa, synthetic construct
MAKDVLH

SEQ ID NO: 84989 - protein, 7 aa, synthetic construct
QTHHPEY

SEQ ID NO: 84990 - protein, 7 aa, synthetic construct
FLTGDLV

SEQ ID NO: 84991 - protein, 7 aa, synthetic construct
KVTNTAV

SEQ ID NO: 84992 - protein, 7 aa, synthetic construct
LYPHGVL

SEQ ID NO: 84993 - protein, 7 aa, synthetic construct
AHINQAM

SEQ ID NO: 84994 - protein, 7 aa, synthetic construct
FKQAPGT

SEQ ID NO: 84995 - protein, 7 aa, synthetic construct
GSWMAKE

SEQ ID NO: 84996 - protein, 7 aa, synthetic construct
ASNLLVE

SEQ ID NO: 84997 - protein, 7 aa, synthetic construct
VKHMHSN

SEQ ID NO: 84998 - protein, 7 aa, synthetic construct
AKQPNIT

SEQ ID NO: 84999 - protein, 7 aa, synthetic construct
EMHNVAG

SEQ ID NO: 85000 - protein, 7 aa, synthetic construct
SYQAAIN

SEQ ID NO: 85001 - protein, 7 aa, synthetic construct
MGVDRVA

SEQ ID NO: 85002 - protein, 7 aa, synthetic construct
YKDMGPR

SEQ ID NO: 85003 - protein, 7 aa, synthetic construct
HHLVAVE

SEQ ID NO: 85004 - protein, 7 aa, synthetic construct
HHTPDGH

SEQ ID NO: 85005 - protein, 7 aa, synthetic construct
DRDPDKN

SEQ ID NO: 85006 - protein, 7 aa, synthetic construct
QKPSNGM

SEQ ID NO: 85007 - protein, 7 aa, synthetic construct
KPSYNTA

SEQ ID NO: 85008 - protein, 7 aa, synthetic construct
HKDRETQ

SEQ ID NO: 85009 - protein, 7 aa, synthetic construct
DIKSPHA

SEQ ID NO: 85010 - protein, 7 aa, synthetic construct
QNDLKKQ

SEQ ID NO: 85011 - protein, 7 aa, synthetic construct
RIRDSEH

SEQ ID NO: 85012 - protein, 7 aa, synthetic construct
STTFGSP

SEQ ID NO: 85013 - protein, 7 aa, synthetic construct
KTKDYTM

SEQ ID NO: 85014 - protein, 7 aa, synthetic construct
FPNGSQY

SEQ ID NO: 85015 - protein, 7 aa, synthetic construct
GHLEHQA

SEQ ID NO: 85016 - protein, 7 aa, synthetic construct
KPAHGGA

SEQ ID NO: 85017 - protein, 7 aa, synthetic construct
ERTEVRK

SEQ ID NO: 85018 - protein, 7 aa, synthetic construct
KKAVDPW

SEQ ID NO: 85019 - protein, 7 aa, synthetic construct
AVTKQQT

SEQ ID NO: 85020 - protein, 7 aa, synthetic construct
NHFSTDG

SEQ ID NO: 85021 - protein, 7 aa, synthetic construct
PRTKDMS

SEQ ID NO: 85022 - protein, 7 aa, synthetic construct
HNQGGTQ

SEQ ID NO: 85023 - protein, 7 aa, synthetic construct
ERENKKT

SEQ ID NO: 85024 - protein, 7 aa, synthetic construct
VQNHEPT

SEQ ID NO: 85025 - protein, 7 aa, synthetic construct
VAIGYPN

SEQ ID NO: 85026 - protein, 7 aa, synthetic construct
SYRNLNS

SEQ ID NO: 85027 - protein, 7 aa, synthetic construct
RSDRVIT

SEQ ID NO: 85028 - protein, 7 aa, synthetic construct
IYMPQKD

SEQ ID NO: 85029 - protein, 7 aa, synthetic construct
TTSSLKE

SEQ ID NO: 85030 - protein, 7 aa, synthetic construct
HPRGAHP

SEQ ID NO: 85031 - protein, 7 aa, synthetic construct
ANRDAVS

SEQ ID NO: 85032 - protein, 7 aa, synthetic construct
LALNEPI

SEQ ID NO: 85033 - protein, 7 aa, synthetic construct
NFYGKTS

SEQ ID NO: 85034 - protein, 7 aa, synthetic construct
LRSSREF

SEQ ID NO: 85035 - protein, 7 aa, synthetic construct
HFTKDII

SEQ ID NO: 85036 - protein, 7 aa, synthetic construct
RIKTTDE

SEQ ID NO: 85037 - protein, 7 aa, synthetic construct
EKQHQHN

SEQ ID NO: 85038 - protein, 7 aa, synthetic construct
PEGHMNL

SEQ ID NO: 85039 - protein, 7 aa, synthetic construct
AKMAEHI

SEQ ID NO: 85040 - protein, 7 aa, synthetic construct
HFKGVHS

SEQ ID NO: 85041 - protein, 7 aa, synthetic construct
SQQTKLG

SEQ ID NO: 85042 - protein, 7 aa, synthetic construct
GNVHNGN

SEQ ID NO: 85043 - protein, 7 aa, synthetic construct
RTSSSTP

SEQ ID NO: 85044 - protein, 7 aa, synthetic construct
DEGFIKI

SEQ ID NO: 85045 - protein, 7 aa, synthetic construct
WRMSNEP

SEQ ID NO: 85046 - protein, 7 aa, synthetic construct
WNQRKDV

SEQ ID NO: 85047 - protein, 7 aa, synthetic construct
APAPSLG

SEQ ID NO: 85048 - protein, 7 aa, synthetic construct
DKGEYQR

SEQ ID NO: 85049 - protein, 7 aa, synthetic construct
GAISGHE

SEQ ID NO: 85050 - protein, 7 aa, synthetic construct
NIHDVHK

SEQ ID NO: 85051 - protein, 7 aa, synthetic construct
MRDRAAQ

SEQ ID NO: 85052 - protein, 7 aa, synthetic construct
VQYHQEI

SEQ ID NO: 85053 - protein, 7 aa, synthetic construct
REDRSIA

SEQ ID NO: 85054 - protein, 7 aa, synthetic construct
QYSGNAK

SEQ ID NO: 85055 - protein, 7 aa, synthetic construct
RRNEDEA

SEQ ID NO: 85056 - protein, 7 aa, synthetic construct
MDRAPVA

SEQ ID NO: 85057 - protein, 7 aa, synthetic construct
GAFNHPD

SEQ ID NO: 85058 - protein, 7 aa, synthetic construct
IHNIQQQ

SEQ ID NO: 85059 - protein, 7 aa, synthetic construct
KQDALVG

SEQ ID NO: 85060 - protein, 7 aa, synthetic construct
VSVGNSM

SEQ ID NO: 85061 - protein, 7 aa, synthetic construct
FMGMSEK

SEQ ID NO: 85062 - protein, 7 aa, synthetic construct
THQKPVD

SEQ ID NO: 85063 - protein, 7 aa, synthetic construct
PNRATVF

SEQ ID NO: 85064 - protein, 7 aa, synthetic construct
MRHNNPT

SEQ ID NO: 85065 - protein, 7 aa, synthetic construct
ERELKAM

SEQ ID NO: 85066 - protein, 7 aa, synthetic construct
YSALVPH

SEQ ID NO: 85067 - protein, 7 aa, synthetic construct
DKNVWPA

SEQ ID NO: 85068 - protein, 7 aa, synthetic construct
SLGNQNT

SEQ ID NO: 85069 - protein, 7 aa, synthetic construct
NKLEKML

SEQ ID NO: 85070 - protein, 7 aa, synthetic construct
VPHNQPR

SEQ ID NO: 85071 - protein, 7 aa, synthetic construct
IGQSMQP

SEQ ID NO: 85072 - protein, 7 aa, synthetic construct
KHPNIIM

SEQ ID NO: 85073 - protein, 7 aa, synthetic construct
PIQKREF

SEQ ID NO: 85074 - protein, 7 aa, synthetic construct
RRTDVLE

SEQ ID NO: 85075 - protein, 7 aa, synthetic construct
LIANGTN

SEQ ID NO: 85076 - protein, 7 aa, synthetic construct
VRDISFK

SEQ ID NO: 85077 - protein, 7 aa, synthetic construct
PAPSTPR

SEQ ID NO: 85078 - protein, 7 aa, synthetic construct
NRDKYDH

SEQ ID NO: 85079 - protein, 7 aa, synthetic construct
KRETADQ

SEQ ID NO: 85080 - protein, 7 aa, synthetic construct
WNIERIG

SEQ ID NO: 85081 - protein, 7 aa, synthetic construct
WSDISHR

SEQ ID NO: 85082 - protein, 7 aa, synthetic construct
NPPKFVI

SEQ ID NO: 85083 - protein, 7 aa, synthetic construct
KGRTDDH

SEQ ID NO: 85084 - protein, 7 aa, synthetic construct
SKNTGQM

SEQ ID NO: 85085 - protein, 7 aa, synthetic construct
HKPPVPL

SEQ ID NO: 85086 - protein, 7 aa, synthetic construct
TPNSPVD

SEQ ID NO: 85087 - protein, 7 aa, synthetic construct
PHQVPSI

SEQ ID NO: 85088 - protein, 7 aa, synthetic construct
SMSQNQL

SEQ ID NO: 85089 - protein, 7 aa, synthetic construct
KVTPNSA

SEQ ID NO: 85090 - protein, 7 aa, synthetic construct
VTINPSQ

SEQ ID NO: 85091 - protein, 7 aa, synthetic construct
DSIGMIR

SEQ ID NO: 85092 - protein, 7 aa, synthetic construct
QHGESSQ

SEQ ID NO: 85093 - protein, 7 aa, synthetic construct
RAMDKTS

SEQ ID NO: 85094 - protein, 7 aa, synthetic construct
IHSFPTD

SEQ ID NO: 85095 - protein, 7 aa, synthetic construct
GMPMTQM

SEQ ID NO: 85096 - protein, 7 aa, synthetic construct
EYNAGQA

SEQ ID NO: 85097 - protein, 7 aa, synthetic construct
SLHRSAV

SEQ ID NO: 85098 - protein, 7 aa, synthetic construct
YGSIVHE

SEQ ID NO: 85099 - protein, 7 aa, synthetic construct
VYAKGTE

SEQ ID NO: 85100 - protein, 7 aa, synthetic construct
HVQHNNG

SEQ ID NO: 85101 - protein, 7 aa, synthetic construct
RIMSTGN

SEQ ID NO: 85102 - protein, 7 aa, synthetic construct
KGAMQEM

SEQ ID NO: 85103 - protein, 7 aa, synthetic construct
NYPGKGD

SEQ ID NO: 85104 - protein, 7 aa, synthetic construct
KYPQDRP

SEQ ID NO: 85105 - protein, 7 aa, synthetic construct
SQRVIEQ

SEQ ID NO: 85106 - protein, 7 aa, synthetic construct
SSPAMSP

SEQ ID NO: 85107 - protein, 7 aa, synthetic construct
MSDAWKK

SEQ ID NO: 85108 - protein, 7 aa, synthetic construct
TALNQIK

SEQ ID NO: 85109 - protein, 7 aa, synthetic construct
WDKMNAK

SEQ ID NO: 85110 - protein, 7 aa, synthetic construct
TQSPFPA

SEQ ID NO: 85111 - protein, 7 aa, synthetic construct
LSYTATG

SEQ ID NO: 85112 - protein, 7 aa, synthetic construct
GVNNRTG

SEQ ID NO: 85113 - protein, 7 aa, synthetic construct
HGQSEMG

SEQ ID NO: 85114 - protein, 7 aa, synthetic construct
LLVRMSD

SEQ ID NO: 85115 - protein, 7 aa, synthetic construct
SKNHTHV

SEQ ID NO: 85116 - protein, 7 aa, synthetic construct
MSANVNI

SEQ ID NO: 85117 - protein, 7 aa, synthetic construct
KFSSVGT

SEQ ID NO: 85118 - protein, 7 aa, synthetic construct
RAEPLRM

SEQ ID NO: 85119 - protein, 7 aa, synthetic construct
SDGSKYH

SEQ ID NO: 85120 - protein, 7 aa, synthetic construct
KSPNPMA

SEQ ID NO: 85121 - protein, 7 aa, synthetic construct
ADPLGKL

SEQ ID NO: 85122 - protein, 7 aa, synthetic construct
YIESRGV

SEQ ID NO: 85123 - protein, 7 aa, synthetic construct
KYNMQEE

SEQ ID NO: 85124 - protein, 7 aa, synthetic construct
QMMHPTS

SEQ ID NO: 85125 - protein, 7 aa, synthetic construct
QGEINKP

SEQ ID NO: 85126 - protein, 7 aa, synthetic construct
NSTRVGW

SEQ ID NO: 85127 - protein, 7 aa, synthetic construct
IDKPREV

SEQ ID NO: 85128 - protein, 7 aa, synthetic construct
VTGKGMQ

SEQ ID NO: 85129 - protein, 7 aa, synthetic construct
KSAASNA

SEQ ID NO: 85130 - protein, 7 aa, synthetic construct
MSTNNLA

SEQ ID NO: 85131 - protein, 7 aa, synthetic construct
RERQAHL

SEQ ID NO: 85132 - protein, 7 aa, synthetic construct
WGPQLTS

SEQ ID NO: 85133 - protein, 7 aa, synthetic construct
KPGGIGY

SEQ ID NO: 85134 - protein, 7 aa, synthetic construct
GPELRRL

SEQ ID NO: 85135 - protein, 7 aa, synthetic construct
EQMTSKA

SEQ ID NO: 85136 - protein, 7 aa, synthetic construct
KQSNWAQ

SEQ ID NO: 85137 - protein, 7 aa, synthetic construct
ARQPGPM

SEQ ID NO: 85138 - protein, 7 aa, synthetic construct
PQRGNDS

SEQ ID NO: 85139 - protein, 7 aa, synthetic construct
IWEGGSE

SEQ ID NO: 85140 - protein, 7 aa, synthetic construct
FKNSVSN

SEQ ID NO: 85141 - protein, 7 aa, synthetic construct
NKMYPAQ

SEQ ID NO: 85142 - protein, 7 aa, synthetic construct
DPNGYKF

SEQ ID NO: 85143 - protein, 7 aa, synthetic construct
PMKMHGP

SEQ ID NO: 85144 - protein, 7 aa, synthetic construct
MENARSM

SEQ ID NO: 85145 - protein, 7 aa, synthetic construct
GIEARGL

SEQ ID NO: 85146 - protein, 7 aa, synthetic construct
VPYNNGT

SEQ ID NO: 85147 - protein, 7 aa, synthetic construct
DHQPTTR

SEQ ID NO: 85148 - protein, 7 aa, synthetic construct
HLQNIQI

SEQ ID NO: 85149 - protein, 7 aa, synthetic construct
IMMGKQP

SEQ ID NO: 85150 - protein, 7 aa, synthetic construct
GLGSTKG

SEQ ID NO: 85151 - protein, 7 aa, synthetic construct
IREMQQS

SEQ ID NO: 85152 - protein, 7 aa, synthetic construct
TMNSHQY

SEQ ID NO: 85153 - protein, 7 aa, synthetic construct
DSEMSHK

SEQ ID NO: 85154 - protein, 7 aa, synthetic construct
TNMKNPY

SEQ ID NO: 85155 - protein, 7 aa, synthetic construct
NQFNQTI

SEQ ID NO: 85156 - protein, 7 aa, synthetic construct
QKSNTIG

SEQ ID NO: 85157 - protein, 7 aa, synthetic construct
KEQNNFP

SEQ ID NO: 85158 - protein, 7 aa, synthetic construct
KYVTTGT

SEQ ID NO: 85159 - protein, 7 aa, synthetic construct
AAQQPGK

SEQ ID NO: 85160 - protein, 7 aa, synthetic construct
RDKSSQL

SEQ ID NO: 85161 - protein, 7 aa, synthetic construct
HIERGHN

SEQ ID NO: 85162 - protein, 7 aa, synthetic construct
TKSSYQS

SEQ ID NO: 85163 - protein, 7 aa, synthetic construct
LHSKHVT

SEQ ID NO: 85164 - protein, 7 aa, synthetic construct
AYNHQGG

SEQ ID NO: 85165 - protein, 7 aa, synthetic construct
STHHEQY

SEQ ID NO: 85166 - protein, 7 aa, synthetic construct
TTSGMNM

SEQ ID NO: 85167 - protein, 7 aa, synthetic construct
HNKGGMF

SEQ ID NO: 85168 - protein, 7 aa, synthetic construct
NQLNMGR

SEQ ID NO: 85169 - protein, 7 aa, synthetic construct
GSRTTAA

SEQ ID NO: 85170 - protein, 7 aa, synthetic construct
GGIGREE

SEQ ID NO: 85171 - protein, 7 aa, synthetic construct
STHNVTE

SEQ ID NO: 85172 - protein, 7 aa, synthetic construct
NLHGFQE

SEQ ID NO: 85173 - protein, 7 aa, synthetic construct
WKAIIQS

SEQ ID NO: 85174 - protein, 7 aa, synthetic construct
SNKQTMG

SEQ ID NO: 85175 - protein, 7 aa, synthetic construct
VRDRATA

SEQ ID NO: 85176 - protein, 7 aa, synthetic construct
GTKSMSA

SEQ ID NO: 85177 - protein, 7 aa, synthetic construct
GERPKYP

SEQ ID NO: 85178 - protein, 7 aa, synthetic construct
ENVKGAN

SEQ ID NO: 85179 - protein, 7 aa, synthetic construct
RAQRVEY

SEQ ID NO: 85180 - protein, 7 aa, synthetic construct
TAKITEM

SEQ ID NO: 85181 - protein, 7 aa, synthetic construct
DFRRQEF

SEQ ID NO: 85182 - protein, 7 aa, synthetic construct
GPLPHKE

SEQ ID NO: 85183 - protein, 7 aa, synthetic construct
KERDGIV

SEQ ID NO: 85184 - protein, 7 aa, synthetic construct
MRESLST

SEQ ID NO: 85185 - protein, 7 aa, synthetic construct
NDGTQVK

SEQ ID NO: 85186 - protein, 7 aa, synthetic construct
PAQPKGM

SEQ ID NO: 85187 - protein, 7 aa, synthetic construct
PMRAAFS

SEQ ID NO: 85188 - protein, 7 aa, synthetic construct
TSANAGP

SEQ ID NO: 85189 - protein, 7 aa, synthetic construct
FAGNSEG

SEQ ID NO: 85190 - protein, 7 aa, synthetic construct
VVHHTDF

SEQ ID NO: 85191 - protein, 7 aa, synthetic construct
RFREEAQ

SEQ ID NO: 85192 - protein, 7 aa, synthetic construct
GIKYPGH

SEQ ID NO: 85193 - protein, 7 aa, synthetic construct
YTNKMEP

SEQ ID NO: 85194 - protein, 7 aa, synthetic construct
TVTMQRV

SEQ ID NO: 85195 - protein, 7 aa, synthetic construct
FQRESIP

SEQ ID NO: 85196 - protein, 7 aa, synthetic construct
GVNRLMT

SEQ ID NO: 85197 - protein, 7 aa, synthetic construct
HTPPLST

SEQ ID NO: 85198 - protein, 7 aa, synthetic construct
GGTRGNT

SEQ ID NO: 85199 - protein, 7 aa, synthetic construct
MAGAVGY

SEQ ID NO: 85200 - protein, 7 aa, synthetic construct
QIAANQS

SEQ ID NO: 85201 - protein, 7 aa, synthetic construct
ENSRVVG

SEQ ID NO: 85202 - protein, 7 aa, synthetic construct
LHAKQND

SEQ ID NO: 85203 - protein, 7 aa, synthetic construct
THYNGKM

SEQ ID NO: 85204 - protein, 7 aa, synthetic construct
QQKGNNV

SEQ ID NO: 85205 - protein, 7 aa, synthetic construct
WNKGTEP

SEQ ID NO: 85206 - protein, 7 aa, synthetic construct
TEQYPGR

SEQ ID NO: 85207 - protein, 7 aa, synthetic construct
GVHVAMD

SEQ ID NO: 85208 - protein, 7 aa, synthetic construct
GRIVPVH

SEQ ID NO: 85209 - protein, 7 aa, synthetic construct
VPDQKSY

SEQ ID NO: 85210 - protein, 7 aa, synthetic construct
YRGQDGF

SEQ ID NO: 85211 - protein, 7 aa, synthetic construct
RSNAVYV

SEQ ID NO: 85212 - protein, 7 aa, synthetic construct
NLYQKPQ

SEQ ID NO: 85213 - protein, 7 aa, synthetic construct
GVNEMHK

SEQ ID NO: 85214 - protein, 7 aa, synthetic construct
TPYNPVQ

SEQ ID NO: 85215 - protein, 7 aa, synthetic construct
FPRTQRD

SEQ ID NO: 85216 - protein, 7 aa, synthetic construct
QVGNEKH

SEQ ID NO: 85217 - protein, 7 aa, synthetic construct
MHTNQLP

SEQ ID NO: 85218 - protein, 7 aa, synthetic construct
KVGLYPE

SEQ ID NO: 85219 - protein, 7 aa, synthetic construct
YAMGSQK

SEQ ID NO: 85220 - protein, 7 aa, synthetic construct
QQNPHFK

SEQ ID NO: 85221 - protein, 7 aa, synthetic construct
VVRTNMS

SEQ ID NO: 85222 - protein, 7 aa, synthetic construct
PMTRQNE

SEQ ID NO: 85223 - protein, 7 aa, synthetic construct
IFHGEYS

SEQ ID NO: 85224 - protein, 7 aa, synthetic construct
MAQGKNE

SEQ ID NO: 85225 - protein, 7 aa, synthetic construct
STNYQKA

SEQ ID NO: 85226 - protein, 7 aa, synthetic construct
LVGTKGN

SEQ ID NO: 85227 - protein, 7 aa, synthetic construct
VWEGAQK

SEQ ID NO: 85228 - protein, 7 aa, synthetic construct
IPAKNVN

SEQ ID NO: 85229 - protein, 7 aa, synthetic construct
KDSGLER

SEQ ID NO: 85230 - protein, 7 aa, synthetic construct
ALPAING

SEQ ID NO: 85231 - protein, 7 aa, synthetic construct
QAPQQPF

SEQ ID NO: 85232 - protein, 7 aa, synthetic construct
TVPSIVG

SEQ ID NO: 85233 - protein, 7 aa, synthetic construct
GGPGGHG

SEQ ID NO: 85234 - protein, 7 aa, synthetic construct
SASRQHN

SEQ ID NO: 85235 - protein, 7 aa, synthetic construct
MDGARVT

SEQ ID NO: 85236 - protein, 7 aa, synthetic construct
MMHVHTP

SEQ ID NO: 85237 - protein, 7 aa, synthetic construct
TVWSGND

SEQ ID NO: 85238 - protein, 7 aa, synthetic construct
QQGQHEV

SEQ ID NO: 85239 - protein, 7 aa, synthetic construct
KKDNVTG

SEQ ID NO: 85240 - protein, 7 aa, synthetic construct
GVRPTKE

SEQ ID NO: 85241 - protein, 7 aa, synthetic construct
PMISNDR

SEQ ID NO: 85242 - protein, 7 aa, synthetic construct
VGTTYTK

SEQ ID NO: 85243 - protein, 7 aa, synthetic construct
QYPKYTA

SEQ ID NO: 85244 - protein, 7 aa, synthetic construct
MPLTDKA

SEQ ID NO: 85245 - protein, 7 aa, synthetic construct
KTPTSNS

SEQ ID NO: 85246 - protein, 7 aa, synthetic construct
TVLETNA

SEQ ID NO: 85247 - protein, 7 aa, synthetic construct
DNGGILR

SEQ ID NO: 85248 - protein, 7 aa, synthetic construct
QREYKPE

SEQ ID NO: 85249 - protein, 7 aa, synthetic construct
KQQGATL

SEQ ID NO: 85250 - protein, 7 aa, synthetic construct
TGKSGTP

SEQ ID NO: 85251 - protein, 7 aa, synthetic construct
YSHEMKY

SEQ ID NO: 85252 - protein, 7 aa, synthetic construct
FVNPHAH

SEQ ID NO: 85253 - protein, 7 aa, synthetic construct
HPGLAPE

SEQ ID NO: 85254 - protein, 7 aa, synthetic construct
GIMSGQV

SEQ ID NO: 85255 - protein, 7 aa, synthetic construct
SASQGIY

SEQ ID NO: 85256 - protein, 7 aa, synthetic construct
GHDKPGQ

SEQ ID NO: 85257 - protein, 7 aa, synthetic construct
YKANKQA

SEQ ID NO: 85258 - protein, 7 aa, synthetic construct
QGSVGPS

SEQ ID NO: 85259 - protein, 7 aa, synthetic construct
SSKEAHF

SEQ ID NO: 85260 - protein, 7 aa, synthetic construct
ASKTSLI

SEQ ID NO: 85261 - protein, 7 aa, synthetic construct
DRDIHNS

SEQ ID NO: 85262 - protein, 7 aa, synthetic construct
VGKMKSE

SEQ ID NO: 85263 - protein, 7 aa, synthetic construct
HQHDHGH

SEQ ID NO: 85264 - protein, 7 aa, synthetic construct
WMNPKTV

SEQ ID NO: 85265 - protein, 7 aa, synthetic construct
YSNNYKV

SEQ ID NO: 85266 - protein, 7 aa, synthetic construct
TSVSLNF

SEQ ID NO: 85267 - protein, 7 aa, synthetic construct
RVFANEH

SEQ ID NO: 85268 - protein, 7 aa, synthetic construct
YAHRESV

SEQ ID NO: 85269 - protein, 7 aa, synthetic construct
PHLSDGR

SEQ ID NO: 85270 - protein, 7 aa, synthetic construct
KTAGQIM

SEQ ID NO: 85271 - protein, 7 aa, synthetic construct
WKNHTEL

SEQ ID NO: 85272 - protein, 7 aa, synthetic construct
RPAEIHL

SEQ ID NO: 85273 - protein, 7 aa, synthetic construct
ARNLMPS

SEQ ID NO: 85274 - protein, 7 aa, synthetic construct
QLNSGIP

SEQ ID NO: 85275 - protein, 7 aa, synthetic construct
AMNRLQV

SEQ ID NO: 85276 - protein, 7 aa, synthetic construct
NDILKKE

SEQ ID NO: 85277 - protein, 7 aa, synthetic construct
YTKAALE

SEQ ID NO: 85278 - protein, 7 aa, synthetic construct
IWREGEH

SEQ ID NO: 85279 - protein, 7 aa, synthetic construct
IASPADK

SEQ ID NO: 85280 - protein, 7 aa, synthetic construct
PKTAYAD

SEQ ID NO: 85281 - protein, 7 aa, synthetic construct
RGFGHDG

SEQ ID NO: 85282 - protein, 7 aa, synthetic construct
IMSNSRG

SEQ ID NO: 85283 - protein, 7 aa, synthetic construct
PHGLPTP

SEQ ID NO: 85284 - protein, 7 aa, synthetic construct
FAHGYGQ

SEQ ID NO: 85285 - protein, 7 aa, synthetic construct
VSQTHYM

SEQ ID NO: 85286 - protein, 7 aa, synthetic construct
TPIHTRH

SEQ ID NO: 85287 - protein, 7 aa, synthetic construct
NRGTVGG

SEQ ID NO: 85288 - protein, 7 aa, synthetic construct
NTKPTQS

SEQ ID NO: 85289 - protein, 7 aa, synthetic construct
FAFEAKG

SEQ ID NO: 85290 - protein, 7 aa, synthetic construct
HKELLKG

SEQ ID NO: 85291 - protein, 7 aa, synthetic construct
SNGHKFY

SEQ ID NO: 85292 - protein, 7 aa, synthetic construct
RHTYAND

SEQ ID NO: 85293 - protein, 7 aa, synthetic construct
EMTARSS

SEQ ID NO: 85294 - protein, 7 aa, synthetic construct
TFDHKHT

SEQ ID NO: 85295 - protein, 7 aa, synthetic construct
YDGAIPQ

SEQ ID NO: 85296 - protein, 7 aa, synthetic construct
FASVADK

SEQ ID NO: 85297 - protein, 7 aa, synthetic construct
YGGKMNA

SEQ ID NO: 85298 - protein, 7 aa, synthetic construct
NNAPIYT

SEQ ID NO: 85299 - protein, 7 aa, synthetic construct
EVIKTKL

SEQ ID NO: 85300 - protein, 7 aa, synthetic construct
HMKDIHP

SEQ ID NO: 85301 - protein, 7 aa, synthetic construct
YHKDVIV

SEQ ID NO: 85302 - protein, 7 aa, synthetic construct
RSVEQSG

SEQ ID NO: 85303 - protein, 7 aa, synthetic construct
GKGGLTG

SEQ ID NO: 85304 - protein, 7 aa, synthetic construct
KEGYGQA

SEQ ID NO: 85305 - protein, 7 aa, synthetic construct
ARYAEHV

SEQ ID NO: 85306 - protein, 7 aa, synthetic construct
TGEGQKV

SEQ ID NO: 85307 - protein, 7 aa, synthetic construct
YEQNAGR

SEQ ID NO: 85308 - protein, 7 aa, synthetic construct
PVAKQNV

SEQ ID NO: 85309 - protein, 7 aa, synthetic construct
RKSVGYE

SEQ ID NO: 85310 - protein, 7 aa, synthetic construct
PKPNAMN

SEQ ID NO: 85311 - protein, 7 aa, synthetic construct
ISGMTAP

SEQ ID NO: 85312 - protein, 7 aa, synthetic construct
FVAHKLN

SEQ ID NO: 85313 - protein, 7 aa, synthetic construct
LKNNMIH

SEQ ID NO: 85314 - protein, 7 aa, synthetic construct
LSHNVTP

SEQ ID NO: 85315 - protein, 7 aa, synthetic construct
GQGRVFA

SEQ ID NO: 85316 - protein, 7 aa, synthetic construct
KSTHVYQ

SEQ ID NO: 85317 - protein, 7 aa, synthetic construct
HGSDGTH

SEQ ID NO: 85318 - protein, 7 aa, synthetic construct
HGIHNDS

SEQ ID NO: 85319 - protein, 7 aa, synthetic construct
WAPSRFD

SEQ ID NO: 85320 - protein, 7 aa, synthetic construct
KPNRDMP

SEQ ID NO: 85321 - protein, 7 aa, synthetic construct
KEYSTQT

SEQ ID NO: 85322 - protein, 7 aa, synthetic construct
TEWQTGN

SEQ ID NO: 85323 - protein, 7 aa, synthetic construct
RENRANE

SEQ ID NO: 85324 - protein, 7 aa, synthetic construct
QRYGQNA

SEQ ID NO: 85325 - protein, 7 aa, synthetic construct
PSPAQRY

SEQ ID NO: 85326 - protein, 7 aa, synthetic construct
PDDTRHY

SEQ ID NO: 85327 - protein, 7 aa, synthetic construct
LGFKIEA

SEQ ID NO: 85328 - protein, 7 aa, synthetic construct
LNSQLPD

SEQ ID NO: 85329 - protein, 7 aa, synthetic construct
GTQMIIS

SEQ ID NO: 85330 - protein, 7 aa, synthetic construct
AMDLPRS

SEQ ID NO: 85331 - protein, 7 aa, synthetic construct
NNGSKIL

SEQ ID NO: 85332 - protein, 7 aa, synthetic construct
HDLHKAE

SEQ ID NO: 85333 - protein, 7 aa, synthetic construct
IGPDTKS

SEQ ID NO: 85334 - protein, 7 aa, synthetic construct
KDDVYKR

SEQ ID NO: 85335 - protein, 7 aa, synthetic construct
VTTQDQH

SEQ ID NO: 85336 - protein, 7 aa, synthetic construct
SAKSANG

SEQ ID NO: 85337 - protein, 7 aa, synthetic construct
QPRENST

SEQ ID NO: 85338 - protein, 7 aa, synthetic construct
TIQLVHS

SEQ ID NO: 85339 - protein, 7 aa, synthetic construct
TLTASPP

SEQ ID NO: 85340 - protein, 7 aa, synthetic construct
QAFTGND

SEQ ID NO: 85341 - protein, 7 aa, synthetic construct
FNKNHGH

SEQ ID NO: 85342 - protein, 7 aa, synthetic construct
NDQRQPG

SEQ ID NO: 85343 - protein, 7 aa, synthetic construct
HNPGYVV

SEQ ID NO: 85344 - protein, 7 aa, synthetic construct
GSNVSER

SEQ ID NO: 85345 - protein, 7 aa, synthetic construct
DRKYIAG

SEQ ID NO: 85346 - protein, 7 aa, synthetic construct
SSRQHVQ

SEQ ID NO: 85347 - protein, 7 aa, synthetic construct
TNQYAVQ

SEQ ID NO: 85348 - protein, 7 aa, synthetic construct
AMGTSAV

SEQ ID NO: 85349 - protein, 7 aa, synthetic construct
GTFKEAL

SEQ ID NO: 85350 - protein, 7 aa, synthetic construct
VTLIPNK

SEQ ID NO: 85351 - protein, 7 aa, synthetic construct
FPTLHHS

SEQ ID NO: 85352 - protein, 7 aa, synthetic construct
KAELKNA

SEQ ID NO: 85353 - protein, 7 aa, synthetic construct
LARNNFN

SEQ ID NO: 85354 - protein, 7 aa, synthetic construct
YGHRIES

SEQ ID NO: 85355 - protein, 7 aa, synthetic construct
WKALEVN

SEQ ID NO: 85356 - protein, 7 aa, synthetic construct
QYESERN

SEQ ID NO: 85357 - protein, 7 aa, synthetic construct
WNIIKDS

SEQ ID NO: 85358 - protein, 7 aa, synthetic construct
DLQGPTD

SEQ ID NO: 85359 - protein, 7 aa, synthetic construct
STRGEAY

SEQ ID NO: 85360 - protein, 7 aa, synthetic construct
DRMEAMR

SEQ ID NO: 85361 - protein, 7 aa, synthetic construct
INIAQTA

SEQ ID NO: 85362 - protein, 7 aa, synthetic construct
VSRTWTD

SEQ ID NO: 85363 - protein, 7 aa, synthetic construct
QRTYEEY

SEQ ID NO: 85364 - protein, 7 aa, synthetic construct
IHFPDRP

SEQ ID NO: 85365 - protein, 7 aa, synthetic construct
TIFRDKA

SEQ ID NO: 85366 - protein, 7 aa, synthetic construct
SGILHKS

SEQ ID NO: 85367 - protein, 7 aa, synthetic construct
QTRENFR

SEQ ID NO: 85368 - protein, 7 aa, synthetic construct
PHMVHMG

SEQ ID NO: 85369 - protein, 7 aa, synthetic construct
QKVYRGE

SEQ ID NO: 85370 - protein, 7 aa, synthetic construct
IVNKQKE

SEQ ID NO: 85371 - protein, 7 aa, synthetic construct
SANKDRS

SEQ ID NO: 85372 - protein, 7 aa, synthetic construct
KPNNNQP

SEQ ID NO: 85373 - protein, 7 aa, synthetic construct
HGYEGSI

SEQ ID NO: 85374 - protein, 7 aa, synthetic construct
EFEPHNH

SEQ ID NO: 85375 - protein, 7 aa, synthetic construct
SAFDSSG

SEQ ID NO: 85376 - protein, 7 aa, synthetic construct
HIDRVLN

SEQ ID NO: 85377 - protein, 7 aa, synthetic construct
VAMLNQK

SEQ ID NO: 85378 - protein, 7 aa, synthetic construct
HVEGMKP

SEQ ID NO: 85379 - protein, 7 aa, synthetic construct
FLGLETG

SEQ ID NO: 85380 - protein, 7 aa, synthetic construct
AWGRDLT

SEQ ID NO: 85381 - protein, 7 aa, synthetic construct
KPEPNAF

SEQ ID NO: 85382 - protein, 7 aa, synthetic construct
QKHAALI

SEQ ID NO: 85383 - protein, 7 aa, synthetic construct
PHPLIGD

SEQ ID NO: 85384 - protein, 7 aa, synthetic construct
VIRETNK

SEQ ID NO: 85385 - protein, 7 aa, synthetic construct
QKVDSDT

SEQ ID NO: 85386 - protein, 7 aa, synthetic construct
HHNARFD

SEQ ID NO: 85387 - protein, 7 aa, synthetic construct
RNPGNNG

SEQ ID NO: 85388 - protein, 7 aa, synthetic construct
LQSRAPF

SEQ ID NO: 85389 - protein, 7 aa, synthetic construct
YDRHKGE

SEQ ID NO: 85390 - protein, 7 aa, synthetic construct
FKGTSDE

SEQ ID NO: 85391 - protein, 7 aa, synthetic construct
AGHILTG

SEQ ID NO: 85392 - protein, 7 aa, synthetic construct
PMSGSNS

SEQ ID NO: 85393 - protein, 7 aa, synthetic construct
SNKHPVE

SEQ ID NO: 85394 - protein, 7 aa, synthetic construct
RTSQMNA

SEQ ID NO: 85395 - protein, 7 aa, synthetic construct
YKLFPEA

SEQ ID NO: 85396 - protein, 7 aa, synthetic construct
VQPTMSM

SEQ ID NO: 85397 - protein, 7 aa, synthetic construct
RAEKPFV

SEQ ID NO: 85398 - protein, 7 aa, synthetic construct
VIVAARG

SEQ ID NO: 85399 - protein, 7 aa, synthetic construct
PNRLTEM

SEQ ID NO: 85400 - protein, 7 aa, synthetic construct
EFKGAMM

SEQ ID NO: 85401 - protein, 7 aa, synthetic construct
VDLSKRA

SEQ ID NO: 85402 - protein, 7 aa, synthetic construct
RLVNDVR

SEQ ID NO: 85403 - protein, 7 aa, synthetic construct
ERGERYM

SEQ ID NO: 85404 - protein, 7 aa, synthetic construct
ADWTRTP

SEQ ID NO: 85405 - protein, 7 aa, synthetic construct
AQKNVSG

SEQ ID NO: 85406 - protein, 7 aa, synthetic construct
IKAVPET

SEQ ID NO: 85407 - protein, 7 aa, synthetic construct
VSSGMRF

SEQ ID NO: 85408 - protein, 7 aa, synthetic construct
HSRKWED

SEQ ID NO: 85409 - protein, 7 aa, synthetic construct
NNNNPYR

SEQ ID NO: 85410 - protein, 7 aa, synthetic construct
DGSRSIV

SEQ ID NO: 85411 - protein, 7 aa, synthetic construct
GLGKLVS

SEQ ID NO: 85412 - protein, 7 aa, synthetic construct
NDKDFKW

SEQ ID NO: 85413 - protein, 7 aa, synthetic construct
DDPRRHT

SEQ ID NO: 85414 - protein, 7 aa, synthetic construct
VDQFTQA

SEQ ID NO: 85415 - protein, 7 aa, synthetic construct
LKQFSSQ

SEQ ID NO: 85416 - protein, 7 aa, synthetic construct
KMAGVKE

SEQ ID NO: 85417 - protein, 7 aa, synthetic construct
FHSGMVK

SEQ ID NO: 85418 - protein, 7 aa, synthetic construct
YDQRIIK

SEQ ID NO: 85419 - protein, 7 aa, synthetic construct
HFRGTIN

SEQ ID NO: 85420 - protein, 7 aa, synthetic construct
IHDKTYD

SEQ ID NO: 85421 - protein, 7 aa, synthetic construct
PEAAGIK

SEQ ID NO: 85422 - protein, 7 aa, synthetic construct
VSFTQQT

SEQ ID NO: 85423 - protein, 7 aa, synthetic construct
HFAKNDF

SEQ ID NO: 85424 - protein, 7 aa, synthetic construct
TSNRQEW

SEQ ID NO: 85425 - protein, 7 aa, synthetic construct
LTVIGGT

SEQ ID NO: 85426 - protein, 7 aa, synthetic construct
IPMRAGL

SEQ ID NO: 85427 - protein, 7 aa, synthetic construct
SGQNYKE

SEQ ID NO: 85428 - protein, 7 aa, synthetic construct
VLQGLHA

SEQ ID NO: 85429 - protein, 7 aa, synthetic construct
AIHRGHI

SEQ ID NO: 85430 - protein, 7 aa, synthetic construct
IKEFSVH

SEQ ID NO: 85431 - protein, 7 aa, synthetic construct
HDPGRRA

SEQ ID NO: 85432 - protein, 7 aa, synthetic construct
RNAPQQA

SEQ ID NO: 85433 - protein, 7 aa, synthetic construct
ASNLHTI

SEQ ID NO: 85434 - protein, 7 aa, synthetic construct
ELKMGAR

SEQ ID NO: 85435 - protein, 7 aa, synthetic construct
YDKTQTY

SEQ ID NO: 85436 - protein, 7 aa, synthetic construct
SIYGEGI

SEQ ID NO: 85437 - protein, 7 aa, synthetic construct
PAPMLEG

SEQ ID NO: 85438 - protein, 7 aa, synthetic construct
YENIRAD

SEQ ID NO: 85439 - protein, 7 aa, synthetic construct
WARSGGD

SEQ ID NO: 85440 - protein, 7 aa, synthetic construct
PMERLQS

SEQ ID NO: 85441 - protein, 7 aa, synthetic construct
IPNMNQA

SEQ ID NO: 85442 - protein, 7 aa, synthetic construct
NNKFVNE

SEQ ID NO: 85443 - protein, 7 aa, synthetic construct
ERLPTAM

SEQ ID NO: 85444 - protein, 7 aa, synthetic construct
DGISLRQ

SEQ ID NO: 85445 - protein, 7 aa, synthetic construct
PAKPAPP

SEQ ID NO: 85446 - protein, 7 aa, synthetic construct
KQVQQAE

SEQ ID NO: 85447 - protein, 7 aa, synthetic construct
LQGMTTH

SEQ ID NO: 85448 - protein, 7 aa, synthetic construct
QIMPARQ

SEQ ID NO: 85449 - protein, 7 aa, synthetic construct
PNERSQG

SEQ ID NO: 85450 - protein, 7 aa, synthetic construct
QLKEVSP

SEQ ID NO: 85451 - protein, 7 aa, synthetic construct
PWPASVP

SEQ ID NO: 85452 - protein, 7 aa, synthetic construct
YQPLGVE

SEQ ID NO: 85453 - protein, 7 aa, synthetic construct
FVNHHDR

SEQ ID NO: 85454 - protein, 7 aa, synthetic construct
TLPNSTM

SEQ ID NO: 85455 - protein, 7 aa, synthetic construct
HVTMPPA

SEQ ID NO: 85456 - protein, 7 aa, synthetic construct
RIDVAGV

SEQ ID NO: 85457 - protein, 7 aa, synthetic construct
PKNSSEE

SEQ ID NO: 85458 - protein, 7 aa, synthetic construct
ANKNNAP

SEQ ID NO: 85459 - protein, 7 aa, synthetic construct
QGKIGPD

SEQ ID NO: 85460 - protein, 7 aa, synthetic construct
PTGAHAS

SEQ ID NO: 85461 - protein, 7 aa, synthetic construct
SYIGEPA

SEQ ID NO: 85462 - protein, 7 aa, synthetic construct
RVKDYQT

SEQ ID NO: 85463 - protein, 7 aa, synthetic construct
SPVQLHQ

SEQ ID NO: 85464 - protein, 7 aa, synthetic construct
QAAPNSQ

SEQ ID NO: 85465 - protein, 7 aa, synthetic construct
APNHNVL

SEQ ID NO: 85466 - protein, 7 aa, synthetic construct
LSSVHVI

SEQ ID NO: 85467 - protein, 7 aa, synthetic construct
EGFARTP

SEQ ID NO: 85468 - protein, 7 aa, synthetic construct
NGYHQVE

SEQ ID NO: 85469 - protein, 7 aa, synthetic construct
NLNFQNK

SEQ ID NO: 85470 - protein, 7 aa, synthetic construct
QKMDNQM

SEQ ID NO: 85471 - protein, 7 aa, synthetic construct
MILKNQS

SEQ ID NO: 85472 - protein, 7 aa, synthetic construct
PHIGPNR

SEQ ID NO: 85473 - protein, 7 aa, synthetic construct
PYSKFPS

SEQ ID NO: 85474 - protein, 7 aa, synthetic construct
KQQASGS

SEQ ID NO: 85475 - protein, 7 aa, synthetic construct
PKEMEHR

SEQ ID NO: 85476 - protein, 7 aa, synthetic construct
STPKNVH

SEQ ID NO: 85477 - protein, 7 aa, synthetic construct
DGHLTFS

SEQ ID NO: 85478 - protein, 7 aa, synthetic construct
WEQAGIK

SEQ ID NO: 85479 - protein, 7 aa, synthetic construct
QNQDTRM

SEQ ID NO: 85480 - protein, 7 aa, synthetic construct
KSSIIKS

SEQ ID NO: 85481 - protein, 7 aa, synthetic construct
GRIPDIQ

SEQ ID NO: 85482 - protein, 7 aa, synthetic construct
YSRNSVD

SEQ ID NO: 85483 - protein, 7 aa, synthetic construct
NQRAHDG

SEQ ID NO: 85484 - protein, 7 aa, synthetic construct
MDSGNHK

SEQ ID NO: 85485 - protein, 7 aa, synthetic construct
REQPRNQ

SEQ ID NO: 85486 - protein, 7 aa, synthetic construct
QNPNLEK

SEQ ID NO: 85487 - protein, 7 aa, synthetic construct
THPASSD

SEQ ID NO: 85488 - protein, 7 aa, synthetic construct
INTPPKD

SEQ ID NO: 85489 - protein, 7 aa, synthetic construct
PKQLTNQ

SEQ ID NO: 85490 - protein, 7 aa, synthetic construct
VDFRHEH

SEQ ID NO: 85491 - protein, 7 aa, synthetic construct
TDTVRHQ

SEQ ID NO: 85492 - protein, 7 aa, synthetic construct
LHGRLPT

SEQ ID NO: 85493 - protein, 7 aa, synthetic construct
NHETKEQ

SEQ ID NO: 85494 - protein, 7 aa, synthetic construct
QRQTGEQ

SEQ ID NO: 85495 - protein, 7 aa, synthetic construct
DNNRSMP

SEQ ID NO: 85496 - protein, 7 aa, synthetic construct
PPATRGN

SEQ ID NO: 85497 - protein, 7 aa, synthetic construct
KINFKEP

SEQ ID NO: 85498 - protein, 7 aa, synthetic construct
KNNVNVT

SEQ ID NO: 85499 - protein, 7 aa, synthetic construct
GHKSYQE

SEQ ID NO: 85500 - protein, 7 aa, synthetic construct
DQKNIQW

SEQ ID NO: 85501 - protein, 7 aa, synthetic construct
LLKPMAT

SEQ ID NO: 85502 - protein, 7 aa, synthetic construct
FPFAQNS

SEQ ID NO: 85503 - protein, 7 aa, synthetic construct
TKATPKD

SEQ ID NO: 85504 - protein, 7 aa, synthetic construct
RAAAENW

SEQ ID NO: 85505 - protein, 7 aa, synthetic construct
RGNPNIG

SEQ ID NO: 85506 - protein, 7 aa, synthetic construct
LRSENGA

SEQ ID NO: 85507 - protein, 7 aa, synthetic construct
HISDLKV

SEQ ID NO: 85508 - protein, 7 aa, synthetic construct
RLQHERP

SEQ ID NO: 85509 - protein, 7 aa, synthetic construct
ETGKRGP

SEQ ID NO: 85510 - protein, 7 aa, synthetic construct
MKTNMSA

SEQ ID NO: 85511 - protein, 7 aa, synthetic construct
YANQHHA

SEQ ID NO: 85512 - protein, 7 aa, synthetic construct
LTKDQAL

SEQ ID NO: 85513 - protein, 7 aa, synthetic construct
VGEWRND

SEQ ID NO: 85514 - protein, 7 aa, synthetic construct
DQQHREK

SEQ ID NO: 85515 - protein, 7 aa, synthetic construct
TFAYAKG

SEQ ID NO: 85516 - protein, 7 aa, synthetic construct
VEKKQQW

SEQ ID NO: 85517 - protein, 7 aa, synthetic construct
IMTQMTP

SEQ ID NO: 85518 - protein, 7 aa, synthetic construct
NIDVARN

SEQ ID NO: 85519 - protein, 7 aa, synthetic construct
IKLTPQA

SEQ ID NO: 85520 - protein, 7 aa, synthetic construct
SWGGRID

SEQ ID NO: 85521 - protein, 7 aa, synthetic construct
RQAPGVP

SEQ ID NO: 85522 - protein, 7 aa, synthetic construct
YGTVPGI

SEQ ID NO: 85523 - protein, 7 aa, synthetic construct
TYRNNIG

SEQ ID NO: 85524 - protein, 7 aa, synthetic construct
LLKHINS

SEQ ID NO: 85525 - protein, 7 aa, synthetic construct
KSDRGHV

SEQ ID NO: 85526 - protein, 7 aa, synthetic construct
TRSQTAV

SEQ ID NO: 85527 - protein, 7 aa, synthetic construct
HGTKAGP

SEQ ID NO: 85528 - protein, 7 aa, synthetic construct
YADKQVP

SEQ ID NO: 85529 - protein, 7 aa, synthetic construct
QNRSMSV

SEQ ID NO: 85530 - protein, 7 aa, synthetic construct
TLRDNMK

SEQ ID NO: 85531 - protein, 7 aa, synthetic construct
TFQSMAV

SEQ ID NO: 85532 - protein, 7 aa, synthetic construct
SHPMVSE

SEQ ID NO: 85533 - protein, 7 aa, synthetic construct
QPKAGLG

SEQ ID NO: 85534 - protein, 7 aa, synthetic construct
RVFADQP

SEQ ID NO: 85535 - protein, 7 aa, synthetic construct
GGVITKS

SEQ ID NO: 85536 - protein, 7 aa, synthetic construct
IKLISHA

SEQ ID NO: 85537 - protein, 7 aa, synthetic construct
YHNTMND

SEQ ID NO: 85538 - protein, 7 aa, synthetic construct
PKTQASP

SEQ ID NO: 85539 - protein, 7 aa, synthetic construct
EAVGGKE

SEQ ID NO: 85540 - protein, 7 aa, synthetic construct
SMQIPLT

SEQ ID NO: 85541 - protein, 7 aa, synthetic construct
KEPQFAQ

SEQ ID NO: 85542 - protein, 7 aa, synthetic construct
QTAHTVS

SEQ ID NO: 85543 - protein, 7 aa, synthetic construct
LPSVSTN

SEQ ID NO: 85544 - protein, 7 aa, synthetic construct
RPNGSSA

SEQ ID NO: 85545 - protein, 7 aa, synthetic construct
KHPEMQP

SEQ ID NO: 85546 - protein, 7 aa, synthetic construct
KDVHMIQ

SEQ ID NO: 85547 - protein, 7 aa, synthetic construct
GKQGIGG

SEQ ID NO: 85548 - protein, 7 aa, synthetic construct
MNTSRAA

SEQ ID NO: 85549 - protein, 7 aa, synthetic construct
PSKGGIT

SEQ ID NO: 85550 - protein, 7 aa, synthetic construct
LRHLGKD

SEQ ID NO: 85551 - protein, 7 aa, synthetic construct
GMLGFQP

SEQ ID NO: 85552 - protein, 7 aa, synthetic construct
ANKNDAG

SEQ ID NO: 85553 - protein, 7 aa, synthetic construct
RGENRVA

SEQ ID NO: 85554 - protein, 7 aa, synthetic construct
GTDPKSS

SEQ ID NO: 85555 - protein, 7 aa, synthetic construct
GKLPHIQ

SEQ ID NO: 85556 - protein, 7 aa, synthetic construct
HVPVAKQ

SEQ ID NO: 85557 - protein, 7 aa, synthetic construct
RNDHLSS

SEQ ID NO: 85558 - protein, 7 aa, synthetic construct
MRPQHAD

SEQ ID NO: 85559 - protein, 7 aa, synthetic construct
WAQQPSI

SEQ ID NO: 85560 - protein, 7 aa, synthetic construct
IRDGKPI

SEQ ID NO: 85561 - protein, 7 aa, synthetic construct
MPYDQMK

SEQ ID NO: 85562 - protein, 7 aa, synthetic construct
SPIPNIT

SEQ ID NO: 85563 - protein, 7 aa, synthetic construct
DWKPSYG

SEQ ID NO: 85564 - protein, 7 aa, synthetic construct
QHKGLMP

SEQ ID NO: 85565 - protein, 7 aa, synthetic construct
HMAHQKQ

SEQ ID NO: 85566 - protein, 7 aa, synthetic construct
HADRTMW

SEQ ID NO: 85567 - protein, 7 aa, synthetic construct
YAPQNQQ

SEQ ID NO: 85568 - protein, 7 aa, synthetic construct
VQSAQDR

SEQ ID NO: 85569 - protein, 7 aa, synthetic construct
STQDLPA

SEQ ID NO: 85570 - protein, 7 aa, synthetic construct
WAIGDDK

SEQ ID NO: 85571 - protein, 7 aa, synthetic construct
SREHIIT

SEQ ID NO: 85572 - protein, 7 aa, synthetic construct
RDKSVIA

SEQ ID NO: 85573 - protein, 7 aa, synthetic construct
YKQSQNG

SEQ ID NO: 85574 - protein, 7 aa, synthetic construct
IRPMNAM

SEQ ID NO: 85575 - protein, 7 aa, synthetic construct
LSINPPK

SEQ ID NO: 85576 - protein, 7 aa, synthetic construct
KQQASKD

SEQ ID NO: 85577 - protein, 7 aa, synthetic construct
GPNEPKW

SEQ ID NO: 85578 - protein, 7 aa, synthetic construct
VVKVRHE

SEQ ID NO: 85579 - protein, 7 aa, synthetic construct
GMLGIDR

SEQ ID NO: 85580 - protein, 7 aa, synthetic construct
LIGKFQS

SEQ ID NO: 85581 - protein, 7 aa, synthetic construct
AASNAHS

SEQ ID NO: 85582 - protein, 7 aa, synthetic construct
ARAEPWK

SEQ ID NO: 85583 - protein, 7 aa, synthetic construct
RTSSGAG

SEQ ID NO: 85584 - protein, 7 aa, synthetic construct
NSVERIS

SEQ ID NO: 85585 - protein, 7 aa, synthetic construct
LIQTLSP

SEQ ID NO: 85586 - protein, 7 aa, synthetic construct
NRSAEGQ

SEQ ID NO: 85587 - protein, 7 aa, synthetic construct
VAPDANL

SEQ ID NO: 85588 - protein, 7 aa, synthetic construct
QMKAPLY

SEQ ID NO: 85589 - protein, 7 aa, synthetic construct
SPVKPPW

SEQ ID NO: 85590 - protein, 7 aa, synthetic construct
QAVQESG

SEQ ID NO: 85591 - protein, 7 aa, synthetic construct
RQDGKTS

SEQ ID NO: 85592 - protein, 7 aa, synthetic construct
RYPQHDF

SEQ ID NO: 85593 - protein, 7 aa, synthetic construct
HAYPEAH

SEQ ID NO: 85594 - protein, 7 aa, synthetic construct
GKMPSQA

SEQ ID NO: 85595 - protein, 7 aa, synthetic construct
YPRDLPA

SEQ ID NO: 85596 - protein, 7 aa, synthetic construct
NSHQILP

SEQ ID NO: 85597 - protein, 7 aa, synthetic construct
NHQKGEY

SEQ ID NO: 85598 - protein, 7 aa, synthetic construct
AREDLVG

SEQ ID NO: 85599 - protein, 7 aa, synthetic construct
TKTHIHF

SEQ ID NO: 85600 - protein, 7 aa, synthetic construct
KTGKGDP

SEQ ID NO: 85601 - protein, 7 aa, synthetic construct
QRNLTNQ

SEQ ID NO: 85602 - protein, 7 aa, synthetic construct
EALMHRG

SEQ ID NO: 85603 - protein, 7 aa, synthetic construct
TKTTPVG

SEQ ID NO: 85604 - protein, 7 aa, synthetic construct
RPATMTD

SEQ ID NO: 85605 - protein, 7 aa, synthetic construct
KPPGTAP

SEQ ID NO: 85606 - protein, 7 aa, synthetic construct
NHKFQPQ

SEQ ID NO: 85607 - protein, 7 aa, synthetic construct
KYNGAPN

SEQ ID NO: 85608 - protein, 7 aa, synthetic construct
TKQTIAG

SEQ ID NO: 85609 - protein, 7 aa, synthetic construct
EPSAVTA

SEQ ID NO: 85610 - protein, 7 aa, synthetic construct
GFNRQLT

SEQ ID NO: 85611 - protein, 7 aa, synthetic construct
QGAIQIP

SEQ ID NO: 85612 - protein, 7 aa, synthetic construct
KMMHVQP

SEQ ID NO: 85613 - protein, 7 aa, synthetic construct
LLETRMS

SEQ ID NO: 85614 - protein, 7 aa, synthetic construct
PQTQPKT

SEQ ID NO: 85615 - protein, 7 aa, synthetic construct
EHQNRAV

SEQ ID NO: 85616 - protein, 7 aa, synthetic construct
VATRLIA

SEQ ID NO: 85617 - protein, 7 aa, synthetic construct
HDGGTYS

SEQ ID NO: 85618 - protein, 7 aa, synthetic construct
TGYQRID

SEQ ID NO: 85619 - protein, 7 aa, synthetic construct
KTTAVDM

SEQ ID NO: 85620 - protein, 7 aa, synthetic construct
SMDSSSP

SEQ ID NO: 85621 - protein, 7 aa, synthetic construct
YVPIEAT

SEQ ID NO: 85622 - protein, 7 aa, synthetic construct
SKGMPQV

SEQ ID NO: 85623 - protein, 7 aa, synthetic construct
LRPAVVN

SEQ ID NO: 85624 - protein, 7 aa, synthetic construct
MHIKDLR

SEQ ID NO: 85625 - protein, 7 aa, synthetic construct
GKTSVKD

SEQ ID NO: 85626 - protein, 7 aa, synthetic construct
HVGIGGA

SEQ ID NO: 85627 - protein, 7 aa, synthetic construct
DRYLQKD

SEQ ID NO: 85628 - protein, 7 aa, synthetic construct
PNPVATT

SEQ ID NO: 85629 - protein, 7 aa, synthetic construct
QNRTEYP

SEQ ID NO: 85630 - protein, 7 aa, synthetic construct
DAQMEKR

SEQ ID NO: 85631 - protein, 7 aa, synthetic construct
IAGLKNP

SEQ ID NO: 85632 - protein, 7 aa, synthetic construct
GTTNQRQ

SEQ ID NO: 85633 - protein, 7 aa, synthetic construct
SGGLPDK

SEQ ID NO: 85634 - protein, 7 aa, synthetic construct
LLAPNQD

SEQ ID NO: 85635 - protein, 7 aa, synthetic construct
RVQREGH

SEQ ID NO: 85636 - protein, 7 aa, synthetic construct
QQQKQAQ

SEQ ID NO: 85637 - protein, 7 aa, synthetic construct
HGSNWVS

SEQ ID NO: 85638 - protein, 7 aa, synthetic construct
TVWEQNK

SEQ ID NO: 85639 - protein, 7 aa, synthetic construct
LEEKHYR

SEQ ID NO: 85640 - protein, 7 aa, synthetic construct
VNAGQRF

SEQ ID NO: 85641 - protein, 7 aa, synthetic construct
TNVHQHD

SEQ ID NO: 85642 - protein, 7 aa, synthetic construct
VKYPHGV

SEQ ID NO: 85643 - protein, 7 aa, synthetic construct
LGKIPIP

SEQ ID NO: 85644 - protein, 7 aa, synthetic construct
WGEAKPY

SEQ ID NO: 85645 - protein, 7 aa, synthetic construct
SEFAYKP

SEQ ID NO: 85646 - protein, 7 aa, synthetic construct
YSTQHMD

SEQ ID NO: 85647 - protein, 7 aa, synthetic construct
VVPGNDK

SEQ ID NO: 85648 - protein, 7 aa, synthetic construct
INIAERV

SEQ ID NO: 85649 - protein, 7 aa, synthetic construct
MHFRPQD

SEQ ID NO: 85650 - protein, 7 aa, synthetic construct
SSQNHIM

SEQ ID NO: 85651 - protein, 7 aa, synthetic construct
KTETKGG

SEQ ID NO: 85652 - protein, 7 aa, synthetic construct
AISPQGK

SEQ ID NO: 85653 - protein, 7 aa, synthetic construct
NITHRAQ

SEQ ID NO: 85654 - protein, 7 aa, synthetic construct
QSTRPDK

SEQ ID NO: 85655 - protein, 7 aa, synthetic construct
KMQDNLA

SEQ ID NO: 85656 - protein, 7 aa, synthetic construct
WPMLTSD

SEQ ID NO: 85657 - protein, 7 aa, synthetic construct
SHHTKED

SEQ ID NO: 85658 - protein, 7 aa, synthetic construct
RNEMAPN

SEQ ID NO: 85659 - protein, 7 aa, synthetic construct
TARQNVP

SEQ ID NO: 85660 - protein, 7 aa, synthetic construct
DHQGHQM

SEQ ID NO: 85661 - protein, 7 aa, synthetic construct
IFGSGQK

SEQ ID NO: 85662 - protein, 7 aa, synthetic construct
EWNASKD

SEQ ID NO: 85663 - protein, 7 aa, synthetic construct
FVREYNS

SEQ ID NO: 85664 - protein, 7 aa, synthetic construct
MPHKTEA

SEQ ID NO: 85665 - protein, 7 aa, synthetic construct
FGHIKVI

SEQ ID NO: 85666 - protein, 7 aa, synthetic construct
YKGGQEG

SEQ ID NO: 85667 - protein, 7 aa, synthetic construct
NYIKEVP

SEQ ID NO: 85668 - protein, 7 aa, synthetic construct
MQINALA

SEQ ID NO: 85669 - protein, 7 aa, synthetic construct
HSKASDQ

SEQ ID NO: 85670 - protein, 7 aa, synthetic construct
AQLKVGP

SEQ ID NO: 85671 - protein, 7 aa, synthetic construct
VRAYANQ

SEQ ID NO: 85672 - protein, 7 aa, synthetic construct
RGLGQDA

SEQ ID NO: 85673 - protein, 7 aa, synthetic construct
AILVREN

SEQ ID NO: 85674 - protein, 7 aa, synthetic construct
YFDQRKN

SEQ ID NO: 85675 - protein, 7 aa, synthetic construct
FTVPRHP

SEQ ID NO: 85676 - protein, 7 aa, synthetic construct
PGQEMRA

SEQ ID NO: 85677 - protein, 7 aa, synthetic construct
SVTPAIP

SEQ ID NO: 85678 - protein, 7 aa, synthetic construct
HDNKQYS

SEQ ID NO: 85679 - protein, 7 aa, synthetic construct
LQNQPNK

SEQ ID NO: 85680 - protein, 7 aa, synthetic construct
GHRTLEA

SEQ ID NO: 85681 - protein, 7 aa, synthetic construct
EHQTGHV

SEQ ID NO: 85682 - protein, 7 aa, synthetic construct
DSSSHAH

SEQ ID NO: 85683 - protein, 7 aa, synthetic construct
KRDDQNM

SEQ ID NO: 85684 - protein, 7 aa, synthetic construct
QLNLSNK

SEQ ID NO: 85685 - protein, 7 aa, synthetic construct
FAHLQMP

SEQ ID NO: 85686 - protein, 7 aa, synthetic construct
NVTGIVH

SEQ ID NO: 85687 - protein, 7 aa, synthetic construct
RQAEGSN

SEQ ID NO: 85688 - protein, 7 aa, synthetic construct
FMSAMPQ

SEQ ID NO: 85689 - protein, 7 aa, synthetic construct
RSGPNTG

SEQ ID NO: 85690 - protein, 7 aa, synthetic construct
TDTSTVT

SEQ ID NO: 85691 - protein, 7 aa, synthetic construct
LHQHKYA

SEQ ID NO: 85692 - protein, 7 aa, synthetic construct
GQGKGEE

SEQ ID NO: 85693 - protein, 7 aa, synthetic construct
TQERTPK

SEQ ID NO: 85694 - protein, 7 aa, synthetic construct
NQSTRIP

SEQ ID NO: 85695 - protein, 7 aa, synthetic construct
ANLAKVM

SEQ ID NO: 85696 - protein, 7 aa, synthetic construct
DRTESKE

SEQ ID NO: 85697 - protein, 7 aa, synthetic construct
FQDHHFA

SEQ ID NO: 85698 - protein, 7 aa, synthetic construct
DEWEKMP

SEQ ID NO: 85699 - protein, 7 aa, synthetic construct
FVSPNRH

SEQ ID NO: 85700 - protein, 7 aa, synthetic construct
FELLAKG

SEQ ID NO: 85701 - protein, 7 aa, synthetic construct
SSASHNR

SEQ ID NO: 85702 - protein, 7 aa, synthetic construct
SPKSTQN

SEQ ID NO: 85703 - protein, 7 aa, synthetic construct
TEPSRRS

SEQ ID NO: 85704 - protein, 7 aa, synthetic construct
NSPSKNG

SEQ ID NO: 85705 - protein, 7 aa, synthetic construct
KTVHGTG

SEQ ID NO: 85706 - protein, 7 aa, synthetic construct
QPGYRIQ

SEQ ID NO: 85707 - protein, 7 aa, synthetic construct
KWTAEGL

SEQ ID NO: 85708 - protein, 7 aa, synthetic construct
PERPHDA

SEQ ID NO: 85709 - protein, 7 aa, synthetic construct
MDTLRHT

SEQ ID NO: 85710 - protein, 7 aa, synthetic construct
HKHVMEL

SEQ ID NO: 85711 - protein, 7 aa, synthetic construct
VNSPEGP

SEQ ID NO: 85712 - protein, 7 aa, synthetic construct
TDAFVRD

SEQ ID NO: 85713 - protein, 7 aa, synthetic construct
FRRELNA

SEQ ID NO: 85714 - protein, 7 aa, synthetic construct
ENKNEMV

SEQ ID NO: 85715 - protein, 7 aa, synthetic construct
SYDHHMK

SEQ ID NO: 85716 - protein, 7 aa, synthetic construct
RPDPSMS

SEQ ID NO: 85717 - protein, 7 aa, synthetic construct
IIHATGA

SEQ ID NO: 85718 - protein, 7 aa, synthetic construct
KTVNQKD

SEQ ID NO: 85719 - protein, 7 aa, synthetic construct
MAPDRMA

SEQ ID NO: 85720 - protein, 7 aa, synthetic construct
RYHDHDL

SEQ ID NO: 85721 - protein, 7 aa, synthetic construct
IHTKPQD

SEQ ID NO: 85722 - protein, 7 aa, synthetic construct
DKVAFSV

SEQ ID NO: 85723 - protein, 7 aa, synthetic construct
RNGSNTP

SEQ ID NO: 85724 - protein, 7 aa, synthetic construct
KTKETNS

SEQ ID NO: 85725 - protein, 7 aa, synthetic construct
IGDKMDR

SEQ ID NO: 85726 - protein, 7 aa, synthetic construct
FRESKPS

SEQ ID NO: 85727 - protein, 7 aa, synthetic construct
GSRDAFA

SEQ ID NO: 85728 - protein, 7 aa, synthetic construct
SRNMNDD

SEQ ID NO: 85729 - protein, 7 aa, synthetic construct
GMNVTMK

SEQ ID NO: 85730 - protein, 7 aa, synthetic construct
NRLPDEE

SEQ ID NO: 85731 - protein, 7 aa, synthetic construct
SRPNMQP

SEQ ID NO: 85732 - protein, 7 aa, synthetic construct
RGQSTYD

SEQ ID NO: 85733 - protein, 7 aa, synthetic construct
VTDRNQT

SEQ ID NO: 85734 - protein, 7 aa, synthetic construct
YEHEKGS

SEQ ID NO: 85735 - protein, 7 aa, synthetic construct
HPSSAAH

SEQ ID NO: 85736 - protein, 7 aa, synthetic construct
AVESRPM

SEQ ID NO: 85737 - protein, 7 aa, synthetic construct
GVMHSLD

SEQ ID NO: 85738 - protein, 7 aa, synthetic construct
SIRPPYN

SEQ ID NO: 85739 - protein, 7 aa, synthetic construct
AVPFKDQ

SEQ ID NO: 85740 - protein, 7 aa, synthetic construct
GQKIHDT

SEQ ID NO: 85741 - protein, 7 aa, synthetic construct
PGLKTEP

SEQ ID NO: 85742 - protein, 7 aa, synthetic construct
IDKQQQW

SEQ ID NO: 85743 - protein, 7 aa, synthetic construct
VRDFHEH

SEQ ID NO: 85744 - protein, 7 aa, synthetic construct
GIKVHTP

SEQ ID NO: 85745 - protein, 7 aa, synthetic construct
SPAKVPM

SEQ ID NO: 85746 - protein, 7 aa, synthetic construct
PQGNLTV

SEQ ID NO: 85747 - protein, 7 aa, synthetic construct
TSPKVVV

SEQ ID NO: 85748 - protein, 7 aa, synthetic construct
HIHAPAI

SEQ ID NO: 85749 - protein, 7 aa, synthetic construct
MPGGGVV

SEQ ID NO: 85750 - protein, 7 aa, synthetic construct
FNTLTKV

SEQ ID NO: 85751 - protein, 7 aa, synthetic construct
AVLKSFG

SEQ ID NO: 85752 - protein, 7 aa, synthetic construct
PEHHAGL

SEQ ID NO: 85753 - protein, 7 aa, synthetic construct
RENASNQ

SEQ ID NO: 85754 - protein, 7 aa, synthetic construct
VVDSHPF

SEQ ID NO: 85755 - protein, 7 aa, synthetic construct
GPERNKA

SEQ ID NO: 85756 - protein, 7 aa, synthetic construct
MNKGKDM

SEQ ID NO: 85757 - protein, 7 aa, synthetic construct
SGHSMLA

SEQ ID NO: 85758 - protein, 7 aa, synthetic construct
YTKPSYG

SEQ ID NO: 85759 - protein, 7 aa, synthetic construct
PQKASMH

SEQ ID NO: 85760 - protein, 7 aa, synthetic construct
NLGHSSH

SEQ ID NO: 85761 - protein, 7 aa, synthetic construct
DKWDMAG

SEQ ID NO: 85762 - protein, 7 aa, synthetic construct
GDKYGRA

SEQ ID NO: 85763 - protein, 7 aa, synthetic construct
LNNQGRM

SEQ ID NO: 85764 - protein, 7 aa, synthetic construct
TLDHRMY

SEQ ID NO: 85765 - protein, 7 aa, synthetic construct
NSNQALL

SEQ ID NO: 85766 - protein, 7 aa, synthetic construct
YNQGLIA

SEQ ID NO: 85767 - protein, 7 aa, synthetic construct
PGKMDYP

SEQ ID NO: 85768 - protein, 7 aa, synthetic construct
KGWKSEE

SEQ ID NO: 85769 - protein, 7 aa, synthetic construct
ALHGTLP

SEQ ID NO: 85770 - protein, 7 aa, synthetic construct
DARNAGS

SEQ ID NO: 85771 - protein, 7 aa, synthetic construct
TTHSHTD

SEQ ID NO: 85772 - protein, 7 aa, synthetic construct
KKDPYKD

SEQ ID NO: 85773 - protein, 7 aa, synthetic construct
RFKQEGY

SEQ ID NO: 85774 - protein, 7 aa, synthetic construct
PRDSNNS

SEQ ID NO: 85775 - protein, 7 aa, synthetic construct
GVRQVNA

SEQ ID NO: 85776 - protein, 7 aa, synthetic construct
MSFAKIE

SEQ ID NO: 85777 - protein, 7 aa, synthetic construct
FADTKAD

SEQ ID NO: 85778 - protein, 7 aa, synthetic construct
KTNMMSN

SEQ ID NO: 85779 - protein, 7 aa, synthetic construct
NHQNPAM

SEQ ID NO: 85780 - protein, 7 aa, synthetic construct
EQHKNMR

SEQ ID NO: 85781 - protein, 7 aa, synthetic construct
WQARGEM

SEQ ID NO: 85782 - protein, 7 aa, synthetic construct
EKPNISS

SEQ ID NO: 85783 - protein, 7 aa, synthetic construct
FSQRENM

SEQ ID NO: 85784 - protein, 7 aa, synthetic construct
SMNHPTL

SEQ ID NO: 85785 - protein, 7 aa, synthetic construct
HMPAHST

SEQ ID NO: 85786 - protein, 7 aa, synthetic construct
SQYMAPA

SEQ ID NO: 85787 - protein, 7 aa, synthetic construct
QWELAKS

SEQ ID NO: 85788 - protein, 7 aa, synthetic construct
HELKLAT

SEQ ID NO: 85789 - protein, 7 aa, synthetic construct
DPNYNKS

SEQ ID NO: 85790 - protein, 7 aa, synthetic construct
SNEAFGY

SEQ ID NO: 85791 - protein, 7 aa, synthetic construct
RGTHIQD

SEQ ID NO: 85792 - protein, 7 aa, synthetic construct
SQHQGRH

SEQ ID NO: 85793 - protein, 7 aa, synthetic construct
RELQPDH

SEQ ID NO: 85794 - protein, 7 aa, synthetic construct
EDKTATK

SEQ ID NO: 85795 - protein, 7 aa, synthetic construct
RPTASQS

SEQ ID NO: 85796 - protein, 7 aa, synthetic construct
IVVQRDI

SEQ ID NO: 85797 - protein, 7 aa, synthetic construct
AQKNQMS

SEQ ID NO: 85798 - protein, 7 aa, synthetic construct
ANNTFPV

SEQ ID NO: 85799 - protein, 7 aa, synthetic construct
GDNRWAG

SEQ ID NO: 85800 - protein, 7 aa, synthetic construct
FMHKPAA

SEQ ID NO: 85801 - protein, 7 aa, synthetic construct
KPERFDR

SEQ ID NO: 85802 - protein, 7 aa, synthetic construct
LKDNWPD

SEQ ID NO: 85803 - protein, 7 aa, synthetic construct
VLHSRQN

SEQ ID NO: 85804 - protein, 7 aa, synthetic construct
RLGPTDE

SEQ ID NO: 85805 - protein, 7 aa, synthetic construct
PGQTWQK

SEQ ID NO: 85806 - protein, 7 aa, synthetic construct
KMHQFEM

SEQ ID NO: 85807 - protein, 7 aa, synthetic construct
VKVDTVI

SEQ ID NO: 85808 - protein, 7 aa, synthetic construct
RVTNPLT

SEQ ID NO: 85809 - protein, 7 aa, synthetic construct
HHRTVPV

SEQ ID NO: 85810 - protein, 7 aa, synthetic construct
LYQNEAM

SEQ ID NO: 85811 - protein, 7 aa, synthetic construct
SDRFGMK

SEQ ID NO: 85812 - protein, 7 aa, synthetic construct
LNQTSSE

SEQ ID NO: 85813 - protein, 7 aa, synthetic construct
SMYMHNP

SEQ ID NO: 85814 - protein, 7 aa, synthetic construct
LQDSKMP

SEQ ID NO: 85815 - protein, 7 aa, synthetic construct
QGGQTIF

SEQ ID NO: 85816 - protein, 7 aa, synthetic construct
QAQRMST

SEQ ID NO: 85817 - protein, 7 aa, synthetic construct
HSDAFRK

SEQ ID NO: 85818 - protein, 7 aa, synthetic construct
LETGGGK

SEQ ID NO: 85819 - protein, 7 aa, synthetic construct
MGMEAHG

SEQ ID NO: 85820 - protein, 7 aa, synthetic construct
TDRAMRI

SEQ ID NO: 85821 - protein, 7 aa, synthetic construct
NTIYRME

SEQ ID NO: 85822 - protein, 7 aa, synthetic construct
NNQWHED

SEQ ID NO: 85823 - protein, 7 aa, synthetic construct
YPNAKIQ

SEQ ID NO: 85824 - protein, 7 aa, synthetic construct
TVKPGTM

SEQ ID NO: 85825 - protein, 7 aa, synthetic construct
NRKVDQP

SEQ ID NO: 85826 - protein, 7 aa, synthetic construct
SFNNNTD

SEQ ID NO: 85827 - protein, 7 aa, synthetic construct
NARGAMG

SEQ ID NO: 85828 - protein, 7 aa, synthetic construct
ANTNDGP

SEQ ID NO: 85829 - protein, 7 aa, synthetic construct
GHGAWAS

SEQ ID NO: 85830 - protein, 7 aa, synthetic construct
NNSHAIL

SEQ ID NO: 85831 - protein, 7 aa, synthetic construct
TRNFALQ

SEQ ID NO: 85832 - protein, 7 aa, synthetic construct
PYKEIQI

SEQ ID NO: 85833 - protein, 7 aa, synthetic construct
NVKSNSP

SEQ ID NO: 85834 - protein, 7 aa, synthetic construct
GIYQNQA

SEQ ID NO: 85835 - protein, 7 aa, synthetic construct
MMPPWDE

SEQ ID NO: 85836 - protein, 7 aa, synthetic construct
TGQQVAE

SEQ ID NO: 85837 - protein, 7 aa, synthetic construct
TNTRQGA

SEQ ID NO: 85838 - protein, 7 aa, synthetic construct
RTNTTED

SEQ ID NO: 85839 - protein, 7 aa, synthetic construct
TSDFQSA

SEQ ID NO: 85840 - protein, 7 aa, synthetic construct
SKDKVSS

SEQ ID NO: 85841 - protein, 7 aa, synthetic construct
WTKWKDA

SEQ ID NO: 85842 - protein, 7 aa, synthetic construct
LGAAHYA

SEQ ID NO: 85843 - protein, 7 aa, synthetic construct
NHPHKHM

SEQ ID NO: 85844 - protein, 7 aa, synthetic construct
EAMSIAR

SEQ ID NO: 85845 - protein, 7 aa, synthetic construct
GELKKVN

SEQ ID NO: 85846 - protein, 7 aa, synthetic construct
GVKMVRD

SEQ ID NO: 85847 - protein, 7 aa, synthetic construct
KAQPVGT

SEQ ID NO: 85848 - protein, 7 aa, synthetic construct
NLKPQVL

SEQ ID NO: 85849 - protein, 7 aa, synthetic construct
RMNTGVG

SEQ ID NO: 85850 - protein, 7 aa, synthetic construct
HQRIETT

SEQ ID NO: 85851 - protein, 7 aa, synthetic construct
NNGLQSH

SEQ ID NO: 85852 - protein, 7 aa, synthetic construct
INPVLVD

SEQ ID NO: 85853 - protein, 7 aa, synthetic construct
PKSSTGS

SEQ ID NO: 85854 - protein, 7 aa, synthetic construct
IKQIGQH

SEQ ID NO: 85855 - protein, 7 aa, synthetic construct
HHEKLKD

SEQ ID NO: 85856 - protein, 7 aa, synthetic construct
NREKFQM

SEQ ID NO: 85857 - protein, 7 aa, synthetic construct
IGSSASA

SEQ ID NO: 85858 - protein, 7 aa, synthetic construct
GQYAEQK

SEQ ID NO: 85859 - protein, 7 aa, synthetic construct
FQASGLI

SEQ ID NO: 85860 - protein, 7 aa, synthetic construct
GLQSHGH

SEQ ID NO: 85861 - protein, 7 aa, synthetic construct
ITKDPLL

SEQ ID NO: 85862 - protein, 7 aa, synthetic construct
NRVVEHQ

SEQ ID NO: 85863 - protein, 7 aa, synthetic construct
WVNARNE

SEQ ID NO: 85864 - protein, 7 aa, synthetic construct
WVGADTK

SEQ ID NO: 85865 - protein, 7 aa, synthetic construct
WAHQIHE

SEQ ID NO: 85866 - protein, 7 aa, synthetic construct
LVGMGGK

SEQ ID NO: 85867 - protein, 7 aa, synthetic construct
DSHGKVH

SEQ ID NO: 85868 - protein, 7 aa, synthetic construct
LRKGAPD

SEQ ID NO: 85869 - protein, 7 aa, synthetic construct
DPHTKHY

SEQ ID NO: 85870 - protein, 7 aa, synthetic construct
TKTGQQG

SEQ ID NO: 85871 - protein, 7 aa, synthetic construct
WTNQPHP

SEQ ID NO: 85872 - protein, 7 aa, synthetic construct
RDNKAEA

SEQ ID NO: 85873 - protein, 7 aa, synthetic construct
AQSNGQG

SEQ ID NO: 85874 - protein, 7 aa, synthetic construct
TTMHSGN

SEQ ID NO: 85875 - protein, 7 aa, synthetic construct
HGDIRQH

SEQ ID NO: 85876 - protein, 7 aa, synthetic construct
EHKSGII

SEQ ID NO: 85877 - protein, 7 aa, synthetic construct
DLTAVRM

SEQ ID NO: 85878 - protein, 7 aa, synthetic construct
EIKGAFS

SEQ ID NO: 85879 - protein, 7 aa, synthetic construct
DRGYGNV

SEQ ID NO: 85880 - protein, 7 aa, synthetic construct
RKGDSLP

SEQ ID NO: 85881 - protein, 7 aa, synthetic construct
WMRTISP

SEQ ID NO: 85882 - protein, 7 aa, synthetic construct
EQTMPKS

SEQ ID NO: 85883 - protein, 7 aa, synthetic construct
IMARQQI

SEQ ID NO: 85884 - protein, 7 aa, synthetic construct
IMVHSVP

SEQ ID NO: 85885 - protein, 7 aa, synthetic construct
KPQQSYT

SEQ ID NO: 85886 - protein, 7 aa, synthetic construct
MNNNAIA

SEQ ID NO: 85887 - protein, 7 aa, synthetic construct
YPRHDIM

SEQ ID NO: 85888 - protein, 7 aa, synthetic construct
MVKLMDP

SEQ ID NO: 85889 - protein, 7 aa, synthetic construct
SNEQIAK

SEQ ID NO: 85890 - protein, 7 aa, synthetic construct
RHFNTED

SEQ ID NO: 85891 - protein, 7 aa, synthetic construct
FRQNVSH

SEQ ID NO: 85892 - protein, 7 aa, synthetic construct
TSKSSVL

SEQ ID NO: 85893 - protein, 7 aa, synthetic construct
MTSPSKG

SEQ ID NO: 85894 - protein, 7 aa, synthetic construct
AKGASAY

SEQ ID NO: 85895 - protein, 7 aa, synthetic construct
EKWRGDS

SEQ ID NO: 85896 - protein, 7 aa, synthetic construct
RDNHNGH

SEQ ID NO: 85897 - protein, 7 aa, synthetic construct
HEISSKT

SEQ ID NO: 85898 - protein, 7 aa, synthetic construct
MIKIDGR

SEQ ID NO: 85899 - protein, 7 aa, synthetic construct
QHTMKAG

SEQ ID NO: 85900 - protein, 7 aa, synthetic construct
YSANGNK

SEQ ID NO: 85901 - protein, 7 aa, synthetic construct
KTPQNRD

SEQ ID NO: 85902 - protein, 7 aa, synthetic construct
NAGSGTY

SEQ ID NO: 85903 - protein, 7 aa, synthetic construct
YASMEKF

SEQ ID NO: 85904 - protein, 7 aa, synthetic construct
SRAEERS

SEQ ID NO: 85905 - protein, 7 aa, synthetic construct
NHYGAPA

SEQ ID NO: 85906 - protein, 7 aa, synthetic construct
QGKYDEA

SEQ ID NO: 85907 - protein, 7 aa, synthetic construct
AVQNRNN

SEQ ID NO: 85908 - protein, 7 aa, synthetic construct
GTATIQS

SEQ ID NO: 85909 - protein, 7 aa, synthetic construct
AMKAPTN

SEQ ID NO: 85910 - protein, 7 aa, synthetic construct
KTSSTVP

SEQ ID NO: 85911 - protein, 7 aa, synthetic construct
LPNPDRH

SEQ ID NO: 85912 - protein, 7 aa, synthetic construct
MVGQKVT

SEQ ID NO: 85913 - protein, 7 aa, synthetic construct
MQQRHTP

SEQ ID NO: 85914 - protein, 7 aa, synthetic construct
NLSTNSY

SEQ ID NO: 85915 - protein, 7 aa, synthetic construct
QRLSLTA

SEQ ID NO: 85916 - protein, 7 aa, synthetic construct
HDNHSLQ

SEQ ID NO: 85917 - protein, 7 aa, synthetic construct
GFPHDQR

SEQ ID NO: 85918 - protein, 7 aa, synthetic construct
QNKYINQ

SEQ ID NO: 85919 - protein, 7 aa, synthetic construct
SPHTQVL

SEQ ID NO: 85920 - protein, 7 aa, synthetic construct
AIFKDRS

SEQ ID NO: 85921 - protein, 7 aa, synthetic construct
TSSTGKG

SEQ ID NO: 85922 - protein, 7 aa, synthetic construct
SMVHVDG

SEQ ID NO: 85923 - protein, 7 aa, synthetic construct
KEKVNIT

SEQ ID NO: 85924 - protein, 7 aa, synthetic construct
EGKFMVI

SEQ ID NO: 85925 - protein, 7 aa, synthetic construct
RTEAQHQ

SEQ ID NO: 85926 - protein, 7 aa, synthetic construct
QHMAKTA

SEQ ID NO: 85927 - protein, 7 aa, synthetic construct
PVREHQY

SEQ ID NO: 85928 - protein, 7 aa, synthetic construct
THQDAPM

SEQ ID NO: 85929 - protein, 7 aa, synthetic construct
VVQQYAS

SEQ ID NO: 85930 - protein, 7 aa, synthetic construct
YSRTKDD

SEQ ID NO: 85931 - protein, 7 aa, synthetic construct
DFHSKSD

SEQ ID NO: 85932 - protein, 7 aa, synthetic construct
CGKIGPA

SEQ ID NO: 85933 - protein, 7 aa, synthetic construct
YHDGPSL

SEQ ID NO: 85934 - protein, 7 aa, synthetic construct
VDGSRLF

SEQ ID NO: 85935 - protein, 7 aa, synthetic construct
YNGKNTA

SEQ ID NO: 85936 - protein, 7 aa, synthetic construct
HSQLRSP

SEQ ID NO: 85937 - protein, 7 aa, synthetic construct
LKMSPEW

SEQ ID NO: 85938 - protein, 7 aa, synthetic construct
LKKEVNQ

SEQ ID NO: 85939 - protein, 7 aa, synthetic construct
WRVNQTN

SEQ ID NO: 85940 - protein, 7 aa, synthetic construct
MANEMSR

SEQ ID NO: 85941 - protein, 7 aa, synthetic construct
LTIMRNS

SEQ ID NO: 85942 - protein, 7 aa, synthetic construct
KNAQAKE

SEQ ID NO: 85943 - protein, 7 aa, synthetic construct
FIEGTKN

SEQ ID NO: 85944 - protein, 7 aa, synthetic construct
KYELQIA

SEQ ID NO: 85945 - protein, 7 aa, synthetic construct
PQFPQPN

SEQ ID NO: 85946 - protein, 7 aa, synthetic construct
ITMKPEH

SEQ ID NO: 85947 - protein, 7 aa, synthetic construct
SEKQVNL

SEQ ID NO: 85948 - protein, 7 aa, synthetic construct
GQSFIVA

SEQ ID NO: 85949 - protein, 7 aa, synthetic construct
DDKQNIG

SEQ ID NO: 85950 - protein, 7 aa, synthetic construct
PIGKYEP

SEQ ID NO: 85951 - protein, 7 aa, synthetic construct
YYVNGEP

SEQ ID NO: 85952 - protein, 7 aa, synthetic construct
PQHREKT

SEQ ID NO: 85953 - protein, 7 aa, synthetic construct
QAEVRHM

SEQ ID NO: 85954 - protein, 7 aa, synthetic construct
RLERSLH

SEQ ID NO: 85955 - protein, 7 aa, synthetic construct
QTGHNVI

SEQ ID NO: 85956 - protein, 7 aa, synthetic construct
LQDIFKP

SEQ ID NO: 85957 - protein, 7 aa, synthetic construct
PSTAHTE

SEQ ID NO: 85958 - protein, 7 aa, synthetic construct
LATAANN

SEQ ID NO: 85959 - protein, 7 aa, synthetic construct
DKFASRI

SEQ ID NO: 85960 - protein, 7 aa, synthetic construct
IKMQTDF

SEQ ID NO: 85961 - protein, 7 aa, synthetic construct
TPTRDSI

SEQ ID NO: 85962 - protein, 7 aa, synthetic construct
MEKTILQ

SEQ ID NO: 85963 - protein, 7 aa, synthetic construct
QAPAVLN

SEQ ID NO: 85964 - protein, 7 aa, synthetic construct
EVHINQP

SEQ ID NO: 85965 - protein, 7 aa, synthetic construct
PGKLLAD

SEQ ID NO: 85966 - protein, 7 aa, synthetic construct
EETNKFA

SEQ ID NO: 85967 - protein, 7 aa, synthetic construct
EMRHLTK

SEQ ID NO: 85968 - protein, 7 aa, synthetic construct
WQMPHSS

SEQ ID NO: 85969 - protein, 7 aa, synthetic construct
HVKGRME

SEQ ID NO: 85970 - protein, 7 aa, synthetic construct
FDIKRQH

SEQ ID NO: 85971 - protein, 7 aa, synthetic construct
YNNNASG

SEQ ID NO: 85972 - protein, 7 aa, synthetic construct
NSGPQKM

SEQ ID NO: 85973 - protein, 7 aa, synthetic construct
TVLPQPM

SEQ ID NO: 85974 - protein, 7 aa, synthetic construct
TTPFGNA

SEQ ID NO: 85975 - protein, 7 aa, synthetic construct
ELKHDMG

SEQ ID NO: 85976 - protein, 7 aa, synthetic construct
SIPQMEG

SEQ ID NO: 85977 - protein, 7 aa, synthetic construct
RVAAHPH

SEQ ID NO: 85978 - protein, 7 aa, synthetic construct
WPMGATM

SEQ ID NO: 85979 - protein, 7 aa, synthetic construct
VQMAKGP

SEQ ID NO: 85980 - protein, 7 aa, synthetic construct
LGTQSYN

SEQ ID NO: 85981 - protein, 7 aa, synthetic construct
IKVNNLM

SEQ ID NO: 85982 - protein, 7 aa, synthetic construct
LVNEMAT

SEQ ID NO: 85983 - protein, 7 aa, synthetic construct
YGAKTNA

SEQ ID NO: 85984 - protein, 7 aa, synthetic construct
MMSQHHA

SEQ ID NO: 85985 - protein, 7 aa, synthetic construct
TDARSQI

SEQ ID NO: 85986 - protein, 7 aa, synthetic construct
SPVGKAH

SEQ ID NO: 85987 - protein, 7 aa, synthetic construct
MIHNIAS

SEQ ID NO: 85988 - protein, 7 aa, synthetic construct
ATGKWPQ

SEQ ID NO: 85989 - protein, 7 aa, synthetic construct
LSMNNHV

SEQ ID NO: 85990 - protein, 7 aa, synthetic construct
VPKESPH

SEQ ID NO: 85991 - protein, 7 aa, synthetic construct
IGYPTQV

SEQ ID NO: 85992 - protein, 7 aa, synthetic construct
KPSSSGP

SEQ ID NO: 85993 - protein, 7 aa, synthetic construct
GFAVATG

SEQ ID NO: 85994 - protein, 7 aa, synthetic construct
KATQSGS

SEQ ID NO: 85995 - protein, 7 aa, synthetic construct
IPQMDRN

SEQ ID NO: 85996 - protein, 7 aa, synthetic construct
VGHAVDP

SEQ ID NO: 85997 - protein, 7 aa, synthetic construct
KWTGESS

SEQ ID NO: 85998 - protein, 7 aa, synthetic construct
TKGGEMS

SEQ ID NO: 85999 - protein, 7 aa, synthetic construct
KVSHMLP

SEQ ID NO: 86000 - protein, 7 aa, synthetic construct
SQRPYAE

SEQ ID NO: 86001 - protein, 7 aa, synthetic construct
ERAATSQ

SEQ ID NO: 86002 - protein, 7 aa, synthetic construct
RAPEGHG

SEQ ID NO: 86003 - protein, 7 aa, synthetic construct
RPKEEYA

SEQ ID NO: 86004 - protein, 7 aa, synthetic construct
PASKEGW

SEQ ID NO: 86005 - protein, 7 aa, synthetic construct
QWQDMGA

SEQ ID NO: 86006 - protein, 7 aa, synthetic construct
VRKAADI

SEQ ID NO: 86007 - protein, 7 aa, synthetic construct
SGQIMTR

SEQ ID NO: 86008 - protein, 7 aa, synthetic construct
MRSTTQP

SEQ ID NO: 86009 - protein, 7 aa, synthetic construct
GDKYEQS

SEQ ID NO: 86010 - protein, 7 aa, synthetic construct
TSYVNTL

SEQ ID NO: 86011 - protein, 7 aa, synthetic construct
YRDKHHI

SEQ ID NO: 86012 - protein, 7 aa, synthetic construct
AKAIIVN

SEQ ID NO: 86013 - protein, 7 aa, synthetic construct
PNVTSNA

SEQ ID NO: 86014 - protein, 7 aa, synthetic construct
RQEDSRG

SEQ ID NO: 86015 - protein, 7 aa, synthetic construct
EMASKQP

SEQ ID NO: 86016 - protein, 7 aa, synthetic construct
DKKITDK

SEQ ID NO: 86017 - protein, 7 aa, synthetic construct
NKTTPSG

SEQ ID NO: 86018 - protein, 7 aa, synthetic construct
RDNANAK

SEQ ID NO: 86019 - protein, 7 aa, synthetic construct
VPQGVIN

SEQ ID NO: 86020 - protein, 7 aa, synthetic construct
NKTFNMT

SEQ ID NO: 86021 - protein, 7 aa, synthetic construct
TAHLEKG

SEQ ID NO: 86022 - protein, 7 aa, synthetic construct
KSPTVSS

SEQ ID NO: 86023 - protein, 7 aa, synthetic construct
DLTSERR

SEQ ID NO: 86024 - protein, 7 aa, synthetic construct
GSRGDVG

SEQ ID NO: 86025 - protein, 7 aa, synthetic construct
WQTHEKR

SEQ ID NO: 86026 - protein, 7 aa, synthetic construct
PANTTNT

SEQ ID NO: 86027 - protein, 7 aa, synthetic construct
VPNAKAT

SEQ ID NO: 86028 - protein, 7 aa, synthetic construct
LNFVGPE

SEQ ID NO: 86029 - protein, 7 aa, synthetic construct
VNNIHGY

SEQ ID NO: 86030 - protein, 7 aa, synthetic construct
KKEGFKD

SEQ ID NO: 86031 - protein, 7 aa, synthetic construct
PNRINSD

SEQ ID NO: 86032 - protein, 7 aa, synthetic construct
YQGMQMA

SEQ ID NO: 86033 - protein, 7 aa, synthetic construct
NGKHDQW

SEQ ID NO: 86034 - protein, 7 aa, synthetic construct
QMNDKLH

SEQ ID NO: 86035 - protein, 7 aa, synthetic construct
ILSHVLP

SEQ ID NO: 86036 - protein, 7 aa, synthetic construct
ADRKMTY

SEQ ID NO: 86037 - protein, 7 aa, synthetic construct
AFKDSKS

SEQ ID NO: 86038 - protein, 7 aa, synthetic construct
MNRGGQP

SEQ ID NO: 86039 - protein, 7 aa, synthetic construct
VINQTQL

SEQ ID NO: 86040 - protein, 7 aa, synthetic construct
PRVSGGA

SEQ ID NO: 86041 - protein, 7 aa, synthetic construct
EKKNYET

SEQ ID NO: 86042 - protein, 7 aa, synthetic construct
WIGKEHT

SEQ ID NO: 86043 - protein, 7 aa, synthetic construct
NGQVGMN

SEQ ID NO: 86044 - protein, 7 aa, synthetic construct
DNHVGPW

SEQ ID NO: 86045 - protein, 7 aa, synthetic construct
RADTFGN

SEQ ID NO: 86046 - protein, 7 aa, synthetic construct
FAFNQHS

SEQ ID NO: 86047 - protein, 7 aa, synthetic construct
KEYNSYG

SEQ ID NO: 86048 - protein, 7 aa, synthetic construct
HPNSYPV

SEQ ID NO: 86049 - protein, 7 aa, synthetic construct
HEAKHSH

SEQ ID NO: 86050 - protein, 7 aa, synthetic construct
TFQKSYD

SEQ ID NO: 86051 - protein, 7 aa, synthetic construct
RNQATGS

SEQ ID NO: 86052 - protein, 7 aa, synthetic construct
INISIKA

SEQ ID NO: 86053 - protein, 7 aa, synthetic construct
SAKNHQS

SEQ ID NO: 86054 - protein, 7 aa, synthetic construct
ITANFPL

SEQ ID NO: 86055 - protein, 7 aa, synthetic construct
GQGVTQV

SEQ ID NO: 86056 - protein, 7 aa, synthetic construct
LYNTKTF

SEQ ID NO: 86057 - protein, 7 aa, synthetic construct
DQKNYLA

SEQ ID NO: 86058 - protein, 7 aa, synthetic construct
VDKLTSK

SEQ ID NO: 86059 - protein, 7 aa, synthetic construct
WHPPTDA

SEQ ID NO: 86060 - protein, 7 aa, synthetic construct
QPQQNDP

SEQ ID NO: 86061 - protein, 7 aa, synthetic construct
AKSGATG

SEQ ID NO: 86062 - protein, 7 aa, synthetic construct
KNSSVVT

SEQ ID NO: 86063 - protein, 7 aa, synthetic construct
DQDKLHY

SEQ ID NO: 86064 - protein, 7 aa, synthetic construct
NLAMNTV

SEQ ID NO: 86065 - protein, 7 aa, synthetic construct
SEHSPVR

SEQ ID NO: 86066 - protein, 7 aa, synthetic construct
AEPGHAS

SEQ ID NO: 86067 - protein, 7 aa, synthetic construct
NVQHSKD

SEQ ID NO: 86068 - protein, 7 aa, synthetic construct
HGGISYQ

SEQ ID NO: 86069 - protein, 7 aa, synthetic construct
HNAPVTV

SEQ ID NO: 86070 - protein, 7 aa, synthetic construct
GMRMHIG

SEQ ID NO: 86071 - protein, 7 aa, synthetic construct
YGVPHPK

SEQ ID NO: 86072 - protein, 7 aa, synthetic construct
HENEWKD

SEQ ID NO: 86073 - protein, 7 aa, synthetic construct
NQEMRIP

SEQ ID NO: 86074 - protein, 7 aa, synthetic construct
REHNDVA

SEQ ID NO: 86075 - protein, 7 aa, synthetic construct
NRNAEQR

SEQ ID NO: 86076 - protein, 7 aa, synthetic construct
NKKDVQL

SEQ ID NO: 86077 - protein, 7 aa, synthetic construct
IPNKTHF

SEQ ID NO: 86078 - protein, 7 aa, synthetic construct
PMSHQAG

SEQ ID NO: 86079 - protein, 7 aa, synthetic construct
LGAITGY

SEQ ID NO: 86080 - protein, 7 aa, synthetic construct
AKQSQAY

SEQ ID NO: 86081 - protein, 7 aa, synthetic construct
PTMASRP

SEQ ID NO: 86082 - protein, 7 aa, synthetic construct
KQGGVPF

SEQ ID NO: 86083 - protein, 7 aa, synthetic construct
LVNSMGK

SEQ ID NO: 86084 - protein, 7 aa, synthetic construct
QRDAPIG

SEQ ID NO: 86085 - protein, 7 aa, synthetic construct
TMLDRPS

SEQ ID NO: 86086 - protein, 7 aa, synthetic construct
HEQRGDP

SEQ ID NO: 86087 - protein, 7 aa, synthetic construct
TTQITEG

SEQ ID NO: 86088 - protein, 7 aa, synthetic construct
EAIVQKG

SEQ ID NO: 86089 - protein, 7 aa, synthetic construct
GMAMKTN

SEQ ID NO: 86090 - protein, 7 aa, synthetic construct
GTRIAVM

SEQ ID NO: 86091 - protein, 7 aa, synthetic construct
WANWSAE

SEQ ID NO: 86092 - protein, 7 aa, synthetic construct
IGRDHLA

SEQ ID NO: 86093 - protein, 7 aa, synthetic construct
AAPHRAL

SEQ ID NO: 86094 - protein, 7 aa, synthetic construct
EKPMAEQ

SEQ ID NO: 86095 - protein, 7 aa, synthetic construct
NQKGMSA

SEQ ID NO: 86096 - protein, 7 aa, synthetic construct
GNFAAGY

SEQ ID NO: 86097 - protein, 7 aa, synthetic construct
KVSLHPT

SEQ ID NO: 86098 - protein, 7 aa, synthetic construct
DKPARQM

SEQ ID NO: 86099 - protein, 7 aa, synthetic construct
KVMGQNF

SEQ ID NO: 86100 - protein, 7 aa, synthetic construct
RETPSTQ

SEQ ID NO: 86101 - protein, 7 aa, synthetic construct
SKQATQT

SEQ ID NO: 86102 - protein, 7 aa, synthetic construct
DYNNVVR

SEQ ID NO: 86103 - protein, 7 aa, synthetic construct
ARQISQH

SEQ ID NO: 86104 - protein, 7 aa, synthetic construct
SAEYSAP

SEQ ID NO: 86105 - protein, 7 aa, synthetic construct
IGPHETT

SEQ ID NO: 86106 - protein, 7 aa, synthetic construct
NVDAKAF

SEQ ID NO: 86107 - protein, 7 aa, synthetic construct
GIKADGK

SEQ ID NO: 86108 - protein, 7 aa, synthetic construct
NKTGVKE

SEQ ID NO: 86109 - protein, 7 aa, synthetic construct
DKWAPIS

SEQ ID NO: 86110 - protein, 7 aa, synthetic construct
MTPSSKM

SEQ ID NO: 86111 - protein, 7 aa, synthetic construct
FSVNFGA

SEQ ID NO: 86112 - protein, 7 aa, synthetic construct
THNNTFY

SEQ ID NO: 86113 - protein, 7 aa, synthetic construct
NQKMHPV

SEQ ID NO: 86114 - protein, 7 aa, synthetic construct
FPQPPNT

SEQ ID NO: 86115 - protein, 7 aa, synthetic construct
HKYPQPF

SEQ ID NO: 86116 - protein, 7 aa, synthetic construct
PFDAHKF

SEQ ID NO: 86117 - protein, 7 aa, synthetic construct
SQNVHKH

SEQ ID NO: 86118 - protein, 7 aa, synthetic construct
IHQQSSL

SEQ ID NO: 86119 - protein, 7 aa, synthetic construct
QANMHNA

SEQ ID NO: 86120 - protein, 7 aa, synthetic construct
TLIRLQG

SEQ ID NO: 86121 - protein, 7 aa, synthetic construct
VDRYTYA

SEQ ID NO: 86122 - protein, 7 aa, synthetic construct
SYLDQHG

SEQ ID NO: 86123 - protein, 7 aa, synthetic construct
PSNGGHS

SEQ ID NO: 86124 - protein, 7 aa, synthetic construct
FPEQSAL

SEQ ID NO: 86125 - protein, 7 aa, synthetic construct
HFDGMTA

SEQ ID NO: 86126 - protein, 7 aa, synthetic construct
PQSGKID

SEQ ID NO: 86127 - protein, 7 aa, synthetic construct
YLGWVSE

SEQ ID NO: 86128 - protein, 7 aa, synthetic construct
LPPLQTI

SEQ ID NO: 86129 - protein, 7 aa, synthetic construct
AASNAYI

SEQ ID NO: 86130 - protein, 7 aa, synthetic construct
RGPTGNG

SEQ ID NO: 86131 - protein, 7 aa, synthetic construct
RIIPDQL

SEQ ID NO: 86132 - protein, 7 aa, synthetic construct
HSKNIFE

SEQ ID NO: 86133 - protein, 7 aa, synthetic construct
QVHPTSK

SEQ ID NO: 86134 - protein, 7 aa, synthetic construct
MFGVGPQ

SEQ ID NO: 86135 - protein, 7 aa, synthetic construct
TVAGQHQ

SEQ ID NO: 86136 - protein, 7 aa, synthetic construct
LKSNTKD

SEQ ID NO: 86137 - protein, 7 aa, synthetic construct
GVHKSAH

SEQ ID NO: 86138 - protein, 7 aa, synthetic construct
WIAGMQT

SEQ ID NO: 86139 - protein, 7 aa, synthetic construct
EERPRLL

SEQ ID NO: 86140 - protein, 7 aa, synthetic construct
KPAESTK

SEQ ID NO: 86141 - protein, 7 aa, synthetic construct
QVVTPVP

SEQ ID NO: 86142 - protein, 7 aa, synthetic construct
LSAQAMV

SEQ ID NO: 86143 - protein, 7 aa, synthetic construct
DKIQPYK

SEQ ID NO: 86144 - protein, 7 aa, synthetic construct
YATDESR

SEQ ID NO: 86145 - protein, 7 aa, synthetic construct
RRGQDHG

SEQ ID NO: 86146 - protein, 7 aa, synthetic construct
KSASAQA

SEQ ID NO: 86147 - protein, 7 aa, synthetic construct
NQDFKRI

SEQ ID NO: 86148 - protein, 7 aa, synthetic construct
PHFLKES

SEQ ID NO: 86149 - protein, 7 aa, synthetic construct
IPAGMPM

SEQ ID NO: 86150 - protein, 7 aa, synthetic construct
HLQPVMQ

SEQ ID NO: 86151 - protein, 7 aa, synthetic construct
NVTMPKG

SEQ ID NO: 86152 - protein, 7 aa, synthetic construct
NKHDFLV

SEQ ID NO: 86153 - protein, 7 aa, synthetic construct
DFTTMNR

SEQ ID NO: 86154 - protein, 7 aa, synthetic construct
HSAANLN

SEQ ID NO: 86155 - protein, 7 aa, synthetic construct
VAEIKFH

SEQ ID NO: 86156 - protein, 7 aa, synthetic construct
SEQPRDK

SEQ ID NO: 86157 - protein, 7 aa, synthetic construct
AKDHMVM

SEQ ID NO: 86158 - protein, 7 aa, synthetic construct
RHDMRQI

SEQ ID NO: 86159 - protein, 7 aa, synthetic construct
FLSQGGA

SEQ ID NO: 86160 - protein, 7 aa, synthetic construct
FGHQKEL

SEQ ID NO: 86161 - protein, 7 aa, synthetic construct
AESSRAA

SEQ ID NO: 86162 - protein, 7 aa, synthetic construct
QNAHDHK

SEQ ID NO: 86163 - protein, 7 aa, synthetic construct
GDKQNEI

SEQ ID NO: 86164 - protein, 7 aa, synthetic construct
RAETSIT

SEQ ID NO: 86165 - protein, 7 aa, synthetic construct
KSQDARE

SEQ ID NO: 86166 - protein, 7 aa, synthetic construct
AERKDFP

SEQ ID NO: 86167 - protein, 7 aa, synthetic construct
KKTPEDT

SEQ ID NO: 86168 - protein, 7 aa, synthetic construct
WNQEFTG

SEQ ID NO: 86169 - protein, 7 aa, synthetic construct
ISAKDNS

SEQ ID NO: 86170 - protein, 7 aa, synthetic construct
LEKRNVW

SEQ ID NO: 86171 - protein, 7 aa, synthetic construct
RKMDPMF

SEQ ID NO: 86172 - protein, 7 aa, synthetic construct
LPQDSRF

SEQ ID NO: 86173 - protein, 7 aa, synthetic construct
GAKPWME

SEQ ID NO: 86174 - protein, 7 aa, synthetic construct
PKPSNQA

SEQ ID NO: 86175 - protein, 7 aa, synthetic construct
LGLSKEA

SEQ ID NO: 86176 - protein, 7 aa, synthetic construct
QTDKPIM

SEQ ID NO: 86177 - protein, 7 aa, synthetic construct
HPDKSQA

SEQ ID NO: 86178 - protein, 7 aa, synthetic construct
DSGFHER

SEQ ID NO: 86179 - protein, 7 aa, synthetic construct
RKEYGET

SEQ ID NO: 86180 - protein, 7 aa, synthetic construct
KAWKDSI

SEQ ID NO: 86181 - protein, 7 aa, synthetic construct
QAQIINH

SEQ ID NO: 86182 - protein, 7 aa, synthetic construct
DNLGPAG

SEQ ID NO: 86183 - protein, 7 aa, synthetic construct
RKDTQQA

SEQ ID NO: 86184 - protein, 7 aa, synthetic construct
PVQGVRE

SEQ ID NO: 86185 - protein, 7 aa, synthetic construct
LFSREQP

SEQ ID NO: 86186 - protein, 7 aa, synthetic construct
WTKTGQY

SEQ ID NO: 86187 - protein, 7 aa, synthetic construct
HLDPHQM

SEQ ID NO: 86188 - protein, 7 aa, synthetic construct
PPVMNSH

SEQ ID NO: 86189 - protein, 7 aa, synthetic construct
INHKNDL

SEQ ID NO: 86190 - protein, 7 aa, synthetic construct
FPNVKVL

SEQ ID NO: 86191 - protein, 7 aa, synthetic construct
GKQAIKD

SEQ ID NO: 86192 - protein, 7 aa, synthetic construct
LRTTIDR

SEQ ID NO: 86193 - protein, 7 aa, synthetic construct
WGSVVHQ

SEQ ID NO: 86194 - protein, 7 aa, synthetic construct
YAKNWDE

SEQ ID NO: 86195 - protein, 7 aa, synthetic construct
KTASLGH

SEQ ID NO: 86196 - protein, 7 aa, synthetic construct
GNGRNMT

SEQ ID NO: 86197 - protein, 7 aa, synthetic construct
KTRISEP

SEQ ID NO: 86198 - protein, 7 aa, synthetic construct
KTGLAYV

SEQ ID NO: 86199 - protein, 7 aa, synthetic construct
NYNRDRA

SEQ ID NO: 86200 - protein, 7 aa, synthetic construct
FNDKWKM

SEQ ID NO: 86201 - protein, 7 aa, synthetic construct
AVKNPGA

SEQ ID NO: 86202 - protein, 7 aa, synthetic construct
MVPSNGE

SEQ ID NO: 86203 - protein, 7 aa, synthetic construct
SIDQRAY

SEQ ID NO: 86204 - protein, 7 aa, synthetic construct
IMIKQQD

SEQ ID NO: 86205 - protein, 7 aa, synthetic construct
NRHTSQY

SEQ ID NO: 86206 - protein, 7 aa, synthetic construct
DMLNGHA

SEQ ID NO: 86207 - protein, 7 aa, synthetic construct
RIPVLDP

SEQ ID NO: 86208 - protein, 7 aa, synthetic construct
MPDKGMM

SEQ ID NO: 86209 - protein, 7 aa, synthetic construct
LKLMDRP

SEQ ID NO: 86210 - protein, 7 aa, synthetic construct
FNTGIPH

SEQ ID NO: 86211 - protein, 7 aa, synthetic construct
GAERVHH

SEQ ID NO: 86212 - protein, 7 aa, synthetic construct
HRYAAGA

SEQ ID NO: 86213 - protein, 7 aa, synthetic construct
AEFKSAR

SEQ ID NO: 86214 - protein, 7 aa, synthetic construct
WLKYDQA

SEQ ID NO: 86215 - protein, 7 aa, synthetic construct
EQRRASP

SEQ ID NO: 86216 - protein, 7 aa, synthetic construct
MKAMVDG

SEQ ID NO: 86217 - protein, 7 aa, synthetic construct
GPYADRL

SEQ ID NO: 86218 - protein, 7 aa, synthetic construct
ISEGGRM

SEQ ID NO: 86219 - protein, 7 aa, synthetic construct
EQRTMRI

SEQ ID NO: 86220 - protein, 7 aa, synthetic construct
CPRLGCA

SEQ ID NO: 86221 - protein, 7 aa, synthetic construct
TGMQQKF

SEQ ID NO: 86222 - protein, 7 aa, synthetic construct
QKHSQDA

SEQ ID NO: 86223 - protein, 7 aa, synthetic construct
YDNHPNV

SEQ ID NO: 86224 - protein, 7 aa, synthetic construct
IKADEGR

SEQ ID NO: 86225 - protein, 7 aa, synthetic construct
PGEPRTG

SEQ ID NO: 86226 - protein, 7 aa, synthetic construct
IKMGGLH

SEQ ID NO: 86227 - protein, 7 aa, synthetic construct
RTQHMAD

SEQ ID NO: 86228 - protein, 7 aa, synthetic construct
EHAMPQK

SEQ ID NO: 86229 - protein, 7 aa, synthetic construct
MPRSSLA

SEQ ID NO: 86230 - protein, 7 aa, synthetic construct
ELGVGHK

SEQ ID NO: 86231 - protein, 7 aa, synthetic construct
YKGKMFE

SEQ ID NO: 86232 - protein, 7 aa, synthetic construct
LPDLRMS

SEQ ID NO: 86233 - protein, 7 aa, synthetic construct
VKRYDDA

SEQ ID NO: 86234 - protein, 7 aa, synthetic construct
RDSMTML

SEQ ID NO: 86235 - protein, 7 aa, synthetic construct
FLQRNAA

SEQ ID NO: 86236 - protein, 7 aa, synthetic construct
NRDHREE

SEQ ID NO: 86237 - protein, 7 aa, synthetic construct
KTGGMVL

SEQ ID NO: 86238 - protein, 7 aa, synthetic construct
ETKGPVF

SEQ ID NO: 86239 - protein, 7 aa, synthetic construct
TIIQREA

SEQ ID NO: 86240 - protein, 7 aa, synthetic construct
KNGHDNY

SEQ ID NO: 86241 - protein, 7 aa, synthetic construct
DIYYTNE

SEQ ID NO: 86242 - protein, 7 aa, synthetic construct
GVSQLKH

SEQ ID NO: 86243 - protein, 7 aa, synthetic construct
HYDTRSP

SEQ ID NO: 86244 - protein, 7 aa, synthetic construct
VNREPLS

SEQ ID NO: 86245 - protein, 7 aa, synthetic construct
HQMVGMP

SEQ ID NO: 86246 - protein, 7 aa, synthetic construct
GKQERDQ

SEQ ID NO: 86247 - protein, 7 aa, synthetic construct
LDQKTSP

SEQ ID NO: 86248 - protein, 7 aa, synthetic construct
KGGTFGA

SEQ ID NO: 86249 - protein, 7 aa, synthetic construct
PPLTVVA

SEQ ID NO: 86250 - protein, 7 aa, synthetic construct
REGNHAA

SEQ ID NO: 86251 - protein, 7 aa, synthetic construct
KSYGQFE

SEQ ID NO: 86252 - protein, 7 aa, synthetic construct
IYDAHVN

SEQ ID NO: 86253 - protein, 7 aa, synthetic construct
NDSRHEF

SEQ ID NO: 86254 - protein, 7 aa, synthetic construct
VYPLPSA

SEQ ID NO: 86255 - protein, 7 aa, synthetic construct
PKYVEIS

SEQ ID NO: 86256 - protein, 7 aa, synthetic construct
PWNAGKT

SEQ ID NO: 86257 - protein, 7 aa, synthetic construct
LQTSAVN

SEQ ID NO: 86258 - protein, 7 aa, synthetic construct
WETARNL

SEQ ID NO: 86259 - protein, 7 aa, synthetic construct
SIKLGNE

SEQ ID NO: 86260 - protein, 7 aa, synthetic construct
YKPKLEH

SEQ ID NO: 86261 - protein, 7 aa, synthetic construct
KMSTGNA

SEQ ID NO: 86262 - protein, 7 aa, synthetic construct
SASNDPK

SEQ ID NO: 86263 - protein, 7 aa, synthetic construct
GTENSYK

SEQ ID NO: 86264 - protein, 7 aa, synthetic construct
QYNHVKL

SEQ ID NO: 86265 - protein, 7 aa, synthetic construct
NMNVVRA

SEQ ID NO: 86266 - protein, 7 aa, synthetic construct
PIGQYHA

SEQ ID NO: 86267 - protein, 7 aa, synthetic construct
GKWERHE

SEQ ID NO: 86268 - protein, 7 aa, synthetic construct
RHMTEQV

SEQ ID NO: 86269 - protein, 7 aa, synthetic construct
GFPYKFE

SEQ ID NO: 86270 - protein, 7 aa, synthetic construct
FKTTNSS

SEQ ID NO: 86271 - protein, 7 aa, synthetic construct
QAQKWSE

SEQ ID NO: 86272 - protein, 7 aa, synthetic construct
HKDQRGP

SEQ ID NO: 86273 - protein, 7 aa, synthetic construct
GRTPHDV

SEQ ID NO: 86274 - protein, 7 aa, synthetic construct
REVTGGH

SEQ ID NO: 86275 - protein, 7 aa, synthetic construct
TMPATRT

SEQ ID NO: 86276 - protein, 7 aa, synthetic construct
TWKAHKE

SEQ ID NO: 86277 - protein, 7 aa, synthetic construct
MKEQMVD

SEQ ID NO: 86278 - protein, 7 aa, synthetic construct
LRELATV

SEQ ID NO: 86279 - protein, 7 aa, synthetic construct
TRFPGMT

SEQ ID NO: 86280 - protein, 7 aa, synthetic construct
ILMNNGP

SEQ ID NO: 86281 - protein, 7 aa, synthetic construct
NRVDHAQ

SEQ ID NO: 86282 - protein, 7 aa, synthetic construct
REREKSN

SEQ ID NO: 86283 - protein, 7 aa, synthetic construct
NMGRMTE

SEQ ID NO: 86284 - protein, 7 aa, synthetic construct
GKGHMGQ

SEQ ID NO: 86285 - protein, 7 aa, synthetic construct
GHHLKGG

SEQ ID NO: 86286 - protein, 7 aa, synthetic construct
LSLTKIQ

SEQ ID NO: 86287 - protein, 7 aa, synthetic construct
SPNSTGT

SEQ ID NO: 86288 - protein, 7 aa, synthetic construct
INYRMDK

SEQ ID NO: 86289 - protein, 7 aa, synthetic construct
YKAQTME

SEQ ID NO: 86290 - protein, 7 aa, synthetic construct
DKFKMMP

SEQ ID NO: 86291 - protein, 7 aa, synthetic construct
IVSTQND

SEQ ID NO: 86292 - protein, 7 aa, synthetic construct
LSVHNQE

SEQ ID NO: 86293 - protein, 7 aa, synthetic construct
TVGKHPE

SEQ ID NO: 86294 - protein, 7 aa, synthetic construct
RDDPKNP

SEQ ID NO: 86295 - protein, 7 aa, synthetic construct
NRTIPSY

SEQ ID NO: 86296 - protein, 7 aa, synthetic construct
HTHTGDT

SEQ ID NO: 86297 - protein, 7 aa, synthetic construct
VGPAAKN

SEQ ID NO: 86298 - protein, 7 aa, synthetic construct
HTPAVSR

SEQ ID NO: 86299 - protein, 7 aa, synthetic construct
YNPNVSL

SEQ ID NO: 86300 - protein, 7 aa, synthetic construct
GSKNYGY

SEQ ID NO: 86301 - protein, 7 aa, synthetic construct
KQETATK

SEQ ID NO: 86302 - protein, 7 aa, synthetic construct
PISNVRI

SEQ ID NO: 86303 - protein, 7 aa, synthetic construct
MGDKLGK

SEQ ID NO: 86304 - protein, 7 aa, synthetic construct
IARASEW

SEQ ID NO: 86305 - protein, 7 aa, synthetic construct
QFPPNTM

SEQ ID NO: 86306 - protein, 7 aa, synthetic construct
DKTKGDM

SEQ ID NO: 86307 - protein, 7 aa, synthetic construct
VQHSAPE

SEQ ID NO: 86308 - protein, 7 aa, synthetic construct
KYAQKAE

SEQ ID NO: 86309 - protein, 7 aa, synthetic construct
QQKVAVF

SEQ ID NO: 86310 - protein, 7 aa, synthetic construct
SKQDNHQ

SEQ ID NO: 86311 - protein, 7 aa, synthetic construct
GGFHDQM

SEQ ID NO: 86312 - protein, 7 aa, synthetic construct
AKILQLD

SEQ ID NO: 86313 - protein, 7 aa, synthetic construct
AYGHTTG

SEQ ID NO: 86314 - protein, 7 aa, synthetic construct
MYDHKHE

SEQ ID NO: 86315 - protein, 7 aa, synthetic construct
AQLSARE

SEQ ID NO: 86316 - protein, 7 aa, synthetic construct
YANNMKE

SEQ ID NO: 86317 - protein, 7 aa, synthetic construct
IAGKHVV

SEQ ID NO: 86318 - protein, 7 aa, synthetic construct
PVHKVTA

SEQ ID NO: 86319 - protein, 7 aa, synthetic construct
LMKMAEN

SEQ ID NO: 86320 - protein, 7 aa, synthetic construct
TPIINAG

SEQ ID NO: 86321 - protein, 7 aa, synthetic construct
RDERFQH

SEQ ID NO: 86322 - protein, 7 aa, synthetic construct
DQSLGKS

SEQ ID NO: 86323 - protein, 7 aa, synthetic construct
YPQKITA

SEQ ID NO: 86324 - protein, 7 aa, synthetic construct
GAINTNA

SEQ ID NO: 86325 - protein, 7 aa, synthetic construct
ELAVIKK

SEQ ID NO: 86326 - protein, 7 aa, synthetic construct
LPMNNAP

SEQ ID NO: 86327 - protein, 7 aa, synthetic construct
SRDYKQV

SEQ ID NO: 86328 - protein, 7 aa, synthetic construct
GKVVTSA

SEQ ID NO: 86329 - protein, 7 aa, synthetic construct
REDHQRN

SEQ ID NO: 86330 - protein, 7 aa, synthetic construct
PRPNSGV

SEQ ID NO: 86331 - protein, 7 aa, synthetic construct
TTQSSPR

SEQ ID NO: 86332 - protein, 7 aa, synthetic construct
DLHGPVG

SEQ ID NO: 86333 - protein, 7 aa, synthetic construct
LEKTVTH

SEQ ID NO: 86334 - protein, 7 aa, synthetic construct
PPHLNQH

SEQ ID NO: 86335 - protein, 7 aa, synthetic construct
SAAFSTA

SEQ ID NO: 86336 - protein, 7 aa, synthetic construct
GKPENFQ

SEQ ID NO: 86337 - protein, 7 aa, synthetic construct
VDIPHHG

SEQ ID NO: 86338 - protein, 7 aa, synthetic construct
YLHNHGE

SEQ ID NO: 86339 - protein, 7 aa, synthetic construct
STGSQTN

SEQ ID NO: 86340 - protein, 7 aa, synthetic construct
KRGIDDT

SEQ ID NO: 86341 - protein, 7 aa, synthetic construct
WIRGTHD

SEQ ID NO: 86342 - protein, 7 aa, synthetic construct
HPSNYAA

SEQ ID NO: 86343 - protein, 7 aa, synthetic construct
MEKNNQG

SEQ ID NO: 86344 - protein, 7 aa, synthetic construct
GVGSFRQ

SEQ ID NO: 86345 - protein, 7 aa, synthetic construct
SPNKTTE

SEQ ID NO: 86346 - protein, 7 aa, synthetic construct
EGNARAV

SEQ ID NO: 86347 - protein, 7 aa, synthetic construct
DVHSEFI

SEQ ID NO: 86348 - protein, 7 aa, synthetic construct
VVSRFPN

SEQ ID NO: 86349 - protein, 7 aa, synthetic construct
IEAYHVD

SEQ ID NO: 86350 - protein, 7 aa, synthetic construct
RLSQAPH

SEQ ID NO: 86351 - protein, 7 aa, synthetic construct
VNSKSNP

SEQ ID NO: 86352 - protein, 7 aa, synthetic construct
VHFKTTT

SEQ ID NO: 86353 - protein, 7 aa, synthetic construct
KSANMQS

SEQ ID NO: 86354 - protein, 7 aa, synthetic construct
QVARTGP

SEQ ID NO: 86355 - protein, 7 aa, synthetic construct
FSKQTNS

SEQ ID NO: 86356 - protein, 7 aa, synthetic construct
SDDKVTR

SEQ ID NO: 86357 - protein, 7 aa, synthetic construct
RSNSIQG

SEQ ID NO: 86358 - protein, 7 aa, synthetic construct
QETRVAF

SEQ ID NO: 86359 - protein, 7 aa, synthetic construct
RDINKAI

SEQ ID NO: 86360 - protein, 7 aa, synthetic construct
HQDNVRQ

SEQ ID NO: 86361 - protein, 7 aa, synthetic construct
KTGATYI

SEQ ID NO: 86362 - protein, 7 aa, synthetic construct
ATPMNGF

SEQ ID NO: 86363 - protein, 7 aa, synthetic construct
TVVMRSQ

SEQ ID NO: 86364 - protein, 7 aa, synthetic construct
SHESRPE

SEQ ID NO: 86365 - protein, 7 aa, synthetic construct
MATNQNQ

SEQ ID NO: 86366 - protein, 7 aa, synthetic construct
GVYPELH

SEQ ID NO: 86367 - protein, 7 aa, synthetic construct
LHAMKAQ

SEQ ID NO: 86368 - protein, 7 aa, synthetic construct
MLGELRH

SEQ ID NO: 86369 - protein, 7 aa, synthetic construct
FRFKLEE

SEQ ID NO: 86370 - protein, 7 aa, synthetic construct
MVIALKD

SEQ ID NO: 86371 - protein, 7 aa, synthetic construct
NWEKRGD

SEQ ID NO: 86372 - protein, 7 aa, synthetic construct
HGHKQDA

SEQ ID NO: 86373 - protein, 7 aa, synthetic construct
LGFNGSP

SEQ ID NO: 86374 - protein, 7 aa, synthetic construct
NDHHGMK

SEQ ID NO: 86375 - protein, 7 aa, synthetic construct
EVNSTRE

SEQ ID NO: 86376 - protein, 7 aa, synthetic construct
MQTLKLS

SEQ ID NO: 86377 - protein, 7 aa, synthetic construct
QRGRDSE

SEQ ID NO: 86378 - protein, 7 aa, synthetic construct
YLRTAQH

SEQ ID NO: 86379 - protein, 7 aa, synthetic construct
SMLSHTV

SEQ ID NO: 86380 - protein, 7 aa, synthetic construct
SNSGHKF

SEQ ID NO: 86381 - protein, 7 aa, synthetic construct
HFAHGPM

SEQ ID NO: 86382 - protein, 7 aa, synthetic construct
RFAEAHE

SEQ ID NO: 86383 - protein, 7 aa, synthetic construct
MQRLEFN

SEQ ID NO: 86384 - protein, 7 aa, synthetic construct
HHKSTAH

SEQ ID NO: 86385 - protein, 7 aa, synthetic construct
FHGDVMT

SEQ ID NO: 86386 - protein, 7 aa, synthetic construct
QQNFNVI

SEQ ID NO: 86387 - protein, 7 aa, synthetic construct
YNHMGSN

SEQ ID NO: 86388 - protein, 7 aa, synthetic construct
QVVTRDG

SEQ ID NO: 86389 - protein, 7 aa, synthetic construct
HKALQPM

SEQ ID NO: 86390 - protein, 7 aa, synthetic construct
MARTVPL

SEQ ID NO: 86391 - protein, 7 aa, synthetic construct
LTLKLDS

SEQ ID NO: 86392 - protein, 7 aa, synthetic construct
ANLRNIN

SEQ ID NO: 86393 - protein, 7 aa, synthetic construct
IKAAVVV

SEQ ID NO: 86394 - protein, 7 aa, synthetic construct
YNVVNSP

SEQ ID NO: 86395 - protein, 7 aa, synthetic construct
RMNHSDN

SEQ ID NO: 86396 - protein, 7 aa, synthetic construct
KGYSQGE

SEQ ID NO: 86397 - protein, 7 aa, synthetic construct
FSKVGQA

SEQ ID NO: 86398 - protein, 7 aa, synthetic construct
SSMVRHP

SEQ ID NO: 86399 - protein, 7 aa, synthetic construct
IWNSTHV

SEQ ID NO: 86400 - protein, 7 aa, synthetic construct
AKLIGLH

SEQ ID NO: 86401 - protein, 7 aa, synthetic construct
RDATMRY

SEQ ID NO: 86402 - protein, 7 aa, synthetic construct
HNWPEKV

SEQ ID NO: 86403 - protein, 7 aa, synthetic construct
MMREGTM

SEQ ID NO: 86404 - protein, 7 aa, synthetic construct
LFPEKNM

SEQ ID NO: 86405 - protein, 7 aa, synthetic construct
RNDLPVA

SEQ ID NO: 86406 - protein, 7 aa, synthetic construct
APNHTAA

SEQ ID NO: 86407 - protein, 7 aa, synthetic construct
FLNNPMD

SEQ ID NO: 86408 - protein, 7 aa, synthetic construct
GPYHEGH

SEQ ID NO: 86409 - protein, 7 aa, synthetic construct
MATGHSW

SEQ ID NO: 86410 - protein, 7 aa, synthetic construct
MTNDRPT

SEQ ID NO: 86411 - protein, 7 aa, synthetic construct
ATSKPYV

SEQ ID NO: 86412 - protein, 7 aa, synthetic construct
TGARDKD

SEQ ID NO: 86413 - protein, 7 aa, synthetic construct
GFKHHLD

SEQ ID NO: 86414 - protein, 7 aa, synthetic construct
MIGSIKV

SEQ ID NO: 86415 - protein, 7 aa, synthetic construct
RIERATI

SEQ ID NO: 86416 - protein, 7 aa, synthetic construct
WHQGMPE

SEQ ID NO: 86417 - protein, 7 aa, synthetic construct
HPGKSED

SEQ ID NO: 86418 - protein, 7 aa, synthetic construct
PHKVAPM

SEQ ID NO: 86419 - protein, 7 aa, synthetic construct
VEQHSTG

SEQ ID NO: 86420 - protein, 7 aa, synthetic construct
TKNDQSW

SEQ ID NO: 86421 - protein, 7 aa, synthetic construct
PNTGQQF

SEQ ID NO: 86422 - protein, 7 aa, synthetic construct
STGAQIV

SEQ ID NO: 86423 - protein, 7 aa, synthetic construct
AGHNAKL

SEQ ID NO: 86424 - protein, 7 aa, synthetic construct
ISGGYHA

SEQ ID NO: 86425 - protein, 7 aa, synthetic construct
PPYDVKD

SEQ ID NO: 86426 - protein, 7 aa, synthetic construct
HINTGKE

SEQ ID NO: 86427 - protein, 7 aa, synthetic construct
TAAMFDK

SEQ ID NO: 86428 - protein, 7 aa, synthetic construct
HEPNAGG

SEQ ID NO: 86429 - protein, 7 aa, synthetic construct
GHVVGEV

SEQ ID NO: 86430 - protein, 7 aa, synthetic construct
RPDNTNK

SEQ ID NO: 86431 - protein, 7 aa, synthetic construct
PMKEMAN

SEQ ID NO: 86432 - protein, 7 aa, synthetic construct
KGGVTDA

SEQ ID NO: 86433 - protein, 7 aa, synthetic construct
AMPKSMI

SEQ ID NO: 86434 - protein, 7 aa, synthetic construct
VGTQRSP

SEQ ID NO: 86435 - protein, 7 aa, synthetic construct
WRMERSD

SEQ ID NO: 86436 - protein, 7 aa, synthetic construct
GNLNMKY

SEQ ID NO: 86437 - protein, 7 aa, synthetic construct
DSAAHKF

SEQ ID NO: 86438 - protein, 7 aa, synthetic construct
VFGQKPD

SEQ ID NO: 86439 - protein, 7 aa, synthetic construct
KNGLEQT

SEQ ID NO: 86440 - protein, 7 aa, synthetic construct
GKIPLQM

SEQ ID NO: 86441 - protein, 7 aa, synthetic construct
VPLHKIP

SEQ ID NO: 86442 - protein, 7 aa, synthetic construct
HFPAQME

SEQ ID NO: 86443 - protein, 7 aa, synthetic construct
ERFGEPH

SEQ ID NO: 86444 - protein, 7 aa, synthetic construct
FSMEGHG

SEQ ID NO: 86445 - protein, 7 aa, synthetic construct
EASWKDA

SEQ ID NO: 86446 - protein, 7 aa, synthetic construct
GTGESNS

SEQ ID NO: 86447 - protein, 7 aa, synthetic construct
WSKTPSL

SEQ ID NO: 86448 - protein, 7 aa, synthetic construct
ASTIKFQ

SEQ ID NO: 86449 - protein, 7 aa, synthetic construct
FLERNMK

SEQ ID NO: 86450 - protein, 7 aa, synthetic construct
YKYNDPI

SEQ ID NO: 86451 - protein, 7 aa, synthetic construct
QGKSNET

SEQ ID NO: 86452 - protein, 7 aa, synthetic construct
DHKYVEK

SEQ ID NO: 86453 - protein, 7 aa, synthetic construct
GAVALGP

SEQ ID NO: 86454 - protein, 7 aa, synthetic construct
PQAAKAY

SEQ ID NO: 86455 - protein, 7 aa, synthetic construct
GMGMQQI

SEQ ID NO: 86456 - protein, 7 aa, synthetic construct
RAANQHG

SEQ ID NO: 86457 - protein, 7 aa, synthetic construct
VNHARVP

SEQ ID NO: 86458 - protein, 7 aa, synthetic construct
AYTQSDS

SEQ ID NO: 86459 - protein, 7 aa, synthetic construct
RKTEPDA

SEQ ID NO: 86460 - protein, 7 aa, synthetic construct
VMGVHHH

SEQ ID NO: 86461 - protein, 7 aa, synthetic construct
SMIHAPG

SEQ ID NO: 86462 - protein, 7 aa, synthetic construct
SKNSQFE

SEQ ID NO: 86463 - protein, 7 aa, synthetic construct
KVRDTLV

SEQ ID NO: 86464 - protein, 7 aa, synthetic construct
AIGAHTV

SEQ ID NO: 86465 - protein, 7 aa, synthetic construct
TPGKNGW

SEQ ID NO: 86466 - protein, 7 aa, synthetic construct
HTHQATY

SEQ ID NO: 86467 - protein, 7 aa, synthetic construct
AVPQART

SEQ ID NO: 86468 - protein, 7 aa, synthetic construct
QWKQEHD

SEQ ID NO: 86469 - protein, 7 aa, synthetic construct
IGKQMSE

SEQ ID NO: 86470 - protein, 7 aa, synthetic construct
CRDVICP

SEQ ID NO: 86471 - protein, 7 aa, synthetic construct
YQGIKHA

SEQ ID NO: 86472 - protein, 7 aa, synthetic construct
ILQSSPM

SEQ ID NO: 86473 - protein, 7 aa, synthetic construct
IWERLPS

SEQ ID NO: 86474 - protein, 7 aa, synthetic construct
VLNQHMM

SEQ ID NO: 86475 - protein, 7 aa, synthetic construct
VDMNTPH

SEQ ID NO: 86476 - protein, 7 aa, synthetic construct
YNQAVHT

SEQ ID NO: 86477 - protein, 7 aa, synthetic construct
RAIQYQA

SEQ ID NO: 86478 - protein, 7 aa, synthetic construct
VSGIPGT

SEQ ID NO: 86479 - protein, 7 aa, synthetic construct
LPKAYAP

SEQ ID NO: 86480 - protein, 7 aa, synthetic construct
MSSKVPV

SEQ ID NO: 86481 - protein, 7 aa, synthetic construct
QHVATMI

SEQ ID NO: 86482 - protein, 7 aa, synthetic construct
MNANYEK

SEQ ID NO: 86483 - protein, 7 aa, synthetic construct
NVVAIPA

SEQ ID NO: 86484 - protein, 7 aa, synthetic construct
YKSQNSS

SEQ ID NO: 86485 - protein, 7 aa, synthetic construct
THRTGDK

SEQ ID NO: 86486 - protein, 7 aa, synthetic construct
MLMNGHV

SEQ ID NO: 86487 - protein, 7 aa, synthetic construct
SDKLSVY

SEQ ID NO: 86488 - protein, 7 aa, synthetic construct
PFRSHEG

SEQ ID NO: 86489 - protein, 7 aa, synthetic construct
PPMVHKP

SEQ ID NO: 86490 - protein, 7 aa, synthetic construct
MGGVRMN

SEQ ID NO: 86491 - protein, 7 aa, synthetic construct
INQRDNV

SEQ ID NO: 86492 - protein, 7 aa, synthetic construct
NRNNATP

SEQ ID NO: 86493 - protein, 7 aa, synthetic construct
MQRHPAA

SEQ ID NO: 86494 - protein, 7 aa, synthetic construct
AFHREHD

SEQ ID NO: 86495 - protein, 7 aa, synthetic construct
FREESKQ

SEQ ID NO: 86496 - protein, 7 aa, synthetic construct
NMTTGAI

SEQ ID NO: 86497 - protein, 7 aa, synthetic construct
WAPIAIN

SEQ ID NO: 86498 - protein, 7 aa, synthetic construct
GIHQMGV

SEQ ID NO: 86499 - protein, 7 aa, synthetic construct
KDKGVYG

SEQ ID NO: 86500 - protein, 7 aa, synthetic construct
WRGKSEM

SEQ ID NO: 86501 - protein, 7 aa, synthetic construct
KGEARNG

SEQ ID NO: 86502 - protein, 7 aa, synthetic construct
SSAISFG

SEQ ID NO: 86503 - protein, 7 aa, synthetic construct
MKKMVMD

SEQ ID NO: 86504 - protein, 7 aa, synthetic construct
SITEKYH

SEQ ID NO: 86505 - protein, 7 aa, synthetic construct
EGQPLPY

SEQ ID NO: 86506 - protein, 7 aa, synthetic construct
TAMHQHH

SEQ ID NO: 86507 - protein, 7 aa, synthetic construct
ALIDNHF

SEQ ID NO: 86508 - protein, 7 aa, synthetic construct
FDDHYRQ

SEQ ID NO: 86509 - protein, 7 aa, synthetic construct
LSRQDHI

SEQ ID NO: 86510 - protein, 7 aa, synthetic construct
EMRHLEM

SEQ ID NO: 86511 - protein, 7 aa, synthetic construct
FHPDKVP

SEQ ID NO: 86512 - protein, 7 aa, synthetic construct
KRSEQYQ

SEQ ID NO: 86513 - protein, 7 aa, synthetic construct
LGTKHTT

SEQ ID NO: 86514 - protein, 7 aa, synthetic construct
LGIYTAD

SEQ ID NO: 86515 - protein, 7 aa, synthetic construct
RPTEVHD

SEQ ID NO: 86516 - protein, 7 aa, synthetic construct
GNVAAQG

SEQ ID NO: 86517 - protein, 7 aa, synthetic construct
TPPMRNV

SEQ ID NO: 86518 - protein, 7 aa, synthetic construct
QGYIVGD

SEQ ID NO: 86519 - protein, 7 aa, synthetic construct
KPLHTMD

SEQ ID NO: 86520 - protein, 7 aa, synthetic construct
MLPAMAD

SEQ ID NO: 86521 - protein, 7 aa, synthetic construct
QTNAVVS

SEQ ID NO: 86522 - protein, 7 aa, synthetic construct
YLNGVVS

SEQ ID NO: 86523 - protein, 7 aa, synthetic construct
LNSIQLH

SEQ ID NO: 86524 - protein, 7 aa, synthetic construct
HKQDRDA

SEQ ID NO: 86525 - protein, 7 aa, synthetic construct
YKTISMN

SEQ ID NO: 86526 - protein, 7 aa, synthetic construct
AKLQKEA

SEQ ID NO: 86527 - protein, 7 aa, synthetic construct
TPTVSFA

SEQ ID NO: 86528 - protein, 7 aa, synthetic construct
VSNNTNA

SEQ ID NO: 86529 - protein, 7 aa, synthetic construct
QSQASNR

SEQ ID NO: 86530 - protein, 7 aa, synthetic construct
GKANPRD

SEQ ID NO: 86531 - protein, 7 aa, synthetic construct
ERTFNSH

SEQ ID NO: 86532 - protein, 7 aa, synthetic construct
PDKKVSS

SEQ ID NO: 86533 - protein, 7 aa, synthetic construct
KSSAPQS

SEQ ID NO: 86534 - protein, 7 aa, synthetic construct
AVSRIQD

SEQ ID NO: 86535 - protein, 7 aa, synthetic construct
LGIKNIH

SEQ ID NO: 86536 - protein, 7 aa, synthetic construct
NNKQQQG

SEQ ID NO: 86537 - protein, 7 aa, synthetic construct
KTAMPKD

SEQ ID NO: 86538 - protein, 7 aa, synthetic construct
NKGQGAG

SEQ ID NO: 86539 - protein, 7 aa, synthetic construct
QFSHNIM

SEQ ID NO: 86540 - protein, 7 aa, synthetic construct
HEPGWIA

SEQ ID NO: 86541 - protein, 7 aa, synthetic construct
QFRPGIS

SEQ ID NO: 86542 - protein, 7 aa, synthetic construct
QEFRQSF

SEQ ID NO: 86543 - protein, 7 aa, synthetic construct
ASIGPKN

SEQ ID NO: 86544 - protein, 7 aa, synthetic construct
TRLTPQI

SEQ ID NO: 86545 - protein, 7 aa, synthetic construct
DVKILQI

SEQ ID NO: 86546 - protein, 7 aa, synthetic construct
DNFTNRA

SEQ ID NO: 86547 - protein, 7 aa, synthetic construct
ASSDMKN

SEQ ID NO: 86548 - protein, 7 aa, synthetic construct
DQKFDVK

SEQ ID NO: 86549 - protein, 7 aa, synthetic construct
LIGINPD

SEQ ID NO: 86550 - protein, 7 aa, synthetic construct
LSSMHLH

SEQ ID NO: 86551 - protein, 7 aa, synthetic construct
PHTVQET

SEQ ID NO: 86552 - protein, 7 aa, synthetic construct
WSKSPGL

SEQ ID NO: 86553 - protein, 7 aa, synthetic construct
TGDQIKQ

SEQ ID NO: 86554 - protein, 7 aa, synthetic construct
PINSLVV

SEQ ID NO: 86555 - protein, 7 aa, synthetic construct
GLRGDPY

SEQ ID NO: 86556 - protein, 7 aa, synthetic construct
HGISQGL

SEQ ID NO: 86557 - protein, 7 aa, synthetic construct
MKMRGAD

SEQ ID NO: 86558 - protein, 7 aa, synthetic construct
FKQSPTW

SEQ ID NO: 86559 - protein, 7 aa, synthetic construct
IIKQESK

SEQ ID NO: 86560 - protein, 7 aa, synthetic construct
GVGQYTL

SEQ ID NO: 86561 - protein, 7 aa, synthetic construct
QGPGNNP

SEQ ID NO: 86562 - protein, 7 aa, synthetic construct
NVNPNFF

SEQ ID NO: 86563 - protein, 7 aa, synthetic construct
YHMKIEQ

SEQ ID NO: 86564 - protein, 7 aa, synthetic construct
PHPLVET

SEQ ID NO: 86565 - protein, 7 aa, synthetic construct
KKEIGTG

SEQ ID NO: 86566 - protein, 7 aa, synthetic construct
KTREENK

SEQ ID NO: 86567 - protein, 7 aa, synthetic construct
KSPTASM

SEQ ID NO: 86568 - protein, 7 aa, synthetic construct
KPAPLAM

SEQ ID NO: 86569 - protein, 7 aa, synthetic construct
PMAQKAE

SEQ ID NO: 86570 - protein, 7 aa, synthetic construct
FKAHDES

SEQ ID NO: 86571 - protein, 7 aa, synthetic construct
HNIEHHA

SEQ ID NO: 86572 - protein, 7 aa, synthetic construct
AKTSVAF

SEQ ID NO: 86573 - protein, 7 aa, synthetic construct
HGDKNHN

SEQ ID NO: 86574 - protein, 7 aa, synthetic construct
PGAHDPK

SEQ ID NO: 86575 - protein, 7 aa, synthetic construct
GHSNPMD

SEQ ID NO: 86576 - protein, 7 aa, synthetic construct
HTHKIES

SEQ ID NO: 86577 - protein, 7 aa, synthetic construct
PQGPGAA

SEQ ID NO: 86578 - protein, 7 aa, synthetic construct
MFATHER

SEQ ID NO: 86579 - protein, 7 aa, synthetic construct
NNSFNQT

SEQ ID NO: 86580 - protein, 7 aa, synthetic construct
FQHHKME

SEQ ID NO: 86581 - protein, 7 aa, synthetic construct
SMHDAHL

SEQ ID NO: 86582 - protein, 7 aa, synthetic construct
RLTQEHE

SEQ ID NO: 86583 - protein, 7 aa, synthetic construct
NGGGLVM

SEQ ID NO: 86584 - protein, 7 aa, synthetic construct
AKSTQLT

SEQ ID NO: 86585 - protein, 7 aa, synthetic construct
WTTTSRA

SEQ ID NO: 86586 - protein, 7 aa, synthetic construct
TKEAGRG

SEQ ID NO: 86587 - protein, 7 aa, synthetic construct
QTQARAS

SEQ ID NO: 86588 - protein, 7 aa, synthetic construct
EARTLGK

SEQ ID NO: 86589 - protein, 7 aa, synthetic construct
DQKGRDE

SEQ ID NO: 86590 - protein, 7 aa, synthetic construct
YDVTRNN

SEQ ID NO: 86591 - protein, 7 aa, synthetic construct
FPHPMKS

SEQ ID NO: 86592 - protein, 7 aa, synthetic construct
KTETWKI

SEQ ID NO: 86593 - protein, 7 aa, synthetic construct
VVRPAPH

SEQ ID NO: 86594 - protein, 7 aa, synthetic construct
LHSTQGY

SEQ ID NO: 86595 - protein, 7 aa, synthetic construct
NTKYDVH

SEQ ID NO: 86596 - protein, 7 aa, synthetic construct
YKTNPTC

SEQ ID NO: 86597 - protein, 7 aa, synthetic construct
NTMRGAD

SEQ ID NO: 86598 - protein, 7 aa, synthetic construct
IGVVGID

SEQ ID NO: 86599 - protein, 7 aa, synthetic construct
EYPTMMK

SEQ ID NO: 86600 - protein, 7 aa, synthetic construct
ESGKPKY

SEQ ID NO: 86601 - protein, 7 aa, synthetic construct
HNHAMPI

SEQ ID NO: 86602 - protein, 7 aa, synthetic construct
YHMHTAE

SEQ ID NO: 86603 - protein, 7 aa, synthetic construct
NRAHLQN

SEQ ID NO: 86604 - protein, 7 aa, synthetic construct
ISERHSE

SEQ ID NO: 86605 - protein, 7 aa, synthetic construct
RPIHDGQ

SEQ ID NO: 86606 - protein, 7 aa, synthetic construct
QVRLDNH

SEQ ID NO: 86607 - protein, 7 aa, synthetic construct
TAMADQA

SEQ ID NO: 86608 - protein, 7 aa, synthetic construct
YTASAVK

SEQ ID NO: 86609 - protein, 7 aa, synthetic construct
DYQNAQH

SEQ ID NO: 86610 - protein, 7 aa, synthetic construct
REKHVGY

SEQ ID NO: 86611 - protein, 7 aa, synthetic construct
SGLMVAV

SEQ ID NO: 86612 - protein, 7 aa, synthetic construct
YHSDQPH

SEQ ID NO: 86613 - protein, 7 aa, synthetic construct
QLMQGRL

SEQ ID NO: 86614 - protein, 7 aa, synthetic construct
RGQMHGQ

SEQ ID NO: 86615 - protein, 7 aa, synthetic construct
FASDKEK

SEQ ID NO: 86616 - protein, 7 aa, synthetic construct
SDQRLGN

SEQ ID NO: 86617 - protein, 7 aa, synthetic construct
TGVAPTQ

SEQ ID NO: 86618 - protein, 7 aa, synthetic construct
LTQQNPV

SEQ ID NO: 86619 - protein, 7 aa, synthetic construct
VKANPGG

SEQ ID NO: 86620 - protein, 7 aa, synthetic construct
SLTAAKM

SEQ ID NO: 86621 - protein, 7 aa, synthetic construct
AMSDRHL

SEQ ID NO: 86622 - protein, 7 aa, synthetic construct
PLKAITT

SEQ ID NO: 86623 - protein, 7 aa, synthetic construct
MPTANMY

SEQ ID NO: 86624 - protein, 7 aa, synthetic construct
NYNKTVM

SEQ ID NO: 86625 - protein, 7 aa, synthetic construct
RDHSESR

SEQ ID NO: 86626 - protein, 7 aa, synthetic construct
TNAFDKA

SEQ ID NO: 86627 - protein, 7 aa, synthetic construct
RNITEQP

SEQ ID NO: 86628 - protein, 7 aa, synthetic construct
RDFPRPS

SEQ ID NO: 86629 - protein, 7 aa, synthetic construct
AMEHRIP

SEQ ID NO: 86630 - protein, 7 aa, synthetic construct
FVHSPIA

SEQ ID NO: 86631 - protein, 7 aa, synthetic construct
VITNGPK

SEQ ID NO: 86632 - protein, 7 aa, synthetic construct
HTPNKML

SEQ ID NO: 86633 - protein, 7 aa, synthetic construct
LQAPMAH

SEQ ID NO: 86634 - protein, 7 aa, synthetic construct
NGEYVGR

SEQ ID NO: 86635 - protein, 7 aa, synthetic construct
SPHLQFP

SEQ ID NO: 86636 - protein, 7 aa, synthetic construct
QFKPQVV

SEQ ID NO: 86637 - protein, 7 aa, synthetic construct
NPAYAGS

SEQ ID NO: 86638 - protein, 7 aa, synthetic construct
IIPHSMP

SEQ ID NO: 86639 - protein, 7 aa, synthetic construct
EKWNAVK

SEQ ID NO: 86640 - protein, 7 aa, synthetic construct
DVWHTSD

SEQ ID NO: 86641 - protein, 7 aa, synthetic construct
HKTTFNP

SEQ ID NO: 86642 - protein, 7 aa, synthetic construct
DLPTVLA

SEQ ID NO: 86643 - protein, 7 aa, synthetic construct
PNRAAAP

SEQ ID NO: 86644 - protein, 7 aa, synthetic construct
MYDVSIS

SEQ ID NO: 86645 - protein, 7 aa, synthetic construct
LPHDADQ

SEQ ID NO: 86646 - protein, 7 aa, synthetic construct
YKVDYDS

SEQ ID NO: 86647 - protein, 7 aa, synthetic construct
YEDRTNK

SEQ ID NO: 86648 - protein, 7 aa, synthetic construct
QKEQERL

SEQ ID NO: 86649 - protein, 7 aa, synthetic construct
GPRSVNA

SEQ ID NO: 86650 - protein, 7 aa, synthetic construct
YNKAKDP

SEQ ID NO: 86651 - protein, 7 aa, synthetic construct
GQKNAGH

SEQ ID NO: 86652 - protein, 7 aa, synthetic construct
RDNQQGK

SEQ ID NO: 86653 - protein, 7 aa, synthetic construct
IYGEKNM

SEQ ID NO: 86654 - protein, 7 aa, synthetic construct
TPTIAQM

SEQ ID NO: 86655 - protein, 7 aa, synthetic construct
KNQNNSA

SEQ ID NO: 86656 - protein, 7 aa, synthetic construct
WHKGNEG

SEQ ID NO: 86657 - protein, 7 aa, synthetic construct
NNTNKNM

SEQ ID NO: 86658 - protein, 7 aa, synthetic construct
PKIQGHV

SEQ ID NO: 86659 - protein, 7 aa, synthetic construct
IMPLEKT

SEQ ID NO: 86660 - protein, 7 aa, synthetic construct
VYGTTDP

SEQ ID NO: 86661 - protein, 7 aa, synthetic construct
MGYVGSM

SEQ ID NO: 86662 - protein, 7 aa, synthetic construct
REIHDRQ

SEQ ID NO: 86663 - protein, 7 aa, synthetic construct
QGQNNKA

SEQ ID NO: 86664 - protein, 7 aa, synthetic construct
ISHAHVQ

SEQ ID NO: 86665 - protein, 7 aa, synthetic construct
IGTNSYK

SEQ ID NO: 86666 - protein, 7 aa, synthetic construct
STPVNLR

SEQ ID NO: 86667 - protein, 7 aa, synthetic construct
QAYGKVF

SEQ ID NO: 86668 - protein, 7 aa, synthetic construct
DSGGRLP

SEQ ID NO: 86669 - protein, 7 aa, synthetic construct
KSPTTAP

SEQ ID NO: 86670 - protein, 7 aa, synthetic construct
TQKAMPF

SEQ ID NO: 86671 - protein, 7 aa, synthetic construct
HHTADSM

SEQ ID NO: 86672 - protein, 7 aa, synthetic construct
QAKVVHM

SEQ ID NO: 86673 - protein, 7 aa, synthetic construct
VVNHSMS

SEQ ID NO: 86674 - protein, 7 aa, synthetic construct
AVVRNLA

SEQ ID NO: 86675 - protein, 7 aa, synthetic construct
RTMGETI

SEQ ID NO: 86676 - protein, 7 aa, synthetic construct
IDPIKLS

SEQ ID NO: 86677 - protein, 7 aa, synthetic construct
TNQGNNK

SEQ ID NO: 86678 - protein, 7 aa, synthetic construct
AHVAMPH

SEQ ID NO: 86679 - protein, 7 aa, synthetic construct
TLNGAFI

SEQ ID NO: 86680 - protein, 7 aa, synthetic construct
RFKLHQE

SEQ ID NO: 86681 - protein, 7 aa, synthetic construct
HRAGGHA

SEQ ID NO: 86682 - protein, 7 aa, synthetic construct
HNRPQSI

SEQ ID NO: 86683 - protein, 7 aa, synthetic construct
GKLGMQS

SEQ ID NO: 86684 - protein, 7 aa, synthetic construct
ALSQYQP

SEQ ID NO: 86685 - protein, 7 aa, synthetic construct
VKLVNGS

SEQ ID NO: 86686 - protein, 7 aa, synthetic construct
NPSSRPA

SEQ ID NO: 86687 - protein, 7 aa, synthetic construct
DFKSTVI

SEQ ID NO: 86688 - protein, 7 aa, synthetic construct
RSPASQS

SEQ ID NO: 86689 - protein, 7 aa, synthetic construct
KVELTMG

SEQ ID NO: 86690 - protein, 7 aa, synthetic construct
LDANSMR

SEQ ID NO: 86691 - protein, 7 aa, synthetic construct
SHPQQFQ

SEQ ID NO: 86692 - protein, 7 aa, synthetic construct
FANLYQS

SEQ ID NO: 86693 - protein, 7 aa, synthetic construct
FVALQSA

SEQ ID NO: 86694 - protein, 7 aa, synthetic construct
NWSNDGK

SEQ ID NO: 86695 - protein, 7 aa, synthetic construct
TSPGAAR

SEQ ID NO: 86696 - protein, 7 aa, synthetic construct
LSNGLYA

SEQ ID NO: 86697 - protein, 7 aa, synthetic construct
SHVVKNF

SEQ ID NO: 86698 - protein, 7 aa, synthetic construct
TNKNESE

SEQ ID NO: 86699 - protein, 7 aa, synthetic construct
PMFGNLE

SEQ ID NO: 86700 - protein, 7 aa, synthetic construct
GKYMEIG

SEQ ID NO: 86701 - protein, 7 aa, synthetic construct
QAYEKSL

SEQ ID NO: 86702 - protein, 7 aa, synthetic construct
SSNEKDQ

SEQ ID NO: 86703 - protein, 7 aa, synthetic construct
TVNVGAD

SEQ ID NO: 86704 - protein, 7 aa, synthetic construct
ILQYATA

SEQ ID NO: 86705 - protein, 7 aa, synthetic construct
AGNKIDP

SEQ ID NO: 86706 - protein, 7 aa, synthetic construct
ERHNKVA

SEQ ID NO: 86707 - protein, 7 aa, synthetic construct
PPIQQSF

SEQ ID NO: 86708 - protein, 7 aa, synthetic construct
AKTTTTS

SEQ ID NO: 86709 - protein, 7 aa, synthetic construct
RENIEKY

SEQ ID NO: 86710 - protein, 7 aa, synthetic construct
GVGEIKS

SEQ ID NO: 86711 - protein, 7 aa, synthetic construct
RDVGENR

SEQ ID NO: 86712 - protein, 7 aa, synthetic construct
GYGSHAV

SEQ ID NO: 86713 - protein, 7 aa, synthetic construct
NGTRAEG

SEQ ID NO: 86714 - protein, 7 aa, synthetic construct
ESNTVRM

SEQ ID NO: 86715 - protein, 7 aa, synthetic construct
KAATDAG

SEQ ID NO: 86716 - protein, 7 aa, synthetic construct
KATSSAS

SEQ ID NO: 86717 - protein, 7 aa, synthetic construct
HVGQDAK

SEQ ID NO: 86718 - protein, 7 aa, synthetic construct
AKPTMGG

SEQ ID NO: 86719 - protein, 7 aa, synthetic construct
HSTQLRM

SEQ ID NO: 86720 - protein, 7 aa, synthetic construct
GTRNNNV

SEQ ID NO: 86721 - protein, 7 aa, synthetic construct
NKGEPQK

SEQ ID NO: 86722 - protein, 7 aa, synthetic construct
MDMLKAV

SEQ ID NO: 86723 - protein, 7 aa, synthetic construct
LRNREGV

SEQ ID NO: 86724 - protein, 7 aa, synthetic construct
RTYDTPF

SEQ ID NO: 86725 - protein, 7 aa, synthetic construct
LNPQHHF

SEQ ID NO: 86726 - protein, 7 aa, synthetic construct
SNNNNGA

SEQ ID NO: 86727 - protein, 7 aa, synthetic construct
SHETGSF

SEQ ID NO: 86728 - protein, 7 aa, synthetic construct
YKHGRNE

SEQ ID NO: 86729 - protein, 7 aa, synthetic construct
MHMTVPA

SEQ ID NO: 86730 - protein, 7 aa, synthetic construct
RMIDKMD

SEQ ID NO: 86731 - protein, 7 aa, synthetic construct
IPTKYQA

SEQ ID NO: 86732 - protein, 7 aa, synthetic construct
GIGVLHP

SEQ ID NO: 86733 - protein, 7 aa, synthetic construct
FTKSVDT

SEQ ID NO: 86734 - protein, 7 aa, synthetic construct
KQSAATC

SEQ ID NO: 86735 - protein, 7 aa, synthetic construct
KVIHPSD

SEQ ID NO: 86736 - protein, 7 aa, synthetic construct
HLKHEMN

SEQ ID NO: 86737 - protein, 7 aa, synthetic construct
AVPVQAH

SEQ ID NO: 86738 - protein, 7 aa, synthetic construct
PTSNVDF

SEQ ID NO: 86739 - protein, 7 aa, synthetic construct
RRTDTDT

SEQ ID NO: 86740 - protein, 7 aa, synthetic construct
QHPPSLD

SEQ ID NO: 86741 - protein, 7 aa, synthetic construct
KSDHIEY

SEQ ID NO: 86742 - protein, 7 aa, synthetic construct
DEQRFGR

SEQ ID NO: 86743 - protein, 7 aa, synthetic construct
FQANRST

SEQ ID NO: 86744 - protein, 7 aa, synthetic construct
NRSPDIQ

SEQ ID NO: 86745 - protein, 7 aa, synthetic construct
AVGNQLS

SEQ ID NO: 86746 - protein, 7 aa, synthetic construct
SVVFHEG

SEQ ID NO: 86747 - protein, 7 aa, synthetic construct
FHVPNHN

SEQ ID NO: 86748 - protein, 7 aa, synthetic construct
GAVNGPG

SEQ ID NO: 86749 - protein, 7 aa, synthetic construct
KKHINGD

SEQ ID NO: 86750 - protein, 7 aa, synthetic construct
STGAPRN

SEQ ID NO: 86751 - protein, 7 aa, synthetic construct
SRADTAM

SEQ ID NO: 86752 - protein, 7 aa, synthetic construct
VTLMGDK

SEQ ID NO: 86753 - protein, 7 aa, synthetic construct
LRMNSPV

SEQ ID NO: 86754 - protein, 7 aa, synthetic construct
RQKHNDP

SEQ ID NO: 86755 - protein, 7 aa, synthetic construct
SSKSITG

SEQ ID NO: 86756 - protein, 7 aa, synthetic construct
NDHYARE

SEQ ID NO: 86757 - protein, 7 aa, synthetic construct
GKQPNQS

SEQ ID NO: 86758 - protein, 7 aa, synthetic construct
WRTSPND

SEQ ID NO: 86759 - protein, 7 aa, synthetic construct
AGNKMDM

SEQ ID NO: 86760 - protein, 7 aa, synthetic construct
LHHPRSN

SEQ ID NO: 86761 - protein, 7 aa, synthetic construct
INKDNFI

SEQ ID NO: 86762 - protein, 7 aa, synthetic construct
GVAKGAP

SEQ ID NO: 86763 - protein, 7 aa, synthetic construct
NSMQLQI

SEQ ID NO: 86764 - protein, 7 aa, synthetic construct
FPSGMAQ

SEQ ID NO: 86765 - protein, 7 aa, synthetic construct
QGFMGHP

SEQ ID NO: 86766 - protein, 7 aa, synthetic construct
RMQSAAQ

SEQ ID NO: 86767 - protein, 7 aa, synthetic construct
TATDHQR

SEQ ID NO: 86768 - protein, 7 aa, synthetic construct
IRTLVPE

SEQ ID NO: 86769 - protein, 7 aa, synthetic construct
HIEDRQM

SEQ ID NO: 86770 - protein, 7 aa, synthetic construct
YGSIRPD

SEQ ID NO: 86771 - protein, 7 aa, synthetic construct
PKNGNGA

SEQ ID NO: 86772 - protein, 7 aa, synthetic construct
RQGTNDQ

SEQ ID NO: 86773 - protein, 7 aa, synthetic construct
AQDKNQM

SEQ ID NO: 86774 - protein, 7 aa, synthetic construct
TVVNSQF

SEQ ID NO: 86775 - protein, 7 aa, synthetic construct
VHTNFRE

SEQ ID NO: 86776 - protein, 7 aa, synthetic construct
MRQPEMN

SEQ ID NO: 86777 - protein, 7 aa, synthetic construct
GAGMKNN

SEQ ID NO: 86778 - protein, 7 aa, synthetic construct
IVTVAER

SEQ ID NO: 86779 - protein, 7 aa, synthetic construct
MWSSHDA

SEQ ID NO: 86780 - protein, 7 aa, synthetic construct
TSKDPTR

SEQ ID NO: 86781 - protein, 7 aa, synthetic construct
YDSLQHV

SEQ ID NO: 86782 - protein, 7 aa, synthetic construct
RGGQDRE

SEQ ID NO: 86783 - protein, 7 aa, synthetic construct
DVRAIST

SEQ ID NO: 86784 - protein, 7 aa, synthetic construct
IAKSAVD

SEQ ID NO: 86785 - protein, 7 aa, synthetic construct
AMVSHHP

SEQ ID NO: 86786 - protein, 7 aa, synthetic construct
KPAGSTE

SEQ ID NO: 86787 - protein, 7 aa, synthetic construct
HVQIGGS

SEQ ID NO: 86788 - protein, 7 aa, synthetic construct
ITNKTVT

SEQ ID NO: 86789 - protein, 7 aa, synthetic construct
EIYAQKN

SEQ ID NO: 86790 - protein, 7 aa, synthetic construct
VNIIKVD

SEQ ID NO: 86791 - protein, 7 aa, synthetic construct
SNYTSMH

SEQ ID NO: 86792 - protein, 7 aa, synthetic construct
GVVPGRQ

SEQ ID NO: 86793 - protein, 7 aa, synthetic construct
QMQPSKE

SEQ ID NO: 86794 - protein, 7 aa, synthetic construct
IRHTETG

SEQ ID NO: 86795 - protein, 7 aa, synthetic construct
YNETTNK

SEQ ID NO: 86796 - protein, 7 aa, synthetic construct
LKTLPQG

SEQ ID NO: 86797 - protein, 7 aa, synthetic construct
PIAIDKP

SEQ ID NO: 86798 - protein, 7 aa, synthetic construct
QNPASVW

SEQ ID NO: 86799 - protein, 7 aa, synthetic construct
GDKWPNG

SEQ ID NO: 86800 - protein, 7 aa, synthetic construct
IHISGDH

SEQ ID NO: 86801 - protein, 7 aa, synthetic construct
WQTPIGG

SEQ ID NO: 86802 - protein, 7 aa, synthetic construct
KMEQVVP

SEQ ID NO: 86803 - protein, 7 aa, synthetic construct
IHVKLPQ

SEQ ID NO: 86804 - protein, 7 aa, synthetic construct
WKSKDMI

SEQ ID NO: 86805 - protein, 7 aa, synthetic construct
VMVNARN

SEQ ID NO: 86806 - protein, 7 aa, synthetic construct
KTSTKEG

SEQ ID NO: 86807 - protein, 7 aa, synthetic construct
TKDASFQ

SEQ ID NO: 86808 - protein, 7 aa, synthetic construct
LSTLHLS

SEQ ID NO: 86809 - protein, 7 aa, synthetic construct
SNGNNPA

SEQ ID NO: 86810 - protein, 7 aa, synthetic construct
LAQAVPN

SEQ ID NO: 86811 - protein, 7 aa, synthetic construct
DNRLPTP

SEQ ID NO: 86812 - protein, 7 aa, synthetic construct
KGMTEKY

SEQ ID NO: 86813 - protein, 7 aa, synthetic construct
HTHNIID

SEQ ID NO: 86814 - protein, 7 aa, synthetic construct
RNDAGAS

SEQ ID NO: 86815 - protein, 7 aa, synthetic construct
NARRTEE

SEQ ID NO: 86816 - protein, 7 aa, synthetic construct
VTTNDYI

SEQ ID NO: 86817 - protein, 7 aa, synthetic construct
WDPKVNS

SEQ ID NO: 86818 - protein, 7 aa, synthetic construct
NYHNNSH

SEQ ID NO: 86819 - protein, 7 aa, synthetic construct
SQQMAEI

SEQ ID NO: 86820 - protein, 7 aa, synthetic construct
ETMAAPR

SEQ ID NO: 86821 - protein, 7 aa, synthetic construct
EMQKAGA

SEQ ID NO: 86822 - protein, 7 aa, synthetic construct
IRASKLP

SEQ ID NO: 86823 - protein, 7 aa, synthetic construct
QQAARES

SEQ ID NO: 86824 - protein, 7 aa, synthetic construct
YREGVGI

SEQ ID NO: 86825 - protein, 7 aa, synthetic construct
LLDHKHT

SEQ ID NO: 86826 - protein, 7 aa, synthetic construct
QRSGPIM

SEQ ID NO: 86827 - protein, 7 aa, synthetic construct
KRNNGEV

SEQ ID NO: 86828 - protein, 7 aa, synthetic construct
TNQFFRE

SEQ ID NO: 86829 - protein, 7 aa, synthetic construct
RATTHLE

SEQ ID NO: 86830 - protein, 7 aa, synthetic construct
HREHHIQ

SEQ ID NO: 86831 - protein, 7 aa, synthetic construct
KSQQQIQ

SEQ ID NO: 86832 - protein, 7 aa, synthetic construct
NASRAAM

SEQ ID NO: 86833 - protein, 7 aa, synthetic construct
YDRKTHT

SEQ ID NO: 86834 - protein, 7 aa, synthetic construct
HHPEWKS

SEQ ID NO: 86835 - protein, 7 aa, synthetic construct
YGPTFQT

SEQ ID NO: 86836 - protein, 7 aa, synthetic construct
DIYAKVK

SEQ ID NO: 86837 - protein, 7 aa, synthetic construct
SKKIFVD

SEQ ID NO: 86838 - protein, 7 aa, synthetic construct
IANHQYK

SEQ ID NO: 86839 - protein, 7 aa, synthetic construct
DRPLPGM

SEQ ID NO: 86840 - protein, 7 aa, synthetic construct
SNKHESE

SEQ ID NO: 86841 - protein, 7 aa, synthetic construct
PHKNAFV

SEQ ID NO: 86842 - protein, 7 aa, synthetic construct
QTSTPAI

SEQ ID NO: 86843 - protein, 7 aa, synthetic construct
KDAVLSF

SEQ ID NO: 86844 - protein, 7 aa, synthetic construct
NNISYSH

SEQ ID NO: 86845 - protein, 7 aa, synthetic construct
FNPVSIA

SEQ ID NO: 86846 - protein, 7 aa, synthetic construct
VDVRIQN

SEQ ID NO: 86847 - protein, 7 aa, synthetic construct
MKGQVAP

SEQ ID NO: 86848 - protein, 7 aa, synthetic construct
KMPYTAT

SEQ ID NO: 86849 - protein, 7 aa, synthetic construct
GPASTGQ

SEQ ID NO: 86850 - protein, 7 aa, synthetic construct
MHQQNVP

SEQ ID NO: 86851 - protein, 7 aa, synthetic construct
KLTGVRE

SEQ ID NO: 86852 - protein, 7 aa, synthetic construct
SDAAGMR

SEQ ID NO: 86853 - protein, 7 aa, synthetic construct
GPKNAAA

SEQ ID NO: 86854 - protein, 7 aa, synthetic construct
NARTAVP

SEQ ID NO: 86855 - protein, 7 aa, synthetic construct
FKGDQET

SEQ ID NO: 86856 - protein, 7 aa, synthetic construct
QKMFVME

SEQ ID NO: 86857 - protein, 7 aa, synthetic construct
HVRSLQH

SEQ ID NO: 86858 - protein, 7 aa, synthetic construct
YTHNIME

SEQ ID NO: 86859 - protein, 7 aa, synthetic construct
NIGGSEN

SEQ ID NO: 86860 - protein, 7 aa, synthetic construct
NRGSPTA

SEQ ID NO: 86861 - protein, 7 aa, synthetic construct
PPSIPSG

SEQ ID NO: 86862 - protein, 7 aa, synthetic construct
APPQGNK

SEQ ID NO: 86863 - protein, 7 aa, synthetic construct
NREVVYA

SEQ ID NO: 86864 - protein, 7 aa, synthetic construct
DVNTKKN

SEQ ID NO: 86865 - protein, 7 aa, synthetic construct
ADPVNMA

SEQ ID NO: 86866 - protein, 7 aa, synthetic construct
VHPANTA

SEQ ID NO: 86867 - protein, 7 aa, synthetic construct
QRMNFQG

SEQ ID NO: 86868 - protein, 7 aa, synthetic construct
RNTHDVH

SEQ ID NO: 86869 - protein, 7 aa, synthetic construct
GHLSEGY

SEQ ID NO: 86870 - protein, 7 aa, synthetic construct
LREHLMQ

SEQ ID NO: 86871 - protein, 7 aa, synthetic construct
ANPMLKD

SEQ ID NO: 86872 - protein, 7 aa, synthetic construct
GVERMKV

SEQ ID NO: 86873 - protein, 7 aa, synthetic construct
CKGVAKD

SEQ ID NO: 86874 - protein, 7 aa, synthetic construct
REATRDT

SEQ ID NO: 86875 - protein, 7 aa, synthetic construct
QLTSKQY

SEQ ID NO: 86876 - protein, 7 aa, synthetic construct
PQFNNEM

SEQ ID NO: 86877 - protein, 7 aa, synthetic construct
YATDTKE

SEQ ID NO: 86878 - protein, 7 aa, synthetic construct
MTFQPVS

SEQ ID NO: 86879 - protein, 7 aa, synthetic construct
ANSSNNS

SEQ ID NO: 86880 - protein, 7 aa, synthetic construct
VKTVDYA

SEQ ID NO: 86881 - protein, 7 aa, synthetic construct
NHHSQGR

SEQ ID NO: 86882 - protein, 7 aa, synthetic construct
VKNGTNA

SEQ ID NO: 86883 - protein, 7 aa, synthetic construct
KEHFITQ

SEQ ID NO: 86884 - protein, 7 aa, synthetic construct
WRESLTN

SEQ ID NO: 86885 - protein, 7 aa, synthetic construct
YQAAPIP

SEQ ID NO: 86886 - protein, 7 aa, synthetic construct
GRGQEMH

SEQ ID NO: 86887 - protein, 7 aa, synthetic construct
PSGQILK

SEQ ID NO: 86888 - protein, 7 aa, synthetic construct
VKTEASF

SEQ ID NO: 86889 - protein, 7 aa, synthetic construct
VNPPWDS

SEQ ID NO: 86890 - protein, 7 aa, synthetic construct
AFSKEKI

SEQ ID NO: 86891 - protein, 7 aa, synthetic construct
MFTQNHG

SEQ ID NO: 86892 - protein, 7 aa, synthetic construct
SVSKVEY

SEQ ID NO: 86893 - protein, 7 aa, synthetic construct
ILGMTKV

SEQ ID NO: 86894 - protein, 7 aa, synthetic construct
WKSVSNM

SEQ ID NO: 86895 - protein, 7 aa, synthetic construct
TGASKQA

SEQ ID NO: 86896 - protein, 7 aa, synthetic construct
DFHRMKP

SEQ ID NO: 86897 - protein, 7 aa, synthetic construct
TANQGSG

SEQ ID NO: 86898 - protein, 7 aa, synthetic construct
VSNTSLP

SEQ ID NO: 86899 - protein, 7 aa, synthetic construct
PAKLGHP

SEQ ID NO: 86900 - protein, 7 aa, synthetic construct
DKFMNVG

SEQ ID NO: 86901 - protein, 7 aa, synthetic construct
NFKNSDY

SEQ ID NO: 86902 - protein, 7 aa, synthetic construct
EEKWAHK

SEQ ID NO: 86903 - protein, 7 aa, synthetic construct
HPVMSIP

SEQ ID NO: 86904 - protein, 7 aa, synthetic construct
NMGLQMA

SEQ ID NO: 86905 - protein, 7 aa, synthetic construct
QHNPTRV

SEQ ID NO: 86906 - protein, 7 aa, synthetic construct
ESRSIEN

SEQ ID NO: 86907 - protein, 7 aa, synthetic construct
PNTIGVE

SEQ ID NO: 86908 - protein, 7 aa, synthetic construct
LAITTGP

SEQ ID NO: 86909 - protein, 7 aa, synthetic construct
AYTKVGV

SEQ ID NO: 86910 - protein, 7 aa, synthetic construct
GKLANQD

SEQ ID NO: 86911 - protein, 7 aa, synthetic construct
DSQRLTQ

SEQ ID NO: 86912 - protein, 7 aa, synthetic construct
GGFHMQT

SEQ ID NO: 86913 - protein, 7 aa, synthetic construct
AFGPDVG

SEQ ID NO: 86914 - protein, 7 aa, synthetic construct
SMHNERE

SEQ ID NO: 86915 - protein, 7 aa, synthetic construct
PFQEKII

SEQ ID NO: 86916 - protein, 7 aa, synthetic construct
IMQGMTK

SEQ ID NO: 86917 - protein, 7 aa, synthetic construct
VHSPLSK

SEQ ID NO: 86918 - protein, 7 aa, synthetic construct
FGSGSKF

SEQ ID NO: 86919 - protein, 7 aa, synthetic construct
SQDWKGT

SEQ ID NO: 86920 - protein, 7 aa, synthetic construct
KMASIRD

SEQ ID NO: 86921 - protein, 7 aa, synthetic construct
TAPGITS

SEQ ID NO: 86922 - protein, 7 aa, synthetic construct
PASHPTQ

SEQ ID NO: 86923 - protein, 7 aa, synthetic construct
IAKQNSL

SEQ ID NO: 86924 - protein, 7 aa, synthetic construct
PTFNERS

SEQ ID NO: 86925 - protein, 7 aa, synthetic construct
SRSQVND

SEQ ID NO: 86926 - protein, 7 aa, synthetic construct
LVTVVSK

SEQ ID NO: 86927 - protein, 7 aa, synthetic construct
AKSAVGT

SEQ ID NO: 86928 - protein, 7 aa, synthetic construct
ERANNVL

SEQ ID NO: 86929 - protein, 7 aa, synthetic construct
HNSHDFK

SEQ ID NO: 86930 - protein, 7 aa, synthetic construct
VDAQKMF

SEQ ID NO: 86931 - protein, 7 aa, synthetic construct
PTKESYM

SEQ ID NO: 86932 - protein, 7 aa, synthetic construct
QPLRSIG

SEQ ID NO: 86933 - protein, 7 aa, synthetic construct
HDSVMPA

SEQ ID NO: 86934 - protein, 7 aa, synthetic construct
TKQNQDW

SEQ ID NO: 86935 - protein, 7 aa, synthetic construct
GKVKYDT

SEQ ID NO: 86936 - protein, 7 aa, synthetic construct
WTAAGRG

SEQ ID NO: 86937 - protein, 7 aa, synthetic construct
HTGGSRE

SEQ ID NO: 86938 - protein, 7 aa, synthetic construct
TNWHPNE

SEQ ID NO: 86939 - protein, 7 aa, synthetic construct
KTNSTST

SEQ ID NO: 86940 - protein, 7 aa, synthetic construct
QTSQRII

SEQ ID NO: 86941 - protein, 7 aa, synthetic construct
PRHMEPI

SEQ ID NO: 86942 - protein, 7 aa, synthetic construct
NHEHQRE

SEQ ID NO: 86943 - protein, 7 aa, synthetic construct
HPQIHEA

SEQ ID NO: 86944 - protein, 7 aa, synthetic construct
DIKDQNR

SEQ ID NO: 86945 - protein, 7 aa, synthetic construct
TYDSIKL

SEQ ID NO: 86946 - protein, 7 aa, synthetic construct
PDTSQKK

SEQ ID NO: 86947 - protein, 7 aa, synthetic construct
NEYVGGA

SEQ ID NO: 86948 - protein, 7 aa, synthetic construct
PQKTMTP

SEQ ID NO: 86949 - protein, 7 aa, synthetic construct
TIRAFPP

SEQ ID NO: 86950 - protein, 7 aa, synthetic construct
PRSGYTD

SEQ ID NO: 86951 - protein, 7 aa, synthetic construct
QKNQADI

SEQ ID NO: 86952 - protein, 7 aa, synthetic construct
RMAAHLD

SEQ ID NO: 86953 - protein, 7 aa, synthetic construct
VEFSRAH

SEQ ID NO: 86954 - protein, 7 aa, synthetic construct
MNPGTEA

SEQ ID NO: 86955 - protein, 7 aa, synthetic construct
TAQLVSC

SEQ ID NO: 86956 - protein, 7 aa, synthetic construct
IHSTKQQ

SEQ ID NO: 86957 - protein, 7 aa, synthetic construct
AVHRQEL

SEQ ID NO: 86958 - protein, 7 aa, synthetic construct
SQYVGGD

SEQ ID NO: 86959 - protein, 7 aa, synthetic construct
PQKGAPA

SEQ ID NO: 86960 - protein, 7 aa, synthetic construct
GKMEFNH

SEQ ID NO: 86961 - protein, 7 aa, synthetic construct
RQGVMPV

SEQ ID NO: 86962 - protein, 7 aa, synthetic construct
IYTFTED

SEQ ID NO: 86963 - protein, 7 aa, synthetic construct
RAIANQS

SEQ ID NO: 86964 - protein, 7 aa, synthetic construct
GKDKMIG

SEQ ID NO: 86965 - protein, 7 aa, synthetic construct
IEGVAIR

SEQ ID NO: 86966 - protein, 7 aa, synthetic construct
PHQPSIV

SEQ ID NO: 86967 - protein, 7 aa, synthetic construct
RPTFEVG

SEQ ID NO: 86968 - protein, 7 aa, synthetic construct
GVWRQND

SEQ ID NO: 86969 - protein, 7 aa, synthetic construct
SHVNGDA

SEQ ID NO: 86970 - protein, 7 aa, synthetic construct
KHLNEVA

SEQ ID NO: 86971 - protein, 7 aa, synthetic construct
TNSQKQS

SEQ ID NO: 86972 - protein, 7 aa, synthetic construct
FHSDHTP

SEQ ID NO: 86973 - protein, 7 aa, synthetic construct
QVHGNMN

SEQ ID NO: 86974 - protein, 7 aa, synthetic construct
WTQVDNK

SEQ ID NO: 86975 - protein, 7 aa, synthetic construct
GSHNGVM

SEQ ID NO: 86976 - protein, 7 aa, synthetic construct
GQRSENL

SEQ ID NO: 86977 - protein, 7 aa, synthetic construct
FAKTKME

SEQ ID NO: 86978 - protein, 7 aa, synthetic construct
QGHPDSS

SEQ ID NO: 86979 - protein, 7 aa, synthetic construct
GGAHNNM

SEQ ID NO: 86980 - protein, 7 aa, synthetic construct
TNSARAA

SEQ ID NO: 86981 - protein, 7 aa, synthetic construct
DQKVHEP

SEQ ID NO: 86982 - protein, 7 aa, synthetic construct
NAGNYTA

SEQ ID NO: 86983 - protein, 7 aa, synthetic construct
PNKIWGE

SEQ ID NO: 86984 - protein, 7 aa, synthetic construct
TMQMDKA

SEQ ID NO: 86985 - protein, 7 aa, synthetic construct
TVAGSGN

SEQ ID NO: 86986 - protein, 7 aa, synthetic construct
VSNKSQA

SEQ ID NO: 86987 - protein, 7 aa, synthetic construct
ARNIDDG

SEQ ID NO: 86988 - protein, 7 aa, synthetic construct
ADPHHKE

SEQ ID NO: 86989 - protein, 7 aa, synthetic construct
AYVKDKA

SEQ ID NO: 86990 - protein, 7 aa, synthetic construct
MHGTQGS

SEQ ID NO: 86991 - protein, 7 aa, synthetic construct
RDEMRGF

SEQ ID NO: 86992 - protein, 7 aa, synthetic construct
YEHHLPM

SEQ ID NO: 86993 - protein, 7 aa, synthetic construct
HANPPQE

SEQ ID NO: 86994 - protein, 7 aa, synthetic construct
GNAKGTN

SEQ ID NO: 86995 - protein, 7 aa, synthetic construct
VSQGHGL

SEQ ID NO: 86996 - protein, 7 aa, synthetic construct
TKTLHNE

SEQ ID NO: 86997 - protein, 7 aa, synthetic construct
NRENSVA

SEQ ID NO: 86998 - protein, 7 aa, synthetic construct
RFIDTQP

SEQ ID NO: 86999 - protein, 7 aa, synthetic construct
PRNGGIV

SEQ ID NO: 87000 - protein, 7 aa, synthetic construct
HHGTRYP

SEQ ID NO: 87001 - protein, 7 aa, synthetic construct
SMQKSQG

SEQ ID NO: 87002 - protein, 7 aa, synthetic construct
PNSTNFV

SEQ ID NO: 87003 - protein, 7 aa, synthetic construct
NQFNDKW

SEQ ID NO: 87004 - protein, 7 aa, synthetic construct
SVAGYHA

SEQ ID NO: 87005 - protein, 7 aa, synthetic construct
IVGSREA

SEQ ID NO: 87006 - protein, 7 aa, synthetic construct
EVSHNLG

SEQ ID NO: 87007 - protein, 7 aa, synthetic construct
KSPIMGH

SEQ ID NO: 87008 - protein, 7 aa, synthetic construct
HSTLAGR

SEQ ID NO: 87009 - protein, 7 aa, synthetic construct
TKIETPH

SEQ ID NO: 87010 - protein, 7 aa, synthetic construct
GHSAHAH

SEQ ID NO: 87011 - protein, 7 aa, synthetic construct
TTHHQKV

SEQ ID NO: 87012 - protein, 7 aa, synthetic construct
MTQNALS

SEQ ID NO: 87013 - protein, 7 aa, synthetic construct
KEQAWSM

SEQ ID NO: 87014 - protein, 7 aa, synthetic construct
NAHNTTP

SEQ ID NO: 87015 - protein, 7 aa, synthetic construct
KGSMSSD

SEQ ID NO: 87016 - protein, 7 aa, synthetic construct
GFPMMSA

SEQ ID NO: 87017 - protein, 7 aa, synthetic construct
MGNPMQH

SEQ ID NO: 87018 - protein, 7 aa, synthetic construct
GKHLEYV

SEQ ID NO: 87019 - protein, 7 aa, synthetic construct
HSALNKI

SEQ ID NO: 87020 - protein, 7 aa, synthetic construct
MPSGGMK

SEQ ID NO: 87021 - protein, 7 aa, synthetic construct
NAAPHMI

SEQ ID NO: 87022 - protein, 7 aa, synthetic construct
IPAGMDN

SEQ ID NO: 87023 - protein, 7 aa, synthetic construct
VNPTYKQ

SEQ ID NO: 87024 - protein, 7 aa, synthetic construct
ISQNLSV

SEQ ID NO: 87025 - protein, 7 aa, synthetic construct
HQGIIKI

SEQ ID NO: 87026 - protein, 7 aa, synthetic construct
FNNGKLE

SEQ ID NO: 87027 - protein, 7 aa, synthetic construct
FGESLSH

SEQ ID NO: 87028 - protein, 7 aa, synthetic construct
TGSPRPG

SEQ ID NO: 87029 - protein, 7 aa, synthetic construct
DTRGRDW

SEQ ID NO: 87030 - protein, 7 aa, synthetic construct
YRQNIEV

SEQ ID NO: 87031 - protein, 7 aa, synthetic construct
NKMNLQW

SEQ ID NO: 87032 - protein, 7 aa, synthetic construct
QVQSAAN

SEQ ID NO: 87033 - protein, 7 aa, synthetic construct
STRFDMS

SEQ ID NO: 87034 - protein, 7 aa, synthetic construct
EDRAHGH

SEQ ID NO: 87035 - protein, 7 aa, synthetic construct
DYNYAKA

SEQ ID NO: 87036 - protein, 7 aa, synthetic construct
HMQIVPP

SEQ ID NO: 87037 - protein, 7 aa, synthetic construct
TPKMLHS

SEQ ID NO: 87038 - protein, 7 aa, synthetic construct
VLKRENI

SEQ ID NO: 87039 - protein, 7 aa, synthetic construct
RQPERYN

SEQ ID NO: 87040 - protein, 7 aa, synthetic construct
VSHIQNY

SEQ ID NO: 87041 - protein, 7 aa, synthetic construct
FQIANME

SEQ ID NO: 87042 - protein, 7 aa, synthetic construct
EANIKND

SEQ ID NO: 87043 - protein, 7 aa, synthetic construct
KNQLEDG

SEQ ID NO: 87044 - protein, 7 aa, synthetic construct
TVMTLQS

SEQ ID NO: 87045 - protein, 7 aa, synthetic construct
NSPFSVE

SEQ ID NO: 87046 - protein, 7 aa, synthetic construct
ITGKQDG

SEQ ID NO: 87047 - protein, 7 aa, synthetic construct
ERLTYAG

SEQ ID NO: 87048 - protein, 7 aa, synthetic construct
NRQAQQG

SEQ ID NO: 87049 - protein, 7 aa, synthetic construct
PHVKNSP

SEQ ID NO: 87050 - protein, 7 aa, synthetic construct
PRQPNNA

SEQ ID NO: 87051 - protein, 7 aa, synthetic construct
AKPHVQP

SEQ ID NO: 87052 - protein, 7 aa, synthetic construct
TQSQGTM

SEQ ID NO: 87053 - protein, 7 aa, synthetic construct
KLVGPII

SEQ ID NO: 87054 - protein, 7 aa, synthetic construct
LDHPAAP

SEQ ID NO: 87055 - protein, 7 aa, synthetic construct
RDQGAPT

SEQ ID NO: 87056 - protein, 7 aa, synthetic construct
VSATNLH

SEQ ID NO: 87057 - protein, 7 aa, synthetic construct
AQTTVHI

SEQ ID NO: 87058 - protein, 7 aa, synthetic construct
HQGQKKD

SEQ ID NO: 87059 - protein, 7 aa, synthetic construct
VSVTGVH

SEQ ID NO: 87060 - protein, 7 aa, synthetic construct
MGQHNIP

SEQ ID NO: 87061 - protein, 7 aa, synthetic construct
REGVDRL

SEQ ID NO: 87062 - protein, 7 aa, synthetic construct
HTNASSM

SEQ ID NO: 87063 - protein, 7 aa, synthetic construct
QQIKDYV

SEQ ID NO: 87064 - protein, 7 aa, synthetic construct
YNARQFA

SEQ ID NO: 87065 - protein, 7 aa, synthetic construct
FIMKSLP

SEQ ID NO: 87066 - protein, 7 aa, synthetic construct
STPRRAE

SEQ ID NO: 87067 - protein, 7 aa, synthetic construct
RGDFDIP

SEQ ID NO: 87068 - protein, 7 aa, synthetic construct
VNHGNEL

SEQ ID NO: 87069 - protein, 7 aa, synthetic construct
RISQATI

SEQ ID NO: 87070 - protein, 7 aa, synthetic construct
PGRGYPD

SEQ ID NO: 87071 - protein, 7 aa, synthetic construct
AAGSKWA

SEQ ID NO: 87072 - protein, 7 aa, synthetic construct
PGVQQQY

SEQ ID NO: 87073 - protein, 7 aa, synthetic construct
HEPKNNV

SEQ ID NO: 87074 - protein, 7 aa, synthetic construct
NWSIQTA

SEQ ID NO: 87075 - protein, 7 aa, synthetic construct
NTHHSFE

SEQ ID NO: 87076 - protein, 7 aa, synthetic construct
IIQRENT

SEQ ID NO: 87077 - protein, 7 aa, synthetic construct
MKNTGNG

SEQ ID NO: 87078 - protein, 7 aa, synthetic construct
AGQWKAS

SEQ ID NO: 87079 - protein, 7 aa, synthetic construct
HAGGYLA

SEQ ID NO: 87080 - protein, 7 aa, synthetic construct
QHQTNIY

SEQ ID NO: 87081 - protein, 7 aa, synthetic construct
MKEANLI

SEQ ID NO: 87082 - protein, 7 aa, synthetic construct
AMMNRVH

SEQ ID NO: 87083 - protein, 7 aa, synthetic construct
VNGYSDK

SEQ ID NO: 87084 - protein, 7 aa, synthetic construct
SLRLSVN

SEQ ID NO: 87085 - protein, 7 aa, synthetic construct
NSKTNNA

SEQ ID NO: 87086 - protein, 7 aa, synthetic construct
KDHGSAF

SEQ ID NO: 87087 - protein, 7 aa, synthetic construct
GKFVAVQ

SEQ ID NO: 87088 - protein, 7 aa, synthetic construct
QNDARRL

SEQ ID NO: 87089 - protein, 7 aa, synthetic construct
TVANPIP

SEQ ID NO: 87090 - protein, 7 aa, synthetic construct
PSKSSAA

SEQ ID NO: 87091 - protein, 7 aa, synthetic construct
REYPIGG

SEQ ID NO: 87092 - protein, 7 aa, synthetic construct
RMNGPQQ

SEQ ID NO: 87093 - protein, 7 aa, synthetic construct
DRMQGKH

SEQ ID NO: 87094 - protein, 7 aa, synthetic construct
HHHVKMQ

SEQ ID NO: 87095 - protein, 7 aa, synthetic construct
IYEFRTA

SEQ ID NO: 87096 - protein, 7 aa, synthetic construct
KDAKESS

SEQ ID NO: 87097 - protein, 7 aa, synthetic construct
KMTNSQT

SEQ ID NO: 87098 - protein, 7 aa, synthetic construct
HPLSLNG

SEQ ID NO: 87099 - protein, 7 aa, synthetic construct
MRSAGMG

SEQ ID NO: 87100 - protein, 7 aa, synthetic construct
PALLKEK

SEQ ID NO: 87101 - protein, 7 aa, synthetic construct
KDRFTDR

SEQ ID NO: 87102 - protein, 7 aa, synthetic construct
KYQNSTP

SEQ ID NO: 87103 - protein, 7 aa, synthetic construct
AKGMNGV

SEQ ID NO: 87104 - protein, 7 aa, synthetic construct
RMHSNNF

SEQ ID NO: 87105 - protein, 7 aa, synthetic construct
EIQVTSG

SEQ ID NO: 87106 - protein, 7 aa, synthetic construct
PRMQQSP

SEQ ID NO: 87107 - protein, 7 aa, synthetic construct
KVSMKFG

SEQ ID NO: 87108 - protein, 7 aa, synthetic construct
HNGREPK

SEQ ID NO: 87109 - protein, 7 aa, synthetic construct
TTQQKMT

SEQ ID NO: 87110 - protein, 7 aa, synthetic construct
ASPQWIG

SEQ ID NO: 87111 - protein, 7 aa, synthetic construct
FMKHAAL

SEQ ID NO: 87112 - protein, 7 aa, synthetic construct
IRRTDDH

SEQ ID NO: 87113 - protein, 7 aa, synthetic construct
LPETKTY

SEQ ID NO: 87114 - protein, 7 aa, synthetic construct
VPGYAIK

SEQ ID NO: 87115 - protein, 7 aa, synthetic construct
TSRAEIQ

SEQ ID NO: 87116 - protein, 7 aa, synthetic construct
TMFAHTA

SEQ ID NO: 87117 - protein, 7 aa, synthetic construct
KPQMHIG

SEQ ID NO: 87118 - protein, 7 aa, synthetic construct
DVFRVGA

SEQ ID NO: 87119 - protein, 7 aa, synthetic construct
NNMIRAV

SEQ ID NO: 87120 - protein, 7 aa, synthetic construct
KSKHGDI

SEQ ID NO: 87121 - protein, 7 aa, synthetic construct
WSQTDSG

SEQ ID NO: 87122 - protein, 7 aa, synthetic construct
MTQNRSV

SEQ ID NO: 87123 - protein, 7 aa, synthetic construct
SMRVPEY

SEQ ID NO: 87124 - protein, 7 aa, synthetic construct
FGRIGQG

SEQ ID NO: 87125 - protein, 7 aa, synthetic construct
GRPMMTG

SEQ ID NO: 87126 - protein, 7 aa, synthetic construct
MPHHPSS

SEQ ID NO: 87127 - protein, 7 aa, synthetic construct
PVQKTTM

SEQ ID NO: 87128 - protein, 7 aa, synthetic construct
ISQGMIA

SEQ ID NO: 87129 - protein, 7 aa, synthetic construct
YPGKIDM

SEQ ID NO: 87130 - protein, 7 aa, synthetic construct
TRASFTS

SEQ ID NO: 87131 - protein, 7 aa, synthetic construct
KNQNPAG

SEQ ID NO: 87132 - protein, 7 aa, synthetic construct
EKHRPSP

SEQ ID NO: 87133 - protein, 7 aa, synthetic construct
EPRGPDS

SEQ ID NO: 87134 - protein, 7 aa, synthetic construct
TSYPHSS

SEQ ID NO: 87135 - protein, 7 aa, synthetic construct
SELMKEK

SEQ ID NO: 87136 - protein, 7 aa, synthetic construct
SKAPGFG

SEQ ID NO: 87137 - protein, 7 aa, synthetic construct
KNRQEWE

SEQ ID NO: 87138 - protein, 7 aa, synthetic construct
STAVRTY

SEQ ID NO: 87139 - protein, 7 aa, synthetic construct
TSNNRMP

SEQ ID NO: 87140 - protein, 7 aa, synthetic construct
WTKSENE

SEQ ID NO: 87141 - protein, 7 aa, synthetic construct
NERVHNL

SEQ ID NO: 87142 - protein, 7 aa, synthetic construct
SWKAENT

SEQ ID NO: 87143 - protein, 7 aa, synthetic construct
IMKAGMH

SEQ ID NO: 87144 - protein, 7 aa, synthetic construct
DGYARVA

SEQ ID NO: 87145 - protein, 7 aa, synthetic construct
SVWANQD

SEQ ID NO: 87146 - protein, 7 aa, synthetic construct
APYANGT

SEQ ID NO: 87147 - protein, 7 aa, synthetic construct
EHFQPER

SEQ ID NO: 87148 - protein, 7 aa, synthetic construct
QKETWNK

SEQ ID NO: 87149 - protein, 7 aa, synthetic construct
WVHEGSM

SEQ ID NO: 87150 - protein, 7 aa, synthetic construct
SLKVSGF

SEQ ID NO: 87151 - protein, 7 aa, synthetic construct
LPAFPER

SEQ ID NO: 87152 - protein, 7 aa, synthetic construct
VFQSNPI

SEQ ID NO: 87153 - protein, 7 aa, synthetic construct
MRDSFQH

SEQ ID NO: 87154 - protein, 7 aa, synthetic construct
HKHAMPH

SEQ ID NO: 87155 - protein, 7 aa, synthetic construct
KKDSYAG

SEQ ID NO: 87156 - protein, 7 aa, synthetic construct
HPNPASP

SEQ ID NO: 87157 - protein, 7 aa, synthetic construct
RQMGGFS

SEQ ID NO: 87158 - protein, 7 aa, synthetic construct
FGPDYHG

SEQ ID NO: 87159 - protein, 7 aa, synthetic construct
NGMHTGI

SEQ ID NO: 87160 - protein, 7 aa, synthetic construct
VLPPMPR

SEQ ID NO: 87161 - protein, 7 aa, synthetic construct
VMSMNEY

SEQ ID NO: 87162 - protein, 7 aa, synthetic construct
AQGRIDR

SEQ ID NO: 87163 - protein, 7 aa, synthetic construct
SESFRHE

SEQ ID NO: 87164 - protein, 7 aa, synthetic construct
KMDVMNQ

SEQ ID NO: 87165 - protein, 7 aa, synthetic construct
HQPYLNA

SEQ ID NO: 87166 - protein, 7 aa, synthetic construct
TEKKLHD

SEQ ID NO: 87167 - protein, 7 aa, synthetic construct
QNVIGSH

SEQ ID NO: 87168 - protein, 7 aa, synthetic construct
MAKRHDD

SEQ ID NO: 87169 - protein, 7 aa, synthetic construct
LSGMRTD

SEQ ID NO: 87170 - protein, 7 aa, synthetic construct
NATRMSA

SEQ ID NO: 87171 - protein, 7 aa, synthetic construct
GNVMPIT

SEQ ID NO: 87172 - protein, 7 aa, synthetic construct
VIEQRGH

SEQ ID NO: 87173 - protein, 7 aa, synthetic construct
ALRYDNE

SEQ ID NO: 87174 - protein, 7 aa, synthetic construct
AGITHNP

SEQ ID NO: 87175 - protein, 7 aa, synthetic construct
ISTTEVQ

SEQ ID NO: 87176 - protein, 7 aa, synthetic construct
FGGQGDG

SEQ ID NO: 87177 - protein, 7 aa, synthetic construct
YHEAFKQ

SEQ ID NO: 87178 - protein, 7 aa, synthetic construct
GTGTYTM

SEQ ID NO: 87179 - protein, 7 aa, synthetic construct
GFKETHT

SEQ ID NO: 87180 - protein, 7 aa, synthetic construct
TRIEGNY

SEQ ID NO: 87181 - protein, 7 aa, synthetic construct
AVNGAAK

SEQ ID NO: 87182 - protein, 7 aa, synthetic construct
HSVDRNP

SEQ ID NO: 87183 - protein, 7 aa, synthetic construct
QSQHLIV

SEQ ID NO: 87184 - protein, 7 aa, synthetic construct
MNQREDT

SEQ ID NO: 87185 - protein, 7 aa, synthetic construct
PLFGSNG

SEQ ID NO: 87186 - protein, 7 aa, synthetic construct
APRGNEA

SEQ ID NO: 87187 - protein, 7 aa, synthetic construct
TGVKTSP

SEQ ID NO: 87188 - protein, 7 aa, synthetic construct
AKVPGDL

SEQ ID NO: 87189 - protein, 7 aa, synthetic construct
KRPDTLV

SEQ ID NO: 87190 - protein, 7 aa, synthetic construct
ASPGYAA

SEQ ID NO: 87191 - protein, 7 aa, synthetic construct
MVVTQQP

SEQ ID NO: 87192 - protein, 7 aa, synthetic construct
DSIKRVD

SEQ ID NO: 87193 - protein, 7 aa, synthetic construct
VHGHAHG

SEQ ID NO: 87194 - protein, 7 aa, synthetic construct
NYQSNSS

SEQ ID NO: 87195 - protein, 7 aa, synthetic construct
CDGKRIC

SEQ ID NO: 87196 - protein, 7 aa, synthetic construct
FLPNQAI

SEQ ID NO: 87197 - protein, 7 aa, synthetic construct
YDVAYTS

SEQ ID NO: 87198 - protein, 7 aa, synthetic construct
KQDQFKS

SEQ ID NO: 87199 - protein, 7 aa, synthetic construct
DRRSMGG

SEQ ID NO: 87200 - protein, 7 aa, synthetic construct
KGAQTNA

SEQ ID NO: 87201 - protein, 7 aa, synthetic construct
WTERDAT

SEQ ID NO: 87202 - protein, 7 aa, synthetic construct
QRVEARQ

SEQ ID NO: 87203 - protein, 7 aa, synthetic construct
WGEVRLN

SEQ ID NO: 87204 - protein, 7 aa, synthetic construct
DSQKERV

SEQ ID NO: 87205 - protein, 7 aa, synthetic construct
RTTVDQD

SEQ ID NO: 87206 - protein, 7 aa, synthetic construct
VLGPDPP

SEQ ID NO: 87207 - protein, 7 aa, synthetic construct
MGGMAPI

SEQ ID NO: 87208 - protein, 7 aa, synthetic construct
SRMDSGM

SEQ ID NO: 87209 - protein, 7 aa, synthetic construct
KKDKTPP

SEQ ID NO: 87210 - protein, 7 aa, synthetic construct
INMHGMS

SEQ ID NO: 87211 - protein, 7 aa, synthetic construct
KDKEHKS

SEQ ID NO: 87212 - protein, 7 aa, synthetic construct
DWKEGAK

SEQ ID NO: 87213 - protein, 7 aa, synthetic construct
SQKNSNA

SEQ ID NO: 87214 - protein, 7 aa, synthetic construct
QGHKPPQ

SEQ ID NO: 87215 - protein, 7 aa, synthetic construct
HDKFNKG

SEQ ID NO: 87216 - protein, 7 aa, synthetic construct
VRHETKE

SEQ ID NO: 87217 - protein, 7 aa, synthetic construct
NAALFPA

SEQ ID NO: 87218 - protein, 7 aa, synthetic construct
WKGEGNS

SEQ ID NO: 87219 - protein, 7 aa, synthetic construct
GAERMKD

SEQ ID NO: 87220 - protein, 7 aa, synthetic construct
LRPNHPF

SEQ ID NO: 87221 - protein, 7 aa, synthetic construct
GPLKINL

SEQ ID NO: 87222 - protein, 7 aa, synthetic construct
NGVYNQP

SEQ ID NO: 87223 - protein, 7 aa, synthetic construct
TFAVKYN

SEQ ID NO: 87224 - protein, 7 aa, synthetic construct
DKNTGRH

SEQ ID NO: 87225 - protein, 7 aa, synthetic construct
HAQVNRY

SEQ ID NO: 87226 - protein, 7 aa, synthetic construct
TKIEQRE

SEQ ID NO: 87227 - protein, 7 aa, synthetic construct
RLTDQVP

SEQ ID NO: 87228 - protein, 7 aa, synthetic construct
YGLYTDD

SEQ ID NO: 87229 - protein, 7 aa, synthetic construct
DRSMTLS

SEQ ID NO: 87230 - protein, 7 aa, synthetic construct
WKIRTHD

SEQ ID NO: 87231 - protein, 7 aa, synthetic construct
SNSMKQE

SEQ ID NO: 87232 - protein, 7 aa, synthetic construct
KHQNIKE

SEQ ID NO: 87233 - protein, 7 aa, synthetic construct
GSAHMSH

SEQ ID NO: 87234 - protein, 7 aa, synthetic construct
GPNIMAP

SEQ ID NO: 87235 - protein, 7 aa, synthetic construct
QTPTTIK

SEQ ID NO: 87236 - protein, 7 aa, synthetic construct
LGMKPEP

SEQ ID NO: 87237 - protein, 7 aa, synthetic construct
ESQKMAA

SEQ ID NO: 87238 - protein, 7 aa, synthetic construct
LNSGMHP

SEQ ID NO: 87239 - protein, 7 aa, synthetic construct
GQRSFNA

SEQ ID NO: 87240 - protein, 7 aa, synthetic construct
ETARSVW

SEQ ID NO: 87241 - protein, 7 aa, synthetic construct
REGLQQR

SEQ ID NO: 87242 - protein, 7 aa, synthetic construct
KPPQGMH

SEQ ID NO: 87243 - protein, 7 aa, synthetic construct
HLGHKHI

SEQ ID NO: 87244 - protein, 7 aa, synthetic construct
AVNHNYE

SEQ ID NO: 87245 - protein, 7 aa, synthetic construct
TTFHGSH

SEQ ID NO: 87246 - protein, 7 aa, synthetic construct
LVVNENK

SEQ ID NO: 87247 - protein, 7 aa, synthetic construct
MSPGKTA

SEQ ID NO: 87248 - protein, 7 aa, synthetic construct
FDKIPVR

SEQ ID NO: 87249 - protein, 7 aa, synthetic construct
MSHWKVE

SEQ ID NO: 87250 - protein, 7 aa, synthetic construct
GYPFSSA

SEQ ID NO: 87251 - protein, 7 aa, synthetic construct
KVKQSFD

SEQ ID NO: 87252 - protein, 7 aa, synthetic construct
VRDAGEV

SEQ ID NO: 87253 - protein, 7 aa, synthetic construct
SQVGTQY

SEQ ID NO: 87254 - protein, 7 aa, synthetic construct
WTDKLMH

SEQ ID NO: 87255 - protein, 7 aa, synthetic construct
DSPAMAK

SEQ ID NO: 87256 - protein, 7 aa, synthetic construct
NKFYNTA

SEQ ID NO: 87257 - protein, 7 aa, synthetic construct
SLKHTFQ

SEQ ID NO: 87258 - protein, 7 aa, synthetic construct
QPPGHLK

SEQ ID NO: 87259 - protein, 7 aa, synthetic construct
WDANLKQ

SEQ ID NO: 87260 - protein, 7 aa, synthetic construct
AHIVNER

SEQ ID NO: 87261 - protein, 7 aa, synthetic construct
SHDGRTR

SEQ ID NO: 87262 - protein, 7 aa, synthetic construct
QPQKPFQ

SEQ ID NO: 87263 - protein, 7 aa, synthetic construct
TVQESYK

SEQ ID NO: 87264 - protein, 7 aa, synthetic construct
SRPMGNL

SEQ ID NO: 87265 - protein, 7 aa, synthetic construct
GEYFQSA

SEQ ID NO: 87266 - protein, 7 aa, synthetic construct
EFKRELS

SEQ ID NO: 87267 - protein, 7 aa, synthetic construct
QPRNQQE

SEQ ID NO: 87268 - protein, 7 aa, synthetic construct
QSHTNHA

SEQ ID NO: 87269 - protein, 7 aa, synthetic construct
QLHINAM

SEQ ID NO: 87270 - protein, 7 aa, synthetic construct
SLPHPDS

SEQ ID NO: 87271 - protein, 7 aa, synthetic construct
TWQQQQK

SEQ ID NO: 87272 - protein, 7 aa, synthetic construct
RKIIADE

SEQ ID NO: 87273 - protein, 7 aa, synthetic construct
NANTSYF

SEQ ID NO: 87274 - protein, 7 aa, synthetic construct
QQNRENI

SEQ ID NO: 87275 - protein, 7 aa, synthetic construct
DPRGMTK

SEQ ID NO: 87276 - protein, 7 aa, synthetic construct
KVQKEYD

SEQ ID NO: 87277 - protein, 7 aa, synthetic construct
VKDPNFA

SEQ ID NO: 87278 - protein, 7 aa, synthetic construct
RDFINGK

SEQ ID NO: 87279 - protein, 7 aa, synthetic construct
VSNVDQY

SEQ ID NO: 87280 - protein, 7 aa, synthetic construct
KNSSIRE

SEQ ID NO: 87281 - protein, 7 aa, synthetic construct
DFTGHHS

SEQ ID NO: 87282 - protein, 7 aa, synthetic construct
NKRQETD

SEQ ID NO: 87283 - protein, 7 aa, synthetic construct
QAQAGLT

SEQ ID NO: 87284 - protein, 7 aa, synthetic construct
QERQAGY

SEQ ID NO: 87285 - protein, 7 aa, synthetic construct
NRPEVYA

SEQ ID NO: 87286 - protein, 7 aa, synthetic construct
PNRAIDT

SEQ ID NO: 87287 - protein, 7 aa, synthetic construct
VLRANNI

SEQ ID NO: 87288 - protein, 7 aa, synthetic construct
AASPNFI

SEQ ID NO: 87289 - protein, 7 aa, synthetic construct
YQHERET

SEQ ID NO: 87290 - protein, 7 aa, synthetic construct
GDVSTRA

SEQ ID NO: 87291 - protein, 7 aa, synthetic construct
HRETPMD

SEQ ID NO: 87292 - protein, 7 aa, synthetic construct
THEKFPF

SEQ ID NO: 87293 - protein, 7 aa, synthetic construct
NPTVQAR

SEQ ID NO: 87294 - protein, 7 aa, synthetic construct
TKYPKEI

SEQ ID NO: 87295 - protein, 7 aa, synthetic construct
YTQLIHE

SEQ ID NO: 87296 - protein, 7 aa, synthetic construct
SYNKAYT

SEQ ID NO: 87297 - protein, 7 aa, synthetic construct
KYASALN

SEQ ID NO: 87298 - protein, 7 aa, synthetic construct
VELGQHR

SEQ ID NO: 87299 - protein, 7 aa, synthetic construct
ALGVITH

SEQ ID NO: 87300 - protein, 7 aa, synthetic construct
VREDREW

SEQ ID NO: 87301 - protein, 7 aa, synthetic construct
FNKGVEM

SEQ ID NO: 87302 - protein, 7 aa, synthetic construct
MKRIDDR

SEQ ID NO: 87303 - protein, 7 aa, synthetic construct
PFENWKG

SEQ ID NO: 87304 - protein, 7 aa, synthetic construct
GFSPEYH

SEQ ID NO: 87305 - protein, 7 aa, synthetic construct
KGNNLNQ

SEQ ID NO: 87306 - protein, 7 aa, synthetic construct
MKMAADG

SEQ ID NO: 87307 - protein, 7 aa, synthetic construct
GAVDTKA

SEQ ID NO: 87308 - protein, 7 aa, synthetic construct
KGSVKEE

SEQ ID NO: 87309 - protein, 7 aa, synthetic construct
QFKMDQN

SEQ ID NO: 87310 - protein, 7 aa, synthetic construct
YIPTHES

SEQ ID NO: 87311 - protein, 7 aa, synthetic construct
GTKVGSG

SEQ ID NO: 87312 - protein, 7 aa, synthetic construct
TDIRANE

SEQ ID NO: 87313 - protein, 7 aa, synthetic construct
PYNQGAS

SEQ ID NO: 87314 - protein, 7 aa, synthetic construct
RVQNAVH

SEQ ID NO: 87315 - protein, 7 aa, synthetic construct
QANMQGI

SEQ ID NO: 87316 - protein, 7 aa, synthetic construct
HAFNPGA

SEQ ID NO: 87317 - protein, 7 aa, synthetic construct
EINYSSE

SEQ ID NO: 87318 - protein, 7 aa, synthetic construct
VNVVHAQ

SEQ ID NO: 87319 - protein, 7 aa, synthetic construct
SVNVAHN

SEQ ID NO: 87320 - protein, 7 aa, synthetic construct
ADLKYEF

SEQ ID NO: 87321 - protein, 7 aa, synthetic construct
PWKDVNM

SEQ ID NO: 87322 - protein, 7 aa, synthetic construct
VPNANYY

SEQ ID NO: 87323 - protein, 7 aa, synthetic construct
VTPTASF

SEQ ID NO: 87324 - protein, 7 aa, synthetic construct
VFTPGVM

SEQ ID NO: 87325 - protein, 7 aa, synthetic construct
LNVQNQS

SEQ ID NO: 87326 - protein, 7 aa, synthetic construct
CPGSSCI

SEQ ID NO: 87327 - protein, 7 aa, synthetic construct
MNNNAEM

SEQ ID NO: 87328 - protein, 7 aa, synthetic construct
YYQQGQE

SEQ ID NO: 87329 - protein, 7 aa, synthetic construct
TGLSRLD

SEQ ID NO: 87330 - protein, 7 aa, synthetic construct
NKSAGSA

SEQ ID NO: 87331 - protein, 7 aa, synthetic construct
QGKPNGM

SEQ ID NO: 87332 - protein, 7 aa, synthetic construct
FKANKAE

SEQ ID NO: 87333 - protein, 7 aa, synthetic construct
KEDNWTI

SEQ ID NO: 87334 - protein, 7 aa, synthetic construct
RVGVYNP

SEQ ID NO: 87335 - protein, 7 aa, synthetic construct
EQGWKDE

SEQ ID NO: 87336 - protein, 7 aa, synthetic construct
GHHTAKI

SEQ ID NO: 87337 - protein, 7 aa, synthetic construct
RMLRQDP

SEQ ID NO: 87338 - protein, 7 aa, synthetic construct
KDGNVGG

SEQ ID NO: 87339 - protein, 7 aa, synthetic construct
GSFQAKL

SEQ ID NO: 87340 - protein, 7 aa, synthetic construct
NGSMRNI

SEQ ID NO: 87341 - protein, 7 aa, synthetic construct
KMNAQKE

SEQ ID NO: 87342 - protein, 7 aa, synthetic construct
VKGNLSA

SEQ ID NO: 87343 - protein, 7 aa, synthetic construct
HRSGLPY

SEQ ID NO: 87344 - protein, 7 aa, synthetic construct
MDIPGRK

SEQ ID NO: 87345 - protein, 7 aa, synthetic construct
HWNATSV

SEQ ID NO: 87346 - protein, 7 aa, synthetic construct
KNEGHYD

SEQ ID NO: 87347 - protein, 7 aa, synthetic construct
HSTQSLE

SEQ ID NO: 87348 - protein, 7 aa, synthetic construct
EMAKEAS

SEQ ID NO: 87349 - protein, 7 aa, synthetic construct
NPRAMGP

SEQ ID NO: 87350 - protein, 7 aa, synthetic construct
TAHVRGS

SEQ ID NO: 87351 - protein, 7 aa, synthetic construct
TVYLSNG

SEQ ID NO: 87352 - protein, 7 aa, synthetic construct
RKIELSY

SEQ ID NO: 87353 - protein, 7 aa, synthetic construct
QRAEAHR

SEQ ID NO: 87354 - protein, 7 aa, synthetic construct
EGRITPD

SEQ ID NO: 87355 - protein, 7 aa, synthetic construct
NVKSMGP

SEQ ID NO: 87356 - protein, 7 aa, synthetic construct
HSGSERI

SEQ ID NO: 87357 - protein, 7 aa, synthetic construct
KLNMYPN

SEQ ID NO: 87358 - protein, 7 aa, synthetic construct
TQAIIQT

SEQ ID NO: 87359 - protein, 7 aa, synthetic construct
PLPTYPS

SEQ ID NO: 87360 - protein, 7 aa, synthetic construct
RERHVNE

SEQ ID NO: 87361 - protein, 7 aa, synthetic construct
ESKAMIK

SEQ ID NO: 87362 - protein, 7 aa, synthetic construct
QPTGDGM

SEQ ID NO: 87363 - protein, 7 aa, synthetic construct
KIVPQEL

SEQ ID NO: 87364 - protein, 7 aa, synthetic construct
AKDSGYI

SEQ ID NO: 87365 - protein, 7 aa, synthetic construct
AVVSNHI

SEQ ID NO: 87366 - protein, 7 aa, synthetic construct
ERNSHAE

SEQ ID NO: 87367 - protein, 7 aa, synthetic construct
TEYFRQA

SEQ ID NO: 87368 - protein, 7 aa, synthetic construct
FEKPQVG

SEQ ID NO: 87369 - protein, 7 aa, synthetic construct
SAPKDST

SEQ ID NO: 87370 - protein, 7 aa, synthetic construct
EIVRQTG

SEQ ID NO: 87371 - protein, 7 aa, synthetic construct
GRNMDKP

SEQ ID NO: 87372 - protein, 7 aa, synthetic construct
ASQRMNT

SEQ ID NO: 87373 - protein, 7 aa, synthetic construct
GFGKAQS

SEQ ID NO: 87374 - protein, 7 aa, synthetic construct
ESPHIAV

SEQ ID NO: 87375 - protein, 7 aa, synthetic construct
KAKDASG

SEQ ID NO: 87376 - protein, 7 aa, synthetic construct
RKLEENA

SEQ ID NO: 87377 - protein, 7 aa, synthetic construct
HYSEPRP

SEQ ID NO: 87378 - protein, 7 aa, synthetic construct
GNMGRNN

SEQ ID NO: 87379 - protein, 7 aa, synthetic construct
KYPKEEK

SEQ ID NO: 87380 - protein, 7 aa, synthetic construct
PNAQNMG

SEQ ID NO: 87381 - protein, 7 aa, synthetic construct
LVNKTAV

SEQ ID NO: 87382 - protein, 7 aa, synthetic construct
PDAIARG

SEQ ID NO: 87383 - protein, 7 aa, synthetic construct
VSGKAPA

SEQ ID NO: 87384 - protein, 7 aa, synthetic construct
RLENHMS

SEQ ID NO: 87385 - protein, 7 aa, synthetic construct
VEHIGAG

SEQ ID NO: 87386 - protein, 7 aa, synthetic construct
CRNNCQE

SEQ ID NO: 87387 - protein, 7 aa, synthetic construct
EKILNVK

SEQ ID NO: 87388 - protein, 7 aa, synthetic construct
YPGDRAH

SEQ ID NO: 87389 - protein, 7 aa, synthetic construct
NKGLMQA

SEQ ID NO: 87390 - protein, 7 aa, synthetic construct
DFSERHE

SEQ ID NO: 87391 - protein, 7 aa, synthetic construct
GNGGNSY

SEQ ID NO: 87392 - protein, 7 aa, synthetic construct
KEKGLPA

SEQ ID NO: 87393 - protein, 7 aa, synthetic construct
TPASLIS

SEQ ID NO: 87394 - protein, 7 aa, synthetic construct
KTGDDVS

SEQ ID NO: 87395 - protein, 7 aa, synthetic construct
SWQENKI

SEQ ID NO: 87396 - protein, 7 aa, synthetic construct
PGSKEEK

SEQ ID NO: 87397 - protein, 7 aa, synthetic construct
MNHHVKI

SEQ ID NO: 87398 - protein, 7 aa, synthetic construct
AWDKRDG

SEQ ID NO: 87399 - protein, 7 aa, synthetic construct
HAQMNHV

SEQ ID NO: 87400 - protein, 7 aa, synthetic construct
HFPGQKF

SEQ ID NO: 87401 - protein, 7 aa, synthetic construct
NSVTRYT

SEQ ID NO: 87402 - protein, 7 aa, synthetic construct
RTPMHDR

SEQ ID NO: 87403 - protein, 7 aa, synthetic construct
LQINNTG

SEQ ID NO: 87404 - protein, 7 aa, synthetic construct
WAKYELQ

SEQ ID NO: 87405 - protein, 7 aa, synthetic construct
GRTKEHN

SEQ ID NO: 87406 - protein, 7 aa, synthetic construct
YERRMQP

SEQ ID NO: 87407 - protein, 7 aa, synthetic construct
LNQTLDL

SEQ ID NO: 87408 - protein, 7 aa, synthetic construct
KNNAEMG

SEQ ID NO: 87409 - protein, 7 aa, synthetic construct
ILMDKTN

SEQ ID NO: 87410 - protein, 7 aa, synthetic construct
IHERPKE

SEQ ID NO: 87411 - protein, 7 aa, synthetic construct
EHTIGDR

SEQ ID NO: 87412 - protein, 7 aa, synthetic construct
PNQKIEE

SEQ ID NO: 87413 - protein, 7 aa, synthetic construct
FSSHNAP

SEQ ID NO: 87414 - protein, 7 aa, synthetic construct
KQQYGQI

SEQ ID NO: 87415 - protein, 7 aa, synthetic construct
GYISDQG

SEQ ID NO: 87416 - protein, 7 aa, synthetic construct
TPNSSAG

SEQ ID NO: 87417 - protein, 7 aa, synthetic construct
VNYDMTR

SEQ ID NO: 87418 - protein, 7 aa, synthetic construct
IGGVMSR

SEQ ID NO: 87419 - protein, 7 aa, synthetic construct
KPGEQAW

SEQ ID NO: 87420 - protein, 7 aa, synthetic construct
HTFAIDS

SEQ ID NO: 87421 - protein, 7 aa, synthetic construct
KNEHTYR

SEQ ID NO: 87422 - protein, 7 aa, synthetic construct
IPPVPRG

SEQ ID NO: 87423 - protein, 7 aa, synthetic construct
MIQYREE

SEQ ID NO: 87424 - protein, 7 aa, synthetic construct
EKVYPDY

SEQ ID NO: 87425 - protein, 7 aa, synthetic construct
AITQHPS

SEQ ID NO: 87426 - protein, 7 aa, synthetic construct
SGDYIKN

SEQ ID NO: 87427 - protein, 7 aa, synthetic construct
MFPQENI

SEQ ID NO: 87428 - protein, 7 aa, synthetic construct
FRATPAH

SEQ ID NO: 87429 - protein, 7 aa, synthetic construct
HVGLNKY

SEQ ID NO: 87430 - protein, 7 aa, synthetic construct
LKETKFN

SEQ ID NO: 87431 - protein, 7 aa, synthetic construct
LQKEPQQ

SEQ ID NO: 87432 - protein, 7 aa, synthetic construct
FTNTTLA

SEQ ID NO: 87433 - protein, 7 aa, synthetic construct
KESMNEK

SEQ ID NO: 87434 - protein, 7 aa, synthetic construct
AVLQSSP

SEQ ID NO: 87435 - protein, 7 aa, synthetic construct
HFKNNHE

SEQ ID NO: 87436 - protein, 7 aa, synthetic construct
LPEHMKK

SEQ ID NO: 87437 - protein, 7 aa, synthetic construct
NHNEILT

SEQ ID NO: 87438 - protein, 7 aa, synthetic construct
QNPQWPN

SEQ ID NO: 87439 - protein, 7 aa, synthetic construct
YQAQVPA

SEQ ID NO: 87440 - protein, 7 aa, synthetic construct
KSSNPGS

SEQ ID NO: 87441 - protein, 7 aa, synthetic construct
KENVTMQ

SEQ ID NO: 87442 - protein, 7 aa, synthetic construct
TRSETRM

SEQ ID NO: 87443 - protein, 7 aa, synthetic construct
YGLNNIS

SEQ ID NO: 87444 - protein, 7 aa, synthetic construct
NKTPTSI

SEQ ID NO: 87445 - protein, 7 aa, synthetic construct
NADWGHE

SEQ ID NO: 87446 - protein, 7 aa, synthetic construct
LYALGGV

SEQ ID NO: 87447 - protein, 7 aa, synthetic construct
GPNGNYI

SEQ ID NO: 87448 - protein, 7 aa, synthetic construct
HAVHGMP

SEQ ID NO: 87449 - protein, 7 aa, synthetic construct
NPGQVKF

SEQ ID NO: 87450 - protein, 7 aa, synthetic construct
FTNPNLN

SEQ ID NO: 87451 - protein, 7 aa, synthetic construct
RSSEERG

SEQ ID NO: 87452 - protein, 7 aa, synthetic construct
GLPLSMH

SEQ ID NO: 87453 - protein, 7 aa, synthetic construct
FEGQVRI

SEQ ID NO: 87454 - protein, 7 aa, synthetic construct
HVVTERA

SEQ ID NO: 87455 - protein, 7 aa, synthetic construct
THFPGMS

SEQ ID NO: 87456 - protein, 7 aa, synthetic construct
PKMTREG

SEQ ID NO: 87457 - protein, 7 aa, synthetic construct
ERETYKH

SEQ ID NO: 87458 - protein, 7 aa, synthetic construct
CGESHCN

SEQ ID NO: 87459 - protein, 7 aa, synthetic construct
TDSAHKI

SEQ ID NO: 87460 - protein, 7 aa, synthetic construct
QYKDEMK

SEQ ID NO: 87461 - protein, 7 aa, synthetic construct
TQRADII

SEQ ID NO: 87462 - protein, 7 aa, synthetic construct
TYEKEKM

SEQ ID NO: 87463 - protein, 7 aa, synthetic construct
FTVPQGA

SEQ ID NO: 87464 - protein, 7 aa, synthetic construct
QHHAMGV

SEQ ID NO: 87465 - protein, 7 aa, synthetic construct
GVSMVNR

SEQ ID NO: 87466 - protein, 7 aa, synthetic construct
HRAVNVI

SEQ ID NO: 87467 - protein, 7 aa, synthetic construct
PTQSSTN

SEQ ID NO: 87468 - protein, 7 aa, synthetic construct
VKHEETY

SEQ ID NO: 87469 - protein, 7 aa, synthetic construct
LEWKGPG

SEQ ID NO: 87470 - protein, 7 aa, synthetic construct
LLKQSNN

SEQ ID NO: 87471 - protein, 7 aa, synthetic construct
VSTVFAP

SEQ ID NO: 87472 - protein, 7 aa, synthetic construct
RTVNALM

SEQ ID NO: 87473 - protein, 7 aa, synthetic construct
ERSLSAH

SEQ ID NO: 87474 - protein, 7 aa, synthetic construct
RQQPAHM

SEQ ID NO: 87475 - protein, 7 aa, synthetic construct
RKTETDG

SEQ ID NO: 87476 - protein, 7 aa, synthetic construct
TVARFAP

SEQ ID NO: 87477 - protein, 7 aa, synthetic construct
SYAKPGG

SEQ ID NO: 87478 - protein, 7 aa, synthetic construct
SMGNEKG

SEQ ID NO: 87479 - protein, 7 aa, synthetic construct
KQSLSSF

SEQ ID NO: 87480 - protein, 7 aa, synthetic construct
SPSKYLA

SEQ ID NO: 87481 - protein, 7 aa, synthetic construct
VAHQHYE

SEQ ID NO: 87482 - protein, 7 aa, synthetic construct
FVKNNIA

SEQ ID NO: 87483 - protein, 7 aa, synthetic construct
GDKAYMY

SEQ ID NO: 87484 - protein, 7 aa, synthetic construct
NYHNFEA

SEQ ID NO: 87485 - protein, 7 aa, synthetic construct
ASPARQS

SEQ ID NO: 87486 - protein, 7 aa, synthetic construct
ELSPAMA

SEQ ID NO: 87487 - protein, 7 aa, synthetic construct
ESGGMTM

SEQ ID NO: 87488 - protein, 7 aa, synthetic construct
AVVGNNK

SEQ ID NO: 87489 - protein, 7 aa, synthetic construct
NGSHHME

SEQ ID NO: 87490 - protein, 7 aa, synthetic construct
PSGMKAS

SEQ ID NO: 87491 - protein, 7 aa, synthetic construct
DPANGQW

SEQ ID NO: 87492 - protein, 7 aa, synthetic construct
WNPLAKL

SEQ ID NO: 87493 - protein, 7 aa, synthetic construct
KNQIPTM

SEQ ID NO: 87494 - protein, 7 aa, synthetic construct
TGSKLEG

SEQ ID NO: 87495 - protein, 7 aa, synthetic construct
KSVVEIL

SEQ ID NO: 87496 - protein, 7 aa, synthetic construct
GQDRKTV

SEQ ID NO: 87497 - protein, 7 aa, synthetic construct
FEARQVR

SEQ ID NO: 87498 - protein, 7 aa, synthetic construct
IHGSQNP

SEQ ID NO: 87499 - protein, 7 aa, synthetic construct
YKDSDGM

SEQ ID NO: 87500 - protein, 7 aa, synthetic construct
KREEFTM

SEQ ID NO: 87501 - protein, 7 aa, synthetic construct
QSHNLVR

SEQ ID NO: 87502 - protein, 7 aa, synthetic construct
RPNQQNA

SEQ ID NO: 87503 - protein, 7 aa, synthetic construct
HDGPGNS

SEQ ID NO: 87504 - protein, 7 aa, synthetic construct
THQNMKP

SEQ ID NO: 87505 - protein, 7 aa, synthetic construct
VTVSMNA

SEQ ID NO: 87506 - protein, 7 aa, synthetic construct
IPEMKKH

SEQ ID NO: 87507 - protein, 7 aa, synthetic construct
QSGKMSA

SEQ ID NO: 87508 - protein, 7 aa, synthetic construct
ANTGPAT

SEQ ID NO: 87509 - protein, 7 aa, synthetic construct
PTEKSIV

SEQ ID NO: 87510 - protein, 7 aa, synthetic construct
TEFRKPI

SEQ ID NO: 87511 - protein, 7 aa, synthetic construct
KPATHDR

SEQ ID NO: 87512 - protein, 7 aa, synthetic construct
NIKDKGT

SEQ ID NO: 87513 - protein, 7 aa, synthetic construct
DKLVTTF

SEQ ID NO: 87514 - protein, 7 aa, synthetic construct
VQMIMQG

SEQ ID NO: 87515 - protein, 7 aa, synthetic construct
ITTSSNL

SEQ ID NO: 87516 - protein, 7 aa, synthetic construct
TLNQRYN

SEQ ID NO: 87517 - protein, 7 aa, synthetic construct
QPKRELA

SEQ ID NO: 87518 - protein, 7 aa, synthetic construct
QMQQVDG

SEQ ID NO: 87519 - protein, 7 aa, synthetic construct
NKEFSMH

SEQ ID NO: 87520 - protein, 7 aa, synthetic construct
TGASWSK

SEQ ID NO: 87521 - protein, 7 aa, synthetic construct
GPAEPAR

SEQ ID NO: 87522 - protein, 7 aa, synthetic construct
PQLHSLA

SEQ ID NO: 87523 - protein, 7 aa, synthetic construct
TPRSPDG

SEQ ID NO: 87524 - protein, 7 aa, synthetic construct
HLQNPTE

SEQ ID NO: 87525 - protein, 7 aa, synthetic construct
FVNQGAI

SEQ ID NO: 87526 - protein, 7 aa, synthetic construct
GIMLTRG

SEQ ID NO: 87527 - protein, 7 aa, synthetic construct
HERVRVQ

SEQ ID NO: 87528 - protein, 7 aa, synthetic construct
GIEASPA

SEQ ID NO: 87529 - protein, 7 aa, synthetic construct
QPKMDLG

SEQ ID NO: 87530 - protein, 7 aa, synthetic construct
GIGAQQH

SEQ ID NO: 87531 - protein, 7 aa, synthetic construct
AQPKYGA

SEQ ID NO: 87532 - protein, 7 aa, synthetic construct
SGAYPNE

SEQ ID NO: 87533 - protein, 7 aa, synthetic construct
DFKTSQG

SEQ ID NO: 87534 - protein, 7 aa, synthetic construct
DLVMRHG

SEQ ID NO: 87535 - protein, 7 aa, synthetic construct
KARDPPP

SEQ ID NO: 87536 - protein, 7 aa, synthetic construct
TMPGTHD

SEQ ID NO: 87537 - protein, 7 aa, synthetic construct
QLQQPGN

SEQ ID NO: 87538 - protein, 7 aa, synthetic construct
MINIGMG

SEQ ID NO: 87539 - protein, 7 aa, synthetic construct
VQSITER

SEQ ID NO: 87540 - protein, 7 aa, synthetic construct
DSHTNMK

SEQ ID NO: 87541 - protein, 7 aa, synthetic construct
INQGNGG

SEQ ID NO: 87542 - protein, 7 aa, synthetic construct
EGNITRV

SEQ ID NO: 87543 - protein, 7 aa, synthetic construct
QSMRLPT

SEQ ID NO: 87544 - protein, 7 aa, synthetic construct
DQKEYKD

SEQ ID NO: 87545 - protein, 7 aa, synthetic construct
DHEYTKP

SEQ ID NO: 87546 - protein, 7 aa, synthetic construct
MKFTEGH

SEQ ID NO: 87547 - protein, 7 aa, synthetic construct
HNSNEIS

SEQ ID NO: 87548 - protein, 7 aa, synthetic construct
MAPHNMK

SEQ ID NO: 87549 - protein, 7 aa, synthetic construct
FIIPKQD

SEQ ID NO: 87550 - protein, 7 aa, synthetic construct
IVSGVGM

SEQ ID NO: 87551 - protein, 7 aa, synthetic construct
RVVVAGE

SEQ ID NO: 87552 - protein, 7 aa, synthetic construct
SVQNGAP

SEQ ID NO: 87553 - protein, 7 aa, synthetic construct
QVKQAYT

SEQ ID NO: 87554 - protein, 7 aa, synthetic construct
LHAKQYT

SEQ ID NO: 87555 - protein, 7 aa, synthetic construct
LFKAINQ

SEQ ID NO: 87556 - protein, 7 aa, synthetic construct
NPREKLE

SEQ ID NO: 87557 - protein, 7 aa, synthetic construct
KMDMITA

SEQ ID NO: 87558 - protein, 7 aa, synthetic construct
SHVGPNI

SEQ ID NO: 87559 - protein, 7 aa, synthetic construct
APIKNSF

SEQ ID NO: 87560 - protein, 7 aa, synthetic construct
TVHQVQM

SEQ ID NO: 87561 - protein, 7 aa, synthetic construct
PKSDSTM

SEQ ID NO: 87562 - protein, 7 aa, synthetic construct
VKSYPIP

SEQ ID NO: 87563 - protein, 7 aa, synthetic construct
RERDHHM

SEQ ID NO: 87564 - protein, 7 aa, synthetic construct
SDHGDHA

SEQ ID NO: 87565 - protein, 7 aa, synthetic construct
GRYEKET

SEQ ID NO: 87566 - protein, 7 aa, synthetic construct
QHKLNHY

SEQ ID NO: 87567 - protein, 7 aa, synthetic construct
AIKAIDP

SEQ ID NO: 87568 - protein, 7 aa, synthetic construct
SAKQQST

SEQ ID NO: 87569 - protein, 7 aa, synthetic construct
NPGNNAT

SEQ ID NO: 87570 - protein, 7 aa, synthetic construct
NMARTGN

SEQ ID NO: 87571 - protein, 7 aa, synthetic construct
QINNNKD

SEQ ID NO: 87572 - protein, 7 aa, synthetic construct
WVAPRHE

SEQ ID NO: 87573 - protein, 7 aa, synthetic construct
DGHKINS

SEQ ID NO: 87574 - protein, 7 aa, synthetic construct
FSNIPRQ

SEQ ID NO: 87575 - protein, 7 aa, synthetic construct
NHDPFNA

SEQ ID NO: 87576 - protein, 7 aa, synthetic construct
VTKGWRD

SEQ ID NO: 87577 - protein, 7 aa, synthetic construct
KSGNQGA

SEQ ID NO: 87578 - protein, 7 aa, synthetic construct
QKEGRHV

SEQ ID NO: 87579 - protein, 7 aa, synthetic construct
PKGAGQM

SEQ ID NO: 87580 - protein, 7 aa, synthetic construct
QNIPLKG

SEQ ID NO: 87581 - protein, 7 aa, synthetic construct
TYATAAQ

SEQ ID NO: 87582 - protein, 7 aa, synthetic construct
VQAYMPE

SEQ ID NO: 87583 - protein, 7 aa, synthetic construct
TGPKRHE

SEQ ID NO: 87584 - protein, 7 aa, synthetic construct
GGAGHQH

SEQ ID NO: 87585 - protein, 7 aa, synthetic construct
MPSGSHI

SEQ ID NO: 87586 - protein, 7 aa, synthetic construct
HPKVNSG

SEQ ID NO: 87587 - protein, 7 aa, synthetic construct
QRTQAVV

SEQ ID NO: 87588 - protein, 7 aa, synthetic construct
QQHAGYP

SEQ ID NO: 87589 - protein, 7 aa, synthetic construct
SQIKSDD

SEQ ID NO: 87590 - protein, 7 aa, synthetic construct
ATQPLAI

SEQ ID NO: 87591 - protein, 7 aa, synthetic construct
TQLYAKG

SEQ ID NO: 87592 - protein, 7 aa, synthetic construct
GKSQGFG

SEQ ID NO: 87593 - protein, 7 aa, synthetic construct
VSMSPKY

SEQ ID NO: 87594 - protein, 7 aa, synthetic construct
DDVKHTH

SEQ ID NO: 87595 - protein, 7 aa, synthetic construct
TARYQVS

SEQ ID NO: 87596 - protein, 7 aa, synthetic construct
PKAGGMD

SEQ ID NO: 87597 - protein, 7 aa, synthetic construct
TFGHGEV

SEQ ID NO: 87598 - protein, 7 aa, synthetic construct
GDKYNIS

SEQ ID NO: 87599 - protein, 7 aa, synthetic construct
MYKSAQL

SEQ ID NO: 87600 - protein, 7 aa, synthetic construct
FPADQGT

SEQ ID NO: 87601 - protein, 7 aa, synthetic construct
NARMLDP

SEQ ID NO: 87602 - protein, 7 aa, synthetic construct
QYPKQTN

SEQ ID NO: 87603 - protein, 7 aa, synthetic construct
KDADLRS

SEQ ID NO: 87604 - protein, 7 aa, synthetic construct
WRNADIS

SEQ ID NO: 87605 - protein, 7 aa, synthetic construct
KTESEYI

SEQ ID NO: 87606 - protein, 7 aa, synthetic construct
TQGSRQP

SEQ ID NO: 87607 - protein, 7 aa, synthetic construct
VPIGNGV

SEQ ID NO: 87608 - protein, 7 aa, synthetic construct
WAATYKQ

SEQ ID NO: 87609 - protein, 7 aa, synthetic construct
SKKDAHM

SEQ ID NO: 87610 - protein, 7 aa, synthetic construct
NMGHNIL

SEQ ID NO: 87611 - protein, 7 aa, synthetic construct
EQKKWGN

SEQ ID NO: 87612 - protein, 7 aa, synthetic construct
KTPIVQI

SEQ ID NO: 87613 - protein, 7 aa, synthetic construct
GKSFTTG

SEQ ID NO: 87614 - protein, 7 aa, synthetic construct
LDMFPSP

SEQ ID NO: 87615 - protein, 7 aa, synthetic construct
RDHMNAT

SEQ ID NO: 87616 - protein, 7 aa, synthetic construct
HWNGVIP

SEQ ID NO: 87617 - protein, 7 aa, synthetic construct
VPHAQQT

SEQ ID NO: 87618 - protein, 7 aa, synthetic construct
GQPAKVG

SEQ ID NO: 87619 - protein, 7 aa, synthetic construct
KDDSVKA

SEQ ID NO: 87620 - protein, 7 aa, synthetic construct
KMAGQQV

SEQ ID NO: 87621 - protein, 7 aa, synthetic construct
TSGINAG

SEQ ID NO: 87622 - protein, 7 aa, synthetic construct
QHKQVVP

SEQ ID NO: 87623 - protein, 7 aa, synthetic construct
MKSDIQH

SEQ ID NO: 87624 - protein, 7 aa, synthetic construct
EPYGSAD

SEQ ID NO: 87625 - protein, 7 aa, synthetic construct
IMSDRNI

SEQ ID NO: 87626 - protein, 7 aa, synthetic construct
SQAHANI

SEQ ID NO: 87627 - protein, 7 aa, synthetic construct
KNMGLLT

SEQ ID NO: 87628 - protein, 7 aa, synthetic construct
PMSAQTS

SEQ ID NO: 87629 - protein, 7 aa, synthetic construct
IIQKNHE

SEQ ID NO: 87630 - protein, 7 aa, synthetic construct
LRSTEPP

SEQ ID NO: 87631 - protein, 7 aa, synthetic construct
MHAAPHI

SEQ ID NO: 87632 - protein, 7 aa, synthetic construct
FPHNMRV

SEQ ID NO: 87633 - protein, 7 aa, synthetic construct
YGGQWTE

SEQ ID NO: 87634 - protein, 7 aa, synthetic construct
HPLSPDK

SEQ ID NO: 87635 - protein, 7 aa, synthetic construct
FVKAMER

SEQ ID NO: 87636 - protein, 7 aa, synthetic construct
RTTSQER

SEQ ID NO: 87637 - protein, 7 aa, synthetic construct
EKSKHMT

SEQ ID NO: 87638 - protein, 7 aa, synthetic construct
KPGPPSI

SEQ ID NO: 87639 - protein, 7 aa, synthetic construct
RPSPGES

SEQ ID NO: 87640 - protein, 7 aa, synthetic construct
WNVNVQG

SEQ ID NO: 87641 - protein, 7 aa, synthetic construct
HKDTRIS

SEQ ID NO: 87642 - protein, 7 aa, synthetic construct
KSVVKEV

SEQ ID NO: 87643 - protein, 7 aa, synthetic construct
VAEPKKG

SEQ ID NO: 87644 - protein, 7 aa, synthetic construct
PQGRLNI

SEQ ID NO: 87645 - protein, 7 aa, synthetic construct
TVSMPNR

SEQ ID NO: 87646 - protein, 7 aa, synthetic construct
QEKFIIP

SEQ ID NO: 87647 - protein, 7 aa, synthetic construct
VLSHPLN

SEQ ID NO: 87648 - protein, 7 aa, synthetic construct
KIPNPGA

SEQ ID NO: 87649 - protein, 7 aa, synthetic construct
HPHTEQN

SEQ ID NO: 87650 - protein, 7 aa, synthetic construct
PKLKNIE

SEQ ID NO: 87651 - protein, 7 aa, synthetic construct
GQWLADP

SEQ ID NO: 87652 - protein, 7 aa, synthetic construct
ANHQPKD

SEQ ID NO: 87653 - protein, 7 aa, synthetic construct
DVRQTRM

SEQ ID NO: 87654 - protein, 7 aa, synthetic construct
PQKQGER

SEQ ID NO: 87655 - protein, 7 aa, synthetic construct
ARVVEPI

SEQ ID NO: 87656 - protein, 7 aa, synthetic construct
PSPGTPI

SEQ ID NO: 87657 - protein, 7 aa, synthetic construct
QRPMIDI

SEQ ID NO: 87658 - protein, 7 aa, synthetic construct
YLLQASG

SEQ ID NO: 87659 - protein, 7 aa, synthetic construct
NAPRGVF

SEQ ID NO: 87660 - protein, 7 aa, synthetic construct
FVQASIG

SEQ ID NO: 87661 - protein, 7 aa, synthetic construct
EHIQARA

SEQ ID NO: 87662 - protein, 7 aa, synthetic construct
AVAQKPW

SEQ ID NO: 87663 - protein, 7 aa, synthetic construct
AQHPMSG

SEQ ID NO: 87664 - protein, 7 aa, synthetic construct
PTSRLNL

SEQ ID NO: 87665 - protein, 7 aa, synthetic construct
TPARGVH

SEQ ID NO: 87666 - protein, 7 aa, synthetic construct
TRQNYNT

SEQ ID NO: 87667 - protein, 7 aa, synthetic construct
YKAKDTQ

SEQ ID NO: 87668 - protein, 7 aa, synthetic construct
QQAQSYK

SEQ ID NO: 87669 - protein, 7 aa, synthetic construct
TPDHLHG

SEQ ID NO: 87670 - protein, 7 aa, synthetic construct
NPSSHVP

SEQ ID NO: 87671 - protein, 7 aa, synthetic construct
AKSQQLW

SEQ ID NO: 87672 - protein, 7 aa, synthetic construct
YHDPVKG

SEQ ID NO: 87673 - protein, 7 aa, synthetic construct
DPHTAGV

SEQ ID NO: 87674 - protein, 7 aa, synthetic construct
QRPDLDN

SEQ ID NO: 87675 - protein, 7 aa, synthetic construct
PPYRTDN

SEQ ID NO: 87676 - protein, 7 aa, synthetic construct
PPIGDNK

SEQ ID NO: 87677 - protein, 7 aa, synthetic construct
YENFTYK

SEQ ID NO: 87678 - protein, 7 aa, synthetic construct
HTESGPL

SEQ ID NO: 87679 - protein, 7 aa, synthetic construct
GFIPVEG

SEQ ID NO: 87680 - protein, 7 aa, synthetic construct
NTAREHV

SEQ ID NO: 87681 - protein, 7 aa, synthetic construct
EAKVHYI

SEQ ID NO: 87682 - protein, 7 aa, synthetic construct
GVSDRHL

SEQ ID NO: 87683 - protein, 7 aa, synthetic construct
KYTNGES

SEQ ID NO: 87684 - protein, 7 aa, synthetic construct
NQTNIEL

SEQ ID NO: 87685 - protein, 7 aa, synthetic construct
GPQGHYV

SEQ ID NO: 87686 - protein, 7 aa, synthetic construct
TLLPYKE

SEQ ID NO: 87687 - protein, 7 aa, synthetic construct
SEKFINL

SEQ ID NO: 87688 - protein, 7 aa, synthetic construct
WKKSKDE

SEQ ID NO: 87689 - protein, 7 aa, synthetic construct
VRNRDID

SEQ ID NO: 87690 - protein, 7 aa, synthetic construct
EEARHSS

SEQ ID NO: 87691 - protein, 7 aa, synthetic construct
AIHARSV

SEQ ID NO: 87692 - protein, 7 aa, synthetic construct
MKASTQN

SEQ ID NO: 87693 - protein, 7 aa, synthetic construct
HLPVAID

SEQ ID NO: 87694 - protein, 7 aa, synthetic construct
KNGPQAA

SEQ ID NO: 87695 - protein, 7 aa, synthetic construct
TQPAGAQ

SEQ ID NO: 87696 - protein, 7 aa, synthetic construct
NVSQNVI

SEQ ID NO: 87697 - protein, 7 aa, synthetic construct
KVAFHSE

SEQ ID NO: 87698 - protein, 7 aa, synthetic construct
LDGHHTW

SEQ ID NO: 87699 - protein, 7 aa, synthetic construct
APVMPMG

SEQ ID NO: 87700 - protein, 7 aa, synthetic construct
AYDGTKI

SEQ ID NO: 87701 - protein, 7 aa, synthetic construct
GVYSTPD

SEQ ID NO: 87702 - protein, 7 aa, synthetic construct
QFKHNMQ

SEQ ID NO: 87703 - protein, 7 aa, synthetic construct
QKLKYFE

SEQ ID NO: 87704 - protein, 7 aa, synthetic construct
VNKPANG

SEQ ID NO: 87705 - protein, 7 aa, synthetic construct
YKMSMKE

SEQ ID NO: 87706 - protein, 7 aa, synthetic construct
LGIMHQD

SEQ ID NO: 87707 - protein, 7 aa, synthetic construct
TAPSQKS

SEQ ID NO: 87708 - protein, 7 aa, synthetic construct
APVMKYG

SEQ ID NO: 87709 - protein, 7 aa, synthetic construct
TQKQPLE

SEQ ID NO: 87710 - protein, 7 aa, synthetic construct
FHTRYVE

SEQ ID NO: 87711 - protein, 7 aa, synthetic construct
DAMNIKT

SEQ ID NO: 87712 - protein, 7 aa, synthetic construct
ARNISES

SEQ ID NO: 87713 - protein, 7 aa, synthetic construct
GNFLKEM

SEQ ID NO: 87714 - protein, 7 aa, synthetic construct
RPTTGNG

SEQ ID NO: 87715 - protein, 7 aa, synthetic construct
NTPFKEK

SEQ ID NO: 87716 - protein, 7 aa, synthetic construct
AGDTYHG

SEQ ID NO: 87717 - protein, 7 aa, synthetic construct
NPPNKVV

SEQ ID NO: 87718 - protein, 7 aa, synthetic construct
YGPQMKA

SEQ ID NO: 87719 - protein, 7 aa, synthetic construct
TQETKWT

SEQ ID NO: 87720 - protein, 7 aa, synthetic construct
EYEFRQP

SEQ ID NO: 87721 - protein, 7 aa, synthetic construct
DQPFHIG

SEQ ID NO: 87722 - protein, 7 aa, synthetic construct
VVTSRDT

SEQ ID NO: 87723 - protein, 7 aa, synthetic construct
MGAHYHQ

SEQ ID NO: 87724 - protein, 7 aa, synthetic construct
QPNNDER

SEQ ID NO: 87725 - protein, 7 aa, synthetic construct
DQGGAKH

SEQ ID NO: 87726 - protein, 7 aa, synthetic construct
ISPRDKP

SEQ ID NO: 87727 - protein, 7 aa, synthetic construct
TTAPRAG

SEQ ID NO: 87728 - protein, 7 aa, synthetic construct
GLKIMAA

SEQ ID NO: 87729 - protein, 7 aa, synthetic construct
IKEYPIK

SEQ ID NO: 87730 - protein, 7 aa, synthetic construct
HPNTVSV

SEQ ID NO: 87731 - protein, 7 aa, synthetic construct
AVQKQIG

SEQ ID NO: 87732 - protein, 7 aa, synthetic construct
AIQAGQP

SEQ ID NO: 87733 - protein, 7 aa, synthetic construct
IQKMLTP

SEQ ID NO: 87734 - protein, 7 aa, synthetic construct
AEKDRVI

SEQ ID NO: 87735 - protein, 7 aa, synthetic construct
GKERIGP

SEQ ID NO: 87736 - protein, 7 aa, synthetic construct
TGKHMNL

SEQ ID NO: 87737 - protein, 7 aa, synthetic construct
QDGPKGK

SEQ ID NO: 87738 - protein, 7 aa, synthetic construct
IHHNQNN

SEQ ID NO: 87739 - protein, 7 aa, synthetic construct
TRQVVNF

SEQ ID NO: 87740 - protein, 7 aa, synthetic construct
RVPGNNS

SEQ ID NO: 87741 - protein, 7 aa, synthetic construct
MQSNRSF

SEQ ID NO: 87742 - protein, 7 aa, synthetic construct
DDRLKRM

SEQ ID NO: 87743 - protein, 7 aa, synthetic construct
WINDNAK

SEQ ID NO: 87744 - protein, 7 aa, synthetic construct
GPIKNVP

SEQ ID NO: 87745 - protein, 7 aa, synthetic construct
RTNSMSM

SEQ ID NO: 87746 - protein, 7 aa, synthetic construct
LYLQTAS

SEQ ID NO: 87747 - protein, 7 aa, synthetic construct
EHRDGKE

SEQ ID NO: 87748 - protein, 7 aa, synthetic construct
NGVQPMG

SEQ ID NO: 87749 - protein, 7 aa, synthetic construct
SRIVGFD

SEQ ID NO: 87750 - protein, 7 aa, synthetic construct
RGMGTNI

SEQ ID NO: 87751 - protein, 7 aa, synthetic construct
DATIPQK

SEQ ID NO: 87752 - protein, 7 aa, synthetic construct
QGNSKQG

SEQ ID NO: 87753 - protein, 7 aa, synthetic construct
YTDHNPV

SEQ ID NO: 87754 - protein, 7 aa, synthetic construct
INIVNGD

SEQ ID NO: 87755 - protein, 7 aa, synthetic construct
TNKTVKD

SEQ ID NO: 87756 - protein, 7 aa, synthetic construct
LYKRESM

SEQ ID NO: 87757 - protein, 7 aa, synthetic construct
VLPHVGT

SEQ ID NO: 87758 - protein, 7 aa, synthetic construct
MLRTNQM

SEQ ID NO: 87759 - protein, 7 aa, synthetic construct
TYKADRI

SEQ ID NO: 87760 - protein, 7 aa, synthetic construct
IDNRFIQ

SEQ ID NO: 87761 - protein, 7 aa, synthetic construct
LVAANES

SEQ ID NO: 87762 - protein, 7 aa, synthetic construct
PMQSSKY

SEQ ID NO: 87763 - protein, 7 aa, synthetic construct
IIIDQGG

SEQ ID NO: 87764 - protein, 7 aa, synthetic construct
TMNTTHW

SEQ ID NO: 87765 - protein, 7 aa, synthetic construct
TNPAHVA

SEQ ID NO: 87766 - protein, 7 aa, synthetic construct
FKDGVIY

SEQ ID NO: 87767 - protein, 7 aa, synthetic construct
SANYQHE

SEQ ID NO: 87768 - protein, 7 aa, synthetic construct
PLNQMKE

SEQ ID NO: 87769 - protein, 7 aa, synthetic construct
QGQTIAI

SEQ ID NO: 87770 - protein, 7 aa, synthetic construct
RDNNPQT

SEQ ID NO: 87771 - protein, 7 aa, synthetic construct
KEHLRAF

SEQ ID NO: 87772 - protein, 7 aa, synthetic construct
MLPPSQV

SEQ ID NO: 87773 - protein, 7 aa, synthetic construct
NPSYKGV

SEQ ID NO: 87774 - protein, 7 aa, synthetic construct
SSPYAQV

SEQ ID NO: 87775 - protein, 7 aa, synthetic construct
GAHTIET

SEQ ID NO: 87776 - protein, 7 aa, synthetic construct
GGTSWKV

SEQ ID NO: 87777 - protein, 7 aa, synthetic construct
STWKEGI

SEQ ID NO: 87778 - protein, 7 aa, synthetic construct
YKVNNNM

SEQ ID NO: 87779 - protein, 7 aa, synthetic construct
IEMHSVP

SEQ ID NO: 87780 - protein, 7 aa, synthetic construct
VTSHQLP

SEQ ID NO: 87781 - protein, 7 aa, synthetic construct
QGMQSKA

SEQ ID NO: 87782 - protein, 7 aa, synthetic construct
VGAKQSG

SEQ ID NO: 87783 - protein, 7 aa, synthetic construct
QHGQNSK

SEQ ID NO: 87784 - protein, 7 aa, synthetic construct
HTKGIAM

SEQ ID NO: 87785 - protein, 7 aa, synthetic construct
KAEMTSM

SEQ ID NO: 87786 - protein, 7 aa, synthetic construct
TDPQRSK

SEQ ID NO: 87787 - protein, 7 aa, synthetic construct
ATHRSVS

SEQ ID NO: 87788 - protein, 7 aa, synthetic construct
HNMNVPN

SEQ ID NO: 87789 - protein, 7 aa, synthetic construct
DNYDLRK

SEQ ID NO: 87790 - protein, 7 aa, synthetic construct
MGHNIVP

SEQ ID NO: 87791 - protein, 7 aa, synthetic construct
LQKPAVN

SEQ ID NO: 87792 - protein, 7 aa, synthetic construct
TKSTQGG

SEQ ID NO: 87793 - protein, 7 aa, synthetic construct
MDPKAIK

SEQ ID NO: 87794 - protein, 7 aa, synthetic construct
TTPKAQG

SEQ ID NO: 87795 - protein, 7 aa, synthetic construct
GMYEKTE

SEQ ID NO: 87796 - protein, 7 aa, synthetic construct
YGGQQTV

SEQ ID NO: 87797 - protein, 7 aa, synthetic construct
TKAKVID

SEQ ID NO: 87798 - protein, 7 aa, synthetic construct
QKNENKM

SEQ ID NO: 87799 - protein, 7 aa, synthetic construct
LFDHIKA

SEQ ID NO: 87800 - protein, 7 aa, synthetic construct
MSGNDTT

SEQ ID NO: 87801 - protein, 7 aa, synthetic construct
AYSVHGM

SEQ ID NO: 87802 - protein, 7 aa, synthetic construct
ARDAPLN

SEQ ID NO: 87803 - protein, 7 aa, synthetic construct
QTARHGL

SEQ ID NO: 87804 - protein, 7 aa, synthetic construct
YNHMRHS

SEQ ID NO: 87805 - protein, 7 aa, synthetic construct
YMHDGPH

SEQ ID NO: 87806 - protein, 7 aa, synthetic construct
KIERGGD

SEQ ID NO: 87807 - protein, 7 aa, synthetic construct
MPKKDFD

SEQ ID NO: 87808 - protein, 7 aa, synthetic construct
NVNASMI

SEQ ID NO: 87809 - protein, 7 aa, synthetic construct
VKMNEGR

SEQ ID NO: 87810 - protein, 7 aa, synthetic construct
PVDRRSD

SEQ ID NO: 87811 - protein, 7 aa, synthetic construct
GAKVLMV

SEQ ID NO: 87812 - protein, 7 aa, synthetic construct
QGFSYQP

SEQ ID NO: 87813 - protein, 7 aa, synthetic construct
VHVSDYK

SEQ ID NO: 87814 - protein, 7 aa, synthetic construct
NLEAGKF

SEQ ID NO: 87815 - protein, 7 aa, synthetic construct
GSLKFEF

SEQ ID NO: 87816 - protein, 7 aa, synthetic construct
KQMFPDD

SEQ ID NO: 87817 - protein, 7 aa, synthetic construct
RLPPGKQ

SEQ ID NO: 87818 - protein, 7 aa, synthetic construct
DPVKMIT

SEQ ID NO: 87819 - protein, 7 aa, synthetic construct
QGLANRP

SEQ ID NO: 87820 - protein, 7 aa, synthetic construct
KTQSSDA

SEQ ID NO: 87821 - protein, 7 aa, synthetic construct
PPSVTLK

SEQ ID NO: 87822 - protein, 7 aa, synthetic construct
MPIITTG

SEQ ID NO: 87823 - protein, 7 aa, synthetic construct
WDKGQQV

SEQ ID NO: 87824 - protein, 7 aa, synthetic construct
EHHMHPP

SEQ ID NO: 87825 - protein, 7 aa, synthetic construct
APWNKTS

SEQ ID NO: 87826 - protein, 7 aa, synthetic construct
GHNMDIK

SEQ ID NO: 87827 - protein, 7 aa, synthetic construct
PLNPHMR

SEQ ID NO: 87828 - protein, 7 aa, synthetic construct
WSHNDNR

SEQ ID NO: 87829 - protein, 7 aa, synthetic construct
TMTEPAP

SEQ ID NO: 87830 - protein, 7 aa, synthetic construct
VNSGNID

SEQ ID NO: 87831 - protein, 7 aa, synthetic construct
RDTDHNF

SEQ ID NO: 87832 - protein, 7 aa, synthetic construct
TPIKNFQ

SEQ ID NO: 87833 - protein, 7 aa, synthetic construct
LQKLQTF

SEQ ID NO: 87834 - protein, 7 aa, synthetic construct
DVRLAQY

SEQ ID NO: 87835 - protein, 7 aa, synthetic construct
NPLTGTV

SEQ ID NO: 87836 - protein, 7 aa, synthetic construct
EIQAKGR

SEQ ID NO: 87837 - protein, 7 aa, synthetic construct
YANKELF

SEQ ID NO: 87838 - protein, 7 aa, synthetic construct
MLRHPDP

SEQ ID NO: 87839 - protein, 7 aa, synthetic construct
VRKIEMN

SEQ ID NO: 87840 - protein, 7 aa, synthetic construct
QMKFEDL

SEQ ID NO: 87841 - protein, 7 aa, synthetic construct
LAAVKDR

SEQ ID NO: 87842 - protein, 7 aa, synthetic construct
PVKDPDM

SEQ ID NO: 87843 - protein, 7 aa, synthetic construct
FNATHTI

SEQ ID NO: 87844 - protein, 7 aa, synthetic construct
LDAHVTM

SEQ ID NO: 87845 - protein, 7 aa, synthetic construct
RNFNQTV

SEQ ID NO: 87846 - protein, 7 aa, synthetic construct
YRPNDHI

SEQ ID NO: 87847 - protein, 7 aa, synthetic construct
AGELEWH

SEQ ID NO: 87848 - protein, 7 aa, synthetic construct
TAKMDLP

SEQ ID NO: 87849 - protein, 7 aa, synthetic construct
LKHYEED

SEQ ID NO: 87850 - protein, 7 aa, synthetic construct
IQPDARI

SEQ ID NO: 87851 - protein, 7 aa, synthetic construct
STPQRVQ

SEQ ID NO: 87852 - protein, 7 aa, synthetic construct
ARQDEAI

SEQ ID NO: 87853 - protein, 7 aa, synthetic construct
TGAFQGT

SEQ ID NO: 87854 - protein, 7 aa, synthetic construct
KVAHTHE

SEQ ID NO: 87855 - protein, 7 aa, synthetic construct
IGTAFRH

SEQ ID NO: 87856 - protein, 7 aa, synthetic construct
WIKQTEA

SEQ ID NO: 87857 - protein, 7 aa, synthetic construct
FLKSEVM

SEQ ID NO: 87858 - protein, 7 aa, synthetic construct
EIRNTDY

SEQ ID NO: 87859 - protein, 7 aa, synthetic construct
YGILANE

SEQ ID NO: 87860 - protein, 7 aa, synthetic construct
FRLANDD

SEQ ID NO: 87861 - protein, 7 aa, synthetic construct
IQQAQSN

SEQ ID NO: 87862 - protein, 7 aa, synthetic construct
RLSGPGP

SEQ ID NO: 87863 - protein, 7 aa, synthetic construct
YKFENQK

SEQ ID NO: 87864 - protein, 7 aa, synthetic construct
TKAVDMS

SEQ ID NO: 87865 - protein, 7 aa, synthetic construct
YQHETTL

SEQ ID NO: 87866 - protein, 7 aa, synthetic construct
DSNMTHA

SEQ ID NO: 87867 - protein, 7 aa, synthetic construct
QKAPNYN

SEQ ID NO: 87868 - protein, 7 aa, synthetic construct
TFADVTK

SEQ ID NO: 87869 - protein, 7 aa, synthetic construct
EHKQQHA

SEQ ID NO: 87870 - protein, 7 aa, synthetic construct
PSKASQS

SEQ ID NO: 87871 - protein, 7 aa, synthetic construct
NPRSPGP

SEQ ID NO: 87872 - protein, 7 aa, synthetic construct
KGTAQAG

SEQ ID NO: 87873 - protein, 7 aa, synthetic construct
GPTQTNT

SEQ ID NO: 87874 - protein, 7 aa, synthetic construct
DKGNTGM

SEQ ID NO: 87875 - protein, 7 aa, synthetic construct
GHGNFAV

SEQ ID NO: 87876 - protein, 7 aa, synthetic construct
IQHMAYG

SEQ ID NO: 87877 - protein, 7 aa, synthetic construct
HSRGAFV

SEQ ID NO: 87878 - protein, 7 aa, synthetic construct
LKVHGPE

SEQ ID NO: 87879 - protein, 7 aa, synthetic construct
KTQPSDV

SEQ ID NO: 87880 - protein, 7 aa, synthetic construct
NKQSGFE

SEQ ID NO: 87881 - protein, 7 aa, synthetic construct
RMIPHDA

SEQ ID NO: 87882 - protein, 7 aa, synthetic construct
LQVHSHS

SEQ ID NO: 87883 - protein, 7 aa, synthetic construct
SFNRANT

SEQ ID NO: 87884 - protein, 7 aa, synthetic construct
RSHVGGP

SEQ ID NO: 87885 - protein, 7 aa, synthetic construct
KNNGAAS

SEQ ID NO: 87886 - protein, 7 aa, synthetic construct
IKGQIEQ

SEQ ID NO: 87887 - protein, 7 aa, synthetic construct
SVNNTVD

SEQ ID NO: 87888 - protein, 7 aa, synthetic construct
KQSPGQG

SEQ ID NO: 87889 - protein, 7 aa, synthetic construct
SLVNQQE

SEQ ID NO: 87890 - protein, 7 aa, synthetic construct
KRPDVQA

SEQ ID NO: 87891 - protein, 7 aa, synthetic construct
SRETQQH

SEQ ID NO: 87892 - protein, 7 aa, synthetic construct
SSVPSGP

SEQ ID NO: 87893 - protein, 7 aa, synthetic construct
GIYIRQE

SEQ ID NO: 87894 - protein, 7 aa, synthetic construct
TYMHGLP

SEQ ID NO: 87895 - protein, 7 aa, synthetic construct
QQQNAHM

SEQ ID NO: 87896 - protein, 7 aa, synthetic construct
LTEYPAK

SEQ ID NO: 87897 - protein, 7 aa, synthetic construct
SVQKGQP

SEQ ID NO: 87898 - protein, 7 aa, synthetic construct
SPHSQVI

SEQ ID NO: 87899 - protein, 7 aa, synthetic construct
VSKMPQA

SEQ ID NO: 87900 - protein, 7 aa, synthetic construct
QAHIYDG

SEQ ID NO: 87901 - protein, 7 aa, synthetic construct
ISPEKYR

SEQ ID NO: 87902 - protein, 7 aa, synthetic construct
PNSKTAV

SEQ ID NO: 87903 - protein, 7 aa, synthetic construct
PVTVGGP

SEQ ID NO: 87904 - protein, 7 aa, synthetic construct
IMRSVGV

SEQ ID NO: 87905 - protein, 7 aa, synthetic construct
MGASKEW

SEQ ID NO: 87906 - protein, 7 aa, synthetic construct
AAMMPNA

SEQ ID NO: 87907 - protein, 7 aa, synthetic construct
NHMNSSH

SEQ ID NO: 87908 - protein, 7 aa, synthetic construct
MRDLTGS

SEQ ID NO: 87909 - protein, 7 aa, synthetic construct
AHHREVE

SEQ ID NO: 87910 - protein, 7 aa, synthetic construct
LYNKLME

SEQ ID NO: 87911 - protein, 7 aa, synthetic construct
AGAPYQH

SEQ ID NO: 87912 - protein, 7 aa, synthetic construct
SNSTGET

SEQ ID NO: 87913 - protein, 7 aa, synthetic construct
TINPVTA

SEQ ID NO: 87914 - protein, 7 aa, synthetic construct
LHAHVQS

SEQ ID NO: 87915 - protein, 7 aa, synthetic construct
NMRDVTQ

SEQ ID NO: 87916 - protein, 7 aa, synthetic construct
SNRVAQD

SEQ ID NO: 87917 - protein, 7 aa, synthetic construct
QRVFNQE

SEQ ID NO: 87918 - protein, 7 aa, synthetic construct
EKMLGGR

SEQ ID NO: 87919 - protein, 7 aa, synthetic construct
MVDMSGK

SEQ ID NO: 87920 - protein, 7 aa, synthetic construct
EANEYKA

SEQ ID NO: 87921 - protein, 7 aa, synthetic construct
RQTSAMP

SEQ ID NO: 87922 - protein, 7 aa, synthetic construct
EIPGLKF

SEQ ID NO: 87923 - protein, 7 aa, synthetic construct
WKDQPTI

SEQ ID NO: 87924 - protein, 7 aa, synthetic construct
HMQIGYA

SEQ ID NO: 87925 - protein, 7 aa, synthetic construct
VHKGAVQ

SEQ ID NO: 87926 - protein, 7 aa, synthetic construct
PGKNTNP

SEQ ID NO: 87927 - protein, 7 aa, synthetic construct
KNQTMNA

SEQ ID NO: 87928 - protein, 7 aa, synthetic construct
IINANAI

SEQ ID NO: 87929 - protein, 7 aa, synthetic construct
KQPPTAF

SEQ ID NO: 87930 - protein, 7 aa, synthetic construct
VKYPEGF

SEQ ID NO: 87931 - protein, 7 aa, synthetic construct
SRNVEPQ

SEQ ID NO: 87932 - protein, 7 aa, synthetic construct
FGKAMKD

SEQ ID NO: 87933 - protein, 7 aa, synthetic construct
VHENKTA

SEQ ID NO: 87934 - protein, 7 aa, synthetic construct
ELNYHKE

SEQ ID NO: 87935 - protein, 7 aa, synthetic construct
SWGVVNP

SEQ ID NO: 87936 - protein, 7 aa, synthetic construct
DKHEKQQ

SEQ ID NO: 87937 - protein, 7 aa, synthetic construct
AKVSNNG

SEQ ID NO: 87938 - protein, 7 aa, synthetic construct
LFHHSLD

SEQ ID NO: 87939 - protein, 7 aa, synthetic construct
EIRVTSR

SEQ ID NO: 87940 - protein, 7 aa, synthetic construct
VIDFKNG

SEQ ID NO: 87941 - protein, 7 aa, synthetic construct
HMVTHTP

SEQ ID NO: 87942 - protein, 7 aa, synthetic construct
ATPVYQM

SEQ ID NO: 87943 - protein, 7 aa, synthetic construct
KLVIGIN

SEQ ID NO: 87944 - protein, 7 aa, synthetic construct
PTRTAHE

SEQ ID NO: 87945 - protein, 7 aa, synthetic construct
FSTVGLH

SEQ ID NO: 87946 - protein, 7 aa, synthetic construct
QQHKVQG

SEQ ID NO: 87947 - protein, 7 aa, synthetic construct
RDEYGAK

SEQ ID NO: 87948 - protein, 7 aa, synthetic construct
YAGDQVR

SEQ ID NO: 87949 - protein, 7 aa, synthetic construct
ATSSRQI

SEQ ID NO: 87950 - protein, 7 aa, synthetic construct
MHKNITY

SEQ ID NO: 87951 - protein, 7 aa, synthetic construct
GTEGKRN

SEQ ID NO: 87952 - protein, 7 aa, synthetic construct
RFQKIDH

SEQ ID NO: 87953 - protein, 7 aa, synthetic construct
GVMTHTA

SEQ ID NO: 87954 - protein, 7 aa, synthetic construct
SHNKHEN

SEQ ID NO: 87955 - protein, 7 aa, synthetic construct
RYNDIQD

SEQ ID NO: 87956 - protein, 7 aa, synthetic construct
KDYIGSE

SEQ ID NO: 87957 - protein, 7 aa, synthetic construct
DKIEPWR

SEQ ID NO: 87958 - protein, 7 aa, synthetic construct
STQFHNS

SEQ ID NO: 87959 - protein, 7 aa, synthetic construct
ITGKWPL

SEQ ID NO: 87960 - protein, 7 aa, synthetic construct
VNLQENK

SEQ ID NO: 87961 - protein, 7 aa, synthetic construct
RQAPSGA

SEQ ID NO: 87962 - protein, 7 aa, synthetic construct
TYNKQGN

SEQ ID NO: 87963 - protein, 7 aa, synthetic construct
HKQTDES

SEQ ID NO: 87964 - protein, 7 aa, synthetic construct
HGDTGAP

SEQ ID NO: 87965 - protein, 7 aa, synthetic construct
GFTKEGM

SEQ ID NO: 87966 - protein, 7 aa, synthetic construct
PKPMTVG

SEQ ID NO: 87967 - protein, 7 aa, synthetic construct
VMNNDRA

SEQ ID NO: 87968 - protein, 7 aa, synthetic construct
KGKENDW

SEQ ID NO: 87969 - protein, 7 aa, synthetic construct
QSKPGGG

SEQ ID NO: 87970 - protein, 7 aa, synthetic construct
AYTSSTV

SEQ ID NO: 87971 - protein, 7 aa, synthetic construct
RQRPQSD

SEQ ID NO: 87972 - protein, 7 aa, synthetic construct
SPDFSTR

SEQ ID NO: 87973 - protein, 7 aa, synthetic construct
FVQSPGV

SEQ ID NO: 87974 - protein, 7 aa, synthetic construct
QRTGTQS

SEQ ID NO: 87975 - protein, 7 aa, synthetic construct
DKGFNGG

SEQ ID NO: 87976 - protein, 7 aa, synthetic construct
NKSAQGA

SEQ ID NO: 87977 - protein, 7 aa, synthetic construct
FTSDKRY

SEQ ID NO: 87978 - protein, 7 aa, synthetic construct
HTHGHHP

SEQ ID NO: 87979 - protein, 7 aa, synthetic construct
NPVQRHV

SEQ ID NO: 87980 - protein, 7 aa, synthetic construct
QQVGQKS

SEQ ID NO: 87981 - protein, 7 aa, synthetic construct
ETVAIKN

SEQ ID NO: 87982 - protein, 7 aa, synthetic construct
MTRNGPS

SEQ ID NO: 87983 - protein, 7 aa, synthetic construct
QRTEPFI

SEQ ID NO: 87984 - protein, 7 aa, synthetic construct
EPTSTRA

SEQ ID NO: 87985 - protein, 7 aa, synthetic construct
VQGWPGE

SEQ ID NO: 87986 - protein, 7 aa, synthetic construct
NDERPAH

SEQ ID NO: 87987 - protein, 7 aa, synthetic construct
HGTNEKD

SEQ ID NO: 87988 - protein, 7 aa, synthetic construct
GIKQNTY

SEQ ID NO: 87989 - protein, 7 aa, synthetic construct
IKGIMDY

SEQ ID NO: 87990 - protein, 7 aa, synthetic construct
VHSGEYA

SEQ ID NO: 87991 - protein, 7 aa, synthetic construct
MQHIIAS

SEQ ID NO: 87992 - protein, 7 aa, synthetic construct
RNPQNMP

SEQ ID NO: 87993 - protein, 7 aa, synthetic construct
YLGKTLE

SEQ ID NO: 87994 - protein, 7 aa, synthetic construct
FNHNASM

SEQ ID NO: 87995 - protein, 7 aa, synthetic construct
NNSARAG

SEQ ID NO: 87996 - protein, 7 aa, synthetic construct
KFQAGQY

SEQ ID NO: 87997 - protein, 7 aa, synthetic construct
FTEHKII

SEQ ID NO: 87998 - protein, 7 aa, synthetic construct
RQSPPAG

SEQ ID NO: 87999 - protein, 7 aa, synthetic construct
HQGEPRQ

SEQ ID NO: 88000 - protein, 7 aa, synthetic construct
HLAYEQA

SEQ ID NO: 88001 - protein, 7 aa, synthetic construct
LRSQEQM

SEQ ID NO: 88002 - protein, 7 aa, synthetic construct
PTSQITT

SEQ ID NO: 88003 - protein, 7 aa, synthetic construct
EAKFPTQ

SEQ ID NO: 88004 - protein, 7 aa, synthetic construct
KSQPNGN

SEQ ID NO: 88005 - protein, 7 aa, synthetic construct
AHGREKQ

SEQ ID NO: 88006 - protein, 7 aa, synthetic construct
YAQQRAP

SEQ ID NO: 88007 - protein, 7 aa, synthetic construct
GDMKGNL

SEQ ID NO: 88008 - protein, 7 aa, synthetic construct
PMSTEHY

SEQ ID NO: 88009 - protein, 7 aa, synthetic construct
PNFSSRN

SEQ ID NO: 88010 - protein, 7 aa, synthetic construct
QNPQVQL

SEQ ID NO: 88011 - protein, 7 aa, synthetic construct
NDNWRKE

SEQ ID NO: 88012 - protein, 7 aa, synthetic construct
KEGSDSR

SEQ ID NO: 88013 - protein, 7 aa, synthetic construct
HHANMQS

SEQ ID NO: 88014 - protein, 7 aa, synthetic construct
RSVVQAA

SEQ ID NO: 88015 - protein, 7 aa, synthetic construct
REPAGMV

SEQ ID NO: 88016 - protein, 7 aa, synthetic construct
HVFSSAG

SEQ ID NO: 88017 - protein, 7 aa, synthetic construct
PANVPYV

SEQ ID NO: 88018 - protein, 7 aa, synthetic construct
TMTGVQQ

SEQ ID NO: 88019 - protein, 7 aa, synthetic construct
TPNTPEN

SEQ ID NO: 88020 - protein, 7 aa, synthetic construct
PLSGIVI

SEQ ID NO: 88021 - protein, 7 aa, synthetic construct
VSVTLKN

SEQ ID NO: 88022 - protein, 7 aa, synthetic construct
SPARSTG

SEQ ID NO: 88023 - protein, 7 aa, synthetic construct
NKGAAMT

SEQ ID NO: 88024 - protein, 7 aa, synthetic construct
HSTKTFA

SEQ ID NO: 88025 - protein, 7 aa, synthetic construct
RDRASTD

SEQ ID NO: 88026 - protein, 7 aa, synthetic construct
KDSRTQP

SEQ ID NO: 88027 - protein, 7 aa, synthetic construct
STNVRSV

SEQ ID NO: 88028 - protein, 7 aa, synthetic construct
GVMGGQE

SEQ ID NO: 88029 - protein, 7 aa, synthetic construct
HAKYPML

SEQ ID NO: 88030 - protein, 7 aa, synthetic construct
LAVRLSD

SEQ ID NO: 88031 - protein, 7 aa, synthetic construct
PHHIPAV

SEQ ID NO: 88032 - protein, 7 aa, synthetic construct
NLKHPNE

SEQ ID NO: 88033 - protein, 7 aa, synthetic construct
PNKTIIV

SEQ ID NO: 88034 - protein, 7 aa, synthetic construct
RERMTVQ

SEQ ID NO: 88035 - protein, 7 aa, synthetic construct
DKEKFSN

SEQ ID NO: 88036 - protein, 7 aa, synthetic construct
ILRHKEN

SEQ ID NO: 88037 - protein, 7 aa, synthetic construct
RPNNGGF

SEQ ID NO: 88038 - protein, 7 aa, synthetic construct
DRLHIEA

SEQ ID NO: 88039 - protein, 7 aa, synthetic construct
IFQNGDH

SEQ ID NO: 88040 - protein, 7 aa, synthetic construct
VWAESSR

SEQ ID NO: 88041 - protein, 7 aa, synthetic construct
EAQSKAW

SEQ ID NO: 88042 - protein, 7 aa, synthetic construct
PYHLPQG

SEQ ID NO: 88043 - protein, 7 aa, synthetic construct
FHATSKH

SEQ ID NO: 88044 - protein, 7 aa, synthetic construct
TELSKLP

SEQ ID NO: 88045 - protein, 7 aa, synthetic construct
PMLKHGF

SEQ ID NO: 88046 - protein, 7 aa, synthetic construct
RADAVRG

SEQ ID NO: 88047 - protein, 7 aa, synthetic construct
IFKIKEQ

SEQ ID NO: 88048 - protein, 7 aa, synthetic construct
CKHDLKC

SEQ ID NO: 88049 - protein, 7 aa, synthetic construct
NNVKSTG

SEQ ID NO: 88050 - protein, 7 aa, synthetic construct
TYGGTDA

SEQ ID NO: 88051 - protein, 7 aa, synthetic construct
EENKPKI

SEQ ID NO: 88052 - protein, 7 aa, synthetic construct
MTKLDPQ

SEQ ID NO: 88053 - protein, 7 aa, synthetic construct
HRVDRGY

SEQ ID NO: 88054 - protein, 7 aa, synthetic construct
RQHSDVM

SEQ ID NO: 88055 - protein, 7 aa, synthetic construct
DRGSAHM

SEQ ID NO: 88056 - protein, 7 aa, synthetic construct
LLGITSP

SEQ ID NO: 88057 - protein, 7 aa, synthetic construct
GPHENGA

SEQ ID NO: 88058 - protein, 7 aa, synthetic construct
ITYERKD

SEQ ID NO: 88059 - protein, 7 aa, synthetic construct
STSSKSA

SEQ ID NO: 88060 - protein, 7 aa, synthetic construct
HNDVLSA

SEQ ID NO: 88061 - protein, 7 aa, synthetic construct
VRQHAMT

SEQ ID NO: 88062 - protein, 7 aa, synthetic construct
VHGVHNN

SEQ ID NO: 88063 - protein, 7 aa, synthetic construct
TGQSRMY

SEQ ID NO: 88064 - protein, 7 aa, synthetic construct
VFESGQP

SEQ ID NO: 88065 - protein, 7 aa, synthetic construct
GPYPKYN

SEQ ID NO: 88066 - protein, 7 aa, synthetic construct
LPEVPYN

SEQ ID NO: 88067 - protein, 7 aa, synthetic construct
GDVGISP

SEQ ID NO: 88068 - protein, 7 aa, synthetic construct
SAQNNHS

SEQ ID NO: 88069 - protein, 7 aa, synthetic construct
IENPPKG

SEQ ID NO: 88070 - protein, 7 aa, synthetic construct
DRSGWER

SEQ ID NO: 88071 - protein, 7 aa, synthetic construct
TRNGQSA

SEQ ID NO: 88072 - protein, 7 aa, synthetic construct
GTNVSFI

SEQ ID NO: 88073 - protein, 7 aa, synthetic construct
LNIQMEG

SEQ ID NO: 88074 - protein, 7 aa, synthetic construct
TSAAANP

SEQ ID NO: 88075 - protein, 7 aa, synthetic construct
NRQMGMM

SEQ ID NO: 88076 - protein, 7 aa, synthetic construct
HQLLEKN

SEQ ID NO: 88077 - protein, 7 aa, synthetic construct
FGNYSEH

SEQ ID NO: 88078 - protein, 7 aa, synthetic construct
FPNYPQP

SEQ ID NO: 88079 - protein, 7 aa, synthetic construct
IRDQFIG

SEQ ID NO: 88080 - protein, 7 aa, synthetic construct
YKADQPR

SEQ ID NO: 88081 - protein, 7 aa, synthetic construct
GRPNMGV

SEQ ID NO: 88082 - protein, 7 aa, synthetic construct
NHTSAPG

SEQ ID NO: 88083 - protein, 7 aa, synthetic construct
GVNQRQI

SEQ ID NO: 88084 - protein, 7 aa, synthetic construct
KQSAKFE

SEQ ID NO: 88085 - protein, 7 aa, synthetic construct
FPENKKA

SEQ ID NO: 88086 - protein, 7 aa, synthetic construct
SVAQRSF

SEQ ID NO: 88087 - protein, 7 aa, synthetic construct
STSQGAN

SEQ ID NO: 88088 - protein, 7 aa, synthetic construct
DPSKQII

SEQ ID NO: 88089 - protein, 7 aa, synthetic construct
MFAPRDE

SEQ ID NO: 88090 - protein, 7 aa, synthetic construct
VMKNQSI

SEQ ID NO: 88091 - protein, 7 aa, synthetic construct
RNGERMI

SEQ ID NO: 88092 - protein, 7 aa, synthetic construct
DGIHRQE

SEQ ID NO: 88093 - protein, 7 aa, synthetic construct
EGNAMQP

SEQ ID NO: 88094 - protein, 7 aa, synthetic construct
PKIINSG

SEQ ID NO: 88095 - protein, 7 aa, synthetic construct
NPTYQTA

SEQ ID NO: 88096 - protein, 7 aa, synthetic construct
MLESKTH

SEQ ID NO: 88097 - protein, 7 aa, synthetic construct
MPRTGQS

SEQ ID NO: 88098 - protein, 7 aa, synthetic construct
QIPSGKW

SEQ ID NO: 88099 - protein, 7 aa, synthetic construct
ARSENPQ

SEQ ID NO: 88100 - protein, 7 aa, synthetic construct
QGGFSGM

SEQ ID NO: 88101 - protein, 7 aa, synthetic construct
KEFPNTT

SEQ ID NO: 88102 - protein, 7 aa, synthetic construct
RGQMGHM

SEQ ID NO: 88103 - protein, 7 aa, synthetic construct
PQRVQDT

SEQ ID NO: 88104 - protein, 7 aa, synthetic construct
FTEHQMI

SEQ ID NO: 88105 - protein, 7 aa, synthetic construct
CKDSQCN

SEQ ID NO: 88106 - protein, 7 aa, synthetic construct
SIREAKV

SEQ ID NO: 88107 - protein, 7 aa, synthetic construct
ILNLNDR

SEQ ID NO: 88108 - protein, 7 aa, synthetic construct
FPKTSAG

SEQ ID NO: 88109 - protein, 7 aa, synthetic construct
IRGLKDI

SEQ ID NO: 88110 - protein, 7 aa, synthetic construct
WDKNNDS

SEQ ID NO: 88111 - protein, 7 aa, synthetic construct
PPSGTLG

SEQ ID NO: 88112 - protein, 7 aa, synthetic construct
SSAGTSY

SEQ ID NO: 88113 - protein, 7 aa, synthetic construct
IRSIEVD

SEQ ID NO: 88114 - protein, 7 aa, synthetic construct
NLSRMSV

SEQ ID NO: 88115 - protein, 7 aa, synthetic construct
LVSQNTL

SEQ ID NO: 88116 - protein, 7 aa, synthetic construct
YQVQPLT

SEQ ID NO: 88117 - protein, 7 aa, synthetic construct
WERNPLG

SEQ ID NO: 88118 - protein, 7 aa, synthetic construct
PYQSVKG

SEQ ID NO: 88119 - protein, 7 aa, synthetic construct
QYRKETT

SEQ ID NO: 88120 - protein, 7 aa, synthetic construct
PKHLISE

SEQ ID NO: 88121 - protein, 7 aa, synthetic construct
YKHFEVD

SEQ ID NO: 88122 - protein, 7 aa, synthetic construct
FKTAQSP

SEQ ID NO: 88123 - protein, 7 aa, synthetic construct
SREHTEM

SEQ ID NO: 88124 - protein, 7 aa, synthetic construct
YQGRTSH

SEQ ID NO: 88125 - protein, 7 aa, synthetic construct
YPNKPLP

SEQ ID NO: 88126 - protein, 7 aa, synthetic construct
SLMPRHP

SEQ ID NO: 88127 - protein, 7 aa, synthetic construct
PLSSKGA

SEQ ID NO: 88128 - protein, 7 aa, synthetic construct
HEEKPRL

SEQ ID NO: 88129 - protein, 7 aa, synthetic construct
NFSPEVM

SEQ ID NO: 88130 - protein, 7 aa, synthetic construct
GKSNMSV

SEQ ID NO: 88131 - protein, 7 aa, synthetic construct
KLVNNDM

SEQ ID NO: 88132 - protein, 7 aa, synthetic construct
AGNFPKP

SEQ ID NO: 88133 - protein, 7 aa, synthetic construct
GQVTIQG

SEQ ID NO: 88134 - protein, 7 aa, synthetic construct
GGHDFGK

SEQ ID NO: 88135 - protein, 7 aa, synthetic construct
KTASDIR

SEQ ID NO: 88136 - protein, 7 aa, synthetic construct
APPVQKV

SEQ ID NO: 88137 - protein, 7 aa, synthetic construct
EDRAALK

SEQ ID NO: 88138 - protein, 7 aa, synthetic construct
WNGEYPS

SEQ ID NO: 88139 - protein, 7 aa, synthetic construct
MYSGKEV

SEQ ID NO: 88140 - protein, 7 aa, synthetic construct
FTSMSLE

SEQ ID NO: 88141 - protein, 7 aa, synthetic construct
MDPKAQH

SEQ ID NO: 88142 - protein, 7 aa, synthetic construct
ATHIPRQ

SEQ ID NO: 88143 - protein, 7 aa, synthetic construct
HIRQDDG

SEQ ID NO: 88144 - protein, 7 aa, synthetic construct
VSRNTIG

SEQ ID NO: 88145 - protein, 7 aa, synthetic construct
VDHSNSA

SEQ ID NO: 88146 - protein, 7 aa, synthetic construct
MANSKTG

SEQ ID NO: 88147 - protein, 7 aa, synthetic construct
RPMGVDV

SEQ ID NO: 88148 - protein, 7 aa, synthetic construct
RRDMHTN

SEQ ID NO: 88149 - protein, 7 aa, synthetic construct
SHTSLVG

SEQ ID NO: 88150 - protein, 7 aa, synthetic construct
MQGQSHG

SEQ ID NO: 88151 - protein, 7 aa, synthetic construct
RDDARGY

SEQ ID NO: 88152 - protein, 7 aa, synthetic construct
KMPSPIM

SEQ ID NO: 88153 - protein, 7 aa, synthetic construct
AEKTNYD

SEQ ID NO: 88154 - protein, 7 aa, synthetic construct
SGVLQHS

SEQ ID NO: 88155 - protein, 7 aa, synthetic construct
LASHKQQ

SEQ ID NO: 88156 - protein, 7 aa, synthetic construct
HFTTIPQ

SEQ ID NO: 88157 - protein, 7 aa, synthetic construct
QEKGVGK

SEQ ID NO: 88158 - protein, 7 aa, synthetic construct
GTIVGDK

SEQ ID NO: 88159 - protein, 7 aa, synthetic construct
SLSYERD

SEQ ID NO: 88160 - protein, 7 aa, synthetic construct
TVPDHTG

SEQ ID NO: 88161 - protein, 7 aa, synthetic construct
NTKIWQE

SEQ ID NO: 88162 - protein, 7 aa, synthetic construct
LRSTNPT

SEQ ID NO: 88163 - protein, 7 aa, synthetic construct
NVTHSAW

SEQ ID NO: 88164 - protein, 7 aa, synthetic construct
INKMMDI

SEQ ID NO: 88165 - protein, 7 aa, synthetic construct
TNRATES

SEQ ID NO: 88166 - protein, 7 aa, synthetic construct
QKSSASF

SEQ ID NO: 88167 - protein, 7 aa, synthetic construct
VQSVRSP

SEQ ID NO: 88168 - protein, 7 aa, synthetic construct
VNVGKGP

SEQ ID NO: 88169 - protein, 7 aa, synthetic construct
NTPVITS

SEQ ID NO: 88170 - protein, 7 aa, synthetic construct
MNGVEKN

SEQ ID NO: 88171 - protein, 7 aa, synthetic construct
IYDKIQE

SEQ ID NO: 88172 - protein, 7 aa, synthetic construct
WHMRANE

SEQ ID NO: 88173 - protein, 7 aa, synthetic construct
IRTTNQV

SEQ ID NO: 88174 - protein, 7 aa, synthetic construct
KAVPAIN

SEQ ID NO: 88175 - protein, 7 aa, synthetic construct
RYATNHV

SEQ ID NO: 88176 - protein, 7 aa, synthetic construct
FNNFQED

SEQ ID NO: 88177 - protein, 7 aa, synthetic construct
QLTQGTA

SEQ ID NO: 88178 - protein, 7 aa, synthetic construct
QQKPSSS

SEQ ID NO: 88179 - protein, 7 aa, synthetic construct
KRGQDDS

SEQ ID NO: 88180 - protein, 7 aa, synthetic construct
GAHHHDA

SEQ ID NO: 88181 - protein, 7 aa, synthetic construct
PYNASKE

SEQ ID NO: 88182 - protein, 7 aa, synthetic construct
NKKDGFW

SEQ ID NO: 88183 - protein, 7 aa, synthetic construct
DDKQAKK

SEQ ID NO: 88184 - protein, 7 aa, synthetic construct
GQWAKQM

SEQ ID NO: 88185 - protein, 7 aa, synthetic construct
TLRIHTD

SEQ ID NO: 88186 - protein, 7 aa, synthetic construct
IGNETHP

SEQ ID NO: 88187 - protein, 7 aa, synthetic construct
VQRKDDM

SEQ ID NO: 88188 - protein, 7 aa, synthetic construct
NHKFELA

SEQ ID NO: 88189 - protein, 7 aa, synthetic construct
EYKTHND

SEQ ID NO: 88190 - protein, 7 aa, synthetic construct
MRDNSTL

SEQ ID NO: 88191 - protein, 7 aa, synthetic construct
ASQASAM

SEQ ID NO: 88192 - protein, 7 aa, synthetic construct
PWNDKLK

SEQ ID NO: 88193 - protein, 7 aa, synthetic construct
HKSGMVL

SEQ ID NO: 88194 - protein, 7 aa, synthetic construct
KVLGRVD

SEQ ID NO: 88195 - protein, 7 aa, synthetic construct
RGSLDSP

SEQ ID NO: 88196 - protein, 7 aa, synthetic construct
NAISQGG

SEQ ID NO: 88197 - protein, 7 aa, synthetic construct
IGRSLDL

SEQ ID NO: 88198 - protein, 7 aa, synthetic construct
QEIGHQV

SEQ ID NO: 88199 - protein, 7 aa, synthetic construct
AIHFRPD

SEQ ID NO: 88200 - protein, 7 aa, synthetic construct
RHPELRP

SEQ ID NO: 88201 - protein, 7 aa, synthetic construct
AQRSANP

SEQ ID NO: 88202 - protein, 7 aa, synthetic construct
FHSIPKN

SEQ ID NO: 88203 - protein, 7 aa, synthetic construct
HFDGMGS

SEQ ID NO: 88204 - protein, 7 aa, synthetic construct
HGHDYKE

SEQ ID NO: 88205 - protein, 7 aa, synthetic construct
NHESNAQ

SEQ ID NO: 88206 - protein, 7 aa, synthetic construct
QSTHWIE

SEQ ID NO: 88207 - protein, 7 aa, synthetic construct
GDMVKGR

SEQ ID NO: 88208 - protein, 7 aa, synthetic construct
TMVAVHE

SEQ ID NO: 88209 - protein, 7 aa, synthetic construct
PGYDKTN

SEQ ID NO: 88210 - protein, 7 aa, synthetic construct
SSHSGVA

SEQ ID NO: 88211 - protein, 7 aa, synthetic construct
MHHAYQD

SEQ ID NO: 88212 - protein, 7 aa, synthetic construct
YFNIRDA

SEQ ID NO: 88213 - protein, 7 aa, synthetic construct
AAIANHL

SEQ ID NO: 88214 - protein, 7 aa, synthetic construct
GMKMHRD

SEQ ID NO: 88215 - protein, 7 aa, synthetic construct
NHAIPIK

SEQ ID NO: 88216 - protein, 7 aa, synthetic construct
HVPRREL

SEQ ID NO: 88217 - protein, 7 aa, synthetic construct
MLKPPSS

SEQ ID NO: 88218 - protein, 7 aa, synthetic construct
IHKVPHA

SEQ ID NO: 88219 - protein, 7 aa, synthetic construct
PKQASNA

SEQ ID NO: 88220 - protein, 7 aa, synthetic construct
GTWANNP

SEQ ID NO: 88221 - protein, 7 aa, synthetic construct
KGHFVDH

SEQ ID NO: 88222 - protein, 7 aa, synthetic construct
KTPKQGD

SEQ ID NO: 88223 - protein, 7 aa, synthetic construct
LNHFYPE

SEQ ID NO: 88224 - protein, 7 aa, synthetic construct
DAHPGRG

SEQ ID NO: 88225 - protein, 7 aa, synthetic construct
LNKMSHM

SEQ ID NO: 88226 - protein, 7 aa, synthetic construct
TRHEQWV

SEQ ID NO: 88227 - protein, 7 aa, synthetic construct
DIHGAPK

SEQ ID NO: 88228 - protein, 7 aa, synthetic construct
YMPVHAD

SEQ ID NO: 88229 - protein, 7 aa, synthetic construct
AAWSHKE

SEQ ID NO: 88230 - protein, 7 aa, synthetic construct
KEYMIRD

SEQ ID NO: 88231 - protein, 7 aa, synthetic construct
TVTPINS

SEQ ID NO: 88232 - protein, 7 aa, synthetic construct
VINYHEP

SEQ ID NO: 88233 - protein, 7 aa, synthetic construct
LTGSVRG

SEQ ID NO: 88234 - protein, 7 aa, synthetic construct
MPENKKY

SEQ ID NO: 88235 - protein, 7 aa, synthetic construct
NSQSTNY

SEQ ID NO: 88236 - protein, 7 aa, synthetic construct
TRISEDQ

SEQ ID NO: 88237 - protein, 7 aa, synthetic construct
DFGAATK

SEQ ID NO: 88238 - protein, 7 aa, synthetic construct
TAKWSNS

SEQ ID NO: 88239 - protein, 7 aa, synthetic construct
TQLPQSE

SEQ ID NO: 88240 - protein, 7 aa, synthetic construct
MQSEQAV

SEQ ID NO: 88241 - protein, 7 aa, synthetic construct
IRTNSQG

SEQ ID NO: 88242 - protein, 7 aa, synthetic construct
TSAMVVG

SEQ ID NO: 88243 - protein, 7 aa, synthetic construct
PYADYSR

SEQ ID NO: 88244 - protein, 7 aa, synthetic construct
DRPHADH

SEQ ID NO: 88245 - protein, 7 aa, synthetic construct
KSLSNGG

SEQ ID NO: 88246 - protein, 7 aa, synthetic construct
STKGYAH

SEQ ID NO: 88247 - protein, 7 aa, synthetic construct
AAVTIER

SEQ ID NO: 88248 - protein, 7 aa, synthetic construct
GDGIHKA

SEQ ID NO: 88249 - protein, 7 aa, synthetic construct
DRLGADQ

SEQ ID NO: 88250 - protein, 7 aa, synthetic construct
WENSMRD

SEQ ID NO: 88251 - protein, 7 aa, synthetic construct
QHNVQME

SEQ ID NO: 88252 - protein, 7 aa, synthetic construct
SAKEANR

SEQ ID NO: 88253 - protein, 7 aa, synthetic construct
VWKGNRD

SEQ ID NO: 88254 - protein, 7 aa, synthetic construct
EAGKGVY

SEQ ID NO: 88255 - protein, 7 aa, synthetic construct
LYGAKAF

SEQ ID NO: 88256 - protein, 7 aa, synthetic construct
KKNTELY

SEQ ID NO: 88257 - protein, 7 aa, synthetic construct
MSYIKES

SEQ ID NO: 88258 - protein, 7 aa, synthetic construct
GPGRGFE

SEQ ID NO: 88259 - protein, 7 aa, synthetic construct
ADFNYTK

SEQ ID NO: 88260 - protein, 7 aa, synthetic construct
VTTGIRY

SEQ ID NO: 88261 - protein, 7 aa, synthetic construct
IYNAGSD

SEQ ID NO: 88262 - protein, 7 aa, synthetic construct
MDRPNKD

SEQ ID NO: 88263 - protein, 7 aa, synthetic construct
VLHSMMN

SEQ ID NO: 88264 - protein, 7 aa, synthetic construct
AEHRSFE

SEQ ID NO: 88265 - protein, 7 aa, synthetic construct
SDHKMFA

SEQ ID NO: 88266 - protein, 7 aa, synthetic construct
QVERSFQ

SEQ ID NO: 88267 - protein, 7 aa, synthetic construct
LGATTTP

SEQ ID NO: 88268 - protein, 7 aa, synthetic construct
SRVPAEQ

SEQ ID NO: 88269 - protein, 7 aa, synthetic construct
HSRMTPM

SEQ ID NO: 88270 - protein, 7 aa, synthetic construct
LNIVNTL

SEQ ID NO: 88271 - protein, 7 aa, synthetic construct
TLQASNA

SEQ ID NO: 88272 - protein, 7 aa, synthetic construct
NAVPMRS

SEQ ID NO: 88273 - protein, 7 aa, synthetic construct
LQFTQAS

SEQ ID NO: 88274 - protein, 7 aa, synthetic construct
GHGEMIA

SEQ ID NO: 88275 - protein, 7 aa, synthetic construct
MGPKHDT

SEQ ID NO: 88276 - protein, 7 aa, synthetic construct
HFQSGDA

SEQ ID NO: 88277 - protein, 7 aa, synthetic construct
LPPAQSS

SEQ ID NO: 88278 - protein, 7 aa, synthetic construct
QARPAAP

SEQ ID NO: 88279 - protein, 7 aa, synthetic construct
YNATPGH

SEQ ID NO: 88280 - protein, 7 aa, synthetic construct
HQRETDT

SEQ ID NO: 88281 - protein, 7 aa, synthetic construct
KSTANNS

SEQ ID NO: 88282 - protein, 7 aa, synthetic construct
IVDMKTR

SEQ ID NO: 88283 - protein, 7 aa, synthetic construct
NQKTGNW

SEQ ID NO: 88284 - protein, 7 aa, synthetic construct
SIAHSRN

SEQ ID NO: 88285 - protein, 7 aa, synthetic construct
ARQHNNI

SEQ ID NO: 88286 - protein, 7 aa, synthetic construct
GVERATA

SEQ ID NO: 88287 - protein, 7 aa, synthetic construct
RNPQTAS

SEQ ID NO: 88288 - protein, 7 aa, synthetic construct
PERYAMA

SEQ ID NO: 88289 - protein, 7 aa, synthetic construct
HQGQRGI

SEQ ID NO: 88290 - protein, 7 aa, synthetic construct
QDAGHLA

SEQ ID NO: 88291 - protein, 7 aa, synthetic construct
QSVTPGM

SEQ ID NO: 88292 - protein, 7 aa, synthetic construct
KWHDVPT

SEQ ID NO: 88293 - protein, 7 aa, synthetic construct
SSNPIVD

SEQ ID NO: 88294 - protein, 7 aa, synthetic construct
INMPPQP

SEQ ID NO: 88295 - protein, 7 aa, synthetic construct
HVRNLAT

SEQ ID NO: 88296 - protein, 7 aa, synthetic construct
DLNKSVL

SEQ ID NO: 88297 - protein, 7 aa, synthetic construct
MINRGLA

SEQ ID NO: 88298 - protein, 7 aa, synthetic construct
SPHDLGA

SEQ ID NO: 88299 - protein, 7 aa, synthetic construct
VQVLKPG

SEQ ID NO: 88300 - protein, 7 aa, synthetic construct
FTRKEDA

SEQ ID NO: 88301 - protein, 7 aa, synthetic construct
GNTITTR

SEQ ID NO: 88302 - protein, 7 aa, synthetic construct
KQKGDWE

SEQ ID NO: 88303 - protein, 7 aa, synthetic construct
YMPIAKH

SEQ ID NO: 88304 - protein, 7 aa, synthetic construct
TNGKSMA

SEQ ID NO: 88305 - protein, 7 aa, synthetic construct
KYAPGEK

SEQ ID NO: 88306 - protein, 7 aa, synthetic construct
TNQMPNF

SEQ ID NO: 88307 - protein, 7 aa, synthetic construct
MKDNKLV

SEQ ID NO: 88308 - protein, 7 aa, synthetic construct
DTQQQQK

SEQ ID NO: 88309 - protein, 7 aa, synthetic construct
SWSVKMD

SEQ ID NO: 88310 - protein, 7 aa, synthetic construct
THMGNEK

SEQ ID NO: 88311 - protein, 7 aa, synthetic construct
TDRIQPK

SEQ ID NO: 88312 - protein, 7 aa, synthetic construct
NNVKNIW

SEQ ID NO: 88313 - protein, 7 aa, synthetic construct
KQSAVAA

SEQ ID NO: 88314 - protein, 7 aa, synthetic construct
ILPSTNY

SEQ ID NO: 88315 - protein, 7 aa, synthetic construct
QTQGARI

SEQ ID NO: 88316 - protein, 7 aa, synthetic construct
QHAPIPD

SEQ ID NO: 88317 - protein, 7 aa, synthetic construct
HATFHHG

SEQ ID NO: 88318 - protein, 7 aa, synthetic construct
KYQENYT

SEQ ID NO: 88319 - protein, 7 aa, synthetic construct
RFEDFKG

SEQ ID NO: 88320 - protein, 7 aa, synthetic construct
VYAKIDA

SEQ ID NO: 88321 - protein, 7 aa, synthetic construct
AERISYT

SEQ ID NO: 88322 - protein, 7 aa, synthetic construct
VKSSGAN

SEQ ID NO: 88323 - protein, 7 aa, synthetic construct
QGSHNSP

SEQ ID NO: 88324 - protein, 7 aa, synthetic construct
RTEQHYS

SEQ ID NO: 88325 - protein, 7 aa, synthetic construct
AETRTPQ

SEQ ID NO: 88326 - protein, 7 aa, synthetic construct
QDKAQRH

SEQ ID NO: 88327 - protein, 7 aa, synthetic construct
QNPNTTG

SEQ ID NO: 88328 - protein, 7 aa, synthetic construct
GAKTNYT

SEQ ID NO: 88329 - protein, 7 aa, synthetic construct
TIEHRLR

SEQ ID NO: 88330 - protein, 7 aa, synthetic construct
RSGQSNQ

SEQ ID NO: 88331 - protein, 7 aa, synthetic construct
LMPQLNH

SEQ ID NO: 88332 - protein, 7 aa, synthetic construct
SIKSEFY

SEQ ID NO: 88333 - protein, 7 aa, synthetic construct
HDFMIRE

SEQ ID NO: 88334 - protein, 7 aa, synthetic construct
NKQSQPN

SEQ ID NO: 88335 - protein, 7 aa, synthetic construct
VKIVDEN

SEQ ID NO: 88336 - protein, 7 aa, synthetic construct
VAHAERK

SEQ ID NO: 88337 - protein, 7 aa, synthetic construct
AIHVIQA

SEQ ID NO: 88338 - protein, 7 aa, synthetic construct
MVGEFKR

SEQ ID NO: 88339 - protein, 7 aa, synthetic construct
KISVNNQ

SEQ ID NO: 88340 - protein, 7 aa, synthetic construct
FPSIEAG

SEQ ID NO: 88341 - protein, 7 aa, synthetic construct
IYHENHP

SEQ ID NO: 88342 - protein, 7 aa, synthetic construct
DLPRPTH

SEQ ID NO: 88343 - protein, 7 aa, synthetic construct
LMGTQIQ

SEQ ID NO: 88344 - protein, 7 aa, synthetic construct
REGGISL

SEQ ID NO: 88345 - protein, 7 aa, synthetic construct
KITSHND

SEQ ID NO: 88346 - protein, 7 aa, synthetic construct
AFMEKVE

SEQ ID NO: 88347 - protein, 7 aa, synthetic construct
DKMIIRE

SEQ ID NO: 88348 - protein, 7 aa, synthetic construct
WHTHYKE

SEQ ID NO: 88349 - protein, 7 aa, synthetic construct
MADRAYV

SEQ ID NO: 88350 - protein, 7 aa, synthetic construct
TLKMYSE

SEQ ID NO: 88351 - protein, 7 aa, synthetic construct
NDRMERV

SEQ ID NO: 88352 - protein, 7 aa, synthetic construct
DKERSQQ

SEQ ID NO: 88353 - protein, 7 aa, synthetic construct
HQGQIMH

SEQ ID NO: 88354 - protein, 7 aa, synthetic construct
WEAKPDF

SEQ ID NO: 88355 - protein, 7 aa, synthetic construct
VGYPVSA

SEQ ID NO: 88356 - protein, 7 aa, synthetic construct
KNDHVNV

SEQ ID NO: 88357 - protein, 7 aa, synthetic construct
TNTPVHS

SEQ ID NO: 88358 - protein, 7 aa, synthetic construct
INASRTG

SEQ ID NO: 88359 - protein, 7 aa, synthetic construct
IARSSSH

SEQ ID NO: 88360 - protein, 7 aa, synthetic construct
IVSATKS

SEQ ID NO: 88361 - protein, 7 aa, synthetic construct
EEHYMLD

SEQ ID NO: 88362 - protein, 7 aa, synthetic construct
SEKMIKY

SEQ ID NO: 88363 - protein, 7 aa, synthetic construct
SKLPTVT

SEQ ID NO: 88364 - protein, 7 aa, synthetic construct
NQLKDAA

SEQ ID NO: 88365 - protein, 7 aa, synthetic construct
TSLQTIM

SEQ ID NO: 88366 - protein, 7 aa, synthetic construct
PPAIGTA

SEQ ID NO: 88367 - protein, 7 aa, synthetic construct
NHVKPHF

SEQ ID NO: 88368 - protein, 7 aa, synthetic construct
HAPKKHE

SEQ ID NO: 88369 - protein, 7 aa, synthetic construct
LIHDHPK

SEQ ID NO: 88370 - protein, 7 aa, synthetic construct
NSGVKVP

SEQ ID NO: 88371 - protein, 7 aa, synthetic construct
TEKFAQW

SEQ ID NO: 88372 - protein, 7 aa, synthetic construct
AFEARTA

SEQ ID NO: 88373 - protein, 7 aa, synthetic construct
NHDQKFR

SEQ ID NO: 88374 - protein, 7 aa, synthetic construct
ASTGNIM

SEQ ID NO: 88375 - protein, 7 aa, synthetic construct
DLGKGIG

SEQ ID NO: 88376 - protein, 7 aa, synthetic construct
KKDGGMA

SEQ ID NO: 88377 - protein, 7 aa, synthetic construct
EGAIGTR

SEQ ID NO: 88378 - protein, 7 aa, synthetic construct
FSKAVNN

SEQ ID NO: 88379 - protein, 7 aa, synthetic construct
RSHIMTD

SEQ ID NO: 88380 - protein, 7 aa, synthetic construct
RNGLEAH

SEQ ID NO: 88381 - protein, 7 aa, synthetic construct
KEKQSQQ

SEQ ID NO: 88382 - protein, 7 aa, synthetic construct
PPTKENA

SEQ ID NO: 88383 - protein, 7 aa, synthetic construct
HVKAEGI

SEQ ID NO: 88384 - protein, 7 aa, synthetic construct
SRLSANE

SEQ ID NO: 88385 - protein, 7 aa, synthetic construct
KTAAAKE

SEQ ID NO: 88386 - protein, 7 aa, synthetic construct
TNADTHY

SEQ ID NO: 88387 - protein, 7 aa, synthetic construct
PPSHKVE

SEQ ID NO: 88388 - protein, 7 aa, synthetic construct
AAAQRMN

SEQ ID NO: 88389 - protein, 7 aa, synthetic construct
YDVHFSA

SEQ ID NO: 88390 - protein, 7 aa, synthetic construct
ANYERKV

SEQ ID NO: 88391 - protein, 7 aa, synthetic construct
MNGFTAV

SEQ ID NO: 88392 - protein, 7 aa, synthetic construct
QGMKPEW

SEQ ID NO: 88393 - protein, 7 aa, synthetic construct
QVAQHHI

SEQ ID NO: 88394 - protein, 7 aa, synthetic construct
RVMVPNQ

SEQ ID NO: 88395 - protein, 7 aa, synthetic construct
IFNGPIQ

SEQ ID NO: 88396 - protein, 7 aa, synthetic construct
GTMRPIM

SEQ ID NO: 88397 - protein, 7 aa, synthetic construct
GLKGSYS

SEQ ID NO: 88398 - protein, 7 aa, synthetic construct
DFAHKNV

SEQ ID NO: 88399 - protein, 7 aa, synthetic construct
SWANTEL

SEQ ID NO: 88400 - protein, 7 aa, synthetic construct
NSEKLRQ

SEQ ID NO: 88401 - protein, 7 aa, synthetic construct
RDSEKGP

SEQ ID NO: 88402 - protein, 7 aa, synthetic construct
RDYARQG

SEQ ID NO: 88403 - protein, 7 aa, synthetic construct
VAQVMGG

SEQ ID NO: 88404 - protein, 7 aa, synthetic construct
NNFPNSV

SEQ ID NO: 88405 - protein, 7 aa, synthetic construct
RYTNVNT

SEQ ID NO: 88406 - protein, 7 aa, synthetic construct
NFYKEHH

SEQ ID NO: 88407 - protein, 7 aa, synthetic construct
ENVQGVG

SEQ ID NO: 88408 - protein, 7 aa, synthetic construct
AIPVSGH

SEQ ID NO: 88409 - protein, 7 aa, synthetic construct
LMMVPEE

SEQ ID NO: 88410 - protein, 7 aa, synthetic construct
FTLDNKN

SEQ ID NO: 88411 - protein, 7 aa, synthetic construct
DVKKSHW

SEQ ID NO: 88412 - protein, 7 aa, synthetic construct
FEHVAPN

SEQ ID NO: 88413 - protein, 7 aa, synthetic construct
WSASDRS

SEQ ID NO: 88414 - protein, 7 aa, synthetic construct
NEGMQRT

SEQ ID NO: 88415 - protein, 7 aa, synthetic construct
NMYMQTP

SEQ ID NO: 88416 - protein, 7 aa, synthetic construct
QITLVKQ

SEQ ID NO: 88417 - protein, 7 aa, synthetic construct
NRMDPEG

SEQ ID NO: 88418 - protein, 7 aa, synthetic construct
KAEMVQI

SEQ ID NO: 88419 - protein, 7 aa, synthetic construct
QKPMNAS

SEQ ID NO: 88420 - protein, 7 aa, synthetic construct
WLHSNTS

SEQ ID NO: 88421 - protein, 7 aa, synthetic construct
RLHNHMP

SEQ ID NO: 88422 - protein, 7 aa, synthetic construct
FASVLPQ

SEQ ID NO: 88423 - protein, 7 aa, synthetic construct
FMQQRGE

SEQ ID NO: 88424 - protein, 7 aa, synthetic construct
QNPSQKN

SEQ ID NO: 88425 - protein, 7 aa, synthetic construct
QPQNPDH

SEQ ID NO: 88426 - protein, 7 aa, synthetic construct
YQTAIPQ

SEQ ID NO: 88427 - protein, 7 aa, synthetic construct
QVQGLGP

SEQ ID NO: 88428 - protein, 7 aa, synthetic construct
ATSLALE

SEQ ID NO: 88429 - protein, 7 aa, synthetic construct
FSTPESR

SEQ ID NO: 88430 - protein, 7 aa, synthetic construct
KIMDNFS

SEQ ID NO: 88431 - protein, 7 aa, synthetic construct
MGNTFQQ

SEQ ID NO: 88432 - protein, 7 aa, synthetic construct
HSTKTGV

SEQ ID NO: 88433 - protein, 7 aa, synthetic construct
GHSPNIT

SEQ ID NO: 88434 - protein, 7 aa, synthetic construct
DLVKQFG

SEQ ID NO: 88435 - protein, 7 aa, synthetic construct
IQERVIA

SEQ ID NO: 88436 - protein, 7 aa, synthetic construct
RPTSADS

SEQ ID NO: 88437 - protein, 7 aa, synthetic construct
LRNITEQ

SEQ ID NO: 88438 - protein, 7 aa, synthetic construct
MTMQFEK

SEQ ID NO: 88439 - protein, 7 aa, synthetic construct
TMHTQKD

SEQ ID NO: 88440 - protein, 7 aa, synthetic construct
KLETNGR

SEQ ID NO: 88441 - protein, 7 aa, synthetic construct
AKPNVQD

SEQ ID NO: 88442 - protein, 7 aa, synthetic construct
DYSRTVV

SEQ ID NO: 88443 - protein, 7 aa, synthetic construct
SFRMSDM

SEQ ID NO: 88444 - protein, 7 aa, synthetic construct
KMFTSAE

SEQ ID NO: 88445 - protein, 7 aa, synthetic construct
QNSPART

SEQ ID NO: 88446 - protein, 7 aa, synthetic construct
NSAVQVP

SEQ ID NO: 88447 - protein, 7 aa, synthetic construct
FYNGNPA

SEQ ID NO: 88448 - protein, 7 aa, synthetic construct
FKTPVEK

SEQ ID NO: 88449 - protein, 7 aa, synthetic construct
ANGFTND

SEQ ID NO: 88450 - protein, 7 aa, synthetic construct
LGVTQSN

SEQ ID NO: 88451 - protein, 7 aa, synthetic construct
KKDHPET

SEQ ID NO: 88452 - protein, 7 aa, synthetic construct
ITPNTEP

SEQ ID NO: 88453 - protein, 7 aa, synthetic construct
RKDKMEE

SEQ ID NO: 88454 - protein, 7 aa, synthetic construct
PVLDMAR

SEQ ID NO: 88455 - protein, 7 aa, synthetic construct
ANAMPLG

SEQ ID NO: 88456 - protein, 7 aa, synthetic construct
PIGNSGF

SEQ ID NO: 88457 - protein, 7 aa, synthetic construct
HFPDRKQ

SEQ ID NO: 88458 - protein, 7 aa, synthetic construct
LVDGAQF

SEQ ID NO: 88459 - protein, 7 aa, synthetic construct
HKPNQDW

SEQ ID NO: 88460 - protein, 7 aa, synthetic construct
NGKSNNV

SEQ ID NO: 88461 - protein, 7 aa, synthetic construct
TIQGQFH

SEQ ID NO: 88462 - protein, 7 aa, synthetic construct
PIERTQV

SEQ ID NO: 88463 - protein, 7 aa, synthetic construct
VKEYHLQ

SEQ ID NO: 88464 - protein, 7 aa, synthetic construct
TNVVAAL

SEQ ID NO: 88465 - protein, 7 aa, synthetic construct
TNAKQGG

SEQ ID NO: 88466 - protein, 7 aa, synthetic construct
MDTHVAK

SEQ ID NO: 88467 - protein, 7 aa, synthetic construct
GGLKAAL

SEQ ID NO: 88468 - protein, 7 aa, synthetic construct
LHQQTSN

SEQ ID NO: 88469 - protein, 7 aa, synthetic construct
DNTPKIK

SEQ ID NO: 88470 - protein, 7 aa, synthetic construct
LEMTFKD

SEQ ID NO: 88471 - protein, 7 aa, synthetic construct
GLLERGH

SEQ ID NO: 88472 - protein, 7 aa, synthetic construct
VYFDPEK

SEQ ID NO: 88473 - protein, 7 aa, synthetic construct
FGSPAKY

SEQ ID NO: 88474 - protein, 7 aa, synthetic construct
RYPLVKD

SEQ ID NO: 88475 - protein, 7 aa, synthetic construct
NRPEFLL

SEQ ID NO: 88476 - protein, 7 aa, synthetic construct
WDTGHIH

SEQ ID NO: 88477 - protein, 7 aa, synthetic construct
MMGQGHL

SEQ ID NO: 88478 - protein, 7 aa, synthetic construct
MMRIGGM

SEQ ID NO: 88479 - protein, 7 aa, synthetic construct
YEMGPPQ

SEQ ID NO: 88480 - protein, 7 aa, synthetic construct
QHVPHRD

SEQ ID NO: 88481 - protein, 7 aa, synthetic construct
GGRINLV

SEQ ID NO: 88482 - protein, 7 aa, synthetic construct
EKGSQTL

SEQ ID NO: 88483 - protein, 7 aa, synthetic construct
NMPDGKH

SEQ ID NO: 88484 - protein, 7 aa, synthetic construct
TQKTNPN

SEQ ID NO: 88485 - protein, 7 aa, synthetic construct
EHKTFKL

SEQ ID NO: 88486 - protein, 7 aa, synthetic construct
MGIGDHI

SEQ ID NO: 88487 - protein, 7 aa, synthetic construct
KLRMADI

SEQ ID NO: 88488 - protein, 7 aa, synthetic construct
DKTFRTS

SEQ ID NO: 88489 - protein, 7 aa, synthetic construct
MMKGNQG

SEQ ID NO: 88490 - protein, 7 aa, synthetic construct
KIDIAGA

SEQ ID NO: 88491 - protein, 7 aa, synthetic construct
IQQERSN

SEQ ID NO: 88492 - protein, 7 aa, synthetic construct
HLGEGLA

SEQ ID NO: 88493 - protein, 7 aa, synthetic construct
RAHGMHA

SEQ ID NO: 88494 - protein, 7 aa, synthetic construct
NRMAVMP

SEQ ID NO: 88495 - protein, 7 aa, synthetic construct
LKQIINN

SEQ ID NO: 88496 - protein, 7 aa, synthetic construct
VKIIPAN

SEQ ID NO: 88497 - protein, 7 aa, synthetic construct
LAKGGDH

SEQ ID NO: 88498 - protein, 7 aa, synthetic construct
RSPLTAM

SEQ ID NO: 88499 - protein, 7 aa, synthetic construct
SINSAKT

SEQ ID NO: 88500 - protein, 7 aa, synthetic construct
TPSGRGP

SEQ ID NO: 88501 - protein, 7 aa, synthetic construct
NLRDPEM

SEQ ID NO: 88502 - protein, 7 aa, synthetic construct
STGGHIH

SEQ ID NO: 88503 - protein, 7 aa, synthetic construct
FRNTMIT

SEQ ID NO: 88504 - protein, 7 aa, synthetic construct
NKAYISG

SEQ ID NO: 88505 - protein, 7 aa, synthetic construct
AVQMNAM

SEQ ID NO: 88506 - protein, 7 aa, synthetic construct
AEQSKFG

SEQ ID NO: 88507 - protein, 7 aa, synthetic construct
TPTKQQP

SEQ ID NO: 88508 - protein, 7 aa, synthetic construct
LNSILVQ

SEQ ID NO: 88509 - protein, 7 aa, synthetic construct
FERGLAG

SEQ ID NO: 88510 - protein, 7 aa, synthetic construct
WEKNVAE

SEQ ID NO: 88511 - protein, 7 aa, synthetic construct
QNFPGTI

SEQ ID NO: 88512 - protein, 7 aa, synthetic construct
YKEQDLH

SEQ ID NO: 88513 - protein, 7 aa, synthetic construct
IKPWNNQ

SEQ ID NO: 88514 - protein, 7 aa, synthetic construct
AFGIGGH

SEQ ID NO: 88515 - protein, 7 aa, synthetic construct
NRQEALV

SEQ ID NO: 88516 - protein, 7 aa, synthetic construct
MYHEKDS

SEQ ID NO: 88517 - protein, 7 aa, synthetic construct
QYKDREF

SEQ ID NO: 88518 - protein, 7 aa, synthetic construct
IQSAHNR

SEQ ID NO: 88519 - protein, 7 aa, synthetic construct
AKYAKVE

SEQ ID NO: 88520 - protein, 7 aa, synthetic construct
GQNMPHS

SEQ ID NO: 88521 - protein, 7 aa, synthetic construct
KTQTTGY

SEQ ID NO: 88522 - protein, 7 aa, synthetic construct
VIHPISN

SEQ ID NO: 88523 - protein, 7 aa, synthetic construct
WYEGAGK

SEQ ID NO: 88524 - protein, 7 aa, synthetic construct
MLGMTNV

SEQ ID NO: 88525 - protein, 7 aa, synthetic construct
VGRSVFQ

SEQ ID NO: 88526 - protein, 7 aa, synthetic construct
DRDSYVA

SEQ ID NO: 88527 - protein, 7 aa, synthetic construct
IYKSWEA

SEQ ID NO: 88528 - protein, 7 aa, synthetic construct
KEGFTVL

SEQ ID NO: 88529 - protein, 7 aa, synthetic construct
SKPTDDG

SEQ ID NO: 88530 - protein, 7 aa, synthetic construct
QRSVPYT

SEQ ID NO: 88531 - protein, 7 aa, synthetic construct
PHQTDQF

SEQ ID NO: 88532 - protein, 7 aa, synthetic construct
SYGEAGT

SEQ ID NO: 88533 - protein, 7 aa, synthetic construct
MFADVKK

SEQ ID NO: 88534 - protein, 7 aa, synthetic construct
GIVVPAQ

SEQ ID NO: 88535 - protein, 7 aa, synthetic construct
EKAREVA

SEQ ID NO: 88536 - protein, 7 aa, synthetic construct
VINDQSR

SEQ ID NO: 88537 - protein, 7 aa, synthetic construct
ATFRGQH

SEQ ID NO: 88538 - protein, 7 aa, synthetic construct
SHFVHKA

SEQ ID NO: 88539 - protein, 7 aa, synthetic construct
RYGQKEI

SEQ ID NO: 88540 - protein, 7 aa, synthetic construct
TKSQKQE

SEQ ID NO: 88541 - protein, 7 aa, synthetic construct
LNPTQMM

SEQ ID NO: 88542 - protein, 7 aa, synthetic construct
RFEVDQQ

SEQ ID NO: 88543 - protein, 7 aa, synthetic construct
KPDNERP

SEQ ID NO: 88544 - protein, 7 aa, synthetic construct
KAQGPHN

SEQ ID NO: 88545 - protein, 7 aa, synthetic construct
INSDKSL

SEQ ID NO: 88546 - protein, 7 aa, synthetic construct
SQRTTNP

SEQ ID NO: 88547 - protein, 7 aa, synthetic construct
NESKRDS

SEQ ID NO: 88548 - protein, 7 aa, synthetic construct
HGQTLSE

SEQ ID NO: 88549 - protein, 7 aa, synthetic construct
KKYMDYE

SEQ ID NO: 88550 - protein, 7 aa, synthetic construct
RELTQAH

SEQ ID NO: 88551 - protein, 7 aa, synthetic construct
YNKDEPY

SEQ ID NO: 88552 - protein, 7 aa, synthetic construct
LHGLGSM

SEQ ID NO: 88553 - protein, 7 aa, synthetic construct
IKEQNPW

SEQ ID NO: 88554 - protein, 7 aa, synthetic construct
HSKLPHQ

SEQ ID NO: 88555 - protein, 7 aa, synthetic construct
MHSPKDD

SEQ ID NO: 88556 - protein, 7 aa, synthetic construct
KTNLNSW

SEQ ID NO: 88557 - protein, 7 aa, synthetic construct
TWKKDNL

SEQ ID NO: 88558 - protein, 7 aa, synthetic construct
AMGNMPM

SEQ ID NO: 88559 - protein, 7 aa, synthetic construct
SIQTQFG

SEQ ID NO: 88560 - protein, 7 aa, synthetic construct
QHNFPLP

SEQ ID NO: 88561 - protein, 7 aa, synthetic construct
PATFSHG

SEQ ID NO: 88562 - protein, 7 aa, synthetic construct
YGKPPIT

SEQ ID NO: 88563 - protein, 7 aa, synthetic construct
VTVKDYH

SEQ ID NO: 88564 - protein, 7 aa, synthetic construct
NKYDKNW

SEQ ID NO: 88565 - protein, 7 aa, synthetic construct
MMPAQVR

SEQ ID NO: 88566 - protein, 7 aa, synthetic construct
VSMHGKD

SEQ ID NO: 88567 - protein, 7 aa, synthetic construct
YDKKESM

SEQ ID NO: 88568 - protein, 7 aa, synthetic construct
QNLVDTI

SEQ ID NO: 88569 - protein, 7 aa, synthetic construct
LTPNVMG

SEQ ID NO: 88570 - protein, 7 aa, synthetic construct
VAQHNNS

SEQ ID NO: 88571 - protein, 7 aa, synthetic construct
KTQAGGT

SEQ ID NO: 88572 - protein, 7 aa, synthetic construct
PALNKTV

SEQ ID NO: 88573 - protein, 7 aa, synthetic construct
GIGYKVM

SEQ ID NO: 88574 - protein, 7 aa, synthetic construct
VPPNTFT

SEQ ID NO: 88575 - protein, 7 aa, synthetic construct
FNAQNTA

SEQ ID NO: 88576 - protein, 7 aa, synthetic construct
ILKPMAT

SEQ ID NO: 88577 - protein, 7 aa, synthetic construct
PIQNHII

SEQ ID NO: 88578 - protein, 7 aa, synthetic construct
SANNNQA

SEQ ID NO: 88579 - protein, 7 aa, synthetic construct
TMPDFSI

SEQ ID NO: 88580 - protein, 7 aa, synthetic construct
VINGTIF

SEQ ID NO: 88581 - protein, 7 aa, synthetic construct
IGVLKDP

SEQ ID NO: 88582 - protein, 7 aa, synthetic construct
NSMGKVV

SEQ ID NO: 88583 - protein, 7 aa, synthetic construct
ISPVGDR

SEQ ID NO: 88584 - protein, 7 aa, synthetic construct
MDVNQKY

SEQ ID NO: 88585 - protein, 7 aa, synthetic construct
QVRQDGH

SEQ ID NO: 88586 - protein, 7 aa, synthetic construct
TNGARTP

SEQ ID NO: 88587 - protein, 7 aa, synthetic construct
TMPMQRV

SEQ ID NO: 88588 - protein, 7 aa, synthetic construct
LNDALRG

SEQ ID NO: 88589 - protein, 7 aa, synthetic construct
LNQRIQP

SEQ ID NO: 88590 - protein, 7 aa, synthetic construct
WITGTVH

SEQ ID NO: 88591 - protein, 7 aa, synthetic construct
DPKSKRD

SEQ ID NO: 88592 - protein, 7 aa, synthetic construct
LPHEMAT

SEQ ID NO: 88593 - protein, 7 aa, synthetic construct
RAPNQHI

SEQ ID NO: 88594 - protein, 7 aa, synthetic construct
ESAQSRQ

SEQ ID NO: 88595 - protein, 7 aa, synthetic construct
RNDLQFQ

SEQ ID NO: 88596 - protein, 7 aa, synthetic construct
SHKDKVN

SEQ ID NO: 88597 - protein, 7 aa, synthetic construct
KMIPFAD

SEQ ID NO: 88598 - protein, 7 aa, synthetic construct
NTPMKMM

SEQ ID NO: 88599 - protein, 7 aa, synthetic construct
AQGNSMM

SEQ ID NO: 88600 - protein, 7 aa, synthetic construct
PQIKPHA

SEQ ID NO: 88601 - protein, 7 aa, synthetic construct
QVVQGVS

SEQ ID NO: 88602 - protein, 7 aa, synthetic construct
GIKVPQS

SEQ ID NO: 88603 - protein, 7 aa, synthetic construct
NSTKDGK

SEQ ID NO: 88604 - protein, 7 aa, synthetic construct
RIGEQSM

SEQ ID NO: 88605 - protein, 7 aa, synthetic construct
RMGMKEG

SEQ ID NO: 88606 - protein, 7 aa, synthetic construct
HNNQGGV

SEQ ID NO: 88607 - protein, 7 aa, synthetic construct
RLPIAEM

SEQ ID NO: 88608 - protein, 7 aa, synthetic construct
YGRKADE

SEQ ID NO: 88609 - protein, 7 aa, synthetic construct
WLTGKVG

SEQ ID NO: 88610 - protein, 7 aa, synthetic construct
DMTLRHV

SEQ ID NO: 88611 - protein, 7 aa, synthetic construct
QTAVLKP

SEQ ID NO: 88612 - protein, 7 aa, synthetic construct
SPAFVRD

SEQ ID NO: 88613 - protein, 7 aa, synthetic construct
VGRQMQT

SEQ ID NO: 88614 - protein, 7 aa, synthetic construct
HHQNSTK

SEQ ID NO: 88615 - protein, 7 aa, synthetic construct
KDEKSER

SEQ ID NO: 88616 - protein, 7 aa, synthetic construct
PSGQSNA

SEQ ID NO: 88617 - protein, 7 aa, synthetic construct
LDAGHMR

SEQ ID NO: 88618 - protein, 7 aa, synthetic construct
FARLERN

SEQ ID NO: 88619 - protein, 7 aa, synthetic construct
DDRARVM

SEQ ID NO: 88620 - protein, 7 aa, synthetic construct
AVAQMVG

SEQ ID NO: 88621 - protein, 7 aa, synthetic construct
KLYQDRS

SEQ ID NO: 88622 - protein, 7 aa, synthetic construct
MNTNWVA

SEQ ID NO: 88623 - protein, 7 aa, synthetic construct
GTKNISD

SEQ ID NO: 88624 - protein, 7 aa, synthetic construct
VDFRSKG

SEQ ID NO: 88625 - protein, 7 aa, synthetic construct
IFSEAVA

SEQ ID NO: 88626 - protein, 7 aa, synthetic construct
VPVRDGN

SEQ ID NO: 88627 - protein, 7 aa, synthetic construct
MNVGPRQ

SEQ ID NO: 88628 - protein, 7 aa, synthetic construct
HPQNSNM

SEQ ID NO: 88629 - protein, 7 aa, synthetic construct
PKQPNSV

SEQ ID NO: 88630 - protein, 7 aa, synthetic construct
AWQTVGA

SEQ ID NO: 88631 - protein, 7 aa, synthetic construct
MTPSWTD

SEQ ID NO: 88632 - protein, 7 aa, synthetic construct
SFLDRIP

SEQ ID NO: 88633 - protein, 7 aa, synthetic construct
AERPQMY

SEQ ID NO: 88634 - protein, 7 aa, synthetic construct
MKFNEGV

SEQ ID NO: 88635 - protein, 7 aa, synthetic construct
RPNTGGS

SEQ ID NO: 88636 - protein, 7 aa, synthetic construct
QKNTGVQ

SEQ ID NO: 88637 - protein, 7 aa, synthetic construct
NRADLSV

SEQ ID NO: 88638 - protein, 7 aa, synthetic construct
KQPDSAM

SEQ ID NO: 88639 - protein, 7 aa, synthetic construct
TGDGRKI

SEQ ID NO: 88640 - protein, 7 aa, synthetic construct
LIHSQPG

SEQ ID NO: 88641 - protein, 7 aa, synthetic construct
WADSQHT

SEQ ID NO: 88642 - protein, 7 aa, synthetic construct
HQHLSKV

SEQ ID NO: 88643 - protein, 7 aa, synthetic construct
NQKGLLY

SEQ ID NO: 88644 - protein, 7 aa, synthetic construct
GHKVEMM

SEQ ID NO: 88645 - protein, 7 aa, synthetic construct
WTTSPDK

SEQ ID NO: 88646 - protein, 7 aa, synthetic construct
FIHNMEG

SEQ ID NO: 88647 - protein, 7 aa, synthetic construct
PLTHMEL

SEQ ID NO: 88648 - protein, 7 aa, synthetic construct
NSKNHYH

SEQ ID NO: 88649 - protein, 7 aa, synthetic construct
NMRAHLA

SEQ ID NO: 88650 - protein, 7 aa, synthetic construct
SRKIDQN

SEQ ID NO: 88651 - protein, 7 aa, synthetic construct
KEAPHFR

SEQ ID NO: 88652 - protein, 7 aa, synthetic construct
KETGING

SEQ ID NO: 88653 - protein, 7 aa, synthetic construct
QKITVDL

SEQ ID NO: 88654 - protein, 7 aa, synthetic construct
IKKSEPP

SEQ ID NO: 88655 - protein, 7 aa, synthetic construct
FLLSPQG

SEQ ID NO: 88656 - protein, 7 aa, synthetic construct
TRKGEAL

SEQ ID NO: 88657 - protein, 7 aa, synthetic construct
RMSPGAM

SEQ ID NO: 88658 - protein, 7 aa, synthetic construct
NVTGKGG

SEQ ID NO: 88659 - protein, 7 aa, synthetic construct
KFNPSHI

SEQ ID NO: 88660 - protein, 7 aa, synthetic construct
SPAAGYG

SEQ ID NO: 88661 - protein, 7 aa, synthetic construct
HRLDQDS

SEQ ID NO: 88662 - protein, 7 aa, synthetic construct
FEMHLQK

SEQ ID NO: 88663 - protein, 7 aa, synthetic construct
IQIAVGS

SEQ ID NO: 88664 - protein, 7 aa, synthetic construct
SILKTVI

SEQ ID NO: 88665 - protein, 7 aa, synthetic construct
HQTRALI

SEQ ID NO: 88666 - protein, 7 aa, synthetic construct
AVNGVIN

SEQ ID NO: 88667 - protein, 7 aa, synthetic construct
TKDGMAR

SEQ ID NO: 88668 - protein, 7 aa, synthetic construct
LKPAHLS

SEQ ID NO: 88669 - protein, 7 aa, synthetic construct
TQETRFL

SEQ ID NO: 88670 - protein, 7 aa, synthetic construct
GWMNRPD

SEQ ID NO: 88671 - protein, 7 aa, synthetic construct
FMASPPT

SEQ ID NO: 88672 - protein, 7 aa, synthetic construct
TDVMMKH

SEQ ID NO: 88673 - protein, 7 aa, synthetic construct
ALPQRAL

SEQ ID NO: 88674 - protein, 7 aa, synthetic construct
KAPKLQE

SEQ ID NO: 88675 - protein, 7 aa, synthetic construct
LSHQLYS

SEQ ID NO: 88676 - protein, 7 aa, synthetic construct
ARDVVKQ

SEQ ID NO: 88677 - protein, 7 aa, synthetic construct
PLKAMPQ

SEQ ID NO: 88678 - protein, 7 aa, synthetic construct
KTGTNFY

SEQ ID NO: 88679 - protein, 7 aa, synthetic construct
EHNSRQS

SEQ ID NO: 88680 - protein, 7 aa, synthetic construct
VGTLGVY

SEQ ID NO: 88681 - protein, 7 aa, synthetic construct
PKNIVSA

SEQ ID NO: 88682 - protein, 7 aa, synthetic construct
VSRQEST

SEQ ID NO: 88683 - protein, 7 aa, synthetic construct
IMYKAHS

SEQ ID NO: 88684 - protein, 7 aa, synthetic construct
ILDKFRT

SEQ ID NO: 88685 - protein, 7 aa, synthetic construct
QPPQISR

SEQ ID NO: 88686 - protein, 7 aa, synthetic construct
TMDHKYQ

SEQ ID NO: 88687 - protein, 7 aa, synthetic construct
ELPGFRE

SEQ ID NO: 88688 - protein, 7 aa, synthetic construct
KMQITKD

SEQ ID NO: 88689 - protein, 7 aa, synthetic construct
VTSLVAP

SEQ ID NO: 88690 - protein, 7 aa, synthetic construct
GMKNVQA

SEQ ID NO: 88691 - protein, 7 aa, synthetic construct
GLARSIQ

SEQ ID NO: 88692 - protein, 7 aa, synthetic construct
QAAPRNI

SEQ ID NO: 88693 - protein, 7 aa, synthetic construct
TTWQPAD

SEQ ID NO: 88694 - protein, 7 aa, synthetic construct
NRNTNHQ

SEQ ID NO: 88695 - protein, 7 aa, synthetic construct
HSQPTKW

SEQ ID NO: 88696 - protein, 7 aa, synthetic construct
HPTSRDP

SEQ ID NO: 88697 - protein, 7 aa, synthetic construct
VKQTQKD

SEQ ID NO: 88698 - protein, 7 aa, synthetic construct
PLNVKGL

SEQ ID NO: 88699 - protein, 7 aa, synthetic construct
NSAYIQD

SEQ ID NO: 88700 - protein, 7 aa, synthetic construct
MGELPFR

SEQ ID NO: 88701 - protein, 7 aa, synthetic construct
LMTRSSA

SEQ ID NO: 88702 - protein, 7 aa, synthetic construct
VQPVFRA

SEQ ID NO: 88703 - protein, 7 aa, synthetic construct
CKAANGG

SEQ ID NO: 88704 - protein, 7 aa, synthetic construct
YKPPVSG

SEQ ID NO: 88705 - protein, 7 aa, synthetic construct
KHGMEHE

SEQ ID NO: 88706 - protein, 7 aa, synthetic construct
NYKEAYD

SEQ ID NO: 88707 - protein, 7 aa, synthetic construct
EHLGQRE

SEQ ID NO: 88708 - protein, 7 aa, synthetic construct
RQPEQLH

SEQ ID NO: 88709 - protein, 7 aa, synthetic construct
GVFAQAA

SEQ ID NO: 88710 - protein, 7 aa, synthetic construct
VRGIAHL

SEQ ID NO: 88711 - protein, 7 aa, synthetic construct
GPPSYVQ

SEQ ID NO: 88712 - protein, 7 aa, synthetic construct
NFAQNHM

SEQ ID NO: 88713 - protein, 7 aa, synthetic construct
KNTLSMN

SEQ ID NO: 88714 - protein, 7 aa, synthetic construct
PGKEAFR

SEQ ID NO: 88715 - protein, 7 aa, synthetic construct
RKDIDPS

SEQ ID NO: 88716 - protein, 7 aa, synthetic construct
YIKGLHT

SEQ ID NO: 88717 - protein, 7 aa, synthetic construct
YKQEDTG

SEQ ID NO: 88718 - protein, 7 aa, synthetic construct
MTASGQS

SEQ ID NO: 88719 - protein, 7 aa, synthetic construct
HIKGNML

SEQ ID NO: 88720 - protein, 7 aa, synthetic construct
IMMGAKQ

SEQ ID NO: 88721 - protein, 7 aa, synthetic construct
PFGHGMD

SEQ ID NO: 88722 - protein, 7 aa, synthetic construct
GLHMEGF

SEQ ID NO: 88723 - protein, 7 aa, synthetic construct
LKVMSQT

SEQ ID NO: 88724 - protein, 7 aa, synthetic construct
KREPTNS

SEQ ID NO: 88725 - protein, 7 aa, synthetic construct
DHNHSAR

SEQ ID NO: 88726 - protein, 7 aa, synthetic construct
HGDMRPM

SEQ ID NO: 88727 - protein, 7 aa, synthetic construct
GRSEATL

SEQ ID NO: 88728 - protein, 7 aa, synthetic construct
QQRNTVW

SEQ ID NO: 88729 - protein, 7 aa, synthetic construct
QLNATYP

SEQ ID NO: 88730 - protein, 7 aa, synthetic construct
YVTQVER

SEQ ID NO: 88731 - protein, 7 aa, synthetic construct
PHNGKDH

SEQ ID NO: 88732 - protein, 7 aa, synthetic construct
HRSSELI

SEQ ID NO: 88733 - protein, 7 aa, synthetic construct
TGTFGEG

SEQ ID NO: 88734 - protein, 7 aa, synthetic construct
KPTPNTS

SEQ ID NO: 88735 - protein, 7 aa, synthetic construct
WSKEKSA

SEQ ID NO: 88736 - protein, 7 aa, synthetic construct
HQQHKIL

SEQ ID NO: 88737 - protein, 7 aa, synthetic construct
TKSTMNA

SEQ ID NO: 88738 - protein, 7 aa, synthetic construct
IDFHGIV

SEQ ID NO: 88739 - protein, 7 aa, synthetic construct
MHLGTSD

SEQ ID NO: 88740 - protein, 7 aa, synthetic construct
TPRSPIG

SEQ ID NO: 88741 - protein, 7 aa, synthetic construct
DWAQKPT

SEQ ID NO: 88742 - protein, 7 aa, synthetic construct
YNKNSQP

SEQ ID NO: 88743 - protein, 7 aa, synthetic construct
MQVQGNR

SEQ ID NO: 88744 - protein, 7 aa, synthetic construct
REHFTNE

SEQ ID NO: 88745 - protein, 7 aa, synthetic construct
MAPGVNH

SEQ ID NO: 88746 - protein, 7 aa, synthetic construct
FVDPKMG

SEQ ID NO: 88747 - protein, 7 aa, synthetic construct
LPNSHDT

SEQ ID NO: 88748 - protein, 7 aa, synthetic construct
PTYATGL

SEQ ID NO: 88749 - protein, 7 aa, synthetic construct
QMEIIKG

SEQ ID NO: 88750 - protein, 7 aa, synthetic construct
SERDSQH

SEQ ID NO: 88751 - protein, 7 aa, synthetic construct
TRPPTAA

SEQ ID NO: 88752 - protein, 7 aa, synthetic construct
HKDYTNK

SEQ ID NO: 88753 - protein, 7 aa, synthetic construct
AYKHVVS

SEQ ID NO: 88754 - protein, 7 aa, synthetic construct
AFNQQHT

SEQ ID NO: 88755 - protein, 7 aa, synthetic construct
GAGRATV

SEQ ID NO: 88756 - protein, 7 aa, synthetic construct
FNPAQMQ

SEQ ID NO: 88757 - protein, 7 aa, synthetic construct
SSRNADH

SEQ ID NO: 88758 - protein, 7 aa, synthetic construct
NQMPQNY

SEQ ID NO: 88759 - protein, 7 aa, synthetic construct
VHEGAFG

SEQ ID NO: 88760 - protein, 7 aa, synthetic construct
YSPAYAT

SEQ ID NO: 88761 - protein, 7 aa, synthetic construct
GPVYTDH

SEQ ID NO: 88762 - protein, 7 aa, synthetic construct
LHKAEND

SEQ ID NO: 88763 - protein, 7 aa, synthetic construct
LQNPANY

SEQ ID NO: 88764 - protein, 7 aa, synthetic construct
FLQHMDA

SEQ ID NO: 88765 - protein, 7 aa, synthetic construct
YQGFDRT

SEQ ID NO: 88766 - protein, 7 aa, synthetic construct
IIKPYGT

SEQ ID NO: 88767 - protein, 7 aa, synthetic construct
PTPTGKL

SEQ ID NO: 88768 - protein, 7 aa, synthetic construct
PSVRTSD

SEQ ID NO: 88769 - protein, 7 aa, synthetic construct
SWSNGTT

SEQ ID NO: 88770 - protein, 7 aa, synthetic construct
AMPDLLN

SEQ ID NO: 88771 - protein, 7 aa, synthetic construct
TAMKPHE

SEQ ID NO: 88772 - protein, 7 aa, synthetic construct
IPNTYSP

SEQ ID NO: 88773 - protein, 7 aa, synthetic construct
MINDRAT

SEQ ID NO: 88774 - protein, 7 aa, synthetic construct
GQKYQDD

SEQ ID NO: 88775 - protein, 7 aa, synthetic construct
GFGEPRM

SEQ ID NO: 88776 - protein, 7 aa, synthetic construct
HEKLKAQ

SEQ ID NO: 88777 - protein, 7 aa, synthetic construct
SYGQSKL

SEQ ID NO: 88778 - protein, 7 aa, synthetic construct
GPDMIPR

SEQ ID NO: 88779 - protein, 7 aa, synthetic construct
IMHMQAH

SEQ ID NO: 88780 - protein, 7 aa, synthetic construct
VVYKFKE

SEQ ID NO: 88781 - protein, 7 aa, synthetic construct
MLRDIKM

SEQ ID NO: 88782 - protein, 7 aa, synthetic construct
LRTEHVP

SEQ ID NO: 88783 - protein, 7 aa, synthetic construct
IHNMKPD

SEQ ID NO: 88784 - protein, 7 aa, synthetic construct
QKFPDVI

SEQ ID NO: 88785 - protein, 7 aa, synthetic construct
ESDSKIR

SEQ ID NO: 88786 - protein, 7 aa, synthetic construct
SRQLMPA

SEQ ID NO: 88787 - protein, 7 aa, synthetic construct
PYMNHQS

SEQ ID NO: 88788 - protein, 7 aa, synthetic construct
VPQTGVR

SEQ ID NO: 88789 - protein, 7 aa, synthetic construct
TEGRNDN

SEQ ID NO: 88790 - protein, 7 aa, synthetic construct
DAEWTTP

SEQ ID NO: 88791 - protein, 7 aa, synthetic construct
NPLALGH

SEQ ID NO: 88792 - protein, 7 aa, synthetic construct
EHNNQRE

SEQ ID NO: 88793 - protein, 7 aa, synthetic construct
KNTLQGE

SEQ ID NO: 88794 - protein, 7 aa, synthetic construct
TLNGPAV

SEQ ID NO: 88795 - protein, 7 aa, synthetic construct
PTQNKLV

SEQ ID NO: 88796 - protein, 7 aa, synthetic construct
INYKNGP

SEQ ID NO: 88797 - protein, 7 aa, synthetic construct
NAPHNRN

SEQ ID NO: 88798 - protein, 7 aa, synthetic construct
FLGMTGN

SEQ ID NO: 88799 - protein, 7 aa, synthetic construct
SKTQSEQ

SEQ ID NO: 88800 - protein, 7 aa, synthetic construct
DMRTVDV

SEQ ID NO: 88801 - protein, 7 aa, synthetic construct
DHSVSQA

SEQ ID NO: 88802 - protein, 7 aa, synthetic construct
HIIKAEL

SEQ ID NO: 88803 - protein, 7 aa, synthetic construct
AANWVHE

SEQ ID NO: 88804 - protein, 7 aa, synthetic construct
TRSSMQM

SEQ ID NO: 88805 - protein, 7 aa, synthetic construct
QITYHVE

SEQ ID NO: 88806 - protein, 7 aa, synthetic construct
TNLGSPM

SEQ ID NO: 88807 - protein, 7 aa, synthetic construct
HDMTRGI

SEQ ID NO: 88808 - protein, 7 aa, synthetic construct
VMPTNQI

SEQ ID NO: 88809 - protein, 7 aa, synthetic construct
GLSHVFE

SEQ ID NO: 88810 - protein, 7 aa, synthetic construct
RFSTFQE

SEQ ID NO: 88811 - protein, 7 aa, synthetic construct
HLGRSYP

SEQ ID NO: 88812 - protein, 7 aa, synthetic construct
WGDRQNI

SEQ ID NO: 88813 - protein, 7 aa, synthetic construct
KKGVDIQ

SEQ ID NO: 88814 - protein, 7 aa, synthetic construct
NIVQKSV

SEQ ID NO: 88815 - protein, 7 aa, synthetic construct
TEYVSGH

SEQ ID NO: 88816 - protein, 7 aa, synthetic construct
SKDHPLH

SEQ ID NO: 88817 - protein, 7 aa, synthetic construct
TKEYIKL

SEQ ID NO: 88818 - protein, 7 aa, synthetic construct
VGVKLVT

SEQ ID NO: 88819 - protein, 7 aa, synthetic construct
HLKVSDL

SEQ ID NO: 88820 - protein, 7 aa, synthetic construct
HTDHHPT

SEQ ID NO: 88821 - protein, 7 aa, synthetic construct
KKETYTL

SEQ ID NO: 88822 - protein, 7 aa, synthetic construct
HHMGSKT

SEQ ID NO: 88823 - protein, 7 aa, synthetic construct
PMQATSS

SEQ ID NO: 88824 - protein, 7 aa, synthetic construct
KTNAYTA

SEQ ID NO: 88825 - protein, 7 aa, synthetic construct
RNEQGTP

SEQ ID NO: 88826 - protein, 7 aa, synthetic construct
FSTGMTM

SEQ ID NO: 88827 - protein, 7 aa, synthetic construct
GEKGAKH

SEQ ID NO: 88828 - protein, 7 aa, synthetic construct
VDNFNGM

SEQ ID NO: 88829 - protein, 7 aa, synthetic construct
KSVTMGV

SEQ ID NO: 88830 - protein, 7 aa, synthetic construct
NRSAAPA

SEQ ID NO: 88831 - protein, 7 aa, synthetic construct
TANHSQM

SEQ ID NO: 88832 - protein, 7 aa, synthetic construct
IANQVAM

SEQ ID NO: 88833 - protein, 7 aa, synthetic construct
GGRSFAE

SEQ ID NO: 88834 - protein, 7 aa, synthetic construct
GNMPNKM

SEQ ID NO: 88835 - protein, 7 aa, synthetic construct
DMHFKAN

SEQ ID NO: 88836 - protein, 7 aa, synthetic construct
TVQVQKI

SEQ ID NO: 88837 - protein, 7 aa, synthetic construct
ALGLPVP

SEQ ID NO: 88838 - protein, 7 aa, synthetic construct
NSSTKGA

SEQ ID NO: 88839 - protein, 7 aa, synthetic construct
GVKEKNF

SEQ ID NO: 88840 - protein, 7 aa, synthetic construct
PLNKTEA

SEQ ID NO: 88841 - protein, 7 aa, synthetic construct
SDSITPH

SEQ ID NO: 88842 - protein, 7 aa, synthetic construct
MLPRESQ

SEQ ID NO: 88843 - protein, 7 aa, synthetic construct
TNNKYQP

SEQ ID NO: 88844 - protein, 7 aa, synthetic construct
NTMGKGW

SEQ ID NO: 88845 - protein, 7 aa, synthetic construct
NEYFAQA

SEQ ID NO: 88846 - protein, 7 aa, synthetic construct
PSYGMTA

SEQ ID NO: 88847 - protein, 7 aa, synthetic construct
YEQKLKT

SEQ ID NO: 88848 - protein, 7 aa, synthetic construct
KDRNVNG

SEQ ID NO: 88849 - protein, 7 aa, synthetic construct
VNRNGMP

SEQ ID NO: 88850 - protein, 7 aa, synthetic construct
SKSMMHD

SEQ ID NO: 88851 - protein, 7 aa, synthetic construct
TKMNDNG

SEQ ID NO: 88852 - protein, 7 aa, synthetic construct
PRFQETG

SEQ ID NO: 88853 - protein, 7 aa, synthetic construct
IQRATAV

SEQ ID NO: 88854 - protein, 7 aa, synthetic construct
TQKSNSN

SEQ ID NO: 88855 - protein, 7 aa, synthetic construct
WGRHQDV

SEQ ID NO: 88856 - protein, 7 aa, synthetic construct
SMGPILA

SEQ ID NO: 88857 - protein, 7 aa, synthetic construct
NPKAASS

SEQ ID NO: 88858 - protein, 7 aa, synthetic construct
RSAKDEV

SEQ ID NO: 88859 - protein, 7 aa, synthetic construct
SVSTNHE

SEQ ID NO: 88860 - protein, 7 aa, synthetic construct
TPKNYHP

SEQ ID NO: 88861 - protein, 7 aa, synthetic construct
IAALNGA

SEQ ID NO: 88862 - protein, 7 aa, synthetic construct
KNQAGNG

SEQ ID NO: 88863 - protein, 7 aa, synthetic construct
TTMPTVE

SEQ ID NO: 88864 - protein, 7 aa, synthetic construct
PEFKARE

SEQ ID NO: 88865 - protein, 7 aa, synthetic construct
FTALKAQ

SEQ ID NO: 88866 - protein, 7 aa, synthetic construct
RQMDHKE

SEQ ID NO: 88867 - protein, 7 aa, synthetic construct
HPSSVHQ

SEQ ID NO: 88868 - protein, 7 aa, synthetic construct
KSSIGIQ

SEQ ID NO: 88869 - protein, 7 aa, synthetic construct
KQDFNHN

SEQ ID NO: 88870 - protein, 7 aa, synthetic construct
SRMTNQA

SEQ ID NO: 88871 - protein, 7 aa, synthetic construct
FHAGPHN

SEQ ID NO: 88872 - protein, 7 aa, synthetic construct
FSDPTRP

SEQ ID NO: 88873 - protein, 7 aa, synthetic construct
TYVKDRT

SEQ ID NO: 88874 - protein, 7 aa, synthetic construct
TSNQLHG

SEQ ID NO: 88875 - protein, 7 aa, synthetic construct
AESWPKE

SEQ ID NO: 88876 - protein, 7 aa, synthetic construct
FVSRSAV

SEQ ID NO: 88877 - protein, 7 aa, synthetic construct
VTHIHNM

SEQ ID NO: 88878 - protein, 7 aa, synthetic construct
RNDVLNF

SEQ ID NO: 88879 - protein, 7 aa, synthetic construct
ETPKVDK

SEQ ID NO: 88880 - protein, 7 aa, synthetic construct
PHMPQRD

SEQ ID NO: 88881 - protein, 7 aa, synthetic construct
STEMGPV

SEQ ID NO: 88882 - protein, 7 aa, synthetic construct
LDENRKS

SEQ ID NO: 88883 - protein, 7 aa, synthetic construct
STHEHVD

SEQ ID NO: 88884 - protein, 7 aa, synthetic construct
GAGSMML

SEQ ID NO: 88885 - protein, 7 aa, synthetic construct
HSHIGHS

SEQ ID NO: 88886 - protein, 7 aa, synthetic construct
YYHAKSN

SEQ ID NO: 88887 - protein, 7 aa, synthetic construct
TNMGRLS

SEQ ID NO: 88888 - protein, 7 aa, synthetic construct
DNVGRYQ

SEQ ID NO: 88889 - protein, 7 aa, synthetic construct
NHPLGRI

SEQ ID NO: 88890 - protein, 7 aa, synthetic construct
NNHVGTI

SEQ ID NO: 88891 - protein, 7 aa, synthetic construct
TYANHKL

SEQ ID NO: 88892 - protein, 7 aa, synthetic construct
SPKQPEE

SEQ ID NO: 88893 - protein, 7 aa, synthetic construct
YWNSTHD

SEQ ID NO: 88894 - protein, 7 aa, synthetic construct
NPRTSNY

SEQ ID NO: 88895 - protein, 7 aa, synthetic construct
EMKKNNT

SEQ ID NO: 88896 - protein, 7 aa, synthetic construct
SFHNLDV

SEQ ID NO: 88897 - protein, 7 aa, synthetic construct
MFNVDMV

SEQ ID NO: 88898 - protein, 7 aa, synthetic construct
IPMQSIH

SEQ ID NO: 88899 - protein, 7 aa, synthetic construct
AMTHHNE

SEQ ID NO: 88900 - protein, 7 aa, synthetic construct
GGPNMQG

SEQ ID NO: 88901 - protein, 7 aa, synthetic construct
KLGQHER

SEQ ID NO: 88902 - protein, 7 aa, synthetic construct
QNKLGTA

SEQ ID NO: 88903 - protein, 7 aa, synthetic construct
KHGDPNH

SEQ ID NO: 88904 - protein, 7 aa, synthetic construct
WEHASNA

SEQ ID NO: 88905 - protein, 7 aa, synthetic construct
VQTQYMG

SEQ ID NO: 88906 - protein, 7 aa, synthetic construct
SVSRNGI

SEQ ID NO: 88907 - protein, 7 aa, synthetic construct
NTKPIGG

SEQ ID NO: 88908 - protein, 7 aa, synthetic construct
RPEKDIR

SEQ ID NO: 88909 - protein, 7 aa, synthetic construct
THYKMPH

SEQ ID NO: 88910 - protein, 7 aa, synthetic construct
QGGVKAT

SEQ ID NO: 88911 - protein, 7 aa, synthetic construct
KGVAEPK

SEQ ID NO: 88912 - protein, 7 aa, synthetic construct
YSKWSDP

SEQ ID NO: 88913 - protein, 7 aa, synthetic construct
TQAGQIH

SEQ ID NO: 88914 - protein, 7 aa, synthetic construct
AFIKSMD

SEQ ID NO: 88915 - protein, 7 aa, synthetic construct
NNNHYEK

SEQ ID NO: 88916 - protein, 7 aa, synthetic construct
RLQAVEP

SEQ ID NO: 88917 - protein, 7 aa, synthetic construct
RNVPHQI

SEQ ID NO: 88918 - protein, 7 aa, synthetic construct
GKTQHGG

SEQ ID NO: 88919 - protein, 7 aa, synthetic construct
KWKETAM

SEQ ID NO: 88920 - protein, 7 aa, synthetic construct
WQPAVAP

SEQ ID NO: 88921 - protein, 7 aa, synthetic construct
NAKELMQ

SEQ ID NO: 88922 - protein, 7 aa, synthetic construct
PNQKFHV

SEQ ID NO: 88923 - protein, 7 aa, synthetic construct
IRVPRDS

SEQ ID NO: 88924 - protein, 7 aa, synthetic construct
HSQNTGY

SEQ ID NO: 88925 - protein, 7 aa, synthetic construct
TMGANMY

SEQ ID NO: 88926 - protein, 7 aa, synthetic construct
IYRSGQH

SEQ ID NO: 88927 - protein, 7 aa, synthetic construct
CIGPRCD

SEQ ID NO: 88928 - protein, 7 aa, synthetic construct
QAIIHEG

SEQ ID NO: 88929 - protein, 7 aa, synthetic construct
KTTSGNN

SEQ ID NO: 88930 - protein, 7 aa, synthetic construct
YPIAVQA

SEQ ID NO: 88931 - protein, 7 aa, synthetic construct
PVFPVRD

SEQ ID NO: 88932 - protein, 7 aa, synthetic construct
HAQPNNK

SEQ ID NO: 88933 - protein, 7 aa, synthetic construct
TPQGGRE

SEQ ID NO: 88934 - protein, 7 aa, synthetic construct
GMVQGNI

SEQ ID NO: 88935 - protein, 7 aa, synthetic construct
QTQISFD

SEQ ID NO: 88936 - protein, 7 aa, synthetic construct
VNLTKYS

SEQ ID NO: 88937 - protein, 7 aa, synthetic construct
EWAQLPE

SEQ ID NO: 88938 - protein, 7 aa, synthetic construct
REMNMER

SEQ ID NO: 88939 - protein, 7 aa, synthetic construct
QQPKDMG

SEQ ID NO: 88940 - protein, 7 aa, synthetic construct
VAKTSSQ

SEQ ID NO: 88941 - protein, 7 aa, synthetic construct
DKQLYTV

SEQ ID NO: 88942 - protein, 7 aa, synthetic construct
HNHPPEM

SEQ ID NO: 88943 - protein, 7 aa, synthetic construct
MMKPVLP

SEQ ID NO: 88944 - protein, 7 aa, synthetic construct
AHQKYQV

SEQ ID NO: 88945 - protein, 7 aa, synthetic construct
SLHDHVA

SEQ ID NO: 88946 - protein, 7 aa, synthetic construct
SRQEKIM

SEQ ID NO: 88947 - protein, 7 aa, synthetic construct
AAKANSP

SEQ ID NO: 88948 - protein, 7 aa, synthetic construct
LVTMNIP

SEQ ID NO: 88949 - protein, 7 aa, synthetic construct
GKTEMKA

SEQ ID NO: 88950 - protein, 7 aa, synthetic construct
KERITPM

SEQ ID NO: 88951 - protein, 7 aa, synthetic construct
ANKNAQG

SEQ ID NO: 88952 - protein, 7 aa, synthetic construct
EEGHNPR

SEQ ID NO: 88953 - protein, 7 aa, synthetic construct
WRAHLQS

SEQ ID NO: 88954 - protein, 7 aa, synthetic construct
YPTSTKS

SEQ ID NO: 88955 - protein, 7 aa, synthetic construct
DNYEGKK

SEQ ID NO: 88956 - protein, 7 aa, synthetic construct
CRTTCHE

SEQ ID NO: 88957 - protein, 7 aa, synthetic construct
ISPKSYS

SEQ ID NO: 88958 - protein, 7 aa, synthetic construct
DPVRLNQ

SEQ ID NO: 88959 - protein, 7 aa, synthetic construct
VKAMSVL

SEQ ID NO: 88960 - protein, 7 aa, synthetic construct
ARPAGLP

SEQ ID NO: 88961 - protein, 7 aa, synthetic construct
FYDQNKH

SEQ ID NO: 88962 - protein, 7 aa, synthetic construct
MPKTHDW

SEQ ID NO: 88963 - protein, 7 aa, synthetic construct
SFHQKME

SEQ ID NO: 88964 - protein, 7 aa, synthetic construct
VLYTEKH

SEQ ID NO: 88965 - protein, 7 aa, synthetic construct
EYKQKTN

SEQ ID NO: 88966 - protein, 7 aa, synthetic construct
ETMQRDK

SEQ ID NO: 88967 - protein, 7 aa, synthetic construct
HPASSNF

SEQ ID NO: 88968 - protein, 7 aa, synthetic construct
YDRSWPS

SEQ ID NO: 88969 - protein, 7 aa, synthetic construct
GWTEVNK

SEQ ID NO: 88970 - protein, 7 aa, synthetic construct
SWAMKSP

SEQ ID NO: 88971 - protein, 7 aa, synthetic construct
MTSHDEH

SEQ ID NO: 88972 - protein, 7 aa, synthetic construct
LPGKVAA

SEQ ID NO: 88973 - protein, 7 aa, synthetic construct
SVQNHNS

SEQ ID NO: 88974 - protein, 7 aa, synthetic construct
GRDIASH

SEQ ID NO: 88975 - protein, 7 aa, synthetic construct
KKDQGSA

SEQ ID NO: 88976 - protein, 7 aa, synthetic construct
KKEQILF

SEQ ID NO: 88977 - protein, 7 aa, synthetic construct
PSEHRIY

SEQ ID NO: 88978 - protein, 7 aa, synthetic construct
PARKEIW

SEQ ID NO: 88979 - protein, 7 aa, synthetic construct
TTPRPNP

SEQ ID NO: 88980 - protein, 7 aa, synthetic construct
TIKLTTM

SEQ ID NO: 88981 - protein, 7 aa, synthetic construct
YAGQLAQ

SEQ ID NO: 88982 - protein, 7 aa, synthetic construct
HWKQTSN

SEQ ID NO: 88983 - protein, 7 aa, synthetic construct
IQMVRHP

SEQ ID NO: 88984 - protein, 7 aa, synthetic construct
MINTMAA

SEQ ID NO: 88985 - protein, 7 aa, synthetic construct
WGINHKD

SEQ ID NO: 88986 - protein, 7 aa, synthetic construct
AFTRINE

SEQ ID NO: 88987 - protein, 7 aa, synthetic construct
KTIEYRG

SEQ ID NO: 88988 - protein, 7 aa, synthetic construct
VSGNTAV

SEQ ID NO: 88989 - protein, 7 aa, synthetic construct
AGPHSLS

SEQ ID NO: 88990 - protein, 7 aa, synthetic construct
IMGFGHA

SEQ ID NO: 88991 - protein, 7 aa, synthetic construct
IGTAVET

SEQ ID NO: 88992 - protein, 7 aa, synthetic construct
IEHLSPR

SEQ ID NO: 88993 - protein, 7 aa, synthetic construct
LDIAHIA

SEQ ID NO: 88994 - protein, 7 aa, synthetic construct
LPNGYME

SEQ ID NO: 88995 - protein, 7 aa, synthetic construct
TTAQRSP

SEQ ID NO: 88996 - protein, 7 aa, synthetic construct
NKDGYMR

SEQ ID NO: 88997 - protein, 7 aa, synthetic construct
WGLGSHV

SEQ ID NO: 88998 - protein, 7 aa, synthetic construct
KMHTTDN

SEQ ID NO: 88999 - protein, 7 aa, synthetic construct
NRDTVPH

SEQ ID NO: 89000 - protein, 7 aa, synthetic construct
HNVLIAP

SEQ ID NO: 89001 - protein, 7 aa, synthetic construct
RTQTATP

SEQ ID NO: 89002 - protein, 7 aa, synthetic construct
LKAHWED

SEQ ID NO: 89003 - protein, 7 aa, synthetic construct
LGMGVHK

SEQ ID NO: 89004 - protein, 7 aa, synthetic construct
THNMKSV

SEQ ID NO: 89005 - protein, 7 aa, synthetic construct
SFMKSHV

SEQ ID NO: 89006 - protein, 7 aa, synthetic construct
AAKGSEI

SEQ ID NO: 89007 - protein, 7 aa, synthetic construct
DSQRKYM

SEQ ID NO: 89008 - protein, 7 aa, synthetic construct
HQGTKIS

SEQ ID NO: 89009 - protein, 7 aa, synthetic construct
KSGATVM

SEQ ID NO: 89010 - protein, 7 aa, synthetic construct
NYRESSK

SEQ ID NO: 89011 - protein, 7 aa, synthetic construct
QPTPNYP

SEQ ID NO: 89012 - protein, 7 aa, synthetic construct
TMDKTAK

SEQ ID NO: 89013 - protein, 7 aa, synthetic construct
EGSGRQA

SEQ ID NO: 89014 - protein, 7 aa, synthetic construct
DHSGPGS

SEQ ID NO: 89015 - protein, 7 aa, synthetic construct
NDGSHVK

SEQ ID NO: 89016 - protein, 7 aa, synthetic construct
GVYQGRT

SEQ ID NO: 89017 - protein, 7 aa, synthetic construct
CIKTQAP

SEQ ID NO: 89018 - protein, 7 aa, synthetic construct
FRGRSIE

SEQ ID NO: 89019 - protein, 7 aa, synthetic construct
RGYDTLN

SEQ ID NO: 89020 - protein, 7 aa, synthetic construct
VPHGLRN

SEQ ID NO: 89021 - protein, 7 aa, synthetic construct
KSPDVNS

SEQ ID NO: 89022 - protein, 7 aa, synthetic construct
PHVRQTI

SEQ ID NO: 89023 - protein, 7 aa, synthetic construct
TNVDGMS

SEQ ID NO: 89024 - protein, 7 aa, synthetic construct
LRLAGDD

SEQ ID NO: 89025 - protein, 7 aa, synthetic construct
TEFRNSF

SEQ ID NO: 89026 - protein, 7 aa, synthetic construct
TYPSNLL

SEQ ID NO: 89027 - protein, 7 aa, synthetic construct
RSEQIKE

SEQ ID NO: 89028 - protein, 7 aa, synthetic construct
GSMTQLA

SEQ ID NO: 89029 - protein, 7 aa, synthetic construct
IDHFEPR

SEQ ID NO: 89030 - protein, 7 aa, synthetic construct
HLYHSNS

SEQ ID NO: 89031 - protein, 7 aa, synthetic construct
QELHINS

SEQ ID NO: 89032 - protein, 7 aa, synthetic construct
NQVVRTY

SEQ ID NO: 89033 - protein, 7 aa, synthetic construct
GQGKANG

SEQ ID NO: 89034 - protein, 7 aa, synthetic construct
TQNQQKI

SEQ ID NO: 89035 - protein, 7 aa, synthetic construct
PMRLSTE

SEQ ID NO: 89036 - protein, 7 aa, synthetic construct
ETRAKVD

SEQ ID NO: 89037 - protein, 7 aa, synthetic construct
VRHQSLL

SEQ ID NO: 89038 - protein, 7 aa, synthetic construct
LLANRPY

SEQ ID NO: 89039 - protein, 7 aa, synthetic construct
QKLKNEP

SEQ ID NO: 89040 - protein, 7 aa, synthetic construct
TPQKNNA

SEQ ID NO: 89041 - protein, 7 aa, synthetic construct
GQMTNSH

SEQ ID NO: 89042 - protein, 7 aa, synthetic construct
KTQNTAP

SEQ ID NO: 89043 - protein, 7 aa, synthetic construct
DITRHVV

SEQ ID NO: 89044 - protein, 7 aa, synthetic construct
AVRADRL

SEQ ID NO: 89045 - protein, 7 aa, synthetic construct
NMRPDAS

SEQ ID NO: 89046 - protein, 7 aa, synthetic construct
ETSIVKK

SEQ ID NO: 89047 - protein, 7 aa, synthetic construct
RHLAHES

SEQ ID NO: 89048 - protein, 7 aa, synthetic construct
RPATNQP

SEQ ID NO: 89049 - protein, 7 aa, synthetic construct
PSKSVAP

SEQ ID NO: 89050 - protein, 7 aa, synthetic construct
SFVHGMT

SEQ ID NO: 89051 - protein, 7 aa, synthetic construct
ELKRYQT

SEQ ID NO: 89052 - protein, 7 aa, synthetic construct
SLAPYAS

SEQ ID NO: 89053 - protein, 7 aa, synthetic construct
QSQHDEH

SEQ ID NO: 89054 - protein, 7 aa, synthetic construct
DWGNIRS

SEQ ID NO: 89055 - protein, 7 aa, synthetic construct
GGPPVDK

SEQ ID NO: 89056 - protein, 7 aa, synthetic construct
RRDTMET

SEQ ID NO: 89057 - protein, 7 aa, synthetic construct
VATMKQL

SEQ ID NO: 89058 - protein, 7 aa, synthetic construct
NQYIVVE

SEQ ID NO: 89059 - protein, 7 aa, synthetic construct
QVMSDYR

SEQ ID NO: 89060 - protein, 7 aa, synthetic construct
TIIRNHG

SEQ ID NO: 89061 - protein, 7 aa, synthetic construct
HSPQAHE

SEQ ID NO: 89062 - protein, 7 aa, synthetic construct
AVRDQAI

SEQ ID NO: 89063 - protein, 7 aa, synthetic construct
HGAPTGI

SEQ ID NO: 89064 - protein, 7 aa, synthetic construct
RETMVRP

SEQ ID NO: 89065 - protein, 7 aa, synthetic construct
DKVQNRP

SEQ ID NO: 89066 - protein, 7 aa, synthetic construct
NKNNQQP

SEQ ID NO: 89067 - protein, 7 aa, synthetic construct
GNQGGEF

SEQ ID NO: 89068 - protein, 7 aa, synthetic construct
RRGESIE

SEQ ID NO: 89069 - protein, 7 aa, synthetic construct
SMQALGS

SEQ ID NO: 89070 - protein, 7 aa, synthetic construct
FKEQTEW

SEQ ID NO: 89071 - protein, 7 aa, synthetic construct
FPSVGGN

SEQ ID NO: 89072 - protein, 7 aa, synthetic construct
MMRKEQH

SEQ ID NO: 89073 - protein, 7 aa, synthetic construct
KGQREPE

SEQ ID NO: 89074 - protein, 7 aa, synthetic construct
LDQKTTI

SEQ ID NO: 89075 - protein, 7 aa, synthetic construct
KHIAGEM

SEQ ID NO: 89076 - protein, 7 aa, synthetic construct
SQNQFLA

SEQ ID NO: 89077 - protein, 7 aa, synthetic construct
VVKGYDN

SEQ ID NO: 89078 - protein, 7 aa, synthetic construct
KYRTDLI

SEQ ID NO: 89079 - protein, 7 aa, synthetic construct
WELQNLP

SEQ ID NO: 89080 - protein, 7 aa, synthetic construct
GKRLNDA

SEQ ID NO: 89081 - protein, 7 aa, synthetic construct
KGMSGMV

SEQ ID NO: 89082 - protein, 7 aa, synthetic construct
FVRLEKE

SEQ ID NO: 89083 - protein, 7 aa, synthetic construct
HLMSGNP

SEQ ID NO: 89084 - protein, 7 aa, synthetic construct
GYIPKIE

SEQ ID NO: 89085 - protein, 7 aa, synthetic construct
FKHNPIQ

SEQ ID NO: 89086 - protein, 7 aa, synthetic construct
TQSNVTP

SEQ ID NO: 89087 - protein, 7 aa, synthetic construct
TVGNDPK

SEQ ID NO: 89088 - protein, 7 aa, synthetic construct
SQANIDW

SEQ ID NO: 89089 - protein, 7 aa, synthetic construct
HMLQVAP

SEQ ID NO: 89090 - protein, 7 aa, synthetic construct
VDKTLHG

SEQ ID NO: 89091 - protein, 7 aa, synthetic construct
VPQILKM

SEQ ID NO: 89092 - protein, 7 aa, synthetic construct
GVYRDTY

SEQ ID NO: 89093 - protein, 7 aa, synthetic construct
FSKTINV

SEQ ID NO: 89094 - protein, 7 aa, synthetic construct
TNTLKNV

SEQ ID NO: 89095 - protein, 7 aa, synthetic construct
RIKYTIE

SEQ ID NO: 89096 - protein, 7 aa, synthetic construct
QYVINEP

SEQ ID NO: 89097 - protein, 7 aa, synthetic construct
ISERRER

SEQ ID NO: 89098 - protein, 7 aa, synthetic construct
WSAHNQG

SEQ ID NO: 89099 - protein, 7 aa, synthetic construct
YQKQYAT

SEQ ID NO: 89100 - protein, 7 aa, synthetic construct
NSIRAIH

SEQ ID NO: 89101 - protein, 7 aa, synthetic construct
QGFTHEY

SEQ ID NO: 89102 - protein, 7 aa, synthetic construct
TEHKHTF

SEQ ID NO: 89103 - protein, 7 aa, synthetic construct
IQKAQMM

SEQ ID NO: 89104 - protein, 7 aa, synthetic construct
YIQNANH

SEQ ID NO: 89105 - protein, 7 aa, synthetic construct
FNNKGDG

SEQ ID NO: 89106 - protein, 7 aa, synthetic construct
YIRSQKE

SEQ ID NO: 89107 - protein, 7 aa, synthetic construct
NRGQATP

SEQ ID NO: 89108 - protein, 7 aa, synthetic construct
INDPQRN

SEQ ID NO: 89109 - protein, 7 aa, synthetic construct
HFTSMSH

SEQ ID NO: 89110 - protein, 7 aa, synthetic construct
KNERMGV

SEQ ID NO: 89111 - protein, 7 aa, synthetic construct
LEISPHG

SEQ ID NO: 89112 - protein, 7 aa, synthetic construct
ETSGRFH

SEQ ID NO: 89113 - protein, 7 aa, synthetic construct
AMQGMDR

SEQ ID NO: 89114 - protein, 7 aa, synthetic construct
NIKTSTS

SEQ ID NO: 89115 - protein, 7 aa, synthetic construct
SDFKEYS

SEQ ID NO: 89116 - protein, 7 aa, synthetic construct
WSNSFDK

SEQ ID NO: 89117 - protein, 7 aa, synthetic construct
HHIQVMG

SEQ ID NO: 89118 - protein, 7 aa, synthetic construct
GAKSAVG

SEQ ID NO: 89119 - protein, 7 aa, synthetic construct
IEHASRD

SEQ ID NO: 89120 - protein, 7 aa, synthetic construct
TLERVRH

SEQ ID NO: 89121 - protein, 7 aa, synthetic construct
SSDKQVM

SEQ ID NO: 89122 - protein, 7 aa, synthetic construct
YMDIGNS

SEQ ID NO: 89123 - protein, 7 aa, synthetic construct
HGTREST

SEQ ID NO: 89124 - protein, 7 aa, synthetic construct
YLKTYHA

SEQ ID NO: 89125 - protein, 7 aa, synthetic construct
RAVVGNL

SEQ ID NO: 89126 - protein, 7 aa, synthetic construct
DGRGGWS

SEQ ID NO: 89127 - protein, 7 aa, synthetic construct
HTKPITT

SEQ ID NO: 89128 - protein, 7 aa, synthetic construct
LEKPYPT

SEQ ID NO: 89129 - protein, 7 aa, synthetic construct
AFQHTDH

SEQ ID NO: 89130 - protein, 7 aa, synthetic construct
ATGSQQY

SEQ ID NO: 89131 - protein, 7 aa, synthetic construct
LTAIVHQ

SEQ ID NO: 89132 - protein, 7 aa, synthetic construct
ANAQHGE

SEQ ID NO: 89133 - protein, 7 aa, synthetic construct
VNQRNNP

SEQ ID NO: 89134 - protein, 7 aa, synthetic construct
GVHNAHM

SEQ ID NO: 89135 - protein, 7 aa, synthetic construct
MSINSEM

SEQ ID NO: 89136 - protein, 7 aa, synthetic construct
NGTTANT

SEQ ID NO: 89137 - protein, 7 aa, synthetic construct
QGDKKSP

SEQ ID NO: 89138 - protein, 7 aa, synthetic construct
YNSTTNW

SEQ ID NO: 89139 - protein, 7 aa, synthetic construct
SKKSDDA

SEQ ID NO: 89140 - protein, 7 aa, synthetic construct
GGSGGFE

SEQ ID NO: 89141 - protein, 7 aa, synthetic construct
PPSFDGP

SEQ ID NO: 89142 - protein, 7 aa, synthetic construct
YHQSEDT

SEQ ID NO: 89143 - protein, 7 aa, synthetic construct
GGLKNEP

SEQ ID NO: 89144 - protein, 7 aa, synthetic construct
WGSGVSI

SEQ ID NO: 89145 - protein, 7 aa, synthetic construct
KGIMTGA

SEQ ID NO: 89146 - protein, 7 aa, synthetic construct
QGMEHKM

SEQ ID NO: 89147 - protein, 7 aa, synthetic construct
DKIFKNL

SEQ ID NO: 89148 - protein, 7 aa, synthetic construct
HRKVDMP

SEQ ID NO: 89149 - protein, 7 aa, synthetic construct
DKFSAQW

SEQ ID NO: 89150 - protein, 7 aa, synthetic construct
MTDGPRF

SEQ ID NO: 89151 - protein, 7 aa, synthetic construct
HARVEER

SEQ ID NO: 89152 - protein, 7 aa, synthetic construct
DGPTNLT

SEQ ID NO: 89153 - protein, 7 aa, synthetic construct
KQLQPMP

SEQ ID NO: 89154 - protein, 7 aa, synthetic construct
ISAREFI

SEQ ID NO: 89155 - protein, 7 aa, synthetic construct
PKFKETM

SEQ ID NO: 89156 - protein, 7 aa, synthetic construct
RLISGDT

SEQ ID NO: 89157 - protein, 7 aa, synthetic construct
LHGIDAM

SEQ ID NO: 89158 - protein, 7 aa, synthetic construct
SNMVENR

SEQ ID NO: 89159 - protein, 7 aa, synthetic construct
YKSVKDS

SEQ ID NO: 89160 - protein, 7 aa, synthetic construct
KTYNEHG

SEQ ID NO: 89161 - protein, 7 aa, synthetic construct
DHKGYMK

SEQ ID NO: 89162 - protein, 7 aa, synthetic construct
NHNTLRT

SEQ ID NO: 89163 - protein, 7 aa, synthetic construct
GKSHQSN

SEQ ID NO: 89164 - protein, 7 aa, synthetic construct
SQDAKSQ

SEQ ID NO: 89165 - protein, 7 aa, synthetic construct
KMDSKTS

SEQ ID NO: 89166 - protein, 7 aa, synthetic construct
HITQHPP

SEQ ID NO: 89167 - protein, 7 aa, synthetic construct
GDLKKLT

SEQ ID NO: 89168 - protein, 7 aa, synthetic construct
FPSPNPM

SEQ ID NO: 89169 - protein, 7 aa, synthetic construct
IEKELRM

SEQ ID NO: 89170 - protein, 7 aa, synthetic construct
GITNSLV

SEQ ID NO: 89171 - protein, 7 aa, synthetic construct
IMDYEKS

SEQ ID NO: 89172 - protein, 7 aa, synthetic construct
MSFSNNV

SEQ ID NO: 89173 - protein, 7 aa, synthetic construct
IPTISQQ

SEQ ID NO: 89174 - protein, 7 aa, synthetic construct
VQKHPEY

SEQ ID NO: 89175 - protein, 7 aa, synthetic construct
QTQRGAA

SEQ ID NO: 89176 - protein, 7 aa, synthetic construct
QKLHPEI

SEQ ID NO: 89177 - protein, 7 aa, synthetic construct
ALYTSQT

SEQ ID NO: 89178 - protein, 7 aa, synthetic construct
LALRETI

SEQ ID NO: 89179 - protein, 7 aa, synthetic construct
QKHFQGH

SEQ ID NO: 89180 - protein, 7 aa, synthetic construct
QKTANRD

SEQ ID NO: 89181 - protein, 7 aa, synthetic construct
YKHPDSP

SEQ ID NO: 89182 - protein, 7 aa, synthetic construct
YNETRKH

SEQ ID NO: 89183 - protein, 7 aa, synthetic construct
MGKNQTS

SEQ ID NO: 89184 - protein, 7 aa, synthetic construct
IHHNGMK

SEQ ID NO: 89185 - protein, 7 aa, synthetic construct
YGDIMKN

SEQ ID NO: 89186 - protein, 7 aa, synthetic construct
VGSGVMI

SEQ ID NO: 89187 - protein, 7 aa, synthetic construct
VHASKER

SEQ ID NO: 89188 - protein, 7 aa, synthetic construct
STSSTSR

SEQ ID NO: 89189 - protein, 7 aa, synthetic construct
VGHNLKG

SEQ ID NO: 89190 - protein, 7 aa, synthetic construct
HGMGVNH

SEQ ID NO: 89191 - protein, 7 aa, synthetic construct
RDKTIGS

SEQ ID NO: 89192 - protein, 7 aa, synthetic construct
TVMDKQM

SEQ ID NO: 89193 - protein, 7 aa, synthetic construct
WKALRPE

SEQ ID NO: 89194 - protein, 7 aa, synthetic construct
KFKTAMP

SEQ ID NO: 89195 - protein, 7 aa, synthetic construct
SAVMVLE

SEQ ID NO: 89196 - protein, 7 aa, synthetic construct
SLKNPNW

SEQ ID NO: 89197 - protein, 7 aa, synthetic construct
KPAPAAN

SEQ ID NO: 89198 - protein, 7 aa, synthetic construct
KRDAPST

SEQ ID NO: 89199 - protein, 7 aa, synthetic construct
FEHHQPL

SEQ ID NO: 89200 - protein, 7 aa, synthetic construct
AVYRETS

SEQ ID NO: 89201 - protein, 7 aa, synthetic construct
FASNMAA

SEQ ID NO: 89202 - protein, 7 aa, synthetic construct
QLTRGFP

SEQ ID NO: 89203 - protein, 7 aa, synthetic construct
HTGQTHN

SEQ ID NO: 89204 - protein, 7 aa, synthetic construct
TYKTMEV

SEQ ID NO: 89205 - protein, 7 aa, synthetic construct
WIANANP

SEQ ID NO: 89206 - protein, 7 aa, synthetic construct
EKNLHSA

SEQ ID NO: 89207 - protein, 7 aa, synthetic construct
HEPLIHM

SEQ ID NO: 89208 - protein, 7 aa, synthetic construct
SGIMPHH

SEQ ID NO: 89209 - protein, 7 aa, synthetic construct
LITQSKL

SEQ ID NO: 89210 - protein, 7 aa, synthetic construct
RVGLMQE

SEQ ID NO: 89211 - protein, 7 aa, synthetic construct
SFMQQRP

SEQ ID NO: 89212 - protein, 7 aa, synthetic construct
AQRSNRE

SEQ ID NO: 89213 - protein, 7 aa, synthetic construct
TFAKNLV

SEQ ID NO: 89214 - protein, 7 aa, synthetic construct
ENSYEGA

SEQ ID NO: 89215 - protein, 7 aa, synthetic construct
LRHTQSF

SEQ ID NO: 89216 - protein, 7 aa, synthetic construct
NKSVLDI

SEQ ID NO: 89217 - protein, 7 aa, synthetic construct
QTKASVY

SEQ ID NO: 89218 - protein, 7 aa, synthetic construct
MTNSANF

SEQ ID NO: 89219 - protein, 7 aa, synthetic construct
IASGSLM

SEQ ID NO: 89220 - protein, 7 aa, synthetic construct
PMPQGYN

SEQ ID NO: 89221 - protein, 7 aa, synthetic construct
WAHSKPL

SEQ ID NO: 89222 - protein, 7 aa, synthetic construct
PQYKADT

SEQ ID NO: 89223 - protein, 7 aa, synthetic construct
YNKDWAV

SEQ ID NO: 89224 - protein, 7 aa, synthetic construct
NAARTTG

SEQ ID NO: 89225 - protein, 7 aa, synthetic construct
NIPHDKT

SEQ ID NO: 89226 - protein, 7 aa, synthetic construct
KIAQQFA

SEQ ID NO: 89227 - protein, 7 aa, synthetic construct
KYSNSSA

SEQ ID NO: 89228 - protein, 7 aa, synthetic construct
LGITQTI

SEQ ID NO: 89229 - protein, 7 aa, synthetic construct
ALAVKQA

SEQ ID NO: 89230 - protein, 7 aa, synthetic construct
TSPSRTP

SEQ ID NO: 89231 - protein, 7 aa, synthetic construct
TEKLVQA

SEQ ID NO: 89232 - protein, 7 aa, synthetic construct
SQHKQDI

SEQ ID NO: 89233 - protein, 7 aa, synthetic construct
LYHSKVA

SEQ ID NO: 89234 - protein, 7 aa, synthetic construct
THTYMRD

SEQ ID NO: 89235 - protein, 7 aa, synthetic construct
QIREGDF

SEQ ID NO: 89236 - protein, 7 aa, synthetic construct
KTPPNGA

SEQ ID NO: 89237 - protein, 7 aa, synthetic construct
MTHQAME

SEQ ID NO: 89238 - protein, 7 aa, synthetic construct
VYNHVGH

SEQ ID NO: 89239 - protein, 7 aa, synthetic construct
EPQRFEK

SEQ ID NO: 89240 - protein, 7 aa, synthetic construct
NLLDSHA

SEQ ID NO: 89241 - protein, 7 aa, synthetic construct
QLGKSNE

SEQ ID NO: 89242 - protein, 7 aa, synthetic construct
ELHGRMH

SEQ ID NO: 89243 - protein, 7 aa, synthetic construct
PKLKFNE

SEQ ID NO: 89244 - protein, 7 aa, synthetic construct
EPQLKDI

SEQ ID NO: 89245 - protein, 7 aa, synthetic construct
HPTYPHP

SEQ ID NO: 89246 - protein, 7 aa, synthetic construct
LVHPPGK

SEQ ID NO: 89247 - protein, 7 aa, synthetic construct
WGQGDTA

SEQ ID NO: 89248 - protein, 7 aa, synthetic construct
EFGIPYK

SEQ ID NO: 89249 - protein, 7 aa, synthetic construct
QNVRMEK

SEQ ID NO: 89250 - protein, 7 aa, synthetic construct
IRENMER

SEQ ID NO: 89251 - protein, 7 aa, synthetic construct
EYKDHSS

SEQ ID NO: 89252 - protein, 7 aa, synthetic construct
SPGLHGT

SEQ ID NO: 89253 - protein, 7 aa, synthetic construct
DQHYRSP

SEQ ID NO: 89254 - protein, 7 aa, synthetic construct
YPMMGIG

SEQ ID NO: 89255 - protein, 7 aa, synthetic construct
ARQHTNS

SEQ ID NO: 89256 - protein, 7 aa, synthetic construct
QQRGYAD

SEQ ID NO: 89257 - protein, 7 aa, synthetic construct
RPAGESW

SEQ ID NO: 89258 - protein, 7 aa, synthetic construct
IGKLFLD

SEQ ID NO: 89259 - protein, 7 aa, synthetic construct
HSTHIDH

SEQ ID NO: 89260 - protein, 7 aa, synthetic construct
INGTVKD

SEQ ID NO: 89261 - protein, 7 aa, synthetic construct
FEYNTKM

SEQ ID NO: 89262 - protein, 7 aa, synthetic construct
SHSNVMQ

SEQ ID NO: 89263 - protein, 7 aa, synthetic construct
RNNQSTP

SEQ ID NO: 89264 - protein, 7 aa, synthetic construct
NMKQPVM

SEQ ID NO: 89265 - protein, 7 aa, synthetic construct
ASKVKWE

SEQ ID NO: 89266 - protein, 7 aa, synthetic construct
MNFTEAV

SEQ ID NO: 89267 - protein, 7 aa, synthetic construct
PKKDGLA

SEQ ID NO: 89268 - protein, 7 aa, synthetic construct
KRGDQWQ

SEQ ID NO: 89269 - protein, 7 aa, synthetic construct
RAPTQNS

SEQ ID NO: 89270 - protein, 7 aa, synthetic construct
YHMMPHA

SEQ ID NO: 89271 - protein, 7 aa, synthetic construct
MNHTPNY

SEQ ID NO: 89272 - protein, 7 aa, synthetic construct
GWSQHTT

SEQ ID NO: 89273 - protein, 7 aa, synthetic construct
GQTTNSL

SEQ ID NO: 89274 - protein, 7 aa, synthetic construct
PEKGMGV

SEQ ID NO: 89275 - protein, 7 aa, synthetic construct
YDKSFAA

SEQ ID NO: 89276 - protein, 7 aa, synthetic construct
TYPLAQA

SEQ ID NO: 89277 - protein, 7 aa, synthetic construct
GNLNVLQ

SEQ ID NO: 89278 - protein, 7 aa, synthetic construct
LDEKARW

SEQ ID NO: 89279 - protein, 7 aa, synthetic construct
RIERQMQ

SEQ ID NO: 89280 - protein, 7 aa, synthetic construct
HSKVAHQ

SEQ ID NO: 89281 - protein, 7 aa, synthetic construct
SRDQFGE

SEQ ID NO: 89282 - protein, 7 aa, synthetic construct
PKSAQMA

SEQ ID NO: 89283 - protein, 7 aa, synthetic construct
SPKQQQS

SEQ ID NO: 89284 - protein, 7 aa, synthetic construct
VQTHDRH

SEQ ID NO: 89285 - protein, 7 aa, synthetic construct
QKNDAVW

SEQ ID NO: 89286 - protein, 7 aa, synthetic construct
EHSQIRV

SEQ ID NO: 89287 - protein, 7 aa, synthetic construct
SEKPNPW

SEQ ID NO: 89288 - protein, 7 aa, synthetic construct
TALLGHK

SEQ ID NO: 89289 - protein, 7 aa, synthetic construct
EQTNFLG

SEQ ID NO: 89290 - protein, 7 aa, synthetic construct
RQGLPEE

SEQ ID NO: 89291 - protein, 7 aa, synthetic construct
QHKDQGF

SEQ ID NO: 89292 - protein, 7 aa, synthetic construct
YKHEAVF

SEQ ID NO: 89293 - protein, 7 aa, synthetic construct
KANSIDG

SEQ ID NO: 89294 - protein, 7 aa, synthetic construct
GPASSAE

SEQ ID NO: 89295 - protein, 7 aa, synthetic construct
RMHQPPD

SEQ ID NO: 89296 - protein, 7 aa, synthetic construct
IPHSMSG

SEQ ID NO: 89297 - protein, 7 aa, synthetic construct
KVPEKDF

SEQ ID NO: 89298 - protein, 7 aa, synthetic construct
WAREKRD

SEQ ID NO: 89299 - protein, 7 aa, synthetic construct
KKSDGFA

SEQ ID NO: 89300 - protein, 7 aa, synthetic construct
MMAHTHL

SEQ ID NO: 89301 - protein, 7 aa, synthetic construct
EKPNTTF

SEQ ID NO: 89302 - protein, 7 aa, synthetic construct
KIHPHEY

SEQ ID NO: 89303 - protein, 7 aa, synthetic construct
IGHANHD

SEQ ID NO: 89304 - protein, 7 aa, synthetic construct
INYGGDT

SEQ ID NO: 89305 - protein, 7 aa, synthetic construct
HGKLRME

SEQ ID NO: 89306 - protein, 7 aa, synthetic construct
LFAKINP

SEQ ID NO: 89307 - protein, 7 aa, synthetic construct
GVMKFDL

SEQ ID NO: 89308 - protein, 7 aa, synthetic construct
THQDGAY

SEQ ID NO: 89309 - protein, 7 aa, synthetic construct
IKDNWQR

SEQ ID NO: 89310 - protein, 7 aa, synthetic construct
REQMQQR

SEQ ID NO: 89311 - protein, 7 aa, synthetic construct
MQNHAQG

SEQ ID NO: 89312 - protein, 7 aa, synthetic construct
KHNTLDW

SEQ ID NO: 89313 - protein, 7 aa, synthetic construct
PKPVHAA

SEQ ID NO: 89314 - protein, 7 aa, synthetic construct
TKTREFH

SEQ ID NO: 89315 - protein, 7 aa, synthetic construct
LNQIRVP

SEQ ID NO: 89316 - protein, 7 aa, synthetic construct
GSQPVTH

SEQ ID NO: 89317 - protein, 7 aa, synthetic construct
IGVALDP

SEQ ID NO: 89318 - protein, 7 aa, synthetic construct
RDTALRE

SEQ ID NO: 89319 - protein, 7 aa, synthetic construct
QFELTKG

SEQ ID NO: 89320 - protein, 7 aa, synthetic construct
KMNGARE

SEQ ID NO: 89321 - protein, 7 aa, synthetic construct
LSERQMR

SEQ ID NO: 89322 - protein, 7 aa, synthetic construct
KDPLYVA

SEQ ID NO: 89323 - protein, 7 aa, synthetic construct
EENKKII

SEQ ID NO: 89324 - protein, 7 aa, synthetic construct
KTPGQAA

SEQ ID NO: 89325 - protein, 7 aa, synthetic construct
EHVMGKK

SEQ ID NO: 89326 - protein, 7 aa, synthetic construct
ITGYKEW

SEQ ID NO: 89327 - protein, 7 aa, synthetic construct
EDERVKS

SEQ ID NO: 89328 - protein, 7 aa, synthetic construct
VVHEPLE

SEQ ID NO: 89329 - protein, 7 aa, synthetic construct
IDSLKNY

SEQ ID NO: 89330 - protein, 7 aa, synthetic construct
IGQLAVT

SEQ ID NO: 89331 - protein, 7 aa, synthetic construct
QAKDSYQ

SEQ ID NO: 89332 - protein, 7 aa, synthetic construct
NGKTSAM

SEQ ID NO: 89333 - protein, 7 aa, synthetic construct
LDGGPVH

SEQ ID NO: 89334 - protein, 7 aa, synthetic construct
NGKHLPT

SEQ ID NO: 89335 - protein, 7 aa, synthetic construct
THNVKQW

SEQ ID NO: 89336 - protein, 7 aa, synthetic construct
IHPLVQA

SEQ ID NO: 89337 - protein, 7 aa, synthetic construct
QYSPNLS

SEQ ID NO: 89338 - protein, 7 aa, synthetic construct
PGKSNTG

SEQ ID NO: 89339 - protein, 7 aa, synthetic construct
WTGNAVH

SEQ ID NO: 89340 - protein, 7 aa, synthetic construct
WSGHGIA

SEQ ID NO: 89341 - protein, 7 aa, synthetic construct
DKQMINE

SEQ ID NO: 89342 - protein, 7 aa, synthetic construct
PQYKAGV

SEQ ID NO: 89343 - protein, 7 aa, synthetic construct
LVKVWSE

SEQ ID NO: 89344 - protein, 7 aa, synthetic construct
MSKQQQG

SEQ ID NO: 89345 - protein, 7 aa, synthetic construct
GFIVKSS

SEQ ID NO: 89346 - protein, 7 aa, synthetic construct
RQTGNVL

SEQ ID NO: 89347 - protein, 7 aa, synthetic construct
KKSTTDD

SEQ ID NO: 89348 - protein, 7 aa, synthetic construct
SMAKMSP

SEQ ID NO: 89349 - protein, 7 aa, synthetic construct
WKSEFKS

SEQ ID NO: 89350 - protein, 7 aa, synthetic construct
LLGNVDR

SEQ ID NO: 89351 - protein, 7 aa, synthetic construct
QRSTGTS

SEQ ID NO: 89352 - protein, 7 aa, synthetic construct
GEVAFMA

SEQ ID NO: 89353 - protein, 7 aa, synthetic construct
VLQREDH

SEQ ID NO: 89354 - protein, 7 aa, synthetic construct
ISAHWQS

SEQ ID NO: 89355 - protein, 7 aa, synthetic construct
NVNHTDW

SEQ ID NO: 89356 - protein, 7 aa, synthetic construct
HIRTTST

SEQ ID NO: 89357 - protein, 7 aa, synthetic construct
TTQPDYK

SEQ ID NO: 89358 - protein, 7 aa, synthetic construct
SHIRQTH

SEQ ID NO: 89359 - protein, 7 aa, synthetic construct
SHLDSDK

SEQ ID NO: 89360 - protein, 7 aa, synthetic construct
MRHNMKE

SEQ ID NO: 89361 - protein, 7 aa, synthetic construct
MGGHKDG

SEQ ID NO: 89362 - protein, 7 aa, synthetic construct
KHITVGP

SEQ ID NO: 89363 - protein, 7 aa, synthetic construct
DGRNGPD

SEQ ID NO: 89364 - protein, 7 aa, synthetic construct
TTHKTDY

SEQ ID NO: 89365 - protein, 7 aa, synthetic construct
TAGYHTS

SEQ ID NO: 89366 - protein, 7 aa, synthetic construct
PRSGQED

SEQ ID NO: 89367 - protein, 7 aa, synthetic construct
RIDPQKG

SEQ ID NO: 89368 - protein, 7 aa, synthetic construct
DKPAMMN

SEQ ID NO: 89369 - protein, 7 aa, synthetic construct
NNQGRQG

SEQ ID NO: 89370 - protein, 7 aa, synthetic construct
QTSFIAH

SEQ ID NO: 89371 - protein, 7 aa, synthetic construct
GGNFQTL

SEQ ID NO: 89372 - protein, 7 aa, synthetic construct
SNPHGLN

SEQ ID NO: 89373 - protein, 7 aa, synthetic construct
TPKGVST

SEQ ID NO: 89374 - protein, 7 aa, synthetic construct
NAHTPKE

SEQ ID NO: 89375 - protein, 7 aa, synthetic construct
KARIGET

SEQ ID NO: 89376 - protein, 7 aa, synthetic construct
QSTVHDG

SEQ ID NO: 89377 - protein, 7 aa, synthetic construct
QSIRSHD

SEQ ID NO: 89378 - protein, 7 aa, synthetic construct
INTKFGE

SEQ ID NO: 89379 - protein, 7 aa, synthetic construct
AHTVNTE

SEQ ID NO: 89380 - protein, 7 aa, synthetic construct
VAQNHVT

SEQ ID NO: 89381 - protein, 7 aa, synthetic construct
VNKTYFG

SEQ ID NO: 89382 - protein, 7 aa, synthetic construct
PMPGKNS

SEQ ID NO: 89383 - protein, 7 aa, synthetic construct
ENRGLFL

SEQ ID NO: 89384 - protein, 7 aa, synthetic construct
EFNSHKI

SEQ ID NO: 89385 - protein, 7 aa, synthetic construct
THYTTPV

SEQ ID NO: 89386 - protein, 7 aa, synthetic construct
KQIMGAE

SEQ ID NO: 89387 - protein, 7 aa, synthetic construct
EQAARGR

SEQ ID NO: 89388 - protein, 7 aa, synthetic construct
SGHAATN

SEQ ID NO: 89389 - protein, 7 aa, synthetic construct
LYKGFPH

SEQ ID NO: 89390 - protein, 7 aa, synthetic construct
NDNIYAG

SEQ ID NO: 89391 - protein, 7 aa, synthetic construct
LMLKKLP

SEQ ID NO: 89392 - protein, 7 aa, synthetic construct
IAVYNQN

SEQ ID NO: 89393 - protein, 7 aa, synthetic construct
IHTANKD

SEQ ID NO: 89394 - protein, 7 aa, synthetic construct
PPQINHA

SEQ ID NO: 89395 - protein, 7 aa, synthetic construct
HEFRDGM

SEQ ID NO: 89396 - protein, 7 aa, synthetic construct
RSDHPHI

SEQ ID NO: 89397 - protein, 7 aa, synthetic construct
SRAGDQE

SEQ ID NO: 89398 - protein, 7 aa, synthetic construct
INVDWAG

SEQ ID NO: 89399 - protein, 7 aa, synthetic construct
SDKKPTM

SEQ ID NO: 89400 - protein, 7 aa, synthetic construct
SGYSNDS

SEQ ID NO: 89401 - protein, 7 aa, synthetic construct
LPTNMLK

SEQ ID NO: 89402 - protein, 7 aa, synthetic construct
LLLAQGS

SEQ ID NO: 89403 - protein, 7 aa, synthetic construct
QPQGKTI

SEQ ID NO: 89404 - protein, 7 aa, synthetic construct
ADVKVMV

SEQ ID NO: 89405 - protein, 7 aa, synthetic construct
MTVPAQQ

SEQ ID NO: 89406 - protein, 7 aa, synthetic construct
RDIVAKE

SEQ ID NO: 89407 - protein, 7 aa, synthetic construct
IRSESVH

SEQ ID NO: 89408 - protein, 7 aa, synthetic construct
KAPVYIQ

SEQ ID NO: 89409 - protein, 7 aa, synthetic construct
DKRQADG

SEQ ID NO: 89410 - protein, 7 aa, synthetic construct
QSSVNPP

SEQ ID NO: 89411 - protein, 7 aa, synthetic construct
FQQLMNS

SEQ ID NO: 89412 - protein, 7 aa, synthetic construct
DPQHHIA

SEQ ID NO: 89413 - protein, 7 aa, synthetic construct
WQRDPPD

SEQ ID NO: 89414 - protein, 7 aa, synthetic construct
KKSSADV

SEQ ID NO: 89415 - protein, 7 aa, synthetic construct
IPVEWTS

SEQ ID NO: 89416 - protein, 7 aa, synthetic construct
WEPRSSA

SEQ ID NO: 89417 - protein, 7 aa, synthetic construct
YHMVDND

SEQ ID NO: 89418 - protein, 7 aa, synthetic construct
QTQQYRQ

SEQ ID NO: 89419 - protein, 7 aa, synthetic construct
RRKDEES

SEQ ID NO: 89420 - protein, 7 aa, synthetic construct
GNNTHGA

SEQ ID NO: 89421 - protein, 7 aa, synthetic construct
MNDGRAS

SEQ ID NO: 89422 - protein, 7 aa, synthetic construct
VHEMVKQ

SEQ ID NO: 89423 - protein, 7 aa, synthetic construct
GHNIEPA

SEQ ID NO: 89424 - protein, 7 aa, synthetic construct
FQKPVDP

SEQ ID NO: 89425 - protein, 7 aa, synthetic construct
HNNASSQ

SEQ ID NO: 89426 - protein, 7 aa, synthetic construct
YAAHPEI

SEQ ID NO: 89427 - protein, 7 aa, synthetic construct
LGKQERQ

SEQ ID NO: 89428 - protein, 7 aa, synthetic construct
INLERGH

SEQ ID NO: 89429 - protein, 7 aa, synthetic construct
RDNFTNQ

SEQ ID NO: 89430 - protein, 7 aa, synthetic construct
RYMPPQG

SEQ ID NO: 89431 - protein, 7 aa, synthetic construct
TKHAITV

SEQ ID NO: 89432 - protein, 7 aa, synthetic construct
NHAGMSY

SEQ ID NO: 89433 - protein, 7 aa, synthetic construct
FQDAKHM

SEQ ID NO: 89434 - protein, 7 aa, synthetic construct
YSAKTSP

SEQ ID NO: 89435 - protein, 7 aa, synthetic construct
TGPSTHK

SEQ ID NO: 89436 - protein, 7 aa, synthetic construct
KNIMEPS

SEQ ID NO: 89437 - protein, 7 aa, synthetic construct
VPYHDHT

SEQ ID NO: 89438 - protein, 7 aa, synthetic construct
SKDAREH

SEQ ID NO: 89439 - protein, 7 aa, synthetic construct
YRIGITE

SEQ ID NO: 89440 - protein, 7 aa, synthetic construct
PNRSEGD

SEQ ID NO: 89441 - protein, 7 aa, synthetic construct
LDALKPT

SEQ ID NO: 89442 - protein, 7 aa, synthetic construct
HRALRME

SEQ ID NO: 89443 - protein, 7 aa, synthetic construct
PQPKTGF

SEQ ID NO: 89444 - protein, 7 aa, synthetic construct
LHMAIKA

SEQ ID NO: 89445 - protein, 7 aa, synthetic construct
MGIANVK

SEQ ID NO: 89446 - protein, 7 aa, synthetic construct
KSDTVSQ

SEQ ID NO: 89447 - protein, 7 aa, synthetic construct
NHAKSMV

SEQ ID NO: 89448 - protein, 7 aa, synthetic construct
PRPNSGM

SEQ ID NO: 89449 - protein, 7 aa, synthetic construct
APMGAAR

SEQ ID NO: 89450 - protein, 7 aa, synthetic construct
NAFKQEE

SEQ ID NO: 89451 - protein, 7 aa, synthetic construct
PSHPNSR

SEQ ID NO: 89452 - protein, 7 aa, synthetic construct
EGQHNMK

SEQ ID NO: 89453 - protein, 7 aa, synthetic construct
KPPHVMG

SEQ ID NO: 89454 - protein, 7 aa, synthetic construct
HQSQNDR

SEQ ID NO: 89455 - protein, 7 aa, synthetic construct
MRSEGGS

SEQ ID NO: 89456 - protein, 7 aa, synthetic construct
NHRGHSM

SEQ ID NO: 89457 - protein, 7 aa, synthetic construct
QTYVQQA

SEQ ID NO: 89458 - protein, 7 aa, synthetic construct
QAFAEPK

SEQ ID NO: 89459 - protein, 7 aa, synthetic construct
QKSNPNL

SEQ ID NO: 89460 - protein, 7 aa, synthetic construct
TGGAAGW

SEQ ID NO: 89461 - protein, 7 aa, synthetic construct
GYEARTQ

SEQ ID NO: 89462 - protein, 7 aa, synthetic construct
FMTNIID

SEQ ID NO: 89463 - protein, 7 aa, synthetic construct
KGTIGKD

SEQ ID NO: 89464 - protein, 7 aa, synthetic construct
NDPQKIG

SEQ ID NO: 89465 - protein, 7 aa, synthetic construct
QRITDDN

SEQ ID NO: 89466 - protein, 7 aa, synthetic construct
LQSPVLN

SEQ ID NO: 89467 - protein, 7 aa, synthetic construct
YTVGTMN

SEQ ID NO: 89468 - protein, 7 aa, synthetic construct
ARAGPLV

SEQ ID NO: 89469 - protein, 7 aa, synthetic construct
GNRAAGT

SEQ ID NO: 89470 - protein, 7 aa, synthetic construct
AQFRGAT

SEQ ID NO: 89471 - protein, 7 aa, synthetic construct
DVTMKLD

SEQ ID NO: 89472 - protein, 7 aa, synthetic construct
DPHGKFI

SEQ ID NO: 89473 - protein, 7 aa, synthetic construct
YNQHTHT

SEQ ID NO: 89474 - protein, 7 aa, synthetic construct
KLDFGQD

SEQ ID NO: 89475 - protein, 7 aa, synthetic construct
PLSVRTT

SEQ ID NO: 89476 - protein, 7 aa, synthetic construct
GQTAMVR

SEQ ID NO: 89477 - protein, 7 aa, synthetic construct
MNVTNNI

SEQ ID NO: 89478 - protein, 7 aa, synthetic construct
IEIKRDF

SEQ ID NO: 89479 - protein, 7 aa, synthetic construct
MDGVRQS

SEQ ID NO: 89480 - protein, 7 aa, synthetic construct
HTRDQLG

SEQ ID NO: 89481 - protein, 7 aa, synthetic construct
HNYKQVQ

SEQ ID NO: 89482 - protein, 7 aa, synthetic construct
GNGMAIR

SEQ ID NO: 89483 - protein, 7 aa, synthetic construct
MHHAPQA

SEQ ID NO: 89484 - protein, 7 aa, synthetic construct
DHKHHGP

SEQ ID NO: 89485 - protein, 7 aa, synthetic construct
MKPSTPS

SEQ ID NO: 89486 - protein, 7 aa, synthetic construct
RMPNSIE

SEQ ID NO: 89487 - protein, 7 aa, synthetic construct
RLKSDYA

SEQ ID NO: 89488 - protein, 7 aa, synthetic construct
GDKQFAK

SEQ ID NO: 89489 - protein, 7 aa, synthetic construct
QMLNKQA

SEQ ID NO: 89490 - protein, 7 aa, synthetic construct
PEHRPIM

SEQ ID NO: 89491 - protein, 7 aa, synthetic construct
WTDKTVH

SEQ ID NO: 89492 - protein, 7 aa, synthetic construct
PHVVHAE

SEQ ID NO: 89493 - protein, 7 aa, synthetic construct
KRADNGV

SEQ ID NO: 89494 - protein, 7 aa, synthetic construct
TWQGNPE

SEQ ID NO: 89495 - protein, 7 aa, synthetic construct
VPEVKTP

SEQ ID NO: 89496 - protein, 7 aa, synthetic construct
HWSDRAP

SEQ ID NO: 89497 - protein, 7 aa, synthetic construct
KDKTMRD

SEQ ID NO: 89498 - protein, 7 aa, synthetic construct
WAASVVP

SEQ ID NO: 89499 - protein, 7 aa, synthetic construct
SHTHGKG

SEQ ID NO: 89500 - protein, 7 aa, synthetic construct
FIKTGGG

SEQ ID NO: 89501 - protein, 7 aa, synthetic construct
NNYGNSP

SEQ ID NO: 89502 - protein, 7 aa, synthetic construct
SEGNRLA

SEQ ID NO: 89503 - protein, 7 aa, synthetic construct
NTKSMYA

SEQ ID NO: 89504 - protein, 7 aa, synthetic construct
KAPIREE

SEQ ID NO: 89505 - protein, 7 aa, synthetic construct
MGGTDFP

SEQ ID NO: 89506 - protein, 7 aa, synthetic construct
PKEPYVG

SEQ ID NO: 89507 - protein, 7 aa, synthetic construct
KNNGESS

SEQ ID NO: 89508 - protein, 7 aa, synthetic construct
QIFPNGH

SEQ ID NO: 89509 - protein, 7 aa, synthetic construct
YTTERVI

SEQ ID NO: 89510 - protein, 7 aa, synthetic construct
TEKELFA

SEQ ID NO: 89511 - protein, 7 aa, synthetic construct
TMAPTDS

SEQ ID NO: 89512 - protein, 7 aa, synthetic construct
EAASRYH

SEQ ID NO: 89513 - protein, 7 aa, synthetic construct
VMDKTVI

SEQ ID NO: 89514 - protein, 7 aa, synthetic construct
ELRVTRN

SEQ ID NO: 89515 - protein, 7 aa, synthetic construct
VWQSMPP

SEQ ID NO: 89516 - protein, 7 aa, synthetic construct
NVKLTMT

SEQ ID NO: 89517 - protein, 7 aa, synthetic construct
VMAKWKE

SEQ ID NO: 89518 - protein, 7 aa, synthetic construct
PHDHIPM

SEQ ID NO: 89519 - protein, 7 aa, synthetic construct
GRTPETQ

SEQ ID NO: 89520 - protein, 7 aa, synthetic construct
GAAGGHH

SEQ ID NO: 89521 - protein, 7 aa, synthetic construct
VTQGASR

SEQ ID NO: 89522 - protein, 7 aa, synthetic construct
ARTTGEN

SEQ ID NO: 89523 - protein, 7 aa, synthetic construct
ENNHVLV

SEQ ID NO: 89524 - protein, 7 aa, synthetic construct
RTQQVIM

SEQ ID NO: 89525 - protein, 7 aa, synthetic construct
SSATPMR

SEQ ID NO: 89526 - protein, 7 aa, synthetic construct
NQIHGTK

SEQ ID NO: 89527 - protein, 7 aa, synthetic construct
VPVDRIH

SEQ ID NO: 89528 - protein, 7 aa, synthetic construct
VTHTQKW

SEQ ID NO: 89529 - protein, 7 aa, synthetic construct
NRNEHYT

SEQ ID NO: 89530 - protein, 7 aa, synthetic construct
HKQHSPD

SEQ ID NO: 89531 - protein, 7 aa, synthetic construct
YHARSND

SEQ ID NO: 89532 - protein, 7 aa, synthetic construct
KSADLQL

SEQ ID NO: 89533 - protein, 7 aa, synthetic construct
MRPNQNG

SEQ ID NO: 89534 - protein, 7 aa, synthetic construct
NKQQAQA

SEQ ID NO: 89535 - protein, 7 aa, synthetic construct
MPAKRDW

SEQ ID NO: 89536 - protein, 7 aa, synthetic construct
VAVPQPP

SEQ ID NO: 89537 - protein, 7 aa, synthetic construct
PAGLLAV

SEQ ID NO: 89538 - protein, 7 aa, synthetic construct
AREISQP

SEQ ID NO: 89539 - protein, 7 aa, synthetic construct
TEHHHYH

SEQ ID NO: 89540 - protein, 7 aa, synthetic construct
QQTSKHD

SEQ ID NO: 89541 - protein, 7 aa, synthetic construct
GNGLMTV

SEQ ID NO: 89542 - protein, 7 aa, synthetic construct
TPTRENK

SEQ ID NO: 89543 - protein, 7 aa, synthetic construct
GTMTERK

SEQ ID NO: 89544 - protein, 7 aa, synthetic construct
VMGHQTM

SEQ ID NO: 89545 - protein, 7 aa, synthetic construct
TAHGTGW

SEQ ID NO: 89546 - protein, 7 aa, synthetic construct
WQGGVVK

SEQ ID NO: 89547 - protein, 7 aa, synthetic construct
EYGLDRK

SEQ ID NO: 89548 - protein, 7 aa, synthetic construct
IHKYPAL

SEQ ID NO: 89549 - protein, 7 aa, synthetic construct
PMAPSEH

SEQ ID NO: 89550 - protein, 7 aa, synthetic construct
KINVSTM

SEQ ID NO: 89551 - protein, 7 aa, synthetic construct
KNSNPQT

SEQ ID NO: 89552 - protein, 7 aa, synthetic construct
ANPLVPG

SEQ ID NO: 89553 - protein, 7 aa, synthetic construct
GAGAIEY

SEQ ID NO: 89554 - protein, 7 aa, synthetic construct
KDMVHVN

SEQ ID NO: 89555 - protein, 7 aa, synthetic construct
QPVQNVA

SEQ ID NO: 89556 - protein, 7 aa, synthetic construct
DQRTNGM

SEQ ID NO: 89557 - protein, 7 aa, synthetic construct
EMKNYSP

SEQ ID NO: 89558 - protein, 7 aa, synthetic construct
SIFQKKD

SEQ ID NO: 89559 - protein, 7 aa, synthetic construct
LKDLIQK

SEQ ID NO: 89560 - protein, 7 aa, synthetic construct
YHASLAE

SEQ ID NO: 89561 - protein, 7 aa, synthetic construct
IVAGHVR

SEQ ID NO: 89562 - protein, 7 aa, synthetic construct
VKHPNGA

SEQ ID NO: 89563 - protein, 7 aa, synthetic construct
SNTTVGP

SEQ ID NO: 89564 - protein, 7 aa, synthetic construct
GTLGSQH

SEQ ID NO: 89565 - protein, 7 aa, synthetic construct
PDTRASP

SEQ ID NO: 89566 - protein, 7 aa, synthetic construct
KPREDNF

SEQ ID NO: 89567 - protein, 7 aa, synthetic construct
LARQVMT

SEQ ID NO: 89568 - protein, 7 aa, synthetic construct
DGLGRAA

SEQ ID NO: 89569 - protein, 7 aa, synthetic construct
GLFPTSV

SEQ ID NO: 89570 - protein, 7 aa, synthetic construct
VQKESYY

SEQ ID NO: 89571 - protein, 7 aa, synthetic construct
HGINSTN

SEQ ID NO: 89572 - protein, 7 aa, synthetic construct
GATSVKP

SEQ ID NO: 89573 - protein, 7 aa, synthetic construct
KISQESY

SEQ ID NO: 89574 - protein, 7 aa, synthetic construct
IGKQDPT

SEQ ID NO: 89575 - protein, 7 aa, synthetic construct
IGLMRVD

SEQ ID NO: 89576 - protein, 7 aa, synthetic construct
MQSPGHN

SEQ ID NO: 89577 - protein, 7 aa, synthetic construct
RGNAHQH

SEQ ID NO: 89578 - protein, 7 aa, synthetic construct
SAQSVPH

SEQ ID NO: 89579 - protein, 7 aa, synthetic construct
NNQRQAA

SEQ ID NO: 89580 - protein, 7 aa, synthetic construct
RWGMKEE

SEQ ID NO: 89581 - protein, 7 aa, synthetic construct
GNWSTDR

SEQ ID NO: 89582 - protein, 7 aa, synthetic construct
NESRHQA

SEQ ID NO: 89583 - protein, 7 aa, synthetic construct
MKDTAPK

SEQ ID NO: 89584 - protein, 7 aa, synthetic construct
YDTQQKH

SEQ ID NO: 89585 - protein, 7 aa, synthetic construct
ARNEAGY

SEQ ID NO: 89586 - protein, 7 aa, synthetic construct
MFTKNGI

SEQ ID NO: 89587 - protein, 7 aa, synthetic construct
GLKSTPP

SEQ ID NO: 89588 - protein, 7 aa, synthetic construct
YPQYKMA

SEQ ID NO: 89589 - protein, 7 aa, synthetic construct
RREDMGT

SEQ ID NO: 89590 - protein, 7 aa, synthetic construct
QRPVWSE

SEQ ID NO: 89591 - protein, 7 aa, synthetic construct
KNHQQYI

SEQ ID NO: 89592 - protein, 7 aa, synthetic construct
TNRYNGI

SEQ ID NO: 89593 - protein, 7 aa, synthetic construct
MLNLSVP

SEQ ID NO: 89594 - protein, 7 aa, synthetic construct
YFGKSAT

SEQ ID NO: 89595 - protein, 7 aa, synthetic construct
HDRVYSH

SEQ ID NO: 89596 - protein, 7 aa, synthetic construct
KGSGPVF

SEQ ID NO: 89597 - protein, 7 aa, synthetic construct
YQERNHL

SEQ ID NO: 89598 - protein, 7 aa, synthetic construct
TKDFGYP

SEQ ID NO: 89599 - protein, 7 aa, synthetic construct
FSQSSTD

SEQ ID NO: 89600 - protein, 7 aa, synthetic construct
KQSNQAA

SEQ ID NO: 89601 - protein, 7 aa, synthetic construct
YFKRQAE

SEQ ID NO: 89602 - protein, 7 aa, synthetic construct
QRTGVMD

SEQ ID NO: 89603 - protein, 7 aa, synthetic construct
SMRVSQP

SEQ ID NO: 89604 - protein, 7 aa, synthetic construct
HDGKGPD

SEQ ID NO: 89605 - protein, 7 aa, synthetic construct
RYAHSID

SEQ ID NO: 89606 - protein, 7 aa, synthetic construct
KIYGEAG

SEQ ID NO: 89607 - protein, 7 aa, synthetic construct
VERLART

SEQ ID NO: 89608 - protein, 7 aa, synthetic construct
NEKQPYG

SEQ ID NO: 89609 - protein, 7 aa, synthetic construct
LDMNKPS

SEQ ID NO: 89610 - protein, 7 aa, synthetic construct
PSPWSDK

SEQ ID NO: 89611 - protein, 7 aa, synthetic construct
HVGENGT

SEQ ID NO: 89612 - protein, 7 aa, synthetic construct
HRQDGNS

SEQ ID NO: 89613 - protein, 7 aa, synthetic construct
VMFHEHP

SEQ ID NO: 89614 - protein, 7 aa, synthetic construct
WQQEKRE

SEQ ID NO: 89615 - protein, 7 aa, synthetic construct
TPDVKQV

SEQ ID NO: 89616 - protein, 7 aa, synthetic construct
GKMGGIG

SEQ ID NO: 89617 - protein, 7 aa, synthetic construct
TWKDPNN

SEQ ID NO: 89618 - protein, 7 aa, synthetic construct
FHVPQVG

SEQ ID NO: 89619 - protein, 7 aa, synthetic construct
SGSQNHH

SEQ ID NO: 89620 - protein, 7 aa, synthetic construct
VSTHTAI

SEQ ID NO: 89621 - protein, 7 aa, synthetic construct
IWVEGNS

SEQ ID NO: 89622 - protein, 7 aa, synthetic construct
QDSGGRA

SEQ ID NO: 89623 - protein, 7 aa, synthetic construct
EKMQPMH

SEQ ID NO: 89624 - protein, 7 aa, synthetic construct
WLEVERN

SEQ ID NO: 89625 - protein, 7 aa, synthetic construct
HGGATTT

SEQ ID NO: 89626 - protein, 7 aa, synthetic construct
PYALTHE

SEQ ID NO: 89627 - protein, 7 aa, synthetic construct
PTRANNP

SEQ ID NO: 89628 - protein, 7 aa, synthetic construct
MYIAPNS

SEQ ID NO: 89629 - protein, 7 aa, synthetic construct
KAQGLRD

SEQ ID NO: 89630 - protein, 7 aa, synthetic construct
YQNHQNP

SEQ ID NO: 89631 - protein, 7 aa, synthetic construct
GPEVVKP

SEQ ID NO: 89632 - protein, 7 aa, synthetic construct
YWANTQE

SEQ ID NO: 89633 - protein, 7 aa, synthetic construct
GSVKANN

SEQ ID NO: 89634 - protein, 7 aa, synthetic construct
KMDMHRN

SEQ ID NO: 89635 - protein, 7 aa, synthetic construct
GQESSNW

SEQ ID NO: 89636 - protein, 7 aa, synthetic construct
NEIKWQN

SEQ ID NO: 89637 - protein, 7 aa, synthetic construct
SRFMESE

SEQ ID NO: 89638 - protein, 7 aa, synthetic construct
QQRGKDI

SEQ ID NO: 89639 - protein, 7 aa, synthetic construct
SMYNREI

SEQ ID NO: 89640 - protein, 7 aa, synthetic construct
QTKHVFS

SEQ ID NO: 89641 - protein, 7 aa, synthetic construct
QQSMKAL

SEQ ID NO: 89642 - protein, 7 aa, synthetic construct
VGAAFQY

SEQ ID NO: 89643 - protein, 7 aa, synthetic construct
VLGYKES

SEQ ID NO: 89644 - protein, 7 aa, synthetic construct
LSRDRIQ

SEQ ID NO: 89645 - protein, 7 aa, synthetic construct
THGTISE

SEQ ID NO: 89646 - protein, 7 aa, synthetic construct
VSSQKAG

SEQ ID NO: 89647 - protein, 7 aa, synthetic construct
KHHETRQ

SEQ ID NO: 89648 - protein, 7 aa, synthetic construct
MDKRMNN

SEQ ID NO: 89649 - protein, 7 aa, synthetic construct
QLTTMHY

SEQ ID NO: 89650 - protein, 7 aa, synthetic construct
QHNEKAV

SEQ ID NO: 89651 - protein, 7 aa, synthetic construct
NRVDPAV

SEQ ID NO: 89652 - protein, 7 aa, synthetic construct
STTNSEK

SEQ ID NO: 89653 - protein, 7 aa, synthetic construct
WATMIKE

SEQ ID NO: 89654 - protein, 7 aa, synthetic construct
YGGKNTP

SEQ ID NO: 89655 - protein, 7 aa, synthetic construct
SEVRMDK

SEQ ID NO: 89656 - protein, 7 aa, synthetic construct
NSTSMKL

SEQ ID NO: 89657 - protein, 7 aa, synthetic construct
DQSPRAT

SEQ ID NO: 89658 - protein, 7 aa, synthetic construct
DHNGNKP

SEQ ID NO: 89659 - protein, 7 aa, synthetic construct
AWTNIPS

SEQ ID NO: 89660 - protein, 7 aa, synthetic construct
HIHIIQE

SEQ ID NO: 89661 - protein, 7 aa, synthetic construct
TRAYEHI

SEQ ID NO: 89662 - protein, 7 aa, synthetic construct
ENERFPK

SEQ ID NO: 89663 - protein, 7 aa, synthetic construct
KQRDSNP

SEQ ID NO: 89664 - protein, 7 aa, synthetic construct
SAHQDGA

SEQ ID NO: 89665 - protein, 7 aa, synthetic construct
HGTNKIH

SEQ ID NO: 89666 - protein, 7 aa, synthetic construct
DSVRKTA

SEQ ID NO: 89667 - protein, 7 aa, synthetic construct
WSIKRAE

SEQ ID NO: 89668 - protein, 7 aa, synthetic construct
HVLVQGS

SEQ ID NO: 89669 - protein, 7 aa, synthetic construct
DIQQHHR

SEQ ID NO: 89670 - protein, 7 aa, synthetic construct
QAHAGAI

SEQ ID NO: 89671 - protein, 7 aa, synthetic construct
GNFNHEH

SEQ ID NO: 89672 - protein, 7 aa, synthetic construct
NKDYQMD

SEQ ID NO: 89673 - protein, 7 aa, synthetic construct
VYAHTGH

SEQ ID NO: 89674 - protein, 7 aa, synthetic construct
RHQPSFP

SEQ ID NO: 89675 - protein, 7 aa, synthetic construct
AKTMIKG

SEQ ID NO: 89676 - protein, 7 aa, synthetic construct
AHQRITV

SEQ ID NO: 89677 - protein, 7 aa, synthetic construct
THMLLGA

SEQ ID NO: 89678 - protein, 7 aa, synthetic construct
SFNDNKN

SEQ ID NO: 89679 - protein, 7 aa, synthetic construct
MENRISV

SEQ ID NO: 89680 - protein, 7 aa, synthetic construct
ANTGKQD

SEQ ID NO: 89681 - protein, 7 aa, synthetic construct
SSAAIRH

SEQ ID NO: 89682 - protein, 7 aa, synthetic construct
KHNNSIV

SEQ ID NO: 89683 - protein, 7 aa, synthetic construct
NSRHLVM

SEQ ID NO: 89684 - protein, 7 aa, synthetic construct
LARQEDS

SEQ ID NO: 89685 - protein, 7 aa, synthetic construct
RESMPSW

SEQ ID NO: 89686 - protein, 7 aa, synthetic construct
NRLDKPI

SEQ ID NO: 89687 - protein, 7 aa, synthetic construct
INNSVKV

SEQ ID NO: 89688 - protein, 7 aa, synthetic construct
VKKTSDE

SEQ ID NO: 89689 - protein, 7 aa, synthetic construct
NKHQGVT

SEQ ID NO: 89690 - protein, 7 aa, synthetic construct
LLNDKRS

SEQ ID NO: 89691 - protein, 7 aa, synthetic construct
KYQEGLG

SEQ ID NO: 89692 - protein, 7 aa, synthetic construct
IPKNHER

SEQ ID NO: 89693 - protein, 7 aa, synthetic construct
KMYEKHA

SEQ ID NO: 89694 - protein, 7 aa, synthetic construct
SQPRAEP

SEQ ID NO: 89695 - protein, 7 aa, synthetic construct
APNVLSG

SEQ ID NO: 89696 - protein, 7 aa, synthetic construct
NAQGKEL

SEQ ID NO: 89697 - protein, 7 aa, synthetic construct
TGRYNDT

SEQ ID NO: 89698 - protein, 7 aa, synthetic construct
KVSFEVS

SEQ ID NO: 89699 - protein, 7 aa, synthetic construct
KMPDTMF

SEQ ID NO: 89700 - protein, 7 aa, synthetic construct
MHHEPGH

SEQ ID NO: 89701 - protein, 7 aa, synthetic construct
HFGSNKM

SEQ ID NO: 89702 - protein, 7 aa, synthetic construct
DHTPTRE

SEQ ID NO: 89703 - protein, 7 aa, synthetic construct
TGVAIMQ

SEQ ID NO: 89704 - protein, 7 aa, synthetic construct
CQSMPCT

SEQ ID NO: 89705 - protein, 7 aa, synthetic construct
SMAQGTH

SEQ ID NO: 89706 - protein, 7 aa, synthetic construct
MNRNKEF

SEQ ID NO: 89707 - protein, 7 aa, synthetic construct
PKYQISA

SEQ ID NO: 89708 - protein, 7 aa, synthetic construct
PTKNGAP

SEQ ID NO: 89709 - protein, 7 aa, synthetic construct
PPMVGQM

SEQ ID NO: 89710 - protein, 7 aa, synthetic construct
RGPDYSG

SEQ ID NO: 89711 - protein, 7 aa, synthetic construct
DRFSPRS

SEQ ID NO: 89712 - protein, 7 aa, synthetic construct
FSTGYHD

SEQ ID NO: 89713 - protein, 7 aa, synthetic construct
QRMEGGK

SEQ ID NO: 89714 - protein, 7 aa, synthetic construct
RERNMTN

SEQ ID NO: 89715 - protein, 7 aa, synthetic construct
NERKIPW

SEQ ID NO: 89716 - protein, 7 aa, synthetic construct
RSNEVYF

SEQ ID NO: 89717 - protein, 7 aa, synthetic construct
PSQKDDR

SEQ ID NO: 89718 - protein, 7 aa, synthetic construct
ASFGGPD

SEQ ID NO: 89719 - protein, 7 aa, synthetic construct
MTKPNHT

SEQ ID NO: 89720 - protein, 7 aa, synthetic construct
MRGIIDE

SEQ ID NO: 89721 - protein, 7 aa, synthetic construct
KLDIHDF

SEQ ID NO: 89722 - protein, 7 aa, synthetic construct
PTKSAGG

SEQ ID NO: 89723 - protein, 7 aa, synthetic construct
ANNSPRF

SEQ ID NO: 89724 - protein, 7 aa, synthetic construct
YSHVHQK

SEQ ID NO: 89725 - protein, 7 aa, synthetic construct
LKQGKIE

SEQ ID NO: 89726 - protein, 7 aa, synthetic construct
PTFHGSG

SEQ ID NO: 89727 - protein, 7 aa, synthetic construct
IDLTQHQ

SEQ ID NO: 89728 - protein, 7 aa, synthetic construct
KGPDGTE

SEQ ID NO: 89729 - protein, 7 aa, synthetic construct
AISAKDH

SEQ ID NO: 89730 - protein, 7 aa, synthetic construct
SSQQQTG

SEQ ID NO: 89731 - protein, 7 aa, synthetic construct
ALNAVGI

SEQ ID NO: 89732 - protein, 7 aa, synthetic construct
LNIPMGQ

SEQ ID NO: 89733 - protein, 7 aa, synthetic construct
EVHRTIP

SEQ ID NO: 89734 - protein, 7 aa, synthetic construct
ATSPAFS

SEQ ID NO: 89735 - protein, 7 aa, synthetic construct
MSAITGL

SEQ ID NO: 89736 - protein, 7 aa, synthetic construct
RQFDQKQ

SEQ ID NO: 89737 - protein, 7 aa, synthetic construct
QMKEGYG

SEQ ID NO: 89738 - protein, 7 aa, synthetic construct
WHKHFQD

SEQ ID NO: 89739 - protein, 7 aa, synthetic construct
GSMPLPR

SEQ ID NO: 89740 - protein, 7 aa, synthetic construct
GQQGAHE

SEQ ID NO: 89741 - protein, 7 aa, synthetic construct
DQRIQSY

SEQ ID NO: 89742 - protein, 7 aa, synthetic construct
KKVDMRD

SEQ ID NO: 89743 - protein, 7 aa, synthetic construct
KIPPDGS

SEQ ID NO: 89744 - protein, 7 aa, synthetic construct
LDVRGIG

SEQ ID NO: 89745 - protein, 7 aa, synthetic construct
MVRTIAG

SEQ ID NO: 89746 - protein, 7 aa, synthetic construct
KSAQPGA

SEQ ID NO: 89747 - protein, 7 aa, synthetic construct
MEHVFVG

SEQ ID NO: 89748 - protein, 7 aa, synthetic construct
RFNQDGM

SEQ ID NO: 89749 - protein, 7 aa, synthetic construct
QRGLFTD

SEQ ID NO: 89750 - protein, 7 aa, synthetic construct
KNSALIM

SEQ ID NO: 89751 - protein, 7 aa, synthetic construct
LETARAS

SEQ ID NO: 89752 - protein, 7 aa, synthetic construct
MAAGSTE

SEQ ID NO: 89753 - protein, 7 aa, synthetic construct
QSSSNLM

SEQ ID NO: 89754 - protein, 7 aa, synthetic construct
PEKQVVV

SEQ ID NO: 89755 - protein, 7 aa, synthetic construct
AERVYPQ

SEQ ID NO: 89756 - protein, 7 aa, synthetic construct
FDYKHNS

SEQ ID NO: 89757 - protein, 7 aa, synthetic construct
IDLRNHH

SEQ ID NO: 89758 - protein, 7 aa, synthetic construct
AGQIIHK

SEQ ID NO: 89759 - protein, 7 aa, synthetic construct
TGSRGND

SEQ ID NO: 89760 - protein, 7 aa, synthetic construct
ERSHGAI

SEQ ID NO: 89761 - protein, 7 aa, synthetic construct
AVLAMKE

SEQ ID NO: 89762 - protein, 7 aa, synthetic construct
GMFRNEP

SEQ ID NO: 89763 - protein, 7 aa, synthetic construct
VDVSSRA

SEQ ID NO: 89764 - protein, 7 aa, synthetic construct
SQSSKNG

SEQ ID NO: 89765 - protein, 7 aa, synthetic construct
QVKYENF

SEQ ID NO: 89766 - protein, 7 aa, synthetic construct
FLAHGLS

SEQ ID NO: 89767 - protein, 7 aa, synthetic construct
HLLATAG

SEQ ID NO: 89768 - protein, 7 aa, synthetic construct
NPKSNNG

SEQ ID NO: 89769 - protein, 7 aa, synthetic construct
TITPGPH

SEQ ID NO: 89770 - protein, 7 aa, synthetic construct
QQGKKVE

SEQ ID NO: 89771 - protein, 7 aa, synthetic construct
QQQTMPH

SEQ ID NO: 89772 - protein, 7 aa, synthetic construct
RNPSGGV

SEQ ID NO: 89773 - protein, 7 aa, synthetic construct
GINLAAE

SEQ ID NO: 89774 - protein, 7 aa, synthetic construct
KLKDIDT

SEQ ID NO: 89775 - protein, 7 aa, synthetic construct
HPMPKPL

SEQ ID NO: 89776 - protein, 7 aa, synthetic construct
VLNTRLA

SEQ ID NO: 89777 - protein, 7 aa, synthetic construct
GLVTTGF

SEQ ID NO: 89778 - protein, 7 aa, synthetic construct
IADRMQA

SEQ ID NO: 89779 - protein, 7 aa, synthetic construct
EQSLKHE

SEQ ID NO: 89780 - protein, 7 aa, synthetic construct
PLHDLSH

SEQ ID NO: 89781 - protein, 7 aa, synthetic construct
RGGGQAL

SEQ ID NO: 89782 - protein, 7 aa, synthetic construct
HADKQVH

SEQ ID NO: 89783 - protein, 7 aa, synthetic construct
IAARDRY

SEQ ID NO: 89784 - protein, 7 aa, synthetic construct
HPNHLHG

SEQ ID NO: 89785 - protein, 7 aa, synthetic construct
MGSVYNM

SEQ ID NO: 89786 - protein, 7 aa, synthetic construct
IPRTTQG

SEQ ID NO: 89787 - protein, 7 aa, synthetic construct
DIERQNK

SEQ ID NO: 89788 - protein, 7 aa, synthetic construct
KGDPQNG

SEQ ID NO: 89789 - protein, 7 aa, synthetic construct
INGKMAA

SEQ ID NO: 89790 - protein, 7 aa, synthetic construct
EPKKMVS

SEQ ID NO: 89791 - protein, 7 aa, synthetic construct
DFVHKEF

SEQ ID NO: 89792 - protein, 7 aa, synthetic construct
MNINHST

SEQ ID NO: 89793 - protein, 7 aa, synthetic construct
KDHLYKL

SEQ ID NO: 89794 - protein, 7 aa, synthetic construct
QGQYQQT

SEQ ID NO: 89795 - protein, 7 aa, synthetic construct
QKIQAEV

SEQ ID NO: 89796 - protein, 7 aa, synthetic construct
EYHQGAK

SEQ ID NO: 89797 - protein, 7 aa, synthetic construct
SHSPYSP

SEQ ID NO: 89798 - protein, 7 aa, synthetic construct
PTRQGTL

SEQ ID NO: 89799 - protein, 7 aa, synthetic construct
WNREQAV

SEQ ID NO: 89800 - protein, 7 aa, synthetic construct
TAQQMTP

SEQ ID NO: 89801 - protein, 7 aa, synthetic construct
GVTGQMA

SEQ ID NO: 89802 - protein, 7 aa, synthetic construct
RVHDVEF

SEQ ID NO: 89803 - protein, 7 aa, synthetic construct
ISFKSHV

SEQ ID NO: 89804 - protein, 7 aa, synthetic construct
ARGGMEG

SEQ ID NO: 89805 - protein, 7 aa, synthetic construct
WHKPVDH

SEQ ID NO: 89806 - protein, 7 aa, synthetic construct
WSSQPAI

SEQ ID NO: 89807 - protein, 7 aa, synthetic construct
DTHASMS

SEQ ID NO: 89808 - protein, 7 aa, synthetic construct
NLQGNGF

SEQ ID NO: 89809 - protein, 7 aa, synthetic construct
AQDNKRT

SEQ ID NO: 89810 - protein, 7 aa, synthetic construct
RTNAENM

SEQ ID NO: 89811 - protein, 7 aa, synthetic construct
QSAKLDT

SEQ ID NO: 89812 - protein, 7 aa, synthetic construct
NVVSFSA

SEQ ID NO: 89813 - protein, 7 aa, synthetic construct
QPPKMEL

SEQ ID NO: 89814 - protein, 7 aa, synthetic construct
GVAHGLP

SEQ ID NO: 89815 - protein, 7 aa, synthetic construct
VSTMRHE

SEQ ID NO: 89816 - protein, 7 aa, synthetic construct
GHFTGPT

SEQ ID NO: 89817 - protein, 7 aa, synthetic construct
AKEPDYR

SEQ ID NO: 89818 - protein, 7 aa, synthetic construct
APNKLAS

SEQ ID NO: 89819 - protein, 7 aa, synthetic construct
PAYNTQH

SEQ ID NO: 89820 - protein, 7 aa, synthetic construct
DRGVTES

SEQ ID NO: 89821 - protein, 7 aa, synthetic construct
RKESFIE

SEQ ID NO: 89822 - protein, 7 aa, synthetic construct
NFTKGFT

SEQ ID NO: 89823 - protein, 7 aa, synthetic construct
FPAKPQL

SEQ ID NO: 89824 - protein, 7 aa, synthetic construct
QRTSETR

SEQ ID NO: 89825 - protein, 7 aa, synthetic construct
RMLDGPQ

SEQ ID NO: 89826 - protein, 7 aa, synthetic construct
FMKIRDP

SEQ ID NO: 89827 - protein, 7 aa, synthetic construct
VHRAVTT

SEQ ID NO: 89828 - protein, 7 aa, synthetic construct
KKESSGQ

SEQ ID NO: 89829 - protein, 7 aa, synthetic construct
GHIYGER

SEQ ID NO: 89830 - protein, 7 aa, synthetic construct
MHALSAP

SEQ ID NO: 89831 - protein, 7 aa, synthetic construct
PDKPVHN

SEQ ID NO: 89832 - protein, 7 aa, synthetic construct
KDVIMRS

SEQ ID NO: 89833 - protein, 7 aa, synthetic construct
VHEAGHG

SEQ ID NO: 89834 - protein, 7 aa, synthetic construct
SKQTNEG

SEQ ID NO: 89835 - protein, 7 aa, synthetic construct
KNPSGNM

SEQ ID NO: 89836 - protein, 7 aa, synthetic construct
QDGKKAP

SEQ ID NO: 89837 - protein, 7 aa, synthetic construct
GPMAKIE

SEQ ID NO: 89838 - protein, 7 aa, synthetic construct
GTNQPNM

SEQ ID NO: 89839 - protein, 7 aa, synthetic construct
MGSRAVY

SEQ ID NO: 89840 - protein, 7 aa, synthetic construct
KFNPPKA

SEQ ID NO: 89841 - protein, 7 aa, synthetic construct
KTTNPMA

SEQ ID NO: 89842 - protein, 7 aa, synthetic construct
TQTMQIV

SEQ ID NO: 89843 - protein, 7 aa, synthetic construct
VSPMIVG

SEQ ID NO: 89844 - protein, 7 aa, synthetic construct
TTLPNMH

SEQ ID NO: 89845 - protein, 7 aa, synthetic construct
RPSNQNS

SEQ ID NO: 89846 - protein, 7 aa, synthetic construct
MSKSGQQ

SEQ ID NO: 89847 - protein, 7 aa, synthetic construct
KPDSAHP

SEQ ID NO: 89848 - protein, 7 aa, synthetic construct
SKVSTAI

SEQ ID NO: 89849 - protein, 7 aa, synthetic construct
QNTNNRA

SEQ ID NO: 89850 - protein, 7 aa, synthetic construct
NQGVNND

SEQ ID NO: 89851 - protein, 7 aa, synthetic construct
QHPPEPH

SEQ ID NO: 89852 - protein, 7 aa, synthetic construct
THGLQKM

SEQ ID NO: 89853 - protein, 7 aa, synthetic construct
TNGGVPN

SEQ ID NO: 89854 - protein, 7 aa, synthetic construct
DNPPTLG

SEQ ID NO: 89855 - protein, 7 aa, synthetic construct
SMNNPVS

SEQ ID NO: 89856 - protein, 7 aa, synthetic construct
DRKHGHA

SEQ ID NO: 89857 - protein, 7 aa, synthetic construct
FSTEKMN

SEQ ID NO: 89858 - protein, 7 aa, synthetic construct
MDQLKQR

SEQ ID NO: 89859 - protein, 7 aa, synthetic construct
AVNITQK

SEQ ID NO: 89860 - protein, 7 aa, synthetic construct
NMAPLSM

SEQ ID NO: 89861 - protein, 7 aa, synthetic construct
NHMGSFA

SEQ ID NO: 89862 - protein, 7 aa, synthetic construct
NNRPNHA

SEQ ID NO: 89863 - protein, 7 aa, synthetic construct
QFVTNEK

SEQ ID NO: 89864 - protein, 7 aa, synthetic construct
PDHMQQS

SEQ ID NO: 89865 - protein, 7 aa, synthetic construct
VRIQLPS

SEQ ID NO: 89866 - protein, 7 aa, synthetic construct
PKVQGNQ

SEQ ID NO: 89867 - protein, 7 aa, synthetic construct
KTSQTPG

SEQ ID NO: 89868 - protein, 7 aa, synthetic construct
LGPDALR

SEQ ID NO: 89869 - protein, 7 aa, synthetic construct
LAPDFRK

SEQ ID NO: 89870 - protein, 7 aa, synthetic construct
TSAVGHR

SEQ ID NO: 89871 - protein, 7 aa, synthetic construct
HGFSTDF

SEQ ID NO: 89872 - protein, 7 aa, synthetic construct
YDGKKNA

SEQ ID NO: 89873 - protein, 7 aa, synthetic construct
NNPEYHA

SEQ ID NO: 89874 - protein, 7 aa, synthetic construct
ETSKHVD

SEQ ID NO: 89875 - protein, 7 aa, synthetic construct
EKPAVHR

SEQ ID NO: 89876 - protein, 7 aa, synthetic construct
YLEHSSK

SEQ ID NO: 89877 - protein, 7 aa, synthetic construct
LVSMTDM

SEQ ID NO: 89878 - protein, 7 aa, synthetic construct
AKSTNVP

SEQ ID NO: 89879 - protein, 7 aa, synthetic construct
HVGVPKS

SEQ ID NO: 89880 - protein, 7 aa, synthetic construct
GKADVYY

SEQ ID NO: 89881 - protein, 7 aa, synthetic construct
RSDEQHT

SEQ ID NO: 89882 - protein, 7 aa, synthetic construct
KQGASPA

SEQ ID NO: 89883 - protein, 7 aa, synthetic construct
MQAKISY

SEQ ID NO: 89884 - protein, 7 aa, synthetic construct
HFGDAVN

SEQ ID NO: 89885 - protein, 7 aa, synthetic construct
YEFNKTI

SEQ ID NO: 89886 - protein, 7 aa, synthetic construct
TMHISAP

SEQ ID NO: 89887 - protein, 7 aa, synthetic construct
VGSTSYP

SEQ ID NO: 89888 - protein, 7 aa, synthetic construct
PRYAEST

SEQ ID NO: 89889 - protein, 7 aa, synthetic construct
KQNNTQS

SEQ ID NO: 89890 - protein, 7 aa, synthetic construct
LTKTSDQ

SEQ ID NO: 89891 - protein, 7 aa, synthetic construct
TTDQNSK

SEQ ID NO: 89892 - protein, 7 aa, synthetic construct
YEKAKVA

SEQ ID NO: 89893 - protein, 7 aa, synthetic construct
ALNFAKT

SEQ ID NO: 89894 - protein, 7 aa, synthetic construct
LTQLINQ

SEQ ID NO: 89895 - protein, 7 aa, synthetic construct
NKPNKEP

SEQ ID NO: 89896 - protein, 7 aa, synthetic construct
RHDDQGV

SEQ ID NO: 89897 - protein, 7 aa, synthetic construct
KVTDYTM

SEQ ID NO: 89898 - protein, 7 aa, synthetic construct
ESGHKDR

SEQ ID NO: 89899 - protein, 7 aa, synthetic construct
VHLGNHV

SEQ ID NO: 89900 - protein, 7 aa, synthetic construct
VRTSGQP

SEQ ID NO: 89901 - protein, 7 aa, synthetic construct
QKPTAPN

SEQ ID NO: 89902 - protein, 7 aa, synthetic construct
FLPNHPA

SEQ ID NO: 89903 - protein, 7 aa, synthetic construct
VYPNFRE

SEQ ID NO: 89904 - protein, 7 aa, synthetic construct
SGAHNHG

SEQ ID NO: 89905 - protein, 7 aa, synthetic construct
PLGGTTA

SEQ ID NO: 89906 - protein, 7 aa, synthetic construct
ERVAHGR

SEQ ID NO: 89907 - protein, 7 aa, synthetic construct
RKLQDNN

SEQ ID NO: 89908 - protein, 7 aa, synthetic construct
FVDFMKG

SEQ ID NO: 89909 - protein, 7 aa, synthetic construct
ERAKALP

SEQ ID NO: 89910 - protein, 7 aa, synthetic construct
GRAVHPP

SEQ ID NO: 89911 - protein, 7 aa, synthetic construct
TPAKADG

SEQ ID NO: 89912 - protein, 7 aa, synthetic construct
SDFERRL

SEQ ID NO: 89913 - protein, 7 aa, synthetic construct
HLQPRMP

SEQ ID NO: 89914 - protein, 7 aa, synthetic construct
FRASEMM

SEQ ID NO: 89915 - protein, 7 aa, synthetic construct
TGNNKFA

SEQ ID NO: 89916 - protein, 7 aa, synthetic construct
KPMPQLS

SEQ ID NO: 89917 - protein, 7 aa, synthetic construct
THSGFEH

SEQ ID NO: 89918 - protein, 7 aa, synthetic construct
APREFHM

SEQ ID NO: 89919 - protein, 7 aa, synthetic construct
VYSSQLK

SEQ ID NO: 89920 - protein, 7 aa, synthetic construct
QHNETTM

SEQ ID NO: 89921 - protein, 7 aa, synthetic construct
SPKQTVP

SEQ ID NO: 89922 - protein, 7 aa, synthetic construct
NNRDVDA

SEQ ID NO: 89923 - protein, 7 aa, synthetic construct
TTELNPR

SEQ ID NO: 89924 - protein, 7 aa, synthetic construct
PLKSVED

SEQ ID NO: 89925 - protein, 7 aa, synthetic construct
YKNDYGI

SEQ ID NO: 89926 - protein, 7 aa, synthetic construct
VKKDMKE

SEQ ID NO: 89927 - protein, 7 aa, synthetic construct
HREHNSA

SEQ ID NO: 89928 - protein, 7 aa, synthetic construct
QRPYLES

SEQ ID NO: 89929 - protein, 7 aa, synthetic construct
GGYKQPY

SEQ ID NO: 89930 - protein, 7 aa, synthetic construct
YPQSQRM

SEQ ID NO: 89931 - protein, 7 aa, synthetic construct
MGSSLVH

SEQ ID NO: 89932 - protein, 7 aa, synthetic construct
IKVPFTN

SEQ ID NO: 89933 - protein, 7 aa, synthetic construct
SAVTNSV

SEQ ID NO: 89934 - protein, 7 aa, synthetic construct
WAGESHI

SEQ ID NO: 89935 - protein, 7 aa, synthetic construct
SPFRQTA

SEQ ID NO: 89936 - protein, 7 aa, synthetic construct
QNLQRGI

SEQ ID NO: 89937 - protein, 7 aa, synthetic construct
DQKHASG

SEQ ID NO: 89938 - protein, 7 aa, synthetic construct
FLGSVVS

SEQ ID NO: 89939 - protein, 7 aa, synthetic construct
ATGSLKL

SEQ ID NO: 89940 - protein, 7 aa, synthetic construct
SEHTHVH

SEQ ID NO: 89941 - protein, 7 aa, synthetic construct
GQRESLH

SEQ ID NO: 89942 - protein, 7 aa, synthetic construct
QQEHKMK

SEQ ID NO: 89943 - protein, 7 aa, synthetic construct
NVVTAAP

SEQ ID NO: 89944 - protein, 7 aa, synthetic construct
VNTALPN

SEQ ID NO: 89945 - protein, 7 aa, synthetic construct
QKTHTVQ

SEQ ID NO: 89946 - protein, 7 aa, synthetic construct
GTREKTG

SEQ ID NO: 89947 - protein, 7 aa, synthetic construct
ERKDGIL

SEQ ID NO: 89948 - protein, 7 aa, synthetic construct
YRQESNH

SEQ ID NO: 89949 - protein, 7 aa, synthetic construct
QSRERTT

SEQ ID NO: 89950 - protein, 7 aa, synthetic construct
KMTAMIN

SEQ ID NO: 89951 - protein, 7 aa, synthetic construct
TQKVVGP

SEQ ID NO: 89952 - protein, 7 aa, synthetic construct
ETKSLKQ

SEQ ID NO: 89953 - protein, 7 aa, synthetic construct
DFSDPKG

SEQ ID NO: 89954 - protein, 7 aa, synthetic construct
GGGIIPH

SEQ ID NO: 89955 - protein, 7 aa, synthetic construct
IILDPAR

SEQ ID NO: 89956 - protein, 7 aa, synthetic construct
LMAVADK

SEQ ID NO: 89957 - protein, 7 aa, synthetic construct
MMQRPVS

SEQ ID NO: 89958 - protein, 7 aa, synthetic construct
HNAPMIM

SEQ ID NO: 89959 - protein, 7 aa, synthetic construct
PHTYNGY

SEQ ID NO: 89960 - protein, 7 aa, synthetic construct
AAFDGSK

SEQ ID NO: 89961 - protein, 7 aa, synthetic construct
VKDHMHM

SEQ ID NO: 89962 - protein, 7 aa, synthetic construct
IFIDGAA

SEQ ID NO: 89963 - protein, 7 aa, synthetic construct
NLHIHGV

SEQ ID NO: 89964 - protein, 7 aa, synthetic construct
WQGISIG

SEQ ID NO: 89965 - protein, 7 aa, synthetic construct
NQPQGAE

SEQ ID NO: 89966 - protein, 7 aa, synthetic construct
YNGHLRE

SEQ ID NO: 89967 - protein, 7 aa, synthetic construct
QHAPNSI

SEQ ID NO: 89968 - protein, 7 aa, synthetic construct
TPNKVGG

SEQ ID NO: 89969 - protein, 7 aa, synthetic construct
HPLHGQA

SEQ ID NO: 89970 - protein, 7 aa, synthetic construct
MTQGQMN

SEQ ID NO: 89971 - protein, 7 aa, synthetic construct
KTVQSQM

SEQ ID NO: 89972 - protein, 7 aa, synthetic construct
RLTSAIA

SEQ ID NO: 89973 - protein, 7 aa, synthetic construct
IQDPYGR

SEQ ID NO: 89974 - protein, 7 aa, synthetic construct
RIDHAEN

SEQ ID NO: 89975 - protein, 7 aa, synthetic construct
PSKMQNH

SEQ ID NO: 89976 - protein, 7 aa, synthetic construct
GVRISMV

SEQ ID NO: 89977 - protein, 7 aa, synthetic construct
GHPGPKF

SEQ ID NO: 89978 - protein, 7 aa, synthetic construct
YESIKTV

SEQ ID NO: 89979 - protein, 7 aa, synthetic construct
LTTHSLA

SEQ ID NO: 89980 - protein, 7 aa, synthetic construct
GMMNPSR

SEQ ID NO: 89981 - protein, 7 aa, synthetic construct
GLHNDTR

SEQ ID NO: 89982 - protein, 7 aa, synthetic construct
SPGTTTL

SEQ ID NO: 89983 - protein, 7 aa, synthetic construct
RPSNTEA

SEQ ID NO: 89984 - protein, 7 aa, synthetic construct
LVSNMKH

SEQ ID NO: 89985 - protein, 7 aa, synthetic construct
KQTDPYI

SEQ ID NO: 89986 - protein, 7 aa, synthetic construct
HEARDVR

SEQ ID NO: 89987 - protein, 7 aa, synthetic construct
QQKHAFN

SEQ ID NO: 89988 - protein, 7 aa, synthetic construct
HDGVRAV

SEQ ID NO: 89989 - protein, 7 aa, synthetic construct
YKQSTFV

SEQ ID NO: 89990 - protein, 7 aa, synthetic construct
GRQNQTA

SEQ ID NO: 89991 - protein, 7 aa, synthetic construct
IQMKTTF

SEQ ID NO: 89992 - protein, 7 aa, synthetic construct
PERQGVW

SEQ ID NO: 89993 - protein, 7 aa, synthetic construct
NGQRKSE

SEQ ID NO: 89994 - protein, 7 aa, synthetic construct
PSQNFRD

SEQ ID NO: 89995 - protein, 7 aa, synthetic construct
VFKIHDV

SEQ ID NO: 89996 - protein, 7 aa, synthetic construct
TYQQMSV

SEQ ID NO: 89997 - protein, 7 aa, synthetic construct
PKILNSN

SEQ ID NO: 89998 - protein, 7 aa, synthetic construct
YPKHPTM

SEQ ID NO: 89999 - protein, 7 aa, synthetic construct
NTISMSI

SEQ ID NO: 90000 - protein, 7 aa, synthetic construct
SNKARDN

SEQ ID NO: 90001 - protein, 7 aa, synthetic construct
SQTRSYD

SEQ ID NO: 90002 - protein, 7 aa, synthetic construct
DDRVMPK

SEQ ID NO: 90003 - protein, 7 aa, synthetic construct
FAMKSEQ

SEQ ID NO: 90004 - protein, 7 aa, synthetic construct
IFAQGAE

SEQ ID NO: 90005 - protein, 7 aa, synthetic construct
LNIHVDR

SEQ ID NO: 90006 - protein, 7 aa, synthetic construct
QGGVGKY

SEQ ID NO: 90007 - protein, 7 aa, synthetic construct
VHARPTH

SEQ ID NO: 90008 - protein, 7 aa, synthetic construct
KYSGHTE

SEQ ID NO: 90009 - protein, 7 aa, synthetic construct
WIDSNAR

SEQ ID NO: 90010 - protein, 7 aa, synthetic construct
WRDTTSP

SEQ ID NO: 90011 - protein, 7 aa, synthetic construct
GTTAIVM

SEQ ID NO: 90012 - protein, 7 aa, synthetic construct
DWPSKPL

SEQ ID NO: 90013 - protein, 7 aa, synthetic construct
SMEFRGM

SEQ ID NO: 90014 - protein, 7 aa, synthetic construct
MMQMAQS

SEQ ID NO: 90015 - protein, 7 aa, synthetic construct
NMLRNNQ

SEQ ID NO: 90016 - protein, 7 aa, synthetic construct
IIPHQMN

SEQ ID NO: 90017 - protein, 7 aa, synthetic construct
NYNHTHV

SEQ ID NO: 90018 - protein, 7 aa, synthetic construct
RHVLQQV

SEQ ID NO: 90019 - protein, 7 aa, synthetic construct
HGAKTEV

SEQ ID NO: 90020 - protein, 7 aa, synthetic construct
HRSGDML

SEQ ID NO: 90021 - protein, 7 aa, synthetic construct
DNVIKEV

SEQ ID NO: 90022 - protein, 7 aa, synthetic construct
ETSRSKL

SEQ ID NO: 90023 - protein, 7 aa, synthetic construct
NQKQKDG

SEQ ID NO: 90024 - protein, 7 aa, synthetic construct
QPRQGGG

SEQ ID NO: 90025 - protein, 7 aa, synthetic construct
DTIKLDI

SEQ ID NO: 90026 - protein, 7 aa, synthetic construct
QHQLPMA

SEQ ID NO: 90027 - protein, 7 aa, synthetic construct
TFNTGGM

SEQ ID NO: 90028 - protein, 7 aa, synthetic construct
KYNNNGN

SEQ ID NO: 90029 - protein, 7 aa, synthetic construct
GRMPGII

SEQ ID NO: 90030 - protein, 7 aa, synthetic construct
IGKIDKM

SEQ ID NO: 90031 - protein, 7 aa, synthetic construct
GTPIYLE

SEQ ID NO: 90032 - protein, 7 aa, synthetic construct
MRSNDTS

SEQ ID NO: 90033 - protein, 7 aa, synthetic construct
QDSQMNK

SEQ ID NO: 90034 - protein, 7 aa, synthetic construct
KENNINE

SEQ ID NO: 90035 - protein, 7 aa, synthetic construct
QETVRMG

SEQ ID NO: 90036 - protein, 7 aa, synthetic construct
PHTVSIP

SEQ ID NO: 90037 - protein, 7 aa, synthetic construct
QNNGSAV

SEQ ID NO: 90038 - protein, 7 aa, synthetic construct
YKGNTAD

SEQ ID NO: 90039 - protein, 7 aa, synthetic construct
AKQVQAQ

SEQ ID NO: 90040 - protein, 7 aa, synthetic construct
AHDQLKV

SEQ ID NO: 90041 - protein, 7 aa, synthetic construct
AENNRVY

SEQ ID NO: 90042 - protein, 7 aa, synthetic construct
KVRMQEM

SEQ ID NO: 90043 - protein, 7 aa, synthetic construct
NGADLRG

SEQ ID NO: 90044 - protein, 7 aa, synthetic construct
FKANDHG

SEQ ID NO: 90045 - protein, 7 aa, synthetic construct
LGPQAGG

SEQ ID NO: 90046 - protein, 7 aa, synthetic construct
KANMGMD

SEQ ID NO: 90047 - protein, 7 aa, synthetic construct
PFTKHEY

SEQ ID NO: 90048 - protein, 7 aa, synthetic construct
WMNVQIE

SEQ ID NO: 90049 - protein, 7 aa, synthetic construct
MENHNRV

SEQ ID NO: 90050 - protein, 7 aa, synthetic construct
SKTVTQL

SEQ ID NO: 90051 - protein, 7 aa, synthetic construct
ESHPATA

SEQ ID NO: 90052 - protein, 7 aa, synthetic construct
KSPSGTA

SEQ ID NO: 90053 - protein, 7 aa, synthetic construct
ADQGGKS

SEQ ID NO: 90054 - protein, 7 aa, synthetic construct
QKSGVAS

SEQ ID NO: 90055 - protein, 7 aa, synthetic construct
LIIKPNA

SEQ ID NO: 90056 - protein, 7 aa, synthetic construct
IAYNMEG

SEQ ID NO: 90057 - protein, 7 aa, synthetic construct
GQTTRNG

SEQ ID NO: 90058 - protein, 7 aa, synthetic construct
IAHQGHQ

SEQ ID NO: 90059 - protein, 7 aa, synthetic construct
IDAKFNQ

SEQ ID NO: 90060 - protein, 7 aa, synthetic construct
IQHNHGM

SEQ ID NO: 90061 - protein, 7 aa, synthetic construct
TKQLQTE

SEQ ID NO: 90062 - protein, 7 aa, synthetic construct
LSHGIYE

SEQ ID NO: 90063 - protein, 7 aa, synthetic construct
YKGMEPI

SEQ ID NO: 90064 - protein, 7 aa, synthetic construct
NLTKTGW

SEQ ID NO: 90065 - protein, 7 aa, synthetic construct
THAVELA

SEQ ID NO: 90066 - protein, 7 aa, synthetic construct
SQMEIRH

SEQ ID NO: 90067 - protein, 7 aa, synthetic construct
TGTQHSS

SEQ ID NO: 90068 - protein, 7 aa, synthetic construct
HGRKNED

SEQ ID NO: 90069 - protein, 7 aa, synthetic construct
DSQHPKA

SEQ ID NO: 90070 - protein, 7 aa, synthetic construct
SKDEHAA

SEQ ID NO: 90071 - protein, 7 aa, synthetic construct
HGMIQQD

SEQ ID NO: 90072 - protein, 7 aa, synthetic construct
STLVRHA

SEQ ID NO: 90073 - protein, 7 aa, synthetic construct
IASNAVK

SEQ ID NO: 90074 - protein, 7 aa, synthetic construct
HSAKEPS

SEQ ID NO: 90075 - protein, 7 aa, synthetic construct
YIRPNKE

SEQ ID NO: 90076 - protein, 7 aa, synthetic construct
YATQDSK

SEQ ID NO: 90077 - protein, 7 aa, synthetic construct
DNKGRET

SEQ ID NO: 90078 - protein, 7 aa, synthetic construct
DIHVHTL

SEQ ID NO: 90079 - protein, 7 aa, synthetic construct
KSNTTVS

SEQ ID NO: 90080 - protein, 7 aa, synthetic construct
PHISNRS

SEQ ID NO: 90081 - protein, 7 aa, synthetic construct
DNEGHRH

SEQ ID NO: 90082 - protein, 7 aa, synthetic construct
RPIDGYD

SEQ ID NO: 90083 - protein, 7 aa, synthetic construct
WSSVVPQ

SEQ ID NO: 90084 - protein, 7 aa, synthetic construct
VNGYMAD

SEQ ID NO: 90085 - protein, 7 aa, synthetic construct
RDPNNMN

SEQ ID NO: 90086 - protein, 7 aa, synthetic construct
GEHKYDR

SEQ ID NO: 90087 - protein, 7 aa, synthetic construct
FGRMIEK

SEQ ID NO: 90088 - protein, 7 aa, synthetic construct
SGKSTTP

SEQ ID NO: 90089 - protein, 7 aa, synthetic construct
QQEHNPR

SEQ ID NO: 90090 - protein, 7 aa, synthetic construct
GRLEPYQ

SEQ ID NO: 90091 - protein, 7 aa, synthetic construct
FKEGYKM

SEQ ID NO: 90092 - protein, 7 aa, synthetic construct
MLPPTKF

SEQ ID NO: 90093 - protein, 7 aa, synthetic construct
KNGHLVI

SEQ ID NO: 90094 - protein, 7 aa, synthetic construct
QGKPLLG

SEQ ID NO: 90095 - protein, 7 aa, synthetic construct
LTHINNQ

SEQ ID NO: 90096 - protein, 7 aa, synthetic construct
RGIPHQS

SEQ ID NO: 90097 - protein, 7 aa, synthetic construct
GNRAPAN

SEQ ID NO: 90098 - protein, 7 aa, synthetic construct
HSAEERI

SEQ ID NO: 90099 - protein, 7 aa, synthetic construct
ALKERDY

SEQ ID NO: 90100 - protein, 7 aa, synthetic construct
YNGGDPK

SEQ ID NO: 90101 - protein, 7 aa, synthetic construct
RQNDNAT

SEQ ID NO: 90102 - protein, 7 aa, synthetic construct
DTLKSVS

SEQ ID NO: 90103 - protein, 7 aa, synthetic construct
FYRQPEG

SEQ ID NO: 90104 - protein, 7 aa, synthetic construct
ARRGIDP

SEQ ID NO: 90105 - protein, 7 aa, synthetic construct
LREPREA

SEQ ID NO: 90106 - protein, 7 aa, synthetic construct
DWNKHDR

SEQ ID NO: 90107 - protein, 7 aa, synthetic construct
NRQQTIM

SEQ ID NO: 90108 - protein, 7 aa, synthetic construct
FDIVMKN

SEQ ID NO: 90109 - protein, 7 aa, synthetic construct
AQHSGST

SEQ ID NO: 90110 - protein, 7 aa, synthetic construct
AKTSSDL

SEQ ID NO: 90111 - protein, 7 aa, synthetic construct
QKTSNTA

SEQ ID NO: 90112 - protein, 7 aa, synthetic construct
IMMNGSS

SEQ ID NO: 90113 - protein, 7 aa, synthetic construct
NHEWMKA

SEQ ID NO: 90114 - protein, 7 aa, synthetic construct
NVATSAW

SEQ ID NO: 90115 - protein, 7 aa, synthetic construct
EPKMDGG

SEQ ID NO: 90116 - protein, 7 aa, synthetic construct
MRKQDDT

SEQ ID NO: 90117 - protein, 7 aa, synthetic construct
NFHGEGS

SEQ ID NO: 90118 - protein, 7 aa, synthetic construct
SIHSALY

SEQ ID NO: 90119 - protein, 7 aa, synthetic construct
DAPNIRT

SEQ ID NO: 90120 - protein, 7 aa, synthetic construct
HVLGSGP

SEQ ID NO: 90121 - protein, 7 aa, synthetic construct
IDPRSTR

SEQ ID NO: 90122 - protein, 7 aa, synthetic construct
GRSGAAF

SEQ ID NO: 90123 - protein, 7 aa, synthetic construct
DGDKFFG

SEQ ID NO: 90124 - protein, 7 aa, synthetic construct
TAMHRTL

SEQ ID NO: 90125 - protein, 7 aa, synthetic construct
LKWKDMV

SEQ ID NO: 90126 - protein, 7 aa, synthetic construct
TKEAQRV

SEQ ID NO: 90127 - protein, 7 aa, synthetic construct
HGIEDRR

SEQ ID NO: 90128 - protein, 7 aa, synthetic construct
WEEYQKK

SEQ ID NO: 90129 - protein, 7 aa, synthetic construct
LRNEMET

SEQ ID NO: 90130 - protein, 7 aa, synthetic construct
LSRTSPM

SEQ ID NO: 90131 - protein, 7 aa, synthetic construct
MSTQVNS

SEQ ID NO: 90132 - protein, 7 aa, synthetic construct
HADTRLD

SEQ ID NO: 90133 - protein, 7 aa, synthetic construct
SNFMDER

SEQ ID NO: 90134 - protein, 7 aa, synthetic construct
HDLAKNF

SEQ ID NO: 90135 - protein, 7 aa, synthetic construct
GSNTNNY

SEQ ID NO: 90136 - protein, 7 aa, synthetic construct
HNQNYVA

SEQ ID NO: 90137 - protein, 7 aa, synthetic construct
EMGKKES

SEQ ID NO: 90138 - protein, 7 aa, synthetic construct
SKSTHNM

SEQ ID NO: 90139 - protein, 7 aa, synthetic construct
WPLKTEV

SEQ ID NO: 90140 - protein, 7 aa, synthetic construct
AMPEHGK

SEQ ID NO: 90141 - protein, 7 aa, synthetic construct
VKTMVPL

SEQ ID NO: 90142 - protein, 7 aa, synthetic construct
HAALARN

SEQ ID NO: 90143 - protein, 7 aa, synthetic construct
NYGSHNH

SEQ ID NO: 90144 - protein, 7 aa, synthetic construct
KVDTSHH

SEQ ID NO: 90145 - protein, 7 aa, synthetic construct
LVKAEYH

SEQ ID NO: 90146 - protein, 7 aa, synthetic construct
SSFMSGP

SEQ ID NO: 90147 - protein, 7 aa, synthetic construct
RESFQQQ

SEQ ID NO: 90148 - protein, 7 aa, synthetic construct
FAQNRDS

SEQ ID NO: 90149 - protein, 7 aa, synthetic construct
HKVGGLI

SEQ ID NO: 90150 - protein, 7 aa, synthetic construct
RTTEAKW

SEQ ID NO: 90151 - protein, 7 aa, synthetic construct
IPHWQNS

SEQ ID NO: 90152 - protein, 7 aa, synthetic construct
YAPTHQP

SEQ ID NO: 90153 - protein, 7 aa, synthetic construct
GGKEVLH

SEQ ID NO: 90154 - protein, 7 aa, synthetic construct
DWVPGKS

SEQ ID NO: 90155 - protein, 7 aa, synthetic construct
RYPQYKE

SEQ ID NO: 90156 - protein, 7 aa, synthetic construct
YHSFNKV

SEQ ID NO: 90157 - protein, 7 aa, synthetic construct
VLHIDHG

SEQ ID NO: 90158 - protein, 7 aa, synthetic construct
HISVART

SEQ ID NO: 90159 - protein, 7 aa, synthetic construct
MSKTGSV

SEQ ID NO: 90160 - protein, 7 aa, synthetic construct
KERAPDQ

SEQ ID NO: 90161 - protein, 7 aa, synthetic construct
GHGKEQI

SEQ ID NO: 90162 - protein, 7 aa, synthetic construct
RHERAGM

SEQ ID NO: 90163 - protein, 7 aa, synthetic construct
TTANVTL

SEQ ID NO: 90164 - protein, 7 aa, synthetic construct
IPQQAKE

SEQ ID NO: 90165 - protein, 7 aa, synthetic construct
FNGHPGE

SEQ ID NO: 90166 - protein, 7 aa, synthetic construct
LHHELPA

SEQ ID NO: 90167 - protein, 7 aa, synthetic construct
QGHFATM

SEQ ID NO: 90168 - protein, 7 aa, synthetic construct
IKQKYEH

SEQ ID NO: 90169 - protein, 7 aa, synthetic construct
NVRPEQY

SEQ ID NO: 90170 - protein, 7 aa, synthetic construct
ANYLPVS

SEQ ID NO: 90171 - protein, 7 aa, synthetic construct
VTGMVPT

SEQ ID NO: 90172 - protein, 7 aa, synthetic construct
TVTWSED

SEQ ID NO: 90173 - protein, 7 aa, synthetic construct
WRQNGTT

SEQ ID NO: 90174 - protein, 7 aa, synthetic construct
MNEYKDR

SEQ ID NO: 90175 - protein, 7 aa, synthetic construct
KQQSAPM

SEQ ID NO: 90176 - protein, 7 aa, synthetic construct
HREQEMI

SEQ ID NO: 90177 - protein, 7 aa, synthetic construct
HTGNLAH

SEQ ID NO: 90178 - protein, 7 aa, synthetic construct
VVPIGDG

SEQ ID NO: 90179 - protein, 7 aa, synthetic construct
SSNVNIP

SEQ ID NO: 90180 - protein, 7 aa, synthetic construct
WVHLEEH

SEQ ID NO: 90181 - protein, 7 aa, synthetic construct
GIAKPQQ

SEQ ID NO: 90182 - protein, 7 aa, synthetic construct
MKEYGQI

SEQ ID NO: 90183 - protein, 7 aa, synthetic construct
KHSAMNE

SEQ ID NO: 90184 - protein, 7 aa, synthetic construct
YRSNTYP

SEQ ID NO: 90185 - protein, 7 aa, synthetic construct
PTSSVAP

SEQ ID NO: 90186 - protein, 7 aa, synthetic construct
HAKHIGM

SEQ ID NO: 90187 - protein, 7 aa, synthetic construct
TGSHWTE

SEQ ID NO: 90188 - protein, 7 aa, synthetic construct
AANYAQE

SEQ ID NO: 90189 - protein, 7 aa, synthetic construct
NFEVTKV

SEQ ID NO: 90190 - protein, 7 aa, synthetic construct
IEPFVNG

SEQ ID NO: 90191 - protein, 7 aa, synthetic construct
FLSTALD

SEQ ID NO: 90192 - protein, 7 aa, synthetic construct
HGSSRGN

SEQ ID NO: 90193 - protein, 7 aa, synthetic construct
VTTTGKV

SEQ ID NO: 90194 - protein, 7 aa, synthetic construct
SRANFQE

SEQ ID NO: 90195 - protein, 7 aa, synthetic construct
YSPGNQD

SEQ ID NO: 90196 - protein, 7 aa, synthetic construct
VLPAITD

SEQ ID NO: 90197 - protein, 7 aa, synthetic construct
ANTGHRT

SEQ ID NO: 90198 - protein, 7 aa, synthetic construct
LYDIHDK

SEQ ID NO: 90199 - protein, 7 aa, synthetic construct
ARKEIEF

SEQ ID NO: 90200 - protein, 7 aa, synthetic construct
HSDKMGV

SEQ ID NO: 90201 - protein, 7 aa, synthetic construct
NTTHSNH

SEQ ID NO: 90202 - protein, 7 aa, synthetic construct
GDKVVKW

SEQ ID NO: 90203 - protein, 7 aa, synthetic construct
RMQGAAP

SEQ ID NO: 90204 - protein, 7 aa, synthetic construct
GSSATKG

SEQ ID NO: 90205 - protein, 7 aa, synthetic construct
LHHNVTE

SEQ ID NO: 90206 - protein, 7 aa, synthetic construct
EGRDKNV

SEQ ID NO: 90207 - protein, 7 aa, synthetic construct
FRTITEE

SEQ ID NO: 90208 - protein, 7 aa, synthetic construct
NINRYQA

SEQ ID NO: 90209 - protein, 7 aa, synthetic construct
EQRHEKQ

SEQ ID NO: 90210 - protein, 7 aa, synthetic construct
YKPEHYT

SEQ ID NO: 90211 - protein, 7 aa, synthetic construct
NLIAHLG

SEQ ID NO: 90212 - protein, 7 aa, synthetic construct
DRNEANN

SEQ ID NO: 90213 - protein, 7 aa, synthetic construct
INPAINY

SEQ ID NO: 90214 - protein, 7 aa, synthetic construct
RTVAHAE

SEQ ID NO: 90215 - protein, 7 aa, synthetic construct
GRMESFK

SEQ ID NO: 90216 - protein, 7 aa, synthetic construct
QAKLPEP

SEQ ID NO: 90217 - protein, 7 aa, synthetic construct
EQNVTLR

SEQ ID NO: 90218 - protein, 7 aa, synthetic construct
NKNSAYG

SEQ ID NO: 90219 - protein, 7 aa, synthetic construct
HNVSNGQ

SEQ ID NO: 90220 - protein, 7 aa, synthetic construct
PGHQKMY

SEQ ID NO: 90221 - protein, 7 aa, synthetic construct
MANPHFG

SEQ ID NO: 90222 - protein, 7 aa, synthetic construct
HQTQLQM

SEQ ID NO: 90223 - protein, 7 aa, synthetic construct
YKDIHTI

SEQ ID NO: 90224 - protein, 7 aa, synthetic construct
AVGKIIL

SEQ ID NO: 90225 - protein, 7 aa, synthetic construct
YYSPEQV

SEQ ID NO: 90226 - protein, 7 aa, synthetic construct
DSIKHEP

SEQ ID NO: 90227 - protein, 7 aa, synthetic construct
MDPSMSG

SEQ ID NO: 90228 - protein, 7 aa, synthetic construct
TAVVPRH

SEQ ID NO: 90229 - protein, 7 aa, synthetic construct
PLAVHDI

SEQ ID NO: 90230 - protein, 7 aa, synthetic construct
PIPVPMG

SEQ ID NO: 90231 - protein, 7 aa, synthetic construct
NPEQFER

SEQ ID NO: 90232 - protein, 7 aa, synthetic construct
WKMPSLD

SEQ ID NO: 90233 - protein, 7 aa, synthetic construct
SKDASIQ

SEQ ID NO: 90234 - protein, 7 aa, synthetic construct
SHIYKVG

SEQ ID NO: 90235 - protein, 7 aa, synthetic construct
WHAAADT

SEQ ID NO: 90236 - protein, 7 aa, synthetic construct
IHNHFPE

SEQ ID NO: 90237 - protein, 7 aa, synthetic construct
IDRANTD

SEQ ID NO: 90238 - protein, 7 aa, synthetic construct
VLGMMTH

SEQ ID NO: 90239 - protein, 7 aa, synthetic construct
RVDMKAA

SEQ ID NO: 90240 - protein, 7 aa, synthetic construct
GIGTDTR

SEQ ID NO: 90241 - protein, 7 aa, synthetic construct
PDHFADR

SEQ ID NO: 90242 - protein, 7 aa, synthetic construct
TKQHTTE

SEQ ID NO: 90243 - protein, 7 aa, synthetic construct
TDMGTSN

SEQ ID NO: 90244 - protein, 7 aa, synthetic construct
HNEIQSY

SEQ ID NO: 90245 - protein, 7 aa, synthetic construct
HEPHGNA

SEQ ID NO: 90246 - protein, 7 aa, synthetic construct
QITGWEK

SEQ ID NO: 90247 - protein, 7 aa, synthetic construct
NHKPHNQ

SEQ ID NO: 90248 - protein, 7 aa, synthetic construct
HQDNNTH

SEQ ID NO: 90249 - protein, 7 aa, synthetic construct
TDRKMLT

SEQ ID NO: 90250 - protein, 7 aa, synthetic construct
NLLPARD

SEQ ID NO: 90251 - protein, 7 aa, synthetic construct
SQAVSTW

SEQ ID NO: 90252 - protein, 7 aa, synthetic construct
RDRELIS

SEQ ID NO: 90253 - protein, 7 aa, synthetic construct
GNRFGDI

SEQ ID NO: 90254 - protein, 7 aa, synthetic construct
IAQYSVN

SEQ ID NO: 90255 - protein, 7 aa, synthetic construct
YRTENYP

SEQ ID NO: 90256 - protein, 7 aa, synthetic construct
TYMIRNE

SEQ ID NO: 90257 - protein, 7 aa, synthetic construct
FTGNQAS

SEQ ID NO: 90258 - protein, 7 aa, synthetic construct
GHVKWDD

SEQ ID NO: 90259 - protein, 7 aa, synthetic construct
GAHNREA

SEQ ID NO: 90260 - protein, 7 aa, synthetic construct
MNDHWLG

SEQ ID NO: 90261 - protein, 7 aa, synthetic construct
RPVESML

SEQ ID NO: 90262 - protein, 7 aa, synthetic construct
EFERLTK

SEQ ID NO: 90263 - protein, 7 aa, synthetic construct
VYKLETR

SEQ ID NO: 90264 - protein, 7 aa, synthetic construct
IHTTGKY

SEQ ID NO: 90265 - protein, 7 aa, synthetic construct
IGNVPKF

SEQ ID NO: 90266 - protein, 7 aa, synthetic construct
DVRQYNV

SEQ ID NO: 90267 - protein, 7 aa, synthetic construct
TQGSSYS

SEQ ID NO: 90268 - protein, 7 aa, synthetic construct
NSLHEKN

SEQ ID NO: 90269 - protein, 7 aa, synthetic construct
RNGNHVL

SEQ ID NO: 90270 - protein, 7 aa, synthetic construct
QKQMSGT

SEQ ID NO: 90271 - protein, 7 aa, synthetic construct
VAVAGSH

SEQ ID NO: 90272 - protein, 7 aa, synthetic construct
GPKMNHQ

SEQ ID NO: 90273 - protein, 7 aa, synthetic construct
HQQIFHA

SEQ ID NO: 90274 - protein, 7 aa, synthetic construct
EGIPKLN

SEQ ID NO: 90275 - protein, 7 aa, synthetic construct
STNNYTH

SEQ ID NO: 90276 - protein, 7 aa, synthetic construct
MEMDARP

SEQ ID NO: 90277 - protein, 7 aa, synthetic construct
KWKPEKD

SEQ ID NO: 90278 - protein, 7 aa, synthetic construct
LRPQHVH

SEQ ID NO: 90279 - protein, 7 aa, synthetic construct
EKGEARN

SEQ ID NO: 90280 - protein, 7 aa, synthetic construct
IDSSAIK

SEQ ID NO: 90281 - protein, 7 aa, synthetic construct
DPKIRSS

SEQ ID NO: 90282 - protein, 7 aa, synthetic construct
VLDHSIL

SEQ ID NO: 90283 - protein, 7 aa, synthetic construct
GSGTNMG

SEQ ID NO: 90284 - protein, 7 aa, synthetic construct
IPASKIY

SEQ ID NO: 90285 - protein, 7 aa, synthetic construct
KKNEING

SEQ ID NO: 90286 - protein, 7 aa, synthetic construct
EGKLVHL

SEQ ID NO: 90287 - protein, 7 aa, synthetic construct
DKFGFDK

SEQ ID NO: 90288 - protein, 7 aa, synthetic construct
TDPTKIP

SEQ ID NO: 90289 - protein, 7 aa, synthetic construct
MINSHRQ

SEQ ID NO: 90290 - protein, 7 aa, synthetic construct
LSQTKWN

SEQ ID NO: 90291 - protein, 7 aa, synthetic construct
RGYPVVD

SEQ ID NO: 90292 - protein, 7 aa, synthetic construct
WAGHMTS

SEQ ID NO: 90293 - protein, 7 aa, synthetic construct
MSQGNGP

SEQ ID NO: 90294 - protein, 7 aa, synthetic construct
SSERIMV

SEQ ID NO: 90295 - protein, 7 aa, synthetic construct
PAMGYSG

SEQ ID NO: 90296 - protein, 7 aa, synthetic construct
PRGDTAW

SEQ ID NO: 90297 - protein, 7 aa, synthetic construct
EPARKTA

SEQ ID NO: 90298 - protein, 7 aa, synthetic construct
TPMYQQS

SEQ ID NO: 90299 - protein, 7 aa, synthetic construct
KYLAGHD

SEQ ID NO: 90300 - protein, 7 aa, synthetic construct
CLSSHCE

SEQ ID NO: 90301 - protein, 7 aa, synthetic construct
RDSSARI

SEQ ID NO: 90302 - protein, 7 aa, synthetic construct
VHRNDSP

SEQ ID NO: 90303 - protein, 7 aa, synthetic construct
PIGRPAF

SEQ ID NO: 90304 - protein, 7 aa, synthetic construct
QQMKVEF

SEQ ID NO: 90305 - protein, 7 aa, synthetic construct
TRDKGFF

SEQ ID NO: 90306 - protein, 7 aa, synthetic construct
GNSKVQV

SEQ ID NO: 90307 - protein, 7 aa, synthetic construct
RFGPIAG

SEQ ID NO: 90308 - protein, 7 aa, synthetic construct
QEGHTLI

SEQ ID NO: 90309 - protein, 7 aa, synthetic construct
WTEQLPS

SEQ ID NO: 90310 - protein, 7 aa, synthetic construct
FEKTLQG

SEQ ID NO: 90311 - protein, 7 aa, synthetic construct
YIHSKYA

SEQ ID NO: 90312 - protein, 7 aa, synthetic construct
PEDSVKR

SEQ ID NO: 90313 - protein, 7 aa, synthetic construct
GVHTNLY

SEQ ID NO: 90314 - protein, 7 aa, synthetic construct
KNSKQGE

SEQ ID NO: 90315 - protein, 7 aa, synthetic construct
YGRVRDN

SEQ ID NO: 90316 - protein, 7 aa, synthetic construct
MQYPHSL

SEQ ID NO: 90317 - protein, 7 aa, synthetic construct
TTQHMAM

SEQ ID NO: 90318 - protein, 7 aa, synthetic construct
PLFTERN

SEQ ID NO: 90319 - protein, 7 aa, synthetic construct
SMYTQPP

SEQ ID NO: 90320 - protein, 7 aa, synthetic construct
MVGHKPH

SEQ ID NO: 90321 - protein, 7 aa, synthetic construct
FVYKPTA

SEQ ID NO: 90322 - protein, 7 aa, synthetic construct
RMHDNKI

SEQ ID NO: 90323 - protein, 7 aa, synthetic construct
KIDINLG

SEQ ID NO: 90324 - protein, 7 aa, synthetic construct
YDRLIHP

SEQ ID NO: 90325 - protein, 7 aa, synthetic construct
MNGAQSF

SEQ ID NO: 90326 - protein, 7 aa, synthetic construct
SSMNQNS

SEQ ID NO: 90327 - protein, 7 aa, synthetic construct
YTAQMTV

SEQ ID NO: 90328 - protein, 7 aa, synthetic construct
HKTDDRV

SEQ ID NO: 90329 - protein, 7 aa, synthetic construct
QQRVDFA

SEQ ID NO: 90330 - protein, 7 aa, synthetic construct
RMRSEQA

SEQ ID NO: 90331 - protein, 7 aa, synthetic construct
MQIQHPA

SEQ ID NO: 90332 - protein, 7 aa, synthetic construct
IRPDVIL

SEQ ID NO: 90333 - protein, 7 aa, synthetic construct
LHQSVGA

SEQ ID NO: 90334 - protein, 7 aa, synthetic construct
WHTNSPD

SEQ ID NO: 90335 - protein, 7 aa, synthetic construct
FSPPDHE

SEQ ID NO: 90336 - protein, 7 aa, synthetic construct
ARDAPKS

SEQ ID NO: 90337 - protein, 7 aa, synthetic construct
QVRRDEC

SEQ ID NO: 90338 - protein, 7 aa, synthetic construct
LNFSRQP

SEQ ID NO: 90339 - protein, 7 aa, synthetic construct
EQPFAVK

SEQ ID NO: 90340 - protein, 7 aa, synthetic construct
LSEMQKP

SEQ ID NO: 90341 - protein, 7 aa, synthetic construct
KQPSDMR

SEQ ID NO: 90342 - protein, 7 aa, synthetic construct
FNGPVPS

SEQ ID NO: 90343 - protein, 7 aa, synthetic construct
RVKEMQD

SEQ ID NO: 90344 - protein, 7 aa, synthetic construct
KISIMPE

SEQ ID NO: 90345 - protein, 7 aa, synthetic construct
LDRQSTM

SEQ ID NO: 90346 - protein, 7 aa, synthetic construct
QPRELLS

SEQ ID NO: 90347 - protein, 7 aa, synthetic construct
SNMGFMG

SEQ ID NO: 90348 - protein, 7 aa, synthetic construct
TATSLQW

SEQ ID NO: 90349 - protein, 7 aa, synthetic construct
VNNKTNA

SEQ ID NO: 90350 - protein, 7 aa, synthetic construct
RMSNHDW

SEQ ID NO: 90351 - protein, 7 aa, synthetic construct
GKQTPKD

SEQ ID NO: 90352 - protein, 7 aa, synthetic construct
MRSDHHH

SEQ ID NO: 90353 - protein, 7 aa, synthetic construct
VHQAEQS

SEQ ID NO: 90354 - protein, 7 aa, synthetic construct
RQPEGQW

SEQ ID NO: 90355 - protein, 7 aa, synthetic construct
HENKQSF

SEQ ID NO: 90356 - protein, 7 aa, synthetic construct
KEFLDKP

SEQ ID NO: 90357 - protein, 7 aa, synthetic construct
AYHHEEV

SEQ ID NO: 90358 - protein, 7 aa, synthetic construct
KVYKDFD

SEQ ID NO: 90359 - protein, 7 aa, synthetic construct
KSHVQER

SEQ ID NO: 90360 - protein, 7 aa, synthetic construct
YNRYPEQ

SEQ ID NO: 90361 - protein, 7 aa, synthetic construct
DEKFGNS

SEQ ID NO: 90362 - protein, 7 aa, synthetic construct
TPDKASN

SEQ ID NO: 90363 - protein, 7 aa, synthetic construct
DGQTKPN

SEQ ID NO: 90364 - protein, 7 aa, synthetic construct
TTHSVAM

SEQ ID NO: 90365 - protein, 7 aa, synthetic construct
DPHRAHL

SEQ ID NO: 90366 - protein, 7 aa, synthetic construct
AFPNTEH

SEQ ID NO: 90367 - protein, 7 aa, synthetic construct
HDGKTNS

SEQ ID NO: 90368 - protein, 7 aa, synthetic construct
SQKIIGS

SEQ ID NO: 90369 - protein, 7 aa, synthetic construct
NDMLKQR

SEQ ID NO: 90370 - protein, 7 aa, synthetic construct
KKVGDTQ

SEQ ID NO: 90371 - protein, 7 aa, synthetic construct
TRTELVM

SEQ ID NO: 90372 - protein, 7 aa, synthetic construct
SQKPELF

SEQ ID NO: 90373 - protein, 7 aa, synthetic construct
NQHESHP

SEQ ID NO: 90374 - protein, 7 aa, synthetic construct
LWGAGEP

SEQ ID NO: 90375 - protein, 7 aa, synthetic construct
KPDAAGR

SEQ ID NO: 90376 - protein, 7 aa, synthetic construct
MHKGIGF

SEQ ID NO: 90377 - protein, 7 aa, synthetic construct
FTGQKSP

SEQ ID NO: 90378 - protein, 7 aa, synthetic construct
RDPIQQY

SEQ ID NO: 90379 - protein, 7 aa, synthetic construct
PHQVSKI

SEQ ID NO: 90380 - protein, 7 aa, synthetic construct
GPKPPPW

SEQ ID NO: 90381 - protein, 7 aa, synthetic construct
TTRAQQP

SEQ ID NO: 90382 - protein, 7 aa, synthetic construct
QRTIAAE

SEQ ID NO: 90383 - protein, 7 aa, synthetic construct
IQDQRPS

SEQ ID NO: 90384 - protein, 7 aa, synthetic construct
SGHEGTG

SEQ ID NO: 90385 - protein, 7 aa, synthetic construct
NQSKQPP

SEQ ID NO: 90386 - protein, 7 aa, synthetic construct
HITSIMG

SEQ ID NO: 90387 - protein, 7 aa, synthetic construct
GPQRIAY

SEQ ID NO: 90388 - protein, 7 aa, synthetic construct
KYETALN

SEQ ID NO: 90389 - protein, 7 aa, synthetic construct
NEGAAMS

SEQ ID NO: 90390 - protein, 7 aa, synthetic construct
LKPMFGE

SEQ ID NO: 90391 - protein, 7 aa, synthetic construct
AVKELPS

SEQ ID NO: 90392 - protein, 7 aa, synthetic construct
MSHMLGN

SEQ ID NO: 90393 - protein, 7 aa, synthetic construct
NIDFHNG

SEQ ID NO: 90394 - protein, 7 aa, synthetic construct
FVNTPNA

SEQ ID NO: 90395 - protein, 7 aa, synthetic construct
KVHIESH

SEQ ID NO: 90396 - protein, 7 aa, synthetic construct
AFYQKNP

SEQ ID NO: 90397 - protein, 7 aa, synthetic construct
PSDRIGS

SEQ ID NO: 90398 - protein, 7 aa, synthetic construct
AGFMQHD

SEQ ID NO: 90399 - protein, 7 aa, synthetic construct
AERKSVM

SEQ ID NO: 90400 - protein, 7 aa, synthetic construct
WHITEQG

SEQ ID NO: 90401 - protein, 7 aa, synthetic construct
AEGGNTY

SEQ ID NO: 90402 - protein, 7 aa, synthetic construct
TKEITTN

SEQ ID NO: 90403 - protein, 7 aa, synthetic construct
QQQERFK

SEQ ID NO: 90404 - protein, 7 aa, synthetic construct
LPHLDRH

SEQ ID NO: 90405 - protein, 7 aa, synthetic construct
THAPHLR

SEQ ID NO: 90406 - protein, 7 aa, synthetic construct
SIKDPAC

SEQ ID NO: 90407 - protein, 7 aa, synthetic construct
PDRPNLT

SEQ ID NO: 90408 - protein, 7 aa, synthetic construct
YDTKYVS

SEQ ID NO: 90409 - protein, 7 aa, synthetic construct
KDHSYQH

SEQ ID NO: 90410 - protein, 7 aa, synthetic construct
MVVANTI

SEQ ID NO: 90411 - protein, 7 aa, synthetic construct
NRVQVDH

SEQ ID NO: 90412 - protein, 7 aa, synthetic construct
RHPETRM

SEQ ID NO: 90413 - protein, 7 aa, synthetic construct
LGNGIYD

SEQ ID NO: 90414 - protein, 7 aa, synthetic construct
LAAKTEH

SEQ ID NO: 90415 - protein, 7 aa, synthetic construct
PHARDTE

SEQ ID NO: 90416 - protein, 7 aa, synthetic construct
LVSQGLN

SEQ ID NO: 90417 - protein, 7 aa, synthetic construct
ERFGSRD

SEQ ID NO: 90418 - protein, 7 aa, synthetic construct
HQWKHQD

SEQ ID NO: 90419 - protein, 7 aa, synthetic construct
YHGVKTE

SEQ ID NO: 90420 - protein, 7 aa, synthetic construct
HTQTDNT

SEQ ID NO: 90421 - protein, 7 aa, synthetic construct
LRSMESF

SEQ ID NO: 90422 - protein, 7 aa, synthetic construct
RHNTLPL

SEQ ID NO: 90423 - protein, 7 aa, synthetic construct
NHGKHYI

SEQ ID NO: 90424 - protein, 7 aa, synthetic construct
ARKDIYA

SEQ ID NO: 90425 - protein, 7 aa, synthetic construct
ATIKNFG

SEQ ID NO: 90426 - protein, 7 aa, synthetic construct
GPKLDHK

SEQ ID NO: 90427 - protein, 7 aa, synthetic construct
DMIKTTA

SEQ ID NO: 90428 - protein, 7 aa, synthetic construct
NVTATYE

SEQ ID NO: 90429 - protein, 7 aa, synthetic construct
YMQSNPM

SEQ ID NO: 90430 - protein, 7 aa, synthetic construct
HSLDFGP

SEQ ID NO: 90431 - protein, 7 aa, synthetic construct
FINHPRQ

SEQ ID NO: 90432 - protein, 7 aa, synthetic construct
EKADNSR

SEQ ID NO: 90433 - protein, 7 aa, synthetic construct
HVHSNIV

SEQ ID NO: 90434 - protein, 7 aa, synthetic construct
MEAYPPK

SEQ ID NO: 90435 - protein, 7 aa, synthetic construct
QHLNKTL

SEQ ID NO: 90436 - protein, 7 aa, synthetic construct
EQHKKIP

SEQ ID NO: 90437 - protein, 7 aa, synthetic construct
YPVERPR

SEQ ID NO: 90438 - protein, 7 aa, synthetic construct
RHFGIEG

SEQ ID NO: 90439 - protein, 7 aa, synthetic construct
YKAPVAG

SEQ ID NO: 90440 - protein, 7 aa, synthetic construct
NTNYAQL

SEQ ID NO: 90441 - protein, 7 aa, synthetic construct
LMQQFQG

SEQ ID NO: 90442 - protein, 7 aa, synthetic construct
GLDVNYR

SEQ ID NO: 90443 - protein, 7 aa, synthetic construct
YMSPEGS

SEQ ID NO: 90444 - protein, 7 aa, synthetic construct
ALRESNL

SEQ ID NO: 90445 - protein, 7 aa, synthetic construct
ANVTFRG

SEQ ID NO: 90446 - protein, 7 aa, synthetic construct
NIEQAKQ

SEQ ID NO: 90447 - protein, 7 aa, synthetic construct
EFTKAHL

SEQ ID NO: 90448 - protein, 7 aa, synthetic construct
DVTTKMC

SEQ ID NO: 90449 - protein, 7 aa, synthetic construct
GGPMYTA

SEQ ID NO: 90450 - protein, 7 aa, synthetic construct
LEGVSKF

SEQ ID NO: 90451 - protein, 7 aa, synthetic construct
MKHVGGY

SEQ ID NO: 90452 - protein, 7 aa, synthetic construct
QKIIENF

SEQ ID NO: 90453 - protein, 7 aa, synthetic construct
RRPDDTL

SEQ ID NO: 90454 - protein, 7 aa, synthetic construct
KNEFHQD

SEQ ID NO: 90455 - protein, 7 aa, synthetic construct
WAGAHKM

SEQ ID NO: 90456 - protein, 7 aa, synthetic construct
HFNDGQM

SEQ ID NO: 90457 - protein, 7 aa, synthetic construct
QSHYYTE

SEQ ID NO: 90458 - protein, 7 aa, synthetic construct
HDTWKTA

SEQ ID NO: 90459 - protein, 7 aa, synthetic construct
VMDAVKG

SEQ ID NO: 90460 - protein, 7 aa, synthetic construct
IKDFSYK

SEQ ID NO: 90461 - protein, 7 aa, synthetic construct
LGIHYAP

SEQ ID NO: 90462 - protein, 7 aa, synthetic construct
VIPHIAN

SEQ ID NO: 90463 - protein, 7 aa, synthetic construct
TVKQLNF

SEQ ID NO: 90464 - protein, 7 aa, synthetic construct
MVFANKT

SEQ ID NO: 90465 - protein, 7 aa, synthetic construct
KTNPSSV

SEQ ID NO: 90466 - protein, 7 aa, synthetic construct
AVTKYVD

SEQ ID NO: 90467 - protein, 7 aa, synthetic construct
EKLHGPE

SEQ ID NO: 90468 - protein, 7 aa, synthetic construct
YGIYNKG

SEQ ID NO: 90469 - protein, 7 aa, synthetic construct
ANTNTHA

SEQ ID NO: 90470 - protein, 7 aa, synthetic construct
NDQNNKT

SEQ ID NO: 90471 - protein, 7 aa, synthetic construct
PINVQIG

SEQ ID NO: 90472 - protein, 7 aa, synthetic construct
TKTQFQT

SEQ ID NO: 90473 - protein, 7 aa, synthetic construct
RRADSKE

SEQ ID NO: 90474 - protein, 7 aa, synthetic construct
GMHVPHK

SEQ ID NO: 90475 - protein, 7 aa, synthetic construct
PDHHGLH

SEQ ID NO: 90476 - protein, 7 aa, synthetic construct
KYSGEPK

SEQ ID NO: 90477 - protein, 7 aa, synthetic construct
RGERNQY

SEQ ID NO: 90478 - protein, 7 aa, synthetic construct
ADHVPMR

SEQ ID NO: 90479 - protein, 7 aa, synthetic construct
NYASVAH

SEQ ID NO: 90480 - protein, 7 aa, synthetic construct
TMGEPMK

SEQ ID NO: 90481 - protein, 7 aa, synthetic construct
TKVEGMD

SEQ ID NO: 90482 - protein, 7 aa, synthetic construct
FFEINTP

SEQ ID NO: 90483 - protein, 7 aa, synthetic construct
VTGHKSG

SEQ ID NO: 90484 - protein, 7 aa, synthetic construct
TAHKHNQ

SEQ ID NO: 90485 - protein, 7 aa, synthetic construct
SIHTSYV

SEQ ID NO: 90486 - protein, 7 aa, synthetic construct
YQKSSPV

SEQ ID NO: 90487 - protein, 7 aa, synthetic construct
GKIQVVD

SEQ ID NO: 90488 - protein, 7 aa, synthetic construct
DASHMKV

SEQ ID NO: 90489 - protein, 7 aa, synthetic construct
NDGKPAS

SEQ ID NO: 90490 - protein, 7 aa, synthetic construct
ITNMVQI

SEQ ID NO: 90491 - protein, 7 aa, synthetic construct
GQMANRV

SEQ ID NO: 90492 - protein, 7 aa, synthetic construct
GATQKPI

SEQ ID NO: 90493 - protein, 7 aa, synthetic construct
AMYQVTP

SEQ ID NO: 90494 - protein, 7 aa, synthetic construct
DYMANRP

SEQ ID NO: 90495 - protein, 7 aa, synthetic construct
KKISAEP

SEQ ID NO: 90496 - protein, 7 aa, synthetic construct
AQTKIYS

SEQ ID NO: 90497 - protein, 7 aa, synthetic construct
QKDWAQS

SEQ ID NO: 90498 - protein, 7 aa, synthetic construct
NANIIQK

SEQ ID NO: 90499 - protein, 7 aa, synthetic construct
MTHISIG

SEQ ID NO: 90500 - protein, 7 aa, synthetic construct
GHNQYPF

SEQ ID NO: 90501 - protein, 7 aa, synthetic construct
YKEMASH

SEQ ID NO: 90502 - protein, 7 aa, synthetic construct
QQHQIKF

SEQ ID NO: 90503 - protein, 7 aa, synthetic construct
QGARNGF

SEQ ID NO: 90504 - protein, 7 aa, synthetic construct
GILYSEG

SEQ ID NO: 90505 - protein, 7 aa, synthetic construct
SDMAATA

SEQ ID NO: 90506 - protein, 7 aa, synthetic construct
FDRQHAI

SEQ ID NO: 90507 - protein, 7 aa, synthetic construct
ISSFLSA

SEQ ID NO: 90508 - protein, 7 aa, synthetic construct
GKFMNIT

SEQ ID NO: 90509 - protein, 7 aa, synthetic construct
GKGTADE

SEQ ID NO: 90510 - protein, 7 aa, synthetic construct
DGFGMSP

SEQ ID NO: 90511 - protein, 7 aa, synthetic construct
PKKTQND

SEQ ID NO: 90512 - protein, 7 aa, synthetic construct
IASRPIV

SEQ ID NO: 90513 - protein, 7 aa, synthetic construct
LNSKGSF

SEQ ID NO: 90514 - protein, 7 aa, synthetic construct
GMKTSQA

SEQ ID NO: 90515 - protein, 7 aa, synthetic construct
EQYVQKK

SEQ ID NO: 90516 - protein, 7 aa, synthetic construct
RPAQNNW

SEQ ID NO: 90517 - protein, 7 aa, synthetic construct
LYTGRLE

SEQ ID NO: 90518 - protein, 7 aa, synthetic construct
KTNGANP

SEQ ID NO: 90519 - protein, 7 aa, synthetic construct
GQFPKKD

SEQ ID NO: 90520 - protein, 7 aa, synthetic construct
TEVRAPK

SEQ ID NO: 90521 - protein, 7 aa, synthetic construct
PQRTGGP

SEQ ID NO: 90522 - protein, 7 aa, synthetic construct
VAPYLQE

SEQ ID NO: 90523 - protein, 7 aa, synthetic construct
NSPHWNP

SEQ ID NO: 90524 - protein, 7 aa, synthetic construct
EIPMPQK

SEQ ID NO: 90525 - protein, 7 aa, synthetic construct
YGMKNEY

SEQ ID NO: 90526 - protein, 7 aa, synthetic construct
HLPNEFM

SEQ ID NO: 90527 - protein, 7 aa, synthetic construct
NGYQGYP

SEQ ID NO: 90528 - protein, 7 aa, synthetic construct
GDKQQGY

SEQ ID NO: 90529 - protein, 7 aa, synthetic construct
HIAGKID

SEQ ID NO: 90530 - protein, 7 aa, synthetic construct
MPPPNIQ

SEQ ID NO: 90531 - protein, 7 aa, synthetic construct
NQAGGIM

SEQ ID NO: 90532 - protein, 7 aa, synthetic construct
HLRQIDH

SEQ ID NO: 90533 - protein, 7 aa, synthetic construct
QANENKS

SEQ ID NO: 90534 - protein, 7 aa, synthetic construct
SGGLVAD

SEQ ID NO: 90535 - protein, 7 aa, synthetic construct
NNANSIF

SEQ ID NO: 90536 - protein, 7 aa, synthetic construct
RHVAQDY

SEQ ID NO: 90537 - protein, 7 aa, synthetic construct
KSSFAVP

SEQ ID NO: 90538 - protein, 7 aa, synthetic construct
FYQTGGH

SEQ ID NO: 90539 - protein, 7 aa, synthetic construct
GTARGTA

SEQ ID NO: 90540 - protein, 7 aa, synthetic construct
ADRKQEL

SEQ ID NO: 90541 - protein, 7 aa, synthetic construct
NTYRPTI

SEQ ID NO: 90542 - protein, 7 aa, synthetic construct
MISDMTM

SEQ ID NO: 90543 - protein, 7 aa, synthetic construct
QKGQIYD

SEQ ID NO: 90544 - protein, 7 aa, synthetic construct
ANYPPLA

SEQ ID NO: 90545 - protein, 7 aa, synthetic construct
DAKMKSP

SEQ ID NO: 90546 - protein, 7 aa, synthetic construct
ESLVGSR

SEQ ID NO: 90547 - protein, 7 aa, synthetic construct
SIYQQPS

SEQ ID NO: 90548 - protein, 7 aa, synthetic construct
RHHGELY

SEQ ID NO: 90549 - protein, 7 aa, synthetic construct
INGIVSN

SEQ ID NO: 90550 - protein, 7 aa, synthetic construct
GAVGEQR

SEQ ID NO: 90551 - protein, 7 aa, synthetic construct
TQPYAQQ

SEQ ID NO: 90552 - protein, 7 aa, synthetic construct
RTDAGKV

SEQ ID NO: 90553 - protein, 7 aa, synthetic construct
DKKFNGM

SEQ ID NO: 90554 - protein, 7 aa, synthetic construct
QPYMDRV

SEQ ID NO: 90555 - protein, 7 aa, synthetic construct
DMLQKHR

SEQ ID NO: 90556 - protein, 7 aa, synthetic construct
HSRVEKM

SEQ ID NO: 90557 - protein, 7 aa, synthetic construct
TPLNKDF

SEQ ID NO: 90558 - protein, 7 aa, synthetic construct
KIDYQLA

SEQ ID NO: 90559 - protein, 7 aa, synthetic construct
VFPKAAM

SEQ ID NO: 90560 - protein, 7 aa, synthetic construct
MKVNSLE

SEQ ID NO: 90561 - protein, 7 aa, synthetic construct
MAMRDND

SEQ ID NO: 90562 - protein, 7 aa, synthetic construct
SVKRVVD

SEQ ID NO: 90563 - protein, 7 aa, synthetic construct
IQTGKDR

SEQ ID NO: 90564 - protein, 7 aa, synthetic construct
MKDWTVS

SEQ ID NO: 90565 - protein, 7 aa, synthetic construct
AYLAEPA

SEQ ID NO: 90566 - protein, 7 aa, synthetic construct
LFVGQNH

SEQ ID NO: 90567 - protein, 7 aa, synthetic construct
EMLQGPH

SEQ ID NO: 90568 - protein, 7 aa, synthetic construct
MPIHSPT

SEQ ID NO: 90569 - protein, 7 aa, synthetic construct
YLTRHGS

SEQ ID NO: 90570 - protein, 7 aa, synthetic construct
RGDYRTS

SEQ ID NO: 90571 - protein, 7 aa, synthetic construct
QRENSFF

SEQ ID NO: 90572 - protein, 7 aa, synthetic construct
GRSNEFI

SEQ ID NO: 90573 - protein, 7 aa, synthetic construct
HTRHDEY

SEQ ID NO: 90574 - protein, 7 aa, synthetic construct
GQPLIRS

SEQ ID NO: 90575 - protein, 7 aa, synthetic construct
GDFSNHG

SEQ ID NO: 90576 - protein, 7 aa, synthetic construct
TPTYNLT

SEQ ID NO: 90577 - protein, 7 aa, synthetic construct
AKPTEWG

SEQ ID NO: 90578 - protein, 7 aa, synthetic construct
GILSTHT

SEQ ID NO: 90579 - protein, 7 aa, synthetic construct
KVMIAAS

SEQ ID NO: 90580 - protein, 7 aa, synthetic construct
PGENLKG

SEQ ID NO: 90581 - protein, 7 aa, synthetic construct
ANVDKPY

SEQ ID NO: 90582 - protein, 7 aa, synthetic construct
QKNDQGV

SEQ ID NO: 90583 - protein, 7 aa, synthetic construct
TAKAVQV

SEQ ID NO: 90584 - protein, 7 aa, synthetic construct
GMEQKTR

SEQ ID NO: 90585 - protein, 7 aa, synthetic construct
MHPVMSQ

SEQ ID NO: 90586 - protein, 7 aa, synthetic construct
QGFMGQD

SEQ ID NO: 90587 - protein, 7 aa, synthetic construct
TGGDTNH

SEQ ID NO: 90588 - protein, 7 aa, synthetic construct
DKSNKQW

SEQ ID NO: 90589 - protein, 7 aa, synthetic construct
RSAQKLG

SEQ ID NO: 90590 - protein, 7 aa, synthetic construct
QKASTQD

SEQ ID NO: 90591 - protein, 7 aa, synthetic construct
QVSMNTN

SEQ ID NO: 90592 - protein, 7 aa, synthetic construct
KEKGSWE

SEQ ID NO: 90593 - protein, 7 aa, synthetic construct
KREYNQQ

SEQ ID NO: 90594 - protein, 7 aa, synthetic construct
WQLVHSE

SEQ ID NO: 90595 - protein, 7 aa, synthetic construct
MPTYVHN

SEQ ID NO: 90596 - protein, 7 aa, synthetic construct
IVVGVTE

SEQ ID NO: 90597 - protein, 7 aa, synthetic construct
TIPTLTG

SEQ ID NO: 90598 - protein, 7 aa, synthetic construct
TTVAVQY

SEQ ID NO: 90599 - protein, 7 aa, synthetic construct
RSTPHLT

SEQ ID NO: 90600 - protein, 7 aa, synthetic construct
KDEIQKG

SEQ ID NO: 90601 - protein, 7 aa, synthetic construct
QTASMNR

SEQ ID NO: 90602 - protein, 7 aa, synthetic construct
HSKPIFE

SEQ ID NO: 90603 - protein, 7 aa, synthetic construct
GLNAVIS

SEQ ID NO: 90604 - protein, 7 aa, synthetic construct
PHANSIN

SEQ ID NO: 90605 - protein, 7 aa, synthetic construct
NATTVMH

SEQ ID NO: 90606 - protein, 7 aa, synthetic construct
FFEGPGM

SEQ ID NO: 90607 - protein, 7 aa, synthetic construct
LMQGLTG

SEQ ID NO: 90608 - protein, 7 aa, synthetic construct
NSTSSKG

SEQ ID NO: 90609 - protein, 7 aa, synthetic construct
SSFQQVM

SEQ ID NO: 90610 - protein, 7 aa, synthetic construct
YKAAMNA

SEQ ID NO: 90611 - protein, 7 aa, synthetic construct
IPLSIHA

SEQ ID NO: 90612 - protein, 7 aa, synthetic construct
AKMNPNY

SEQ ID NO: 90613 - protein, 7 aa, synthetic construct
TVQHQFH

SEQ ID NO: 90614 - protein, 7 aa, synthetic construct
NGAQVKV

SEQ ID NO: 90615 - protein, 7 aa, synthetic construct
KETGREF

SEQ ID NO: 90616 - protein, 7 aa, synthetic construct
PAVHLDF

SEQ ID NO: 90617 - protein, 7 aa, synthetic construct
FFSKASS

SEQ ID NO: 90618 - protein, 7 aa, synthetic construct
HPASGFL

SEQ ID NO: 90619 - protein, 7 aa, synthetic construct
YQKTSNS

SEQ ID NO: 90620 - protein, 7 aa, synthetic construct
HTYDLKA

SEQ ID NO: 90621 - protein, 7 aa, synthetic construct
AMQRPDM

SEQ ID NO: 90622 - protein, 7 aa, synthetic construct
RKDYQVH

SEQ ID NO: 90623 - protein, 7 aa, synthetic construct
FQVSKQT

SEQ ID NO: 90624 - protein, 7 aa, synthetic construct
IDGNGYR

SEQ ID NO: 90625 - protein, 7 aa, synthetic construct
KQKDSIP

SEQ ID NO: 90626 - protein, 7 aa, synthetic construct
LYTASGM

SEQ ID NO: 90627 - protein, 7 aa, synthetic construct
VQKYMMA

SEQ ID NO: 90628 - protein, 7 aa, synthetic construct
FRVESST

SEQ ID NO: 90629 - protein, 7 aa, synthetic construct
FRIPANG

SEQ ID NO: 90630 - protein, 7 aa, synthetic construct
RETYTNA

SEQ ID NO: 90631 - protein, 7 aa, synthetic construct
KPEYTER

SEQ ID NO: 90632 - protein, 7 aa, synthetic construct
HQHEFNP

SEQ ID NO: 90633 - protein, 7 aa, synthetic construct
QVGQNQK

SEQ ID NO: 90634 - protein, 7 aa, synthetic construct
GTNSMKG

SEQ ID NO: 90635 - protein, 7 aa, synthetic construct
IKGVWEG

SEQ ID NO: 90636 - protein, 7 aa, synthetic construct
DQPRQGM

SEQ ID NO: 90637 - protein, 7 aa, synthetic construct
TPAQKTQ

SEQ ID NO: 90638 - protein, 7 aa, synthetic construct
YNSGYPN

SEQ ID NO: 90639 - protein, 7 aa, synthetic construct
LMRHQQT

SEQ ID NO: 90640 - protein, 7 aa, synthetic construct
FPQTGAM

SEQ ID NO: 90641 - protein, 7 aa, synthetic construct
SDAQRQF

SEQ ID NO: 90642 - protein, 7 aa, synthetic construct
MFLSGKS

SEQ ID NO: 90643 - protein, 7 aa, synthetic construct
PWKTPTD

SEQ ID NO: 90644 - protein, 7 aa, synthetic construct
TPQGPSV

SEQ ID NO: 90645 - protein, 7 aa, synthetic construct
KDTNTYT

SEQ ID NO: 90646 - protein, 7 aa, synthetic construct
GMKHAGQ

SEQ ID NO: 90647 - protein, 7 aa, synthetic construct
YNETNLK

SEQ ID NO: 90648 - protein, 7 aa, synthetic construct
PAKAHHM

SEQ ID NO: 90649 - protein, 7 aa, synthetic construct
NRESAIL

SEQ ID NO: 90650 - protein, 7 aa, synthetic construct
CVKVCEG

SEQ ID NO: 90651 - protein, 7 aa, synthetic construct
ADRATAW

SEQ ID NO: 90652 - protein, 7 aa, synthetic construct
LSENNRV

SEQ ID NO: 90653 - protein, 7 aa, synthetic construct
DRDGGMQ

SEQ ID NO: 90654 - protein, 7 aa, synthetic construct
WGLSGAV

SEQ ID NO: 90655 - protein, 7 aa, synthetic construct
NNQRYER

SEQ ID NO: 90656 - protein, 7 aa, synthetic construct
VNMMNGK

SEQ ID NO: 90657 - protein, 7 aa, synthetic construct
WPVNHQN

SEQ ID NO: 90658 - protein, 7 aa, synthetic construct
VSIRGIV

SEQ ID NO: 90659 - protein, 7 aa, synthetic construct
TKLTANF

SEQ ID NO: 90660 - protein, 7 aa, synthetic construct
FQDRVTN

SEQ ID NO: 90661 - protein, 7 aa, synthetic construct
GLYQQKY

SEQ ID NO: 90662 - protein, 7 aa, synthetic construct
YSATHMH

SEQ ID NO: 90663 - protein, 7 aa, synthetic construct
ASHVPVD

SEQ ID NO: 90664 - protein, 7 aa, synthetic construct
GTGGMAH

SEQ ID NO: 90665 - protein, 7 aa, synthetic construct
SFGPTDF

SEQ ID NO: 90666 - protein, 7 aa, synthetic construct
HESRMTH

SEQ ID NO: 90667 - protein, 7 aa, synthetic construct
YYTEPGK

SEQ ID NO: 90668 - protein, 7 aa, synthetic construct
KDRLHGM

SEQ ID NO: 90669 - protein, 7 aa, synthetic construct
TQWQQQA

SEQ ID NO: 90670 - protein, 7 aa, synthetic construct
LDFQGSL

SEQ ID NO: 90671 - protein, 7 aa, synthetic construct
KAMDQAH

SEQ ID NO: 90672 - protein, 7 aa, synthetic construct
DKMVHKI

SEQ ID NO: 90673 - protein, 7 aa, synthetic construct
GLAKTVY

SEQ ID NO: 90674 - protein, 7 aa, synthetic construct
PFKMPDD

SEQ ID NO: 90675 - protein, 7 aa, synthetic construct
RKIENMT

SEQ ID NO: 90676 - protein, 7 aa, synthetic construct
PARHNEM

SEQ ID NO: 90677 - protein, 7 aa, synthetic construct
TIYEKYQ

SEQ ID NO: 90678 - protein, 7 aa, synthetic construct
RDAPASA

SEQ ID NO: 90679 - protein, 7 aa, synthetic construct
SARNHPE

SEQ ID NO: 90680 - protein, 7 aa, synthetic construct
RTTPEMA

SEQ ID NO: 90681 - protein, 7 aa, synthetic construct
NKDTYMG

SEQ ID NO: 90682 - protein, 7 aa, synthetic construct
YRKLGAE

SEQ ID NO: 90683 - protein, 7 aa, synthetic construct
FKSGETP

SEQ ID NO: 90684 - protein, 7 aa, synthetic construct
QQIERVT

SEQ ID NO: 90685 - protein, 7 aa, synthetic construct
QYKHNQF

SEQ ID NO: 90686 - protein, 7 aa, synthetic construct
DDIQMAK

SEQ ID NO: 90687 - protein, 7 aa, synthetic construct
MSSKTNP

SEQ ID NO: 90688 - protein, 7 aa, synthetic construct
STRPQPN

SEQ ID NO: 90689 - protein, 7 aa, synthetic construct
NWKDAQY

SEQ ID NO: 90690 - protein, 7 aa, synthetic construct
NVIDSTR

SEQ ID NO: 90691 - protein, 7 aa, synthetic construct
DAYMKAS

SEQ ID NO: 90692 - protein, 7 aa, synthetic construct
NITALSY

SEQ ID NO: 90693 - protein, 7 aa, synthetic construct
ENVGNQR

SEQ ID NO: 90694 - protein, 7 aa, synthetic construct
GRMEERN

SEQ ID NO: 90695 - protein, 7 aa, synthetic construct
KLDTAAD

SEQ ID NO: 90696 - protein, 7 aa, synthetic construct
IHDLRNF

SEQ ID NO: 90697 - protein, 7 aa, synthetic construct
PVDPKNL

SEQ ID NO: 90698 - protein, 7 aa, synthetic construct
NYLQQMP

SEQ ID NO: 90699 - protein, 7 aa, synthetic construct
EAFNGHP

SEQ ID NO: 90700 - protein, 7 aa, synthetic construct
AFPGHQV

SEQ ID NO: 90701 - protein, 7 aa, synthetic construct
SEIHKFA

SEQ ID NO: 90702 - protein, 7 aa, synthetic construct
DRNTDIA

SEQ ID NO: 90703 - protein, 7 aa, synthetic construct
LAIKREH

SEQ ID NO: 90704 - protein, 7 aa, synthetic construct
ESVVKGS

SEQ ID NO: 90705 - protein, 7 aa, synthetic construct
IMGISIN

SEQ ID NO: 90706 - protein, 7 aa, synthetic construct
LDHTITV

SEQ ID NO: 90707 - protein, 7 aa, synthetic construct
INGHELA

SEQ ID NO: 90708 - protein, 7 aa, synthetic construct
HQGIALP

SEQ ID NO: 90709 - protein, 7 aa, synthetic construct
KSYTNQP

SEQ ID NO: 90710 - protein, 7 aa, synthetic construct
QRDKQEQ

SEQ ID NO: 90711 - protein, 7 aa, synthetic construct
VMKTGQN

SEQ ID NO: 90712 - protein, 7 aa, synthetic construct
TFVSQKT

SEQ ID NO: 90713 - protein, 7 aa, synthetic construct
PSAQAKG

SEQ ID NO: 90714 - protein, 7 aa, synthetic construct
NGHLVGN

SEQ ID NO: 90715 - protein, 7 aa, synthetic construct
SMLHASS

SEQ ID NO: 90716 - protein, 7 aa, synthetic construct
NFQSQHT

SEQ ID NO: 90717 - protein, 7 aa, synthetic construct
KKPEKMA

SEQ ID NO: 90718 - protein, 7 aa, synthetic construct
VKNRGEY

SEQ ID NO: 90719 - protein, 7 aa, synthetic construct
KGQDSGD

SEQ ID NO: 90720 - protein, 7 aa, synthetic construct
YNSTTPA

SEQ ID NO: 90721 - protein, 7 aa, synthetic construct
IKVPYEN

SEQ ID NO: 90722 - protein, 7 aa, synthetic construct
MQPSAAN

SEQ ID NO: 90723 - protein, 7 aa, synthetic construct
LPEVNYK

SEQ ID NO: 90724 - protein, 7 aa, synthetic construct
PNTSNID

SEQ ID NO: 90725 - protein, 7 aa, synthetic construct
GKILPSS

SEQ ID NO: 90726 - protein, 7 aa, synthetic construct
PNQPPRY

SEQ ID NO: 90727 - protein, 7 aa, synthetic construct
PTPGAEG

SEQ ID NO: 90728 - protein, 7 aa, synthetic construct
TLVGSDR

SEQ ID NO: 90729 - protein, 7 aa, synthetic construct
LNNGTLP

SEQ ID NO: 90730 - protein, 7 aa, synthetic construct
LEHDFTR

SEQ ID NO: 90731 - protein, 7 aa, synthetic construct
ADQFNGS

SEQ ID NO: 90732 - protein, 7 aa, synthetic construct
TMHQGVT

SEQ ID NO: 90733 - protein, 7 aa, synthetic construct
MLSSGGP

SEQ ID NO: 90734 - protein, 7 aa, synthetic construct
FTPYTDK

SEQ ID NO: 90735 - protein, 7 aa, synthetic construct
AEVANKK

SEQ ID NO: 90736 - protein, 7 aa, synthetic construct
FLQAAPP

SEQ ID NO: 90737 - protein, 7 aa, synthetic construct
TRENTSY

SEQ ID NO: 90738 - protein, 7 aa, synthetic construct
YYKGITD

SEQ ID NO: 90739 - protein, 7 aa, synthetic construct
YHKTIVL

SEQ ID NO: 90740 - protein, 7 aa, synthetic construct
AKREQLN

SEQ ID NO: 90741 - protein, 7 aa, synthetic construct
QEKDHGR

SEQ ID NO: 90742 - protein, 7 aa, synthetic construct
KGNWTDP

SEQ ID NO: 90743 - protein, 7 aa, synthetic construct
SVTEIPR

SEQ ID NO: 90744 - protein, 7 aa, synthetic construct
QETIANR

SEQ ID NO: 90745 - protein, 7 aa, synthetic construct
YASTSAA

SEQ ID NO: 90746 - protein, 7 aa, synthetic construct
KDTTSGF

SEQ ID NO: 90747 - protein, 7 aa, synthetic construct
MRQPTTA

SEQ ID NO: 90748 - protein, 7 aa, synthetic construct
VKHVIVQ

SEQ ID NO: 90749 - protein, 7 aa, synthetic construct
RALESEM

SEQ ID NO: 90750 - protein, 7 aa, synthetic construct
IEHKFHT

SEQ ID NO: 90751 - protein, 7 aa, synthetic construct
QPTTENR

SEQ ID NO: 90752 - protein, 7 aa, synthetic construct
AEKSPRL

SEQ ID NO: 90753 - protein, 7 aa, synthetic construct
LQIQASE

SEQ ID NO: 90754 - protein, 7 aa, synthetic construct
MDMRPDK

SEQ ID NO: 90755 - protein, 7 aa, synthetic construct
PETVYKG

SEQ ID NO: 90756 - protein, 7 aa, synthetic construct
LKNHHPS

SEQ ID NO: 90757 - protein, 7 aa, synthetic construct
MHAKGEQ

SEQ ID NO: 90758 - protein, 7 aa, synthetic construct
TVTSRMY

SEQ ID NO: 90759 - protein, 7 aa, synthetic construct
PANIKLG

SEQ ID NO: 90760 - protein, 7 aa, synthetic construct
TISHTEY

SEQ ID NO: 90761 - protein, 7 aa, synthetic construct
MYNKDVD

SEQ ID NO: 90762 - protein, 7 aa, synthetic construct
AYSQLSD

SEQ ID NO: 90763 - protein, 7 aa, synthetic construct
VVHSNTS

SEQ ID NO: 90764 - protein, 7 aa, synthetic construct
TTVLVNP

SEQ ID NO: 90765 - protein, 7 aa, synthetic construct
KNSAGFS

SEQ ID NO: 90766 - protein, 7 aa, synthetic construct
GQEHMTA

SEQ ID NO: 90767 - protein, 7 aa, synthetic construct
FKMAVTP

SEQ ID NO: 90768 - protein, 7 aa, synthetic construct
GSHLVNA

SEQ ID NO: 90769 - protein, 7 aa, synthetic construct
AEMHMHV

SEQ ID NO: 90770 - protein, 7 aa, synthetic construct
GGGVMKP

SEQ ID NO: 90771 - protein, 7 aa, synthetic construct
DAPWRME

SEQ ID NO: 90772 - protein, 7 aa, synthetic construct
LGTRFHP

SEQ ID NO: 90773 - protein, 7 aa, synthetic construct
TEMRGKW

SEQ ID NO: 90774 - protein, 7 aa, synthetic construct
TEFSTKH

SEQ ID NO: 90775 - protein, 7 aa, synthetic construct
PSVAINS

SEQ ID NO: 90776 - protein, 7 aa, synthetic construct
QVKVSNN

SEQ ID NO: 90777 - protein, 7 aa, synthetic construct
TPSARRD

SEQ ID NO: 90778 - protein, 7 aa, synthetic construct
TEIKEWA

SEQ ID NO: 90779 - protein, 7 aa, synthetic construct
TGAKGNP

SEQ ID NO: 90780 - protein, 7 aa, synthetic construct
GIQPSAW

SEQ ID NO: 90781 - protein, 7 aa, synthetic construct
HFDKFPE

SEQ ID NO: 90782 - protein, 7 aa, synthetic construct
KKYEGIP

SEQ ID NO: 90783 - protein, 7 aa, synthetic construct
DNTHIQS

SEQ ID NO: 90784 - protein, 7 aa, synthetic construct
WTGRIPA

SEQ ID NO: 90785 - protein, 7 aa, synthetic construct
WKDEHKK

SEQ ID NO: 90786 - protein, 7 aa, synthetic construct
TKPAGMV

SEQ ID NO: 90787 - protein, 7 aa, synthetic construct
IAGDRAE

SEQ ID NO: 90788 - protein, 7 aa, synthetic construct
MFAHGNI

SEQ ID NO: 90789 - protein, 7 aa, synthetic construct
MDPHMSQ

SEQ ID NO: 90790 - protein, 7 aa, synthetic construct
LILHATP

SEQ ID NO: 90791 - protein, 7 aa, synthetic construct
HHQKNAA

SEQ ID NO: 90792 - protein, 7 aa, synthetic construct
MFKVAHN

SEQ ID NO: 90793 - protein, 7 aa, synthetic construct
PYATGSV

SEQ ID NO: 90794 - protein, 7 aa, synthetic construct
VPAARFD

SEQ ID NO: 90795 - protein, 7 aa, synthetic construct
QGVNKNA

SEQ ID NO: 90796 - protein, 7 aa, synthetic construct
KKGDGHV

SEQ ID NO: 90797 - protein, 7 aa, synthetic construct
MRRDHEY

SEQ ID NO: 90798 - protein, 7 aa, synthetic construct
FDKHTNT

SEQ ID NO: 90799 - protein, 7 aa, synthetic construct
LGTRTTS

SEQ ID NO: 90800 - protein, 7 aa, synthetic construct
LQDKQSG

SEQ ID NO: 90801 - protein, 7 aa, synthetic construct
SKSMTNA

SEQ ID NO: 90802 - protein, 7 aa, synthetic construct
MWKQEPP

SEQ ID NO: 90803 - protein, 7 aa, synthetic construct
LPIPHEN

SEQ ID NO: 90804 - protein, 7 aa, synthetic construct
MVNVNPG

SEQ ID NO: 90805 - protein, 7 aa, synthetic construct
VITSTYH

SEQ ID NO: 90806 - protein, 7 aa, synthetic construct
YRDRGNV

SEQ ID NO: 90807 - protein, 7 aa, synthetic construct
RMDREFR

SEQ ID NO: 90808 - protein, 7 aa, synthetic construct
IVNGNKI

SEQ ID NO: 90809 - protein, 7 aa, synthetic construct
ARALLGE

SEQ ID NO: 90810 - protein, 7 aa, synthetic construct
MKTAFTP

SEQ ID NO: 90811 - protein, 7 aa, synthetic construct
IHRPLDF

SEQ ID NO: 90812 - protein, 7 aa, synthetic construct
QRSTPVT

SEQ ID NO: 90813 - protein, 7 aa, synthetic construct
VRRMEME

SEQ ID NO: 90814 - protein, 7 aa, synthetic construct
TEKGSAA

SEQ ID NO: 90815 - protein, 7 aa, synthetic construct
NEGIKYL

SEQ ID NO: 90816 - protein, 7 aa, synthetic construct
KSMPLPA

SEQ ID NO: 90817 - protein, 7 aa, synthetic construct
HLHQFDV

SEQ ID NO: 90818 - protein, 7 aa, synthetic construct
QLESWAK

SEQ ID NO: 90819 - protein, 7 aa, synthetic construct
YFSETGT

SEQ ID NO: 90820 - protein, 7 aa, synthetic construct
PPKGDGH

SEQ ID NO: 90821 - protein, 7 aa, synthetic construct
YTEAVAP

SEQ ID NO: 90822 - protein, 7 aa, synthetic construct
HAKYSEY

SEQ ID NO: 90823 - protein, 7 aa, synthetic construct
IVNKLEN

SEQ ID NO: 90824 - protein, 7 aa, synthetic construct
DFRKPMG

SEQ ID NO: 90825 - protein, 7 aa, synthetic construct
AMKQVNH

SEQ ID NO: 90826 - protein, 7 aa, synthetic construct
NSLSHNM

SEQ ID NO: 90827 - protein, 7 aa, synthetic construct
RVAAQMD

SEQ ID NO: 90828 - protein, 7 aa, synthetic construct
SYASDRL

SEQ ID NO: 90829 - protein, 7 aa, synthetic construct
HGVTDMK

SEQ ID NO: 90830 - protein, 7 aa, synthetic construct
HLPSAAI

SEQ ID NO: 90831 - protein, 7 aa, synthetic construct
KEQVAMT

SEQ ID NO: 90832 - protein, 7 aa, synthetic construct
SIPMPHD

SEQ ID NO: 90833 - protein, 7 aa, synthetic construct
MGDGTAP

SEQ ID NO: 90834 - protein, 7 aa, synthetic construct
NGGPTQG

SEQ ID NO: 90835 - protein, 7 aa, synthetic construct
AEAPKRA

SEQ ID NO: 90836 - protein, 7 aa, synthetic construct
EWNKMNL

SEQ ID NO: 90837 - protein, 7 aa, synthetic construct
PINGLSM

SEQ ID NO: 90838 - protein, 7 aa, synthetic construct
HIAPPPQ

SEQ ID NO: 90839 - protein, 7 aa, synthetic construct
PKPAHST

SEQ ID NO: 90840 - protein, 7 aa, synthetic construct
DEIRKTK

SEQ ID NO: 90841 - protein, 7 aa, synthetic construct
EEYHQLK

SEQ ID NO: 90842 - protein, 7 aa, synthetic construct
PLDSYKR

SEQ ID NO: 90843 - protein, 7 aa, synthetic construct
SGQAHTD

SEQ ID NO: 90844 - protein, 7 aa, synthetic construct
NYELRQT

SEQ ID NO: 90845 - protein, 7 aa, synthetic construct
HFAGPVV

SEQ ID NO: 90846 - protein, 7 aa, synthetic construct
DRSRIMV

SEQ ID NO: 90847 - protein, 7 aa, synthetic construct
KSTNPSY

SEQ ID NO: 90848 - protein, 7 aa, synthetic construct
IHGGGPF

SEQ ID NO: 90849 - protein, 7 aa, synthetic construct
EKYGVGV

SEQ ID NO: 90850 - protein, 7 aa, synthetic construct
MDIGKRV

SEQ ID NO: 90851 - protein, 7 aa, synthetic construct
YIQNNMR

SEQ ID NO: 90852 - protein, 7 aa, synthetic construct
RNQHDTT

SEQ ID NO: 90853 - protein, 7 aa, synthetic construct
VMAKVVD

SEQ ID NO: 90854 - protein, 7 aa, synthetic construct
TYLQGNG

SEQ ID NO: 90855 - protein, 7 aa, synthetic construct
VQSTTVI

SEQ ID NO: 90856 - protein, 7 aa, synthetic construct
VHQKHYV

SEQ ID NO: 90857 - protein, 7 aa, synthetic construct
ASGAGGK

SEQ ID NO: 90858 - protein, 7 aa, synthetic construct
GPREHVE

SEQ ID NO: 90859 - protein, 7 aa, synthetic construct
QQHFERN

SEQ ID NO: 90860 - protein, 7 aa, synthetic construct
SMHKMAE

SEQ ID NO: 90861 - protein, 7 aa, synthetic construct
KQPNTPG

SEQ ID NO: 90862 - protein, 7 aa, synthetic construct
GFVHLAS

SEQ ID NO: 90863 - protein, 7 aa, synthetic construct
MVESTKT

SEQ ID NO: 90864 - protein, 7 aa, synthetic construct
GMHEMMI

SEQ ID NO: 90865 - protein, 7 aa, synthetic construct
KHIDHGD

SEQ ID NO: 90866 - protein, 7 aa, synthetic construct
LRSGHMY

SEQ ID NO: 90867 - protein, 7 aa, synthetic construct
NQEHFTH

SEQ ID NO: 90868 - protein, 7 aa, synthetic construct
SAAAKDT

SEQ ID NO: 90869 - protein, 7 aa, synthetic construct
PNGVPKS

SEQ ID NO: 90870 - protein, 7 aa, synthetic construct
NSSQTTK

SEQ ID NO: 90871 - protein, 7 aa, synthetic construct
WDDRGRH

SEQ ID NO: 90872 - protein, 7 aa, synthetic construct
FMERQHG

SEQ ID NO: 90873 - protein, 7 aa, synthetic construct
KVVLGHT

SEQ ID NO: 90874 - protein, 7 aa, synthetic construct
SPGIQII

SEQ ID NO: 90875 - protein, 7 aa, synthetic construct
REKTDNW

SEQ ID NO: 90876 - protein, 7 aa, synthetic construct
NPMSHHK

SEQ ID NO: 90877 - protein, 7 aa, synthetic construct
NGSLQQF

SEQ ID NO: 90878 - protein, 7 aa, synthetic construct
SMAKMDP

SEQ ID NO: 90879 - protein, 7 aa, synthetic construct
GSYGSVE

SEQ ID NO: 90880 - protein, 7 aa, synthetic construct
HRVKDHD

SEQ ID NO: 90881 - protein, 7 aa, synthetic construct
MYAPGQV

SEQ ID NO: 90882 - protein, 7 aa, synthetic construct
HYHNVSG

SEQ ID NO: 90883 - protein, 7 aa, synthetic construct
IVNRQSH

SEQ ID NO: 90884 - protein, 7 aa, synthetic construct
FKRQAYD

SEQ ID NO: 90885 - protein, 7 aa, synthetic construct
NYAKQIN

SEQ ID NO: 90886 - protein, 7 aa, synthetic construct
NPPHEYA

SEQ ID NO: 90887 - protein, 7 aa, synthetic construct
IVHHNMV

SEQ ID NO: 90888 - protein, 7 aa, synthetic construct
FGHTTER

SEQ ID NO: 90889 - protein, 7 aa, synthetic construct
YNASKVD

SEQ ID NO: 90890 - protein, 7 aa, synthetic construct
MRTQESS

SEQ ID NO: 90891 - protein, 7 aa, synthetic construct
TMRVDAS

SEQ ID NO: 90892 - protein, 7 aa, synthetic construct
GIHHSVM

SEQ ID NO: 90893 - protein, 7 aa, synthetic construct
MYNGVIE

SEQ ID NO: 90894 - protein, 7 aa, synthetic construct
PLHREYL

SEQ ID NO: 90895 - protein, 7 aa, synthetic construct
TNFIPSS

SEQ ID NO: 90896 - protein, 7 aa, synthetic construct
FPRTHQL

SEQ ID NO: 90897 - protein, 7 aa, synthetic construct
QALKHGF

SEQ ID NO: 90898 - protein, 7 aa, synthetic construct
YTNVQFK

SEQ ID NO: 90899 - protein, 7 aa, synthetic construct
DWKAESQ

SEQ ID NO: 90900 - protein, 7 aa, synthetic construct
DVPTKNT

SEQ ID NO: 90901 - protein, 7 aa, synthetic construct
WDSATPM

SEQ ID NO: 90902 - protein, 7 aa, synthetic construct
GQNKSPA

SEQ ID NO: 90903 - protein, 7 aa, synthetic construct
GNKHFHA

SEQ ID NO: 90904 - protein, 7 aa, synthetic construct
DNRNMPF

SEQ ID NO: 90905 - protein, 7 aa, synthetic construct
QSLKVGV

SEQ ID NO: 90906 - protein, 7 aa, synthetic construct
RERILDL

SEQ ID NO: 90907 - protein, 7 aa, synthetic construct
GMKPNQS

SEQ ID NO: 90908 - protein, 7 aa, synthetic construct
HGHPLNT

SEQ ID NO: 90909 - protein, 7 aa, synthetic construct
TQNTHDP

SEQ ID NO: 90910 - protein, 7 aa, synthetic construct
MPMQMPN

SEQ ID NO: 90911 - protein, 7 aa, synthetic construct
GMVTGLE

SEQ ID NO: 90912 - protein, 7 aa, synthetic construct
YTNNQMM

SEQ ID NO: 90913 - protein, 7 aa, synthetic construct
NAKSDYM

SEQ ID NO: 90914 - protein, 7 aa, synthetic construct
RNGFNTM

SEQ ID NO: 90915 - protein, 7 aa, synthetic construct
QSRLEHY

SEQ ID NO: 90916 - protein, 7 aa, synthetic construct
MAVMTRS

SEQ ID NO: 90917 - protein, 7 aa, synthetic construct
DTKQMAF

SEQ ID NO: 90918 - protein, 7 aa, synthetic construct
DHFIAEK

SEQ ID NO: 90919 - protein, 7 aa, synthetic construct
NTKMSEE

SEQ ID NO: 90920 - protein, 7 aa, synthetic construct
MNTQHII

SEQ ID NO: 90921 - protein, 7 aa, synthetic construct
DIFKTDF

SEQ ID NO: 90922 - protein, 7 aa, synthetic construct
LEAQRIS

SEQ ID NO: 90923 - protein, 7 aa, synthetic construct
NNMPNTA

SEQ ID NO: 90924 - protein, 7 aa, synthetic construct
TGMIIMA

SEQ ID NO: 90925 - protein, 7 aa, synthetic construct
TSHKQEH

SEQ ID NO: 90926 - protein, 7 aa, synthetic construct
MQTAMKI

SEQ ID NO: 90927 - protein, 7 aa, synthetic construct
NQHAMPK

SEQ ID NO: 90928 - protein, 7 aa, synthetic construct
VPAGSEK

SEQ ID NO: 90929 - protein, 7 aa, synthetic construct
HRSDGET

SEQ ID NO: 90930 - protein, 7 aa, synthetic construct
ESKSYNG

SEQ ID NO: 90931 - protein, 7 aa, synthetic construct
INGQNVQ

SEQ ID NO: 90932 - protein, 7 aa, synthetic construct
GKGTSID

SEQ ID NO: 90933 - protein, 7 aa, synthetic construct
KDDRISP

SEQ ID NO: 90934 - protein, 7 aa, synthetic construct
MDKDRIN

SEQ ID NO: 90935 - protein, 7 aa, synthetic construct
IKAPVRE

SEQ ID NO: 90936 - protein, 7 aa, synthetic construct
THPVGQT

SEQ ID NO: 90937 - protein, 7 aa, synthetic construct
MRINNPT

SEQ ID NO: 90938 - protein, 7 aa, synthetic construct
ALQAAYK

SEQ ID NO: 90939 - protein, 7 aa, synthetic construct
SIHDVAH

SEQ ID NO: 90940 - protein, 7 aa, synthetic construct
YQPKSNS

SEQ ID NO: 90941 - protein, 7 aa, synthetic construct
REKWVDN

SEQ ID NO: 90942 - protein, 7 aa, synthetic construct
SVGERPN

SEQ ID NO: 90943 - protein, 7 aa, synthetic construct
INQKGDK

SEQ ID NO: 90944 - protein, 7 aa, synthetic construct
IAQPGYT

SEQ ID NO: 90945 - protein, 7 aa, synthetic construct
PIPGTTI

SEQ ID NO: 90946 - protein, 7 aa, synthetic construct
WHDRAFP

SEQ ID NO: 90947 - protein, 7 aa, synthetic construct
FDRMDAV

SEQ ID NO: 90948 - protein, 7 aa, synthetic construct
HYANKAP

SEQ ID NO: 90949 - protein, 7 aa, synthetic construct
LHVPDHS

SEQ ID NO: 90950 - protein, 7 aa, synthetic construct
VVGAKQS

SEQ ID NO: 90951 - protein, 7 aa, synthetic construct
IPKPELK

SEQ ID NO: 90952 - protein, 7 aa, synthetic construct
ASVAPMT

SEQ ID NO: 90953 - protein, 7 aa, synthetic construct
LPVWKEE

SEQ ID NO: 90954 - protein, 7 aa, synthetic construct
GPKNSTP

SEQ ID NO: 90955 - protein, 7 aa, synthetic construct
FYANPGM

SEQ ID NO: 90956 - protein, 7 aa, synthetic construct
IMVSTVN

SEQ ID NO: 90957 - protein, 7 aa, synthetic construct
PTKHDGF

SEQ ID NO: 90958 - protein, 7 aa, synthetic construct
THSTRLQ

SEQ ID NO: 90959 - protein, 7 aa, synthetic construct
GPKGVAG

SEQ ID NO: 90960 - protein, 7 aa, synthetic construct
YDMNVKP

SEQ ID NO: 90961 - protein, 7 aa, synthetic construct
RMSQDMT

SEQ ID NO: 90962 - protein, 7 aa, synthetic construct
PIDHTRL

SEQ ID NO: 90963 - protein, 7 aa, synthetic construct
HSRNISF

SEQ ID NO: 90964 - protein, 7 aa, synthetic construct
EGITMMS

SEQ ID NO: 90965 - protein, 7 aa, synthetic construct
KHDTYQV

SEQ ID NO: 90966 - protein, 7 aa, synthetic construct
GHPLINS

SEQ ID NO: 90967 - protein, 7 aa, synthetic construct
YTHLDYE

SEQ ID NO: 90968 - protein, 7 aa, synthetic construct
TIAYSHG

SEQ ID NO: 90969 - protein, 7 aa, synthetic construct
TQNNNIN

SEQ ID NO: 90970 - protein, 7 aa, synthetic construct
QEIIKPG

SEQ ID NO: 90971 - protein, 7 aa, synthetic construct
HTTNLGP

SEQ ID NO: 90972 - protein, 7 aa, synthetic construct
PSQSAGG

SEQ ID NO: 90973 - protein, 7 aa, synthetic construct
TDKKKET

SEQ ID NO: 90974 - protein, 7 aa, synthetic construct
SQELKAG

SEQ ID NO: 90975 - protein, 7 aa, synthetic construct
SGNHPTC

SEQ ID NO: 90976 - protein, 7 aa, synthetic construct
NEGRTPS

SEQ ID NO: 90977 - protein, 7 aa, synthetic construct
RVTKDGF

SEQ ID NO: 90978 - protein, 7 aa, synthetic construct
RDGFGAK

SEQ ID NO: 90979 - protein, 7 aa, synthetic construct
MMEGLNA

SEQ ID NO: 90980 - protein, 7 aa, synthetic construct
SKSTMNG

SEQ ID NO: 90981 - protein, 7 aa, synthetic construct
TKPVVIT

SEQ ID NO: 90982 - protein, 7 aa, synthetic construct
KQAVARD

SEQ ID NO: 90983 - protein, 7 aa, synthetic construct
GKGMTGA

SEQ ID NO: 90984 - protein, 7 aa, synthetic construct
VMHKMMG

SEQ ID NO: 90985 - protein, 7 aa, synthetic construct
DFMHKNS

SEQ ID NO: 90986 - protein, 7 aa, synthetic construct
NAMRHLP

SEQ ID NO: 90987 - protein, 7 aa, synthetic construct
EYKQTAQ

SEQ ID NO: 90988 - protein, 7 aa, synthetic construct
IPQLGPA

SEQ ID NO: 90989 - protein, 7 aa, synthetic construct
IRKIETQ

SEQ ID NO: 90990 - protein, 7 aa, synthetic construct
QSEMHTG

SEQ ID NO: 90991 - protein, 7 aa, synthetic construct
DDKFAVA

SEQ ID NO: 90992 - protein, 7 aa, synthetic construct
SVRHYPD

SEQ ID NO: 90993 - protein, 7 aa, synthetic construct
GPQKVLT

SEQ ID NO: 90994 - protein, 7 aa, synthetic construct
VKLNSFV

SEQ ID NO: 90995 - protein, 7 aa, synthetic construct
GYMETKE

SEQ ID NO: 90996 - protein, 7 aa, synthetic construct
NKSVQKE

SEQ ID NO: 90997 - protein, 7 aa, synthetic construct
GKNLTAP

SEQ ID NO: 90998 - protein, 7 aa, synthetic construct
KSAVASM

SEQ ID NO: 90999 - protein, 7 aa, synthetic construct
DHAPGKR

SEQ ID NO: 91000 - protein, 7 aa, synthetic construct
TPKTHMA

SEQ ID NO: 91001 - protein, 7 aa, synthetic construct
FVVPNKH

SEQ ID NO: 91002 - protein, 7 aa, synthetic construct
WKNYAIN

SEQ ID NO: 91003 - protein, 7 aa, synthetic construct
GKKDNSQ

SEQ ID NO: 91004 - protein, 7 aa, synthetic construct
TGGNQKL

SEQ ID NO: 91005 - protein, 7 aa, synthetic construct
MGNMYQG

SEQ ID NO: 91006 - protein, 7 aa, synthetic construct
KQYNFAG

SEQ ID NO: 91007 - protein, 7 aa, synthetic construct
EVMRDQV

SEQ ID NO: 91008 - protein, 7 aa, synthetic construct
ERGNGSF

SEQ ID NO: 91009 - protein, 7 aa, synthetic construct
GSLAIQH

SEQ ID NO: 91010 - protein, 7 aa, synthetic construct
GKVANEV

SEQ ID NO: 91011 - protein, 7 aa, synthetic construct
DLTGGKF

SEQ ID NO: 91012 - protein, 7 aa, synthetic construct
RSIQAGI

SEQ ID NO: 91013 - protein, 7 aa, synthetic construct
KVMTLRD

SEQ ID NO: 91014 - protein, 7 aa, synthetic construct
GGPYRET

SEQ ID NO: 91015 - protein, 7 aa, synthetic construct
PTKGGIL

SEQ ID NO: 91016 - protein, 7 aa, synthetic construct
HPNFRGH

SEQ ID NO: 91017 - protein, 7 aa, synthetic construct
NRLAPAD

SEQ ID NO: 91018 - protein, 7 aa, synthetic construct
KVNSGVM

SEQ ID NO: 91019 - protein, 7 aa, synthetic construct
QRDFPLM

SEQ ID NO: 91020 - protein, 7 aa, synthetic construct
IMQVSMG

SEQ ID NO: 91021 - protein, 7 aa, synthetic construct
PMRPLGN

SEQ ID NO: 91022 - protein, 7 aa, synthetic construct
PFKQLQM

SEQ ID NO: 91023 - protein, 7 aa, synthetic construct
KPRFGDG

SEQ ID NO: 91024 - protein, 7 aa, synthetic construct
NNGPERF

SEQ ID NO: 91025 - protein, 7 aa, synthetic construct
GPLNGTP

SEQ ID NO: 91026 - protein, 7 aa, synthetic construct
YMQSATL

SEQ ID NO: 91027 - protein, 7 aa, synthetic construct
MPSYSEH

SEQ ID NO: 91028 - protein, 7 aa, synthetic construct
IRDIQHQ

SEQ ID NO: 91029 - protein, 7 aa, synthetic construct
VPFTENH

SEQ ID NO: 91030 - protein, 7 aa, synthetic construct
KDADNPN

SEQ ID NO: 91031 - protein, 7 aa, synthetic construct
HTQDRIR

SEQ ID NO: 91032 - protein, 7 aa, synthetic construct
MASLRLA

SEQ ID NO: 91033 - protein, 7 aa, synthetic construct
SRMNGSA

SEQ ID NO: 91034 - protein, 7 aa, synthetic construct
DYPQVHS

SEQ ID NO: 91035 - protein, 7 aa, synthetic construct
NKNTGQA

SEQ ID NO: 91036 - protein, 7 aa, synthetic construct
PGSAAIA

SEQ ID NO: 91037 - protein, 7 aa, synthetic construct
WAVGKND

SEQ ID NO: 91038 - protein, 7 aa, synthetic construct
YHTNGLT

SEQ ID NO: 91039 - protein, 7 aa, synthetic construct
RPDTGHA

SEQ ID NO: 91040 - protein, 7 aa, synthetic construct
KKAPMTD

SEQ ID NO: 91041 - protein, 7 aa, synthetic construct
WQKYEIN

SEQ ID NO: 91042 - protein, 7 aa, synthetic construct
WLEKGRH

SEQ ID NO: 91043 - protein, 7 aa, synthetic construct
FPHKMMS

SEQ ID NO: 91044 - protein, 7 aa, synthetic construct
WASLQVA

SEQ ID NO: 91045 - protein, 7 aa, synthetic construct
MNREHEH

SEQ ID NO: 91046 - protein, 7 aa, synthetic construct
PDTFKQK

SEQ ID NO: 91047 - protein, 7 aa, synthetic construct
DAAGLVR

SEQ ID NO: 91048 - protein, 7 aa, synthetic construct
EQQQQYR

SEQ ID NO: 91049 - protein, 7 aa, synthetic construct
SARNEAI

SEQ ID NO: 91050 - protein, 7 aa, synthetic construct
SEKTERS

SEQ ID NO: 91051 - protein, 7 aa, synthetic construct
EISRSGR

SEQ ID NO: 91052 - protein, 7 aa, synthetic construct
QIVGQSM

SEQ ID NO: 91053 - protein, 7 aa, synthetic construct
HLKGEEY

SEQ ID NO: 91054 - protein, 7 aa, synthetic construct
HPAKVEE

SEQ ID NO: 91055 - protein, 7 aa, synthetic construct
SMLDKKG

SEQ ID NO: 91056 - protein, 7 aa, synthetic construct
DVAFPLK

SEQ ID NO: 91057 - protein, 7 aa, synthetic construct
SHFKMEY

SEQ ID NO: 91058 - protein, 7 aa, synthetic construct
LGSLIIQ

SEQ ID NO: 91059 - protein, 7 aa, synthetic construct
KIMQPEM

SEQ ID NO: 91060 - protein, 7 aa, synthetic construct
QTISEDR

SEQ ID NO: 91061 - protein, 7 aa, synthetic construct
TIMDRVH

SEQ ID NO: 91062 - protein, 7 aa, synthetic construct
EKYDIVV

SEQ ID NO: 91063 - protein, 7 aa, synthetic construct
KHQDAGS

SEQ ID NO: 91064 - protein, 7 aa, synthetic construct
MLHESVK

SEQ ID NO: 91065 - protein, 7 aa, synthetic construct
MGTKPAV

SEQ ID NO: 91066 - protein, 7 aa, synthetic construct
LKSENFD

SEQ ID NO: 91067 - protein, 7 aa, synthetic construct
MGLNIAS

SEQ ID NO: 91068 - protein, 7 aa, synthetic construct
KGVDADT

SEQ ID NO: 91069 - protein, 7 aa, synthetic construct
SVLQVAP

SEQ ID NO: 91070 - protein, 7 aa, synthetic construct
KYVDQRV

SEQ ID NO: 91071 - protein, 7 aa, synthetic construct
SKIRLED

SEQ ID NO: 91072 - protein, 7 aa, synthetic construct
DQVRRQI

SEQ ID NO: 91073 - protein, 7 aa, synthetic construct
NQVKSNH

SEQ ID NO: 91074 - protein, 7 aa, synthetic construct
FYQATKS

SEQ ID NO: 91075 - protein, 7 aa, synthetic construct
EPYRSMM

SEQ ID NO: 91076 - protein, 7 aa, synthetic construct
WTTFKSD

SEQ ID NO: 91077 - protein, 7 aa, synthetic construct
MIEKAFA

SEQ ID NO: 91078 - protein, 7 aa, synthetic construct
YKHYQLG

SEQ ID NO: 91079 - protein, 7 aa, synthetic construct
VHDHREY

SEQ ID NO: 91080 - protein, 7 aa, synthetic construct
HFSTIEK

SEQ ID NO: 91081 - protein, 7 aa, synthetic construct
MGKHWAE

SEQ ID NO: 91082 - protein, 7 aa, synthetic construct
MNTNPAI

SEQ ID NO: 91083 - protein, 7 aa, synthetic construct
RTVYADK

SEQ ID NO: 91084 - protein, 7 aa, synthetic construct
TAIFAQP

SEQ ID NO: 91085 - protein, 7 aa, synthetic construct
ADKSRLA

SEQ ID NO: 91086 - protein, 7 aa, synthetic construct
EIKGNRQ

SEQ ID NO: 91087 - protein, 7 aa, synthetic construct
LKSPSGG

SEQ ID NO: 91088 - protein, 7 aa, synthetic construct
SQEGNRL

SEQ ID NO: 91089 - protein, 7 aa, synthetic construct
MPENIHV

SEQ ID NO: 91090 - protein, 7 aa, synthetic construct
AENQGVV

SEQ ID NO: 91091 - protein, 7 aa, synthetic construct
ENKMGIF

SEQ ID NO: 91092 - protein, 7 aa, synthetic construct
QWTGMGE

SEQ ID NO: 91093 - protein, 7 aa, synthetic construct
KTPSTNI

SEQ ID NO: 91094 - protein, 7 aa, synthetic construct
LYAMRDS

SEQ ID NO: 91095 - protein, 7 aa, synthetic construct
KQNPNPD

SEQ ID NO: 91096 - protein, 7 aa, synthetic construct
NKLHTED

SEQ ID NO: 91097 - protein, 7 aa, synthetic construct
RESAGPF

SEQ ID NO: 91098 - protein, 7 aa, synthetic construct
GATNFVM

SEQ ID NO: 91099 - protein, 7 aa, synthetic construct
YQYTLNA

SEQ ID NO: 91100 - protein, 7 aa, synthetic construct
QNTTEQT

SEQ ID NO: 91101 - protein, 7 aa, synthetic construct
FRGVSHV

SEQ ID NO: 91102 - protein, 7 aa, synthetic construct
GPKTQNP

SEQ ID NO: 91103 - protein, 7 aa, synthetic construct
GVEQTKM

SEQ ID NO: 91104 - protein, 7 aa, synthetic construct
PGAHNTW

SEQ ID NO: 91105 - protein, 7 aa, synthetic construct
NVGFQSP

SEQ ID NO: 91106 - protein, 7 aa, synthetic construct
KQPTSAA

SEQ ID NO: 91107 - protein, 7 aa, synthetic construct
ELAQKSM

SEQ ID NO: 91108 - protein, 7 aa, synthetic construct
HRAQQEY

SEQ ID NO: 91109 - protein, 7 aa, synthetic construct
TVTRQGA

SEQ ID NO: 91110 - protein, 7 aa, synthetic construct
GKAATTT

SEQ ID NO: 91111 - protein, 7 aa, synthetic construct
KVVNYGE

SEQ ID NO: 91112 - protein, 7 aa, synthetic construct
STGDRTA

SEQ ID NO: 91113 - protein, 7 aa, synthetic construct
PYHGNER

SEQ ID NO: 91114 - protein, 7 aa, synthetic construct
KFTRNDM

SEQ ID NO: 91115 - protein, 7 aa, synthetic construct
VKPAESV

SEQ ID NO: 91116 - protein, 7 aa, synthetic construct
HGGGLTL

SEQ ID NO: 91117 - protein, 7 aa, synthetic construct
EVRKIIT

SEQ ID NO: 91118 - protein, 7 aa, synthetic construct
KAAMGFS

SEQ ID NO: 91119 - protein, 7 aa, synthetic construct
FANTHHM

SEQ ID NO: 91120 - protein, 7 aa, synthetic construct
PPTSQTS

SEQ ID NO: 91121 - protein, 7 aa, synthetic construct
IMHNHES

SEQ ID NO: 91122 - protein, 7 aa, synthetic construct
YSRHPGP

SEQ ID NO: 91123 - protein, 7 aa, synthetic construct
HQRHITV

SEQ ID NO: 91124 - protein, 7 aa, synthetic construct
ATGNVHL

SEQ ID NO: 91125 - protein, 7 aa, synthetic construct
ARGTDKE

SEQ ID NO: 91126 - protein, 7 aa, synthetic construct
YEGIRIS

SEQ ID NO: 91127 - protein, 7 aa, synthetic construct
YKVPGGY

SEQ ID NO: 91128 - protein, 7 aa, synthetic construct
YPKNNQA

SEQ ID NO: 91129 - protein, 7 aa, synthetic construct
FYGREGG

SEQ ID NO: 91130 - protein, 7 aa, synthetic construct
VHDNAKN

SEQ ID NO: 91131 - protein, 7 aa, synthetic construct
NAHTVGG

SEQ ID NO: 91132 - protein, 7 aa, synthetic construct
MPVTVPG

SEQ ID NO: 91133 - protein, 7 aa, synthetic construct
PVSREIA

SEQ ID NO: 91134 - protein, 7 aa, synthetic construct
PTKLQAL

SEQ ID NO: 91135 - protein, 7 aa, synthetic construct
SDIQHSA

SEQ ID NO: 91136 - protein, 7 aa, synthetic construct
IALPDGY

SEQ ID NO: 91137 - protein, 7 aa, synthetic construct
HTGAHHQ

SEQ ID NO: 91138 - protein, 7 aa, synthetic construct
DRHAGRD

SEQ ID NO: 91139 - protein, 7 aa, synthetic construct
MSKYVPL

SEQ ID NO: 91140 - protein, 7 aa, synthetic construct
YPDKRID

SEQ ID NO: 91141 - protein, 7 aa, synthetic construct
NKPAGTA

SEQ ID NO: 91142 - protein, 7 aa, synthetic construct
VWQKEYP

SEQ ID NO: 91143 - protein, 7 aa, synthetic construct
LSGHMRD

SEQ ID NO: 91144 - protein, 7 aa, synthetic construct
YQTPNPD

SEQ ID NO: 91145 - protein, 7 aa, synthetic construct
PRKENIE

SEQ ID NO: 91146 - protein, 7 aa, synthetic construct
LFNEIVG

SEQ ID NO: 91147 - protein, 7 aa, synthetic construct
VLGNKAP

SEQ ID NO: 91148 - protein, 7 aa, synthetic construct
NGSNKMP

SEQ ID NO: 91149 - protein, 7 aa, synthetic construct
LLDIFQP

SEQ ID NO: 91150 - protein, 7 aa, synthetic construct
NTDRINY

SEQ ID NO: 91151 - protein, 7 aa, synthetic construct
QEGKLSR

SEQ ID NO: 91152 - protein, 7 aa, synthetic construct
TRKETWE

SEQ ID NO: 91153 - protein, 7 aa, synthetic construct
PMKYHNM

SEQ ID NO: 91154 - protein, 7 aa, synthetic construct
IRAHHVV

SEQ ID NO: 91155 - protein, 7 aa, synthetic construct
TKPTAEK

SEQ ID NO: 91156 - protein, 7 aa, synthetic construct
YLNFGME

SEQ ID NO: 91157 - protein, 7 aa, synthetic construct
NPLKHMI

SEQ ID NO: 91158 - protein, 7 aa, synthetic construct
GTMTRYD

SEQ ID NO: 91159 - protein, 7 aa, synthetic construct
RLGLFDD

SEQ ID NO: 91160 - protein, 7 aa, synthetic construct
DPGWEGK

SEQ ID NO: 91161 - protein, 7 aa, synthetic construct
HQQMTQL

SEQ ID NO: 91162 - protein, 7 aa, synthetic construct
PSAPLQM

SEQ ID NO: 91163 - protein, 7 aa, synthetic construct
VMGSTDL

SEQ ID NO: 91164 - protein, 7 aa, synthetic construct
KWAEKVV

SEQ ID NO: 91165 - protein, 7 aa, synthetic construct
KVLPDRG

SEQ ID NO: 91166 - protein, 7 aa, synthetic construct
TEGTSRV

SEQ ID NO: 91167 - protein, 7 aa, synthetic construct
PPPKMAA

SEQ ID NO: 91168 - protein, 7 aa, synthetic construct
NVMGHMA

SEQ ID NO: 91169 - protein, 7 aa, synthetic construct
AKVYATA

SEQ ID NO: 91170 - protein, 7 aa, synthetic construct
FITYAPE

SEQ ID NO: 91171 - protein, 7 aa, synthetic construct
KTNSAYA

SEQ ID NO: 91172 - protein, 7 aa, synthetic construct
WQAQHVN

SEQ ID NO: 91173 - protein, 7 aa, synthetic construct
IRDPSAS

SEQ ID NO: 91174 - protein, 7 aa, synthetic construct
PKSAAAA

SEQ ID NO: 91175 - protein, 7 aa, synthetic construct
DRLAGAV

SEQ ID NO: 91176 - protein, 7 aa, synthetic construct
FDPVAVH

SEQ ID NO: 91177 - protein, 7 aa, synthetic construct
DGNIRSH

SEQ ID NO: 91178 - protein, 7 aa, synthetic construct
PKHQMLA

SEQ ID NO: 91179 - protein, 7 aa, synthetic construct
VGKSYNQ

SEQ ID NO: 91180 - protein, 7 aa, synthetic construct
AYVQRTP

SEQ ID NO: 91181 - protein, 7 aa, synthetic construct
QNGHQPE

SEQ ID NO: 91182 - protein, 7 aa, synthetic construct
FAGFQTH

SEQ ID NO: 91183 - protein, 7 aa, synthetic construct
PSTPKGM

SEQ ID NO: 91184 - protein, 7 aa, synthetic construct
LGGPVKT

SEQ ID NO: 91185 - protein, 7 aa, synthetic construct
MIRLHDG

SEQ ID NO: 91186 - protein, 7 aa, synthetic construct
DEYHKPS

SEQ ID NO: 91187 - protein, 7 aa, synthetic construct
RSTDWPH

SEQ ID NO: 91188 - protein, 7 aa, synthetic construct
YLERQRV

SEQ ID NO: 91189 - protein, 7 aa, synthetic construct
RHNHTED

SEQ ID NO: 91190 - protein, 7 aa, synthetic construct
PQKSMSA

SEQ ID NO: 91191 - protein, 7 aa, synthetic construct
YPMGQGP

SEQ ID NO: 91192 - protein, 7 aa, synthetic construct
AAHMLQD

SEQ ID NO: 91193 - protein, 7 aa, synthetic construct
ANSRTMY

SEQ ID NO: 91194 - protein, 7 aa, synthetic construct
KLPETHT

SEQ ID NO: 91195 - protein, 7 aa, synthetic construct
GLNGVHF

SEQ ID NO: 91196 - protein, 7 aa, synthetic construct
NLRPEYN

SEQ ID NO: 91197 - protein, 7 aa, synthetic construct
LHEKMHV

SEQ ID NO: 91198 - protein, 7 aa, synthetic construct
MIKGPND

SEQ ID NO: 91199 - protein, 7 aa, synthetic construct
THAMPSP

SEQ ID NO: 91200 - protein, 7 aa, synthetic construct
NRNSITD

SEQ ID NO: 91201 - protein, 7 aa, synthetic construct
LYMEGGN

SEQ ID NO: 91202 - protein, 7 aa, synthetic construct
ILPLTPR

SEQ ID NO: 91203 - protein, 7 aa, synthetic construct
AQQANVT

SEQ ID NO: 91204 - protein, 7 aa, synthetic construct
TQVKHNT

SEQ ID NO: 91205 - protein, 7 aa, synthetic construct
VSMPSRM

SEQ ID NO: 91206 - protein, 7 aa, synthetic construct
HQQTTVY

SEQ ID NO: 91207 - protein, 7 aa, synthetic construct
NHHSFNP

SEQ ID NO: 91208 - protein, 7 aa, synthetic construct
NSSQLAK

SEQ ID NO: 91209 - protein, 7 aa, synthetic construct
DSQNGSR

SEQ ID NO: 91210 - protein, 7 aa, synthetic construct
YAYGKGV

SEQ ID NO: 91211 - protein, 7 aa, synthetic construct
IAVPNAD

SEQ ID NO: 91212 - protein, 7 aa, synthetic construct
NHAPKNI

SEQ ID NO: 91213 - protein, 7 aa, synthetic construct
GTKGMAA

SEQ ID NO: 91214 - protein, 7 aa, synthetic construct
PWMKNGT

SEQ ID NO: 91215 - protein, 7 aa, synthetic construct
IPKQYHQ

SEQ ID NO: 91216 - protein, 7 aa, synthetic construct
MGKTQNP

SEQ ID NO: 91217 - protein, 7 aa, synthetic construct
TTSHDAF

SEQ ID NO: 91218 - protein, 7 aa, synthetic construct
SAAQATT

SEQ ID NO: 91219 - protein, 7 aa, synthetic construct
FERVTIN

SEQ ID NO: 91220 - protein, 7 aa, synthetic construct
SYGTMSM

SEQ ID NO: 91221 - protein, 7 aa, synthetic construct
VGPNPQA

SEQ ID NO: 91222 - protein, 7 aa, synthetic construct
QDRLTQK

SEQ ID NO: 91223 - protein, 7 aa, synthetic construct
VGPMGFD

SEQ ID NO: 91224 - protein, 7 aa, synthetic construct
QPKNAQL

SEQ ID NO: 91225 - protein, 7 aa, synthetic construct
LLSADYV

SEQ ID NO: 91226 - protein, 7 aa, synthetic construct
VLYQKEM

SEQ ID NO: 91227 - protein, 7 aa, synthetic construct
MNGTNDL

SEQ ID NO: 91228 - protein, 7 aa, synthetic construct
LMQDGRK

SEQ ID NO: 91229 - protein, 7 aa, synthetic construct
RSPDLRT

SEQ ID NO: 91230 - protein, 7 aa, synthetic construct
FDPVQRF

SEQ ID NO: 91231 - protein, 7 aa, synthetic construct
AIIRGGM

SEQ ID NO: 91232 - protein, 7 aa, synthetic construct
GYPNHLA

SEQ ID NO: 91233 - protein, 7 aa, synthetic construct
HSNKDLL

SEQ ID NO: 91234 - protein, 7 aa, synthetic construct
NPHRDGK

SEQ ID NO: 91235 - protein, 7 aa, synthetic construct
GKMTAPA

SEQ ID NO: 91236 - protein, 7 aa, synthetic construct
FQDGANA

SEQ ID NO: 91237 - protein, 7 aa, synthetic construct
SNTQGNS

SEQ ID NO: 91238 - protein, 7 aa, synthetic construct
FPSQQGD

SEQ ID NO: 91239 - protein, 7 aa, synthetic construct
ALGAPAF

SEQ ID NO: 91240 - protein, 7 aa, synthetic construct
WNTIPQG

SEQ ID NO: 91241 - protein, 7 aa, synthetic construct
AHQVENR

SEQ ID NO: 91242 - protein, 7 aa, synthetic construct
YEKIPYI

SEQ ID NO: 91243 - protein, 7 aa, synthetic construct
VRSPGHD

SEQ ID NO: 91244 - protein, 7 aa, synthetic construct
YISTGKG

SEQ ID NO: 91245 - protein, 7 aa, synthetic construct
MNTAGQR

SEQ ID NO: 91246 - protein, 7 aa, synthetic construct
AVPEKIN

SEQ ID NO: 91247 - protein, 7 aa, synthetic construct
VPKEGKV

SEQ ID NO: 91248 - protein, 7 aa, synthetic construct
YVNQEQR

SEQ ID NO: 91249 - protein, 7 aa, synthetic construct
WHMQKVS

SEQ ID NO: 91250 - protein, 7 aa, synthetic construct
WKGPVDL

SEQ ID NO: 91251 - protein, 7 aa, synthetic construct
NIRYQDH

SEQ ID NO: 91252 - protein, 7 aa, synthetic construct
FLMNMPN

SEQ ID NO: 91253 - protein, 7 aa, synthetic construct
KVYEEPV

SEQ ID NO: 91254 - protein, 7 aa, synthetic construct
ERHLAVT

SEQ ID NO: 91255 - protein, 7 aa, synthetic construct
NKNPGNA

SEQ ID NO: 91256 - protein, 7 aa, synthetic construct
PYNGNDS

SEQ ID NO: 91257 - protein, 7 aa, synthetic construct
ELRLNMH

SEQ ID NO: 91258 - protein, 7 aa, synthetic construct
QMEFVQA

SEQ ID NO: 91259 - protein, 7 aa, synthetic construct
LMPNARL

SEQ ID NO: 91260 - protein, 7 aa, synthetic construct
VYIQKNE

SEQ ID NO: 91261 - protein, 7 aa, synthetic construct
AKDENKG

SEQ ID NO: 91262 - protein, 7 aa, synthetic construct
AEGFKHN

SEQ ID NO: 91263 - protein, 7 aa, synthetic construct
FTSNAEL

SEQ ID NO: 91264 - protein, 7 aa, synthetic construct
KTGESIA

SEQ ID NO: 91265 - protein, 7 aa, synthetic construct
GHKDMLV

SEQ ID NO: 91266 - protein, 7 aa, synthetic construct
SHESRHD

SEQ ID NO: 91267 - protein, 7 aa, synthetic construct
PPRPQVP

SEQ ID NO: 91268 - protein, 7 aa, synthetic construct
NAAMHTI

SEQ ID NO: 91269 - protein, 7 aa, synthetic construct
APTSTLD

SEQ ID NO: 91270 - protein, 7 aa, synthetic construct
KFDPKVM

SEQ ID NO: 91271 - protein, 7 aa, synthetic construct
QVSSAAA

SEQ ID NO: 91272 - protein, 7 aa, synthetic construct
HPKNELH

SEQ ID NO: 91273 - protein, 7 aa, synthetic construct
IISRETG

SEQ ID NO: 91274 - protein, 7 aa, synthetic construct
RNHLGNL

SEQ ID NO: 91275 - protein, 7 aa, synthetic construct
VARETNM

SEQ ID NO: 91276 - protein, 7 aa, synthetic construct
TMFEKFE

SEQ ID NO: 91277 - protein, 7 aa, synthetic construct
FPPFQGP

SEQ ID NO: 91278 - protein, 7 aa, synthetic construct
DKVLQHA

SEQ ID NO: 91279 - protein, 7 aa, synthetic construct
IQRHQAN

SEQ ID NO: 91280 - protein, 7 aa, synthetic construct
WHDLGRE

SEQ ID NO: 91281 - protein, 7 aa, synthetic construct
YPALGNT

SEQ ID NO: 91282 - protein, 7 aa, synthetic construct
GDPRIGE

SEQ ID NO: 91283 - protein, 7 aa, synthetic construct
EHTTQRN

SEQ ID NO: 91284 - protein, 7 aa, synthetic construct
MDNYQKV

SEQ ID NO: 91285 - protein, 7 aa, synthetic construct
YAPKYPQ

SEQ ID NO: 91286 - protein, 7 aa, synthetic construct
YKEVHTM

SEQ ID NO: 91287 - protein, 7 aa, synthetic construct
KQTAQKE

SEQ ID NO: 91288 - protein, 7 aa, synthetic construct
DDLRYPK

SEQ ID NO: 91289 - protein, 7 aa, synthetic construct
DTNWKDK

SEQ ID NO: 91290 - protein, 7 aa, synthetic construct
KRIVHDV

SEQ ID NO: 91291 - protein, 7 aa, synthetic construct
LVPSLHI

SEQ ID NO: 91292 - protein, 7 aa, synthetic construct
LQFEKSV

SEQ ID NO: 91293 - protein, 7 aa, synthetic construct
KYDMHME

SEQ ID NO: 91294 - protein, 7 aa, synthetic construct
LAPGLEI

SEQ ID NO: 91295 - protein, 7 aa, synthetic construct
ERIYQDK

SEQ ID NO: 91296 - protein, 7 aa, synthetic construct
TQRTSNP

SEQ ID NO: 91297 - protein, 7 aa, synthetic construct
HRDNNLQ

SEQ ID NO: 91298 - protein, 7 aa, synthetic construct
QERKEPG

SEQ ID NO: 91299 - protein, 7 aa, synthetic construct
KSKTEVF

SEQ ID NO: 91300 - protein, 7 aa, synthetic construct
QTPQHAF

SEQ ID NO: 91301 - protein, 7 aa, synthetic construct
WGAVQMT

SEQ ID NO: 91302 - protein, 7 aa, synthetic construct
AKLNQNA

SEQ ID NO: 91303 - protein, 7 aa, synthetic construct
YKIEHVT

SEQ ID NO: 91304 - protein, 7 aa, synthetic construct
DLTPKAG

SEQ ID NO: 91305 - protein, 7 aa, synthetic construct
SPTFRPE

SEQ ID NO: 91306 - protein, 7 aa, synthetic construct
MQRNEGY

SEQ ID NO: 91307 - protein, 7 aa, synthetic construct
NLGWNQA

SEQ ID NO: 91308 - protein, 7 aa, synthetic construct
EGLYPSR

SEQ ID NO: 91309 - protein, 7 aa, synthetic construct
KRQEDHR

SEQ ID NO: 91310 - protein, 7 aa, synthetic construct
AMNNTTV

SEQ ID NO: 91311 - protein, 7 aa, synthetic construct
YPAATPP

SEQ ID NO: 91312 - protein, 7 aa, synthetic construct
MKVTMNM

SEQ ID NO: 91313 - protein, 7 aa, synthetic construct
GTKEREH

SEQ ID NO: 91314 - protein, 7 aa, synthetic construct
YENRMQS

SEQ ID NO: 91315 - protein, 7 aa, synthetic construct
RQWQPSE

SEQ ID NO: 91316 - protein, 7 aa, synthetic construct
TNHKGVW

SEQ ID NO: 91317 - protein, 7 aa, synthetic construct
AEDRQAH

SEQ ID NO: 91318 - protein, 7 aa, synthetic construct
AEGIQRL

SEQ ID NO: 91319 - protein, 7 aa, synthetic construct
PKHQYIE

SEQ ID NO: 91320 - protein, 7 aa, synthetic construct
QSLMPKP

SEQ ID NO: 91321 - protein, 7 aa, synthetic construct
IIYKNQH

SEQ ID NO: 91322 - protein, 7 aa, synthetic construct
AAQNTTN

SEQ ID NO: 91323 - protein, 7 aa, synthetic construct
VPMMQVN

SEQ ID NO: 91324 - protein, 7 aa, synthetic construct
NTIDAEK

SEQ ID NO: 91325 - protein, 7 aa, synthetic construct
HAHNVNF

SEQ ID NO: 91326 - protein, 7 aa, synthetic construct
TMPATML

SEQ ID NO: 91327 - protein, 7 aa, synthetic construct
AYHHPMS

SEQ ID NO: 91328 - protein, 7 aa, synthetic construct
ESRINQH

SEQ ID NO: 91329 - protein, 7 aa, synthetic construct
DYRGSVQ

SEQ ID NO: 91330 - protein, 7 aa, synthetic construct
FRTVRDG

SEQ ID NO: 91331 - protein, 7 aa, synthetic construct
PPRVVPG

SEQ ID NO: 91332 - protein, 7 aa, synthetic construct
LDWKDER

SEQ ID NO: 91333 - protein, 7 aa, synthetic construct
FQKNRDI

SEQ ID NO: 91334 - protein, 7 aa, synthetic construct
ANKQSNH

SEQ ID NO: 91335 - protein, 7 aa, synthetic construct
DGQNQKL

SEQ ID NO: 91336 - protein, 7 aa, synthetic construct
VSRDASE

SEQ ID NO: 91337 - protein, 7 aa, synthetic construct
KSISPGQ

SEQ ID NO: 91338 - protein, 7 aa, synthetic construct
SGAMGGN

SEQ ID NO: 91339 - protein, 7 aa, synthetic construct
VPQSTKY

SEQ ID NO: 91340 - protein, 7 aa, synthetic construct
HPEPAVS

SEQ ID NO: 91341 - protein, 7 aa, synthetic construct
SGEWINS

SEQ ID NO: 91342 - protein, 7 aa, synthetic construct
TREYTTH

SEQ ID NO: 91343 - protein, 7 aa, synthetic construct
TIEKTLQ

SEQ ID NO: 91344 - protein, 7 aa, synthetic construct
QFMLKQE

SEQ ID NO: 91345 - protein, 7 aa, synthetic construct
ETRNQSD

SEQ ID NO: 91346 - protein, 7 aa, synthetic construct
KVIQQDH

SEQ ID NO: 91347 - protein, 7 aa, synthetic construct
EKTHVAW

SEQ ID NO: 91348 - protein, 7 aa, synthetic construct
IRGNFLP

SEQ ID NO: 91349 - protein, 7 aa, synthetic construct
QYPKQHN

SEQ ID NO: 91350 - protein, 7 aa, synthetic construct
FHIDPNG

SEQ ID NO: 91351 - protein, 7 aa, synthetic construct
MVHKEDY

SEQ ID NO: 91352 - protein, 7 aa, synthetic construct
THTISAH

SEQ ID NO: 91353 - protein, 7 aa, synthetic construct
CKNAVAG

SEQ ID NO: 91354 - protein, 7 aa, synthetic construct
GYQKSDH

SEQ ID NO: 91355 - protein, 7 aa, synthetic construct
HDNFKYA

SEQ ID NO: 91356 - protein, 7 aa, synthetic construct
SNNAQKV

SEQ ID NO: 91357 - protein, 7 aa, synthetic construct
QIQHPHI

SEQ ID NO: 91358 - protein, 7 aa, synthetic construct
DKLLNNG

SEQ ID NO: 91359 - protein, 7 aa, synthetic construct
SVPRLNP

SEQ ID NO: 91360 - protein, 7 aa, synthetic construct
YKSATIH

SEQ ID NO: 91361 - protein, 7 aa, synthetic construct
HETIKIG

SEQ ID NO: 91362 - protein, 7 aa, synthetic construct
MQKDRTA

SEQ ID NO: 91363 - protein, 7 aa, synthetic construct
RHTGDSW

SEQ ID NO: 91364 - protein, 7 aa, synthetic construct
NSIVYTP

SEQ ID NO: 91365 - protein, 7 aa, synthetic construct
SQKMMPP

SEQ ID NO: 91366 - protein, 7 aa, synthetic construct
DEQKFKY

SEQ ID NO: 91367 - protein, 7 aa, synthetic construct
LRKAEHQ

SEQ ID NO: 91368 - protein, 7 aa, synthetic construct
AVGTMQH

SEQ ID NO: 91369 - protein, 7 aa, synthetic construct
RQNAMGG

SEQ ID NO: 91370 - protein, 7 aa, synthetic construct
VEDRAGA

SEQ ID NO: 91371 - protein, 7 aa, synthetic construct
KMPMNEQ

SEQ ID NO: 91372 - protein, 7 aa, synthetic construct
GGNKATP

SEQ ID NO: 91373 - protein, 7 aa, synthetic construct
SVQSHHM

SEQ ID NO: 91374 - protein, 7 aa, synthetic construct
EHPTFPA

SEQ ID NO: 91375 - protein, 7 aa, synthetic construct
TKGQELL

SEQ ID NO: 91376 - protein, 7 aa, synthetic construct
SNAPRIV

SEQ ID NO: 91377 - protein, 7 aa, synthetic construct
IQKGQTI

SEQ ID NO: 91378 - protein, 7 aa, synthetic construct
MKAELLH

SEQ ID NO: 91379 - protein, 7 aa, synthetic construct
TMKLDPS

SEQ ID NO: 91380 - protein, 7 aa, synthetic construct
DERSHAW

SEQ ID NO: 91381 - protein, 7 aa, synthetic construct
QGPAASK

SEQ ID NO: 91382 - protein, 7 aa, synthetic construct
GAEFSNH

SEQ ID NO: 91383 - protein, 7 aa, synthetic construct
YPGSDQS

SEQ ID NO: 91384 - protein, 7 aa, synthetic construct
NRKIEVT

SEQ ID NO: 91385 - protein, 7 aa, synthetic construct
NHDFVQK

SEQ ID NO: 91386 - protein, 7 aa, synthetic construct
YAEMRQQ

SEQ ID NO: 91387 - protein, 7 aa, synthetic construct
WNVKHSS

SEQ ID NO: 91388 - protein, 7 aa, synthetic construct
RTTDKTV

SEQ ID NO: 91389 - protein, 7 aa, synthetic construct
SVQSPKM

SEQ ID NO: 91390 - protein, 7 aa, synthetic construct
MAFNTKE

SEQ ID NO: 91391 - protein, 7 aa, synthetic construct
LIDHNRD

SEQ ID NO: 91392 - protein, 7 aa, synthetic construct
TRPMDRL

SEQ ID NO: 91393 - protein, 7 aa, synthetic construct
YSRFENA

SEQ ID NO: 91394 - protein, 7 aa, synthetic construct
SKFVAIQ

SEQ ID NO: 91395 - protein, 7 aa, synthetic construct
QMVHHRD

SEQ ID NO: 91396 - protein, 7 aa, synthetic construct
TPKSSMS

SEQ ID NO: 91397 - protein, 7 aa, synthetic construct
LKGQNHW

SEQ ID NO: 91398 - protein, 7 aa, synthetic construct
TWSKNGL

SEQ ID NO: 91399 - protein, 7 aa, synthetic construct
TAANYQD

SEQ ID NO: 91400 - protein, 7 aa, synthetic construct
YKPKGMA

SEQ ID NO: 91401 - protein, 7 aa, synthetic construct
AASIAMH

SEQ ID NO: 91402 - protein, 7 aa, synthetic construct
DHAIRTD

SEQ ID NO: 91403 - protein, 7 aa, synthetic construct
MPERSGP

SEQ ID NO: 91404 - protein, 7 aa, synthetic construct
RMTEKNF

SEQ ID NO: 91405 - protein, 7 aa, synthetic construct
NPGQSRW

SEQ ID NO: 91406 - protein, 7 aa, synthetic construct
AFAFQTP

SEQ ID NO: 91407 - protein, 7 aa, synthetic construct
MNNNKSF

SEQ ID NO: 91408 - protein, 7 aa, synthetic construct
VNFHGNK

SEQ ID NO: 91409 - protein, 7 aa, synthetic construct
SVMQTRT

SEQ ID NO: 91410 - protein, 7 aa, synthetic construct
QWSAAPP

SEQ ID NO: 91411 - protein, 7 aa, synthetic construct
LRMPPHS

SEQ ID NO: 91412 - protein, 7 aa, synthetic construct
VKMVGMM

SEQ ID NO: 91413 - protein, 7 aa, synthetic construct
NKKDVTA

SEQ ID NO: 91414 - protein, 7 aa, synthetic construct
RVTVHNA

SEQ ID NO: 91415 - protein, 7 aa, synthetic construct
YGEWRSQ

SEQ ID NO: 91416 - protein, 7 aa, synthetic construct
AKSHNPV

SEQ ID NO: 91417 - protein, 7 aa, synthetic construct
HREGSNY

SEQ ID NO: 91418 - protein, 7 aa, synthetic construct
TNLRELP

SEQ ID NO: 91419 - protein, 7 aa, synthetic construct
GHNHVIH

SEQ ID NO: 91420 - protein, 7 aa, synthetic construct
THQSTIV

SEQ ID NO: 91421 - protein, 7 aa, synthetic construct
MVRVHLD

SEQ ID NO: 91422 - protein, 7 aa, synthetic construct
LQFGGIH

SEQ ID NO: 91423 - protein, 7 aa, synthetic construct
THLEKIG

SEQ ID NO: 91424 - protein, 7 aa, synthetic construct
IQNMLIS

SEQ ID NO: 91425 - protein, 7 aa, synthetic construct
QQNFNPM

SEQ ID NO: 91426 - protein, 7 aa, synthetic construct
KFNVNEA

SEQ ID NO: 91427 - protein, 7 aa, synthetic construct
HVGAMQI

SEQ ID NO: 91428 - protein, 7 aa, synthetic construct
GKSTSGV

SEQ ID NO: 91429 - protein, 7 aa, synthetic construct
RFTTDEN

SEQ ID NO: 91430 - protein, 7 aa, synthetic construct
QLNGHYH

SEQ ID NO: 91431 - protein, 7 aa, synthetic construct
AFSPASI

SEQ ID NO: 91432 - protein, 7 aa, synthetic construct
GGGLPHQ

SEQ ID NO: 91433 - protein, 7 aa, synthetic construct
TAQQHWS

SEQ ID NO: 91434 - protein, 7 aa, synthetic construct
MATVSGR

SEQ ID NO: 91435 - protein, 7 aa, synthetic construct
NGKGQMG

SEQ ID NO: 91436 - protein, 7 aa, synthetic construct
YKAGQDD

SEQ ID NO: 91437 - protein, 7 aa, synthetic construct
PRMVTEG

SEQ ID NO: 91438 - protein, 7 aa, synthetic construct
HQPERRI

SEQ ID NO: 91439 - protein, 7 aa, synthetic construct
HSPNSSM

SEQ ID NO: 91440 - protein, 7 aa, synthetic construct
VRVLHGV

SEQ ID NO: 91441 - protein, 7 aa, synthetic construct
RIPMGPV

SEQ ID NO: 91442 - protein, 7 aa, synthetic construct
PNGQHGS

SEQ ID NO: 91443 - protein, 7 aa, synthetic construct
GLQPYPI

SEQ ID NO: 91444 - protein, 7 aa, synthetic construct
NHDKTEH

SEQ ID NO: 91445 - protein, 7 aa, synthetic construct
HGGIPTR

SEQ ID NO: 91446 - protein, 7 aa, synthetic construct
LFGMKQH

SEQ ID NO: 91447 - protein, 7 aa, synthetic construct
NLRDSNG

SEQ ID NO: 91448 - protein, 7 aa, synthetic construct
FLTTHDI

SEQ ID NO: 91449 - protein, 7 aa, synthetic construct
GRMSEER

SEQ ID NO: 91450 - protein, 7 aa, synthetic construct
EARPQRN

SEQ ID NO: 91451 - protein, 7 aa, synthetic construct
YNAGLTT

SEQ ID NO: 91452 - protein, 7 aa, synthetic construct
LNHEHKG

SEQ ID NO: 91453 - protein, 7 aa, synthetic construct
GNRISEY

SEQ ID NO: 91454 - protein, 7 aa, synthetic construct
VPEIAHS

SEQ ID NO: 91455 - protein, 7 aa, synthetic construct
SFHPEFK

SEQ ID NO: 91456 - protein, 7 aa, synthetic construct
TVTAHTE

SEQ ID NO: 91457 - protein, 7 aa, synthetic construct
GKTEQKG

SEQ ID NO: 91458 - protein, 7 aa, synthetic construct
IPPMSGQ

SEQ ID NO: 91459 - protein, 7 aa, synthetic construct
PALSNKT

SEQ ID NO: 91460 - protein, 7 aa, synthetic construct
HFAANQT

SEQ ID NO: 91461 - protein, 7 aa, synthetic construct
DPAYRNQ

SEQ ID NO: 91462 - protein, 7 aa, synthetic construct
VTSQYTR

SEQ ID NO: 91463 - protein, 7 aa, synthetic construct
SGSLMSK

SEQ ID NO: 91464 - protein, 7 aa, synthetic construct
YQHESAN

SEQ ID NO: 91465 - protein, 7 aa, synthetic construct
KTPNMGE

SEQ ID NO: 91466 - protein, 7 aa, synthetic construct
YEKWNTM

SEQ ID NO: 91467 - protein, 7 aa, synthetic construct
LSHNGSA

SEQ ID NO: 91468 - protein, 7 aa, synthetic construct
LRIYDHE

SEQ ID NO: 91469 - protein, 7 aa, synthetic construct
FPGAQLQ

SEQ ID NO: 91470 - protein, 7 aa, synthetic construct
HTQLGYG

SEQ ID NO: 91471 - protein, 7 aa, synthetic construct
SPSTMPV

SEQ ID NO: 91472 - protein, 7 aa, synthetic construct
KTDAALI

SEQ ID NO: 91473 - protein, 7 aa, synthetic construct
MANIQGY

SEQ ID NO: 91474 - protein, 7 aa, synthetic construct
PTRRDME

SEQ ID NO: 91475 - protein, 7 aa, synthetic construct
YIVDAKV

SEQ ID NO: 91476 - protein, 7 aa, synthetic construct
GYESLTA

SEQ ID NO: 91477 - protein, 7 aa, synthetic construct
SGHGSTQ

SEQ ID NO: 91478 - protein, 7 aa, synthetic construct
ISDRNNN

SEQ ID NO: 91479 - protein, 7 aa, synthetic construct
HSQKSYI

SEQ ID NO: 91480 - protein, 7 aa, synthetic construct
GPMSKRD

SEQ ID NO: 91481 - protein, 7 aa, synthetic construct
WNVINNG

SEQ ID NO: 91482 - protein, 7 aa, synthetic construct
HKNYPLM

SEQ ID NO: 91483 - protein, 7 aa, synthetic construct
RPNNNGV

SEQ ID NO: 91484 - protein, 7 aa, synthetic construct
AGEHSNA

SEQ ID NO: 91485 - protein, 7 aa, synthetic construct
LFNLGKP

SEQ ID NO: 91486 - protein, 7 aa, synthetic construct
NFGAGQG

SEQ ID NO: 91487 - protein, 7 aa, synthetic construct
QTLQDKG

SEQ ID NO: 91488 - protein, 7 aa, synthetic construct
NKTYALG

SEQ ID NO: 91489 - protein, 7 aa, synthetic construct
YLIGKTV

SEQ ID NO: 91490 - protein, 7 aa, synthetic construct
KFSEHYI

SEQ ID NO: 91491 - protein, 7 aa, synthetic construct
SYGTKFL

SEQ ID NO: 91492 - protein, 7 aa, synthetic construct
DIHMMHK

SEQ ID NO: 91493 - protein, 7 aa, synthetic construct
NPMPTPY

SEQ ID NO: 91494 - protein, 7 aa, synthetic construct
KKHNDDT

SEQ ID NO: 91495 - protein, 7 aa, synthetic construct
IHQGNMA

SEQ ID NO: 91496 - protein, 7 aa, synthetic construct
KYNDANL

SEQ ID NO: 91497 - protein, 7 aa, synthetic construct
TDNKYML

SEQ ID NO: 91498 - protein, 7 aa, synthetic construct
MQFTHIE

SEQ ID NO: 91499 - protein, 7 aa, synthetic construct
RQAPQMP

SEQ ID NO: 91500 - protein, 7 aa, synthetic construct
STKSGVF

SEQ ID NO: 91501 - protein, 7 aa, synthetic construct
TFLESTR

SEQ ID NO: 91502 - protein, 7 aa, synthetic construct
TTDKWAR

SEQ ID NO: 91503 - protein, 7 aa, synthetic construct
VMSPISK

SEQ ID NO: 91504 - protein, 7 aa, synthetic construct
GSTHMNG

SEQ ID NO: 91505 - protein, 7 aa, synthetic construct
NFGHAEE

SEQ ID NO: 91506 - protein, 7 aa, synthetic construct
TSNAQLS

SEQ ID NO: 91507 - protein, 7 aa, synthetic construct
AVNSNKA

SEQ ID NO: 91508 - protein, 7 aa, synthetic construct
AYEIRSA

SEQ ID NO: 91509 - protein, 7 aa, synthetic construct
TSLNQLA

SEQ ID NO: 91510 - protein, 7 aa, synthetic construct
AYNLKTS

SEQ ID NO: 91511 - protein, 7 aa, synthetic construct
MNASAVP

SEQ ID NO: 91512 - protein, 7 aa, synthetic construct
NKYQNIM

SEQ ID NO: 91513 - protein, 7 aa, synthetic construct
KNGIATV

SEQ ID NO: 91514 - protein, 7 aa, synthetic construct
IHNEGKT

SEQ ID NO: 91515 - protein, 7 aa, synthetic construct
HKMKEDN

SEQ ID NO: 91516 - protein, 7 aa, synthetic construct
MPQHDRE

SEQ ID NO: 91517 - protein, 7 aa, synthetic construct
LQGYDVH

SEQ ID NO: 91518 - protein, 7 aa, synthetic construct
WYKDAPM

SEQ ID NO: 91519 - protein, 7 aa, synthetic construct
GKQQNAA

SEQ ID NO: 91520 - protein, 7 aa, synthetic construct
ASHKSID

SEQ ID NO: 91521 - protein, 7 aa, synthetic construct
YKNQNED

SEQ ID NO: 91522 - protein, 7 aa, synthetic construct
AQWNKDN

SEQ ID NO: 91523 - protein, 7 aa, synthetic construct
LRAANVL

SEQ ID NO: 91524 - protein, 7 aa, synthetic construct
SKSSGFM

SEQ ID NO: 91525 - protein, 7 aa, synthetic construct
NAVHLMK

SEQ ID NO: 91526 - protein, 7 aa, synthetic construct
MPPIQTH

SEQ ID NO: 91527 - protein, 7 aa, synthetic construct
GPQHNPA

SEQ ID NO: 91528 - protein, 7 aa, synthetic construct
LSFKETK

SEQ ID NO: 91529 - protein, 7 aa, synthetic construct
QSVVVTK

SEQ ID NO: 91530 - protein, 7 aa, synthetic construct
TLPTLGL

SEQ ID NO: 91531 - protein, 7 aa, synthetic construct
FIQVDSH

SEQ ID NO: 91532 - protein, 7 aa, synthetic construct
GPQSHFA

SEQ ID NO: 91533 - protein, 7 aa, synthetic construct
NMMFHKE

SEQ ID NO: 91534 - protein, 7 aa, synthetic construct
DIKYEQE

SEQ ID NO: 91535 - protein, 7 aa, synthetic construct
NPPFFDD

SEQ ID NO: 91536 - protein, 7 aa, synthetic construct
SGYMPDG

SEQ ID NO: 91537 - protein, 7 aa, synthetic construct
VLQTDYA

SEQ ID NO: 91538 - protein, 7 aa, synthetic construct
GKMPSLH

SEQ ID NO: 91539 - protein, 7 aa, synthetic construct
LNHSNLN

SEQ ID NO: 91540 - protein, 7 aa, synthetic construct
TEGQHPM

SEQ ID NO: 91541 - protein, 7 aa, synthetic construct
RHVGDST

SEQ ID NO: 91542 - protein, 7 aa, synthetic construct
LAVENRI

SEQ ID NO: 91543 - protein, 7 aa, synthetic construct
NVHLERS

SEQ ID NO: 91544 - protein, 7 aa, synthetic construct
PMNQRQM

SEQ ID NO: 91545 - protein, 7 aa, synthetic construct
NTQFVKH

SEQ ID NO: 91546 - protein, 7 aa, synthetic construct
LDPPTYK

SEQ ID NO: 91547 - protein, 7 aa, synthetic construct
VAGPLLR

SEQ ID NO: 91548 - protein, 7 aa, synthetic construct
LNKNGAA

SEQ ID NO: 91549 - protein, 7 aa, synthetic construct
LAASSDP

SEQ ID NO: 91550 - protein, 7 aa, synthetic construct
AQHYTPD

SEQ ID NO: 91551 - protein, 7 aa, synthetic construct
DLQKGKN

SEQ ID NO: 91552 - protein, 7 aa, synthetic construct
TMQSRSV

SEQ ID NO: 91553 - protein, 7 aa, synthetic construct
RVIQTDK

SEQ ID NO: 91554 - protein, 7 aa, synthetic construct
HEHNMMV

SEQ ID NO: 91555 - protein, 7 aa, synthetic construct
WTTAMVG

SEQ ID NO: 91556 - protein, 7 aa, synthetic construct
IEIVKGG

SEQ ID NO: 91557 - protein, 7 aa, synthetic construct
FLKMMHE

SEQ ID NO: 91558 - protein, 7 aa, synthetic construct
SLKSMHP

SEQ ID NO: 91559 - protein, 7 aa, synthetic construct
TKAHDKV

SEQ ID NO: 91560 - protein, 7 aa, synthetic construct
HNTHNHE

SEQ ID NO: 91561 - protein, 7 aa, synthetic construct
ENKVQLF

SEQ ID NO: 91562 - protein, 7 aa, synthetic construct
SSKTIAG

SEQ ID NO: 91563 - protein, 7 aa, synthetic construct
TQQAGPN

SEQ ID NO: 91564 - protein, 7 aa, synthetic construct
NPSRGFD

SEQ ID NO: 91565 - protein, 7 aa, synthetic construct
GWPGTKN

SEQ ID NO: 91566 - protein, 7 aa, synthetic construct
YTTGTGI

SEQ ID NO: 91567 - protein, 7 aa, synthetic construct
IQYNHKD

SEQ ID NO: 91568 - protein, 7 aa, synthetic construct
AKNAIEM

SEQ ID NO: 91569 - protein, 7 aa, synthetic construct
MVDKKGS

SEQ ID NO: 91570 - protein, 7 aa, synthetic construct
QFQGGPV

SEQ ID NO: 91571 - protein, 7 aa, synthetic construct
NRVLSEA

SEQ ID NO: 91572 - protein, 7 aa, synthetic construct
LKAFDYE

SEQ ID NO: 91573 - protein, 7 aa, synthetic construct
NFAVDRA

SEQ ID NO: 91574 - protein, 7 aa, synthetic construct
DAHRTTI

SEQ ID NO: 91575 - protein, 7 aa, synthetic construct
KDAVMYK

SEQ ID NO: 91576 - protein, 7 aa, synthetic construct
YHNEEER

SEQ ID NO: 91577 - protein, 7 aa, synthetic construct
GDGKAAV

SEQ ID NO: 91578 - protein, 7 aa, synthetic construct
EHSSGNM

SEQ ID NO: 91579 - protein, 7 aa, synthetic construct
KSMGPQG

SEQ ID NO: 91580 - protein, 7 aa, synthetic construct
DLGERRE

SEQ ID NO: 91581 - protein, 7 aa, synthetic construct
YRGFTSS

SEQ ID NO: 91582 - protein, 7 aa, synthetic construct
DRKMLYD

SEQ ID NO: 91583 - protein, 7 aa, synthetic construct
YLKQMAH

SEQ ID NO: 91584 - protein, 7 aa, synthetic construct
KIKGEMG

SEQ ID NO: 91585 - protein, 7 aa, synthetic construct
MVKEKMD

SEQ ID NO: 91586 - protein, 7 aa, synthetic construct
DDATRRE

SEQ ID NO: 91587 - protein, 7 aa, synthetic construct
TLHGEQA

SEQ ID NO: 91588 - protein, 7 aa, synthetic construct
LEYKPYQ

SEQ ID NO: 91589 - protein, 7 aa, synthetic construct
YDERLGL

SEQ ID NO: 91590 - protein, 7 aa, synthetic construct
QPVNPTA

SEQ ID NO: 91591 - protein, 7 aa, synthetic construct
KTSATVS

SEQ ID NO: 91592 - protein, 7 aa, synthetic construct
VAMARPD

SEQ ID NO: 91593 - protein, 7 aa, synthetic construct
RYSKTFE

SEQ ID NO: 91594 - protein, 7 aa, synthetic construct
PKGNMHS

SEQ ID NO: 91595 - protein, 7 aa, synthetic construct
KHEWEGT

SEQ ID NO: 91596 - protein, 7 aa, synthetic construct
DGALGVG

SEQ ID NO: 91597 - protein, 7 aa, synthetic construct
ANVGVGF

SEQ ID NO: 91598 - protein, 7 aa, synthetic construct
PKNGSDM

SEQ ID NO: 91599 - protein, 7 aa, synthetic construct
TWDSQHK

SEQ ID NO: 91600 - protein, 7 aa, synthetic construct
LGGMVSM

SEQ ID NO: 91601 - protein, 7 aa, synthetic construct
VIDFKPV

SEQ ID NO: 91602 - protein, 7 aa, synthetic construct
VVHKYIG

SEQ ID NO: 91603 - protein, 7 aa, synthetic construct
LKNNLGE

SEQ ID NO: 91604 - protein, 7 aa, synthetic construct
QLPSIHE

SEQ ID NO: 91605 - protein, 7 aa, synthetic construct
VRDAGYK

SEQ ID NO: 91606 - protein, 7 aa, synthetic construct
DEGARLR

SEQ ID NO: 91607 - protein, 7 aa, synthetic construct
AKPWDQV

SEQ ID NO: 91608 - protein, 7 aa, synthetic construct
LKDNTAF

SEQ ID NO: 91609 - protein, 7 aa, synthetic construct
LYLTKME

SEQ ID NO: 91610 - protein, 7 aa, synthetic construct
DQIRRTH

SEQ ID NO: 91611 - protein, 7 aa, synthetic construct
NRNAMTG

SEQ ID NO: 91612 - protein, 7 aa, synthetic construct
QWDTRPS

SEQ ID NO: 91613 - protein, 7 aa, synthetic construct
MKMSPKV

SEQ ID NO: 91614 - protein, 7 aa, synthetic construct
KVMEGHM

SEQ ID NO: 91615 - protein, 7 aa, synthetic construct
HDSTRVT

SEQ ID NO: 91616 - protein, 7 aa, synthetic construct
HGHVEIA

SEQ ID NO: 91617 - protein, 7 aa, synthetic construct
EMNRSPK

SEQ ID NO: 91618 - protein, 7 aa, synthetic construct
GMFQQPQ

SEQ ID NO: 91619 - protein, 7 aa, synthetic construct
APFNHSA

SEQ ID NO: 91620 - protein, 7 aa, synthetic construct
HGTGEAI

SEQ ID NO: 91621 - protein, 7 aa, synthetic construct
HASLAGY

SEQ ID NO: 91622 - protein, 7 aa, synthetic construct
SAGYNDR

SEQ ID NO: 91623 - protein, 7 aa, synthetic construct
KASDYLI

SEQ ID NO: 91624 - protein, 7 aa, synthetic construct
HAQHDKV

SEQ ID NO: 91625 - protein, 7 aa, synthetic construct
NRQTTQA

SEQ ID NO: 91626 - protein, 7 aa, synthetic construct
EGPKAAP

SEQ ID NO: 91627 - protein, 7 aa, synthetic construct
IKHTMPA

SEQ ID NO: 91628 - protein, 7 aa, synthetic construct
NYVKKEI

SEQ ID NO: 91629 - protein, 7 aa, synthetic construct
PQVVPDH

SEQ ID NO: 91630 - protein, 7 aa, synthetic construct
KNKFDPV

SEQ ID NO: 91631 - protein, 7 aa, synthetic construct
YFPHAQQ

SEQ ID NO: 91632 - protein, 7 aa, synthetic construct
RERSEVH

SEQ ID NO: 91633 - protein, 7 aa, synthetic construct
SDKPPNA

SEQ ID NO: 91634 - protein, 7 aa, synthetic construct
YEPSNQY

SEQ ID NO: 91635 - protein, 7 aa, synthetic construct
DVKVQTG

SEQ ID NO: 91636 - protein, 7 aa, synthetic construct
YGKTNPD

SEQ ID NO: 91637 - protein, 7 aa, synthetic construct
TNPMWEG

SEQ ID NO: 91638 - protein, 7 aa, synthetic construct
VHIARPQ

SEQ ID NO: 91639 - protein, 7 aa, synthetic construct
TVLSKPL

SEQ ID NO: 91640 - protein, 7 aa, synthetic construct
MAKMSHS

SEQ ID NO: 91641 - protein, 7 aa, synthetic construct
LDSFQPV

SEQ ID NO: 91642 - protein, 7 aa, synthetic construct
LKGMHDT

SEQ ID NO: 91643 - protein, 7 aa, synthetic construct
ILRGSGA

SEQ ID NO: 91644 - protein, 7 aa, synthetic construct
LGAINSH

SEQ ID NO: 91645 - protein, 7 aa, synthetic construct
KGSEGRG

SEQ ID NO: 91646 - protein, 7 aa, synthetic construct
GQKNMMP

SEQ ID NO: 91647 - protein, 7 aa, synthetic construct
LNTREAY

SEQ ID NO: 91648 - protein, 7 aa, synthetic construct
AKIYNGA

SEQ ID NO: 91649 - protein, 7 aa, synthetic construct
PKNTIEK

SEQ ID NO: 91650 - protein, 7 aa, synthetic construct
QGTKQPV

SEQ ID NO: 91651 - protein, 7 aa, synthetic construct
LVRSLQD

SEQ ID NO: 91652 - protein, 7 aa, synthetic construct
WDRLTLN

SEQ ID NO: 91653 - protein, 7 aa, synthetic construct
AGRPYQA

SEQ ID NO: 91654 - protein, 7 aa, synthetic construct
PPGGGLR

SEQ ID NO: 91655 - protein, 7 aa, synthetic construct
DFRPDMR

SEQ ID NO: 91656 - protein, 7 aa, synthetic construct
REANLHA

SEQ ID NO: 91657 - protein, 7 aa, synthetic construct
GTRAFGI

SEQ ID NO: 91658 - protein, 7 aa, synthetic construct
IYKDTAG

SEQ ID NO: 91659 - protein, 7 aa, synthetic construct
DHKIRLV

SEQ ID NO: 91660 - protein, 7 aa, synthetic construct
EKSLGDF

SEQ ID NO: 91661 - protein, 7 aa, synthetic construct
MKDHGDQ

SEQ ID NO: 91662 - protein, 7 aa, synthetic construct
LKSDTSI

SEQ ID NO: 91663 - protein, 7 aa, synthetic construct
HIRNTNI

SEQ ID NO: 91664 - protein, 7 aa, synthetic construct
MDQHKNT

SEQ ID NO: 91665 - protein, 7 aa, synthetic construct
LEVRKEP

SEQ ID NO: 91666 - protein, 7 aa, synthetic construct
HSIDRQI

SEQ ID NO: 91667 - protein, 7 aa, synthetic construct
DANKPLR

SEQ ID NO: 91668 - protein, 7 aa, synthetic construct
PTHLKNL

SEQ ID NO: 91669 - protein, 7 aa, synthetic construct
HDARDLP

SEQ ID NO: 91670 - protein, 7 aa, synthetic construct
LYTVESA

SEQ ID NO: 91671 - protein, 7 aa, synthetic construct
KSAMIHG

SEQ ID NO: 91672 - protein, 7 aa, synthetic construct
FPKHDPE

SEQ ID NO: 91673 - protein, 7 aa, synthetic construct
SKDALYF

SEQ ID NO: 91674 - protein, 7 aa, synthetic construct
HHGIDKV

SEQ ID NO: 91675 - protein, 7 aa, synthetic construct
FIKNNAI

SEQ ID NO: 91676 - protein, 7 aa, synthetic construct
REQPLFA

SEQ ID NO: 91677 - protein, 7 aa, synthetic construct
LQPKQIL

SEQ ID NO: 91678 - protein, 7 aa, synthetic construct
FPRADVV

SEQ ID NO: 91679 - protein, 7 aa, synthetic construct
IKGGAPF

SEQ ID NO: 91680 - protein, 7 aa, synthetic construct
RDAAQYS

SEQ ID NO: 91681 - protein, 7 aa, synthetic construct
MKGIDPL

SEQ ID NO: 91682 - protein, 7 aa, synthetic construct
QDRPSDK

SEQ ID NO: 91683 - protein, 7 aa, synthetic construct
AHTPRSV

SEQ ID NO: 91684 - protein, 7 aa, synthetic construct
ELVNFRG

SEQ ID NO: 91685 - protein, 7 aa, synthetic construct
AMPLGAI

SEQ ID NO: 91686 - protein, 7 aa, synthetic construct
RPQGAGS

SEQ ID NO: 91687 - protein, 7 aa, synthetic construct
NFPDHHK

SEQ ID NO: 91688 - protein, 7 aa, synthetic construct
NQKATTG

SEQ ID NO: 91689 - protein, 7 aa, synthetic construct
KMTSEQF

SEQ ID NO: 91690 - protein, 7 aa, synthetic construct
LRATYDS

SEQ ID NO: 91691 - protein, 7 aa, synthetic construct
KAQIMFE

SEQ ID NO: 91692 - protein, 7 aa, synthetic construct
GKTNAPA

SEQ ID NO: 91693 - protein, 7 aa, synthetic construct
PPLKHIE

SEQ ID NO: 91694 - protein, 7 aa, synthetic construct
LQKPIQV

SEQ ID NO: 91695 - protein, 7 aa, synthetic construct
IKPNEGP

SEQ ID NO: 91696 - protein, 7 aa, synthetic construct
HKDSMKY

SEQ ID NO: 91697 - protein, 7 aa, synthetic construct
GAPSKFD

SEQ ID NO: 91698 - protein, 7 aa, synthetic construct
ENAILRM

SEQ ID NO: 91699 - protein, 7 aa, synthetic construct
GVTNRGG

SEQ ID NO: 91700 - protein, 7 aa, synthetic construct
SDFANKI

SEQ ID NO: 91701 - protein, 7 aa, synthetic construct
LNEHTPK

SEQ ID NO: 91702 - protein, 7 aa, synthetic construct
EGFHVGG

SEQ ID NO: 91703 - protein, 7 aa, synthetic construct
KIHESGS

SEQ ID NO: 91704 - protein, 7 aa, synthetic construct
QDSSERY

SEQ ID NO: 91705 - protein, 7 aa, synthetic construct
LDLKSGW

SEQ ID NO: 91706 - protein, 7 aa, synthetic construct
LPYQQKD

SEQ ID NO: 91707 - protein, 7 aa, synthetic construct
KMHDNDH

SEQ ID NO: 91708 - protein, 7 aa, synthetic construct
NRSEKVI

SEQ ID NO: 91709 - protein, 7 aa, synthetic construct
KAVVLEI

SEQ ID NO: 91710 - protein, 7 aa, synthetic construct
DFQDQMR

SEQ ID NO: 91711 - protein, 7 aa, synthetic construct
SQGAPSR

SEQ ID NO: 91712 - protein, 7 aa, synthetic construct
QKPPTQN

SEQ ID NO: 91713 - protein, 7 aa, synthetic construct
QHSANQT

SEQ ID NO: 91714 - protein, 7 aa, synthetic construct
VNHTMLG

SEQ ID NO: 91715 - protein, 7 aa, synthetic construct
DLFYGHE

SEQ ID NO: 91716 - protein, 7 aa, synthetic construct
LGVDHVL

SEQ ID NO: 91717 - protein, 7 aa, synthetic construct
EPRATVG

SEQ ID NO: 91718 - protein, 7 aa, synthetic construct
MQHEPQH

SEQ ID NO: 91719 - protein, 7 aa, synthetic construct
VNQQLHS

SEQ ID NO: 91720 - protein, 7 aa, synthetic construct
WHHKMQA

SEQ ID NO: 91721 - protein, 7 aa, synthetic construct
KIEGPNA

SEQ ID NO: 91722 - protein, 7 aa, synthetic construct
KEPQGNA

SEQ ID NO: 91723 - protein, 7 aa, synthetic construct
YVTDKKS

SEQ ID NO: 91724 - protein, 7 aa, synthetic construct
NGQAYAA

SEQ ID NO: 91725 - protein, 7 aa, synthetic construct
WMPIEKT

SEQ ID NO: 91726 - protein, 7 aa, synthetic construct
RDDFIGP

SEQ ID NO: 91727 - protein, 7 aa, synthetic construct
MPDNNKF

SEQ ID NO: 91728 - protein, 7 aa, synthetic construct
NSAIGVG

SEQ ID NO: 91729 - protein, 7 aa, synthetic construct
REAFENK

SEQ ID NO: 91730 - protein, 7 aa, synthetic construct
LPLTHGV

SEQ ID NO: 91731 - protein, 7 aa, synthetic construct
WTNNLRS

SEQ ID NO: 91732 - protein, 7 aa, synthetic construct
KGNESMG

SEQ ID NO: 91733 - protein, 7 aa, synthetic construct
KPEYGQL

SEQ ID NO: 91734 - protein, 7 aa, synthetic construct
MIAYHAE

SEQ ID NO: 91735 - protein, 7 aa, synthetic construct
GQLTHTS

SEQ ID NO: 91736 - protein, 7 aa, synthetic construct
ITAAYEK

SEQ ID NO: 91737 - protein, 7 aa, synthetic construct
KALPHML

SEQ ID NO: 91738 - protein, 7 aa, synthetic construct
TIWEGKA

SEQ ID NO: 91739 - protein, 7 aa, synthetic construct
NHTRVHF

SEQ ID NO: 91740 - protein, 7 aa, synthetic construct
IGGLMPN

SEQ ID NO: 91741 - protein, 7 aa, synthetic construct
KEMRGEL

SEQ ID NO: 91742 - protein, 7 aa, synthetic construct
GNKDNFH

SEQ ID NO: 91743 - protein, 7 aa, synthetic construct
FQGNMDM

SEQ ID NO: 91744 - protein, 7 aa, synthetic construct
HYSQMTP

SEQ ID NO: 91745 - protein, 7 aa, synthetic construct
ADMPKLV

SEQ ID NO: 91746 - protein, 7 aa, synthetic construct
TKEGDNR

SEQ ID NO: 91747 - protein, 7 aa, synthetic construct
VMAYGKD

SEQ ID NO: 91748 - protein, 7 aa, synthetic construct
TLDYRKE

SEQ ID NO: 91749 - protein, 7 aa, synthetic construct
TGNWRTE

SEQ ID NO: 91750 - protein, 7 aa, synthetic construct
YHRNQND

SEQ ID NO: 91751 - protein, 7 aa, synthetic construct
SMVQPHR

SEQ ID NO: 91752 - protein, 7 aa, synthetic construct
RIMGEEA

SEQ ID NO: 91753 - protein, 7 aa, synthetic construct
RDVQLEG

SEQ ID NO: 91754 - protein, 7 aa, synthetic construct
IGPLSNF

SEQ ID NO: 91755 - protein, 7 aa, synthetic construct
VAYRTTH

SEQ ID NO: 91756 - protein, 7 aa, synthetic construct
VNEKREM

SEQ ID NO: 91757 - protein, 7 aa, synthetic construct
YQDRNQF

SEQ ID NO: 91758 - protein, 7 aa, synthetic construct
PERLGLG

SEQ ID NO: 91759 - protein, 7 aa, synthetic construct
YRKESFI

SEQ ID NO: 91760 - protein, 7 aa, synthetic construct
SLASVTD

SEQ ID NO: 91761 - protein, 7 aa, synthetic construct
LRVTVVG

SEQ ID NO: 91762 - protein, 7 aa, synthetic construct
GQTGTPH

SEQ ID NO: 91763 - protein, 7 aa, synthetic construct
IANDWKA

SEQ ID NO: 91764 - protein, 7 aa, synthetic construct
QGSPTVL

SEQ ID NO: 91765 - protein, 7 aa, synthetic construct
RHSEFPS

SEQ ID NO: 91766 - protein, 7 aa, synthetic construct
TEISQNA

SEQ ID NO: 91767 - protein, 7 aa, synthetic construct
VDVNRYA

SEQ ID NO: 91768 - protein, 7 aa, synthetic construct
WVGEAGM

SEQ ID NO: 91769 - protein, 7 aa, synthetic construct
SQKVGEP

SEQ ID NO: 91770 - protein, 7 aa, synthetic construct
RLTNNAQ

SEQ ID NO: 91771 - protein, 7 aa, synthetic construct
EWQSGVV

SEQ ID NO: 91772 - protein, 7 aa, synthetic construct
YNVHMNI

SEQ ID NO: 91773 - protein, 7 aa, synthetic construct
NKFNTYQ

SEQ ID NO: 91774 - protein, 7 aa, synthetic construct
SKKDFQG

SEQ ID NO: 91775 - protein, 7 aa, synthetic construct
NKVNAAA

SEQ ID NO: 91776 - protein, 7 aa, synthetic construct
PIAHGLK

SEQ ID NO: 91777 - protein, 7 aa, synthetic construct
SEKAQYP

SEQ ID NO: 91778 - protein, 7 aa, synthetic construct
GKHDEIK

SEQ ID NO: 91779 - protein, 7 aa, synthetic construct
EPVRAEL

SEQ ID NO: 91780 - protein, 7 aa, synthetic construct
IPVRDVT

SEQ ID NO: 91781 - protein, 7 aa, synthetic construct
TTAHMLS

SEQ ID NO: 91782 - protein, 7 aa, synthetic construct
IARILPS

SEQ ID NO: 91783 - protein, 7 aa, synthetic construct
IHPEEIR

SEQ ID NO: 91784 - protein, 7 aa, synthetic construct
IDLKRGT

SEQ ID NO: 91785 - protein, 7 aa, synthetic construct
DKASNWG

SEQ ID NO: 91786 - protein, 7 aa, synthetic construct
YAEQFQS

SEQ ID NO: 91787 - protein, 7 aa, synthetic construct
YQPYLQD

SEQ ID NO: 91788 - protein, 7 aa, synthetic construct
HQQREAH

SEQ ID NO: 91789 - protein, 7 aa, synthetic construct
LSEKASY

SEQ ID NO: 91790 - protein, 7 aa, synthetic construct
NDKFETP

SEQ ID NO: 91791 - protein, 7 aa, synthetic construct
PSGPKVV

SEQ ID NO: 91792 - protein, 7 aa, synthetic construct
EGSISRA

SEQ ID NO: 91793 - protein, 7 aa, synthetic construct
SMEHTNT

SEQ ID NO: 91794 - protein, 7 aa, synthetic construct
FPPLQTY

SEQ ID NO: 91795 - protein, 7 aa, synthetic construct
QTRDKWG

SEQ ID NO: 91796 - protein, 7 aa, synthetic construct
RVDIEGA

SEQ ID NO: 91797 - protein, 7 aa, synthetic construct
NGPNFLM

SEQ ID NO: 91798 - protein, 7 aa, synthetic construct
PSKDNTI

SEQ ID NO: 91799 - protein, 7 aa, synthetic construct
KTTASPA

SEQ ID NO: 91800 - protein, 7 aa, synthetic construct
YRQSQDS

SEQ ID NO: 91801 - protein, 7 aa, synthetic construct
FKTGTID

SEQ ID NO: 91802 - protein, 7 aa, synthetic construct
MVANQGK

SEQ ID NO: 91803 - protein, 7 aa, synthetic construct
AIRAVNP

SEQ ID NO: 91804 - protein, 7 aa, synthetic construct
WIRDVDA

SEQ ID NO: 91805 - protein, 7 aa, synthetic construct
PLKHAQQ

SEQ ID NO: 91806 - protein, 7 aa, synthetic construct
LFSIVTE

SEQ ID NO: 91807 - protein, 7 aa, synthetic construct
LVPNIVT

SEQ ID NO: 91808 - protein, 7 aa, synthetic construct
ATPHHMN

SEQ ID NO: 91809 - protein, 7 aa, synthetic construct
WGANVMT

SEQ ID NO: 91810 - protein, 7 aa, synthetic construct
TLMVPSP

SEQ ID NO: 91811 - protein, 7 aa, synthetic construct
APYNNLV

SEQ ID NO: 91812 - protein, 7 aa, synthetic construct
LKTMTGQ

SEQ ID NO: 91813 - protein, 7 aa, synthetic construct
NFHTIVA

SEQ ID NO: 91814 - protein, 7 aa, synthetic construct
TNMHPGH

SEQ ID NO: 91815 - protein, 7 aa, synthetic construct
DGQHGMA

SEQ ID NO: 91816 - protein, 7 aa, synthetic construct
WSANSLS

SEQ ID NO: 91817 - protein, 7 aa, synthetic construct
PKVSSGG

SEQ ID NO: 91818 - protein, 7 aa, synthetic construct
TKTGALN

SEQ ID NO: 91819 - protein, 7 aa, synthetic construct
NEVGRIT

SEQ ID NO: 91820 - protein, 7 aa, synthetic construct
YMEARPS

SEQ ID NO: 91821 - protein, 7 aa, synthetic construct
QTAFEGV

SEQ ID NO: 91822 - protein, 7 aa, synthetic construct
THKDDVG

SEQ ID NO: 91823 - protein, 7 aa, synthetic construct
VAGMNRL

SEQ ID NO: 91824 - protein, 7 aa, synthetic construct
GDIKMSM

SEQ ID NO: 91825 - protein, 7 aa, synthetic construct
SDRKEPR

SEQ ID NO: 91826 - protein, 7 aa, synthetic construct
SAPNWAA

SEQ ID NO: 91827 - protein, 7 aa, synthetic construct
KLHDGNI

SEQ ID NO: 91828 - protein, 7 aa, synthetic construct
KSPNNVF

SEQ ID NO: 91829 - protein, 7 aa, synthetic construct
AKDNYQW

SEQ ID NO: 91830 - protein, 7 aa, synthetic construct
MYLDRTD

SEQ ID NO: 91831 - protein, 7 aa, synthetic construct
THVHKIP

SEQ ID NO: 91832 - protein, 7 aa, synthetic construct
SDVVHML

SEQ ID NO: 91833 - protein, 7 aa, synthetic construct
KPFGDMM

SEQ ID NO: 91834 - protein, 7 aa, synthetic construct
KPSSTQN

SEQ ID NO: 91835 - protein, 7 aa, synthetic construct
LNRSQAP

SEQ ID NO: 91836 - protein, 7 aa, synthetic construct
VVQREVA

SEQ ID NO: 91837 - protein, 7 aa, synthetic construct
SHPAIPD

SEQ ID NO: 91838 - protein, 7 aa, synthetic construct
TRNDSKE

SEQ ID NO: 91839 - protein, 7 aa, synthetic construct
ESPRRGD

SEQ ID NO: 91840 - protein, 7 aa, synthetic construct
GHPVAGR

SEQ ID NO: 91841 - protein, 7 aa, synthetic construct
VMGFSEA

SEQ ID NO: 91842 - protein, 7 aa, synthetic construct
GQKMSMS

SEQ ID NO: 91843 - protein, 7 aa, synthetic construct
EVTKLEH

SEQ ID NO: 91844 - protein, 7 aa, synthetic construct
VQSPRES

SEQ ID NO: 91845 - protein, 7 aa, synthetic construct
GAEHNKM

SEQ ID NO: 91846 - protein, 7 aa, synthetic construct
DKYLGVE

SEQ ID NO: 91847 - protein, 7 aa, synthetic construct
QVTATQM

SEQ ID NO: 91848 - protein, 7 aa, synthetic construct
KLTTSNF

SEQ ID NO: 91849 - protein, 7 aa, synthetic construct
SQSTKDW

SEQ ID NO: 91850 - protein, 7 aa, synthetic construct
LEGNRLT

SEQ ID NO: 91851 - protein, 7 aa, synthetic construct
AHFEARV

SEQ ID NO: 91852 - protein, 7 aa, synthetic construct
TGRDDNN

SEQ ID NO: 91853 - protein, 7 aa, synthetic construct
LRDAVTR

SEQ ID NO: 91854 - protein, 7 aa, synthetic construct
GAGAHVW

SEQ ID NO: 91855 - protein, 7 aa, synthetic construct
ANTEFRK

SEQ ID NO: 91856 - protein, 7 aa, synthetic construct
NVSALGA

SEQ ID NO: 91857 - protein, 7 aa, synthetic construct
PQKMIVQ

SEQ ID NO: 91858 - protein, 7 aa, synthetic construct
IHDKLKI

SEQ ID NO: 91859 - protein, 7 aa, synthetic construct
HNQRMDD

SEQ ID NO: 91860 - protein, 7 aa, synthetic construct
TLPNAHD

SEQ ID NO: 91861 - protein, 7 aa, synthetic construct
SDGSNTR

SEQ ID NO: 91862 - protein, 7 aa, synthetic construct
VHMGQGR

SEQ ID NO: 91863 - protein, 7 aa, synthetic construct
MPYSSPA

SEQ ID NO: 91864 - protein, 7 aa, synthetic construct
NKLPPNQ

SEQ ID NO: 91865 - protein, 7 aa, synthetic construct
KQNTNTQ

SEQ ID NO: 91866 - protein, 7 aa, synthetic construct
IAKPQNI

SEQ ID NO: 91867 - protein, 7 aa, synthetic construct
TMNRSEF

SEQ ID NO: 91868 - protein, 7 aa, synthetic construct
LGRPVAP

SEQ ID NO: 91869 - protein, 7 aa, synthetic construct
EDRGAHR

SEQ ID NO: 91870 - protein, 7 aa, synthetic construct
TPPIGGR

SEQ ID NO: 91871 - protein, 7 aa, synthetic construct
GSYPTSK

SEQ ID NO: 91872 - protein, 7 aa, synthetic construct
HRVERPN

SEQ ID NO: 91873 - protein, 7 aa, synthetic construct
HGRINQN

SEQ ID NO: 91874 - protein, 7 aa, synthetic construct
LPVLAVG

SEQ ID NO: 91875 - protein, 7 aa, synthetic construct
PHGFTVS

SEQ ID NO: 91876 - protein, 7 aa, synthetic construct
VQTFTQG

SEQ ID NO: 91877 - protein, 7 aa, synthetic construct
SRFINAG

SEQ ID NO: 91878 - protein, 7 aa, synthetic construct
LIIDKSP

SEQ ID NO: 91879 - protein, 7 aa, synthetic construct
TNASSYK

SEQ ID NO: 91880 - protein, 7 aa, synthetic construct
PYNPAIV

SEQ ID NO: 91881 - protein, 7 aa, synthetic construct
ALRVPTP

SEQ ID NO: 91882 - protein, 7 aa, synthetic construct
QERDSMA

SEQ ID NO: 91883 - protein, 7 aa, synthetic construct
WSINARA

SEQ ID NO: 91884 - protein, 7 aa, synthetic construct
VNIYKDK

SEQ ID NO: 91885 - protein, 7 aa, synthetic construct
IPMQHSY

SEQ ID NO: 91886 - protein, 7 aa, synthetic construct
AIRDSFL

SEQ ID NO: 91887 - protein, 7 aa, synthetic construct
MHSMQSR

SEQ ID NO: 91888 - protein, 7 aa, synthetic construct
RVSPNIL

SEQ ID NO: 91889 - protein, 7 aa, synthetic construct
NTNRIMP

SEQ ID NO: 91890 - protein, 7 aa, synthetic construct
RHGGAER

SEQ ID NO: 91891 - protein, 7 aa, synthetic construct
HMGINLE

SEQ ID NO: 91892 - protein, 7 aa, synthetic construct
QNPSNQY

SEQ ID NO: 91893 - protein, 7 aa, synthetic construct
MSTPTQD

SEQ ID NO: 91894 - protein, 7 aa, synthetic construct
RMEQGPK

SEQ ID NO: 91895 - protein, 7 aa, synthetic construct
GYSQEQF

SEQ ID NO: 91896 - protein, 7 aa, synthetic construct
ELNSNFK

SEQ ID NO: 91897 - protein, 7 aa, synthetic construct
QIPVAKI

SEQ ID NO: 91898 - protein, 7 aa, synthetic construct
VLSPHKI

SEQ ID NO: 91899 - protein, 7 aa, synthetic construct
SIDRMTE

SEQ ID NO: 91900 - protein, 7 aa, synthetic construct
PLAIPGR

SEQ ID NO: 91901 - protein, 7 aa, synthetic construct
DFTLKPM

SEQ ID NO: 91902 - protein, 7 aa, synthetic construct
MGQKEPT

SEQ ID NO: 91903 - protein, 7 aa, synthetic construct
NLQDKYH

SEQ ID NO: 91904 - protein, 7 aa, synthetic construct
HYVERKG

SEQ ID NO: 91905 - protein, 7 aa, synthetic construct
DINPISH

SEQ ID NO: 91906 - protein, 7 aa, synthetic construct
PMYNVDR

SEQ ID NO: 91907 - protein, 7 aa, synthetic construct
IEKMITK

SEQ ID NO: 91908 - protein, 7 aa, synthetic construct
DKTRLVM

SEQ ID NO: 91909 - protein, 7 aa, synthetic construct
PRMSGNP

SEQ ID NO: 91910 - protein, 7 aa, synthetic construct
RNIHMNT

SEQ ID NO: 91911 - protein, 7 aa, synthetic construct
TAPKLQD

SEQ ID NO: 91912 - protein, 7 aa, synthetic construct
SKKPDYG

SEQ ID NO: 91913 - protein, 7 aa, synthetic construct
KSFHKED

SEQ ID NO: 91914 - protein, 7 aa, synthetic construct
YGSYEGR

SEQ ID NO: 91915 - protein, 7 aa, synthetic construct
LTRQGEW

SEQ ID NO: 91916 - protein, 7 aa, synthetic construct
MTSNGNR

SEQ ID NO: 91917 - protein, 7 aa, synthetic construct
WDTKGDV

SEQ ID NO: 91918 - protein, 7 aa, synthetic construct
HFKYEAP

SEQ ID NO: 91919 - protein, 7 aa, synthetic construct
KTNSGMV

SEQ ID NO: 91920 - protein, 7 aa, synthetic construct
HEMKMIK

SEQ ID NO: 91921 - protein, 7 aa, synthetic construct
ISENHMV

SEQ ID NO: 91922 - protein, 7 aa, synthetic construct
DPALRIK

SEQ ID NO: 91923 - protein, 7 aa, synthetic construct
AGQAMTK

SEQ ID NO: 91924 - protein, 7 aa, synthetic construct
SNQELTN

SEQ ID NO: 91925 - protein, 7 aa, synthetic construct
NFPPRTM

SEQ ID NO: 91926 - protein, 7 aa, synthetic construct
MQNLANE

SEQ ID NO: 91927 - protein, 7 aa, synthetic construct
AITMIRD

SEQ ID NO: 91928 - protein, 7 aa, synthetic construct
KNRQDII

SEQ ID NO: 91929 - protein, 7 aa, synthetic construct
GALPQMK

SEQ ID NO: 91930 - protein, 7 aa, synthetic construct
LMNVVKH

SEQ ID NO: 91931 - protein, 7 aa, synthetic construct
WRIDAGD

SEQ ID NO: 91932 - protein, 7 aa, synthetic construct
NINPRGA

SEQ ID NO: 91933 - protein, 7 aa, synthetic construct
QHIPVHG

SEQ ID NO: 91934 - protein, 7 aa, synthetic construct
QSYDHKQ

SEQ ID NO: 91935 - protein, 7 aa, synthetic construct
EFRLKNA

SEQ ID NO: 91936 - protein, 7 aa, synthetic construct
RTREPVQ

SEQ ID NO: 91937 - protein, 7 aa, synthetic construct
GEASRPR

SEQ ID NO: 91938 - protein, 7 aa, synthetic construct
VSYQNTG

SEQ ID NO: 91939 - protein, 7 aa, synthetic construct
KPNQSNG

SEQ ID NO: 91940 - protein, 7 aa, synthetic construct
MVPGLIH

SEQ ID NO: 91941 - protein, 7 aa, synthetic construct
EMNIARM

SEQ ID NO: 91942 - protein, 7 aa, synthetic construct
AEMRNPI

SEQ ID NO: 91943 - protein, 7 aa, synthetic construct
DLFYSKE

SEQ ID NO: 91944 - protein, 7 aa, synthetic construct
KPPATDH

SEQ ID NO: 91945 - protein, 7 aa, synthetic construct
IPPVIQS

SEQ ID NO: 91946 - protein, 7 aa, synthetic construct
NDSYMYK

SEQ ID NO: 91947 - protein, 7 aa, synthetic construct
LGDNKQI

SEQ ID NO: 91948 - protein, 7 aa, synthetic construct
WKEIQRE

SEQ ID NO: 91949 - protein, 7 aa, synthetic construct
HRTNMFE

SEQ ID NO: 91950 - protein, 7 aa, synthetic construct
RLPSFHS

SEQ ID NO: 91951 - protein, 7 aa, synthetic construct
MFETSPK

SEQ ID NO: 91952 - protein, 7 aa, synthetic construct
RPQPNEE

SEQ ID NO: 91953 - protein, 7 aa, synthetic construct
AVTLPQP

SEQ ID NO: 91954 - protein, 7 aa, synthetic construct
MSENPMG

SEQ ID NO: 91955 - protein, 7 aa, synthetic construct
HNFGDPA

SEQ ID NO: 91956 - protein, 7 aa, synthetic construct
KMNLHER

SEQ ID NO: 91957 - protein, 7 aa, synthetic construct
LYDKMYP

SEQ ID NO: 91958 - protein, 7 aa, synthetic construct
YEAAPRE

SEQ ID NO: 91959 - protein, 7 aa, synthetic construct
VGAKPAL

SEQ ID NO: 91960 - protein, 7 aa, synthetic construct
NDYQPKE

SEQ ID NO: 91961 - protein, 7 aa, synthetic construct
LKESSQK

SEQ ID NO: 91962 - protein, 7 aa, synthetic construct
GFGIRDG

SEQ ID NO: 91963 - protein, 7 aa, synthetic construct
NDVISKY

SEQ ID NO: 91964 - protein, 7 aa, synthetic construct
MQPIKAF

SEQ ID NO: 91965 - protein, 7 aa, synthetic construct
TQDRAAV

SEQ ID NO: 91966 - protein, 7 aa, synthetic construct
GKQQNNG

SEQ ID NO: 91967 - protein, 7 aa, synthetic construct
KHEKYDL

SEQ ID NO: 91968 - protein, 7 aa, synthetic construct
LQRFREE

SEQ ID NO: 91969 - protein, 7 aa, synthetic construct
LYHKTAA

SEQ ID NO: 91970 - protein, 7 aa, synthetic construct
TIPFTDP

SEQ ID NO: 91971 - protein, 7 aa, synthetic construct
QGARVND

SEQ ID NO: 91972 - protein, 7 aa, synthetic construct
VPVNQKG

SEQ ID NO: 91973 - protein, 7 aa, synthetic construct
HKVAHTV

SEQ ID NO: 91974 - protein, 7 aa, synthetic construct
SGQDRTH

SEQ ID NO: 91975 - protein, 7 aa, synthetic construct
HTMNGPA

SEQ ID NO: 91976 - protein, 7 aa, synthetic construct
IVGANPN

SEQ ID NO: 91977 - protein, 7 aa, synthetic construct
LDRVPIP

SEQ ID NO: 91978 - protein, 7 aa, synthetic construct
MKGQNQC

SEQ ID NO: 91979 - protein, 7 aa, synthetic construct
AQVKLNE

SEQ ID NO: 91980 - protein, 7 aa, synthetic construct
AATAFAP

SEQ ID NO: 91981 - protein, 7 aa, synthetic construct
KMKLQEI

SEQ ID NO: 91982 - protein, 7 aa, synthetic construct
KASAHIP

SEQ ID NO: 91983 - protein, 7 aa, synthetic construct
RDTPNQS

SEQ ID NO: 91984 - protein, 7 aa, synthetic construct
GGSHNQM

SEQ ID NO: 91985 - protein, 7 aa, synthetic construct
TTPKSHE

SEQ ID NO: 91986 - protein, 7 aa, synthetic construct
EGTVNRM

SEQ ID NO: 91987 - protein, 7 aa, synthetic construct
PSLNTQI

SEQ ID NO: 91988 - protein, 7 aa, synthetic construct
FFADPTR

SEQ ID NO: 91989 - protein, 7 aa, synthetic construct
PEKTQHI

SEQ ID NO: 91990 - protein, 7 aa, synthetic construct
TTILLTG

SEQ ID NO: 91991 - protein, 7 aa, synthetic construct
DHMHGKD

SEQ ID NO: 91992 - protein, 7 aa, synthetic construct
FGTNFPS

SEQ ID NO: 91993 - protein, 7 aa, synthetic construct
PMKDARG

SEQ ID NO: 91994 - protein, 7 aa, synthetic construct
DNHGHDD

SEQ ID NO: 91995 - protein, 7 aa, synthetic construct
KQTYTFD

SEQ ID NO: 91996 - protein, 7 aa, synthetic construct
YLPAGMD

SEQ ID NO: 91997 - protein, 7 aa, synthetic construct
HQLGVLA

SEQ ID NO: 91998 - protein, 7 aa, synthetic construct
RDNEYPL

SEQ ID NO: 91999 - protein, 7 aa, synthetic construct
YRGGPTE

SEQ ID NO: 92000 - protein, 7 aa, synthetic construct
KISNAQN

SEQ ID NO: 92001 - protein, 7 aa, synthetic construct
RPANNTA

SEQ ID NO: 92002 - protein, 7 aa, synthetic construct
LPGYSAM

SEQ ID NO: 92003 - protein, 7 aa, synthetic construct
QGVPVTK

SEQ ID NO: 92004 - protein, 7 aa, synthetic construct
KKMDETM

SEQ ID NO: 92005 - protein, 7 aa, synthetic construct
KGVYVPG

SEQ ID NO: 92006 - protein, 7 aa, synthetic construct
ERPTNNT

SEQ ID NO: 92007 - protein, 7 aa, synthetic construct
LEIRDQH

SEQ ID NO: 92008 - protein, 7 aa, synthetic construct
WSSAENT

SEQ ID NO: 92009 - protein, 7 aa, synthetic construct
RSSMERS

SEQ ID NO: 92010 - protein, 7 aa, synthetic construct
MTKDDMR

SEQ ID NO: 92011 - protein, 7 aa, synthetic construct
NVFDSRL

SEQ ID NO: 92012 - protein, 7 aa, synthetic construct
QENHDRN

SEQ ID NO: 92013 - protein, 7 aa, synthetic construct
IQRGTEI

SEQ ID NO: 92014 - protein, 7 aa, synthetic construct
VYLADME

SEQ ID NO: 92015 - protein, 7 aa, synthetic construct
YAKDKMA

SEQ ID NO: 92016 - protein, 7 aa, synthetic construct
KNERNHF

SEQ ID NO: 92017 - protein, 7 aa, synthetic construct
LVAQGYT

SEQ ID NO: 92018 - protein, 7 aa, synthetic construct
YMQSNEF

SEQ ID NO: 92019 - protein, 7 aa, synthetic construct
TLFTVSE

SEQ ID NO: 92020 - protein, 7 aa, synthetic construct
EREFQIT

SEQ ID NO: 92021 - protein, 7 aa, synthetic construct
TMHYNVV

SEQ ID NO: 92022 - protein, 7 aa, synthetic construct
RNSVNYI

SEQ ID NO: 92023 - protein, 7 aa, synthetic construct
NGMESHS

SEQ ID NO: 92024 - protein, 7 aa, synthetic construct
WDAIRQN

SEQ ID NO: 92025 - protein, 7 aa, synthetic construct
GFKGTNI

SEQ ID NO: 92026 - protein, 7 aa, synthetic construct
PQAKMIP

SEQ ID NO: 92027 - protein, 7 aa, synthetic construct
QGTTYTK

SEQ ID NO: 92028 - protein, 7 aa, synthetic construct
VVVSQAN

SEQ ID NO: 92029 - protein, 7 aa, synthetic construct
MNAAYTA

SEQ ID NO: 92030 - protein, 7 aa, synthetic construct
IHETNQP

SEQ ID NO: 92031 - protein, 7 aa, synthetic construct
MGGLVLK

SEQ ID NO: 92032 - protein, 7 aa, synthetic construct
KLPPLMH

SEQ ID NO: 92033 - protein, 7 aa, synthetic construct
YKTEPGV

SEQ ID NO: 92034 - protein, 7 aa, synthetic construct
YVSLQNS

SEQ ID NO: 92035 - protein, 7 aa, synthetic construct
WRADATR

SEQ ID NO: 92036 - protein, 7 aa, synthetic construct
PRVGGLI

SEQ ID NO: 92037 - protein, 7 aa, synthetic construct
AHMQQDR

SEQ ID NO: 92038 - protein, 7 aa, synthetic construct
IEQVAPR

SEQ ID NO: 92039 - protein, 7 aa, synthetic construct
IRVGALV

SEQ ID NO: 92040 - protein, 7 aa, synthetic construct
IVRSIRE

SEQ ID NO: 92041 - protein, 7 aa, synthetic construct
WNLKKSP

SEQ ID NO: 92042 - protein, 7 aa, synthetic construct
NRQSSGI

SEQ ID NO: 92043 - protein, 7 aa, synthetic construct
GTKDKYE

SEQ ID NO: 92044 - protein, 7 aa, synthetic construct
KNPDNAP

SEQ ID NO: 92045 - protein, 7 aa, synthetic construct
QTIVPRP

SEQ ID NO: 92046 - protein, 7 aa, synthetic construct
VTSGSKG

SEQ ID NO: 92047 - protein, 7 aa, synthetic construct
PEPKGYP

SEQ ID NO: 92048 - protein, 7 aa, synthetic construct
YQNGDMT

SEQ ID NO: 92049 - protein, 7 aa, synthetic construct
RNYDSGA

SEQ ID NO: 92050 - protein, 7 aa, synthetic construct
PRATASY

SEQ ID NO: 92051 - protein, 7 aa, synthetic construct
KWVADDK

SEQ ID NO: 92052 - protein, 7 aa, synthetic construct
SAREPEG

SEQ ID NO: 92053 - protein, 7 aa, synthetic construct
FMKMPHA

SEQ ID NO: 92054 - protein, 7 aa, synthetic construct
MQVTRNP

SEQ ID NO: 92055 - protein, 7 aa, synthetic construct
PVAKDDL

SEQ ID NO: 92056 - protein, 7 aa, synthetic construct
NMRITEH

SEQ ID NO: 92057 - protein, 7 aa, synthetic construct
MVREVST

SEQ ID NO: 92058 - protein, 7 aa, synthetic construct
NAQHAQA

SEQ ID NO: 92059 - protein, 7 aa, synthetic construct
VMRNFDD

SEQ ID NO: 92060 - protein, 7 aa, synthetic construct
SHEKHSS

SEQ ID NO: 92061 - protein, 7 aa, synthetic construct
SVVDARR

SEQ ID NO: 92062 - protein, 7 aa, synthetic construct
PHAVKQL

SEQ ID NO: 92063 - protein, 7 aa, synthetic construct
LNDGYRH

SEQ ID NO: 92064 - protein, 7 aa, synthetic construct
KDMRMND

SEQ ID NO: 92065 - protein, 7 aa, synthetic construct
HARSESF

SEQ ID NO: 92066 - protein, 7 aa, synthetic construct
ADPAFLK

SEQ ID NO: 92067 - protein, 7 aa, synthetic construct
PINTNAG

SEQ ID NO: 92068 - protein, 7 aa, synthetic construct
GAGNGTH

SEQ ID NO: 92069 - protein, 7 aa, synthetic construct
RLGHIIQ

SEQ ID NO: 92070 - protein, 7 aa, synthetic construct
FNNGKLQ

SEQ ID NO: 92071 - protein, 7 aa, synthetic construct
GHSQKLD

SEQ ID NO: 92072 - protein, 7 aa, synthetic construct
AGPFSEP

SEQ ID NO: 92073 - protein, 7 aa, synthetic construct
RTHPQAE

SEQ ID NO: 92074 - protein, 7 aa, synthetic construct
KNREAIV

SEQ ID NO: 92075 - protein, 7 aa, synthetic construct
TERSPPR

SEQ ID NO: 92076 - protein, 7 aa, synthetic construct
SNRQQGW

SEQ ID NO: 92077 - protein, 7 aa, synthetic construct
ANPHKVV

SEQ ID NO: 92078 - protein, 7 aa, synthetic construct
NQAKMET

SEQ ID NO: 92079 - protein, 7 aa, synthetic construct
VNTKNSP

SEQ ID NO: 92080 - protein, 7 aa, synthetic construct
KSYNVSI

SEQ ID NO: 92081 - protein, 7 aa, synthetic construct
GRMTDLE

SEQ ID NO: 92082 - protein, 7 aa, synthetic construct
FGADWKE

SEQ ID NO: 92083 - protein, 7 aa, synthetic construct
AMAKTQA

SEQ ID NO: 92084 - protein, 7 aa, synthetic construct
EFPLVKL

SEQ ID NO: 92085 - protein, 7 aa, synthetic construct
ILQHGIL

SEQ ID NO: 92086 - protein, 7 aa, synthetic construct
RPSPATG

SEQ ID NO: 92087 - protein, 7 aa, synthetic construct
GGMNYRG

SEQ ID NO: 92088 - protein, 7 aa, synthetic construct
YKGALQM

SEQ ID NO: 92089 - protein, 7 aa, synthetic construct
STHMGQY

SEQ ID NO: 92090 - protein, 7 aa, synthetic construct
NRAETIY

SEQ ID NO: 92091 - protein, 7 aa, synthetic construct
TIAVHNG

SEQ ID NO: 92092 - protein, 7 aa, synthetic construct
QGTVVPV

SEQ ID NO: 92093 - protein, 7 aa, synthetic construct
MPNNMNM

SEQ ID NO: 92094 - protein, 7 aa, synthetic construct
LKPVFAQ

SEQ ID NO: 92095 - protein, 7 aa, synthetic construct
TNRTIHY

SEQ ID NO: 92096 - protein, 7 aa, synthetic construct
GDATKRH

SEQ ID NO: 92097 - protein, 7 aa, synthetic construct
VRVKHQD

SEQ ID NO: 92098 - protein, 7 aa, synthetic construct
WREEPMP

SEQ ID NO: 92099 - protein, 7 aa, synthetic construct
YKSDENK

SEQ ID NO: 92100 - protein, 7 aa, synthetic construct
MNKIDNI

SEQ ID NO: 92101 - protein, 7 aa, synthetic construct
NWGHSGE

SEQ ID NO: 92102 - protein, 7 aa, synthetic construct
QQKHDGH

SEQ ID NO: 92103 - protein, 7 aa, synthetic construct
TDVHNIG

SEQ ID NO: 92104 - protein, 7 aa, synthetic construct
IDNFSSS

SEQ ID NO: 92105 - protein, 7 aa, synthetic construct
YVAEPQR

SEQ ID NO: 92106 - protein, 7 aa, synthetic construct
SSKSGTM

SEQ ID NO: 92107 - protein, 7 aa, synthetic construct
HERNWEP

SEQ ID NO: 92108 - protein, 7 aa, synthetic construct
SRWAEND

SEQ ID NO: 92109 - protein, 7 aa, synthetic construct
PAKTTGH

SEQ ID NO: 92110 - protein, 7 aa, synthetic construct
SAYLKNE

SEQ ID NO: 92111 - protein, 7 aa, synthetic construct
MSRSNEH

SEQ ID NO: 92112 - protein, 7 aa, synthetic construct
NNNQDKP

SEQ ID NO: 92113 - protein, 7 aa, synthetic construct
WLDRATV

SEQ ID NO: 92114 - protein, 7 aa, synthetic construct
VGPTSGK

SEQ ID NO: 92115 - protein, 7 aa, synthetic construct
KQKIYND

SEQ ID NO: 92116 - protein, 7 aa, synthetic construct
ANFSRSE

SEQ ID NO: 92117 - protein, 7 aa, synthetic construct
MSIQGQA

SEQ ID NO: 92118 - protein, 7 aa, synthetic construct
DNSVKTE

SEQ ID NO: 92119 - protein, 7 aa, synthetic construct
SRGPEGH

SEQ ID NO: 92120 - protein, 7 aa, synthetic construct
NASSDNS

SEQ ID NO: 92121 - protein, 7 aa, synthetic construct
SWTNGVA

SEQ ID NO: 92122 - protein, 7 aa, synthetic construct
QPTPPFS

SEQ ID NO: 92123 - protein, 7 aa, synthetic construct
KENWQTH

SEQ ID NO: 92124 - protein, 7 aa, synthetic construct
ILKHMAP

SEQ ID NO: 92125 - protein, 7 aa, synthetic construct
KLTMGRE

SEQ ID NO: 92126 - protein, 7 aa, synthetic construct
MPIQSLA

SEQ ID NO: 92127 - protein, 7 aa, synthetic construct
SRNVTTD

SEQ ID NO: 92128 - protein, 7 aa, synthetic construct
KAVGLPL

SEQ ID NO: 92129 - protein, 7 aa, synthetic construct
WEKPQTV

SEQ ID NO: 92130 - protein, 7 aa, synthetic construct
ENGGFVR

SEQ ID NO: 92131 - protein, 7 aa, synthetic construct
ANDGYLG

SEQ ID NO: 92132 - protein, 7 aa, synthetic construct
GHLGAQM

SEQ ID NO: 92133 - protein, 7 aa, synthetic construct
PFKHQVM

SEQ ID NO: 92134 - protein, 7 aa, synthetic construct
KSGMEGI

SEQ ID NO: 92135 - protein, 7 aa, synthetic construct
RATTTNA

SEQ ID NO: 92136 - protein, 7 aa, synthetic construct
MLNVNYE

SEQ ID NO: 92137 - protein, 7 aa, synthetic construct
SYHANTL

SEQ ID NO: 92138 - protein, 7 aa, synthetic construct
NHSAMPQ

SEQ ID NO: 92139 - protein, 7 aa, synthetic construct
VIGPNDM

SEQ ID NO: 92140 - protein, 7 aa, synthetic construct
RTGIHEN

SEQ ID NO: 92141 - protein, 7 aa, synthetic construct
WETREGK

SEQ ID NO: 92142 - protein, 7 aa, synthetic construct
WSMNMKS

SEQ ID NO: 92143 - protein, 7 aa, synthetic construct
SNEKNIS

SEQ ID NO: 92144 - protein, 7 aa, synthetic construct
MRTPNLN

SEQ ID NO: 92145 - protein, 7 aa, synthetic construct
QRHDMIV

SEQ ID NO: 92146 - protein, 7 aa, synthetic construct
QNNQSGI

SEQ ID NO: 92147 - protein, 7 aa, synthetic construct
QWDKLNH

SEQ ID NO: 92148 - protein, 7 aa, synthetic construct
NNTFVPQ

SEQ ID NO: 92149 - protein, 7 aa, synthetic construct
QNKQSAP

SEQ ID NO: 92150 - protein, 7 aa, synthetic construct
RNFDEVL

SEQ ID NO: 92151 - protein, 7 aa, synthetic construct
YNLPQNG

SEQ ID NO: 92152 - protein, 7 aa, synthetic construct
NVSYAEI

SEQ ID NO: 92153 - protein, 7 aa, synthetic construct
MHDLIRN

SEQ ID NO: 92154 - protein, 7 aa, synthetic construct
VTVMTGP

SEQ ID NO: 92155 - protein, 7 aa, synthetic construct
KNNSNGG

SEQ ID NO: 92156 - protein, 7 aa, synthetic construct
FQPTQGY

SEQ ID NO: 92157 - protein, 7 aa, synthetic construct
TNMILVP

SEQ ID NO: 92158 - protein, 7 aa, synthetic construct
PTHHEQL

SEQ ID NO: 92159 - protein, 7 aa, synthetic construct
DMHMGKD

SEQ ID NO: 92160 - protein, 7 aa, synthetic construct
NQHTANG

SEQ ID NO: 92161 - protein, 7 aa, synthetic construct
GMGKSHL

SEQ ID NO: 92162 - protein, 7 aa, synthetic construct
FQAVDRR

SEQ ID NO: 92163 - protein, 7 aa, synthetic construct
RVHKEDS

SEQ ID NO: 92164 - protein, 7 aa, synthetic construct
NGLSQEG

SEQ ID NO: 92165 - protein, 7 aa, synthetic construct
DYHAMTK

SEQ ID NO: 92166 - protein, 7 aa, synthetic construct
AAKITLS

SEQ ID NO: 92167 - protein, 7 aa, synthetic construct
SLKIGID

SEQ ID NO: 92168 - protein, 7 aa, synthetic construct
HQYPSIN

SEQ ID NO: 92169 - protein, 7 aa, synthetic construct
ANRGSVA

SEQ ID NO: 92170 - protein, 7 aa, synthetic construct
LVQTFDS

SEQ ID NO: 92171 - protein, 7 aa, synthetic construct
GGDHMNH

SEQ ID NO: 92172 - protein, 7 aa, synthetic construct
PSKQATG

SEQ ID NO: 92173 - protein, 7 aa, synthetic construct
CPGSACS

SEQ ID NO: 92174 - protein, 7 aa, synthetic construct
TPMKASV

SEQ ID NO: 92175 - protein, 7 aa, synthetic construct
HVEHATS

SEQ ID NO: 92176 - protein, 7 aa, synthetic construct
EMHHKER

SEQ ID NO: 92177 - protein, 7 aa, synthetic construct
SRDDMNV

SEQ ID NO: 92178 - protein, 7 aa, synthetic construct
LTVIHTG

SEQ ID NO: 92179 - protein, 7 aa, synthetic construct
GRKNEYD

SEQ ID NO: 92180 - protein, 7 aa, synthetic construct
ALMPSRG

SEQ ID NO: 92181 - protein, 7 aa, synthetic construct
PVEKNWH

SEQ ID NO: 92182 - protein, 7 aa, synthetic construct
MRDAELT

SEQ ID NO: 92183 - protein, 7 aa, synthetic construct
RSAPEVQ

SEQ ID NO: 92184 - protein, 7 aa, synthetic construct
HHHPVPD

SEQ ID NO: 92185 - protein, 7 aa, synthetic construct
SKHLHNM

SEQ ID NO: 92186 - protein, 7 aa, synthetic construct
SYHLPKS

SEQ ID NO: 92187 - protein, 7 aa, synthetic construct
TIKVNIM

SEQ ID NO: 92188 - protein, 7 aa, synthetic construct
FHTHTIK

SEQ ID NO: 92189 - protein, 7 aa, synthetic construct
KLAEGGA

SEQ ID NO: 92190 - protein, 7 aa, synthetic construct
RTPREAD

SEQ ID NO: 92191 - protein, 7 aa, synthetic construct
KYSHSSL

SEQ ID NO: 92192 - protein, 7 aa, synthetic construct
GAYIAPP

SEQ ID NO: 92193 - protein, 7 aa, synthetic construct
NKQTRDG

SEQ ID NO: 92194 - protein, 7 aa, synthetic construct
HQVIAKE

SEQ ID NO: 92195 - protein, 7 aa, synthetic construct
FAIQGNT

SEQ ID NO: 92196 - protein, 7 aa, synthetic construct
YITQPMG

SEQ ID NO: 92197 - protein, 7 aa, synthetic construct
PNQKSNP

SEQ ID NO: 92198 - protein, 7 aa, synthetic construct
TKSEAAS

SEQ ID NO: 92199 - protein, 7 aa, synthetic construct
THTIDRA

SEQ ID NO: 92200 - protein, 7 aa, synthetic construct
NVVQYKE

SEQ ID NO: 92201 - protein, 7 aa, synthetic construct
RAEIAIP

SEQ ID NO: 92202 - protein, 7 aa, synthetic construct
LFTVANS

SEQ ID NO: 92203 - protein, 7 aa, synthetic construct
NPAAQQN

SEQ ID NO: 92204 - protein, 7 aa, synthetic construct
KTRAQDD

SEQ ID NO: 92205 - protein, 7 aa, synthetic construct
QRANSVA

SEQ ID NO: 92206 - protein, 7 aa, synthetic construct
MNIESTK

SEQ ID NO: 92207 - protein, 7 aa, synthetic construct
VKNTVSL

SEQ ID NO: 92208 - protein, 7 aa, synthetic construct
TLTLHEK

SEQ ID NO: 92209 - protein, 7 aa, synthetic construct
KSTVNKD

SEQ ID NO: 92210 - protein, 7 aa, synthetic construct
YHAVDRL

SEQ ID NO: 92211 - protein, 7 aa, synthetic construct
DGTGQMR

SEQ ID NO: 92212 - protein, 7 aa, synthetic construct
RIPIEHD

SEQ ID NO: 92213 - protein, 7 aa, synthetic construct
EARGMNC

SEQ ID NO: 92214 - protein, 7 aa, synthetic construct
GSLDKTH

SEQ ID NO: 92215 - protein, 7 aa, synthetic construct
LNMNQNG

SEQ ID NO: 92216 - protein, 7 aa, synthetic construct
KWSAGDF

SEQ ID NO: 92217 - protein, 7 aa, synthetic construct
NAKSQSA

SEQ ID NO: 92218 - protein, 7 aa, synthetic construct
WQQRIAN

SEQ ID NO: 92219 - protein, 7 aa, synthetic construct
WLQKGED

SEQ ID NO: 92220 - protein, 7 aa, synthetic construct
GKPIENG

SEQ ID NO: 92221 - protein, 7 aa, synthetic construct
FGIMKVH

SEQ ID NO: 92222 - protein, 7 aa, synthetic construct
LNDPLKR

SEQ ID NO: 92223 - protein, 7 aa, synthetic construct
VHNPDLV

SEQ ID NO: 92224 - protein, 7 aa, synthetic construct
KSFAATQ

SEQ ID NO: 92225 - protein, 7 aa, synthetic construct
SVLAGQK

SEQ ID NO: 92226 - protein, 7 aa, synthetic construct
RPTTGTL

SEQ ID NO: 92227 - protein, 7 aa, synthetic construct
KQITEHM

SEQ ID NO: 92228 - protein, 7 aa, synthetic construct
LQGRHQH

SEQ ID NO: 92229 - protein, 7 aa, synthetic construct
KNGAQLN

SEQ ID NO: 92230 - protein, 7 aa, synthetic construct
YVRGISS

SEQ ID NO: 92231 - protein, 7 aa, synthetic construct
SSIYPTT

SEQ ID NO: 92232 - protein, 7 aa, synthetic construct
HLEKNGP

SEQ ID NO: 92233 - protein, 7 aa, synthetic construct
ERIVGRS

SEQ ID NO: 92234 - protein, 7 aa, synthetic construct
KYPAPNA

SEQ ID NO: 92235 - protein, 7 aa, synthetic construct
SIVQHNQ

SEQ ID NO: 92236 - protein, 7 aa, synthetic construct
QMNNIHP

SEQ ID NO: 92237 - protein, 7 aa, synthetic construct
RDWGIHE

SEQ ID NO: 92238 - protein, 7 aa, synthetic construct
ASSEWAP

SEQ ID NO: 92239 - protein, 7 aa, synthetic construct
QFANDDR

SEQ ID NO: 92240 - protein, 7 aa, synthetic construct
IWHREQD

SEQ ID NO: 92241 - protein, 7 aa, synthetic construct
SGLQTRE

SEQ ID NO: 92242 - protein, 7 aa, synthetic construct
NVSFLGE

SEQ ID NO: 92243 - protein, 7 aa, synthetic construct
QRAQTQP

SEQ ID NO: 92244 - protein, 7 aa, synthetic construct
QGHAKVV

SEQ ID NO: 92245 - protein, 7 aa, synthetic construct
RLHDNTL

SEQ ID NO: 92246 - protein, 7 aa, synthetic construct
LKFNENK

SEQ ID NO: 92247 - protein, 7 aa, synthetic construct
HFKIEAV

SEQ ID NO: 92248 - protein, 7 aa, synthetic construct
TRPFAND

SEQ ID NO: 92249 - protein, 7 aa, synthetic construct
QAERYEK

SEQ ID NO: 92250 - protein, 7 aa, synthetic construct
NGPPQVG

SEQ ID NO: 92251 - protein, 7 aa, synthetic construct
KQQPNQA

SEQ ID NO: 92252 - protein, 7 aa, synthetic construct
NRGDTKE

SEQ ID NO: 92253 - protein, 7 aa, synthetic construct
LHHAAAS

SEQ ID NO: 92254 - protein, 7 aa, synthetic construct
MMQQHQL

SEQ ID NO: 92255 - protein, 7 aa, synthetic construct
AWTTEKE

SEQ ID NO: 92256 - protein, 7 aa, synthetic construct
KLRPEKD

SEQ ID NO: 92257 - protein, 7 aa, synthetic construct
TKEILSA

SEQ ID NO: 92258 - protein, 7 aa, synthetic construct
MRTETMS

SEQ ID NO: 92259 - protein, 7 aa, synthetic construct
FTEQSRH

SEQ ID NO: 92260 - protein, 7 aa, synthetic construct
EGHSVRF

SEQ ID NO: 92261 - protein, 7 aa, synthetic construct
KLEQVSV

SEQ ID NO: 92262 - protein, 7 aa, synthetic construct
EKVQILG

SEQ ID NO: 92263 - protein, 7 aa, synthetic construct
LRHAVLS

SEQ ID NO: 92264 - protein, 7 aa, synthetic construct
TNAGLNQ

SEQ ID NO: 92265 - protein, 7 aa, synthetic construct
TAFYDKV

SEQ ID NO: 92266 - protein, 7 aa, synthetic construct
SSIVPAP

SEQ ID NO: 92267 - protein, 7 aa, synthetic construct
MHPKTQS

SEQ ID NO: 92268 - protein, 7 aa, synthetic construct
EPPRSHM

SEQ ID NO: 92269 - protein, 7 aa, synthetic construct
KGKNDGH

SEQ ID NO: 92270 - protein, 7 aa, synthetic construct
PVFRGDS

SEQ ID NO: 92271 - protein, 7 aa, synthetic construct
EMPSYTR

SEQ ID NO: 92272 - protein, 7 aa, synthetic construct
KTGNQQA

SEQ ID NO: 92273 - protein, 7 aa, synthetic construct
HGFPGEL

SEQ ID NO: 92274 - protein, 7 aa, synthetic construct
FIGQMPN

SEQ ID NO: 92275 - protein, 7 aa, synthetic construct
SSKSMMD

SEQ ID NO: 92276 - protein, 7 aa, synthetic construct
ILERHAA

SEQ ID NO: 92277 - protein, 7 aa, synthetic construct
MQVTKDF

SEQ ID NO: 92278 - protein, 7 aa, synthetic construct
QTMEKHI

SEQ ID NO: 92279 - protein, 7 aa, synthetic construct
YAEHMTT

SEQ ID NO: 92280 - protein, 7 aa, synthetic construct
VQDRVKE

SEQ ID NO: 92281 - protein, 7 aa, synthetic construct
GSYGLLG

SEQ ID NO: 92282 - protein, 7 aa, synthetic construct
RQSNYMD

SEQ ID NO: 92283 - protein, 7 aa, synthetic construct
PRTHMQD

SEQ ID NO: 92284 - protein, 7 aa, synthetic construct
PNTLDLK

SEQ ID NO: 92285 - protein, 7 aa, synthetic construct
VVDHGPM

SEQ ID NO: 92286 - protein, 7 aa, synthetic construct
LAGKSDA

SEQ ID NO: 92287 - protein, 7 aa, synthetic construct
GFEYKEA

SEQ ID NO: 92288 - protein, 7 aa, synthetic construct
VNNNNYK

SEQ ID NO: 92289 - protein, 7 aa, synthetic construct
QSDLAGI

SEQ ID NO: 92290 - protein, 7 aa, synthetic construct
LGIPGQL

SEQ ID NO: 92291 - protein, 7 aa, synthetic construct
RGEEYQQ

SEQ ID NO: 92292 - protein, 7 aa, synthetic construct
VAAMIES

SEQ ID NO: 92293 - protein, 7 aa, synthetic construct
GTYPGAI

SEQ ID NO: 92294 - protein, 7 aa, synthetic construct
LYPHPIS

SEQ ID NO: 92295 - protein, 7 aa, synthetic construct
TKTYQHM

SEQ ID NO: 92296 - protein, 7 aa, synthetic construct
FWTNTEG

SEQ ID NO: 92297 - protein, 7 aa, synthetic construct
KMHIVAQ

SEQ ID NO: 92298 - protein, 7 aa, synthetic construct
IEVPDRT

SEQ ID NO: 92299 - protein, 7 aa, synthetic construct
QLAVHES

SEQ ID NO: 92300 - protein, 7 aa, synthetic construct
QGSKPAG

SEQ ID NO: 92301 - protein, 7 aa, synthetic construct
VGAWQEK

SEQ ID NO: 92302 - protein, 7 aa, synthetic construct
SMLSRRE

SEQ ID NO: 92303 - protein, 7 aa, synthetic construct
SNLHQVL

SEQ ID NO: 92304 - protein, 7 aa, synthetic construct
MQHPNRD

SEQ ID NO: 92305 - protein, 7 aa, synthetic construct
LLHDNVG

SEQ ID NO: 92306 - protein, 7 aa, synthetic construct
VGNRSSP

SEQ ID NO: 92307 - protein, 7 aa, synthetic construct
NMNGKVP

SEQ ID NO: 92308 - protein, 7 aa, synthetic construct
YTHGDYP

SEQ ID NO: 92309 - protein, 7 aa, synthetic construct
IMGVIAK

SEQ ID NO: 92310 - protein, 7 aa, synthetic construct
MVKSPFQ

SEQ ID NO: 92311 - protein, 7 aa, synthetic construct
KGFEAEF

SEQ ID NO: 92312 - protein, 7 aa, synthetic construct
MKDVYNS

SEQ ID NO: 92313 - protein, 7 aa, synthetic construct
KFHAMDT

SEQ ID NO: 92314 - protein, 7 aa, synthetic construct
TQAVVRQ

SEQ ID NO: 92315 - protein, 7 aa, synthetic construct
TANKEAG

SEQ ID NO: 92316 - protein, 7 aa, synthetic construct
NRHEKLL

SEQ ID NO: 92317 - protein, 7 aa, synthetic construct
ANNVQAP

SEQ ID NO: 92318 - protein, 7 aa, synthetic construct
PPHKLHF

SEQ ID NO: 92319 - protein, 7 aa, synthetic construct
GEYVSIK

SEQ ID NO: 92320 - protein, 7 aa, synthetic construct
PAKITHI

SEQ ID NO: 92321 - protein, 7 aa, synthetic construct
TLKLGFG

SEQ ID NO: 92322 - protein, 7 aa, synthetic construct
IDSMVAM

SEQ ID NO: 92323 - protein, 7 aa, synthetic construct
QPVTKTI

SEQ ID NO: 92324 - protein, 7 aa, synthetic construct
KPAGIMQ

SEQ ID NO: 92325 - protein, 7 aa, synthetic construct
HVFTQGE

SEQ ID NO: 92326 - protein, 7 aa, synthetic construct
RPELNKF

SEQ ID NO: 92327 - protein, 7 aa, synthetic construct
PAGGHQP

SEQ ID NO: 92328 - protein, 7 aa, synthetic construct
KAYMSEI

SEQ ID NO: 92329 - protein, 7 aa, synthetic construct
IGKDERT

SEQ ID NO: 92330 - protein, 7 aa, synthetic construct
IKGNDAS

SEQ ID NO: 92331 - protein, 7 aa, synthetic construct
RQNLLDH

SEQ ID NO: 92332 - protein, 7 aa, synthetic construct
PKPPYNE

SEQ ID NO: 92333 - protein, 7 aa, synthetic construct
KMGFETQ

SEQ ID NO: 92334 - protein, 7 aa, synthetic construct
PAKEGQK

SEQ ID NO: 92335 - protein, 7 aa, synthetic construct
WNTNFVA

SEQ ID NO: 92336 - protein, 7 aa, synthetic construct
TNNIVNA

SEQ ID NO: 92337 - protein, 7 aa, synthetic construct
NGTKSGG

SEQ ID NO: 92338 - protein, 7 aa, synthetic construct
NVTNMVN

SEQ ID NO: 92339 - protein, 7 aa, synthetic construct
SQQMMPV

SEQ ID NO: 92340 - protein, 7 aa, synthetic construct
SVHPLPQ

SEQ ID NO: 92341 - protein, 7 aa, synthetic construct
TRGGNNS

SEQ ID NO: 92342 - protein, 7 aa, synthetic construct
LTQRIMP

SEQ ID NO: 92343 - protein, 7 aa, synthetic construct
WAKGAYT

SEQ ID NO: 92344 - protein, 7 aa, synthetic construct
LTAYGSV

SEQ ID NO: 92345 - protein, 7 aa, synthetic construct
PTKNGGS

SEQ ID NO: 92346 - protein, 7 aa, synthetic construct
PTIQVTA

SEQ ID NO: 92347 - protein, 7 aa, synthetic construct
VVGYMGA

SEQ ID NO: 92348 - protein, 7 aa, synthetic construct
YMAKMDM

SEQ ID NO: 92349 - protein, 7 aa, synthetic construct
RTGNAGA

SEQ ID NO: 92350 - protein, 7 aa, synthetic construct
SDIHMMG

SEQ ID NO: 92351 - protein, 7 aa, synthetic construct
IYGTKSE

SEQ ID NO: 92352 - protein, 7 aa, synthetic construct
MTVARER

SEQ ID NO: 92353 - protein, 7 aa, synthetic construct
APDPHSY

SEQ ID NO: 92354 - protein, 7 aa, synthetic construct
THRESHW

SEQ ID NO: 92355 - protein, 7 aa, synthetic construct
HQHEMGP

SEQ ID NO: 92356 - protein, 7 aa, synthetic construct
YKARGIE

SEQ ID NO: 92357 - protein, 7 aa, synthetic construct
HDYVTAK

SEQ ID NO: 92358 - protein, 7 aa, synthetic construct
MHQRSLI

SEQ ID NO: 92359 - protein, 7 aa, synthetic construct
ALTTVHH

SEQ ID NO: 92360 - protein, 7 aa, synthetic construct
YPVGNYI

SEQ ID NO: 92361 - protein, 7 aa, synthetic construct
QVQPERS

SEQ ID NO: 92362 - protein, 7 aa, synthetic construct
STAHNHG

SEQ ID NO: 92363 - protein, 7 aa, synthetic construct
AHGPENH

SEQ ID NO: 92364 - protein, 7 aa, synthetic construct
TSEKKLG

SEQ ID NO: 92365 - protein, 7 aa, synthetic construct
HKLVQIE

SEQ ID NO: 92366 - protein, 7 aa, synthetic construct
KSTSAGM

SEQ ID NO: 92367 - protein, 7 aa, synthetic construct
YRQEQLD

SEQ ID NO: 92368 - protein, 7 aa, synthetic construct
AAYKPGW

SEQ ID NO: 92369 - protein, 7 aa, synthetic construct
SEQTTHA

SEQ ID NO: 92370 - protein, 7 aa, synthetic construct
DGYGVKH

SEQ ID NO: 92371 - protein, 7 aa, synthetic construct
NFPSQAT

SEQ ID NO: 92372 - protein, 7 aa, synthetic construct
MHGEHAV

SEQ ID NO: 92373 - protein, 7 aa, synthetic construct
PNSTAAR

SEQ ID NO: 92374 - protein, 7 aa, synthetic construct
VFTRNEA

SEQ ID NO: 92375 - protein, 7 aa, synthetic construct
KNMPYGQ

SEQ ID NO: 92376 - protein, 7 aa, synthetic construct
SMTMLRD

SEQ ID NO: 92377 - protein, 7 aa, synthetic construct
SSKGTSA

SEQ ID NO: 92378 - protein, 7 aa, synthetic construct
RDGDGVH

SEQ ID NO: 92379 - protein, 7 aa, synthetic construct
MKSSHVH

SEQ ID NO: 92380 - protein, 7 aa, synthetic construct
HQQYVKI

SEQ ID NO: 92381 - protein, 7 aa, synthetic construct
QKTDVRW

SEQ ID NO: 92382 - protein, 7 aa, synthetic construct
LAGAPTM

SEQ ID NO: 92383 - protein, 7 aa, synthetic construct
QPSTTKY

SEQ ID NO: 92384 - protein, 7 aa, synthetic construct
FRPAPDM

SEQ ID NO: 92385 - protein, 7 aa, synthetic construct
YQKDFKH

SEQ ID NO: 92386 - protein, 7 aa, synthetic construct
HNQILMG

SEQ ID NO: 92387 - protein, 7 aa, synthetic construct
NTDHSPH

SEQ ID NO: 92388 - protein, 7 aa, synthetic construct
NHKEFLR

SEQ ID NO: 92389 - protein, 7 aa, synthetic construct
NILQNGY

SEQ ID NO: 92390 - protein, 7 aa, synthetic construct
SHTVPII

SEQ ID NO: 92391 - protein, 7 aa, synthetic construct
AWKHETS

SEQ ID NO: 92392 - protein, 7 aa, synthetic construct
PTNAQRM

SEQ ID NO: 92393 - protein, 7 aa, synthetic construct
QAGSRHY

SEQ ID NO: 92394 - protein, 7 aa, synthetic construct
FKQKESP

SEQ ID NO: 92395 - protein, 7 aa, synthetic construct
IMDHYRP

SEQ ID NO: 92396 - protein, 7 aa, synthetic construct
RDHYAAN

SEQ ID NO: 92397 - protein, 7 aa, synthetic construct
GFNQVKP

SEQ ID NO: 92398 - protein, 7 aa, synthetic construct
TSRGIAH

SEQ ID NO: 92399 - protein, 7 aa, synthetic construct
FHVTTGK

SEQ ID NO: 92400 - protein, 7 aa, synthetic construct
FNKGQNG

SEQ ID NO: 92401 - protein, 7 aa, synthetic construct
VEGINAL

SEQ ID NO: 92402 - protein, 7 aa, synthetic construct
NIAPNPP

SEQ ID NO: 92403 - protein, 7 aa, synthetic construct
EPSNGPR

SEQ ID NO: 92404 - protein, 7 aa, synthetic construct
QDPKLRT

SEQ ID NO: 92405 - protein, 7 aa, synthetic construct
SNLQGMH

SEQ ID NO: 92406 - protein, 7 aa, synthetic construct
IDHWHTP

SEQ ID NO: 92407 - protein, 7 aa, synthetic construct
HREWEKS

SEQ ID NO: 92408 - protein, 7 aa, synthetic construct
RTQRDYP

SEQ ID NO: 92409 - protein, 7 aa, synthetic construct
PMMSANK

SEQ ID NO: 92410 - protein, 7 aa, synthetic construct
MDLSTKN

SEQ ID NO: 92411 - protein, 7 aa, synthetic construct
KDSSPQN

SEQ ID NO: 92412 - protein, 7 aa, synthetic construct
DRMDGHR

SEQ ID NO: 92413 - protein, 7 aa, synthetic construct
SPIAGKV

SEQ ID NO: 92414 - protein, 7 aa, synthetic construct
FYLKDKV

SEQ ID NO: 92415 - protein, 7 aa, synthetic construct
QHAVLVT

SEQ ID NO: 92416 - protein, 7 aa, synthetic construct
EYTKHLH

SEQ ID NO: 92417 - protein, 7 aa, synthetic construct
DQNLNRH

SEQ ID NO: 92418 - protein, 7 aa, synthetic construct
KTSPHQS

SEQ ID NO: 92419 - protein, 7 aa, synthetic construct
AHSGVVD

SEQ ID NO: 92420 - protein, 7 aa, synthetic construct
GKTMQDD

SEQ ID NO: 92421 - protein, 7 aa, synthetic construct
SRRGEIF

SEQ ID NO: 92422 - protein, 7 aa, synthetic construct
MGTENNR

SEQ ID NO: 92423 - protein, 7 aa, synthetic construct
HIMGGMT

SEQ ID NO: 92424 - protein, 7 aa, synthetic construct
LPRQQDG

SEQ ID NO: 92425 - protein, 7 aa, synthetic construct
NARPSMY

SEQ ID NO: 92426 - protein, 7 aa, synthetic construct
DPRPITV

SEQ ID NO: 92427 - protein, 7 aa, synthetic construct
GQGNVVQ

SEQ ID NO: 92428 - protein, 7 aa, synthetic construct
LKLRQFD

SEQ ID NO: 92429 - protein, 7 aa, synthetic construct
LHAAATK

SEQ ID NO: 92430 - protein, 7 aa, synthetic construct
LLVGNVG

SEQ ID NO: 92431 - protein, 7 aa, synthetic construct
GEIMHHG

SEQ ID NO: 92432 - protein, 7 aa, synthetic construct
YRDEGTN

SEQ ID NO: 92433 - protein, 7 aa, synthetic construct
DSGQIRF

SEQ ID NO: 92434 - protein, 7 aa, synthetic construct
AHNALRQ

SEQ ID NO: 92435 - protein, 7 aa, synthetic construct
EHNVTKN

SEQ ID NO: 92436 - protein, 7 aa, synthetic construct
ENSMHKQ

SEQ ID NO: 92437 - protein, 7 aa, synthetic construct
YIHGGMN

SEQ ID NO: 92438 - protein, 7 aa, synthetic construct
VRHDTIT

SEQ ID NO: 92439 - protein, 7 aa, synthetic construct
QHDHLTI

SEQ ID NO: 92440 - protein, 7 aa, synthetic construct
FKFTMED

SEQ ID NO: 92441 - protein, 7 aa, synthetic construct
NPAGRPA

SEQ ID NO: 92442 - protein, 7 aa, synthetic construct
IAQAHPS

SEQ ID NO: 92443 - protein, 7 aa, synthetic construct
IYNKIHM

SEQ ID NO: 92444 - protein, 7 aa, synthetic construct
ALDIRRQ

SEQ ID NO: 92445 - protein, 7 aa, synthetic construct
APIHEVM

SEQ ID NO: 92446 - protein, 7 aa, synthetic construct
TQKIDSQ

SEQ ID NO: 92447 - protein, 7 aa, synthetic construct
FMNIRLD

SEQ ID NO: 92448 - protein, 7 aa, synthetic construct
RDQRHQT

SEQ ID NO: 92449 - protein, 7 aa, synthetic construct
AIMGTPA

SEQ ID NO: 92450 - protein, 7 aa, synthetic construct
DTGFTAP

SEQ ID NO: 92451 - protein, 7 aa, synthetic construct
WTGDGSG

SEQ ID NO: 92452 - protein, 7 aa, synthetic construct
EVTSPHR

SEQ ID NO: 92453 - protein, 7 aa, synthetic construct
GNPRVPY

SEQ ID NO: 92454 - protein, 7 aa, synthetic construct
ENFLRAA

SEQ ID NO: 92455 - protein, 7 aa, synthetic construct
KWEAGDV

SEQ ID NO: 92456 - protein, 7 aa, synthetic construct
KHSETSP

SEQ ID NO: 92457 - protein, 7 aa, synthetic construct
TKLSESE

SEQ ID NO: 92458 - protein, 7 aa, synthetic construct
NKFDGAE

SEQ ID NO: 92459 - protein, 7 aa, synthetic construct
PNSLGAF

SEQ ID NO: 92460 - protein, 7 aa, synthetic construct
THSISPE

SEQ ID NO: 92461 - protein, 7 aa, synthetic construct
YGSTSTH

SEQ ID NO: 92462 - protein, 7 aa, synthetic construct
SKKPEPW

SEQ ID NO: 92463 - protein, 7 aa, synthetic construct
GKINSFT

SEQ ID NO: 92464 - protein, 7 aa, synthetic construct
LRAIVNQ

SEQ ID NO: 92465 - protein, 7 aa, synthetic construct
AVTSHAM

SEQ ID NO: 92466 - protein, 7 aa, synthetic construct
LMKPPHH

SEQ ID NO: 92467 - protein, 7 aa, synthetic construct
NHLKATT

SEQ ID NO: 92468 - protein, 7 aa, synthetic construct
TFANATI

SEQ ID NO: 92469 - protein, 7 aa, synthetic construct
YISREMK

SEQ ID NO: 92470 - protein, 7 aa, synthetic construct
FYNATMP

SEQ ID NO: 92471 - protein, 7 aa, synthetic construct
AEKTVKW

SEQ ID NO: 92472 - protein, 7 aa, synthetic construct
PNITNII

SEQ ID NO: 92473 - protein, 7 aa, synthetic construct
AQAKQSI

SEQ ID NO: 92474 - protein, 7 aa, synthetic construct
KTPQPGS

SEQ ID NO: 92475 - protein, 7 aa, synthetic construct
YNSKTQP

SEQ ID NO: 92476 - protein, 7 aa, synthetic construct
HQPPYAP

SEQ ID NO: 92477 - protein, 7 aa, synthetic construct
KSPNTAM

SEQ ID NO: 92478 - protein, 7 aa, synthetic construct
VEPRAAD

SEQ ID NO: 92479 - protein, 7 aa, synthetic construct
SHPTEPN

SEQ ID NO: 92480 - protein, 7 aa, synthetic construct
MVKKQDT

SEQ ID NO: 92481 - protein, 7 aa, synthetic construct
SHKLEVD

SEQ ID NO: 92482 - protein, 7 aa, synthetic construct
THHEPRV

SEQ ID NO: 92483 - protein, 7 aa, synthetic construct
TDMGSKY

SEQ ID NO: 92484 - protein, 7 aa, synthetic construct
YINVTEV

SEQ ID NO: 92485 - protein, 7 aa, synthetic construct
HPTLHAH

SEQ ID NO: 92486 - protein, 7 aa, synthetic construct
VIHQERP

SEQ ID NO: 92487 - protein, 7 aa, synthetic construct
QNKNGAS

SEQ ID NO: 92488 - protein, 7 aa, synthetic construct
QVGFEHK

SEQ ID NO: 92489 - protein, 7 aa, synthetic construct
SYSPDGV

SEQ ID NO: 92490 - protein, 7 aa, synthetic construct
TTAKNTT

SEQ ID NO: 92491 - protein, 7 aa, synthetic construct
RATSSQS

SEQ ID NO: 92492 - protein, 7 aa, synthetic construct
WEDYKAA

SEQ ID NO: 92493 - protein, 7 aa, synthetic construct
PLKKEDS

SEQ ID NO: 92494 - protein, 7 aa, synthetic construct
ASTKTNL

SEQ ID NO: 92495 - protein, 7 aa, synthetic construct
VGPAAPA

SEQ ID NO: 92496 - protein, 7 aa, synthetic construct
TQEKHNH

SEQ ID NO: 92497 - protein, 7 aa, synthetic construct
WKGGTLD

SEQ ID NO: 92498 - protein, 7 aa, synthetic construct
WAHKNPE

SEQ ID NO: 92499 - protein, 7 aa, synthetic construct
QPHPHPP

SEQ ID NO: 92500 - protein, 7 aa, synthetic construct
RANTGQL

SEQ ID NO: 92501 - protein, 7 aa, synthetic construct
MQSPENS

SEQ ID NO: 92502 - protein, 7 aa, synthetic construct
CRANCVD

SEQ ID NO: 92503 - protein, 7 aa, synthetic construct
VGLANKH

SEQ ID NO: 92504 - protein, 7 aa, synthetic construct
YMPKHDN

SEQ ID NO: 92505 - protein, 7 aa, synthetic construct
HDNKHSF

SEQ ID NO: 92506 - protein, 7 aa, synthetic construct
DYRMMQG

SEQ ID NO: 92507 - protein, 7 aa, synthetic construct
GRYNSGE

SEQ ID NO: 92508 - protein, 7 aa, synthetic construct
QQHSSIE

SEQ ID NO: 92509 - protein, 7 aa, synthetic construct
VPKPDKM

SEQ ID NO: 92510 - protein, 7 aa, synthetic construct
TVMPNNQ

SEQ ID NO: 92511 - protein, 7 aa, synthetic construct
NDAAHKY

SEQ ID NO: 92512 - protein, 7 aa, synthetic construct
GYHKHPA

SEQ ID NO: 92513 - protein, 7 aa, synthetic construct
IYTPQMA

SEQ ID NO: 92514 - protein, 7 aa, synthetic construct
AYGAAIT

SEQ ID NO: 92515 - protein, 7 aa, synthetic construct
KQHMDEP

SEQ ID NO: 92516 - protein, 7 aa, synthetic construct
RNMPKDQ

SEQ ID NO: 92517 - protein, 7 aa, synthetic construct
RPDPQMN

SEQ ID NO: 92518 - protein, 7 aa, synthetic construct
RFPDQIR

SEQ ID NO: 92519 - protein, 7 aa, synthetic construct
KSHFNDQ

SEQ ID NO: 92520 - protein, 7 aa, synthetic construct
PGSSPGS

SEQ ID NO: 92521 - protein, 7 aa, synthetic construct
FSPGIAQ

SEQ ID NO: 92522 - protein, 7 aa, synthetic construct
FSQEFQK

SEQ ID NO: 92523 - protein, 7 aa, synthetic construct
RYRVEEL

SEQ ID NO: 92524 - protein, 7 aa, synthetic construct
SDQQRNI

SEQ ID NO: 92525 - protein, 7 aa, synthetic construct
HITHQQL

SEQ ID NO: 92526 - protein, 7 aa, synthetic construct
GAYKNGN

SEQ ID NO: 92527 - protein, 7 aa, synthetic construct
NHAKSTI

SEQ ID NO: 92528 - protein, 7 aa, synthetic construct
LEDQRGV

SEQ ID NO: 92529 - protein, 7 aa, synthetic construct
MSGNNQK

SEQ ID NO: 92530 - protein, 7 aa, synthetic construct
NLSAAVE

SEQ ID NO: 92531 - protein, 7 aa, synthetic construct
TEYKANT

SEQ ID NO: 92532 - protein, 7 aa, synthetic construct
HLDIRKE

SEQ ID NO: 92533 - protein, 7 aa, synthetic construct
EPAKYIA

SEQ ID NO: 92534 - protein, 7 aa, synthetic construct
AQYADNV

SEQ ID NO: 92535 - protein, 7 aa, synthetic construct
MSRQHPG

SEQ ID NO: 92536 - protein, 7 aa, synthetic construct
VVTPAYK

SEQ ID NO: 92537 - protein, 7 aa, synthetic construct
GAAFHTT

SEQ ID NO: 92538 - protein, 7 aa, synthetic construct
WSSSPHS

SEQ ID NO: 92539 - protein, 7 aa, synthetic construct
EKATGKF

SEQ ID NO: 92540 - protein, 7 aa, synthetic construct
VVQQRPN

SEQ ID NO: 92541 - protein, 7 aa, synthetic construct
TYAAKID

SEQ ID NO: 92542 - protein, 7 aa, synthetic construct
GWLPGEP

SEQ ID NO: 92543 - protein, 7 aa, synthetic construct
NRTGSNA

SEQ ID NO: 92544 - protein, 7 aa, synthetic construct
VMVGPNM

SEQ ID NO: 92545 - protein, 7 aa, synthetic construct
RTEMGKV

SEQ ID NO: 92546 - protein, 7 aa, synthetic construct
GQTHNGM

SEQ ID NO: 92547 - protein, 7 aa, synthetic construct
KSSGAFA

SEQ ID NO: 92548 - protein, 7 aa, synthetic construct
WVPTVNS

SEQ ID NO: 92549 - protein, 7 aa, synthetic construct
IPHVDSS

SEQ ID NO: 92550 - protein, 7 aa, synthetic construct
NVNSRGA

SEQ ID NO: 92551 - protein, 7 aa, synthetic construct
TKNNYQE

SEQ ID NO: 92552 - protein, 7 aa, synthetic construct
TMTDRVS

SEQ ID NO: 92553 - protein, 7 aa, synthetic construct
FIVNQSD

SEQ ID NO: 92554 - protein, 7 aa, synthetic construct
IHKFQNH

SEQ ID NO: 92555 - protein, 7 aa, synthetic construct
KSPSNAW

SEQ ID NO: 92556 - protein, 7 aa, synthetic construct
LPQTMKN

SEQ ID NO: 92557 - protein, 7 aa, synthetic construct
FPNERGM

SEQ ID NO: 92558 - protein, 7 aa, synthetic construct
GLTQFTH

SEQ ID NO: 92559 - protein, 7 aa, synthetic construct
HQAQPQM

SEQ ID NO: 92560 - protein, 7 aa, synthetic construct
LMTRIET

SEQ ID NO: 92561 - protein, 7 aa, synthetic construct
YFTAFKE

SEQ ID NO: 92562 - protein, 7 aa, synthetic construct
DTMNFRS

SEQ ID NO: 92563 - protein, 7 aa, synthetic construct
IGHAGTK

SEQ ID NO: 92564 - protein, 7 aa, synthetic construct
LKERTHV

SEQ ID NO: 92565 - protein, 7 aa, synthetic construct
FPGNFSP

SEQ ID NO: 92566 - protein, 7 aa, synthetic construct
DSHVMSK

SEQ ID NO: 92567 - protein, 7 aa, synthetic construct
KLNTISE

SEQ ID NO: 92568 - protein, 7 aa, synthetic construct
MPSLNTL

SEQ ID NO: 92569 - protein, 7 aa, synthetic construct
ANGKTQT

SEQ ID NO: 92570 - protein, 7 aa, synthetic construct
TKGTSAS

SEQ ID NO: 92571 - protein, 7 aa, synthetic construct
SGVNNAD

SEQ ID NO: 92572 - protein, 7 aa, synthetic construct
NGVYLSP

SEQ ID NO: 92573 - protein, 7 aa, synthetic construct
HITVSKD

SEQ ID NO: 92574 - protein, 7 aa, synthetic construct
YAADAIR

SEQ ID NO: 92575 - protein, 7 aa, synthetic construct
QRNTINV

SEQ ID NO: 92576 - protein, 7 aa, synthetic construct
TFNKYNP

SEQ ID NO: 92577 - protein, 7 aa, synthetic construct
WAANLTN

SEQ ID NO: 92578 - protein, 7 aa, synthetic construct
VQRGVGG

SEQ ID NO: 92579 - protein, 7 aa, synthetic construct
VLHTDRK

SEQ ID NO: 92580 - protein, 7 aa, synthetic construct
VARHTAF

SEQ ID NO: 92581 - protein, 7 aa, synthetic construct
LMMDVKG

SEQ ID NO: 92582 - protein, 7 aa, synthetic construct
SWEKSTN

SEQ ID NO: 92583 - protein, 7 aa, synthetic construct
KMKEARD

SEQ ID NO: 92584 - protein, 7 aa, synthetic construct
FRDDPDN

SEQ ID NO: 92585 - protein, 7 aa, synthetic construct
CTRGDAC

SEQ ID NO: 92586 - protein, 7 aa, synthetic construct
MEKMTGT

SEQ ID NO: 92587 - protein, 7 aa, synthetic construct
MASVAYG

SEQ ID NO: 92588 - protein, 7 aa, synthetic construct
QRQQMGG

SEQ ID NO: 92589 - protein, 7 aa, synthetic construct
MAMDSRI

SEQ ID NO: 92590 - protein, 7 aa, synthetic construct
TSNQVPK

SEQ ID NO: 92591 - protein, 7 aa, synthetic construct
TNIVTKL

SEQ ID NO: 92592 - protein, 7 aa, synthetic construct
WHQRVHD

SEQ ID NO: 92593 - protein, 7 aa, synthetic construct
YPNTETS

SEQ ID NO: 92594 - protein, 7 aa, synthetic construct
SQQTDAK

SEQ ID NO: 92595 - protein, 7 aa, synthetic construct
FLKNLNE

SEQ ID NO: 92596 - protein, 7 aa, synthetic construct
KSMNAVG

SEQ ID NO: 92597 - protein, 7 aa, synthetic construct
VPNPQTA

SEQ ID NO: 92598 - protein, 7 aa, synthetic construct
PANDFTR

SEQ ID NO: 92599 - protein, 7 aa, synthetic construct
IVIQAGG

SEQ ID NO: 92600 - protein, 7 aa, synthetic construct
QRQQLPL

SEQ ID NO: 92601 - protein, 7 aa, synthetic construct
SKMNSQN

SEQ ID NO: 92602 - protein, 7 aa, synthetic construct
LAIKTIP

SEQ ID NO: 92603 - protein, 7 aa, synthetic construct
YKQSNPE

SEQ ID NO: 92604 - protein, 7 aa, synthetic construct
GKTSSGG

SEQ ID NO: 92605 - protein, 7 aa, synthetic construct
FPKDANK

SEQ ID NO: 92606 - protein, 7 aa, synthetic construct
QHFAPSP

SEQ ID NO: 92607 - protein, 7 aa, synthetic construct
FDKTILL

SEQ ID NO: 92608 - protein, 7 aa, synthetic construct
DLGRFSD

SEQ ID NO: 92609 - protein, 7 aa, synthetic construct
YITHPGN

SEQ ID NO: 92610 - protein, 7 aa, synthetic construct
TQKTTWH

SEQ ID NO: 92611 - protein, 7 aa, synthetic construct
HHSVMTV

SEQ ID NO: 92612 - protein, 7 aa, synthetic construct
GNLRPDK

SEQ ID NO: 92613 - protein, 7 aa, synthetic construct
GWESNKH

SEQ ID NO: 92614 - protein, 7 aa, synthetic construct
KREFDPF

SEQ ID NO: 92615 - protein, 7 aa, synthetic construct
SIMGNGG

SEQ ID NO: 92616 - protein, 7 aa, synthetic construct
ENPRRQA

SEQ ID NO: 92617 - protein, 7 aa, synthetic construct
GPGVPHD

SEQ ID NO: 92618 - protein, 7 aa, synthetic construct
KEHDTRA

SEQ ID NO: 92619 - protein, 7 aa, synthetic construct
PHHVMPD

SEQ ID NO: 92620 - protein, 7 aa, synthetic construct
GLAHQLG

SEQ ID NO: 92621 - protein, 7 aa, synthetic construct
NSGAMVW

SEQ ID NO: 92622 - protein, 7 aa, synthetic construct
FSNTMVL

SEQ ID NO: 92623 - protein, 7 aa, synthetic construct
SLVVPTA

SEQ ID NO: 92624 - protein, 7 aa, synthetic construct
KSSGTMP

SEQ ID NO: 92625 - protein, 7 aa, synthetic construct
PKRDHTF

SEQ ID NO: 92626 - protein, 7 aa, synthetic construct
TYHENQG

SEQ ID NO: 92627 - protein, 7 aa, synthetic construct
ARNLEVE

SEQ ID NO: 92628 - protein, 7 aa, synthetic construct
NMAATQP

SEQ ID NO: 92629 - protein, 7 aa, synthetic construct
TQLHGSN

SEQ ID NO: 92630 - protein, 7 aa, synthetic construct
KEVHAEH

SEQ ID NO: 92631 - protein, 7 aa, synthetic construct
TGRTPDR

SEQ ID NO: 92632 - protein, 7 aa, synthetic construct
DISHNTF

SEQ ID NO: 92633 - protein, 7 aa, synthetic construct
YEYKGID

SEQ ID NO: 92634 - protein, 7 aa, synthetic construct
NGKLYIA

SEQ ID NO: 92635 - protein, 7 aa, synthetic construct
EEGRHYF

SEQ ID NO: 92636 - protein, 7 aa, synthetic construct
MTKIELH

SEQ ID NO: 92637 - protein, 7 aa, synthetic construct
GHTKENH

SEQ ID NO: 92638 - protein, 7 aa, synthetic construct
SNHGNMG

SEQ ID NO: 92639 - protein, 7 aa, synthetic construct
ILQNGMK

SEQ ID NO: 92640 - protein, 7 aa, synthetic construct
PYKTHHD

SEQ ID NO: 92641 - protein, 7 aa, synthetic construct
EIVGPLG

SEQ ID NO: 92642 - protein, 7 aa, synthetic construct
NISPSNS

SEQ ID NO: 92643 - protein, 7 aa, synthetic construct
ISRAIEM

SEQ ID NO: 92644 - protein, 7 aa, synthetic construct
QVRTEFA

SEQ ID NO: 92645 - protein, 7 aa, synthetic construct
NEKRMDW

SEQ ID NO: 92646 - protein, 7 aa, synthetic construct
RKPVEAE

SEQ ID NO: 92647 - protein, 7 aa, synthetic construct
KQREAMI

SEQ ID NO: 92648 - protein, 7 aa, synthetic construct
KHVHVTP

SEQ ID NO: 92649 - protein, 7 aa, synthetic construct
NRQNSVW

SEQ ID NO: 92650 - protein, 7 aa, synthetic construct
PMNNTAK

SEQ ID NO: 92651 - protein, 7 aa, synthetic construct
GINLIGK

SEQ ID NO: 92652 - protein, 7 aa, synthetic construct
GGTKMAT

SEQ ID NO: 92653 - protein, 7 aa, synthetic construct
NNQNSKG

SEQ ID NO: 92654 - protein, 7 aa, synthetic construct
GGNIMAM

SEQ ID NO: 92655 - protein, 7 aa, synthetic construct
HMSNGFS

SEQ ID NO: 92656 - protein, 7 aa, synthetic construct
KNSSVIG

SEQ ID NO: 92657 - protein, 7 aa, synthetic construct
PLIKTQN

SEQ ID NO: 92658 - protein, 7 aa, synthetic construct
YDSQVHM

SEQ ID NO: 92659 - protein, 7 aa, synthetic construct
AVKEHHT

SEQ ID NO: 92660 - protein, 7 aa, synthetic construct
LHQDGHA

SEQ ID NO: 92661 - protein, 7 aa, synthetic construct
IKQSSEW

SEQ ID NO: 92662 - protein, 7 aa, synthetic construct
NSGVRND

SEQ ID NO: 92663 - protein, 7 aa, synthetic construct
DPKIKHQ

SEQ ID NO: 92664 - protein, 7 aa, synthetic construct
HDAKHSA

SEQ ID NO: 92665 - protein, 7 aa, synthetic construct
PKAQKSD

SEQ ID NO: 92666 - protein, 7 aa, synthetic construct
AWHKEPQ

SEQ ID NO: 92667 - protein, 7 aa, synthetic construct
PHSASKD

SEQ ID NO: 92668 - protein, 7 aa, synthetic construct
TPHRMHV

SEQ ID NO: 92669 - protein, 7 aa, synthetic construct
DSTIARL

SEQ ID NO: 92670 - protein, 7 aa, synthetic construct
RYNPQMV

SEQ ID NO: 92671 - protein, 7 aa, synthetic construct
ALMQQVS

SEQ ID NO: 92672 - protein, 7 aa, synthetic construct
FFRGNKD

SEQ ID NO: 92673 - protein, 7 aa, synthetic construct
YNDYNAS

SEQ ID NO: 92674 - protein, 7 aa, synthetic construct
SYSHPND

SEQ ID NO: 92675 - protein, 7 aa, synthetic construct
DKHVTNQ

SEQ ID NO: 92676 - protein, 7 aa, synthetic construct
SAEANKF

SEQ ID NO: 92677 - protein, 7 aa, synthetic construct
WVDGGTM

SEQ ID NO: 92678 - protein, 7 aa, synthetic construct
HPVAAPQ

SEQ ID NO: 92679 - protein, 7 aa, synthetic construct
RQSMPIP

SEQ ID NO: 92680 - protein, 7 aa, synthetic construct
TSGTQLG

SEQ ID NO: 92681 - protein, 7 aa, synthetic construct
SRAQNNM

SEQ ID NO: 92682 - protein, 7 aa, synthetic construct
GKNAQSF

SEQ ID NO: 92683 - protein, 7 aa, synthetic construct
SKDWMPS

SEQ ID NO: 92684 - protein, 7 aa, synthetic construct
ARSELAT

SEQ ID NO: 92685 - protein, 7 aa, synthetic construct
VATKMIT

SEQ ID NO: 92686 - protein, 7 aa, synthetic construct
EFHINVP

SEQ ID NO: 92687 - protein, 7 aa, synthetic construct
YYPNRMA

SEQ ID NO: 92688 - protein, 7 aa, synthetic construct
YEFFHAE

SEQ ID NO: 92689 - protein, 7 aa, synthetic construct
WRNDREV

SEQ ID NO: 92690 - protein, 7 aa, synthetic construct
KEPDWSS

SEQ ID NO: 92691 - protein, 7 aa, synthetic construct
KEPAYKQ

SEQ ID NO: 92692 - protein, 7 aa, synthetic construct
HHPIVVE

SEQ ID NO: 92693 - protein, 7 aa, synthetic construct
TKAQEWA

SEQ ID NO: 92694 - protein, 7 aa, synthetic construct
YPITIQE

SEQ ID NO: 92695 - protein, 7 aa, synthetic construct
HKSSIND

SEQ ID NO: 92696 - protein, 7 aa, synthetic construct
RTDSQSS

SEQ ID NO: 92697 - protein, 7 aa, synthetic construct
PVKVTTA

SEQ ID NO: 92698 - protein, 7 aa, synthetic construct
PNNKSGA

SEQ ID NO: 92699 - protein, 7 aa, synthetic construct
QPYNHMP

SEQ ID NO: 92700 - protein, 7 aa, synthetic construct
VKDIKAI

SEQ ID NO: 92701 - protein, 7 aa, synthetic construct
NKAMKMD

SEQ ID NO: 92702 - protein, 7 aa, synthetic construct
VHNRSDP

SEQ ID NO: 92703 - protein, 7 aa, synthetic construct
YRNENVD

SEQ ID NO: 92704 - protein, 7 aa, synthetic construct
GDRSRII

SEQ ID NO: 92705 - protein, 7 aa, synthetic construct
FAQQWPA

SEQ ID NO: 92706 - protein, 7 aa, synthetic construct
ISSAQKN

SEQ ID NO: 92707 - protein, 7 aa, synthetic construct
NYGFGAP

SEQ ID NO: 92708 - protein, 7 aa, synthetic construct
IGAFHQM

SEQ ID NO: 92709 - protein, 7 aa, synthetic construct
VVKLRHD

SEQ ID NO: 92710 - protein, 7 aa, synthetic construct
HPKADML

SEQ ID NO: 92711 - protein, 7 aa, synthetic construct
SHNPDPP

SEQ ID NO: 92712 - protein, 7 aa, synthetic construct
YWKHTQD

SEQ ID NO: 92713 - protein, 7 aa, synthetic construct
HSARISD

SEQ ID NO: 92714 - protein, 7 aa, synthetic construct
TGSPMIM

SEQ ID NO: 92715 - protein, 7 aa, synthetic construct
KNSAVFM

SEQ ID NO: 92716 - protein, 7 aa, synthetic construct
KPAQNVY

SEQ ID NO: 92717 - protein, 7 aa, synthetic construct
IMQTTQH

SEQ ID NO: 92718 - protein, 7 aa, synthetic construct
FYHGEGI

SEQ ID NO: 92719 - protein, 7 aa, synthetic construct
GQATKSF

SEQ ID NO: 92720 - protein, 7 aa, synthetic construct
VHPHKTV

SEQ ID NO: 92721 - protein, 7 aa, synthetic construct
NNAAPFS

SEQ ID NO: 92722 - protein, 7 aa, synthetic construct
TNEWRTA

SEQ ID NO: 92723 - protein, 7 aa, synthetic construct
SNDHHAA

SEQ ID NO: 92724 - protein, 7 aa, synthetic construct
ASHTPFK

SEQ ID NO: 92725 - protein, 7 aa, synthetic construct
WQKEGDN

SEQ ID NO: 92726 - protein, 7 aa, synthetic construct
LDRSYAP

SEQ ID NO: 92727 - protein, 7 aa, synthetic construct
GERFTDG

SEQ ID NO: 92728 - protein, 7 aa, synthetic construct
WSSHTTF

SEQ ID NO: 92729 - protein, 7 aa, synthetic construct
EMPPKGI

SEQ ID NO: 92730 - protein, 7 aa, synthetic construct
VAAGSEM

SEQ ID NO: 92731 - protein, 7 aa, synthetic construct
GKYGTQV

SEQ ID NO: 92732 - protein, 7 aa, synthetic construct
GHGMVQK

SEQ ID NO: 92733 - protein, 7 aa, synthetic construct
PDRLHTF

SEQ ID NO: 92734 - protein, 7 aa, synthetic construct
KVATWDP

SEQ ID NO: 92735 - protein, 7 aa, synthetic construct
WNTNAIL

SEQ ID NO: 92736 - protein, 7 aa, synthetic construct
HRHYQDD

SEQ ID NO: 92737 - protein, 7 aa, synthetic construct
QVRGDNM

SEQ ID NO: 92738 - protein, 7 aa, synthetic construct
KQPMGLG

SEQ ID NO: 92739 - protein, 7 aa, synthetic construct
SENKHYD

SEQ ID NO: 92740 - protein, 7 aa, synthetic construct
PKLAAQP

SEQ ID NO: 92741 - protein, 7 aa, synthetic construct
RDGRNQE

SEQ ID NO: 92742 - protein, 7 aa, synthetic construct
KEDAYRV

SEQ ID NO: 92743 - protein, 7 aa, synthetic construct
AQLHLER

SEQ ID NO: 92744 - protein, 7 aa, synthetic construct
GDMAFRQ

SEQ ID NO: 92745 - protein, 7 aa, synthetic construct
TLSFKEM

SEQ ID NO: 92746 - protein, 7 aa, synthetic construct
QSVNTPP

SEQ ID NO: 92747 - protein, 7 aa, synthetic construct
KSGAELW

SEQ ID NO: 92748 - protein, 7 aa, synthetic construct
GKEVTSQ

SEQ ID NO: 92749 - protein, 7 aa, synthetic construct
KGGGLQH

SEQ ID NO: 92750 - protein, 7 aa, synthetic construct
FPMGNQP

SEQ ID NO: 92751 - protein, 7 aa, synthetic construct
ILGATAF

SEQ ID NO: 92752 - protein, 7 aa, synthetic construct
FSNQKNG

SEQ ID NO: 92753 - protein, 7 aa, synthetic construct
DRVGSQS

SEQ ID NO: 92754 - protein, 7 aa, synthetic construct
YKQLLPT

SEQ ID NO: 92755 - protein, 7 aa, synthetic construct
GRFEPLH

SEQ ID NO: 92756 - protein, 7 aa, synthetic construct
VRQSNSW

SEQ ID NO: 92757 - protein, 7 aa, synthetic construct
RQSGVIT

SEQ ID NO: 92758 - protein, 7 aa, synthetic construct
QSSVSIM

SEQ ID NO: 92759 - protein, 7 aa, synthetic construct
INSPNPT

SEQ ID NO: 92760 - protein, 7 aa, synthetic construct
TSNTTTV

SEQ ID NO: 92761 - protein, 7 aa, synthetic construct
QRQPMAS

SEQ ID NO: 92762 - protein, 7 aa, synthetic construct
SEKSHNQ

SEQ ID NO: 92763 - protein, 7 aa, synthetic construct
DGNHGYP

SEQ ID NO: 92764 - protein, 7 aa, synthetic construct
GVPNMPS

SEQ ID NO: 92765 - protein, 7 aa, synthetic construct
EHAGTVM

SEQ ID NO: 92766 - protein, 7 aa, synthetic construct
MAHAQMY

SEQ ID NO: 92767 - protein, 7 aa, synthetic construct
KNANTSP

SEQ ID NO: 92768 - protein, 7 aa, synthetic construct
AWSHNAD

SEQ ID NO: 92769 - protein, 7 aa, synthetic construct
HLDNGMQ

SEQ ID NO: 92770 - protein, 7 aa, synthetic construct
VSTQHLP

SEQ ID NO: 92771 - protein, 7 aa, synthetic construct
TITPVKV

SEQ ID NO: 92772 - protein, 7 aa, synthetic construct
SQIQTPF

SEQ ID NO: 92773 - protein, 7 aa, synthetic construct
VAAKIQN

SEQ ID NO: 92774 - protein, 7 aa, synthetic construct
PNNKGVA

SEQ ID NO: 92775 - protein, 7 aa, synthetic construct
KITDKWV

SEQ ID NO: 92776 - protein, 7 aa, synthetic construct
EHTQNNK

SEQ ID NO: 92777 - protein, 7 aa, synthetic construct
RMRESID

SEQ ID NO: 92778 - protein, 7 aa, synthetic construct
HAQRKDI

SEQ ID NO: 92779 - protein, 7 aa, synthetic construct
PPESLSG

SEQ ID NO: 92780 - protein, 7 aa, synthetic construct
NVDRMLP

SEQ ID NO: 92781 - protein, 7 aa, synthetic construct
HWKMETD

SEQ ID NO: 92782 - protein, 7 aa, synthetic construct
PKNSGER

SEQ ID NO: 92783 - protein, 7 aa, synthetic construct
NLADGYH

SEQ ID NO: 92784 - protein, 7 aa, synthetic construct
FMLKNDV

SEQ ID NO: 92785 - protein, 7 aa, synthetic construct
GKLAAHV

SEQ ID NO: 92786 - protein, 7 aa, synthetic construct
WNGTMPG

SEQ ID NO: 92787 - protein, 7 aa, synthetic construct
KVMPGTL

SEQ ID NO: 92788 - protein, 7 aa, synthetic construct
TAPHNGL

SEQ ID NO: 92789 - protein, 7 aa, synthetic construct
LNHGIIP

SEQ ID NO: 92790 - protein, 7 aa, synthetic construct
IPQGPVE

SEQ ID NO: 92791 - protein, 7 aa, synthetic construct
KTSMQHN

SEQ ID NO: 92792 - protein, 7 aa, synthetic construct
NNQREQT

SEQ ID NO: 92793 - protein, 7 aa, synthetic construct
EFQRVEA

SEQ ID NO: 92794 - protein, 7 aa, synthetic construct
HPQPSIR

SEQ ID NO: 92795 - protein, 7 aa, synthetic construct
PVTRVSY

SEQ ID NO: 92796 - protein, 7 aa, synthetic construct
GTKHHHP

SEQ ID NO: 92797 - protein, 7 aa, synthetic construct
FLPTQDR

SEQ ID NO: 92798 - protein, 7 aa, synthetic construct
THPDGSQ

SEQ ID NO: 92799 - protein, 7 aa, synthetic construct
PEVSVSK

SEQ ID NO: 92800 - protein, 7 aa, synthetic construct
HRVHEIA

SEQ ID NO: 92801 - protein, 7 aa, synthetic construct
MTKTTPW

SEQ ID NO: 92802 - protein, 7 aa, synthetic construct
WEKISPP

SEQ ID NO: 92803 - protein, 7 aa, synthetic construct
NSVTNKV

SEQ ID NO: 92804 - protein, 7 aa, synthetic construct
NAFDKNE

SEQ ID NO: 92805 - protein, 7 aa, synthetic construct
LSSNVRH

SEQ ID NO: 92806 - protein, 7 aa, synthetic construct
HNSMHHL

SEQ ID NO: 92807 - protein, 7 aa, synthetic construct
TQNRNGM

SEQ ID NO: 92808 - protein, 7 aa, synthetic construct
SSLHTHI

SEQ ID NO: 92809 - protein, 7 aa, synthetic construct
AEHYDRG

SEQ ID NO: 92810 - protein, 7 aa, synthetic construct
NKIHTSM

SEQ ID NO: 92811 - protein, 7 aa, synthetic construct
MTVSLDH

SEQ ID NO: 92812 - protein, 7 aa, synthetic construct
KVYLDSD

SEQ ID NO: 92813 - protein, 7 aa, synthetic construct
VAGTMET

SEQ ID NO: 92814 - protein, 7 aa, synthetic construct
VSSGILQ

SEQ ID NO: 92815 - protein, 7 aa, synthetic construct
AIPGINI

SEQ ID NO: 92816 - protein, 7 aa, synthetic construct
TAQQDVF

SEQ ID NO: 92817 - protein, 7 aa, synthetic construct
TTQMLQY

SEQ ID NO: 92818 - protein, 7 aa, synthetic construct
RWQTLEP

SEQ ID NO: 92819 - protein, 7 aa, synthetic construct
HSQQKAA

SEQ ID NO: 92820 - protein, 7 aa, synthetic construct
GIWEASG

SEQ ID NO: 92821 - protein, 7 aa, synthetic construct
ELNKLQS

SEQ ID NO: 92822 - protein, 7 aa, synthetic construct
WEKPTGA

SEQ ID NO: 92823 - protein, 7 aa, synthetic construct
YKHDESN

SEQ ID NO: 92824 - protein, 7 aa, synthetic construct
NMYEKMV

SEQ ID NO: 92825 - protein, 7 aa, synthetic construct
VALNHRN

SEQ ID NO: 92826 - protein, 7 aa, synthetic construct
VQRNTHE

SEQ ID NO: 92827 - protein, 7 aa, synthetic construct
TESTAAR

SEQ ID NO: 92828 - protein, 7 aa, synthetic construct
HIHQTNE

SEQ ID NO: 92829 - protein, 7 aa, synthetic construct
HTNDAGS

SEQ ID NO: 92830 - protein, 7 aa, synthetic construct
KTTAKSE

SEQ ID NO: 92831 - protein, 7 aa, synthetic construct
PYTNRDS

SEQ ID NO: 92832 - protein, 7 aa, synthetic construct
LSKGINS

SEQ ID NO: 92833 - protein, 7 aa, synthetic construct
QPTLATK

SEQ ID NO: 92834 - protein, 7 aa, synthetic construct
SSKSDTW
